United States Patent Application Publication US 2024/0124889 A1 - sequence listing, part 4

SEQ ID NO: 18572 - protein, 211 aa, Artificial Sequence
  source: /note="Description of Artificial Sequence: Synthetic polypeptide"
SIVMTQTPKTLSVSAGERVTITCKASQSVSNDVTWYQQKPGQSPKLLIYSASNRYSGVPDRFSGSGYGTAFTFTISSVQAEDFAVYFCQQDYSSFGQGTKLEIKRTVAAPSVFIFPPSDEQLKSGTASVVCLLNNFYPREAKVQWKVDNALQSGNSQESVTEQDSKDSTYSLSSTLTLSKADYEKHKVYACEVTHQGLSSPVTKSFNRGEC

SEQ ID NO: 18573 - protein, 211 aa, Artificial Sequence
  source: /note="Description of Artificial Sequence: Synthetic polypeptide"
SIVMTQTPAFLLVSAGERVTITCRASQSVSNDVTWYQQKAGQAPRLLIYSASNRYTGIPARFSGSGYGTEFTFTISSVQSEDFAVYFCQQDYSSFGGGTKLEIKRTVAAPSVFIFPPSDEQLKSGTASVVCLLNNFYPREAKVQWKVDNALQSGNSQESVTEQDSKDSTYSLSSTLTLSKADYEKHKVYACEVTHQGLSSPVTKSFNRGEC

SEQ ID NO: 18574 - protein, 214 aa, Mus musculus; identical to SEQ ID NO: 14756

SEQ ID NO: 18575 - protein, 213 aa, Artificial Sequence; identical to SEQ ID NO: 15868
  source: /note="Description of Artificial Sequence: Synthetic polypeptide"

SEQ ID NO: 18576 - protein, 214 aa, Mus musculus; identical to SEQ ID NO: 14758

SEQ ID NO: 18577 - protein, 214 aa, Artificial Sequence; identical to SEQ ID NO: 14754
  source: /note="Description of Artificial Sequence: Synthetic polypeptide"

SEQ ID NO: 18578 - protein, 214 aa, Mus musculus; identical to SEQ ID NO: 14753

SEQ ID NO: 18579 - protein, 214 aa, Artificial Sequence; identical to SEQ ID NO: 9315
  source: /note="Description of Artificial Sequence: Synthetic polypeptide"

SEQ ID NO: 18580 - protein, 220 aa, Mus musculus
DIVMTQSPSSLTVTAGEKVTMSCKSSQSLLNSGNQKNYLTWYQQKPGQPPKLLIYWASTRESGVPDRFTGSGSGTDFTLTISSVQAEDLAVYYCQSDYSYPYTFGGGTKLEIKRTVAAPSVFIFPPSDEQLKSGTASVVCLLNNFYPREAKVQWKVDNALQSGNSQESVTEQDSKDSTYSLSSTLTLSKADYEKHKVYACEVTHQGLSSPVTKSFNRGEC

SEQ ID NO: 18581 - protein, 222 aa, Mus musculus; identical to SEQ ID NO: 15869

SEQ ID NO: 18582 - protein, 214 aa, Mus musculus
DIVMTQSTSSLSASLGDRVTVSCRASQDISNYLNWYQQKPDGTIKLLIYYTSRLHSGVPSRFSGSGSGTDYSLTISNLDQEDIATYFCQQSNTLPWTFGGGTKLEIKRTVAAPSVFIFPPSDEQLKSGTASVVCLLNNFYPREAKVQWKVDNALQSGNSQESVTEQDSKDSTYSLSSTLTLSKADYEKHKVYACEVTHQGLSSPVTKSFNRGEC

SEQ ID NO: 18583 - protein, 218 aa, Mus musculus
DIQMTQSPASLAVSLGQRATISCRASESVDSYGNTFMHWYQQKPGQPPKLLIYRASNLESGIPARFSGSGSRTDFTLTINPVEADDVATYYCQQSNEDPWTFGGGTKLEIKRTVAAPSVFIFPPSDEQLKSGTASVVCLLNNFYPREAKVQWKVDNALQSGNSQESVTEQDSKDSTYSLSSTLTLSKADYEKHKVYACEVTHQGLSSPVTKSFNRGEC

SEQ ID NO: 18584 - protein, 216 aa, Artificial Sequence; identical to SEQ ID NO: 15870
  source: /note="Description of Artificial Sequence: Synthetic polypeptide"

SEQ ID NO: 18585 - protein, 214 aa, Mus musculus
DIVMTQTTSSLSASLGDRVTISCRPSQDISNYVNWFQQKPGGTVKLLIFHTSRLHSGVPSRFSGSGSGTDYSLTISTLEQEDIAIYFCQQGITLPWTFGGGTKLEIKRTVAAPSVFIFPPSDEQLKSGTASVVCLLNNFYPREAKVQWKVDNALQSGNSQESVTEQDSKDSTYSLSSTLTLSKADYEKHKVYACEVTHQGLSSPVTKSFNRGEC

SEQ ID NO: 18586 - protein, 216 aa, Artificial Sequence; identical to SEQ ID NO: 15871
  source: /note="Description of Artificial Sequence: Synthetic polypeptide"

SEQ ID NO: 18587 - protein, 214 aa, Mus musculus
DIVMTQATSSLSASLGDRVTVSCRASQDINNYLNWYQQKPDGTVKLLIYYTSRLQSGVPSRFSGSGSGIDYSLTISNLEQEDFVTYFCQQSETLPWTFGGGTKLELKRTVAAPSVFIFPPSDEQLKSGTASVVCLLNNFYPREAKVQWKVDNALQSGNSQESVTEQDSKDSTYSLSSTLTLSKADYEKHKVYACEVTHQGLSSPVTKSFNRGEC

SEQ ID NO: 18588 - protein, 221 aa, Mus musculus; identical to SEQ ID NO: 15872

SEQ ID NO: 18589 - protein, 214 aa, Mus musculus
QIVLTQSPSSLSASLGDRVTISCRASQDISNYLNWFQQRPDGTVKLLIYYTSRLHSGVPSRFSGSGSGTDYSLTISNLEQEDIATYFCQQGNTLPYTFGGGTKLELKRTVAAPSVFIFPPSDEQLKSGTASVVCLLNNFYPREAKVQWKVDNALQSGNSQESVTEQDSKDSTYSLSSTLTLSKADYEKHKVYACEVTHQGLSSPVTKSFNRGEC

SEQ ID NO: 18590 - protein, 214 aa, Mus musculus
DIVMTQATSSLSASLGDRVTISCSASQDINNYLNWYQQKPDGTIKLLIYYTSSLHSGVPSRFSGSGSGTDYSLTISNLEPEDIATYYCQQYSRIPYTFGGGTKLEIKRTVAAPSVFIFPPSDEQLKSGTASVVCLLNNFYPREAKVQWKVDNALQSGNSQESVTEQDSKDSTYSLSSTLTLSKADYEKHKVYACEVTHQGLSSPVTKSFNRGEC

SEQ ID NO: 18591 - protein, 220 aa, Mus musculus
DIVMTQSPSSLTVTAGEKVTMSCKSSQSLLNSGNQKNYMTWYQQKPGQSPKLLIYWASTRESGVPDRFTGSGSGTDFTLTISSVQAEDLAVYYCQNDYSYPYTFGGGTKLELKRTVAAPSVFIFPPSDEQLKSGTASVVCLLNNFYPREAKVQWKVDNALQSGNSQESVTEQDSKDSTYSLSSTLTLSKADYEKHKVYACEVTHQGLSSPVTKSFNRGEC

SEQ ID NO: 18592 - protein, 213 aa, Mus musculus
HIVLTQSPAIMSASPGEKVTMTCSASSSVSYMYWYQQKPRSSPRLLIYDTSNLASGVPVRFSGSGSGTSYSLTISRMEADDAATYYCQQLSSYPPTFGGGTKLELKRTVAAPSVFIFPPSDEQLKSGTASVVCLLNNFYPREAKVQWKVDNALQSGNSQESVTEQDSKDSTYSLSSTLTLSKADYEKHKVYACEVTHQGLSSPVTKSFNRGEC

SEQ ID NO: 18593 - protein, 213 aa, Mus musculus
NIVLTQSPAIMSASPGEKVTMTCSASSSVSYMFWYQQKPGSSPRLLIYDTSNLASGVPVRFSGSGSGTSYSLTISRMEAEDAATYYCQQLNSYPPTFGGGTKLEIKRTVAAPSVFIFPPSDEQLKSGTASVVCLLNNFYPREAKVQWKVDNALQSGNSQESVTEQDSKDSTYSLSSTLTLSKADYEKHKVYACEVTHQGLSSPVTKSFNRGEC

SEQ ID NO: 18594 - protein, 215 aa, Homo sapiens
EIVLTQSPGTLSLSPGERATFSCRSSHSIRSRRVAWYQHKPGQAPRLVIHGVSNRASGISDRFSGSGSGTDFTLTITRVEPEDFALYYCQVYGASSYTFGQGTKLERKRTVAAPSVFIFPPSDEQLKSGTASVVCLLNNFYPREAKVQWKVDNALQSGNSQESVTEQDSKDSTYSLSSTLTLSKADYEKHKVYACEVTHQGLSSPVTKSFNRGEC

SEQ ID NO: 18595 - protein, 219 aa, Artificial Sequence; identical to SEQ ID NO: 9629
  source: /note="Description of Artificial Sequence: Synthetic polypeptide"

SEQ ID NO: 18596 - protein, 215 aa, Artificial Sequence; identical to SEQ ID NO: 9522
  source: /note="Description of Artificial Sequence: Synthetic polypeptide"

SEQ ID NO: 18597 - protein, 234 aa, Mus musculus
MSVLTQVLALLLLWLTGARCDIQMTQSPTSLSASVGETVTITCRTSENIHNFLTWYQQKQGKSPQVLVYNAKTLPDGVPSRFSGSGSGTQYSLKINSLQPEDFGTYYCQHFWSSPWTFGGGTKLEIKRADAAPTVSIFPPSSEQLTSGGASVVCFLNNFTPKDINVKWKIDGSERQNGVLNSWTDQDSKDSTYSMSSTLTLTKDEYERHNSYTCEATHKTSTSPIVKSFNRNEC

SEQ ID NO: 18598 - protein, 233 aa, Homo sapiens
MSVLTQVLALLLLWLTGARCDIQMTQSPTSLSASVGETVTITCRTSENIHNFLTWYQQKQGKSPQVLVYNAKTLPDGVPSRFSGSGSGTQYSLKINSLQPEDFGTYYCQHFWSSPWTFGGGTKLEIKRTVAPSVFIFPPSDEQLKSGTASVVCLLNNFYPREAKVQWKVDNALQSGNSQESVTEQDSKDSTYSLSSTLTLSKADYEKHKVYACEVTHQGLSSPVTKSFNRGEC

SEQ ID NO: 18599 - protein, 234 aa, Homo sapiens
MSVLTQVLALLLLWLTGARCDIQMTQSPTSLSASVGETVTITCRTSENIHNFLTWYQQKQGKSPQVLVYNAKTLPDGVPSRFSGSGSETQYSLKINSLQPEDFGTYYCQHFWSSPWTFGGGTKLEIKRADAAPTVSIFPPSSEQLTSGGASVVCFLNNFYPKDINVKWKIDGSERQNGVLNSWTDQDSKDSTYSMSSTLTLTKDEYERHNSYTCEATHKTSTSPIVKSFNRNEC

SEQ ID NO: 18600 - protein, 219 aa, Artificial Sequence
  source: /note="Description of Artificial Sequence: Synthetic Human/murine chimera"
DIQMTQSPSSLSASVGDRVTITCRSSQRIVHSNGNTYLEWYQQTPGKAPKLLIYKVSNRFSGVPSRFSGSGSGTDFTFTISSLQPEDIATYYCFQGSHVPFTFGQGTKLQITRTVAAPSVFIFPPSDEQLKSGTASVVCLLNNFYPREAKVQWKVDNALQSGNSQESVTEQDSKDSTYSLSSTLTLSKADYEKHKVYACEVTHQGLSSPVTKSFNRGEC

SEQ ID NO: 18601 - protein, 214 aa, Artificial Sequence
  source: /note="Description of Artificial Sequence: Synthetic polypeptide"
DIQLTQSPSFLSASVGDRVTITCRASQNVDTNLAWYQQKPGKAPKLLIYSASYRYTGVPSRFSGSGSGTEFTLTISSLQPEDFATYYCQQYNSYPLTFGGGTKVEIKRTVAAPSVFIFPPSDEQLKSGTASVVCLLNNFYPREAKVQWKVDNALQSGNSQESVTEQDSKDSTYSLSSTLTLSKADYEKHKVYACEVTHQGLSSPVTKSFNRGEC

SEQ ID NO: 18602 - protein, 214 aa, Artificial Sequence
  source: /note="Description of Artificial Sequence: Synthetic polypeptide"
DIQLTQSPSFLSASVGDRVTITCKASQNVDTNVAWYQQKPGKAPKPLIYSASYRYTGVPSRFSGSGSGTEFTLTISSLQPEDFATYYCQQYNSYPLTFGGGTKVEIKRTVAAPSVFIFPPSDEQLKSGTASVVCLLNNFYPREAKVQWKVDNALQSGNSQESVTEQDSKDSTYSLSSTLTLSKADYEKHKVYACEVTHQGLSSPVTKSFNRGEC

SEQ ID NO: 18603 - protein, 214 aa, Artificial Sequence
  source: /note="Description of Artificial Sequence: Synthetic polypeptide"
DIQMTQSPSSLSASVGDRVTITCRASQGIRNYLNWYQQKPGKAPKLLIYYTSSLHSGVPSRFSGSGSGTDYTLTISSLQPEDFATYYCQQYSALPWTFGQGTKVEIKRTVAAPSVFIFPPSDEQLKSGTASVVCLLNNFYPREAKVQWKVDNALQSGNSQESVTEQDSKDSTYSLSSTLTLSKADYEKHKVYACEVTHQGLSSPVTKSFNRGEC

SEQ ID NO: 18604 - protein, 238 aa, Artificial Sequence; identical to SEQ ID NO: 14882
  source: /note="Description of Artificial Sequence: Synthetic polypeptide"

SEQ ID NO: 18605 - protein, 218 aa, Artificial Sequence
  source: /note="Description of Artificial Sequence: Synthetic polypeptide"
DIVMTQSPSSLAVSAGDTVTINCRSSQSLFSGNYNYLAWYQQKTGQTPKLLISYASTRHTGVPDRFVGSGSGTDFILTIYNFQTEDLGDYYCQQHYSSPRTFGPGTKLKIKRTVAAPSVFIFPPSDEQLKSGTASVVCLLNNFYPREAKVQWKVDNALQSGNSQESVTEQDSKDSTYSLSSTLTLSKADYEKHKVYACEVTHQGLSSPVTKSFNRGEC

SEQ ID NO: 18606 - protein, 215 aa, Artificial Sequence; identical to SEQ ID NO: 9775
  source: /note="Description of Artificial Sequence: Synthetic polypeptide"

SEQ ID NO: 18607 - protein, 217 aa, Artificial Sequence
  source: /note="Description of Artificial Sequence: Synthetic polypeptide"
DIQMTQSPASLSLSQEEKVTITCRASEDIYNALAWYQQKPGQAPKLLIYNTDTLHTGVPSRFSGSGSGTEYSLTINSLESEDVAVYFCQHYFHYPRTFGAGTKVELKRNDAQPAVYLFQPSPDQLHTGSASVVCLLNSFYPKDINVKWKVDGVIQDTGIQESVTEQDKDSTYSLSSTLTMSSTEYLSHELYSCEITHKSLPSTLIKSFQRSECQRVD

SEQ ID NO: 18608 - protein, 218 aa, Artificial Sequence
  source: /note="Description of Artificial Sequence: Synthetic polypeptide"
NIVLTQSPASLAVSLGQRATISCRASESVDSYGRSFMHWYQQRPGQPPTLLIYLASNLESGVPVRFSGSGSRTDFTLTIDPVEADDAATYYCQQDNEDPYTFGGGTKLEIKGTVAAPSVFIFPPSDEQLKSGTASVVCLLNNFYPREAKVQWKVDNALQSGNSQESVTEQDSKDSTYSLSSTLTLSKADYEKHKVYACEVTHQGLSSPVTKSFNRGEC

SEQ ID NO: 18609 - protein, 218 aa, Artificial Sequence
  source: /note="Description of Artificial Sequence: Synthetic polypeptide"
DIVMTQSPDSLAVSLGERATINCRASESVDSYGRSFMHWYQQKPGQAPRLLIYLASNLESGVPSRFSGSGSGTDFTLTINSLEAEDAATYYCQQDNEDPYTFGGGTKLEIKGTVAAPSVFIFPPSDEQLKSGTASVVCLLNNFYPREAKVQWKVDNALQSGNSQESVTEQDSKDSTYSLSSTLTLSKADYEKHKVYACEVTHQGLSSPVTKSFNRGEC

SEQ ID NO: 18610 - protein, 218 aa, Artificial Sequence
  source: /note="Description of Artificial Sequence: Synthetic polypeptide"
NIVLTQSPASLSVSLGQRATISCRASESVDSYGRSFMHWYQQRPGQAPRLLIYLASNLESGVPARFSGSGSRTDFTLTISSVEAEDEATYYCQQDNEDPYTFGGGTKLEIKGTVAAPSVFIFPPSDEQLKSGTASVVCLLNNFYPREAKVQWKVDNALQSGNSQESVTEQDSKDSTYSLSSTLTLSKADYEKHKVYACEVTHQGLSSPVTKSFNRGEC

SEQ ID NO: 18611 - protein, 218 aa, Artificial Sequence
  source: /note="Description of Artificial Sequence: Synthetic polypeptide"
NIVLTQSPASLSVSLGQRATISCRASESVDSYGRSFMHWYQQKPGQAPKLLIYLASNLESGVPSRFSGSGSRTDFTLTISAVEAEDAATYYCQQDNEDPYTFGGGTKLEIKGTVAAPSVFIFPPSDEQLKSGTASVVCLLNNFYPREAKVQWKVDNALQSGNSQESVTEQDSKDSTYSLSSTLTLSKADYEKHKVYACEVTHQGLSSPVTKSFNRGEC

SEQ ID NO: 18612 - protein, 218 aa, Artificial Sequence
  source: /note="Description of Artificial Sequence: Synthetic polypeptide"
NIVLTQSPASLSVSLGQRATISCRASESVDSYGRSFMHWYQQRPGQAPKLLIYLASNLESGVPARFSGSGSRTDFTLTISSVEAEDEATYYCQQDNEDPYTFGGGTKLEIKGTVAAPSVFIFPPSDEQLKSGTASVVCLLNNFYPREAKVQWKVDNALQSGNSQESVTEQDSKDSTYSLSSTLTLSKADYEKHKVYACEVTHQGLSSPVTKSFNRGEC

SEQ ID NO: 18613 - protein, 218 aa, Artificial Sequence
  source: /note="Description of Artificial Sequence: Synthetic polypeptide"
NIVLTQSPASLSVSLGQRATISCRASESVDSYGRSFMHWYQQKPGQAPKLLIYLASNLESGVPSRFSGSGSRTDFTLTISRVEAEDAATYYCQQDNEDPYTFGGGTKLEIKGTVAAPSVFIFPPSDEQLKSGTASVVCLLNNFYPREAKVQWKVDNALQSGNSQESVTEQDSKDSTYSLSSTLTLSKADYEKHKVYACEVTHQGLSSPVTKSFNRGEC

SEQ ID NO: 18614 - protein, 107 aa, Artificial Sequence
  source: /note="Description of Artificial Sequence: Synthetic polypeptide"
GTVAAPSVFIFPPSDEQLKSGTASVVCLLNNFYPREAKVQWKVDNALQSGNSQESVTEQDSKDSTYSLSSTLTLSKADYEKHKVYACEVTHQGLSSPVTKSFNRGEC

SEQ ID NO: 18615 - protein, 235 aa, Artificial Sequence; identical to SEQ ID NO: 11474
  source: /note="Description of Artificial Sequence: Synthetic polypeptide"

SEQ ID NO: 18616 - protein, 285 aa, Artificial Sequence [sequence omitted]

SEQ ID NO: 18617 - protein, 214 aa, Artificial Sequence
  source: /note="Description of Artificial Sequence: Synthetic polypeptide"
DIVMTQSHKFMSTSVGDRVSITCKASQDVGTNIAWYQQKPGRSPKVLIYSASTRHTGVPDRFTGSGSGTDFTLTISNVQSEDLTDYFCQQYSSFPLTFGVGTKLELKRADAAPTVSIFPPSSEQLTSGGASVVCFLNNFYPKDINVKWKIDGSERQNGVLNSWTDQDSKDSTYSMSSTLTLTKDEYERHNSYTCEATHKTSTSPIVKSFNRNEC

SEQ ID NO: 18618 - protein, 234 aa, Artificial Sequence
  source: /note="Description of Artificial Sequence: Synthetic polypeptide"
MVSTPQFLVFLLFWIPASRGDILLTQSPAILSVSPGERVSFSCRASQNIGTSIHWYQQRTNGSPRLLIKYASESVSGIPSRFSGSGSGTDFTLSINSVESEDIADYYCQHTNSWPTTFGGGTKLEIKRTVAAPSVFIFPPSDEQLKSGTASVVCLLNNFYPREAKVQWKVDNALQSGNSQESVTEQDSKDSTYSLSSTLTLSKADYEKHKVYACEVTHQGLSSPVTKSFNRGEC

SEQ ID NO: 18619 - protein, 214 aa, Artificial Sequence
  source: /note="Description of Artificial Sequence: Synthetic polypeptide"
SYVLTQPPSVSVAPGQTARITCGGNNLGSKSVHWYQQKPGQAPVLVVYDDSDRPSWIPERFSGSNSGNTATLTISRGEAGDEADYYCQVWDSSSDHVVFGGGTKLTVLGQPKAAPSVTLFPPSSEELQANKATLVCLISDFYPGAVTVAWKADSSPVKAGVETTTPSKQSNNKYAASSYLSLTPEQWKSHRSYSCQVTHEGSTVEKTVAPTECS

SEQ ID NO: 18620 - protein, 112 aa, Artificial Sequence
  source: /note="Description of Artificial Sequence: Synthetic polypeptide"
DIQMTQSPSSLSASVGDRVTINCQASQSIYNNNELSWYQQKPGKPPKLLIYRASTLASGVPSRFSGSGSGTDFTLTISSLQPEDVATYYCGGYKSYSNDGNGFGGGTKVEIK

SEQ ID NO: 18621 - protein, 110 aa, Artificial Sequence
  source: /note="Description of Artificial Sequence: Synthetic polypeptide"
DIQMTQSPSSLSASVGDRVTITCRASQGIRNDLGWYQQKPGKAPKRLIYAASSLQSGVPSRFSGSGSGTEFTLTISSLQPEDFATYYCLQHNSYPPVYTFGQGTKLEIKR

SEQ ID NO: 18622 - protein, 108 aa, Artificial Sequence; identical to SEQ ID NO: 6323
  source: /note="Description of Artificial Sequence: Synthetic polypeptide"

SEQ ID NO: 18623 - protein, 217 aa, Artificial Sequence; identical to SEQ ID NO: 9575
  source: /note="Description of Artificial Sequence: Synthetic polypeptide"

SEQ ID NO: 18624 - protein, 211 aa, Artificial Sequence
  source: /note="Description of Artificial Sequence: Synthetic polypeptide"
SIVMTQTPKFLLVSAGDRVTITCKASQSVSNDVTWYQQKAGQSPKLLIYSASNRYSGVPDRFTGSGYGTAFTFTISTVQAEDLAVYFCQQDYSSFGGGTKLEIKRTVAAPSVFIFPPSDEQLKSGTASVVCLLNNFYPREAKVQWKVDNALQSGNSQESVTEQDSKDSTYSLSSTLTLSKADYEKHKVYACEVTHQGLSSPVTKSFNRGEC

SEQ ID NO: 18625 - protein, 240 aa, Artificial Sequence
  source: /note="Description of Artificial Sequence: Synthetic polypeptide"
MEAPAQLLFLLLLWLPDTTGEIVMTQSPATLSVSPGERATLSCRSSQSLVHRNGNTYLHWYLQKPGQSPKLLIHKVSNRFSGVPDRFSGSGSGTDFTLKISRVEAEDLGVYFCSQSTHVPPLTFGAGTKLELKRTVAAPSVFIFPPSDEQLKSGTASVVCLLNNFYPREAKVQWKVDNALQSGNSQESVTEQDSKDSTYSLSSTLTLSKADYEKHKVYACEVTHQGLSSPVTKSFNRGEC

SEQ ID NO: 18626 - protein, 216 aa, Homo sapiens
DIQMTQSPSSLSASVGDRVTITCRASQDIGNFLNWYQQKPGKAPKLLIYYTSRLQSGVPSRFSGSGSGTDYTLTISSLQPEDFATYYCQQGKTLPYTFGGGTKVEIKDIRTVAAPSVFIFPPSDEQLKSGTASVVCLLNNFYPREAKVQWKVDNALQSGNSQESVTEQDSKDSTYSLSSTLTLSKADYEKHKVYACEVTHQGLSSPVTKSFNRGEC

SEQ ID NO: 18627 - protein, 216 aa, Homo sapiens
DIQMTQSPSSLSASVGDRVTITCRASQDIGNFLNWYQQKPGKAPKLLLYYTSRLQSGVPSRFSGSGSGTDYTLTISSLQPEDFATYYCQQGKTLPYTFGGGTKVEIKDIRTVAAPSVFIFPPSDEQLKSGTASVVCLLNNFYPREAKVQWKVDNALQSGNSQESVTEQDSKDSTYSLSSTLTLSKADYEKHKVYACEVTHQGLSSPVTKSFNRGEC

SEQ ID NO: 18628 - protein, 219 aa, Artificial Sequence; identical to SEQ ID NO: 14948
  source: /note="Description of Artificial Sequence: Synthetic polypeptide"

SEQ ID NO: 18629 - protein, 219 aa, Mus musculus
DVVMTQTPLSLPVSLGDQASISCRSSQSLLKNNGNTFLHWYLQKSGQSPKLLIYKVSNRLSGVPDRFSGSGSGTYFTLKISRVEAEDLGVYFCSQSTHIPYTFGGGTKLEIKRTVAAPSVFIFPPSDEQLKSGTASVVCLLNNFYPREAKVQWKVDNALQSGNSQESVTEQDSKDSTYSLSSTLTLSKADYEKHKVYACEVTHQGLSSPVTKSFNRGEC

SEQ ID NO: 18630 - protein, 215 aa, Artificial Sequence
  source: /note="Description of Artificial Sequence: Synthetic polypeptide"
EIVLTQSPGTLSLSPGERATLSCRASQSVSSSYLAWYQQKPGQAPRLLIYGASSRATGIPDRFSGSGSGTDFTLTISRLEPEDFAVYYCQQSSYYAPVTFGQGTKVEIKRTVAAPSVFIFPPSDEQLKSGTASWCLLNNFYPREAKVQWKVDNALQSGNSQESVTEQDSKDSTYSLSSTLTLSKADYEKHKVYACEVTHQGLSSPVTKSFNRGEC

SEQ ID NO: 18631 - protein, 203 aa, Artificial Sequence
  source: /note="Description of Artificial Sequence: Synthetic polypeptide"
EIVLTQSPGTLSLSPGERATLSCRASQSVSSSYLAWYQQKPGQAPRLLIYGASSRATGIPDRFSGSGSGTDFTLTISRLEPEDFAVYYCQQYYSSPITGQGTKVEIKRTVAAPSVFIFTASWCLLNNFYPREAKVQWKVDNALQSGNSQESVTEQDSKDSTYSLSSTLTLSKADYEKHKVYACEVTHQGLSSPVTKSFNRGEC

SEQ ID NO: 18632 - protein, 215 aa, Artificial Sequence
  source: /note="Description of Artificial Sequence: Synthetic polypeptide"
EIVLTQSPGTLSLSPGERATLSCRASQSVSSSYLAWYQQKPGQAPRLLIYGASSRATGIPDRFSGSGSGTDFTLTISRLEPEDFAVYYCQQASYYSPFTFGQGTKVEIKRTVAAPSVFIFPPSDEQLKSGTASWCLLNNFYPREAKVQWKVDNALQSGNSQESVTEQDSKDSTYSLSSTLTLSKADYEKHKVYACEVTHQGLSSPVTKSFNRGEC

SEQ ID NO: 18633 - protein, 215 aa, Artificial Sequence
  source: /note="Description of Artificial Sequence: Synthetic polypeptide"
EIVLTQSPGTLSLSPGERATLSCRASQSVSSSYLAWYQQKPGQAPRLLIYGASSRATGIPDRFSGSGSGTDFTLTISRLEPEDFAVYYCQQSYDSYPFTFGQGTKVEIKRTVAAPSVFIFPPSDEQLKSGTASWCLLNNFYPREAKVQWKVDNALQSGNSQESVTEQDSKDSTYSLSSTLTLSKADYEKHKVYACEVTHQGLSSPVTKSFNRGEC

SEQ ID NO: 18634 - protein, 214 aa, Artificial Sequence
  source: /note="Description of Artificial Sequence: Synthetic polypeptide"
EIVLTQSPGTLSLSPGERATLSCRASQSVSSSYLAWYQQKPGQAPRLLIYGASSRATGIPDRFSGSGSGTDFTLTISRLEPEDFAVYYCQQSDSYPITFGQGTKVEIKRTVAAPSVFIFPPSDEQLKSGTASWCLLNNFYPREAKVQWKVDNALQSGNSQESVTEQDSKDSTYSLSSTLTLSKADYEKHKVYACEVTHQGLSSPVTKSFNRGEC

SEQ ID NO: 18635 - protein, 214 aa, Artificial Sequence
  source: /note="Description of Artificial Sequence: Synthetic polypeptide"
EIVLTQSPGTLSLSPGERATLSCRASQSVSSSYLAWYQQKPGQAPRLLIYGASSRATGIPDRFSGSGSGTDFTLTISRLEPEDFAVYYCQQARKSPITFGQGTKVEIKRTVAAPSVFIFPPSDEQLKSGTASWCLLNNFYPREAKVQWKVDNALQSGNSQESVTEQDSKDSTYSLSSTLTLSKADYEKHKVYACEVTHQGLSSPVTKSFNRGEC

SEQ ID NO: 18636 - protein, 205 aa, Artificial Sequence
  source: /note="Description of Artificial Sequence: Synthetic polypeptide"
EIVLTQSPGTLSLSPGERATLSCRASQSVSSSYLAWYQQKPGQAPRLLIYGASSRATGIPDRFSGSGSGTDFTLTISRLEPEDFAVYYCQQASYYSPVTFGQGTKVEIKRTVAAPSVFIFTASWCLLNNFYPREAKVQWKVDNALQSGNSQESVTEQDSKDSTYSLSSTLTLSKADYEKHKVYACEVTHQGLSSPVTKSFNRGEC

SEQ ID NO: 18637 - protein, 215 aa, Artificial Sequence
  source: /note="Description of Artificial Sequence: Synthetic polypeptide"
EIVLTQSPGTLSLSPGERATLSCRASQSVSSSYLAWYQQKPGQAPRLLIYGASSRATGIPDRFSGSGSGTDFTLTISRLEPEDFAVYYCQQASYYSPVTFGQGTKVEIKRTVAAPSVFIFPPSDEQLKSGTASWCLLNNFYPREAKVQWKVDNALQSGNSQESVTEQDSKDSTYSLSSTLTLSKADYEKHKVYACEVTHQGLSSPVTKSFNRGEC

SEQ ID NO: 18638 - protein, 204 aa, Artificial Sequence
  source: /note="Description of Artificial Sequence: Synthetic polypeptide"
EIVLTQSPGTLSLSPGERATLSCRASQSVSSSYLAWYQQKPGQAPRLLIYGASSRATGIPDRFSGSGSGTDFTLTISRLEPEDFAVYYCQQSSYSPLTFGQGTKVEIKRTVAAPSVFIFTASWCLLNNFYPREAKVQWKVDNALQSGNSQESVTEQDSKDSTYSLSSTLTLSKADYEKHKVYACEVTHQGLSSPVTKSFNRGEC

SEQ ID NO: 18639 - protein, 205 aa, Artificial Sequence
  source: /note="Description of Artificial Sequence: Synthetic polypeptide"
EIVLTQSPGTLSLSPGERATLSCRASQSVSSSYLAWYQQKPGQAPRLLIYGASSRATGIPDRFSGSGSGTDFTLTISRLEPEDFAVYYCQQSSYYSPGTFGQGTKVEIKRTVAAPSVFIFTASWCLLNNFYPREAKVQWKVDNALQSGNSQESVTEQDSKDSTYSLSSTLTLSKADYEKHKVYACEVTHQGLSSPVTKSFNRGEC

SEQ ID NO: 18640 - protein, 220 aa, Artificial Sequence; identical to SEQ ID NO: 9594
  source: /note="Description of Artificial Sequence: Synthetic polypeptide"

SEQ ID NO: 18641 - protein, 217 aa, Artificial Sequence
  source: /note="Description of Artificial Sequence: Synthetic polypeptide"
QSALTQPASVSGSPGQSITISCTGTSSDVGGYNFVSWYQQHPGKAPKLMIYDVSDRPSGVSDRFSGSKSGNTASLIISGLQADDEADYYCSSYGSSSTHVIFGGGTKVTVLGQPKAAPSVTLFPPSSEELQANKATLVCLISDFYPGAVTVAWKADSSPVKAGVETTTPSKQSNNKYAASSYLSLTPEQWKSHRSYSCQVTHEGSTVEKTVAPAECS

SEQ ID NO: 18642 - protein, 212 aa, Artificial Sequence
  source: /note="Description of Artificial Sequence: Synthetic polypeptide"
QYELTQPPSVSVYPGQTASITCSGDQLGSKFVSWYQQRPGQSPVLVMYKDKRRPSEIPERFSGSNSGNTATLTISGTQAIDEADYYCQAWDSSTYVFGTGTKVTVLGQPKAAPSVTLFPPSSEELQANKATLVCLISDFYPGAVTVAWKADSSPVKAGVETTTPSKQSNNKYAASSYLSLTPEQWKSHRSYSCQVTHEGSTVEKTVAPAECS

SEQ ID NO: 18643 - protein, 214 aa, Artificial Sequence
  source: /note="Description of Artificial Sequence: Synthetic polypeptide"
DIQMTQSPSSLSASVGDRITITCQASQDIGDSLNWYQQKPGKAPRLLIYDASNLETGVPPRFSGSGSGTDFTFTFRSLQPEDIATYFCQQSANAPFTFGPGTKVDIKRTVAAPSVFIFPPSDEQLKSGTASVVCLLNNFYPREAKVQWKVDNALQSGNSQESVTEQDSKDSTYSLSSTLTLSKADYEKHKVYACEVTHQGLSSPVTKSFNRGEC

SEQ ID NO: 18644 - protein, 216 aa, Artificial Sequence
  source: /note="Description of Artificial Sequence: Synthetic polypeptide"
QSVLTQPPSASGTPGQRVTISCSGSDSNIGRNYIYWYQQFPGTAPKLLIYRNNQRPSGVPDRISGSKSGTSASLAISGLRSEDEAEYHCGTWDDSLSGPVFGGGTKLTVLGQPKAAPSVTLFPPSSEELQANKATLVCLISDFYPGAVTVAWKADSSPVKAGVETTTPSKQSNNKYAASSYLSLTPEQWKSHRSYSCQVTHEGSTVEKTVAPAECS

SEQ ID NO: 18645 - protein, 216 aa, Artificial Sequence
  source: /note="Description of Artificial Sequence: Synthetic polypeptide"
QYELTQPASVSGSPGQSITISCTGTSSDIGRWNIVSWYQQHPGKAPKLMIYDVSNRPSGVSNRFSGSKSGNTASLTISGLQAEDEADYYCSSYTSSSTWVFGGGTKLTVLGQPKAAPSVTLFPPSSEELQANKATLVCLISDFYPGAVTVAWKADSSPVKAGVETTTPSKQSNNKYAASSYLSLTPEQWKSHRSYSCQVTHEGSTVEKTVAPAECS

SEQ ID NO: 18646 - protein, 214 aa, Artificial Sequence; identical to SEQ ID NO: 14602
  source: /note="Description of Artificial Sequence: Synthetic polypeptide"

SEQ ID NO: 18647 - protein, 219 aa, Artificial Sequence
  source: /note="Description of Artificial Sequence: Synthetic polypeptide"
DIQMTQSPDSLAVSLGERATINCKSSQSVLYSSNNKNYLAWYQQKPGQPPKLLIYLASTRESGVPDRFSGSGSGTDFTLTISSLQAEDVAVYYCQQYYSTWTFGQGTKVEIKRTVAAPSVFIFPPSDEQLKSGTASVVCLLNNFYPREAKVQWKVDNALQSGNSQESVTEQDSKDSTYSLSSTLTLSKADYEKHKVYACEVTHQGLSSPVTKSFNRGEC

SEQ ID NO: 18648 - protein, 214 aa, Artificial Sequence
  source: /note="Description of Artificial Sequence: Synthetic polypeptide"
SSELTQDPAVSVALGQTVRITCQGDSLRSYYATWYQQKPGQAPILVIYGENKRPSGIPDRFSGSSSGNTASLTITGAQAEDEADYYCKSRDGSGQHLVFGGGTKLTVLGQPKAAPSVTLFPPSSEELQANKATLVCLISDFYPGAVTVAWKADSSPVKAGVETTTPSKQSNNKYAASSYLSLTPEQWKSHRSYSCQVTHEGSTVEKTVAPAECS

SEQ ID NO: 18649 - protein, 214 aa, Artificial Sequence; identical to SEQ ID NO: 9626
  source: /note="Description of Artificial Sequence: Synthetic polypeptide"

SEQ ID NO: 18650 - protein, 94 aa, Mus musculus
ASPGEKVTMTCRASSSVSYMHWYQQKPGSSPKPWIYATSNLASGVPARFSGSGSGTSYSLTISRVEAEDAATYFCQQWSRNPFTFGSGTKLEIR

SEQ ID NO: 18651 - protein, 94 aa, Mus musculus
ASPGEKVTMTCRASSSVSYMHWYQQKPGSSPKPYIYATSNLSSGVPARFSGSGSGTSYSLTISRVEAEDAATYYCQQWSSNPFTFGSGTKLEIK

SEQ ID NO: 18652 - protein, 113 aa, Mus musculus [sequence omitted]

SEQ ID NO: 18653 - protein, 107 aa, Mus musculus; identical to SEQ ID NO: 15760

SEQ ID NO: 18654 - protein, 105 aa, Artificial Sequence
  source: /note="Description of Artificial Sequence: Synthetic polypeptide"
QIVLTQSPAIMSASPGETVTMTCSASSSITYMHWYQQKPGTSPKRWIYDTSKLASGVPARFSGSGSGTSYSLTISSMEAEDAATYYCHQRSSYTFGGGTKLEIKR

SEQ ID NO: 18655 - protein, 106 aa, Artificial Sequence
  source: /note="Description of Artificial Sequence: Synthetic polypeptide"
QIVLTQSPAIMSASPGEKVTMTCSASSSVSYMHWYQQKSGTSPKRWIFDTSKLASGVPARFSGSGSGTSYSLTISSMEAEDAATYYCQQWSSNLLTFGAGTKLELK

SEQ ID NO: 18656 - protein, 108 aa, Artificial Sequence [sequence omitted]

SEQ ID NO: 18657 - protein, 108 aa, Artificial Sequence
  source: /note="Description of Artificial Sequence: Synthetic polypeptide"
DIQMTQSPSSLSASVGDRVTITCKASENVVSYVSWYQQKPGKAPKLLIYGASNRNTGVPSRFSGSGSGTDFTLTISSLQPEDFATYYCGQSYNYPYTFGQGTKLEIKR

SEQ ID NO: 18658 - protein, 108 aa, Artificial Sequence
  source: /note="Description of Artificial Sequence: Synthetic polypeptide"
DIQMTQSPSSLSASVGDRVTITCKASQDVSIGVAWYQQKPGKAPKLLIYSASYRYTGVPSRFSGSGSGTDFTLTISSLQPEDFATYYCQQYYIYPYTFGQGTKVEIKR

SEQ ID NO: 18659 - protein, 108 aa, Artificial Sequence
  source: /note="Description of Artificial Sequence: Synthetic polypeptide"
DIQMTQSPSSLPASLGDRVTINCQASQDISNYLNWYQQKPGKAPKLLIYYTNKLADGVPSRFSGSGSGRDSSFTISSLESEDIGSYYCQQYYNYPWTFGPGTKLEIKR

SEQ ID NO: 18660 - protein, 114 aa, Artificial Sequence; identical to SEQ ID NO: 11363
  source: /note="Description of Artificial Sequence: Synthetic polypeptide"

SEQ ID NO: 18661 - protein, 107 aa, Artificial Sequence
  source: /note="Description of Artificial Sequence: Synthetic polypeptide"
DIVMTQSPATLSVTPGDRVSLSCRASQSISDYLHWYQQKSHESPRLLIKYASQSISGIPSRFSGSGSGSDFTLSINSVEPEDVGVYYCQNGHSFPLTFGAGTKLELK

SEQ ID NO: 18662 - protein, 105 aa, Artificial Sequence
  source: /note="Description of Artificial Sequence: Synthetic polypeptide"
QIVLTQSPAIMSASPGEKVTMTCSASSSISYMHWYHQKPGTSPKRWIYDTSKLASGVPARFSGSGSGTSYSLTISSMEAEDAATYYCHQRSSYTFGGGTKLEIKR

SEQ ID NO: 18663 - protein, 108 aa, Artificial Sequence
  source: /note="Description of Artificial Sequence: Synthetic polypeptide"
QIVLTQSPAIMSASPGEKVTMTCSASSSVSYIHWYQQKSGTSPKRWIYDTSKLASGVPARFSGSGSGTSYSLTISSMEAEDAATYYCQQWSSNPPMLTFGAGTKLELK

SEQ ID NO: 18664 - protein, 106 aa, Artificial Sequence
  source: /note="Description of Artificial Sequence: Synthetic polypeptide"
QIVLTQSPAIMSASPGEKVTMTCSASSSVSYMHWFQQKSGTSPKRWIYDTSKLASGVPARFSGSGSGTSYSLTISSMEAEDAATYYCQQWSSNLLTFGAGTKLELK

SEQ ID NO: 18665 - protein, 106 aa, Artificial Sequence
  source: /note="Description of Artificial Sequence: Synthetic polypeptide"
QIVLTQSPAVMSASPGEKVAITCSASSSVSYMHWFQQKPGTSPKLWIYSTSNLASGVPARFSGSGSGTSYSLTISRMEAEDAATYYCQQRSSYPWTFGGGTKLEIK

SEQ ID NO: 18666 - protein, 106 aa, Artificial Sequence
  source: /note="Description of Artificial Sequence: Synthetic polypeptide"
QIVLTQSPAIMSASPGEKVTMTCSASSSVSDMHWYQQKSGTSPKRWIYDTSKLASGVPARFSGSGSGTSYSLTINSMEAEDAASYYCQQWSSYPFTFGSGTKLEIK

SEQ ID NO: 18667 - protein, 109 aa, Artificial Sequence
  source: /note="Description of Artificial Sequence: Synthetic polypeptide"
QIVLIQSPAIMSAFPGERVTMTCSASLSVTYMYWYQQRPGSSPRLLISDTSNLASGVPVRFSGSGSGTSYSLTISRVEAEDAATYYCQQWSYYPVTFGAGTKLELKRAD

SEQ ID NO: 18668 - protein, 107 aa, Artificial Sequence
  source: /note="Description of Artificial Sequence: Synthetic polypeptide"
DIVMTQSQKFMSTTVGDRVSITCKASQNVGTAVAWYQQKPGQSPKLLIYSASNRFTGVPDRFTGSGSGRDFTLTISNMQSEDLADYFCQQYSTYPLTFGTGTRLEVK

SEQ ID NO: 18669 - protein, 107 aa, Artificial Sequence
  source: /note="Description of Artificial Sequence: Synthetic polypeptide"
DIQLTQSPSSLSASLGGKVTITCKASQDINKYIGWYQHKPGKGPRLLMHYTSALLPGIPSRFSGSGSGRDYSFSISNLEPEDIATYYCLQYDDLWTFGGGTKLEIKR

SEQ ID NO: 18670 - protein, 107 aa, Artificial Sequence
  source: /note="Description of Artificial Sequence: Synthetic polypeptide"
DIQLTQSPSSLSASVGDRVTITCKASQDINKYIGWYQQKPGKAPKLLMHYTSALLPGIPSRFSGSGSGTDYTFTISSLQPEDIATYYCLQYDDLWTFGGGTKLQIKR

SEQ ID NO: 18671 - protein, 107 aa, Artificial Sequence
  source: /note="Description of Artificial Sequence: Synthetic polypeptide"
DIQLTQSPSSLSASVGDRVTITCKASQDINKYIGWYQQTPGKAPKLLMHYTSALLPGIPSRFSGSGSGRDYTFTISSLQPEDIATYYCLQYDDLWTFGGGTKLQIKR

SEQ ID NO: 18672 - protein, 107 aa, Artificial Sequence
  source: /note="Description of Artificial Sequence: Synthetic polypeptide"
DIQLTQSPSSLSASLGGKVTITCKASQDINKYIGWYQHKPGKGPRLLMHYTSALLPGIPSRFSGSGSGRDYSFSISNLEPEDIATYYCLQYDDLWTFGGGTKLEMKR

SEQ ID NO: 18673 - protein, 111 aa, Artificial Sequence
  source: /note="Description of Artificial Sequence: Synthetic polypeptide"
QSVLTQPPSASGTPGQRVTISCSGSSSNIGNNAVNWYQQLPGTAPKLLIYADSNRPSGVPDRFSGSKSGTSASLAISGLRSEDEADYYCGSWDYSLSGYVFGGGTKLTVLG

SEQ ID NO: 18674 - protein, 111 aa, Artificial Sequence
  source: /note="Description of Artificial Sequence: Synthetic polypeptide"
QSVLTQPPSASGTPGQRVTISCSGSSSNIGNNYVTWYQQLPGTAPKLLIYADSHRPSGVPDRFSGSKSGTSASLAISGLRSEDEADYYCATWDYSLSGYVFGGGTKLTVLG

SEQ ID NO: 18675 - protein, 111 aa, Artificial Sequence
  source: /note="Description of Artificial Sequence: Synthetic polypeptide"
QSVLTQPPSASGTPGQRVTISCSGSSSNIGNNDVYWYQQLPGTAPKLLIYANSHRPSGVPDRFSGSKSGTSASLAISGLRSEDEADYYCGTWDYSLSGYVFGGGTKLTVLG

SEQ ID NO: 18676 - protein, 111 aa, Artificial Sequence
  source: /note="Description of Artificial Sequence: Synthetic polypeptide"
QSVLTQPPSASGTPGQRVTISCTGSSSNIGNNDVSWYQQLPGTAPKLLIYSDSKRPSGVPDRFSGSKSGTSASLAISGLRSEDEADYYCGSWDYSLSGYVFGGGTKLTVLG

SEQ ID NO: 18677 - protein, 111 aa, Artificial Sequence
  source: /note="Description of Artificial Sequence: Synthetic polypeptide"
QSVLTQPPSASGTPGQRVTISCSGSSSNIGSNAVNWYQQLPGTAPKLLIYADSNRPSGVPDRFSGSKSGTSASLAISGLRSEDEADYYCGSWDYSLSGYVFGGGTKLTVLG

SEQ ID NO: 18678 - protein, 111 aa, Artificial Sequence
  source: /note="Description of Artificial Sequence: Synthetic polypeptide"
QSVLTQPPSASGTPGQRVTISCTGSSSNIGNNAVSWYQQLPGTAPKLLIYSDSQRPSGVPDRFSGSKSGTSASLAISGLRSEDEADYYCATWDYSLSAYVFGGGTKLTVLG

SEQ ID NO: 18679 - protein, 111 aa, Artificial Sequence
  source: /note="Description of Artificial Sequence: Synthetic polypeptide"
QSVLTQPPSASGTPGQRVTISCSGSSSNIGSNYVNWYQQLPGTAPKLLIYSDSHRPSGVPDRFSGSKSGTSASLAISGLRSEDEADYYCGAWDDSLSGYVFGGGTKLTVLG

SEQ ID NO: 18680 - protein, 111 aa, Artificial Sequence
  source: /note="Description of Artificial Sequence: Synthetic polypeptide"
QSVLTQPPSASGTPGQRVTISCTGSSSNIGSNYVSWYQQLPGTAPKLLIYSDNKRPSGVPDRFSGSKSGTSASLAISGLRSEDEADYYCGTWDDSLNGYVFGGGTKLTVLG

SEQ ID NO: 18681 - protein, 111 aa, Artificial Sequence
  source: /note="Description of Artificial Sequence: Synthetic polypeptide"
DIVLTQSPASLAVSLGQRATISCRASESVDSYGNSFMHWYQQKPGQPPKLLIYRASNLDSGIPARFSGSGSRTDFTLTINPVEADDVATYYCQQSNEDPLTFGAGTKLELK

SEQ ID NO: 18682 - protein, 107 aa, Artificial Sequence
  source: /note="Description of Artificial Sequence: Synthetic polypeptide"
DIQMTQTTSSLSASLGDRVTISCRASQDISNYLNWYQQKPDGTVKLLIYYTSRLHSGVPSRFSGSGSGTDYSLTITNLEQEDIATYFCQQGNTLPWTFGGGTKLEIK

SEQ ID NO: 18683 - protein, 107 aa, Artificial Sequence
  source: /note="Description of Artificial Sequence: Synthetic polypeptide"
TIVMTQTPKFLLVSAGDRITITCKASQSVSNDVAWYQQKPGQSPKLLIYYASNRYPGVPDRFTGSGYGTDFTFTISTVQAEDLAVYFCQQDYTSPWTFGGGTELEIK

SEQ ID NO: 18684 - protein, 107 aa, Artificial Sequence
  source: /note="Description of Artificial Sequence: Synthetic polypeptide"
DIQMTQTTSSLSASLGDRVTISCSTSQGISNYLNWYQQKPDGTVKLLIFYTSSLHSGVPSRFSGSGSGTDYSLTISNLEPEDIATYYCQQYSKLPYTFGGGTKLEIK

SEQ ID NO: 18685 - protein, 141 aa, Artificial Sequence
  source: /note="Description of Artificial Sequence: Synthetic polypeptide"
MRCLAEFLGLLVLWIPGAIGDIVMTQAAPSVPVTPGESVSISCRSSKSLLHSNGNTYLYWFLQRPGQSPQLLIYRMSNLVSGVPDRFSGSGSGTAFTLRISRVEAEDVGVYYCLQHLEYPFTFGPGTKLELKRADAAPTVT

SEQ ID NO: 18686 - protein, 108 aa, Artificial Sequence
  source: /note="Description of Artificial Sequence: Synthetic polypeptide"
DIQMTQSPSSLSASVGDRVTITCRASKTISKYLAWYQQKPGKAPKLLIYSGSTLQSGVPSRFSGSGSGTDFTLTISSLQPEDFATYYCQQHNEYPLTFGQGTKVEIKR

SEQ ID NO: 18687 - protein, 112 aa, Artificial Sequence
  source: /note="Description of Artificial Sequence: Synthetic polypeptide"
DIVMTQTPLSLSVTPGQPASISCKSSQSLETSTGNTYLNWYLQKPGQSPQLLIYRVSKRFSGVPDRFSGSGSGTDFTLKISRVEAEDVGVYYCLQLDSYPNTFGQGTKLEIK

SEQ ID NO: 18688 - protein, 112 aa, Artificial Sequence
  source: /note="Description of Artificial Sequence: Synthetic polypeptide"
DIVMTQAAPSIPVTPGESVSISCRSSKSLLNSNGNTYLYWFLQRPGQSPQLLIYRMSNLASGVPDRFSGSGSGTAFTLRISRVEAEDVGVYYCMQHLEYPFTFGAGTKLELK

SEQ ID NO: 18689 - protein, 112 aa, Artificial Sequence
  source: /note="Description of Artificial Sequence: Synthetic polypeptide"
DIVMTQTPLSLSVTPGQPASISCKSSQSLENPNGNTYLNWYLQKPGQSPQLLIYRVSKRFSGVPDRFSGSGSGTDFTLKISRVEAEDVGVYYCLQLTHVPYTFGQGTKLEIK

SEQ ID NO: 18690 - protein, 112 aa, Artificial Sequence
  source: /note="Description of Artificial Sequence: Synthetic polypeptide"
  MOD_RES (107)..(107): Any amino acid
DIVMTQTPLSLSVTPGQPASISCKSSQSLETSTGNTYLNWYLQKPGQSPQLLIYRVSKRFSGVPDRFSGSGSGTDFTLKISRVEAEDVGVYYCLQLTHVPYTFGQGXKLEIK

SEQ ID NO: 18691 - protein, 112 aa, Artificial Sequence
  source: /note="Description of Artificial Sequence: Synthetic polypeptide"
DIVMTQTPLSLSVTPGQPASISCKSSQSLETSTGTTYLNWYLQKPGQSPQLLIYRVSKRFSGVPDRFSGSGSGTDFTLKISRVEAEDVGVYYCLQLLEDPYTFGQGTKLEIK

SEQ ID NO: 18692 - protein, 112 aa, Artificial Sequence
  source: /note="Description of Artificial Sequence: Synthetic polypeptide"
DIVMTQTPLSLSVTPGQPASISCKSSQSLETSTGNTYLNWYLQKPGQSPQLLIYRVSKRFSGVPDRFSGSGSGTDFTLKISRVEAEDVGVYYCLQPGHYPGTFGQGTKLEIK

SEQ ID NO: 18693 - protein, 112 aa, Artificial Sequence
  source: /note="Description of Artificial Sequence: Synthetic polypeptide"
DIVMTQTPLSLSVTPGQPASISCKSSQSLETSTGNTYLNWYLQKPGQSPQLLIYRVSKRFSGVPDRFSGSGSGTDFTLKISRVEAEDVGVYYCLQLTHEPYTFGQGTKLEIK

SEQ ID NO: 18694 - protein, 112 aa, Artificial Sequence
  source: /note="Description of Artificial Sequence: Synthetic polypeptide"
DIVMTQTPLSLSVTPGQPASISCKSSQSLESSTGNTYLNWYLQKPGQSPQLLIYRVSKRFSGVPDRFSGSGSGTDFTLKISRVEAEDVGVYYCLQLIDYPVTFGQGTKLEIK

SEQ ID NO: 18695 - protein, 112 aa, Artificial Sequence
  source: /note="Description of Artificial Sequence: Synthetic polypeptide"
DIVMTQTPLSLSVTPGQPASISCKSSQSLETSTGNTYLNWYLQKPGQSPQLLIYRVSKRFSGVPDRFSGSGSGTDFTLKISRVEAEDVGVYYCLQATHIPYTFGQGTKLEIK

SEQ ID NO: 18696 - protein, 112 aa, Artificial Sequence; identical to SEQ ID NO: 10122
  source: /note="Description of Artificial Sequence: Synthetic polypeptide"

SEQ ID NO: 18697 - protein, 112 aa, Artificial Sequence; identical to SEQ ID NO: 10124
  source: /note="Description of Artificial Sequence: Synthetic polypeptide"

SEQ ID NO: 18698 - protein, 112 aa, Artificial Sequence; identical to SEQ ID NO: 10121
  source: /note="Description of Artificial Sequence: Synthetic polypeptide"

SEQ ID NO: 18699 - protein, 111 aa, Artificial Sequence; identical to SEQ ID NO: 13109
  source: /note="Description of Artificial Sequence: Synthetic polypeptide"

SEQ ID NO: 18700 - protein, 107 aa, Artificial Sequence; identical to SEQ ID NO: 10130
  source: /note="Description of Artificial Sequence: Synthetic polypeptide"

SEQ ID NO: 18701 - protein, 107 aa, Artificial Sequence; identical to SEQ ID NO: 10239
  source: /note="Description of Artificial Sequence: Synthetic polypeptide"

SEQ ID NO: 18702 - protein, 107 aa, Artificial Sequence; identical to SEQ ID NO: 10006
  source: /note="Description of Artificial Sequence: Synthetic polypeptide"

SEQ ID NO: 18703 - protein, 107 aa, Artificial Sequence
  source: /note="Description of Artificial Sequence: Synthetic polypeptide"
DIQMTQSPSSLSASVGDRVTMTCSASSSVSYMNWYQQKPGKAPKRWIYDSSKLASGVPARFSGSGSGTDYTLTISSLQPEDFATYYCQQWSRNPPTFGGGTKLQITR

SEQ ID NO: 18704 - protein, 106 aa, Artificial Sequence [sequence omitted]

SEQ ID NO: 18705 - protein, 107 aa, Artificial Sequence
  source: /note="Description of Artificial Sequence: Synthetic polypeptide"
DIQMTQSPSSLSASVGDRVTITCSASSSVSYMNWYQQTPGKAPKRWIYDTSKLASGVPSRFSGSGSGTDYTFTISSLQPEDIATYYCQQWSSNPFTFGQGTKLQITR

SEQ ID NO: 18706 - protein, 106 aa, Artificial Sequence [sequence omitted]

SEQ ID NO: 18707 - protein, 106 aa, Artificial Sequence
  source: /note="Description of Artificial Sequence: Synthetic polypeptide"
DIQMTQSPSSLSASVGDRVTITCRASSSVSYMNWYQQTPGKAPKRWIYDTSKVASGVPSRFSGSGSGTDYTFTISSLQPEDIATYYCQQWSSNPLTFGQGTKLQIT

SEQ ID NO: 18708 - protein, 112 aa, Artificial Sequence; identical to SEQ ID NO: 10058
  source: /note="Description of Artificial Sequence: Synthetic polypeptide"

SEQ ID NO: 18709 - protein, 112 aa, Artificial Sequence; identical to SEQ ID NO: 10060
  source: /note="Description of Artificial Sequence: Synthetic polypeptide"

SEQ ID NO: 18710 - protein, 106 aa, Artificial Sequence [sequence omitted]

SEQ ID NO: 18711 - protein, 112 aa, Artificial Sequence; identical to SEQ ID NO: 10062
  source: /note="Description of Artificial Sequence: Synthetic polypeptide"

SEQ ID NO: 18712 - protein, 112 aa, Artificial Sequence; identical to SEQ ID NO: 10063
  source: /note="Description of Artificial Sequence: Synthetic polypeptide"

SEQ ID NO: 18713 - protein, 112 aa, Artificial Sequence; identical to SEQ ID NO: 10064
  source: /note="Description of Artificial Sequence: Synthetic polypeptide"

SEQ ID NO: 18714 - protein, 109 aa, Artificial Sequence
  source: /note="Description of Artificial Sequence: Synthetic polypeptide"
QAVVTQEPSLTVSPGGTVTLTCGSSTGAVTTSNYANWVQEKPGQAFRGLIGGTNKRAPGTPARFSGSLLGGKAALTLSGAQPEDEAEYYCALWYSNLWVFGGGTKLTVL

SEQ ID NO: 18715 - protein, 111 aa, Artificial Sequence
  source: /note="Description of Artificial Sequence: Synthetic polypeptide"
QTVVTQEPSLTVSPGGTVTLTCGSSTGAVTTSNYANWVQQKPGQAPRGLIGGTNKRAPGTPARFSGSLLGGKAALTLSGVQPEDEAEYYCALWYSNLWVFGGGTKLTVLSS

SEQ ID NO: 18716 - protein, 113 aa, Artificial Sequence; identical to SEQ ID NO: 10643
  source: /note="Description of Artificial Sequence: Synthetic polypeptide"

SEQ ID NO: 18717 - protein, 111 aa, Homo sapiens; identical to SEQ ID NO: 8168

SEQ ID NO: 18718 - protein, 113 aa, Artificial Sequence; identical to SEQ ID NO: 8169
  source: /note="Description of Artificial Sequence: Synthetic polypeptide"

SEQ ID NO: 18719 - protein, 111 aa, Mus musculus; identical to SEQ ID NO: 10642

SEQ ID NO: 18720 - protein, 108 aa, Artificial Sequence
  source: /note="Description of Artificial Sequence: Synthetic polypeptide"
DIQMTQSPSSLSASVGDRVTITCKASAAVGTYVAWYQQKPGKAPKLLIYSASYRKRGVPSRFSGSGSGTDFTLTISSLQPEDFATYYCHQYYTYPLFTFGQGTKLEIK

SEQ ID NO: 18721 - protein, 106 aa, Homo sapiens
DIQLTQSPSSLSASVGDRVTITCKASQDVGTSVAWYQQKPGKAPKLLIYWTSTRHTGVPSRFSGSGSGTDFTFTISSLQPEDIATYYCQQYSLYRSFGQGTKVEIK

SEQ ID NO: 18722 - protein, 106 aa, Mus sp.
EIQLTQSHKMMSTSVGDRVSITCKASQDVGTSVAWYQQRPGQSPKLLIYWTSTRHTGVPDRFTGSVSGTDFTLTITNVQSEDLADYFCQQYSLYRSFGGGTKLEIK

SEQ ID NO: 18723 - protein, 106 aa, Artificial Sequence
  source: /note="Description of Artificial Sequence: Synthetic polypeptide"
ENVLTQSPSSMSVSVGDRVTIACSASSSVPYMHWLQQKPGKSPKLLIYSTSNLASGVPSRFSGSGSGTDYSLTISSVQPEDAATYYCQQRSSYPLTFGCGTKLEIK

SEQ ID NO: 18724 - protein, 131 aa, Artificial Sequence
  source: /note="Description of Artificial Sequence: Synthetic polypeptide"
METDTLLLWVLLLWVPGSTGDIVLTQSPASLAVSLGQRATMSCRAGESVDIFGVGFLHWYQQKPGQPPKLLIYRASNLESGIPVRFSGTGSRTDFTLIIDPVEADDVATYYCQQTNEDPYTFGGGTKLEIK

SEQ ID NO: 18725 - protein, 111 aa, Artificial Sequence
  source: /note="Description of Artificial Sequence: Synthetic polypeptide"
DIVLTQSPASLAVSLGQRATMSCRAGESVDIFGVGFLHWYQQKPGQPPKLLIYRASNLESGIPVRFSGTGSRTDFTLIIDPVEADDVATYYCQQTNEDPYTFGGGTKLEIK

SEQ ID NO: 18726 - protein, 111 aa, Artificial Sequence
  source: /note="Description of Artificial Sequence: Synthetic polypeptide"
EIVLTQSPATLSLSPGERATLSCRAGESVDIFGVGFLHWYQQKPGQAPRLLIYRASNRATGIPARFSGSGSGTDFTLTISSLEPEDFAVYYCQQTNEDPYTFGQGTKLEIK

SEQ ID NO: 18727 - protein, 108 aa, Artificial Sequence; identical to SEQ ID NO: 15072
  source: /note="Description of Artificial Sequence: Synthetic polypeptide"

SEQ ID NO: 18728 - protein, 110 aa, Artificial Sequence
  source: /note="Description of Artificial Sequence: Synthetic polypeptide"
QSVLTQPPSASGTPGQRVTISCTGSSSNIGNNYVTWYQQLPGTAPKLLIYYNNHRPSGVPDRFSGSKSGTSASLAISGLQSEDEADYYCGSWDYSLSAYVFGGGTKLTVL

SEQ ID NO: 18729 - protein, 112 aa, Mus musculus; identical to SEQ ID NO: 15112

SEQ ID NO: 18730 - protein, 112 aa, Mus musculus; identical to SEQ ID NO: 15113

SEQ ID NO: 18731 - protein, 112 aa, Mus musculus; identical to SEQ ID NO: 15114

SEQ ID NO: 18732 - protein, 112 aa, Mus musculus; identical to SEQ ID NO: 15115

SEQ ID NO: 18733 - protein, 110 aa, Artificial Sequence
  source: /note="Description of Artificial Sequence: Synthetic polypeptide"
QSVLTQPPSASGTPGQRVTISCSGSSSNIGNNDVSWYQQLPGTAPKLLIYPDSQRPSGVPDRFSGSKSGTSASLAISGLRSEDEADYYCASWDSSLSGYVFGGGTKLTVL

SEQ ID NO: 18734 - protein, 110 aa, Artificial Sequence
  source: /note="Description of Artificial Sequence: Synthetic polypeptide"
QSVLTQPPSASGTPGQRVTISCTGSSSNIGSNYVSWYRQLPGTAPKLLIYSDSNRPSGVPDRFSGSKSGTSASLAISGLRSEDEADYYCGSWDDSLSGYVFGGGTKLTVL

SEQ ID NO: 18735 - protein, 114 aa, Artificial Sequence; identical to SEQ ID NO: 15057
  source: /note="Description of Artificial Sequence: Synthetic polypeptide"

SEQ ID NO: 18736 - protein, 114 aa, Artificial Sequence; identical to SEQ ID NO: 15055
  source: /note="Description of Artificial Sequence: Synthetic polypeptide"

SEQ ID NO: 18737 - protein, 113 aa, Artificial Sequence
  source: /note="Description of Artificial Sequence: Synthetic polypeptide"
DIVMSQSPSSLTVSVGEKVAMSCKSSQSLLYSSNQKDYLAWYQQKPGQSPKLLIYWASTRESGVPDRFTGSGSGTDFTLTISSVKAEDLAVYYCQQYYSYPLTFGAGTKLELK

SEQ ID NO: 18738 - protein, 112 aa, Artificial Sequence
  source: /note="Description of Artificial Sequence: Synthetic polypeptide"
DVLMTQTPLSLPVSLGDQASISCRSSQSILHSNGNTYLEWYLQKPGQSPKLLIYKVSNRFSGVPDRFSGSGSGTDFTLKISRVEAEDLGVYYCFQGSHVPWTFGGGTKLEIK

SEQ ID NO: 18739 - protein, 106 aa, Artificial Sequence
  source: /note="Description of Artificial Sequence: Synthetic polypeptide"
QIVLSQSPAILSASPGEKVTMTCRASSGVNYMHWYQQKPGSSPKPWIYATSNLASGVPARFSGSGSGTSYSLTISRVEAEDAATYYCQQWISHPFTFGSGTKLEIK

SEQ ID NO: 18740 - protein, 112 aa, Artificial Sequence
  source: /note="Description of Artificial Sequence: Synthetic polypeptide"
DIVMTQAAPSVPVTPGESVSISCRSSKSLLHSNGNTYLYWFLQRPGQSPQVLIYRMSNLASGVPDRFSGSGSGTAFTLRIRRVEAEDVGVYYCMQNLEYPFTFGGGTKLEIK

SEQ ID NO: 18741 - protein, 107 aa, Homo sapiens; identical to SEQ ID NO: 15073

SEQ ID NO: 18742 - protein, 106 aa, Homo sapiens
QLTQSPSSLSASVGDRVTITCRASQGLSSALAWYRQKPGKAPKLLIYDASSLESGVPSRFSGSGSGTDFTLTISSLQPEDFATYYCQQFTSYPQITFGQGTRLEIK

SEQ ID NO: 18743 - protein, 107 aa, Artificial Sequence
  source: /note="Description of Artificial Sequence: Synthetic polypeptide"
ETTVTQSPALMAASPGEKVTITCSVSSSISSTNLHWYQQKSETSPKPWIYGTSNLASGVPVRFGGSGSGTSYSLTISSMEAEDAATYYCQQWSSYPYTFGGGTKLEI

SEQ ID NO: 18744 - protein, 108 aa, Artificial Sequence [sequence omitted]

SEQ ID NO: 18745 - protein, 98 aa, Artificial Sequence
  source: /note="Description of Artificial Sequence: Synthetic polypeptide"
DRVTITCKSSQSLLYTSSQKNYLAWYQQKPGKAPKLLIYWASTRESGVPSRFSGSGSGTDFTLTISSLQPEDFATYYCQQYYAYPWTFGQGTKVEIKR

SEQ ID NO: 18746 - protein, 114 aa, Artificial Sequence; identical to SEQ ID NO: 15056
  source: /note="Description of Artificial Sequence: Synthetic polypeptide"

SEQ ID NO: 18747 - protein, 132 aa, Artificial Sequence
  source: /note="Description of Artificial Sequence: Synthetic polypeptide"
MGWSYIILFLVATAADVHSQSALTQPASVSGSPGQSITISCTGTISDIGTYDFVSWYQHKPGKAPKLLIFDVNNRPSGVSSRFSGSKSDNTASLSISGFQAEDEADYYCSSYTDNRGLVLFGGGTKLTVLRS

SEQ ID NO: 18748 - protein, 107 aa, Artificial Sequence
  source: /note="Description of Artificial Sequence: Synthetic polypeptide"
EIQMTQSPASLSASVGETVTITCRASENIYSYLAWYQRKQGRSPQLLVYNAKPLAEGVPSRFSGSGSGTQFSLKINSLQPEDFGTYYCQHHYGTPFTFGSGTRLEIK

SEQ ID NO: 18749 - protein, 113 aa, Artificial Sequence; identical to SEQ ID NO: 15144
  source: /note="Description of Artificial Sequence: Synthetic polypeptide"

SEQ ID NO: 18750 - protein, 113 aa, Artificial Sequence; identical to SEQ ID NO: 15145
  source: /note="Description of Artificial Sequence: Synthetic polypeptide"

SEQ ID NO: 18751 - protein, 113 aa, Artificial Sequence; identical to SEQ ID NO: 15146
  source: /note="Description of Artificial Sequence: Synthetic polypeptide"

SEQ ID NO: 18752 - protein, 113 aa, Artificial Sequence; identical to SEQ ID NO: 15147
  source: /note="Description of Artificial Sequence: Synthetic polypeptide"

SEQ ID NO: 18753 - protein, 114 aa, Artificial Sequence; identical to SEQ ID NO: 15048
  source: /note="Description of Artificial Sequence: Synthetic polypeptide"

SEQ ID NO: 18754 - protein, 108 aa, Artificial Sequence
  source: /note="Description of Artificial Sequence: Synthetic polypeptide"
EIVLTQSPGTLSLSPGERATLSCRASQSVSSSYLAWYQQKPGQAPRLLIYGASSRATGIPDRFSGSGSGTDFTLTISRLEPEDFAVYYCQQGSNQPVTFGQGTKVEIK

SEQ ID NO: 18755 - protein, 111 aa, Artificial Sequence
  source: /note="Description of Artificial Sequence: Synthetic polypeptide"
ADIQMTQSPSTLSASVGDRVTITCRASQSISTYLSWYQQKPGKAPKRLIYKASSLASGVPSRFSGSGSGTEFTLTISSLQPDDAATYYCQPNSGIATYGAAFGGGTKVEIK

SEQ ID NO: 18756 - protein, 108 aa, Artificial Sequence
  source: /note="Description of Artificial Sequence: Synthetic polypeptide"
EIVLTQSPGTLSLSPGERATLSCRASQSVSSSYLAWYQQKPGQAPRLLIYGASSRATGIPDRFSGSGSGTDFTLTISRLEPEDFAVYYCQQGQLPPITFGQGTKVEIK

SEQ ID NO: 18757 - protein, 108 aa, Artificial Sequence
  source: /note="Description of Artificial Sequence: Synthetic polypeptide"
EIVLTQSPGTLSLSPGERATLSCRASQSVSSSYLAWYQQKPGQAPRLLIYGASSRATGIPDRFSGSGSGTDFTLTISRLEPEDFAVYYCQQGESPPPTFGQGTKVEIK

SEQ ID NO: 18758 - protein, 108 aa, Artificial Sequence
  source: /note="Description of Artificial Sequence: Synthetic polypeptide"
EIVLTQSPGTLSLSPGERATLSCRASQSVSSSYLAWYQQKPGQAPRLLIYGASSRATGIPDRFSGSGSGTDFTLTISRLEPEDFAVYYCQQGSQPPITFGQGTKVEIK

SEQ ID NO: 18759 - protein, 108 aa, Artificial Sequence
  source: /note="Description of Artificial Sequence: Synthetic polypeptide"
EIVLTQSPGTLSLSPGERATLSCRASQSVSSSYLAWYQQKPGQAPRLLIYGASSRATGIPDRFSGSGSGTDFTLTISRLEPEDFAVYYCQQGTTHPITFGQGTKVEIK

SEQ ID NO: 18760 - protein, 110 aa, Artificial Sequence
  source: /note="Description of Artificial Sequence: Synthetic polypeptide"
LVMTQTPSSTSEPVGGTVTIKCQASQSIGSSLSWYQQKPGQPPKLLIYHASTLASGVPSRFSGSRSGIQTTLTISGVQCDDAATYYCLGVADARRDDGFAFGGGTEVVVK

SEQ ID NO: 18761 - protein, 110 aa, Artificial Sequence
  source: /note="Description of Artificial Sequence: Synthetic polypeptide"
AYDMTQTPDSVEVAVGGTVTIKCQASQTIGDALAWYQQKPGQRPNLLIYRTSTLASGVPSRFSGSGSGTHFTLTISGVECADAATYYCQQGATYNNVLNTFGGGTEVVVK

SEQ ID NO: 18762 - protein, 111 aa, Artificial Sequence
  source: /note="Description of Artificial Sequence: Synthetic polypeptide"
ADIVMTQTPASVSEPVGGTVTIKCQASQSISTYLSWYQQKPGQPPKRLIYKASTLASGVPSRFKGSGSGTDFTLTIRDLECADAATYYCQPNSGIATYGAAFGGGTEVVVK

SEQ ID NO: 18763 - protein, 110 aa, Artificial Sequence
  source: /note="Description of Artificial Sequence: Synthetic polypeptide"
LVMTQTPSSTSEPVGGTVTIKCQASQSIGSSLSWYQQTPGQPPKLLIYTASSLASSVPKRFSGSRSGTQFTLTISGVQCADAATYYCLGIDDVRRDDGFAFGGGTEVVVK

SEQ ID NO: 18764 - protein, 113 aa, Artificial Sequence
  source: /note="Description of Artificial Sequence: Synthetic polypeptide"
ADIVMTQTASPVSAAVGGTVTINCQASQSISSSYVSWYQQKPGQPPKLLIYKASTLASGVPSRFSGSGSGTQLSLTIRGVQCDDAATYYCLYGYSDVSSSEYVFGGGTEVVVR

SEQ ID NO: 18765 - protein, 110 aa, Artificial Sequence
  source: /note="Description of Artificial Sequence: Synthetic polypeptide"
ALVMTQTPSSVSAAVGGTVTINCQASQNIYSNLAWFQQKPGQPPKLLIYETSKLASGVPSRFSGSGSGTEFTLTISDLECDDAATYYCQSSWHSISTDCAFGGGTEVVVK

SEQ ID NO: 18766 - protein, 111 aa, Artificial Sequence
  source: /note="Description of Artificial Sequence: Synthetic polypeptide"
ADIVMTQTPASVSEPVGGTVTIKCQASQSISTYLSWYQQKPGQPPKRLIYKASTLASGVPSRFKGSGSGTDFTLTIRDLESADAATYYCQPNSGIATYGAAFGGGTEVVVK

SEQ ID NO: 18767 - protein, 110 aa, Artificial Sequence
  source: /note="Description of Artificial Sequence: Synthetic polypeptide"
DIQMTQSPSSLSASVGDRVTITCRASQSISTYLSWYQQKPGQPPKRLIYKASTLASGVPSRFSGSGSGTDFTLTISSLQPEDFATYYCQPNSGIATYGAAFGGGTKVEIK

SEQ ID NO: 18768 - protein, 110 aa, Artificial Sequence
  source: /note="Description of Artificial Sequence: Synthetic polypeptide"
DIQMTQSPSSLSASVGDRVTITCQASQSISTYLSWYQQKPGQPPKRLIYKASTLASGVPSRFSGSGSGTDFTLTISSLQPEDFATYYCQPNSGIATYGAAFGGGTKVEIK

SEQ ID NO: 18769 - protein, 110 aa, Artificial Sequence
  source: /note="Description of Artificial Sequence: Synthetic polypeptide"
DIQMTQSPSTLSASVGDRVTITCRASQSISTYLSWYQQKPGKAPKRLIYKASSLASGVPSRFSGSGSGTEFTLTISSLQPDDAATYYCQPNSGIATYGAAFGGGTKVEIK

SEQ ID NO: 18770 - protein, 110 aa, Artificial Sequence
  source: /note="Description of Artificial Sequence: Synthetic polypeptide"
DIQMTQSPSSLSASVGDRVTITCRASQSISTYLSWYQQKPGKAPKRLIYKASTLASGVPSRFSGSGSGTDFTLTISSLQPEDAATYYCQPNSGIATYGAAFGGGTKVEIK

SEQ ID NO: 18771 - protein, 108 aa, Artificial Sequence
  source: /note="Description of Artificial Sequence: Synthetic polypeptide"
QVLTQTPSPVSAAVGGTVTINCQASQSVYNNRLAWYQQKPGQPPKLLIYLASTLASGVPSRFKGSGSGTQFTLTISDLQCDDAATYYCAGGYSGNINAFGGGTEVVVK

SEQ ID NO: 18772 - protein, 113 aa, Artificial Sequence
  source: /note="Description of Artificial Sequence: Synthetic polypeptide"
DIVMTQSPLSLPVTPGEPASISCRSSQNIVHNNGITYLEWYLQKPGQSPQLLIYKVSDRFSGVPDRFSGSGSGTDFTLKISRVEAEDVGVYYCFQGSHIPPTFGQGTKVEIKR

SEQ ID NO: 18773 - protein, 219 aa, Homo sapiens; identical to SEQ ID NO: 15821

SEQ ID NO: 18774 - protein, 216 aa, Homo sapiens; identical to SEQ ID NO: 15823

SEQ ID NO: 18775 - protein, 215 aa, Homo sapiens; identical to SEQ ID NO: 15825

SEQ ID NO: 18776 - protein, 216 aa, Homo sapiens; identical to SEQ ID NO: 15826

SEQ ID NO: 18777 - protein, 215 aa, Homo sapiens; identical to SEQ ID NO: 15827

SEQ ID NO: 18778 - protein, 111 aa, Artificial Sequence
  source: /note="Description of Artificial Sequence: Synthetic polypeptide"
  MOD_RES (33)..(34): Any amino acid
DIQMTQSPSSLSASVGDRVTITCRSSQSLVHSXXNTYLHWYQQKPGKAPKLLIYKVSNRFSGVPSRFSGSGSGTDFTLTISSLQPEDFATYYCSQSTHVPTFGGGTKVEIK

SEQ ID NO: 18779 - protein, 220 aa, Homo sapiens; identical to SEQ ID NO: 15828

SEQ ID NO: 18780 - protein, 216 aa, Homo sapiens; identical to SEQ ID NO: 15829

SEQ ID NO: 18781 - protein, 216 aa, Homo sapiens; identical to SEQ ID NO: 15830

SEQ ID NO: 18782 - protein, 216 aa, Homo sapiens; identical to SEQ ID NO: 15831

SEQ ID NO: 18783 - protein, 217 aa, Homo sapiens; identical to SEQ ID NO: 15832

SEQ ID NO: 18784 - protein, 107 aa, Artificial Sequence
  source: /note="Description of Artificial Sequence: Synthetic polypeptide"
AIQLTQSPSSLSASVGDRVTITCKASQDVDTAVAWYQQKPGKAPKLLIYWASTRHTGVPSRFSGSGSGTDFTLTISSLQPEDFATYYCQQYSSYPLTFGGGTKVEIK

SEQ ID NO: 18785 - protein, 111 aa, Artificial Sequence
  source: /note="Description of Artificial Sequence: Synthetic polypeptide"
DIQMTQSPSSLSASVGDRATITCRSSQSLVHSNGNTYLHWYQQKPGKAPKLLIYKVSNRFSGVPSRFSGSGSGTDFTLTISSLQPEDFATYFCSQSTHVPTFGGGTKVEIK

SEQ ID NO: 18786 - protein, 111 aa, Artificial Sequence
  source: /note="Description of Artificial Sequence: Synthetic polypeptide"
DVVMTQSPLSLPVTLGQPASISCRSSQSLVHSNGNTYLHWYQQRPGQSPRLLIYKVSNRFSGVPDRFSGSGSGTDFTLKISRVEAEDVGVYFCSQSTHVPTFGGGTKLEIK

SEQ ID NO: 18787 - protein, 111 aa, Artificial Sequence
  source: /note="Description of Artificial Sequence: Synthetic polypeptide"
DVVMTQSPLSLPVTLGQPASISCRSSQSLVHSNLNTYLHWYQQRPGQSPRLLIYKVSNRFSGVPDRFSGSGSGTDFTLKISRVEAEDVGVYFCSQSTHVPTFGGGTKVEIK

SEQ ID NO: 18788 - protein, 107 aa, Artificial Sequence
  source: /note="Description of Artificial Sequence: Synthetic polypeptide"
AIQLTQSPSSLSASVGDRVTITCKASQDVDTAVAWYQQKPGKAPKLLIYWASTRHTGVPSRFSGSGSGTDFTLTVSSLQPEDFATYFCQQYSSYPLTFGGGTKVEIK

SEQ ID NO: 18789 - protein, 107 aa, Homo sapiens
EIVLTQSPGTLSLSPGERATLSCRASQSISSSYLAWYQQKPGQAPRLLIYGPSSRATGIPDRFSGSGSGTDFTLTISRLEPEDFAVYYCQQYAGSLTFGPGTKVDIK

SEQ ID NO: 18790 - protein, 111 aa, Artificial Sequence
  source: /note="Description of Artificial Sequence: Synthetic polypeptide"
DVVMTQSPLSLPVTLGQPASISCRSSQSLVHSNGNTYLHWFQQRPGQSPRRLIYKVSNRFSGVPDRFSGSGSGTDFTLKISRVEAEDVGVYYCSQSTHVPTFGGGTKVEIK

SEQ ID NO: 18791 - protein, 114 aa, Artificial Sequence
  source: /note="Description of Artificial Sequence: Synthetic polypeptide"
QSVLTQPPSASGTPGQGVTISCSGSSADIGANYVYWYQQLPGTAPKLLIYSINQRPSGVPDRFSGSKSGTSASLAISGLRSEDEADYYCATWDDSLGGWAFGGGTKVEIKRTVA

SEQ ID NO: 18792 - protein, 107 aa, Mus musculus
DIQMTQSPASLSASVGETVTITCRTSENIYIYLAWYQQKQGKSPQLLVYNAKTLAEGVPSRFSGSGSGTQFSLKINGLQPEDFGGYYCQQHYGTPYTFGGGTKLEKK

SEQ ID NO: 18793 - protein, 107 aa, Homo sapiens [sequence omitted]

SEQ ID NO: 18794 - protein, 107 aa, Homo sapiens [sequence omitted]

SEQ ID NO: 18795 - protein, 107 aa, Artificial Sequence
  source: /note="Description of Artificial Sequence: Synthetic polypeptide"
DIVLTQSPAFMSASPGEKVTMTCSASSSVSYMHWYQQKPDQSPKRWIYATSKLASGVPSRFSGSGSGTDYSLTISSMEAEDAATYYCQQWSSNPLTFGQGTKLELKR

SEQ ID NO: 18796 - protein, 109 aa, Artificial Sequence; identical to SEQ ID NO: 15807
  source: /note="Description of Artificial Sequence: Synthetic polypeptide"

SEQ ID NO: 18797 - protein, 109 aa, Artificial Sequence; identical to SEQ ID NO: 15808
  source: /note="Description of Artificial Sequence: Synthetic polypeptide"

SEQ ID NO: 18798 - protein, 107 aa, Artificial Sequence
  source: /note="Description of Artificial Sequence: Synthetic polypeptide"
DTVLTQSPSLAVSPGERATISCRASESVSTLMHWYQQKPGQQPKLLIYLASHRESGVPARFSGSGSGTDFTLTIDPMEAEDTATYYCQQSRNDPWTFGQGTKLELKR

SEQ ID NO: 18799 - protein, 108 aa, Rattus sp.; identical to SEQ ID NO: 15202

SEQ ID NO: 18800 - protein, 111 aa, Artificial Sequence
  source: /note="Description of Artificial Sequence: Synthetic polypeptide"
DIVLTQSPATLSLSPGERATLSCRASQSVSSYLAWFQQKPGQAPRLLIYDASNRATGVPARFSGSGSGTDFTLTITSLEPEDFAVYYCQQRGDWPLTFGGGTKVEIKRTVA

SEQ ID NO: 18801 - protein, 108 aa, Mus musculus; identical to SEQ ID NO: 15199

SEQ ID NO: 18802 - protein, 107 aa, Mus musculus; identical to SEQ ID NO: 15200

SEQ ID NO: 18803 - protein, 107 aa, Artificial Sequence
  source: /note="Description of Artificial Sequence: Synthetic polypeptide"
QIVLTQSPASMSASPGEKVTMTCSASSSVSYMHWYQQKSGTSPKRWIYATSKLASGVPARFSGSGSGTSYSLTISSMEAEDAATYYCQQWSSNPLTFGAGTKLELKR

SEQ ID NO: 18804 - protein, 127 aa, Artificial Sequence; identical to SEQ ID NO: 15858
  source: /note="Description of Artificial Sequence: Synthetic polypeptide"

SEQ ID NO: 18805 - protein, 133 aa, Artificial Sequence; identical to SEQ ID NO: 15859
  source: /note="Description of Artificial Sequence: Synthetic polypeptide"

SEQ ID NO: 18806 - protein, 128 aa, Artificial Sequence; identical to SEQ ID NO: 15860
  source: /note="Description of Artificial Sequence: Synthetic polypeptide"

SEQ ID NO: 18807 - protein, 107 aa, Artificial Sequence
  source: /note="Description of Artificial Sequence: Synthetic polypeptide"
DTVLTQSPALAVSPGERVTISCRASESVSTLMHWYQQKSGQQPKLLIYLASHRESGVPARFSGSGSGTDFTLTIDPMEADDTATYYCQQSRNDPWTFGGGTNLELKR

SEQ ID NO: 18808 - protein, 127 aa, Artificial Sequence; identical to SEQ ID NO: 15196
  source: /note="Description of Artificial Sequence: Synthetic polypeptide"

SEQ ID NO: 18809 - protein, 108 aa, Artificial Sequence; identical to SEQ ID NO: 10714
  source: /note="Description of Artificial Sequence: Synthetic polypeptide"

SEQ ID NO: 18810 - protein, 128 aa, Mus musculus; identical to SEQ ID NO: 14659

SEQ ID NO: 18811 - protein, 108 aa, Mus musculus; identical to SEQ ID NO: 15198

SEQ ID NO: 18812 - protein, 117 aa, Artificial Sequence
  source: /note="Description of Artificial Sequence: Synthetic polypeptide"
DIVMTQTPDSLAVSLGERATINCKSSQNLLYTSSNQTYLAWYQQKPGQPPKLLIYWASTRESGVPDRFSGSGSGTDFTLTISSLQPEDVAAYYCQQYYRTPITFGPGTKVEIKRTVA

SEQ ID NO: 18813 - protein, 115 aa, Artificial Sequence
  source: /note="Description of Artificial Sequence: Synthetic polypeptide"
EIVMTQSPCPSPLESRPPSPAGLVRASWIAMMATPIWTGTCRSQGSLHSSSIYTLSHRAPGVPDRFSGSGSGTDFTLKISRVEAEDVGVYYCLQRIDFPFTFGPGTKVEIKRTVA

SEQ ID NO: 18814 - protein, 139 aa, Mus musculus
MVLAQFLAFLLLWFPGARCDILMTQSPSSMSVSLGDTVSITCHASQDINSNIGWLQQKPGKSFKGLIYHGTNLEDGVPSRFSGSGSGADYSLTISSLESEDFADYYCVQYAQFPWTFGGGTKLEIKRADAAPTVSIFPP

SEQ ID NO: 18815 - protein, 108 aa, Homo sapiens
DIQLTQSPSSLSASVGDRVSITCKASQDVSIAVAWYQQKPGKAPKLLIYSASYRYTGVPDRFSGSGSGTDFTLTISSLQPEDFAVYYCQQHYITPLTFGAGTKVEIKR

SEQ ID NO: 18816 - protein, 108 aa, Mus sp.
DIQLTQSHKFMSTSVGDRVSITCKASQDVSIAVAWYQQKPGQSPKLLIYSASYRYTGVPDRFTGSGSGTDFTFTISSVQAEDLAVYYCQQHYITPLTFGAGTKLELKR

SEQ ID NO: 18817 - protein, 107 aa, Artificial Sequence
  source: /note="Description of Artificial Sequence: Synthetic polypeptide"
QIVLTQSPALMSASPGEKVTMTCSASSSVSYMYWYQQRPRSSPKPWIYLTSNLASGVPARFSGSGSGTSYSLTISSMEAEDAATYYCQQWSSNPLTFGAGTKLELKR

SEQ ID NO: 18818 - protein, 107 aa, Artificial Sequence
  source: /note="Description of Artificial Sequence: Synthetic polypeptide"
ELVMTQSPSYLAASPGETITINCRASKSISKYLAWYQEKPGKTNKLLIYSGSTLQSGIPSRFSGSGSGTDFTLTISSLEPEDFAMYYCQQHNEYPYTFGGGTKLEIK

SEQ ID NO: 18819 - protein, 112 aa, Artificial Sequence
  source: /note="Description of Artificial Sequence: Synthetic polypeptide"
ELVMTQTPLSLPVSLGDQASISCRSSQSLVHSNGNTYLHWYLQKPGQSPKLLIYKVSNRFSGVPDRFSGSGSGTDFTLKISRVEAEDLGVYFCSQSTHVPYTFGGGTKLEIK

SEQ ID NO: 18820 - protein, 113 aa, Artificial Sequence
  source: /note="Description of Artificial Sequence: Synthetic polypeptide"
ELVMTQSPSSLTVTAGEKVTMSCKSSQSLLNSGNQKNYLTWYQQKPGQPPKLLIYWASTRESGVPDRFTGSGSGTDFTLTISSVQAEDLAVYYCQNDYSYPLTFGAGTKLEIK

SEQ ID NO: 18821 - protein, 110 aa, Homo sapiens; identical to SEQ ID NO: 16074

SEQ ID NO: 18822 - protein, 112 aa, Artificial Sequence
  source: /note="Description of Artificial Sequence: Synthetic polypeptide"
DVLMTQIPLSLPVSLGDQASISCRSSQSIVHSNGNTYLEWYLQKPGQSPKSLIYKVSNRFSGVPDRFSGSGSGTDFTLKISRVEAEDLGVYYCFQGSYVPWTFGGGTKLEIK

SEQ ID NO: 18823 - protein, 112 aa, Artificial Sequence
  source: /note="Description of Artificial Sequence: Synthetic polypeptide"
DIVLTQTAPSVPVTPGESVSISCRSSKSLLHSNGNTYLYWFLQRPGQSPQLLIYRMSNLASGVPDRFSGSGSGTAFTLRISRVEAEDVGVYYCMQHLEYPFTFGSGTKLEIK

SEQ ID NO: 18824 - protein, 112 aa, Artificial Sequence
  source: /note="Description of Artificial Sequence: Synthetic polypeptide"
DVLMTQTPLSLPVSLGDQASISCRSSQSIVHSIGNTYLEWYLQKPGQSPKLLIYKVSNRFSGVPERFSGSGSGTDFTLKISRVEAEDLGVYYCFQGSHVPFTFGSGTKLEIK

SEQ ID NO: 18825 - protein, 112 aa, Artificial Sequence
  source: /note="Description of Artificial Sequence: Synthetic polypeptide"
DVLMTQIPLSLPVSLGDQASISCRSSQSIVHSNGNTYLEWYLQKPGQSPKLLIYKVSNRFSGVPDRFSGSGSGTDFTLKISRVEAEDLGVYYCFQGSYVPWTFGGGTKLEIK

SEQ ID NO: 18826 - protein, 107 aa, Artificial Sequence
  source: /note="Description of Artificial Sequence: Synthetic polypeptide"
ETTVTQSPASLSMAIGDKVTIRCITSTDIDDDMNWFQQKPGEPPKLLISEGNTLRPGVPSRFSGSGYGTDFIFTIENMLSEDVADYYCLQSDNLPYTFGGGTKLEIK

SEQ ID NO: 18827 - protein, 112 aa, Artificial Sequence
  source: /note="Description of Artificial Sequence: Synthetic polypeptide"
DVLMTQTPLSLPVSLGDQASISCRSSQSIVHSNGNTYLEWYLQKPGQSPKLLIYKVSNRFSGVPDRFSGSGSGTDFTLKISRVEAEDLGVYYCFQGSYVPWTFGGGTKLEIK

SEQ ID NO: 18828 - protein, 107 aa, Artificial Sequence
  source: /note="Description of Artificial Sequence: Synthetic polypeptide"
DIQMTQSPSSLSASLGERVSLTCRASQEISGYLSWLQQKPDGTIKRLIYAASTLDSGVPKRFSGSRSGSDYSLTIGSLESEDLADYYCLQYDSYPYTFGGGTKLEIK

SEQ ID NO: 18829 - protein, 107 aa, Artificial Sequence
  source: /note="Description of Artificial Sequence: Synthetic polypeptide"
DIQMTQSPSSLSASVGDRVTITCRASQEISGYLSWLQQKPGGAIKRLIYAASTLDSGVPSRFSGSGSGSDYTLTISSLQPEDFATYYCLQYDSYPYTFGQGTKLEIK

SEQ ID NO: 18830 - protein, 111 aa, Artificial Sequence [sequence omitted]

SEQ ID NO: 18831 - protein, 107 aa, Artificial Sequence
  source: /note="Description of Artificial Sequence: Synthetic polypeptide"
DIQMTQSPSSLSASVGDRVTITCRASQEISGYLSWFQQKPGKAPKSLIYAASTLDSGVPSRFSGSGSGTDFTLTISSLQPEDFATYYCLQYDSYPYTFGQGTKLEIK

SEQ ID NO: 18832 - protein, 107 aa, Artificial Sequence
  source: /note="Description of Artificial Sequence: Synthetic polypeptide"
DIQMTQSPSSLSASVGDRVTITCRASQEISGYLSWYQQKPGKAPKRLIYAASTLDSGVPSRFSGSGSGTEFTLTISSLQPEDFATYYCLQYDSYPYTFGQGTKLEIK

SEQ ID NO: 18833 - protein, 107 aa, Artificial Sequence
  source: /note="Description of Artificial Sequence: Synthetic polypeptide"
DIQMTQSPSSLSASVGDRVTITCRASQEISGYLSWYQQKPGKAPKLLIYAASTLDSGVPSRFSGSGSGTDFTFTISSLQPEDIATYYCLQYDSYPYTFGQGTKLEIK

SEQ ID NO: 18834 - protein, 107 aa, Artificial Sequence
  source: /note="Description of Artificial Sequence: Synthetic polypeptide"
DIQMTQSPSSLSASVGDRVTITCRASQEISGYLSWYQQKPGKAPKLLIYAASTLDSGVPSRFSGSGSGTDFTLTISSLQPEDFATYYCLQYDSYPYTFGQGTKLEIK

SEQ ID NO: 18835 - protein, 107 aa, Artificial Sequence
  source: /note="Description of Artificial Sequence: Synthetic polypeptide"
DIQLTQSPSFLSASVGDRVTITCRASQEISGYLSWYQQKPGKAPKLLIYAASTLDSGVPSRFSGSGSGTEFTLTISSLQPEDFATYYCLQYDSYPYTFGQGTKLEIK

SEQ ID NO: 18836 - protein, 108 aa, Artificial Sequence
  source: /note="Description of Artificial Sequence: Synthetic polypeptide"
AIQMTQSPSSLSASVGDRVTITCRASQDIRDDLGWFQQKPGKAPNLLIYAASSLQSGVPSRFSGSGSGTDFTLTISSLQPEDFATYYCLQDYNYPLTFGGGTKVEIKR

SEQ ID NO: 18837 - protein, 108 aa, Artificial Sequence
  source: /note="Description of Artificial Sequence: Synthetic polypeptide"
DIQLTQSPSFLSASVGDRVTITCWASQDISSYLAWYQQKPGKAPKLLIYAASTFQSGVPSRFSGSGSGTEFTLTISNLQPEDFATYYCQQLDSYPLSFGGGTKVEIKR

SEQ ID NO: 18838 - protein, 108 aa, Artificial Sequence
  source: /note="Description of Artificial Sequence: Synthetic polypeptide"
DIQLTQSPSFLSASVGDRVTITCWASQGISDYLAWYQKKPGKAPQLLIYAATTLQSGVPSRFSGSGSGTEFTLTISSLQPEDFATYYCQQLNTYPLTFGGGTKVEIKR

SEQ ID NO: 18839 - protein, 108 aa, Artificial Sequence
  source: /note="Description of Artificial Sequence: Synthetic polypeptide"
DIQLTQSPSFLSASVGDRVTITCWASQGISSFLAWYQQKAGKAPRLLIYAASTLQTGVPSRFSGSGSGTEFTLTISSLQPGDFATYHCQQLNSYPYTFGQGTKLEIKR

SEQ ID NO: 18840 - protein, 108 aa, Artificial Sequence
  source: /note="Description of Artificial Sequence: Synthetic polypeptide"
DIQLTQSPSFLSASVGDRVTITCWASQDITSYLAWYQKKPGKAPKLLIYAASTLQSGVPSRFSGSGSGTEFTLTISSLQPEDFAAYYCQQLNSYPLTFGGGTKVDIKR

SEQ ID NO: 18841 - protein, 108 aa, Artificial Sequence
  source: /note="Description of Artificial Sequence: Synthetic polypeptide"
DIQMTQSPSSVSASVGDRVTITCRASQGISDYLAWYQQKPGKAPKLLIYAASSLQSGVPSRFSGRGSGTDFTLTISTLQPEDFATYYCQQANSFPLTFGGGTKVDIKR

SEQ ID NO: 18842 - protein, 108 aa, Artificial Sequence
  source: /note="Description of Artificial Sequence: Synthetic polypeptide"
DIQLTQSPSFLSASVGDRVTITCWASQGISSYLAWYQQKPGKAPKLLIYGASTLQSGVPSRFSGSGSGTEFTLTISSLQPEDFATYYCQQLNSYPLTFGGGTKVEIKR

SEQ ID NO: 18843 - protein, 108 aa, Artificial Sequence
  source: /note="Description of Artificial Sequence: Synthetic polypeptide"
AIQMTQSPSSLSASVGDRVTITCRASQGIRNDLGWYQQKPGKAPKVLIYAASSLQSGVPSRFSGSGSGTVFTLTISSLQPEDFATYYCLQDYNYPLTFGGGTKVEIKR

SEQ ID NO: 18844 - protein, 114 aa, Artificial Sequence
  source: /note="Description of Artificial Sequence: Synthetic polypeptide"
DIVMTQSPDSLAVSLGERATINCKSSQSVLSSSNDNNYLAWFQQKPGQPPNLLIYWASTRDSGVPDRFSASGSGTDFTLAISSLQAEDVAVYYCHQYYSSPPTFGQGTKVEIKR

SEQ ID NO: 18845 - protein, 107 aa, Artificial Sequence
  source: /note="Description of Artificial Sequence: Synthetic polypeptide"
DIVMTQSPSSVSASVGDRVTITCRASQGVSSWLAWYQQKPGKAPKLLIYTTSSLQSGVPSRFSGSGSGTDFTLTISSLQPEDFATYYCQQSNSFPFTFGPGTKVEIK

SEQ ID NO: 18846 - protein, 108 aa, Artificial Sequence
  source: /note="Description of Artificial Sequence: Synthetic polypeptide"
DIQLTQSPSFLSASVGDRVTITCWASQDISSYLAWYQQKPGKAPKLLIYAASTLQSGVPSRFSGSGSGTEFTLTISSLQPEDFATYYCQQLNSYPLTFGGGTKVEIKR

SEQ ID NO: 18847 - protein, 108 aa, Artificial Sequence
  source: /note="Description of Artificial Sequence: Synthetic polypeptide"
DVVMTQSPSFLSASVGDRVTITCWASQGISSYLAWYQQKPGKAPKLLIYDASTLESGVPSRFSGSGSGTEFTLTISNLQPEDFATYYCQQVNSYPLTFGGGTKVEIKR

SEQ ID NO: 18848 - protein, 113 aa, Artificial Sequence
  source: /note="Description of Artificial Sequence: Synthetic polypeptide"
DIQMTQSPDSLAVSLGERAAINCKSSQSVLYISNNNNYLAWYQQKPGQPPKLLIYWASTRESGVPDRFSGSGSGTDFTLTISSLQAEDVAIYYCQQYYSSPPTFGQGTKVDIK

SEQ ID NO: 18849 - protein, 108 aa, Artificial Sequence
  source: /note="Description of Artificial Sequence: Synthetic polypeptide"
DIQLTQSPSFLSASVGDRVTITCWASQDISSYLAWYQQKPGKAPKLLIYGASTLESGVPSRFSGSGSGTEFTLTISSLQPEDVATYYCQQLNTYPLTFGGGTKVEIKR

SEQ ID NO: 18850 - protein, 108 aa, Artificial Sequence
  source: /note="Description of Artificial Sequence: Synthetic polypeptide"
DIQMTQSPSSVSASVGDRVTITCRASQDINSWLAWYQQKPGKAPKLLIYTSSNLQSGVPSRFSGSGSGTDFTLTISSLQPEDFATYYCQQSDSFPFTFGPGTKVDIKR

SEQ ID NO: 18851 - protein, 107 aa, Artificial Sequence
  source: /note="Description of Artificial Sequence: Synthetic polypeptide"
DIVMTQSPSSLSASVGDRVTITCRASQDIRNDLGWYQQKPGKAPKLLIYAASSLQTGVPSRFSGSVSGTDFTLTISSLQPEDFATYYCLQDYTYPLTFGGGTKVEIK

SEQ ID NO: 18852 - protein, 114 aa, Artificial Sequence
  source: /note="Description of Artificial Sequence: Synthetic polypeptide"
DIVMTQSPDSLDVPLGERATINCKSSQSILFGSNNKNYLAWYQQKSGQPPKLLIYWASTRESGVPDRFSGSGSGTDFTLTISSLQAEDVAVYYCQQYYSTPHTFGQGTKVEIKR

SEQ ID NO: 18853 - protein, 108 aa, Artificial Sequence
  source: /note="Description of Artificial Sequence: Synthetic polypeptide"
DIQMTQSPSSVSASVGDRVTITCRASQDISSWLAWYQQKPGRAPKLLIYTASSLQSGVPSRFSGSGSGTDFTLTISSLQPEDFATYFCQQANSFPFTFGPGTKVDIKR

SEQ ID NO: 18854 - protein, 107 aa, Artificial Sequence
  source: /note="Description of Artificial Sequence: Synthetic polypeptide"
DIQLTQSPSFLSASVGDRVTITCWASQDISSYLAWYQQKPGKVPNLLIYGASSLQPGVPSRFSGSGSGTEFTLTISSLQPEDFATYYCQQLNNYPTFGGGTKLEIKR

SEQ ID NO: 18855 - protein, 107 aa, Artificial Sequence
  source: /note="Description of Artificial Sequence: Synthetic polypeptide"
DIQMTQSPSSLSASVGDRVTITCRASQDISSYLAWYQQKPGKVPNLLIYDASSLQSGVPSRFSGSGSGTDFTLTLSSLQPEDFASYYCQNYNSAPYTFGQGTKLEIK

SEQ ID NO: 18856 - protein, 113 aa, Artificial Sequence
  source: /note="Description of Artificial Sequence: Synthetic polypeptide"
DIVMTQSPDSLAVSLGERATINCKSSQSVLYNSDNKKYLAWYQQKPGQPPKLLIYWASTRESGVPDRFSGSGSGTDFTLTISSLQAEDVAVYYCHQYYTTPPTFGQGTKVEIK

SEQ ID NO: 18857 - protein, 107 aa, Artificial Sequence
  source: /note="Description of Artificial Sequence: Synthetic polypeptide"
EIVMTQSPATLSVSPGERATLSCRASQSVSSNLAWYQQKPGQAPRLLIYGASTRATGIPARFSGSGSGTEFTLTISSLQSEDFAVYFCQEYNDWPLTFGGGTKVEIK

SEQ ID NO: 18858 - protein, 107 aa, Artificial Sequence
  source: /note="Description of Artificial Sequence: Synthetic polypeptide"
EILMTQSPATLSVSPGERATLSCRASQSVSSNLAWYQQKPGQAPRLLIYGASTRATGIPARFSGSGSGTEFTLTISSLQSEDFAIYYCQEYNDWPLTFGGGTKVEIK

SEQ ID NO: 18859 - protein, 107 aa, Artificial Sequence
  source: /note="Description of Artificial Sequence: Synthetic polypeptide"
DIQMTQSPSSVSASVGDRVTITCRASQDISSWLAWYQQKPGTAPKFLIYETSSLQSGVPSRFSGSGSGTDFILTISSLQPEDFATYYCQQTDSFPHTFGQGTKLEIR

SEQ ID NO: 18860 - protein, 107 aa, Artificial Sequence
  source: /note="Description of Artificial Sequence: Synthetic polypeptide"
EIVLTQSPGTLSLSPGERATLSCRASQSVSSSYLAWYQQKPGQAPRLLIYGTSSRATGIPDRFSGSGSGTDFTLTISRLEPEDFAVYYCQQYDNSYTFGQGTKLEIK

SEQ ID NO: 18861 - protein, 107 aa, Artificial Sequence
  source: /note="Description of Artificial Sequence: Synthetic polypeptide"
EIVLTQSPDTLSLSPGERATLSCRASQSVSSNYLAWYQQKPGQAPRLLIYSASNRATGIPDRFSGSGSGTDFTLTISRLEPEDFAVYYCQQYDSSYTFGQGTKLEIK

SEQ ID NO: 18862 - protein, 107 aa, Artificial Sequence
  source: /note="Description of Artificial Sequence: Synthetic polypeptide"
DIQMTQSPSSLSASVGDRVTVTCRASQGISNYLAWYQQKPGKVPKLLIYAASTLQSGVPSRFSGSGSGTDFTLTISSLQPEDVASYYCQNYNSAPMTFGQGTKVEIK

SEQ ID NO: 18863 - protein, 107 aa, Artificial Sequence
  source: /note="Description of Artificial Sequence: Synthetic polypeptide"
DIQMTQSPSSLSASVGDRVTITCRASQVIRNDLGWFQQRPGKAPKRLIYAASSLQSEVPSRFSGSGSGTEFTLTITSLQPEDFATYYCLQHNSYPLTFGQGTRLEIK

SEQ ID NO: 18864 - protein, 106 aa, Artificial Sequence
  source: /note="Description of Artificial Sequence: Synthetic polypeptide"
QIVMTQSPATLSVSPGERATLSCRASQSITPYLAWYQQKPGQTPRLLIYGVSTRATGIPARFSGSGSGTEFTLTISSLQSEDFAVYYCQQYDNWYTFGQGTKLEIK

SEQ ID NO: 18865 - protein, 107 aa, Artificial Sequence
  source: /note="Description of Artificial Sequence: Synthetic polypeptide"
AIQMTQSPSSLSASVGDRVTITCRASQDIRNDLGWYQQKPGKAPNLLIYAASSLQSGVPSRFSGSGSGTDFTLTISSLQPEDFATYYCLQDSNYPLTFGGGTKVEIK

SEQ ID NO: 18866 - protein, 109 aa, Artificial Sequence
  source: /note="Description of Artificial Sequence: Synthetic polypeptide"
  MOD_RES (2)..(2): Any amino acid
  MOD_RES (65)..(65): Any amino acid
  MOD_RES (69)..(69): Any amino acid
  MOD_RES (88)..(88): Any amino acid
  MOD_RES (92)..(93): Any amino acid
  MOD_RES (95)..(96): Any amino acid
  MOD_RES (108)..(108): Any amino acid
SXELTQDPAVSVALGQTVRITCQGDSLRSYYASWYQQKPGQAPVLVIYGKNNRPSGIPDRFSGSXSGNXASLTITGAQAEDEADYYCXSRDXXGXXWVFGGGTKVTVXG

SEQ ID NO: 18867 - protein, 109 aa, Artificial Sequence
  source: /note="Description of Artificial Sequence: Synthetic polypeptide"
SSELTQDPAVSVALGQTVRITCQGDSLRSYYASWYQQKPGQAPVLVIYGKNNRPSGIPDRFSGSSSGNTASLTITGAQAEDEADYYCNSRDWPGNQWVFGGGTKVTVLG

SEQ ID NO: 18868 - protein, 109 aa, Artificial Sequence
  source: /note="Description of Artificial Sequence: Synthetic polypeptide"
SSELTQDPAVSVALGQTVRITCQGDSLRSYYASWYQQKPGQAPVLVIYGKNNRPSGIPDRFSGSSSGNTASLTITGAQAEDEADYYCNSRDVPGDQWVFGGGTKVTVLG

SEQ ID NO: 18869 - protein, 109 aa, Artificial Sequence
  source: /note="Description of Artificial Sequence: Synthetic polypeptide"
SSELTQDPAVSVALGQTVRITCQGDSLRSYYASWYQQKPGQAPVLVIYGKNNRPSGIPDRFSGSSSGNTASLTITGAQAEDEADYYCNSRDTPGDQWVFGGGTKVTVLG

SEQ ID NO: 18870 - protein, 109 aa, Artificial Sequence
  source: /note="Description of Artificial Sequence: Synthetic polypeptide"
SSELTQDPAVSVALGQTVRITCQGDSLRSYYASWYQQKPGQAPVLVIYGKNNRPSGIPDRFSGSSSGNTASLTITGAQAEDEADYYCNSRDTPGNKWVFGGGTKVTVIG

SEQ ID NO: 18871 - protein, 109 aa, Artificial Sequence
  source: /note="Description of Artificial Sequence: Synthetic polypeptide"
SSELTQDPAVSVALGQTVRITCQGDSLRSYYASWYQQKPGQAPVLVIYGKNNRPSGIPDRFSGSSSGNTASLTITGAQAEDEADYYCESRDSPGNQWVFGGGTKVTVLG

SEQ ID NO: 18872 - protein, 109 aa, Artificial Sequence
  source: /note="Description of Artificial Sequence: Synthetic polypeptide"
SSELTQDPAVSVALGQTVRITCQGDSLRSYYASWYQQKPGQAPVLVIYGKNNRPSGIPDRFSGSSSGNTASLTITGAQAEDEADYYCMSRDSPGNQWVFGGGTKVTVLG

SEQ ID NO: 18873 - protein, 109 aa, Artificial Sequence
  source: /note="Description of Artificial Sequence: Synthetic polypeptide"
SSELTQDPAVSVALGQTVRITCQGDSLRSYYASWYQQKPGQAPVLVIYGKNNRPSGIPDRFSGSSSGNTASLTITGAQAEDEADYYCMSRDHPGNQWVFGGGTKVTVLG

SEQ ID NO: 18874 - protein, 109 aa, Artificial Sequence
  source: /note="Description of Artificial Sequence: Synthetic polypeptide"
SYELTQDPAVSVALGQTVRITCQGDSLRSYYASWYQQKPGQAPVLVIYGKNNRPSGIPDRFSGSTSGNSASLTITGAQAEDEADYYCNSRDSPGNQWVFGGGTKVTVLG

SEQ ID NO: 18875 - protein, 109 aa, Artificial Sequence
  source: /note="Description of Artificial Sequence: Synthetic polypeptide"
SYELTQDPAVSVALGQTVRITCQGDSLRSYYASWYQQKPGQAPVLVIYGKNNRPSGIPDRFSGSTSGNSASLTITGAQAEDEADYYCNSRDSSGNHWVFGGGTKVTVLG

SEQ ID NO: 18876 - protein, 109 aa, Artificial Sequence
  source: /note="Description of Artificial Sequence: Synthetic polypeptide"
SSELTQDPAVSVALGQTVRITCQGDSLRSYYASWYQQKPGQAPVLVIYGKNNRPSGIPDRFSGSSSGNTASLTITGAQAEDEADYYCNSRDYPGNSWVFGGGTKVTVLG

SEQ ID NO: 18877 - protein, 109 aa, Artificial Sequence
  source: /note="Description of Artificial Sequence: Synthetic polypeptide"
SSELTQDPAVSVALGQTVRITCQGDSLRSYYASWYQQKPGQAPVLVIYGKNNRPSGIPDRFSGSSSGNTASLTITGAQAEDEADYYCESRDSPGNVWVFGGGTKVTVLG

SEQ ID NO: 18878 - protein, 109 aa, Artificial Sequence
  source: /note="Description of Artificial Sequence: Synthetic polypeptide"
SSELTQDPAVSVALGQTVRITCQGDSLRSYYASWYQQKPGQAPVLVIYGKNNRPSGIPDRFSGSSSGNTASLTITGAQAEDEADYYCNSRDSPGNRWVFGGGTKVTVLG

SEQ ID NO: 18879 - protein, 109 aa, Artificial Sequence
  source: /note="Description of Artificial Sequence: Synthetic polypeptide"
SSELTQDPAVSVALGQTVRITCQGDSLRSYYASWYQQKPGQAPVLVIYGKNNRPSGIPDRFSGSSSGNTASLTITGAQAEDEADYYCNSRDTPGNTWVFGGGTKVTVLG

SEQ ID NO: 18880 - protein, 109 aa, Artificial Sequence
  source: /note="Description of Artificial Sequence: Synthetic polypeptide"
SSELTQDPAVSVALGQTVRITCQGDSLRSYYASWYQQKPGQAPVLVIYGKNNRPSGIPDRFSGSSSGNTASLTITGAQAEDEADYYCNSRDTPGNKWVFGGGTKVTVLG

SEQ ID NO: 18881 - protein, 109 aa, Artificial Sequence
  source: /note="Description of Artificial Sequence: Synthetic polypeptide"
SSELTQDPAVSVALGQTVRITCQGDSLRSYYASWYQQKPGQAPVLVIYGKNNRPSGIPDRFSGSSSGNTASLTITGAQAEDEADYYCNSRDVPGNQWVFGGGTKVTVLG

SEQ ID NO: 18882 - protein, 109 aa, Artificial Sequence
  source: /note="Description of Artificial Sequence: Synthetic polypeptide"
SSELTQDPAVSVALGQTVRITCQGDSLRSYYASWYQQKPGQAPVLVIYGKNNRPSGIPDRFSGSSSGNTASLTITGAQAEDEADYYCNSRDNPGNQWVFGGGTKVTVLG

SEQ ID NO: 18883 - protein, 109 aa, Artificial Sequence
  source: /note="Description of Artificial Sequence: Synthetic polypeptide"
SSELTQDPAVSVALGQTVRITCQGDSLRSYYASWYQQKPGQAPVLVIYGKNNRPSGIPDRFSGSSSGNTASLTITGAQAEDEADYYCNSRDHPGNNWVFGGGTKVTVLG

SEQ ID NO: 18884 - protein, 109 aa, Artificial Sequence
  source: /note="Description of Artificial Sequence: Synthetic polypeptide"
SSELTQDPAVSVALGQTVRITCQGDSLRSYYASWYQQKPGQAPVLVIYGKNNRPSGIPDRFSGSSSGNTASLTITGAQAEDEADYYCNSRDYPGNQWVFGGGTKVTVIG

SEQ ID NO: 18885 - protein, 109 aa, Artificial Sequence
  source: /note="Description of Artificial Sequence: Synthetic polypeptide"
SSELTQDPAVSVALGQTVRITCQGDSLRSYYASWYQQKPGQAPVLVIYGKNNRPSGIPDRFSGSSSGNTASLTITGAQAEDEADYYCNSRDYPGDKWVFGGGTKVTVLG

SEQ ID NO: 18886 - protein, 109 aa, Artificial Sequence
  source: /note="Description of Artificial Sequence: Synthetic polypeptide"
SSELTQDPAVSVALGQTVRITCQGDSLRSYYASWYQQKPGQAPVLVIYGKNNRPSGIPDRFSGSSSGNTASLTITGAQAEDEADYYCNSRDSPGDQWVFGGGTKVTVLG

SEQ ID NO: 18887 - protein, 109 aa, Artificial Sequence
  source: /note="Description of Artificial Sequence: Synthetic polypeptide"
SSELTQDPAVSVALGQTVRITCQGDSLRSYYASWYQQKPGQAPVLVIYGKNNRPSGIPDRFSGSSSGNTASLTITGAQAEDEADYYCMSRDYPGNNWVFGGGTKVTVLG

SEQ ID NO: 18888 - protein, 109 aa, Artificial Sequence
  source: /note="Description of Artificial Sequence: Synthetic polypeptide"
SSELTQDPAVSVALGQTVRITCQGDSLRSYYASWYQQKPGQAPVLVIYGKNNRPSGIPDRFSGSSSGNTASLTITGAQAEDEADYYCMSRDYPGNHWVFGGGTKVTVLG

SEQ ID NO: 18889 - protein, 109 aa, Artificial Sequence
  source: /note="Description of Artificial Sequence: Synthetic polypeptide"
SSELTQDPAVSVALGQTVRITCQGDSLRSYYASWYQQKPGQAPVLVIYGKNNRPSGIPDRFSGSSSGNTASLTITGAQAEDEADYYCESRDAPGDQWVFGGGTKVTVLG

SEQ ID NO: 18890 - protein, 109 aa, Artificial Sequence
  source: /note="Description of Artificial Sequence: Synthetic polypeptide"
SSELTQDPAVSVALGQTVRITCQGDSLRSYYASWYQQKPGQAPVLVIYGKNNRPSGIPDRFSGSSSGNTASLTITGAQAEDEADYYCNSRDSPGNQWVFGGGTKVTVLG

SEQ ID NO: 18891 - protein, 109 aa, Artificial Sequence
  source: /note="Description of Artificial Sequence: Synthetic polypeptide"
SSELTQDPAVSVALGQTVRITCQGDSLRSYYASWYQQKPGQAPVLVIYGKNNRPSGIPDRFSGSSSGNTASLTITGAQAEDEADYYCNSRDSPGNNWVFGGGTKVTVLG

SEQ ID NO: 18892 - protein, 109 aa, Artificial Sequence
  source: /note="Description of Artificial Sequence: Synthetic polypeptide"
SSELTQDPAVSVALGQTVRITCQGDSLRSYYASWYQQKPGQAPVLVIYGKNNRPSGIPDRFSGSSSGNTASLTITGAQAEDEADYYCNSRDYPGNNWVFGGGTKVTVLG

SEQ ID NO: 18893 - protein, 108 aa, Artificial Sequence
  source: /note="Description of Artificial Sequence: Synthetic polypeptide"
EIVLTQSPGTLSLSPGERATLSCRASQSVSSSYLAWYQQKPGQAPRLLIYGASSRATGIPDRFSGSGSGTDFTLTISRLEPEDFAVYYCQQGLNIPSTFGQGTKVEIK

SEQ ID NO: 18894 - protein, 108 aa, Artificial Sequence
  source: /note="Description of Artificial Sequence: Synthetic polypeptide"
EIVLTQSPGTLSLSPGERATLSCRASQSVSSSYLAWYQQKPGQAPRLLIYGASSRATGIPDRFSGSGSGTDFTLTISRLEPEDFAVYYCQQGHIIPPTFGQGTKVEIK

SEQ ID NO: 18895 - protein, 108 aa, Artificial Sequence
  source: /note="Description of Artificial Sequence: Synthetic polypeptide"
EIVLTQSPGTLSLSPGERATLSCRASQSVSSNYLAWYQQKPGQAPRLLIYGASIRATGIPDRFSGSGSGTDFTLTISRLEPEDFAVYYCQQGNQIPPTFGQGTKVEIK

SEQ ID NO: 18896 - protein, 108 aa, Artificial Sequence
  source: /note="Description of Artificial Sequence: Synthetic polypeptide"
EIVLTQSPGTLSLSPGERATLSCRASQSVSSSYLAWYQQKPGQAPRLLIYGASSRATGIPDRFSGSGSGTDFTLTISRLEPEDFAVYYCQQGQQIPPTFGQGTKVEIK

SEQ ID NO: 18897 - protein, 108 aa, Artificial Sequence
  source: /note="Description of Artificial Sequence: Synthetic polypeptide"
EIVLTQSPGTLSLSPGERATLSCRASQSVSSSYLAWYQQKPGQAPRLLIYGASSRATGIPDRFSGSGSGTDFTLTISRLEPEDFAVYYCQQGQLIPPTFGQGTKVEIK

SEQ ID NO: 18898 - protein, 108 aa, Artificial Sequence
  source: /note="Description of Artificial Sequence: Synthetic polypeptide"
EIVLTQSPGTLSLYPGERATLSCRASQSVTSSYLAWYQQKPGQAPRLLINVGSRRATGIPDRFSGSGSGTDFTLTISRLEPEDFAVYYCQQGIMLPPTFGQGTKVEIK

SEQ ID NO: 18899 - protein, 108 aa, Artificial Sequence
  source: /note="Description of Artificial Sequence: Synthetic polypeptide"
EIVLTQSPGTLSLSPGERATLSCRASQSVTSSYLAWYQQKPGQAPRLLINVGSRRATGIPDRFSGSGSGTDFTLTISRLEPEDFAVYYCQQGIMLPPTFGQGTKVEIK

SEQ ID NO: 18900 - protein, 108 aa, Artificial Sequence
  source: /note="Description of Artificial Sequence: Synthetic polypeptide"
EIVLTQSPGTLSLSPGERATLSCRASQSVSSNYLAWYQQKPGQAPRLLIYGAYIRATGIPDRFSGSGSGTDFTLTISRLEPEDFAVYYCQQGQVIPPTFGQGTKVEIK

SEQ ID NO: 18901 - protein, 108 aa, Artificial Sequence
  source: /note="Description of Artificial Sequence: Synthetic polypeptide"
EIVLTQSPGTLSLSPGERATLSCRASQSVSSSYLAWYQQKPGQAPRLLIYGASSRATGIPDRFSGSGSGTDFTLTISRLEPEDFAVYYCQQGQVIPPTFGQGTKVEIK

SEQ ID NO: 18902 - protein, 108 aa, Artificial Sequence
  source: /note="Description of Artificial Sequence: Synthetic polypeptide"
EIVLTQSPGTLSLSPGERATLSCRASQSVSSNYLAWYQQKPGQAPRLLIQGASSRATGIPDRFSGSGSGTDFTLTISRLEPEDFAVYYCQQGQVIPPTFGQGTKVEIK

SEQ ID NO: 18903 - protein, 108 aa, Artificial Sequence
  source: /note="Description of Artificial Sequence: Synthetic polypeptide"
EIVLTQSPGTLSLSPGERATLSCRASQSVSRSYLAWYQQKPGQAPRLLIIGASTRATGIPDRFSGSGSGTDFTLTISRLEPEDFAVYYCQQGQVIPPTFGQGTKVEIK

SEQ ID NO: 18904 - protein, 108 aa, Artificial Sequence
  source: /note="Description of Artificial Sequence: Synthetic polypeptide"
EIVLTQSPGTLSLSPGERATLSCRASQSVSSSYLAWYQQKPGQAPRLLIYGASSRATGIPDRFSGSGSGTDFTLTISRLEPEDFAVYYCQQGNQIPPTFGQGTKVEIK

SEQ ID NO: 18905 - protein, 108 aa, Artificial Sequence
  source: /note="Description of Artificial Sequence: Synthetic polypeptide"
EIVLTQSPGTLSLSPGERATLSCRASQSVSRNYLAWYQQKPGQAPRLLIYGASSRATGIPDRFSGSGSGTDFTLTISRLEPEDFAVYYCQQSLGYPPTFGQGTKVEIK

SEQ ID NO: 18906 - protein, 112 aa, Artificial Sequence
  source: /note="Description of Artificial Sequence: Synthetic polypeptide"
DIQMTQSPSSLSASVGDRVTITCRASKSVSTSAYSYMHWYQQKPGKAPKLLIYLASNLESGVPSRFSGSGSGTDFTLTISSLQPEDFATYYCQHSRELPYTFGQGTKLEIKR

SEQ ID NO: 18907 - protein, 108 aa, Artificial Sequence
  source: /note="Description of Artificial Sequence: Synthetic polypeptide"
EIVLTQSPGTLSLSPGERATLSCRASQSVTSSYLAWYQQKPGQAPRLLINVGSRRATGTPDRFSGSGSGTDFTLTISRLEPEDFAVYYCQQAIMLPPTFGQGTKVEIK

SEQ ID NO: 18908 - protein, 107 aa, Homo sapiens
ETTLTQSPGTLSLSPGERATLSCRASQTVTRNYLAWYQQKPGQAPRLLMYGASNRAAGVPDRFSGSGSGTDFTLTISRLEPEDFAVYYCQQFGSPYTFGQGTKVEIK

SEQ ID NO: 18909 - protein, 112 aa, Homo sapiens
DVVMTQSPLSLPVTLGQPASISCRSSQSLLHSNGYNYLDWYLQRPGQSPHLLIFLGSNRASGVPDRFSGSGSGTDFTLKISRVEAEDVGIYYCMQALQTPPTFGQGTKVEIK

SEQ ID NO: 18910 - protein, 133 aa, Homo sapiens
MDSQAQVLMLLPLWVSGTCGDIVMSQSPSSLAVSVGEKVTMSCKSSQSLLYSRNQKNYLAWFQQKPGQSPKLLIFWASTRESGVPDRFTGSGFGTDFNLTISSVQAEDLAVYDCQQYFSYPLTFGAGTKLELK

SEQ ID NO: 18911 - protein, 113 aa, Homo sapiens; identical to SEQ ID NO: 10019

SEQ ID NO: 18912 - protein, 113 aa, Homo sapiens
DIVMTQSPDSLAVSLGERATINCKSSQSLLYSRNQKNYLAWFQQKPGQPPKLLIFWASTRESGVPDRFSGSGFGTDFTLTISSLQAEDVAVYDCQQYFSYPLTFGQGTKVEIK

SEQ ID NO: 18913 - protein, 113 aa, Homo sapiens; identical to SEQ ID NO: 10021

SEQ ID NO: 18914 - protein, 118 aa, Homo sapiens
DIQMTQSPSSLSASTGDRVTITCRASQDISSYLAWYQQAPGKAPHLLMSGATTLQTGVPSRFSGSGSGTDFTLTITSLQSEDFATYYCQQYYIYPPTFGQGTRVEIKRTVAAPSVFAA

SEQ ID NO: 18915 - protein, 118 aa, Artificial Sequence
  source: /note="Description of Artificial Sequence: Synthetic polypeptide"
DIQMTQSPSSLSASTGDRVTITCRASQDISSYLAWYQQAPGKAPHLLMSGATTLQTGVPSRFSGSGSGTDFTLTISSLQAEDVAVYYCQQYYRTPFTFGQGTKLEIKRTVAAPSVFAA

SEQ ID NO: 18916 - protein, 137 aa, Mus musculus
MDFQVQIFSFLLISASVIISRGQIVLTQSPAIMSASPGEKVTMTCSASSGVNFMHWYQQKSGTSPKRWIFDTSKLASGVPARFSGSGSGTSYSLTISSMEAEDAATYYCQQWSFNPPTFGGGTKLEIKRADAAPTVS

SEQ ID NO: 18917 - protein, 107 aa, Artificial Sequence
  source: /note="Description of Artificial Sequence: Synthetic polypeptide"
QIVLTQSPATLSLSPGERATLSCSASSGVNFMHWYQQKPGQAPRRLIFDTSKLASGIPARFSGSGSGTDYTLTISSLEPEDFAVYYCQQWSFNPPTFGQGTKVEIKR

SEQ ID NO: 18918 - protein, 107 aa, Artificial Sequence
  source: /note="Description of Artificial Sequence: Synthetic polypeptide"
QIVLTQSPATLSLSPGERATLSCSASSGVNFMHWYQQKPGQAPKRLIFDTSKLASGVPARFSGSGSGTDYTLTISSLEPEDFAVYYCQQWSFNPPTFGQGTKVEIKR

SEQ ID NO: 18919 - protein, 108 aa, Artificial Sequence
  source: /note="Description of Artificial Sequence: Synthetic polypeptide"
EIVLTQSPGTLSLSPGEKATLSCRASQSVSVAFLAWYQQKPGQAPRLLIYGASSRATGIPDRFSGSGSGTDFTLTISRLEPEDFAVYYCQQMRGRPPTFGQGTKVEIK

SEQ ID NO: 18920 - protein, 108 aa, Artificial Sequence
  source: /note="Description of Artificial Sequence: Synthetic polypeptide"
EIVLTQSPGTLSLSPGEKATLSCRASQSVSLAFLAWYQQKPGQAPRLLIYGASSRATGIPDRFSGSGSGTDFTLTISRLEPEDFAVYYCQQMRGRPPTFGQGTKVEIK

SEQ ID NO: 18921 - protein, 108 aa, Artificial Sequence
  source: /note="Description of Artificial Sequence: Synthetic polypeptide"
EIVLTQSPGTLSLSPGEKATLSCRASQSVSLHFLAWYQQKPGQAPRLLIYGASSRATGIPDRFSGSGSGTDFTLTISRLEPEDFAVYYCQQMRGRPPTFGQGTKVEIK

SEQ ID NO: 18922 - protein, 108 aa, Artificial Sequence
  source: /note="Description of Artificial Sequence: Synthetic polypeptide"
EIVLTQSPGTLSLSPGEKATLSCRASQSVSLPFLAWYQQKPGQAPRLLIYGASSRATGIPDRFSGSGSGTDFTLTISRLEPEDFAVYYCQQMRGRPPTFGQGTKVEIK

SEQ ID NO: 18923 - protein, 108 aa, Artificial Sequence
  source: /note="Description of Artificial Sequence: Synthetic polypeptide"
EIVLTQSPGTLSLSPGEKATLSCRASQSVSNAFLAWYQQKPGQAPRLLIYGASSRATGIPDRFSGSGSGTDFTLTISRLEPEDFAVYYCQQMRGRPPTFGQGTKVEIK

SEQ ID NO: 18924 - protein, 108 aa, Artificial Sequence
  source: /note="Description of Artificial Sequence: Synthetic polypeptide"
EIVLTQSPGTLSLSPGEKATLSCRASQSVSLAHLAWYQQKPGQAPRLLIYGASSRATGIPDRFSGSGSGTDFTLTISRLEPEDFAVYYCQQMRGRPPTFGQGTKVEIK

SEQ ID NO: 18925 - protein, 108 aa, Artificial Sequence
  source: /note="Description of Artificial Sequence: Synthetic polypeptide"
EIVLTQSPGTLSLSPGEKATLSCRASQSVSSSFLAWYQQKPGQAPRLLIYGASSRATGIPDRFSGSGSGTDFTLTISRLEPEDFAVYYCQQMRGRPPTFGQGTKVEIK

SEQ ID NO: 18926 - protein, 108 aa, Artificial Sequence
  source: /note="Description of Artificial Sequence: Synthetic polypeptide"
EIVLTQSPGTLSLSPGEKATLSCRASQSVSAPFLAWYQQKPGQAPRLLIYGASSRATGIPDRFSGSGSGTDFTLTISRLEPEDFAVYYCQQMRGRPPTFGQGTKVEIK

SEQ ID NO: 18927 - protein, 108 aa, Artificial Sequence
  source: /note="Description of Artificial Sequence: Synthetic polypeptide"
EIVLTQSPGTLSLSPGEKATLSCRASQSVSMPFLAWYQQKPGQAPRLLIYGASSRATGIPDRFSGSGSGTDFTLTISRLEPEDFAVYYCQQMRGRPPTFGQGTKVEIK

SEQ ID NO: 18928 - protein, 108 aa, Artificial Sequence
  source: /note="Description of Artificial Sequence: Synthetic polypeptide"
EIVLTQSPGTLSLSPGERATLSCRASQSVSMPFLAWYQQKPGQAPRLLIYGASSRATGIPDRFSGSGSGTDFTLTISRLEPEDFAVYYCQQMRGRPPTFGQGTKVEIK

SEQ ID NO: 18929 - protein, 108 aa, Artificial Sequence
  source: /note="Description of Artificial Sequence: Synthetic polypeptide"
EIVLTQSPGTLSLSPGEKATLSCRASQSVSTAFLAWYQQKPGQAPRLLIYGASSRATGIPDRFSGSGSGTDFTLTISRLEPEDFAVYYCQQMRGRPPTFGQGTKVEIK

SEQ ID NO: 18930 - protein, 108 aa, Artificial Sequence
  source: /note="Description of Artificial Sequence: Synthetic polypeptide"
EIVLTQSPGTLSLSPGEKATLSCRASQSVSSAWLAWYQQKPGQAPRLLIYGASSRATGIPDRFSGSGSGTDFTLTISRLEPEDFAVYYCQQMRGRPPTFGQGTKVEIK

SEQ ID NO: 18931 - protein, 108 aa, Artificial Sequence
  source: /note="Description of Artificial Sequence: Synthetic polypeptide"
SELTQDPAVSVALGQTVRITCQGDSLRSYYASWYQQKPGQAPVLVIYGKNNRPSGIPDRFSGSSSGNTASLTITGAQAEDEADYYCNSSPKAPRPVVFGGGTKLTVLG

SEQ ID NO: 18932 - protein, 108 aa, Artificial Sequence
  source: /note="Description of Artificial Sequence: Synthetic polypeptide"
SELTQDPAVSVALGQTVRITCQGDSLRSYYASWYQQKPGQAPVLVIYGKNNRPSGIPDRFSGSSSGNTASLTITGAQAEDEADYYCNSSPLYNPYVVFGGGTKLTVLG

SEQ ID NO: 18933 - protein, 107 aa, Artificial Sequence
  source: /note="Description of Artificial Sequence: Synthetic polypeptide"
DIVLTQSPATLSVTPGDSVSLSCRASQSISNNLHWYQQKSHESPRLLIKYASQSISGIPSRFSGSGSGTDFTLSINSVETEDFGVYFCQQSNTWPYTFGGGTKLEIK

SEQ ID NO: 18934 - protein, 113 aa, Artificial Sequence
  source: /note="Description of Artificial Sequence: Synthetic polypeptide"
DIVMTQSPSSLSVSAGEKVTMSCKSSQSLLNSGNQKNYMAWYQQKPGQPPKLLIYGASTRESGVPDRFTGSGSGTDFTLTISSVQAEDLAVYYCQNDHSYPLTFGAGTKLELK

SEQ ID NO: 18935 - protein, 113 aa, Artificial Sequence; identical to SEQ ID NO: 9590
  source: /note="Description of Artificial Sequence: Synthetic polypeptide"

SEQ ID NO: 18936 - protein, 108 aa, Artificial Sequence
  source: /note="Description of Artificial Sequence: Synthetic polypeptide"
ENVLTQSPAIMSASPGEKVTMTCRASSSVSSSYLHWYQQKSGASPKVWIYSTSNLASGVPGRFSGSGSGTSYSLTISSVEAEDAATYYCQQYSGYPITFGAGTKVEVK

SEQ ID NO: 18937 - protein, 108 aa, Artificial Sequence
  source: /note="Description of Artificial Sequence: Synthetic polypeptide"
ENQMTQSPSSLSASVGDRVTMTCRASSSVSSSYLHWYQQKSGKAPKVWIYSTSNLASGVPSRFSGSGSGTDYTLTISSLQPEDFATYYCQQYSGYPITFGQGTKVEIK

SEQ ID NO: 18938 - protein, 112 aa, Artificial Sequence
  source: /note="Description of Artificial Sequence: Synthetic polypeptide"
DVVMTQSPLSLPVTPGEPASISCRSSQSLLHRNGYNYLDWYLQKPGQSPQLLIYLGSNRASGVPDRFSGSGSGTDFTLKISRVEAEDVGVYYCMQALQTPFTFGPGTKVDIK

SEQ ID NO: 18939 - protein, 112 aa, Artificial Sequence
  source: /note="Description of Artificial Sequence: Synthetic polypeptide"
DIQVTQSPLSLPVTPGEPASISCRSSQSLLHSNGYNYLDWYLQKPGQSPQLLIYLGSNRASGVPDRFSGSGSGTDFTLKISRVEAEDVGVYYCMQALQTPFTFGPGIKVDIK

SEQ ID NO: 18940 - protein, 113 aa, Artificial Sequence
  source: /note="Description of Artificial Sequence: Synthetic polypeptide"
DIQMTQSPDSLAVSLGERATINCKSSQSVLYSPNKKNYLAWYQQKPGQPPSLLFYWASTRESGVPDRFSGSGSGTDFTLTISSLQAEDVAVYYCQQYYSTPPTFGQGTKVEIK

SEQ ID NO: 18941 - protein, 113 aa, Artificial Sequence
  source: /note="Description of Artificial Sequence: Synthetic polypeptide"
DVVMTQTPDSLAVSLGERATINCKSSQSVLYISNNKNYLAWYQQKPGQPPKLLIYWASTRESGVPDRFSGSGSGTDFTLTISSLQAEDVAVYYCQHYYSTPPTFGQGTKLEIK

SEQ ID NO: 18942 - protein, 113 aa, Artificial Sequence
  source: /note="Description of Artificial Sequence: Synthetic polypeptide"
DIRVTQSPDSLAVSLGERATINCKSSQSVLYSSNNKNYLAWYQQKPGQPPKLLIYWASTRESGVPDRFSGSGSGTDFTLTISSLQAEDVAVYYCQQYYSTPPTFGQGTKVEIK

SEQ ID NO: 18943 - protein, 113 aa, Artificial Sequence
  source: /note="Description of Artificial Sequence: Synthetic polypeptide"
DIQLTQSPDSLAVSLGERATINCKSSQSILYSSNNKNYLAWYQQKPGQPPKLLIYWASTRESGVPDRFSGSGSGTDFTLTISSLQAEDVAVYYCQQYYSTPPTFGQGTKVEIK

SEQ ID NO: 18944 - protein, 112 aa, Artificial Sequence
  source: /note="Description of Artificial Sequence: Synthetic polypeptide"
EIVMTQSPLSLPVTPGEPASISCTSSQSLLHSNGYNYLDWYLQKPGQSPQLLIYLGSNRASGVPDRFSGSGSGTDFTLKISTVEAEDVGVYYCMQALQTPWTFGQGTKVEIK

SEQ ID NO: 18945 - protein, 112 aa, Artificial Sequence
  source: /note="Description of Artificial Sequence: Synthetic polypeptide"
EIVLTQSPLSLSVTPGEPASISCRSSQSLLHRNGYNYFDWYLQQPGQSPQLLIYLGSNRASGVPDRFSGSGSGTDFTLKISRVEAEDVGVYYCMQALQTPYTFGQGTKLEIK

SEQ ID NO: 18946 - protein, 107 aa, Artificial Sequence
  source: /note="Description of Artificial Sequence: Synthetic polypeptide"
DIRMTQSPSSLSASVGDRVTITCRASQGISNYLAWYQQKPGKVPKFLIYAASTLQSGVPSRFSGSGSGTDFTLTISSLQPEDVATYYCQKYNSAPWTFGQGTKVEIK

SEQ ID NO: 18947 - protein, 113 aa, Artificial Sequence
  source: /note="Description of Artificial Sequence: Synthetic polypeptide"
DIVLTQSPDSLAVSLGERATINCKSSQSVLYSSNNKNYLAWYQQKPGQPPKLLIYWASTRESGVPDRFSGSGSGTDFTLTISSLQAEDVAVYYCQQYYSTPPTFGQGTKLEIK

SEQ ID NO: 18948 - protein, 102 aa, Homo sapiens
EIVLTQSPLSLPVTLGQPASISCRSSQSLVYSDGNTYLNWFQQRPGQSPRRLIYKVSNRDSGVPDRFSGSGSGTDFTLKISRVEAEDVGVYYCMQGTHWPRT

SEQ ID NO: 18949 - protein, 108 aa, Artificial Sequence
  source: /note="Description of Artificial Sequence: Synthetic polypeptide"
DIQMTQSPSSLSASVGDRVTITCSASQDISNYLNWYQQKPDKAVKLLIFYSSNLHSGVPSRFSGGGSGTDYTLTISSLQPEDIATYFCHQYSKLPWTFGQGTKVEIKR

SEQ ID NO: 18950 - protein, 108 aa, Mus musculus
DIQMTQTASSLPASLGDRVTISCSASQDISNYLNWYQQKPDGTVKLLIFYSSNLHSGVPSRFSGGGSGTDYSLTISNLEPEDIATYFCHQYSKLPWTFGGGTKLEIKR

SEQ ID NO: 18951 - protein, 92 aa, Artificial Sequence
  source: /note="Description of Artificial Sequence: Synthetic polypeptide"
DRVTITCSASQDISNYLNWYQQKPDKAPKLLIFYSSNLHSGVPSRFSGGGSGTDYTLTISSLQPEDIATYFCHQYSKLPWTFGQGTKVEIKR

SEQ ID NO: 18952 - protein, 113 aa, Artificial Sequence
  source: /note="Description of Artificial Sequence: Synthetic polypeptide"
DIVMTQSPDSLAVSLGERATINCKSSQSVLYSSNKKNYLAWYQQKPGQPPKLLIYWASTRESGVPDRFTGSGSGTDFTLTISSLQAEDVAVYYCQQYYSTPLTFGPGTKVDIK

SEQ ID NO: 18953 - protein, 92 aa, Mus musculus
DRVTISCSASQDISNYLNWYQQKPDGTVKLLIFYSSNLHSGVPSRFSGGGSGTDYSLTISNLEPEDIATYFCHQYSKLPWTFGGGTKLEIKR

SEQ ID NO: 18954 - protein, 128 aa, Artificial Sequence
  source: /note="Description of Artificial Sequence: Synthetic polypeptide"
MMAPVQLLGLLLIWLPAMRCDIQMTQSPSFLSASVGDRVTINCKASQNINKYLNWYQQKLGEAPKRLIYNTNNLQTGIPSRFSGSGSGTDYTLTISSLQPEDFATYFCLQHNSFPNTFGAGTKLELKR

SEQ ID NO: 18955 - protein, 129 aa, Artificial Sequence
  source: /note="Description of Artificial Sequence: Synthetic polypeptide"
MHFQVQIFSFLLISASVIMSRGQIVLTQSPAIMSASPGEKVTITCSASSSVSYMHWFQQKPGTSPKLWIYSTSNLASGVPARFSGSGSGTSYSLTISRMEAEDAATYYCQQRSSYPYTFGGGTKLEIKR

SEQ ID NO: 18956 - protein, 130 aa, Artificial Sequence
  source: /note="Description of Artificial Sequence: Synthetic polypeptide"
MHFQVQIFSFLLISASVIMSRGDIQLTQSPSSLSASPGDRVTITCSASSSVSYMHWFQQKPGKAPKLWIYSTSNLASGVPSRFSGSGSGTSYSLTISRLQPEDIATYYCQQRSSYPYTFGGGTKVEIKRT

SEQ ID NO: 18957 - protein, 130 aa, Artificial Sequence
  source: /note="Description of Artificial Sequence: Synthetic polypeptide"
MHFQVQIFSFLLISASVIMSRGDIQLTQSPSSLSASPGDRVTITCSASSSVSYMHWFQQKPGKAPKLWIYSTSNLASGVPARFSGSGSGTSYSLTISRLQPEDIATYYCQQRSSYPYTFGGGTKVEIKRT

SEQ ID NO: 18958 - protein, 107 aa, Mus musculus; identical to SEQ ID NO: 15954

SEQ ID NO: 18959 - protein, 108 aa, Artificial Sequence; identical to SEQ ID NO: 15957
  source: /note="Description of Artificial Sequence: Synthetic polypeptide"

SEQ ID NO: 18960 - protein, 108 aa, Artificial Sequence; identical to SEQ ID NO: 15958
  source: /note="Description of Artificial Sequence: Synthetic polypeptide"

SEQ ID NO: 18961 - protein, 108 aa, Artificial Sequence; identical to SEQ ID NO: 15959
  source: /note="Description of Artificial Sequence: Synthetic polypeptide"

SEQ ID NO: 18962 - protein, 108 aa, Artificial Sequence; identical to SEQ ID NO: 15961
  source: /note="Description of Artificial Sequence: Synthetic polypeptide"

SEQ ID NO: 18963 - protein, 108 aa, Artificial Sequence
  source: /note="Description of Artificial Sequence: Synthetic polypeptide"
DIQMTQSPSSLSASVGDRVTITCRASQSISSYLNWYQQKPGKAPKLLIYAASSLQSGVPSRFSGSGSGTDFTLTISSLQPEDFATYYCQQSYSTPNTFGQGTKVEIKR

SEQ ID NO: 18964 - protein, 107 aa, Artificial Sequence; identical to SEQ ID NO: 16024
  source: /note="Description of Artificial Sequence: Synthetic polypeptide"

SEQ ID NO: 18965 - protein, 107 aa, Artificial Sequence; identical to SEQ ID NO: 16036
  source: /note="Description of Artificial Sequence: Synthetic polypeptide"

SEQ ID NO: 18966 - protein, 107 aa, Artificial Sequence; identical to SEQ ID NO: 16040
  source: /note="Description of Artificial Sequence: Synthetic polypeptide"

SEQ ID NO: 18967 - protein, 107 aa, Artificial Sequence; identical to SEQ ID NO: 6073
  source: /note="Description of Artificial Sequence: Synthetic polypeptide"

SEQ ID NO: 18968 - protein, 106 aa, Artificial Sequence
  source: /note="Description of Artificial Sequence: Synthetic polypeptide"
DIQMTQSPSSLSASVGDRVTITCRSSQDISNYLNWYQQKPGKAPKLLIYISRLHSGVPSRFSGSGSGTDFTFTISSLQPEDIATYYCQQGNTLPLTFGGGTKVEIK

SEQ ID NO: 18969 - protein, 107 aa, Artificial Sequence
  source: /note="Description of Artificial Sequence: Synthetic polypeptide"
DIQMTQSPSSLSASVGDRVTITCRASENIYSNLAWYQQKPGKAPKLLIYAATNLADGVPSRFSGSGSGTDFTLTISSLQPEDFATYYCQHFWGTPWTFGQGTKVEIK

SEQ ID NO: 18970 - protein, 106 aa, Artificial Sequence
  source: /note="Description of Artificial Sequence: Synthetic polypeptide"
DIQMTQSPSSLSASVGDRVTITCRSSQDISNYLNWYQQKPGKAVKLLMYISRLHSGVPSRFSGSGSGTDYTFTISSLQPEDIATYYCQQGNTLPLTFGGGTKVEIK

SEQ ID NO: 18971 - protein, 107 aa, Artificial Sequence
  source: /note="Description of Artificial Sequence: Synthetic polypeptide"
DIQMTQSPSSLSASVGDRVTITCRASENIYSNLAWYQQKPGKAPKLLIYAATNLATGVPSRFSGSGSGTDYTLTISSLQPEDFASYYCQHFWGTPWTFGQGTKLEIK

SEQ ID NO: 18972 - protein, 106 aa, Artificial Sequence
  source: /note="Description of Artificial Sequence: Synthetic polypeptide"
DIQMTQSPSSLSASVGDRVTITCRSSQDISNYLNWYQQKPGKAPKLLMYISRLHSGVPSRFSGSGSGTDYTFTISSLQPEDIATYYCQQGNTLPLTFGGGTKVEIK

SEQ ID NO: 18973 - protein, 107 aa, Artificial Sequence [sequence omitted]

SEQ ID NO: 18974 - protein, 107 aa, Artificial Sequence [sequence omitted]

SEQ ID NO: 18975 - protein, 108 aa, Artificial Sequence
  source: /note="Description of Artificial Sequence: Synthetic polypeptide"
DIQLTQSPSSLSASVGDRVTITCSASQDISNYLNWYQQKPGKAPKVLIYFTSSLHSGVPSRFSGSGSGTDFTLTISSLQPEDFATYYCQQYSTVPWTFGQGTKVEIKR

SEQ ID NO: 18976 - protein, 106 aa, Artificial Sequence
  source: /note="Description of Artificial Sequence: Synthetic polypeptide"
EIVLTQSPATLSLSPGERATLSCSASSSVTYVHWYQQKPGQAPRLLIYDTSKLASGIPARFSGSGSGTDFTLTISSLEPEDFAVYYCFQGSGYPLTFGSGTKLEMR

SEQ ID NO: 18977 - protein, 110 aa, Artificial Sequence [sequence omitted]

SEQ ID NO: 18978 - protein, 107 aa, Artificial Sequence
  source: /note="Description of Artificial Sequence: Synthetic polypeptide"
DIQMTQSPSSLSASVGDRVTITCRPSQDISNYVNWYQQKPGKAPKLLIYHTSRLHSGVPSRFSGSGSGTDFTFTISSLQPEDIATYYCQQGITLPWTFGQGTKVEIK

SEQ ID NO: 18979 - protein, 107 aa, Artificial Sequence
  source: /note="Description of Artificial Sequence: Synthetic polypeptide"
DIQMTQSPSSLSASVGDRVTITCRASQDINNYLNWYQQKPGKAPKLLIYYTSRLQSGVPSRFSGSGSGTDFTLTISSLQPEDFATYYCQQSETLPWTFGQGTKVEIK

SEQ ID NO: 18980 - protein, 107 aa, Artificial Sequence
  source: /note="Description of Artificial Sequence: Synthetic polypeptide"
DIQMTQSPSSLSASVGDRVTITCRPSQDISNYVNWFQQKPGKAVKLLIFHTSRLHSGVPSRFSGSGSGTDFTFTISSLQPEDIAIYYCQQGITLPWTFGQGTKVEIK

SEQ ID NO: 18981 - protein, 107 aa, Artificial Sequence
  source: /note="Description of Artificial Sequence: Synthetic polypeptide"
DIQMTQSPSSLSASVGDRVTITCRPSQDISNYVNWFQQKPGKAPKLLIFHTSRLHSGVPSRFSGSGSGTDFTLTISSLQPEDIATYYCQQGITLPWTFGQGTKVEIK

SEQ ID NO: 18982 - protein, 107 aa, Artificial Sequence
  source: /note="Description of Artificial Sequence: Synthetic polypeptide"
DIQMTQSPSSLSASVGDRVTVTCRASQDTNNYLNWYQQKPGKAVKLLIYYTSRLQSGVPSRFSGSGSGTDFTLTISSLQPEDFATYFCQQSETLPWTFGQGTKVEIK

SEQ ID NO: 18983 - protein, 107 aa, Artificial Sequence
  source: /note="Description of Artificial Sequence: Synthetic polypeptide"
DIQMTQSPSSLSASVGDRVTVTCRASQDINNYLNWYQQKPGKAVKLLIYYTSRLQSGVPSRFSGSGSGTDYTLTISSLQPEDFATYFCQQSETLPWTFGQGTKLEIK

SEQ ID NO: 18984 - protein, 111 aa, Artificial Sequence
  source: /note="Description of Artificial Sequence: Synthetic polypeptide"
DIQMTQSPSSLSASVGDRVTITCRSSQSLVHSNGNTYLHWYQQKPGKAPKLLIYKVSNRFSGVPSRFSGSGSGTDFTLTISSLQPEDFATYYCSQSTHVPTFGGGTKVEIK

SEQ ID NO: 18985 - protein, 108 aa, Artificial Sequence
  source: /note="Description of Artificial Sequence: Synthetic polypeptide"
DIPLTQSPSSLSASVGDRVTITCRASQGISNYLAWYQQKPGKVPKLLIYAASTLQSGVPSRFSGSGSGTDFTLTIHSLQPEDVATYYCQKYNSAPWTFGQGTKLEIKR

SEQ ID NO: 18986 - protein, 110 aa, Homo sapiens
QSVLTQPPSASGTPGQRVTISCSGSSSNIGSNTVNWYQRLPGAAPQLLIYNNDQRPSGIPDRFSGSKSGTSGSLVISGLQSEDEADYYCASWDDSLNGRVFGGGTKLTVL

SEQ ID NO: 18987 - protein, 110 aa, Homo sapiens
QSVLTQPPSVSGTPGQRVTISCSGSSSNIGSNTVNWYQQLPGTAPKLLIYNNDQRPSGVPDRFSGSKSGTSGSLAISGLQSEDEADYYCASWDDSLNGRVFGGGTKLTVL

SEQ ID NO: 18988 - protein, 110 aa, Homo sapiens
QSVLTQPPSASGTPGQRVTISCSGSGSNIGSNTVNWYQRLPGAAPQLLIYNNGQRPSGIPDRFSGSKSGTSGSLVISGLQSEDEADYYCASWDDSLNGRVFGGGTKLTVL

SEQ ID NO: 18989 - protein, 110 aa, Homo sapiens
QSVLTQPPSVSGTPGQRVTISCSGSGSNIGSNTVNWYQQLPGTAPKLLIYNNGQRPSGVPDRFSGSKSGTSGSLAISGLQSEDEADYYCASWDDSLNGRVFGGGTKLTVL

SEQ ID NO: 18990 - protein, 110 aa, Homo sapiens
QSVLTQPPSASGTPGQRVTISCSGSGSNIGSNTVNWYQRLPGAAPQLLIYNNGQRPSGIPDRFSGSKSGTSGSLVISGLQSEDEADYYCASWDDLSLNFRFGGGTKLTVL

SEQ ID NO: 18991 - protein, 110 aa, Homo sapiens
QSVLTQPPSASGTPGQRVTISCSGSGSNIGSNTVNWYQRLPGAAPQLLIYNNGQRPSGIPDRFSGSKSGTSGSLVISGLQSEDEADYYCASWDDLTLDHLFGGGTKLTVL

SEQ ID NO: 18992 - protein, 110 aa, Homo sapiens
QSVLTQPPSASGTPGQRVTISCSGSGSNIGSNTVNWYQRLPGAAPQLLIYNNGQRPSGIPDRFSGSKSGTSGSLVISGLQSEDEADYYCASWDDMNLDHVFGGGTKLTVL

SEQ ID NO: 18993 - protein, 110 aa, Homo sapiens
QSVLTQPPSASGTPGQRVTISCSGSSSNIGSNTVNWYQRLPGAAPQLLIYNNDQRPSGIPDRFSGSKSGTSGSLVISGLQSEDEADYYCASWDDTLGSRVFGGGTKLTVL

SEQ ID NO: 18994 - protein, 110 aa, Homo sapiens
QSVLTQPPSASGTPGQRVTISCSGSSSNIGSNTVNWYQRLPGAAPQLLIYNNDQRPSGIPDRFSGSKSGTSGSLVISGLQSEDEADYYCASWDDHKGTRVFGGGTKLTVL

SEQ ID NO: 18995 - protein, 110 aa, Homo sapiens
QSVLTQPPSASGTPGQRVTISCSGSSSNIGSNTVNWYQRLPGAAPQLLIYNNDQRPSGIPDRFSGSKSGTSGSLVISGLQSEDEADYYCETFDTSLNGRVFGGGTKLTVL

SEQ ID NO: 18996 - protein, 110 aa, Homo sapiens
QSVLTQPPSASGTPGQRVTISCSGSSSNIGSNTVNWYQRLPGAAPQLLIYNNDQRPSGIPDRFSGSKSGTSGSLVISGLQSEDEADYYCETGSSTLNGRVFGGGTKLTVL

SEQ ID NO: 18997 - protein, 110 aa, Homo sapiens
QSVLTQPPSASGTPGQRVTISCSGSSSNIGSNTVNWYQRLPGAAPQLLIYNNDQRPSGIPDRFSGSKSGTSGSLVISGLQSEDEADYYCATGDKNLNGRVFGGGTKLTVL

SEQ ID NO: 18998 - protein, 110 aa, Homo sapiens
QSVLTQPPSASGTPGQRVTISCSGSGSNIGSNTVNWYQRLPGAAPQLLIYNNGQRPSGIPDRFSGSKSGTSGSLVISGLQSEDEADYYCASWDDHTLNFEFGGGTKLTVL

SEQ ID NO: 18999 - protein, 110 aa, Homo sapiens
QSVLTQPPSASGTPGQRVTISCSGSGSNIGSNTVNWYQRLPGAAPQLLIYNNGQRPSGIPDRFSGSKSGTSGSLVISGLQSEDEADYYCASWDDRDLNFVFGGGTKLTVL

SEQ ID NO: 19000 - protein, 110 aa, Homo sapiens
QSVLTQPPSASGTPGQRVTISCSGSGSNIGSNTVNWYQRLPGAAPQLLIYNNGQRPSGIPDRFSGSKSGTSGSLVISGLQSEDEADYYCASWDDLTWDHVFGGGTKLTVL

SEQ ID NO: 19001 - protein, 110 aa, Homo sapiens
QSVLTQPPSASGTPGQRVTISCSGSGSNIGSNTVNWYQRLPGAAPQLLIYNNGQRPSGIPDRFSGSKSGTSGSLVISGLQSEDEADYYCASWDDRLLSFEFGGGTKLTVL

SEQ ID NO: 19002 - protein, 110 aa, Homo sapiens
QSVLTQPPSASGTPGQRVTISCSGSGSNIGSNTVNWYQRLPGAAPQLLIYNNGQRPSGIPDRFSGSKSGTSGSLVISGLQSEDEADYYCASWDDRLLNFVFGGGTKLTVL

SEQ ID NO: 19003 - protein, 110 aa, Homo sapiens
QSVLTQPPSASGTPGQRVTIPCSGSSSNIGSSTVNWYQRLPGAAPQLLIYNNDQRPSGIPDRFSGSKSGTSGSLVISGLQSEDEADYYCATWDDSLNGRVFGGGTKLTVL

SEQ ID NO: 19004 - protein, 110 aa, Homo sapiens
QSVLTQPPSASGTPGQRVTISCSGSSSNIGSNTVNWYQRLPGAAPQLLVYNNDQRPSGIPDRFSGSKSGTSGSLVIGGLQSEDEADYYCESWDDSLNGRVFGGGTKLTVL

SEQ ID NO: 19005 - protein, 110 aa, Homo sapiens
QSVLTQPPSASGTPGQRVTISCSGSSSNIGSNTVNWYQRLPGAAPQLLVYNNDQRPSGIPDRFSGSKSGTSGSLVIGGLQSEDEADYYCESWDDSLSGRVFGGGTKLTVL

SEQ ID NO: 19006 - protein, 110 aa, Homo sapiens
QSVLAQPPSASGTPGQRVTISCSGSSSNIGGSTVNWYQQLPGAAPRLLIYNNDQRPSGVPDRFSGSKSGTSGSLVISGLQSEDEADYYCASWDDSLSGRVFGGGTKLTVL

SEQ ID NO: 19007 - protein, 110 aa, Homo sapiens
QSVLTQPPSASGTPGQRVTVTCSGSSSNIGSSTVNWYQRLPGAAPQLLIYNNDRRPSGIPDRFSGSKSGTSGSLVISGLQSEDEADYYCATWDDRLNGRVFGGGTKLTVL

SEQ ID NO: 19008 - protein, 110 aa, Homo sapiens
QSVLSQPPSASGTPGRRVTISCSGSSSNIGSSTVNWYRRLPGAAPQLLIYNNDQRPSGIPDRFSGSRSGTSGSLVISGLQSEDEADYYCASWDDNLNGRVFGGGTKLTVL

SEQ ID NO: 19009 - protein, 110 aa, Homo sapiens
QSVLAQPPSASGTPGQRVTISCSGSSSNIGGSTVNWYQQLPGAAPRLLIYNNDQRPSGVPDRFSGSKSGTSGSLVISGLQSEDEADYYCESWDDSLNGRVFGGGTKLTVL

SEQ ID NO: 19010 - protein, 110 aa, Homo sapiens
QSVLTQPPSASGTPGQRVTISCSGSSSNIGSSTVNWYRRLPGAAPQLLIYNNDQRPSGIPDRFSGSRSGTSGSLVISGLQSEDEADYYCESWDDSLNGRVFGGGTKLTVL

SEQ ID NO: 19011 - protein, 110 aa, Homo sapiens
QSVLTQPPSVSGTPGQRVTISCSGSSSNIGSSTVNWYQQLPGTAPKLLIYNNDQRPSGVPDRFSGSRSGTSGSLAISGLQSEDEADYYCESWDDSLSGRVFGGGTKLTVL

SEQ ID NO: 19012 - protein, 110 aa, Homo sapiens
RSVLTQPPSASGTPGQRVTTSCSGSSSNIGSNTVNWYQQLPGAAPRLLIYNNDQRPSGIPDRFSGSKSGTSGSLVIGGLQSEDEADYYCESWDDSLNGRVFGGGTKLTVL

SEQ ID NO: 19013 - protein, 110 aa, Homo sapiens
QSVLAQPPSASGTPGQRVTISCSGSSSNIGGSTVNWYQQLPGAAPRLLIYNNDQRPSGVPDRFSGSKSGTSGSLVIGGLQSEDEADYYCESWDDSLNGRVFGGGTKLTVL

SEQ ID NO: 19014 - protein, 110 aa, Homo sapiens
QSVLAQPPSASGTPGQRVTISCSGSSSNIGGSTVNWYQQLPGAAPRLLIYNNDQRPSGVPDRFSGSKSGTSGSLVISGLQSEDKADYYCESWDDSLNGRVFGGGTKLTVL

SEQ ID NO: 19015 - protein, 110 aa, Homo sapiens
QSVLTQPPSVSGTPGQRVTISCSGSSSNIGGSTVNWYQQLPGTAPKLLIYNNDQRPSGVPDRFSGSKSGTSGSLAISGLQSEDEADYYCESWDDSLSGRVFGGGTKLTVL

SEQ ID NO: 19016 - protein, 110 aa, Homo sapiens
QSVLTQPPSASGTPGQRVIIPCSGSSSNIGSSTVNWYRRLPGAAPQLLIYNNDRRPSGIPDRFSGSKSGTSGSLVIGGLQSEDEADYYCESWDDGLNGRVFGGGTKLTVL

SEQ ID NO: 19017 - protein, 110 aa, Homo sapiens
QSVLTQPPSVSGTPGQRVTISCSGSSSNIGSSTVNWYQQLPGTAPKLLIYNNDRRPSGVPDRFSGSKSGTSGSLAISGLQSEDEADYYCESWDDGLSGRVFGGGTKLTVL

SEQ ID NO: 19018 - protein, 110 aa, Homo sapiens
  MOD_RES (1)..(1): Any amino acid
  MOD_RES (5)..(5): Any amino acid
  MOD_RES (10)..(10): Any amino acid
  MOD_RES (16)..(16): Any amino acid
  MOD_RES (19)..(21): Any amino acid
  MOD_RES (31)..(32): Any amino acid
  MOD_RES (38)..(39): Any amino acid
  MOD_RES (43)..(43): Any amino acid
  MOD_RES (46)..(46): Any amino acid
  MOD_RES (49)..(49): Any amino acid
  MOD_RES (54)..(54): Any amino acid
  MOD_RES (59)..(59): Any amino acid
  MOD_RES (67)..(67): Any amino acid
  MOD_RES (75)..(75): Any amino acid
  MOD_RES (77)..(77): Any amino acid
  MOD_RES (84)..(84): Any amino acid
  MOD_RES (90)..(92): Any amino acid
  MOD_RES (94)..(95): Any amino acid
  MOD_RES (97)..(97): Any amino acid
XSVLXQPPSXSGTPGXRVXXXCSGSSSNIGXXTVNWYXXLPGXAPXLLXYNNDXRPSGXPDRFSGSXSGTSGSLXIXGLQSEDXADYYCXXXDXXLXGRVFGGGTKLTVL

SEQ ID NO: 19019 - protein, 110 aa, Homo sapiens
  MOD_RES (10)..(10): Any amino acid
  MOD_RES (39)..(39): Any amino acid
  MOD_RES (43)..(43): Any amino acid
  MOD_RES (46)..(46): Any amino acid
  MOD_RES (59)..(59): Any amino acid
  MOD_RES (75)..(75): Any amino acid
  MOD_RES (95)..(100): Any amino acid
QSVLTQPPSXSGTPGQRVTISCSGSGSNIGSNTVNWYQXLPGXAPXLLIYNNGQRPSGXPDRFSGSKSGTSGSLXISGLQSEDEADYYCASWDDXXXXXXFGGGTKLTVL

SEQ ID NO: 19020 - protein, 107 aa, Artificial Sequence
  source: /note="Description of Artificial Sequence: Synthetic polypeptide"
DIQMTQSPSSLSASTGDRVTITCRASQGISSYLAWYQQKPGKAPKLLIYARSTRQSGVPSRFSGSGSGTDFTLTISSLQPEDFATYYCQQYWRWPLTFGGGTKVEIK

SEQ ID NO: 19021 - protein, 107 aa, Artificial Sequence
  source: /note="Description of Artificial Sequence: Synthetic polypeptide"
DIQMTQSPSSLSASTGDRVTITCRASQGISSYLAWYQQKPGKAPKLLIYAKSTLQSGVPSRFSGSGSGTDFTLTISSLQPEDFATYYCQQYWTFPLTFGGGTKVEIK

SEQ ID NO: 19022 - protein, 107 aa, Artificial Sequence
  source: /note="Description of Artificial Sequence: Synthetic polypeptide"
  MOD_RES (4)..(4): Any amino acid
  MOD_RES (15)..(15): Any amino acid
  MOD_RES (51)..(51): Any amino acid
  MOD_RES (54)..(54): Any amino acid
  MOD_RES (70)..(70): Any amino acid
  MOD_RES (83)..(84): Any amino acid
  MOD_RES (92)..(94): Any amino acid
DIQXTQSPSSLSASXGDRVTITCRASQGISSYLAWYQQKPGKAPKLLIYAXSTXQSGVPSRFSGSGSGTXFTLTISSLQPEDXXTYYCQQYXXXPLTFGGGTKVEIK

SEQ ID NO: 19023 - protein, 107 aa, Artificial Sequence
  source: /note="Description of Artificial Sequence: Synthetic polypeptide"
DIQLTQSPSSLSASLGDRVTITCRASQGISSYLAWYQQKPGKAPKLLIYARSTRQSGVPSRFSGSGSGTEFTLTISSLQPEDSATYYCQQYWTWPLTFGGGTKVEIK

SEQ ID NO: 19024 - protein, 107 aa, Artificial Sequence
  source: /note="Description of Artificial Sequence: Synthetic polypeptide"
DIQMTQSPSSLSASLGDRVTITCRASQGISSYLAWYQQKPGKAPKLLIYASSTRQSGVPSRFSGSGSGTDFTLTISSLQPEDSGTYYCQQYWAFPLTFGGGTKVEIK

SEQ ID NO: 19025 - protein, 107 aa, Artificial Sequence
  source: /note="Description of Artificial Sequence: Synthetic polypeptide"
DIQMTQSPSSLSASLGDRVTITCRASQGISSYLAWYQQKPGKAPKLLIYAKSTLQSGVPSRFSGSGSGTDFTLTISSLQPEDSATYYCQQYWTFPLTFGGGTKVEIK

SEQ ID NO: 19026 - protein, 107 aa, Artificial Sequence
  source: /note="Description of Artificial Sequence: Synthetic polypeptide"
DIQMTQSPSSLSASTGDRVTITCRASQGISSYLAWYQQKPGKAPKLLIYAASTLQSGVPSRFSGSGSGTDFTLTISSLQPEDFATYYCQQYFTFPLTFGGGTKVEIK

SEQ ID NO: 19027 - protein, 107 aa, Artificial Sequence
  source: /note="Description of Artificial Sequence: Synthetic polypeptide"
DIQLTQSPSSLSASLGDRVTITCRASQGISSYLAWYQQKPGKAPKLLIYAGSTCQSGVPSRFSGSGSGTDFTLTISSLQPEDSGTYYCQQYWTWPLTFGGGTKVEIK

SEQ ID NO: 19028 - protein, 107 aa, Artificial Sequence
  source: /note="Description of Artificial Sequence: Synthetic polypeptide"
DIQMTQSPSSLSASLGDRVTITCRASQGISSYLAWYQQKPGKAPKLLIYAKSTRQSGVPSRFSGSGSGTDFTLTISSLQPEDSGTYYCQQYWRWPLTFGGGTKVEIK

SEQ ID NO: 19029 - protein, 107 aa, Artificial Sequence
  source: /note="Description of Artificial Sequence: Synthetic polypeptide"
DIQLTQSPSSLSASLGDRVTITCRASQGISSYLAWYQQKPGKAPKLLIYAASTRQSGVPSRFSGSGSGTEFTLTISSLQPEDSATYYCQQYWMWPLTFGGGTKVEIK

SEQ ID NO: 19030 - protein, 107 aa, Artificial Sequence
  source: /note="Description of Artificial Sequence: Synthetic polypeptide"
DIQMTQSPSSLSASLGDRVTITCRASQGISSYLAWYQQKPGKAPKLLIYASSTTQSGVPSRFSGSGSGTEFTLTISSLQPEDSATYYCQQYWTFPLTFGGGTKVEIK

SEQ ID NO: 19031 - protein, 107 aa, Artificial Sequence
  source: /note="Description of Artificial Sequence: Synthetic polypeptide"
DIQLTQSPSSLSASLGDRVTITCRASQGISSYLAWYQQKPGKAPKLLIYAKSTRQSGVPSRFSGSGSGTDFTLTISSLQPEDSGTYYCQQYWMFPLTFGGGTKVEIK

SEQ ID NO: 19032 - protein, 107 aa, Artificial Sequence
  source: /note="Description of Artificial Sequence: Synthetic polypeptide"
DIQLTQSPSSLSASLGDRVTITCRASQGISSYLAWYQQKPGKAPKLLIYAGSTGQSGVPSRFSGSGSGTDFTLTISSLQPEDSATYYCQQYWRFPLTFGGGTKVEIK

SEQ ID NO: 19033 - protein, 107 aa, Artificial Sequence
  source: /note="Description of Artificial Sequence: Synthetic polypeptide"
DIQMTQSPSSLSASLGDRVTITCRASQGISSYLAWYQQKPGKAPKLLIYASSTPQSGVPSRFSGSGSGTEFTLTISSLQPEDSGTYYCQQYWSFPLTFGGGTKVEIK

SEQ ID NO: 19034 - protein, 107 aa, Artificial Sequence
  source: /note="Description of Artificial Sequence: Synthetic polypeptide"
DIQLTQSPSSLSASLGDRVTITCRASQGISSYLAWYQQKPGKAPKLLIYAASTPQSGVPSRFSGSGSGTDFTLTISSLQPEDSGTYYCQQYWTWPLTFGGGTKVEIK

SEQ ID NO: 19035 - protein, 107 aa, Artificial Sequence
  source: /note="Description of Artificial Sequence: Synthetic polypeptide"
DIQLTQSPSSLSASLGDRVTITCRASQGISSYLAWYQQKPGKAPKLLIYASSTLQSGVPSRFSGSGSGTEFTLTISSLQPEDSATYYCQQYWMFPLTFGGGTKVEIK

SEQ ID NO: 19036 - protein, 107 aa, Artificial Sequence
  source: /note="Description of Artificial Sequence: Synthetic polypeptide"
DIQMTQSPSSLSASLGDRVTITCRASQGISSYLAWYQQKPGKAPKLLIYASSTPQSGVPSRFSGSGSGTEFTLTISSLQPEDSATYYCQQYWNFPLTFGGGTKVEIK

SEQ ID NO: 19037 - protein, 107 aa, Artificial Sequence
  source: /note="Description of Artificial Sequence: Synthetic polypeptide"
DIQMTQSPSSLSASLGDRVTITCRASQGISSYLAWYQQKPGKAPKLLIYAASTTQSGVPSRFSGSGSGTDFTLTISSLQPEDSGTYYCQQYWTFPLTFGGGTKVEIK

SEQ ID NO: 19038 - protein, 107 aa, Artificial Sequence
  source: /note="Description of Artificial Sequence: Synthetic polypeptide"
DIQMTQSPSSLSASLGDRVTITCRASQGISSYLAWYQQKPGKAPKLLIYASSTSQSGVPSRFSGSGSGTDFTLTISSLQPEDSGTYYCQQYWWWPLTFGGGTKVEIK

SEQ ID NO: 19039 - protein, 107 aa, Artificial Sequence
  source: /note="Description of Artificial Sequence: Synthetic polypeptide"
DIQLTQSPSSLSASLGDRVTITCRASQGISSYLAWYQQKPGKAPKLLIYASSTPQSGVPSRFSGSGSGTEFTLTISSLQPEDSATYYCQQYWWWPLTFGGGTKVEIK

SEQ ID NO: 19040 - protein, 107 aa, Artificial Sequence
  source: /note="Description of Artificial Sequence: Synthetic polypeptide"
DIQMTQSPSSLSASLGDRVTITCRASQGISSYLAWYQQKPGKAPKLLIYARSTLQSGVPSRFSGSGSGTEFTLTISSLQPEDSATYYCQQYWMFPLTFGGGTKVEIK

SEQ ID NO: 19041 - protein, 107 aa, Artificial Sequence
  source: /note="Description of Artificial Sequence: Synthetic polypeptide"
DIQMTQSPSSLSASLGDRVTITCRASQGISSYLAWYQQKPGKAPKLLIYAQSTKQSGVPSRFSGSGSGTEFTLTISSLQPEDSGTYYCQQYWTWPLTFGGGTKVEIK

SEQ ID NO: 19042 - protein, 107 aa, Artificial Sequence
  source: /note="Description of Artificial Sequence: Synthetic polypeptide"
DIQLTQSPSSLSASLGDRVTITCRASQGISSYLAWYQQKPGKAPKLLIYASSTEQSGVPSRFSGSGSGTEFTLTISSLQPEDSGTYYCQQYWSFPLTFGGGTKVEIK

SEQ ID NO: 19043 - protein, 107 aa, Artificial Sequence
  source: /note="Description of Artificial Sequence: Synthetic polypeptide"
DIQLTQSPSSLSASLGDRVTITCRASQGISSYLAWYQQKPGKAPKLLIYARSTRQSGVPSRFSGSGSGTEFTLTISSLQPEDSATYYCQQYWRWPLTFGGGTKVEIK

SEQ ID NO: 19044 - protein, 107 aa, Artificial Sequence
  source: /note="Description of Artificial Sequence: Synthetic polypeptide"
DIQLTQSPSSLSASLGDRVTITCRASQGISSYLAWYQQKPGKAPKLLIYAASTQQSGVPSRFSGSGSGTEFTLTISSLQPEDSGTYYCQQYWSWPLTFGGGTKVEIK

SEQ ID NO: 19045 - protein, 107 aa, Artificial Sequence
  source: /note="Description of Artificial Sequence: Synthetic polypeptide"
DIQLTQSPSSLSASLGDRVTITCRASQGISSYLAWYQQKPGKAPKLLIYASSTPQSGVPSRFSGSGSGTDFTLTISSLQPEDSATYYCQQYWRFPLTFGGGTKVEIK

SEQ ID NO: 19046 - protein, 107 aa, Artificial Sequence
  source: /note="Description of Artificial Sequence: Synthetic polypeptide"
DIQMTQSPSSLSASLGDRVTITCRASQGISSYLAWYQQKPGKAPKLLIYARSTLQSGVPSRFSGSGSGTEFTLTISSLQPEDSATYYCQQYWTFPLTFGGGTKVEIK

SEQ ID NO: 19047 - protein, 107 aa, Artificial Sequence
  source: /note="Description of Artificial Sequence: Synthetic polypeptide"
DIQLTQSPSSLSASLGDRVTITCRASQGISSYLAWYQQKPGKAPKLLIYAGSTSQSGVPSRFSGSGSGTEFTLTISSLQPEDSGTYYCQQYWTWPLTFGGGTKVEIK

SEQ ID NO: 19048 - protein, 107 aa, Artificial Sequence
  source: /note="Description of Artificial Sequence: Synthetic polypeptide"
DIQMTQSPSSLSASLGDRVTITCRASQGISSYLAWYQQKPGKAPKLLIYARSTLQSGVPSRFSGSGSGTDFTLTISSLQPEDSATYYCQQYWSWPLTFGGGTKVEIK

SEQ ID NO: 19049 - protein, 107 aa, Artificial Sequence
  source: /note="Description of Artificial Sequence: Synthetic polypeptide"
DIQLTQSPSSLSASLGDRVTITCRASQGISSYLAWYQQKPGKAPKLLIYATSTLQSGVPSRFSGSGSGTEFTLTISSLQPEDSGTYYCQQYWRFPLTFGGGTKVEIK

SEQ ID NO: 19050 - protein, 107 aa, Artificial Sequence
  source: /note="Description of Artificial Sequence: Synthetic polypeptide"
DIQLTQSPSSLSASLGDRVTITCRASQGISSYLAWYQQKPGKAPKLLIYARSTRQSGVPSRFSGSGSGTEFTLTISSLQPEDSATYYCQQYWTFPLTFGGGTKVEIK

SEQ ID NO: 19051 - protein, 107 aa, Artificial Sequence
  source: /note="Description of Artificial Sequence: Synthetic polypeptide"
DIQMTQSPSSLSASLGDRVTITCRASQGISSYLAWYQQKPGKAPKLLIYASSTHQSGVPSRFSGSGSGTDFTLTISSLQPEDSATYYCQQYWRWPLTFGGGTKVEIK

SEQ ID NO: 19052 - protein, 107 aa, Artificial Sequence
  source: /note="Description of Artificial Sequence: Synthetic polypeptide"
DIQLTQSPSSLSASLGDRVTITCRASQGISSYLAWYQQKPGKAPKLLIYAASTRQSGVPSRFSGSGSGTDFTLTISSLQPEDSATYYCQQYWTFPLTFGGGTKVEIK

SEQ ID NO: 19053 - protein, 107 aa, Artificial Sequence
  source: /note="Description of Artificial Sequence: Synthetic polypeptide"
DIQMTQSPSSLSASLGDRVTITCRASQGISSYLAWYQQKPGKAPKLLIYANSTAQSGVPSRFSGSGSGTEFTLTISSLQPEDSATYYCQQYWRWPLTFGGGTKVEIK

SEQ ID NO: 19054 - protein, 107 aa, Artificial Sequence
  source: /note="Description of Artificial Sequence: Synthetic polypeptide"
DIQMTQSPSSLSASLGDRVTITCRASQGISSYLAWYQQKPGKAPKLLIYAASTTQSGVPSRFSGSGSGTDFTLTISSLQPEDSATYYCQQYWTFPLTFGGGTKVEIK

SEQ ID NO: 19055 - protein, 107 aa, Artificial Sequence
  source: /note="Description of Artificial Sequence: Synthetic polypeptide"
DIQMTQSPSSLSASLGDRVTITCRASQGISSYLAWYQQKPGKAPKLLIYAQSTLQSGVPSRFSGSGSGTDFTLTISSLQPEDSGTYYCQQYWRFPLTFGGGTKVEIK

SEQ ID NO: 19056 - protein, 107 aa, Artificial Sequence
  source: /note="Description of Artificial Sequence: Synthetic polypeptide"
DIQMTQSPSSLSASLGDRVTITCRASQGISSYLAWYQQKPGKAPKLLIYATSTAQSGVPSRFSGSGSGTDFTLTISSLQPEDSGTYYCQQYWMFPLTFGGGTKVEIK

SEQ ID NO: 19057 - protein, 107 aa, Artificial Sequence
  source: /note="Description of Artificial Sequence: Synthetic polypeptide"
DIQLTQSPSSLSASLGDRVTITCRASQGISSYLAWYQQKPGKAPKLLIYARSTTQSGVPSRFSGSGSGTEFTLTISSLQPEDSGTYYCQQYWSFPLTFGGGTKVEIK

SEQ ID NO: 19058 - protein, 107 aa, Artificial Sequence
  source: /note="Description of Artificial Sequence: Synthetic polypeptide"
DIQLTQSPSSLSASLGDRVTITCRASQGISSYLAWYQQKPGKAPKLLIYAPSTPQSGVPSRFSGSGSGTEFTLTISSLQPEDSATYYCQQYWMFPLTFGGGTKVEIK

SEQ ID NO: 19059 - protein, 107 aa, Artificial Sequence
  source: /note="Description of Artificial Sequence: Synthetic polypeptide"
DIQLTQSPSSLSASLGDRVTITCRASQGISSYLAWYQQKPGKAPKLLIYARSTLQSGVPSRFSGSGSGTEFTLTISSLQPEDSGTYYCQQYWTWPLTFGGGTKVEIK

SEQ ID NO: 19060 - protein, 107 aa, Artificial Sequence
  source: /note="Description of Artificial Sequence: Synthetic polypeptide"
DIQMTQSPSSLSASLGDRVTITCRASQGISSYLAWYQQKPGKAPKLLIYAASTRQSGVPSRFSGSGSGTDFTLTISSLQPEDSGTYYCQQYWSFPLTFGGGTKVEIK

SEQ ID NO: 19061 - protein, 107 aa, Artificial Sequence
  source: /note="Description of Artificial Sequence: Synthetic polypeptide"
DIQMTQSPSSLSASLGDRVTITCRASQGISSYLAWYQQKPGKAPKLLIYAASTPQSGVPSRFSGSGSGTEFTLTISSLQPEDSATYYCQQYWRFPLTFGGGTKVEIK

SEQ ID NO: 19062 - protein, 107 aa, Artificial Sequence
  source: /note="Description of Artificial Sequence: Synthetic polypeptide"
DIQLTQSPSSLSASLGDRVTITCRASQGISSYLAWYQQKPGKAPKLLIYAGSTTQSGVPSRFSGSGSGTDFTLTISSLQPEDSGTYYCQQYWRWPLTFGGGTKVEIK

SEQ ID NO: 19063 - protein, 107 aa, Artificial Sequence
  source: /note="Description of Artificial Sequence: Synthetic polypeptide"
DIQLTQSPSSLSASLGDRVTITCRASQGISSYLAWYQQKPGKAPKLLIYASSTSQSGVPSRFSGSGSGTDFTLTISSLQPEDSATYYCQQYWQFPLTFGGGTKVEIK

SEQ ID NO: 19064 - protein, 107 aa, Artificial Sequence
  source: /note="Description of Artificial Sequence: Synthetic polypeptide"
DIQMTQSPSSLSASLGDRVTITCRASQGISSYLAWYQQKPGKAPKLLIYATSTAQSGVPSRFSGSGSGTDFTLTISSLQPEDSATYYCQQYWFWPLTFGGGTKVEIK

SEQ ID NO: 19065 - protein, 107 aa, Artificial Sequence
  source: /note="Description of Artificial Sequence: Synthetic polypeptide"
DIQLTQSPSSLSASLGDRVTITCRASQGISSYLAWYQQKPGKAPKLLIYASSTRQSGVPSRFSGSGSGTEFTLTISSLQPEDSATYYCQQYWLFPLTFGGGTKVEIK

SEQ ID NO: 19066 - protein, 107 aa, Artificial Sequence
  source: /note="Description of Artificial Sequence: Synthetic polypeptide"
DIQLTQSPSSLSASLGDRVTITCRASQGISSYLAWYQQKPGKAPKLLIYASSTRQSGVPSRFSGSGSGTEFTLTISSLQPEDSGTYYCQQYWWFPLTFGGGTKVEIK

SEQ ID NO: 19067 - protein, 107 aa, Artificial Sequence
  source: /note="Description of Artificial Sequence: Synthetic polypeptide"
DIQMTQSPSSLSASLGDRVTITCRASQGISSYLAWYQQKPGKAPKLLIYARSTYQSGVPSRFSGSGSGTEFTLTISSLQPEDSGTYYCQQYWRWPLTFGGGTKVEIK

SEQ ID NO: 19068 - protein, 107 aa, Artificial Sequence
  source: /note="Description of Artificial Sequence: Synthetic polypeptide"
DIQMTQSPSSLSASLGDRVTITCRASQGISSYLAWYQQKPGKAPKLLIYARSTIQSGVPSRFSGSGSGTEFTLTISSLQPEDSATYYCQQYWTFPLTFGGGTKVEIK

SEQ ID NO: 19069 - protein, 107 aa, Artificial Sequence
  source: /note="Description of Artificial Sequence: Synthetic polypeptide"
DIQMTQSPSSLSASLGDRVTITCRASQGISSYLAWYQQKPGKAPKLLIYARSTPQSGVPSRFSGSGSGTEFTLTISSLQPEDSATYYCQQYWLFPLTFGGGTKVEIK

SEQ ID NO: 19070 - protein, 107 aa, Artificial Sequence
  source: /note="Description of Artificial Sequence: Synthetic polypeptide"
DIQMTQSPSSLSASLGDRVTITCRASQGISSYLAWYQQKPGKAPKLLIYAASTLQSGVPSRFSGSGSGTDFTLTISSLQPEDSGTYYCQQYWFFPLTFGGGTKVEIK

SEQ ID NO: 19071 - protein, 107 aa, Artificial Sequence
  source: /note="Description of Artificial Sequence: Synthetic polypeptide"
DIQMTQSPSSLSASLGDRVTITCRASQGISSYLAWYQQKPGKAPKLLIYASSTHQSGVPSRFSGSGSGTEFTLTISSLQPEDSGTYYCQQYWTFPLTFGGGTKVEIK

SEQ ID NO: 19072 - protein, 107 aa, Artificial Sequence
  source: /note="Description of Artificial Sequence: Synthetic polypeptide"
DIQLTQSPSSLSASLGDRVTITCRASQGISSYLAWYQQKPGKAPKLLIYASSTRQSGVPSRFSGSGSGTEFTLTISSLQPEDSATYYCQQYWVWPLTFGGGTKVEIK

SEQ ID NO: 19073 - protein, 107 aa, Artificial Sequence
  source: /note="Description of Artificial Sequence: Synthetic polypeptide"
DIQLTQSPSSLSASLGDRVTITCRASQGISSYLAWYQQKPGKAPKLLIYAGSTRQSGVPSRFSGSGSGTDFTLTISSLQPEDSATYYCQQYWTWPLTFGGGTKVEIK

SEQ ID NO: 19074 - protein, 107 aa, Artificial Sequence
  source: /note="Description of Artificial Sequence: Synthetic polypeptide"
DIQLTQSPSSLSASLGDRVTITCRASQGISSYLAWYQQKPGKAPKLLIYAASTRQSGVPSRFSGSGSGTEFTLTISSLQPEDSGTYYCQQYWTWPLTFGGGTKVEIK

SEQ ID NO: 19075 - protein, 107 aa, Artificial Sequence
  source: /note="Description of Artificial Sequence: Synthetic polypeptide"
DIQLTQSPSSLSASLGDRVTITCRASQGISSYLAWYQQKPGKAPKLLIYARSTLQSGVPSRFSGSGSGTEFTLTISSLQPEDSGTYYCQQYWTFPLTFGGGTKVEIK

SEQ ID NO: 19076 - protein, 107 aa, Artificial Sequence
  source: /note="Description of Artificial Sequence: Synthetic polypeptide"
DIQMTQSPSSLSASLGDRVTITCRASQGISSYLAWYQQKPGKAPKLLIYADSTSQSGVPSRFSGSGSGTEFTLTISSLQPEDSATYYCQQYWTFPLTFGGGTKVEIK

SEQ ID NO: 19077 - protein, 107 aa, Artificial Sequence
  source: /note="Description of Artificial Sequence: Synthetic polypeptide"
DIQLTQSPSSLSASLGDRVTITCRASQGISSYLAWYQQKPGKAPKLLIYAGSTPQSGVPSRFSGSGSGTEFTLTISSLQPEDSGTYYCQQYWTWPLTFGGGTKVEIK

SEQ ID NO: 19078 - protein, 108 aa, Mus musculus
DIVMTQSHKFMSTSVGDRVSITCKASQEVGTAVAWYQQKPGQSPKLLIYWASTRHTGVPDRFTGSGSGTDFTLTISNVQSEDLADYFCQQYSNYPLTFGAGAKLELKR

SEQ ID NO: 19079 - protein, 108 aa, Artificial Sequence; identical to SEQ ID NO: 14967
  source: /note="Description of Artificial Sequence: Synthetic polypeptide"

SEQ ID NO: 19080 - protein, 107 aa, Artificial Sequence; identical to SEQ ID NO: 11025
  source: /note="Description of Artificial Sequence: Synthetic polypeptide"

SEQ ID NO: 19081 - protein, 125 aa, Mus musculus
DVVMTQTPLSLPVSLGDQASISCRSSQNLVHSDGKTYLHWFLQKPGQSPTLLIYKVSNRFSGVPDRFSGSGSGTDFILKISRVEAEDLGVYFCSQSTHVPLTFGAGTKLELKRADAAPTVSIFPP

SEQ ID NO: 19082 - protein, 112 aa, Mus musculus
DVLMTQSPLSLPVSLGDQASISCRSSQIIVHSNGNTYLEWYLQKPGQSPKLLIYKVSNRFSGVPDRFSGSGSGTDFTLKISRVEAEDLGVYYCFQGSHVPFTFGSGTKLEIK

SEQ ID NO: 19083 - protein, 112 aa, Artificial Sequence
  source: /note="Description of Artificial Sequence: Synthetic polypeptide"
DVLMTQSPLSLPVTPGEPASISCRSSQIIVHSNGNTYLEWYLQKPGQSPQLLIYKVSNRFSGVPDRFSGSGSGTDFTLKISRVEAEDVGVYYCFQGSHVPFTFGQGTKVEIK

SEQ ID NO: 19084 - protein, 125 aa, Mus musculus
DVLLTQTPLSLPVSLGDQASISCRSSQSIVHSNGNTYLEWYLQKPGQSPKLLIYKVSNRFSGVPDRFSGSGSGTDFTLKISRVEAEDLGVYYCFQGSHVPFTFGSGTKLEIKRADAAPTVSIFPP

SEQ ID NO: 19085 - protein, 112 aa, Artificial Sequence
  source: /note="Description of Artificial Sequence: Synthetic polypeptide"
DIQMTQSPSSLSASVGDRVTITCRSSQRIVHSNGNTYLEWYQQTPGKAPKLLIYKVSNRFSGVPSRFSGSGSGTDYTFTISSLQPEDIATYYCFQGSHVPFTFGQGTKLQIT

SEQ ID NO: 19086 - protein, 107 aa, Mus musculus
DIELTQSPKFMSTSVGDRVSVTCKASQNVDTNVAWYQQKPGQSPEPLLFSASYRYTGVPDRFTGSGSGTDFTLTISNVQSEDLAEYFCQQYNSYPLTFGGGTKLEIK

SEQ ID NO: 19087 - protein, 109 aa, Artificial Sequence
  source: /note="Description of Artificial Sequence: Synthetic polypeptide"
DIQLTQSPSFLSASVGDRVTITCRASQNVDTNLAWYQQKPGKAPKLLIYSASYRYTGVPSRFSGSGSGTEFTLTISSLQPEDFATYYCQQYNSYPLTFGGGTKVEIKRT

SEQ ID NO: 19088 - protein, 109 aa, Artificial Sequence
  source: /note="Description of Artificial Sequence: Synthetic polypeptide"
DIQLTQSPSFLSASVGDRVTITCKASQNVDTNVAWYQQKPGKAPKPLIYSASYRYTGVPSRFSGSGSGTEFTLTISSLQPEDFATYYCQQYNSYPLTFGGGTKVEIKRT

SEQ ID NO: 19089 - protein, 109 aa, Artificial Sequence
  source: /note="Description of Artificial Sequence: Synthetic polypeptide"
DIQLTQSPSFLSASVGDRVTITCKASQNVDTNVAWYQQKPGQAPRPLIYSASYRYTGVPSRFSGSGSGTEFTLTISSLQPEDFATYYCQQYNSYPLTFGGGTKVEIKRT

SEQ ID NO: 19090 - protein, 107 aa, Artificial Sequence
  source: /note="Description of Artificial Sequence: Synthetic polypeptide"
DIQMTQSPSSLSASVGDRVTITCRASQGIRNYLNWYQQKPGKAPKLLIYYTSSLHSGVPSRFSGSGSGTDFTLTISSLQPEDFATYYCQQYSKLPWTFGQGTKVEIK

SEQ ID NO: 19091 - protein, 107 aa, Artificial Sequence
  source: /note="Description of Artificial Sequence: Synthetic polypeptide"
DIQMTQSPSSLSASVGDRVTITCRASQGIRNYLNWYQQKPGKAPKLLIYYTSSLHSGVPSRFSGSGSGTDYTLTISSLQPEDFATYYCQQYSALPWTFGQGTKVEIK

SEQ ID NO: 19092 - protein, 107 aa, Artificial Sequence
  source: /note="Description of Artificial Sequence: Synthetic polypeptide"
DIQMTQSPSSLSASVGDRVTITCRASYGIRGYLNWYQQKPGKAPKLLIYYTSSLHSGVPSRFSGSGSGTDFTLTISSLQPEDFATYHCQQYSKLPWTFGQGTKVEIK

SEQ ID NO: 19093 - protein, 107 aa, Artificial Sequence
  source: /note="Description of Artificial Sequence: Synthetic polypeptide"
DIQMTQSPSSLSASVGDRVTITCRASYGIRGYLNWYQQKPGKAPKLLIYYTSSLHSGVPSRFSGSGSGTDFTLTISSLQPEDFATYHCQQYSALPWTFGQGTKVEIK

SEQ ID NO: 19094 - protein, 107 aa, Artificial Sequence
  source: /note="Description of Artificial Sequence: Synthetic polypeptide"
DIQMTQSPSSLSASVGDRVTITCRASRGIREYLNWYQQKPGKAPKLLIYYTGSLHSGVPSRFSGSGSGTDFTLTISSLQPEDFATYYCQQYSELPWTFGQGTKVEIK

SEQ ID NO: 19095 - protein, 107 aa, Artificial Sequence
  source: /note="Description of Artificial Sequence: Synthetic polypeptide"
DIQMTQSPSSLSASVGDRVTITCRASRGIREYLNWYQQKPGKAPKLLIYYTGSLHSGVPSRFSGSGSGTDFTLTISSLQPEDFATYYCQQYSALPWTFGQGTKVEIK

SEQ ID NO: 19096 - protein, 108 aa, Artificial Sequence
  source: /note="Description of Artificial Sequence: Synthetic polypeptide"
DIVLTQSPATLSASPGEKVTLTCSASSSVSSSYLYWYQQKPGQAPKLLIYSTSNLASGVPARFSGSGSGTSYSLTISSLEPEDFATYYCHQWSSYPYTFGGGTKLEIK

SEQ ID NO: 19097 - protein, 108 aa, Artificial Sequence
  source: /note="Description of Artificial Sequence: Synthetic polypeptide"
EIVLTQSPGTLSLSPGERATLSCRASQSVSSHHLAWYQQKPGQAPRLLIYDASSRATGIPDRFSGSGSGTDFTLTISRLEPEDFAVYYCQQPRGAPTTFGQGTKVEIK

SEQ ID NO: 19098 - protein, 108 aa, Homo sapiens
ETTLTQSPDTLSLSPGERATLSCRASQSLSNNFLAWYQQKSGQAPRLLIYAASSRATGIPDRFSGSGSGTDFTLTISRLEPEDFAVYYCQQYAASAITFGQGTRLEIK

SEQ ID NO: 19099 - protein, 107 aa, Homo sapiens
DIQMTQSPSFLSASVGDRVTITCRASQGINNYLAWYQQKPGRAPKLLIYAASSLQSGVPSRFSGSGSGTDFTLTISSLQPEDFATYYCLQDSDYPLTFGGGTKLEIK

SEQ ID NO: 19100 - protein, 108 aa, Homo sapiens
SSELTQDPAVSVALGQTVRITCQGDSLRSYYASWYQQKPGQAPVLVIYGKNNRPSGIPDRFSGSSSGNTASLTITGAQAEDEADYYCNSRDSSGNHVVFGGGTKLTVL

SEQ ID NO: 19101 - protein, 108 aa, Homo sapiens
SSELTQDPAVSVALRQTVRITCQGDSLTRYYTNWYQQKPGQAPILVIYGENNRPSGIPDRFSGSRSGNTASLTITGAQAEDEADYYCNSRDNTGKHWVFGGGTKLTVL

SEQ ID NO: 19102 - protein, 110 aa, Homo sapiens
QSALTQPASVSGSPGQSITISCTATSSNVGAYNFVSWYQQHPGKAPKVLIYRVSNRPSGVSNRFSGSKSGNTASLTISGLQADDEADYYCSSYTTDYIWVFGGGTKLTVL

SEQ ID NO: 19103 - protein, 110 aa, Homo sapiens
QSALTQPASVSGSPGQSITISCTATSSNVGAYNFVSWYQQHPGKAPKVLIYRVSNRPSGVSNRFSGSKSGNTASLTISGLQADEEADYYCSSYTTDYIWVFGGGTKLTVL

SEQ ID NO: 19104 - protein, 110 aa, Homo sapiens
QSVLTQPPSVSGTPGQRVTISCYGSSSDIGNNFVYWYQQVPGMAPKLLIYRSHQRPSGVSDRFSGSKSGTSASLAISGLRSEDEADYYCATWGDNLRGWVFGGGTKLTVL

SEQ ID NO: 19105 - protein, 108 aa, Homo sapiens
SSELTQDPAVSVALGQTVRITCQGDSLRSYYASWYQQKPGQAPVLVIYGKNNRPSGVPDRFSGSSSGNTASLTITGAQAEDEADYYCNSRDSSGNHVVFGGGTKLTVL

SEQ ID NO: 19106 - protein, 108 aa, Homo sapiens
SSELTQDPAVSVALGQTVRITCQGDSLRTYYASWYQHKPGQAPVLVMYGKDNRPSGIPDRFSGSSSGTTASLTITGAQAEDEADYYCNSRDSSGHPVVFGGGTKLTVL

SEQ ID NO: 19107 - protein, 111 aa, Homo sapiens
QAVLTQPSSVSGAPGQRVTIPCTGSSSNIGAGYDVNWYQQLPGTAPKLLIFHNNIRPSGVPDRFSGSKSGTSVSLAITGLQAEDEADYYCQSYDSSLSAWVFGGGTKVTVL

SEQ ID NO: 19108 - protein, 110 aa, Homo sapiens
QAVLTQPSSISGAPGQRVTISCTGTSSNIGAGNAVHWYQQLPGTAPRLLIFADNRRPSGVPDRFSASKSATSASLAITGLQVDDEAEYYCQSYDTRLRVVFGGGTKVTVL

SEQ ID NO: 19109 - protein, 112 aa, Artificial Sequence
  source: /note="Description of Artificial Sequence: Synthetic polypeptide"
DIVMTQAAPSVPVTPGESVSISCRSSKSLLHSNGNTYLYWFLQRPGQSPQLLIYRMSNLASGVPDRFSGSGSGTAFTLRISRVEAEDVGVYYCMQHLEYPYTFGGGTKLEIK

SEQ ID NO: 19110 - protein, 112 aa, Artificial Sequence
  source: /note="Description of Artificial Sequence: Synthetic polypeptide"
DVVMTQTPLSLPVSLGDQASISCRSSQSLLKNNGNTFLHWYLQKSGQSPKLLIYKVSNRLSGVPDRFSGSGSGTYFTLKISRVEAEDLGVYFCSQSTHIPYTFGGGTKLEIK

SEQ ID NO: 19111 - protein, 109 aa, Artificial Sequence; identical to SEQ ID NO: 16196
  source: /note="Description of Artificial Sequence: Synthetic polypeptide"

SEQ ID NO: 19112 - protein, 109 aa, Artificial Sequence; identical to SEQ ID NO: 16198
  source: /note="Description of Artificial Sequence: Synthetic polypeptide"

SEQ ID NO: 19113 - protein, 108 aa, Mus sp.; identical to SEQ ID NO: 16195

SEQ ID NO: 19114 - protein, 108 aa, Artificial Sequence
  source: /note="Description of Artificial Sequence: Synthetic polypeptide"
SELTQDPAVSVALGQTVRITCQGDSLRTFYASWYQQKPGQAPVLVIYGKNNRPSGIPDRFSGSSSGNTASLTITGAQAEDEADYYCNSSLYPRTPVVFGGGTKLTVLG

SEQ ID NO: 19115 - protein, 108 aa, Artificial Sequence
  source: /note="Description of Artificial Sequence: Synthetic polypeptide"
SELTQDPAVSVALGQTVRITCQGDSLRSYYASWYQQKPGQAPVLVIYGKNNRPSGIPDRFSGSSSGNTASLTITGAQAEDEADYYCNSPYRPKKLVVFGGGTKLTVLG

SEQ ID NO: 19116 - protein, 108 aa, Artificial Sequence
  source: /note="Description of Artificial Sequence: Synthetic polypeptide"
SELTQDPAVSVALGQTVRITCQGDSLRSYYASWYQQKPGQAPVLVIYGKNNRPSGIPDRFSGSSSGNTASLTITGAQAEDEADYYCNSFGRALPSVVFGGGTKLTVLG

SEQ ID NO: 19117 - protein, 108 aa, Artificial Sequence
  source: /note="Description of Artificial Sequence: Synthetic polypeptide"
EIVLTQSPGTLSLSPGERATLSCRASQSVSSSYLAWYQQKPGQAPRLLIYGASSRATGIPDRFSGSGSGTDFTLTISRLEPEDFAVYYCQQGGSLPLTFGQGTKVEIK

SEQ ID NO: 19118 - protein, 107 aa, Artificial Sequence; identical to SEQ ID NO: 6292
  source: /note="Description of Artificial Sequence: Synthetic polypeptide"

SEQ ID NO: 19119 - protein, 108 aa, Mus musculus
DIQMTQTTSSLSASLGDRVTISCSASQGISNYLNWYQQKPDGTVKLLIYSTSSLHSGVPSRFSGSGSGTDYSLTISSLEPEDIATYYCQQYSKLPLTFGAGTKLELKR

SEQ ID NO: 19120 - protein, 108 aa, Mus musculus
DIQMTQTTSSLSASLGDRVTISCSASQGVSNYLNWYQQKPDGTVKLLIYSTSSLHSGVPSRFSGSGSGTDYSLTISNLEPEDVATYYCQQYSKLPFTFGSGTKLEIKR

SEQ ID NO: 19121 - protein, 107 aa, Mus musculus
DIQMTQTTSSLSASLGDRVTISCSASQGISNYLNWYQQKPDGTVKLLIYYTSSLHSGVPSRFSGSGSGTDYSLTISNLEPEDIATYYCQQYSKLPLTFGAGTKLELK

SEQ ID NO: 19122 - protein, 108 aa, Mus musculus
DIQMTQPTSSLSASLGDTVTISCSASQDISNYLNWYQQKPDGTLKLLIYYTSSLHSGVPSRFSGSGSGTDYSLTISNLEPEDIATYYCQQFSKLPLTFGAGTKLELKR

SEQ ID NO: 19123 - protein, 112 aa, Mus musculus; identical to SEQ ID NO: 11006

SEQ ID NO: 19124 - protein, 111 aa, Mus musculus
NIVLTQSPASLAVSLGQRATISCRASESVDSYGRSFMHWYQQRPGQPPTLLIYLASNLESGVPVRFSGSGSRTDFTLTIDPVEADDAATYYCQQDNEDPYTFGGGTKLEIK

SEQ ID NO: 19125 - protein, 111 aa, Mus musculus
NIVLTQSPASLAVSLGQRATISCRASESVDSYGRSFMHWYQQRPGQPPTLLIYLASNLESGVPARFSGSGSRTDFTLTIDPVEADDAATYYCQQDNEDPYTFGGGTKLEIK

SEQ ID NO: 19126 - protein, 107 aa, Mus musculus
DIVLTQSPATLSVTPGDSVSLSCRASQSISKNLHWYQQKSHESPRLLIKYASQSISGIPSRFSGSGSGTDFTLSINSVETEDFGIYFCQQINSWPLTFGAGTKLELK

SEQ ID NO: 19127 - protein, 108 aa, Oryctolagus cuniculus
DMTQTPASVEVAVGGTVTIKCQASQNIGSNLAWYQQKPGQPPKLLIYKASTLASGVPSRFRGSGSGTEFTLAISDLECADAATYYCQQGYTTKDLVNPFGGGTEVVVK

SEQ ID NO: 19128 - protein, 108 aa, Oryctolagus cuniculus
DMTQTPASVEVAVGGTVTIKCQASQNIGSNLAWYQQKPGQPPKLLISKASTLASGVPSRFKGSGSGTEFTLAISDLECADAATYYCQQGYTTKNVVNPFGGGTEVVVK

SEQ ID NO: 19129 - protein, 108 aa, Oryctolagus cuniculus
DMIQTPASVEVAVGGTVTINCQASQNIGSNLAWYQQKPGQPPKLLIYGTSTLASGVSSRFKGSGFGTQFTFTISDVECTDAATYYCQQAYSISNVDNAFGGGTEVVVK

SEQ ID NO: 19130 - protein, 108 aa, Oryctolagus cuniculus
IVMTQTPSPVSGAVGGTVTINCQASQSIGSNLAWYQQKPGQPPKLLIYSASILASGAPSRVSGSGYGTEFTLTISGVQCADAATYYCQQGYTTNADNIFGGGTEVVVE

SEQ ID NO: 19131 - protein, 108 aa, Oryctolagus cuniculus
VMTQTPASVSGPVGGTVTIKCQASQSIGSNLGWYQQKPGQPPKLLIFSASNLESGVPSRFKGSGSGTQFTLTISDLECDDAATYYCQQGYTTNNVLNAFAGGTEVVVK

SEQ ID NO: 19132 - protein, 107 aa, Oryctolagus cuniculus
QMCLRHDPDSSLCGGSCGRHSHHQLPGQSEHWFSLVSAETRAASQAPDLWCIHSGIWGLIAVQRQWIWDTVHFHHQRRGVYRCCHLLLSTGICACRCFRRRDRDGGQ

SEQ ID NO: 19133 - protein, 108 aa, Oryctolagus cuniculus
DMIQTPASVEVAVGGTVTINCQASQSIGSNLAWYQQKPGQPPKLLIYGASTLASGVPSRFKGSGSGTQFTFTISDVECTAAATYYCQQAYSISNVDNAFGGGTEVVVK

SEQ ID NO: 19134 - protein, 108 aa, Oryctolagus cuniculus
DMTQTPASVEAAVGGTVTIKCQASQNIGSNLAWYQQKPGQRPKLLIYSASTLASGVPSRFKGSGSGTQFTLTISGVQCDDAATYYCQQGYSVGNVNNAFGGGTEVVVK

SEQ ID NO: 19135 - protein, 110 aa, Oryctolagus cuniculus
AYDMIQTPASVEVAVGGTVTINCQASQTIGTNLAWYQQKPGQRPKLLIYAASTLPSGVSSRFKGSGSGTQFTLTISDVECSDAATYYCQQAYSVGNVDNAFGGGTEVVVK

SEQ ID NO: 19136 - protein, 108 aa, Oryctolagus cuniculus
DMIQTPASVEVAVGGTVTINCQASQNIGSNLAWYQQKPGQPPKLLIYGTSTLASGVSSRFKGSGFGTQFTFTISDVECTDAATYYCQQAYSTSKIDNAFGGGTEVVVK

SEQ ID NO: 19137 - protein, 108 aa, Oryctolagus cuniculus
DMIQTPASVEVAVGGTVTINCQASQSIGSNLAWYQQKPGQPPKLLIYSASTLASGVSSRFKGSGSGTDYTLTISDVECTDAATYYCQQAYSISNVENPFGGGTEVVVK

SEQ ID NO: 19138 - protein, 108 aa, Oryctolagus cuniculus
DMTQTPASVEVAVGGTVTIKCQASQNIGYNLAWYQQKPGQPPKLLIYGASTLASGVPSRFKGSGSGTQFTLTISGVQCDDAATYYCQQGYSVSNIDNAFGGGTEVVVK

SEQ ID NO: 19139 - protein, 107 aa, Oryctolagus cuniculus
DMTQTPASVEAAVGGTVTIKCQASQSIGSYLSWYHQKPGQPPKLLIYRASTLASGVPSRFKGSGSGTQFTLTISDLECADAATYYCQQGYSANVDNAFGGGTEVVVK

SEQ ID NO: 19140 - protein, 108 aa, Oryctolagus cuniculus
DMTQTPASVSAAVGGTVTINCQASQSIGSNLGWYQQKPGQPPKLLIYGASTLASGVSSRFKGSGSGTHFAFTISDVECTDAATYYCQQAYSVGNVDNAFGGGTEVVVK

SEQ ID NO: 19141 - protein, 108 aa, Oryctolagus cuniculus
DMTQTPASVEVAVGGTVTIKCQASQSIGSNLAWYQQKPGQSPKLLIYSASILASGVPSRFKGSGSGTQFTLTISGVQCDDAATYYCQQGYSVGNIDNAFGGGTEVVVK

SEQ ID NO: 19142 - protein, 108 aa, Oryctolagus cuniculus
DMIQTPASVEVAVGGTVTINCQASQSIGSNLAWYQQKPGQPPKLLIYLASTLPSGVPSRFKGSGSGTQFTFTISDVECTDAATYYCQQAYTASNVDNAFGGGTEVVVK

SEQ ID NO: 19143 - protein, 111 aa, Oryctolagus cuniculus
IVMTQTPASVEAAVGGTVTIKCQASQNIYNYLAWYQQQPGQPPKLLIYSASNLASGVSSRFKGSGSGTEFTLTISDLECGDAATYYCQSYYDSSRISYGSAFGGGTEVVVK

SEQ ID NO: 19144 - protein, 108 aa, Oryctolagus cuniculus
DMTQTPASVEVAVGGTVTIKCQASQNIGSNLAWYQQKPGQPPKLLIYKASTLASGVPSRFRGSGSGTEFTLAISDLECADAATYYCQQGYTTKDVVNPFGGGTEVVVK

SEQ ID NO: 19145 - protein, 108 aa, Oryctolagus cuniculus
DMTQTPASVEAAVGGAVTIKCQASQNIGSNLAWYHQKPGQPPKLLISKASTLASGVPSRFKGSGSGTEFTLAISDLECADAATYYCQQGYTTKNVVNPFGGGTEVVVK

SEQ ID NO: 19146 - protein, 110 aa, Artificial Sequence
  source: /note="Description of Artificial Sequence: Synthetic polypeptide"
DIQMTQSPSSLSASVGDRVTIKCQASQNIGSNLAWYQQKPGKPPKLLISKASTLASGVPSRFSGSGSGTDFTLTISSLQPEDFATYYCQQGYTTKNVVNPFGGGTKVEIK

SEQ ID NO: 19147 - protein, 108 aa, Oryctolagus cuniculus
DMTQTPASVEVAVGGTVTIKCQASQNIGSNLAWYQQKPGQRPKLLIYSASTLASGVPSRFKGSGSGTQFTLTISGVQCDDAATYYCQQGYSVGNVNNAFGGGTEVVVK

SEQ ID NO: 19148 - protein, 108 aa, Oryctolagus cuniculus
DMIQTPASVEVVVGGTVTFNCQASQNIGSNLAWYQQKPGQPPKLLIYSASTLASGVPSRFKGSGSGTQFTFTISDVECTDAATYYCQQAYSISNVDNAFGGGTEVVVK

SEQ ID NO: 19149 - protein, 108 aa, Oryctolagus cuniculus
DMIQTPASVEVGVGGTVTINCQASQNIGSNLAWYQQKPGQPPKFLIYGASTLASGVSSRFKGSGSGTRFTFTISDVECTDAATYYCQQAYSVGNVDNAFGGGTEVVVK

SEQ ID NO: 19150 - protein, 112 aa, Oryctolagus cuniculus
DIVMTQTPASVEAAVGGTVTIKCQASENIYNYLSWYQQKPGQPPKLLIYEASKLASGVSSRFKGSGSGTEFTLTISDLECADAATYYCQSYYDVTSHSYDNPFGGGTEVVVS

SEQ ID NO: 19151 - protein, 108 aa, Oryctolagus cuniculus
DMIQTPASVEVAVGGTVTINCQASQSIGSNLAWYQQKPGQRPKLLIYGASTLASGVSSRVKGSGSGTQFTFTISDVECTDAATYYCQQAYSISNVDNAFGGGTEVVVK

SEQ ID NO: 19152 - protein, 108 aa, Oryctolagus cuniculus
DMIQTPASVSEPVGGTVTINCQASQNIGSNLAWYQQKPGQPSKLLIYKASTLASGVPSRFKGSGSGTDFTLTISDLECADAATYYCQQAYTISNVDNAFGGGTEVVVK

SEQ ID NO: 19153 - protein, 108 aa, Oryctolagus cuniculus
DMIQTPASVEVAVGGTVTIGCQASQSIGSNLGWYQQKPGQPPKLLIYSASTLASGVSSRFKGSGSGTEFTLTISDVECDDAATYYCQQAYSVSNVDNAFGGGTEVVVK

SEQ ID NO: 19154 - protein, 108 aa, Oryctolagus cuniculus
DMTQTPASVEVAVGGTVTINCQASQNIGSNLAWYQQKPGQPPKLLIYGASTLASGVSSRFKGSGSGTQFTFTISDVECTDPATYYCQQAYSISNVDNPFGGGTEVVVK

SEQ ID NO: 19155 - protein, 108 aa, Oryctolagus cuniculus
DMTQTPASVEVAVGGTVTIKCQASQNIGSNLAWYQQKPGQPPKLLIYSTSTVASGVPSRFKGSGFGTQFTLTISGVQCDDAATYYCQQGYSAGNVNNPFGGGTEVVVK

SEQ ID NO: 19156 - protein, 109 aa, Oryctolagus cuniculus
DMTQTPASVSEPVGGTVTIKCQASQNIGSNLAWYQQKPGQRPKLLIYRASTLASGVSSRFKGSGSGTQFTLTISDLECADAATYYCQQGYSAGNVDNNTFGGGTEVVVK

SEQ ID NO: 19157 - protein, 109 aa, Oryctolagus cuniculus
DMTQTPASVSEPVGGTVTIKCQASQNIGSNLAWYQQKPGQRPKLLIYRASTLASGVSSRFKGSGSGTQFTLTISDLECADAATYYCQQGYSAGNVDKHVFGGGTEVVVK

SEQ ID NO: 19158 - protein, 108 aa, Oryctolagus cuniculus
DMIQTPASVSEPVGGTVTIVCQASQNIGSNFAWYQQKPGQPPKLLIYRASTLASGVSSRFKGSGFGTQFTLTISDLECADAATYYCQQGYSAGNVDNNFGGGTEVVVK

SEQ ID NO: 19159 - protein, 111 aa, Artificial Sequence
  source: /note="Description of Artificial Sequence: Synthetic polypeptide"
DIQMTQSPSSLSASVGDRVTIKCQASQNIGSNLAWYQQKPGKRPKLLIYRASTLASGVPSRFSGSGSGTDFTLTISSLQPEDFATYYCQQGYSAGNVDNNAFGGGTKVEIK

SEQ ID NO: 19160 - protein, 109 aa, Oryctolagus cuniculus
DMTQTPASVSDPVGGTVTIKCQASQNIGSNLAWYQQKPGQRPKLLIYRASTLASGVSSRFKGSGSGTQFTLTISDLECADAATYYCQQGYSAGNVDNNAFGGGTEVVVK

SEQ ID NO: 19161 - protein, 108 aa, Oryctolagus cuniculus
DMTQTPASVEVAVGGTVTINCQASQNIGSNLAWYQQKPGQPPKLLIYKASTLASGVPSRLKGSGSGTEFTLTISGVQCDDAATYYCQQGYTTGNVDNPFGGGTEVVVK

SEQ ID NO: 19162 - protein, 108 aa, Oryctolagus cuniculus
DMTQTPASVSEPVGGTVTIKCQASQNIGSNLAWYQQKPGQRPKLLIYRASTLASGVSSRFKGSGSGTQFTLTISDLECADAATYYCQQGYSAGNVDNSFGGGTEVVVK

SEQ ID NO: 19163 - protein, 110 aa, Artificial Sequence
  source: /note="Description of Artificial Sequence: Synthetic polypeptide"
DIQMTQSPSSLSASVGDRVTINCQASQSIGSNLAWYQQKPGKAPKLLIYAASTLPSGVSSRFSGSGSGTDFTLTINSLEAEDAATYYCQQAYSVGNVDNAFGGGTKVEIK

SEQ ID NO: 19164 - protein, 110 aa, Artificial Sequence
  source: /note="Description of Artificial Sequence: Synthetic polypeptide"
DIQMTQSPSSLSASVGDRVTINCQASQTIGTNLAWYQQKPGKRPKLLIYAASTLPSGVPSRFSGSGSGTDFTLTISSLQPEDFATYYCQQAYSVGNVDNAFGGGTKVEIK

SEQ ID NO: 19165 - protein, 110 aa, Artificial Sequence
  source: /note="Description of Artificial Sequence: Synthetic polypeptide"
DIQMTQSPSSLSASVGDRVTINCQASQSIGSNLAWYQQKPGKRPKLLIYAASTLPSGVPSRFSGSGSGTDFTLTISSLQPEDFATYYCQQAYSVGNVDNAFGGGTKVEIK

SEQ ID NO: 19166 - protein, 111 aa, Artificial Sequence
  source: /note="Description of Artificial Sequence: Synthetic polypeptide"
NIVLTQSPASLSVSLGQRATISCRASESVDSYGRSFMHWYQQRPGQAPRLLIYLASNLESGVPARFSGSGSRTDFTLTISSVEAEDEATYYCQQDNEDPYTFGGGTKLEIK

SEQ ID NO: 19167 - protein, 111 aa, Artificial Sequence
  source: /note="Description of Artificial Sequence: Synthetic polypeptide"
NIVLTQSPASLSVSLGQRATISCRASESVDSYGRSFMHWYQQRPGQAPKLLIYLASNLESGVPARFSGSGSRTDFTLTISSVEAEDEATYYCQQDNEDPYTFGGGTKLEIK

SEQ ID NO: 19168 - protein, 111 aa, Artificial Sequence
  source: /note="Description of Artificial Sequence: Synthetic polypeptide"
NIVLTQSPASLSVSLGQRATISCRASESVDSYGRSFMHWYQQKPGQAPKLLIYLASNLESGVPSRFSGSGSRTDFTLTISAVEAEDAATYYCQQDNEDPYTFGGGTKLEIK

SEQ ID NO: 19169 - protein, 111 aa, Artificial Sequence
  source: /note="Description of Artificial Sequence: Synthetic polypeptide"
NIVLTQSPASLSVSLGQRATISCRASESVDSYGRSFMHWYQQKPGQAPKLLIYLASNLESGVPSRFSGSGSRTDFTLTISRVEAEDAATYYCQQDNEDPYTFGGGTKLEIK

SEQ ID NO: 19170 - protein, 111 aa, Artificial Sequence
  source: /note="Description of Artificial Sequence: Synthetic polypeptide"
DIVMTQSPDSLAVSLGERATINCRASESVDSYGRSFMHWYQQKPGQAPRLLIYLASNLESGVPSRFSGSGSGTDFTLTINSLEAEDAATYYCQQDNEDPYTFGGGTKLEIK

SEQ ID NO: 19171 - protein, 108 aa, Artificial Sequence; identical to SEQ ID NO: 11385
  source: /note="Description of Artificial Sequence: Synthetic polypeptide"

SEQ ID NO: 19172 - protein, 108 aa, Artificial Sequence
  source: /note="Description of Artificial Sequence: Synthetic polypeptide"
EIVLTQSPGTLSLSPGERATLSCRASQSVRSNDLAWYQQKPGQAPRLLLYGASSRATGIPDRFSGSGSGTDFTLTISRLEPEDFVVYYCQQYGSSPRTFGQGTKVEMK

SEQ ID NO: 19173 - protein, 108 aa, Artificial Sequence
  source: /note="Description of Artificial Sequence: Synthetic polypeptide"
EIVLTQSPGTLSLSPGERATLSCRASQSVRSNDLAWYQQKPGQAPRLLLYGASSRATGIPDRFSGSGSGTDFTLTISRLEPEDFVVYYCQQYGSSPRTFGQGTKVEIK

SEQ ID NO: 19174 - protein, 108 aa, Artificial Sequence
  source: /note="Description of Artificial Sequence: Synthetic polypeptide"
EIVLTQSPGTLSLSPGERATLSCRASQSVRSNDLAWYQQKPGQAPRLLIYGASSRATGIPDRFSGSGSGTDFTLTISRLEPEDFAVYYCQQYGSSPRTFGQGTKVEIK

SEQ ID NO: 19175 - protein, 111 aa, Artificial Sequence
  source: /note="Description of Artificial Sequence: Synthetic polypeptide"
EIVMTQSPFSLPVTPGEPASISCRSSQNLLHSNGYNYLDWYLQKPGQSPQLLIYLGSNRASGVPDRFSGSGSGTDFTLKISRVEAEDVGVYYCMQALQTLTFGGGTKVEIR

SEQ ID NO: 19176 - protein, 111 aa, Artificial Sequence
  source: /note="Description of Artificial Sequence: Synthetic polypeptide"
DIVMTQSPFSLPVTPGEPASISCRSSQNLLHSNGYNYLDWYLQKPGQSPQLLIYLGSNRASGVPDRFSGSGSGTDFTLKISRVEAEDVGVYYCMQALQTLTFGGGTKVEIK

SEQ ID NO: 19177 - protein, 111 aa, Artificial Sequence
  source: /note="Description of Artificial Sequence: Synthetic polypeptide"
DIVMTQSPLSLPVTPGEPASISCRSSQNLLHSNGYNYLDWYLQKPGQSPQLLIYLGSNRASGVPDRFSGSGSGTDFTLKISRVEAEDVGVYYCMQALQTLTFGGGTKVEIK

SEQ ID NO: 19178 - protein, 111 aa, Artificial Sequence
  source: /note="Description of Artificial Sequence: Synthetic polypeptide"
DIVMTQSPLSLPVTPGEPASISCRSSQSLLHSNGNNYLDWYLHKPGQSPQLLIYLGSNRASGVPDRFSGSGSGTDFTLKISRVEAEDVGVYYCMQALQTLTFGGGTKVEIK

SEQ ID NO: 19179 - protein, 111 aa, Artificial Sequence
  source: /note="Description of Artificial Sequence: Synthetic polypeptide"
DIVMTQSPLSLPVTPGEPASISCRSSQSLLHSNGNNYLDWYLQKPGQSPQLLIYLGSNRASGVPDRFSGSGSGTDFTLKISRVEAEDVGVYYCMQALQTLTFGGGTKVEIK

SEQ ID NO: 19180 - protein, 111 aa, Artificial Sequence
  source: /note="Description of Artificial Sequence: Synthetic polypeptide"
DIVMTQSPLSLPVTPGEPASISCRSSQSLLHSNGYNYLDWYLQKPGQSPQLLIYLGSNRASGVPDRFSGSGSGTDFTLKISRVEAEDVGVYYCMQALQTLTFGGGTKVEIK

SEQ ID NO: 19181 - protein, 111 aa, Artificial Sequence
  source: /note="Description of Artificial Sequence: Synthetic polypeptide"
DIVMTQSPLSLPVTPGEPASISCRSSQSLLHSNGYKYLDWYLQKPGQSPQLLIYLGSNRASGVPDRFSGSGSGTDFTLKISRVEAEDVGVYYCMQALQTLTFGGGTKVEIK

SEQ ID NO: 19182 - protein, 111 aa, Artificial Sequence
  source: /note="Description of Artificial Sequence: Synthetic polypeptide"
DIVMTQSPLSLPVTPGEPASISCRSSQSLLHSNGYNYLDWYLQKPGQSPQLLIYLGSNRASGVPDRFSGSGSGTDFTLRISRVEAEDVGVYYCMQALQTLTFGGGTKVEIK

SEQ ID NO: 19183 - protein, 111 aa, Artificial Sequence
  source: /note="Description of Artificial Sequence: Synthetic polypeptide"
DIVMTQSPLSLPVTPGEPASISCRSSQSLLHSNGYNYLDWYLQKPGQSPQLLIYLGSNRASGVPDRFSGSGSGTDFTLQISRVEAEDVGVYYCMQALQTLSFGGGTKVEIK

SEQ ID NO: 19184 - protein, 111 aa, Artificial Sequence
  source: /note="Description of Artificial Sequence: Synthetic polypeptide"
DIVMTQSPLSLPVTPGEPASISCRSSQSLLHSNGYNYLDWYLQKPGQSPQLLIYLGSNRASGVPDRFSGSGSGTDFTLKISRVEAEDVGVYYCMQALQTLSFGGGTKVEIK

SEQ ID NO: 19185 - protein, 111 aa, Artificial Sequence
  source: /note="Description of Artificial Sequence: Synthetic polypeptide"
DIVMTQSPLSLPVSPGEPASISCRSSQSLLHSNGNNYLDWYLQKPGQSPQLLIYLGSNRASGVPDRFSGSGSGTDFTLKISRVEAEDVGVYYCMQALQTLTFGGGTKVEIK

SEQ ID NO: 19186 - protein, 111 aa, Artificial Sequence
  source: /note="Description of Artificial Sequence: Synthetic polypeptide"
DIVMTQSPLSLPVTPGEPASISCRSSQSLLHSNGYNYLDWYLQKPGQSPQLLIYLGSNRASGVPDRFSGSGSGTDFTLKISRVEAEDVGIYYCMQALQTLTFGGGTKVEIK

SEQ ID NO: 19187 - protein, 111 aa, Artificial Sequence
  source: /note="Description of Artificial Sequence: Synthetic polypeptide"
DIVMTQSPLSLPVTPGEPASISCRSSQSLLHNNGYNYLDWYLQKPGQSPHLLIYLGSNRASGVPDRFSGSGSGTDFTLKISRVAAEDVGVYYCMQALQTLTFGGGTKVEIK

SEQ ID NO: 19188 - protein, 111 aa, Artificial Sequence
  source: /note="Description of Artificial Sequence: Synthetic polypeptide"
DIVMTQSPLSLPVTPGEPASISCRSSQSLLHNNGYNYLDWYLQKPGQSPQLLIYLGSNRASGVPDRFSGSGSGTDFTLKISRVEAEDVGVYYCMQALQTLTFGGGTKVEIK

SEQ ID NO: 19189 - protein, 111 aa, Artificial Sequence
  source: /note="Description of Artificial Sequence: Synthetic polypeptide"
DIVLTQSPLSLPVTPGEPASISCRSSQSLLHSNGYNYLDWYLQKPGQSPQLLIYLGSNRASGVPDRFSGSGSGTDFTLKISRVEAEDVGVYYCMQALQTLTFGGGTKVEIK

SEQ ID NO: 19190 - protein, 112 aa, Artificial Sequence
  source: /note="Description of Artificial Sequence: Synthetic polypeptide"
DLVMTQSPLSLPVTPGEPASISCRSSQSLLYSNGYNYLDWYLQKTGQSPQLLIYLGSNRASGVPDRFSGSGSGTDFTLKISRVEAEDVGVYYCMQALQTPHTFGQGTKLEIK

SEQ ID NO: 19191 - protein, 112 aa, Artificial Sequence
  source: /note="Description of Artificial Sequence: Synthetic polypeptide"
DIVMTQSPLSLPVTPGEPASISCRSSQSLLYSNGYNYLDWYLQKTGQSPQLLIYLGSNRASGVPDRFSGSGSGTDFTLKISRVEAEDVGVYYCMQALQTPHTFGQGTKLEIK

SEQ ID NO: 19192 - protein, 112 aa, Artificial Sequence
  source: /note="Description of Artificial Sequence: Synthetic polypeptide"
DIVMTQSPLSLPVTPGEPASISCRSSQSLLYSNGYNYLDWYLQKPGQSPQLLIYLGSNRASGVPDRFSGSGSGTDFTLKISRVEAEDVGVYYCMQALQTPHTFGQGTKLEIK

SEQ ID NO: 19193 - protein, 111 aa, Artificial Sequence
  source: /note="Description of Artificial Sequence: Synthetic polypeptide"
DIVMTQSPLSLPVTPGEPASISCRSSQSLLHSNGYNYLDWYLQKPGQSPQLLIYLGSNRASGVPDRFSGSGSGTDFTLRISRVEAEDVGVYYCMQALQTLTFGGGTKVKIK

SEQ ID NO: 19194 - protein, 112 aa, Artificial Sequence
  source: /note="Description of Artificial Sequence: Synthetic polypeptide"
DIVMTQSPLSLSVTPGEPASISCRSSQSLLHSNGYNYLDWFLQKPGQSPQLLIYLGSNRASGVPDRFSGSGSGTDFTLKISRVEAEDVGVYYCMQPLQTPLTFGGGTKVEIK

SEQ ID NO: 19195 - protein, 112 aa, Artificial Sequence
  source: /note="Description of Artificial Sequence: Synthetic polypeptide"
DIVMTQSPLSLPVTPGEPASISCRSSQSLLHSNGYNYLDWYLQKPGQSPQLLIYLGSNRASGVPDRFSGSGSGTDFTLKISRVEAEDVGVYYCMQPLQTPLTFGGGTKVEIK

SEQ ID NO: 19196 - protein, 112 aa, Artificial Sequence
  source: /note="Description of Artificial Sequence: Synthetic polypeptide"
DIVMTQSPLSLPVTPGEPASISCRSSQSLLHSNGYNYLDWYLQKPGQSPQLLIYLGSNRASGVPDRFSGSGSGTDFTLKISRVEAEDVAIYYCMQALQIPWTFGQGTKVEIK

SEQ ID NO: 19197 - protein, 112 aa, Artificial Sequence
  source: /note="Description of Artificial Sequence: Synthetic polypeptide"
DIVMTQSPLSLPVTPGEPASISCRSSQSLLHSNGYNYLDWYLQKPGQSPQLLIYLGSNRASGVPDRFSGSGSGTDFTLKISRVEAEDVGVYYCMQALQIPWTFGQGTKVEIK

SEQ ID NO: 19198 - protein, 107 aa, Artificial Sequence
  source: /note="Description of Artificial Sequence: Synthetic polypeptide"
DIQMTQSPSTLSASVGDRVTITCRASQSISSWLAWYQQKPGKAPKLLIYKASNLKSGVPSRFSGSGSGTEFTLTISSLQPDDFATYYCQQYNSYSWTFGQGTKVEIK

SEQ ID NO: 19199 - protein, 107 aa, Artificial Sequence
  source: /note="Description of Artificial Sequence: Synthetic polypeptide"
DIQMTQSPSTLSASVGDRVTITCRASQSISSWLAWYQQKPGKAPKLLIYKASSLESGVPSRFSGSGSGTEFTLTISSLQPDDFATYYCQQYNSYSWTFGQGTKVEIK

SEQ ID NO: 19200 - protein, 107 aa, Artificial Sequence
  source: /note="Description of Artificial Sequence: Synthetic polypeptide"
AIQMTQSPSTLSASVGDRVTITCRASQSISSWLAWYQQKPGKAPKLLIYKASSLESGVPSRFSGSGSGTEFTLTISSLQPDDFATYYCQQYNSYSWTFGQGTKVEIK

SEQ ID NO: 19201 - protein, 107 aa, Artificial Sequence
  source: /note="Description of Artificial Sequence: Synthetic polypeptide"
AIQMTQSPSTLSASVGDRVTITCRASRSINSWLAWYQQKPGKAPKLLIYKASSLESGVPSRFSGSGSGTEFTLTISSLQPDDFASYYCQQYNNYSWTFGQGTKVEIK

SEQ ID NO: 19202 - protein, 107 aa, Artificial Sequence
  source: /note="Description of Artificial Sequence: Synthetic polypeptide"
DIQMTQSPSTLSASVGDRVTITCRASRSINSWLAWYQQKPGKAPKLLIYKASSLESGVPSRFSGSGSGTEFTLTISSLQPDDFASYYCQQYNNYSWTFGQGTKVEIK

SEQ ID NO: 19203 - protein, 107 aa, Artificial Sequence
  source: /note="Description of Artificial Sequence: Synthetic polypeptide"
DIQMTQSPSTLSASVGDRVTITCRASRSINSWLAWYQQKPGKAPKLLIYKASSLESGVPSRFSGSGSGTEFTLTISSLQPDDFATYYCQQYNNYSWTFGQGTKVEIK

SEQ ID NO: 19204 - protein, 107 aa, Artificial Sequence
  source: /note="Description of Artificial Sequence: Synthetic polypeptide"
AIQMTQSPSTLSASVGDRVTITCRASQSISSWLAWYQQKTGKAPKLLIYKASSLESGVPSRFSGSGSGTEFTLTISSLQPDDFATYYCQQYNTYSWTFGQGTKVEIK

SEQ ID NO: 19205 - protein, 107 aa, Artificial Sequence
  source: /note="Description of Artificial Sequence: Synthetic polypeptide"
DIQMTQSPSTLSASVGDRVTITCRASQSISSWLAWYQQKTGKAPKLLIYKASSLESGVPSRFSGSGSGTEFTLTISSLQPDDFATYYCQQYNTYSWTFGQGTKVEIK

SEQ ID NO: 19206 - protein, 107 aa, Artificial Sequence
  source: /note="Description of Artificial Sequence: Synthetic polypeptide"
DIQMTQSPSTLSASVGDRVTITCRASQSISSWLAWYQQKPGKAPKLLIYKASSLESGVPSRFSGSGSGTEFTLTISSLQPDDFATYYCQQYNTYSWTFGQGTKVEIK

SEQ ID NO: 19207 - protein, 107 aa, Artificial Sequence
  source: /note="Description of Artificial Sequence: Synthetic polypeptide"
DIQMTQSPSTLSASVGDRVTITCRASQSISNWLAWYQQKPGKAPKLLIYKASNLQSGVPSRFSGSGSGTEFTLTISSLQPDDFATYYCQQYNNYSWTFGQGTKVEIK

SEQ ID NO: 19208 - protein, 107 aa, Artificial Sequence
  source: /note="Description of Artificial Sequence: Synthetic polypeptide"
DIQMTQSPSTLSASVGDRVTITCRASQSISNWLAWYQQKPGKAPKLLIYKASSLESGVPSRFSGSGSGTEFTLTISSLQPDDFATYYCQQYNNYSWTFGQGTKVEIK

SEQ ID NO: 19209 - protein, 107 aa, Artificial Sequence
  source: /note="Description of Artificial Sequence: Synthetic polypeptide"
AIQMTQSPSTLSASVGDRVTITCRASQSISSWLAWYQLKPGKAPKLLIYKASSLESGVPSRFGGSGSGTEFTLTISSLQPDDFATYYCQHYNSYSWTFGQGTKVEIK

SEQ ID NO: 19210 - protein, 107 aa, Artificial Sequence
  source: /note="Description of Artificial Sequence: Synthetic polypeptide"
DIQMTQSPSTLSASVGDRVTITCRASQSISSWLAWYQLKPGKAPKLLIYKASSLESGVPSRFGGSGSGTEFTLTISSLQPDDFATYYCQHYNSYSWTFGQGTKVEIK

SEQ ID NO: 19211 - protein, 107 aa, Artificial Sequence
  source: /note="Description of Artificial Sequence: Synthetic polypeptide"
DIQMTQSPSTLSASVGDRVTITCRASQSISSWLAWYQQKPGKAPKLLIYKASSLESGVPSRFSGSGSGTEFTLTISSLQPDDFATYYCQHYNSYSWTFGQGTKVEIK

SEQ ID NO: 19212 - protein, 107 aa, Artificial Sequence
  source: /note="Description of Artificial Sequence: Synthetic polypeptide"
AIQMTQSPSTLSASVGDRVTITCRASQSIRSWLAWYQQKPGKAPKLLIYKASSLESGVPSRFSGSGSGTEFTLTISSLQPDDFATYYCQQYNSYLWTFGQGTKVEIK

SEQ ID NO: 19213 - protein, 107 aa, Artificial Sequence
  source: /note="Description of Artificial Sequence: Synthetic polypeptide"
DIQMTQSPSTLSASVGDRVTITCRASQSIRSWLAWYQQKPGKAPKLLIYKASSLESGVPSRFSGSGSGTEFTLTISSLQPDDFATYYCQQYNSYLWTFGQGTKVEIK

SEQ ID NO: 19214 - protein, 107 aa, Artificial Sequence
  source: /note="Description of Artificial Sequence: Synthetic polypeptide"
AIQMTQSPSTLSASVGDRVTITCRASQSISSWLAWYQQKPGKAPKLLIYKASSLESGVPSRFSGSGSGTEFTLTISSLQPDDFATYYCQHYNSYSWTFGQGTKVEIK

SEQ ID NO: 19215 - protein, 107 aa, Artificial Sequence
  source: /note="Description of Artificial Sequence: Synthetic polypeptide"
AIQMTQSPSTLSASVGDRVTITCRASQNIGNWLAWYQQKPGKAPKLLIYKASSLQNGVPSRFSGSGSGTEFTLTISSLQPDDFATYYCQRYNSYSWTFGQGTKVEIK

SEQ ID NO: 19216 - protein, 107 aa, Artificial Sequence
  source: /note="Description of Artificial Sequence: Synthetic polypeptide"
DIQMTQSPSTLSASVGDRVTITCRASQNIGNWLAWYQQKPGKAPKLLIYKASSLQNGVPSRFSGSGSGTEFTLTISSLQPDDFATYYCQRYNSYSWTFGQGTKVEIK

SEQ ID NO: 19217 - protein, 107 aa, Artificial Sequence
  source: /note="Description of Artificial Sequence: Synthetic polypeptide"
DIQMTQSPSTLSASVGDRVTITCRASQNIGNWLAWYQQKPGKAPKLLIYKASSLESGVPSRFSGSGSGTEFTLTISSLQPDDFATYYCQRYNSYSWTFGQGTKVEIK

SEQ ID NO: 19218 - protein, 107 aa, Artificial Sequence
  source: /note="Description of Artificial Sequence: Synthetic polypeptide"
AIQMTQSPSTLSASVGDRVTITCRASQNISSWLAWYQQKPGKAPKLLIYKASSLESGVPSRFSGSGSGTEFTLTVSSLQPDDFATYYCQQYNRYSWTFGQGTKVEIK

SEQ ID NO: 19219 - protein, 107 aa, Artificial Sequence
  source: /note="Description of Artificial Sequence: Synthetic polypeptide"
DIQMTQSPSTLSASVGDRVTITCRASQNISSWLAWYQQKPGKAPKLLIYKASSLESGVPSRFSGSGSGTEFTLTVSSLQPDDFATYYCQQYNRYSWTFGQGTKVEIK

SEQ ID NO: 19220 - protein, 107 aa, Artificial Sequence
  source: /note="Description of Artificial Sequence: Synthetic polypeptide"
DIQMTQSPSTLSASVGDRVTITCRASQNISSWLAWYQQKPGKAPKLLIYKASSLESGVPSRFSGSGSGTEFTLTISSLQPDDFATYYCQQYNRYSWTFGQGTKVEIK

SEQ ID NO: 19221 - protein, 107 aa, Artificial Sequence
  source: /note="Description of Artificial Sequence: Synthetic polypeptide"
DIQMTQSPSTLSASVGDRVTITCRASQTISSWLAWYQQKPGKAPKLLIYKASSLESGVPSRFSGSGSGTEFTLTISSLQPDDFATYYCQQYNSYSWTFGQGTKVDIK

SEQ ID NO: 19222 - protein, 107 aa, Artificial Sequence
  source: /note="Description of Artificial Sequence: Synthetic polypeptide"
DIQMTQSPSTLSASVGDRVTITCRASQTISSWLAWYQQKPGKAPKLLIYKASSLESGVPSRFSGSGSGTEFTLTISSLQPDDFATYYCQQYNSYSWTFGQGTKVEIK

SEQ ID NO: 19223 - protein, 108 aa, Artificial Sequence
  source: /note="Description of Artificial Sequence: Synthetic polypeptide"
EIVLTQSPATLSLSPGERATLSCRASQSIRSWLAWYQQKPGQAPRLLIYKASNRATGIPARFSGSGSGTDFTLTISSLEPEDFGVYYCQQYNSYLWTFGGGTKVEIKR

SEQ ID NO: 19224 - protein, 107 aa, Artificial Sequence
  source: /note="Description of Artificial Sequence: Synthetic polypeptide"
DIQMTQSPSTLSASVGDRVTITCRASQSISSWLAWYQQKPGKAPKLLIYKASSLESGVPSRFSGSGSGTEFTLTVSSLQPDDFATYYCQQYNRYSWTFGQGTKVEIK

SEQ ID NO: 19225 - protein, 107 aa, Artificial Sequence
  source: /note="Description of Artificial Sequence: Synthetic polypeptide"
DIQMTQSPSSLSASLGERVSLTCRASQDIGSSLSWLQQEPDGTIKRLIYSTSSLDSGVPKRFSGSRSGSDYSLTISSLESEDFVDYYCLQYASSPWTFGGGTKLEIK

SEQ ID NO: 19226 - protein, 107 aa, Artificial Sequence
  source: /note="Description of Artificial Sequence: Synthetic polypeptide"
AIQLTQSPSSLSASVGDRVTITCRASQDIGSSLSWLQQKPGKAPKRLIYSTSSLDSGVPSRFSGSGSGTDFTLTISSLQPEDFATYYCLQYASSPWTFGQGTKVEIK

SEQ ID NO: 19227 - protein, 107 aa, Artificial Sequence
  source: /note="Description of Artificial Sequence: Synthetic polypeptide"
DIQMTQSPSSLSASVGDRVTITCRASQDIGSSLSWLQQKPGKAPKRLIYSTSSLDSGVPSRFSGSGSGTDYTLTISSLQPEDFATYYCLQYASSPWTFGQGTKVEIK

SEQ ID NO: 19228 - protein, 107 aa, Artificial Sequence
  source: /note="Description of Artificial Sequence: Synthetic polypeptide"
DIQMTQSPASQSASLGESVTITCLASQTIGTWLAWYQQKPGKSPQLLIYAATSLADGVPSRFSASGSGTKFSFKIDSLQSEDFVSYYCQQLYNTPWTFGGGTKLEIK

SEQ ID NO: 19229 - protein, 107 aa, Artificial Sequence
  source: /note="Description of Artificial Sequence: Synthetic polypeptide"
DIQMTQSPSSLSASVGDRVTITCLASQTIGTWLAWYQQKPGKAPKLLIYAATSLADGVPSRFSGSGSGTDFTLTISSLQPEDFATYYCQQLYNTPWTFGGGTKVEIK

SEQ ID NO: 19230 - protein, 113 aa, Artificial Sequence
  source: /note="Description of Artificial Sequence: Synthetic polypeptide"
DIVMTQSPDSLAVSLGERATINCKSSQSVLYSSNNKNYLAWYQQKPGQPPKLLIYWASTRESGVPDRFSGSGSGTDFTLTISSLQAEDVAVYYCQQYYSYPLTFGQGTKVEIK

SEQ ID NO: 19231 - protein, 113 aa, Artificial Sequence; identical to SEQ ID NO: 16307
  source: /note="Description of Artificial Sequence: Synthetic polypeptide"

SEQ ID NO: 19232 - protein, 147 aa, Mus musculus
MDLQVQIFSFLLISASVIMSRGENVLTQSPVIMSASPGEKVTMTCSASSSLSYIHWYQQKSRTSPKLWIYDTSNLASGVPGRFSGSGSGNSYSLTISSMEAEDVATYYCFQGSEYPLTFGGGTKLEMTRADAAPTVSIFPPSSKLGK

SEQ ID NO: 19233 - protein, 108 aa, Artificial Sequence
  source: /note="Description of Artificial Sequence: Synthetic polypeptide"
EIVLTQSPGTLSLSPGERATLSCRASQSVSSSYLAWYQQKPGQAPRLLIYGASSRATGVPDRFSGSGSGTDFTLTISRLEPEDFAVYYCQQGQYTPPTFGQGTKVEIK

SEQ ID NO: 19234 - protein, 108 aa, Artificial Sequence
  source: /note="Description of Artificial Sequence: Synthetic polypeptide"
EIVLTQSPGTLSLSPGERATLSCRASQSVSSSYLAWYQQKPGQAPRLLIYGASSRATGIPDRFSGSGSGTDFTLTISRLEPEDFAVYYCQQGQYTPPTFGQGTKVEIK

SEQ ID NO: 19235 - protein, 107 aa, Artificial Sequence
  source: /note="Description of Artificial Sequence: Synthetic polypeptide"
DIQMTQSPSSLSASVGDRVTITCRASQGIRNDLGWYQQKPGKAPKRLIYAASSLQSGVPSRFSGGGSGTEFTLTISSLQPEDFATYYCLQNGLQPATFGQGTKVEIK

SEQ ID NO: 19236 - protein, 107 aa, Artificial Sequence
  source: /note="Description of Artificial Sequence: Synthetic polypeptide"
DIQMTQSPSSLSASVGDRVTITCRASQGIRNDLGWYQQKPGKAPKRLIYAASSLQSGVPSRFSGSGSGTEFTLTISSLQPEDFATYYCLQNGLQPATFGQGTKVEIK

SEQ ID NO: 19237 - protein, 107 aa, Artificial Sequence
  source: /note="Description of Artificial Sequence: Synthetic polypeptide"
DIQMTQSPSSLSASVGDRVTITCRASQGIRNVLGWYQQKPGKAPKRLIQAATSLQSGVPSRFSGGGSGTEFTLTISSLQPEDFATYYCLQNGLQPATFGQGTKVEIK

SEQ ID NO: 19238 - protein, 107 aa, Artificial Sequence
  source: /note="Description of Artificial Sequence: Synthetic polypeptide"
DIQMTQSPSSLSASVGDRVTITCRASQGIRNVLGWYQQKPGKAPKRLIYDSSSLQSGVPSRFSGGGSGTEFTLTISSLQPEDFATYYCLQNGLQPATFGQGTKVEIK

SEQ ID NO: 19239 - protein, 107 aa, Artificial Sequence
  source: /note="Description of Artificial Sequence: Synthetic polypeptide"
DIQMTQSPSSLSASVGDRVTITCRASQGIRNDLGWYQQKPGKAPKRLIYDAYSLQSGVPSRFSGGGSGTEFTLTISSLQPEDFATYYCLQNGLQPATFGQGTKVEIK

SEQ ID NO: 19240 - protein, 107 aa, Artificial Sequence
  source: /note="Description of Artificial Sequence: Synthetic polypeptide"
DIQMTQSPSSLSASVGDRVTITCRASQGIRNVLGWYQQKPGKAPKRLIYDAYSLQSGVPSRFSGGGSGTEFTLTISSLQPEDFATYYCLQNGLQPATFGQGTKVEIK

SEQ ID NO: 19241 - protein, 107 aa, Artificial Sequence
  source: /note="Description of Artificial Sequence: Synthetic polypeptide"
DIQMTQSPSSLSASVGDRVTITCRASQGIRNVLGWYQQKPGKAPKRLIYDASSLQSGVPSRFSGGGSGTEFTLTISSLQPEDFATYYCLQNGLQPATFGQGTKVEIK

SEQ ID NO: 19242 - protein, 107 aa, Artificial Sequence
  source: /note="Description of Artificial Sequence: Synthetic polypeptide"
DIQMTQSPSSLSASVGDRVTITCRASQSIRNVLGWYQQKPGKAPKRLIYDVSSLQSGVPSRFSGGGSGTEFTLTISSLQPEDFATYYCLQNGLQPATFGQGTKVEIK

SEQ ID NO: 19243 - protein, 108 aa, Homo sapiens
SELTQDPAVSVALGQTVRITCQGDSLRSYYASWYQQKPGQAPVLVIYGKNNRPSGIPDRFSGSSSGNTASLTITGAQAEDEADYYCNSSVYTMPPVVFGGGTKLTVLG

SEQ ID NO: 19244 - protein, 109 aa, Homo sapiens
SSELTQDPAVSVALGQTVRITCQGDSLRSYYASWYQQKPGQAPVLVIYGKNNRPSGIPDRFSGSSSGNTASLTITGAQAEDEADYYCNSSHGPRRPVVFGGGTKLTVLG

SEQ ID NO: 19245 - protein, 108 aa, Homo sapiens
SELTQDPAVSVALGQTVRITCQGDSLRSYYASWYQQKPGQAPVLVIYGKNNRPSGIPDRFSGSSSGNTASLTITGAQAEDEADYYCNSSHGPRRPVVFGGGTKLTVLG

SEQ ID NO: 19246 - protein, 108 aa, Artificial Sequence
  source: /note="Description of Artificial Sequence: Synthetic polypeptide"
SSELTQDPAVSVALGQTVRITCQGDSLRSYYASWYQQKPGQAPVLVIYGKNNRPSGIPDRFSGSSSGNTASLTITGAQAEDEADYYCNSSVYTMPPVVFGGGTKLTVL

SEQ ID NO: 19247 - protein, 108 aa, Homo sapiens
SELTQDPAVSVALGQTVRITCQGDSLRLYYASWYQQKPGQAPVLVIYGKSSRPSGIPDRFSGSSSGNTASLTITGAQAEDEADYYCNSSHGPRRPVVFGGGTKLTVLG

SEQ ID NO: 19248 - protein, 109 aa, Homo sapiens
SSELTQDPAVSVALGQTVRITCQGDSLRLYYASWYQQKPGQAPVLVIYGKSSRPSGIPDRFSGSSSGNTASLTITGAQAEDEADYYCNSSHGPRRPVVFGGGTKLTVLG

SEQ ID NO: 19249 - protein, 109 aa, Homo sapiens
SSELTQDPAVSVALGQTVRITCQGDSLRSYYASWYQQKPGQAPVLVIYGKNNRPSGIPDRFSGSSSGNTASLTITGAQAEDEADYYCNSFSPKPKPVVFGGGTKLTVLG

SEQ ID NO: 19250 - protein, 108 aa, Homo sapiens
SELTQDPAVSVALGQTVRITCQGDSLRLYYASWYQQKPGQAPVLVIYGKNNRPSGIPDRFSGSSSGNTASLTITGAQAEDEADYYCNSSHGPRRPVVFGGGTKLTVLG

SEQ ID NO: 19251 - protein, 109 aa, Homo sapiens
SSELTQDPAVSVALGQTVRITCQGDSLRLYYASWYQQKPGQAPVLVIYGKNNRPSGIPDRFSGSSSGNTASLTITGAQAEDEADYYCNSSHGPRRPVVFGGGTKLTVLG

SEQ ID NO: 19252 - protein, 109 aa, Homo sapiens
SSELTQDPAVSVALGQTVRITCQGDSLRRQPASWYQQKPGQAPVLVIYYKKLRPSGIPDRFSGSSSGNTASLTITGAQAEDEADYYCNSFSPKPKPVVFGGGTKLTVLG

SEQ ID NO: 19253 - protein, 108 aa, Artificial Sequence
  source: /note="Description of Artificial Sequence: Synthetic polypeptide"
SELTQDPAVSVALGQTVRITCQGDSLRSYYASWYQQKPGQAPVLVIYGKNNRPSGIPDRFSGSSSGNTASLTITGAQAEDEADYYCNSSGSQRSPVVFGGGTKLTVLG

SEQ ID NO: 19254 - protein, 142 aa, Artificial Sequence
  source: /note="Description of Artificial Sequence: Synthetic polypeptide"
MRCLAEFLGLLVLWIPGAIGDIVMTQAAPSVPVTPGESVSISCRSSKSLLHSNGNTYLYWFLQRPGQSPQLLIYRMSNLASGVPDRFSGSGSGTAFTLRISRVEAEDVGVYYCMQHLEYPLTFGAGTKLELKRADAAPTVSI

SEQ ID NO: 19255 - protein, 138 aa, Mus musculus
MGWSWIFLFLLSGTAGVHSEVQLQQSGPELVKPGASMKISCKASGYSFTGYTMNWVKQSHGKNLEWIGLINPHNGGTTYNQKFKGKATLTVDKSSNTAYMELLSLTSEDSAVYYCTRPGGYYWFFDVWGAGTTVTVSS

SEQ ID NO: 19256 - protein, 111 aa, Homo sapiens
DIVMTQSPLSLPVTPGEPASISCRTSQSLLQSNGYNYLDWYLQKPGQSPQLLIYLGSSRASGVPDRFSGSGSGTDFTLKISRVEAEDVGVYYCMQALQTLTFGGGTKVEIK

SEQ ID NO: 19257 - protein, 108 aa, Homo sapiens
EIVLTQFPGTLSLSPGESAPLSCRASQSVSSIDLVWYQQKPGQAPRLLIYGASSRATGIPDRFSVSGSGTDFTLTISRLEPEDFAVYYCQQYGSSPFTFGPGTKVDIK

SEQ ID NO: 19258 - protein, 106 aa, Homo sapiens
QIVMTQSPATLSVSPGERATLSCRASQSVSSNLAWYQQKPGQAPRLLIYGASTRATGIPARFSGSGSGTEFTLTISSLQSEDFAVYYCQQYNKWWTFGQGTKVEIK

SEQ ID NO: 19259 - protein, 112 aa, Homo sapiens
DIVMTQSPLSLPVTPGEPASISCRSSQSLLHSNGYNYLDWYLQKPGQSPQFLIYLGSNRASGVPDRFSGSGSGTDFTLKISRVEAEDVGVYYCMQALQTPITFGQGTRLEIK

SEQ ID NO: 19260 - protein, 113 aa, Homo sapiens
DIVMTQSPDSLAVSLGERATVNCKSSQSVLYRSNNKNYLAWYHQKPGQPPKMLISWASTRESGVPDRFSGSGSGTDFTLTISSLQAEDVAVYYCQQYYSTPITFGQGTRLEIK

SEQ ID NO: 19261 - protein, 108 aa, Homo sapiens
EIVLTQSPGTLSLSPGERATLSCRASQSVSSRYLAWYQQKPGQAPRLLIYGASSRATGIPDRFSGSGSGTDFTLTISRLEPEDFAEYYCQQYGRSPFTFGAGTKVDIK

SEQ ID NO: 19262 - protein, 108 aa, Homo sapiens
EIVLTQSPGTLSLSPGERATLSCRASQSVISSYLAWYQQKPGQAPRLLIYNASNRATGIPDRFSGSGSGTDFTLTISRLEPEDFAVYYCQQYGSSPITFGQGTRLEIK

SEQ ID NO: 19263 - protein, 108 aa, Homo sapiens
EIVLTQSPGTLSLSPGERATFSCRASQSVISNYLAWYQQKPGQAPRLLIYNTSSRATGIPGRFSGGGSGTDFTLTITRLEPEDFAVYYCQQYGSSPITFGQGTRLEIK

SEQ ID NO: 19264 - protein, 112 aa, Homo sapiens
DIVMTQSPLSLPVTPGEPASISCRSSQSLLHSIGYNYLDWYLQKPGQSPQLLIYLGSNRASGVPDRFSGSGSGTDFTLKISRVEAEDVGIYYCMQALQTPLTFGGGTKVEIK

SEQ ID NO: 19265 - protein, 112 aa, Homo sapiens
DIVMTQTPLSLSVTPGQPASISCKSSQSLLHSDRQTYLFWYLQKPGQPPQLLIYEVSNRFSGVPDRFSGSGSGTDFTLKISRVEAEDVGVYYCMQSIQLPPTFGPGTKVDIK

SEQ ID NO: 19266 - protein, 107 aa, Homo sapiens
DIQLTQSPSSLSASVGDRVTITCRASQDISNYLAWYQQKPGKVPKLLIYAASTLQSGVPSRFSGSGSGTDFTLTISSLQPEDIATYSCQKYSSTPFTFGPGTKVDIK

SEQ ID NO: 19267 - protein, 107 aa, Homo sapiens
DIQMTQSPSSLSASVGDRVTITCRASQSINSYLNWYQQKPGKAPRLLIYAASNLQSGVPSRFSGSGSGTDFTLTISSLQPEDFSTYYCQQSHNTPLTFGGGTKVEIK

SEQ ID NO: 19268 - protein, 107 aa, Homo sapiens
DIQMTQSPSSLSASVGDRVTITCRASQSISSYLNWYQQKPGKAPNLLIYTASSLQSGVPSRFSGSGSGTVFTLTISSLQPEDFATYYCQQSSSTPFTFGPGTKVDFK

SEQ ID NO: 19269 - protein, 114 aa, Artificial Sequence
  source: /note="Description of Artificial Sequence: Synthetic polypeptide"
DIVMTQSPSSLAVSPGEKVTMTCKSSQSLYYSGVKENLLAWYQQKPGQSPKLLIYYASIRFTGVPDRFTGSGSGTDYTLTITSVQAEDMGQYFCQQGINNPLTFGDGTKLEIKR

SEQ ID NO: 19270 - protein, 112 aa, Artificial Sequence
  source: /note="Description of Artificial Sequence: Synthetic polypeptide"
DVVLTQTPLSLSVSFGDQVSISCRSSQSLVNSYGNTFLSWYLHKPGQSPQLLIFGISNRFSGVPDRFSGSGSGTDFTLKISTIKPEDLGMYYCLQGTHQPPTFGPGTKLEVK

SEQ ID NO: 19271 - protein, 106 aa, Artificial Sequence
  source: /note="Description of Artificial Sequence: Synthetic polypeptide"
QIVLTQSPAIMSASPGEKVTITCSASSSVSYMHWFQQKPGTSPKLWIYSTSNLASGVPARFSGSGSGTSYSLTISRMEAEDAATYYCQQRSSYPFTFGSGTKLEIK

SEQ ID NO: 19272 - protein, 113 aa, Artificial Sequence
  source: /note="Description of Artificial Sequence: Synthetic polypeptide"
DIVMTQSPSSLTVTAGEKVTMICKSSQSLLNSGDQKNYLTWYQQKPGQPPKLLIFWASTRESGVPDRFTGSGSGTDFTLTISSVQAEDLAVYYCQNDYSYPLTFGAGTKLELK

SEQ ID NO: 19273 - protein, 113 aa, Artificial Sequence
  source: /note="Description of Artificial Sequence: Synthetic polypeptide"
DIVMTQSPDSLAVSLGERATINCKSSQSLLNSGDQKNYLTWYQQKPGQPPKLLIYWASTRESGVPDRFSGSGSGTDFTLTISSLQAEDVAVYYCQNDYSYPLTFGQGTKVEIK

SEQ ID NO: 19274 - protein, 113 aa, Artificial Sequence
  source: /note="Description of Artificial Sequence: Synthetic polypeptide"
DIVMTQSPDSLAVSLGERATIICKSSQSLLNSGDQKNYLTWYQQKPGQPPKLLIFWASTRESGVPDRFTGSGSGTDFTLTISSLQAEDVAVYYCQNDYSYPLTFGQGTKVEIK

SEQ ID NO: 19275 - protein, 113 aa, Artificial Sequence
  source: /note="Description of Artificial Sequence: Synthetic polypeptide"
DIVMTQSPLSLPVTPGEPASISCKSSQSLLNSGDQKNYLTWYLQKPGQSPQLLIYWASTRESGVPDRFSGSGSGTDFTLKISRVEAEDVGVYYCQNDYSYPLTFGGGTKVEIK

SEQ ID NO: 19276 - protein, 113 aa, Artificial Sequence
  source: /note="Description of Artificial Sequence: Synthetic polypeptide"
DIVMTQSPLSLPVTPGEPASIICKSSQSLLNSGDQKNYLTWYLQKPGQSPQLLIFWASTRESGVPDRFTGSGSGTDFTLKISRVEAEDVGVYYCQNDYSYPLTFGGGTKVEIK

SEQ ID NO: 19277 - protein, 113 aa, Artificial Sequence
  source: /note="Description of Artificial Sequence: Synthetic polypeptide"
ELVMTQSPSSLTVTAGEKVTMICKSSQSLLNSGDQKNYLTWYQQKPGQPPKLLIFWASTRESGVPDRFTGSGSGTDFTLTISSVQAEDLAVYYCQNDYSYPLTFGAGTKLELK

SEQ ID NO: 19278 - protein, 108 aa, Artificial Sequence
  source: /note="Description of Artificial Sequence: Synthetic polypeptide"
DIQMTQTTSSLSASLGDRVIISCSASQDISNYLNWYQQKPDGTVKVLIYFTSSLHSGVPSRFSGSGSGTDYSLTISNLEPEDIATYYCQQYSTVPWTFGGGTKLEIKR

SEQ ID NO: 19279 - protein, 108 aa, Artificial Sequence; identical to SEQ ID NO: 16396
  source: /note="Description of Artificial Sequence: Synthetic polypeptide"

SEQ ID NO: 19280 - protein, 112 aa, Artificial Sequence
  source: /note="Description of Artificial Sequence: Synthetic polypeptide"
DIVMSQSPSSLAVSAGEKVTLSCKSSQSLLNSRSRKNYLAWYQQKPGQSPKLLISWASTRESGVPDRFTGSGSGTDFTLTISSVQAEDLAVYYCKQSYNLYTFGGGTKLEIK

SEQ ID NO: 19281 - protein, 107 aa, Artificial Sequence
  source: /note="Description of Artificial Sequence: Synthetic polypeptide"
DIQMTQTTSSLSASLGDRVTISCRASQDISNHLNWYQQKPDGTVKLLIYYTSTLHSGVPSRFSGSGSGTDYSLTISNLEPEDIATYYCQQDLNLPWTFGGGTKLEIK

SEQ ID NO: 19282 - protein, 107 aa, Artificial Sequence
  source: /note="Description of Artificial Sequence: Synthetic polypeptide"
DIQMTQSPSSLSASVGDRVTITCRASQSISSYLNWYQQKPGKAPKLLIYAASSLQSGVPSRFSGSGSGTDFTLTISSLQPEDFATYYCQQSYSTPITFGQGTRLEIK

SEQ ID NO: 19283 - protein, 107 aa, Artificial Sequence
  source: /note="Description of Artificial Sequence: Synthetic polypeptide"
DIQMTQSPATLSLSPGERATLSCRASQSVSSYLAWYQQKPGQAPRLLIYSASTRATGIPARFSGSGSGTEFTLTISSLQSEDFAVYYCQQSNDWPLTFGGGTKVEIK

SEQ ID NO: 19284 - protein, 113 aa, Artificial Sequence
  source: /note="Description of Artificial Sequence: Synthetic polypeptide"
DIQMTQSPDSLAVSLGERATINCKSSQSVLYSSNNKNYLAWYQQKPGQPPKLLIYWASTRESGVPDRFSGSGSGTDFTLTISSLQAEDVAVYYCQQYYSTPLTFGGGTKVEIK

SEQ ID NO: 19285 - protein, 107 aa, Artificial Sequence
  source: /note="Description of Artificial Sequence: Synthetic polypeptide"
DIQMTQSPSFLSASVGDRVTITCRASQGISSYLAWYQQKPGKAPKLLIYAASTLQSGVPSRFSGSGSGTEFTLTISSLQPEDFATYYCQQANSFSITFGQGTRVDNK

SEQ ID NO: 19286 - protein, 107 aa, Artificial Sequence
  source: /note="Description of Artificial Sequence: Synthetic polypeptide"
DIQMTQSPATLSLSPGERATLSCRASQSVSSYLAWYQQKPGQAPRLLIYDASNRATGIPARFSGSGSGTDFTLTITSLQPEDFAAYYCQQSYTTPITFGQGTRLDIK

SEQ ID NO: 19287 - protein, 107 aa, Artificial Sequence
  source: /note="Description of Artificial Sequence: Synthetic polypeptide"
DIQMTQSSSSLSASVGDRVTITCRASQRIGTYLNWYQQKPGKAPKLLLYTASRLQSGVPPTFSGSGSETDFTLTISSLQPEDFATYYCQQTYTTPPTFGQGTIVEIK

SEQ ID NO: 19288 - protein, 149 aa, Mus musculus
MKLPVRLLVLMFWIPASSDDVFMTQTPLSLPVSLGDQASISCRSSQSIVHSNGNTYLEWYLQKPGQSPNLLIYFVSNRFSGVPDRFSGSGSGTDFTLKISRVEAEDLGVYYCFQGSHVPWTFGGGTKLEIKRADAAPTVSIFPPSSKLG

SEQ ID NO: 19289 - protein, 131 aa, Artificial Sequence
  source: /note="Description of Artificial Sequence: Synthetic polypeptide"
MKLPVRLLVLMFWIPASSSDVLMTQTPLSLPVSLGDQASISCRSSQSIVHSNGNTYLEWYLQKPGQSPKLLISKVSNRFSGVPDRFSGSGSGTDFTLKISRVEAEDLGVYYCFQGSHVPFTFGSGTKLEIK

SEQ ID NO: 19290 - protein, 112 aa, Artificial Sequence
  source: /note="Description of Artificial Sequence: Synthetic polypeptide"
DIVMTQSPLSLPVTPGEPASISCRSSQSIVHSNGNTYLEWYLQKPGQSPQLLISKVSNRFSGVPDRFSGSGSGTDFTLKISRVEAEDVGVYYCFQGSHVPFTFGQGTKLEIK

SEQ ID NO: 19291 - protein, 112 aa, Artificial Sequence
  source: /note="Description of Artificial Sequence: Synthetic polypeptide"
DIVMTQSPLSLPVTPGEPASISCRSSQSLLHSDGFDYLNWYLQKPGQSPQLLIYALSNRASGVPDRFSGSGSGTDFTLKISRVEAEDVGVYYCMQALQAPITFGQGTRLEIK

SEQ ID NO: 19292 - protein, 111 aa, Artificial Sequence
  source: /note="Description of Artificial Sequence: Synthetic polypeptide"
DVMTQTPLSLPVSLGDQASISCRSSQSLVHSNGNTYLHWYLQKPGQSPKLLIYKVSNRFSGVPDRFSGSGSGTDFTLKISRVEAEDLGVYFCSQSTHVPWTFGGGTKLEIK

SEQ ID NO: 19293 - protein, 111 aa, Artificial Sequence
  source: /note="Description of Artificial Sequence: Synthetic polypeptide"
DVVMTQTPLSLPVSLGDQASISCRSSQSLVHSNGNTYLHWYLQKPGQSPKLLIYKVSNRFSGVPDRFSGSGSGTDFTLKISRVEAEDLGVYFCSQSTHYLTFGSGTKLEIK

SEQ ID NO: 19294 - protein, 108 aa, Mus musculus; identical to SEQ ID NO: 14660

SEQ ID NO: 19295 - protein, 108 aa, Mus musculus; identical to SEQ ID NO: 14661

SEQ ID NO: 19296 - protein, 107 aa, Mus musculus; identical to SEQ ID NO: 15197

SEQ ID NO: 19297 - protein, 120 aa, Homo sapiens
TQSPDSLAVSLGERATINCKSSQSVLYSSNNKNYLAWYQQKPGQPPKLLIYWASTRESGVPDRFSGSGSGTDFTLTISSLQAEDVAVYYCQQYYSTPPTFGQGTKVEIKRTVAAPSVFIF

SEQ ID NO: 19298 - protein, 104 aa, Artificial Sequence
  source: /note="Description of Artificial Sequence: Synthetic polypeptide"
EIVMTQTPATLSVSAGERVTITCKASQSVSNDVTWYQQKPGQAPRLLIYSASNRYSGVPARFSGSGYGTEFTFTISSVQSEDFAVYFCQQDYSSFGQGTKLEIK

SEQ ID NO: 19299 - protein, 108 aa, Artificial Sequence; identical to SEQ ID NO: 18936
  source: /note="Description of Artificial Sequence: Synthetic polypeptide"

SEQ ID NO: 19300 - protein, 140 aa, Mus sp.
MNFGFSLIFLVLVLKGVQCEVVVVESGGGFVKPGGSLKLSCAAAGFTFSRYAMSWVRQTPEKRLEWVATISSGGSHTYYPDSVKGRFTISRDNAKNTLYLQMSSLRSEDTAIYYCARPGYDRGAWFFDVWGAGTTVTVSS

SEQ ID NO: 19301 - protein, 107 aa, Homo sapiens
DIQMTQSPSSLSASVGDRVTITCRASQDIGNFLNWYQQKPGKAPKLLIYYTSRLQSGVPSRFSGSGSGTDYTLTISSLQPEDFATYYCQQGKTLPYTFGGGTKVEIK

SEQ ID NO: 19302 - protein, 107 aa, Homo sapiens
DIQMTQSPSSLSASVGDRVTITCRASQDIGNFLNWYQQKPGKAPKLLLYYTSRLQSGVPSRFSGSGSGTDYTLTISSLQPEDFATYYCQQGKTLPYTFGGGTKVEIK

SEQ ID NO: 19303 - protein, 128 aa, Mus musculus
MMSSAQFLGLLLLCFQGTRCDIQMTQTASSLPASLGDRVTISCSASQDISNYLNWYQQKPDGTVKLLIFYSSNLHSGVPSRFSGGGSGTDYSLTISNLEPEDIATYFCHQYSKLPWTFGGGTKLEIKR

SEQ ID NO: 19304 - protein, 106 aa, Artificial Sequence
  source: /note="Description of Artificial Sequence: Synthetic polypeptide"
DIQLTQSPAILSVSPGERVSFSCWASQSIGTSIHWYQQRTNGSPRLLIKYSSESISGIPSRFSGSGSGTDFTLSINSLESEDIADYYCQQTYSWPFTFGSGTKLEI

SEQ ID NO: 19305 - protein, 107 aa, Artificial Sequence
  source: /note="Description of Artificial Sequence: Synthetic polypeptide"
DIQMTQTASSLPASLGDRVTISCSASQDISNYLNWYQQKPDGTVKLLIFYSSNLHSGVPSRFSGGGSGTDYSLTISNLEPEDIATYFCHQYSKLPWTFGGGTKLEIK

SEQ ID NO: 19306 - protein, 108 aa, Artificial Sequence
  source: /note="Description of Artificial Sequence: Synthetic polypeptide"
DIVLTQSPATLSVTPGDSVSLSCRASQIISNNLHWYQQKSHESPRLLIKYASQSISGIPSRFSGSGSGTDFTLSINSVETEDFGMYFCQQSNSWPLTFGSGTKLEIKR

SEQ ID NO: 19307 - protein, 107 aa, Artificial Sequence
  source: /note="Description of Artificial Sequence: Synthetic polypeptide"
DIQMTQITSSLSVSLGDRVIISCRASQDIGNFLNWYQQKPDGSLKLLIYYTSRLQSGVPSRFSGWGSGTDYSLTISNLEEEDIATFFCQQGKTLPYTFGGGTKLEIK

SEQ ID NO: 19308 - protein, 133 aa, Artificial Sequence
  source: /note="Description of Artificial Sequence: Synthetic polypeptide"
MHFQVQIFSFLLISASVIMSRGDIQLTQSPSSLSASVGDRVTITCSASSSVSYMHWYQQKPGKAPKLLIYSTSNLASGVPSRFSGSGSGTDFTFTISSLQPEDIATYYCQQRSSYPYTFGGGTKVEIKRTVAA

SEQ ID NO: 19309 - protein, 108 aa, Artificial Sequence; identical to SEQ ID NO: 15955
  source: /note="Description of Artificial Sequence: Synthetic polypeptide"

SEQ ID NO: 19310 - protein, 108 aa, Artificial Sequence; identical to SEQ ID NO: 15956
  source: /note="Description of Artificial Sequence: Synthetic polypeptide"

SEQ ID NO: 19311 - protein, 108 aa, Artificial Sequence; identical to SEQ ID NO: 15960
  source: /note="Description of Artificial Sequence: Synthetic polypeptide"

SEQ ID NO: 19312 - protein, 128 aa, Homo sapiens; identical to SEQ ID NO: 9996

SEQ ID NO: 19313 - protein, 128 aa, Homo sapiens; identical to SEQ ID NO: 9997

SEQ ID NO: 19314 - protein, 128 aa, Homo sapiens; identical to SEQ ID NO: 9998

SEQ ID NO: 19315 - protein, 128 aa, Homo sapiens; identical to SEQ ID NO: 9999

SEQ ID NO: 19316 - protein, 107 aa, Artificial Sequence; identical to SEQ ID NO: 16415
  source: /note="Description of Artificial Sequence: Synthetic polypeptide"

SEQ ID NO: 19317 - protein, 108 aa, Artificial Sequence; identical to SEQ ID NO: 15204
  source: /note="Description of Artificial Sequence: Synthetic polypeptide"

SEQ ID NO: 19318 - protein, 109 aa, Artificial Sequence
  source: /note="Description of Artificial Sequence: Synthetic polypeptide"
DIQMTQFPSSLSASVGDRVTITCRASQGIRNDLGWYQQKPGKAPKRLIYAASRLHRGVPSRFSGSGSGTEFTLTISSLQPEDFATYYCLQHNSYPCSFGQGTKLEIKRT

SEQ ID NO: 19319 - protein, 109 aa, Artificial Sequence; identical to SEQ ID NO: 16291
  source: /note="Description of Artificial Sequence: Synthetic polypeptide"

SEQ ID NO: 19320 - protein, 112 aa, Artificial Sequence [sequence omitted]

SEQ ID NO: 19321 - protein, 112 aa, Artificial Sequence [sequence omitted]

SEQ ID NO: 19322 - protein, 100 aa, Artificial Sequence
  source: /note="Description of Artificial Sequence: Synthetic polypeptide"
LTTAPGGTVILTCRSSTGAVTTNNYANWVQEKPDHLFTGLIDATSNRVPGVPVRFSGSLIGDKAALTITGAQTEDDAMYFCALWYNTHFVFGGGTKVTVL

SEQ ID NO: 19323 - protein, 114 aa, Artificial Sequence
  source: /note="Description of Artificial Sequence: Synthetic polypeptide"
DVLMTQIPVSLPVSLGDQASISCRSSQIIVHNNGNTYLEWYLQKPGQSPQLLIYKVSNRFSGVPDRFSGTGSGTDFTLKISRVEAEDLGVYYCFQGSHVPFTFGSGTKLEIKRA

SEQ ID NO: 19324 - protein, 112 aa, Artificial Sequence
  source: /note="Description of Artificial Sequence: Synthetic polypeptide"
DIVMTQTPPSVPVTPGESVSISCRSSQSLLHGDGNTYLYWFLQRPGQSPRLLIYRMSNLASGVPDRFSGSGSGTAFTLRISRVEAEDVGVYYCMQHLEYPFTFGGGTKVEIK

SEQ ID NO: 19325 - protein, 107 aa, Mus musculus
DIVLTQSPATLSVTPGDSVSFSCRASQSISNNLHWYQQRTHESPRLLIKYASQSISGIPSRFSGSGSGTDFTLSIIAVETEDFGMYFCQQSNRWPLTFGAGTKLELK

SEQ ID NO: 19326 - protein, 111 aa, Artificial Sequence
  source: /note="Description of Artificial Sequence: Synthetic polypeptide"
DIVMFQSPASLAVSLGQRATISCRASQSVSSSSYSYMHWYQQKPGQPPKLLIKYASNLESGVPARFSGSGSGTDFTLNIHPVEEEDAATYYCQHSRDVPLTFGAGTKLEIK

SEQ ID NO: 19327 - protein, 107 aa, Artificial Sequence
  source: /note="Description of Artificial Sequence: Synthetic polypeptide"
DIQMTQTPSSLSASLGDRVTISCRASQDISNYLNWYQQKPDGTVKLLIVYTSRLHSGVPSRFSGSGSGTDYSLTISNLEQEDIATYFCQQGNTLPPTFGAGTKLELK

SEQ ID NO: 19328 - protein, 107 aa, Artificial Sequence
  source: /note="Description of Artificial Sequence: Synthetic polypeptide"
DIQMTQTPSSLSASVGDRVTITCRASQSISSFLNWYQQKPGKAPKLLIYAASNLGSGVPSRFSGRGSGTDFTLTISSLQPEDFAAYYCQQGYTTPLTFGQGTKLELK

SEQ ID NO: 19329 - protein, 110 aa, Artificial Sequence
  source: /note="Description of Artificial Sequence: Synthetic polypeptide"
QSVVTQPPSASGGPGQSLTISCTGTSSDVGGYNHVSWYQQHPGKAPKLMIYDVSKRPSGVPHRFSGSKSGNTASLTVSGLQAEDEAVYYCSSYAGSNNLVFGGGTKVTVL

SEQ ID NO: 19330 - protein, 108 aa, Artificial Sequence
  source: /note="Description of Artificial Sequence: Synthetic polypeptide"
SSELTQDPAVSVALGQTVRITCQGDSLRSYYASWYQQKPGQAPVLYIYGKNNRPSGIPDRFSGSSSGNTASLTITGAQAEDEADYYCNSRDSSGNHVVFGGGTKLTVL

SEQ ID NO: 19331 - protein, 133 aa, Mus musculus
MKLPVRLLVLMFWIPGSSSDVVMTQTPLSLPVSLGDQASISCRSSQSLLKNNGNTFLHWYLQKSGQSPKLLIYKVSNRLSGVPDRFSGSGSGTYFTLKISRVEAEDLGVYFCSQSTHIPYTFGGGTKLELKRT

SEQ ID NO: 19332 - protein, 94 aa, Artificial Sequence
  source: /note="Description of Artificial Sequence: Synthetic polypeptide"
GGTVKITCSGGGGSYYGWFQQKSPGSAPVTVIYDNTNRPSNIPSRFSGSLSGSTNTLTITGVQAEDEAVYYCGSYDRSAGYVGIFGAGTTLTVL

SEQ ID NO: 19333 - protein, 89 aa, Artificial Sequence
  source: /note="Description of Artificial Sequence: Synthetic polypeptide"
GGTVKITCSGGGGSYYGWFQQKSPGSAPVTVIYDNTNRPSNIPSRFSGSKSGSTGTLTITVQAEDEAVYYCGNFDTSAIFGAGTTLTVL

SEQ ID NO: 19334 - protein, 90 aa, Artificial Sequence
  source: /note="Description of Artificial Sequence: Synthetic polypeptide"
GGTVEITCSGGSYSYGWYQQKSPGSAPVTVIYQNTNRPSDIPSRFSGSKSGSTGTLTITGVRAEDEAVYYCGSFDSSVGMFGAGTTLTVL

SEQ ID NO: 19335 - protein, 79 aa, Artificial Sequence
  source: /note="Description of Artificial Sequence: Synthetic polypeptide"
KWYGWYQQKAPGSAPVTLIYDNTNRPSDIPSRFSGSASGSTATLTITGVQVEDEAVYFGGYDGSTDAGIFGAGTTLTVL

SEQ ID NO: 19336 - protein, 130 aa, Artificial Sequence
  source: /note="Description of Artificial Sequence: Synthetic polypeptide"
MAGFPLLLTLLTHCAGSWAQSVLTQPPSASGTPGQRVTISCSGSSSNIGSNFVYWYQQLPGTAPKLLIYRNNQRPSGVPDRFSGSRSGTSASLAISGLRSEDEADYYCAAWDDSLGGHYVFGTGTKVTVL

SEQ ID NO: 19337 - protein, 129 aa, Artificial Sequence
  source: /note="Description of Artificial Sequence: Synthetic polypeptide"
MAGFPLLLTLLTHCAGSWAQSVLTQPPSASGTPGQRVTISCSGSSSNIGSNYVYWYQQLPGTAPKLLIYRNNQRPSGVPDRFSGSKSGTSASLAISGLRSEDEADYYCAAWDASLSGVVFGGGTKLTVL

SEQ ID NO: 19338 - protein, 130 aa, Artificial Sequence
  source: /note="Description of Artificial Sequence: Synthetic polypeptide"
MAGFPLLLTLLTHCAGSWAQSVLTQPPSASGTPGQRVTISCSGSSSNIGSNYVYWYQQVPGTAPKLLIYRNNQRPSGVPDRFSGSKSGTSASLAISGLRSEDEADYYCAAWDDSLSGHYVFGTGTKVTVL

SEQ ID NO: 19339 - protein, 130 aa, Artificial Sequence
  source: /note="Description of Artificial Sequence: Synthetic polypeptide"
MDMRVPAQLLGLLLLWLRGARCEIVMTQSPATLSVSPGERATLSCRASQSVSSNLAWYQQKPGQAPRLLIYGASTRATGIPARFSGSGSGTDFTLTISSLQSVDSAVYYCQQYNNWPPYTFGQGTKLEIK

SEQ ID NO: 19340 - protein, 109 aa, Artificial Sequence
  source: /note="Description of Artificial Sequence: Synthetic polypeptide"
  MOD_RES (2)..(2): Any amino acid
  MOD_RES (65)..(65): Any amino acid
  MOD_RES (69)..(69): Any amino acid
  MOD_RES (88)..(88): Any amino acid
  MOD_RES (92)..(92): Any amino acid
  MOD_RES (95)..(96): Any amino acid
  MOD_RES (108)..(108): Any amino acid
SXELTQDPAVSVALGQTVRITCQGDSLRSYYASWYQQKPGQAPVLVIYGKNNRPSGIPDRFSGSXSGNXASLTITGAQAEDEADYYCXSRDXPGXXWVFGGGTKVTVXG

SEQ ID NO: 19341 - protein, 107 aa, Artificial Sequence
  source: /note="Description of Artificial Sequence: Synthetic polypeptide"
  MOD_RES (4)..(4): Any amino acid
  MOD_RES (51)..(51): Any amino acid
  MOD_RES (54)..(54): Any amino acid
  MOD_RES (70)..(70): Any amino acid
  MOD_RES (84)..(84): Any amino acid
  MOD_RES (93)..(94): Any amino acid
DIQXTQSPSSLSASLGDRVTITCRASQGISSYLAWYQQKPGKAPKLLIYAXSTXQSGVPSRFSGSGSGTXFTLTISSLQPEDSXTYYCQQYWXXPLTFGGGTKVEIK

SEQ ID NO: 19342 - protein, 233 aa, Mus musculus; identical to SEQ ID NO: 14663

SEQ ID NO: 19343 - protein, 233 aa, Mus musculus; identical to SEQ ID NO: 14934

SEQ ID NO: 19344 - protein, 209 aa, Mus musculus; identical to SEQ ID NO: 14662

SEQ ID NO: 19345 - protein, 334 aa, Artificial Sequence; identical to SEQ ID NO: 16403
  source: /note="Description of Artificial Sequence: Synthetic polypeptide"

SEQ ID NO: 19346 - protein, 334 aa, Artificial Sequence; identical to SEQ ID NO: 16402
  source: /note="Description of Artificial Sequence: Synthetic polypeptide"

SEQ ID NO: 19347 - protein, 234 aa, Artificial Sequence
  source: /note="Description of Artificial Sequence: Synthetic polypeptide"
MKHLWFFLLLVAAPRWVLSDIVLTQSPATLSASPGEKVTLTCSASSSVSSSYLYWYQQKPGQAPKLLIYSTSNLASGVPARFSGSGSGTSYSLTISSLEPEDFATYYCHQWSSYPYTFGGGTKLEIKRTVAAPSVFIFPPSDEQLKSGTASVVCLLNNFYPREAKVQWKVDNALQSGNSQESVTEQDSKDSTYSLSSTLTLSKADYEKHKVYACEVTHQGLSSPVTKSFNRGEC

SEQ ID NO: 19348 - protein, 215 aa, Artificial Sequence
  source: /note="Description of Artificial Sequence: Synthetic polypeptide"
DIVLTQSPATLSASPGEKVTLTCSASSSVSSSYLYWYQQKPGQAPKLLIYSTSNLASGVPARFSGSGSGTSYSLTISSLEPEDFATYYCHQWSSYPYTFGGGTKLEIKRTVAAPSVFIFPPSDEQLKSGTASVVCLLNNFYPREAKVQWKVDNALQSGNSQESVTEQDSKDSTYSLSSTLTLSKADYEKHKVYACEVTHQGLSSPVTKSFNRGEC

SEQ ID NO: 19349 - protein, 110 aa, Artificial Sequence
  source: /note="Description of Artificial Sequence: Synthetic polypeptide"
  MOD_RES (23)..(23): Any amino acid
QSVLTQPPSASGTPGQRVTISCXGSLSNIGLNYVSWYQQLPGTAPKLLISRNNQRPSGVPDRFSGSKSGTSASLAISGLRSEDEADYYCAAWDDSPPGEAFGGGTKLTVL

SEQ ID NO: 19350 - protein, 110 aa, Artificial Sequence
  source: /note="Description of Artificial Sequence: Synthetic polypeptide"
  MOD_RES (25)..(25): Any amino acid
QSVLTQPPSASGTPGQRVTISCSGXLSNIGLNYVSWYQQLPGTAPKLLISRNNQRPSGVPDRFSGSKSGTSASLAISGLRSEDEADYYCAAWDDSPPGEAFGGGTKLTVL

SEQ ID NO: 19351 - protein, 110 aa, Artificial Sequence
  source: /note="Description of Artificial Sequence: Synthetic polypeptide"
  MOD_RES (26)..(26): Any amino acid
QSVLTQPPSASGTPGQRVTISCSGSXSNIGLNYVSWYQQLPGTAPKLLISRNNQRPSGVPDRFSGSKSGTSASLAISGLRSEDEADYYCAAWDDSPPGEAFGGGTKLTVL

SEQ ID NO: 19352 - protein, 110 aa, Artificial Sequence
  source: /note="Description of Artificial Sequence: Synthetic polypeptide"
  MOD_RES (23)..(23): Any amino acid
  MOD_RES (25)..(25): Any amino acid
QSVLTQPPSASGTPGQRVTISCXGXLSNIGLNYVSWYQQLPGTAPKLLISRNNQRPSGVPDRFSGSKSGTSASLAISGLRSEDEADYYCAAWDDSPPGEAFGGGTKLTVL

SEQ ID NO: 19353 - protein, 110 aa, Artificial Sequence
  source: /note="Description of Artificial Sequence: Synthetic polypeptide"
  MOD_RES (23)..(23): Any amino acid
  MOD_RES (26)..(26): Any amino acid
QSVLTQPPSASGTPGQRVTISCXGSXSNIGLNYVSWYQQLPGTAPKLLISRNNQRPSGVPDRFSGSKSGTSASLAISGLRSEDEADYYCAAWDDSPPGEAFGGGTKLTVL

SEQ ID NO: 19354 - protein, 110 aa, Artificial Sequence
  source: /note="Description of Artificial Sequence: Synthetic polypeptide"
  MOD_RES (25)..(26): Any amino acid
QSVLTQPPSASGTPGQRVTISCSGXXSNIGLNYVSWYQQLPGTAPKLLISRNNQRPSGVPDRFSGSKSGTSASLAISGLRSEDEADYYCAAWDDSPPGEAFGGGTKLTVL

SEQ ID NO: 19355 - protein, 110 aa, Artificial Sequence
  source: /note="Description of Artificial Sequence: Synthetic polypeptide"
  MOD_RES (23)..(23): Any amino acid
  MOD_RES (25)..(26): Any amino acid
QSVLTQPPSASGTPGQRVTISCXGXXSNIGLNYVSWYQQLPGTAPKLLISRNNQRPSGVPDRFSGSKSGTSASLAISGLRSEDEADYYCAAWDDSPPGEAFGGGTKLTVL

SEQ ID NO: 19356 - protein, 110 aa, Artificial Sequence
  source: /note="Description of Artificial Sequence: Synthetic polypeptide"
  MOD_RES (70)..(71): Any amino acid
QSVLTQPPSASGTPGQRVTISCSGSLSNIGLNYVSWYQQLPGTAPKLLISRNNQRPSGVPDRFSGSKSGXXASLAISGLRSEDEADYYCAAWDDSPPGEAFGGGTKLTVL

SEQ ID NO: 19357 - protein, 110 aa, Artificial Sequence
  source: /note="Description of Artificial Sequence: Synthetic polypeptide"
  MOD_RES (51)..(51): Any amino acid
QSVLTQPPSASGTPGQRVTISCSGSLSNIGLNYVSWYQQLPGTAPKLLISXNNQRPSGVPDRFSGSKSGTSASLAISGLRSEDEADYYCAAWDDSPPGEAFGGGTKLTVL

SEQ ID NO: 19358 - protein, 110 aa, Artificial Sequence
  source: /note="Description of Artificial Sequence: Synthetic polypeptide"
  MOD_RES (31)..(31): Any amino acid
  MOD_RES (51)..(51): Any amino acid
QSVLTQPPSASGTPGQRVTISCSGSLSNIGXNYVSWYQQLPGTAPKLLISXNNQRPSGVPDRFSGSKSGTSASLAISGLRSEDEADYYCAAWDDSPPGEAFGGGTKLTVL

SEQ ID NO: 19359 - protein, 110 aa, Artificial Sequence
  source: /note="Description of Artificial Sequence: Synthetic polypeptide"
  MOD_RES (31)..(31): Any amino acid
QSVLTQPPSASGTPGQRVTISCSGSLSNIGXNYVSWYQQLPGTAPKLLISRNNQRPSGVPDRFSGSKSGTSASLAISGLRSEDEADYYCAAWDDSPPGEAFGGGTKLTVL

SEQ ID NO: 19360 - protein, 110 aa, Artificial Sequence
  source: /note="Description of Artificial Sequence: Synthetic polypeptide"
  MOD_RES (33)..(33): Any amino acid
QSVLTQPPSASGTPGQRVTISCSGSLSNIGLNXVSWYQQLPGTAPKLLISRNNQRPSGVPDRFSGSKSGTSASLAISGLRSEDEADYYCAAWDDSPPGEAFGGGTKLTVL

SEQ ID NO: 19361 - protein, 105 aa, Artificial Sequence [sequence omitted]

SEQ ID NO: 19362 - protein, 103 aa, Artificial Sequence
  source: /note="Description of Artificial Sequence: Synthetic polypeptide"
KAAPSVTLFPPSSEELQANKATLVCLISDFYPGAVTVAWKADSSPVKAGVETTTPSKQSNNKYAASSYLSLTPEQWKSHRSYSCQVTHEGSTVEKTVAPTECS

SEQ ID NO: 19363 - protein, 104 aa, Artificial Sequence
  source: /note="Description of Artificial Sequence: Synthetic polypeptide"
VAAPSVFIFPPSDEQLKSGTASVVCLLNNFYPREAKVQWKVDNALQSGNSQESVTEQDSKDSTYSLSSTLTLSKADYEKHKVYACEVTHQGLSSPVTKSFNRGE

SEQ ID NO: 19364 - protein, 101 aa, Artificial Sequence
  source: /note="Description of Artificial Sequence: Synthetic polypeptide"
KAAPSVTLFPPSSEELQANKATLVCLISDFYPGAVTVAWKADSSPVKAGVETTTPSKQSNNKYAASSYLSLTPEQWKSHRSYSCQVTHEGSTVEKTVAPTE

SEQ ID NO: 19365 - protein, 105 aa, Artificial Sequence
  source: /note="Description of Artificial Sequence: Synthetic polypeptide"
VAAPSVFIFPPSDEQLKSGTASVVCLLNNFYPREAKVQWKVDNALQSGNSQESVTEQDSKDSTYSLSSTLTLSKADYEKHKVYACEVTHQGLSSPVTKSFNRGES

SEQ ID NO: 19366 - protein, 105 aa, Artificial Sequence
  source: /note="Description of Artificial Sequence: Synthetic polypeptide"
VAAPSVFIFPPSDEQLKSGTASVVCLLNNFYPREAKVQWKVDNALQSGNSQESVTEQDSKDSTYSLSSTLTLSKADYEKHKVYACEVTHQGLSSPVTKSFNRGEV

SEQ ID NO: 19367 - protein, 103 aa, Artificial Sequence
  source: /note="Description of Artificial Sequence: Synthetic polypeptide"
KAAPSVTLFPPSSEELQANKATLVCLISDFYPGAVTVAWKADSSPVKAGVETTTPSKQSNNKYAASSYLSLTPEQWKSHRSYSCQVTHEGSTVEKTVAPTESS

SEQ ID NO: 19368 - protein, 103 aa, Artificial Sequence
  source: /note="Description of Artificial Sequence: Synthetic polypeptide"
KAAPSVTLFPPSSEELQANKATLVCLISDFYPGAVTVAWKADSSPVKAGVETTTPSKQSNNKYAASSYLSLTPEQWKSHRSYSCQVTHEGSTVEKTVAPTEVS

SEQ ID NO: 19369 - protein, 513 aa, Artificial Sequence
  source: /note="Description of Artificial Sequence: Synthetic polypeptide"
EFATMAVMAPRTLVLLLSGALALTQTWAGDIQLTQSPASLAVSLGQRATISCKASQSVDYDGDSYLNWYQQIPGQPPKLLIYDASNLVSGIPPRFSGSGSGTDFTLNIHPVEKVDAATYHCQQSTEDPWTFGGGTKLEIKGGGGSGGGGSGGGGSQVQLQQSGAELVRPGSSVKISCKASGYAFSSYWMNWVKQRPGQGLEWIGQIWPGDGDTNYNGKFKGKATLTADESSSTAYMQLSSLASEDSAVYFCARRETTTVGRYYYAMDYWGQGTTVTVSSAAEPKSSDKTHTCPPCPAPELLGGPSVFLFPPKPKDTLMISRTPEVTCVVVDVSHEDPEVKFNWYVDGVEVHNAKTKPREEQYNSTYRVVSVLTVLHQDWLNGKEYKCKVSNKALPAPIEKTISKAKGQPREPQVYVYPPSRDELTKNQVSLTCLVKGFYPSDIAVEWESNGQPENNYKTTPPVLDSDGSFALVSKLTVDKSRWQQGNVFSCSVMHEALHNHYTQKSLSLSPGK

SEQ ID NO: 19370 - protein, 513 aa, Artificial Sequence
  source: /note="Description of Artificial Sequence: Synthetic polypeptide"
EFATMAVMAPRTLVLLLSGALALTQTWAGDIQLTQSPASLAVSLGQRATISCKASQSVDYDGDSYLNWYQQIPGQPPKLLIYDASNLVSGIPPRFSGSGSGTDFTLNIHPVEKVDAATYHCQQSTEDPWTFGGGTKLEIKGGGGSGGGGSGGGGSQVQLQQSGAELVRPGSSVKISCKASGYAFSSYWMNWVKQRPGQGLEWIGQIWPGDGDTNYNGKFKGKATLTADESSSTAYMQLSSLASEDSAVYFCARRETTTVGRYYYAMDYWGQGTTVTVSSAAEPKSSDKTHTCPPCPAPEAAGGPSVFLFPPKPKDTLMISRTPEVTCVVVDVSHEDPEVKFNWYVDGVEVHNAKTKPREEQYNSTYRVVSVLTVLHQDWLNGKEYKCKVSNKALPAPIEKTISKAKGQPREPQVYVYPPSRDELTKNQVSLTCLVKGFYPSDIAVEWESNGQPENNYKTTPPVLDSDGSFALVSKLTVDKSRWQQGNVFSCSVMHEALHNHYTQKSLSLSPGK

SEQ ID NO: 19371 - protein, 513 aa, Artificial Sequence; identical to SEQ ID NO: 19370
  source: /note="Description of Artificial Sequence: Synthetic polypeptide"

SEQ ID NO: 19372 - protein, 513 aa, Artificial Sequence; identical to SEQ ID NO: 19369
  source: /note="Description of Artificial Sequence: Synthetic polypeptide"

SEQ ID NO: 19373 - protein, 513 aa, Artificial Sequence; identical to SEQ ID NO: 19369
  source: /note="Description of Artificial Sequence: Synthetic polypeptide"

SEQ ID NO: 19374 - protein, 513 aa, Artificial Sequence; identical to SEQ ID NO: 17194
  source: /note="Description of Artificial Sequence: Synthetic polypeptide"

SEQ ID NO: 19375 - protein, 513 aa, Artificial Sequence; identical to SEQ ID NO: 17194
  source: /note="Description of Artificial Sequence: Synthetic polypeptide"

SEQ ID NO: 19376 - protein, 513 aa, Artificial Sequence; identical to SEQ ID NO: 17194
  source: /note="Description of Artificial Sequence: Synthetic polypeptide"

SEQ ID NO: 19377 - protein, 513 aa, Artificial Sequence; identical to SEQ ID NO: 17194
  source: /note="Description of Artificial Sequence: Synthetic polypeptide"

SEQ ID NO: 19378 - protein, 513 aa, Artificial Sequence
  source: /note="Description of Artificial Sequence: Synthetic polypeptide"
EFATMAVMAPRTLVLLLSGALALTQTWAGDIQLTQSPASLAVSLGQRATISCKASQSVDYDGDSYLNWYQQIPGQPPKLLIYDASNLVSGIPPRFSGSGSGTDFTLNIHPVEKVDAATYHCQQSTEDPWTFGGGTKLEIKGGGGSGGGGSGGGGSQVQLQQSGAELVRPGSSVKISCKASGYAFSSYWMNWVKQRPGQGLEWIGQIWPGDGDTNYNGKFKGKATLTADESSSTAYMQLSSLASEDSAVYFCARRETTTVGRYYYAMDYWGQGTTVTVSSAAEPKSSDKTHTCPPCPAPEAAGGPSVFLFPPKPKDTLMISRTPEVTCVVVSVSHEDPEVKFNWYVDGVEVHNAKTKPREEQYNSTYRVVSVLTVLHQDWLNGKEYKCKVSNKALPAPIEKTISKAKGQPREPQVYVYPPSRDELTKNQVSLTCLVKGFYPSDIAVEWESNGQPENNYKTTPPVLDSDGSFALVSKLTVDKSRWQQGNVFSCSVMHEALHNHYTQKSLSLSPGK

SEQ ID NO: 19379 - protein, 513 aa, Artificial Sequence; identical to SEQ ID NO: 19378
  source: /note="Description of Artificial Sequence: Synthetic polypeptide"

SEQ ID NO: 19380 - protein, 513 aa, Artificial Sequence; identical to SEQ ID NO: 19378
  source: /note="Description of Artificial Sequence: Synthetic polypeptide"

SEQ ID NO: 19381 - protein, 513 aa, Artificial Sequence
  source: /note="Description of Artificial Sequence: Synthetic polypeptide"
EFATMAVMAPRTLVLLLSGALALTQTWAGDIQLTQSPASLAVSLGQRATISCKASQSVDYDGDSYLNWYQQIPGQPPKLLIYDASNLVSGIPPRFSGSGSGTDFTLNIHPVEKVDAATYHCQQSTEDPWTFGGGTKLEIKGGGGSGGGGSGGGGSQVQLQQSGAELVRPGSSVKISCKASGYAFSSYWMNWVKQRPGQGLEWIGQIWPGDGDTNYNGKFKGKATLTADESSSTAYMQLSSLASEDSAVYFCARRETTTVGRYYYAMDYWGQGTTVTVSSAAEPKSSDKTHTCPPCPAPEAAGGPSVFLFPPKPKDTLMISRTPEVTCVVVSVSHEDPEVKFNWYVDGVEVHNAKTKPREEQYNSTYRVVSVLTVLHQDWLNGKEYKCKVSNKALPAPIEKTISKAKGQPREPQVYVLPPSRDELTKNQVSLLCLVKGFYPSDIAVEWESNGQPENNYLTWPPVLDSDGSFFLYSKLTVDKSRWQQGNVFSCSVMHEALHNHYTQKSLSLSPGK

SEQ ID NO: 19382 - protein, 513 aa, Artificial Sequence
  source: /note="Description of Artificial Sequence: Synthetic polypeptide"
EFATMAVMAPRTLVLLLSGALALTQTWAGDIQLTQSPASLAVSLGQRATISCKASQSVDYDGDSYLNWYQQIPGQPPKLLIYDASNLVSGIPPRFSGSGSGTDFTLNIHPVEKVDAATYHCQQSTEDPWTFGGGTKLEIKGGGGSGGGGSGGGGSQVQLQQSGAELVRPGSSVKISCKASGYAFSSYWMNWVKQRPGQGLEWIGQIWPGDGDTNYNGKFKGKATLTADESSSTAYMQLSSLASEDSAVYFCARRETTTVGRYYYAMDYWGQGTTVTVSSAAEPKSSDKTHTCPPCPAPELLGGPSVFLFPPKPKDTLMISRTPEVTCVVVDVSHEDPEVKFNWYVDGVEVHNAKTKPREEQYNSTYRVVSVLTVLHQDWLNGKEYKCKVSNKALPAPIEKTISKAKGQPREPQVYTLPPSRDELTKNQVSLTCLVKGFYPSDIAVEWESNGQPENNYKTTPPVLDSDGSFFLYSKLTVDKSRWQQGNVFSCSVMHEALHNHYTQKSLSLSPGK

SEQ ID NO: 19383 - protein, 513 aa, Artificial Sequence
  source: /note="Description of Artificial Sequence: Synthetic polypeptide"
EFATMAVMAPRTLVLLLSGALALTQTWAGDIQLTQSPASLAVSLGQRATISCKASQSVDYDGDSYLNWYQQIPGQPPKLLIYDASNLVSGIPPRFSGSGSGTDFTLNIHPVEKVDAATYHCQQSTEDPWTFGGGTKLEIKGGGGSGGGGSGGGGSQVQLQQSGAELVRPGSSVKISCKASGYAFSSYWMNWVKQRPGQGLEWIGQIWPGDGDTNYNGKFKGKATLTADESSSTAYMQLSSLASEDSAVYFCARRETTTVGRYYYAMDYWGQGTTVTVSSAAEPKSSDKTHTCPPCPAPELLGGPSVFLFPPKPKDTLMISRTPEVTCVVVDVSHEDPEVKFNWYVDGVEVHNAKTKPREEQYNSTYRVVSVLTVLHQDWLNGKEYKCKVSNKALPAPIEKTISKAKGQPREPQVYTYPPSRDELTKNQVSLTCLVKGFYPSDIAVEWESNGQPENNYKTTPPVLDSDGSFALVSKLTVDKSRWQQGNVFSCSVMHEALHNHYTQKSLSLSPGK

SEQ ID NO: 19384 - protein, 513 aa, Artificial Sequence; identical to SEQ ID NO: 19383
  source: /note="Description of Artificial Sequence: Synthetic polypeptide"

SEQ ID NO: 19385 - protein, 513 aa, Artificial Sequence; identical to SEQ ID NO: 19383
  source: /note="Description of Artificial Sequence: Synthetic polypeptide"

SEQ ID NO: 19386 - protein, 513 aa, Artificial Sequence; identical to SEQ ID NO: 19383
  source: /note="Description of Artificial Sequence: Synthetic polypeptide"

SEQ ID NO: 19387 - protein, 533 aa, Artificial Sequence
  source: /note="Description of Artificial Sequence: Synthetic polypeptide"
EFATMAVMAPRTLVLLLSGALALTQTWAGDIQLTQSPASLAVSLGQRATISCKASQSVDYDGDSYLNWYQQIPGQPPKLLIYDASNLVSGIPPRFSGSGSGTDFTLNIHPVEKVDAATYHCQQSTEDPWTFGGGTKLEIKGGGGSGGGGSGGGGSQVQLQQSGAELVRPGSSVKISCKASGYAFSSYWMNWVKQRPGQGLEWIGQIWPGDGDTNYNGKFKGKATLTADESSSTAYMQLSSLASEDSAVYFCARRETTTVGRYYYAMDYWGQGTTVTVSSGGGGSDIKLQQSGAELARPGASVKMSCKTSGYTFTRYTMHWVKQRPGQGLEWIGYINPSRGYTNYNQKFKDKATLTTDKSSSTAYMQLSSLTSEDSAVYYCARYYDDHYCLDYWGQGTTLTVSSVEGGSGGSGGSGGSGGVDDIQLTQSPAIMSASPGEKVTMTCRASSSVSYMNWYQQKSGTSPKRWIYDTSKVASGVPYRFSGSGSGTSYSLTISSMEAEDAATYYCQQWSSNPLTFGAGTKLELKHHHHHH

SEQ ID NO: 19388 - protein, 512 aa, Artificial Sequence
  source: /note="Description of Artificial Sequence: Synthetic polypeptide"
MQVQLQQPGAELVKPGASVKMSCKTSGYTFTSYNVHWVKQTPGQGLEWIGAIYPGNGDTSFNQKFKGKATLTADKSSSTVYMQLSSLTSEDSAVYYCARSNYYGSSYVWFFDVWGAGTTVTVSSGSTSGSGKPGSGEGSQIVLSQSPTILSASPGEKVTMTCRASSSVSYMDWYQQKPGSSPKPWIYATSNLASGVPARFSGSGSGTSYSLTISRVEAEDAATYYCQQWISNPPTFGAGTKLELKEFPKPSTPPGSSGGAPKEFTLDFSTAKTYVDSLNVIRSAIGTPLQTISSGGTSLLMIDSGSGDNLFAVDVRGIDPEEGRFNNLRLIVERNNLYVTGFVNRTNNVFYRFADFSHVTFPGTTAVTLSGDSSYTTLQRVAGISRTGMQINRHSLTTSYLDLMSHSGTSLTQSVARAMLRFVTVTAEALRFRQIQRGFRTTLDDLSGRSYVMTAEDVDLTLNWGRLSSVLPDYHGQDSVRVGRISFGSINAILGSVALILNCHHHASRVAR

SEQ ID NO: 19389 - protein, 511 aa, Artificial Sequence
  source: /note="Description of Artificial Sequence: Synthetic polypeptide"
MQVQLVQSGAELVKPGASVKMSCKASGYTFTSYNMHWVKQTPGQGLEWIGAIYPGNGDTSYNQKFKGKATLTADKSSSTAYMQLSSLTSEDSAVYYCARAQLRPNYWYFDVWGAGTTVTVSSGGGGSGGGGSGGGGSGGGGSGGGGSDIVLSQSPAILSASPGEKVTMTCRASSSVSYMHWYQQKPGSSPKPWIYATSNLASGVPARFSGSGSGTSYSLTISRVEAEDAATYYCQQWISNPPTFGAGTKLELKGGGGSGGKEFTLDFSTAKTYVDSLNVIRSAIGTPLQTISSGGTSLLMIDSGSGDNLFAVDVRGIDPEEGRFNNLRLIVERNNLYVTGFVNRTNNVFYRFADFSHVTFPGTTAVTLSGDSSYTTLQRVAGISRTGMQINRHSLTTSYLDLMSHSGTSLTQSVARAMLRFVTVTAEALRFRQIQRGFRTTLDDLSGRSYVMTAEDVDLTLNWGRLSSVLPDYHGQDSVRVGRISFGSINAILGSVALILNCHHHASRVAR

SEQ ID NO: 19390 - protein, 513 aa, Artificial Sequence
  source: /note="Description of Artificial Sequence: Synthetic polypeptide"
MQVQLQQPGAELVKPGASVKMSCKASGYTFTSYNMHWVKQTPGRGLEWIGAIYPGNGDTSYNQKFKGKATLTADKSSSTAYMQLSSLTSEDSAVYYCARSTYYGGDWYFNVWGAGTTVTVSAGSTSGSGKPGSGEGSTKGQIVLSQSPAILSASPGEKVTMTCRASSSVSYIHWFQQKPGSSPKPWIYATSNLASGVPVRFSGSGSGTSYSLTISRVEAEDAATYYCQQWTSNPPTFGGGTKLEIKEFPKPSTPPGSSGGAPKEFTLDFSTAKTYVDSLNVIRSAIGTPLQTISSGGTSLLMIDSGSGDNLFAVDVRGIDPEEGRFNNLRLIVERNNLYVTGFVNRTNNVFYRFADFSHVTFPGTTAVTLSGDSSYTTLQRVAGISRTGMQINRHSLTTSYLDLMSHSGTSLTQSVARAMLRFVTVTAEALRFRQIQRGFRTTLDDLSGRSYVMTAEDVDLTLNWGRLSSVLPDYHGQDSVRVGRISFGSINAILGSVALILNCHHHASRVAR

SEQ ID NO: 19391 - protein, 521 aa, Artificial Sequence
  source: /note="Description of Artificial Sequence: Synthetic polypeptide"
MQVQLQQPGAELVKPGASVKMSCKTSGYTFTSYNVHWVKQTPGQGLEWIGAIYPGNGDTSFNQKFKGKATLTADKSSSTVYMQLSSLTSEDSAVYYCARSNYYGSSYVWFFDVWGAGTTVTVSSGSTSGSGKPGSGEGSQIVLSQSPTILSASPGEKVTMTCRASSSVSYMDWYQQKPGSSPKPWIYATSNLASGVPARFSGSGSGTSYSLTISRVEAEDAATYYCQQWISNPPTFGAGTKLELKEFPKPSTPPGSSGGAPGILGFVFTLKEFTLDFSTAKTYVDSLNVIRSAIGTPLQTISSGGTSLLMIDSGSGDNLFAVDVRGIDPEEGRFNNLRLIVERNNLYVTGFVNRTNNVFYRFADFSHVTFPGTTAVTLSGDSSYTTLQRVAGISRTGMQINRHSLTTSYLDLMSHSGTSLTQSVARAMLRFVTVTAEALRFRQIQRGFRTTLDDLSGRSYVMTAEDVDLTLNWGRLSSVLPDYHGQDSVRVGRISFGSINAILGSVALILNCHHHASRVAR

SEQ ID NO: 19392 - protein, 506 aa, Artificial Sequence
  source: /note="Description of Artificial Sequence: Synthetic polypeptide"
EFATMAVMAPRTLVLLLSGALALTQTWAGDIKLQQSGAELARPGASVKMSCKTSGYTFTRYTMHWVKQRPGQGLEWIGYINPSRGYTNYNQKFKDKATLTTDKSSSTAYMQLSSLTSEDSAVYYCARYYDDHYCLDYWGQGTTLTVSSVEGGSGGSGGSGGSGGVDDIQLTQSPAIMSASPGEKVTMTCRASSSVSYMNWYQQKSGTSPKRWIYDTSKVASGVPYRFSGSGSGTSYSLTISSMEAEDAATYYCQQWSSNPLTFGAGTKLELKAAEPKSSDKTHTCPPCPAPELLGGPSVFLFPPKPKDTLMISRTPEVTCVVVDVSHEDPEVKFNWYVDGVEVHNAKTKPREEQYASTYRVVSVLTVLHQDWLNGKEYKCKVSNKALPAPIEKTISKAKGQPREPQVYVLPPSRDELTKNQVSLLCLVKGFYPSDIAVEWESNGQPENNYLTWPPVLDSDGSFFLYSKLTVDKSRWQQGNVFSCSVMHEALHNHYTQKSLSLSPGK

SEQ ID NO: 19393 - protein, 506 aa, Artificial Sequence
  source: /note="Description of Artificial Sequence: Synthetic polypeptide"
EFATMAVMAPRTLVLLLSGALALTQTWAGDIKLQQSGAELARPGASVKMSCKTSGYTFTRYTMHWVKQRPGQGLEWIGYINPSRGYTNYNQKFKDKATLTTDKSSSTAYMQLSSLTSEDSAVYYCARYYDDHYCLDYWGQGTTLTVSSVEGGSGGSGGSGGSGGVDDIQLTQSPAIMSASPGEKVTMTCRASSSVSYMNWYQQKSGTSPKRWIYDTSKVASGVPYRFSGSGSGTSYSLTISSMEAEDAATYYCQQWSSNPLTFGAGTKLELKAAEPKSSDKTHTCPPCPAPELLGGPSVFLFPPKPKDTLMISRTPEVTCVVVDVSHEDPEVKFNWYVDGVEVHNAKTKPREEQYNSTYRVVSVLTVLHQDWLNGKEYKCKVSNKALPAPIEKTISKAKGQPREPQVYVYPPSRDELTKNQVSLTCLVKGFYPSDIAVEWESNGQPENNYKTTPPVLDSDGSFALVSKLTVDKSRWQQGNVFSCSVMHEALHNHYTQKSLSLSPGK

SEQ ID NO: 19394 - protein, 503 aa, Artificial Sequence
  source: /note="Description of Artificial Sequence: Synthetic polypeptide"
EFATMAVMAPRTLVLLLSGALALTQTWAGQIVLTQSPAIMSASPGEKVTMTCSASSSVSYMNWYQQKSGTSPKRWIYDTSKLASGVPAHFRGSGSGTSYSLTISGMEAEDAATYYCQQWSSNPFTFGSGTKLEINGGGGSGGGGSGGGGSQVQLQQSGAELARPGASVKMSCKASGYTFTRYTMHWVKQRPGQGLEWIGYINPSRGYTNYNQKFKDKATLTTDKSSSTAYMQLSSLTSEDSAVYYCARYYDDHYSLDYWGQGTTLTVSSAAEPKSSDKTHTCPPCPAPELLGGPSVFLFPPKPKDTLMISRTPEVTCVVVDVSHEDPEVKFNWYVDGVEVHNAKTKPREEQYNSTYRVVSVLTVLHQDWLNGKEYKCKVSNKALPAPIEKTISKAKGQPREPQVYVYPPSRDELTKNQVSLTCLVKGFYPSDIAVEWESNGQPENNYKTTPPVLDSDGSFALVSKLTVDKSRWQQGNVFSCSVMHEALHNHYTQKSLSLSPGK

SEQ ID NO: 19395 - protein, 506 aa, Artificial Sequence
  source: /note="Description of Artificial Sequence: Synthetic polypeptide"
EFATMAVMAPRTLVLLLSGALALTQTWAGQVQLQQSGAELARPGASVKMSCKASGYTFTRYTMHWVKQRPGQGLEWIGYINPSRGYTNYNQKFKDKATLTTDKSSSTAYMQLSSLTSEDSAVYYCARYYDDHYSLDYWGQGTTLTVSSAKTTPKLEEGEFSEARVDIVLTQSPAIMSASPGEKVTMTCSASSSVSYMNWYQQKSGTSPKRWIYDTSKLASGVPAHFRGSGSGTSYSLTISGMEAEDAATYYCQQWSSNPFTFGSGTKLEINRAAEPKSSDKTHTCPPCPAPELLGGPSVFLFPPKPKDTLMISRTPEVTCVVVDVSHEDPEVKFNWYVDGVEVHNAKTKPREEQYNSTYRVVSVLTVLHQDWLNGKEYKCKVSNKALPAPIEKTISKAKGQPREPQVYVYPPSRDELTKNQVSLTCLVKGFYPSDIAVEWESNGQPENNYKTTPPVLDSDGSFALVSKLTVDKSRWQQGNVFSCSVMHEALHNHYTQKSLSLSPGK

SEQ ID NO: 19396 - protein, 498 aa, Artificial Sequence
  source: /note="Description of Artificial Sequence: Synthetic polypeptide"
EFATMAVMAPRTLVLLLSGALALTQTWAGQVQLQQSGAELARPGASVKMSCKASGYTFTRYTMHWVKQRPGQGLEWIGYINPSRGYTNYNQKFKDKATLTTDKSSSTAYMQLSSLTSEDSAVYYCARYYDDHYSLDYWGQGTTLTVSSAKTTPKLGGDIVLTQSPAIMSASPGEKVTMTCSASSSVSYMNWYQQKSGTSPKRWIYDTSKLASGVPAHFRGSGSGTSYSLTISGMEAEDAATYYCQQWSSNPFTFGSGTKLEINRAAEPKSSDKTHTCPPCPAPELLGGPSVFLFPPKPKDTLMISRTPEVTCVVVDVSHEDPEVKFNWYVDGVEVHNAKTKPREEQYNSTYRVVSVLTVLHQDWLNGKEYKCKVSNKALPAPIEKTISKAKGQPREPQVYVYPPSRDELTKNQVSLTCLVKGFYPSDIAVEWESNGQPENNYKTTPPVLDSDGSFALVSKLTVDKSRWQQGNVFSCSVMHEALHNHYTQKSLSLSPGK

SEQ ID NO: 19397 - protein, 509 aa, Artificial Sequence
  source: /note="Description of Artificial Sequence: Synthetic polypeptide"
EFATMAVMAPRTLVLLLSGALALTQTWAGQVQLQQSGAELARPGASVKMSCKASGYTFTRYTMHWVKQRPGQGLEWIGYINPSRGYTNYNQKFKDKATLTTDKSSSTAYMQLSSLTSEDSAVYYCARYYDDHYSLDYWGQGTTLTVSSSSTGGGGSGGGGSGGGGSDIQIVLTQSPAIMSASPGEKVTMTCSASSSVSYMNWYQQKSGTSPKRWIYDTSKLASGVPAHFRGSGSGTSYSLTISGMEAEDAATYYCQQWSSNPFTFGSGTKLEINRAAEPKSSDKTHTCPPCPAPELLGGPSVFLFPPKPKDTLMISRTPEVTCVVVDVSHEDPEVKFNWYVDGVEVHNAKTKPREEQYNSTYRVVSVLTVLHQDWLNGKEYKCKVSNKALPAPIEKTISKAKGQPREPQVYVYPPSRDELTKNQVSLTCLVKGFYPSDIAVEWESNGQPENNYKTTPPVLDSDGSFALVSKLTVDKSRWQQGNVFSCSVMHEALHNHYTQKSLSLSPGK

SEQ ID NO: 19398 - protein, 503 aa, Artificial Sequence
  source: /note="Description of Artificial Sequence: Synthetic polypeptide"
EFATMAVMAPRTLVLLLSGALALTQTWAGQIVLTQSPAIMSASPGEKVTMTCSASSSVSYMNWYQQKSGTSPKRWIYDTSKLASGVPAHFRGSGSGTSYSLTISGMEAEDAATYYCQQWSSNPFTFGSGTKLEINGGGGSGGGGSGGGGSQVQLQQSGAELARPGASVKMSCKASGYTFTRYTMHWVKQRPGQGLEWIGYINPSRGYTNYNQKFKDKATLTTDKSSSTAYMQLSSLTSEDSAVYYCARYYDDHYCLDYWGQGTTLTVSSAAEPKSSDKTHTCPPCPAPEAAGGPSVFLFPPKPKDTLMISRTPEVTCVVVSVSHEDPEVKFNWYVDGVEVHNAKTKPREEQYNSTYRVVSVLTVLHQDWLNGKEYKCKVSNKALPAPIEKTISKAKGQPREPQVYVLPPSRDELTKNQVSLLCLVKGFYPSDIAVEWESNGQPENNYLTWPPVLDSDGSFFLYSKLTVDKSRWQQGNVFSCSVMHEALHNHYTQKSLSLSPGK

SEQ ID NO: 19399 - protein, 506 aa, Artificial Sequence
  source: /note="Description of Artificial Sequence: Synthetic polypeptide"
EFATMAVMAPRTLVLLLSGALALTQTWAGQVQLQQSGAELARPGASVKMSCKASGYTFTRYTMHWVKQRPGQGLEWIGYINPSRGYTNYNQKFKDKATLTTDKSSSTAYMQLSSLTSEDSAVYYCARYYDDHYSLDYWGQGTTLTVSSAKTTPKLEEGEFSEARVDIVLTQSPAIMSASPGEKVTMTCSASSSVSYMNWYQQKSGTSPKRWIYDTSKLASGVPAHFRGSGSGTSYSLTISGMEAEDAATYYCQQWSSNPFTFGSGTKLEINRAAEPKSSDKTHTCPPCPAPEAAGGPSVFLFPPKPKDTLMISRTPEVTCVVVSVSHEDPEVKFNWYVDGVEVHNAKTKPREEQYNSTYRVVSVLTVLHQDWLNGKEYKCKVSNKALPAPIEKTISKAKGQPREPQVYVLPPSRDELTKNQVSLLCLVKGFYPSDIAVEWESNGQPENNYLTWPPVLDSDGSFFLYSKLTVDKSRWQQGNVFSCSVMHEALHNHYTQKSLSLSPGK

SEQ ID NO: 19400 - protein, 498 aa, Artificial Sequence
  source: /note="Description of Artificial Sequence: Synthetic polypeptide"
EFATMAVMAPRTLVLLLSGALALTQTWAGQVQLQQSGAELARPGASVKMSCKASGYTFTRYTMHWVKQRPGQGLEWIGYINPSRGYTNYNQKFKDKATLTTDKSSSTAYMQLSSLTSEDSAVYYCARYYDDHYSLDYWGQGTTLTVSSAKTTPKLGGDIVLTQSPAIMSASPGEKVTMTCSASSSVSYMNWYQQKSGTSPKRWIYDTSKLASGVPAHFRGSGSGTSYSLTISGMEAEDAATYYCQQWSSNPFTFGSGTKLEINRAAEPKSSDKTHTCPPCPAPEAAGGPSVFLFPPKPKDTLMISRTPEVTCVVVSVSHEDPEVKFNWYVDGVEVHNAKTKPREEQYNSTYRVVSVLTVLHQDWLNGKEYKCKVSNKALPAPIEKTISKAKGQPREPQVYVLPPSRDELTKNQVSLLCLVKGFYPSDIAVEWESNGQPENNYLTWPPVLDSDGSFFLYSKLTVDKSRWQQGNVFSCSVMHEALHNHYTQKSLSLSPGK

SEQ ID NO: 19401 - protein, 506 aa, Artificial Sequence
  source: /note="Description of Artificial Sequence: Synthetic polypeptide"
EFATMAVMAPRTLVLLLSGALALTQTWAGDIKLQQSGAELARPGASVKMSCKTSGYTFTRYTMHWVKQRPGQGLEWIGYINPSRGYTNYNQKFKDKATLTTDKSSSTAYMQLSSLTSEDSAVYYCARYYDDHYCLDYWGQGTTLTVSSVEGGSGGSGGSGGSGGVDDIQLTQSPAIMSASPGEKVTMTCRASSSVSYMNWYQQKSGTSPKRWIYDTSKVASGVPYRFSGSGSGTSYSLTISSMEAEDAATYYCQQWSSNPLTFGAGTKLELKAAEPKSSDKTHTCPPCPAPEAAGGPSVFLFPPKPKDTLMISRTPEVTCVVVSVSHEDPEVKFNWYVDGVEVHNAKTKPREEQYNSTYRVVSVLTVLHQDWLNGKEYKCKVSNKALPAPIEKTISKAKGQPREPQVYVYPPSRDELTKNQVSLTCLVKGFYPSDIAVEWESNGQPENNYKTTPPVLDSDGSFALVSKLTVDKSRWQQGNVFSCSVMHEALHNHYTQKSLSLSPGK

SEQ ID NO: 19402 - protein, 509 aa, Artificial Sequence
  source: /note="Description of Artificial Sequence: Synthetic polypeptide"
EFATMAVMAPRTLVLLLSGALALTQTWAGQVQLQQSGAELARPGASVKMSCKASGYTFTRYTMHWVKQRPGQGLEWIGYINPSRGYTNYNQKFKDKATLTTDKSSSTAYMQLSSLTSEDSAVYYCARYYDDHYSLDYWGQGTTLTVSSSSTGGGGSGGGGSGGGGSDIQIVLTQSPAIMSASPGEKVTMTCSASSSVSYMNWYQQKSGTSPKRWIYDTSKLASGVPAHFRGSGSGTSYSLTISGMEAEDAATYYCQQWSSNPFTFGSGTKLEINRAAEPKSSDKTHTCPPCPAPEAAGGPSVFLFPPKPKDTLMISRTPEVTCVVVSVSHEDPEVKFNWYVDGVEVHNAKTKPREEQYNSTYRVVSVLTVLHQDWLNGKEYKCKVSNKALPAPIEKTISKAKGQPREPQVYVYPPSRDELTKNQVSLTCLVKGFYPSDIAVEWESNGQPENNYKTTPPVLDSDGSFALVSKLTVDKSRWQQGNVFSCSVMHEALHNHYTQKSLSLSPGK

SEQ ID NO: 19403 - protein, 503 aa, Artificial Sequence
  source: /note="Description of Artificial Sequence: Synthetic polypeptide"
EFATMAVMAPRTLVLLLSGALALTQTWAGQIVLTQSPAIMSASPGEKVTMTCSASSSVSYMNWYQQKSGTSPKRWIYDTSKLASGVPAHFRGSGSGTSYSLTISGMEAEDAATYYCQQWSSNPFTFGSGTKLEINGGGGSGGGGSGGGGSQVQLQQSGAELARPGASVKMSCKASGYTFTRYTMHWVKQRPGQGLEWIGYINPSRGYTNYNQKFKDKATLTTDKSSSTAYMQLSSLTSEDSAVYYCARYYDDHYCLDYWGQGTTLTVSSAAEPKSSDKTHTCPPCPAPELLGGPSVFLFPPKPKDTLMISRTPEVTCVVVDVSHEDPEVKFNWYVDGVEVHNAKTKPREEQYASTYRVVSVLTVLHQDWLNGKEYKCKVSNKALPAPIEKTISKAKGQPREPQVYVLPPSRDELTKNQVSLLCLVKGFYPSDIAVEWESNGQPENNYLTWPPVLDSDGSFFLYSKLTVDKSRWQQGNVFSCSVMHEALHNHYTQKSLSLSPGK

SEQ ID NO: 19404 - protein, 503 aa, Artificial Sequence
  source: /note="Description of Artificial Sequence: Synthetic polypeptide"
EFATMAVMAPRTLVLLLSGALALTQTWAGQIVLTQSPAIMSASPGEKVTMTCSASSSVSYMNWYQQKSGTSPKRWIYDTSKLASGVPAHFRGSGSGTSYSLTISGMEAEDAATYYCQQWSSNPFTFGSGTKLEINGGGGSGGGGSGGGGSQVQLQQSGAELARPGASVKMSCKASGYTFTRYTMHWVKQRPGQGLEWIGYINPSRGYTNYNQKFKDKATLTTDKSSSTAYMQLSSLTSEDSAVYYCARYYDDHYSLDYWGQGTTLTVSSAAEPKSSDKTHTCPPCPAPELLGGPSVFLFPPKPKDTLMISRTPEVTCVVVDVSHEDPEVKFNWYVDGVEVHNAKTKPREEQYASTYRVVSVLTVLHQDWLNGKEYKCKVSNKALPAPIEKTISKAKGQPREPQVYVLPPSRDELTKNQVSLLCLVKGFYPSDIAVEWESNGQPENNYLTWPPVLDSDGSFFLYSKLTVDKSRWQQGNVFSCSVMHEALHNHYTQKSLSLSPGK

SEQ ID NO: 19405 - protein, 506 aa, Artificial Sequence
  source: /note="Description of Artificial Sequence: Synthetic polypeptide"
EFATMAVMAPRTLVLLLSGALALTQTWAGQVQLQQSGAELARPGASVKMSCKASGYTFTRYTMHWVKQRPGQGLEWIGYINPSRGYTNYNQKFKDKATLTTDKSSSTAYMQLSSLTSEDSAVYYCARYYDDHYSLDYWGQGTTLTVSSAKTTPKLEEGEFSEARVDIVLTQSPAIMSASPGEKVTMTCSASSSVSYMNWYQQKSGTSPKRWIYDTSKLASGVPAHFRGSGSGTSYSLTISGMEAEDAATYYCQQWSSNPFTFGSGTKLEINRAAEPKSSDKTHTCPPCPAPELLGGPSVFLFPPKPKDTLMISRTPEVTCVVVDVSHEDPEVKFNWYVDGVEVHNAKTKPREEQYASTYRVVSVLTVLHQDWLNGKEYKCKVSNKALPAPIEKTISKAKGQPREPQVYVLPPSRDELTKNQVSLLCLVKGFYPSDIAVEWESNGQPENNYLTWPPVLDSDGSFFLYSKLTVDKSRWQQGNVFSCSVMHEALHNHYTQKSLSLSPGK

SEQ ID NO: 19406 - protein, 498 aa, Artificial Sequence
  source: /note="Description of Artificial Sequence: Synthetic polypeptide"
EFATMAVMAPRTLVLLLSGALALTQTWAGQVQLQQSGAELARPGASVKMSCKASGYTFTRYTMHWVKQRPGQGLEWIGYINPSRGYTNYNQKFKDKATLTTDKSSSTAYMQLSSLTSEDSAVYYCARYYDDHYSLDYWGQGTTLTVSSAKTTPKLGGDIVLTQSPAIMSASPGEKVTMTCSASSSVSYMNWYQQKSGTSPKRWIYDTSKLASGVPAHFRGSGSGTSYSLTISGMEAEDAATYYCQQWSSNPFTFGSGTKLEINRAAEPKSSDKTHTCPPCPAPELLGGPSVFLFPPKPKDTLMISRTPEVTCVVVDVSHEDPEVKFNWYVDGVEVHNAKTKPREEQYASTYRVVSVLTVLHQDWLNGKEYKCKVSNKALPAPIEKTISKAKGQPREPQVYVLPPSRDELTKNQVSLLCLVKGFYPSDIAVEWESNGQPENNYLTWPPVLDSDGSFFLYSKLTVDKSRWQQGNVFSCSVMHEALHNHYTQKSLSLSPGK

SEQ ID NO: 19407 - protein, 509 aa, Artificial Sequence
  source: /note="Description of Artificial Sequence: Synthetic polypeptide"
EFATMAVMAPRTLVLLLSGALALTQTWAGQVQLQQSGAELARPGASVKMSCKASGYTFTRYTMHWVKQRPGQGLEWIGYINPSRGYTNYNQKFKDKATLTTDKSSSTAYMQLSSLTSEDSAVYYCARYYDDHYSLDYWGQGTTLTVSSSSTGGGGSGGGGSGGGGSDIQIVLTQSPAIMSASPGEKVTMTCSASSSVSYMNWYQQKSGTSPKRWIYDTSKLASGVPAHFRGSGSGTSYSLTISGMEAEDAATYYCQQWSSNPFTFGSGTKLEINRAAEPKSSDKTHTCPPCPAPELLGGPSVFLFPPKPKDTLMISRTPEVTCVVVDVSHEDPEVKFNWYVDGVEVHNAKTKPREEQYASTYRVVSVLTVLHQDWLNGKEYKCKVSNKALPAPIEKTISKAKGQPREPQVYVYPPSRDELTKNQVSLTCLVKGFYPSDIAVEWESNGQPENNYKTTPPVLDSDGSFALVSKLTVDKSRWQQGNVFSCSVMHEALHNHYTQKSLSLSPGK

SEQ ID NO: 19408 - protein, 261 aa, Artificial Sequence
  source: /note="Description of Artificial Sequence: Synthetic polypeptide"
EFATMAVMAPRTLVLLLSGALALTQTWAGEPKSSDKTHTCPPCPAPELLGGPSVFLFPPKPKDTLMISRTPEVTCVVVDVSHEDPEVKFNWYVDGVEVHNAKTKPREEQYNSTYRVVSVLTVLHQDWLNGKEYKCKVSNKALPAPIEKTISKAKGQPREPQVYVYPPSRDELTKNQVSLTCLVKGFYPSDIAVEWESNGQPENNYKTTPPVLDSDGSFALVSKLTVDKSRWQQGNVFSCSVMHEALHNHYTQKSLSLSPGK

SEQ ID NO: 19409 - protein, 261 aa, Artificial Sequence; identical to SEQ ID NO: 19408
  source: /note="Description of Artificial Sequence: Synthetic polypeptide"

SEQ ID NO: 19410 - protein, 261 aa, Artificial Sequence; identical to SEQ ID NO: 19408
  source: /note="Description of Artificial Sequence: Synthetic polypeptide"

SEQ ID NO: 19411 - protein, 509 aa, Artificial Sequence; identical to SEQ ID NO: 19397
  source: /note="Description of Artificial Sequence: Synthetic polypeptide"

SEQ ID NO: 19412 - protein, 502 aa, Artificial Sequence
  source: /note="Description of Artificial Sequence: Synthetic polypeptide"
EFATMAVMAPRTLVLLLSGALALTQTWAGDIQLTQSPAIMSASPGEKVTMTCRASSSVSYMNWYQQKSGTSPKRWIYDTSKVASGVPYRFSGSGSGTSYSLTISSMEAEDAATYYCQQWSSNPLTFGAGTKLELKGGGGSGGGGSGGGGSDIKLQQSGAELARPGASVKMSCKTSGYTFTRYTMHWVKQRPGQGLEWIGYINPSRGYTNYNQKFKDKATLTTDKSSSTAYMQLSSLTSEDSAVYYCARYYDDHYCLDYWGQGTTLTVSSAAEPKSSDKTHTCPPCPAPELLGGPSVFLFPPKPKDTLMISRTPEVTCVVVDVSHEDPEVKFNWYVDGVEVHNAKTKPREEQYNSTYRVVSVLTVLHQDWLNGKEYKCKVSNKALPAPIEKTISKAKGQPREPQVYTLPPSRDELTKNQVSLTCLVKGFYPSDIAVEWESNGQPENNYKTTPPVLDSDGSFFLYSKLTVDKSRWQQNVFSCSVMHEALHNHYTQKSLSLSPGK

SEQ ID NO: 19413 - protein, 503 aa, Artificial Sequence
  source: /note="Description of Artificial Sequence: Synthetic polypeptide"
EFATMAVMAPRTLVLLLSGALALTQTWAGQIVLTQSPAIMSASPGEKVTMTCSASSSVSYMNWYQQKSGTSPKRWIYDTSKLASGVPAHFRGSGSGTSYSLTISGMEAEDAATYYCQQWSSNPFTFGSGTKLEINGGGGSGGGGSGGGGSQVQLQQSGAELARPGASVKMSCKASGYTFTRYTMHWVKQRPGQGLEWIGYINPSRGYTNYNQKFKDKATLTTDKSSSTAYMQLSSLTSEDSAVYYCARYYDDHYCLDYWGQGTTLTVSSAAEPKSSDKTHTCPPCPAPELLGGPSVFLFPPKPKDTLMISRTPEVTCVVVDVSHEDPEVKFNWYVDGVEVHNAKTKPREEQYNSTYRVVSVLTVLHQDWLNGKEYKCKVSNKALPAPIEKTISKAKGQPREPQVYTLPPSRDELTKNQVSLTCLVKGFYPSDIAVEWESNGQPENNYKTTPPVLDSDGSFFLYSKLTVDKSRWQQGNVFSCSVMHEALHNHYTQKSLSLSPGK

SEQ ID NO: 19414 - protein, 261 aa, Artificial Sequence
  source: /note="Description of Artificial Sequence: Synthetic polypeptide"
EFATMAVMAPRTLVLLLSGALALTQTWAGEPKSSDKTHTCPPCPAPELLGGPSVFLFPPKPKDTLMISRTPEVTCVVVDVSHEDPEVKFNWYVDGVEVHNAKTKPREEQYNSTYRVVSVLTVLHQDWLNGKEYKCKVSNKALPAPIEKTISKAKGQPREPQVYTYPPSRDELTKNQVSLTCLVKGFYPSDIAVEWESNGQPENNYKTTPPVLDSDGSFALVSKLTVDKSRWQQGNVFSCSVMHEALHNHYTQKSLSLSPGK

SEQ ID NO: 19415 - protein, 260 aa, Artificial Sequence
  source: /note="Description of Artificial Sequence: Synthetic polypeptide"
EFATMAVMAPRTLVLLLSGALALTQTWAGEPKSSDKTHTCPPCPAPELLGGPSVFLFPPKPKDTLMISRTPEVCVVVDVSHEDPEVKFNWYVDGVEVHNAKTKPREEQYNSTYRVVSVLTVLHQDWLNGKEYKCKVSNKALPAPIEKTISKAKGQPREPQVYTYPPSRDELTKNQVSLTCLVKGFYPSDIAVEWESNGQPENNYKTTPPVLDSDGSFALVSKLTVDKSRWQQGNVFSCSVMHEALHNHYTQKSLSLSPGK

SEQ ID NO: 19416 - protein, 261 aa, Artificial Sequence; identical to SEQ ID NO: 19414
  source: /note="Description of Artificial Sequence: Synthetic polypeptide"

SEQ ID NO: 19417 - protein, 506 aa, Artificial Sequence; identical to SEQ ID NO: 17293
  source: /note="Description of Artificial Sequence: Synthetic polypeptide"

SEQ ID NO: 19418 - protein, 503 aa, Artificial Sequence; identical to SEQ ID NO: 17294
  source: /note="Description of Artificial Sequence: Synthetic polypeptide"

SEQ ID NO: 19419 - protein, 503 aa, Artificial Sequence; identical to SEQ ID NO: 17295
  source: /note="Description of Artificial Sequence: Synthetic polypeptide"

SEQ ID NO: 19420 - protein, 492 aa, Artificial Sequence
  source: /note="Description of Artificial Sequence: Synthetic polypeptide"
DIVLTQSPSSLSASLGDRVTISCSASQGIRNYLNWYQQRPDGTVKLLIYYTSSLHSGVPSRFSGSGSGTDYSLTISNLEPEDIATYYCQQYSKLPWTFGGGTKLEIKGGGGSGGGGSGGGGSEVQLQESGPGLVKPSQSLSLTCSVTGYSITSGYYWNWIRQFPGNKLEWMGYITYDGSNNYNPSLKNRISITRDTSKNQFFLKLNSVTTEDTATYYCADFDYWGQGTTLTVSSGGGGSEVQLVESGGGLVQPGGSLRLSCAASGYSFTGYTMNWVRQAPGKGLEWVALINPYKGVSTYNQKFKDRFTISVDKSKNTAYLQMNSLRAEDTAVYYCARSGYYGDSDWYFDVWGQGTLVTVSSVEGGSGGSGGSGGSGGVDDIQMTQSPSSLSASVGDRVTITCRASQDIRNYLNWYQQKPGKAPKLLIYYTSRLESGVPSRFSGSGSGTDYTLTISSLQPEDFATYYCQQGNTLPWTFGQGTKVEIKHHHHHH

SEQ ID NO: 19421 - protein, 264 aa, Homo sapiens
MKYLLPTAAAGLLLLAAQPAMAEVQLVESGGGLVQPGGSLRLSCAASGFSLTNYGVHWVRQAPGKGLEWLGVIWSGGNTDYNTPFTSRFTISRDNSKNTLYLQMNSLRAEDTAVYYCARALTYYDYEFAYWGQGTTVTVSSGGGGSGGGGSGGGGSDIQLTQSPSFLSASVGDRVTITCRASQSIGTNIHWYQQKPGKAPKLLIKYASESISGVPSRFSGSGSGTEFTLTISSLQPEDFATYYCQQNNNWPTTFGAGTKLEIKR

SEQ ID NO: 19422 - protein, 479 aa, Artificial Sequence
  source: /note="Description of Artificial Sequence: Synthetic polypeptide"
DVVMTQTPLSLPVTPGEPASISCRSSQSLVHRNGNTYLHWYLQKPGQSPKLLIHKVSNRFSGVPDRFSGSGSGTDFTLKISRVEAEDLGVYFCSQSTHVPPLTFGAGTKLELKSGGGGSGGGGSGGGGSGGGGSEVQLVQSGAEVEKPGASVKISCKASGSSFTGYNMNWVRQNIGKSLEWIGAIDPYYGGTSYNQKFKGRATLTVDKSTSTAYMHLKSLRSEDTAVYYCVSGMEYWGQGTSVTVSSEPKSCDKTHTCPPCPAPELLGGPSVFLFPPKPKDTLMISRTPEVTCVVVDVSHEDPEVKFNWYVDGVEVHNAKTKPREEQYNSTYRVVSVLTVLHQDWLNGKEYKCKVSNKALPAPIEKTISKAKGQPREPQVYTLPPSREEMTKNQVSLTCLVKGFYPSDIAVEWESNGQPENNYKTTPPVLDSDGSFFLYSKLTVDKSRWQQGNVFSCSVMHEALHNHYTQKSLSLSPGK

SEQ ID NO: 19423 - protein, 241 aa, Artificial Sequence
  source: /note="Description of Artificial Sequence: Synthetic polypeptide"
QVQLVESGPGVVQPGRSLRISCAVSGFSVTNYGVHWVRQPPGKGLEWLGVIWAGGITNYNSAFMSRLTISKDNSKNTVYLQMNSLRAEDTAMYYCASRGGHYGYALDYWGQGTLVTVSSGSTSGSGKPGSSEGSTKGEIVMTQTPATLSVSAGERVTITCKASQSVSNDVTWYQQKPGQAPRLLIYSASNRYSGVPARFSGSGYGTEFTFTISSVQSEDFAVYFCQQDYSSFGQGTKLEIK

SEQ ID NO: 19424 - protein, 249 aa, Artificial Sequence
  source: /note="Description of Artificial Sequence: Synthetic polypeptide"
EVKLVESGGGLVLPGDSLRLSCATSEFTFTDYYMTWVRQPPRKALEWLGFIRNRANGYTTEYNPSVKGRFTISRDNSQSILYLQMNTLRTEDSATYYCARVSNWAFDYWGQGTTLTVSSGSTSGSGKPGSSEGSTKGDVVMTQTPLSLPVSLGDQASISCRSSQSLLKNNGNTFLHWYLQKSGQSPKLLIYKVSNRLSGVPDRFSGSGSGTYFTLKISRVEAEDLGVYFCSQSTHIPYTFGGGTKLEIK

SEQ ID NO: 19425 - protein, 244 aa, Artificial Sequence
  source: /note="Description of Artificial Sequence: Synthetic polypeptide"
EVQLVQSGAEVEKPGASVKISCKASGSSFTGYNMNWVRQNIGKSLEWIGAIDPYYGGTSYNQKFKGRATLTVDKSTSTAYMHLKSLRSEDTAVYYCVSGMEYWGQGTSVTVSSGSTSGSGKPGSSEGSTKGDVVMTQTPLSLPVTPGEPASISCRSSQSLVHRNGNTYLHWYLQKPGQSPKLLIHKVSNRFSGVPDRFSGSGSGTDFTLKISRVEAEDLGVYFCSQSTHVPPLTFGAGTKLELK

SEQ ID NO: 19426 - protein, 243 aa, Artificial Sequence
  source: /note="Description of Artificial Sequence: Synthetic polypeptide"
QVQLKESGPVLVAPSQTLSITCTVSGFSLASYNIHVWRQPPGKGLEWLGVIWAGGSTNYNSALMSRLSISKDNSKSQVFLQMNSLQTDDTAMYYCAKRSDDYSWFAYWGQGTLVTVSASGGGGSGGGGSGGGGSENVLTQSPAIMSASPGEKVTMTCRASSSVSSSYLHWYQQKSGASPKVWIYSTSNLASGVPGRFSGSGSGTSYSLTISSVEAEDAATYYCQQYSGYPITFGAGTKVEVKR

SEQ ID NO: 19427 - protein, 242 aa, Artificial Sequence
  source: /note="Description of Artificial Sequence: Synthetic polypeptide"
QVQLQESGPGLVKPSQTLSITCTVSGFSLASYNIHWVRQPPGKGLEWLGVIWAGGSTNYNSALMSRLTISKDNSKNQVFLKMSSLTAADTAVYYCAKRSDDYSWFAYWGQGTLVTVSSGGGGSGGGGSGGGGSENQMTQSPSSLSASVGDRVTMTCRASSSVSSSYLHWYQQKSGKAPKVWIYSTSNLASGVPSRFSGSGSGTDYTLTISSLQPEDFATYYCQQYSGYPITFGQGTKVEIKR

SEQ ID NO: 19428 - protein, 243 aa, Artificial Sequence
  source: /note="Description of Artificial Sequence: Synthetic polypeptide"
QVQLKESGPVLVAPSQTLSITCTVSGFSLASYNIHWVRQPPGKGLEWLGVIWAGGSTNYNSALMSRLSISKDNSKSQVFLQMNSLQTDDTAMYYCAKRSDDYSWFAYWGQGTLVTVSASGGGGSGGGGSGGGGSENVLTQSPAIMSASPGEKVTMTCRASSSVSSSYLHWYQQKSGASPKVWIYSTSNLASGVPGRFSGSGSGTSYSLTISSVEAEDAATYYCQQYSGYPITFGAGTKVEVKR

SEQ ID NO: 19429 - protein, 265 aa, Homo sapiens
MKYLLPTAAAGLLLLAAQPAMAEVQLVESGGGLVQPGGSLRLSCAASGFNIKDTYIHWVRQAPGKGLEWVARIYPTNGYTRYADSVKGRFTISADTSKNTAYLQMNSLRAEDTAVYYCSRWGGDGFYAMDYWGQGTLVTVSSGGGGSGGGGSGGGTGDIQMTQSPSSLSASVGDRVTITCRASQDVNTAVAWYQQKPGKAPKLLIYSASFLYSGVPSRFSGSRSGTDFTLTISSLQPEDFATYYCQQHYTTPPTFGQGTKVEIKR

SEQ ID NO: 19430 - protein, 248 aa, Artificial Sequence
  source: /note="Description of Artificial Sequence: Synthetic polypeptide"
MDVKLVESGGGLVQPGGSLKLSCATSGFTFSDYYMYWVRQTPEKRLEWVAYISNDDSSAAYSDTVKGRFTISRDNARNTLYLQMSRLKSEDTAIYSCARGLAWGAWFAYWGQGTLVTVSSGGGGSGGGGSGGGGSDVLMTQSPLSLPVSLGDQASISCRSSQIIVHSNGNTYLEWYLQKPGQSPKLLIYKVSNRFSGVPDRFSGSGSGTDFTLKISRVEAEDLGVYYCFQGSHVPFTFGSGTKLEIKA

SEQ ID NO: 19431 - protein, 192 aa, Artificial Sequence
  source: /note="Description of Artificial Sequence: Synthetic polypeptide"
GGTVKITCSGGGGSYYGWFQQKSPGSAPVTVIYDNTNRPSNIPSRFSGSLSGSTNTLTITGVQAEDEAVYYCGSYDRSAGYVGIFGAGTTLTVLGQSSRSSAVTLDESGGGLQTPGGGLSLVCKASGFTFDSYAMYWVRQAPGKGLEWVASINRFGSSTGHGAAVKGRATISRDNGQSTLGAYPYDVPDYAS

SEQ ID NO: 19432 - protein, 249 aa, Artificial Sequence
  source: /note="Description of Artificial Sequence: Synthetic polypeptide"
GGTVKITCSGGGGSYYGWFQQKSPGSAPVTVIYDNTNRPSNIPSRFSGSKSGSTGTLTITVQAEDEAVYYCGNFDTSAIFGAGTTLTVLGQSSRSSAVTLDESGGGLQTPGGALSLICKASGFTFSSFNMIWVRQAPGKGLEFVGSINRFGNSTGHGAAVKGRVTISRDDGQSTVRLQLNNLRAEDTGTYFCAKSVHGHCASGYWCSAASIDAWGHGTEVIVSSTSGQAGQHHHHHHGAYPYDVPDYAS

SEQ ID NO: 19433 - protein, 245 aa, Artificial Sequence
  source: /note="Description of Artificial Sequence: Synthetic polypeptide"
GGTVEITCSGGSYSYGWYQQKSPGSAPVTVIYQNTNRPSDIPSRFSGSKSGSTGTLTITGVRAEDEAVYYCGSFDSSVGMFGAGTTLTVLGQSSRSSAVTLDESEGGLQTPGGALSLVCKASGFSFSDRGMHWVRQAPGKGLEYVAGIYDDGGTTYYGAAVKGRASITRDNGQSAVRLQLNNLRAEDTATYYCAKSAAGDAWGADDIDAWGHGTEVIVSSTSGQAGQHHHHHHGAYPYDVPDYAS

SEQ ID NO: 19434 - protein, 240 aa, Artificial Sequence
  source: /note="Description of Artificial Sequence: Synthetic polypeptide"
KWYGWYQQKAPGSAPVTLIYDNTNRPSDIPSRFSGSASGSTATLTITGVQVEDEAVYFCGGYDGSTDAGIFGAGTTLTVLGQSSRSSAVTLDESGGGLQTPGGALSLVCKASGFDFSSYQMNWIRQAPGKGLEWVAAINKFGTSTSRGAAVKGRVTISRDDGQSTVRLQLNNLRSEDTATYFCAKSAYGSCASGSWCSAASIDAWGHGTEVIVSSTSGQAGQHHHHHHGAYPYDVPDYAS

SEQ ID NO: 19435 - protein, 260 aa, Artificial Sequence
  source: /note="Description of Artificial Sequence: Synthetic polypeptide"
MAQVQLLESGGGLVQPGGSLRLSCAASGFTVSSNYMHWVRQAPGKGLEWVSAINSNGDSTYYPDTVKDRFTISRDNSKNTLYLQMNSLRAEDTAVYYCARCHLYDLGSHPPYYFDFWGQGTLVTVSSGSAGGGGSGGGGSGGGGSDIVLTQSPGTLSLSPGERATLSCRASQSVSSGYLAWYQQKPGQAPRLLIYAASSRATGIPDRFSGSGSGTDFTLTISRLEPEDFAVYYCQQYYGSPWTFGQGTKLEIKAAADYKD

SEQ ID NO: 19436 - protein, 250 aa, Artificial Sequence
  source: /note="Description of Artificial Sequence: Synthetic polypeptide"
MAEVQLLESGGGLVQPGGSLRLSCAASGFTAWPSVVTEGLGGPGGGSARLQARGWSGFHHLQRQFQEHAVSANEQPESRGHAVYYCARDPDPYGSESFRLFGTFDYWGQGTLVTVSSGSAGGGGSGGGGSGGGGSDIVLTQSPGTLSLSPGERATLSCRASQSVTSSSLAWYQQKPGQAPRLLIYGASARATGIPDRFSGSGSGTDFTLTISRLEPEDFAVYYCQQYYDWPLTFGGGTKLEIKAAADYKD

SEQ ID NO: 19437 - protein, 247 aa, Artificial Sequence
  source: /note="Description of Artificial Sequence: Synthetic polypeptide"
MAEVQLLESGGGLVQPGGSLRLSCAASGFTFSEYGMNWVRQAPGKGLEWVSGISWNSDTIDYGDSVKGRFTISRDNSKNTLYLQMNSLRAEDTAVYYCARRQYYAMDVWGPGTLVTVSSGSAGGGGSGGGGSGGGGSDIVLTQPPSASGTPGQRVTISCSGNSGSIASNSVQWYQQLPGKAPKLLIYDNDKRPSGVPDRFSGSKSGTSASLAISGLRSEDEADYYCSSYTSSSTLVVFGGGTKLTVL

SEQ ID NO: 19438 - protein, 251 aa, Artificial Sequence
  source: /note="Description of Artificial Sequence: Synthetic polypeptide"
MAEVQLLESGGGLVQPGGSLRLSCAASGFTVISGDMGWVRQAPGKGLEWVSAITTGGGSPNYADSVKGRFTISRDNSKNTLYLQMNSLRAEDTAVYYCARDEGMVGATYFDHWGQGTLVTVSSGSAGGGGSGGGGSGGGGSDIVLTQPPSASGTPGQRVTISCSGSNSNIGYSQVSWYQQFPGKAPKLLIYEVSKRPSGVPDRFCGSKSGTSASLAISGLRSEDEADYYCQSYDSSLNSYIFGGGTKVTVL

SEQ ID NO: 19439 - protein, 252 aa, Artificial Sequence
  source: /note="Description of Artificial Sequence: Synthetic polypeptide"
MAEVQLLESGGGLVQPGGSLRLSCAASGFTFSNFVMNWVRQAPGKGLEWVSRINTDGTSTNYADSVTGRFTISRDNSKNTLYLQMNSLRAEDTAVYYCARSPYTIFGVVHFDYWGQGTLVTVSSGSAGGGGSGGGGSGGGGSDIVLTQPPSASGTPGQRVTISCSGSSSNIDSSPVNWYQQLPGAAPKLLIYLINERPSGVPDRFSGSKSGTSASLAISGLRSEDEADYYCQVWDSISDHWVFGGGTKLTVL

SEQ ID NO: 19440 - protein, 513 aa, Artificial Sequence; identical to SEQ ID NO: 19369
  source: /note="Description of Artificial Sequence: Synthetic polypeptide"

SEQ ID NO: 19441 - protein, 513 aa, Artificial Sequence; identical to SEQ ID NO: 19378
  source: /note="Description of Artificial Sequence: Synthetic polypeptide"

SEQ ID NO: 19442 - protein, 513 aa, Artificial Sequence; identical to SEQ ID NO: 19381
  source: /note="Description of Artificial Sequence: Synthetic polypeptide"

SEQ ID NO: 19443 - protein, 513 aa, Artificial Sequence
  source: /note="Description of Artificial Sequence: Synthetic polypeptide"
EFATMAVMAPRTLVLLLSGALALTQTWAGDIQLTQSPASLAVSLGQRATISCKASQSVDYDGDSYLNWYQQIPGQPPKLLIYDASNLVSGIPPRFSGSGSGTDFTLNIHPVEKVDAATYHCQQSTEDPWTFGGGTKLEIKGGGGSGGGGSGGGGSQVQLQQSGAELVRPGSSVKISCKASGYAFSSYWMNWVKQRPGQGLEWIGQIWPGDGDTNYNGKFKGKATLTADESSSTAYMQLSSLASEDSAVYFCARRETTTVGRYYYAMDYWGQGTTVTVSSAAEPKSSDKTHTCPPCPAPELLGGPSVFLFPPKPKDTLMISRTPEVTCVVVDVSHEDPEVKFNWYVDGVEVHNAKTKPREEQYASTYRVVSVLTVLHQDWLNGKEYKCKVSNKALPAPIEKTISKAKGQPREPQVYVYPPSRDELTKNQVSLTCLVKGFYPSDIAVEWESNGQPENNYKTTPPVLDSDGSFALVSKLTVDKSRWQQGNVFSCSVMHEALHNHYTQKSLSLSPGK

SEQ ID NO: 19444 - protein, 513 aa, Artificial Sequence; identical to SEQ ID NO: 19443
  source: /note="Description of Artificial Sequence: Synthetic polypeptide"

SEQ ID NO: 19445 - protein, 513 aa, Artificial Sequence; identical to SEQ ID NO: 19443
  source: /note="Description of Artificial Sequence: Synthetic polypeptide"

SEQ ID NO: 19446 - protein, 513 aa, Artificial Sequence; identical to SEQ ID NO: 19443
  source: /note="Description of Artificial Sequence: Synthetic polypeptide"

SEQ ID NO: 19447 - protein, 513 aa, Artificial Sequence
  source: /note="Description of Artificial Sequence: Synthetic polypeptide"
EFATMAVMAPRTLVLLLSGALALTQTWAGDIQLTQSPASLAVSLGQRATISCKASQSVDYDGDSYLNWYQQIPGQPPKLLIYDASNLVSGIPPRFSGSGSGTDFTLNIHPVEKVDAATYHCQQSTEDPWTFGGGTKLEIKGGGGSGGGGSGGGGSQVQLQQSGAELVRPGSSVKISCKASGYAFSSYWMNWVKQRPGQGLEWIGQIWPGDGDTNYNGKFKGKATLTADESSSTAYMQLSSLASEDSAVYFCARRETTTVGRYYYAMDYWGQGTTVTVSSAAEPKSSDKTHTCPPCPAPELLGGPSVFLFPPKPKDTLMISRTPEVTCVVVDVSHEDPEVKFNWYVDGVEVHNAKTKPREEQYASTYRVVSVLTVLHQDWLNGKEYKCKVSNKALPAPIEKTISKAKGQPREPQVYVLPPSRDELTKNQVSLLCLVKGFYPSDIAVEWESNGQPENNYLTWPPVLDSDGSFFLYSKLTVDKSRWQQGNVFSCSVMHEALHNHYTQKSLSLSPGK

SEQ ID NO: 19448 - protein, 513 aa, Artificial Sequence; identical to SEQ ID NO: 19447
  source: /note="Description of Artificial Sequence: Synthetic polypeptide"

SEQ ID NO: 19449 - protein, 513 aa, Artificial Sequence; identical to SEQ ID NO: 19369
  source: /note="Description of Artificial Sequence: Synthetic polypeptide"

SEQ ID NO: 19450 - protein, 513 aa, Artificial Sequence; identical to SEQ ID NO: 19369
  source: /note="Description of Artificial Sequence: Synthetic polypeptide"

SEQ ID NO: 19451 - protein, 513 aa, Artificial Sequence; identical to SEQ ID NO: 17194
  source: /note="Description of Artificial Sequence: Synthetic polypeptide"

SEQ ID NO: 19452 - protein, 513 aa, Artificial Sequence; identical to SEQ ID NO: 19381
  source: /note="Description of Artificial Sequence: Synthetic polypeptide"

SEQ ID NO: 19453 - protein, 511 aa, Artificial Sequence
  source: /note="Description of Artificial Sequence: Synthetic polypeptide"
EFATMAVMAPRTLVLLLSGALALTQTWAGEVQLVESGGGLVKPGGSLKLSCAASGYTFTSYVMHWVRQAPGKGLEWIGYINPYNDGTKYNEKFQGRVTISSDKSISTAYMELSSLRSEDTAMYYCARGTYYYGTRVFDYWGQGTLVTVSSGGGGSGGGGSGGGGSDIVMTQSPATLSLSPGERATLSCRSSKSLQNVNGNTYLYWFQQKPGQSPQLLIYRMSNLNSGVPDRFSGSGSGTEFTLTISSLEPEDFAVYYCMQHLEYPITFGAGTKLEIKAAEPKSSDKTHTCPPCPAPEAAGGPSVFLFPPKPKDTLMISRTPEVTCVVVSVSHEDPEVKFNWYVDGVEVHNAKTKPREEQYNSTYRVVSVLTVLHQDWLNGKEYKCKVSNKALPAPIEKTISKAKGQPREPQVYVLPPSRDELTKNQVSLLCLVKGFYPSDIAVEWESNGQPENNYLTWPPVLDSDGSFFLYSKLTVDKSRWQQGNVFSCSVMHEALHNHYTQKSLSLSPGK

SEQ ID NO: 19454 - protein, 511 aa, Artificial Sequence
  source: /note="Description of Artificial Sequence: Synthetic polypeptide"
EFATMAVMAPRTLVLLLSGALALTQTWAGEVQLVESGGGLVKPGGSLKLSCAASGYTFTSYVMHWVRQAPGKCLEWIGYINPYNDGTKYNEKFQGRVTISSDKSISTAYMELSSLRSEDTAMYYCARGTYYYGTRVFDYWGQGTLVTVSSGGGGSGGGGSGGGGSDIVMTQSPATLSLSPGERATLSCRSSKSLQNVNGNTYLYWFQQKPGQSPQLLIYRMSNLNSGVPDRFSGSGSGTEFTLTISSLEPEDFAVYYCMQHLEYPITFGCGTKLEIKAAEPKSSDKTHTCPPCPAPEAAGGPSVFLFPPKPKDTLMISRTPEVTCVVVSVSHEDPEVKFNWYVDGVEVHNAKTKPREEQYNSTYRVVSVLTVLHQDWLNGKEYKCKVSNKALPAPIEKTISKAKGQPREPQVYVLPPSRDELTKNQVSLLCLVKGFYPSDIAVEWESNGQPENNYLTWPPVLDSDGSFFLYSKLTVDKSRWQQGNVFSCSVMHEALHNHYTQKSLSLSPGK

SEQ ID NO: 19455 - protein, 511 aa, Artificial Sequence
  source: /note="Description of Artificial Sequence: Synthetic polypeptide"
EFATMAVMAPRTLVLLLSGALALTQTWAGDIVMTQSPATLSLSPGERATLSCRSSKSLQNVNGNTYLYWFQQKPGQSPQLLIYRMSNLNSGVPDRFSGSGSGTEFTLTISSLEPEDFAVYYCMQHLEYPITFGAGTKLEIKGGGGSGGGGSGGGGSEVQLVESGGGLVKPGGSLKLSCAASGYTFTSYVMHWVRQAPGKGLEWIGYINPYNDGTKYNEKFQGRVTISSDKSISTAYMELSSLRSEDTAMYYCARGTYYYGTRVFDYWGQGTLVTVSSAAEPKSSDKTHTCPPCPAPEAAGGPSVFLFPPKPKDTLMISRTPEVTCVVVSVSHEDPEVKFNWYVDGVEVHNAKTKPREEQYNSTYRVVSVLTVLHQDWLNGKEYKCKVSNKALPAPIEKTISKAKGQPREPQVYVLPPSRDELTKNQVSLLCLVKGFYPSDIAVEWESNGQPENNYLTWPPVLDSDGSFFLYSKLTVDKSRWQQGNVFSCSVMHEALHNHYTQKSLSLSPGK

SEQ ID NO: 19456 - protein, 511 aa, Artificial Sequence
  source: /note="Description of Artificial Sequence: Synthetic polypeptide"
EFATMAVMAPRTLVLLLSGALALTQTWAGDIVMTQSPATLSLSPGERATLSCRSSKSLQNVNGNTYLYWFQQKPGQSPQLLIYRMSNLNSGVPDRFSGSGSGTEFTLTISSLEPEDFAVYYCMQHLEYPITFGCGTKLEIKGGGGSGGGGSGGGGSEVQLVESGGGLVKPGGSLKLSCAASGYTFTSYVMHWVRQAPGKCLEWIGYINPYNDGTKYNEKFQGRVTISSDKSISTAYMELSSLRSEDTAMYYCARGTYYYGTRVFDYWGQGTLVTVSSAAEPKSSDKTHTCPPCPAPEAAGGPSVFLFPPKPKDTLMISRTPEVTCVVVSVSHEDPEVKFNWYVDGVEVHNAKTKPREEQYNSTYRVVSVLTVLHQDWLNGKEYKCKVSNKALPAPIEKTISKAKGQPREPQVYVLPPSRDELTKNQVSLLCLVKGFYPSDIAVEWESNGQPENNYLTWPPVLDSDGSFFLYSKLTVDKSRWQQGNVFSCSVMHEALHNHYTQKSLSLSPGK

SEQ ID NO: 19457 - protein, 506 aa, Artificial Sequence
  source: /note="Description of Artificial Sequence: Synthetic polypeptide"
EFATMAVMAPRTLVLLLSGALALTQTWAGEVQLVQSGAEVKKPGESLKISCKGSGYSFSSSWIGWVRQMPGKGLEWMGIIYPDDSDTRYSPSFQGQVTISADKSIRTAYLQWSSLKASDTAMYYCARHVTMIWGVIIDFWGQGTLVTVSSGGGGSGGGGSGGGGSAIQLTQSPSSLSASVGDRVTITCRASQGISSALAWYQQKPGKAPKLLIYDASSLESGVPSRFSGSGSGTDFTLTISSLQPEDFATYYCQQFNSYPYTFGQGTKLEIKAAEPKSSDKTHTCPPCPAPEAAGGPSVFLFPPKPKDTLMISRTPEVTCVVVSVSHEDPEVKFNWYVDGVEVHNAKTKPREEQYNSTYRVVSVLTVLHQDWLNGKEYKCKVSNKALPAPIEKTISKAKGQPREPQVYVLPPSRDELTKNQVSLLCLVKGFYPSDIAVEWESNGQPENNYLTWPPVLDSDGSFFLYSKLTVDKSRWQQGNVFSCSVMHEALHNHYTQKSLSLSPGK

SEQ ID NO: 19458 - protein, 506 aa, Artificial Sequence
  source: /note="Description of Artificial Sequence: Synthetic polypeptide"
EFATMAVMAPRTLVLLLSGALALTQTWAGEVQLVQSGAEVKKPGESLKISCKGSGYSFSSSWIGWVRQMPGKCLEWMGIIYPDDSDTRYSPSFQGQVTISADKSIRTAYLQWSSLKASDTAMYYCARHVTMIWGVIIDFWGQGTLVTVSSGGGGSGGGGSGGGGSAIQLTQSPSSLSASVGDRVTITCRASQGISSALAWYQQKPGKAPKLLIYDASSLESGVPSRFSGSGSGTDFTLTISSLQPEDFATYYCQQFNSYPYTFGCGTKLEIKAAEPKSSDKTHTCPPCPAPEAAGGPSVFLFPPKPKDTLMISRTPEVTCVVVSVSHEDPEVKFNWYVDGVEVHNAKTKPREEQYNSTYRVVSVLTVLHQDWLNGKEYKCKVSNKALPAPIEKTISKAKGQPREPQVYVLPPSRDELTKNQVSLLCLVKGFYPSDIAVEWESNGQPENNYLTWPPVLDSDGSFFLYSKLTVDKSRWQQGNVFSCSVMHEALHNHYTQKSLSLSPGK

SEQ ID NO: 19459 - protein, 506 aa, Artificial Sequence
  source: /note="Description of Artificial Sequence: Synthetic polypeptide"
EFATMAVMAPRTLVLLLSGALALTQTWAGAIQLTQSPSSLSASVGDRVTITCRASQGISSALAWYQQKPGKAPKLLIYDASSLESGVPSRFSGSGSGTDFTLTISSLQPEDFATYYCQQFNSYPYTFGQGTKLEIKGGGGSGGGGSGGGGSEVQLVQSGAEVKKPGESLKISCKGSGYSFSSSWIGWVRQMPGKGLEWMGIIYPDDSDTRYSPSFQGQVTISADKSIRTAYLQWSSLKASDTAMYYCARHVTMIWGVIIDFWGQGTLVTVSSAAEPKSSDKTHTCPPCPAPEAAGGPSVFLFPPKPKDTLMISRTPEVTCVVVSVSHEDPEVKFNWYVDGVEVHNAKTKPREEQYNSTYRVVSVLTVLHQDWLNGKEYKCKVSNKALPAPIEKTISKAKGQPREPQVYVLPPSRDELTKNQVSLLCLVKGFYPSDIAVEWESNGQPENNYLTWPPVLDSDGSFFLYSKLTVDKSRWQQGNVFSCSVMHEALHNHYTQKSLSLSPGK

SEQ ID NO: 19460 - protein, 506 aa, Artificial Sequence
  source: /note="Description of Artificial Sequence: Synthetic polypeptide"
EFATMAVMAPRTLVLLLSGALALTQTWAGAIQLTQSPSSLSASVGDRVTITCRASQGISSALAWYQQKPGKAPKLLIYDASSLESGVPSRFSGSGSGTDFTLTISSLQPEDFATYYCQQFNSYPYTFGCGTKLEIKGGGGSGGGGSGGGGSEVQLVQSGAEVKKPGESLKISCKGSGYSFSSSWIGWVRQMPGKCLEWMGIIYPDDSDTRYSPSFQGQVTISADKSIRTAYLQWSSLKASDTAMYYCARHVTMIWGVIIDFWGQGTLVTVSSAAEPKSSDKTHTCPPCPAPEAAGGPSVFLFPPKPKDTLMISRTPEVTCVVVSVSHEDPEVKFNWYVDGVEVHNAKTKPREEQYNSTYRVVSVLTVLHQDWLNGKEYKCKVSNKALPAPIEKTISKAKGQPREPQVYVLPPSRDELTKNQVSLLCLVKGFYPSDIAVEWESNGQPENNYLTWPPVLDSDGSFFLYSKLTVDKSRWQQGNVFSCSVMHEALHNHYTQKSLSLSPGK

SEQ ID NO: 19461 - protein, 503 aa, Artificial Sequence
  source: /note="Description of Artificial Sequence: Synthetic polypeptide"
EFATMAVMAPRTLVLLLSGALALTQTWAGQIVLTQSPAIMSASPGEKVTMTCSASSSVSYMNWYQQKSGTSPKRWIYDTSKLASGVPAHFRGSGSGTSYSLTISGMEAEDAATYYCQQWSSNPFTFGSGTKLEINGGGGSGGGGSGGGGSQVQLQQSGAELARPGASVKMSCKASGYTFTRYTMHWVKQRPGQGLEWIGYINPSRGYTNYNQKFKDKATLTTDKSSSTAYMQLSSLTSEDSAVYYCARYYDDHYSLDYWGQGTTLTVSSAAEPKSSDKTHTCPPCPAPEAAGGPSVFLFPPKPKDTLMISRTPEVTCVVVSVSHEDPEVKFNWYVDGVEVHNAKTKPREEQYNSTYRVVSVLTVLHQDWLNGKEYKCKVSNKALPAPIEKTISKAKGQPREPQVYVLPPSRDELTKNQVSLLCLVKGFYPSDIAVEWESNGQPENNYLTWPPVLDSDGSFFLYSKLTVDKSRWQQGNVFSCSVMHEALHNHYTQKSLSLSPGK

SEQ ID NO: 19462 - protein, 506 aa, Artificial Sequence
  source: /note="Description of Artificial Sequence: Synthetic polypeptide"
EFATMAVMAPRTLVLLLSGALALTQTWAGDIKLQQSGAELARPGASVKMSCKTSGYTFTRYTMHWVKQRPGQGLEWIGYINPSRGYTNYNQKFKDKATLTTDKSSSTAYMQLSSLTSEDSAVYYCARYYDDHYCLDYWGQGTTLTVSSVEGGSGGSGGSGGSGGVDDIQLTQSPAIMSASPGEKVTMTCRASSSVSYMNWYQQKSGTSPKRWIYDTSKVASGVPYRFSGSGSGTSYSLTISSMEAEDAATYYCQQWSSNPLTFGAGTKLELKAAEPKSSDKTHTCPPCPAPELLGGPSVFLFPPKPKDTLMISRTPEVTCVVVDVSHEDPEVKFNWYVDGVEVHNAKTKPREEQYASTYRVVSVLTVLHQDWLNGKEYKCKVSNKALPAPIEKTISKAKGQPREPQVYVYPPSRDELTKNQVSLTCLVKGFYPSDIAVEWESNGQPENNYKTTPPVLDSDGSFALVSKLTVDKSRWQQGNVFSCSVMHEALHNHYTQKSLSLSPGK

SEQ ID NO: 19463 - protein, 506 aa, Artificial Sequence
  source: /note="Description of Artificial Sequence: Synthetic polypeptide"
EFATMAVMAPRTLVLLLSGALALTQTWAGDIKLQQSGAELARPGASVKMSCKTSGYTFTRYTMHWVKQRPGQCLEWIGYINPSRGYTNYNQKFKDKATLTTDKSSSTAYMQLSSLTSEDSAVYYCARYYDDHYCLDYWGQGTTLTVSSVEGGSGGSGGSGGSGGVDDIQLTQSPAIMSASPGEKVTMTCRASSSVSYMNWYQQKSGTSPKRWIYDTSKVASGVPYRFSGSGSGTSYSLTISSMEAEDAATYYCQQWSSNPLTFGCGTKLELKAAEPKSSDKTHTCPPCPAPELLGGPSVFLFPPKPKDTLMISRTPEVTCVVVDVSHEDPEVKFNWYVDGVEVHNAKTKPREEQYNSTYRVVSVLTVLHQDWLNGKEYKCKVSNKALPAPIEKTISKAKGQPREPQVYVYPPSRDELTKNQVSLTCLVKGFYPSDIAVEWESNGQPENNYKTTPPVLDSDGSFALVSKLTVDKSRWQQGNVFSCSVMHEALHNHYTQKSLSLSPGK

SEQ ID NO: 19464 - protein, 506 aa, Artificial Sequence
  source: /note="Description of Artificial Sequence: Synthetic polypeptide"
EFATMAVMAPRTLVLLLSGALALTQTWAGDIKLQQSGAELARPGASVKMSCKTSGYTFTRYTMHWVKQRPGQCLEWIGYINPSRGYTNYNQKFKDKATLTTDKSSSTAYMQLSSLTSEDSAVYYCARYYDDHYCLDYWGQGTTLTVSSVEGGSGGSGGSGGSGGVDDIQLTQSPAIMSASPGEKVTMTCRASSSVSYMNWYQQKSGTSPKRWIYDTSKVASGVPYRFSGSGSGTSYSLTISSMEAEDAATYYCQQWSSNPLTFGCGTKLELKAAEPKSSDKTHTCPPCPAPEAAGGPSVFLFPPKPKDTLMISRTPEVTCVVVSVSHEDPEVKFNWYVDGVEVHNAKTKPREEQYNSTYRVVSVLTVLHQDWLNGKEYKCKVSNKALPAPIEKTISKAKGQPREPQVYVYPPSRDELTKNQVSLTCLVKGFYPSDIAVEWESNGQPENNYKTTPPVLDSDGSFALVSKLTVDKSRWQQGNVFSCSVMHEALHNHYTQKSLSLSPGK

SEQ ID NO: 19465 - protein, 512 aa, Artificial Sequence
  source: /note="Description of Artificial Sequence: Synthetic polypeptide"
EFATMAVMAPRTLVLLLSGALALTQTWAGEVQLVESGGGLVQPGGSLKLSCAASGFTFNKYAMNWVRQAPGKGLEWVARIRSKYNNYATYYADSVKDRFTISRDDSKNTAYLQMNNLKTEDTAVYYCVRHGNFGNSYISYWAYWGQGTLVTVSSGGGGSGGGGSGGGGSQTVVTQEPSLTVSPGGTVTLTCGSSTGAVTSGNYPNWVQQKPGQAPRGLIGGTKFLAPGTPARFSGSLLGGKAALTLSGVQPEDEAEYYCVLWYSNRWVFGGGTKLTVLAAEPKSSDKTHTCPPCPAPEAAGGPSVFLFPPKPKDTLMISRTPEVTCVVVSVSHEDPEVKFNWYVDGVEVHNAKTKPREEQYNSTYRVVSVLTVLHQDWLNGKEYKCKVSNKALPAPIEKTISKAKGQPREPQVYVYPPSRDELTKNQVSLTCLVKGFYPSDIAVEWESNGQPENNYKTTPPVLDSDGSFALVSKLTVDKSRWQQGNVFSCSVMHEALHNHYTQKSLSLSPGK

SEQ ID NO: 19466 - protein, 512 aa, Artificial Sequence
  source: /note="Description of Artificial Sequence: Synthetic polypeptide"
EFATMAVMAPRTLVLLLSGALALTQTWAGEVQLVESGGGLVQPGGSLKLSCAASGFTFNKYAMNWVRQAPGKCLEWVARIRSKYNNYATYYADSVKDRFTISRDDSKNTAYLQMNNLKTEDTAVYYCVRHGNFGNSYISYWAYWGQGTLVTVSSGGGGSGGGGSGGGGSQTVVTQEPSLTVSPGGTVTLTCGSSTGAVTSGNYPNWVQQKPGQAPRGLIGGTKFLAPGTPARFSGSLLGGKAALTLSGVQPEDEAEYYCVLWYSNRWVFGCGTKLTVLAAEPKSSDKTHTCPPCPAPEAAGGPSVFLFPPKPKDTLMISRTPEVTCVVVSVSHEDPEVKFNWYVDGVEVHNAKTKPREEQYNSTYRVVSVLTVLHQDWLNGKEYKCKVSNKALPAPIEKTISKAKGQPREPQVYVYPPSRDELTKNQVSLTCLVKGFYPSDIAVEWESNGQPENNYKTTPPVLDSDGSFALVSKLTVDKSRWQQGNVFSCSVMHEALHNHYTQKSLSLSPGK

SEQ ID NO: 19467 - protein, 512 aa, Artificial Sequence; identical to SEQ ID NO: 19465
  source: /note="Description of Artificial Sequence: Synthetic polypeptide"

SEQ ID NO: 19468 - protein, 512 aa, Artificial Sequence; identical to SEQ ID NO: 19466
  source: /note="Description of Artificial Sequence: Synthetic polypeptide"

SEQ ID NO: 19469 - protein, 512 aa, Artificial Sequence; identical to SEQ ID NO: 19465
  source: /note="Description of Artificial Sequence: Synthetic polypeptide"

SEQ ID NO: 19470 - protein, 512 aa, Artificial Sequence; identical to SEQ ID NO: 19466
  source: /note="Description of Artificial Sequence: Synthetic polypeptide"

SEQ ID NO: 19471 - protein, 512 aa, Artificial Sequence; identical to SEQ ID NO: 19465
  source: /note="Description of Artificial Sequence: Synthetic polypeptide"

SEQ ID NO: 19472 - protein, 512 aa, Artificial Sequence; identical to SEQ ID NO: 19466
  source: /note="Description of Artificial Sequence: Synthetic polypeptide"

SEQ ID NO: 19473 - protein, 506 aa, Artificial Sequence
  source: /note="Description of Artificial Sequence: Synthetic polypeptide"
EFATMAVMAPRTLVLLLSGALALTQTWAGDIKLQQSGAELARPGASVKMSCKTSGYTFTRYTMHWVKQRPGQGLEWIGYINPSRGYTNYNQKFKDKATLTTDKSSSTAYMQLSSLTSEDSAVYYCARYYDDHYCLDYWGQGTTLTVSSVEGGSGGSGGSGGSGGVDDIQLTQSPAIMSASPGEKVTMTCRASSSVSYMNWYQQKSGTSPKRWIYDTSKVASGVPYRFSGSGSGTSYSLTISSMEAEDAATYYCQQWSSNPLTFGAGTKLELKAAEPKSSDKTHTCPPCPAPELLGGPSVFLFPPKPKDTLMISRTPEVTCVVVDVSHEDPEVKFNWYVDGVEVHNAKTKPREEQYNSTYRVVSVLTVLHQDWLNGKEYKCKVSNKALPAPIEKTISKAKGQPREPQVYTLPPSRDELTKNQVSLTCLVKGFYPSDIAVEWESNGQPENNYKTTPPVLDSDGSFFLYSKLTVDKSRWQQGNVFSCSVMHEALHNHYTQKSLSLSPGK

SEQ ID NO: 19474 - protein, 504 aa, Artificial Sequence; identical to SEQ ID NO: 12335
  source: /note="Description of Artificial Sequence: Synthetic polypeptide"

SEQ ID NO: 19475 - protein, 255 aa, Homo sapiens
QVQLVESGGTLVQPGGSLRLSCAASGFTFSSYAMSWIRQAPGKGLEWVSGISASGGYIDYADSVKGRVTISRDNSKNMAYLQMSSLRAEDTALYYCAKGGNYQMLLDHWGQGTLVTVSSASTKGPKLEEGEFSEARVDIQMTQSPSSLSASTGDRVTITCRASQDISSYLAWYQQAPGKAPHLLMSGATTLQTGVPSRFSGSGSGTDFTLTITSLQSEDFATYYCQQYYIYPPTFGQGTRVEIKRTVAAPSVFAA

SEQ ID NO: 19476 - protein, 260 aa, Artificial Sequence
  source: /note="Description of Artificial Sequence: Synthetic polypeptide"
QVQLVQSGAELKKPGSSMKVSCKASGDTFSTYSINWVRQAPGQGLEWMGVINPSGGSTSYAQKFQGRVTMTRDTSTSTVYMELSSLRSEDTAVYYCARRRIAYGYDEGHAMDYWGQGTLVTVSSASTKGPKLEEGEFSEARVDIQMTQSPSSLSASTGDRVTITCRASQDISSYLAWYQQAPGKAPHLLMSGATTLQTGVPSRFSGSGSGTDFTLTISSLQAEDVAVYYCQQYYRTPFTFGQGTKLEIKRTVAAPSVFAA

SEQ ID NO: 19477 - protein, 260 aa, Artificial Sequence
  source: /note="Description of Artificial Sequence: Synthetic polypeptide"
QVQLQQSGAEVKKPGSSVKVSCKASGGTFSTHTINWVRQAPGQGLEWMGGIAPMFGTANYAQKFQGRVTITADKSTSTAYMEMSSLRSDDTAVYYCARRRIAYGYDEGHAMDYWGQGTLVTVSSASTKGPKLEEGEFSEARVDIQMTQSPSSLSASTGDRVTITCRASQDISSYLAWYQQAPGKAPHLLMSGATTLQTGVPSRFSGSGSGTDFTLTISSLQAEDVAVYYCQQYYRTPFTFGQGTKLEIKRTVAAPSVFAA

SEQ ID NO: 19478 - protein, 253 aa, Homo sapiens
QVQLVQSGAEVKKDGASVKVSCKATGGTFSGHAISWVRQAPGQRLEWMGEISPMFGTPNYAQSFQGRVTITADESTSYMEVSSLRSEDTATYYCARGANYRALLDYWGQGTLVTVSSASTKGPKLEEGEFSEARVDIQMTQSPSSLSASTGDRVTITCRASQDISSYLAWYQQAPGKAPHLLMSGATTLQTGVPSRFSGSGSGTDFTLTITSLQSEDFATYYCQQYYIYPPTFGQGTRVEIKRTVAAPSVFAA

SEQ ID NO: 19479 - protein, 262 aa, Homo sapiens
QVQLVESGGGLVQPGGSLRLSCAASGFTFSNYWMSWVRQAPGKGLEWVANIKQDGSEKYYVDSVKGRFTISRDNAKNSLYLQMNSLRAEDTAVYYCARGSLCTDGSCPTIGPGPNWGQGTLVTVSSAPTKAPKLEEGEFSEARVDIQMTQSPSSLSASTGDRVTITCRASQDISSYLAWYQQAPGKAPHLLMSGATTLQTGVPSRFSGSGSGTDFTLTITSLQSEDFATYYCQQYYIYPPTFGQGTRVEIKRTVAAPSVFAA

SEQ ID NO: 19480 - protein, 1114 aa, Artificial Sequence
  source: /note="Description of Artificial Sequence: Synthetic polypeptide"
EFATMAVMAPRTLVLLLSGALALTQTWAGDIKLQQSGAELARPGASVKMSCKTSGYTFTRYTMHWVKQRPGQGLEWIGYINPSRGYTNYNQKFKDKATLTTDKSSSTAYMQLSSLTSEDSAVYYCARYYDDHYCLDYWGQGTTLTVSSVEGGSGGSGGSGGSGGVDDIQLTQSPAIMSASPGEKVTMTCRASSSVSYMNWYQQKSGTSPKRWIYDTSKVASGVPYRFSGSGSGTSYSLTISSMEAEDAATYYCQQWSSNPLTFGAGTKLELKGGSDAHKSEVAHRFKDLGEENFKALVLIAFAQYLQQCPFEDHVKLVNEVTEFAKTCVADESAENCDKSLHTLFGDKLCTVATLRETYGEMADCCAKQEPERNECFLQHKDDNPNLPRLVRPEVDVMCTAFHDNEETFLKKYLYEIARRHPYFYAPELLFFAKRYKAAFTECCQAADKAACLLPKLDELRDEGKASSAKQRLKCASLQKFGERAFKAWAVARLSQRFPKAEFAEVSKLVTDLTKVHTECCHGDLLECADDRADLAKYICENQDSISSKLKECCEKPLLEKSHCIAEVENDEMPADLPSLAADFVESKDVCKNYAEAKDVFLGMFLYEYARRHPDYSVVLLLRLAKTYETTLEKCCAAADPHECYAKVFDEFKPLVEEPQNLIKQNCELFEQLGEYKFQNALLVRYTKKVPQVSTPTLVEVSRNLGKVGSKCCKHPEAKRMPCAEDYLSVVLNQLCVLHEKTPVSDRVTKCCTESLVNRRPCFSALEVDETYVPKEFNAETFTFHADICTLSEKERQIKKQTALVELVKHKPKATKEQLKAVMDDFAAFVEKCCKADDKETCFAEEGKKLVAASQAALGLGGSGDIQLTQSPASLAVSLGQRATISCKASQSVDYDGDSYLNWYQQIPGQPPKLLIYDASNLVSGIPPRFSGSGSGTDFTLNIHPVEKVDAATYHCQQSTEDPWTFGGGTKLEIKGGGGSGGGGSGGGGSQVQLQQSGAELVRPGSSVKISCKASGYAFSSYWMNWVKQRPGQGLEWIGQIWPGDGDTNYNGKFKGKATLTADESSSTAYMQLSSLASEDSAVYFCARRETTTVGRYYYAMDYWGQGTTVTVSS

SEQ ID NO: 19481 - protein, 1124 aa, Artificial Sequence [sequence omitted]

SEQ ID NO: 19482 - protein, 118 aa, Mus musculus
VTLVESGGDFVKPGGSLKVSCAASGFAFSHYAMSWVRQTPAKRLEWVAYISSGGSGTYYSDSVKGRFTISRDNAKNTLYLQMRSLRSEDSAMYFCTRVKLGTYYFDSWGQGTTLTVSS

SEQ ID NO: 19483 - protein, 498 aa, Artificial Sequence
  source: /note="Description of Artificial Sequence: Synthetic polypeptide"
EIVMTQTPATLSVSAGERVTITCKASQSVSNDVTWYQQKPGQAPRLLIYSASNRYSGVPARFSGSGYGTEFTFTISSVQSEDFAVYFCQQDYSSFGQGTKLEIKRGGGGSGGGGSGGGGSQVQLVESGPGVVQPGRSLRISCAVSGFSVTNYGVHWVRQPPGKGLEWLGVIWAGGITNYNSAFMSRLTISKDNSKNTVYLQMNSLRAEDTAMYYCASRGGHYGYALDYWGQGTLVTVSSGGGGSGGGGSGGGGSHVKLQESGPGLVQPSQSLSLTCTVSGFSLTDYGVHWVRQSPGKGLEWLGVIWSGGGTAYNTALISRLNIYRDNSKNQVFLEMNSLQAEDTAMYYCARRGSYPYNYFDAWGCGTTVTVSSGGGGSGGGGSGGGGSQAVVIQESALTTPPGETVTLTCGSSTGAVTASNYANWVQEKPDHCFTGLIGGHNNRPPGVPARFSGSLIGDKAALTIAGTQTEDEAIYFCALWYSDHWVIGGGTRLTVLG

SEQ ID NO: 19484 - protein, 501 aa, Artificial Sequence
  source: /note="Description of Artificial Sequence: Synthetic polypeptide"
EIVMTQTPATLSVSAGERVTITCKASQSVSNDVTWYQQKPGQAPRLLIYSASNRYSGVPARFSGSGYGTEFTFTISSVQSEDFAVYFCQQDYSSFGQGTKLEIKRGGGGSGGGGSGGGGSQVQLVESGPGVVQPGRSLRISCAVSGFSVTNYGVHWVRQPPGKGLEWLGVIWAGGITNYNSAFMSRLTISKDNSKNTVYLQMNSLRAEDTAMYYCASRGGHYGYALDYWGQGTLVTVSSASTKGPGGGGSGGGGSGGGGSQVQLVQSGGGVVQPGRSLRLSCKASGYTFTRYTMHWVRQAPGKGLEWIGYINPSRGYTNYNQKFKDRFTISRDNSKNTAFLQMDSLRPEDTGVYFCARYYDDHYCLDYWGQGTPVTVSSGGGGSGGGGSGGGGSDIQMTQSPSSLSASVGDRVTITCSASSSVSYMNWYQQTPGKAPKRWIYDTSKLASGVPSRFSGSGSGTDYTFTISSLQPEDIATYYCQQWSSNPFTFGQGTKLQITR

SEQ ID NO: 19485 - protein, 495 aa, Artificial Sequence
  source: /note="Description of Artificial Sequence: Synthetic polypeptide"
EIVMTQTPATLSVSAGERVTITCKASQSVSNDVTWYQQKPGQAPRLLIYSASNRYSGVPARFSGSGYGTEFTFTISSVQSEDFAVYFCQQDYSSFGQGTKLEIKRGGGGSGGGGSGGGGSQVQLVESGPGVVQPGRSLRISCAVSGFSVTNYGVHWVRQPPGKGLEWLGVIWAGGITNYNSAFMSRLTISKDNSKNTVYLQMNSLRAEDTAMYYCASRGGHYGYALDYWGQGTLVTVSSGGGGSGGGGSGGGGSQVQLVQSGGGVVQPGRSLRLSCKASGYTFTRYTMHWVRQAPGKGLEWIGYINPSRGYTNYNQKFKDRFTISRDNSKNTAFLQMDSLRPEDTGVYFCARYYDDHYCLDYWGQGTPVTVSSGGGGSGGGGSGGGGSDIQMTQSPSSLSASVGDRVTITCSASSSVSYMNWYQQTPGKAPKRWIYDTSKLASGVPSRFSGSGSGTDYTFTISSLQPEDIATYYCQQWSSNPFTFGQGTKLQITR

SEQ ID NO: 19486 - protein, 239 aa, Artificial Sequence
  source: /note="Description of Artificial Sequence: Synthetic polypeptide"
EIVMTQTPATLSVSAGERVTITCKASQSVSNHVTWYQQKPGQAPRLLIYSASNRYSGVPARFSGSGYGTEFTFTISSVQSEDFAVYFCQQDYSSFGQGTKLEIKRGGGGSGGGGSGGGGSQVQLVESGPGVVQPGRSLRISCAVSGFSVTNYGVHWVRQPPGKGLEWLGVIWAGGITNYNSAFMSRLTISKDNSKNTVYLQMNSLRAEDTAMYYCASRGGHYGYALDYWGQGTLVTVSS

SEQ ID NO: 19487 - protein, 239 aa, Artificial Sequence
  source: /note="Description of Artificial Sequence: Synthetic polypeptide"
EIVMTQTPATLSVSAGERVTITCKASQSVSNHVTWYQQKPGQAPRLLIYSASNRYSGVPARFSGSGYGTEFTFTISSVQSEDFAVYFCQQDYSSFGQGTKLEIKRGGGGSGGGGSGGGGSQVQLVESGPGVVQPGRSLRISCAVSGFSVTNYGVHWVRQPPGKGLEWLGVIWAIGITNYNSAFMSRLTISKDNSKNTVYLQMNSLRAEDTAMYYCASRGGHYGYALDYWGQGTLVTVSS

SEQ ID NO: 19488 - protein, 239 aa, Artificial Sequence
  source: /note="Description of Artificial Sequence: Synthetic polypeptide"
KIVMTQTPATLSVSAGERVTITCKASQSVSNDVTWYQQKPGQAPRLLIYSASNRYSGVPARFSGSGYGTEFTFTISSVQSEDFAVYFCQQDYSSFGQGTKLEIKRGGGGSGGGGSGGGGSQVQLVESGPGVVQPGRSLRISCAVSGFSVTNYGVHWVRQPPGKGLEWLGVIWAGGITNYNSAFMSRLTISKDNSKNTVYLQMNSLRAEDTAMYYCASRGGHYGYALDYWGQGTLVTVSS

SEQ ID NO: 19489 - protein, 239 aa, Artificial Sequence
  source: /note="Description of Artificial Sequence: Synthetic polypeptide"
KIVMTQTPATLSVSAGERVTITCKASQSVSNDVTWYQQKPGQAPRLLIYSASNRYSGVPARFSGSGYGTEFTFTISSVQSEDFAVYFCQQDYSSFGQGTKLEIKRGGGGSGGGGSGGGGSQVQLVESGPGVVQPGRSLRISCAVSGFSVTNYGVHWVRQPPGKGLEWLGVIWAIGITNYNSAFMSRLTISKDNSKNTVYLQMNSLRAEDTAMYYCASRGGHYGYALDYWGQGTLVTVSS

SEQ ID NO: 19490 - protein, 239 aa, Artificial Sequence
  source: /note="Description of Artificial Sequence: Synthetic polypeptide"
KIVMTQTPATLSVSAGERVTITCKASQSVSNHVTWYQQKPGQAPRLLIYSASNRYSGVPARFSGSGYGTEFTFTISSVQSEDFAVYFCQQDYSSFGQGTKLEIKRGGGGSGGGGSGGGGSQVQLVESGPGVVQPGRSLRISCAVSGFSVTNYGVHWVRQPPGKGLEWLGVIWAGGITNYNSAFMSRLTISKDNSKNTVYLQMNSLRAEDTAMYYCASRGGHYGYALDYWGQGTLVTVSS

SEQ ID NO: 19491 - protein, 239 aa, Artificial Sequence
  source: /note="Description of Artificial Sequence: Synthetic polypeptide"
KIVMTQTPATLSVSAGERVTITCKASQSVSNHVTWYQQKPGQAPRLLIYSASNRYSGVPARFSGSGYGTEFTFTISSVQSEDFAVYFCQQDYSSFGQGTKLEIKRGGGGSGGGGSGGGGSQVQLVESGPGVVQPGRSLRISCAVSGFSVTNYGVHWVRQPPGKGLEWLGVIWAIGITNYNSAFMSRLTISKDNSKNTVYLQMNSLRAEDTAMYYCASRGGHYGYALDYWGQGTLVTVSS

SEQ ID NO: 19492 - protein, 239 aa, Artificial Sequence
  source: /note="Description of Artificial Sequence: Synthetic polypeptide"
EIVMTQTPATLSVSAGERVTITCKASQSVSNDVTWYQQKPGQAPRLLIYSASNRYSGVPARFSGSGYGTEFTFTISSVQSEDFAVYFCQQDYSSFGQGTKLEIKRGGGGSGGGGSGGGGSQVQLVESGPGVVQPGRSLRISCAVSGFSVTNYGVHWVRQPPGKGLEWLGVIWAIGITNYNSAFMSRLTISKDNSKNTVYLQMNSLRAEDTAMYYCASRGGHYGYALDYWGQGTLVTVSS

SEQ ID NO: 19493 - protein, 239 aa, Artificial Sequence
  source: /note="Description of Artificial Sequence: Synthetic polypeptide"
EIVMTQTPATLSVSAGERVTITCRASQSVSNDVTWYQQKPGQAPRLLIYSASNRYTGIPARFSGSGYGTEFTFTISSVQSEDFAVYFCQQDYSSFGQGTKLEIKRGGGGSGGGGSGGGGSQVQLVESGPGVVQPGRSLRLSCAVSGFSVTNYGVHWVRQPPGKGLEWLGVIWAGGITNYNSSVKGRLTISKDNSKNTVYLQMNSLRAEDTAVYYCASRGGHYGYALDYWGQGTLVTVSS

SEQ ID NO: 19494 - protein, 239 aa, Artificial Sequence
  source: /note="Description of Artificial Sequence: Synthetic polypeptide"
EIVMTQTPATLSVSAGERVTITCRASQSVSNHVTWYQQKPGQAPRLLIYSASNRYTGIPARFSGSGYGTEFTFTISSVQSEDFAVYFCQQDYSSFGQGTKLEIKRGGGGSGGGGSGGGGSQVQLVESGPGVVQPGRSLRLSCAVSGFSVTNYGVHWVRQPPGKGLEWLGVIWAGGITNYNSSVKGRLTISKDNSKNTVYLQMNSLRAEDTAVYYCASRGGHYGYALDYWGQGTLVTVSS

SEQ ID NO: 19495 - protein, 239 aa, Artificial Sequence
  source: /note="Description of Artificial Sequence: Synthetic polypeptide"
EIVMTQTPATLSVSAGERVTITCRASQSVSNDVTWYQQKPGQAPRLLIYSASNRYTGIPARFSGSGYGTEFTFTISSVQSEDFAVYFCQQDYSSFGQGTKLEIKRGGGGSGGGGSGGGGSQVQLVESGPGVVQPGRSLRLSCAVSGFSVTNYGVHWVRQPPGKGLEWLGVIWAIGITNYNSSVKGRLTISKDNSKNTVYLQMNSLRAEDTAVYYCASRGGHYGYALDYWGQGTLVTVSS

SEQ ID NO: 19496 - protein, 239 aa, Artificial Sequence
  source: /note="Description of Artificial Sequence: Synthetic polypeptide"
EIVMTQTPATLSVSAGERVTITCRASQSVSNHVTWYQQKPGQAPRLLIYSASNRYTGIPARFSGSGYGTEFTFTISSVQSEDFAVYFCQQDYSSFGQGTKLEIKRGGGGSGGGGSGGGGSQVQLVESGPGVVQPGRSLRLSCAVSGFSVTNYGVHWVRQPPGKGLEWLGVIWAIGITNYNSSVKGRLTISKDNSKNTVYLQMNSLRAEDTAVYYCASRGGHYGYALDYWGQGTLVTVSS

SEQ ID NO: 19497 - protein, 239 aa, Artificial Sequence
  source: /note="Description of Artificial Sequence: Synthetic polypeptide"
KIVMTQTPATLSVSAGERVTITCRASQSVSNDVTWYQQKPGQAPRLLIYSASNRYTGIPARFSGSGYGTEFTFTISSVQSEDFAVYFCQQDYSSFGQGTKLEIKRGGGGSGGGGSGGGGSQVQLVESGPGVVQPGRSLRLSCAVSGFSVTNYGVHWVRQPPGKGLEWLGVIWAGGITNYNSSVKGRLTISKDNSKNTVYLQMNSLRAEDTAVYYCASRGGHYGYALDYWGQGTLVTVSS

SEQ ID NO: 19498 - protein, 239 aa, Artificial Sequence
  source: /note="Description of Artificial Sequence: Synthetic polypeptide"
KIVMTQTPATLSVSAGERVTITCRASQSVSNDVTWYQQKPGQAPRLLIYSASNRYTGIPARFSGSGYGTEFTFTISSVQSEDFAVYFCQQDYSSFGQGTKLEIKRGGGGSGGGGSGGGGSQVQLVESGPGVVQPGRSLRLSCAVSGFSVTNYGVHWVRQPPGKGLEWLGVIWAIGITNYNSSVKGRLTISKDNSKNTVYLQMNSLRAEDTAVYYCASRGGHYGYALDYWGQGTLVTVSS

SEQ ID NO: 19499 - protein, 239 aa, Artificial Sequence
  source: /note="Description of Artificial Sequence: Synthetic polypeptide"
KIVMTQTPATLSVSAGERVTITCRASQSVSNHVTWYQQKPGQAPRLLIYSASNRYTGIPARFSGSGYGTEFTFTISSVQSEDFAVYFCQQDYSSFGQGTKLEIKRGGGGSGGGGSGGGGSQVQLVESGPGVVQPGRSLRLSCAVSGFSVTNYGVHWVRQPPGKGLEWLGVIWAGGITNYNSSVKGRLTISKDNSKNTVYLQMNSLRAEDTAVYYCASRGGHYGYALDYWGQGTLVTVSS

SEQ ID NO: 19500 - protein, 239 aa, Artificial Sequence
  source: /note="Description of Artificial Sequence: Synthetic polypeptide"
KIVMTQTPATLSVSAGERVTITCRASQSVSNHVTWYQQKPGQAPRLLIYSASNRYTGIPARFSGSGYGTEFTFTISSVQSEDFAVYFCQQDYSSFGQGTKLEIKRGGGGSGGGGSGGGGSQVQLVESGPGVVQPGRSLRLSCAVSGFSVTNYGVHWVRQPPGKGLEWLGVIWAIGITNYNSSVKGRLTISKDNSKNTVYLQMNSLRAEDTAVYYCASRGGHYGYALDYWGQGTLVTVSS

SEQ ID NO: 19501 - protein, 266 aa, Artificial Sequence
  source: /note="Description of Artificial Sequence: Synthetic polypeptide"
QVQLVQSGAEVKKPGASVKVSCKASGYTFTSYWMHWVRQAPGQGLEWMGNIYPGSGGTNYAEKFKNRVTMTRDTSISTAYMELSRLRSDDTAVYYCARSGGPYFFDYWGQGTLVTVSSAGGGGSDIVMTQSPLSLPVTPGEPASISCRSSQNIVHNNGITYLEWYLQKPGQSPQLLIYKVSDRFSGVPDRFSGSGSGTDFTLKISRVEAEDVGVYYCFQGSHIPPTFGQGTKVEIKRAAAAEQKLISEEDLNLGGGMRGSHHHHHH

SEQ ID NO: 19502 - protein, 249 aa, Artificial Sequence
  source: /note="Description of Artificial Sequence: Synthetic polypeptide"
EVQLVESGGGLVRPGGSLKLSCAASGFTFSDYYMYWVRQTPEKRLEWVASISGGDDYTYYSESVKGRFTISRDNAKNTLCLQMNSLKSDDTAMYYCVRGEGRNWDDYAMDYWGQGTSVTVSSGGGGSGGGGSGGGGSDIVMTQTPLSLPVSLGDQASISCRSSQSLVHTHGHTYLHWHLQKPGQSPKLLIYKVSNRFSGVPDRFSGSGSGTDFTLKISRVEAEDLGVYFCSQSTHVPRTFGGGTKLEIK

SEQ ID NO: 19503 - protein, 255 aa, Artificial Sequence
  source: /note="Description of Artificial Sequence: Synthetic polypeptide"
QVQLQQWGAGLLKPSETLSLTCAVYGGSFSGYYWSWIRQPPGKGLEWIGEINHSGSTNYNPSLKSRVTISVETSKNQFSLKLSSVTAADTAVYYCARDKWTWYFDLWGRGTLVTVSSASTGGGGSGGGGSGGGGSGGGGSDIEMTQSPDSLAVSLGERATINCRSSQSVLYSSSNRNYLAWYQQNPGQPPKLLIYWASTRESGVPDRFSGSGSGTDFTLTISSLQAEDVAVYYCQQYYSTPRTFGQGTKVEIKRT

SEQ ID NO: 19504 - protein, 249 aa, Artificial Sequence
  source: /note="Description of Artificial Sequence: Synthetic polypeptide"
EVQLVESGGGLVQPGRSLRLSCAASGFTFDDYAMHWVRQAPGKGLEWVSGISWNSGSVGYADSVKGRFTISRDNAKNSLYLQMNSLRAEDTALYYCARDLGYNQWLEGFDYWGQGTLVTVSSASTGGGGSGGGGSGGGGSSSELTQDPAVSVALGQTVRITCQGDSLRSYYASWYQQKPGQAPVLVIYGKNNRPSGIPDRFSGSSSGNTASLTITGAQAEDEADYYCMSRDSPGNQWVFGGGTKVTVLG

SEQ ID NO: 19505 - protein, 254 aa, Artificial Sequence
  source: /note="Description of Artificial Sequence: Synthetic polypeptide"
QVQLVQSGGGLVQPGGSLRLSCAASGFTFDDYAMHWVRQAPGKGLEWVAGISWNSGSIGYADSVKGRFTISRDNAKNSLYLQMNSLRPEDTAVYYCARDLGYNQWVEGFDYWGQGTLVTVSSASTGGGGSGGGGSGGGGSGGGGSSYELTQDPAVSVALGQTVRITCQGDSLRSYYASWYQQKPGQAPVLVIYGKNNRPSGIPDRFSGSTSGNSASLTITGAQAEDEADYYCNSRDSSGNHWVFGGGTKVTVLG

SEQ ID NO: 19506 - protein, 253 aa, Artificial Sequence
  source: /note="Description of Artificial Sequence: Synthetic polypeptide"
QVQLQESGGGLVKPGGSLRLSCAASGFTFSSYWMSWVRQAPGKGLEWVANINRDGSASYYVDSVKGRFTISRDDAKNSLYLQMNSLRAEDTAVYYCARDRGVGYFDLWGRGTLVTVSSASTGGGGSGGGGSGGGGSGGGGSQSALTQPASVSGSPGQSITISCTGTSSDVGGYNFVSWYQQHPGKAPKLMIYDVSDRPSGVSDRFSGSKSGNTASLIISGLQADDEADYYCSSYGSSSTHVIFGGGTKVTVLG

SEQ ID NO: 19507 - protein, 254 aa, Artificial Sequence
  source: /note="Description of Artificial Sequence: Synthetic polypeptide"
QVQLVQSGGGLVQPGGSLRLSCAASGFTFDDYAMHWVRQAPGKGLEWVAGISWDSGSTGYADSVKGRFTISRDNAKNSLYLQMNSLRAEDTALYYCARDLGAYQWVEGFDYWGQGTLVTVSSASTGGGGSGGGGSGGGGSGGGGSSYELTQDPAVSVALGQTVRITCQGDSLRSYYASWYQQKPGQAPVLVIYGKNNRPSGIPDRFSGSTSGNSASLTITGAQAEDEADYYCNSRDSPGNQWVFGGGTKVTVLG

SEQ ID NO: 19508 - protein, 249 aa, Artificial Sequence
  source: /note="Description of Artificial Sequence: Synthetic polypeptide"
EVQLVESGGGLVQPGRSLRLSCAASGFTFDDYAMHWVRQAPGKGLEWVSGISWNSGSTGYADSVKGRFTISRDNAKNSLYLQMNSLRAEDTALYYCARDLGFNQWVDGFDYWGQGTLVTVSSASTGGGGSGGGGSGGGGSSSELTQDPAVSVALGQTVRITCQGDSLRSYYASWYQQKPGQAPVLVIYGKNNRPSGIPDRFSGSSSGNTASLTITGAQAEDEADYYCNSRDTPGDQWVFGGGTKVTVLG

SEQ ID NO: 19509 - protein, 252 aa, Artificial Sequence
  source: /note="Description of Artificial Sequence: Synthetic polypeptide"
EVQLLESGGGLVQPGGSLRLSCAASGFTFSAYGMGWVRQAPGKGLEWVSYISPSGGHTKYADSVKGRFTISRDNSKNTLYLQMNSLRAEDTAVYYCAKVLETGLLVDAFDIWGQGTMVTVSSASTGGGGSGGGGSGGGGSGGGGSQYELTQPPSVSVYPGQTASITCSGDQLGSKFVSWYQQRPGQSPVLVMYKDKRRPSEIPERFSGSNSGNTATLTISGTQAIDEADYYCQAWDSSTYVFGTGTKVTVLG

SEQ ID NO: 19510 - protein, 250 aa, Artificial Sequence
  source: /note="Description of Artificial Sequence: Synthetic polypeptide"
EVQLLESGGGLVQPGGSLRLSCAASGFTFSWYGMGWVRQAPGKGLEWVSYISPSGGITVYADSVKGRFTISRDNSKNTLYLQMNSLRAEDTAVYYCARLNYYYGLDVWGQGTTVTVSSASTGGGGSGGGGSGGGGSGGGGSDIQMTQSPSSLSASVGDRITITCQASQDIGDSLNWYQQKPGKAPRLLIYDASNLETGVPPRFSGSGSGTDFTFTFRSLQPEDIATYFCQQSANAPFTFGPGTKVDIKRT

SEQ ID NO: 19511 - protein, 252 aa, Artificial Sequence
  source: /note="Description of Artificial Sequence: Synthetic polypeptide"
EVQLLESGGGLVQPGGSLRLSCAASGFTFSAYNMRWVRQAPGKGLEWVSVIYPSGGATRYADSVKGRFTISRDNSKNTLYLQMNSLRAEDTAVYYCARGYYYYGMDVWGQGTLVTVSSASTGGGGSGGGGSGGGGSGGGGSQSVLTQPPSASGTPGQRVTISCSGSDSNIGRNYIYWYQQFPGTAPKLLIYRNNQRPSGVPDRISGSKSGTSASLAISGLRSEDEAEYHCGTWDDSLSGPVFGGGTKLTVLG

SEQ ID NO: 19512 - protein, 249 aa, Artificial Sequence
  source: /note="Description of Artificial Sequence: Synthetic polypeptide"
EVQLVESGGGLVQPGRSLRLSCAASGFTFDDYAMHWVRQAPGKGLEWVSGISWDSGSTGYADSVKGRFTISRDNAKNSLYLQMNSLRAEDTALYYCARDLGAYQWVEGFDYWGQGTLVTVSSASTGGGGSGGGGSGGGGSSSELTQDPAVSVALGQTVRITCQGDSLRSYYASWYQQKPGQAPVLVIYGKNNRPSGIPDRFSGSSSGNTASLTITGAQAEDEADYYCESRDSPGNQWVFGGGTKVTVLG

SEQ ID NO: 19513 - protein, 249 aa, Artificial Sequence
  source: /note="Description of Artificial Sequence: Synthetic polypeptide"
EVQLVESGGGLVQPGRSLRLSCAASGFTFDDYAMHWVRQAPGKGLEWVSGISWNSGSTGYADSVKGRFTISRDNAKNSLYLQMNSLRAEDTALYYCARDLGYNQWLEGFDYWGQGTLVTVSSASTGGGGSGGGGSGGGGSSSELTQDPAVSVALGQTVRITCQGDSLRSYYASWYQQKPGQAPVLVIYGKNNRPSGIPDRFSGSSSGNTASLTITGAQAEDEADYYCMSRDHPGNQWVFGGGTKVTVLG

SEQ ID NO: 19514 - protein, 254 aa, Artificial Sequence
  source: /note="Description of Artificial Sequence: Synthetic polypeptide"
EVQLVESGGGLVQPGRSLRLSCAASGFTFDDYAMHWVRQAPGKGLEWVSGISWNSGSTGYADSVKGRFTISRDNAKNSLYLQMNSLRAEDTALYYCARDLGYNQWLEGFDYWGQGTLVTVSSASTGGGGSGGGGSGGGGSGGGGSSSELTQDPAVSVALGQTVRITCQGDSLRSYYASWYQQKPGQAPVLVIYGKNNRPSGIPDRFSGSSSGNTASLTITGAQAEDEADYYCMSRDHPGNQWVFGGGTKVTVLG

SEQ ID NO: 19515 - protein, 253 aa, Artificial Sequence
  source: /note="Description of Artificial Sequence: Synthetic polypeptide"
EVQLLESGGGLVQPGGSLRLSCAASGFTFSRYGMWWVRQAPGKGLEWVSYIGSSGGPTYYVDSVKGRFTISRDNSKNTLYLQMNSLRAEDTAVYYCAGGRGTPYYFDSWGQGTLVTVSSASTGGGGSGGGGSGGGGSGGGGSQYELTQPASVSGSPGQSITISCTGTSSDIGRWNIVSWYQQHPGKAPKLMIYDVSNRPSGVSNRFSGSKSGNTASLTISGLQAEDEADYYCSSYTSSSTWVFGGGTKLTVLG

SEQ ID NO: 19516 - protein, 248 aa, Artificial Sequence; identical to SEQ ID NO: 16684
  source: /note="Description of Artificial Sequence: Synthetic polypeptide"

SEQ ID NO: 19517 - protein, 252 aa, Artificial Sequence
  source: /note="Description of Artificial Sequence: Synthetic polypeptide"
EVQLLESGGGLVQPGGSLRLSCAASGFTFSIYRMQWVRQAPGKGLEWVSGISPSGGTTWYADSVKGRFTISRDNSKNTLYLQMNSLRAEDTAVYYCARWSGGSGYAFDIWGQGTMVTVSSASTGGGGSGGGGSGGGGSGGGGSDIQMTQSPLSLSASVGDRVTITCQASRDIRNYLNWYQQKPGKAPKLLIYDASSLQTGVPSRFGGSGSGTDFSFTIGSLQPEDIATYYCQQFDSLPHTFGQGTKLEIKRT

SEQ ID NO: 19518 - protein, 261 aa, Artificial Sequence
  source: /note="Description of Artificial Sequence: Synthetic polypeptide"
EVQLLESGGGLVQPGGSLRLSCAASGFTFSNYPMYWVRQAPGKGLEWVSRISSSGGRTVYADSVKGRFTISRDNSKNTLYLQMNSLRAEDTAVYYCARDRWSRSAAEYGLGGYWGQGTLVTVSSASTGGGGSGGGGSGGGGSGGGGSDIQMTQSPDSLAVSLGERATINCKSSQSVLYSSNNKNYLAWYQQKPGQPPKLLIYLASTRESGVPDRFSGSGSGTDFTLTISSLQAEDVAVYYCQQYYSTWTFGQGTKVEIKRT

SEQ ID NO: 19519 - protein, 262 aa, Artificial Sequence
  source: /note="Description of Artificial Sequence: Synthetic polypeptide"
EVQLVQSGAEVKKPGSSVKVSCKASGGTFSSYAISWVRQAPGQGLEWMGGIIPIFGTANYAQKFQGRVTITADKSTSTAYMELSSLRSEDTAVYYCARAPLRFLEWSTQDHYYYYYMDVWGKGTTVTVSSASTGGGGSGGGGSGGGGSGGGGSSSELTQDPAVSVALGQTVRITCQGDSLRSYYATWYQQKPGQAPILVIYGENKRPSGIPDRFSGSSSGNTASLTITGAQAEDEADYYCKSRDGSGQHLVFGGGTKLTVLG

SEQ ID NO: 19520 - protein, 257 aa, Artificial Sequence
  source: /note="Description of Artificial Sequence: Synthetic polypeptide"
EVQLLESGGGLVQPGGSLRLSCTASGFTFSSYAMNWVRQAPGKGLEWVSAISGSGGTTFYADSVKGRFTISRDNSRTTLYLQMNSLRAEDTAVYYCAKDLGWSDSYYYYYGMDVWGQGTTVTVSSASTGGGGSGGGGSGGGGSGGGGSDIQMTQFPSSLSASVGDRVTITCRASQGIRNDLGWYQQKPGKAPKRLIYAASRLHRGVPSRFSGSGSGTEFTLTISSLQPEDFATYYCLQHNSYPCSFGQGTKLEIKRT

SEQ ID NO: 19521 - protein, 256 aa, Artificial Sequence
  source: /note="Description of Artificial Sequence: Synthetic polypeptide"
QVQLQESGPGLVKPSGTLSLTCAVSGGSISSSNWWSWVRQPPGKGLEWIGEIYHSGSTNYNPSLKSRVTISVDKSKNQFSLKLSSVTAADTAVYYCARWTGRTDAFDIWGQGTMVTVSSASTGGGGSGGGGSGGGGSGGGGSDVVMTQSPLSLPVTPGEPASISCRSSQSLLHSNGYNYLDWYLQKPGQSPQLLIYLGSNRASGVPDRFSGSGSGTDFTLKISRVEAEDVGVYYCMQGTHWPLTFGQGTKVEIKRT

SEQ ID NO: 19522 - protein, 254 aa, Artificial Sequence
  source: /note="Description of Artificial Sequence: Synthetic polypeptide"
EVQLLQSGGGLVQPGGSLRLSCAASGFFFSKYPMHWVRQAPGKGLEWVSSISSDGGATVYADSVKGRFTISRDNSKNTLYLQMNSLRAEDTAVYYCAKDFYTWLTGNAFDSWGQGTSVTVSSASTGGGGSGGGGSGGGGSGGGGSDIQLTQSPSSLSASLGDRVTITCRASQGISSYLAWYQQKPGKAPKLLIYARSTRQSGVPSRFSGSGSGTEFTLTISSLQPEDSATYYCQQYWTWPLTFGGGTKVEIKRT

SEQ ID NO: 19523 - protein, 254 aa, Artificial Sequence
  source: /note="Description of Artificial Sequence: Synthetic polypeptide"
EVQLLQSGGGLVQPGGSLRLSCAASGFLFSSYPMHWVRQAPGKGLEWVGSISPSGGATPYADSVKGRFTISRDNSKNTLYLQMNSLRPEDTAVYYCAKDFYNILTGNAFDKWGQGTSVTVSSASTGGGGSGGGGSGGGGSGGGGSDIQLTQSPSSLSASLGDRVTITCRASQGISSYLAWYQQKPGKAPKLLIYAGSTPQSGVPSRFSGSGSGTEFTLTISSLQPEDSGTYYCQQYWTWPLTFGGGTKVEIKRT

SEQ ID NO: 19524 - protein, 254 aa, Artificial Sequence
  source: /note="Description of Artificial Sequence: Synthetic polypeptide"
EVQLLQSGGGLVQPGGSLRLSCAASGFDFSSYPMHWVRQAPGKGLEWVGSISSSGGATPYADSVKGRFTISRDNSKNTLYLQMNSLRPEDTAVYYCAKDFYTILTGNAFDMWGQGTSVTVSSASTGGGGSGGGGSGGGGSGGGGSDIQMTQSPSSLSASLGDRVTITCRASQGISSYLAWYQQKPGKAPKLLIYASSTRQSGVPSRFSGSGSGTDFTLTISSLQPEDSGTYYCQQYWAFPLTFGGGTKVEIKRT

SEQ ID NO: 19525 - protein, 254 aa, Artificial Sequence
  source: /note="Description of Artificial Sequence: Synthetic polypeptide"
EVQLLQSGGGLVQPGGSLRLSCAASGFMFSRYPMHWVRQAPGKGLEWVGSISGSGGATPYADSVKGRFTISRDNSKNTLYLQMNSLRAEDTAVYYCAKDFYQILTGNAFDYWGQGTTVTVSSASTGGGGSGGGGSGGGGSGGGGSDIQMTQSPSSLSASLGDRVTITCRASQGISSYLAWYQQKPGKAPKLLIYAKSTLQSGVPSRFSGSGSGTDFTLTISSLQPEDSATYYCQQYWTFPLTFGGGTKVEIKRT

SEQ ID NO: 19526 - protein, 248 aa, Mus musculus
QVQLQQSGAELASPGASVKLSCKASGYTFTTYWLQWVKQRPGQGLEWIGAIYPGPGNTKYTQKFKDKATLTADKSASTAYMQLNSLTSEDSAVYYCARRGSRRGIAYWGQGTLVTVSAASSGGGGSGGGGSGGGGSSNIVLTQSPASLAVSLGQRATISCRASESVDSYGRSFMHWYQQRPGQPPTLLIYLASNLESGVPVRFSGSGSRTDFTLTIDPVEADDAATYYCQQDNEDPYTFGGGTKLEIK

SEQ ID NO: 19527 - protein, 477 aa, Artificial Sequence
  source: /note="Description of Artificial Sequence: Synthetic polypeptide"
QVQLQQSGAELARPGASVKMSCKASGYTFTRYTMHWVKQRPGQGLEWIGYINPSRGYTNYNQKFKDKATLTTDKSSSTAYMQLSSLTSEDSAVYYCARYYDDHYCLDYWGQGTTLTVSSGGGGSGGGGSGGGGSQIVLTQSPAIMSASPGEKVTMTCSASSSVSYMNWYQQKSGTSPKRWIYDTSKLASGVPAHFRGSGSGTSYSLTISGMEAEDAATYYCQQWSSNPFTFGSGTKLEINRGAAAEPKSCDKTHTCPPCPAPELLGGPSVFLFPPKPKDTLMISRTPEVTCVVVDVSHEDPEVKFNWYVDGVEVHNAKTKPREEQYNSTYRVVSVLTVLHQDWLNGKEYKCKVSNKALPAPIEKTISKAKGQPREPQVYTLPPSRDELTKNQVSLTCLVKGFYPSDIAVEWESNGQPENNYKTTPPVLDSDGSFFLYSKLTVDKSRWQQGNVFSCSVMHEALHNHYTQKSLSLSPGK

SEQ ID NO: 19528 - protein, 108 aa, Artificial Sequence
  source: /note="Description of Artificial Sequence: Synthetic polypeptide"
DIQMTQSPSSLSASVGDRVTITCRASQPIGSFLWWYQQKPGKAPKLLIYYSSYLQSGVPSRFSGSGSGTDFTLTISSLQPEDFATYYCQQYRWHPNTFGQGTKVEIKR

SEQ ID NO: 19529 - protein, 108 aa, Artificial Sequence
  source: /note="Description of Artificial Sequence: Synthetic polypeptide"
DIQMTQSPSSLSASVGDRVTITCRASQSIYSWLNWYQQKPGKAPKLLIYRASHLQSGVPSRFSGSGSGTDFTLTISSLQPEDFATYYCQQIWNMPFTFGQGTKVEIKR

SEQ ID NO: 19530 - protein, 108 aa, Artificial Sequence
  source: /note="Description of Artificial Sequence: Synthetic polypeptide"
DIQMTQSPSSLSASVGDRVTITCRASQPIGYDLFWYQQKPGKAPKLLIYRGSVLQSGVPSRFSGSGSGTDFTLTISSLQPEDFATYYCQQRWRWPFTFGQGTKVEIKR

SEQ ID NO: 19531 - protein, 108 aa, Artificial Sequence
  source: /note="Description of Artificial Sequence: Synthetic polypeptide"
DIQMTQSPSSLSASVGDRVTITCRASLPIGRDLWWYQQKPGKAPKLLIYRGSFLQSGVPSRFSGSGSGTDFTLTISSLQPEDFATYYCQQRWYYPHTFGQGTKVEIKR

SEQ ID NO: 19532 - protein, 108 aa, Artificial Sequence
  source: /note="Description of Artificial Sequence: Synthetic polypeptide"
DIQMTQSPSSLSASVGDRVTITCRASQDIEEWLMWYQQKPGKAPKLLIYNSSTLQSGVPSRFSGSGSGTDFTLTISSLQPEDYATYYCQQPLSRPFTFGQGTKVEIKR

SEQ ID NO: 19533 - protein, 108 aa, Artificial Sequence
  source: /note="Description of Artificial Sequence: Synthetic polypeptide"
DIQMTQSPSSLSASVGDRVTITCRASQHIDDWLFWYQQKPGKAPKLLIYRASFLQSGVPSRFSGSGSGTDFTLTISSLQPEDFATYYCQQPLSRPFTFGQGTKVEIKR

SEQ ID NO: 19534 - protein, 108 aa, Artificial Sequence
  source: /note="Description of Artificial Sequence: Synthetic polypeptide"
DIQMTQSPSSLSASVGDRVTITCRASQFIEDWLFWYQQKPGKAPKLLIYQASKLQSGVPSRFSGSGSGTDFTLTISSLQPEDFATYYCQQPLSRPFTFGQGTKVEIKR

SEQ ID NO: 19535 - protein, 108 aa, Artificial Sequence
  source: /note="Description of Artificial Sequence: Synthetic polypeptide"
DIQMTQSPSSLSASVGDRVTITCRASQPIDSWLMWYQQKPGKAPKLLIYQASRLQSGVPSRFSGSGSGTDFTLTISSLQPEDFATYYCQQPLSRPFTFGQGTKVEIKR

SEQ ID NO: 19536 - protein, 108 aa, Artificial Sequence
  source: /note="Description of Artificial Sequence: Synthetic polypeptide"
DIQMTQSPSSLSASVGDRVTITCRASQHIDDWLFWYQQKPGKAPKLLIYRASFLQSGVPPRFSGSGSGTDFTLTISSLQPEDFATYYCQQPLSRPFTFGQGTKVEIKR

SEQ ID NO: 19537 - protein, 108 aa, Artificial Sequence
  source: /note="Description of Artificial Sequence: Synthetic polypeptide"
DIQMTQSPSSLSASVGDRVTITCRASQNIDDHLMWYQQKPGKAPKLLIYSSSILQSGVPPRFSGSGSGTDFTLTISSLQPEDFATYYCQQPLSRPFTFGQGTKVEIKR

SEQ ID NO: 19538 - protein, 108 aa, Artificial Sequence
  source: /note="Description of Artificial Sequence: Synthetic polypeptide"
DIQMTQSPSSLSASVGDRVTITCRASQDIDHALLWYQQKPGKAPRLLIYNGSMLQSGVPSRFSGSGSGTDFTLTISSLQPEDFATYYCQQVLRRPFTFGQGTKVEIKR

SEQ ID NO: 19539 - protein, 108 aa, Artificial Sequence
  source: /note="Description of Artificial Sequence: Synthetic polypeptide"
DIQMTQSPSSLSASVGDRVTITCRASQHIGDWLLWYQQKPGKAPMLLIYQSSRLQSGVPSRFSGSGSGTDFILTISSLQPEDFATYYCQQPLSRPFTFGQGTKVEIKR

SEQ ID NO: 19540 - protein, 108 aa, Artificial Sequence
  source: /note="Description of Artificial Sequence: Synthetic polypeptide"
DIQMTQSPSSLSASVGDRVTITCRASQHIDSYLMWYQQKPGKAPKLLIYNTSVLQSGVPSRFSGSGSGTDFTLTISSLQPEDFATYYCQQPLSRPFTFGQGTKVEIKR

SEQ ID NO: 19541 - protein, 108 aa, Artificial Sequence
  source: /note="Description of Artificial Sequence: Synthetic polypeptide"
DIQMTQSPSSLSASVGDRVTITCRASQWIDDHLFWYQQKPGKAPKLLIYNTSTLQSGVPSRFSGSGSGTDFILTISSLQPEDFATYYCQQPLSRPFTFGQGTKVEIKR

SEQ ID NO: 19542 - protein, 108 aa, Artificial Sequence
  source: /note="Description of Artificial Sequence: Synthetic polypeptide"
DIQMTQSPSSLSASVGDRVTITCRASQFIDEHLMWYQQKPGKAPKLLIYRSSELQSGVPSRFSGSGSGTDFTLTISSLQPEDFATYYCQQPLSRPFTFGQGTKVEIKR

SEQ ID NO: 19543 - protein, 108 aa, Artificial Sequence
  source: /note="Description of Artificial Sequence: Synthetic polypeptide"
DIQMTQSPSSLSASVGDRVTITCRASQWINNWLLWYQQKPGKAPKLLIYESSNLQSGVPSRFSGSGSGTDFTLTISSLQPEDFATYYCQQPLSRPFTFGQGTKVEIKR

SEQ ID NO: 19544 - protein, 107 aa, Artificial Sequence
  source: /note="Description of Artificial Sequence: Synthetic polypeptide"
DIQMTQSPSSLSASVGDRVTITCRASQLIDDHFWYQQKPGKAPTLLIYNSSVLQSGVPSRFSGSGSGTDFTLTISSLQPEDFATYYCQQPLSRPFTFGQGTKVEIKR

SEQ ID NO: 19545 - protein, 108 aa, Artificial Sequence
  source: /note="Description of Artificial Sequence: Synthetic polypeptide"
DIQMTQSPSSLSASVGDRVTITCRASQDIDQWLMWYQQKPGKAPKLLIYQSSMLQSGVPSRFSGSGSGTDFTLTISSLQPEDFATYYCQQPLSRPFTFGQGTKVEIKR

SEQ ID NO: 19546 - protein, 108 aa, Artificial Sequence
  source: /note="Description of Artificial Sequence: Synthetic polypeptide"
DIQMTQSPSSLSASVGDRVTITCQASQDIDNWLLWYQQKPGKAPKLLIYQASNLQSGVPSRFSGSGSGTDFTLTISSLQPEDFATYYCQQPLSRPFTFGQGTKVEIKR

SEQ ID NO: 19547 - protein, 108 aa, Artificial Sequence
  source: /note="Description of Artificial Sequence: Synthetic polypeptide"
DIQMTQSPSSLSASVGDRVTITCRASQPIDSWLMWYQQKPGKAPKLLIYQASRLQSGVPSRFSGSGSGTDFTLTISSLQPEDFATYYCQQPLSGPFTFGQGTKVEIKR

SEQ ID NO: 19548 - protein, 108 aa, Artificial Sequence
  source: /note="Description of Artificial Sequence: Synthetic polypeptide"
DIQMTQSPSSLSASVGDRVTITCRASQYIDYGLMWYQQKPGKAPKLLIYRTSELQSGVPSRFSGSGSGTDFTLTISSLQPEDFATYYCQQPLSRPFTFGQGTKVEIKR

SEQ ID NO: 19549 - protein, 108 aa, Artificial Sequence
  source: /note="Description of Artificial Sequence: Synthetic polypeptide"
DIQMTQSPSSLSASVGDRVTITCRASQWIDSFLMWYQQKPGKAPKLLIYNGSVLQSGVPSRFSGSGSGTDFTLTISSLQPEDFATYYCQQPLSRPFTFGQGTKVEIKR

SEQ ID NO: 19550 - protein, 108 aa, Artificial Sequence
  source: /note="Description of Artificial Sequence: Synthetic polypeptide"
DIQMTQSPSSLSASVGDRVTITCRASQDIGPWLMWYQQKPGKAPKLLIYQGSRLQSGVPLRFSGSGSGTDFTLTISSLQPEDFATYYCQQPLSRPFTFGQGTKVEIRR

SEQ ID NO: 19551 - protein, 108 aa, Artificial Sequence
  source: /note="Description of Artificial Sequence: Synthetic polypeptide"
DIQMTQSPSSLSASVGDRVTITCRASQHIDSWLLWYQQKPGKAPKLLIYNGSVLQSGVPSRFSGSGSGTDFTLTISSLQPEDFATYYCQQPLSGPFTFGQGTKVEIKR

SEQ ID NO: 19552 - protein, 108 aa, Artificial Sequence
  source: /note="Description of Artificial Sequence: Synthetic polypeptide"
DIQMTQSPSSLSASVGDRVTITCRASQHIDTHLFWYQQKPGKAPKLLIYNTSTLQSGVPSRFSGSGSGTDFTLTISSLQPEDFATYYCQQPLSRPFTFGQGTKVEIKR

SEQ ID NO: 19553 - protein, 108 aa, Artificial Sequence
  source: /note="Description of Artificial Sequence: Synthetic polypeptide"
DIQMTQSPSSLSASVGDRVTITCRASQFIDTHLMWYQQKPGKAPRLLIYNTSTLQSGVPSRFSGSGSGTDFTLTISSLQPEDFATYYCQQPLSRPFTFGQGTKVEIKR

SEQ ID NO: 19554 - protein, 108 aa, Artificial Sequence
  source: /note="Description of Artificial Sequence: Synthetic polypeptide"
DIQMTQSPSSLSASVGDRVTITCRASQDIDDWLLWYQQKPGKAPKLLIYQGSRLQSGVPSRFSGSGSGTDFTLTISSLQPEDFATYYCQQPLSRPFTFGQGTKVEIKR

SEQ ID NO: 19555 - protein, 108 aa, Artificial Sequence
  source: /note="Description of Artificial Sequence: Synthetic polypeptide"
DIQMTQSPSSLSASVGDRVTITCRASQWIDDTLMWYQQKPGKAPKLLIYRSSMLQSGVPSRFSGSGSGTDFTLTISSLQPEDFATYYCQQPLSRPFTFGQGTKVEIKR

SEQ ID NO: 19556 - protein, 108 aa, Artificial Sequence
  source: /note="Description of Artificial Sequence: Synthetic polypeptide"
DIQMTQSPSSLSASVGDRVTITCRASQYIDSHLMWYQQKPGKAPKLLIYDTSRLQSGVPSRFSGSGSGTDFTLTISSLQPEDFATYYCQQPLSRPFTFGQGTKVEIKR

SEQ ID NO: 19557 - protein, 108 aa, Artificial Sequence
  source: /note="Description of Artificial Sequence: Synthetic polypeptide"
DIQMTQSPSSLSASVGDRVTITCRASQHIDQHLFWYQQKPGKAPKLLIYNSSSLQSGVPSRFSGSGSGTDFTLTISSLQPEDFATYYCQQPLSRPFTFGQGTKVEIKR

SEQ ID NO: 19558 - protein, 108 aa, Artificial Sequence
  source: /note="Description of Artificial Sequence: Synthetic polypeptide"
DIQMTQSPSSLSASVGDRVTITCRASQHIERWLLWYQQKPGKAPKLLIYNSSKLQSGVPSRFSGSGSGTDFTLTISSLQPEDFATYYCQQPLSRPFTFGQGTKVEIKR

SEQ ID NO: 19559 - protein, 108 aa, Artificial Sequence
  source: /note="Description of Artificial Sequence: Synthetic polypeptide"
DIQMTQSPSSLSASVGDRVTISCRASQHIERWLLWYQQKPGKAPKLLIYNSSKLQSGVPSRFSGSGSGTDFTLTISSLQPEDFATYYCQQPLSRPFTFGQGTKVEIKR

SEQ ID NO: 19560 - protein, 108 aa, Artificial Sequence
  source: /note="Description of Artificial Sequence: Synthetic polypeptide"
DIQMTQSPSSLSASVGDRVTITCRASQDIGSWLMWYQQKSGKAPKLLIYNGSALQSGVPSRFSGSGSGTDFTLTISSLQPEDFATYYCQQPLSRPFTFGQGTKVEIKR

SEQ ID NO: 19561 - protein, 108 aa, Artificial Sequence
  source: /note="Description of Artificial Sequence: Synthetic polypeptide"
DIQMTQSPSSLSASVGDRVTITCRASQHIDKWLMWYQQKPGKAPKLLIYQASKLQSGVPSRFSGSGSGTDFTLTISSLQPEDFATYYCQQPLSRPFTFGQGTKVEIKR

SEQ ID NO: 19562 - protein, 108 aa, Artificial Sequence
  source: /note="Description of Artificial Sequence: Synthetic polypeptide"
DIQMTQSPSSLSASVGDRVTITCRASQDIEEWLMWYQQKPGKAPKLLIYNSSTLQSGVPSRFSGSGSGTDFTLTISSLQPEDFATYYCQQPLSRPFTFGQGTKVEIKR

SEQ ID NO: 19563 - protein, 100 aa, Artificial Sequence
  source: /note="Description of Artificial Sequence: Synthetic polypeptide"
DIQMTQSPSSLSASVGDRVTITCRASQYIDYGLMWYQQKPGKAPKLLIYRTSELQSGVPSRFSGSGSGTDFTLTISSLQPEDFATYYCQQPLSRPFTFGQ

SEQ ID NO: 19564 - protein, 108 aa, Artificial Sequence
  source: /note="Description of Artificial Sequence: Synthetic polypeptide"
DIQMTQSPSSLSASVGDRVTITCRASQNIDIHLMWYQQKPGKAPKLLIYQSSNLQSGVPSPFSGSGSGTDFTLTISSLQPEDFATYYCQQPLSRPFTFGQGTKVEIKR

SEQ ID NO: 19565 - protein, 108 aa, Artificial Sequence
  source: /note="Description of Artificial Sequence: Synthetic polypeptide"
DIQMTQSPSSLSASVGDRVTITCRASQDIGPWLLWYQQKPGKAPKLLIYQSSELQSGVPSRFSGSGSGTDFTLTISSLQPEDLATYYCQQPLSRPFTFGQGTKVEIKR

SEQ ID NO: 19566 - protein, 108 aa, Artificial Sequence
  source: /note="Description of Artificial Sequence: Synthetic polypeptide"
DIQMTQSPSSLSASVGDRVTITCRASQEIGVWLMWYQQKPGKAPKLLIYEGSRLQSGVPSRFSGSGSGTDFTLTISSLQPEDFATYYCQQPLSRPFVFGQGTKVEIKR

SEQ ID NO: 19567 - protein, 108 aa, Artificial Sequence
  source: /note="Description of Artificial Sequence: Synthetic polypeptide"
DIQMTQSPSSLSASVGDRVTITCRASQSIGKWLMWYQQKPGKAPKLLIYQSSLLQSGVPSRFSGSGSGTDFTLTISSLQPEDFATYYCQQPLSRPFTFGQGTKVEIKR

SEQ ID NO: 19568 - protein, 108 aa, Artificial Sequence
  source: /note="Description of Artificial Sequence: Synthetic polypeptide"
DIQMTQSPSSLSASVGDRVTITCRASQDIDTWLFWYQQKPGKAPKLLIYNGSRLQSGVPSRFSGSGSGTDFTLTISGLQPEDFATYYCQQPLSRPFTFGQGTKVEIKR

SEQ ID NO: 19569 - protein, 108 aa, Artificial Sequence
  source: /note="Description of Artificial Sequence: Synthetic polypeptide"
DIQMTQSPSSLSASVGDRVTITCRASQDIEGWLLWYQQKPGKAPKLLIYNSSTLQSGVPSRFSGSGSGTDFTLTISSLQPEDFATYYCQQPLSRPFTFGQGTKVEIKR

SEQ ID NO: 19570 - protein, 108 aa, Artificial Sequence
  source: /note="Description of Artificial Sequence: Synthetic polypeptide"
DIQMTQSPSSLSASVGDRVTITCRASQPIEEWLLWYQQKPGKAPKLLIYNGSHLQSGVPSRFSGSGSGTDFTLTISSLQPEDFATYYCQQPLSRPFTFGQGTKVEIKR

SEQ ID NO: 19571 - protein, 108 aa, Artificial Sequence
  source: /note="Description of Artificial Sequence: Synthetic polypeptide"
DIQMTQSPSSLSASVGDRVTITCRASQPIDYGLMWYQQKPGKAPKLLIYRSSQLQSGVPSRFSGSGSGTDFTLTISSLQPEDFATYYCQQPLSRPFTFGQGTKVEIKR

SEQ ID NO: 19572 - protein, 108 aa, Artificial Sequence
  source: /note="Description of Artificial Sequence: Synthetic polypeptide"
DIQMTQSPSSLSASVGDRVTITCRASQEIGSWLMWYQQKPGKAPKLLIYQSSKLQSGVPSRFSGSGSGTDFTLTISSLQPEDFATYYCQQPLSRPFTFGQGTKVEIKR

SEQ ID NO: 19573 - protein, 108 aa, Artificial Sequence
  source: /note="Description of Artificial Sequence: Synthetic polypeptide"
DIQMTQSPSSLSASVGDRVTITCRASQPIDSWLLWYQQKPGKAPKLLIYNASSLQSGVPSRESGSGSGTDFTLTISSLQPEDFATYYCQQPLSRPFTFGQGTKVEIKR

SEQ ID NO: 19574 - protein, 108 aa, Artificial Sequence
  source: /note="Description of Artificial Sequence: Synthetic polypeptide"
DIQMTQSPSSLSASVGDRVTITCRASQDIGPWLMWYQQKPGKAPKLLIYQASALQSGVPSRFSGSGSGTDFTLTISSLQPEDFATYYCQQPLSRPFTFGQGTKVEIKR

SEQ ID NO: 19575 - protein, 108 aa, Artificial Sequence
  source: /note="Description of Artificial Sequence: Synthetic polypeptide"
DIQMTQSPSSLSASVGDRVTITCRASQNIHEWLMWYQQKPGKAPKLLIYQGSRLQSGVPSRFSGSGSGTDFTLTISSLQPEDFATYYCQQPLSRPFTFGQGTKVEIKR

SEQ ID NO: 19576 - protein, 109 aa, Artificial Sequence
  source: /note="Description of Artificial Sequence: Synthetic polypeptide"
DIQMTQSPSSLSASVGDRVTITCRASQDIGPWLMWYQQKPGKAPKLLIYQASALQSGVPSRFSGSGSGTDFTLTISSLQPEDSATYYCQQPLSRLPFTFGQGTKVEIKR

SEQ ID NO: 19577 - protein, 108 aa, Artificial Sequence
  source: /note="Description of Artificial Sequence: Synthetic polypeptide"
DIQMTQSPSSLSASVGDRVTITCRASQSVKEFLWWYQQKPGKAPKLLIYMASNLQSGVPSRFSGSGSGTDFTLTISSLQPEDFATYYCQQKFKLPRTFGQGTKVEIKR

SEQ ID NO: 19578 - protein, 108 aa, Artificial Sequence; identical to SEQ ID NO: 17083
  source: /note="Description of Artificial Sequence: Synthetic polypeptide"

SEQ ID NO: 19579 - protein, 108 aa, Artificial Sequence; identical to SEQ ID NO: 17084
  source: /note="Description of Artificial Sequence: Synthetic polypeptide"

SEQ ID NO: 19580 - protein, 108 aa, Artificial Sequence; identical to SEQ ID NO: 17085
  source: /note="Description of Artificial Sequence: Synthetic polypeptide"

SEQ ID NO: 19581 - protein, 108 aa, Artificial Sequence; identical to SEQ ID NO: 17086
  source: /note="Description of Artificial Sequence: Synthetic polypeptide"

SEQ ID NO: 19582 - protein, 108 aa, Artificial Sequence; identical to SEQ ID NO: 17087
  source: /note="Description of Artificial Sequence: Synthetic polypeptide"

SEQ ID NO: 19583 - protein, 108 aa, Artificial Sequence; identical to SEQ ID NO: 17088
  source: /note="Description of Artificial Sequence: Synthetic polypeptide"

SEQ ID NO: 19584 - protein, 108 aa, Artificial Sequence; identical to SEQ ID NO: 17089
  source: /note="Description of Artificial Sequence: Synthetic polypeptide"

SEQ ID NO: 19585 - protein, 108 aa, Artificial Sequence; identical to SEQ ID NO: 17090
  source: /note="Description of Artificial Sequence: Synthetic polypeptide"

SEQ ID NO: 19586 - protein, 108 aa, Artificial Sequence; identical to SEQ ID NO: 17091
  source: /note="Description of Artificial Sequence: Synthetic polypeptide"

SEQ ID NO: 19587 - protein, 108 aa, Artificial Sequence; identical to SEQ ID NO: 17092
  source: /note="Description of Artificial Sequence: Synthetic polypeptide"

SEQ ID NO: 19588 - protein, 108 aa, Artificial Sequence; identical to SEQ ID NO: 17093
  source: /note="Description of Artificial Sequence: Synthetic polypeptide"

SEQ ID NO: 19589 - protein, 108 aa, Artificial Sequence; identical to SEQ ID NO: 17094
  source: /note="Description of Artificial Sequence: Synthetic polypeptide"

SEQ ID NO: 19590 - protein, 108 aa, Artificial Sequence; identical to SEQ ID NO: 17095
  source: /note="Description of Artificial Sequence: Synthetic polypeptide"

SEQ ID NO: 19591 - protein, 108 aa, Artificial Sequence; identical to SEQ ID NO: 17096
  source: /note="Description of Artificial Sequence: Synthetic polypeptide"

SEQ ID NO: 19592 - protein, 108 aa, Artificial Sequence; identical to SEQ ID NO: 17097
  source: /note="Description of Artificial Sequence: Synthetic polypeptide"

SEQ ID NO: 19593 - protein, 108 aa, Artificial Sequence; identical to SEQ ID NO: 17098
  source: /note="Description of Artificial Sequence: Synthetic polypeptide"

SEQ ID NO: 19594 - protein, 118 aa, Artificial Sequence; identical to SEQ ID NO: 17099
  source: /note="Description of Artificial Sequence: Synthetic polypeptide"

SEQ ID NO: 19595 - protein, 116 aa, Artificial Sequence; identical to SEQ ID NO: 17100
  source: /note="Description of Artificial Sequence: Synthetic polypeptide"

SEQ ID NO: 19596 - protein, 119 aa, Artificial Sequence; identical to SEQ ID NO: 17101
  source: /note="Description of Artificial Sequence: Synthetic polypeptide"

SEQ ID NO: 19597 - protein, 124 aa, Artificial Sequence; identical to SEQ ID NO: 17102
  source: /note="Description of Artificial Sequence: Synthetic polypeptide"

SEQ ID NO: 19598 - protein, 121 aa, Artificial Sequence; identical to SEQ ID NO: 17103
  source: /note="Description of Artificial Sequence: Synthetic polypeptide"

SEQ ID NO: 19599 - protein, 116 aa, Artificial Sequence; identical to SEQ ID NO: 17104
  source: /note="Description of Artificial Sequence: Synthetic polypeptide"

SEQ ID NO: 19600 - protein, 116 aa, Artificial Sequence; identical to SEQ ID NO: 17105
  source: /note="Description of Artificial Sequence: Synthetic polypeptide"

SEQ ID NO: 19601 - protein, 116 aa, Artificial Sequence; identical to SEQ ID NO: 17106
  source: /note="Description of Artificial Sequence: Synthetic polypeptide"

SEQ ID NO: 19602 - protein, 123 aa, Artificial Sequence; identical to SEQ ID NO: 17107
  source: /note="Description of Artificial Sequence: Synthetic polypeptide"

SEQ ID NO: 19603 - protein, 123 aa, Artificial Sequence; identical to SEQ ID NO: 17108
  source: /note="Description of Artificial Sequence: Synthetic polypeptide"

SEQ ID NO: 19604 - protein, 123 aa, Artificial Sequence; identical to SEQ ID NO: 17109
  source: /note="Description of Artificial Sequence: Synthetic polypeptide"

SEQ ID NO: 19605 - protein, 125 aa, Lama glama
QVKLEESGGGLVQAGDSLRVSCAASGRDFSDYVMGWFRQAPGKEREFVAAISRNGLTTRYADSVKGRFTISRDNDKNMVYLQMNSLKPEDTAVYYCAVNSAGTYVSPRSREYDYWGQGTQVTVSS

SEQ ID NO: 19606 - protein, 109 aa, Lama glama
SLRLSCVDSGRDFSDYVMGWFRQAPGKEREFVAAISRNGITTRYADSVKGRFTISRDNDKNTVYLQMNSLRPEDTAVYYCATNSAGTYVSPRSRDYDGWGQGTQVTVSS

SEQ ID NO: 19607 - protein, 125 aa, Lama glama
QVQLVESGGGLVQAGDSLRLSCVDSGRDFSDYVMGWFRQAPGKEREFVAAISRNGITTRYADSVKGRFTISRDNDKNTVYLQMNSLKPEDTAVYYCATNSAGTYVSPRSRDYDGWGQGTQVTVSS

SEQ ID NO: 19608 - protein, 123 aa, Lama glama
QVKLEESGGGLVQAGGSLTLSCAASGGTFSSYAMGWFRQAPGKEREFVAAISGRSSIRNYDDSVKGRFAISRDNAKNTVYLQMNSLKPEDTAVYYCAADTVFRSFVVGNVKEWGQGTQVTVSS

SEQ ID NO: 19609 - protein, 123 aa, Lama glama
QVQLVESGGGLVQAGGSLTLSCAASGGTFSSYAMGWFRQAPGKEREFVAAISGRSSIRNYDDSVKGRFAISRDSAKNTVYLQMNSLKPEDTAVYYCAADTVFRSFVVGNVKEWGQGTQVTVSS

SEQ ID NO: 19610 - protein, 116 aa, Lama glama
QVQLVESGGGLVQPGGSLRLSCAASESFFNFDAWGWYRQAPGKQREMVAVVGSTGSTSYADFVKGRFTISRDNANNTVYLQMNTLRPEDTAVYYCYARFQSLYNSWGQGTQVTVSS

SEQ ID NO: 19611 - protein, 116 aa, Lama glama
AVQLVESGGGLVQPGGSLRLSCAASVSIFDIDAWGWYRQAPGKQREMVALVGSTGSTSYADSVKGRFTLSRDNVNNTMYLQMNSLRPEDTAVYYCYARFDSLYNSWGQGTQVTVSS

SEQ ID NO: 19612 - protein, 115 aa, Lama glama
VKLEESGGGLVQPGGSLRLSCAASESFFNFDAWGWYRQAPGKQREMVAVVGSTGSTSYADFVKGRFTISRDNANNTVYLQMNTLRPEDTAVYYCYARFQSLYNSWGQGTQVTVSS

SEQ ID NO: 19613 - protein, 116 aa, Lama glama
QVKLEESGGGLVQPGGSLRLSCAASVSIFDIDAWGWYRQAPGKQREMVALVGSTGSTSYADSVKGRFTLSRDNVNNTMYLQMNSLRPEDTAVYYCYARFDSLYNSWGQGTQVTVSS

SEQ ID NO: 19614 - protein, 116 aa, Lama glama
QVQLVESGGGLVQPGGSLRLPCAASGSIFSLDAWGWYRQAPGKQREMVALVGSDGSTSYADSVKGRFTISRDNANNTFYLQMNSLKPEDTAVYYCYARFQSLYNSWGQGTQVTVSS

SEQ ID NO: 19615 - protein, 116 aa, Lama glama
QVKLEESGGGLVQVGGSLRLSCAHSGLPFGINAIGWYRQGPGNQRDLVARITSDGRTILEDSVKGRFTISRDNAKKTVYVQMNNLKPEDTAVYYCAAEKGGSPLYWGQGTQVTVSS

SEQ ID NO: 19616 - protein, 506 aa, Artificial Sequence
  source: /note="Description of Artificial Sequence: Synthetic polypeptide"
EFATMAVMAPRTLVLLLSGALALTQTWAGDIKLQQSGAELARPGASVKMSCKTSGYTFTRYTMHWVKQRPGQGLEWIGYINPSRGYTNYNQKFKDKATLTTDKSSSTAYMQLSSLTSEDSAVYYCARYYDDHYCLDYWGQGTTLTVSSVEGGSGGSGGSGGSGGVDDIQLTQSPAIMSASPGEKVTMTCRASSSVSYMNWYQQKSGTSPKRWIYDTSKVASGVPYRFSGSGSGTSYSLTISSMEAEDAATYYCQQWSSNPLTFGAGTKLELKAAEPKSSDKTHTCPPCPAPEAAGGPSVFLFPPKPKDTLMISRTPEVTCVVVDVSHEDPEVKFNWYVDGVEVHNAKTKPREEQYNSTYRVVSVLTVLHQDWLNGKEYKCKVSNKALPAPIEKTISKAKGQPREPQVYVLPPSRDELTKNQVSLLCLVKGFYPSDIAVEWESNGQPENNYLTWPPVLDSDGSFFLYSKLTVDKSRWQQGNVFSCSVMHEALHNHYTQKSLSLSPGK

SEQ ID NO: 19617 - protein, 243 aa, Artificial Sequence
  source: /note="Description of Artificial Sequence: Synthetic polypeptide"
QVQLVQSGGGVVQPGRSLRLSCKSSGYTFTRYTMHWVRQAPGKGLEWIGYINPSRGYTNYNQKVKDRFTISRDNSKNTAFLQMDSLRPEDTGVYFCARYYDDHYCLDYWGQGTPVTVSSVEGGSGGSGGSGGSGGVDDIQMTQSPSSLSASVGDRVTITCRASSSVSYMNWYQQTPGKAPKRWIYDTSKVASGVPSRFSGSGSGTDYTFTISSLQPEDIATYYCQQWSSNPLTFGQGTKLQIT

SEQ ID NO: 19618 - protein, 532 aa, Artificial Sequence
  source: /note="Description of Artificial Sequence: Synthetic polypeptide"
EFATMAVMAPRTLVLLLSGALALTQTWAGSVVLLLRLAKTYETTLEKCCAAADPHECYAKVFDEFKPLVEEPQNLIKQNCELFEQLGEYKFQNALLVRYTKKVPQVSTPTLVEVSRNLGKVGSKCCKHPEAKRMPCAEDYLSVVLNQLCVLHEKTPVSDRVTKCCTESLVNRRPCFSALEVDETYVPKEFNAETFTFHADICTLSEKERQIKKQTALVELVKHKPKATKEQLKAVMDDFAAFVEKCCKADDKETCFAEEGKKLVAASQAALGLGGSGQVQLVQSGAEVKKPGESLKISCKGSGYSFTSYWIAWVRQMPGKGLEYMGLIYPGDSDTKYSPSFQGQVTISVDKSVSTAYLQWSSLKPSDSAVYFCARHDVGYCTDRTCAKWPEWLGVWGQGTLVTVSSGGGGSSGGGSGGGGSQSVLTQPPSVSAAPGQKVTISCSGSSSNIGNNYVSWYQQLPGTAPKLLIYDHTNRPAGVPDRFSGSKSGTSASLAISGFRSEDEADYYCASWDYTLSGWVFGGGTKLTVLG

SEQ ID NO: 19619 - protein, 617 aa, Artificial Sequence
  source: /note="Description of Artificial Sequence: Synthetic polypeptide"
EFATMAVMAPRTLVLLLSGALALTQTWAGQVQLQESGGGLVKPGGSLRLSCAASGFTFSSYWMSWVRQAPGKGLEWVANINRDGSASYYVDSVKGRFTISRDDAKNSLYLQMNSLRAEDTAVYYCARDRGVGYFDLWGRGTLVTVSSASTGGGGSGGGGSGGGGSQSALTQPASVSGSPGQSITISCTGTSSDVGGYNFVSWYQQHPGKAPKLMIYDVSDRPSGVSDRFSGSKSGNTASLIISGLQADDEADYYCSSYGSSSTHVIFGGGTKVTVLGGGSDAHKSEVAHRFKDLGEENFKALVLIAFAQYLQQCPFEDHVKLVNEVTEFAKTCVADESAENCDKSLHTLFGDKLCTVATLRETYGEMADCCAKQEPERNECFLQHKDDNPNLPRLVRPEVDVMCTAFHDNEETFLKKYLYEIARRHPYFYAPELLFFAKRYKAAFTECCQAADKAACLLPKLDELRDEGKASSAKQRLKCASLQKFGERAFKAWAVARLSQRFPKAEFAEVSKLVTDLTKVHTECCHGDLLECADDRADLAKYICENQDSISSKLKECCEKPLLEKSHCIAEVENDEMPADLPSLAADFVESKDVCKNYAEAKDVFLGMFLYEYARA

SEQ ID NO: 19620 - protein, 527 aa, Artificial Sequence
  source: /note="Description of Artificial Sequence: Synthetic polypeptide"
EFATMAVMAPRTLVLLLSGALALTQTWAGSVVLLLRLAKTYETTLEKCCAAADPHECYAKVFDEFKPLVEEPQNLIKQNCELFEQLGEYKFQNALLVRYTKKVPQVSTPTLVEVSRNLGKVGSKCCKHPEAKRMPCAEDYLSVVLNQLCVLHEKTPVSDRVTKCCTESLVNRRPCFSALEVDETYVPKEFNAETFTFHADICTLSEKERQIKKQTALVELVKHKPKATKEQLKAVMDDFAAFVEKCCKADDKETCFAEEGKKLVAASQAALGLGGSGDIQLTQSPASLAVSLGQRATISCKASQSVDYDGDSYLNWYQQIPGQPPKLLIYDASNLVSGIPPRFSGSGSGTDFTLNIHPVEKVDAATYHCQQSTEDPWTFGGGTKLEIKGGGGSGGGGSGGGGSQVQLQQSGAELVRPGSSVKISCKASGYAFSSYWMNWVKQRPGQGLEWIGQIWPGDGDTNYNGKFKGKATLTADESSSTAYMQLSSLASEDSAVYFCARRETTTVGRYYYAMDYWGQGTTVTVSS

SEQ ID NO: 19621 - protein, 612 aa, Artificial Sequence
  source: /note="Description of Artificial Sequence: Synthetic polypeptide"
EFATMAVMAPRTLVLLLSGALALTQTWAGDIKLQQSGAELARPGASVKMSCKTSGYTFTRYTMHWVKQRPGQGLEWIGYINPSRGYTNYNQKFKDKATLTTDKSSSTAYMQLSSLTSEDSAVYYCARYYDDHYCLDYWGQGTTLTVSSVEGGSGGSGGSGGSGGVDDIQLTQSPAIMSASPGEKVTMTCRASSSVSYMNWYQQKSGTSPKRWIYDTSKVASGVPYRFSGSGSGTSYSLTISSMEAEDAATYYCQQWSSNPLTFGAGTKLELKGGSDAHKSEVAHRFKDLGEENFKALVLIAFAQYLQQCPFEDHVKLVNEVTEFAKTCVADESAENCDKSLHTLFGDKLCTVATLRETYGEMADCCAKQEPERNECFLQHKDDNPNLPRLVRPEVDVMCTAFHDNEETFLKKYLYEIARRHPYFYAPELLFFAKRYKAAFTECCQAADKAACLLPKLDELRDEGKASSAKQRLKCASLQKFGERAFKAWAVARLSQRFPKAEFAEVSKLVTDLTKVHTECCHGDLLECADDRADLAKYICENQDSISSKLKECCEKPLLEKSHCIAEVENDEMPADLPSLAADFVESKDVCKNYAEAKDVFLGMFLYEYARA

SEQ ID NO: 19622 - protein, 448 aa, Artificial Sequence
  source: /note="Description of Artificial Sequence: Synthetic polypeptide"
QVQLVESGGGVVQPGRSLRLSCAASGFKFSGYGMHWVRQAPGKGLEWVAVIWYDGSKKYYVDSVKGRFTISRDNSKNTLYLQMNSLRAEDTAVYYCARQMGYWHFDLWGRGTLVTVSSASTKGPSVFPLAPSSKSTSGGTAALGCLVKDYFPEPVTVSWNSGALTSGVHTFPAVLQSSGLYSLSSVVTVPSSSLGTQTYICNVNHKPSNTKVDKKVEPKSCDKTHTCPPCPAPELLGGPSVFLFPPKPKDTLMISRTPEVTCVVVDVSHEDPEVKFNWYVDGVEVHNAKTKPREEQYNSTYRVVSVLTVLHQDWLNGKEYKCKVSNKALPAPIEKTISKAKGQPREPQVYVYPPSRDELTKNQVSLTCLVKGFYPSDIAVEWESNGQPENNYKTTPPVLDSDGSFALVSKLTVDKSRWQQGNVFSCSVMHEALHNHYTQKSLSLSPGK

SEQ ID NO: 19623 - protein, 452 aa, Artificial Sequence
  source: /note="Description of Artificial Sequence: Synthetic polypeptide"
EVQLVESGGGLVQPGRSLRLSCAASGFTFNDYAMHWVRQAPGKGLEWVSTISWNSGSIGYADSVKGRFTISRDNAKKSLYLQMNSLRAEDTALYYCAKDIQYGNYYYGMDVWGQGTTVTVSSASTKGPSVFPLAPSSKSTSGGTAALGCLVKDYFPEPVTVSWNSGALTSGVHTFPAVLQSSGLYSLSSVVTVPSSSLGTQTYICNVNHKPSNTKVDKKVEPKSCDKTHTCPPCPAPELLGGPSVFLFPPKPKDTLMISRTPEVTCVVVDVSHEDPEVKFNWYVDGVEVHNAKTKPREEQYNSTYRVVSVLTVLHQDWLNGKEYKCKVSNKALPAPIEKTISKAKGQPREPQVYVLPPSRDELTKNQVSLLCLVKGFYPSDIAVEWESNGQPENNYLTWPPVLDSDGSFFLYSKLTVDKSRWQQGNVFSCSVMHEALHNHYTQKSLSLSPGK

SEQ ID NO: 19624 - protein, 449 aa, Artificial Sequence
  source: /note="Description of Artificial Sequence: Synthetic polypeptide"
QVQLVQSGGGVVQPGRSLRLSCKASGYTFTSYTMHWVRQAPGKGLEWIGYINPSSGYTKYNQKFKDRFTISADKSKSTAFLQMDSLRPEDTGVYFCARWQDYDVYFDYWGQGTPVTVSSASTKGPSVFPLAPSSKSTSGGTAALGCLVKDYFPEPVTVSWNSGALTSGVHTFPAVLQSSGLYSLSSVVTVPSSSLGTQTYICNVNHKPSNTKVDKKVEPKSCDKTHTCPPCPAPELLGGPSVFLFPPKPKDTLMISRTPEVTCVVVDVSHEDPEVKFNWYVDGVEVHNAKTKPREEQYNSTYRVVSVLTVLHQDWLNGKEYKCKVSNKALPAPIEKTISKAKGQPREPQVYVYPPSRDELTKNQVSLTCLVKGFYPSDIAVEWESNGQPENNYKTTPPVLDSDGSFALVSKLTVDKSRWQQGNVFSCSVMHEALHNHYTQKSLSLSPGK

SEQ ID NO: 19625 - protein, 451 aa, Artificial Sequence
  source: /note="Description of Artificial Sequence: Synthetic polypeptide"
QVQLQQPGAELVKPGASVKMSCKASGYTFTSYNMHWVKQTPGRGLEWIGAIYPGNGDTSYNQKFKGKATLTADKSSSTAYMQLSSLTSEDSAVYYCARSTYYGGDWYFNVWGAGTTVTVSAASTKGPSVFPLAPSSKSTSGGTAALGCLVKDYFPEPVTVSWNSGALTSGVHTFPAVLQSSGLYSLSSVVTVPSSSLGTQTYICNVNHKPSNTKVDKKVEPKSCDKTHTCPPCPAPELLGGPSVFLFPPKPKDTLMISRTPEVTCVVVDVSHEDPEVKFNWYVDGVEVHNAKTKPREEQYNSTYRVVSVLTVLHQDWLNGKEYKCKVSNKALPAPIEKTISKAKGQPREPQVYVLPPSRDELTKNQVSLLCLVKGFYPSDIAVEWESNGQPENNYLTWPPVLDSDGSFFLYSKLTVDKSRWQQGNVFSCSVMHEALHNHYTQKSLSLSPGK

SEQ ID NO: 19626 - protein, 213 aa, Artificial Sequence; identical to SEQ ID NO: 9975
  source: /note="Description of Artificial Sequence: Synthetic polypeptide"

SEQ ID NO: 19627 - protein, 449 aa, Artificial Sequence; identical to SEQ ID NO: 19624
  source: /note="Description of Artificial Sequence: Synthetic polypeptide"

SEQ ID NO: 19628 - protein, 452 aa, Artificial Sequence
  source: /note="Description of Artificial Sequence: Synthetic polypeptide"
QAYLQQSGAELVRPGASVKMSCKASGYTFTSYNMHWVKQTPRQGLEWIGAIYPGNGDTSYNQKFKGKATLTVDKSSSTAYMQLSSLTSEDSAVYFCARVVYYSNSYWYFDVWGTGTTVTVSSASTKGPSVFPLAPSSKSTSGGTAALGCLVKDYFPEPVTVSWNSGALTSGVHTFPAVLQSSGLYSLSSVVTVPSSSLGTQTYICNVNHKPSNTKVDKKVEPKSCDKTHTCPPCPAPELLGGPSVFLFPPKPKDTLMISRTPEVTCVVVDVSHEDPEVKFNWYVDGVEVHNAKTKPREEQYNSTYRVVSVLTVLHQDWLNGKEYKCKVSNKALPAPIEKTISKAKGQPREPQVYVLPPSRDELTKNQVSLLCLVKGFYPSDIAVEWESNGQPENNYLTWPPVLDSDGSFFLYSKLTVDKSRWQQGNVFSCSVMHEALHNHYTQKSLSLSPGK

SEQ ID NO: 19629 - protein, 213 aa, Artificial Sequence
  source: /note="Description of Artificial Sequence: Synthetic polypeptide"
QIVLSQSPAILSASPGEKVTMTCRASSSVSYMHWYQQKPGSSPKPWIYAPSNLASGVPARFSGSGSGTSYSLTISRVEAEDAATYYCQQWSFNPPTFGAGTKLELKRTVAAPSVFIFPPSDEQLKSGTASVVCLLNNFYPREAKVQWKVDNALQSGNSQESVTEQDSKDSTYSLSSTLTLSKADYEKHKVYACEVTHQGLSSPVTKSFNRGEC

SEQ ID NO: 19630 - protein, 483 aa, Artificial Sequence
  source: /note="Description of Artificial Sequence: Synthetic polypeptide"
EVQLVESGGGLVQPGGSLKLSCAASGFTFNKYAMNWVRQAPGKGLEWVARIRSKYNNYATYYADSVKDRFTISRDDSKNTAYLQMNNLKTEDTAVYYCVRHGNFGNSYISYWAYWGQGTLVTVSSGGGGSGGGGSGGGGSQTVVTQEPSLTVSPGGTVTLTCGSSTGAVTSGNYPNWVQQKPGQAPRGLIGGTKFLAPGTPARFSGSLLGGKAALTLSGVQPEDEAEYYCVLWYSNRWVFGGGTKLTVLAAEPKSSDKTHTCPPCPAPEAAGGPSVFLFPPKPKDTLMISRTPEVTCVVVSVSHEDPEVKFNWYVDGVEVHNAKTKPREEQYNSTYRVVSVLTVLHQDWLNGKEYKCKVSNKALPAPIEKTISKAKGQPREPQVYVYPPSRDELTKNQVSLTCLVKGFYPSDIAVEWESNGQPENNYKTTPPVLDSDGSFALVSKLTVDKSRWQQGNVFSCSVMHEALHNHYTQKSLSLSPGK

SEQ ID NO: 19631 - protein, 452 aa, Artificial Sequence; identical to SEQ ID NO: 19623
  source: /note="Description of Artificial Sequence: Synthetic polypeptide"

SEQ ID NO: 19632 - protein, 214 aa, Artificial Sequence
  source: /note="Description of Artificial Sequence: Synthetic polypeptide"
EIVLTQSPATLSLSPGERATLSCRASQSVSSYLAWYQQKPGQAPRLLIYDASNRATGIPARFSGSGSGTDFTLTISSLEPEDFAVYYCQQRSNWPITFGQGTRLEIKRTVAAPSVFIFPPSDEQLKSGTASVVCLLNNFYPREAKVQWKVDNALQSGNSQESVTEQDSKDSTYSLSSTLTLSKADYEKHKVYACEVTHQGLSSPVTKSFNRGEC

SEQ ID NO: 19633 - protein, 483 aa, Artificial Sequence; identical to SEQ ID NO: 19630
  source: /note="Description of Artificial Sequence: Synthetic polypeptide"

SEQ ID NO: 19634 - protein, 451 aa, Artificial Sequence
  source: /note="Description of Artificial Sequence: Synthetic polypeptide"
EVQLVESGGGLVKPGGSLKLSCAASGYTFTSYVMHWVRQAPGKGLEWIGYINPYNDGTKYNEKFQGRVTISSDKSISTAYMELSSLRSEDTAMYYCARGTYYYGTRVFDYWGQGTLVTVSSASTKGPSVFPLAPSSKSTSGGTAALGCLVKDYFPEPVTVSWNSGALTSGVHTFPAVLQSSGLYSLSSVVTVPSSSLGTQTYICNVNHKPSNTKVDKKVEPKSCDKTHTCPPCPAPELLGGPSVFLFPPKPKDTLMISRTPEVTCVVVDVSHEDPEVKFNWYVDGVEVHNAKTKPREEQYNSTYRVVSVLTVLHQDWLNGKEYKCKVSNKALPAPIEKTISKAKGQPREPQVYVLPPSRDELTKNQVSLLCLVKGFYPSDIAVEWESNGQPENNYLTWPPVLDSDGSFFLYSKLTVDKSRWQQGNVFSCSVMHEALHNHYTQKSLSLSPGK

SEQ ID NO: 19635 - protein, 219 aa, Artificial Sequence
  source: /note="Description of Artificial Sequence: Synthetic polypeptide"
DIVMTQSPATLSLSPGERATLSCRSSKSLQNVNGNTYLYWFQQKPGQSPQLLIYRMSNLNSGVPDRFSGSGSGTEFTLTISSLEPEDFAVYYCMQHLEYPITFGAGTKLEIKRTVAAPSVFIFPPSDEQLKSGTASVVCLLNNFYPREAKVQWKVDNALQSGNSQESVTEQDSKDSTYSLSSTLTLSKADYEKHKVYACEVTHQGLSSPVTKSFNRGEC

SEQ ID NO: 19636 - protein, 449 aa, Artificial Sequence
  source: /note="Description of Artificial Sequence: Synthetic polypeptide"
QVQLVQSGGGVVQPGRSLRLSCKASGYTFTRYTMHWVRQAPGKGLEWIGYINPSRGYTNYNQKVKDRFTISRDNSKNTAFLQMDSLRPEDTGVYFCARYYDDHYCLDYWGQGTPVTVSSASTKGPSVFPLAPSSKSTSGGTAALGCLVKDYFPEPVTVSWNSGALTSGVHTFPAVLQSSGLYSLSSVVTVPSSSLGTQTYICNVNHKPSNTKVDKKVEPKSCDKTHTCPPCPAPELLGGPSVFLFPPKPKDTLMISRTPEVTCVVVDVSHEDPEVKFNWYVDGVEVHNAKTKPREEQYNSTYRVVSVLTVLHQDWLNGKEYKCKVSNKALPAPIEKTISKAKGQPREPQVYVYPPSRDELTKNQVSLTCLVKGFYPSDIAVEWESNGQPENNYKTTPPVLDSDGSFALVSKLTVDKSRWQQGNVFSCSVMHEALHNHYTQKSLSLSPGK

SEQ ID NO: 19637 - protein, 482 aa, Artificial Sequence
  source: /note="Description of Artificial Sequence: Synthetic polypeptide"
EVQLVESGGGLVKPGGSLKLSCAASGYTFTSYVMHWVRQAPGKGLEWIGYINPYNDGTKYNEKFQGRVTISSDKSISTAYMELSSLRSEDTAMYYCARGTYYYGTRVFDYWGQGTLVTVSSGGGGSGGGGSGGGGSDIVMTQSPATLSLSPGERATLSCRSSKSLQNVNGNTYLYWFQQKPGQSPQLLIYRMSNLNSGVPDRFSGSGSGTEFTLTISSLEPEDFAVYYCMQHLEYPITFGAGTKLEIKAAEPKSSDKTHTCPPCPAPEAAGGPSVFLFPPKPKDTLMISRTPEVTCVVVSVSHEDPEVKFNWYVDGVEVHNAKTKPREEQYNSTYRVVSVLTVLHQDWLNGKEYKCKVSNKALPAPIEKTISKAKGQPREPQVYVLPPSRDELTKNQVSLLCLVKGFYPSDIAVEWESNGQPENNYLTWPPVLDSDGSFFLYSKLTVDKSRWQQGNVFSCSVMHEALHNHYTQKSLSLSPGK

SEQ ID NO: 19638 - protein, 213 aa, Artificial Sequence; identical to SEQ ID NO: 11468
  source: /note="Description of Artificial Sequence: Synthetic polypeptide"

SEQ ID NO: 19639 - protein, 483 aa, Artificial Sequence; identical to SEQ ID NO: 19630
  source: /note="Description of Artificial Sequence: Synthetic polypeptide"

SEQ ID NO: 19640 - protein, 478 aa, Artificial Sequence
  source: /note="Description of Artificial Sequence: Synthetic polypeptide"
EVQLVESGGGLVQPGRSLRLSCAASGFTFNDYAMHWVRQAPGKGLEWVSTISWNSGSIGYADSVKGRFTISRDNAKKSLYLQMNSLRAEDTALYYCAKDIQYGNYYYGMDVWGQGTTVTVSSGGGGSGGGGSGGGGSEIVLTQSPATLSLSPGERATLSCRASQSVSSYLAWYQQKPGQAPRLLIYDASNRATGIPARFSGSGSGTDFTLTISSLEPEDFAVYYCQQRSNWPITFGQGTRLEIKAAEPKSSDKTHTCPPCPAPELLGGPSVFLFPPKPKDTLMISRTPEVTCVVVDVSHEDPEVKFNWYVDGVEVHNAKTKPREEQYNSTYRVVSVLTVLHQDWLNGKEYKCKVSNKALPAPIEKTISKAKGQPREPQVYVLPPSRDELTKNQVSLLCLVKGFYPSDIAVEWESNGQPENNYLTWPPVLDSDGSFFLYSKLTVDKSRWQQGNVFSCSVMHEALHNHYTQKSLSLSPGK

SEQ ID NO: 19641 - protein, 449 aa, Artificial Sequence; identical to SEQ ID NO: 19636
  source: /note="Description of Artificial Sequence: Synthetic polypeptide"

SEQ ID NO: 19642 - protein, 478 aa, Artificial Sequence; identical to SEQ ID NO: 19640
  source: /note="Description of Artificial Sequence: Synthetic polypeptide"

SEQ ID NO: 19643 - protein, 455 aa, Artificial Sequence
  source: /note="Description of Artificial Sequence: Synthetic polypeptide"
QVQLVESGGGVVQPGRSLRLSCAASGFTFSTYGMHWVRQAPGKGLEWVAVIWDDGSYKYYGDSVKGRFTISRDNSKNTLYLQMNSLRAEDTAVYYCARDGITMVRGVMKDYFDYWGQGTLVTVSSASTKGPSVFPLAPSSKSTSGGTAALGCLVKDYFPEPVTVSWNSGALTSGVHTFPAVLQSSGLYSLSSVVTVPSSSLGTQTYICNVNHKPSNTKVDKRVEPKSCDKTHTCPPCPAPELLGGPSVFLFPPKPKDTLMISRTPEVTCVVVDVSHEDPEVKFNWYVDGVEVHNAKTKPREEQYNSTYRVVSVLTVLHQDWLNGKEYKCKVSNKALPAPIEKTISKAKGQPREPQVYTLPPSRDELTKNQVSLTCLVKGFYPSDIAVEWESNGQPENNYKTTPPVLDSDGSFFLYSKLTVDKSRWQQGNVFSCSVMHEALHNHYTQKSLSLSPGK

SEQ ID NO: 19644 - protein, 452 aa, Artificial Sequence
  source: /note="Description of Artificial Sequence: Synthetic polypeptide"
QVQLVESGGGVVQPGRSLRLSCAASGFTFSTYGMHWVRQAPGKGLEWVAVIWDDGSYKYYGDSVKGRFTISRDNSKNTLYLQMNSLRAEDTAVYYCARDGITMVRGVMKDYFDYWGQGTLVTVSSASTKGPSVFPLAPCSRSTSESTAALGCLVKDYFPEPVTVSWNSGALTSGVHTFPAVLQSSGLYSLSSVVTVPSSSLGTKTYTCNVDHKPSNTKVDKRVESKYGPPCPSCPAPEFLGGPSVFLFPPKPKDTLMISRTPEVTCVVVDVSQEDPEVQFNWYVDGVEVHNAKTKPREEQFNSTYRVVSVLTVLHQDWLNGKEYKCKVSNKGLPSSIEKTISKAKGQPREPQVYTLPPSQEEMTKNQVSLTCLVKGFYPSDIAVEWESNGQPENNYKTTPPVLDSDGSFFLYSRLTVDKSRWQEGNVFSCSVMHEALHNHYTQKSLSLSLGK

SEQ ID NO: 19645 - protein, 97 aa, Artificial Sequence
  source: /note="Description of Artificial Sequence: Synthetic polypeptide"
NVNHKPSNTKVDKRVELKTPLGDTTHTCPRCPEPKSCDTPPPCPRCPEPKSCDTPPPCPRCPEPKSCDTPPPCPRCPAPELLGGPSVFLFPPKPKDT

SEQ ID NO: 19646 - protein, 440 aa, Artificial Sequence
  source: /note="Description of Artificial Sequence: Synthetic polypeptide"
QVQLVESGGGVVQPGRSLRLSCAASGFTFSTYGMHWVRQAPGKGLEWVAVIWDDGSYKYYGDSVKGRFTISRDNSKNTLYLQMNSLRAEDTAVYYCARDGITMVRGVMKDYFDYWGQGTLVTVSSASTKGPSVFPLAPCSKSTSGGTAALGCLVKDYFPEPVTVSWNSGALTSGVHTFPAVLQSSGLYSLSSVVTVPSSSLGTQTYICNVNHKPSNTKVDKRVAPELLGGPSVFLFPPKPKDTLMISRTPEVTCVVVDVSHEDPEVKFNWYVDGVEVHNAKTKPREEQYNSTYRVVSVLTVLHQDWLNGKEYKCKVSNKALPAPIEKTISKAKGQPREPQVYTLPPSREEMTKNQVSLTCLVKGFYPSDIAVEWESNGQPENNYKTTPPVLDSDGSFFLYSKLTVDKSRWQQGNVFSCSVMHEALHNHYTQKSLSLSPGK

SEQ ID NO: 19647 - protein, 766 aa, Homo sapiens [sequence omitted]

SEQ ID NO: 19648 - protein, 588 aa, Artificial Sequence
  source: /note="Description of Artificial Sequence: Synthetic polypeptide"
MGWSCIILFLVATATGVHSEVQLVESGGGLVQPGGSLRLSCAASGFTVSGSYMSWVRQAPGKGLEWVSVIYSGGSTYYADSVKGRFTISRDNSKNTLYLQMNSLRAEDTAVYYCARDLRGSYDYWGQGTLVIVSSGSASAPTLFPLVSCENSPSDTSSVAVGCLAQDFLPDSITFSWKYKNNSDISSTRGFPSVLRGGKYAATSQVLLPSKDVMQGTDEHVVCKVQHPNGNKEKNVPLPVIAELPPKVSVFVPPRDGFFGNPRKSKLICQATGFSPRQIQVSWLREGKQVGSGVTTDQVQAEAKESGPTTYKVTSTLTIKESDWLSQSMFTCRVDHRGLTFQQNASSMCVPDQDTAIRVFAIPPSFASIFLTKSTKLTCLVTDLTTYDSVTISWTRQNGEAVKTHTNISESHPNATFSAVGEASICEDDWNSGERFTCTVTHTDLPSPLKQTISRPKGVALHRPDVYLLPPAREQLNLRESATITCLVTGFSPADVFVQWMQRGQPLSPEKYVTSAPMPEPQAPGRYFAHSILTVSEEEWNTGETYTCVVAHEALPNRVTERTVDKSTGKPTLYNVSLVMSDTAGTCY

SEQ ID NO: 19649 - protein, 238 aa, Artificial Sequence
  source: /note="Description of Artificial Sequence: Synthetic polypeptide"
MGWSCIILFLVATATGVHSEIVLTQSPLSLPVTLGQPASISCRSSQSLVYSDGNTYLNWFQQRPGQSPRRLIYKVSNRDSGVPDRFSGSGSGTDFTLKISRVEAEDVGVYYCMQGTHWPRTFGQGTKVEIKRTVAAPSVFIFPPSDEQLKSGTASVVCLLNNFYPREAKVQWKVDNALQSGNSQESVTEQDSKDSTYSLSSTLTLSKADYEKHKVYACEVTHQGLSSPVTKSFNRGEC

SEQ ID NO: 19650 - protein, 218 aa, Homo sapiens
EVQLVESGGGLVQPGGSLRLSCAASGFNIKDTYIHWVRQAPGKGLEWVARIYPTNGYTRYADSVKGRFTISADTSKNTAYLQMNSLRAEDTAVYYCSRWGGDGFYAMDYWGQGTLVTVSSASTKGPSVFPLAPSSKSTSGGTAALGCLVKDYFPEPVTVSWNSGALTSGVHTFPAVLQSSGLYSLSSVVTVPSSSLGTQTYICNVNHKPSNTKVDKKV

SEQ ID NO: 19651 - protein, 449 aa, Homo sapiens
EVQLVESGGGVVQPGRSLRLSCSTSGFTFSDYYMYWVRQAPGKGLEWVAYMSNVGAITDYPDTVKGRFTISRDNSKNTLFLQMDSLRPEDTGVYFCARGTRDGSWFAYWGQGTPVTVSSASTKGPSVFPLAPSSKSTSGGTAALGCLVKDYFPEPVTVSWNSGALTSGVHTFPAVLQSSGLYSLSSVVTVPSSSLGTQTYICNVNHKPSNTKVDKKVEPKSCDKTHTCPPCPAPELLGGPSVFLFPPKPKDTLMISRTPEVTCVVVDVSHEDPEVKFNWYVDGVEVHNAKTKPREEQYNSTYRVVSVLTVLHQDWLNGKEYKCKVSNKALPAPIEKTISKAKGQPREPQVYTLPPSREEMTKNQVSLTCLVKGFYPSDIAVEWESNGQPENNYKTTPPVLDSDGSFFLYSKLTVDKSRWQQGNVFSCSVMHEALHNHYTQKSLSLSPGK

SEQ ID NO: 19652 - protein, 449 aa, Homo sapiens
EVQLVESGGGVVQPGRSLRLSCSTSGFTFSDYYMYWVRQAPGKGLEWVAYMSNVGAITDYPDTVKGRFTISRDNSKNTLFLQMDSLRPEDTGVYFCARGTRDGSWFAYWGQGTPVTVSSASTKGPSVFPLAPSSKSTSGGTAALGCLVKDYFPEPVTVSWNSGALTSGVHTFPAVLQSSGLYSLSSVVTVPSSSLGTQTYICNVNHKPSNTKVDKKVEPKSCDKTHTCPPCPAPELLGGPSVFLFPPKPKDTLMISRTPEVTCVVVDVSHEDPEVKFNWYVDGVEVHNAKTKPREEQYNSTYRVVSVLTVLHQDWLNGKEYKCKVSNKALPAPIEKTISKAKGQPREPQVYTLPPSRDELTKNQVSLTCLVKGFYPSDIAVEWESNGQPENNYKTTPPVLDSDGSFFLYSKLTVDKSRWQQGNVFSCSVMHEALHNHYTQKSLSLSPGK

SEQ ID NO: 19653 - protein, 765 aa, Homo sapiens
METDTLLLWVLLLWVPGSTGEVQLVESGGGLVQPGGSLRLSCAASGFNIKDTYIHWVRQAPGKGLEWVARIYPTNGYTRYADSVKGRFTISADTSKNTAYLQMNSLRAEDTAVYYCSRWGGDGFYAMDYWGQGTLVTVSSASTKGPSVFPLAPSSKSTSGGTAALGCLVKDYFPEPVTVSWNSGALTSGVHTFPAVLQSSGLYSLSSVVTVPSSSLGTQTYICNVNHKPSNTKVDKKVEPKSCDKTHTCPPCPAPELLGGPSVFLFPPKPKDTLMISRTPEVTCVVVDVSHEDPEVKFNWYVDGVEVHNAKTKPREEQYNSTYRVVSVLTVLHQDWLNGKEYKCKVSNKALPAPIEKTISKAKGQPREPQVYTLPPSREEMTKNQVSLTCLVKGFYPSDIAVEWESNGQPENNYKTTPPVLDSDGSFFLYSKLTVDKSRWQQGNVFSCSVMHEALHNHYTQKSLSLSPGKSLEGGGSIKQIEDKIEEILSKIYHIENEIARIKKLIGERGHDIERKCCVECPPCPRLEGPRFEEPKSCDKTHTCPPCPAPELLGGPSVFLFPPKPKDTLMISRTPEVTCVVVDVSHEDPEVKFNWYVDGVEVHNAKTKPREEQYNSTYRVVSVLTVLHQDWLNGKEYKCKVSNKALPAPIEKTISKAKGQPREPQVYTLPPSREEMTKNQVSLTCLVKGFYPSDIAVEWESNGQPENNYKTTPPVLDSDGSFFLYSKLTVDKSRWQQGNVFSCSVMHEALHNHYTQKSLSLSPGK

SEQ ID NO: 19654 - protein, 764 aa, Homo sapiens [sequence omitted]

SEQ ID NO: 19655 - protein, 766 aa, Homo sapiens
METDTLLLWVLLLWVPGSTGQVQLQQPGAELVKPGASVKMSCKASGYTFTSYNMHWVKQTPGRGLEWIGAIYPGNGDTSYNQKFKGKATLTADKSSSTAYMQLSSLTSEDSAVYYCARSTYYGGDWYFNVWGAGTTVTVSAASTKGPSVFPLAPSSKSTSGGTAALGCLVKDYFPEPVTVSWNSGALTSGVHTFPAVLQSSGLYSLSSVVTVPSSSLGTQTYICNVNHKPSNTKVDKKVEPKSCDKTHTCPPCPAPELLGGPSVFLFPPKPKDTLMISRTPEVTCVVVDVSHEDPEVKFNWYVDGVEVHNAKTKPREEQYNSTYRVVSVLTVLHQDWLNGKEYKCKVSNKALPAPIEKTISKAKGQPREPQVYTLPPSREEMTKNQVSLTCLVKGFYPSDIAVEWESNGQPENNYKTTPPVLDSDGSFFLYSKLTVDKSRWQQGNVFSCSVMHEALHNHYTQKSLSLSPGKSLEGGGSIKQIEDKIEEILSKIYHIENEIARIKKLIGERGHDIERKCCVECPPCPRLEGPRFEEPKSCDKTHTCPPCPAPELLGGPSVFLFPPKPKDTLMISRTPEVTCVVVDVSHEDPEVKFNWYVDGVEVHNAKTKPREEQYNSTYRVVSVLTVLHQDWLNGKEYKCKVSNKALPAPIEKTISKAKGQPREPQVYTLPPSREEMTKNQVSLTCLVKGFYPSDIAVEWESNGQPENNYKTTPPVLDSDGSFFLYSKLTVDKSRWQQGNVFSCSVMHEALHNHYTQKSLSLSPGK

SEQ ID NO: 19656 - protein, 766 aa, Homo sapiens [sequence omitted]

SEQ ID NO: 19657 - protein, 449 aa, Artificial Sequence; identical to SEQ ID NO: 17557
  source: /note="Description of Artificial Sequence: Synthetic polypeptide"

SEQ ID NO: 19658 - protein, 114 aa, Artificial Sequence
  source: /note="Description of Artificial Sequence: Synthetic polypeptide"
WSASTDIQMTQSPSSLSASVGDRVTITCRASQSIDSYLHWYQQKPGKAPKLLIYSASELQSGVPSRFSGSGSGTDFTLTISSLQPEDFATYYCQQVVWRPFTFGQGTKVEIKRC

SEQ ID NO: 19659 - protein, 483 aa, Mus musculus
MKVFRRKALVLCAGYALLLVLTMLNLLDYKWHKEPLQQCNPDGPLGAAVGAAGAGWGRPGSPPAAPPRAHSRMDPRTPYRPPAAGVGAVPAAAAGSAGAAASLGNATRGTRGGGDKRQLVYVFTTWRSGSSFFGELFNQNPEVFFLYEPVWHVWQKLYPGDAVSLQGAARDMLSALYRCDLSVFQLYSPAGSGGRNLTTLGIFGAATNKVVCSSPLCPAYRKEVVGLVDDRVCKKCPPQRLARFEEECRKYRTVVIKGVRVFDVAVLAPLLKDPALDLKVIHLVRDPRAVASSRIRSRHGLIRESLQVVRSRDPRAHRMPFLEAAGHKLGAKKEGMGGPADYHALGAMEVICNSMAKTLQTALQPPDWLQGHYLVVRYEDLVGDPVKTLRRVYDFVGLLVSPEMEQFALNMTSGSGSSSKPFVVSARNATQAANAWRTALTFQQIKQVEEFCYQPMAVLGYERVNSPEEVKDLSKTLLRKPRL

SEQ ID NO: 19660 - protein, 484 aa, Homo sapiens
MKVFRRKALVLCAGYALLLVLTMLNLLDYKWHKEPLQQCNPDGPLGAAAGAAGGKLGAPRAASGRAAPCSCPFGPPHSLPPSRCRRRGDTLQPRQGWRGLRPLQAMALGAPEGVGDKRHWMYVFTTWRSGSSFFGELFNQNPEVFFLYEPVWHVWQKLYPGDAVSLQGAARDMLSALYRCDLSVFQLYSPAGSGGRNLTTLGIFGAATNKVVCSSPLCPAYRKEVVGLVDDRVCKKCPPQRLARFEEECRKYRTLVIKGVRVFDVAVLAPLLRDPALDLKVIHLVRDPRAVASSRIRSRHGLIRESLQVVRSRDPRAHRMPFLEAAGHKLGAKKEGVGGPADYHALGAMEVICNSMAKTLQTALQPPDWLQGHYLVVRYEDLVGDPVKTLRRVYDFVGLLVSPEMEQFALNMTSGSGSSSKPFVVSARNATQAANAWRTALTFQQIKQVEEFCYQPMAVLGYERVNSPEEVKDLSKTLLRKPRL

SEQ ID NO: 19661 - protein, 219 aa, Homo sapiens
QVQLQQPGAELVKPGASVKMSCKASGYTFTSYNMHWVKQTPGRGLEWIGAIYPGNGDTSYNQKFKGKATLTADKSSSTAYMQLSSLTSEDSAVYYCARSTYYGGDWYFNVWGAGTTVTVSAASTKGPSVFPLAPSSKSTSGGTAALGCLVKDYFPEPVTVSWNSGALTSGVHTFPAVLQSSGLYSLSSVVTVPSSSLGTQTYICNVNHKPSNTKVDKKV

SEQ ID NO: 19662 - protein, 524 aa, Homo sapiens
METDTLLLWVLLLWVPGSTGQVQLKQSGPGLVQPSQSLSITCTVSGFSLTNYGVHWVRQSPGKGLEWLGVIWSGGNTDYNTPFTSRLSINKDNSKSQVFFKMNSLQSNDTAIYYCARALTYYDYEFAYWGQGTLVTVSAASTKGPSVFPLAPSSKSTSGGTAALGCLVKDYFPEPVTVSWNSGALTSGVHTFPAVLQSSGLYSLSSVVTVPSSSLGTQTYICNVNHKPSNTKVDKRVEPKSCDKTHTCPPCPAPELLGGPSVFLFPPKPKDTLMISRTPEVTCVVVDVSHEDPEVKFNWYVDGVEVHNAKTKPREEQYNSTYRVVSVLTVLHQDWLNGKEYKCKVSNKALPAPIEKTISKAKGQPREPQVYTLPPSREEMTKNQVSLTCLVKGFYPSDIAVEWESNGQPENNYKTTPPVLDSDGSFFLYSKLTVDKSRWQQGNVFSCSVMHEALHNHYTQKSLSLSPGKSLEGGGSIKQIEDKIEEILSKIYHIENEIARIKKLIGERGHDIERKCCVECPPCP

SEQ ID NO: 19663 - protein, 526 aa, Homo sapiens
METDTLLLWVLLLWVPGSTGQVQLQQPGAELVKPGASVKMSCKASGYTFTSYNMHWVKQTPGRGLEWIGAIYPGNGDTSYNQKFKGKATLTADKSSSTAYMQLSSLTSEDSAVYYCARSTYYGGDWYFNVWGAGTTVTVSAASTKGPSVFPLAPSSKSTSGGTAALGCLVKDYFPEPVTVSWNSGALTSGVHTFPAVLQSSGLYSLSSVVTVPSSSLGTQTYICNVNHKPSNTKVDKKVEPKSCDKTHTCPPCPAPELLGGPSVFLFPPKPKDTLMISRTPEVTCVVVDVSHEDPEVKFNWYVDGVEVHNAKTKPREEQYNSTYRVVSVLTVLHQDWLNGKEYKCKVSNKALPAPIEKTISKAKGQPREPQVYTLPPSREEMTKNQVSLTCLVKGFYPSDIAVEWESNGQPENNYKTTPPVLDSDGSFFLYSKLTVDKSRWQQGNVFSCSVMHEALHNHYTQKSLSLSPGKSLEGGGSIKQIEDKIEEILSKIYHIENEIARIKKLIGERGHDIERKCCVECPPCP

SEQ ID NO: 19664 - protein, 526 aa, Homo sapiens
METDTLLLWVLLLWVPGSTGEVQLVESGGGLVQPGRSLRLSCAASGFTFDDYAMHWVRQAPGKGLEWVSAITWNSGHIDYADSVEGRFTISRDNAKNSLYLQMNSLRAEDTAVYYCAKVSYLSTASSLDYWGQGTLVTVSSASTKGPSVFPLAPSSKSTSGGTAALGCLVKDYFPEPVTVSWNSGALTSGVHTFPAVLQSSGLYSLSSVVTVPSSSLGTQTYICNVNHKPSNTKVDKKVEPKSCDKTHTCPPCPAPELLGGPSVFLFPPKPKDTLMISRTPEVTCVVVDVSHEDPEVKFNWYVDGVEVHNAKTKPREEQYNSTYRVVSVLTVLHQDWLNGKEYKCKVSNKALPAPIEKTISKAKGQPREPQVYTLPPSREEMTKNQVSLTCLVKGFYPSDIAVEWESNGQPENNYKTTPPVLDSDGSFFLYSKLTVDKSRWQQGNVFSCSVMHEALHNHYTQKSLSLSPGKSLEGGGSIKQIEDKIEEILSKIYHIENEIARIKKLIGERGHDIERKCCVECPPCP

SEQ ID NO: 19665 - protein, 525 aa, Homo sapiens
METDTLLLWVLLLWVPGSTGEVQLVESGGGLVQPGGSLRLSCAASGFNIKDTYIHWVRQAPGKGLEWVARIYPTNGYTRYADSVKGRFTISADTSKNTAYLQMNSLRAEDTAVYYCSRWGGDGFYAMDYWGQGTLVTVSSASTKGPSVFPLAPSSKSTSGGTAALGCLVKDYFPEPVTVSWNSGALTSGVHTFPAVLQSSGLYSLSSVVTVPSSSLGTQTYICNVNHKPSNTKVDKKVEPKSCDKTHTCPPCPAPELLGGPSVFLFPPKPKDTLMISRTPEVTCVVVDVSHEDPEVKFNWYVDGVEVHNAKTKPREEQYNSTYRVVSVLTVLHQDWLNGKEYKCKVSNKALPAPIEKTISKAKGQPREPQVYTLPPSREEMTKNQVSLTCLVKGFYPSDIAVEWESNGQPENNYKTTPPVLDSDGSFFLYSKLTVDKSRWQQGNVFSCSVMHEALHNHYTQKSLSLSPGKSLEGGGSIKQIEDKIEEILSKIYHIENEIARIKKLIGERGHDIERKCCVECPPCP

SEQ ID NO: 19666 - protein, 448 aa, Artificial Sequence
  source: /note="Description of Artificial Sequence: Synthetic polypeptide"
EVQLVESGGGLVQPGGSLRLSCAASGFTFSNYWISWVRQAPGKGLEWVAEIRSESDASATHYAEAVKGRFTISRDNAKNSLYLQMNSLRAEDTAVYYCLAYFDYGLAIQNYWGQGTLVTVSSASTKGPSVFPLAPCSRSTSESTAALGCLVKDYFPEPVTVSWNSGALTSGVHTFPAVLQSSGLYSLSSVVTVPSSNFGTQTYTCNVDHKPSNTKVDKTVERKCCVECPPCPAPPVAGPSVFLFPPKPKDTLMISRTPEVTCVVVDVSHEDPEVQFNWYVDGVEVHNAKTKPREEQFNSTFRVVSVLTVVHQDWLNGKEYKCKVSNKGLPSSIEKTISKTKGQPREPQVYTLPPSREEMTKNQVSLTCLVKGFYPSDIAVEWESNGQPENNYKTTPPMLDSDGSFFLYSKLTVDKSRWQQGNVFSCSVMHEALHNHYTQKSLSLSPGK

SEQ ID NO: 19667 - protein, 474 aa, Artificial Sequence
  source: /note="Description of Artificial Sequence: Synthetic polypeptide"
MDMRVPAQLLGLLLLWLRGARCQVQLVQSGAEVKKPGASVKVSCKASGYTFTDYYMYWVRQAPGQGLEWMGWISPNSGGTNYAQKFQGRVTMTRDTSISTAYMELSRLRSDDTAVYYCVRGGYSGYAGLYSHYYGMDVWGQGTTVTVSSASIKGPSVFPLAPCSRSTSESTAALGCLVKDYFPEPVTVSWNSGALTSGVHTFPAVLQSSGLYSLSSVVTVPSSNFGTQTYTCNVDHKPSNTKVDKTVERKCCVECPPCPAPPVAGPSVFLFPPKPKDTLMISRTPEVTCVVVDVSHEDPEVQFNWYVDGVEVHNAKTKPREEQFNSIFRWSVLTVVHQDWLNGKEYKCKVSNKGLPAPIEKTISKTKGQPREPQVYTLPPSREEMTKNQVSLTCLVKGFYPSDIAVEWESNGQPENNYKTTPPMLDSDGSFFLYSKLTVDKSRWQQGNVFSCSVMHEALHNHYTQKSLSLSPGK

SEQ ID NO: 19668 - protein, 479 aa, Artificial Sequence
  source: /note="Description of Artificial Sequence: Synthetic polypeptide"
MDMRVPAQLLGLLLLWLRGARCEVQLVESGGGLVKPGGSLRLSCAASGFTFGNAWMSWVRQAPGKGLEWVGRIKSKTDGGTTDYAAPVKGRFTISRDDSKNTLYLQMNSLKTEDTAVYYCTTDRTGYSISWSSYYYYYGMDVWGQGTTVTVSSASTKGPSVFPLAPCSRSTSESTAALGCLVKDYFPEPVTVSWNSGALTSGVHTFPAVLQSSGLYSLSSVVTVPSSNFGTQTYTCNVDHKPSNTKVDKTVERKCCVECPPCPAPPVAGPSVFLFPPKPKDTLMISRTPEVTCVVVDVSHEDPEVQFNWYVDGVEVHNAKTKPREEQFNSTFRVVSVLTVVHQDWLNGKEYKCKVSNKGLPAPIEKTISKTKGQPREPQVYTLPPSREEMTKNQVSLTCLVKGFYPSDIAVEWESNGQPENNYKTTPPMLDSDGSFFLYSKLTVDKSRWQQGNVFSCSVMHEALHNHYTQKSLSLSPGK

SEQ ID NO: 19669 - protein, 477 aa, Artificial Sequence
  source: /note="Description of Artificial Sequence: Synthetic polypeptide"
MDMRVPAQLLGLLLLWLRGARCQVQLVESGGGWQPGRSLRLSCAASGFTFSSFGMHWVRQAPGKGLEWVAVISFDGSIKYSVDSVKGRFTISRDNSKNTLFLQMNSLRAEDTAVYYCARDRLNYYDSSGYYHYKYYGLAVWGQGTTVTVSSASTKGPSVFPLAPCSRSTSESTAALGCLVKDYFPEPVTVSWNSGALTSGVHTFPAVLQSSGLYSLSSVVTVPSSNFGTQTYTCNVDHKPSNTKVDKTVERKCCVECPPCPAPPVAGPSVFLFPPKPKDTLMISRTPEVTCVVVDVSHEDPEVQFNWYVDGVEVHNAKTKPREEQFNSTFRVVSVLTVVHQDWLNGKEYKCKVSNKGLPAPIEKTISKTKGQPREPQVYTLPPSREEMTKNQVSLTCLVKGFYPSDIAVEWESNGQPENNYKTTPPMLDSDGSFFLYSKLTVDKSRWQQGNVFSCSVMHEALHNHYTQKSLSLSPGK

SEQ ID NO: 19670 - protein, 478 aa, Artificial Sequence
  source: /note="Description of Artificial Sequence: Synthetic polypeptide"
MDMRVPAQLLGLLLLWLRGARCEVQLVESGGGLVKPGGSLRLSCAASGYTFSTYSMNWVRQAPGKGLEWVSSISSSSSYRYYADSVKGRFTISRDNAKNSLYLQMSSLRAEDTAVYYCAREGVSGSSPYSISWYDYYYGMDVWGQGTTVTVSSASTKGPSVFPLAPCSRSTSESTAALGCLVKDYFPEPVTVSWNSGALTSGVHTFPAVLQSSGLYSLSSVVTVPSSNFGTQTYTCNVDHKPSNTKVDKTVERKCCVECPPCPAPPVAGPSVFLFPPKPKDTLMISRTPEVTCVVVDVSHEDPEVQFNWYVDGVEVHNAKTKPREEQFNSTFRWSVLTVVHQDWLNGKEYKCKVSNKGLPAPIEKTISKTKGQPREPQVYTLPPSREEMTKNQVSLTCLVKGFYPSDIAVEWESNGQPENNYKTTPPMLDSDGSFFLYSKLTVDKSRWQQGNVFSCSVMHEALHNHYTQKSLSLSPGK

SEQ ID NO: 19671 - protein, 474 aa, Artificial Sequence
  source: /note="Description of Artificial Sequence: Synthetic polypeptide"
MDMRVPAQLLGLLLLWLRGARCQVQLVESGGGVVQPGRSLRLSCAASGFTFSSYGMHWVRQAPGKGLEWVAVIWYDGSNKYYADSVKGRFIISRDKSKNTLYLQMNSLRAEDTAVYYCARAGGIAAAGLYYYYGMDVWGQGTTVTVSSASTKGPSVFPLAPCSRSTSESTAALGCLVKDYFPEPVTVSWNSGALTSGVHTFPAVLQSSGLYSLSSVVTVPSSNFGTQTYTCNVDHKPSNTKVDKTVERKCCVECPPCPAPPVAGPSVFLFPPKPKDTLMISRTPEVTCVWDVSHEDPEVQFNWYVDGVEVHNAKTKPREEQFNSTFRVVSVLTVVHQDWLNGKEYKCKVSNKGLPAPIEKTISKIKGQPREPQVYTLPPSREEMTKNQVSLTCLVKGFYPSDIAVEWESNGQPENNYKTTPPMLDSDGSFFLYSKLTVDKSRWQQGNVFSCSVMHEALHNHYTIQKSLSLSPGK

SEQ ID NO: 19672 - protein, 109 aa, Artificial Sequence
  source: /note="Description of Artificial Sequence: Synthetic polypeptide"
QSLEESGGRLVTPGTPLTLTCTVSGLDLSSYYMQWVRQAPGKGLEWIGVIGINDNTYYASWAKGRFTISRASSTTVDLKMTSLTTEDTATYFCARGDIWGPGTLVTVSS

SEQ ID NO: 19673 - protein, 439 aa, Artificial Sequence
  source: /note="Description of Artificial Sequence: Synthetic polypeptide"
QSLEESGGRLVTPGTPLTLTCTVSGLDLSSYYMQWVRQAPGKGLEWIGVIGINDNTYYASWAKGRFTISRASSTTVDLKMTSLTTEDTATYFCARGDIWGPGTLVTVSSASTKGPSVFPLAPSSKSTSGGTAALGCLVKDYFPEPVTVSWNSGALTSGVHTFPAVLQSSGLYSLSSVVTVPSSSLGTQTYICNVNHKPSNTKVDKRVEPKSCDKTHTCPPCPAPELLGGPSVFLFPPKPKDTLMISRTPEVTCVVVDVSHEDPEVKFNWYVDGVEVHNAKTKPREEQYASTYRVVSVLTVLHQDWLNGKEYKCKVSNKALPAPIEKTISKAKGQPREPQVYTLPPSREEMTKNQVSLTCLVKGFYPSDIAVEWESNGQPENNYKTTPPVLDSDGSFFLYSKLTVDKSRWQQGNVFSCSVMHEALHNHYTQKSLSLSPGK

SEQ ID NO: 19674 - protein, 441 aa, Artificial Sequence
  source: /note="Description of Artificial Sequence: Synthetic polypeptide"
EVQLVESGGGLVQPGGSLRLSCAVSGIGLSSYYMQWVRQAPGKGLEWVGVIGSDGKTYYATWAKGRFTISRDNSKTTVYLQMNSLRAEDTAVYFCTRGDIWGQGTLVTVSSASTKGPSVFPLAPSSKSTSGGTAALGCLVKDYFPEPVTVSWNSGALTSGVHTFPAVLQSSGLYSLSSVVTVPSSSLGTQTYICNVNHKPSNTKVDKRVEPKSCDKTHTCPPCPAPELLGGPSVFLFPPKPKDTLMISRTPEVTCVVVDVSHEDPEVKFNWYVDGVEVHNAKTKPREEQYASTYRVVSVLTVLHQDWLNGKEYKCKVSNKALPAPIEKTISKAKGQPREPQVYTLPPSREEMTKNQVSLTCLVKGFYPSDIAVEWESNGQPENNYKTTPPVLDSDGSFFLYSKLTVDKSRWQQGNVFSCSVMHEALHNHYTQKSLSLSPGK

SEQ ID NO: 19675 - protein, 439 aa, Artificial Sequence
  source: /note="Description of Artificial Sequence: Synthetic polypeptide"
QSLEESGGRLVTPGGSLTLTCTVSGIDVTNYYMQWVRQAPGKGLEWIGVIGVNGKRYYASWAKGRFTISKTSSTTVDLKMTSLTTEDTATYFCARGDIWGPGTLVTVSSASTKGPSVFPLAPSSKSTSGGTAALGCLVKDYFPEPVTVSWNSGALTSGVHTFPAVLQSSGLYSLSSVVTVPSSSLGTQTYICNVNHKPSNTKVDKRVEPKSCDKTHTCPPCPAPELLGGPSVFLFPPKPKDTLMISRTPEVTCVVVDVSHEDPEVKFNWYVDGVEVHNAKTKPREEQYASTYRVVSVLTVLHQDWLNGKEYKCKVSNKALPAPIEKTISKAKGQPREPQVYTLPPSREEMTKNQVSLTCLVKGFYPSDIAVEWESNGQPENNYKTTPPVLDSDGSFFLYSKLTVDKSRWQQGNVFSCSVMHEALHNHYTQKSLSLSPGK

SEQ ID NO: 19676 - protein, 441 aa, Artificial Sequence
  source: /note="Description of Artificial Sequence: Synthetic polypeptide"
EVQLVESGGGLVQPGGSLRLSCAVSGIDVTNYYMQWVRQAPGKGLEWVGVIGVNGKRYYASWAKGRFTISRDNSKTTVYLQMNSLRAEDTAVYFCARGDIWGQGTLVTVSSASTKGPSVFPLAPSSKSTSGGTAALGCLVKDYFPEPVTVSWNSGALTSGVHTFPAVLQSSGLYSLSSVVTVPSSSLGTQTYICNVNHKPSNTKVDKRVEPKSCDKTHTCPPCPAPELLGGPSVFLFPPKPKDTLMISRTPEVTCVVVDVSHEDPEVKFNWYVDGVEVHNAKTKPREEQYASTYRVVSVLTVLHQDWLNGKEYKCKVSNKALPAPIEKTISKAKGQPREPQVYTLPPSREEMTKNQVSLTCLVKGFYPSDIAVEWESNGQPENNYKTTPPVLDSDGSFFLYSKLTVDKSRWQQGNVFSCSVMHEALHNHYTQKSLSLSPGK

SEQ ID NO: 19677 - protein, 441 aa, Artificial Sequence
  source: /note="Description of Artificial Sequence: Synthetic polypeptide"
QSVEESGGGLVQPEGSLTLTCTASGFDFSSNAMWWVRQAPGKGLEWIGCIYNGDGSTYYASWVNGRFSISKTSSTTVTLQLNSLTVADTATYYCARDLDLWGPGTLVTVSSASTKGPSVFPLAPSSKSTSGGTAALGCLVKDYFPEPVTVSWNSGALTSGVHTFPAVLQSSGLYSLSSVVTVPSSSLGTQTYICNVNHKPSNTKVDKRVEPKSCDKTHTCPPCPAPELLGGPSVFLFPPKPKDTLMISRTPEVTCVVVDVSHEDPEVKFNWYVDGVEVHNAKTKPREEQYASTYRVVSVLTVLHQDWLNGKEYKCKVSNKALPAPIEKTISKAKGQPREPQVYTLPPSREEMTKNQVSLTCLVKGFYPSDIAVEWESNGQPENNYKTTPPVLDSDGSFFLYSKLTVDKSRWQQGNVFSCSVMHEALHNHYTQKSLSLSPGK

SEQ ID NO: 19678 - protein, 478 aa, Artificial Sequence
  source: /note="Description of Artificial Sequence: Synthetic polypeptide"
MDMRVPAQLLGLLLLWLRGARCEVQLLESGGGLVQPGESLRLSCAASGFTFSSYAMSWVRQAPGKGLEWVSAISGSGGRTYYADSVKGRFTISRDNSKNTLYLQMNSLRAEDTAVYYCAKDQREVGPYSSGWYDYYYGMDVWGQGTTVTVSSASTKGPSVFPLAPCSRSTSESTAALGCLVKDYFPEPVTVSWNSGALTSGVHTFPAVLQSSGLYSLSSVVTVPSSNFGTQTYTCNVDHKPSNTKVDKTVERKCCVECPPCPAPPVAGPSVFLFPPKPKDTLMISRTPEVTCVVVDVSHEDPEVQFNWYVDGVEVHNAKTKPREEQFNSTFRVVSVLTVVHQDWLNGKEYKCKVSNKGLPAPIEKTISKTKGQPREPQVYTLPPSREEMTKNQVSLTCLVKGFYPSDIAVEWESNGQPENNYKTTPPMLDSDGSFFLYSKLTVDKSRWQQGNVFSCSVMHEALHNHYTQKSLSLSPGK

SEQ ID NO: 19679 - protein, 441 aa, Artificial Sequence
  source: /note="Description of Artificial Sequence: Synthetic polypeptide"
EVQLVESGGGLVQPGGSLRLSCAVSGIGLSSYYMQWVRQAPGKGLEWVGVIGSDGKTYYATWAKGRFTISRDNSKTTVYLQMNSLRAEDTAVYFCTRGDIWGQGTLVTVSSASTKGPSVFPLAPSSKSTSGGTAALGCLVKDYFPEPVTVSWNSGALTSGVHTFPAVLQSSGLYSLSSVVTVPSSSLGTQTYICNVNHKPSNTKVDARVEPKSCDKTHTCPPCPAPELLGGPSVFLFPPKPKDTLMISRTPEVTCVVVDVSHEDPEVKFNWYVDGVEVHNAKTKPREEQYASTYRVVSVLTVLHQDWLNGKEYKCKVSNKALPAPIEKTISKAKGQPREPQVYTLPPSREEMTKNQVSLTCLVKGFYPSDIAVEWESNGQPENNYKTTPPVLDSDGSFFLYSKLTVDKSRWQQGNVFSCSVMHEALHNHYTQKSLSLSPGK

SEQ ID NO: 19680 - protein, 441 aa, Artificial Sequence
  source: /note="Description of Artificial Sequence: Synthetic polypeptide"
EVQLVESGGGLVQPGGSLRLSCAVSGLDLSSYYMQWVRQAPGKGLEWVGVIGINDNTYYASWAKGRFTISRDNSKTTVYLQMNSLRAEDTAVYFCARGDIWGQGTLVTVSSASTKGPSVFPLAPSSKSTSGGTAALGCLVKDYFPEPVTVSWNSGALTSGVHTFPAVLQSSGLYSLSSVVTVPSSSLGTQTYICNVNHKPSNTKVDKRVEPKSCDKTHTCPPCPAPELLGGPSVFLFPPKPKDTLMISRTPEVTCVVVDVSHEDPEVKFNWYVDGVEVHNAKTKPREEQYASTYRVVSVLTVLHQDWLNGKEYKCKVSNKALPAPIEKTISKAKGQPREPQVYTLPPSREEMTKNQVSLTCLVKGFYPSDIAVEWESNGQPENNYKTTPPVLDSDGSFFLYSKLTVDKSRWQQGNVFSCSVMHEALHNHYTQKSLSLSPGK

SEQ ID NO: 19681 - protein, 441 aa, Artificial Sequence
  source: /note="Description of Artificial Sequence: Synthetic polypeptide"
EVQLVESGGGLVQPGGSLRLSCAVSGLDLSSYYMQWVRQAPGKGLEWVGVIGINDNTYYASWAKGRFTISRDNSKTTVYLQMNSLRAEDTAVYFCARGDIWGQGTLVTVSSASTKGPSVFPLAPSSKSTSGGTAALGCLVKDYFPEPVTVSWNSGALTSGVHTFPAVLQSSGLYSLSSVVTVPSSSLGTQTYICNVNHKPSNTKVDARVEPKSCDKTHTCPPCPAPELLGGPSVFLFPPKPKDTLMISRTPEVTCVVVDVSHEDPEVKFNWYVDGVEVHNAKTKPREEQYASTYRVVSVLTVLHQDWLNGKEYKCKVSNKALPAPIEKTISKAKGQPREPQVYTLPPSREEMTKNQVSLTCLVKGFYPSDIAVEWESNGQPENNYKTTPPVLDSDGSFFLYSKLTVDKSRWQQGNVFSCSVMHEALHNHYTQKSLSLSPGK

SEQ ID NO: 19682 - protein, 439 aa, Artificial Sequence
  source: /note="Description of Artificial Sequence: Synthetic polypeptide"
QSLEESGGRLVTPGTPLTLTCSVSGIDLSGYYMNWVRQAPGKGLEWIGVIGINGATYYASWAKGRFTISKTSSTTVDLKMTSLTTEDTATYFCARGDIWGPGTLVTVSSASTKGPSVFPLAPSSKSTSGGTAALGCLVKDYFPEPVTVSWNSGALTSGVHTFPAVLQSSGLYSLSSVVTVPSSSLGTQTYICNVNHKPSNTKVDKRVEPKSCDKTHTCPPCPAPELLGGPSVFLFPPKPKDTLMISRTPEVTCVVVDVSHEDPEVKFNWYVDGVEVHNAKTKPREEQYASTYRVVSVLTVLHQDWLNGKEYKCKVSNKALPAPIEKTISKAKGQPREPQVYTLPPSREEMTKNQVSLTCLVKGFYPSDIAVEWESNGQPENNYKTTPPVLDSDGSFFLYSKLTVDKSRWQQGNVFSCSVMHEALHNHYTQKSLSLSPGK

SEQ ID NO: 19683 - protein, 441 aa, Artificial Sequence
  source: /note="Description of Artificial Sequence: Synthetic polypeptide"
EVQLVESGGGLVQPGGSLRLSCAVSGIDLSGYYMNWVRQAPGKGLEWVGVIGINGATYYASWAKGRFTISRDNSKTTVYLQMNSLRAEDTAVYFCARGDIWGQGTLVTVSSASTKGPSVFPLAPSSKSTSGGTAALGCLVKDYFPEPVTVSWNSGALTSGVHTFPAVLQSSGLYSLSSVVTVPSSSLGTQTYICNVNHKPSNTKVDKRVEPKSCDKTHTCPPCPAPELLGGPSVFLFPPKPKDTLMISRTPEVTCVVVDVSHEDPEVKFNWYVDGVEVHNAKTKPREEQYASTYRVVSVLTVLHQDWLNGKEYKCKVSNKALPAPIEKTISKAKGQPREPQVYTLPPSREEMTKNQVSLTCLVKGFYPSDIAVEWESNGQPENNYKTTPPVLDSDGSFFLYSKLTVDKSRWQQGNVFSCSVMHEALHNHYTQKSLSLSPGK

SEQ ID NO: 19684 - protein, 441 aa, Artificial Sequence
  source: /note="Description of Artificial Sequence: Synthetic polypeptide"
EVQLVESGGGLVQPGGSLRLSCAVSGIDLSGYYMNWVRQAPGKGLEWVGVIGINGATYYASWAKGRFTISRDNSKTTVYLQMNSLRAEDTAVYFCARGDIWGQGTLVTVSSASTKGPSVFPLAPSSKSTSGGTAALGCLVKDYFPEPVTVSWNSGALTSGVHTFPAVLQSSGLYSLSSVVTVPSSSLGTQTYICNVNHKPSNTKVDARVEPKSCDKTHTCPPCPAPELLGGPSVFLFPPKPKDTLMISRTPEVTCVVVDVSHEDPEVKFNWYVDGVEVHNAKTKPREEQYASTYRVVSVLTVLHQDWLNGKEYKCKVSNKALPAPIEKTISKAKGQPREPQVYTLPPSREEMTKNQVSLTCLVKGFYPSDIAVEWESNGQPENNYKTTPPVLDSDGSFFLYSKLTVDKSRWQQGNVFSCSVMHEALHNHYTQKSLSLSPGK

SEQ ID NO: 19685 - protein, 440 aa, Artificial Sequence
  source: /note="Description of Artificial Sequence: Synthetic polypeptide"
QEQLKESGGRLVTPGTSLTLTCTVSGIDLSNHYMQWVRQAPGKGLEWIGVVGINGRTYYASWAKGRFTISRTSSTTVDLKMTRLTTEDTATYFCARGDIWGPGTLVTVSSASTKGPSVFPLAPSSKSTSGGTAALGCLVKDYFPEPVTVSWNSGALTSGVHTFPAVLQSSGLYSLSSVVTVPSSSLGTQTYICNVNHKPSNTKVDKRVEPKSCDKTHTCPPCPAPELLGGPSVFLFPPKPKDTLMISRTPEVTCVVVDVSHEDPEVKFNWYVDGVEVHNAKTKPREEQYASTYRVVSVLTVLHQDWLNGKEYKCKVSNKALPAPIEKTISKAKGQPREPQVYTLPPSREEMTKNQVSLTCLVKGFYPSDIAVEWESNGQPENNYKTTPPVLDSDGSFFLYSKLTVDKSRWQQGNVFSCSVMHEALHNHYTQKSLSLSPGK

SEQ ID NO: 19686 - protein, 441 aa, Artificial Sequence
  source: /note="Description of Artificial Sequence: Synthetic polypeptide"
EVQLVESGGGLVQPGGSLRLSCAVSGIDLSNHYMQWVRQAPGKGLEWVGVVGINGRTYYASWAKGRFTISRDNSKTTVYLQMNSLRAEDTAVYFCARGDIWGQGTLVTVSSASTKGPSVFPLAPSSKSTSGGTAALGCLVKDYFPEPVTVSWNSGALTSGVHTFPAVLQSSGLYSLSSVVTVPSSSLGTQTYICNVNHKPSNTKVDKRVEPKSCDKTHTCPPCPAPELLGGPSVFLFPPKPKDTLMISRTPEVTCVVVDVSHEDPEVKFNWYVDGVEVHNAKTKPREEQYASTYRVVSVLTVLHQDWLNGKEYKCKVSNKALPAPIEKTISKAKGQPREPQVYTLPPSREEMTKNQVSLTCLVKGFYPSDIAVEWESNGQPENNYKTTPPVLDSDGSFFLYSKLTVDKSRWQQGNVFSCSVMHEALHNHYTQKSLSLSPGK

SEQ ID NO: 19687 - protein, 439 aa, Artificial Sequence
  source: /note="Description of Artificial Sequence: Synthetic polypeptide"
QSLEESGGRLVTPGTPLTLTCTVSGIGLSSYYMQWVRQSPGRGLEWIGVIGSDGKTYYATWAKGRFTISKTSSTTVDLRMASLTTEDTATYFCTRGDIWGPGTLVTVSSASTKGPSVFPLAPSSKSTSGGTAALGCLVKDYFPEPVTVSWNSGALTSGVHTFPAVLQSSGLYSLSSVVTVPSSSLGTQTYICNVNHKPSNTKVDKRVEPKSCDKTHTCPPCPAPELLGGPSVFLFPPKPKDTLMISRTPEVTCVVVDVSHEDPEVKFNWYVDGVEVHNAKTKPREEQYASTYRVVSVLTVLHQDWLNGKEYKCKVSNKALPAPIEKTISKAKGQPREPQVYTLPPSREEMTKNQVSLTCLVKGFYPSDIAVEWESNGQPENNYKTTPPVLDSDGSFFLYSKLTVDKSRWQQGNVFSCSVMHEALHNHYTQKSLSLSPGK

SEQ ID NO: 19688 - protein, 111 aa, Artificial Sequence
  source: /note="Description of Artificial Sequence: Synthetic polypeptide"
EVQLVESGGGLVQPGGSLRLSCAVSGLDLSSYYMQWVRQAPGKGLEWVGVIGINDNTYYASWAKGRFTISRDNSKTTVYLQMNSLRAEDTAVYFCARGDIWGQGTLVTVSS

SEQ ID NO: 19689 - protein, 478 aa, Artificial Sequence
  source: /note="Description of Artificial Sequence: Synthetic polypeptide"
MDMRVPAQLLGLLLLWLRGARCQVQLVESGGGVVQPGRSLRLSCAASGFTFSSFGMHWVRQAPGKGLEWVAVISFDGSIKYSVDSVKGRFTISRDNSKNTLFLQMNSLRAEDTAVYYCARDRLNYYDSSGYYHYKYYGMAVWGQGTTVTVSSASTKGPSVFPLAPCSRSTSESTAALGCLVKDYFPEPVTVSWNSGALTSGVHTFPAVLQSSGLYSLSSVVTVPSSNFGTQTYTCNVDHKPSNTKVDKTVERKCCVECPPCPAPPVAGPSVFLFPPKPKDTLMISRTPEVTCVVVDVSHEDPEVQFNWYVDGVEVHNAKTKPREEQFNSTFRVVSVLTVVHQDWLNGKEYKCKVSNKGLPAPIEKTISKTKGQPREPQVYTLPPSREEMTKNQVSLTCLVKGFYPSDIAVEWESNGQPENNYKTTPPMLDSDGSFFLYSKLTVDKSRWQQGNVFSCSVMHEALHNHYTQKSLSLSPGK

SEQ ID NO: 19690 - protein, 111 aa, Artificial Sequence; identical to SEQ ID NO: 19688
  source: /note="Description of Artificial Sequence: Synthetic polypeptide"

SEQ ID NO: 19691 - protein, 109 aa, Artificial Sequence
  source: /note="Description of Artificial Sequence: Synthetic polypeptide"
QSLEESGGRLVTPGTPLTLTCSVSGIDLSGYYMNWVRQAPGKGLEWIGVIGINGATYYASWAKGRFTISKTSSTTVDLKMTSLTTEDTATYFCARGDIWGPGTLVTVSS

SEQ ID NO: 19692 - protein, 111 aa, Artificial Sequence
  source: /note="Description of Artificial Sequence: Synthetic polypeptide"
EVQLVESGGGLVQPGGSLRLSCAVSGIDLSGYYMNWVRQAPGKGLEWVGVIGINGATYYASWAKGRFTISRDNSKTTVYLQMNSLRAEDTAVYFCARGDIWGQGTLVTVSS

SEQ ID NO: 19693 - protein, 111 aa, Artificial Sequence; identical to SEQ ID NO: 19692
  source: /note="Description of Artificial Sequence: Synthetic polypeptide"

SEQ ID NO: 19694 - protein, 110 aa, Artificial Sequence
  source: /note="Description of Artificial Sequence: Synthetic polypeptide"
QEQLKESGGRLVTPGTSLTLTCTVSGIDLSNHYMQWVRQAPGKGLEWIGVVGINGRTYYASWAKGRFTISRTSSTTVDLKMTRLTTEDTATYFCARGDIWGPGTLVTVSS

SEQ ID NO: 19695 - protein, 111 aa, Artificial Sequence
  source: /note="Description of Artificial Sequence: Synthetic polypeptide"
EVQLVESGGGLVQPGGSLRLSCAVSGIDLSNHYMQWVRQAPGKGLEWVGVVGINGRTYYASWAKGRFTISRDNSKTTVYLQMNSLRAEDTAVYFCARGDIWGQGTLVTVSS

SEQ ID NO: 19696 - protein, 109 aa, Artificial Sequence
  source: /note="Description of Artificial Sequence: Synthetic polypeptide"
QSLEESGGRLVTPGTPLTLTCTVSGIGLSSYYMQWVRQSPGRGLEWIGVIGSDGKTYYATWAKGRFTISKTSSTTVDLRMASLTTEDTATYFCTRGDIWGPGTLVTVSS

SEQ ID NO: 19697 - protein, 111 aa, Artificial Sequence
  source: /note="Description of Artificial Sequence: Synthetic polypeptide"
EVQLVESGGGLVQPGGSLRLSCAVSGIGLSSYYMQWVRQAPGKGLEWVGVIGSDGKTYYATWAKGRFTISRDNSKTTVYLQMNSLRAEDTAVYFCTRGDIWGQGTLVTVSS

SEQ ID NO: 19698 - protein, 109 aa, Artificial Sequence
  source: /note="Description of Artificial Sequence: Synthetic polypeptide"
QSLEESGGRLVTPGGSLTLTCTVSGIDVTNYYMQWVRQAPGKGLEWIGVIGVNGKRYYASWAKGRFTISKTSSTTVDLKMTSLTTEDTATYFCARGDIWGPGTLVTVSS

SEQ ID NO: 19699 - protein, 111 aa, Artificial Sequence
  source: /note="Description of Artificial Sequence: Synthetic polypeptide"
EVQLVESGGGLVQPGGSLRLSCAVSGIDVTNYYMQWVRQAPGKGLEWVGVIGVNGKRYYASWAKGRFTISRDNSKTTVYLQMNSLRAEDTAVYFCARGDIWGQGTLVTVSS

SEQ ID NO: 19700 - protein, 477 aa, Artificial Sequence
  source: /note="Description of Artificial Sequence: Synthetic polypeptide"
MDMRVPAQLLGLLLLWLRGARCEVQLVESGGGLVKPGGSLRLSCAASGFTFSNAWMSWVRQAPGKGLEWVGRIKSTTDGGTTDYAAPVKGRFTISRDDSKNTLYLQMNSLKTEDTAVYYCTTDRTGYSSWSSYYYYYGMDVWGQGTTVTVSSASTKGPSVFPLAPCSRSTSESTAALGCLVKDYFPEPVTVSWNSGALTSGVHTFPAVLQSSGLYSLSSVVTVPSSNFGTQTYTCNVDHKPSNTKVDKTVERKCCVECPPCPAPPVAGPSVFLFPPKPKDTLMISRTPEVTCVVVDVSHEDPEVQFNWYVDGVEVHNAKTKPREEQFNSIFRWSVLTVVHQDWLNGKEYKCKVSNKGLPAPIEKTISKTKGQPREPQVYTLPPSREEMTKNQVSLTCLVKGFYPSDIAVEWESNGQPENNYKTTPPMLDSDGSFFLYSKLTVDKSRWQQGNVFSCSVMHEALHNHYTQKSLSLSPGK

SEQ ID NO: 19701 - protein, 111 aa, Artificial Sequence
  source: /note="Description of Artificial Sequence: Synthetic polypeptide"
QSVEESGGGLVQPEGSLTLTCTASGFDFSSNAMWWVRQAPGKGLEWIGCIYNGDGSTYYASWVNGRFSISKTSSTTVTLQLNSLTVADTATYYCARDLDLWGPGTLVTVSS

SEQ ID NO: 19702 - protein, 111 aa, Artificial Sequence; identical to SEQ ID NO: 19697
  source: /note="Description of Artificial Sequence: Synthetic polypeptide"

SEQ ID NO: 19703 - protein, 478 aa, Artificial Sequence
  source: /note="Description of Artificial Sequence: Synthetic polypeptide"
MDMRVPAQLLGLLLLWLRGARCQVQLVQSGAEVKKPGASVKVSCKASGYTFTGYYMHWVRQAPGQGLEWMGWINPNSGGTNYAQKFQGRVTMTRDTSISTAYMELSRLRSDDTAVYFCARDQMSIIMLRGVFPPYYYGMDVWGQGTTVTVSSASTKGPSVFPLAPCSRSTSESTAALGCLVKDYFPEPVTVSWNSGALTSGVHTFPAVLQSSGLYSLSSVVTVPSSNFGTQTYTCNVDHKPSNTKVDKTVERKCCVECPPCPAPPVAGPSVFLFPPKPKDTLMISRTPEVTCVVVDVSHEDPEVQFNWYVDGVEVHNAKTKPREEQFNSTFRVVSVLTVVHQDWLNGKEYKCKVSNKGLPAPIEKTISKTKGQPREPQVYTLPPSREEMTKNQVSLTCLVKGFYPSDIAVEWESNGQPENNYKTTPPMLDSDGSFFLYSKLTVDKSRWQQGNVFSCSVMHEALHNHYTQKSLSLSPGK

SEQ ID NO: 19704 - protein, 476 aa, Artificial Sequence
  source: /note="Description of Artificial Sequence: Synthetic polypeptide"
MDMRVPAQLLGLLLLWLRGARCQVQLVESGGGWQPGRSLRLSCCAASGFTFSSYGMHWVRQAPGKGLEWVAVISYDGSHESYADSVKGRFTISRDISKNTLYLQMNSLRAEDTAVYFCARERKRVTMSTLYYYFYYGMDVWGQGTTVTVSSASTKGPSVFPLAPCSRSTSESTAALGCLVKDYFPEPVTVSWNSGALTSGVHTFPAVLQSSGLYSLSSVVTVPSSNFGTQTYTCNVDHKPSNTKVDKTVERKCCVECPPCPAPPVAGPSVFLFPPKPKDTLMISRTPEVTCVVVDVSHEDPEVQFNWYVDGVEVHNAKTKPREEQFNSIFRWSVLTVVHQDWLNGKEYKCKVSNKGLPAPTEKTISKTKGQPREPQVYTLPPSREEMTKNQVSLTCLVKGFYPSDIAVEWESNGQPENNYKTTPPMLDSDGSFFLYSKLTVDKSRWQQGNVFSCSVMHEALHNHYTQKSLSLSPGK

SEQ ID NO: 19705 - protein, 469 aa, Artificial Sequence
  source: /note="Description of Artificial Sequence: Synthetic polypeptide"
MDMRVPAQLLGLLLLWLRGARCEVQLVESGGGLVKPGRSLRLSCTASGFTFGDYAMSWFRQAPGKGLEWIGFIRSRAYGGIPEYAASVKGRFTISRDDSKTIAYLQMNSLKTEDTAVYFCARGRGIAARWDYWGQGTLVTVSSASTKGPSVFPLAPCSRSTSESTAALGCLVKDYFPEPVTVSWNSGALTSGVHTFPAVLQSSGLYSLSSVVTVPSSNFGTQTYTCNVDHKPSNTKVDKTVERKCCVECPPCPAPPVAGPSVFLFPPKPKDTLMISRTPEVTCVVVDVSHEDPEVQFNWYVDGVEVHNAKTKPREEQFNSIFRVVSVLTVVHQDWLNGKEYKCKVSNKGLPAPIEKTISKTKGQPREPQVYTLPPSREEMTKNQVSLTCLVKGFYPSDIAVEWESNGQPENNYKTTPPMLDSDGSFFLYSKLTVDKSRWQQGNVFSCSVMHEALHNHYTQKSLSLSPGK

SEQ ID NO: 19706 - protein, 478 aa, Artificial Sequence
  source: /note="Description of Artificial Sequence: Synthetic polypeptide"
MDMRVPAQLLGLLLLWLRGARCEVQLVESGGGLVKPGGSLRLSCAASGFTFSNAWMSWVRQAPGKGLEWVGRIKSKTDGGTTDYTAPVKGRFTISRDDSKNTLYLQMNSLKAEDTAVYYCTTDRTGYSSWSSYYYYYGMDVWGQGTTVTVSSASTKGPSVFPLAPCSRSTSESTAALGCLVKDYFPEPVTVSWNSGALTSGVHTFPAVLQSSGLYSLSSVVTVPSSNFGTQTYTCNVDHKPSNTKVDKTVERKCCVECPPCPAPPVAGPSVFLFPPKPKDTLMISRTPEVTCVVVDVSHEDPEVQFNWYVDGVEVHNAKTKPREEQFNSTFRVVSVLTVVHQDWLNGKEYKCKVSNKGLPAPIEKTISKTKGQPREPQVYTLPPSREEMTKNQVSLTCLVKGFYPSDIAVEWESNGQPENNYKTTPPMLDSDGSFFLYSKLTVDKSRWQQGNVFSCSVMHEALHNHYTQKSLSLSPGK

SEQ ID NO: 19707 - protein, 476 aa, Artificial Sequence
  source: /note="Description of Artificial Sequence: Synthetic polypeptide"
MDMRVPAQLLGLLLLWLRGARCEVQLVESGGGLVKPGGSLRLSCAASGFTFGNAWMSWVRQAPGKGLEWVGRIKSKTDGGTTDYAAPVKGRFTISRDDSKNTLYLQMNSLKIEDTAVYFCTTDRIGYSISWSSYYYYYGMDVWGQGTTVTVSSASTKGPSVFPLAPCSRSTSESTAALGCLVKDYFPEPVTVSWNSGALTSGVHTFPAVLQSSGLYSLSSVVTVPSSNFGTQTYTCNVDHKPSNTKVDKTVERKCCVECPPCPAPPVAGPSVFLFPPKPKDTLMISRTPEVTCVVVDVSHEDPEVQFNWYVDGVEVHNAKIKPREEQFNSIFRWSVLIWHQDWLNGKEYKCKVSNKGLPAPIEKYISKIKGQPREPQVYYLPPSREEMKNQVSLTCLVKGFYPSDIAVEWESNGQPENNYKTTPPMLDSDGSFFLYSKLTVDKSRWQQGNVFSCSVMHEALHNHYTQKSLSLSPGK

SEQ ID NO: 19708 - protein, 123 aa, Artificial Sequence; identical to SEQ ID NO: 4359
  source: /note="Description of Artificial Sequence: Synthetic polypeptide"

SEQ ID NO: 19709 - protein, 123 aa, Artificial Sequence; identical to SEQ ID NO: 4361
  source: /note="Description of Artificial Sequence: Synthetic polypeptide"

SEQ ID NO: 19710 - protein, 123 aa, Artificial Sequence; identical to SEQ ID NO: 4362
  source: /note="Description of Artificial Sequence: Synthetic polypeptide"

SEQ ID NO: 19711 - protein, 123 aa, Artificial Sequence; identical to SEQ ID NO: 4363
  source: /note="Description of Artificial Sequence: Synthetic polypeptide"

SEQ ID NO: 19712 - protein, 123 aa, Artificial Sequence; identical to SEQ ID NO: 4364
  source: /note="Description of Artificial Sequence: Synthetic polypeptide"

SEQ ID NO: 19713 - protein, 453 aa, Artificial Sequence; identical to SEQ ID NO: 7042
  source: /note="Description of Artificial Sequence: Synthetic polypeptide"

SEQ ID NO: 19714 - protein, 453 aa, Artificial Sequence; identical to SEQ ID NO: 7046
  source: /note="Description of Artificial Sequence: Synthetic polypeptide"

SEQ ID NO: 19715 - protein, 453 aa, Artificial Sequence; identical to SEQ ID NO: 7043
  source: /note="Description of Artificial Sequence: Synthetic polypeptide"

SEQ ID NO: 19716 - protein, 453 aa, Artificial Sequence; identical to SEQ ID NO: 7054
  source: /note="Description of Artificial Sequence: Synthetic polypeptide"

SEQ ID NO: 19717 - protein, 453 aa, Artificial Sequence; identical to SEQ ID NO: 7059
  source: /note="Description of Artificial Sequence: Synthetic polypeptide"

SEQ ID NO: 19718 - protein, 453 aa, Artificial Sequence; identical to SEQ ID NO: 7055
  source: /note="Description of Artificial Sequence: Synthetic polypeptide"

SEQ ID NO: 19719 - protein, 453 aa, Artificial Sequence; identical to SEQ ID NO: 7051
  source: /note="Description of Artificial Sequence: Synthetic polypeptide"

SEQ ID NO: 19720 - protein, 453 aa, Artificial Sequence; identical to SEQ ID NO: 7056
  source: /note="Description of Artificial Sequence: Synthetic polypeptide"

SEQ ID NO: 19721 - protein, 453 aa, Artificial Sequence; identical to SEQ ID NO: 7060
  source: /note="Description of Artificial Sequence: Synthetic polypeptide"

SEQ ID NO: 19722 - protein, 453 aa, Artificial Sequence; identical to SEQ ID NO: 7061
  source: /note="Description of Artificial Sequence: Synthetic polypeptide"

SEQ ID NO: 19723 - protein, 453 aa, Artificial Sequence; identical to SEQ ID NO: 7058
  source: /note="Description of Artificial Sequence: Synthetic polypeptide"

SEQ ID NO: 19724 - protein, 453 aa, Artificial Sequence; identical to SEQ ID NO: 7049
  source: /note="Description of Artificial Sequence: Synthetic polypeptide"

SEQ ID NO: 19725 - protein, 450 aa, Artificial Sequence; identical to SEQ ID NO: 7050
  source: /note="Description of Artificial Sequence: Synthetic polypeptide"

SEQ ID NO: 19726 - protein, 453 aa, Artificial Sequence; identical to SEQ ID NO: 7053
  source: /note="Description of Artificial Sequence: Synthetic polypeptide"

SEQ ID NO: 19727 - protein, 453 aa, Artificial Sequence; identical to SEQ ID NO: 7057
  source: /note="Description of Artificial Sequence: Synthetic polypeptide"

SEQ ID NO: 19728 - protein, 453 aa, Artificial Sequence; identical to SEQ ID NO: 7052
  source: /note="Description of Artificial Sequence: Synthetic polypeptide"

SEQ ID NO: 19729 - protein, 453 aa, Artificial Sequence; identical to SEQ ID NO: 7048
  source: /note="Description of Artificial Sequence: Synthetic polypeptide"

SEQ ID NO: 19730 - protein, 453 aa, Artificial Sequence; identical to SEQ ID NO: 7044
  source: /note="Description of Artificial Sequence: Synthetic polypeptide"

SEQ ID NO: 19731 - protein, 450 aa, Artificial Sequence; identical to SEQ ID NO: 7045
  source: /note="Description of Artificial Sequence: Synthetic polypeptide"

SEQ ID NO: 19732 - protein, 453 aa, Artificial Sequence; identical to SEQ ID NO: 7047
  source: /note="Description of Artificial Sequence: Synthetic polypeptide"

SEQ ID NO: 19733 - protein, 123 aa, Artificial Sequence; identical to SEQ ID NO: 4365
  source: /note="Description of Artificial Sequence: Synthetic polypeptide"

SEQ ID NO: 19734 - protein, 123 aa, Artificial Sequence; identical to SEQ ID NO: 4360
  source: /note="Description of Artificial Sequence: Synthetic polypeptide"

SEQ ID NO: 19735 - protein, 123 aa, Artificial Sequence; identical to SEQ ID NO: 8273
  source: /note="Description of Artificial Sequence: Synthetic polypeptide"

SEQ ID NO: 19736 - protein, 124 aa, Artificial Sequence; identical to SEQ ID NO: 8272
  source: /note="Description of Artificial Sequence: Synthetic polypeptide"

SEQ ID NO: 19737 - protein, 120 aa, Artificial Sequence; identical to SEQ ID NO: 8261
  source: /note="Description of Artificial Sequence: Synthetic polypeptide"

SEQ ID NO: 19738 - protein, 121 aa, Artificial Sequence; identical to SEQ ID NO: 8275
  source: /note="Description of Artificial Sequence: Synthetic polypeptide"

SEQ ID NO: 19739 - protein, 120 aa, Artificial Sequence; identical to SEQ ID NO: 8259
  source: /note="Description of Artificial Sequence: Synthetic polypeptide"

SEQ ID NO: 19740 - protein, 120 aa, Artificial Sequence; identical to SEQ ID NO: 8276
  source: /note="Description of Artificial Sequence: Synthetic polypeptide"

SEQ ID NO: 19741 - protein, 123 aa, Artificial Sequence; identical to SEQ ID NO: 8270
  source: /note="Description of Artificial Sequence: Synthetic polypeptide"

SEQ ID NO: 19742 - protein, 124 aa, Artificial Sequence; identical to SEQ ID NO: 8274
  source: /note="Description of Artificial Sequence: Synthetic polypeptide"

SEQ ID NO: 19743 - protein, 124 aa, Artificial Sequence; identical to SEQ ID NO: 8277
  source: /note="Description of Artificial Sequence: Synthetic polypeptide"

SEQ ID NO: 19744 - protein, 121 aa, Artificial Sequence; identical to SEQ ID NO: 8254
  source: /note="Description of Artificial Sequence: Synthetic polypeptide"

SEQ ID NO: 19745 - protein, 121 aa, Artificial Sequence; identical to SEQ ID NO: 8255
  source: /note="Description of Artificial Sequence: Synthetic polypeptide"

SEQ ID NO: 19746 - protein, 124 aa, Artificial Sequence; identical to SEQ ID NO: 8256
  source: /note="Description of Artificial Sequence: Synthetic polypeptide"

SEQ ID NO: 19747 - protein, 124 aa, Artificial Sequence; identical to SEQ ID NO: 8257
  source: /note="Description of Artificial Sequence: Synthetic polypeptide"

SEQ ID NO: 19748 - protein, 124 aa, Artificial Sequence; identical to SEQ ID NO: 8258
  source: /note="Description of Artificial Sequence: Synthetic polypeptide"

SEQ ID NO: 19749 - protein, 123 aa, Artificial Sequence; identical to SEQ ID NO: 8260
  source: /note="Description of Artificial Sequence: Synthetic polypeptide"

SEQ ID NO: 19750 - protein, 119 aa, Artificial Sequence; identical to SEQ ID NO: 8262
  source: /note="Description of Artificial Sequence: Synthetic polypeptide"

SEQ ID NO: 19751 - protein, 121 aa, Artificial Sequence; identical to SEQ ID NO: 8263
  source: /note="Description of Artificial Sequence: Synthetic polypeptide"

SEQ ID NO: 19752 - protein, 120 aa, Artificial Sequence; identical to SEQ ID NO: 8264
  source: /note="Description of Artificial Sequence: Synthetic polypeptide"

SEQ ID NO: 19753 - protein, 121 aa, Artificial Sequence; identical to SEQ ID NO: 8265
  source: /note="Description of Artificial Sequence: Synthetic polypeptide"

SEQ ID NO: 19754 - protein, 120 aa, Artificial Sequence; identical to SEQ ID NO: 8266
  source: /note="Description of Artificial Sequence: Synthetic polypeptide"

SEQ ID NO: 19755 - protein, 121 aa, Artificial Sequence; identical to SEQ ID NO: 8265
  source: /note="Description of Artificial Sequence: Synthetic polypeptide"

SEQ ID NO: 19756 - protein, 120 aa, Artificial Sequence; identical to SEQ ID NO: 8268
  source: /note="Description of Artificial Sequence: Synthetic polypeptide"

SEQ ID NO: 19757 - protein, 124 aa, Artificial Sequence; identical to SEQ ID NO: 8269
  source: /note="Description of Artificial Sequence: Synthetic polypeptide"

SEQ ID NO: 19758 - protein, 124 aa, Artificial Sequence; identical to SEQ ID NO: 8271
  source: /note="Description of Artificial Sequence: Synthetic polypeptide"

SEQ ID NO: 19759 - protein, 114 aa, Artificial Sequence; identical to SEQ ID NO: 8309
  source: /note="Description of Artificial Sequence: Synthetic polypeptide"

SEQ ID NO: 19760 - protein, 121 aa, Artificial Sequence; identical to SEQ ID NO: 8305
  source: /note="Description of Artificial Sequence: Synthetic polypeptide"

SEQ ID NO: 19761 - protein, 114 aa, Artificial Sequence; identical to SEQ ID NO: 8394
  source: /note="Description of Artificial Sequence: Synthetic polypeptide"

SEQ ID NO: 19762 - protein, 114 aa, Artificial Sequence; identical to SEQ ID NO: 8310
  source: /note="Description of Artificial Sequence: Synthetic polypeptide"

SEQ ID NO: 19763 - protein, 114 aa, Artificial Sequence; identical to SEQ ID NO: 8311
  source: /note="Description of Artificial Sequence: Synthetic polypeptide"

SEQ ID NO: 19764 - protein, 117 aa, Artificial Sequence; identical to SEQ ID NO: 8312
  source: /note="Description of Artificial Sequence: Synthetic polypeptide"

SEQ ID NO: 19765 - protein, 119 aa, Artificial Sequence; identical to SEQ ID NO: 8395
  source: /note="Description of Artificial Sequence: Synthetic polypeptide"

SEQ ID NO: 19766 - protein, 114 aa, Artificial Sequence; identical to SEQ ID NO: 8396
  source: /note="Description of Artificial Sequence: Synthetic polypeptide"

SEQ ID NO: 19767 - protein, 121 aa, Artificial Sequence; identical to SEQ ID NO: 8314
  source: /note="Description of Artificial Sequence: Synthetic polypeptide"

SEQ ID NO: 19768 - protein, 121 aa, Artificial Sequence; identical to SEQ ID NO: 8315
  source: /note="Description of Artificial Sequence: Synthetic polypeptide"

SEQ ID NO: 19769 - protein, 119 aa, Artificial Sequence; identical to SEQ ID NO: 8397
  source: /note="Description of Artificial Sequence: Synthetic polypeptide"

SEQ ID NO: 19770 - protein, 114 aa, Artificial Sequence; identical to SEQ ID NO: 8310
  source: /note="Description of Artificial Sequence: Synthetic polypeptide"

SEQ ID NO: 19771 - protein, 119 aa, Artificial Sequence; identical to SEQ ID NO: 8398
  source: /note="Description of Artificial Sequence: Synthetic polypeptide"

SEQ ID NO: 19772 - protein, 114 aa, Artificial Sequence; identical to SEQ ID NO: 8309
  source: /note="Description of Artificial Sequence: Synthetic polypeptide"

SEQ ID NO: 19773 - protein, 121 aa, Artificial Sequence; identical to SEQ ID NO: 8317
  source: /note="Description of Artificial Sequence: Synthetic polypeptide"

SEQ ID NO: 19774 - protein, 121 aa, Artificial Sequence; identical to SEQ ID NO: 8400
  source: /note="Description of Artificial Sequence: Synthetic polypeptide"

SEQ ID NO: 19775 - protein, 114 aa, Artificial Sequence; identical to SEQ ID NO: 8318
  source: /note="Description of Artificial Sequence: Synthetic polypeptide"

SEQ ID NO: 19776 - protein, 114 aa, Artificial Sequence; identical to SEQ ID NO: 8319
  source: /note="Description of Artificial Sequence: Synthetic polypeptide"

SEQ ID NO: 19777 - protein, 114 aa, Artificial Sequence; identical to SEQ ID NO: 8320
  source: /note="Description of Artificial Sequence: Synthetic polypeptide"

SEQ ID NO: 19778 - protein, 118 aa, Artificial Sequence; identical to SEQ ID NO: 8401
  source: /note="Description of Artificial Sequence: Synthetic polypeptide"

SEQ ID NO: 19779 - protein, 121 aa, Artificial Sequence; identical to SEQ ID NO: 8315
  source: /note="Description of Artificial Sequence: Synthetic polypeptide"

SEQ ID NO: 19780 - protein, 114 aa, Artificial Sequence; identical to SEQ ID NO: 8309
  source: /note="Description of Artificial Sequence: Synthetic polypeptide"

SEQ ID NO: 19781 - protein, 121 aa, Artificial Sequence; identical to SEQ ID NO: 8402
  source: /note="Description of Artificial Sequence: Synthetic polypeptide"

SEQ ID NO: 19782 - protein, 120 aa, Artificial Sequence; identical to SEQ ID NO: 8323
  source: /note="Description of Artificial Sequence: Synthetic polypeptide"

SEQ ID NO: 19783 - protein, 114 aa, Artificial Sequence; identical to SEQ ID NO: 8309
  source: /note="Description of Artificial Sequence: Synthetic polypeptide"

SEQ ID NO: 19784 - protein, 114 aa, Artificial Sequence; identical to SEQ ID NO: 8403
  source: /note="Description of Artificial Sequence: Synthetic polypeptide"

SEQ ID NO: 19785 - protein, 114 aa, Artificial Sequence; identical to SEQ ID NO: 8318
  source: /note="Description of Artificial Sequence: Synthetic polypeptide"

SEQ ID NO: 19786 - protein, 114 aa, Artificial Sequence; identical to SEQ ID NO: 8405
  source: /note="Description of Artificial Sequence: Synthetic polypeptide"

SEQ ID NO: 19787 - protein, 113 aa, Artificial Sequence; identical to SEQ ID NO: 8406
  source: /note="Description of Artificial Sequence: Synthetic polypeptide"

SEQ ID NO: 19788 - protein, 114 aa, Artificial Sequence; identical to SEQ ID NO: 8407
  source: /note="Description of Artificial Sequence: Synthetic polypeptide"

SEQ ID NO: 19789 - protein, 118 aa, Artificial Sequence; identical to SEQ ID NO: 8408
  source: /note="Description of Artificial Sequence: Synthetic polypeptide"

SEQ ID NO: 19790 - protein, 118 aa, Artificial Sequence; identical to SEQ ID NO: 8409
  source: /note="Description of Artificial Sequence: Synthetic polypeptide"

SEQ ID NO: 19791 - protein, 132 aa, Artificial Sequence; identical to SEQ ID NO: 8411
  source: /note="Description of Artificial Sequence: Synthetic polypeptide"

SEQ ID NO: 19792 - protein, 118 aa, Artificial Sequence; identical to SEQ ID NO: 8412
  source: /note="Description of Artificial Sequence: Synthetic polypeptide"

SEQ ID NO: 19793 - protein, 116 aa, Artificial Sequence; identical to SEQ ID NO: 8413
  source: /note="Description of Artificial Sequence: Synthetic polypeptide"

SEQ ID NO: 19794 - protein, 114 aa, Artificial Sequence; identical to SEQ ID NO: 8414
  source: /note="Description of Artificial Sequence: Synthetic polypeptide"

SEQ ID NO: 19795 - protein, 116 aa, Artificial Sequence; identical to SEQ ID NO: 8415
  source: /note="Description of Artificial Sequence: Synthetic polypeptide"

SEQ ID NO: 19796 - protein, 122 aa, Artificial Sequence; identical to SEQ ID NO: 8416
  source: /note="Description of Artificial Sequence: Synthetic polypeptide"

SEQ ID NO: 19797 - protein, 117 aa, Artificial Sequence; identical to SEQ ID NO: 8417
  source: /note="Description of Artificial Sequence: Synthetic polypeptide"

SEQ ID NO: 19798 - protein, 120 aa, Artificial Sequence; identical to SEQ ID NO: 8418
  source: /note="Description of Artificial Sequence: Synthetic polypeptide"

SEQ ID NO: 19799 - protein, 120 aa, Artificial Sequence; identical to SEQ ID NO: 8419
  source: /note="Description of Artificial Sequence: Synthetic polypeptide"

SEQ ID NO: 19800 - protein, 118 aa, Artificial Sequence; identical to SEQ ID NO: 8393
  source: /note="Description of Artificial Sequence: Synthetic polypeptide"

SEQ ID NO: 19801 - protein, 117 aa, Artificial Sequence; identical to SEQ ID NO: 8420
  source: /note="Description of Artificial Sequence: Synthetic polypeptide"

SEQ ID NO: 19802 - protein, 118 aa, Artificial Sequence; identical to SEQ ID NO: 8421
  source: /note="Description of Artificial Sequence: Synthetic polypeptide"

SEQ ID NO: 19803 - protein, 132 aa, Artificial Sequence; identical to SEQ ID NO: 8422
  source: /note="Description of Artificial Sequence: Synthetic polypeptide"

SEQ ID NO: 19804 - protein, 132 aa, Artificial Sequence; identical to SEQ ID NO: 8331
  source: /note="Description of Artificial Sequence: Synthetic polypeptide"

SEQ ID NO: 19805 - protein, 132 aa, Artificial Sequence; identical to SEQ ID NO: 8424
  source: /note="Description of Artificial Sequence: Synthetic polypeptide"

SEQ ID NO: 19806 - protein, 118 aa, Artificial Sequence; identical to SEQ ID NO: 8425
  source: /note="Description of Artificial Sequence: Synthetic polypeptide"

SEQ ID NO: 19807 - protein, 118 aa, Artificial Sequence; identical to SEQ ID NO: 8426
  source: /note="Description of Artificial Sequence: Synthetic polypeptide"

SEQ ID NO: 19808 - protein, 118 aa, Artificial Sequence; identical to SEQ ID NO: 8427
  source: /note="Description of Artificial Sequence: Synthetic polypeptide"

SEQ ID NO: 19809 - protein, 117 aa, Artificial Sequence; identical to SEQ ID NO: 8428
  source: /note="Description of Artificial Sequence: Synthetic polypeptide"

SEQ ID NO: 19810 - protein, 116 aa, Artificial Sequence; identical to SEQ ID NO: 8429
  source: /note="Description of Artificial Sequence: Synthetic polypeptide"

SEQ ID NO: 19811 - protein, 116 aa, Artificial Sequence; identical to SEQ ID NO: 8430
  source: /note="Description of Artificial Sequence: Synthetic polypeptide"

SEQ ID NO: 19812 - protein, 118 aa, Artificial Sequence; identical to SEQ ID NO: 8432
  source: /note="Description of Artificial Sequence: Synthetic polypeptide"

SEQ ID NO: 19813 - protein, 118 aa, Artificial Sequence; identical to SEQ ID NO: 8433
  source: /note="Description of Artificial Sequence: Synthetic polypeptide"

SEQ ID NO: 19814 - protein, 126 aa, Artificial Sequence; identical to SEQ ID NO: 8434
  source: /note="Description of Artificial Sequence: Synthetic polypeptide"

SEQ ID NO: 19815 - protein, 118 aa, Artificial Sequence; identical to SEQ ID NO: 8435
  source: /note="Description of Artificial Sequence: Synthetic polypeptide"

SEQ ID NO: 19816 - protein, 118 aa, Artificial Sequence; identical to SEQ ID NO: 8436
  source: /note="Description of Artificial Sequence: Synthetic polypeptide"

SEQ ID NO: 19817 - protein, 118 aa, Artificial Sequence; identical to SEQ ID NO: 8437
  source: /note="Description of Artificial Sequence: Synthetic polypeptide"

SEQ ID NO: 19818 - protein, 118 aa, Artificial Sequence; identical to SEQ ID NO: 8438
  source: /note="Description of Artificial Sequence: Synthetic polypeptide"

SEQ ID NO: 19819 - protein, 118 aa, Artificial Sequence; identical to SEQ ID NO: 8439
  source: /note="Description of Artificial Sequence: Synthetic polypeptide"

SEQ ID NO: 19820 - protein, 118 aa, Artificial Sequence; identical to SEQ ID NO: 8440
  source: /note="Description of Artificial Sequence: Synthetic polypeptide"

SEQ ID NO: 19821 - protein, 124 aa, Artificial Sequence; identical to SEQ ID NO: 8347
  source: /note="Description of Artificial Sequence: Synthetic polypeptide"

SEQ ID NO: 19822 - protein, 119 aa, Artificial Sequence; identical to SEQ ID NO: 8481
  source: /note="Description of Artificial Sequence: Synthetic polypeptide"

SEQ ID NO: 19823 - protein, 117 aa, Artificial Sequence; identical to SEQ ID NO: 8470
  source: /note="Description of Artificial Sequence: Synthetic polypeptide"

SEQ ID NO: 19824 - protein, 121 aa, Artificial Sequence; identical to SEQ ID NO: 8340
  source: /note="Description of Artificial Sequence: Synthetic polypeptide"

SEQ ID NO: 19825 - protein, 117 aa, Artificial Sequence; identical to SEQ ID NO: 8358
  source: /note="Description of Artificial Sequence: Synthetic polypeptide"

SEQ ID NO: 19826 - protein, 117 aa, Artificial Sequence; identical to SEQ ID NO: 8483
  source: /note="Description of Artificial Sequence: Synthetic polypeptide"

SEQ ID NO: 19827 - protein, 119 aa, Artificial Sequence; identical to SEQ ID NO: 8341
  source: /note="Description of Artificial Sequence: Synthetic polypeptide"

SEQ ID NO: 19828 - protein, 119 aa, Artificial Sequence; identical to SEQ ID NO: 8349
  source: /note="Description of Artificial Sequence: Synthetic polypeptide"

SEQ ID NO: 19829 - protein, 119 aa, Artificial Sequence; identical to SEQ ID NO: 8380
  source: /note="Description of Artificial Sequence: Synthetic polypeptide"

SEQ ID NO: 19830 - protein, 119 aa, Artificial Sequence; identical to SEQ ID NO: 8441
  source: /note="Description of Artificial Sequence: Synthetic polypeptide"

SEQ ID NO: 19831 - protein, 119 aa, Artificial Sequence; identical to SEQ ID NO: 8342
  source: /note="Description of Artificial Sequence: Synthetic polypeptide"

SEQ ID NO: 19832 - protein, 119 aa, Artificial Sequence; identical to SEQ ID NO: 8343
  source: /note="Description of Artificial Sequence: Synthetic polypeptide"

SEQ ID NO: 19833 - protein, 119 aa, Artificial Sequence; identical to SEQ ID NO: 8344
  source: /note="Description of Artificial Sequence: Synthetic polypeptide"

SEQ ID NO: 19834 - protein, 119 aa, Artificial Sequence; identical to SEQ ID NO: 8442
  source: /note="Description of Artificial Sequence: Synthetic polypeptide"

SEQ ID NO: 19835 - protein, 119 aa, Artificial Sequence; identical to SEQ ID NO: 8345
  source: /note="Description of Artificial Sequence: Synthetic polypeptide"

SEQ ID NO: 19836 - protein, 117 aa, Artificial Sequence; identical to SEQ ID NO: 8346
  source: /note="Description of Artificial Sequence: Synthetic polypeptide"

SEQ ID NO: 19837 - protein, 119 aa, Artificial Sequence; identical to SEQ ID NO: 8391
  source: /note="Description of Artificial Sequence: Synthetic polypeptide"

SEQ ID NO: 19838 - protein, 119 aa, Artificial Sequence; identical to SEQ ID NO: 8443
  source: /note="Description of Artificial Sequence: Synthetic polypeptide"

SEQ ID NO: 19839 - protein, 119 aa, Artificial Sequence; identical to SEQ ID NO: 8348
  source: /note="Description of Artificial Sequence: Synthetic polypeptide"

SEQ ID NO: 19840 - DNA, 356 bp, Artificial Sequence; identical to SEQ ID NO: 8461
  source: /note="Description of Artificial Sequence: Synthetic polynucleotide"

SEQ ID NO: 19841 - protein, 119 aa, Artificial Sequence; identical to SEQ ID NO: 8349
  source: /note="Description of Artificial Sequence: Synthetic polypeptide"

SEQ ID NO: 19842 - protein, 119 aa, Artificial Sequence; identical to SEQ ID NO: 8444
  source: /note="Description of Artificial Sequence: Synthetic polypeptide"

SEQ ID NO: 19843 - protein, 119 aa, Artificial Sequence; identical to SEQ ID NO: 8410
  source: /note="Description of Artificial Sequence: Synthetic polypeptide"

SEQ ID NO: 19844 - protein, 119 aa, Artificial Sequence; identical to SEQ ID NO: 8431
  source: /note="Description of Artificial Sequence: Synthetic polypeptide"

SEQ ID NO: 19845 - protein, 126 aa, Artificial Sequence; identical to SEQ ID NO: 8462
  source: /note="Description of Artificial Sequence: Synthetic polypeptide"

SEQ ID NO: 19846 - protein, 119 aa, Artificial Sequence; identical to SEQ ID NO: 8345
  source: /note="Description of Artificial Sequence: Synthetic polypeptide"

SEQ ID NO: 19847 - protein, 119 aa, Artificial Sequence; identical to SEQ ID NO: 8452
  source: /note="Description of Artificial Sequence: Synthetic polypeptide"

SEQ ID NO: 19848 - protein, 119 aa, Artificial Sequence; identical to SEQ ID NO: 8351
  source: /note="Description of Artificial Sequence: Synthetic polypeptide"

SEQ ID NO: 19849 - protein, 119 aa, Artificial Sequence; identical to SEQ ID NO: 8352
  source: /note="Description of Artificial Sequence: Synthetic polypeptide"

SEQ ID NO: 19850 - protein, 119 aa, Artificial Sequence; identical to SEQ ID NO: 8353
  source: /note="Description of Artificial Sequence: Synthetic polypeptide"

SEQ ID NO: 19851 - protein, 119 aa, Artificial Sequence; identical to SEQ ID NO: 8354
  source: /note="Description of Artificial Sequence: Synthetic polypeptide"

SEQ ID NO: 19852 - protein, 118 aa, Artificial Sequence; identical to SEQ ID NO: 8445
  source: /note="Description of Artificial Sequence: Synthetic polypeptide"

SEQ ID NO: 19853 - protein, 119 aa, Artificial Sequence; identical to SEQ ID NO: 8446
  source: /note="Description of Artificial Sequence: Synthetic polypeptide"

SEQ ID NO: 19854 - protein, 119 aa, Artificial Sequence; identical to SEQ ID NO: 8441
  source: /note="Description of Artificial Sequence: Synthetic polypeptide"

SEQ ID NO: 19855 - protein, 119 aa, Artificial Sequence; identical to SEQ ID NO: 8355
  source: /note="Description of Artificial Sequence: Synthetic polypeptide"

SEQ ID NO: 19856 - protein, 119 aa, Artificial Sequence; identical to SEQ ID NO: 8447
  source: /note="Description of Artificial Sequence: Synthetic polypeptide"

SEQ ID NO: 19857 - protein, 119 aa, Artificial Sequence; identical to SEQ ID NO: 8356
  source: /note="Description of Artificial Sequence: Synthetic polypeptide"

SEQ ID NO: 19858 - protein, 119 aa, Artificial Sequence; identical to SEQ ID NO: 8357
  source: /note="Description of Artificial Sequence: Synthetic polypeptide"

SEQ ID NO: 19859 - protein, 119 aa, Artificial Sequence; identical to SEQ ID NO: 8359
  source: /note="Description of Artificial Sequence: Synthetic polypeptide"

SEQ ID NO: 19860 - protein, 122 aa, Artificial Sequence; identical to SEQ ID NO: 8360
  source: /note="Description of Artificial Sequence: Synthetic polypeptide"

SEQ ID NO: 19861 - protein, 128 aa, Artificial Sequence; identical to SEQ ID NO: 8459
  source: /note="Description of Artificial Sequence: Synthetic polypeptide"

SEQ ID NO: 19862 - protein, 122 aa, Artificial Sequence; identical to SEQ ID NO: 8448
  source: /note="Description of Artificial Sequence: Synthetic polypeptide"

SEQ ID NO: 19863 - protein, 118 aa, Artificial Sequence; identical to SEQ ID NO: 8449
  source: /note="Description of Artificial Sequence: Synthetic polypeptide"

SEQ ID NO: 19864 - protein, 122 aa, Artificial Sequence; identical to SEQ ID NO: 8361
  source: /note="Description of Artificial Sequence: Synthetic polypeptide"

SEQ ID NO: 19865 - protein, 122 aa, Artificial Sequence; identical to SEQ ID NO: 8361
  source: /note="Description of Artificial Sequence: Synthetic polypeptide"

SEQ ID NO: 19866 - protein, 122 aa, Artificial Sequence; identical to SEQ ID NO: 8464
  source: /note="Description of Artificial Sequence: Synthetic polypeptide"

SEQ ID NO: 19867 - protein, 115 aa, Artificial Sequence; identical to SEQ ID NO: 8450
  source: /note="Description of Artificial Sequence: Synthetic polypeptide"

SEQ ID NO: 19868 - protein, 114 aa, Artificial Sequence; identical to SEQ ID NO: 8451
  source: /note="Description of Artificial Sequence: Synthetic polypeptide"

SEQ ID NO: 19869 - protein, 121 aa, Artificial Sequence; identical to SEQ ID NO: 8362
  source: /note="Description of Artificial Sequence: Synthetic polypeptide"

SEQ ID NO: 19870 - protein, 121 aa, Artificial Sequence; identical to SEQ ID NO: 8362
  source: /note="Description of Artificial Sequence: Synthetic polypeptide"

SEQ ID NO: 19871 - protein, 121 aa, Artificial Sequence; identical to SEQ ID NO: 8460
  source: /note="Description of Artificial Sequence: Synthetic polypeptide"

SEQ ID NO: 19872 - protein, 121 aa, Artificial Sequence; identical to SEQ ID NO: 8466
  source: /note="Description of Artificial Sequence: Synthetic polypeptide"
  MOD_RES (7)..(7): Any amino acid

SEQ ID NO: 19873 - protein, 121 aa, Artificial Sequence; identical to SEQ ID NO: 8467
  source: /note="Description of Artificial Sequence: Synthetic polypeptide"

SEQ ID NO: 19874 - protein, 121 aa, Artificial Sequence; identical to SEQ ID NO: 8482
  source: /note="Description of Artificial Sequence: Synthetic polypeptide"

SEQ ID NO: 19875 - protein, 114 aa, Artificial Sequence; identical to SEQ ID NO: 8363
  source: /note="Description of Artificial Sequence: Synthetic polypeptide"

SEQ ID NO: 19876 - protein, 128 aa, Artificial Sequence; identical to SEQ ID NO: 8472
  source: /note="Description of Artificial Sequence: Synthetic polypeptide"

SEQ ID NO: 19877 - protein, 122 aa, Artificial Sequence; identical to SEQ ID NO: 8364
  source: /note="Description of Artificial Sequence: Synthetic polypeptide"

SEQ ID NO: 19878 - protein, 118 aa, Artificial Sequence; identical to SEQ ID NO: 8453
  source: /note="Description of Artificial Sequence: Synthetic polypeptide"

SEQ ID NO: 19879 - protein, 128 aa, Artificial Sequence; identical to SEQ ID NO: 8365
  source: /note="Description of Artificial Sequence: Synthetic polypeptide"

SEQ ID NO: 19880 - protein, 128 aa, Artificial Sequence; identical to SEQ ID NO: 8475
  source: /note="Description of Artificial Sequence: Synthetic polypeptide"

SEQ ID NO: 19881 - protein, 118 aa, Artificial Sequence; identical to SEQ ID NO: 8454
  source: /note="Description of Artificial Sequence: Synthetic polypeptide"

SEQ ID NO: 19882 - protein, 113 aa, Artificial Sequence; identical to SEQ ID NO: 8366
  source: /note="Description of Artificial Sequence: Synthetic polypeptide"

SEQ ID NO: 19883 - protein, 127 aa, Artificial Sequence; identical to SEQ ID NO: 8367
  source: /note="Description of Artificial Sequence: Synthetic polypeptide"

SEQ ID NO: 19884 - protein, 120 aa, Artificial Sequence; identical to SEQ ID NO: 8368
  source: /note="Description of Artificial Sequence: Synthetic polypeptide"

SEQ ID NO: 19885 - protein, 122 aa, Artificial Sequence; identical to SEQ ID NO: 8370
  source: /note="Description of Artificial Sequence: Synthetic polypeptide"

SEQ ID NO: 19886 - protein, 127 aa, Artificial Sequence; identical to SEQ ID NO: 8371
  source: /note="Description of Artificial Sequence: Synthetic polypeptide"

SEQ ID NO: 19887 - protein, 125 aa, Artificial Sequence; identical to SEQ ID NO: 8372
  source: /note="Description of Artificial Sequence: Synthetic polypeptide"

SEQ ID NO: 19888 - protein, 124 aa, Artificial Sequence; identical to SEQ ID NO: 8373
  source: /note="Description of Artificial Sequence: Synthetic polypeptide"

SEQ ID NO: 19889 - protein, 127 aa, Artificial Sequence; identical to SEQ ID NO: 8374
  source: /note="Description of Artificial Sequence: Synthetic polypeptide"

SEQ ID NO: 19890 - protein, 127 aa, Artificial Sequence; identical to SEQ ID NO: 8375
  source: /note="Description of Artificial Sequence: Synthetic polypeptide"

SEQ ID NO: 19891 - protein, 127 aa, Artificial Sequence; identical to SEQ ID NO: 8376
  source: /note="Description of Artificial Sequence: Synthetic polypeptide"

SEQ ID NO: 19892 - protein, 122 aa, Artificial Sequence; identical to SEQ ID NO: 8377
  source: /note="Description of Artificial Sequence: Synthetic polypeptide"

SEQ ID NO: 19893 - protein, 128 aa, Artificial Sequence; identical to SEQ ID NO: 8478
  source: /note="Description of Artificial Sequence: Synthetic polypeptide"

SEQ ID NO: 19894 - protein, 128 aa, Artificial Sequence; identical to SEQ ID NO: 8480
  source: /note="Description of Artificial Sequence: Synthetic polypeptide"

SEQ ID NO: 19895 - protein, 127 aa, Artificial Sequence; identical to SEQ ID NO: 8485
  source: /note="Description of Artificial Sequence: Synthetic polypeptide"

SEQ ID NO: 19896 - protein, 127 aa, Artificial Sequence; identical to SEQ ID NO: 8486
  source: /note="Description of Artificial Sequence: Synthetic polypeptide"

SEQ ID NO: 19897 - protein, 122 aa, Artificial Sequence; identical to SEQ ID NO: 8377
  source: /note="Description of Artificial Sequence: Synthetic polypeptide"

SEQ ID NO: 19898 - protein, 120 aa, Artificial Sequence; identical to SEQ ID NO: 8379
  source: /note="Description of Artificial Sequence: Synthetic polypeptide"

SEQ ID NO: 19899 - protein, 127 aa, Artificial Sequence; identical to SEQ ID NO: 8381
  source: /note="Description of Artificial Sequence: Synthetic polypeptide"

SEQ ID NO: 19900 - protein, 127 aa, Artificial Sequence; identical to SEQ ID NO: 8382
  source: /note="Description of Artificial Sequence: Synthetic polypeptide"

SEQ ID NO: 19901 - protein, 120 aa, Artificial Sequence; identical to SEQ ID NO: 8455
  source: /note="Description of Artificial Sequence: Synthetic polypeptide"

SEQ ID NO: 19902 - protein, 127 aa, Artificial Sequence; identical to SEQ ID NO: 8374
  source: /note="Description of Artificial Sequence: Synthetic polypeptide"

SEQ ID NO: 19903 - protein, 127 aa, Artificial Sequence; identical to SEQ ID NO: 8384
  source: /note="Description of Artificial Sequence: Synthetic polypeptide"

SEQ ID NO: 19904 - protein, 122 aa, Artificial Sequence; identical to SEQ ID NO: 8385
  source: /note="Description of Artificial Sequence: Synthetic polypeptide"

SEQ ID NO: 19905 - protein, 127 aa, Artificial Sequence; identical to SEQ ID NO: 8386
  source: /note="Description of Artificial Sequence: Synthetic polypeptide"

SEQ ID NO: 19906 - protein, 126 aa, Artificial Sequence; identical to SEQ ID NO: 8387
  source: /note="Description of Artificial Sequence: Synthetic polypeptide"

SEQ ID NO: 19907 - protein, 127 aa, Artificial Sequence; identical to SEQ ID NO: 8388
  source: /note="Description of Artificial Sequence: Synthetic polypeptide"

SEQ ID NO: 19908 - protein, 127 aa, Artificial Sequence; identical to SEQ ID NO: 8389
  source: /note="Description of Artificial Sequence: Synthetic polypeptide"

SEQ ID NO: 19909 - protein, 124 aa, Artificial Sequence; identical to SEQ ID NO: 8390
  source: /note="Description of Artificial Sequence: Synthetic polypeptide"

SEQ ID NO: 19910 - protein, 123 aa, Artificial Sequence; identical to SEQ ID NO: 8456
  source: /note="Description of Artificial Sequence: Synthetic polypeptide"

SEQ ID NO: 19911 - protein, 120 aa, Artificial Sequence; identical to SEQ ID NO: 8392
  source: /note="Description of Artificial Sequence: Synthetic polypeptide"

SEQ ID NO: 19912 - protein, 117 aa, Artificial Sequence; identical to SEQ ID NO: 8329
  source: /note="Description of Artificial Sequence: Synthetic polypeptide"

SEQ ID NO: 19913 - protein, 132 aa, Artificial Sequence; identical to SEQ ID NO: 8331
  source: /note="Description of Artificial Sequence: Synthetic polypeptide"

SEQ ID NO: 19914 - protein, 118 aa, Artificial Sequence; identical to SEQ ID NO: 8332
  source: /note="Description of Artificial Sequence: Synthetic polypeptide"

SEQ ID NO: 19915 - protein, 118 aa, Artificial Sequence; identical to SEQ ID NO: 8333
  source: /note="Description of Artificial Sequence: Synthetic polypeptide"

SEQ ID NO: 19916 - protein, 118 aa, Artificial Sequence; identical to SEQ ID NO: 8334
  source: /note="Description of Artificial Sequence: Synthetic polypeptide"

SEQ ID NO: 19917 - protein, 118 aa, Artificial Sequence; identical to SEQ ID NO: 8335
  source: /note="Description of Artificial Sequence: Synthetic polypeptide"

SEQ ID NO: 19918 - protein, 124 aa, Artificial Sequence; identical to SEQ ID NO: 8337
  source: /note="Description of Artificial Sequence: Synthetic polypeptide"

SEQ ID NO: 19919 - protein, 118 aa, Artificial Sequence; identical to SEQ ID NO: 8338
  source: /note="Description of Artificial Sequence: Synthetic polypeptide"

SEQ ID NO: 19920 - protein, 118 aa, Artificial Sequence; identical to SEQ ID NO: 8339
  source: /note="Description of Artificial Sequence: Synthetic polypeptide"

SEQ ID NO: 19921 - protein, 121 aa, Artificial Sequence; identical to SEQ ID NO: 8468
  source: /note="Description of Artificial Sequence: Synthetic polypeptide"

SEQ ID NO: 19922 - protein, 117 aa, Artificial Sequence; identical to SEQ ID NO: 8470
  source: /note="Description of Artificial Sequence: Synthetic polypeptide"

SEQ ID NO: 19923 - protein, 114 aa, Artificial Sequence; identical to SEQ ID NO: 8407
  source: /note="Description of Artificial Sequence: Synthetic polypeptide"

SEQ ID NO: 19924 - protein, 132 aa, Artificial Sequence; identical to SEQ ID NO: 8326
  source: /note="Description of Artificial Sequence: Synthetic polypeptide"

SEQ ID NO: 19925 - protein, 118 aa, Artificial Sequence; identical to SEQ ID NO: 8327
  source: /note="Description of Artificial Sequence: Synthetic polypeptide"

SEQ ID NO: 19926 - protein, 118 aa, Artificial Sequence; identical to SEQ ID NO: 8328
  source: /note="Description of Artificial Sequence: Synthetic polypeptide"

SEQ ID NO: 19927 - protein, 121 aa, Artificial Sequence; identical to SEQ ID NO: 8330
  source: /note="Description of Artificial Sequence: Synthetic polypeptide"

SEQ ID NO: 19928 - protein, 118 aa, Artificial Sequence; identical to SEQ ID NO: 8458
  source: /note="Description of Artificial Sequence: Synthetic polypeptide"

SEQ ID NO: 19929 - protein, 124 aa, Artificial Sequence; identical to SEQ ID NO: 8347
  source: /note="Description of Artificial Sequence: Synthetic polypeptide"

SEQ ID NO: 19930 - protein, 118 aa, Artificial Sequence; identical to SEQ ID NO: 8471
  source: /note="Description of Artificial Sequence: Synthetic polypeptide"

SEQ ID NO: 19931 - protein, 118 aa, Artificial Sequence; identical to SEQ ID NO: 8473
  source: /note="Description of Artificial Sequence: Synthetic polypeptide"

SEQ ID NO: 19932 - protein, 118 aa, Artificial Sequence; identical to SEQ ID NO: 8302
  source: /note="Description of Artificial Sequence: Synthetic polypeptide"

SEQ ID NO: 19933 - protein, 118 aa, Artificial Sequence; identical to SEQ ID NO: 8474
  source: /note="Description of Artificial Sequence: Synthetic polypeptide"

SEQ ID NO: 19934 - protein, 118 aa, Artificial Sequence; identical to SEQ ID NO: 8313
  source: /note="Description of Artificial Sequence: Synthetic polypeptide"

SEQ ID NO: 19935 - protein, 123 aa, Artificial Sequence; identical to SEQ ID NO: 8324
  source: /note="Description of Artificial Sequence: Synthetic polypeptide"

SEQ ID NO: 19936 - protein, 118 aa, Artificial Sequence; identical to SEQ ID NO: 8302
  source: /note="Description of Artificial Sequence: Synthetic polypeptide"

SEQ ID NO: 19937 - protein, 120 aa, Artificial Sequence; identical to SEQ ID NO: 8476
  source: /note="Description of Artificial Sequence: Synthetic polypeptide"

SEQ ID NO: 19938 - protein, 118 aa, Artificial Sequence; identical to SEQ ID NO: 8458
  source: /note="Description of Artificial Sequence: Synthetic polypeptide"

SEQ ID NO: 19939 - protein, 119 aa, Artificial Sequence; identical to SEQ ID NO: 8487
  source: /note="Description of Artificial Sequence: Synthetic polypeptide"

SEQ ID NO: 19940 - protein, 121 aa, Artificial Sequence; identical to SEQ ID NO: 8303
  source: /note="Description of Artificial Sequence: Synthetic polypeptide"

SEQ ID NO: 19941 - protein, 121 aa, Artificial Sequence; identical to SEQ ID NO: 8304
  source: /note="Description of Artificial Sequence: Synthetic polypeptide"

SEQ ID NO: 19942 - protein, 126 aa, Artificial Sequence; identical to SEQ ID NO: 8306
  source: /note="Description of Artificial Sequence: Synthetic polypeptide"

SEQ ID NO: 19943 - protein, 126 aa, Artificial Sequence; identical to SEQ ID NO: 8307
  source: /note="Description of Artificial Sequence: Synthetic polypeptide"

SEQ ID NO: 19944 - protein, 114 aa, Artificial Sequence; identical to SEQ ID NO: 8308
  source: /note="Description of Artificial Sequence: Synthetic polypeptide"

SEQ ID NO: 19945 - protein, 216 aa, Artificial Sequence; identical to SEQ ID NO: 8823
  source: /note="Description of Artificial Sequence: Synthetic polypeptide"

SEQ ID NO: 19946 - protein, 229 aa, Artificial Sequence; identical to SEQ ID NO: 8824
  source: /note="Description of Artificial Sequence: Synthetic polypeptide"

SEQ ID NO: 19947 - protein, 123 aa, Artificial Sequence; identical to SEQ ID NO: 4364
  source: /note="Description of Artificial Sequence: Synthetic polypeptide"

SEQ ID NO: 19948 - protein, 449 aa, Artificial Sequence; identical to SEQ ID NO: 14343
  source: /note="Description of Artificial Sequence: Synthetic polypeptide"

SEQ ID NO: 19949 - protein, 446 aa, Artificial Sequence
  source: /note="Description of Artificial Sequence: Synthetic polypeptide"
QVQLVQSGAEVKKPGASVKVSCKVSGFTLTELSIHWVRQAPGKGLEWMGGFDPEDGETIYAQKFQGRVTMTEDTSTDTAYMELTSLRSEDTAVYYCSTIFGVVTNFDNWGQGTLVTVSSASTKGPSVFPLAPCSRSTSESTAALGCLVKDYFPEPVTVSWNSGALTSGVHTFPAVLQSSGLYSLSSVVTVPSSSLGTKTYTCNVDHKPSNTKVDKRVESKYGPPCPPCPAPEFLGGPSVFLFPPKPKDTLMISRTPEVTCVVVDVSQEDPEVQFNWYVDGVEVHNAKTKPREEQFNSTYRVVSVLTVLHQDWLNGKEYKCKVSNKGLPSSIEKTISKAKGQPREPQVYTLPPSQEEMTKNQVSLTCLVKGFYPSDIAVEWESNGQPENNYKTTPPVLDSDGSFFLYSRLTVDKSRWQEGNVFSCSVMHEALHNHYTQKSLSLSLGK

SEQ ID NO: 19950 - protein, 120 aa, Artificial Sequence
  source: /note="Description of Artificial Sequence: Synthetic polypeptide"
QVQLQESGPGLVKPSETLSLTCTVSGFSLIGYDLNWIRQPPGKGLEWIGIIWGDGTTDYNSAVKSRVTISKDTSKNQFSLKLSSVTAADTAVYYCARGGYWYATSYYFDYWGQGTLVTVS

SEQ ID NO: 19951 - protein, 214 aa, Artificial Sequence
  source: /note="Description of Artificial Sequence: Synthetic polypeptide"
EIVLTQSPATLSLSPGERATLSCKASKRVTTYVSWYQQKPGQAPRLLIYGASNRYLGIPARFSGSGSGTDFTLTISSLEPEDFAVYYCSQSYNYPYTFGQGTKLEIKRTVAAPSVFIFPPSDEQLKSGTASVVCLLNNFYPREAKVQWKVDNALQSGNSQESVTEQDSKDSTYSLSSTLTLSKADYEKHKVYACEVTHQGLSSPVTKSFNRGEC

SEQ ID NO: 19952 - protein, 238 aa, Artificial Sequence
  source: /note="Description of Artificial Sequence: Synthetic polypeptide"
MDMRVPAQLLGLLLLWLRGARCQSVLTQPPSVSAAPGQKVTISCSGSSSNIGNNYVSWYQQLPGTAPKLLIYDNNKRPSGIPDRFSGSKSGTSTTLGITGLQTGDEADYYCGTWDSRLSAVVFGGGTKLTVLGQPKANPTVTLFPPSSEELQANKATLVCLISDFYPGAVTVAWKADGSPVKAGVETTKPSKQSNNKYAASSYLSLTPEQWKSHRSYSCQVTHEGSTVEKTVAPTECS

SEQ ID NO: 19953 - protein, 238 aa, Artificial Sequence
  source: /note="Description of Artificial Sequence: Synthetic polypeptide"
MDMRVPAQLLGLLLLWLRGARCQSVLTQPPSASGTPGQRVTISCSGSSSNIGSNTVNWYQQLPGTAPKLLIYTNNQRPSGVPDRFSGSKSGTSASLAISGLQSEDEADFYCAARDESLNGVVFGGGTKLTVLGQPKANPTVTLFPPSSEELQANKATLVCLISDFYPGAVTVAWKADGSPVKAGVETTKPSKQSNNKYAASSYLSLTPEQWKSHRSYSCQVTHEGSTVEKTVAPTECS

SEQ ID NO: 19954 - protein, 236 aa, Artificial Sequence
  source: /note="Description of Artificial Sequence: Synthetic polypeptide"
MDMRVPAQLLGLLLLWLRGARCDIQMTQSPSSLSASVGDRVTITCRASQGIRNDLGWFQQKPGKAPKRLIYAASSLQSGVPSRFSGSGSGTEFTLTISSLQPEDLATYYCLQYNIYPWTFGQGTKVEIKRTVAAPSVFIFPPSDEQLKSGTASVVCLLNNFYPREAKVQWKVDNALQSGNSQESVTEQDSKDSTYSLSSTLTLSKADYEKHKVYACEVTHQGLSSPVTKSFNRGEC

SEQ ID NO: 19955 - protein, 237 aa, Artificial Sequence
  source: /note="Description of Artificial Sequence: Synthetic polypeptide"
MDMRVPAQLLGLLLLWLRGARCQSVLTQPPSVSAAPGQKVTISCSGSSSNIGNNYVSWYQQLPGTAPKLLIYDNNKRPSGIPDRFSGSKSGTSATLGITGLQTGDEADYYCGTWDSRLSAWFGGGTKLTVLGQPKANPTVTLFPPSSEELQANKATLVCLISDFYPGAVTVAWKADGSPVKAGVETTKPSKQSNNKYAASSYLSLTPEQWKSHRSYSCQVTHEGSTVEKTVAPTECS

SEQ ID NO: 19956 - protein, 238 aa, Artificial Sequence
  source: /note="Description of Artificial Sequence: Synthetic polypeptide"
MDMRVPAQLLGLLLLWLRGARCQSVLTQPPSVSEAPGQKVTISCSGSSSNIGNNYVSWYQQLPGTAPKLLIYDNNKRPSGIPDRFSGSKSGTSATLGITGLQTGDEADYYCGTWDSRLSAVVFGGGTKLTVLGQPKANPTVTLFPPSSEELQANKATLVCLISDFYPGAVTVAWKADGSPVKAGVETTKPSKQSNNKYAASSYLSLTPEQWKSHRSYSCQVTHEGSTVEKTVAPTECS

SEQ ID NO: 19957 - protein, 238 aa, Artificial Sequence
  source: /note="Description of Artificial Sequence: Synthetic polypeptide"
MDMRVPAQLLGLLLLWLRGARCQSVLTQPPSASGIPGQRVTISCSGSSSNIGSNYVYWYQQLPGAAPKLLIFRSNQRPSGVPDRFSGSKSGTSASLAISGLRSEDEADYYCAAWDDSLSGWVFGGGTKLTVLGQPKANPTVTLFPPSSEELQANKATLVCLISDFYPGAVTVAWKADGSPVKAGVETTKPSKQSNNKYAASSYLSLTPEQWKSHRSYSCQVTHEGSTVEKTVAPTECS

SEQ ID NO: 19958 - protein, 236 aa, Artificial Sequence
  source: /note="Description of Artificial Sequence: Synthetic polypeptide"
MDMRVPAQLLGLLLLWLRGARCSSELTQDPTVSVALGQTVKITCQGDSLRSFYASWYQQKPGQAPVLVFYGKNNRPSGIPDRFSGSSSGNTASLTITGAQAEDEADYYCNSRDSSVYHLVLGGGTKLTVLGQPKANPTVTLFPPSSEELQANKATLVCLISDFYPGAVTVAWKADGSPVKAGVETTKPSKQSNNKYAASSYLSLTPEQWKSHRSYSCQVTHEGSTVEKTVAPTECS

SEQ ID NO: 19959 - protein, 241 aa, Artificial Sequence
  source: /note="Description of Artificial Sequence: Synthetic polypeptide"
MDMRVPAQLLGLLLLWLRGARCDIILAQTPLSLSVTPGQPASISCKSSQSLLHSAGKTYLYWYLQKPGQPPQLLIYEVSNRFSGVPDRFSGSGSGTDFTLKISRVEAEDVGIYYCMQSFPLPLTFGGGIKVEIKRTVAAPSVFIFPPSDEQLKSGTASVVCLLNNFYPREAKVQWKVDNALQSGNSQESVTEQDSKDSIYSLSSTLTLSKADYEKHKVYACEVTHQGLSSPVTKSFNRGEC

SEQ ID NO: 19960 - protein, 241 aa, Artificial Sequence
  source: /note="Description of Artificial Sequence: Synthetic polypeptide"
MDMRVPAQLLGLLLLWLRGARCDIVMTQSPLSLPVTPGEPASISCRSSQSLLHSFGYNYLDWYLQKPGQSPQLLIYLGSNRASGVPDRFSGSGSGTDFTLKISRVEAEDVGVYYCMQALQTPFTFGPGTKVDIKRTVAAPSVFIFPPSDEQLKSGTASVVCLLNNFYPREAKVQWKVDNALQSGNSQESVTEQDSKDSTYSLSSTLTLSKADYEKHKVYACEVTHQGLSSPVTKSFNRGEC

SEQ ID NO: 19961 - protein, 241 aa, Artificial Sequence
  source: /note="Description of Artificial Sequence: Synthetic polypeptide"
MDMRVPAQLLGLLLLWLRGARCDIILTQTPLSLSVTPGQPASISCKSSQSLLHSDGKTYLYWYLQKPGQPPQLLIYEVSNRFSGEPDRFSGSGSGTDFTLKISRVEAEDVGTYYCMQSFPLPLTFGGGTKVEIKRTVAAPSVFIFPPSDEQLKSGTASVVCLLNNFYPREAKVQWKVDNALQSGNSQESVTEQDSKDSTYSLSSTLTLSKADYEKHKVYACEVTHQGLSSPVTKSFNRGEC

SEQ ID NO: 19962 - protein, 238 aa, Artificial Sequence
  source: /note="Description of Artificial Sequence: Synthetic polypeptide"
MDMRVPAQLLGLLLLWLRGARCQSVLTQPPSVSAAPGQKVTISCSGSSSNIGNNYVSWYQQFPGTAPKLLIYDNNKRPSGIPDRFSGSKSGTSATLGITGLQTGDEADYYCGTWDSRLSAVVFGGGTKLTVLGQPKANPTVTLFPPSSEELQANKATLVCLISDFYPGAVTVAWKADGSPVKAGVETTKPSKQSNNKYAASSYLSLTPEQWKSHRSYSCQVTHEGSTVEKTVAPTECS

SEQ ID NO: 19963 - protein, 238 aa, Artificial Sequence
  source: /note="Description of Artificial Sequence: Synthetic polypeptide"
MDMRVPAQLLGLLLLWLRGARCQSVLTQSPSASGTPGQRVTISCSGSSSNIGSNYVYWYQQLPGAAPKLLILRNNQRPSGVPDRFSGSKSGTSASLTISGLRSEDEADYYCAAWDDSLSGWVFGGGTKLTVLGQPKANPTVTLFPPSSEELQANKATLVCLISDFYPGAVTVAWKADGSPVKAGVETTKPSKQSNNKYAASSYLSLTPEQWKSHRSYSCQVTHEGSTVEKTVAPTECS

SEQ ID NO: 19964 - protein, 238 aa, Artificial Sequence
  source: /note="Description of Artificial Sequence: Synthetic polypeptide"
MDMRVPAQLLGLLLLWLRGARCQSVLTQPPSASGIPGQRVTISCSGSSSNIGSNYVYWYQQLPGAAPKLLIFRNNQRPSGVPDRFSGSKSGTSASLAISGLRSEDEADYYCAAWDDSLSGWVFGGGIKLTVLGQPKANPTVTLFPPSSEELQANKATLVCLISDFYPGAVTVAWKADGSPVKAGVETTKPSKQSNNKYAASSYLSLTPEQWKSHRSYSCQVTHEGSTVEKTVAPTECS

SEQ ID NO: 19965 - protein, 241 aa, Artificial Sequence
  source: /note="Description of Artificial Sequence: Synthetic polypeptide"
MDMRVPAQLLGLLLLWLRGARCDITLTQTPLSLSVSPGQPASISCKSSQSLLHSDGRNYLYWYLQKPGQPPQLLIYEVSNRFSGLPDRFSGSGSGTDFTLKISRVEAEDVGIYYCMQSFPLPLTFGGGTKVEIKRTVAAPSVFIFPPSDEQLKSGTASVVCLLNNFYPREAKVQWKVDNALQSGNSQESVTEQDSKDSTYSLSSTLTLSKADYEKHKVYACEVTHQGLSSPVTKSFNRGEC

SEQ ID NO: 19966 - protein, 236 aa, Artificial Sequence
  source: /note="Description of Artificial Sequence: Synthetic polypeptide"
MDMRVPAQLLGLLLLWLRGARCDIQMTQSPSSLSASVGDRVTITCRASQGIRKDLGWYQQKPGKAPKRLIYGASSLQSGVPSRFSGSGSGTEFTLTISSLQPEDFATYYCLQYNSFPWTFGQGTKVEIKRTVAAPSVFIFPPSDEQLKSGTASVVCLLNNFYPREAKVQWKVDNALQSGNSQESVTEQDSKDSIYSLSSTLTLSKADYEKHKVYACEVTHQGLSSPVIKSFNRGEC

SEQ ID NO: 19967 - protein, 235 aa, Artificial Sequence
  source: /note="Description of Artificial Sequence: Synthetic polypeptide"
METPAQLLFLLLLWLPDTTGEIVLTQSPGTLSLSPGERATLSCRASQSVSSGYLTWYQQKPGQAPRLLIYGASSRATGIPDRFSGSGSGTDFTLTISRLEPEDFAVYYCQQYGNSLCRFGQGTKLEIKRTVAAPSVFIFPPSDEQLKSGTASVVCLLNNFYPREAKVQWKVDNALQSGNSQESVTEQDSKDSTYSLSSTLTLSKADYEKHKVYACEVTHQGLSSPVTKSFNRGEC

SEQ ID NO: 19968 - protein, 235 aa, Artificial Sequence
  source: /note="Description of Artificial Sequence: Synthetic polypeptide"
METPAQLLFLLLLWLPDTTGEIVLTQSPGTLSLSPGERATLSCRASQSVSSGYLTWYQQKPGQAPRLLIYGASSRATGIPDRFSGSGSGTDFTLTISRLEPEDFAVYYCQQYGNSLSRFGQGTKLEIKRTVAAPSVFIFPPSDEQLKSGTASVVCLLNNFYPREAKVQWKVDNALQSGNSQESVTEQDSKDSTYSLSSTLTLSKADYEKHKVYACEVTHQGLSSPVTKSFNRGEC

SEQ ID NO: 19969 - protein, 113 aa, Artificial Sequence
  source: /note="Description of Artificial Sequence: Synthetic polypeptide"
QVLTQTASPVSAAVGSTVTINCQASQSVYDNNYLAWYQQKPGQPPKQLIYSTSTLASGVSSRFKGSGSGTQFTLTISDLECADAATYYCLGSYDCSSGDCFVFGGGTEVVVKR

SEQ ID NO: 19970 - protein, 219 aa, Artificial Sequence
  source: /note="Description of Artificial Sequence: Synthetic polypeptide"
QVLTQTASPVSAAVGSTVTINCQASQSVYDNNYLAWYQQKPGQPPKQLIYSTSTLASGVSSRFKGSGSGTQFTLTISDLECADAATYYCLGSYDCSSGDCFVFGGGTEVVVKRTVAAPSVFIFPPSDEQLKSGTASVVCLLNNFYPREAKVQWKVDNALQSGNSQESVTEQDSKDSTYSLSSTLTLSKADYEKHKVYACEVTHQGLSSPVTKSFNRGEC

SEQ ID NO: 19971 - protein, 219 aa, Artificial Sequence
  source: /note="Description of Artificial Sequence: Synthetic polypeptide"
QVLTQSPSSLSASVGDRVTINCQASQNVYNNNYLAWYQQKPGKVPKQLIYSTSTLASGVPSRFSGSGSGTDFTLTISSLQPEDVATYYCLGSYDCSRGDCFVFGGGTKVEIKRTVAAPSVFIFPPSDEQLKSGTASVVCLLNNFYPREAKVQWKVDNALQSGNSQESVTEQDSKDSTYSLSSTLTLSKADYEKHKVYACEVTHQGLSSPVTKSFNRGEC

SEQ ID NO: 19972 - protein, 219 aa, Artificial Sequence
  source: /note="Description of Artificial Sequence: Synthetic polypeptide"
QVLTQTASPVSPAVGSTVTINCRASQSVYYNNYLAWYQQKPGQPPKQLIYSTSTLASGVSSRFKGSGSGTQFTLTISDVQCDDAATYYCLGSYDCSNGDCFVFGGGTEVVVKRTVAAPSVFIFPPSDEQLKSGTASVVCLLNNFYPREAKVQWKVDNALQSGNSQESVTEQDSKDSTYSLSSTLTLSKADYEKHKVYACEVTHQGLSSPVTKSFNRGEC

SEQ ID NO: 19973 - protein, 219 aa, Artificial Sequence
  source: /note="Description of Artificial Sequence: Synthetic polypeptide"
QVLTQSPSSLSASVGDRVTINCRASQSVYYNNYLAWYQQKPGKVPKQLIYSTSTLASGVPSRFSGSGSGTDFTLTISSLQPEDVATYYCLGSYDCSNGDCFVFGGGTKVEIKRTVAAPSVFIFPPSDEQLKSGTASVVCLLNNFYPREAKVQWKVDNALQSGNSQESVTEQDSKDSTYSLSSTLTLSKADYEKHKVYACEVTHQGLSSPVTKSFNRGEC

SEQ ID NO: 19974 - protein, 219 aa, Artificial Sequence
  source: /note="Description of Artificial Sequence: Synthetic polypeptide"
AIVMTQTPSSKSVPVGDTVTINCQASESLYNNNALAWFQQKPGQPPKRLIYDASKLASGVPSRFSGGGSGTQFTLTISGVQCDDAATYYCGGYRSDSVDGVAFAGGTEVVVKRTVAAPSVFIFPPSDEQLKSGTASVVCLLNNFYPREAKVQWKVDNALQSGNSQESVTEQDSKDSTYSLSSTLTLSKADYEKHKVYACEVTHQGLSSPVTKSFNRGEC

SEQ ID NO: 19975 - protein, 219 aa, Artificial Sequence; identical to SEQ ID NO: 19971
  source: /note="Description of Artificial Sequence: Synthetic polypeptide"

SEQ ID NO: 19976 - protein, 219 aa, Artificial Sequence
  source: /note="Description of Artificial Sequence: Synthetic polypeptide"
QVLTQSPSSLSASVGDRVTINCQASQSVYDNNYLAWYQQKPGKVPKQLIYSTSTLASGVPSRFSGSGSGTDFTLTISSLQPEDVATYYCLGSYDCSSGDCFVFGGGTKVEIKRTVAAPSVFIFPPSDEQLKSGTASVVCLLNNFYPREAKVQWKVDNALQSGNSQESVTEQDSKDSTYSLSSTLTLSKADYEKHKVYACEVTHQGLSSPVTKSFNRGEC

SEQ ID NO: 19977 - protein, 219 aa, Artificial Sequence; identical to SEQ ID NO: 19976
  source: /note="Description of Artificial Sequence: Synthetic polypeptide"

SEQ ID NO: 19978 - protein, 219 aa, Artificial Sequence
  source: /note="Description of Artificial Sequence: Synthetic polypeptide"
QVLTQTPSPVSAAVGSTVTINCQASQSVYHNTYLAWYQQKPGQPPKQLIYDASTLASGVPSRFSGSGSGTQFTLTISGVQCNDAAAYYCLGSYDCTNGDCFVFGGGTEVVVKRTVAAPSVFIFPPSDEQLKSGTASVVCLLNNFYPREAKVQWKVDNALQSGNSQESVTEQDSKDSTYSLSSTLTLSKADYEKHKVYACEVTHQGLSSPVTKSFNRGEC

SEQ ID NO: 19979 - protein, 219 aa, Artificial Sequence
  source: /note="Description of Artificial Sequence: Synthetic polypeptide"
QVLTQSPSSLSASVGDRVTINCQASQSVYHNTYLAWYQQKPGKVPKQLIYDASTLASGVPSRFSGSGSGTDFTLTISSLQPEDVATYYCLGSYDCTNGDCFVFGGGTKVEIKRTVAAPSVFIFPPSDEQLKSGTASVVCLLNNFYPREAKVQWKVDNALQSGNSQESVTEQDSKDSTYSLSSTLTLSKADYEKHKVYACEVTHQGLSSPVTKSFNRGEC

SEQ ID NO: 19980 - protein, 219 aa, Artificial Sequence; identical to SEQ ID NO: 19979
  source: /note="Description of Artificial Sequence: Synthetic polypeptide"

SEQ ID NO: 19981 - protein, 219 aa, Artificial Sequence
  source: /note="Description of Artificial Sequence: Synthetic polypeptide"
QVLTQTASPVSAAVGSTVTINCQASQSVYNYNYLAWYQQKPGQPPKQLIYSTSTLASGVSSRFKGSGSGTQFTLTISDVQCDDAATYYCLGSYDCSTGDCFVFGGGTEVVVKRTVAAPSVFIFPPSDEQLKSGTASVVCLLNNFYPREAKVQWKVDNALQSGNSQESVTEQDSKDSTYSLSSTLTLSKADYEKHKVYACEVTHQGLSSPVTKSFNRGEC

SEQ ID NO: 19982 - protein, 219 aa, Artificial Sequence
  source: /note="Description of Artificial Sequence: Synthetic polypeptide"
QVLTQSPSSLSASVGDRVTINCQASQSVYNYNYLAWYQQKPGKVPKQLIYSTSTLASGVPSRFSGSGSGTDFTLTISSLQPEDVATYYCLGSYDCSTGDCFVFGGGTKVEIKRTVAAPSVFIFPPSDEQLKSGTASVVCLLNNFYPREAKVQWKVDNALQSGNSQESVTEQDSKDSTYSLSSTLTLSKADYEKHKVYACEVTHQGLSSPVTKSFNRGEC

SEQ ID NO: 19983 - protein, 219 aa, Artificial Sequence
  source: /note="Description of Artificial Sequence: Synthetic polypeptide"
QVLTQTPSPVSAAVGSTVTINCQASQNVYNNNYLAWYQQKPGQPPKQLIYSTSTLASGVSSRFRGSGSGTQFTLTISDVQCDDAATYYCLGSYDCSRGDCFVFGGGTEVVVKRTVAAPSVFIFPPSDEQLKSGTASVVCLLNNFYPREAKVQWKVDNALQSGNSQESVTEQDSKDSTYSLSSTLTLSKADYEKHKVYACEVTHQGLSSPVTKSFNRGEC

SEQ ID NO: 19984 - protein, 113 aa, Artificial Sequence
  source: /note="Description of Artificial Sequence: Synthetic polypeptide"
QVLTQSPSSLSASVGDRVTINCQASQSVYDNNYLAWYQQKPGKVPKQLIYSTSTLASGVPSRFSGSGSGTDFTLTISSLQPEDVATYYCLGSYDCSSGDCFVFGGGTKVEIKR

SEQ ID NO: 19985 - protein, 113 aa, Artificial Sequence; identical to SEQ ID NO: 19984
  source: /note="Description of Artificial Sequence: Synthetic polypeptide"

SEQ ID NO: 19986 - protein, 113 aa, Artificial Sequence
  source: /note="Description of Artificial Sequence: Synthetic polypeptide"
QVLTQTPSPVSAAVGSTVTINCQASQSVYHNTYLAWYQQKPGQPPKQLIYDASTLASGVPSRFSGSGSGTQFTLTISGVQCNDAAAYYCLGSYDCTNGDCFVFGGGTEVVVKR

SEQ ID NO: 19987 - protein, 113 aa, Artificial Sequence
  source: /note="Description of Artificial Sequence: Synthetic polypeptide"
QVLTQSPSSLSASVGDRVTINCQASQSVYHNTYLAWYQQKPGKVPKQLIYDASTLASGVPSRFSGSGSGTDFTLTISSLQPEDVATYYCLGSYDCTNGDCFVFGGGTKVEIKR

SEQ ID NO: 19988 - protein, 113 aa, Artificial Sequence; identical to SEQ ID NO: 19987
  source: /note="Description of Artificial Sequence: Synthetic polypeptide"

SEQ ID NO: 19989 - protein, 113 aa, Artificial Sequence
  source: /note="Description of Artificial Sequence: Synthetic polypeptide"
QVLTQTASPVSAAVGSTVTINCQASQSVYNYNYLAWYQQKPGQPPKQLIYSTSTLASGVSSRFKGSGSGTQFTLTISDVQCDDAATYYCLGSYDCSTGDCFVFGGGTEVVVKR

SEQ ID NO: 19990 - protein, 113 aa, Artificial Sequence
  source: /note="Description of Artificial Sequence: Synthetic polypeptide"
QVLTQSPSSLSASVGDRVTINCQASQSVYNYNYLAWYQQKPGKVPKQLIYSTSTLASGVPSRFSGSGSGTDFTLTISSLQPEDVATYYCLGSYDCSTGDCFVFGGGTKVEIKR

SEQ ID NO: 19991 - protein, 113 aa, Artificial Sequence
  source: /note="Description of Artificial Sequence: Synthetic polypeptide"
QVLTQTPSPVSAAVGSTVTINCQASQNVYNNNYLAWYQQKPGQPPKQLIYSTSTLASGVSSRFRGSGSGTQFTLTISDVQCDDAATYYCLGSYDCSRGDCFVFGGGTEVVVKR

SEQ ID NO: 19992 - protein, 113 aa, Artificial Sequence
  source: /note="Description of Artificial Sequence: Synthetic polypeptide"
QVLTQSPSSLSASVGDRVTINCQASQNVYNNNYLAWYQQKPGKVPKQLIYSTSTLASGVPSRFSGSGSGTDFTLTISSLQPEDVATYYCLGSYDCSRGDCFVFGGGTKVEIKR

SEQ ID NO: 19993 - protein, 113 aa, Artificial Sequence
  source: /note="Description of Artificial Sequence: Synthetic polypeptide"
QVLTQTASPVSPAVGSTVTINCRASQSVYYNNYLAWYQQKPGQPPKQLIYSTSTLASGVSSRFKGSGSGTQFTLTISDVQCDDAATYYCLGSYDCSNGDCFVFGGGTEVVVKR

SEQ ID NO: 19994 - protein, 113 aa, Artificial Sequence
  source: /note="Description of Artificial Sequence: Synthetic polypeptide"
QVLTQSPSSLSASVGDRVTINCRASQSVYYNNYLAWYQQKPGKVPKQLIYSTSTLASGVPSRFSGSGSGTDFTLTISSLQPEDVATYYCLGSYDCSNGDCFVFGGGTKVEIKR

SEQ ID NO: 19995 - protein, 113 aa, Artificial Sequence
  source: /note="Description of Artificial Sequence: Synthetic polypeptide"
AIVMTQTPSSKSVPVGDTVTINCQASESLYNNNALAWFQQKPGQPPKRLIYDASKLASGVPSRFSGGGSGTQFTLTISGVQCDDAATYYCGGYRSDSVDGVAFAGGTEVVVKR

SEQ ID NO: 19996 - protein, 113 aa, Artificial Sequence; identical to SEQ ID NO: 19992
  source: /note="Description of Artificial Sequence: Synthetic polypeptide"

SEQ ID NO: 19997 - protein, 213 aa, Artificial Sequence; identical to SEQ ID NO: 9832
  source: /note="Description of Artificial Sequence: Synthetic polypeptide"

SEQ ID NO: 19998 - protein, 106 aa, Artificial Sequence; identical to SEQ ID NO: 4957
  source: /note="Description of Artificial Sequence: Synthetic polypeptide"

SEQ ID NO: 19999 - protein, 106 aa, Artificial Sequence; identical to SEQ ID NO: 4950
  source: /note="Description of Artificial Sequence: Synthetic polypeptide"

SEQ ID NO: 20000 - protein, 106 aa, Artificial Sequence; identical to SEQ ID NO: 4950
  source: /note="Description of Artificial Sequence: Synthetic polypeptide"

SEQ ID NO: 20001 - protein, 106 aa, Artificial Sequence; identical to SEQ ID NO: 4951
  source: /note="Description of Artificial Sequence: Synthetic polypeptide"

SEQ ID NO: 20002 - protein, 106 aa, Artificial Sequence; identical to SEQ ID NO: 4953
  source: /note="Description of Artificial Sequence: Synthetic polypeptide"

SEQ ID NO: 20003 - protein, 106 aa, Artificial Sequence; identical to SEQ ID NO: 4954
  source: /note="Description of Artificial Sequence: Synthetic polypeptide"

SEQ ID NO: 20004 - protein, 106 aa, Artificial Sequence; identical to SEQ ID NO: 4956
  source: /note="Description of Artificial Sequence: Synthetic polypeptide"

SEQ ID NO: 20005 - protein, 106 aa, Artificial Sequence; identical to SEQ ID NO: 4952
  source: /note="Description of Artificial Sequence: Synthetic polypeptide"

SEQ ID NO: 20006 - protein, 106 aa, Artificial Sequence; identical to SEQ ID NO: 4955
  source: /note="Description of Artificial Sequence: Synthetic polypeptide"

SEQ ID NO: 20007 - protein, 107 aa, Artificial Sequence; identical to SEQ ID NO: 10764
  source: /note="Description of Artificial Sequence: Synthetic polypeptide"

SEQ ID NO: 20008 - protein, 107 aa, Artificial Sequence; identical to SEQ ID NO: 10763
  source: /note="Description of Artificial Sequence: Synthetic polypeptide"

SEQ ID NO: 20009 - protein, 106 aa, Artificial Sequence; identical to SEQ ID NO: 10744
  source: /note="Description of Artificial Sequence: Synthetic polypeptide"

SEQ ID NO: 20010 - protein, 107 aa, Artificial Sequence; identical to SEQ ID NO: 10767
  source: /note="Description of Artificial Sequence: Synthetic polypeptide"

SEQ ID NO: 20011 - protein, 113 aa, Artificial Sequence; identical to SEQ ID NO: 10755
  source: /note="Description of Artificial Sequence: Synthetic polypeptide"

SEQ ID NO: 20012 - protein, 113 aa, Artificial Sequence; identical to SEQ ID NO: 10768
  source: /note="Description of Artificial Sequence: Synthetic polypeptide"

SEQ ID NO: 20013 - protein, 107 aa, Artificial Sequence; identical to SEQ ID NO: 10764
  source: /note="Description of Artificial Sequence: Synthetic polypeptide"

SEQ ID NO: 20014 - protein, 107 aa, Artificial Sequence; identical to SEQ ID NO: 10763
  source: /note="Description of Artificial Sequence: Synthetic polypeptide"

SEQ ID NO: 20015 - protein, 107 aa, Artificial Sequence; identical to SEQ ID NO: 10745
  source: /note="Description of Artificial Sequence: Synthetic polypeptide"

SEQ ID NO: 20016 - protein, 107 aa, Artificial Sequence; identical to SEQ ID NO: 10746
  source: /note="Description of Artificial Sequence: Synthetic polypeptide"

SEQ ID NO: 20017 - protein, 108 aa, Artificial Sequence; identical to SEQ ID NO: 10747
  source: /note="Description of Artificial Sequence: Synthetic polypeptide"

SEQ ID NO: 20018 - protein, 107 aa, Artificial Sequence; identical to SEQ ID NO: 10748
  source: /note="Description of Artificial Sequence: Synthetic polypeptide"

SEQ ID NO: 20019 - protein, 107 aa, Artificial Sequence; identical to SEQ ID NO: 10749
  source: /note="Description of Artificial Sequence: Synthetic polypeptide"

SEQ ID NO: 20020 - protein, 107 aa, Artificial Sequence; identical to SEQ ID NO: 10750
  source: /note="Description of Artificial Sequence: Synthetic polypeptide"

SEQ ID NO: 20021 - protein, 107 aa, Artificial Sequence; identical to SEQ ID NO: 10751
  source: /note="Description of Artificial Sequence: Synthetic polypeptide"

SEQ ID NO: 20022 - protein, 106 aa, Artificial Sequence; identical to SEQ ID NO: 10752
  source: /note="Description of Artificial Sequence: Synthetic polypeptide"

SEQ ID NO: 20023 - protein, 108 aa, Artificial Sequence; identical to SEQ ID NO: 10753
  source: /note="Description of Artificial Sequence: Synthetic polypeptide"

SEQ ID NO: 20024 - protein, 106 aa, Artificial Sequence; identical to SEQ ID NO: 10754
  source: /note="Description of Artificial Sequence: Synthetic polypeptide"

SEQ ID NO: 20025 - protein, 108 aa, Artificial Sequence; identical to SEQ ID NO: 10756
  source: /note="Description of Artificial Sequence: Synthetic polypeptide"

SEQ ID NO: 20026 - protein, 107 aa, Artificial Sequence; identical to SEQ ID NO: 10757
  source: /note="Description of Artificial Sequence: Synthetic polypeptide"

SEQ ID NO: 20027 - protein, 108 aa, Artificial Sequence; identical to SEQ ID NO: 10758
  source: /note="Description of Artificial Sequence: Synthetic polypeptide"

SEQ ID NO: 20028 - protein, 108 aa, Artificial Sequence; identical to SEQ ID NO: 10759
  source: /note="Description of Artificial Sequence: Synthetic polypeptide"

SEQ ID NO: 20029 - protein, 106 aa, Artificial Sequence; identical to SEQ ID NO: 10760
  source: /note="Description of Artificial Sequence: Synthetic polypeptide"

SEQ ID NO: 20030 - protein, 107 aa, Artificial Sequence; identical to SEQ ID NO: 10761
  source: /note="Description of Artificial Sequence: Synthetic polypeptide"

SEQ ID NO: 20031 - protein, 107 aa, Artificial Sequence; identical to SEQ ID NO: 10762
  source: /note="Description of Artificial Sequence: Synthetic polypeptide"

SEQ ID NO: 20032 - protein, 108 aa, Artificial Sequence; identical to SEQ ID NO: 10817
  source: /note="Description of Artificial Sequence: Synthetic polypeptide"

SEQ ID NO: 20033 - protein, 108 aa, Artificial Sequence; identical to SEQ ID NO: 10818
  source: /note="Description of Artificial Sequence: Synthetic polypeptide"

SEQ ID NO: 20034 - protein, 108 aa, Artificial Sequence; identical to SEQ ID NO: 10819
  source: /note="Description of Artificial Sequence: Synthetic polypeptide"

SEQ ID NO: 20035 - protein, 113 aa, Artificial Sequence; identical to SEQ ID NO: 10820
  source: /note="Description of Artificial Sequence: Synthetic polypeptide"

SEQ ID NO: 20036 - protein, 108 aa, Artificial Sequence; identical to SEQ ID NO: 10821
  source: /note="Description of Artificial Sequence: Synthetic polypeptide"

SEQ ID NO: 20037 - protein, 108 aa, Artificial Sequence; identical to SEQ ID NO: 10822
  source: /note="Description of Artificial Sequence: Synthetic polypeptide"

SEQ ID NO: 20038 - protein, 113 aa, Artificial Sequence; identical to SEQ ID NO: 10823
  source: /note="Description of Artificial Sequence: Synthetic polypeptide"

SEQ ID NO: 20039 - protein, 108 aa, Artificial Sequence; identical to SEQ ID NO: 10824
  source: /note="Description of Artificial Sequence: Synthetic polypeptide"

SEQ ID NO: 20040 - protein, 107 aa, Artificial Sequence; identical to SEQ ID NO: 10953
  source: /note="Description of Artificial Sequence: Synthetic polypeptide"

SEQ ID NO: 20041 - protein, 108 aa, Artificial Sequence; identical to SEQ ID NO: 10889
  source: /note="Description of Artificial Sequence: Synthetic polypeptide"

SEQ ID NO: 20042 - protein, 114 aa, Artificial Sequence; identical to SEQ ID NO: 10954
  source: /note="Description of Artificial Sequence: Synthetic polypeptide"

SEQ ID NO: 20043 - protein, 108 aa, Artificial Sequence; identical to SEQ ID NO: 10813
  source: /note="Description of Artificial Sequence: Synthetic polypeptide"

SEQ ID NO: 20044 - protein, 109 aa, Artificial Sequence; identical to SEQ ID NO: 10814
  source: /note="Description of Artificial Sequence: Synthetic polypeptide"

SEQ ID NO: 20045 - protein, 108 aa, Artificial Sequence; identical to SEQ ID NO: 10815
  source: /note="Description of Artificial Sequence: Synthetic polypeptide"

SEQ ID NO: 20046 - protein, 107 aa, Artificial Sequence; identical to SEQ ID NO: 10870
  source: /note="Description of Artificial Sequence: Synthetic polypeptide"

SEQ ID NO: 20047 - protein, 112 aa, Artificial Sequence; identical to SEQ ID NO: 10962
  source: /note="Description of Artificial Sequence: Synthetic polypeptide"

SEQ ID NO: 20048 - protein, 113 aa, Artificial Sequence; identical to SEQ ID NO: 10837
  source: /note="Description of Artificial Sequence: Synthetic polypeptide"

SEQ ID NO: 20049 - protein, 112 aa, Artificial Sequence; identical to SEQ ID NO: 10957
  source: /note="Description of Artificial Sequence: Synthetic polypeptide"

SEQ ID NO: 20050 - protein, 112 aa, Artificial Sequence; identical to SEQ ID NO: 10958
  source: /note="Description of Artificial Sequence: Synthetic polypeptide"

SEQ ID NO: 20051 - protein, 112 aa, Artificial Sequence; identical to SEQ ID NO: 10794
  source: /note="Description of Artificial Sequence: Synthetic polypeptide"

SEQ ID NO: 20052 - protein, 112 aa, Artificial Sequence; identical to SEQ ID NO: 10960
  source: /note="Description of Artificial Sequence: Synthetic polypeptide"

SEQ ID NO: 20053 - protein, 112 aa, Artificial Sequence; identical to SEQ ID NO: 10805
  source: /note="Description of Artificial Sequence: Synthetic polypeptide"

SEQ ID NO: 20054 - protein, 107 aa, Artificial Sequence; identical to SEQ ID NO: 10816
  source: /note="Description of Artificial Sequence: Synthetic polypeptide"

SEQ ID NO: 20055 - protein, 112 aa, Artificial Sequence; identical to SEQ ID NO: 10794
  source: /note="Description of Artificial Sequence: Synthetic polypeptide"

SEQ ID NO: 20056 - protein, 107 aa, Artificial Sequence; identical to SEQ ID NO: 10961
  source: /note="Description of Artificial Sequence: Synthetic polypeptide"

SEQ ID NO: 20057 - protein, 112 aa, Artificial Sequence; identical to SEQ ID NO: 10962
  source: /note="Description of Artificial Sequence: Synthetic polypeptide"

SEQ ID NO: 20058 - protein, 108 aa, Artificial Sequence; identical to SEQ ID NO: 10882
  source: /note="Description of Artificial Sequence: Synthetic polypeptide"

SEQ ID NO: 20059 - protein, 110 aa, Artificial Sequence; identical to SEQ ID NO: 10789
  source: /note="Description of Artificial Sequence: Synthetic polypeptide"

SEQ ID NO: 20060 - protein, 108 aa, Artificial Sequence; identical to SEQ ID NO: 10883
  source: /note="Description of Artificial Sequence: Synthetic polypeptide"

SEQ ID NO: 20061 - protein, 108 aa, Artificial Sequence; identical to SEQ ID NO: 10790
  source: /note="Description of Artificial Sequence: Synthetic polypeptide"

SEQ ID NO: 20062 - protein, 108 aa, Artificial Sequence; identical to SEQ ID NO: 10791
  source: /note="Description of Artificial Sequence: Synthetic polypeptide"

SEQ ID NO: 20063 - protein, 108 aa, Artificial Sequence; identical to SEQ ID NO: 10884
  source: /note="Description of Artificial Sequence: Synthetic polypeptide"

SEQ ID NO: 20064 - protein, 108 aa, Artificial Sequence; identical to SEQ ID NO: 10793
  source: /note="Description of Artificial Sequence: Synthetic polypeptide"

SEQ ID NO: 20065 - protein, 108 aa, Artificial Sequence; identical to SEQ ID NO: 10795
  source: /note="Description of Artificial Sequence: Synthetic polypeptide"

SEQ ID NO: 20066 - protein, 108 aa, Artificial Sequence; identical to SEQ ID NO: 10796
  source: /note="Description of Artificial Sequence: Synthetic polypeptide"

SEQ ID NO: 20067 - protein, 108 aa, Artificial Sequence; identical to SEQ ID NO: 10797
  source: /note="Description of Artificial Sequence: Synthetic polypeptide"

SEQ ID NO: 20068 - protein, 108 aa, Artificial Sequence; identical to SEQ ID NO: 10885
  source: /note="Description of Artificial Sequence: Synthetic polypeptide"

SEQ ID NO: 20069 - protein, 108 aa, Artificial Sequence; identical to SEQ ID NO: 10792
  source: /note="Description of Artificial Sequence: Synthetic polypeptide"

SEQ ID NO: 20070 - protein, 108 aa, Artificial Sequence; identical to SEQ ID NO: 10886
  source: /note="Description of Artificial Sequence: Synthetic polypeptide"

SEQ ID NO: 20071 - protein, 107 aa, Artificial Sequence; identical to SEQ ID NO: 10798
  source: /note="Description of Artificial Sequence: Synthetic polypeptide"

SEQ ID NO: 20072 - protein, 108 aa, Artificial Sequence; identical to SEQ ID NO: 10799
  source: /note="Description of Artificial Sequence: Synthetic polypeptide"

SEQ ID NO: 20073 - protein, 108 aa, Artificial Sequence; identical to SEQ ID NO: 10887
  source: /note="Description of Artificial Sequence: Synthetic polypeptide"

SEQ ID NO: 20074 - protein, 108 aa, Artificial Sequence; identical to SEQ ID NO: 10889
  source: /note="Description of Artificial Sequence: Synthetic polypeptide"

SEQ ID NO: 20075 - protein, 108 aa, Artificial Sequence; identical to SEQ ID NO: 10800
  source: /note="Description of Artificial Sequence: Synthetic polypeptide"

SEQ ID NO: 20076 - protein, 108 aa, Artificial Sequence; identical to SEQ ID NO: 10801
  source: /note="Description of Artificial Sequence: Synthetic polypeptide"

SEQ ID NO: 20077 - protein, 108 aa, Artificial Sequence; identical to SEQ ID NO: 10802
  source: /note="Description of Artificial Sequence: Synthetic polypeptide"

SEQ ID NO: 20078 - protein, 108 aa, Artificial Sequence; identical to SEQ ID NO: 10890
  source: /note="Description of Artificial Sequence: Synthetic polypeptide"

SEQ ID NO: 20079 - protein, 108 aa, Artificial Sequence; identical to SEQ ID NO: 10891
  source: /note="Description of Artificial Sequence: Synthetic polypeptide"

SEQ ID NO: 20080 - protein, 108 aa, Artificial Sequence; identical to SEQ ID NO: 10803
  source: /note="Description of Artificial Sequence: Synthetic polypeptide"

SEQ ID NO: 20081 - protein, 108 aa, Artificial Sequence; identical to SEQ ID NO: 10804
  source: /note="Description of Artificial Sequence: Synthetic polypeptide"

SEQ ID NO: 20082 - protein, 108 aa, Artificial Sequence; identical to SEQ ID NO: 10806
  source: /note="Description of Artificial Sequence: Synthetic polypeptide"

SEQ ID NO: 20083 - protein, 108 aa, Artificial Sequence; identical to SEQ ID NO: 10807
  source: /note="Description of Artificial Sequence: Synthetic polypeptide"

SEQ ID NO: 20084 - protein, 108 aa, Artificial Sequence; identical to SEQ ID NO: 10892
  source: /note="Description of Artificial Sequence: Synthetic polypeptide"

SEQ ID NO: 20085 - protein, 108 aa, Artificial Sequence; identical to SEQ ID NO: 10893
  source: /note="Description of Artificial Sequence: Synthetic polypeptide"

SEQ ID NO: 20086 - protein, 108 aa, Artificial Sequence; identical to SEQ ID NO: 10808
  source: /note="Description of Artificial Sequence: Synthetic polypeptide"

SEQ ID NO: 20087 - protein, 108 aa, Artificial Sequence; identical to SEQ ID NO: 10894
  source: /note="Description of Artificial Sequence: Synthetic polypeptide"

SEQ ID NO: 20088 - protein, 108 aa, Artificial Sequence; identical to SEQ ID NO: 10809
  source: /note="Description of Artificial Sequence: Synthetic polypeptide"

SEQ ID NO: 20089 - protein, 113 aa, Artificial Sequence; identical to SEQ ID NO: 10810
  source: /note="Description of Artificial Sequence: Synthetic polypeptide"

SEQ ID NO: 20090 - protein, 108 aa, Artificial Sequence; identical to SEQ ID NO: 10811
  source: /note="Description of Artificial Sequence: Synthetic polypeptide"

SEQ ID NO: 20091 - protein, 108 aa, Artificial Sequence; identical to SEQ ID NO: 10812
  source: /note="Description of Artificial Sequence: Synthetic polypeptide"

SEQ ID NO: 20092 - protein, 108 aa, Artificial Sequence; identical to SEQ ID NO: 10895
  source: /note="Description of Artificial Sequence: Synthetic polypeptide"

SEQ ID NO: 20093 - protein, 108 aa, Artificial Sequence; identical to SEQ ID NO: 10896
  source: /note="Description of Artificial Sequence: Synthetic polypeptide"

SEQ ID NO: 20094 - protein, 108 aa, Artificial Sequence; identical to SEQ ID NO: 10897
  source: /note="Description of Artificial Sequence: Synthetic polypeptide"

SEQ ID NO: 20095 - protein, 108 aa, Artificial Sequence; identical to SEQ ID NO: 10898
  source: /note="Description of Artificial Sequence: Synthetic polypeptide"

SEQ ID NO: 20096 - protein, 108 aa, Artificial Sequence; identical to SEQ ID NO: 10899
  source: /note="Description of Artificial Sequence: Synthetic polypeptide"

SEQ ID NO: 20097 - protein, 108 aa, Artificial Sequence; identical to SEQ ID NO: 10900
  source: /note="Description of Artificial Sequence: Synthetic polypeptide"

SEQ ID NO: 20098 - protein, 108 aa, Artificial Sequence; identical to SEQ ID NO: 10901
  source: /note="Description of Artificial Sequence: Synthetic polypeptide"

SEQ ID NO: 20099 - protein, 113 aa, Artificial Sequence; identical to SEQ ID NO: 10902
  source: /note="Description of Artificial Sequence: Synthetic polypeptide"

SEQ ID NO: 20100 - protein, 113 aa, Artificial Sequence; identical to SEQ ID NO: 10903
  source: /note="Description of Artificial Sequence: Synthetic polypeptide"

SEQ ID NO: 20101 - protein, 108 aa, Artificial Sequence; identical to SEQ ID NO: 10904
  source: /note="Description of Artificial Sequence: Synthetic polypeptide"

SEQ ID NO: 20102 - protein, 108 aa, Artificial Sequence; identical to SEQ ID NO: 10905
  source: /note="Description of Artificial Sequence: Synthetic polypeptide"

SEQ ID NO: 20103 - protein, 113 aa, Artificial Sequence; identical to SEQ ID NO: 10837
  source: /note="Description of Artificial Sequence: Synthetic polypeptide"

SEQ ID NO: 20104 - protein, 109 aa, Artificial Sequence; identical to SEQ ID NO: 10967
  source: /note="Description of Artificial Sequence: Synthetic polypeptide"

SEQ ID NO: 20105 - protein, 107 aa, Artificial Sequence; identical to SEQ ID NO: 10970
  source: /note="Description of Artificial Sequence: Synthetic polypeptide"

SEQ ID NO: 20106 - protein, 108 aa, Artificial Sequence; identical to SEQ ID NO: 10825
  source: /note="Description of Artificial Sequence: Synthetic polypeptide"

SEQ ID NO: 20107 - protein, 114 aa, Artificial Sequence; identical to SEQ ID NO: 10848
  source: /note="Description of Artificial Sequence: Synthetic polypeptide"

SEQ ID NO: 20108 - protein, 113 aa, Artificial Sequence; identical to SEQ ID NO: 10969
  source: /note="Description of Artificial Sequence: Synthetic polypeptide"

SEQ ID NO: 20109 - protein, 114 aa, Artificial Sequence; identical to SEQ ID NO: 10906
  source: /note="Description of Artificial Sequence: Synthetic polypeptide"

SEQ ID NO: 20110 - protein, 114 aa, Artificial Sequence; identical to SEQ ID NO: 10907
  source: /note="Description of Artificial Sequence: Synthetic polypeptide"

SEQ ID NO: 20111 - protein, 114 aa, Artificial Sequence; identical to SEQ ID NO: 10827
  source: /note="Description of Artificial Sequence: Synthetic polypeptide"

SEQ ID NO: 20112 - protein, 114 aa, Artificial Sequence; identical to SEQ ID NO: 10908
  source: /note="Description of Artificial Sequence: Synthetic polypeptide"

SEQ ID NO: 20113 - protein, 108 aa, Artificial Sequence; identical to SEQ ID NO: 10834
  source: /note="Description of Artificial Sequence: Synthetic polypeptide"

SEQ ID NO: 20114 - protein, 114 aa, Artificial Sequence; identical to SEQ ID NO: 10829
  source: /note="Description of Artificial Sequence: Synthetic polypeptide"

SEQ ID NO: 20115 - protein, 114 aa, Artificial Sequence; identical to SEQ ID NO: 10910
  source: /note="Description of Artificial Sequence: Synthetic polypeptide"

SEQ ID NO: 20116 - protein, 114 aa, Artificial Sequence; identical to SEQ ID NO: 10828
  source: /note="Description of Artificial Sequence: Synthetic polypeptide"

SEQ ID NO: 20117 - protein, 114 aa, Artificial Sequence; identical to SEQ ID NO: 10829
  source: /note="Description of Artificial Sequence: Synthetic polypeptide"

SEQ ID NO: 20118 - protein, 114 aa, Artificial Sequence; identical to SEQ ID NO: 10830
  source: /note="Description of Artificial Sequence: Synthetic polypeptide"

SEQ ID NO: 20119 - protein, 114 aa, Artificial Sequence; identical to SEQ ID NO: 10911
  source: /note="Description of Artificial Sequence: Synthetic polypeptide"

SEQ ID NO: 20120 - protein, 114 aa, Artificial Sequence; identical to SEQ ID NO: 10912
  source: /note="Description of Artificial Sequence: Synthetic polypeptide"

SEQ ID NO: 20121 - protein, 114 aa, Artificial Sequence; identical to SEQ ID NO: 10913
  source: /note="Description of Artificial Sequence: Synthetic polypeptide"

SEQ ID NO: 20122 - protein, 108 aa, Artificial Sequence; identical to SEQ ID NO: 10914
  source: /note="Description of Artificial Sequence: Synthetic polypeptide"

SEQ ID NO: 20123 - protein, 114 aa, Artificial Sequence; identical to SEQ ID NO: 10831
  source: /note="Description of Artificial Sequence: Synthetic polypeptide"

SEQ ID NO: 20124 - protein, 114 aa, Artificial Sequence; identical to SEQ ID NO: 10915
  source: /note="Description of Artificial Sequence: Synthetic polypeptide"

SEQ ID NO: 20125 - protein, 108 aa, Artificial Sequence; identical to SEQ ID NO: 10832
  source: /note="Description of Artificial Sequence: Synthetic polypeptide"

SEQ ID NO: 20126 - protein, 114 aa, Artificial Sequence; identical to SEQ ID NO: 10879
  source: /note="Description of Artificial Sequence: Synthetic polypeptide"

SEQ ID NO: 20127 - protein, 114 aa, Artificial Sequence; identical to SEQ ID NO: 10916
  source: /note="Description of Artificial Sequence: Synthetic polypeptide"

SEQ ID NO: 20128 - protein, 114 aa, Artificial Sequence; identical to SEQ ID NO: 10833
  source: /note="Description of Artificial Sequence: Synthetic polypeptide"

SEQ ID NO: 20129 - protein, 114 aa, Artificial Sequence; identical to SEQ ID NO: 10833
  source: /note="Description of Artificial Sequence: Synthetic polypeptide"

SEQ ID NO: 20130 - protein, 114 aa, Artificial Sequence; identical to SEQ ID NO: 10917
  source: /note="Description of Artificial Sequence: Synthetic polypeptide"

SEQ ID NO: 20131 - protein, 108 aa, Artificial Sequence; identical to SEQ ID NO: 10834
  source: /note="Description of Artificial Sequence: Synthetic polypeptide"

SEQ ID NO: 20132 - protein, 114 aa, Artificial Sequence; identical to SEQ ID NO: 10880
  source: /note="Description of Artificial Sequence: Synthetic polypeptide"

SEQ ID NO: 20133 - protein, 113 aa, Artificial Sequence; identical to SEQ ID NO: 10881
  source: /note="Description of Artificial Sequence: Synthetic polypeptide"

SEQ ID NO: 20134 - protein, 114 aa, Artificial Sequence; identical to SEQ ID NO: 10918
  source: /note="Description of Artificial Sequence: Synthetic polypeptide"

SEQ ID NO: 20135 - protein, 108 aa, Artificial Sequence; identical to SEQ ID NO: 10919
  source: /note="Description of Artificial Sequence: Synthetic polypeptide"

SEQ ID NO: 20136 - protein, 114 aa, Artificial Sequence; identical to SEQ ID NO: 10920
  source: /note="Description of Artificial Sequence: Synthetic polypeptide"

SEQ ID NO: 20137 - protein, 114 aa, Artificial Sequence; identical to SEQ ID NO: 10920
  source: /note="Description of Artificial Sequence: Synthetic polypeptide"

SEQ ID NO: 20138 - protein, 114 aa, Artificial Sequence; identical to SEQ ID NO: 10835
  source: /note="Description of Artificial Sequence: Synthetic polypeptide"

SEQ ID NO: 20139 - protein, 114 aa, Artificial Sequence; identical to SEQ ID NO: 10842
  source: /note="Description of Artificial Sequence: Synthetic polypeptide"

SEQ ID NO: 20140 - protein, 108 aa, Artificial Sequence; identical to SEQ ID NO: 10834
  source: /note="Description of Artificial Sequence: Synthetic polypeptide"

SEQ ID NO: 20141 - protein, 114 aa, Artificial Sequence; identical to SEQ ID NO: 10838
  source: /note="Description of Artificial Sequence: Synthetic polypeptide"

SEQ ID NO: 20142 - protein, 108 aa, Artificial Sequence; identical to SEQ ID NO: 10839
  source: /note="Description of Artificial Sequence: Synthetic polypeptide"

SEQ ID NO: 20143 - protein, 108 aa, Artificial Sequence; identical to SEQ ID NO: 10840
  source: /note="Description of Artificial Sequence: Synthetic polypeptide"

SEQ ID NO: 20144 - protein, 114 aa, Artificial Sequence; identical to SEQ ID NO: 10921
  source: /note="Description of Artificial Sequence: Synthetic polypeptide"

SEQ ID NO: 20145 - protein, 108 aa, Artificial Sequence; identical to SEQ ID NO: 10909
  source: /note="Description of Artificial Sequence: Synthetic polypeptide"

SEQ ID NO: 20146 - protein, 114 aa, Artificial Sequence; identical to SEQ ID NO: 10841
  source: /note="Description of Artificial Sequence: Synthetic polypeptide"

SEQ ID NO: 20147 - protein, 114 aa, Artificial Sequence; identical to SEQ ID NO: 10923
  source: /note="Description of Artificial Sequence: Synthetic polypeptide"

SEQ ID NO: 20148 - protein, 108 aa, Artificial Sequence; identical to SEQ ID NO: 10922
  source: /note="Description of Artificial Sequence: Synthetic polypeptide"

SEQ ID NO: 20149 - protein, 114 aa, Artificial Sequence; identical to SEQ ID NO: 10924
  source: /note="Description of Artificial Sequence: Synthetic polypeptide"

SEQ ID NO: 20150 - protein, 108 aa, Artificial Sequence; identical to SEQ ID NO: 10925
  source: /note="Description of Artificial Sequence: Synthetic polypeptide"

SEQ ID NO: 20151 - protein, 114 aa, Artificial Sequence; identical to SEQ ID NO: 10842
  source: /note="Description of Artificial Sequence: Synthetic polypeptide"

SEQ ID NO: 20152 - protein, 114 aa, Artificial Sequence; identical to SEQ ID NO: 10843
  source: /note="Description of Artificial Sequence: Synthetic polypeptide"

SEQ ID NO: 20153 - protein, 114 aa, Artificial Sequence; identical to SEQ ID NO: 10844
  source: /note="Description of Artificial Sequence: Synthetic polypeptide"

SEQ ID NO: 20154 - protein, 114 aa, Artificial Sequence; identical to SEQ ID NO: 10926
  source: /note="Description of Artificial Sequence: Synthetic polypeptide"

SEQ ID NO: 20155 - protein, 114 aa, Artificial Sequence; identical to SEQ ID NO: 10845
  source: /note="Description of Artificial Sequence: Synthetic polypeptide"

SEQ ID NO: 20156 - protein, 108 aa, Artificial Sequence; identical to SEQ ID NO: 10851
  source: /note="Description of Artificial Sequence: Synthetic polypeptide"

SEQ ID NO: 20157 - protein, 108 aa, Artificial Sequence; identical to SEQ ID NO: 10927
  source: /note="Description of Artificial Sequence: Synthetic polypeptide"

SEQ ID NO: 20158 - protein, 108 aa, Artificial Sequence; identical to SEQ ID NO: 10928
  source: /note="Description of Artificial Sequence: Synthetic polypeptide"

SEQ ID NO: 20159 - protein, 108 aa, Artificial Sequence; identical to SEQ ID NO: 10929
  source: /note="Description of Artificial Sequence: Synthetic polypeptide"

SEQ ID NO: 20160 - protein, 114 aa, Artificial Sequence; identical to SEQ ID NO: 10931
  source: /note="Description of Artificial Sequence: Synthetic polypeptide"

SEQ ID NO: 20161 - protein, 114 aa, Artificial Sequence; identical to SEQ ID NO: 10846
  source: /note="Description of Artificial Sequence: Synthetic polypeptide"

SEQ ID NO: 20162 - protein, 114 aa, Artificial Sequence; identical to SEQ ID NO: 10846
  source: /note="Description of Artificial Sequence: Synthetic polypeptide"

SEQ ID NO: 20163 - protein, 113 aa, Artificial Sequence; identical to SEQ ID NO: 10950
  source: /note="Description of Artificial Sequence: Synthetic polypeptide"

SEQ ID NO: 20164 - protein, 114 aa, Artificial Sequence; identical to SEQ ID NO: 10932
  source: /note="Description of Artificial Sequence: Synthetic polypeptide"

SEQ ID NO: 20165 - protein, 108 aa, Artificial Sequence; identical to SEQ ID NO: 10847
  source: /note="Description of Artificial Sequence: Synthetic polypeptide"

SEQ ID NO: 20166 - protein, 108 aa, Artificial Sequence; identical to SEQ ID NO: 10847
  source: /note="Description of Artificial Sequence: Synthetic polypeptide"

SEQ ID NO: 20167 - protein, 108 aa, Artificial Sequence; identical to SEQ ID NO: 10946
  source: /note="Description of Artificial Sequence: Synthetic polypeptide"

SEQ ID NO: 20168 - protein, 107 aa, Artificial Sequence; identical to SEQ ID NO: 10955
  source: /note="Description of Artificial Sequence: Synthetic polypeptide"

SEQ ID NO: 20169 - protein, 114 aa, Artificial Sequence; identical to SEQ ID NO: 10933
  source: /note="Description of Artificial Sequence: Synthetic polypeptide"

SEQ ID NO: 20170 - protein, 108 aa, Artificial Sequence; identical to SEQ ID NO: 10934
  source: /note="Description of Artificial Sequence: Synthetic polypeptide"

SEQ ID NO: 20171 - protein, 108 aa, Artificial Sequence; identical to SEQ ID NO: 10934
  source: /note="Description of Artificial Sequence: Synthetic polypeptide"

SEQ ID NO: 20172 - protein, 107 aa, Artificial Sequence; identical to SEQ ID NO: 10968
  source: /note="Description of Artificial Sequence: Synthetic polypeptide"

SEQ ID NO: 20173 - protein, 114 aa, Artificial Sequence; identical to SEQ ID NO: 10849
  source: /note="Description of Artificial Sequence: Synthetic polypeptide"

SEQ ID NO: 20174 - protein, 108 aa, Artificial Sequence; identical to SEQ ID NO: 10959
  source: /note="Description of Artificial Sequence: Synthetic polypeptide"

SEQ ID NO: 20175 - protein, 108 aa, Artificial Sequence; identical to SEQ ID NO: 10850
  source: /note="Description of Artificial Sequence: Synthetic polypeptide"

SEQ ID NO: 20176 - protein, 108 aa, Artificial Sequence; identical to SEQ ID NO: 10851
  source: /note="Description of Artificial Sequence: Synthetic polypeptide"

SEQ ID NO: 20177 - protein, 108 aa, Artificial Sequence; identical to SEQ ID NO: 10963
  source: /note="Description of Artificial Sequence: Synthetic polypeptide"

SEQ ID NO: 20178 - protein, 114 aa, Artificial Sequence; identical to SEQ ID NO: 10935
  source: /note="Description of Artificial Sequence: Synthetic polypeptide"

SEQ ID NO: 20179 - protein, 114 aa, Artificial Sequence; identical to SEQ ID NO: 10936
  source: /note="Description of Artificial Sequence: Synthetic polypeptide"

SEQ ID NO: 20180 - protein, 108 aa, Artificial Sequence; identical to SEQ ID NO: 10851
  source: /note="Description of Artificial Sequence: Synthetic polypeptide"

SEQ ID NO: 20181 - protein, 108 aa, Artificial Sequence; identical to SEQ ID NO: 10938
  source: /note="Description of Artificial Sequence: Synthetic polypeptide"

SEQ ID NO: 20182 - protein, 114 aa, Artificial Sequence; identical to SEQ ID NO: 10852
  source: /note="Description of Artificial Sequence: Synthetic polypeptide"

SEQ ID NO: 20183 - protein, 108 aa, Artificial Sequence; identical to SEQ ID NO: 10853
  source: /note="Description of Artificial Sequence: Synthetic polypeptide"

SEQ ID NO: 20184 - protein, 114 aa, Artificial Sequence; identical to SEQ ID NO: 10854
  source: /note="Description of Artificial Sequence: Synthetic polypeptide"

SEQ ID NO: 20185 - protein, 114 aa, Artificial Sequence; identical to SEQ ID NO: 10939
  source: /note="Description of Artificial Sequence: Synthetic polypeptide"

SEQ ID NO: 20186 - protein, 113 aa, Artificial Sequence; identical to SEQ ID NO: 10855
  source: /note="Description of Artificial Sequence: Synthetic polypeptide"

SEQ ID NO: 20187 - protein, 108 aa, Artificial Sequence; identical to SEQ ID NO: 10856
  source: /note="Description of Artificial Sequence: Synthetic polypeptide"

SEQ ID NO: 20188 - protein, 108 aa, Artificial Sequence; identical to SEQ ID NO: 10857
  source: /note="Description of Artificial Sequence: Synthetic polypeptide"

SEQ ID NO: 20189 - protein, 108 aa, Artificial Sequence; identical to SEQ ID NO: 10858
  source: /note="Description of Artificial Sequence: Synthetic polypeptide"

SEQ ID NO: 20190 - protein, 108 aa, Artificial Sequence; identical to SEQ ID NO: 10860
  source: /note="Description of Artificial Sequence: Synthetic polypeptide"

SEQ ID NO: 20191 - protein, 108 aa, Artificial Sequence; identical to SEQ ID NO: 10856
  source: /note="Description of Artificial Sequence: Synthetic polypeptide"

SEQ ID NO: 20192 - protein, 108 aa, Artificial Sequence; identical to SEQ ID NO: 10862
  source: /note="Description of Artificial Sequence: Synthetic polypeptide"

SEQ ID NO: 20193 - protein, 113 aa, Artificial Sequence; identical to SEQ ID NO: 10855
  source: /note="Description of Artificial Sequence: Synthetic polypeptide"

SEQ ID NO: 20194 - protein, 108 aa, Artificial Sequence; identical to SEQ ID NO: 10966
  source: /note="Description of Artificial Sequence: Synthetic polypeptide"

SEQ ID NO: 20195 - protein, 107 aa, Artificial Sequence; identical to SEQ ID NO: 10971
  source: /note="Description of Artificial Sequence: Synthetic polypeptide"

SEQ ID NO: 20196 - protein, 108 aa, Artificial Sequence; identical to SEQ ID NO: 10940
  source: /note="Description of Artificial Sequence: Synthetic polypeptide"

SEQ ID NO: 20197 - protein, 108 aa, Artificial Sequence; identical to SEQ ID NO: 10941
  source: /note="Description of Artificial Sequence: Synthetic polypeptide"

SEQ ID NO: 20198 - protein, 108 aa, Artificial Sequence; identical to SEQ ID NO: 10972
  source: /note="Description of Artificial Sequence: Synthetic polypeptide"

SEQ ID NO: 20199 - protein, 107 aa, Artificial Sequence; identical to SEQ ID NO: 10973
  source: /note="Description of Artificial Sequence: Synthetic polypeptide"

SEQ ID NO: 20200 - protein, 113 aa, Artificial Sequence; identical to SEQ ID NO: 10864
  source: /note="Description of Artificial Sequence: Synthetic polypeptide"

SEQ ID NO: 20201 - protein, 114 aa, Artificial Sequence; identical to SEQ ID NO: 10865
  source: /note="Description of Artificial Sequence: Synthetic polypeptide"

SEQ ID NO: 20202 - protein, 108 aa, Artificial Sequence; identical to SEQ ID NO: 10942
  source: /note="Description of Artificial Sequence: Synthetic polypeptide"

SEQ ID NO: 20203 - protein, 108 aa, Artificial Sequence; identical to SEQ ID NO: 10866
  source: /note="Description of Artificial Sequence: Synthetic polypeptide"

SEQ ID NO: 20204 - protein, 114 aa, Artificial Sequence; identical to SEQ ID NO: 10943
  source: /note="Description of Artificial Sequence: Synthetic polypeptide"

SEQ ID NO: 20205 - protein, 108 aa, Artificial Sequence; identical to SEQ ID NO: 10862
  source: /note="Description of Artificial Sequence: Synthetic polypeptide"

SEQ ID NO: 20206 - protein, 114 aa, Artificial Sequence; identical to SEQ ID NO: 10943
  source: /note="Description of Artificial Sequence: Synthetic polypeptide"

SEQ ID NO: 20207 - protein, 108 aa, Artificial Sequence; identical to SEQ ID NO: 10860
  source: /note="Description of Artificial Sequence: Synthetic polypeptide"

SEQ ID NO: 20208 - protein, 108 aa, Artificial Sequence; identical to SEQ ID NO: 10869
  source: /note="Description of Artificial Sequence: Synthetic polypeptide"

SEQ ID NO: 20209 - protein, 113 aa, Artificial Sequence; identical to SEQ ID NO: 10855
  source: /note="Description of Artificial Sequence: Synthetic polypeptide"

SEQ ID NO: 20210 - protein, 108 aa, Artificial Sequence; identical to SEQ ID NO: 10873
  source: /note="Description of Artificial Sequence: Synthetic polypeptide"

SEQ ID NO: 20211 - protein, 108 aa, Artificial Sequence; identical to SEQ ID NO: 10874
  source: /note="Description of Artificial Sequence: Synthetic polypeptide"

SEQ ID NO: 20212 - protein, 108 aa, Artificial Sequence; identical to SEQ ID NO: 10875
  source: /note="Description of Artificial Sequence: Synthetic polypeptide"

SEQ ID NO: 20213 - protein, 114 aa, Artificial Sequence; identical to SEQ ID NO: 10945
  source: /note="Description of Artificial Sequence: Synthetic polypeptide"

SEQ ID NO: 20214 - protein, 108 aa, Artificial Sequence; identical to SEQ ID NO: 10876
  source: /note="Description of Artificial Sequence: Synthetic polypeptide"

SEQ ID NO: 20215 - protein, 108 aa, Artificial Sequence; identical to SEQ ID NO: 10877
  source: /note="Description of Artificial Sequence: Synthetic polypeptide"

SEQ ID NO: 20216 - protein, 114 aa, Artificial Sequence; identical to SEQ ID NO: 10878
  source: /note="Description of Artificial Sequence: Synthetic polypeptide"

SEQ ID NO: 20217 - protein, 214 aa, Artificial Sequence; identical to SEQ ID NO: 11247
  source: /note="Description of Artificial Sequence: Synthetic polypeptide"

SEQ ID NO: 20218 - protein, 98 aa, Artificial Sequence; identical to SEQ ID NO: 4699
  source: /note="Description of Artificial Sequence: Synthetic polypeptide"

SEQ ID NO: 20219 - protein, 453 aa, Artificial Sequence; identical to SEQ ID NO: 5372
  source: /note="Description of Artificial Sequence: Synthetic polypeptide"

SEQ ID NO: 20220 - protein, 106 aa, Artificial Sequence; identical to SEQ ID NO: 5367
  source: /note="Description of Artificial Sequence: Synthetic polypeptide"

SEQ ID NO: 20221 - protein, 15 aa, Artificial Sequence
  source: /note="Description of Artificial Sequence: Synthetic peptide"
YFDYWGQGTLVTVSS

SEQ ID NO: 20222 - protein, 12 aa, Artificial Sequence
  source: /note="Description of Artificial Sequence: Synthetic peptide"
WTFGQGTKVEIK

SEQ ID NO: 20223 - protein, 95 aa, Artificial Sequence; identical to SEQ ID NO: 5370
  source: /note="Description of Artificial Sequence: Synthetic polypeptide"

SEQ ID NO: 20224 - protein, 108 aa, Artificial Sequence; identical to SEQ ID NO: 16215
  source: /note="Description of Artificial Sequence: Synthetic polypeptide"

SEQ ID NO: 20225 - protein, 214 aa, Artificial Sequence; identical to SEQ ID NO: 11488
  source: /note="Description of Artificial Sequence: Synthetic polypeptide"

SEQ ID NO: 20226 - protein, 214 aa, Artificial Sequence
  source: /note="Description of Artificial Sequence: Synthetic polypeptide"
DIQMTQSPSSLSASAGDRVTITCRASQAIRNDLGWYQQKPGKAPKRLIYAAFNLQSGVPSRFSGSGSGTEFTLTISSLQPEDLASYYCQQYNRYPWTFGQGTKVEIKRTVAAPSVFIFPPSDEQLKSGTASVVCLLNNFYPREAKVQWKVDNALQSGNSQESVTEQDSKDSTYSLSSTLTLSKADYEKHKVYACEVTHQGLSSPVTKSFNRGEC

SEQ ID NO: 20227 - protein, 109 aa, Artificial Sequence
  source: /note="Description of Artificial Sequence: Synthetic polypeptide"
DIQMTQSPSSLSASVGDRVTITCRASQSISNNLNWYQQKPGKAPKLLIYYTSRFHSGVPSRFSGSGSGTDFTFTISSLQPEDIATYYCQQEHTLPYTFGQGTKLEIKRT

SEQ ID NO: 20228 - protein, 122 aa, Artificial Sequence
  source: /note="Description of Artificial Sequence: Synthetic polypeptide"
EVQLVESGGGLVQPGGSLRLSCAASGFTFSNYWISWVRQAPGKGLEWVAEIRSESDASATHYAEAVKGRFTISRDNAKNSLYLQMNSLRAEDTAVYYCLAYFDYGLAIQNYWGQGTLVTVSS

SEQ ID NO: 20229 - protein, 107 aa, Artificial Sequence
  source: /note="Description of Artificial Sequence: Synthetic polypeptide"
EIVLTQSPATLSLSPGERATLSCKASKRVTTYVSWYQQKPGQAPRLLIYGASNRYLGIPARFSGSGSGTDFTLTISSLEPEDFAVYYCSQSYNYPYTFGQGTKLEIK

SEQ ID NO: 20230 - protein, 213 aa, Artificial Sequence
  source: /note="Description of Artificial Sequence: Synthetic polypeptide"
DIQLTQSPSSLSASVGDRVTITCSASQDISNYLNWYQQKPGKAPKVLIYFTSSLHSGVPSRFSGSGSGTDFTLTISSLQPEDFATYYCQQYSTVPWTFGQGTKVEIKRTVAAPSVFIFPPSDEQLKSGTASVVCLLNNFYPREAKVQWKVDNALQSGNSQESVTEQDSKDSTYSLSSTLTLSKADYEKHKVYACEVTHQGLSSPVTKSFNRGE

SEQ ID NO: 20231 - protein, 218 aa, Artificial Sequence
  source: /note="Description of Artificial Sequence: Synthetic polypeptide"
EVQLVESGGGLVQPGGSLRLSCAASGYDFTHYGMNWVRQAPGKGLEWVGWINTYTGEPTYAADFKRRFTFSLDTSKSTAYLQMNSLRAEDTAVYYCAKYPYYYGTSHWYFDVWGQGTLVTVSSASTKGPSVFPLAPSGTAALGCLVKDYFPEPVTVSWNSGALTSGVHTFPAVLQSSGLYSLSSVVTVPSSSLGTQTYICNVNHKPSNTKVDKKVEPK

SEQ ID NO: 20232 - protein, 213 aa, Artificial Sequence; identical to SEQ ID NO: 20230
  source: /note="Description of Artificial Sequence: Synthetic polypeptide"

SEQ ID NO: 20233 - protein, 218 aa, Artificial Sequence; identical to SEQ ID NO: 20231
  source: /note="Description of Artificial Sequence: Synthetic polypeptide"

SEQ ID NO: 20234 - protein, 431 aa, Artificial Sequence
  source: /note="Description of Artificial Sequence: Synthetic polypeptide"
SDTGRPFVEMYSEIPEIIHMTEGRELVIPCRVTSPNITVTLKKFPLDTLIPDGKRIIWDSRKGFIISNATYKEIGLLTCEATVNGHLYKTNYLTHRQTNTIIDVVLSPSHGIELSVGEKLVLNCTARTELNVGIDFNWEYPSSKHQHKKLVNRDLKTQSGSEMKKFLSTLTIDGVTRSDQGLYTCAASSGLMTKKNSTFVRVHEKDKTHTCPPCPAPELLGGPSVFLFPPKPKDTLMISRTPEVTCVVVDVSHEDPEVKFNWYVDGVEVHNAKTKPREEQYNSTYRVVSVLTVLHQDWLNGKEYKCKVSNKALPAPIEKTISKAKGQPREPQVYTLPPSRDELTKNQVSLTCLVKGFYPSDIAVEWESNGQPENNYKTTPPVLDSDGSFFLYSKLTVDKSRWQQGNVFSCSVMHEALHNHYTQKSLSLSPG

SEQ ID NO: 20235 - protein, 526 aa, Artificial Sequence
  source: /note="Description of Artificial Sequence: Synthetic polypeptide"
GRPFVEMYSEIPEIIHMTEGRELVIPCRVTSPNITVTLKKFPLDTLIPDGKRIIWDSRKGFIISNATYKEIGLLTCEATVNGHLYKTNYLTHRQTNTIIDVVLSPSHGIELSVGEKLVLNCTARTELNVGIDFNWEYPSSKHQHKKLVNRDLKTQSGSEMKKFLSTLTIDGVTRSDQGLYTCAASSGLMTKKNSTFVRVHEKPFVAFGSGMESLVEATVGERVRIPAKYLGYPPPEIKWYKNGIPLESNHTIKAGHVLTIMEVSERDTGNYTVILTNPISKEKQSHVVSLVVYVPPGPGDKTHTCPLCPAPELLGGPSVFLFPPKPKDTLMISRTPEVTCVVVDVSHEDPEVKFNWYVDGVEVHNAKTKPREEQYNSTYRVVSVLTVLHQDWLNGKEYKCKVSNKALPAPIEKTISKAKGQPREPQVYTLPPSRDELTKNQVSLTCLVKGFYPSDIAVEWESNGQPENNYKATPPVLDSDGSFFLYSKLTVDKSRWQQGNVFSCSVMHEALHNHYTQKSLSLSPGK

SEQ ID NO: 20236 - protein, 117 aa, Artificial Sequence; identical to SEQ ID NO: 6490
  source: /note="Description of Artificial Sequence: Synthetic polypeptide"

SEQ ID NO: 20237 - protein, 117 aa, Artificial Sequence; identical to SEQ ID NO: 6491
  source: /note="Description of Artificial Sequence: Synthetic polypeptide"

SEQ ID NO: 20238 - protein, 117 aa, Artificial Sequence; identical to SEQ ID NO: 6492
  source: /note="Description of Artificial Sequence: Synthetic polypeptide"

SEQ ID NO: 20239 - protein, 449 aa, Artificial Sequence; identical to SEQ ID NO: 6495
  source: /note="Description of Artificial Sequence: Synthetic polypeptide"

SEQ ID NO: 20240 - protein, 109 aa, Artificial Sequence; identical to SEQ ID NO: 6526
  source: /note="Description of Artificial Sequence: Synthetic polypeptide"

SEQ ID NO: 20241 - protein, 120 aa, Artificial Sequence; identical to SEQ ID NO: 6527
  source: /note="Description of Artificial Sequence: Synthetic polypeptide"

SEQ ID NO: 20242 - protein, 120 aa, Artificial Sequence; identical to SEQ ID NO: 6528
  source: /note="Description of Artificial Sequence: Synthetic polypeptide"

SEQ ID NO: 20243 - protein, 120 aa, Artificial Sequence; identical to SEQ ID NO: 6529
  source: /note="Description of Artificial Sequence: Synthetic polypeptide"

SEQ ID NO: 20244 - protein, 120 aa, Artificial Sequence; identical to SEQ ID NO: 6530
  source: /note="Description of Artificial Sequence: Synthetic polypeptide"

SEQ ID NO: 20245 - protein, 116 aa, Artificial Sequence; identical to SEQ ID NO: 6531
  source: /note="Description of Artificial Sequence: Synthetic polypeptide"

SEQ ID NO: 20246 - protein, 126 aa, Artificial Sequence; identical to SEQ ID NO: 6532
  source: /note="Description of Artificial Sequence: Synthetic polypeptide"

SEQ ID NO: 20247 - protein, 117 aa, Artificial Sequence; identical to SEQ ID NO: 6533
  source: /note="Description of Artificial Sequence: Synthetic polypeptide"

SEQ ID NO: 20248 - protein, 111 aa, Artificial Sequence; identical to SEQ ID NO: 6534
  source: /note="Description of Artificial Sequence: Synthetic polypeptide"

SEQ ID NO: 20249 - protein, 111 aa, Artificial Sequence; identical to SEQ ID NO: 6534
  source: /note="Description of Artificial Sequence: Synthetic polypeptide"

SEQ ID NO: 20250 - protein, 111 aa, Artificial Sequence; identical to SEQ ID NO: 6534
  source: /note="Description of Artificial Sequence: Synthetic polypeptide"

SEQ ID NO: 20251 - protein, 111 aa, Artificial Sequence; identical to SEQ ID NO: 6496
  source: /note="Description of Artificial Sequence: Synthetic polypeptide"

SEQ ID NO: 20252 - protein, 111 aa, Artificial Sequence; identical to SEQ ID NO: 6496
  source: /note="Description of Artificial Sequence: Synthetic polypeptide"

SEQ ID NO: 20253 - protein, 111 aa, Artificial Sequence; identical to SEQ ID NO: 6496
  source: /note="Description of Artificial Sequence: Synthetic polypeptide"

SEQ ID NO: 20254 - protein, 111 aa, Artificial Sequence; identical to SEQ ID NO: 6496
  source: /note="Description of Artificial Sequence: Synthetic polypeptide"

SEQ ID NO: 20255 - protein, 111 aa, Artificial Sequence; identical to SEQ ID NO: 6498
  source: /note="Description of Artificial Sequence: Synthetic polypeptide"

SEQ ID NO: 20256 - protein, 111 aa, Artificial Sequence; identical to SEQ ID NO: 6499
  source: /note="Description of Artificial Sequence: Synthetic polypeptide"

SEQ ID NO: 20257 - protein, 111 aa, Artificial Sequence; identical to SEQ ID NO: 6500
  source: /note="Description of Artificial Sequence: Synthetic polypeptide"

SEQ ID NO: 20258 - protein, 111 aa, Artificial Sequence; identical to SEQ ID NO: 6501
  source: /note="Description of Artificial Sequence: Synthetic polypeptide"

SEQ ID NO: 20259 - protein, 111 aa, Artificial Sequence; identical to SEQ ID NO: 6502
  source: /note="Description of Artificial Sequence: Synthetic polypeptide"

SEQ ID NO: 20260 - protein, 118 aa, Artificial Sequence; identical to SEQ ID NO: 6503
  source: /note="Description of Artificial Sequence: Synthetic polypeptide"

SEQ ID NO: 20261 - protein, 111 aa, Artificial Sequence; identical to SEQ ID NO: 6504
  source: /note="Description of Artificial Sequence: Synthetic polypeptide"

SEQ ID NO: 20262 - protein, 111 aa, Artificial Sequence; identical to SEQ ID NO: 6504
  source: /note="Description of Artificial Sequence: Synthetic polypeptide"

SEQ ID NO: 20263 - protein, 111 aa, Artificial Sequence; identical to SEQ ID NO: 6504
  source: /note="Description of Artificial Sequence: Synthetic polypeptide"

SEQ ID NO: 20264 - protein, 111 aa, Artificial Sequence; identical to SEQ ID NO: 6507
  source: /note="Description of Artificial Sequence: Synthetic polypeptide"

SEQ ID NO: 20265 - protein, 118 aa, Artificial Sequence; identical to SEQ ID NO: 6508
  source: /note="Description of Artificial Sequence: Synthetic polypeptide"

SEQ ID NO: 20266 - protein, 118 aa, Artificial Sequence; identical to SEQ ID NO: 6509
  source: /note="Description of Artificial Sequence: Synthetic polypeptide"

SEQ ID NO: 20267 - protein, 232 aa, Artificial Sequence; identical to SEQ ID NO: 6510
  source: /note="Description of Artificial Sequence: Synthetic polypeptide"

SEQ ID NO: 20268 - protein, 98 aa, Artificial Sequence; identical to SEQ ID NO: 6511
  source: /note="Description of Artificial Sequence: Synthetic polypeptide"

SEQ ID NO: 20269 - protein, 121 aa, Artificial Sequence; identical to SEQ ID NO: 6512
  source: /note="Description of Artificial Sequence: Synthetic polypeptide"

SEQ ID NO: 20270 - protein, 121 aa, Artificial Sequence; identical to SEQ ID NO: 6513
  source: /note="Description of Artificial Sequence: Synthetic polypeptide"

SEQ ID NO: 20271 - protein, 121 aa, Artificial Sequence; identical to SEQ ID NO: 6514
  source: /note="Description of Artificial Sequence: Synthetic polypeptide"

SEQ ID NO: 20272 - protein, 120 aa, Artificial Sequence; identical to SEQ ID NO: 6515
  source: /note="Description of Artificial Sequence: Synthetic polypeptide"

SEQ ID NO: 20273 - protein, 120 aa, Artificial Sequence; identical to SEQ ID NO: 6516
  source: /note="Description of Artificial Sequence: Synthetic polypeptide"

SEQ ID NO: 20274 - protein, 120 aa, Artificial Sequence; identical to SEQ ID NO: 6517
  source: /note="Description of Artificial Sequence: Synthetic polypeptide"

SEQ ID NO: 20275 - protein, 120 aa, Artificial Sequence; identical to SEQ ID NO: 6518
  source: /note="Description of Artificial Sequence: Synthetic polypeptide"

SEQ ID NO: 20276 - protein, 128 aa, Artificial Sequence; identical to SEQ ID NO: 6519
  source: /note="Description of Artificial Sequence: Synthetic polypeptide"

SEQ ID NO: 20277 - protein, 117 aa, Artificial Sequence; identical to SEQ ID NO: 6520
  source: /note="Description of Artificial Sequence: Synthetic polypeptide"

SEQ ID NO: 20278 - protein, 118 aa, Artificial Sequence; identical to SEQ ID NO: 6521
  source: /note="Description of Artificial Sequence: Synthetic polypeptide"

SEQ ID NO: 20279 - protein, 123 aa, Artificial Sequence; identical to SEQ ID NO: 6522
  source: /note="Description of Artificial Sequence: Synthetic polypeptide"

SEQ ID NO: 20280 - protein, 123 aa, Artificial Sequence; identical to SEQ ID NO: 6522
  source: /note="Description of Artificial Sequence: Synthetic polypeptide"

SEQ ID NO: 20281 - protein, 122 aa, Artificial Sequence; identical to SEQ ID NO: 6524
  source: /note="Description of Artificial Sequence: Synthetic polypeptide"

SEQ ID NO: 20282 - protein, 115 aa, Artificial Sequence; identical to SEQ ID NO: 6525
  source: /note="Description of Artificial Sequence: Synthetic polypeptide"

SEQ ID NO: 20283 - protein, 220 aa, Artificial Sequence; identical to SEQ ID NO: 6545
  source: /note="Description of Artificial Sequence: Synthetic polypeptide"

SEQ ID NO: 20284 - protein, 220 aa, Artificial Sequence; identical to SEQ ID NO: 6546
  source: /note="Description of Artificial Sequence: Synthetic polypeptide"

SEQ ID NO: 20285 - protein, 220 aa, Artificial Sequence; identical to SEQ ID NO: 6545
  source: /note="Description of Artificial Sequence: Synthetic polypeptide"

SEQ ID NO: 20286 - protein, 220 aa, Artificial Sequence; identical to SEQ ID NO: 6548
  source: /note="Description of Artificial Sequence: Synthetic polypeptide"

SEQ ID NO: 20287 - protein, 220 aa, Artificial Sequence; identical to SEQ ID NO: 6546
  source: /note="Description of Artificial Sequence: Synthetic polypeptide"

SEQ ID NO: 20288 - protein, 220 aa, Artificial Sequence; identical to SEQ ID NO: 6550
  source: /note="Description of Artificial Sequence: Synthetic polypeptide"

SEQ ID NO: 20289 - protein, 220 aa, Artificial Sequence; identical to SEQ ID NO: 6551
  source: /note="Description of Artificial Sequence: Synthetic polypeptide"

SEQ ID NO: 20290 - protein, 220 aa, Artificial Sequence; identical to SEQ ID NO: 6552
  source: /note="Description of Artificial Sequence: Synthetic polypeptide"

SEQ ID NO: 20291 - protein, 220 aa, Artificial Sequence; identical to SEQ ID NO: 6553
  source: /note="Description of Artificial Sequence: Synthetic polypeptide"

SEQ ID NO: 20292 - protein, 220 aa, Artificial Sequence; identical to SEQ ID NO: 6554
  source: /note="Description of Artificial Sequence: Synthetic polypeptide"

SEQ ID NO: 20293 - protein, 220 aa, Artificial Sequence; identical to SEQ ID NO: 6555
  source: /note="Description of Artificial Sequence: Synthetic polypeptide"

SEQ ID NO: 20294 - protein, 220 aa, Artificial Sequence; identical to SEQ ID NO: 6555
  source: /note="Description of Artificial Sequence: Synthetic polypeptide"

SEQ ID NO: 20295 - protein, 220 aa, Artificial Sequence; identical to SEQ ID NO: 6551
  source: /note="Description of Artificial Sequence: Synthetic polypeptide"

SEQ ID NO: 20296 - protein, 220 aa, Artificial Sequence; identical to SEQ ID NO: 6550
  source: /note="Description of Artificial Sequence: Synthetic polypeptide"

SEQ ID NO: 20297 - protein, 229 aa, Artificial Sequence; identical to SEQ ID NO: 6559
  source: /note="Description of Artificial Sequence: Synthetic polypeptide"

SEQ ID NO: 20298 - protein, 446 aa, Artificial Sequence; identical to SEQ ID NO: 6560
  source: /note="Description of Artificial Sequence: Synthetic polypeptide"

SEQ ID NO: 20299 - protein, 446 aa, Artificial Sequence; identical to SEQ ID NO: 6561
  source: /note="Description of Artificial Sequence: Synthetic polypeptide"

SEQ ID NO: 20300 - protein, 109 aa, Artificial Sequence; identical to SEQ ID NO: 6562
  source: /note="Description of Artificial Sequence: Synthetic polypeptide"

SEQ ID NO: 20301 - protein, 446 aa, Artificial Sequence; identical to SEQ ID NO: 6563
  source: /note="Description of Artificial Sequence: Synthetic polypeptide"

SEQ ID NO: 20302 - protein, 447 aa, Artificial Sequence; identical to SEQ ID NO: 6564
  source: /note="Description of Artificial Sequence: Synthetic polypeptide"

SEQ ID NO: 20303 - protein, 224 aa, Artificial Sequence; identical to SEQ ID NO: 6565
  source: /note="Description of Artificial Sequence: Synthetic polypeptide"

SEQ ID NO: 20304 - protein, 220 aa, Artificial Sequence; identical to SEQ ID NO: 6566
  source: /note="Description of Artificial Sequence: Synthetic polypeptide"

SEQ ID NO: 20305 - protein, 229 aa, Artificial Sequence; identical to SEQ ID NO: 6567
  source: /note="Description of Artificial Sequence: Synthetic polypeptide"

SEQ ID NO: 20306 - protein, 220 aa, Artificial Sequence; identical to SEQ ID NO: 6566
  source: /note="Description of Artificial Sequence: Synthetic polypeptide"

SEQ ID NO: 20307 - protein, 220 aa, Artificial Sequence; identical to SEQ ID NO: 6548
  source: /note="Description of Artificial Sequence: Synthetic polypeptide"

SEQ ID NO: 20308 - protein, 119 aa, Artificial Sequence; identical to SEQ ID NO: 6570
  source: /note="Description of Artificial Sequence: Synthetic polypeptide"

SEQ ID NO: 20309 - protein, 119 aa, Artificial Sequence; identical to SEQ ID NO: 6571
  source: /note="Description of Artificial Sequence: Synthetic polypeptide"

SEQ ID NO: 20310 - protein, 107 aa, Artificial Sequence; identical to SEQ ID NO: 6572
  source: /note="Description of Artificial Sequence: Synthetic polypeptide"

SEQ ID NO: 20311 - protein, 107 aa, Artificial Sequence; identical to SEQ ID NO: 6573
  source: /note="Description of Artificial Sequence: Synthetic polypeptide"

SEQ ID NO: 20312 - protein, 107 aa, Artificial Sequence; identical to SEQ ID NO: 6574
  source: /note="Description of Artificial Sequence: Synthetic polypeptide"

SEQ ID NO: 20313 - protein, 119 aa, Artificial Sequence; identical to SEQ ID NO: 6575
  source: /note="Description of Artificial Sequence: Synthetic polypeptide"

SEQ ID NO: 20314 - protein, 446 aa, Artificial Sequence; identical to SEQ ID NO: 6560
  source: /note="Description of Artificial Sequence: Synthetic polypeptide"

SEQ ID NO: 20315 - protein, 119 aa, Artificial Sequence; identical to SEQ ID NO: 6577
  source: /note="Description of Artificial Sequence: Synthetic polypeptide"

SEQ ID NO: 20316 - protein, 119 aa, Artificial Sequence; identical to SEQ ID NO: 6578
  source: /note="Description of Artificial Sequence: Synthetic polypeptide"

SEQ ID NO: 20317 - protein, 118 aa, Artificial Sequence; identical to SEQ ID NO: 6579
  source: /note="Description of Artificial Sequence: Synthetic polypeptide"

SEQ ID NO: 20318 - protein, 118 aa, Artificial Sequence; identical to SEQ ID NO: 6580
  source: /note="Description of Artificial Sequence: Synthetic polypeptide"

SEQ ID NO: 20319 - protein, 119 aa, Artificial Sequence; identical to SEQ ID NO: 6581
  source: /note="Description of Artificial Sequence: Synthetic polypeptide"

SEQ ID NO: 20320 - protein, 119 aa, Artificial Sequence; identical to SEQ ID NO: 6582
  source: /note="Description of Artificial Sequence: Synthetic polypeptide"

SEQ ID NO: 20321 - protein, 447 aa, Artificial Sequence; identical to SEQ ID NO: 6589
  source: /note="Description of Artificial Sequence: Synthetic polypeptide"

SEQ ID NO: 20322 - protein, 447 aa, Artificial Sequence; identical to SEQ ID NO: 6590
  source: /note="Description of Artificial Sequence: Synthetic polypeptide"

SEQ ID NO: 20323 - protein, 446 aa, Artificial Sequence; identical to SEQ ID NO: 6591
  source: /note="Description of Artificial Sequence: Synthetic polypeptide"

SEQ ID NO: 20324 - protein, 446 aa, Artificial Sequence; identical to SEQ ID NO: 6593
  source: /note="Description of Artificial Sequence: Synthetic polypeptide"

SEQ ID NO: 20325 - protein, 439 aa, Artificial Sequence; identical to SEQ ID NO: 19682
  source: /note="Description of Artificial Sequence: Synthetic polypeptide"

SEQ ID NO: 20326 - protein, 439 aa, Artificial Sequence; identical to SEQ ID NO: 19673
  source: /note="Description of Artificial Sequence: Synthetic polypeptide"

SEQ ID NO: 20327 - protein, 441 aa, Artificial Sequence; identical to SEQ ID NO: 19683
  source: /note="Description of Artificial Sequence: Synthetic polypeptide"

SEQ ID NO: 20328 - protein, 441 aa, Artificial Sequence; identical to SEQ ID NO: 19684
  source: /note="Description of Artificial Sequence: Synthetic polypeptide"

SEQ ID NO: 20329 - protein, 440 aa, Artificial Sequence; identical to SEQ ID NO: 19685
  source: /note="Description of Artificial Sequence: Synthetic polypeptide"

SEQ ID NO: 20330 - protein, 441 aa, Artificial Sequence; identical to SEQ ID NO: 19686
  source: /note="Description of Artificial Sequence: Synthetic polypeptide"

SEQ ID NO: 20331 - protein, 439 aa, Artificial Sequence; identical to SEQ ID NO: 19687
  source: /note="Description of Artificial Sequence: Synthetic polypeptide"

SEQ ID NO: 20332 - protein, 441 aa, Artificial Sequence; identical to SEQ ID NO: 19674
  source: /note="Description of Artificial Sequence: Synthetic polypeptide"

SEQ ID NO: 20333 - protein, 439 aa, Artificial Sequence; identical to SEQ ID NO: 19675
  source: /note="Description of Artificial Sequence: Synthetic polypeptide"

SEQ ID NO: 20334 - protein, 441 aa, Artificial Sequence; identical to SEQ ID NO: 19676
  source: /note="Description of Artificial Sequence: Synthetic polypeptide"

SEQ ID NO: 20335 - protein, 441 aa, Artificial Sequence; identical to SEQ ID NO: 19677
  source: /note="Description of Artificial Sequence: Synthetic polypeptide"

SEQ ID NO: 20336 - protein, 441 aa, Artificial Sequence; identical to SEQ ID NO: 19679
  source: /note="Description of Artificial Sequence: Synthetic polypeptide"

SEQ ID NO: 20337 - protein, 441 aa, Artificial Sequence; identical to SEQ ID NO: 19680
  source: /note="Description of Artificial Sequence: Synthetic polypeptide"

SEQ ID NO: 20338 - protein, 441 aa, Artificial Sequence; identical to SEQ ID NO: 19681
  source: /note="Description of Artificial Sequence: Synthetic polypeptide"

SEQ ID NO: 20339 - protein, 107 aa, Artificial Sequence [sequence omitted]

SEQ ID NO: 20340 - protein, 223 aa, Artificial Sequence
  source: /note="Description of Artificial Sequence: Synthetic polypeptide"
EVQLVQSGPELKKPGASVKVSCKASGYTFTNYGMNWVRQAPGQGLEWMGWINTYTGETTYADDFKGRFVFSLDTSVSTAYLQISSLKAEDTAVYYCEREGGVNNWGQGTLVTVSSASTKGPSVFPLAPSSKSTSGGTAALGCLVKDYFPEPVTVSWNSGALTSGVHTFPAVLQSSGLYSLSSVVTVPSSSLGTQTYICNVNHKPSNTKVDKKVEPKSCDKTHT

SEQ ID NO: 20341 - protein, 449 aa, Artificial Sequence
  source: /note="Description of Artificial Sequence: Synthetic polypeptide"
QLQLQESGPGLVKPSETLSLTCTVSGGSITSSSYYWGWIRQPPGKGLEWIGSIYYRGSTNYNPSLKSRVTISVDSSKNQFYLKVSSVTAVDTAVYYCARQNGAARPSWFDPWGQGTLVTVSSASTKGPSVFPLAPCSRSTSESTAALGCLVKDYFPEPVTVSWNSGALTSGVHTFPAVLQSSGLYSLSSVVTVPSSSLGTKTYTCNVDHKPSNTKVDKRVESKYGPPCPPCPAPEFLGGPSVFLFPPKPKDTLMISRTPEVTCVVVDVSQEDPEVQFNWYVDGVEVHNAKTKPREEQFNSTYRVVSVLTVLHQDWLNGKEYKCKVSNKGLPSSIEKTISKAKGQPREPQVYTLPPSQEEMTKNQVSLTCLVKGFYPSDIAVEWESNGQPENNYKTTPPVLDSDGSFFLYSRLTVDKSRWQEGNVFSCSVMHEALHNHYTQKSLSLSLGK

SEQ ID NO: 20342 - protein, 444 aa, Artificial Sequence; identical to SEQ ID NO: 5732
  source: /note="Description of Artificial Sequence: Synthetic polypeptide"

SEQ ID NO: 20343 - protein, 224 aa, Artificial Sequence
  source: /note="Description of Artificial Sequence: Synthetic polypeptide"
EVQLVESGGGSVQPGGSLRLSCTASGFTISRSYWICWVRQAPGKGLEWVGCIYGDNDITPLYANWAKGRFTISRDTSKNTVYLQMNSLRAEDTATYYCARLGYADYAYDLWGQGTTVTVSSASTKGPSVFPLAPSSKSTSGGTAALGCLVKDYFPEPVTVSWNSGALTSGVHTFPAVLQSSGLYSLSSVVTVPSSSLGTQTYICNVNHKPSNTKVDKRVEPKSC

SEQ ID NO: 20344 - protein, 326 aa, Artificial Sequence
  source: /note="Description of Artificial Sequence: Synthetic polypeptide"
EVQLVESGGGSVQPGGSLRLSCTASGFTISRSYWICWVRQAPGKGLEWVGCIYGDNDITPLYANWAKGRFTISRDTSKNTVYLQMNSLRAEDTATYYCARLGYADYAYDLWGQGTTVTVSSASTKGPSVFPLAPSSKSTSGGTAALGCLVKDYFPEPVTVSWNSGALTSGVHTFPAVLQSSGLYSLSSVVTVPSSSLGTQTYICNVNHKPSNTKVDKRVEPKSCGSGGGGVYHREAQSGKYKLTYAEAKAVCEFEGGHLATYKQLEAARKIGFHVCAAGWMAKGRVGYPIVKPGPNCGFGKTGIIDYGIRLNRSERWDAYCYNPHA

SEQ ID NO: 20345 - protein, 221 aa, Artificial Sequence
  source: /note="Description of Artificial Sequence: Synthetic polypeptide"
QVQLVESGGGVVQPGRSLRLSCAASGFTFSVYGMNWVRQAPGKGLEWVAIIWYDGDNQYYADSVKGRFTISRDNSKNTLYLQMNGLRAEDTAVYYCARDLRTGPFDYWGQGTLVTVSSASTKGPSVFPLAPSSKSTSGGTAALGCLVKDYFPEPVTVSWNSGALTSGVHTFPAVLQSSGLYSLSSVVTVPSSSLGTQTYICNVNHKPSNTKVDKRVEPKSC

SEQ ID NO: 20346 - protein, 323 aa, Artificial Sequence
  source: /note="Description of Artificial Sequence: Synthetic polypeptide"
QVQLVESGGGVVQPGRSLRLSCAASGFTFSVYGMNWVRQAPGKGLEWVAIIWYDGDNQYYADSVKGRFTISRDNSKNTLYLQMNGLRAEDTAVYYCARDLRTGPFDYWGQGTLVTVSSASTKGPSVFPLAPSSKSTSGGTAALGCLVKDYFPEPVTVSWNSGALTSGVHTFPAVLQSSGLYSLSSVVTVPSSSLGTQTYICNVNHKPSNTKVDKRVEPKSCGSGGGGVYHREAQSGKYKLTYAEAKAVCEFEGGHLATYKQLEAARKIGFHVCAAGWMAKGRVGYPIVKPGPNCGFGKTGIIDYGIRLNRSERWDAYCYNPHA

SEQ ID NO: 20347 - protein, 325 aa, Artificial Sequence
  source: /note="Description of Artificial Sequence: Synthetic polypeptide"
EVQLVESGGGLVQPGGSLRLSCTASGFSLTDYYYMTWVRQAPGKGLEWVGFIDPDDDPYYATWAKGRFTISRDNSKNTLYLQMNSLRAEDTAVYYCAGGDHNSGWGLDIWGQGTLVTVSSASTKGPSVFPLAPSSKSTSGGTAALGCLVKDYFPEPVTVSWNSGALTSGVHTFPAVLQSSGLYSLSSVVTVPSSSLGTQTYICNVNHKPSNTKVDKRVEPKSCGSGGGGVYHREARSGKYKLTYAEAKAVCEFEGGHLATYKQLEAARKIGFHVCAAGWMAKGRVGYPIVKPGPNCGFGKTGIIDYGIRLNRSERWDAYCYNPHA

SEQ ID NO: 20348 - protein, 325 aa, Artificial Sequence
  source: /note="Description of Artificial Sequence: Synthetic polypeptide"
EVQLVESGGGLVQPGGSLRLSCTASGFSLTDYYYMTWVRQAPGKGLEWVGFIDPDDDPYYATWAKGRFTISRDNSKNTLYLQMNSLRAEDTAVYYCAGGDHNSGWGLDIWGQGTLVTVSSASTKGPSVFPLAPSSKSTSGGTAALGCLVKDYFPEPVTVSWNSGALTSGVHTFPAVLQSSGLYSLSSVVTVPSSSLGTQTYICNVNHKPSNTKVDKRVEPKSCGSGGGGVYHREAQSGKYKLTYAEAKAVCEFEGGHLATYKQLEAARKIGFHVCAAGWMAKGRVGYPIVKPGPNCGFGKTGIIDYGIRLNRSERWDAYCYNPHA

SEQ ID NO: 20349 - protein, 325 aa, Artificial Sequence
  source: /note="Description of Artificial Sequence: Synthetic polypeptide"
EVQLVESGGGLVQPGGSLRLSCTASGFSLTDYYYMTWVRQAPGKGLEWVGFIDPDDDPYYATWAKGRFTISRDNSKNTLYLQMNSLRAEDTAVYYCAGGDHNSGWGLDIWGQGTLVTVSSASTKGPSVFPLAPSSKSTSGGTAALGCLVKDYFPEPVTVSWNSGALTSGVHTFPAVLQSSGLYSLSSVVTVPSSSLGTQTYICNVNHKPSNTKVDKRVEPKSCGSGGGGVYHREAASGKYKLTYAEAKAVCEFEGGHLATYKQLEAARKIGFHVCAAGWMAKGRVGYPIVKPGPNCGFGKTGIIDYGIRLNRSERWDAYCYNPHA

SEQ ID NO: 20350 - protein, 327 aa, Artificial Sequence
  source: /note="Description of Artificial Sequence: Synthetic polypeptide"
EVQLVESGGGLVQPGGSLRLSCTASGFSLTDYYYMTWVRQAPGKGLEWVGFIDPDDDPYYATWAKGRFTISRDNSKNTLYLQMNSLRAEDTAVYYCAGGDHNSGWGLDIWGQGTLVTVSSASTKGPSVFPLAPSSKSTSGGTAALGCLVKDYFPEPVTVSWNSGALTSGVHTFPAVLQSSGLYSLSSVVTVPSSSLGTQTYICNVNHKPSNTKVDKRVEPKSCGSGGGACGVYHREAQSGKYKLTYAEAKAVCEFEGGHLATYKQLECARKIGFHVCAAGWMAKGRVGYPIVKPGPNCGFGKTGIIDYGIRLNRSERWDAYCYNPHA

SEQ ID NO: 20351 - protein, 325 aa, Artificial Sequence
  source: /note="Description of Artificial Sequence: Synthetic polypeptide"
EVQLVESGGGLVQPGGSLRLSCTASGFSLTDYYYMTWVRQAPGKGLEWVGFIDPDDDPYYATWAKGRFTISRDNSKNTLYLQMNSLRAEDTAVYYCAGGDHNSGWGLDIWGQGTLVTVSSASTKGPSVFPLAPSSKSTSGGTAALGCLVKDYFPEPVTVSWNSGALTSGVHTFPAVLQSSGLYSLSSVVTVPSSSLGTQTYICNVNHKPSNTKVDKRVEPKSCGSGGGGVYHREAQSGKYKLTYAEAKAVCEFEGGHLCTYKQLEAARKIGFHVCAAGWMAKGRVGYPIVKPGPNCGFGKTGIIDYGIRLNRSERWDAYCCNPHA

SEQ ID NO: 20352 - protein, 219 aa, Artificial Sequence
  source: /note="Description of Artificial Sequence: Synthetic polypeptide"
EVQLVQSGAEVKKPGSSVKVSCKASGGTFSSYAISWVRQAPGQGLEWMGGIGPFFGTANYAQKFQGRVTITADESTSTAYMELSSLRSEDTAVYYCARDTPYFDYWGQGTLVTVSSASTKGPSVFPLAPSSKSTSGGTAALGCLVKDYFPEPVTVSWNSGALTSGVHTFPAVLQSSGLYSLSSVVTVPSSSLGTQTYICNVNHKPSNTKVDKRVEPKSC

SEQ ID NO: 20353 - protein, 321 aa, Artificial Sequence
  source: /note="Description of Artificial Sequence: Synthetic polypeptide"
EVQLVQSGAEVKKPGSSVKVSCKASGGTFSSYAISWVRQAPGQGLEWMGGIGPFFGTANYAQKFQGRVTITADESTSTAYMELSSLRSEDTAVYYCARDTPYFDYWGQGTLVTVSSASTKGPSVFPLAPSSKSTSGGTAALGCLVKDYFPEPVTVSWNSGALTSGVHTFPAVLQSSGLYSLSSVVTVPSSSLGTQTYICNVNHKPSNTKVDKRVEPKSCGSGGGGVYHREAQSGKYKLTYAEAKAVCEFEGGHLATYKQLEAARKIGFHVCAAGWMAKGRVGYPIVKPGPNCGFGKTGIIDYGIRLNRSERWDAYCYNPHA

SEQ ID NO: 20354 - protein, 220 aa, Artificial Sequence; identical to SEQ ID NO: 6550
  source: /note="Description of Artificial Sequence: Synthetic polypeptide"

SEQ ID NO: 20355 - protein, 322 aa, Artificial Sequence
  source: /note="Description of Artificial Sequence: Synthetic polypeptide"
EVQLVQSGAEVKKPGSSVKVSCKASGGTFSSYAISWVRQAPGQGLEWMGRIIPIFGTANYAQKFQGRVTITADESTSTAYMELSSLRSEDTAVYYCARHGGYSFDSWGQGTLVTVSSASTKGPSVFPLAPSSKSTSGGTAALGCLVKDYFPEPVTVSWNSGALTSGVHTFPAVLQSSGLYSLSSVVTVPSSSLGTQTYICNVNHKPSNTKVDKRVEPKSCGSGGGGVYHREAQSGKYKLTYAEAKAVCEFEGGHLATYKQLEAARKIGFHVCAAGWMAKGRVGYPIVKPGPNCGFGKTGIIDYGIRLNRSERWDAYCYNPHA

SEQ ID NO: 20356 - protein, 220 aa, Artificial Sequence
  source: /note="Description of Artificial Sequence: Synthetic polypeptide"
EVQLVQSGAEVKKPGESLKISCKGSGYSFTSYWIGWVRQMPGKGLEWMGWIDPYRSEIRYSPSFQGQVTISADKSISTAYLQWSSLKASDTAMYYCARVSSEPFDSWGQGTLVTVSSASTKGPSVFPLAPSSKSTSGGTAALGCLVKDYFPEPVTVSWNSGALTSGVHTFPAVLQSSGLYSLSSVVTVPSSSLGTQTYICNVNHKPSNTKVDKRVEPKSC

SEQ ID NO: 20357 - protein, 322 aa, Artificial Sequence
  source: /note="Description of Artificial Sequence: Synthetic polypeptide"
EVQLVQSGAEVKKPGESLKISCKGSGYSFTSYWIGWVRQMPGKGLEWMGWIDPYRSEIRYSPSFQGQVTISADKSISTAYLQWSSLKASDTAMYYCARVSSEPFDSWGQGTLVTVSSASTKGPSVFPLAPSSKSTSGGTAALGCLVKDYFPEPVTVSWNSGALTSGVHTFPAVLQSSGLYSLSSVVTVPSSSLGTQTYICNVNHKPSNTKVDKRVEPKSCGSGGGGVYHREAQSGKYKLTYAEAKAVCEFEGGHLATYKQLEAARKIGFHVCAAGWMAKGRVGYPIVKPGPNCGFGKTGIIDYGIRLNRSERWDAYCYNPHA

SEQ ID NO: 20358 - protein, 223 aa, Artificial Sequence
  source: /note="Description of Artificial Sequence: Synthetic polypeptide"
EVQLVESGGGLVQPGGSLRLSCTASGFSLTDYYYMTWVRQAPGKGLEWVGFIDPDDDPYYATWAKGRFTISRDNSKNTLYLQMNSLRAEDTAVYYCAGGDHNSGWGLDIWGQGTLVTVSSASTKGPSVFPLAPSSKSTSGGTAALGCLVKDYFPEPVTVSWNSGALTSGVHTFPAVLQSSGLYSLSSVVTVPSSSLGTQTYICNVNHKPSNTKVDKRVEPKSC

SEQ ID NO: 20359 - protein, 452 aa, Artificial Sequence
  source: /note="Description of Artificial Sequence: Synthetic polypeptide"
EVQLVESGGGLVQPGGSLRLSCAASGYTFTNYGMNWVRQAPGKGLEWVGWINTYTGEPTYAADFKRRFTFSLDTSKSTAYLQMNSLRAEDTAVYYCAKYPHYYGSSHWYFDVWGQGTLVTVSSASTKGPSVFPLAPSSKSTSGGTAALGCLVKDYFPEPVTVSWNSGALTSGVHTFPAVLQSSGLYSLSSVVTVPSSSLGTQTYICNVNHKPSNTKVDKKVEPKSCDKTHTCPPCPAPELLGGPSVFLFPPKPKDTLMISRTPEVTCVVVDVSHEDPEVKFNWYVDGVEVHNAKTKPREEQYNSTYRVVSVLTVLHQDWLNGKEYKCKVSNKALPAPIEKTISKAKGQPREPQVYTLPPSREEMTKNQVSLTCLVKGFYPSDIAVEWESNGQPENNYKTTPPVLDSDGSFFLYSKLTVDKSRWQQGNVFSCSVMHEALHNHYTQKSLSLSPG

SEQ ID NO: 20360 - protein, 555 aa, Artificial Sequence
  source: /note="Description of Artificial Sequence: Synthetic polypeptide"
EVQLVESGGGLVQPGGSLRLSCAASGYTFTNYGMNWVRQAPGKGLEWVGWINTYTGEPTYAADFKRRFTFSLDTSKSTAYLQMNSLRAEDTAVYYCAKYPHYYGSSHWYFDVWGQGTLVTVSSASTKGPSVFPLAPSSKSTSGGTAALGCLVKDYFPEPVTVSWNSGALTSGVHTFPAVLQSSGLYSLSSVVTVPSSSLGTQTYICNVNHKPSNTKVDKKVEPKSCDKTHTCPPCPAPELLGGPSVFLFPPKPKDTLMISRTPEVTCVVVDVSHEDPEVKFNWYVDGVEVHNAKTKPREEQYNSTYRVVSVLTVLHQDWLNGKEYKCKVSNKALPAPIEKTISKAKGQPREPQVYTLPPSREEMTKNQVSLTCLVKGFYPSDIAVEWESNGQPENNYKTTPPVLDSDGSFFLYSKLTVDKSRWQQGNVFSCSVMHEALHNHYTQKSLSLSPGKGSGGGGVYHREAQSGKYKLTYAEAKAVCEFEGGHLATYKQLEAARKIGFHVCAAGWMAKGRVGYPIVKPGPNCGFGKTGIIDYGIRLNRSERWDAYCYNPHA

SEQ ID NO: 20361 - protein, 450 aa, Artificial Sequence
  source: /note="Description of Artificial Sequence: Synthetic polypeptide"
EVQLVESGGGLVQPGGSLRLSCTASGFSLTDYYYMTWVRQAPGKGLEWVGFIDPDDDPYYATWAKGRFTISRDNSKNTLYLQMNSLRAEDTAVYYCAGGDHNSGWGLDIWGQGTLVTVSSASTKGPSVFPLAPSSKSTSGGTAALGCLVKDYFPEPVTVSWNSGALTSGVHTFPAVLQSSGLYSLSSVVTVPSSSLGTQTYICNVNHKPSNTKVDKRVEPKSCDKTHTCPPCPAPEAAGGPSVFLFPPKPKDTLMISRTPEVTCVVVDVSHEDPEVKFNWYVDGVEVHNAKTKPREEQYNSTYRVVSVLTVLHQDWLNGKEYKCKVSNKALPAPIEKTISKAKGQPREPQVYTLPPSREEMTKNQVSLTCLVKGFYPSDIAVEWESNGQPENNYKTTPPVLDSDGSFFLYSKLTVDKSRWQQGNVFSCSVMHEALHNHYTQKSLSLSPGK

SEQ ID NO: 20362 - protein, 450 aa, Artificial Sequence; identical to SEQ ID NO: 20361
  source: /note="Description of Artificial Sequence: Synthetic polypeptide"

SEQ ID NO: 20363 - protein, 325 aa, Artificial Sequence; identical to SEQ ID NO: 20348
  source: /note="Description of Artificial Sequence: Synthetic polypeptide"

SEQ ID NO: 20364 - protein, 326 aa, Artificial Sequence
  source: /note="Description of Artificial Sequence: Synthetic polypeptide"
VYHREARSGKYKLTYAEAKAVCEFEGGHLATYKQLEAARKIGFHVCAAGWMAKGRVGYPIVKPGPNCGFGKTGIIDYGIRLNRSERWDAYCYNPHAKGGGSEVQLVESGGGLVQPGGSLRLSCTASGFSLTDYYYMTWVRQAPGKGLEWVGFIDPDDDPYYATWAKGRFTISRDNSKNTLYLQMNSLRAEDTAVYYCAGGDHNSGWGLDIWGQGTLVTVSSASTKGPSVFPLAPSSKSTSGGTAALGCLVKDYFPEPVTVSWNSGALTSGVHTFPAVLQSSGLYSLSSVVTVPSSSLGTQTYICNVNHKPSNTKVDKRVEPKSCGS

SEQ ID NO: 20365 - protein, 325 aa, Artificial Sequence; identical to SEQ ID NO: 20348
  source: /note="Description of Artificial Sequence: Synthetic polypeptide"

SEQ ID NO: 20366 - protein, 225 aa, Artificial Sequence
  source: /note="Description of Artificial Sequence: Synthetic polypeptide"
EVQLVESGGGLVQPGGSLRLSCTASGFSLTDYYYMTWVRQAPGKGLEWVGFIDPDDDPYYATWAKGRFTISRDNSKNTLYLQMNSLRAEDTAVYYCAGGDHNSGWGLDIWGQGTLVTVSSASTKGPSVFPLAPSSKSTSGGTAALGCLVKDYFPEPVTVSWNSGALTSGVHTFPAVLQSSGLYSLSSVVTVPSSSLGTQTYICNVNHKPSNTKVDKRVEPKSCGS

SEQ ID NO: 20367 - protein, 325 aa, Artificial Sequence; identical to SEQ ID NO: 20347
  source: /note="Description of Artificial Sequence: Synthetic polypeptide"

SEQ ID NO: 20368 - protein, 633 aa, Artificial Sequence
  source: /note="Description of Artificial Sequence: Synthetic polypeptide"
EVQLVESGGGLVQPGGSLRLSCTASGFSLTDYYYMTWVRQAPGKGLEWVGFIDPDDDPYYATWAKGRFTISRDNSKNTLYLQMNSLRAEDTAVYYCAGGDHNSGWGLDIWGQGTLVTVSSASTKGPSVFPLAPSSKSTSGGTAALGCLVKDYFPEPVTVSWNSGALTSGVHTFPAVLQSSGLYSLSSVVTVPSSSLGTQTYICNVNHKPSNTKVDKRVEPKSCGSGGGGVYHREARSGKYKLTYAEAKAVCEFEGGHLATYKQLEAARKIGFHVCAAGWMAKGRVGYPIVKPGPNCGFGKTGIIDYGIRLNRSERWDAYCYNPHAGGGGGGSGVYHREARSGKYKLTYAEAKAVCEFEGGHLATYKQLEAARKIGFHVCAAGWMAKGRVGYPIVKPGPNCGFGKTGIIDYGIRLNRSERWDAYCYNPHAGSGGGGVYHREARSGKYKLTYAEAKAVCEFEGGHLATYKQLEAARKIGFHVCAAGWMAKGRVGYPIVKPGPNCGFGKTGIIDYGIRLNRSERWDAYCYNPHAGSGGGGVYHREARSGKYKLTYAEAKAVCEFEGGHLATYKQLEAARKIGFHVCAAGWMAKGRVGYPIVKPGPNCGFGKTGIIDYGIRLNRSERWDAYCYNPHA

SEQ ID NO: 20369 - protein, 427 aa, Artificial Sequence
  source: /note="Description of Artificial Sequence: Synthetic polypeptide"
EVQLVESGGGLVQPGGSLRLSCTASGFSLTDYYYMTWVRQAPGKGLEWVGFIDPDDDPYYATWAKGRFTISRDNSKNTLYLQMNSLRAEDTAVYYCAGGDHNSGWGLDIWGQGTLVTVSSASTKGPSVFPLAPSSKSTSGGTAALGCLVKDYFPEPVTVSWNSGALTSGVHTFPAVLQSSGLYSLSSVVTVPSSSLGTQTYICNVNHKPSNTKVDKRVEPKSCGSGGGGVYHREARSGKYKLTYAEAKAVCEFEGGHLATYKQLEAARKIGFHVCAAGWMAKGRVGYPIVKPGPNCGFGKTGIIDYGIRLNRSERWDAYCYNPHAGSGGGGVYHREARSGKYKLTYAEAKAVCEFEGGHLATYKQLEAARKIGFHVCAAGWMAKGRVGYPIVKPGPNCGFGKTGIIDYGIRLNRSERWDAYCYNPHA

SEQ ID NO: 20370 - protein, 451 aa, Artificial Sequence
  source: /note="Description of Artificial Sequence: Synthetic polypeptide"
EVQLVQSGAEVKKPGESLKISCQSFGYIFIDHTIHWMRQMPGQGLEWMGAISPRHDITKYNEMFRGQVTISADKSSSTAYLQWSSLKASDTAMYFCARGGFYGSTIWFDFWGQGTMVTVSSASTKGPSVFPLAPSSKSTSGGTAALGCLVKDYFPEPVTVSWNSGALTSGVHTFPAVLQSSGLYSLSSVVTVPSSSLGTQTYICNVNHKPSNTKVDKRVEPKSCDKTHTCPPCPAPELLGGPSVFLFPPKPKDTLMISRTPEVTCVVVDVSHEDPEVKFNWYVDGVEVHNAKTKPREEQYNSTYRVVSVLTVLHQDWLNGKEYKCKVSNKALPAPIEKTISKAKGQPREPQVYTLPPSREEMTKNQVSLTCLVKGFYPSDIAVEWESNGQPENNYKTTPPVLDSDGSFFLYSKLTVDKSRWQQGNVFSCSVMHEALHNHYTQKSLSLSPGK

SEQ ID NO: 20371 - protein, 121 aa, Artificial Sequence
  source: /note="Description of Artificial Sequence: Synthetic polypeptide"
EVQLVQSGAEVKKPGESLKISCQSFGYIFIDHTIHWMRQMPGQGLEWMGAISPRHDITKYNEMFRGQVTISADKSSSTAYLQWSSLKASDTAMYFCARGGFYGSTIWFDFWGQGTMVTVSS

SEQ ID NO: 20372 - protein, 115 aa, Artificial Sequence
  source: /note="Description of Artificial Sequence: Synthetic polypeptide"
QVQLVQSGPELKKPGASVKVSCKASGYTFTNYGMNWVRQAPGQGLEWMGWINTYTGETTYADDFKGRFVFSLDTSVSTAYLQISSLKAEDTAVYYCEREGGVNNWGQGTLVTVSS

SEQ ID NO: 20373 - protein, 115 aa, Artificial Sequence [sequence omitted]

SEQ ID NO: 20374 - protein, 115 aa, Artificial Sequence; identical to SEQ ID NO: 20372
  source: /note="Description of Artificial Sequence: Synthetic polypeptide"

SEQ ID NO: 20375 - protein, 115 aa, Artificial Sequence; identical to SEQ ID NO: 20372
  source: /note="Description of Artificial Sequence: Synthetic polypeptide"

SEQ ID NO: 20376 - protein, 115 aa, Artificial Sequence; identical to SEQ ID NO: 20372
  source: /note="Description of Artificial Sequence: Synthetic polypeptide"

SEQ ID NO: 20377 - protein, 115 aa, Artificial Sequence; identical to SEQ ID NO: 20372
  source: /note="Description of Artificial Sequence: Synthetic polypeptide"

SEQ ID NO: 20378 - protein, 115 aa, Artificial Sequence; identical to SEQ ID NO: 20372
  source: /note="Description of Artificial Sequence: Synthetic polypeptide"

SEQ ID NO: 20379 - protein, 115 aa, Artificial Sequence; identical to SEQ ID NO: 20372
  source: /note="Description of Artificial Sequence: Synthetic polypeptide"

SEQ ID NO: 20380 - protein, 115 aa, Artificial Sequence; identical to SEQ ID NO: 20372
  source: /note="Description of Artificial Sequence: Synthetic polypeptide"

SEQ ID NO: 20381 - protein, 115 aa, Artificial Sequence
  source: /note="Description of Artificial Sequence: Synthetic polypeptide"
QVQLVQSGPELKKPGASVKVSCKASGYTFTNYGMNWVRQAPGQGLEWMGWINTYTGETTYADDFKGRFVFSLDTSVSTAYLQISSLKAEDTAVYYCEREGGVANWGQGTLVTVSS

SEQ ID NO: 20382 - protein, 115 aa, Artificial Sequence
  source: /note="Description of Artificial Sequence: Synthetic polypeptide"
QVQLVQSGPELKKPGASVKVSCKASGYTFTNYGMNWVRQAPGQGLEWMGWINTYTGETTYADDFKGRFVFSLDTSVSTAYLQISSLKAEDTAVYYCEREGGVQNWGQGTLVTVSS

SEQ ID NO: 20383 - protein, 115 aa, Artificial Sequence
  source: /note="Description of Artificial Sequence: Synthetic polypeptide"
QVQLVQSGPELKKPGASVKVSCKASGYTFTNYGMNWVRQAPGQGLEWMGWINTYTGETTYADDFKGRFVFSLDTSVSTAYLQISSLKAEDTAVYYCEREGGVNAWGQGTLVTVSS

SEQ ID NO: 20384 - protein, 115 aa, Artificial Sequence
  source: /note="Description of Artificial Sequence: Synthetic polypeptide"
QVQLVQSGPELKKPGASVKVSCKASGYTFTNYGMNWVRQAPGQGLEWMGWINTYTGETTYADDFKGRFVFSLDTSVSTAYLQISSLKAEDTAVYYCEREGGVNQWGQGTLVTVSS

SEQ ID NO: 20385 - protein, 121 aa, Artificial Sequence; identical to SEQ ID NO: 8298
  source: /note="Description of Artificial Sequence: Synthetic polypeptide"

SEQ ID NO: 20386 - protein, 121 aa, Artificial Sequence; identical to SEQ ID NO: 8299
  source: /note="Description of Artificial Sequence: Synthetic polypeptide"

SEQ ID NO: 20387 - protein, 98 aa, Artificial Sequence; identical to SEQ ID NO: 3963
  source: /note="Description of Artificial Sequence: Synthetic polypeptide"

SEQ ID NO: 20388 - protein, 125 aa, Artificial Sequence; identical to SEQ ID NO: 3964
  source: /note="Description of Artificial Sequence: Synthetic polypeptide"

SEQ ID NO: 20389 - protein, 120 aa, Artificial Sequence; identical to SEQ ID NO: 8659
  source: /note="Description of Artificial Sequence: Synthetic polypeptide"

SEQ ID NO: 20390 - protein, 122 aa, Artificial Sequence; identical to SEQ ID NO: 8660
  source: /note="Description of Artificial Sequence: Synthetic polypeptide"

SEQ ID NO: 20391 - protein, 127 aa, Artificial Sequence; identical to SEQ ID NO: 8661
  source: /note="Description of Artificial Sequence: Synthetic polypeptide"

SEQ ID NO: 20392 - protein, 127 aa, Artificial Sequence; identical to SEQ ID NO: 8662
  source: /note="Description of Artificial Sequence: Synthetic polypeptide"

SEQ ID NO: 20393 - protein, 127 aa, Artificial Sequence; identical to SEQ ID NO: 8663
  source: /note="Description of Artificial Sequence: Synthetic polypeptide"

SEQ ID NO: 20394 - protein, 121 aa, Artificial Sequence; identical to SEQ ID NO: 8664
  source: /note="Description of Artificial Sequence: Synthetic polypeptide"

SEQ ID NO: 20395 - protein, 123 aa, Artificial Sequence; identical to SEQ ID NO: 8665
  source: /note="Description of Artificial Sequence: Synthetic polypeptide"

SEQ ID NO: 20396 - protein, 120 aa, Artificial Sequence; identical to SEQ ID NO: 8666
  source: /note="Description of Artificial Sequence: Synthetic polypeptide"

SEQ ID NO: 20397 - protein, 118 aa, Artificial Sequence; identical to SEQ ID NO: 8667
  source: /note="Description of Artificial Sequence: Synthetic polypeptide"

SEQ ID NO: 20398 - protein, 124 aa, Artificial Sequence; identical to SEQ ID NO: 8668
  source: /note="Description of Artificial Sequence: Synthetic polypeptide"

SEQ ID NO: 20399 - protein, 119 aa, Artificial Sequence; identical to SEQ ID NO: 8669
  source: /note="Description of Artificial Sequence: Synthetic polypeptide"

SEQ ID NO: 20400 - protein, 124 aa, Artificial Sequence; identical to SEQ ID NO: 8670
  source: /note="Description of Artificial Sequence: Synthetic polypeptide"

SEQ ID NO: 20401 - protein, 124 aa, Artificial Sequence; identical to SEQ ID NO: 8671
  source: /note="Description of Artificial Sequence: Synthetic polypeptide"

SEQ ID NO: 20402 - protein, 127 aa, Artificial Sequence; identical to SEQ ID NO: 8672
  source: /note="Description of Artificial Sequence: Synthetic polypeptide"

SEQ ID NO: 20403 - protein, 127 aa, Artificial Sequence; identical to SEQ ID NO: 8673
  source: /note="Description of Artificial Sequence: Synthetic polypeptide"

SEQ ID NO: 20404 - protein, 118 aa, Artificial Sequence; identical to SEQ ID NO: 8674
  source: /note="Description of Artificial Sequence: Synthetic polypeptide"

SEQ ID NO: 20405 - protein, 123 aa, Artificial Sequence; identical to SEQ ID NO: 8675
  source: /note="Description of Artificial Sequence: Synthetic polypeptide"

SEQ ID NO: 20406 - protein, 126 aa, Artificial Sequence; identical to SEQ ID NO: 8676
  source: /note="Description of Artificial Sequence: Synthetic polypeptide"

SEQ ID NO: 20407 - protein, 123 aa, Artificial Sequence; identical to SEQ ID NO: 8677
  source: /note="Description of Artificial Sequence: Synthetic polypeptide"

SEQ ID NO: 20408 - protein, 120 aa, Artificial Sequence; identical to SEQ ID NO: 8678
  source: /note="Description of Artificial Sequence: Synthetic polypeptide"

SEQ ID NO: 20409 - protein, 123 aa, Artificial Sequence; identical to SEQ ID NO: 8679
  source: /note="Description of Artificial Sequence: Synthetic polypeptide"

SEQ ID NO: 20410 - protein, 121 aa, Artificial Sequence; identical to SEQ ID NO: 8680
  source: /note="Description of Artificial Sequence: Synthetic polypeptide"

SEQ ID NO: 20411 - protein, 121 aa, Artificial Sequence; identical to SEQ ID NO: 8681
  source: /note="Description of Artificial Sequence: Synthetic polypeptide"

SEQ ID NO: 20412 - protein, 121 aa, Artificial Sequence; identical to SEQ ID NO: 8681
  source: /note="Description of Artificial Sequence: Synthetic polypeptide"

SEQ ID NO: 20413 - protein, 121 aa, Artificial Sequence; identical to SEQ ID NO: 8681
  source: /note="Description of Artificial Sequence: Synthetic polypeptide"

SEQ ID NO: 20414 - protein, 121 aa, Artificial Sequence; identical to SEQ ID NO: 8681
  source: /note="Description of Artificial Sequence: Synthetic polypeptide"

SEQ ID NO: 20415 - protein, 121 aa, Artificial Sequence; identical to SEQ ID NO: 8681
  source: /note="Description of Artificial Sequence: Synthetic polypeptide"

SEQ ID NO: 20416 - protein, 122 aa, Artificial Sequence; identical to SEQ ID NO: 8686
  source: /note="Description of Artificial Sequence: Synthetic polypeptide"

SEQ ID NO: 20417 - protein, 122 aa, Artificial Sequence; identical to SEQ ID NO: 8686
  source: /note="Description of Artificial Sequence: Synthetic polypeptide"

SEQ ID NO: 20418 - protein, 122 aa, Artificial Sequence; identical to SEQ ID NO: 8688
  source: /note="Description of Artificial Sequence: Synthetic polypeptide"

SEQ ID NO: 20419 - protein, 122 aa, Artificial Sequence; identical to SEQ ID NO: 8686
  source: /note="Description of Artificial Sequence: Synthetic polypeptide"

SEQ ID NO: 20420 - protein, 121 aa, Artificial Sequence; identical to SEQ ID NO: 8681
  source: /note="Description of Artificial Sequence: Synthetic polypeptide"

SEQ ID NO: 20421 - protein, 120 aa, Artificial Sequence; identical to SEQ ID NO: 8691
  source: /note="Description of Artificial Sequence: Synthetic polypeptide"

SEQ ID NO: 20422 - protein, 121 aa, Artificial Sequence; identical to SEQ ID NO: 8692
  source: /note="Description of Artificial Sequence: Synthetic polypeptide"

SEQ ID NO: 20423 - protein, 121 aa, Artificial Sequence; identical to SEQ ID NO: 8693
  source: /note="Description of Artificial Sequence: Synthetic polypeptide"

SEQ ID NO: 20424 - protein, 121 aa, Artificial Sequence; identical to SEQ ID NO: 8680
  source: /note="Description of Artificial Sequence: Synthetic polypeptide"

SEQ ID NO: 20425 - protein, 122 aa, Artificial Sequence; identical to SEQ ID NO: 8695
  source: /note="Description of Artificial Sequence: Synthetic polypeptide"

SEQ ID NO: 20426 - protein, 121 aa, Artificial Sequence; identical to SEQ ID NO: 8681
  source: /note="Description of Artificial Sequence: Synthetic polypeptide"

SEQ ID NO: 20427 - protein, 122 aa, Artificial Sequence; identical to SEQ ID NO: 8686
  source: /note="Description of Artificial Sequence: Synthetic polypeptide"

SEQ ID NO: 20428 - protein, 122 aa, Artificial Sequence; identical to SEQ ID NO: 8698
  source: /note="Description of Artificial Sequence: Synthetic polypeptide"

SEQ ID NO: 20429 - protein, 112 aa, Artificial Sequence; identical to SEQ ID NO: 8699
  source: /note="Description of Artificial Sequence: Synthetic polypeptide"

SEQ ID NO: 20430 - protein, 113 aa, Artificial Sequence; identical to SEQ ID NO: 8700
  source: /note="Description of Artificial Sequence: Synthetic polypeptide"

SEQ ID NO: 20431 - protein, 121 aa, Artificial Sequence; identical to SEQ ID NO: 8701
  source: /note="Description of Artificial Sequence: Synthetic polypeptide"

SEQ ID NO: 20432 - protein, 121 aa, Artificial Sequence; identical to SEQ ID NO: 8702
  source: /note="Description of Artificial Sequence: Synthetic polypeptide"

SEQ ID NO: 20433 - protein, 121 aa, Artificial Sequence; identical to SEQ ID NO: 8702
  source: /note="Description of Artificial Sequence: Synthetic polypeptide"

SEQ ID NO: 20434 - protein, 121 aa, Artificial Sequence; identical to SEQ ID NO: 8701
  source: /note="Description of Artificial Sequence: Synthetic polypeptide"

SEQ ID NO: 20435 - protein, 121 aa, Artificial Sequence; identical to SEQ ID NO: 8701
  source: /note="Description of Artificial Sequence: Synthetic polypeptide"

SEQ ID NO: 20436 - protein, 121 aa, Artificial Sequence; identical to SEQ ID NO: 8706
  source: /note="Description of Artificial Sequence: Synthetic polypeptide"

SEQ ID NO: 20437 - protein, 126 aa, Artificial Sequence; identical to SEQ ID NO: 8707
  source: /note="Description of Artificial Sequence: Synthetic polypeptide"

SEQ ID NO: 20438 - protein, 121 aa, Artificial Sequence; identical to SEQ ID NO: 8706
  source: /note="Description of Artificial Sequence: Synthetic polypeptide"

SEQ ID NO: 20439 - protein, 121 aa, Artificial Sequence; identical to SEQ ID NO: 8706
  source: /note="Description of Artificial Sequence: Synthetic polypeptide"

SEQ ID NO: 20440 - protein, 121 aa, Artificial Sequence; identical to SEQ ID NO: 8702
  source: /note="Description of Artificial Sequence: Synthetic polypeptide"

SEQ ID NO: 20441 - protein, 121 aa, Artificial Sequence; identical to SEQ ID NO: 8711
  source: /note="Description of Artificial Sequence: Synthetic polypeptide"

SEQ ID NO: 20442 - protein, 121 aa, Artificial Sequence; identical to SEQ ID NO: 8712
  source: /note="Description of Artificial Sequence: Synthetic polypeptide"

SEQ ID NO: 20443 - protein, 121 aa, Artificial Sequence; identical to SEQ ID NO: 8702
  source: /note="Description of Artificial Sequence: Synthetic polypeptide"

SEQ ID NO: 20444 - protein, 121 aa, Artificial Sequence; identical to SEQ ID NO: 8701
  source: /note="Description of Artificial Sequence: Synthetic polypeptide"

SEQ ID NO: 20445 - protein, 121 aa, Artificial Sequence; identical to SEQ ID NO: 8715
  source: /note="Description of Artificial Sequence: Synthetic polypeptide"

SEQ ID NO: 20446 - protein, 121 aa, Artificial Sequence; identical to SEQ ID NO: 8702
  source: /note="Description of Artificial Sequence: Synthetic polypeptide"

SEQ ID NO: 20447 - protein, 113 aa, Artificial Sequence; identical to SEQ ID NO: 8700
  source: /note="Description of Artificial Sequence: Synthetic polypeptide"

SEQ ID NO: 20448 - protein, 122 aa, Artificial Sequence; identical to SEQ ID NO: 8718
  source: /note="Description of Artificial Sequence: Synthetic polypeptide"

SEQ ID NO: 20449 - protein, 121 aa, Artificial Sequence; identical to SEQ ID NO: 8702
  source: /note="Description of Artificial Sequence: Synthetic polypeptide"

SEQ ID NO: 20450 - protein, 118 aa, Artificial Sequence; identical to SEQ ID NO: 8720
  source: /note="Description of Artificial Sequence: Synthetic polypeptide"

SEQ ID NO: 20451 - protein, 113 aa, Artificial Sequence; identical to SEQ ID NO: 8700
  source: /note="Description of Artificial Sequence: Synthetic polypeptide"

SEQ ID NO: 20452 - protein, 121 aa, Artificial Sequence; identical to SEQ ID NO: 8722
  source: /note="Description of Artificial Sequence: Synthetic polypeptide"

SEQ ID NO: 20453 - protein, 121 aa, Artificial Sequence; identical to SEQ ID NO: 8701
  source: /note="Description of Artificial Sequence: Synthetic polypeptide"

SEQ ID NO: 20454 - protein, 121 aa, Artificial Sequence; identical to SEQ ID NO: 8724
  source: /note="Description of Artificial Sequence: Synthetic polypeptide"

SEQ ID NO: 20455 - protein, 121 aa, Artificial Sequence; identical to SEQ ID NO: 8701
  source: /note="Description of Artificial Sequence: Synthetic polypeptide"

SEQ ID NO: 20456 - protein, 121 aa, Artificial Sequence; identical to SEQ ID NO: 8701
  source: /note="Description of Artificial Sequence: Synthetic polypeptide"

SEQ ID NO: 20457 - protein, 121 aa, Artificial Sequence; identical to SEQ ID NO: 8702
  source: /note="Description of Artificial Sequence: Synthetic polypeptide"

SEQ ID NO: 20458 - protein, 113 aa, Artificial Sequence; identical to SEQ ID NO: 8700
  source: /note="Description of Artificial Sequence: Synthetic polypeptide"

SEQ ID NO: 20459 - protein, 121 aa, Artificial Sequence; identical to SEQ ID NO: 8680
  source: /note="Description of Artificial Sequence: Synthetic polypeptide"

SEQ ID NO: 20460 - protein, 121 aa, Artificial Sequence; identical to SEQ ID NO: 8730
  source: /note="Description of Artificial Sequence: Synthetic polypeptide"

SEQ ID NO: 20461 - protein, 118 aa, Artificial Sequence; identical to SEQ ID NO: 8731
  source: /note="Description of Artificial Sequence: Synthetic polypeptide"

SEQ ID NO: 20462 - protein, 113 aa, Artificial Sequence; identical to SEQ ID NO: 8700
  source: /note="Description of Artificial Sequence: Synthetic polypeptide"

SEQ ID NO: 20463 - protein, 121 aa, Artificial Sequence; identical to SEQ ID NO: 8702
  source: /note="Description of Artificial Sequence: Synthetic polypeptide"

SEQ ID NO: 20464 - protein, 121 aa, Artificial Sequence; identical to SEQ ID NO: 8706
  source: /note="Description of Artificial Sequence: Synthetic polypeptide"

SEQ ID NO: 20465 - protein, 121 aa, Artificial Sequence; identical to SEQ ID NO: 8702
  source: /note="Description of Artificial Sequence: Synthetic polypeptide"

SEQ ID NO: 20466 - protein, 113 aa, Artificial Sequence; identical to SEQ ID NO: 8700
  source: /note="Description of Artificial Sequence: Synthetic polypeptide"

SEQ ID NO: 20467 - protein, 121 aa, Artificial Sequence; identical to SEQ ID NO: 8701
  source: /note="Description of Artificial Sequence: Synthetic polypeptide"

SEQ ID NO: 20468 - protein, 113 aa, Artificial Sequence; identical to SEQ ID NO: 8700
  source: /note="Description of Artificial Sequence: Synthetic polypeptide"

SEQ ID NO: 20469 - protein, 121 aa, Artificial Sequence; identical to SEQ ID NO: 8701
  source: /note="Description of Artificial Sequence: Synthetic polypeptide"

SEQ ID NO: 20470 - protein, 121 aa, Artificial Sequence; identical to SEQ ID NO: 8680
  source: /note="Description of Artificial Sequence: Synthetic polypeptide"

SEQ ID NO: 20471 - protein, 113 aa, Artificial Sequence; identical to SEQ ID NO: 8700
  source: /note="Description of Artificial Sequence: Synthetic polypeptide"

SEQ ID NO: 20472 - protein, 122 aa, Artificial Sequence; identical to SEQ ID NO: 8742
  source: /note="Description of Artificial Sequence: Synthetic polypeptide"

SEQ ID NO: 20473 - protein, 121 aa, Artificial Sequence; identical to SEQ ID NO: 8701
  source: /note="Description of Artificial Sequence: Synthetic polypeptide"

SEQ ID NO: 20474 - protein, 113 aa, Artificial Sequence; identical to SEQ ID NO: 8700
  source: /note="Description of Artificial Sequence: Synthetic polypeptide"

SEQ ID NO: 20475 - protein, 118 aa, Artificial Sequence; identical to SEQ ID NO: 8745
  source: /note="Description of Artificial Sequence: Synthetic polypeptide"

SEQ ID NO: 20476 - protein, 113 aa, Artificial Sequence; identical to SEQ ID NO: 8700
  source: /note="Description of Artificial Sequence: Synthetic polypeptide"

SEQ ID NO: 20477 - protein, 121 aa, Artificial Sequence; identical to SEQ ID NO: 8701
  source: /note="Description of Artificial Sequence: Synthetic polypeptide"

SEQ ID NO: 20478 - protein, 118 aa, Artificial Sequence; identical to SEQ ID NO: 8748
  source: /note="Description of Artificial Sequence: Synthetic polypeptide"

SEQ ID NO: 20479 - protein, 118 aa, Artificial Sequence; identical to SEQ ID NO: 8749
  source: /note="Description of Artificial Sequence: Synthetic polypeptide"

SEQ ID NO: 20480 - protein, 118 aa, Artificial Sequence; identical to SEQ ID NO: 8750
  source: /note="Description of Artificial Sequence: Synthetic polypeptide"

SEQ ID NO: 20481 - protein, 121 aa, Artificial Sequence; identical to SEQ ID NO: 8692
  source: /note="Description of Artificial Sequence: Synthetic polypeptide"

SEQ ID NO: 20482 - protein, 121 aa, Artificial Sequence; identical to SEQ ID NO: 8706
  source: /note="Description of Artificial Sequence: Synthetic polypeptide"

SEQ ID NO: 20483 - protein, 121 aa, Artificial Sequence; identical to SEQ ID NO: 8753
  source: /note="Description of Artificial Sequence: Synthetic polypeptide"

SEQ ID NO: 20484 - protein, 121 aa, Artificial Sequence; identical to SEQ ID NO: 8701
  source: /note="Description of Artificial Sequence: Synthetic polypeptide"

SEQ ID NO: 20485 - protein, 121 aa, Artificial Sequence; identical to SEQ ID NO: 8701
  source: /note="Description of Artificial Sequence: Synthetic polypeptide"

SEQ ID NO: 20486 - protein, 118 aa, Artificial Sequence; identical to SEQ ID NO: 8756
  source: /note="Description of Artificial Sequence: Synthetic polypeptide"

SEQ ID NO: 20487 - protein, 118 aa, Artificial Sequence; identical to SEQ ID NO: 8756
  source: /note="Description of Artificial Sequence: Synthetic polypeptide"

SEQ ID NO: 20488 - protein, 118 aa, Artificial Sequence; identical to SEQ ID NO: 8758
  source: /note="Description of Artificial Sequence: Synthetic polypeptide"

SEQ ID NO: 20489 - protein, 118 aa, Artificial Sequence; identical to SEQ ID NO: 8758
  source: /note="Description of Artificial Sequence: Synthetic polypeptide"

SEQ ID NO: 20490 - protein, 118 aa, Artificial Sequence; identical to SEQ ID NO: 8760
  source: /note="Description of Artificial Sequence: Synthetic polypeptide"

SEQ ID NO: 20491 - protein, 113 aa, Artificial Sequence; identical to SEQ ID NO: 8700
  source: /note="Description of Artificial Sequence: Synthetic polypeptide"

SEQ ID NO: 20492 - protein, 121 aa, Artificial Sequence; identical to SEQ ID NO: 8680
  source: /note="Description of Artificial Sequence: Synthetic polypeptide"

SEQ ID NO: 20493 - protein, 118 aa, Artificial Sequence; identical to SEQ ID NO: 8760
  source: /note="Description of Artificial Sequence: Synthetic polypeptide"

SEQ ID NO: 20494 - protein, 118 aa, Artificial Sequence; identical to SEQ ID NO: 8764
  source: /note="Description of Artificial Sequence: Synthetic polypeptide"

SEQ ID NO: 20495 - protein, 121 aa, Artificial Sequence; identical to SEQ ID NO: 8765
  source: /note="Description of Artificial Sequence: Synthetic polypeptide"

SEQ ID NO: 20496 - protein, 116 aa, Artificial Sequence; identical to SEQ ID NO: 8766
  source: /note="Description of Artificial Sequence: Synthetic polypeptide"

SEQ ID NO: 20497 - protein, 121 aa, Artificial Sequence; identical to SEQ ID NO: 8715
  source: /note="Description of Artificial Sequence: Synthetic polypeptide"

SEQ ID NO: 20498 - protein, 113 aa, Artificial Sequence; identical to SEQ ID NO: 8768
  source: /note="Description of Artificial Sequence: Synthetic polypeptide"

SEQ ID NO: 20499 - protein, 121 aa, Artificial Sequence; identical to SEQ ID NO: 8769
  source: /note="Description of Artificial Sequence: Synthetic polypeptide"

SEQ ID NO: 20500 - protein, 118 aa, Artificial Sequence; identical to SEQ ID NO: 8770
  source: /note="Description of Artificial Sequence: Synthetic polypeptide"

SEQ ID NO: 20501 - protein, 113 aa, Artificial Sequence; identical to SEQ ID NO: 8771
  source: /note="Description of Artificial Sequence: Synthetic polypeptide"

SEQ ID NO: 20502 - protein, 121 aa, Artificial Sequence; identical to SEQ ID NO: 8681
  source: /note="Description of Artificial Sequence: Synthetic polypeptide"

SEQ ID NO: 20503 - protein, 122 aa, Artificial Sequence; identical to SEQ ID NO: 8773
  source: /note="Description of Artificial Sequence: Synthetic polypeptide"

SEQ ID NO: 20504 - protein, 121 aa, Artificial Sequence; identical to SEQ ID NO: 8774
  source: /note="Description of Artificial Sequence: Synthetic polypeptide"

SEQ ID NO: 20505 - protein, 121 aa, Artificial Sequence; identical to SEQ ID NO: 8681
  source: /note="Description of Artificial Sequence: Synthetic polypeptide"

SEQ ID NO: 20506 - protein, 122 aa, Artificial Sequence; identical to SEQ ID NO: 8776
  source: /note="Description of Artificial Sequence: Synthetic polypeptide"

SEQ ID NO: 20507 - protein, 122 aa, Artificial Sequence; identical to SEQ ID NO: 8686
  source: /note="Description of Artificial Sequence: Synthetic polypeptide"

SEQ ID NO: 20508 - protein, 122 aa, Artificial Sequence; identical to SEQ ID NO: 8778
  source: /note="Description of Artificial Sequence: Synthetic polypeptide"

SEQ ID NO: 20509 - protein, 121 aa, Artificial Sequence; identical to SEQ ID NO: 8779
  source: /note="Description of Artificial Sequence: Synthetic polypeptide"

SEQ ID NO: 20510 - protein, 121 aa, Artificial Sequence; identical to SEQ ID NO: 8780
  source: /note="Description of Artificial Sequence: Synthetic polypeptide"

SEQ ID NO: 20511 - protein, 121 aa, Artificial Sequence; identical to SEQ ID NO: 8782
  source: /note="Description of Artificial Sequence: Synthetic polypeptide"

SEQ ID NO: 20512 - protein, 121 aa, Artificial Sequence; identical to SEQ ID NO: 8681
  source: /note="Description of Artificial Sequence: Synthetic polypeptide"

SEQ ID NO: 20513 - protein, 122 aa, Artificial Sequence; identical to SEQ ID NO: 8784
  source: /note="Description of Artificial Sequence: Synthetic polypeptide"

SEQ ID NO: 20514 - protein, 121 aa, Artificial Sequence; identical to SEQ ID NO: 8692
  source: /note="Description of Artificial Sequence: Synthetic polypeptide"

SEQ ID NO: 20515 - protein, 121 aa, Artificial Sequence; identical to SEQ ID NO: 8692
  source: /note="Description of Artificial Sequence: Synthetic polypeptide"

SEQ ID NO: 20516 - protein, 121 aa, Artificial Sequence; identical to SEQ ID NO: 8680
  source: /note="Description of Artificial Sequence: Synthetic polypeptide"

SEQ ID NO: 20517 - protein, 120 aa, Artificial Sequence; identical to SEQ ID NO: 4003
  source: /note="Description of Artificial Sequence: Synthetic polypeptide"

SEQ ID NO: 20518 - protein, 121 aa, Artificial Sequence; identical to SEQ ID NO: 4004
  source: /note="Description of Artificial Sequence: Synthetic polypeptide"

SEQ ID NO: 20519 - protein, 126 aa, Artificial Sequence; identical to SEQ ID NO: 4005
  source: /note="Description of Artificial Sequence: Synthetic polypeptide"

SEQ ID NO: 20520 - protein, 117 aa, Artificial Sequence; identical to SEQ ID NO: 4006
  source: /note="Description of Artificial Sequence: Synthetic polypeptide"

SEQ ID NO: 20521 - protein, 120 aa, Artificial Sequence; identical to SEQ ID NO: 4007
  source: /note="Description of Artificial Sequence: Synthetic polypeptide"

SEQ ID NO: 20522 - protein, 126 aa, Artificial Sequence; identical to SEQ ID NO: 4008
  source: /note="Description of Artificial Sequence: Synthetic polypeptide"

SEQ ID NO: 20523 - protein, 117 aa, Artificial Sequence; identical to SEQ ID NO: 4009
  source: /note="Description of Artificial Sequence: Synthetic polypeptide"

SEQ ID NO: 20524 - protein, 120 aa, Artificial Sequence; identical to SEQ ID NO: 4010
  source: /note="Description of Artificial Sequence: Synthetic polypeptide"

SEQ ID NO: 20525 - protein, 120 aa, Artificial Sequence; identical to SEQ ID NO: 4011
  source: /note="Description of Artificial Sequence: Synthetic polypeptide"

SEQ ID NO: 20526 - protein, 117 aa, Artificial Sequence; identical to SEQ ID NO: 4012
  source: /note="Description of Artificial Sequence: Synthetic polypeptide"

SEQ ID NO: 20527 - protein, 126 aa, Artificial Sequence; identical to SEQ ID NO: 4013
  source: /note="Description of Artificial Sequence: Synthetic polypeptide"

SEQ ID NO: 20528 - protein, 115 aa, Artificial Sequence; identical to SEQ ID NO: 4014
  source: /note="Description of Artificial Sequence: Synthetic polypeptide"

SEQ ID NO: 20529 - protein, 117 aa, Artificial Sequence; identical to SEQ ID NO: 4015
  source: /note="Description of Artificial Sequence: Synthetic polypeptide"

SEQ ID NO: 20530 - protein, 123 aa, Artificial Sequence; identical to SEQ ID NO: 4016
  source: /note="Description of Artificial Sequence: Synthetic polypeptide"

SEQ ID NO: 20531 - protein, 118 aa, Artificial Sequence; identical to SEQ ID NO: 5842
  source: /note="Description of Artificial Sequence: Synthetic polypeptide"

SEQ ID NO: 20532 - protein, 121 aa, Artificial Sequence
  source: /note="Description of Artificial Sequence: Synthetic polypeptide"
EVQLVESGGGSVQPGGSLRLSCTASGFTISRSYWICWVRQAPGKGLEWVGCIYGDNDITPLYANWAKGRFTISRDTSKNTVYLQMNSLRAEDTATYYCARLGYADYAYDLWGQGTTVTVSS

SEQ ID NO: 20533 - protein, 118 aa, Artificial Sequence [sequence omitted]

SEQ ID NO: 20534 - protein, 116 aa, Artificial Sequence
  source: /note="Description of Artificial Sequence: Synthetic polypeptide"
EVQLVQSGAEVKKPGSSVKVSCKASGGTFSSYAISWVRQAPGQGLEWMGGIGPFFGTANYAQKFQGRVTITADESTSTAYMELSSLRSEDTAVYYCARDTPYFDYWGQGTLVTVSS

SEQ ID NO: 20535 - protein, 117 aa, Artificial Sequence
  source: /note="Description of Artificial Sequence: Synthetic polypeptide"
EVQLVQSGAEVKKPGSSVKVSCKASGGTFNSYAISWVRQAPGQGLEWMGRIIPIFGTANYAQKFQGRVTITADESTSTAYMELSSLRSEDTAVYYCARHGGYSFDSWGQGTLVTVSS

SEQ ID NO: 20536 - protein, 120 aa, Artificial Sequence
  source: /note="Description of Artificial Sequence: Synthetic polypeptide"
EVQLVESGGGLVQPGGSLRLSCTASGFSLTDYYYMTWVRQAPGKGLEWVGFIDPDDDPYYATWAKGRFTISRDNSKNTLYLQMNSLRAEDTAVYYCAGGDHNSGWGLDIWGQGTLVTVSS

SEQ ID NO: 20537 - protein, 117 aa, Artificial Sequence
  source: /note="Description of Artificial Sequence: Synthetic polypeptide"
EVQLVQSGAEVKKPGESLKISCKGSGYSFTSYWIGWVRQMPGKGLEWMGWIDPYRSEIRYSPSFQGQVTISADKSISTAYLQWSSLKASDTAMYYCARVSSEPFDSWGQGTLVTVSS

SEQ ID NO: 20538 - protein, 118 aa, Artificial Sequence; identical to SEQ ID NO: 8891
  source: /note="Description of Artificial Sequence: Synthetic polypeptide"

SEQ ID NO: 20539 - protein, 118 aa, Artificial Sequence; identical to SEQ ID NO: 8892
  source: /note="Description of Artificial Sequence: Synthetic polypeptide"

SEQ ID NO: 20540 - protein, 118 aa, Artificial Sequence; identical to SEQ ID NO: 8893
  source: /note="Description of Artificial Sequence: Synthetic polypeptide"

SEQ ID NO: 20541 - protein, 466 aa, Artificial Sequence; identical to SEQ ID NO: 9168
  source: /note="Description of Artificial Sequence: Synthetic polypeptide"

SEQ ID NO: 20542 - protein, 466 aa, Artificial Sequence; identical to SEQ ID NO: 9169
  source: /note="Description of Artificial Sequence: Synthetic polypeptide"

SEQ ID NO: 20543 - protein, 465 aa, Artificial Sequence; identical to SEQ ID NO: 9170
  source: /note="Description of Artificial Sequence: Synthetic polypeptide"

SEQ ID NO: 20544 - protein, 465 aa, Artificial Sequence; identical to SEQ ID NO: 9171
  source: /note="Description of Artificial Sequence: Synthetic polypeptide"

SEQ ID NO: 20545 - protein, 107 aa, Artificial Sequence; identical to SEQ ID NO: 9308
  source: /note="Description of Artificial Sequence: Synthetic polypeptide"

SEQ ID NO: 20546 - protein, 112 aa, Artificial Sequence; identical to SEQ ID NO: 9309
  source: /note="Description of Artificial Sequence: Synthetic polypeptide"

SEQ ID NO: 20547 - protein, 108 aa, Artificial Sequence; identical to SEQ ID NO: 9310
  source: /note="Description of Artificial Sequence: Synthetic polypeptide"

SEQ ID NO: 20548 - protein, 107 aa, Artificial Sequence; identical to SEQ ID NO: 9311
  source: /note="Description of Artificial Sequence: Synthetic polypeptide"

SEQ ID NO: 20549 - protein, 214 aa, Artificial Sequence; identical to SEQ ID NO: 9315
  source: /note="Description of Artificial Sequence: Synthetic polypeptide"

SEQ ID NO: 20550 - protein, 112 aa, Artificial Sequence; identical to SEQ ID NO: 9316
  source: /note="Description of Artificial Sequence: Synthetic polypeptide"

SEQ ID NO: 20551 - protein, 107 aa, Artificial Sequence; identical to SEQ ID NO: 9317
  source: /note="Description of Artificial Sequence: Synthetic polypeptide"

SEQ ID NO: 20552 - protein, 108 aa, Artificial Sequence; identical to SEQ ID NO: 9318
  source: /note="Description of Artificial Sequence: Synthetic polypeptide"

SEQ ID NO: 20553 - protein, 108 aa, Artificial Sequence; identical to SEQ ID NO: 9319
  source: /note="Description of Artificial Sequence: Synthetic polypeptide"

SEQ ID NO: 20554 - protein, 108 aa, Artificial Sequence; identical to SEQ ID NO: 9320
  source: /note="Description of Artificial Sequence: Synthetic polypeptide"

SEQ ID NO: 20555 - protein, 101 aa, Artificial Sequence; identical to SEQ ID NO: 9321
  source: /note="Description of Artificial Sequence: Synthetic polypeptide"

SEQ ID NO: 20556 - protein, 101 aa, Artificial Sequence; identical to SEQ ID NO: 9322
  source: /note="Description of Artificial Sequence: Synthetic polypeptide"

SEQ ID NO: 20557 - protein, 101 aa, Artificial Sequence; identical to SEQ ID NO: 9323
  source: /note="Description of Artificial Sequence: Synthetic polypeptide"

SEQ ID NO: 20558 - protein, 101 aa, Artificial Sequence; identical to SEQ ID NO: 9324
  source: /note="Description of Artificial Sequence: Synthetic polypeptide"

SEQ ID NO: 20559 - protein, 101 aa, Artificial Sequence; identical to SEQ ID NO: 9323
  source: /note="Description of Artificial Sequence: Synthetic polypeptide"

SEQ ID NO: 20560 - protein, 101 aa, Artificial Sequence; identical to SEQ ID NO: 9321
  source: /note="Description of Artificial Sequence: Synthetic polypeptide"

SEQ ID NO: 20561 - protein, 111 aa, Artificial Sequence; identical to SEQ ID NO: 9327
  source: /note="Description of Artificial Sequence: Synthetic polypeptide"

SEQ ID NO: 20562 - protein, 101 aa, Artificial Sequence; identical to SEQ ID NO: 9322
  source: /note="Description of Artificial Sequence: Synthetic polypeptide"

SEQ ID NO: 20563 - protein, 101 aa, Artificial Sequence; identical to SEQ ID NO: 9322
  source: /note="Description of Artificial Sequence: Synthetic polypeptide"

SEQ ID NO: 20564 - protein, 101 aa, Artificial Sequence; identical to SEQ ID NO: 9322
  source: /note="Description of Artificial Sequence: Synthetic polypeptide"

SEQ ID NO: 20565 - protein, 101 aa, Artificial Sequence; identical to SEQ ID NO: 9331
  source: /note="Description of Artificial Sequence: Synthetic polypeptide"

SEQ ID NO: 20566 - protein, 101 aa, Artificial Sequence; identical to SEQ ID NO: 9323
  source: /note="Description of Artificial Sequence: Synthetic polypeptide"

SEQ ID NO: 20567 - protein, 101 aa, Artificial Sequence; identical to SEQ ID NO: 9322
  source: /note="Description of Artificial Sequence: Synthetic polypeptide"

SEQ ID NO: 20568 - protein, 108 aa, Artificial Sequence; identical to SEQ ID NO: 9334
  source: /note="Description of Artificial Sequence: Synthetic polypeptide"

SEQ ID NO: 20569 - protein, 101 aa, Artificial Sequence; identical to SEQ ID NO: 9322
  source: /note="Description of Artificial Sequence: Synthetic polypeptide"

SEQ ID NO: 20570 - protein, 101 aa, Artificial Sequence; identical to SEQ ID NO: 9321
  source: /note="Description of Artificial Sequence: Synthetic polypeptide"

SEQ ID NO: 20571 - protein, 101 aa, Artificial Sequence; identical to SEQ ID NO: 9323
  source: /note="Description of Artificial Sequence: Synthetic polypeptide"

SEQ ID NO: 20572 - protein, 111 aa, Artificial Sequence; identical to SEQ ID NO: 9327
  source: /note="Description of Artificial Sequence: Synthetic polypeptide"

SEQ ID NO: 20573 - protein, 101 aa, Artificial Sequence; identical to SEQ ID NO: 9331
  source: /note="Description of Artificial Sequence: Synthetic polypeptide"

SEQ ID NO: 20574 - protein, 108 aa, Artificial Sequence; identical to SEQ ID NO: 9340
  source: /note="Description of Artificial Sequence: Synthetic polypeptide"

SEQ ID NO: 20575 - protein, 108 aa, Artificial Sequence; identical to SEQ ID NO: 9340
  source: /note="Description of Artificial Sequence: Synthetic polypeptide"

SEQ ID NO: 20576 - protein, 156 aa, Artificial Sequence; identical to SEQ ID NO: 9342
  source: /note="Description of Artificial Sequence: Synthetic polypeptide"

SEQ ID NO: 20577 - protein, 101 aa, Artificial Sequence; identical to SEQ ID NO: 9343
  source: /note="Description of Artificial Sequence: Synthetic polypeptide"

SEQ ID NO: 20578 - protein, 108 aa, Artificial Sequence; identical to SEQ ID NO: 9344
  source: /note="Description of Artificial Sequence: Synthetic polypeptide"

SEQ ID NO: 20579 - protein, 108 aa, Artificial Sequence; identical to SEQ ID NO: 9345
  source: /note="Description of Artificial Sequence: Synthetic polypeptide"

SEQ ID NO: 20580 - protein, 108 aa, Artificial Sequence; identical to SEQ ID NO: 9346
  source: /note="Description of Artificial Sequence: Synthetic polypeptide"

SEQ ID NO: 20581 - protein, 107 aa, Artificial Sequence; identical to SEQ ID NO: 9347
  source: /note="Description of Artificial Sequence: Synthetic polypeptide"

SEQ ID NO: 20582 - protein, 106 aa, Artificial Sequence; identical to SEQ ID NO: 9348
  source: /note="Description of Artificial Sequence: Synthetic polypeptide"

SEQ ID NO: 20583 - protein, 111 aa, Artificial Sequence; identical to SEQ ID NO: 9349
  source: /note="Description of Artificial Sequence: Synthetic polypeptide"

SEQ ID NO: 20584 - protein, 106 aa, Artificial Sequence; identical to SEQ ID NO: 9350
  source: /note="Description of Artificial Sequence: Synthetic polypeptide"

SEQ ID NO: 20585 - protein, 106 aa, Artificial Sequence; identical to SEQ ID NO: 9351
  source: /note="Description of Artificial Sequence: Synthetic polypeptide"

SEQ ID NO: 20586 - protein, 108 aa, Artificial Sequence; identical to SEQ ID NO: 9352
  source: /note="Description of Artificial Sequence: Synthetic polypeptide"

SEQ ID NO: 20587 - protein, 108 aa, Artificial Sequence; identical to SEQ ID NO: 9353
  source: /note="Description of Artificial Sequence: Synthetic polypeptide"

SEQ ID NO: 20588 - protein, 111 aa, Artificial Sequence; identical to SEQ ID NO: 9354
  source: /note="Description of Artificial Sequence: Synthetic polypeptide"

SEQ ID NO: 20589 - protein, 114 aa, Artificial Sequence; identical to SEQ ID NO: 9355
  source: /note="Description of Artificial Sequence: Synthetic polypeptide"

SEQ ID NO: 20590 - protein, 108 aa, Artificial Sequence; identical to SEQ ID NO: 9356
  source: /note="Description of Artificial Sequence: Synthetic polypeptide"

SEQ ID NO: 20591 - protein, 107 aa, Artificial Sequence; identical to SEQ ID NO: 9357
  source: /note="Description of Artificial Sequence: Synthetic polypeptide"

SEQ ID NO: 20592 - protein, 107 aa, Artificial Sequence; identical to SEQ ID NO: 9358
  source: /note="Description of Artificial Sequence: Synthetic polypeptide"

SEQ ID NO: 20593 - protein, 214 aa, Artificial Sequence; identical to SEQ ID NO: 9365
  source: /note="Description of Artificial Sequence: Synthetic polypeptide"

SEQ ID NO: 20594 - protein, 214 aa, Artificial Sequence; identical to SEQ ID NO: 9365
  source: /note="Description of Artificial Sequence: Synthetic polypeptide"

SEQ ID NO: 20595 - protein, 214 aa, Artificial Sequence; identical to SEQ ID NO: 9365
  source: /note="Description of Artificial Sequence: Synthetic polypeptide"

SEQ ID NO: 20596 - protein, 214 aa, Artificial Sequence; identical to SEQ ID NO: 9368
  source: /note="Description of Artificial Sequence: Synthetic polypeptide"

SEQ ID NO: 20597 - protein, 214 aa, Artificial Sequence; identical to SEQ ID NO: 9368
  source: /note="Description of Artificial Sequence: Synthetic polypeptide"

SEQ ID NO: 20598 - protein, 214 aa, Artificial Sequence; identical to SEQ ID NO: 9368
  source: /note="Description of Artificial Sequence: Synthetic polypeptide"

SEQ ID NO: 20599 - protein, 214 aa, Artificial Sequence; identical to SEQ ID NO: 9365
  source: /note="Description of Artificial Sequence: Synthetic polypeptide"

SEQ ID NO: 20600 - protein, 214 aa, Artificial Sequence; identical to SEQ ID NO: 9365
  source: /note="Description of Artificial Sequence: Synthetic polypeptide"

SEQ ID NO: 20601 - protein, 214 aa, Artificial Sequence; identical to SEQ ID NO: 9365
  source: /note="Description of Artificial Sequence: Synthetic polypeptide"

SEQ ID NO: 20602 - protein, 214 aa, Artificial Sequence; identical to SEQ ID NO: 9365
  source: /note="Description of Artificial Sequence: Synthetic polypeptide"

SEQ ID NO: 20603 - protein, 214 aa, Artificial Sequence; identical to SEQ ID NO: 9365
  source: /note="Description of Artificial Sequence: Synthetic polypeptide"

SEQ ID NO: 20604 - protein, 216 aa, Artificial Sequence; identical to SEQ ID NO: 9376
  source: /note="Description of Artificial Sequence: Synthetic polypeptide"

SEQ ID NO: 20605 - protein, 214 aa, Artificial Sequence; identical to SEQ ID NO: 9368
  source: /note="Description of Artificial Sequence: Synthetic polypeptide"

SEQ ID NO: 20606 - protein, 214 aa, Artificial Sequence; identical to SEQ ID NO: 9368
  source: /note="Description of Artificial Sequence: Synthetic polypeptide"

SEQ ID NO: 20607 - protein, 214 aa, Artificial Sequence; identical to SEQ ID NO: 9368
  source: /note="Description of Artificial Sequence: Synthetic polypeptide"

SEQ ID NO: 20608 - protein, 213 aa, Artificial Sequence; identical to SEQ ID NO: 9380
  source: /note="Description of Artificial Sequence: Synthetic polypeptide"

SEQ ID NO: 20609 - protein, 214 aa, Artificial Sequence; identical to SEQ ID NO: 9381
  source: /note="Description of Artificial Sequence: Synthetic polypeptide"

SEQ ID NO: 20610 - protein, 212 aa, Artificial Sequence; identical to SEQ ID NO: 9382
  source: /note="Description of Artificial Sequence: Synthetic polypeptide"

SEQ ID NO: 20611 - protein, 447 aa, Artificial Sequence; identical to SEQ ID NO: 9383
  source: /note="Description of Artificial Sequence: Synthetic polypeptide"

SEQ ID NO: 20612 - protein, 212 aa, Artificial Sequence; identical to SEQ ID NO: 9384
  source: /note="Description of Artificial Sequence: Synthetic polypeptide"

SEQ ID NO: 20613 - protein, 213 aa, Artificial Sequence; identical to SEQ ID NO: 9385
  source: /note="Description of Artificial Sequence: Synthetic polypeptide"

SEQ ID NO: 20614 - protein, 212 aa, Artificial Sequence; identical to SEQ ID NO: 9386
  source: /note="Description of Artificial Sequence: Synthetic polypeptide"

SEQ ID NO: 20615 - protein, 214 aa, Artificial Sequence; identical to SEQ ID NO: 9368
  source: /note="Description of Artificial Sequence: Synthetic polypeptide"

SEQ ID NO: 20616 - protein, 213 aa, Artificial Sequence; identical to SEQ ID NO: 9388
  source: /note="Description of Artificial Sequence: Synthetic polypeptide"

SEQ ID NO: 20617 - protein, 214 aa, Artificial Sequence; identical to SEQ ID NO: 9365
  source: /note="Description of Artificial Sequence: Synthetic polypeptide"

SEQ ID NO: 20618 - protein, 107 aa, Artificial Sequence; identical to SEQ ID NO: 9390
  source: /note="Description of Artificial Sequence: Synthetic polypeptide"

SEQ ID NO: 20619 - protein, 119 aa, Artificial Sequence; identical to SEQ ID NO: 9391
  source: /note="Description of Artificial Sequence: Synthetic polypeptide"

SEQ ID NO: 20620 - protein, 107 aa, Artificial Sequence; identical to SEQ ID NO: 9392
  source: /note="Description of Artificial Sequence: Synthetic polypeptide"

SEQ ID NO: 20621 - protein, 107 aa, Artificial Sequence; identical to SEQ ID NO: 9393
  source: /note="Description of Artificial Sequence: Synthetic polypeptide"

SEQ ID NO: 20622 - protein, 119 aa, Artificial Sequence; identical to SEQ ID NO: 9394
  source: /note="Description of Artificial Sequence: Synthetic polypeptide"

SEQ ID NO: 20623 - protein, 119 aa, Artificial Sequence; identical to SEQ ID NO: 9395
  source: /note="Description of Artificial Sequence: Synthetic polypeptide"

SEQ ID NO: 20624 - protein, 214 aa, Artificial Sequence; identical to SEQ ID NO: 9381
  source: /note="Description of Artificial Sequence: Synthetic polypeptide"

SEQ ID NO: 20625 - protein, 110 aa, Artificial Sequence; identical to SEQ ID NO: 9397
  source: /note="Description of Artificial Sequence: Synthetic polypeptide"

SEQ ID NO: 20626 - protein, 110 aa, Artificial Sequence; identical to SEQ ID NO: 9398
  source: /note="Description of Artificial Sequence: Synthetic polypeptide"

SEQ ID NO: 20627 - protein, 110 aa, Artificial Sequence; identical to SEQ ID NO: 9399
  source: /note="Description of Artificial Sequence: Synthetic polypeptide"

SEQ ID NO: 20628 - protein, 110 aa, Artificial Sequence; identical to SEQ ID NO: 9400
  source: /note="Description of Artificial Sequence: Synthetic polypeptide"

SEQ ID NO: 20629 - protein, 110 aa, Artificial Sequence; identical to SEQ ID NO: 9401
  source: /note="Description of Artificial Sequence: Synthetic polypeptide"

SEQ ID NO: 20630 - protein, 110 aa, Artificial Sequence; identical to SEQ ID NO: 9402
  source: /note="Description of Artificial Sequence: Synthetic polypeptide"

SEQ ID NO: 20631 - protein, 110 aa, Artificial Sequence; identical to SEQ ID NO: 9403
  source: /note="Description of Artificial Sequence: Synthetic polypeptide"

SEQ ID NO: 20632 - protein, 110 aa, Artificial Sequence; identical to SEQ ID NO: 9404
  source: /note="Description of Artificial Sequence: Synthetic polypeptide"

SEQ ID NO: 20633 - protein, 110 aa, Artificial Sequence; identical to SEQ ID NO: 9405
  source: /note="Description of Artificial Sequence: Synthetic polypeptide"

SEQ ID NO: 20634 - protein, 115 aa, Artificial Sequence; identical to SEQ ID NO: 9406
  source: /note="Description of Artificial Sequence: Synthetic polypeptide"

SEQ ID NO: 20635 - protein, 110 aa, Artificial Sequence; identical to SEQ ID NO: 9407
  source: /note="Description of Artificial Sequence: Synthetic polypeptide"

SEQ ID NO: 20636 - protein, 110 aa, Artificial Sequence; identical to SEQ ID NO: 9408
  source: /note="Description of Artificial Sequence: Synthetic polypeptide"

SEQ ID NO: 20637 - protein, 108 aa, Artificial Sequence; identical to SEQ ID NO: 9409
  source: /note="Description of Artificial Sequence: Synthetic polypeptide"

SEQ ID NO: 20638 - protein, 110 aa, Artificial Sequence; identical to SEQ ID NO: 9410
  source: /note="Description of Artificial Sequence: Synthetic polypeptide"

SEQ ID NO: 20639 - protein, 116 aa, Artificial Sequence; identical to SEQ ID NO: 9411
  source: /note="Description of Artificial Sequence: Synthetic polypeptide"

SEQ ID NO: 20640 - protein, 110 aa, Artificial Sequence; identical to SEQ ID NO: 9412
  source: /note="Description of Artificial Sequence: Synthetic polypeptide"

SEQ ID NO: 20641 - protein, 110 aa, Artificial Sequence; identical to SEQ ID NO: 9413
  source: /note="Description of Artificial Sequence: Synthetic polypeptide"

SEQ ID NO: 20642 - protein, 110 aa, Artificial Sequence; identical to SEQ ID NO: 9414
  source: /note="Description of Artificial Sequence: Synthetic polypeptide"

SEQ ID NO: 20643 - protein, 110 aa, Artificial Sequence; identical to SEQ ID NO: 9415
  source: /note="Description of Artificial Sequence: Synthetic polypeptide"

SEQ ID NO: 20644 - protein, 218 aa, Artificial Sequence; identical to SEQ ID NO: 9422
  source: /note="Description of Artificial Sequence: Synthetic polypeptide"

SEQ ID NO: 20645 - protein, 218 aa, Artificial Sequence; identical to SEQ ID NO: 9423
  source: /note="Description of Artificial Sequence: Synthetic polypeptide"

SEQ ID NO: 20646 - protein, 218 aa, Artificial Sequence; identical to SEQ ID NO: 9424
  source: /note="Description of Artificial Sequence: Synthetic polypeptide"

SEQ ID NO: 20647 - protein, 219 aa, Artificial Sequence; identical to SEQ ID NO: 19972
  source: /note="Description of Artificial Sequence: Synthetic polypeptide"

SEQ ID NO: 20648 - protein, 219 aa, Artificial Sequence; identical to SEQ ID NO: 19973
  source: /note="Description of Artificial Sequence: Synthetic polypeptide"

SEQ ID NO: 20649 - protein, 219 aa, Artificial Sequence; identical to SEQ ID NO: 19976
  source: /note="Description of Artificial Sequence: Synthetic polypeptide"

SEQ ID NO: 20650 - protein, 219 aa, Artificial Sequence; identical to SEQ ID NO: 19974
  source: /note="Description of Artificial Sequence: Synthetic polypeptide"

SEQ ID NO: 20651 - protein, 219 aa, Artificial Sequence; identical to SEQ ID NO: 19971
  source: /note="Description of Artificial Sequence: Synthetic polypeptide"

SEQ ID NO: 20652 - protein, 219 aa, Artificial Sequence; identical to SEQ ID NO: 19970
  source: /note="Description of Artificial Sequence: Synthetic polypeptide"

SEQ ID NO: 20653 - protein, 219 aa, Artificial Sequence; identical to SEQ ID NO: 19976
  source: /note="Description of Artificial Sequence: Synthetic polypeptide"

SEQ ID NO: 20654 - protein, 219 aa, Artificial Sequence; identical to SEQ ID NO: 19978
  source: /note="Description of Artificial Sequence: Synthetic polypeptide"

SEQ ID NO: 20655 - protein, 219 aa, Artificial Sequence; identical to SEQ ID NO: 19979
  source: /note="Description of Artificial Sequence: Synthetic polypeptide"

SEQ ID NO: 20656 - protein, 219 aa, Artificial Sequence; identical to SEQ ID NO: 19979
  source: /note="Description of Artificial Sequence: Synthetic polypeptide"

SEQ ID NO: 20657 - protein, 219 aa, Artificial Sequence; identical to SEQ ID NO: 19981
  source: /note="Description of Artificial Sequence: Synthetic polypeptide"

SEQ ID NO: 20658 - protein, 219 aa, Artificial Sequence; identical to SEQ ID NO: 19982
  source: /note="Description of Artificial Sequence: Synthetic polypeptide"

SEQ ID NO: 20659 - protein, 219 aa, Artificial Sequence; identical to SEQ ID NO: 19983
  source: /note="Description of Artificial Sequence: Synthetic polypeptide"

SEQ ID NO: 20660 - protein, 219 aa, Artificial Sequence; identical to SEQ ID NO: 19971
  source: /note="Description of Artificial Sequence: Synthetic polypeptide"

SEQ ID NO: 20661 - protein, 214 aa, Artificial Sequence
  source: /note="Description of Artificial Sequence: Synthetic polypeptide"
DIQVTQSPSSLSASVGDRVTITCITSTDIDDDMNWYQQKPGKVPKLLISGGNTLRPGVPSRFSGSGSGTDFTLTISSLQPEDVATYYCLQSDSLPYTFGQGTKVEIKRTVAAPSVFIFPPSDEQLKSGTASVVCLLNNFYPREAKVQWKVDNALQSGNSQESVTEQDSKDSTYSLSSTLTLSKADYEKHKVYACEVTHQGLSSPVTKSFNRGEC

SEQ ID NO: 20662 - protein, 214 aa, Artificial Sequence; identical to SEQ ID NO: 20661
  source: /note="Description of Artificial Sequence: Synthetic polypeptide"

SEQ ID NO: 20663 - protein, 215 aa, Artificial Sequence
  source: /note="Description of Artificial Sequence: Synthetic polypeptide"
EIVLTQSPDTISLSPGERATLSCRASQSISSIYLAWYQQKPGQAPRLLIYGASSRVTGIPDRFSVSGSGTDFTLTISRLEPEDFAVYYCQHYGISPFTFGPGTKVDIRRTVAAPSVFIFPPSDEQLKSGTASVVCLLNNFYPREAKVQWKVDNALQSGNSQESVTEQDSKDSTYSLSSTLTLSKADYEKHKVYACEVTHQGLSSPVTKSFNRGEC

SEQ ID NO: 20664 - protein, 214 aa, Artificial Sequence; identical to SEQ ID NO: 5975
  source: /note="Description of Artificial Sequence: Synthetic polypeptide"

SEQ ID NO: 20665 - protein, 219 aa, Artificial Sequence
  source: /note="Description of Artificial Sequence: Synthetic polypeptide"
EIVMTQSPSTLSASVGDRVIITCQSSQSVYGNIWMAWYQQKPGRAPKLLIYQASKLASGVPSRFSGSGSGAEFTLTISSLQPDDFATYYCQGNFNTGDRYAFGQGTKLTVLKRTVAAPSVFIFPPSDEQLKSGTASVVCLLNNFYPREAKVQWKVDNALQSGNSQESVTEQDSKDSTYSLSSTLTLSKADYEKHKVYACEVTHQGLSSPVTKSFNRGEC

SEQ ID NO: 20666 - protein, 214 aa, Artificial Sequence; identical to SEQ ID NO: 11503
  source: /note="Description of Artificial Sequence: Synthetic polypeptide"

SEQ ID NO: 20667 - protein, 214 aa, Artificial Sequence; identical to SEQ ID NO: 11503
  source: /note="Description of Artificial Sequence: Synthetic polypeptide"

SEQ ID NO: 20668 - protein, 218 aa, Artificial Sequence
  source: /note="Description of Artificial Sequence: Synthetic polypeptide"
EIVMTQSPSTLSASVGDRVIITCQASEIIHSWLAWYQQKPGKAPKLLIYLASTLASGVPSRFSGSGSGAEFTLTISSLQPDDFATYYCQNVYLASTNGANFGQGTKLTVLKRTVAAPSVFIFPPSDEQLKSGTASVVCLLNNFYPREAKVQWKVDNALQSGNSQESVTEQDSKDSTYSLSSTLTLSKADYEKHKVYACEVTHQGLSSPVTKSFNRGEC

SEQ ID NO: 20669 - protein, 320 aa, Artificial Sequence
  source: /note="Description of Artificial Sequence: Synthetic polypeptide"
EIVMTQSPSTLSASVGDRVIITCQASEIIHSWLAWYQQKPGKAPKLLIYLASTLASGVPSRFSGSGSGAEFTLTISSLQPDDFATYYCQNVYLASTNGANFGQGTKLTVLKRTVAAPSVFIFPPSDEQLKSGTASVVCLLNNFYPREAKVQWKVDNALQSGNSQESVTEQDSKDSTYSLSSTLTLSKADYEKHKVYACEVTHQGLSSPVTKSFNRGECGSGGGGVYHREAQSGKYKLTYAEAKAVCEFEGGHLATYKQLEAARKIGFHVCAAGWMAKGRVGYPIVKPGPNCGFGKTGIIDYGIRLNRSERWDAYCYNPHA

SEQ ID NO: 20670 - protein, 223 aa, Artificial Sequence
  source: /note="Description of Artificial Sequence: Synthetic polypeptide"
GGGGGEIVMTQSPSTLSASVGDRVIITCQASEIIHSWLAWYQQKPGKAPKLLIYLASTLASGVPSRFSGSGSGAEFTLTISSLQPDDFATYYCQNVYLASTNGANFGQGTKLTVLKRTVAAPSVFIFPPSDEQLKSGTASVVCLLNNFYPREAKVQWKVDNALQSGNSQESVTEQDSKDSTYSLSSTLTLSKADYEKHKVYACEVTHQGLSSPVTKSFNRGEC

SEQ ID NO: 20671 - protein, 319 aa, Artificial Sequence
  source: /note="Description of Artificial Sequence: Synthetic polypeptide"
VYHREARSGKYKLTYAEAKAVCEFEGGHLATYKQLEAARKIGFHVCAAGWMAKGRVGYPIVKPGPNCGFGKTGIIDYGIRLNRSERWDAYCYNPHAKGGGSEIVMTQSPSTLSASVGDRVIITCQASEIIHSWLAWYQQKPGKAPKLLIYLASTLASGVPSRFSGSGSGAEFTLTISSLQPDDFATYYCQNVYLASTNGANFGQGTKLTVLKRTVAAPSVFIFPPSDEQLKSGTASVVCLLNNFYPREAKVQWKVDNALQSGNSQESVTEQDSKDSTYSLSSTLTLSKADYEKHKVYACEVTHQGLSSPVTKSFNRGEC

SEQ ID NO: 20672 - protein, 320 aa, Artificial Sequence; identical to SEQ ID NO: 20669
  source: /note="Description of Artificial Sequence: Synthetic polypeptide"

SEQ ID NO: 20673 - protein, 422 aa, Artificial Sequence
  source: /note="Description of Artificial Sequence: Synthetic polypeptide"
EIVMTQSPSTLSASVGDRVIITCQASEIIHSWLAWYQQKPGKAPKLLIYLASTLASGVPSRFSGSGSGAEFTLTISSLQPDDFATYYCQNVYLASTNGANFGQGTKLTVLKRTVAAPSVFIFPPSDEQLKSGTASVVCLLNNFYPREAKVQWKVDNALQSGNSQESVTEQDSKDSTYSLSSTLTLSKADYEKHKVYACEVTHQGLSSPVTKSFNRGECGSGGGGVYHREAQSGKYKLTYAEAKAVCEFEGGHLATYKQLEAARKIGFHVCAAGWMAKGRVGYPIVKPGPNCGFGKTGIIDYGIRLNRSERWDAYCYNPHAGSGGGGVYHREAQSGKYKLTYAEAKAVCEFEGGHLATYKQLEAARKIGFHVCAAGWMAKGRVGYPIVKPGPNCGFGKTGIIDYGIRLNRSERWDAYCYNPHA

SEQ ID NO: 20674 - protein, 319 aa, Artificial Sequence; identical to SEQ ID NO: 20671
  source: /note="Description of Artificial Sequence: Synthetic polypeptide"

SEQ ID NO: 20675 - protein, 218 aa, Artificial Sequence; identical to SEQ ID NO: 20668
  source: /note="Description of Artificial Sequence: Synthetic polypeptide"

SEQ ID NO: 20676 - protein, 218 aa, Artificial Sequence; identical to SEQ ID NO: 20668
  source: /note="Description of Artificial Sequence: Synthetic polypeptide"

SEQ ID NO: 20677 - protein, 320 aa, Artificial Sequence; identical to SEQ ID NO: 20669
  source: /note="Description of Artificial Sequence: Synthetic polypeptide"

SEQ ID NO: 20678 - protein, 218 aa, Artificial Sequence; identical to SEQ ID NO: 20668
  source: /note="Description of Artificial Sequence: Synthetic polypeptide"

SEQ ID NO: 20679 - protein, 214 aa, Artificial Sequence
  source: /note="Description of Artificial Sequence: Synthetic polypeptide"
EIVLTQSPDFQSVTPKEKVTITCRASQSIGSSLHWYQQKPDQSPKLLIKYASQSFSGVPSRFSGSGSGTDFTLTINSLEAEDAAAYYCHQSSSLPFTFGPGTKVDIKRTVAAPSVFIFPPSDEQLKSGTASVVCLLNNFYPREAKVQWKVDNALQSGNSQESVTEQDSKDSTYSLSSTLTLSKADYEKHKVYACEVTHQGLSSPVTKSFNRGEC

SEQ ID NO: 20680 - protein, 214 aa, Artificial Sequence; identical to SEQ ID NO: 9381
  source: /note="Description of Artificial Sequence: Synthetic polypeptide"

SEQ ID NO: 20681 - protein, 214 aa, Artificial Sequence; identical to SEQ ID NO: 9365
  source: /note="Description of Artificial Sequence: Synthetic polypeptide"

SEQ ID NO: 20682 - protein, 107 aa, Artificial Sequence
  source: /note="Description of Artificial Sequence: Synthetic polypeptide"
SYVLTQPPSVSVAPGKTARITCSGDKLGDHYAYWYQQKPGQAPVLVIYDDSKRPSGIPERFSGSNSGNTATLTISRVEAGDEADYYCATWTFEGDYVFGGGTKLTVL

SEQ ID NO: 20683 - protein, 214 aa, Artificial Sequence
  source: /note="Description of Artificial Sequence: Synthetic polypeptide"
ETTVTQSPSFLSASVGDRVTITCITTTDIDDDMNWFQQEPGKAPKLLISEGNILRPGVPSRFSSSGYGTDFTLTISKLQPEDFATYYCLQSDNLPFTFGQGTKLEIKRTVAAPSVFIFPPSDEQLKSGTASVVCLLNNFYPREAKVQWKVDNALQSGNSQESVTEQDSKDSTYSLSSTLTLSKADYEKHKVYACEVTHQGLSSPVTKSFNRGEC

SEQ ID NO: 20684 - protein, 107 aa, Artificial Sequence
  source: /note="Description of Artificial Sequence: Synthetic polypeptide"
ETTVTQSPSFLSASVGDRVTITCITTTDIDDDMNWFQQEPGKAPKLLISEGNILRPGVPSRFSSSGYGTDFTLTISKLQPEDFATYYCLQSDNLPFTFGQGTKLEIK

SEQ ID NO: 20685 - protein, 107 aa, Artificial Sequence
  source: /note="Description of Artificial Sequence: Synthetic polypeptide"
DIQVTQSPSSLSASVGDRVTITCITSTDIDDDMNWYQQKPGKVPKLLISGGNTLRPGVPSRFSGSGSGTDFTLTISSLQPEDVATYYCLQSDSLPYTFGQGTKLEIK

SEQ ID NO: 20686 - protein, 107 aa, Artificial Sequence
  source: /note="Description of Artificial Sequence: Synthetic polypeptide"
DIQVTQSPSSLSASVGDRVTITCITSTDIDDDMAWYQQKPGKVPKLLISGGNTLRPGVPSRFSGSGSGTDFTLTISSLQPEDVATYYCLQSDSLPYTFGQGTKLEIK

SEQ ID NO: 20687 - protein, 107 aa, Artificial Sequence
  source: /note="Description of Artificial Sequence: Synthetic polypeptide"
DIQVTQSPSSLSASVGDRVTITCITSTDIDDDMQWYQQKPGKVPKLLISGGNTLRPGVPSRFSGSGSGTDFTLTISSLQPEDVATYYCLQSDSLPYTFGQGTKLEIK

SEQ ID NO: 20688 - protein, 107 aa, Artificial Sequence
  source: /note="Description of Artificial Sequence: Synthetic polypeptide"
DIQVTQSPSSLSASVGDRVTITCITSTDIDDDMNWYQQKPGKVPKLLISGGSTLRPGVPSRFSGSGSGTDFTLTISSLQPEDVATYYCLQSDSLPYTFGQGTKLEIK

SEQ ID NO: 20689 - protein, 107 aa, Artificial Sequence
  source: /note="Description of Artificial Sequence: Synthetic polypeptide"
DIQVTQSPSSLSASVGDRVTITCITSTDIDDDMNWYQQKPGKVPKLLISGGATLRPGVPSRFSGSGSGTDFTLTISSLQPEDVATYYCLQSDSLPYTFGQGTKLEIK

SEQ ID NO: 20690 - protein, 107 aa, Artificial Sequence; identical to SEQ ID NO: 20685
  source: /note="Description of Artificial Sequence: Synthetic polypeptide"

SEQ ID NO: 20691 - protein, 107 aa, Artificial Sequence; identical to SEQ ID NO: 20685
  source: /note="Description of Artificial Sequence: Synthetic polypeptide"

SEQ ID NO: 20692 - protein, 107 aa, Artificial Sequence; identical to SEQ ID NO: 20685
  source: /note="Description of Artificial Sequence: Synthetic polypeptide"

SEQ ID NO: 20693 - protein, 107 aa, Artificial Sequence; identical to SEQ ID NO: 20685
  source: /note="Description of Artificial Sequence: Synthetic polypeptide"

SEQ ID NO: 20694 - protein, 108 aa, Artificial Sequence; identical to SEQ ID NO: 10786
  source: /note="Description of Artificial Sequence: Synthetic polypeptide"

SEQ ID NO: 20695 - protein, 108 aa, Artificial Sequence; identical to SEQ ID NO: 10787
  source: /note="Description of Artificial Sequence: Synthetic polypeptide"

SEQ ID NO: 20696 - protein, 107 aa, Artificial Sequence [sequence omitted]

SEQ ID NO: 20697 - protein, 107 aa, Artificial Sequence [sequence omitted]

SEQ ID NO: 20698 - protein, 107 aa, Artificial Sequence
  source: /note="Description of Artificial Sequence: Synthetic polypeptide"
DIQVTQSPSSLSASVGDRVTITCITSTDIDDDLNWYQQKPGKVPKLLISGGNTLRPGVPSRFSGSGSGTDFTLTISSLQPEDVATYYCLQSDSLPYTFGQGTKLEIK

SEQ ID NO: 20699 - protein, 107 aa, Artificial Sequence
  source: /note="Description of Artificial Sequence: Synthetic polypeptide"
DIQVTQSPSSLSASVGDRVTITCITSTDIDDDINWYQQKPGKVPKLLISGGNTLRPGVPSRFSGSGSGTDFTLTISSLQPEDVATYYCLQSDSLPYTFGQGTKLEIK

SEQ ID NO: 20700 - protein, 116 aa, Artificial Sequence; identical to SEQ ID NO: 4168
  source: /note="Description of Artificial Sequence: Synthetic polypeptide"

SEQ ID NO: 20701 - protein, 111 aa, Artificial Sequence; identical to SEQ ID NO: 4169
  source: /note="Description of Artificial Sequence: Synthetic polypeptide"

SEQ ID NO: 20702 - protein, 113 aa, Artificial Sequence; identical to SEQ ID NO: 11100
  source: /note="Description of Artificial Sequence: Synthetic polypeptide"

SEQ ID NO: 20703 - protein, 106 aa, Artificial Sequence; identical to SEQ ID NO: 11101
  source: /note="Description of Artificial Sequence: Synthetic polypeptide"

SEQ ID NO: 20704 - protein, 107 aa, Artificial Sequence; identical to SEQ ID NO: 11102
  source: /note="Description of Artificial Sequence: Synthetic polypeptide"

SEQ ID NO: 20705 - protein, 108 aa, Artificial Sequence; identical to SEQ ID NO: 11103
  source: /note="Description of Artificial Sequence: Synthetic polypeptide"

SEQ ID NO: 20706 - protein, 107 aa, Artificial Sequence; identical to SEQ ID NO: 11104
  source: /note="Description of Artificial Sequence: Synthetic polypeptide"

SEQ ID NO: 20707 - protein, 107 aa, Artificial Sequence; identical to SEQ ID NO: 11105
  source: /note="Description of Artificial Sequence: Synthetic polypeptide"

SEQ ID NO: 20708 - protein, 108 aa, Artificial Sequence; identical to SEQ ID NO: 11106
  source: /note="Description of Artificial Sequence: Synthetic polypeptide"

SEQ ID NO: 20709 - protein, 107 aa, Artificial Sequence; identical to SEQ ID NO: 11107
  source: /note="Description of Artificial Sequence: Synthetic polypeptide"

SEQ ID NO: 20710 - protein, 107 aa, Artificial Sequence; identical to SEQ ID NO: 11108
  source: /note="Description of Artificial Sequence: Synthetic polypeptide"

SEQ ID NO: 20711 - protein, 113 aa, Artificial Sequence; identical to SEQ ID NO: 11109
  source: /note="Description of Artificial Sequence: Synthetic polypeptide"

SEQ ID NO: 20712 - protein, 107 aa, Artificial Sequence; identical to SEQ ID NO: 11110
  source: /note="Description of Artificial Sequence: Synthetic polypeptide"

SEQ ID NO: 20713 - protein, 113 aa, Artificial Sequence; identical to SEQ ID NO: 11111
  source: /note="Description of Artificial Sequence: Synthetic polypeptide"

SEQ ID NO: 20714 - protein, 107 aa, Artificial Sequence; identical to SEQ ID NO: 11112
  source: /note="Description of Artificial Sequence: Synthetic polypeptide"

SEQ ID NO: 20715 - protein, 107 aa, Artificial Sequence; identical to SEQ ID NO: 11113
  source: /note="Description of Artificial Sequence: Synthetic polypeptide"

SEQ ID NO: 20716 - protein, 107 aa, Artificial Sequence; identical to SEQ ID NO: 11114
  source: /note="Description of Artificial Sequence: Synthetic polypeptide"

SEQ ID NO: 20717 - protein, 107 aa, Artificial Sequence; identical to SEQ ID NO: 11115
  source: /note="Description of Artificial Sequence: Synthetic polypeptide"

SEQ ID NO: 20718 - protein, 112 aa, Artificial Sequence; identical to SEQ ID NO: 11116
  source: /note="Description of Artificial Sequence: Synthetic polypeptide"

SEQ ID NO: 20719 - protein, 113 aa, Artificial Sequence; identical to SEQ ID NO: 11117
  source: /note="Description of Artificial Sequence: Synthetic polypeptide"

SEQ ID NO: 20720 - protein, 107 aa, Artificial Sequence; identical to SEQ ID NO: 11118
  source: /note="Description of Artificial Sequence: Synthetic polypeptide"

SEQ ID NO: 20721 - protein, 113 aa, Artificial Sequence; identical to SEQ ID NO: 11119
  source: /note="Description of Artificial Sequence: Synthetic polypeptide"

SEQ ID NO: 20722 - protein, 113 aa, Artificial Sequence; identical to SEQ ID NO: 11120
  source: /note="Description of Artificial Sequence: Synthetic polypeptide"

SEQ ID NO: 20723 - protein, 112 aa, Artificial Sequence; identical to SEQ ID NO: 11121
  source: /note="Description of Artificial Sequence: Synthetic polypeptide"

SEQ ID NO: 20724 - protein, 112 aa, Artificial Sequence; identical to SEQ ID NO: 11122
  source: /note="Description of Artificial Sequence: Synthetic polypeptide"

SEQ ID NO: 20725 - protein, 113 aa, Artificial Sequence; identical to SEQ ID NO: 11123
  source: /note="Description of Artificial Sequence: Synthetic polypeptide"

SEQ ID NO: 20726 - protein, 113 aa, Artificial Sequence; identical to SEQ ID NO: 11124
  source: /note="Description of Artificial Sequence: Synthetic polypeptide"

SEQ ID NO: 20727 - protein, 112 aa, Artificial Sequence; identical to SEQ ID NO: 11125
  source: /note="Description of Artificial Sequence: Synthetic polypeptide"

SEQ ID NO: 20728 - protein, 113 aa, Artificial Sequence; identical to SEQ ID NO: 11126
  source: /note="Description of Artificial Sequence: Synthetic polypeptide"

SEQ ID NO: 20729 - protein, 113 aa, Artificial Sequence; identical to SEQ ID NO: 11127
  source: /note="Description of Artificial Sequence: Synthetic polypeptide"

SEQ ID NO: 20730 - protein, 113 aa, Artificial Sequence; identical to SEQ ID NO: 11128
  source: /note="Description of Artificial Sequence: Synthetic polypeptide"

SEQ ID NO: 20731 - protein, 113 aa, Artificial Sequence; identical to SEQ ID NO: 11129
  source: /note="Description of Artificial Sequence: Synthetic polypeptide"

SEQ ID NO: 20732 - protein, 113 aa, Artificial Sequence; identical to SEQ ID NO: 11130
  source: /note="Description of Artificial Sequence: Synthetic polypeptide"

SEQ ID NO: 20733 - protein, 113 aa, Artificial Sequence; identical to SEQ ID NO: 11131
  source: /note="Description of Artificial Sequence: Synthetic polypeptide"

SEQ ID NO: 20734 - protein, 113 aa, Artificial Sequence; identical to SEQ ID NO: 11132
  source: /note="Description of Artificial Sequence: Synthetic polypeptide"

SEQ ID NO: 20735 - protein, 113 aa, Artificial Sequence; identical to SEQ ID NO: 11133
  source: /note="Description of Artificial Sequence: Synthetic polypeptide"

SEQ ID NO: 20736 - protein, 113 aa, Artificial Sequence; identical to SEQ ID NO: 11129
  source: /note="Description of Artificial Sequence: Synthetic polypeptide"

SEQ ID NO: 20737 - protein, 112 aa, Artificial Sequence; identical to SEQ ID NO: 11135
  source: /note="Description of Artificial Sequence: Synthetic polypeptide"

SEQ ID NO: 20738 - protein, 113 aa, Artificial Sequence; identical to SEQ ID NO: 11136
  source: /note="Description of Artificial Sequence: Synthetic polypeptide"

SEQ ID NO: 20739 - protein, 113 aa, Artificial Sequence; identical to SEQ ID NO: 11137
  source: /note="Description of Artificial Sequence: Synthetic polypeptide"

SEQ ID NO: 20740 - protein, 112 aa, Artificial Sequence; identical to SEQ ID NO: 11138
  source: /note="Description of Artificial Sequence: Synthetic polypeptide"

SEQ ID NO: 20741 - protein, 107 aa, Artificial Sequence; identical to SEQ ID NO: 11139
  source: /note="Description of Artificial Sequence: Synthetic polypeptide"

SEQ ID NO: 20742 - protein, 107 aa, Artificial Sequence; identical to SEQ ID NO: 11140
  source: /note="Description of Artificial Sequence: Synthetic polypeptide"

SEQ ID NO: 20743 - protein, 107 aa, Artificial Sequence; identical to SEQ ID NO: 11141
  source: /note="Description of Artificial Sequence: Synthetic polypeptide"

SEQ ID NO: 20744 - protein, 107 aa, Artificial Sequence; identical to SEQ ID NO: 11142
  source: /note="Description of Artificial Sequence: Synthetic polypeptide"

SEQ ID NO: 20745 - protein, 107 aa, Artificial Sequence; identical to SEQ ID NO: 11143
  source: /note="Description of Artificial Sequence: Synthetic polypeptide"

SEQ ID NO: 20746 - protein, 107 aa, Artificial Sequence; identical to SEQ ID NO: 11144
  source: /note="Description of Artificial Sequence: Synthetic polypeptide"

SEQ ID NO: 20747 - protein, 107 aa, Artificial Sequence; identical to SEQ ID NO: 11145
  source: /note="Description of Artificial Sequence: Synthetic polypeptide"

SEQ ID NO: 20748 - protein, 107 aa, Artificial Sequence; identical to SEQ ID NO: 11146
  source: /note="Description of Artificial Sequence: Synthetic polypeptide"

SEQ ID NO: 20749 - protein, 107 aa, Artificial Sequence; identical to SEQ ID NO: 11147
  source: /note="Description of Artificial Sequence: Synthetic polypeptide"

SEQ ID NO: 20750 - protein, 107 aa, Artificial Sequence; identical to SEQ ID NO: 11141
  source: /note="Description of Artificial Sequence: Synthetic polypeptide"

SEQ ID NO: 20751 - protein, 107 aa, Artificial Sequence; identical to SEQ ID NO: 11149
  source: /note="Description of Artificial Sequence: Synthetic polypeptide"

SEQ ID NO: 20752 - protein, 107 aa, Artificial Sequence; identical to SEQ ID NO: 11150
  source: /note="Description of Artificial Sequence: Synthetic polypeptide"

SEQ ID NO: 20753 - protein, 107 aa, Artificial Sequence; identical to SEQ ID NO: 11151
  source: /note="Description of Artificial Sequence: Synthetic polypeptide"

SEQ ID NO: 20754 - protein, 110 aa, Artificial Sequence; identical to SEQ ID NO: 11152
  source: /note="Description of Artificial Sequence: Synthetic polypeptide"

SEQ ID NO: 20755 - protein, 107 aa, Artificial Sequence; identical to SEQ ID NO: 11153
  source: /note="Description of Artificial Sequence: Synthetic polypeptide"

SEQ ID NO: 20756 - protein, 112 aa, Artificial Sequence; identical to SEQ ID NO: 11154
  source: /note="Description of Artificial Sequence: Synthetic polypeptide"

SEQ ID NO: 20757 - protein, 107 aa, Artificial Sequence; identical to SEQ ID NO: 11155
  source: /note="Description of Artificial Sequence: Synthetic polypeptide"

SEQ ID NO: 20758 - protein, 107 aa, Artificial Sequence; identical to SEQ ID NO: 11156
  source: /note="Description of Artificial Sequence: Synthetic polypeptide"

SEQ ID NO: 20759 - protein, 106 aa, Artificial Sequence; identical to SEQ ID NO: 11157
  source: /note="Description of Artificial Sequence: Synthetic polypeptide"

SEQ ID NO: 20760 - protein, 110 aa, Artificial Sequence; identical to SEQ ID NO: 11158
  source: /note="Description of Artificial Sequence: Synthetic polypeptide"

SEQ ID NO: 20761 - protein, 107 aa, Artificial Sequence; identical to SEQ ID NO: 11159
  source: /note="Description of Artificial Sequence: Synthetic polypeptide"

SEQ ID NO: 20762 - protein, 107 aa, Artificial Sequence; identical to SEQ ID NO: 11160
  source: /note="Description of Artificial Sequence: Synthetic polypeptide"

SEQ ID NO: 20763 - protein, 110 aa, Artificial Sequence; identical to SEQ ID NO: 11161
  source: /note="Description of Artificial Sequence: Synthetic polypeptide"

SEQ ID NO: 20764 - protein, 107 aa, Artificial Sequence; identical to SEQ ID NO: 11162
  source: /note="Description of Artificial Sequence: Synthetic polypeptide"

SEQ ID NO: 20765 - protein, 106 aa, Artificial Sequence; identical to SEQ ID NO: 11163
  source: /note="Description of Artificial Sequence: Synthetic polypeptide"

SEQ ID NO: 20766 - protein, 107 aa, Artificial Sequence; identical to SEQ ID NO: 11164
  source: /note="Description of Artificial Sequence: Synthetic polypeptide"

SEQ ID NO: 20767 - protein, 121 aa, Artificial Sequence; identical to SEQ ID NO: 8680
  source: /note="Description of Artificial Sequence: Synthetic polypeptide"

SEQ ID NO: 20768 - protein, 107 aa, Artificial Sequence; identical to SEQ ID NO: 11166
  source: /note="Description of Artificial Sequence: Synthetic polypeptide"

SEQ ID NO: 20769 - protein, 107 aa, Artificial Sequence; identical to SEQ ID NO: 11167
  source: /note="Description of Artificial Sequence: Synthetic polypeptide"

SEQ ID NO: 20770 - protein, 107 aa, Artificial Sequence; identical to SEQ ID NO: 11168
  source: /note="Description of Artificial Sequence: Synthetic polypeptide"

SEQ ID NO: 20771 - protein, 110 aa, Artificial Sequence; identical to SEQ ID NO: 11169
  source: /note="Description of Artificial Sequence: Synthetic polypeptide"

SEQ ID NO: 20772 - protein, 107 aa, Artificial Sequence; identical to SEQ ID NO: 11170
  source: /note="Description of Artificial Sequence: Synthetic polypeptide"

SEQ ID NO: 20773 - protein, 107 aa, Artificial Sequence; identical to SEQ ID NO: 11171
  source: /note="Description of Artificial Sequence: Synthetic polypeptide"

SEQ ID NO: 20774 - protein, 110 aa, Artificial Sequence; identical to SEQ ID NO: 11172
  source: /note="Description of Artificial Sequence: Synthetic polypeptide"

SEQ ID NO: 20775 - protein, 107 aa, Artificial Sequence; identical to SEQ ID NO: 11173
  source: /note="Description of Artificial Sequence: Synthetic polypeptide"

SEQ ID NO: 20776 - protein, 107 aa, Artificial Sequence; identical to SEQ ID NO: 11174
  source: /note="Description of Artificial Sequence: Synthetic polypeptide"

SEQ ID NO: 20777 - protein, 106 aa, Artificial Sequence; identical to SEQ ID NO: 11175
  source: /note="Description of Artificial Sequence: Synthetic polypeptide"

SEQ ID NO: 20778 - protein, 112 aa, Artificial Sequence; identical to SEQ ID NO: 11125
  source: /note="Description of Artificial Sequence: Synthetic polypeptide"

SEQ ID NO: 20779 - protein, 110 aa, Artificial Sequence; identical to SEQ ID NO: 11177
  source: /note="Description of Artificial Sequence: Synthetic polypeptide"

SEQ ID NO: 20780 - protein, 107 aa, Artificial Sequence; identical to SEQ ID NO: 11178
  source: /note="Description of Artificial Sequence: Synthetic polypeptide"

SEQ ID NO: 20781 - protein, 110 aa, Artificial Sequence; identical to SEQ ID NO: 11179
  source: /note="Description of Artificial Sequence: Synthetic polypeptide"

SEQ ID NO: 20782 - protein, 107 aa, Artificial Sequence; identical to SEQ ID NO: 11180
  source: /note="Description of Artificial Sequence: Synthetic polypeptide"

SEQ ID NO: 20783 - protein, 110 aa, Artificial Sequence; identical to SEQ ID NO: 11181
  source: /note="Description of Artificial Sequence: Synthetic polypeptide"

SEQ ID NO: 20784 - protein, 107 aa, Artificial Sequence; identical to SEQ ID NO: 11182
  source: /note="Description of Artificial Sequence: Synthetic polypeptide"

SEQ ID NO: 20785 - protein, 107 aa, Artificial Sequence; identical to SEQ ID NO: 11183
  source: /note="Description of Artificial Sequence: Synthetic polypeptide"

SEQ ID NO: 20786 - protein, 107 aa, Artificial Sequence; identical to SEQ ID NO: 11184
  source: /note="Description of Artificial Sequence: Synthetic polypeptide"

SEQ ID NO: 20787 - protein, 107 aa, Artificial Sequence; identical to SEQ ID NO: 11185
  source: /note="Description of Artificial Sequence: Synthetic polypeptide"

SEQ ID NO: 20788 - protein, 110 aa, Artificial Sequence; identical to SEQ ID NO: 11186
  source: /note="Description of Artificial Sequence: Synthetic polypeptide"

SEQ ID NO: 20789 - protein, 112 aa, Artificial Sequence; identical to SEQ ID NO: 11138
  source: /note="Description of Artificial Sequence: Synthetic polypeptide"

SEQ ID NO: 20790 - protein, 107 aa, Artificial Sequence; identical to SEQ ID NO: 11188
  source: /note="Description of Artificial Sequence: Synthetic polypeptide"

SEQ ID NO: 20791 - protein, 107 aa, Artificial Sequence; identical to SEQ ID NO: 11147
  source: /note="Description of Artificial Sequence: Synthetic polypeptide"

SEQ ID NO: 20792 - protein, 107 aa, Artificial Sequence; identical to SEQ ID NO: 11190
  source: /note="Description of Artificial Sequence: Synthetic polypeptide"

SEQ ID NO: 20793 - protein, 116 aa, Artificial Sequence; identical to SEQ ID NO: 11191
  source: /note="Description of Artificial Sequence: Synthetic polypeptide"

SEQ ID NO: 20794 - DNA, 364 bp, Artificial Sequence; identical to SEQ ID NO: 11192
  source: /note="Description of Artificial Sequence: Synthetic polynucleotide"

SEQ ID NO: 20795 - protein, 107 aa, Artificial Sequence; identical to SEQ ID NO: 11193
  source: /note="Description of Artificial Sequence: Synthetic polypeptide"

SEQ ID NO: 20796 - protein, 107 aa, Artificial Sequence; identical to SEQ ID NO: 11194
  source: /note="Description of Artificial Sequence: Synthetic polypeptide"

SEQ ID NO: 20797 - protein, 107 aa, Artificial Sequence; identical to SEQ ID NO: 11195
  source: /note="Description of Artificial Sequence: Synthetic polypeptide"

SEQ ID NO: 20798 - protein, 107 aa, Artificial Sequence; identical to SEQ ID NO: 11196
  source: /note="Description of Artificial Sequence: Synthetic polypeptide"

SEQ ID NO: 20799 - DNA, 355 bp, Artificial Sequence; identical to SEQ ID NO: 11197
  source: /note="Description of Artificial Sequence: Synthetic polynucleotide"

SEQ ID NO: 20800 - protein, 112 aa, Artificial Sequence; identical to SEQ ID NO: 11122
  source: /note="Description of Artificial Sequence: Synthetic polypeptide"

SEQ ID NO: 20801 - protein, 107 aa, Artificial Sequence; identical to SEQ ID NO: 11199
  source: /note="Description of Artificial Sequence: Synthetic polypeptide"

SEQ ID NO: 20802 - protein, 107 aa, Artificial Sequence; identical to SEQ ID NO: 11200
  source: /note="Description of Artificial Sequence: Synthetic polypeptide"

SEQ ID NO: 20803 - protein, 107 aa, Artificial Sequence; identical to SEQ ID NO: 11201
  source: /note="Description of Artificial Sequence: Synthetic polypeptide"

SEQ ID NO: 20804 - protein, 107 aa, Artificial Sequence; identical to SEQ ID NO: 11202
  source: /note="Description of Artificial Sequence: Synthetic polypeptide"

SEQ ID NO: 20805 - protein, 107 aa, Artificial Sequence; identical to SEQ ID NO: 11203
  source: /note="Description of Artificial Sequence: Synthetic polypeptide"

SEQ ID NO: 20806 - protein, 107 aa, Artificial Sequence; identical to SEQ ID NO: 11204
  source: /note="Description of Artificial Sequence: Synthetic polypeptide"

SEQ ID NO: 20807 - protein, 107 aa, Artificial Sequence; identical to SEQ ID NO: 11205
  source: /note="Description of Artificial Sequence: Synthetic polypeptide"

SEQ ID NO: 20808 - protein, 107 aa, Artificial Sequence; identical to SEQ ID NO: 11206
  source: /note="Description of Artificial Sequence: Synthetic polypeptide"

SEQ ID NO: 20809 - protein, 107 aa, Artificial Sequence; identical to SEQ ID NO: 11185
  source: /note="Description of Artificial Sequence: Synthetic polypeptide"

SEQ ID NO: 20810 - protein, 107 aa, Artificial Sequence; identical to SEQ ID NO: 11208
  source: /note="Description of Artificial Sequence: Synthetic polypeptide"

SEQ ID NO: 20811 - protein, 113 aa, Artificial Sequence; identical to SEQ ID NO: 11209
  source: /note="Description of Artificial Sequence: Synthetic polypeptide"

SEQ ID NO: 20812 - protein, 107 aa, Artificial Sequence; identical to SEQ ID NO: 11147
  source: /note="Description of Artificial Sequence: Synthetic polypeptide"

SEQ ID NO: 20813 - protein, 107 aa, Artificial Sequence; identical to SEQ ID NO: 11211
  source: /note="Description of Artificial Sequence: Synthetic polypeptide"

SEQ ID NO: 20814 - protein, 107 aa, Artificial Sequence; identical to SEQ ID NO: 11212
  source: /note="Description of Artificial Sequence: Synthetic polypeptide"

SEQ ID NO: 20815 - protein, 112 aa, Artificial Sequence; identical to SEQ ID NO: 11213
  source: /note="Description of Artificial Sequence: Synthetic polypeptide"

SEQ ID NO: 20816 - protein, 113 aa, Artificial Sequence; identical to SEQ ID NO: 11215
  source: /note="Description of Artificial Sequence: Synthetic polypeptide"

SEQ ID NO: 20817 - protein, 112 aa, Artificial Sequence; identical to SEQ ID NO: 11216
  source: /note="Description of Artificial Sequence: Synthetic polypeptide"

SEQ ID NO: 20818 - protein, 112 aa, Artificial Sequence; identical to SEQ ID NO: 11218
  source: /note="Description of Artificial Sequence: Synthetic polypeptide"

SEQ ID NO: 20819 - protein, 112 aa, Artificial Sequence; identical to SEQ ID NO: 11154
  source: /note="Description of Artificial Sequence: Synthetic polypeptide"

SEQ ID NO: 20820 - protein, 112 aa, Artificial Sequence; identical to SEQ ID NO: 11220
  source: /note="Description of Artificial Sequence: Synthetic polypeptide"

SEQ ID NO: 20821 - protein, 112 aa, Artificial Sequence; identical to SEQ ID NO: 11121
  source: /note="Description of Artificial Sequence: Synthetic polypeptide"

SEQ ID NO: 20822 - protein, 112 aa, Artificial Sequence; identical to SEQ ID NO: 11122
  source: /note="Description of Artificial Sequence: Synthetic polypeptide"

SEQ ID NO: 20823 - protein, 113 aa, Artificial Sequence; identical to SEQ ID NO: 11223
  source: /note="Description of Artificial Sequence: Synthetic polypeptide"

SEQ ID NO: 20824 - protein, 112 aa, Artificial Sequence; identical to SEQ ID NO: 11224
  source: /note="Description of Artificial Sequence: Synthetic polypeptide"

SEQ ID NO: 20825 - protein, 112 aa, Artificial Sequence; identical to SEQ ID NO: 11225
  source: /note="Description of Artificial Sequence: Synthetic polypeptide"

SEQ ID NO: 20826 - protein, 112 aa, Artificial Sequence; identical to SEQ ID NO: 11224
  source: /note="Description of Artificial Sequence: Synthetic polypeptide"

SEQ ID NO: 20827 - protein, 112 aa, Artificial Sequence; identical to SEQ ID NO: 11227
  source: /note="Description of Artificial Sequence: Synthetic polypeptide"

SEQ ID NO: 20828 - protein, 112 aa, Artificial Sequence; identical to SEQ ID NO: 11121
  source: /note="Description of Artificial Sequence: Synthetic polypeptide"

SEQ ID NO: 20829 - protein, 109 aa, Artificial Sequence; identical to SEQ ID NO: 4197
  source: /note="Description of Artificial Sequence: Synthetic polypeptide"

SEQ ID NO: 20830 - protein, 108 aa, Artificial Sequence; identical to SEQ ID NO: 4198
  source: /note="Description of Artificial Sequence: Synthetic polypeptide"

SEQ ID NO: 20831 - protein, 108 aa, Artificial Sequence; identical to SEQ ID NO: 4199
  source: /note="Description of Artificial Sequence: Synthetic polypeptide"

SEQ ID NO: 20832 - protein, 108 aa, Artificial Sequence; identical to SEQ ID NO: 4200
  source: /note="Description of Artificial Sequence: Synthetic polypeptide"

SEQ ID NO: 20833 - protein, 106 aa, Artificial Sequence; identical to SEQ ID NO: 4201
  source: /note="Description of Artificial Sequence: Synthetic polypeptide"

SEQ ID NO: 20834 - protein, 108 aa, Artificial Sequence; identical to SEQ ID NO: 4202
  source: /note="Description of Artificial Sequence: Synthetic polypeptide"

SEQ ID NO: 20835 - protein, 111 aa, Artificial Sequence; identical to SEQ ID NO: 4203
  source: /note="Description of Artificial Sequence: Synthetic polypeptide"

SEQ ID NO: 20836 - protein, 111 aa, Artificial Sequence; identical to SEQ ID NO: 4204
  source: /note="Description of Artificial Sequence: Synthetic polypeptide"

SEQ ID NO: 20837 - protein, 107 aa, Artificial Sequence; identical to SEQ ID NO: 4205
  source: /note="Description of Artificial Sequence: Synthetic polypeptide"

SEQ ID NO: 20838 - protein, 108 aa, Artificial Sequence; identical to SEQ ID NO: 4206
  source: /note="Description of Artificial Sequence: Synthetic polypeptide"

SEQ ID NO: 20839 - protein, 109 aa, Artificial Sequence; identical to SEQ ID NO: 4207
  source: /note="Description of Artificial Sequence: Synthetic polypeptide"

SEQ ID NO: 20840 - protein, 110 aa, Artificial Sequence; identical to SEQ ID NO: 4208
  source: /note="Description of Artificial Sequence: Synthetic polypeptide"

SEQ ID NO: 20841 - protein, 108 aa, Artificial Sequence; identical to SEQ ID NO: 4209
  source: /note="Description of Artificial Sequence: Synthetic polypeptide"

SEQ ID NO: 20842 - protein, 108 aa, Artificial Sequence; identical to SEQ ID NO: 4210
  source: /note="Description of Artificial Sequence: Synthetic polypeptide"

SEQ ID NO: 20843 - protein, 108 aa, Artificial Sequence; identical to SEQ ID NO: 6060
  source: /note="Description of Artificial Sequence: Synthetic polypeptide"

SEQ ID NO: 20844 - protein, 112 aa, Artificial Sequence
  source: /note="Description of Artificial Sequence: Synthetic polypeptide"
EIVMTQSPSTLSASVGDRVIITCQSSQSVYGNIWMAWYQQKPGRAPKLLIYQASKLASGVPSRFSGSGSGAEFTLTISSLQPDDFATYYCQGNFNTGDRYAFGQGTKLTVLK

SEQ ID NO: 20845 - protein, 111 aa, Artificial Sequence
  source: /note="Description of Artificial Sequence: Synthetic polypeptide"
EIVMTQSPSTLSASVGDRVIITCQASEIIHSWLAWYQQKPGKAPKLLIYLASTLASGVPSRFSGSGSGAEFTLTISSLQPDDFATYYCQNVYLASTNGANFGQGTKLTVLK

SEQ ID NO: 20846 - protein, 108 aa, Artificial Sequence
  source: /note="Description of Artificial Sequence: Synthetic polypeptide"
EIVLTQSPDFQSVTPKEKVTITCRASQSIGSSLHWYQQKPDQSPKLLIKYASQSFSGVPSRFSGSGSGTDFTLTINSLEAEDAAAYYCHQSSSLPFTFGPGTKVDIKR

SEQ ID NO: 20847 - protein, 108 aa, Artificial Sequence
  source: /note="Description of Artificial Sequence: Synthetic polypeptide"
SYELTQPLSVSVALGQTARITCSGDSIPNYYVYWYQQKPGQAPVLVIYDDSNRPSGIPERFSGSNSGNTATLTISRAQAGDEADYYCQSFDSSLNAEVFGGGTKLTVL

SEQ ID NO: 20848 - protein, 108 aa, Artificial Sequence
  source: /note="Description of Artificial Sequence: Synthetic polypeptide"
SYELTQPPSVSVAPGQTARISCSGDNLGSKYVDWYQQKPGQAPVLVIYSDNNRPSGIPERFSGSNSGNTATLTISGTQAEDEADYYCQTYTSGNNYLVFGGGTKLTVL

SEQ ID NO: 20849 - protein, 107 aa, Artificial Sequence; identical to SEQ ID NO: 20682
  source: /note="Description of Artificial Sequence: Synthetic polypeptide"

SEQ ID NO: 20850 - protein, 111 aa, Artificial Sequence; identical to SEQ ID NO: 11315
  source: /note="Description of Artificial Sequence: Synthetic polypeptide"

SEQ ID NO: 20851 - protein, 238 aa, Artificial Sequence; identical to SEQ ID NO: 11454
  source: /note="Description of Artificial Sequence: Synthetic polypeptide"

SEQ ID NO: 20852 - protein, 238 aa, Artificial Sequence; identical to SEQ ID NO: 11455
  source: /note="Description of Artificial Sequence: Synthetic polypeptide"

SEQ ID NO: 20853 - protein, 240 aa, Artificial Sequence; identical to SEQ ID NO: 11456
  source: /note="Description of Artificial Sequence: Synthetic polypeptide"

SEQ ID NO: 20854 - protein, 245 aa, Artificial Sequence; identical to SEQ ID NO: 11605
  source: /note="Description of Artificial Sequence: Synthetic polypeptide"

SEQ ID NO: 20855 - protein, 245 aa, Artificial Sequence; identical to SEQ ID NO: 11606
  source: /note="Description of Artificial Sequence: Synthetic polypeptide"

SEQ ID NO: 20856 - protein, 245 aa, Artificial Sequence; identical to SEQ ID NO: 11607
  source: /note="Description of Artificial Sequence: Synthetic polypeptide"

SEQ ID NO: 20857 - protein, 216 aa, Artificial Sequence; identical to SEQ ID NO: 11608
  source: /note="Description of Artificial Sequence: Synthetic polypeptide"

SEQ ID NO: 20858 - protein, 221 aa, Artificial Sequence; identical to SEQ ID NO: 11609
  source: /note="Description of Artificial Sequence: Synthetic polypeptide"

SEQ ID NO: 20859 - protein, 216 aa, Artificial Sequence; identical to SEQ ID NO: 11608
  source: /note="Description of Artificial Sequence: Synthetic polypeptide"

SEQ ID NO: 20860 - protein, 221 aa, Artificial Sequence; identical to SEQ ID NO: 11611
  source: /note="Description of Artificial Sequence: Synthetic polypeptide"

SEQ ID NO: 20861 - protein, 216 aa, Artificial Sequence; identical to SEQ ID NO: 11608
  source: /note="Description of Artificial Sequence: Synthetic polypeptide"

SEQ ID NO: 20862 - protein, 272 aa, Artificial Sequence; identical to SEQ ID NO: 11618
  source: /note="Description of Artificial Sequence: Synthetic polypeptide"

SEQ ID NO: 20863 - protein, 274 aa, Artificial Sequence; identical to SEQ ID NO: 11619
  source: /note="Description of Artificial Sequence: Synthetic polypeptide"

SEQ ID NO: 20864 - protein, 275 aa, Artificial Sequence; identical to SEQ ID NO: 11620
  source: /note="Description of Artificial Sequence: Synthetic polypeptide"

SEQ ID NO: 20865 - protein, 271 aa, Artificial Sequence; identical to SEQ ID NO: 11621
  source: /note="Description of Artificial Sequence: Synthetic polypeptide"

SEQ ID NO: 20866 - protein, 469 aa, Artificial Sequence
  source: /note="Description of Artificial Sequence: Synthetic polypeptide"
GGGGGPPPNLPDPKFESKAALLAARGPEELLCFTERLEDLVCFWEEAASAGVGPGNYSFSYQLEDEPWKLCRLHQAPTARGAVRFWCSLPTADTSSFVPLELRVTAASGAPRYHRVIHINEVVLLDAPVGLVARLADESGHVVLRWLPPPETPMTSHIRYEVDVSAGNGAGSVQRVEILEGRTECVLSNLRGRTRYTFAVRARMAEPSFGGFWSAWSEPVSLLTPSDLDPRIPKVDKKVEPKSCDKTHTCPPCPAPELLGGPSVFLFPPKPKDTLMISRTPEVTCVVVDVSHEDPEVKFNWYVDGVEVHNAKTKPREEQYNSTYRVVSVLTVLHQDWLNGKEYKCRVSNKALPAPIEKTISKAKGQPREPQVYTLPPSRDELTKNQVSLTCLVKGFYPSDIAVEWESNGQPENNYKTTPPVLDSDGSFFLYSKLTVDKSRWQQGNVFSCSVMHEALHNHYTQKSLSLSP

SEQ ID NO: 20867 - protein, 571 aa, Artificial Sequence
  source: /note="Description of Artificial Sequence: Synthetic polypeptide"
GGGGGPPPNLPDPKFESKAALLAARGPEELLCFTERLEDLVCFWEEAASAGVGPGNYSFSYQLEDEPWKLCRLHQAPTARGAVRFWCSLPTADTSSFVPLELRVTAASGAPRYHRVIHINEVVLLDAPVGLVARLADESGHVVLRWLPPPETPMTSHIRYEVDVSAGNGAGSVQRVEILEGRTECVLSNLRGRTRYTFAVRARMAEPSFGGFWSAWSEPVSLLTPSDLDPRIPKVDKKVEPKSCDKTHTCPPCPAPELLGGPSVFLFPPKPKDTLMISRTPEVTCVVVDVSHEDPEVKFNWYVDGVEVHNAKTKPREEQYNSTYRVVSVLTVLHQDWLNGKEYKCRVSNKALPAPIEKTISKAKGQPREPQVYTLPPSRDELTKNQVSLTCLVKGFYPSDIAVEWESNGQPENNYKTTPPVLDSDGSFFLYSKLTVDKSRWQQGNVFSCSVMHEALHNHYTQKSLSLSPGSGGGGVYHREAQSGKYKLTYAEAKAVCEFEGGHLATYKQLEAARKIGFHVCAAGWMAKGRVGYPIVKPGPNCGFGKTGIIDYGIRLNRSERWDAYCYNPHA

SEQ ID NO: 20868 - protein, 166 aa, Artificial Sequence
  source: /note="Description of Artificial Sequence: Synthetic polypeptide"
APPRLICDSRVLERYLLEAKEAENITTGCAEHCSLNENITVPDTKVNFYAWKRMEVGQQAVEVWQGLALLSEAVLRGQALLVNSSQPWEPLQLHVDKAVSGLRSLTTLLRALGAQKEAISPPDAASAAPLRTITADTFRKLFRVYSNFLRGKLKLYTGEACRTGDR

SEQ ID NO: 20869 - protein, 276 aa, Artificial Sequence
  source: /note="Description of Artificial Sequence: Synthetic polypeptide"
APPRLICDSRVLERYLLEAKEAENITTGCAEHCSLNENITVPDTKVNFYAWKRMEVGQQAVEVWQGLALLSEAVLRGQALLVNSSQPWEPLQLHVDKAVSGLRSLTTLLRALGAQKEAISPPDAASAAPLRTITADTFRKLFRVYSNFLRGKLKLYTGEACRTGDRGSGGGGVYHREAQSGKYYLTYAEAKAVCEFEGGHLATYKQLEAARKIGFHVCAAGWMAKGRVGYPIVKPGPNCGFGKTGIIDYGIRLNRSERWDAYCYNPHAGSHHHHHH

SEQ ID NO: 20870 - protein, 120 aa, Artificial Sequence
  source: /note="Description of Artificial Sequence: Synthetic polypeptide"
LPETGGGGGGSGGGGVYHREAQSGKYYLTYAEAKAVCEFEGGHLATYKQLEAARKIGFHVCAAGWMAKGRVGYPIVKPGPNCGFGKTGIIDYGIRLNRSERWDAYCYNPHAGGSHHHHHH

SEQ ID NO: 20871 - protein, 120 aa, Artificial Sequence; identical to SEQ ID NO: 20870
  source: /note="Description of Artificial Sequence: Synthetic polypeptide"

SEQ ID NO: 20872 - protein, 160 aa, Artificial Sequence
  source: /note="Description of Artificial Sequence: Synthetic polypeptide"
SPGQGTQSENSCTHFPGNLPNMLRDLRDAFSRVKTFFQMKDQLDNLLLKESLLEDFKGYLGCQALSEMIQFYLEEVMPQAENQDPDIKAHVNSLGENLKTLRLRLRRCHRFLPCENKSKAVEQVKNAFNKLQEKGIYKAMSEFDIFINYIEAYMTMKIRN

SEQ ID NO: 20873 - protein, 272 aa, Artificial Sequence
  source: /note="Description of Artificial Sequence: Synthetic polypeptide"
SPGQGTQSENSCTHFPGNLPNMLRDLRDAFSRVKTFFQMKDQLDNLLLKESLLEDFKGYLGCQALSEMIQFYLEEVMPQAENQDPDIKAHVNSLGENLKTLRLRLRRCHRFLPCENKSKAVEQVKNAFNKLQEKGIYKAMSEFDIFINYIEAYMTMKIRNGSGGGGVYHREAQSGKYKLTYAEAKAVCEFEGGHLATYKQLEAARKIGFHVCAAGWMAKGRVGYPIVKPGPNCGFGKTGIIDYGIRLNRSERWDAYCYNPHAGSGGHHHHHH

SEQ ID NO: 20874 - protein, 432 aa, Artificial Sequence
  source: /note="Description of Artificial Sequence: Synthetic polypeptide"
SDTGRPFVEMYSEIPEIIHMTEGRELVIPCRVTSPNITVTLKKFPLDTLIPDGKRIIWDSRKGFIISNATYKEIGLLTCEATVNGHLYKTNYLTHRQTNTIIDVVLSPSHGIELSVGEKLVLNCTARTELNVGIDFNWEYPSSKHQHKKLVNRDLKTQSGSEMKKFLSTLTIDGVTRSDQGLYTCAASSGLMTKKNSTFVRVHEKDKTHTCPPCPAPEAAGGPSVFLFPPKPKDTLMISRTPEVTCVVVDVSHEDPEVKFNWYVDGVEVHNAKTKPREEQYNSTYRVVSVLTVLHQDWLNGKEYKCKVSNKALPAPIEKTISKAKGQPREPQVYTLPPSRDELTKNQVSLTCLVKGFYPSDIAVEWESNGQPENNYKTTPPVLDSDGSFFLYSKLTVDKSRWQQGNVFSCSVMHEALHNHYTQKSLSLSPGK

SEQ ID NO: 20875 - protein, 533 aa, Artificial Sequence
  source: /note="Description of Artificial Sequence: Synthetic polypeptide"
SDTGRPFVEMYSEIPEIIHMTEGRELVIPCRVTSPNITVTLKKFPLDTLIPDGKRIIWDSRKGFIISNATYKEIGLLTCEATVNGHLYKTNYLTHRQTNTIIDVVLSPSHGIELSVGEKLVLNCTARTELNVGIDFNWEYPSSKHQHKKLVNRDLKTQSGSEMKKFLSTLTIDGVTRSDQGLYTCAASSGLMTKKNSTFVRVHEKDKTHTCPPCPAPEAAGGPSVFLFPPKPKDTLMISRTPEVTCVVVDVSHEDPEVKFNWYVDGVEVHNAKTKPREEQYNSTYRVVSVLTVLHQDWLNGKEYKCKVSNKALPAPIEKTISKAKGQPREPQVYTLPPSRDELTKNQVSLTCLVKGFYPSDIAVEWESNGQPENNYKTTPPVLDSDGSFFLYSKLTVDKSRWQQGNVFSCSVMHEALHNHYTQKSLSLSPGGSGGGGVYHREAISGKYYLTYAEAKAVCEFEGGHLATYKQLEAAQQIGFHVCAAGWMAKGRVGYPIVKPGPNCGFGKTGIIDYGIRLQRSERWDAYCYNPHA

SEQ ID NO: 20876 - protein, 259 aa, Artificial Sequence
  source: /note="Description of Artificial Sequence: Synthetic polypeptide"
MEIVMTQSPSTLSASVGDRVIITCQASEIIHSWLAWYQQKPGKAPKLLIYLASTLASGVPSRFSGSGSGAEFTLTISSLQPDDFATYYCQNVYLASTNGANFGQGTKLTVLGGGGGGSGGGGSGGGGSSGGGSEVQLVESGGGLVQPGGSLRLSCTASGFSLTDYYYMTWVRQAPGKGLEWVGFIDPDDDPYYATWAKGRFTISRDNSKNTLYLQMNSLRAEDTAVYYCAGGDHNSGWGLDIWGQGTLVTVSSHHHHHH

SEQ ID NO: 20877 - protein, 361 aa, Artificial Sequence
  source: /note="Description of Artificial Sequence: Synthetic polypeptide"
MEIVMTQSPSTLSASVGDRVIITCQASEIIHSWLAWYQQKPGKAPKLLIYLASTLASGVPSRFSGSGSGAEFTLTISSLQPDDFATYYCQNVYLASTNGANFGQGTKLTVLGGGGGGSGGGGSGGGGSSGGGSEVQLVESGGGLVQPGGSLRLSCTASGFSLTDYYYMTWVRQAPGKGLEWVGFIDPDDDPYYATWAKGRFTISRDNSKNTLYLQMNSLRAEDTAVYYCAGGDHNSGWGLDIWGQGTLVTVSSGSGGGGVYHREAQSGKYKLTYAEAKAVCEFEGGHLATYKQLEAARKIGFHVCAAGWMAKGRVGYPIVKPGPNCGFGKTGIIDYGIRLNRSERWDAYCYNPHAHHHHHH

SEQ ID NO: 20878 - protein, 142 aa, Artificial Sequence
  source: /note="Description of Artificial Sequence: Synthetic polypeptide"
SDLGKKLLEAARAGQDDEVRILMANGADVNTADSTGWTPLHLAVPWGHLEIVEVLLKYGADVNAKDFQGWTPLHLAAAIGHQEIVEVLLKNGADVNAQDKFGKTAFDISIDNGNEDLAEILQKAAGSLPETGGGSGHHHHHH

SEQ ID NO: 20879 - protein, 237 aa, Artificial Sequence
  source: /note="Description of Artificial Sequence: Synthetic polypeptide"
SDLGKKLLEAARAGQDDEVRILMANGADVNTADSTGWTPLHLAVPWGHLEIVEVLLKYGADVNAKDFQGWTPLHLAAAIGHQEIVEVLLKNGADVNAQDKFGKTAFDISIDNGNEDLAEILQKAAGSGGGGVYHREAQSGKYKLTYAEAKAVCEFEGGHLATYKQLEAARKIGFHVCAAGWMAKGRVGYPIVKPGPNCGFGKTGIIDYGIRLNRSERWDAYCYNPHAGSGGHHHHHH

SEQ ID NO: 20880 - protein, 164 aa, Artificial Sequence
  source: /note="Description of Artificial Sequence: Synthetic polypeptide"
SDLGKKLLEAARAGQDDEVRILMANGADVNAFDWMGWTPLHLAAHEGHLEIVEVLLKNGADVNATDVSGYTPLHLAAADGHLEIVEVLLKYGADVNTKDNTGWTPLHLSADLGRLEIVEVLLKYGADVNAQDKFGKTAFDISIDNGNEDLAEILQKAAHHHHHH

SEQ ID NO: 20881 - protein, 270 aa, Artificial Sequence
  source: /note="Description of Artificial Sequence: Synthetic polypeptide"
SDLGKKLLEAARAGQDDEVRILMANGADVNAFDWMGWTPLHLAAHEGHLEIVEVLLKNGADVNATDVSGYTPLHLAAADGHLEIVEVLLKYGADVNTKDNTGWTPLHLSADLGRLEIVEVLLKYGADVNAQDKFGKTAFDISIDNGNEDLAEILQKAAGSGGGGVYHREAQSGKYKLTYAEAKAVCEFEGGHLATYKQLEAARKIGFHVCAAGWMAKGRVGYPIVKPGPNCGFGKTGIIDYGIRLNRSERWDAYCYNPHAGSGGHHHHHH

SEQ ID NO: 20882 - protein, 116 aa, Artificial Sequence; identical to SEQ ID NO: 11662
  source: /note="Description of Artificial Sequence: Synthetic polypeptide"

SEQ ID NO: 20883 - protein, 122 aa, Artificial Sequence; identical to SEQ ID NO: 11663
  source: /note="Description of Artificial Sequence: Synthetic polypeptide"

SEQ ID NO: 20884 - protein, 116 aa, Artificial Sequence; identical to SEQ ID NO: 11664
  source: /note="Description of Artificial Sequence: Synthetic polypeptide"

SEQ ID NO: 20885 - protein, 124 aa, Artificial Sequence; identical to SEQ ID NO: 11665
  source: /note="Description of Artificial Sequence: Synthetic polypeptide"

SEQ ID NO: 20886 - protein, 124 aa, Artificial Sequence; identical to SEQ ID NO: 11666
  source: /note="Description of Artificial Sequence: Synthetic polypeptide"

SEQ ID NO: 20887 - protein, 124 aa, Artificial Sequence; identical to SEQ ID NO: 11667
  source: /note="Description of Artificial Sequence: Synthetic polypeptide"

SEQ ID NO: 20888 - protein, 124 aa, Artificial Sequence; identical to SEQ ID NO: 11668
  source: /note="Description of Artificial Sequence: Synthetic polypeptide"

SEQ ID NO: 20889 - protein, 124 aa, Artificial Sequence; identical to SEQ ID NO: 11669
  source: /note="Description of Artificial Sequence: Synthetic polypeptide"

SEQ ID NO: 20890 - protein, 124 aa, Artificial Sequence; identical to SEQ ID NO: 11670
  source: /note="Description of Artificial Sequence: Synthetic polypeptide"

SEQ ID NO: 20891 - protein, 116 aa, Artificial Sequence; identical to SEQ ID NO: 11671
  source: /note="Description of Artificial Sequence: Synthetic polypeptide"

SEQ ID NO: 20892 - protein, 116 aa, Artificial Sequence; identical to SEQ ID NO: 11672
  source: /note="Description of Artificial Sequence: Synthetic polypeptide"

SEQ ID NO: 20893 - protein, 116 aa, Artificial Sequence; identical to SEQ ID NO: 11673
  source: /note="Description of Artificial Sequence: Synthetic polypeptide"

SEQ ID NO: 20894 - protein, 116 aa, Artificial Sequence; identical to SEQ ID NO: 11674
  source: /note="Description of Artificial Sequence: Synthetic polypeptide"

SEQ ID NO: 20895 - protein, 116 aa, Artificial Sequence; identical to SEQ ID NO: 11675
  source: /note="Description of Artificial Sequence: Synthetic polypeptide"

SEQ ID NO: 20896 - protein, 122 aa, Artificial Sequence; identical to SEQ ID NO: 11676
  source: /note="Description of Artificial Sequence: Synthetic polypeptide"

SEQ ID NO: 20897 - protein, 122 aa, Artificial Sequence; identical to SEQ ID NO: 11677
  source: /note="Description of Artificial Sequence: Synthetic polypeptide"

SEQ ID NO: 20898 - protein, 124 aa, Artificial Sequence; identical to SEQ ID NO: 11678
  source: /note="Description of Artificial Sequence: Synthetic polypeptide"

SEQ ID NO: 20899 - protein, 124 aa, Artificial Sequence; identical to SEQ ID NO: 11679
  source: /note="Description of Artificial Sequence: Synthetic polypeptide"

SEQ ID NO: 20900 - protein, 121 aa, Artificial Sequence; identical to SEQ ID NO: 11680
  source: /note="Description of Artificial Sequence: Synthetic polypeptide"

SEQ ID NO: 20901 - protein, 116 aa, Artificial Sequence; identical to SEQ ID NO: 11681
  source: /note="Description of Artificial Sequence: Synthetic polypeptide"

SEQ ID NO: 20902 - protein, 116 aa, Artificial Sequence; identical to SEQ ID NO: 11682
  source: /note="Description of Artificial Sequence: Synthetic polypeptide"

SEQ ID NO: 20903 - protein, 116 aa, Artificial Sequence; identical to SEQ ID NO: 11683
  source: /note="Description of Artificial Sequence: Synthetic polypeptide"

SEQ ID NO: 20904 - protein, 119 aa, Artificial Sequence; identical to SEQ ID NO: 11684
  source: /note="Description of Artificial Sequence: Synthetic polypeptide"

SEQ ID NO: 20905 - protein, 252 aa, Artificial Sequence
  source: /note="Description of Artificial Sequence: Synthetic polypeptide"
MEIVMTQSPSTLSASVGDRVIITCQASEIIHSWLAWYQQKPGKAPKLLIYLASTLASGVPSRFSGSGSGAEFTLTISSLQPDDFATYYCQNVYLASTNGANFGQGTKLTVLGGGGGSGGGGSGGGGSGGGGSEVQLVESGGGLVQPGGSLRLSCTASGFSLTDYYYMTWVRQAPGKGLEWVGFIDPDDDPYYATWAKGRFTISRDNSKNTLYLQMNSLRAEDTAVYYCAGGDHNSGWGLDIWGQGTLVTVSS

SEQ ID NO: 20906 - protein, 226 aa, Artificial Sequence
  source: /note="Description of Artificial Sequence: Synthetic polypeptide"
QVQLVQSGAEVKKPGSSVKVSCKASGYAFTNYLIEWVRQAPGQGLEWIGVIYPGSGGTNYNEKFKGRVTLTVDESTNTAYMELSSLRSEDTAVYFCARRDGNYGWFAYWGQGTLVTVSSASTKGPSVFPLAPSSKSTSGGTAALGCLVKDYFPEPVTVSWNSGALTSGVHTFPAVLQSSGLYSLSSVVTVPSSSLGTQTYICNVNHKPSNTKVDKKVEPKSCDKTH

SEQ ID NO: 20907 - protein, 214 aa, Artificial Sequence
  source: /note="Description of Artificial Sequence: Synthetic polypeptide"
DIQMTQTPSTLSASVGDRVTISCRASQDINNYLNWYQQKPGKAPKLLIYYTSTLHSGVPSRFSGSGSGTDYTLTISSLQPDDFATYFCQQGNTLPWTFGQGTKVEVKRTVAAPSVFIFPPSDEQLKSGTASVVCLLNNFYPREAKVQWKVDNALQSGNSQESVTEQDSKDSTYSLSSTLTLSKADYEKHKVYACEVTHQGLSSPVTKSFNRGEC

SEQ ID NO: 20908 - protein, 226 aa, Artificial Sequence; identical to SEQ ID NO: 20906
  source: /note="Description of Artificial Sequence: Synthetic polypeptide"

SEQ ID NO: 20909 - protein, 194 aa, Artificial Sequence
  source: /note="Description of Artificial Sequence: Synthetic polypeptide"
DIQMTQTPSTLSASVGDRVTISCRASQDINNYLNWYQQKPGKAPKLLIYYTSTLHSGVPSRFSGSGSGTDYTLTISSLQPDDFATYFCQQGNTLPWTFGQGTKVEVKRTVAAPSVFIFPPSDEQLKSGTASVVCLLNNFYESVTEQDSKDSTYSLSSTLTLSKADYEKHKVYACEVTHQGLSSPVTKSFNRGEC

SEQ ID NO: 20910 - protein, 344 aa, Artificial Sequence
  source: /note="Description of Artificial Sequence: Synthetic polypeptide"
ILGRSETQECLFFNANWEKDRTNQTGVEPCYGDKDKRRHCFATWKNISGSIEIVKQGCWLDDINCYDRTDCVEKKDSPEVYFCCCEGNMCNEKFSYFPEMEVTQPTSNPVTPKPPTGGGTHTCPPCPAPELLGGPSVFLFPPKPKDTLMISRTPEVTCVVVDVSHEDPEVKFNWYVDGVEVHNAKTKPREEQYNSTYRVVSVLTVLHQDWLNGKEYKCKVSNKALPVPIEKTISKAKGQPREPQVYTLPPSREEMTKNQVSLTCLVKGFYPSDIAVEWESNGQPENNYKTTPPVLDSDGSFFLYSKLTVDKSRWQQGNVFSCSVMHEALHNHYTQKSLSLSPGK

SEQ ID NO: 20911 - protein, 451 aa, Artificial Sequence
  source: /note="Description of Artificial Sequence: Synthetic polypeptide"
EVQLVESGGGLVRPGGSLRLSCAASGFTFSNYDMHWVRQATGKGLEWVSAITAAGDIYYPGSVKGRFTISRENAKNSLYLQMNSLRAGDTAVYYCARGRYSGSGSYYNDWFDPWGQGTLVTVSSASTKGPSVFPLAPCSRSTSESTAALGCLVKDYFPEPVTVSWNSGALTSGVHTFPAVLQSSGLYSLSSVVTVPSSSLGTKTYTCNVDHKPSNTKVDKRVESKYGPPCPPCPAPEFEGGPSVFLFPPKPKDTLMISRTPEVTCVVVDVSQEDPEVQFNWYVDGVEVHNAKTKPREEQFNSTYRVVSVLTVLHQDWLNGKEYKCKVSNKGLPSSIEKTISKAKGQPREPQVYTLPPSQEEMTKNQVSLTCLVKGFYPSDIAVEWESNGQPENNYKTTPPVLDSDGSFFLYSRLTVDKSRWQEGNVFSCSVMHEALHNHYTQKSLSLSLGK

SEQ ID NO: 20912 - protein, 447 aa, Artificial Sequence
  source: /note="Description of Artificial Sequence: Synthetic polypeptide"
EVQLVESGGGLVQPGGSLRLSCAASGFTFNNYAMNWVRQAPGKGLDWVSTISGSGGTTNYADSVKGRFIISRDSSKHTLYLQMNSLRAEDTAVYYCAKDSNWGNFDLWGRGTLVTVSSASTKGPSVFPLAPSSKSTSGGTAALGCLVKDYFPEPVTVSWNSGALTSGVHTFPAVLQSSGLYSLSSVVTVPSSSLGTQTYICNVNHKPSNTKVDKKVEPKSCDKTHTCPPCPAPELLGGPSVFLFPPKPKDTLMISRTPEVTCVVVDVSHEDPEVKFNWYVDGVEVHNAKTKPREEQYNSTYRVVSVLTVLHQDWLNGKEYKCKVSNKALPAPIEKTISKAKGQPREPQVYTLPPSRDELTKNQVSLTCLVKGFYPSDIAVEWESNGQPENNYKTTPPVLDSDGSFFLYSKLTVDKSRWQQGNVFSCSVMHEALHNHYTQKSLSLSPG

SEQ ID NO: 20913 - protein, 450 aa, Artificial Sequence
  source: /note="Description of Artificial Sequence: Synthetic polypeptide"
EVQLQQSGAELVKPGASVKLSCTASGFNIKDTYVHWVKQRPEQGLEWIGRIDPANGYTKYDPKFQGKATITADTSSNTAYLQLSSLTSEDTAVYYCVRPLYDYYAMDYWGQGTSVTVSSAKTTAPSVYPLAPVCGDTTGSSVTLGCLVKGYFPEPVTLTWNSGSLSSGVHTFPAVLQSDLYTLSSSVTVTSSTWPSQSITCNVAHPASSTKVDKKIEPRPKSCDKTHTCPPCPAPELLGGPSVFLFPPKPKDTLMISRTPEVTCVVVDVSHEDPEVKFNWYVDGVEVHNAKTKPREEQYNSTYRVVSVLTVLHQDWLNGKEYKCKVSNKALPAPIEKTISKAKGQPREPQVYTLPPSRDELTKNQVSLTCLVKGFYPSDIAVEWESNGQPENNYKTTPPVLDSDGSFFLYSKLTVDKSRWQQGNVFSCSVMHEALHNHYTQKSLSLSPGK

SEQ ID NO: 20914 - protein, 444 aa, Artificial Sequence
  source: /note="Description of Artificial Sequence: Synthetic polypeptide"
QVQLVQSGAEVKKPGASVKVSCKASGYTFTSYYMHWVRQAPGQGLEWMGEISPFGGRTNYNEKFKSRVTMTRDTSTSTVYMELSSLRSEDTAVYYCARERPLYASDLWGQGTTVTVSSASTKGPSVFPLAPCSRSTSESTAALGCLVKDYFPEPVTVSWNSGALTSGVHTFPAVLQSSGLYSLSSVVTVPSSNFGTQTYTCNVDHKPSNTKVDKTVERKCCVECPPCPAPPVAGPSVFLFPPKPKDTLMISRTPEVTCVVVDVSHEDPEVQFNWYVDGVEVHNAKTKPREEQFNSTFRVVSVLTVVHQDWLNGKEYKCKVSNKGLPSSIEKTISKTKGQPREPQVYTLPPSREEMTKNQVSLTCLVKGFYPSDIAVEWESNGQPENNYKTTPPMLDSDGSFFLYSKLTVDKSRWQQGNVFSCSVMHEALHNHYTQKSLSLSPGK

SEQ ID NO: 20915 - protein, 453 aa, Artificial Sequence
  source: /note="Description of Artificial Sequence: Synthetic polypeptide"
EVQLVESGGGVIQPGGSLRLSCAASGFTFDDYAMNWVRQGPGKGLEWVSAISGDGGSTYYADSVKGRFTISRDNSKNSLYLQMNSLRAEDTAFFYCAKDLRNTIFGVVIPDAFDIWGQGTMVTVSSASTKGPSVFPLAPCSRSTSESTAALGCLVKDYFPEPVTVSWNSGALTSGVHTFPAVLQSSGLYSLSSVVTVPSSSLGTKTYTCNVDHKPSNTKVDKRVESKYGPPCPPCPAPEFLGGPSVFLFPPKPKDTLMISRTPEVTCVVVDVSQEDPEVQFNWYVDGVEVHNAKTKPREEQFNSTYRVVSVLTVLHQDWLNGKEYKCKVSNKGLPSSIEKTISKAKGQPREPQVYTLPPSQEEMTKNQVSLTCLVKGFYPSDIAVEWESNGQPENNYKTTPPVLDSDGSFFLYSRLTVDKSRWQEGNVFSCSVMHEALHNHYTQKSLSLSLGK

SEQ ID NO: 20916 - protein, 451 aa, Artificial Sequence; identical to SEQ ID NO: 20911
  source: /note="Description of Artificial Sequence: Synthetic polypeptide"

SEQ ID NO: 20917 - protein, 451 aa, Artificial Sequence
  source: /note="Description of Artificial Sequence: Synthetic polypeptide"
EVQLLESGGGLVQPGGSLRLSCAASGFTFSHYIMMWVRQAPGKGLEWVSGIYSSGGITVYADSVKGRFTISRDNSKNTLYLQMNSLRAEDTAVYYCAYRRIGVPRRDEFDIWGQGTMVTVSSASTKGPSVFPLAPSSKSTSGGTAALGCLVKDYFPEPVTVSWNSGALTSGVHTFPAVLQSSGLYSLSSVVTVPSSSLGTQTYICNVNHKPSNTKVDKRVEPKSCDKTHTCPPCPAPELLGGPSVFLFPPKPKDTLMISRTPEVTCVVVDVSHEDPEVKFNWYVDGVEVHNAKTKPREEQYNSTYRVVSVLTVLHQDWLNGKEYKCKVSNKALPAPIEKTISKAKGQPREPQVYTLPPSREEMTKNQVSLTCLVKGFYPSDIAVEWESNGQPENNYKTTPPVLDSDGSFFLYSKLTVDKSRWQQGNVFSCSVMHEALHNHYTQKSLSLSPG

SEQ ID NO: 20918 - protein, 444 aa, Artificial Sequence
  source: /note="Description of Artificial Sequence: Synthetic polypeptide"
QVQLVQSGAEVKKPGASVKVSCKASGYTFTSYYMHWVRQAPGQGLEWMGEIHPSGGRTNYNEKFKSRVTMTRDTSTSTVYMELSSLRSEDTAVYYCARERPLYASDLWGQGTTVTVSSASTKGPSVFPLAPCSRSTSESTAALGCLVKDYFPEPVTVSWNSGALTSGVHTFPAVLQSSGLYSLSSVVTVPSSNFGTQTYTCNVDHKPSNTKVDKTVERKCCVECPPCPAPPVAGPSVFLFPPKPKDTLMISRTPEVTCVVVDVSHEDPEVQFNWYVDGVEVHNAKTKPREEQFNSTFRVVSVLTVVHQDWLNGKEYKCKVSNKGLPSSIEKTISKTKGQPREPQVYTLPPSREEMTKNQVSLTCLVKGFYPSDIAVEWESNGQPENNYKTTPPMLDSDGSFFLYSKLTVDKSRWQQGNVFSCSVMHEALHNHYTQKSLSLSPGK

SEQ ID NO: 20919 - protein, 456 aa, Artificial Sequence
  source: /note="Description of Artificial Sequence: Synthetic polypeptide"
QVQLVESGGGVVQPGRSLRLSCTASGFTFKNYAMHWVRQAPAKGLEWVATISYDGRNIQYADSVKGRFTFSRDNSQDTLYLQLNSLRPEDTAVYYCARPVRSRWLQLGLEDAFHIWGQGTMVTVSSASTKGPSVFPLAPSSKSTSGGTAALGCLVKDYFPEPVTVSWNSGALTSGVHTFPAVLQSSGLYSLSSVVTVPSSSLGTQTYICNVNHKPSNTKVDKKVEPKSCDKTHTCPPCPAPELLGGPSVFLFPPKPKDTLMISRTPEVTCVVVDVSHEDPEVKFNWYVDGVEVHNAKTKPREEQYNSTYRVVSVLTVLHQDWLNGKEYKCKVSNKALPAPIEKTISKAKGQPREPQVYTLPPSRDELTKNQVSLTCLVKGFYPSDIAVEWESNGQPENNYKTTPPVLDSDGSFFLYSKLTVDKSRWQQGNVFSCSVMHEALHNHYTQKSLSLSPGK

SEQ ID NO: 20920 - protein, 219 aa, Artificial Sequence
  source: /note="Description of Artificial Sequence: Synthetic polypeptide"
DVVMTQSPLSLPVTLGQPASISCKSSQSLLYTDGKTYLYWFLQRPGQSPRRLIYLVSKLDSGVPDRFSGSGSGTDFTLKISRVEAEDVGVYYCLQSTHFPHTFGGGTKVEIKRTVAAPSVFIFPPSDEQLKSGTASVVCLLNNFYPREAKVQWKVDNALQSGNSQESVTEQDSKDSTYSLSSTLTLSKADYEKHKVYACEVTHQGLSSPVTKSFNRGEC

SEQ ID NO: 20921 - protein, 451 aa, Artificial Sequence; identical to SEQ ID NO: 9174
  source: /note="Description of Artificial Sequence: Synthetic polypeptide"

SEQ ID NO: 20922 - protein, 225 aa, Artificial Sequence
  source: /note="Description of Artificial Sequence: Synthetic polypeptide"
QVQLQESGPGLVKPSETLSLTCTVSGFSLTSYIVDWIRQPPGKGLEWIGVIWAGGSTGYNSALRSRVSITKDTSKNQFSLKLSSVTAADTAVYYCASAAYYSYYNYDGFAYWGQGTLVTVSSASTKGPSVFPLAPSSKSTSGGTAALGCLVKDYFPEPVTVSWNSGALTSGVHTFPAVLQSSGLYSLSSVVTVPSSSLGTQTYICNVNHKPSNTKVDKKVEPKSC

SEQ ID NO: 20923 - protein, 124 aa, Artificial Sequence
  source: /note="Description of Artificial Sequence: Synthetic polypeptide"
EVQLVESGGGLVRPGGSLRLSCAASGFTFSNYDMHWVRQATGKGLEWVSAITAAGDIYYPGSVKGRFTISRENAKNSLYLQMNSLRAGDTAVYYCARGRYSGSGSYYNDWFDPWGQGTLVTVSS

SEQ ID NO: 20924 - protein, 121 aa, Artificial Sequence; identical to SEQ ID NO: 9021
  source: /note="Description of Artificial Sequence: Synthetic polypeptide"

SEQ ID NO: 20925 - protein, 115 aa, Artificial Sequence
  source: /note="Description of Artificial Sequence: Synthetic polypeptide"
QVQLVQSGAEVKKPGASVKVSCKASGYIFSNYWIQWVRQAPGQGLEWMGEILPGSGSTEYAQKFQGRVTMTADTSTSTAYMELSSLRSEDTAVYYCARYFFGSSPNWYFVWGQGT

SEQ ID NO: 20926 - protein, 118 aa, Artificial Sequence [sequence omitted]

SEQ ID NO: 20927 - protein, 121 aa, Artificial Sequence; identical to SEQ ID NO: 9024
  source: /note="Description of Artificial Sequence: Synthetic polypeptide"

SEQ ID NO: 20928 - protein, 448 aa, Artificial Sequence
  source: /note="Description of Artificial Sequence: Synthetic polypeptide"
EVQLVESGGGLVKPGGSLRLSCAASGFTFSNYAMSWVRQTPEKRLEWVATISRSGSYSYFPDSVQGRFTISRDNAKNSLYLQMNSLRAEDTAVYYCARLGGYDEGDAMDSWGQGTTVTVSSASTKGPSVFPLAPCSRSTSESTAALGCLVKDYFPEPVTVSWNSGALTSGVHTFPAVLQSSGLYSLSSVVTVPSSSLGTKTYTCNVDHKPSNTKVDKRVESKYGPPCPPCPAPEFLGGPSVFLFPPKPKDTLMISRTPEVTCVVVDVSQEDPEVQFNWYVDGVEVHNAKTKPREEQFNSTYRVVSVLTVLHQDWLNGKEYKCKVSNKGLPSSIEKTISKAKGQPREPQVYTLPPSQEEMTKNQVSLTCLVKGFYPSDIAVEWESNGQPENNYKTTPPVLDSDGSFFLYSRLTVDKSRWQEGNVFSCSVMHEALHNHYTQKSLSLSLGK

SEQ ID NO: 20929 - protein, 444 aa, Artificial Sequence; identical to SEQ ID NO: 20914
  source: /note="Description of Artificial Sequence: Synthetic polypeptide"

SEQ ID NO: 20930 - protein, 447 aa, Artificial Sequence; identical to SEQ ID NO: 20912
  source: /note="Description of Artificial Sequence: Synthetic polypeptide"

SEQ ID NO: 20931 - protein, 444 aa, Artificial Sequence; identical to SEQ ID NO: 20918
  source: /note="Description of Artificial Sequence: Synthetic polypeptide"

SEQ ID NO: 20932 - protein, 444 aa, Artificial Sequence
  source: /note="Description of Artificial Sequence: Synthetic polypeptide"
QVQLVQSGSELKKPGASVKVSCKASGYTFTDNNMDWVRQAPGQGLEWMGDINTRSGGSIYNEEFQDRVIMTVDKSTDTAYMELSSLRSEDTATYHCARRKSYGYYLDEWGEGTLVTVSSASTKGPSVFPLAPCSRSTSESTAALGCLVKDYFPEPVTVSWNSGALTSGVHTFPAVLQSSGLYSLSSVVTVPSSSLGTQTYTCNVDHKPSNTKVDKRVESKYGPPCPPCPAPEFLGGPSVFLFPPKPKDTLMISRTPEVTCVVVDVSQEDPEVQFNWYVDGVEVHNAKTKPREEQYNSTYRVVSVLTVLHQDWLNGKEYKCKVSNKGLPSSIEKTISKAKGQPREPQVYTLPPSQEEMTKNQVSLTCLVKGFYPSDIAVEWESNGQPENNYKTTPPVLDSDGSFFLYSKLTVDKSRWQEGNVFSCSVMHEALHNHYTQESLSLSP

SEQ ID NO: 20933 - protein, 448 aa, Artificial Sequence
  source: /note="Description of Artificial Sequence: Synthetic polypeptide"
QVQLVESGGGLVQPGGSLRLSCAASGFTFSYYDIQWVRQAPGKGLEWVSSISPSGQSTYYRREVKGRFTISRDNSKNTLYLQMNSLRAEDTAVYYCARRTGREYGGGWYFDYWGQGTLVTVSSASTKGPSVFPLAPCSRSTSESTAALGCLVKDYFPEPVTVSWNSGALTSGVHTFPAVLQSSGLYSLSSVVTVPSSSLGTQTYTCNVDHKPSNTKVDKRVESKYGPPCPPCPAPEFLGGPSVFLFPPKPKDTLMISRTPEVTCVVVDVSQEDPEVQFNWYVDGVEVHNAKTKPREEQYNSTYRVVSVLTVLHQDWLNGKEYKCKVSNKGLPSSIEKTISKAKGQPREPQVYTLPPSQKEMTKNQVSLTCLVKGFYPSDIAVEWESNGQPENNYKTTPPVLDSDGSFFLYSKLTVDKSRWQEGNVFSCSVMHEALHNRYTQKSLSLSP

SEQ ID NO: 20934 - protein, 448 aa, Artificial Sequence
  source: /note="Description of Artificial Sequence: Synthetic polypeptide"
QVQLVQSGAEVKKPGASVKVSCKASGYTFSTMYMSWVRQAPGQGLEWMGRIDPANEHTNYAQKFQGRVTMTRDTSISTAYMELSRLTSDDTAVYYCARSYYYYNMDYWGQGTLVTVSSASTKGPSVFPLAPSSKSTSGGTAALGCLVKDYFPEPVTVSWNSGALTSGVHTFPAVLQSSGLYSLSSVVTVPSSSLGTQTYICNVNHKPSNTKVDKRVEPKSCDKTHTCPPCPAPEAAGGPSVFLFPPKPKDTLMISRTPEVTCVVVDVSHEDPEVKFNWYVDGVEVHNAKTKPREEQYNSTYRVVSVLTVLHQDWLNGKEYKCKVSNKALPAPIEKTISKAKGQPREPQVYTLPPSREEMTKNQVSLTCLVKGFYPSDIAVEWESNGQPENNYKTTPPVLDSDGSFFLYSKLTVDKSRWQQGNVFSCSVMHEALHNHYTQKSLSLSPGK

SEQ ID NO: 20935 - protein, 441 aa, Artificial Sequence
  source: /note="Description of Artificial Sequence: Synthetic polypeptide"
EVQLVQSGAEVKKPGASVKVSCKASGYTLTSYGISWVRQAPGQGLEWMGWVSFYNGNTNYAQKLQGRGTMTTDPSTSTAYMELRSLRSDDTAVYYCARGYGMDVWGQGTTVTVSSASTKGPSVFPLAPCSRSTSESTAALGCLVKDYFPEPVTVSWNSGALTSGVHTFPAVLQSSGLYSLSSVVTVPSSNFGTQTYTCNVDHKPSNTKVDKTVERKCCVECPPCPAPPVAGPSVFLFPPKPKDTLMISRTPEVTCVVVDVSHEDPEVQFNWYVDGVEVHNAKTKPREEQFNSTFRVVSVLTVVHQDWLNGKEYKCKVSNKGLPAPIEKTISKTKGQPREPQVYTLPPSREEMTKNQVSLTCLVKGFYPSDIAVEWESNGQPENNYKTTPPMLDSDGSFFLYSKLTVDKSRWQQGNVFSCSVMHEALHNHYTQKSLSLSPGK

SEQ ID NO: 20936 - protein, 443 aa, Artificial Sequence
  source: /note="Description of Artificial Sequence: Synthetic polypeptide"
VIQPGGSLRLSCAASGFTFDDYAMNWVRQGPGKGLEWVSAISGDGGSTYYADSVKGRFTISRDNSKNSLYLQMNSLRAEDTAFFYCAKDLRNTIFGVVIPDAFDIWGQGTMVTVSSASTKGPSVFPLAPCSRSTSESTAALGCLVKDYFPEPVTVSWNSGALTSGVHTFPAVLQSSGLYSLSSVVTVPSSSLGTKTYTCNVDHKPSNTKVDKRVESKYGPPCPPCPAPEFLGGPSVFLFPPKPKDTLMISRTPEVTCVVVDVSQEDPEVQFNWYVDGVEVHNAKTKPREEQFNSTYRVVSVLTVLHQDWLNGKEYKCKVSNKGLPSSIEKTISKAKGQPREPQVYTLPPSQEEMTKNQVSLTCLVKGFYPSDIAVEWESNGQPENNYKTTPPVLDSDGSFFLYSRLTVDKSRWQEGNVFSCSVMHEALHNHYTQKSLSLSLGK

SEQ ID NO: 20937 - protein, 467 aa, Artificial Sequence; identical to SEQ ID NO: 9189
  source: /note="Description of Artificial Sequence: Synthetic polypeptide"

SEQ ID NO: 20938 - protein, 449 aa, Artificial Sequence; identical to SEQ ID NO: 9187
  source: /note="Description of Artificial Sequence: Synthetic polypeptide"

SEQ ID NO: 20939 - protein, 444 aa, Artificial Sequence; identical to SEQ ID NO: 9188
  source: /note="Description of Artificial Sequence: Synthetic polypeptide"

SEQ ID NO: 20940 - protein, 452 aa, Artificial Sequence; identical to SEQ ID NO: 9190
  source: /note="Description of Artificial Sequence: Synthetic polypeptide"

SEQ ID NO: 20941 - protein, 456 aa, Artificial Sequence; identical to SEQ ID NO: 20919
  source: /note="Description of Artificial Sequence: Synthetic polypeptide"

SEQ ID NO: 20942 - protein, 225 aa, Artificial Sequence; identical to SEQ ID NO: 20922
  source: /note="Description of Artificial Sequence: Synthetic polypeptide"

SEQ ID NO: 20943 - protein, 696 aa, Artificial Sequence
  source: /note="Description of Artificial Sequence: Synthetic polypeptide"
MQRVNMIMAESPGLITICLLGYLLSAECTVFLDHENANKILNRPKRYNSGKLEEFVQGNLERECMEEKCSFEEAREVFENTERTTEFWKQYVDGDQCESNPCLNGGSCKDDINSYECWCPFGFEGKNCELDVTCNIKNGRCEQFCKNSADNKVVCSCTEGYRLAENQKSCEPAVPFPCGRVSVSQTSKLTRAETVFPDVDYVNSTEAETILDNITQSTQSFNDFTRVVGGEDAKPGQFPWQVVLNGKVDAFCGGSIVNEKWIVTAAHCVETGVKITVVAGEHNIEETEHTEQKRNVIRIIPHHNYNAAINKYNHDIALLELDEPLVLNSYVTPICIADKEYTNIFLKFGSGYVSGWGRVFHKGRSALVLQYLRVPLVDRATCLRSTKFTIYNNMFCAGFHEGGRDSCQGDSGGPHVTEVEGTSFLTGIISWGEECAMKGKYGIYTKVSRYVNWIKEKTKLTEFAGAAAVDKTHTCPPCPAPELLGGPSVFLFPPKPKDTLMISRTPEVTCVVVDVSHEDPEVKFNWYVDGVEVHNAKTKPREEQYNSTYRVVSVLTVLHQDWLNGKEYKCKVSNKALPAPIEKTISKAKGQPREPQVYTLPPSRDELTKNQVSLTCLVKGFYPSDIAVEWESNGQPENNYKTTPPVLDSDGSFFLYSKLTVDKSRWQQGNVFSCSVMHEALHNHYTQKSLSLSPGK

SEQ ID NO: 20944 - protein, 1684 aa, Artificial Sequence
  source: /note="Description of Artificial Sequence: Synthetic polypeptide"
MQIELSTCFFLCLLRFCFSATRRYYLGAVELSWDYMQSDLGELPVDARFPPRVPKSFPFNTSVVYKKTLFVEFTDHLFNIAKPRPPWMGLLGPTIQAEVYDTVVITLKNMASHPVSLHAVGVSYWKASEGAEYDDQTSQREKEDDKVFPGGSHTYVWQVLKENGPMASDPLCLTYSYLSHVDLVKDLNSGLIGALLVCREGSLAKEKTQTLHKFILLFAVFDEGKSWHSETKNSLMQDRDAASARAWPKMHTVNGYVNRSLPGLIGCHRKSVYWHVIGMGTTPEVHSIFLEGHTFLVRNHRQASLEISPITFLTAQTLLMDLGQFLLFCHISSHQHDGMEAYVKVDSCPEEPQLRMKNNEEAEDYDDDLTDSEMDVVRFDDDNSPSFIQIRSVAKKHPKTWVHYIAAEEEDWDYAPLVLAPDDRSYKSQYLNNGPQRIGRKYKKVRFMAYTDETFKTREAIQHESGILGPLLYGEVGDTLLIIFKNQASRPYNIYPHGITDVRPLYSRRLPKGVKHLKDFPILPGEIFKYKWTVTVEDGPTKSDPRCLTRYYSSFVNMERDLASGLIGPLLICYKESVDQRGNQIMSDKRNVILFSVFDENRSWYLTENIQRFLPNPAGVQLEDPEFQASNIMHSINGYVFDSLQLSVCLHEVAYWYILSIGAQTDFLSVFFSGYTFKHKMVYEDTLTLFPFSGETVFMSMENPGLWILGCHNSDFRNRGMTALLKVSSCDKNTGDYYEDSYEDISAYLLSKNNAIEPRSFSQNPPVLKRHQREITRTTLQSDQEEIDYDDTISVEMKKEDFDIYDEDENQSPRSFQKKTRHYFIAAVERLWDYGMSSSPHVLRNRAQSGSVPQFKKVVFQEFTDGSFTQPLYRGELNEHLGLLGPYIRAEVEDNIMVTFRNQASRPYSFYSSLISYEEDQRQGAEPRKNFVKPNETKTYFWKVQHHMAPTKDEFDCKAWAYFSDVDLEKDVHSGLIGPLLVCHTNTLNPAHGRQVTVQEFALFFTIFDETKSWYFTENMERNCRAPCNIQMEDPTFKENYRFHAINGYIMDTLPGLVMAQDQRIRWYLLSMGSNENIHSIHFSGHVFTVRKKEEYKMALYNLYPGVFETVEMLPSKAGIWRVECLIGEHLHAGMSTLFLVYSNKCQTPLGMASGHIRDFQITASGQYGQWAPKLARLHYSGSINAWSTKEPFSWIKVDLLAPMIIHGIKTQGARQKFSSLYISQFIIMYSLDGKKWQTYRGNSTGTLMVFFGNVDSSGIKHNIFNPPIIARYIRLHPTHYSIRSTLRMELMGCDLNSCSMPLGMESKAISDAQITASSYFTNMFATWSPSKARLHLQGRSNAWRPQVNNPKEWLQVDFQKTMKVTGVTTQGVKSLLTSMYVKEFLISSSQDGHQWTLFFQNGKVKVFQGNQDSFTPVVNSLDPPLLTRYLRIHPQSWVHQIALRMEVLGCEAQDLYDKTHTCPPCPAPELLGGPSVFLFPPKPKDTLMISRTPEVTCVVVDVSHEDPEVKFNWYVDGVEVHNAKTKPREEQYNSTYRVVSVLTVLHQDWLNGKEYKCKVSNKALPAPIEKTISKAKGQPREPQVYTLPPSRDELTKNQVSLTCLVKGFYPSDIAVEWESNGQPENNYKTTPPVLDSDGSFFLYSKLTVDKSRWQQGNVFSCSVMHEALHNHYTQKSLSLSPGK

SEQ ID NO: 20945 - protein, 214 aa, Artificial Sequence
  source: /note="Description of Artificial Sequence: Synthetic polypeptide"
EIVLTQSPATLSLSPGERATLSCRASQSVSSYLAWYQQKPGQAPRLLIYDASNRATGIPARFSGSGSGTDFTLTISSLEPEDFAVYYCQQRSNWPLTFGGGTKVEIKRTVAAPSVFIFPPSDEQLKSGTASVVCLLNNFYPREAKVQWKVDNALQSGNSQESVTEQDSKDSTYSLSSTLTLSKADYEKHKVYACEVTHQGLSSPVTKSFNRGEC

SEQ ID NO: 20946 - protein, 220 aa, Artificial Sequence
  source: /note="Description of Artificial Sequence: Synthetic polypeptide"
DIVMTQSPDSLAVSLGERATINCKSSQSVLYRSNNRNFLGWYQQKPGQPPNLLIYWASTRESGVPDRFSGSGSGTDFTLTISSLQAEDVAVYYCQQYYTTPYTFGQGTKLEIKRTVAAPSVFIFPPSDEQLKSGTASVVCLLNNFYPREAKVQWKVDNALQSGNSQESVTEQDSKDSTYSLSSTLTLSKADYEKHKVYACEVTHQGLSSPVTKSFNRGEC

SEQ ID NO: 20947 - protein, 214 aa, Artificial Sequence
  source: /note="Description of Artificial Sequence: Synthetic polypeptide"
DILMTQSPSSMSVSLGDTVSITCHASQGISSNIGWLQQKPGKSFMGLIYYGTNLVDGVPSRFSGSGSGADYSLTISSLDSEDFADYYCVQYAQLPYTFGGGTKLEIKRADAAPTVSIFPPSSEQLTSGGASVVCFLNNFYPKDINVKWKIDGSERQNGVLNSWTDQDSKDSTYSMSSTLTLTKDEYERHNSYTCEATHKTSTSPIVKSFNRNEC

SEQ ID NO: 20948 - protein, 214 aa, Artificial Sequence
  source: /note="Description of Artificial Sequence: Synthetic polypeptide"
DIQMTQSPSSLSASVGDRVTITCRASQGISSALAWYQQKPGKAPKLLIYSASYRYTGVPSRFSGSGSGTDFTFTISSLQPEDIATYYCQQRYSLWRTFGQGTKLEIKRTVAAPSVFIFPPSDEQLKSGTASVVCLLNNFYPREAKVQWKVDNALQSGNSQESVTEQDSKDSTYSLSSTLTLSKADYEKHKVYACEVTHQGLSSPVTKSFNRGEC

SEQ ID NO: 20949 - protein, 214 aa, Artificial Sequence
  source: /note="Description of Artificial Sequence: Synthetic polypeptide"
DIQMTQSPSTLSASVGDRVTITCRASQSIRSWLAWYQQKPGKAPKLLIYKASSLESGVPSRFSGSGSGTEFTLTISSLQPDDFATYYCQQYNSYSYTFGQGTKLEIKRTVAAPSVFIFPPSDEQLKSGTASVVCLLNNFYPREAKVQWKVDNALQSGNSQESVTEQDSKDSTYSLSSTLTLSKADYEKHKVYACEVTHQGLSSPVTKSFNRGEC

SEQ ID NO: 20950 - protein, 219 aa, Artificial Sequence; identical to SEQ ID NO: 20920
  source: /note="Description of Artificial Sequence: Synthetic polypeptide"

SEQ ID NO: 20951 - protein, 214 aa, Artificial Sequence; identical to SEQ ID NO: 20945
  source: /note="Description of Artificial Sequence: Synthetic polypeptide"

SEQ ID NO: 20952 - protein, 213 aa, Artificial Sequence
  source: /note="Description of Artificial Sequence: Synthetic polypeptide"
DIQMTQSPSTLSASVGDRVTITCRASQSISSWLAWYQQKPGKAPKLLIYKASTLESGVPSRFSGSGSGTEFTLTISSLQPDDFATYYCQQYNTYWTFGQGTKVEIKRTVAAPSVFIFPPSDEQLKSGTASVVCLLNNFYPREAKVQWKVDNALQSGNSQESVTEQDSKDSTYSLSSTLTLSKADYEKHKVYACEVTHQGLSSPVTKSFNRGEC

SEQ ID NO: 20953 - protein, 214 aa, Artificial Sequence
  source: /note="Description of Artificial Sequence: Synthetic polypeptide"
DIQMTQSPSSLSASVGDRVTITCKASQDVHTAVAWYQQKPGKAPKLLIYHASYRYTGVPSRFSGSGSGTDFTFTISSLQPEDIATYYCQQRYSLWRTFGQGTKLEIKRTVAAPSVFIFPPSDEQLKSGTASVVCLLNNFYPREAKVQWKVDNALQSGNSQESVTEQDSKDSTYSLSSTLTLSKADYEKHKVYACEVTHQGLSSPVTKSFNRGEC

SEQ ID NO: 20954 - protein, 214 aa, Artificial Sequence
  source: /note="Description of Artificial Sequence: Synthetic polypeptide"
AIRMTQSPSSFSASTGDRVTITCRASQDIRNYVAWYQQKSGKAPKFLIYAASTLQSGVPSRFSGSGSGTDFTLTINSLQSEDFATYYCQQYYNSPPTFGQGTRVEITRTVAAPSVFIFPPSDEQLKSGTASVVCLLNNFYPREAKVQWKVDNALQSGNSQESVTEQDSKDSTYSLSSTLTLSKADYEKHKVYACEVTHQGLSSPVTKSFNRGEC

SEQ ID NO: 20955 - protein, 214 aa, Artificial Sequence; identical to SEQ ID NO: 20949
  source: /note="Description of Artificial Sequence: Synthetic polypeptide"

SEQ ID NO: 20956 - protein, 450 aa, Artificial Sequence; identical to SEQ ID NO: 20913
  source: /note="Description of Artificial Sequence: Synthetic polypeptide"

SEQ ID NO: 20957 - protein, 214 aa, Artificial Sequence; identical to SEQ ID NO: 20947
  source: /note="Description of Artificial Sequence: Synthetic polypeptide"

SEQ ID NO: 20958 - protein, 107 aa, Artificial Sequence; identical to SEQ ID NO: 10176
  source: /note="Description of Artificial Sequence: Synthetic polypeptide"

SEQ ID NO: 20959 - protein, 111 aa, Artificial Sequence; identical to SEQ ID NO: 11382
  source: /note="Description of Artificial Sequence: Synthetic polypeptide"

SEQ ID NO: 20960 - protein, 106 aa, Artificial Sequence
  source: /note="Description of Artificial Sequence: Synthetic polypeptide"
DIQMTQSPSLSASVGDRVTITCGASENIYGALNWYQRKPGKAPKLLIYGATNLADGVPSRFSGSGSGTDYTLTISSLQPEDFATYYCQNVLNTPLTFGQGTKVEIK

SEQ ID NO: 20961 - protein, 113 aa, Artificial Sequence [sequence omitted]

SEQ ID NO: 20962 - protein, 108 aa, Artificial Sequence; identical to SEQ ID NO: 11385
  source: /note="Description of Artificial Sequence: Synthetic polypeptide"

SEQ ID NO: 20963 - protein, 216 aa, Artificial Sequence; identical to SEQ ID NO: 11458
  source: /note="Description of Artificial Sequence: Synthetic polypeptide"

SEQ ID NO: 20964 - protein, 213 aa, Artificial Sequence
  source: /note="Description of Artificial Sequence: Synthetic polypeptide"
QIVLTQSPATLSVSPGERATLSCRASQSVSYMHWYQQKPGQAPRLLIYGVFRRATGIPDRFSGSGSGTDFTLTIGRLEPEDFAVYYCLQWSSDPPTFGQGTKLEIKRTVAAPSVFIFPPSDEQLKSGTASVVCLLNNFYPREAKVQWKVDNALQSGNSQESVTEQDSKDSTYSLSSTLTLSKADYEKHKVYACEVTHQGLSSPVTKSFNRGEC

SEQ ID NO: 20965 - protein, 214 aa, Artificial Sequence; identical to SEQ ID NO: 20948
  source: /note="Description of Artificial Sequence: Synthetic polypeptide"

SEQ ID NO: 20966 - protein, 220 aa, Artificial Sequence; identical to SEQ ID NO: 20946
  source: /note="Description of Artificial Sequence: Synthetic polypeptide"

SEQ ID NO: 20967 - protein, 214 aa, Artificial Sequence; identical to SEQ ID NO: 20953
  source: /note="Description of Artificial Sequence: Synthetic polypeptide"

SEQ ID NO: 20968 - protein, 214 aa, Artificial Sequence
  source: /note="Description of Artificial Sequence: Synthetic polypeptide"
DIQMTQSPSSLSASVGDRVTITCKASRNIERQLAWYQQKPGQAPELLIYQASRKESGVPDRFSGSRYGTDFTLTISSLQPEDIATYYCQQYSDPPLTFGGGTKVEIKRTVAAPSVFIFPPSDEQLKSGTASVVCLLNNFYPREAKVQWKVDNALQSGNSQESVTEQDSKDSTYSLSSTLTLSKADYEKHKVYACEVTHQGLSSPVTKSFNRGEC

SEQ ID NO: 20969 - protein, 219 aa, Artificial Sequence
  source: /note="Description of Artificial Sequence: Synthetic polypeptide"
DIVMTQTPLSLSVTPGQPASISCKSSQSLLESDGKTYLNWYLQKPGQSPQLLIYLVSILDSGVPDRFSGSGSGTDFTLKISRVEAEDVGVYYCLQATHFPQTFGGGTKVEIKRTVAAPSVFIFPPSDEQLKSGTASVVCLLNNFYPREAKVQWKVDNALQSGNSQESVTEQDSKDSTYSLSSTLTLSKADYEKHKVYACEVTHQGLSSPVTKSFNRGEC

SEQ ID NO: 20970 - protein, 215 aa, Artificial Sequence
  source: /note="Description of Artificial Sequence: Synthetic polypeptide"
ESALTQPASVSGSPGQSITISCTGTSSDVGGYNSVSWYQQHPGKAPKLMIYEVSNRPSGVSNRFSGSKSGNTASLTISGLQAEDEADYYCNSYTSTSMVFGGGTKLTVLGQPKAAPSVTLFPPSSEELQANKATLVCLISDFYPGAVTVAWKADSSPVKAGVETTTPSKQSNNKYAASSYLSLTPEQWKSHRSYSCQVTHEGSTVEKTVAPTECS

SEQ ID NO: 20971 - protein, 235 aa, Artificial Sequence; identical to SEQ ID NO: 11474
  source: /note="Description of Artificial Sequence: Synthetic polypeptide"

SEQ ID NO: 20972 - protein, 214 aa, Artificial Sequence; identical to SEQ ID NO: 11472
  source: /note="Description of Artificial Sequence: Synthetic polypeptide"

SEQ ID NO: 20973 - protein, 214 aa, Artificial Sequence; identical to SEQ ID NO: 11473
  source: /note="Description of Artificial Sequence: Synthetic polypeptide"

SEQ ID NO: 20974 - protein, 215 aa, Artificial Sequence; identical to SEQ ID NO: 11475
  source: /note="Description of Artificial Sequence: Synthetic polypeptide"

SEQ ID NO: 20975 - protein, 214 aa, Artificial Sequence; identical to SEQ ID NO: 20954
  source: /note="Description of Artificial Sequence: Synthetic polypeptide"

SEQ ID NO: 20976 - protein, 60 aa, Artificial Sequence
  source: /note="Description of Artificial Sequence: Synthetic polypeptide"
EAMHSFCAFKADDGPCRAAHPRWFFNIFTRQCEEFIYGGCEGNQNRFESLEECKKMCTRD

SEQ ID NO: 20977 - protein, 250 aa, Artificial Sequence
  source: /note="Description of Artificial Sequence: Synthetic polypeptide"
MADIQMTQSPSSLSASVGDRVTITCGASENIYGALNWYQRKPGKAPKLLIYGATNLADGVPSRFSGSGSGTDYTLTISSLQPEDFATYYCQNVLNTPLTFGQGTKVEIKRTGGGGSGGGGSGGGGSQVQLVQSGAEVEKPGASVKKVSCKASGYIFSNYWIQWVRQAPGQGLEWMGEILPGSGSTEYAQKFQGRVTMTADTSTSTAYMELSSLRSEDTAVYYCARYFFGSSPNYWYFDVWGQGTLVTVSS

SEQ ID NO: 20978 - protein, 34 aa, Artificial Sequence
  source: /note="Description of Artificial Sequence: Synthetic polypeptide"
  MOD_RES (29)..(29): Any amino acid
AVSEHQLLHDKGKSIQDLRRRELLEKLLXKLHTA

SEQ ID NO: 20979 - DNA, 1374 bp, Artificial Sequence
  source: /note="Description of Artificial Sequence: Synthetic polynucleotide"
atggaatggacctgggtctttctcttcctcctgtcagtaactgcaggtgtccactcccaggttcagctgcagcagtctggagctgagctgatgaagcctggggcctcagtgaagatatcctgcaaggctactggctacacattcagtaactactggatagagtgggtaaagcagaggcctggacatggccttgagtggattggagagattttacctggaagtgatagtattaagtacaatgagaatttcaagggcaaggccacattcactgcagatacatcctccaacacagcctacatgcaactcagcagcctgacatctgaggactctgccgtctattactgtgcaagaagggggaactacccagactactggggccaaggcaccactctcacagtctcctcagccaaaacgacacccccatctgtctatccactggcccctggatctgctgcccaaactaactccatggtgaccctgggatgcctggtcaagggctatttccctgagccagtgacagtgacctggaactctggatccctgtccagcggtgtgcacaccttcccagctgtcctgcagtctgacctctacactctgagcagctcagtgactgtcccctccagcacctggcccagcgagaccgtcacctgcaacgttgcccacccggccagcagcaccaaggtggacaagaaaattgtgcccagggattgtggttgtaagccttgcatatgtacagtcccagaagtatcatctgtcttcatcttccccccaaagcccaaggatgtgctcaccattactctgactcctaaggtcacgtgtgttgtggtagacatcagcaaggatgatcccgaggtccagttcagctggtttgtagatgatgtggaggtgcacacagctcagacgcaaccccgggaggagcagttcaacagcactttccgctcagtcagtgaacttcccatcatgcaccaggactggctcaatggcaaggagttcaaatgcagggtcaacagtgcagctttccctgcccccatcgagaaaaccatctccaaaaccaaaggcagaccgaaggctccacaggtgtacaccattccacctcccaaggagcagatggccaaggataaagtcagtctgacctgcatgataacagacttcttccctgaagacattactgtggagtggcagtggaatgggcagccagcggagaactacaagaacactcagcccatcatggacacagatggctcttacttcgtctacagcaagctcaatgtgcagaagagcaactgggaggcaggaaatactttcacctgctctgtgttacatgagggcctgcacaaccaccatactgagaagagcctctcccactctcctggt

SEQ ID NO: 20980 - DNA, 1377 bp, Artificial Sequence
  source: /note="Description of Artificial Sequence: Synthetic polynucleotide"
atgggatggagctggatctttctctttctcctgtcaggaactacaggtgtcctctctgaggtccagctgcaacagtctggacctgagctggtgaagcctggggcttcagtgaagatatcctgcaagacttctggatacacattcactgaatacaccatacactgggtgaagcagagccatggagagagccttgagtggattggaggtattaatccaaacgatggtggtactatttacaaccagaagttcaagggcaaggccacattgactgtagacaagtcctccaaaacagcctacatggagctccgcagcctgacatctgaggattctgcagtcttttactgtgcaagagggccctccgccaggtttccttactggggccaagggactctggtcactgtctctgcagccaaaacgacacccccatctgtctatccactggcccctggatctgctgcccaaactaactccatggtgaccctgggatgcctggtcaagggctatttccctgagccagtgacagtgacctggaactctggatccctgtccagcggtgtgcacaccttcccagctgtcctgcagtctgacctctacactctgagcagctcagtgactgtcccctccagcacctggcccagcgagaccgtcacctgcaacgttgcccacccggccagcagcaccaaggtggacaagaaaattgtgcccagggattgtggttgtaagccttgcatatgtacagtcccagaagtatcatctgtcttcatcttccccccaaagcccaaggatgtgctcaccattactctgactcctaaggtcacgtgtgttgtggtagacatcagcaaggatgatcccgaggtccagttcagctggtttgtagatgatgtggaggtgcacacagctcagacgcaaccccgggaggagcagttcaacagcactttccgctcagtcagtgaacttcccatcatgcaccaggactggctcaatggcaaggagttcaaatgcagggtcaacagtgcagctttccctgcccccatcgagaaaaccatctccaaaaccaaaggcagaccgaaggctccacaggtgtacaccattccacctcccaaggagcagatggccaaggataaagtcagtctgacctgcatgataacagacttcttccctgaagacattactgtggagtggcagtggaatgggcagccagcggagaactacaagaacactcagcccatcatggacacagatggctcttacttcgtctacagcaagctcaatgtgcagaagagcaactgggaggcaggaaatactttcacctgctctgtgttacatgagggcctgcacaaccaccatactgagaagagcctctcccactctcctggt

SEQ ID NO: 20981 - DNA, 1377 bp, Artificial Sequence
  source: /note="Description of Artificial Sequence: Synthetic polynucleotide"
atgaacttcgggctcagcttgattttccttgtccttgttttaaaaggtgtccagtgtgaggttcatctggtggagtctgggggagccttagtgaagcctggagggtccctgaaactctcctgtgcagcctctggattcagtttcagtaaatatggcatgtcttgggttcgccagactccagacaagaggctggagtgggtcgcaaccattagtagtagtgggagtcgcacctactatccagacagtgtgaagggccaattcaccatctccagagacaatgccaagaacaccctgtacctgcaaatgagcagtctgaagtctgaggacacagccatgtattactgttcaattagctgggacggtgctatggactactggggtcaagggacctcagtcaccgtctcctcagccaaaacgacacccccatctgtctatccactggcccctggatctgctgcccaaactaactccatggtgaccctgggatgcctggtcaagggctatttccctgagccagtgacagtgacctggaactctggatccctgtccagcggtgtgcacaccttcccagctgtcctgcagtctgacctctacactctgagcagctcagtgactgtcccctccagcacctggcccagcgagaccgtcacctgcaacgttgcccacccggccagcagcaccaaggtggacaagaaaattgtgcccagggattgtggttgtaagccttgcatatgtacagtcccagaagtatcatctgtcttcatcttccccccaaagcccaaggatgtgctcaccattactctgactcctaaggtcacgtgtgttgtggtagacatcagcaaggatgatcccgaggtccagttcagctggtttgtagatgatgtggaggtgcacacagctcagacgcaaccccgggaggagcagttcaacagcactttccgctcagtcagtgaacttcccatcatgcaccaggactggctcaatggcaaggagttcaaatgcagggtcaacagtgcagctttccctgcccccatcgagaaaaccatctccaaaaccaaaggcagaccgaaggctccacaggtgtacaccattccacctcccaaggagcagatggccaaggataaagtcagtctgacctgcatgataacagacttcttccctgaagacattactgtggagtggcagtggaatgggcagccagcggagaactacaagaacactcagcccatcatggacacagatggctcttacttcgtctacagcaagctcaatgtgcagaagagcaactgggaggcaggaaatactttcacctgctctgtgttacatgagggcctgcacaaccaccatactgagaagagcctctcccactctcctggt

SEQ ID NO: 20982 - protein, 217 aa, Artificial Sequence; identical to SEQ ID NO: 4081
  source: /note="Description of Artificial Sequence: Synthetic polypeptide"

SEQ ID NO: 20983 - protein, 220 aa, Artificial Sequence; identical to SEQ ID NO: 4082
  source: /note="Description of Artificial Sequence: Synthetic polypeptide"

SEQ ID NO: 20984 - protein, 227 aa, Artificial Sequence
  source: /note="Description of Artificial Sequence: Synthetic polypeptide"
AAQPAMAQSVKESGGRLVTPGTPLTLACTVSGFSLNTYSMFWVRQAPGKGLQWIGIISNFGVIYYATWAKGRFTISKTSTTVDLKITSPTTEDTATYFCVRKYGSEWGGDLWGPGTLVTVSSGQPKAPSVFPLAPCCGDTPSSTVTLGCLVKGYLPEPVTVTWNSGTLTNGVRTFPSVRQSSGLYSLSSVVSVTSSSQPVTCNVAHPATNTKVDKTVAPSTCSKTSC

SEQ ID NO: 20985 - protein, 222 aa, Artificial Sequence; identical to SEQ ID NO: 3860
  source: /note="Description of Artificial Sequence: Synthetic polypeptide"

SEQ ID NO: 20986 - protein, 462 aa, Artificial Sequence; identical to SEQ ID NO: 3870
  source: /note="Description of Artificial Sequence: Synthetic polypeptide"

SEQ ID NO: 20987 - protein, 462 aa, Artificial Sequence; identical to SEQ ID NO: 3871
  source: /note="Description of Artificial Sequence: Synthetic polypeptide"

SEQ ID NO: 20988 - protein, 462 aa, Artificial Sequence; identical to SEQ ID NO: 3872
  source: /note="Description of Artificial Sequence: Synthetic polypeptide"

SEQ ID NO: 20989 - protein, 462 aa, Artificial Sequence; identical to SEQ ID NO: 3873
  source: /note="Description of Artificial Sequence: Synthetic polypeptide"

SEQ ID NO: 20990 - protein, 462 aa, Artificial Sequence; identical to SEQ ID NO: 3874
  source: /note="Description of Artificial Sequence: Synthetic polypeptide"

SEQ ID NO: 20991 - protein, 462 aa, Artificial Sequence; identical to SEQ ID NO: 3875
  source: /note="Description of Artificial Sequence: Synthetic polypeptide"

SEQ ID NO: 20992 - protein, 462 aa, Artificial Sequence; identical to SEQ ID NO: 3876
  source: /note="Description of Artificial Sequence: Synthetic polypeptide"

SEQ ID NO: 20993 - protein, 144 aa, Artificial Sequence; identical to SEQ ID NO: 3877
  source: /note="Description of Artificial Sequence: Synthetic polypeptide"

SEQ ID NO: 20994 - protein, 114 aa, Artificial Sequence; identical to SEQ ID NO: 3878
  source: /note="Description of Artificial Sequence: Synthetic polypeptide"
  MOD_RES (3)..(3): Any amino acid

SEQ ID NO: 20995 - protein, 454 aa, Artificial Sequence
  source: /note="Description of Artificial Sequence: Synthetic polypeptide"
METGLRWLLLVAVLKGVQCQSVEESGGHLVTPGTPLTLTCTVSGIDLSTYAMGWVRQAPGKGLEWIGVITKSGNTYYASWAKGRFAISKTSTTVDLKITSPTTEDTATYFCGRYGIGVSYYDIWGPGTLVTVSSGQPKAPSVFPLAPCCGDTPSSTVTLGCLVKGYLPEPVTVTWNSGTLTNGVRTFPSVRQSSGLYSLSSWSVTSSSQPVTCNVAHPATNTKVDKTVAPSTCSKPTCPPPELLGGPSVFIFPPKPKDTLMISRTPEVTCVVVDVSQDDPEVQFTWYINNEQVRTARPPLREQQFNSTIRVVSTLPIAHQDWLRGKEFKCKVHNKALPAPIEKTISKARGQPLEPKVYTGPPREELSSRSVSLTCMINGFYPSDISVEWEKNGKAEDNYKTTPAVLDSDGSYFLYSKLSVPTSEWQRGDVFTCSVHEALHNHYTQKSISRSPGK

SEQ ID NO: 20996 - protein, 450 aa, Artificial Sequence; identical to SEQ ID NO: 4337
  source: /note="Description of Artificial Sequence: Synthetic polypeptide"

SEQ ID NO: 20997 - protein, 179 aa, Artificial Sequence; identical to SEQ ID NO: 4338
  source: /note="Description of Artificial Sequence: Synthetic polypeptide"

SEQ ID NO: 20998 - protein, 121 aa, Artificial Sequence; identical to SEQ ID NO: 4339
  source: /note="Description of Artificial Sequence: Synthetic polypeptide"

SEQ ID NO: 20999 - protein, 441 aa, Artificial Sequence; identical to SEQ ID NO: 4340
  source: /note="Description of Artificial Sequence: Synthetic polypeptide"

SEQ ID NO: 21000 - protein, 440 aa, Artificial Sequence; identical to SEQ ID NO: 4341
  source: /note="Description of Artificial Sequence: Synthetic polypeptide"

SEQ ID NO: 21001 - protein, 416 aa, Artificial Sequence; identical to SEQ ID NO: 4342
  source: /note="Description of Artificial Sequence: Synthetic polypeptide"

SEQ ID NO: 21002 - protein, 446 aa, Artificial Sequence; identical to SEQ ID NO: 4343
  source: /note="Description of Artificial Sequence: Synthetic polypeptide"

SEQ ID NO: 21003 - protein, 445 aa, Artificial Sequence; identical to SEQ ID NO: 4344
  source: /note="Description of Artificial Sequence: Synthetic polypeptide"

SEQ ID NO: 21004 - protein, 442 aa, Artificial Sequence; identical to SEQ ID NO: 4345
  source: /note="Description of Artificial Sequence: Synthetic polypeptide"

SEQ ID NO: 21005 - protein, 445 aa, Artificial Sequence; identical to SEQ ID NO: 4346
  source: /note="Description of Artificial Sequence: Synthetic polypeptide"

SEQ ID NO: 21006 - protein, 444 aa, Artificial Sequence; identical to SEQ ID NO: 4347
  source: /note="Description of Artificial Sequence: Synthetic polypeptide"

SEQ ID NO: 21007 - protein, 117 aa, Artificial Sequence; identical to SEQ ID NO: 4348
  source: /note="Description of Artificial Sequence: Synthetic polypeptide"

SEQ ID NO: 21008 - protein, 112 aa, Artificial Sequence; identical to SEQ ID NO: 4349
  source: /note="Description of Artificial Sequence: Synthetic polypeptide"

SEQ ID NO: 21009 - protein, 110 aa, Artificial Sequence; identical to SEQ ID NO: 4350
  source: /note="Description of Artificial Sequence: Synthetic polypeptide"

SEQ ID NO: 21010 - protein, 106 aa, Artificial Sequence; identical to SEQ ID NO: 4351
  source: /note="Description of Artificial Sequence: Synthetic polypeptide"

SEQ ID NO: 21011 - protein, 441 aa, Artificial Sequence; identical to SEQ ID NO: 4340
  source: /note="Description of Artificial Sequence: Synthetic polypeptide"

SEQ ID NO: 21012 - protein, 442 aa, Artificial Sequence; identical to SEQ ID NO: 4353
  source: /note="Description of Artificial Sequence: Synthetic polypeptide"

SEQ ID NO: 21013 - protein, 445 aa, Artificial Sequence; identical to SEQ ID NO: 4354
  source: /note="Description of Artificial Sequence: Synthetic polypeptide"

SEQ ID NO: 21014 - protein, 445 aa, Artificial Sequence; identical to SEQ ID NO: 4355
  source: /note="Description of Artificial Sequence: Synthetic polypeptide"

SEQ ID NO: 21015 - protein, 442 aa, Artificial Sequence; identical to SEQ ID NO: 4353
  source: /note="Description of Artificial Sequence: Synthetic polypeptide"

SEQ ID NO: 21016 - protein, 408 aa, Artificial Sequence; identical to SEQ ID NO: 4357
  source: /note="Description of Artificial Sequence: Synthetic polypeptide"

SEQ ID NO: 21017 - protein, 445 aa, Artificial Sequence; identical to SEQ ID NO: 4355
  source: /note="Description of Artificial Sequence: Synthetic polypeptide"

SEQ ID NO: 21018 - protein, 122 aa, Artificial Sequence; identical to SEQ ID NO: 3879
  source: /note="Description of Artificial Sequence: Synthetic polypeptide"

SEQ ID NO: 21019 - protein, 122 aa, Artificial Sequence; identical to SEQ ID NO: 3880
  source: /note="Description of Artificial Sequence: Synthetic polypeptide"

SEQ ID NO: 21020 - protein, 126 aa, Artificial Sequence; identical to SEQ ID NO: 3881
  source: /note="Description of Artificial Sequence: Synthetic polypeptide"

SEQ ID NO: 21021 - protein, 130 aa, Artificial Sequence; identical to SEQ ID NO: 3882
  source: /note="Description of Artificial Sequence: Synthetic polypeptide"

SEQ ID NO: 21022 - protein, 119 aa, Artificial Sequence; identical to SEQ ID NO: 3883
  source: /note="Description of Artificial Sequence: Synthetic polypeptide"

SEQ ID NO: 21023 - protein, 129 aa, Artificial Sequence; identical to SEQ ID NO: 3884
  source: /note="Description of Artificial Sequence: Synthetic polypeptide"

SEQ ID NO: 21024 - protein, 129 aa, Artificial Sequence; identical to SEQ ID NO: 3885
  source: /note="Description of Artificial Sequence: Synthetic polypeptide"

SEQ ID NO: 21025 - protein, 98 aa, Artificial Sequence; identical to SEQ ID NO: 4413
  source: /note="Description of Artificial Sequence: Synthetic polypeptide"

SEQ ID NO: 21026 - protein, 582 aa, Artificial Sequence [sequence omitted]

SEQ ID NO: 21027 - protein, 582 aa, Artificial Sequence [sequence omitted]

SEQ ID NO: 21028 - protein, 582 aa, Artificial Sequence [sequence omitted]

SEQ ID NO: 21029 - protein, 582 aa, Artificial Sequence; identical to SEQ ID NO: 3898
  source: /note="Description of Artificial Sequence: Synthetic polypeptide"

SEQ ID NO: 21030 - protein, 460 aa, Artificial Sequence; identical to SEQ ID NO: 3899
  source: /note="Description of Artificial Sequence: Synthetic polypeptide"

SEQ ID NO: 21031 - protein, 458 aa, Artificial Sequence; identical to SEQ ID NO: 3900
  source: /note="Description of Artificial Sequence: Synthetic polypeptide"

SEQ ID NO: 21032 - protein, 459 aa, Artificial Sequence; identical to SEQ ID NO: 3901
  source: /note="Description of Artificial Sequence: Synthetic polypeptide"

SEQ ID NO: 21033 - protein, 459 aa, Artificial Sequence; identical to SEQ ID NO: 3902
  source: /note="Description of Artificial Sequence: Synthetic polypeptide"

SEQ ID NO: 21034 - protein, 458 aa, Artificial Sequence; identical to SEQ ID NO: 3903
  source: /note="Description of Artificial Sequence: Synthetic polypeptide"

SEQ ID NO: 21035 - protein, 458 aa, Artificial Sequence; identical to SEQ ID NO: 3904
  source: /note="Description of Artificial Sequence: Synthetic polypeptide"

SEQ ID NO: 21036 - protein, 460 aa, Artificial Sequence; identical to SEQ ID NO: 3905
  source: /note="Description of Artificial Sequence: Synthetic polypeptide"

SEQ ID NO: 21037 - protein, 459 aa, Artificial Sequence; identical to SEQ ID NO: 3906
  source: /note="Description of Artificial Sequence: Synthetic polypeptide"

SEQ ID NO: 21038 - protein, 460 aa, Artificial Sequence; identical to SEQ ID NO: 3907
  source: /note="Description of Artificial Sequence: Synthetic polypeptide"

SEQ ID NO: 21039 - protein, 460 aa, Artificial Sequence; identical to SEQ ID NO: 3908
  source: /note="Description of Artificial Sequence: Synthetic polypeptide"

SEQ ID NO: 21040 - protein, 459 aa, Artificial Sequence; identical to SEQ ID NO: 3909
  source: /note="Description of Artificial Sequence: Synthetic polypeptide"

SEQ ID NO: 21041 - protein, 459 aa, Artificial Sequence; identical to SEQ ID NO: 3910
  source: /note="Description of Artificial Sequence: Synthetic polypeptide"

SEQ ID NO: 21042 - protein, 460 aa, Artificial Sequence; identical to SEQ ID NO: 3911
  source: /note="Description of Artificial Sequence: Synthetic polypeptide"

SEQ ID NO: 21043 - protein, 460 aa, Artificial Sequence; identical to SEQ ID NO: 3912
  source: /note="Description of Artificial Sequence: Synthetic polypeptide"

SEQ ID NO: 21044 - protein, 460 aa, Artificial Sequence; identical to SEQ ID NO: 3913
  source: /note="Description of Artificial Sequence: Synthetic polypeptide"

SEQ ID NO: 21045 - protein, 459 aa, Artificial Sequence; identical to SEQ ID NO: 3914
  source: /note="Description of Artificial Sequence: Synthetic polypeptide"

SEQ ID NO: 21046 - protein, 441 aa, Artificial Sequence; identical to SEQ ID NO: 3915
  source: /note="Description of Artificial Sequence: Synthetic polypeptide"

SEQ ID NO: 21047 - protein, 451 aa, Artificial Sequence; identical to SEQ ID NO: 4436
  source: /note="Description of Artificial Sequence: Synthetic polypeptide"

SEQ ID NO: 21048 - protein, 451 aa, Artificial Sequence; identical to SEQ ID NO: 4437
  source: /note="Description of Artificial Sequence: Synthetic polypeptide"

SEQ ID NO: 21049 - protein, 113 aa, Artificial Sequence; identical to SEQ ID NO: 3979
  source: /note="Description of Artificial Sequence: Synthetic polypeptide"

SEQ ID NO: 21050 - protein, 112 aa, Artificial Sequence; identical to SEQ ID NO: 4021
  source: /note="Description of Artificial Sequence: Synthetic polypeptide"

SEQ ID NO: 21051 - protein, 112 aa, Artificial Sequence; identical to SEQ ID NO: 4022
  source: /note="Description of Artificial Sequence: Synthetic polypeptide"

SEQ ID NO: 21052 - protein, 113 aa, Artificial Sequence; identical to SEQ ID NO: 3976
  source: /note="Description of Artificial Sequence: Synthetic polypeptide"

SEQ ID NO: 21053 - protein, 113 aa, Artificial Sequence; identical to SEQ ID NO: 3977
  source: /note="Description of Artificial Sequence: Synthetic polypeptide"

SEQ ID NO: 21054 - protein, 112 aa, Artificial Sequence; identical to SEQ ID NO: 4025
  source: /note="Description of Artificial Sequence: Synthetic polypeptide"

SEQ ID NO: 21055 - protein, 113 aa, Artificial Sequence; identical to SEQ ID NO: 3980
  source: /note="Description of Artificial Sequence: Synthetic polypeptide"

SEQ ID NO: 21056 - protein, 113 aa, Artificial Sequence; identical to SEQ ID NO: 3981
  source: /note="Description of Artificial Sequence: Synthetic polypeptide"

SEQ ID NO: 21057 - protein, 113 aa, Artificial Sequence; identical to SEQ ID NO: 3982
  source: /note="Description of Artificial Sequence: Synthetic polypeptide"

SEQ ID NO: 21058 - protein, 113 aa, Artificial Sequence; identical to SEQ ID NO: 3983
  source: /note="Description of Artificial Sequence: Synthetic polypeptide"

SEQ ID NO: 21059 - protein, 113 aa, Artificial Sequence; identical to SEQ ID NO: 3984
  source: /note="Description of Artificial Sequence: Synthetic polypeptide"

SEQ ID NO: 21060 - protein, 113 aa, Artificial Sequence; identical to SEQ ID NO: 3985
  source: /note="Description of Artificial Sequence: Synthetic polypeptide"

SEQ ID NO: 21061 - protein, 113 aa, Artificial Sequence; identical to SEQ ID NO: 3986
  source: /note="Description of Artificial Sequence: Synthetic polypeptide"

SEQ ID NO: 21062 - protein, 113 aa, Artificial Sequence; identical to SEQ ID NO: 3971
  source: /note="Description of Artificial Sequence: Synthetic polypeptide"

SEQ ID NO: 21063 - protein, 113 aa, Artificial Sequence; identical to SEQ ID NO: 3972
  source: /note="Description of Artificial Sequence: Synthetic polypeptide"

SEQ ID NO: 21064 - protein, 113 aa, Artificial Sequence; identical to SEQ ID NO: 3973
  source: /note="Description of Artificial Sequence: Synthetic polypeptide"

SEQ ID NO: 21065 - protein, 120 aa, Artificial Sequence; identical to SEQ ID NO: 3949
  source: /note="Description of Artificial Sequence: Synthetic polypeptide"

SEQ ID NO: 21066 - protein, 98 aa, Artificial Sequence; identical to SEQ ID NO: 3963
  source: /note="Description of Artificial Sequence: Synthetic polypeptide"

SEQ ID NO: 21067 - protein, 125 aa, Artificial Sequence; identical to SEQ ID NO: 3964
  source: /note="Description of Artificial Sequence: Synthetic polypeptide"

SEQ ID NO: 21068 - protein, 126 aa, Artificial Sequence; identical to SEQ ID NO: 3965
  source: /note="Description of Artificial Sequence: Synthetic polypeptide"

SEQ ID NO: 21069 - protein, 126 aa, Artificial Sequence; identical to SEQ ID NO: 3966
  source: /note="Description of Artificial Sequence: Synthetic polypeptide"

SEQ ID NO: 21070 - protein, 126 aa, Artificial Sequence; identical to SEQ ID NO: 3967
  source: /note="Description of Artificial Sequence: Synthetic polypeptide"

SEQ ID NO: 21071 - protein, 118 aa, Artificial Sequence; identical to SEQ ID NO: 3968
  source: /note="Description of Artificial Sequence: Synthetic polypeptide"

SEQ ID NO: 21072 - protein, 133 aa, Artificial Sequence; identical to SEQ ID NO: 3969
  source: /note="Description of Artificial Sequence: Synthetic polypeptide"

SEQ ID NO: 21073 - protein, 109 aa, Artificial Sequence; identical to SEQ ID NO: 3970
  source: /note="Description of Artificial Sequence: Synthetic polypeptide"

SEQ ID NO: 21074 - protein, 113 aa, Artificial Sequence; identical to SEQ ID NO: 3971
  source: /note="Description of Artificial Sequence: Synthetic polypeptide"

SEQ ID NO: 21075 - protein, 113 aa, Artificial Sequence; identical to SEQ ID NO: 3972
  source: /note="Description of Artificial Sequence: Synthetic polypeptide"

SEQ ID NO: 21076 - protein, 113 aa, Artificial Sequence; identical to SEQ ID NO: 3973
  source: /note="Description of Artificial Sequence: Synthetic polypeptide"

SEQ ID NO: 21077 - protein, 113 aa, Artificial Sequence; identical to SEQ ID NO: 3974
  source: /note="Description of Artificial Sequence: Synthetic polypeptide"

SEQ ID NO: 21078 - protein, 113 aa, Artificial Sequence; identical to SEQ ID NO: 3975
  source: /note="Description of Artificial Sequence: Synthetic polypeptide"

SEQ ID NO: 21079 - protein, 113 aa, Artificial Sequence; identical to SEQ ID NO: 3976
  source: /note="Description of Artificial Sequence: Synthetic polypeptide"

SEQ ID NO: 21080 - protein, 113 aa, Artificial Sequence; identical to SEQ ID NO: 3977
  source: /note="Description of Artificial Sequence: Synthetic polypeptide"

SEQ ID NO: 21081 - protein, 113 aa, Artificial Sequence; identical to SEQ ID NO: 3978
  source: /note="Description of Artificial Sequence: Synthetic polypeptide"

SEQ ID NO: 21082 - protein, 113 aa, Artificial Sequence; identical to SEQ ID NO: 3979
  source: /note="Description of Artificial Sequence: Synthetic polypeptide"

SEQ ID NO: 21083 - protein, 113 aa, Artificial Sequence; identical to SEQ ID NO: 3980
  source: /note="Description of Artificial Sequence: Synthetic polypeptide"

SEQ ID NO: 21084 - protein, 113 aa, Artificial Sequence; identical to SEQ ID NO: 3981
  source: /note="Description of Artificial Sequence: Synthetic polypeptide"

SEQ ID NO: 21085 - protein, 113 aa, Artificial Sequence; identical to SEQ ID NO: 3982
  source: /note="Description of Artificial Sequence: Synthetic polypeptide"

SEQ ID NO: 21086 - protein, 113 aa, Artificial Sequence; identical to SEQ ID NO: 3983
  source: /note="Description of Artificial Sequence: Synthetic polypeptide"

SEQ ID NO: 21087 - protein, 113 aa, Artificial Sequence; identical to SEQ ID NO: 3984
  source: /note="Description of Artificial Sequence: Synthetic polypeptide"

SEQ ID NO: 21088 - protein, 113 aa, Artificial Sequence; identical to SEQ ID NO: 3985
  source: /note="Description of Artificial Sequence: Synthetic polypeptide"

SEQ ID NO: 21089 - protein, 113 aa, Artificial Sequence; identical to SEQ ID NO: 3986
  source: /note="Description of Artificial Sequence: Synthetic polypeptide"

SEQ ID NO: 21090 - protein, 113 aa, Artificial Sequence
  source: /note="Description of Artificial Sequence: Synthetic polypeptide"
QVQLQQPGTELVKPGASVKLSCKASGYTFTSYWMHWVKQRPGQGLEWIGNINPSNGGTNYNEKFKSKATLTVDKSSSTAYMQLSSLTSEDSAVYYCELGQGYWGQGTTLTVSS

SEQ ID NO: 21091 - protein, 115 aa, Artificial Sequence
  source: /note="Description of Artificial Sequence: Synthetic polypeptide"
EVQLVESGGGLVKPGGSLKLSCAASGFTFSCYAMSWVRQTPEKRLEWVASISDGGSYTYYPDNVKGRFTISRDNAKNNLYLQMSHLKSEDTAMYYCAKELLFDYWGQGTTLTVSS

SEQ ID NO: 21092 - protein, 113 aa, Artificial Sequence
  source: /note="Description of Artificial Sequence: Synthetic polypeptide"
QVQLQQSGAELVKPGASVKISCKASGYAFSSYWMNWVKQRPGKGLEWIGQIYPGDGDTNYNGKFKGKATLTADKSSSTAYMQLSSLTSEDSAVYFCAVRFDYWGQGTTLTVSS

SEQ ID NO: 21093 - protein, 119 aa, Artificial Sequence; identical to SEQ ID NO: 3987
  source: /note="Description of Artificial Sequence: Synthetic polypeptide"

SEQ ID NO: 21094 - protein, 119 aa, Artificial Sequence; identical to SEQ ID NO: 3988
  source: /note="Description of Artificial Sequence: Synthetic polypeptide"

SEQ ID NO: 21095 - protein, 460 aa, Artificial Sequence; identical to SEQ ID NO: 3989
  source: /note="Description of Artificial Sequence: Synthetic polypeptide"

SEQ ID NO: 21096 - protein, 246 aa, Artificial Sequence; identical to SEQ ID NO: 3990
  source: /note="Description of Artificial Sequence: Synthetic polypeptide"

SEQ ID NO: 21097 - protein, 135 aa, Artificial Sequence; identical to SEQ ID NO: 4768
  source: /note="Description of Artificial Sequence: Synthetic polypeptide"

SEQ ID NO: 21098 - protein, 136 aa, Artificial Sequence; identical to SEQ ID NO: 4769
  source: /note="Description of Artificial Sequence: Synthetic polypeptide"

SEQ ID NO: 21099 - protein, 136 aa, Artificial Sequence; identical to SEQ ID NO: 4769
  source: /note="Description of Artificial Sequence: Synthetic polypeptide"

SEQ ID NO: 21100 - protein, 115 aa, Artificial Sequence; identical to SEQ ID NO: 3991
  source: /note="Description of Artificial Sequence: Synthetic polypeptide"

SEQ ID NO: 21101 - protein, 115 aa, Artificial Sequence; identical to SEQ ID NO: 3992
  source: /note="Description of Artificial Sequence: Synthetic polypeptide"

SEQ ID NO: 21102 - protein, 115 aa, Artificial Sequence; identical to SEQ ID NO: 3993
  source: /note="Description of Artificial Sequence: Synthetic polypeptide"

SEQ ID NO: 21103 - protein, 115 aa, Artificial Sequence; identical to SEQ ID NO: 3994
  source: /note="Description of Artificial Sequence: Synthetic polypeptide"

SEQ ID NO: 21104 - protein, 115 aa, Artificial Sequence; identical to SEQ ID NO: 3995
  source: /note="Description of Artificial Sequence: Synthetic polypeptide"

SEQ ID NO: 21105 - protein, 115 aa, Artificial Sequence; identical to SEQ ID NO: 3996
  source: /note="Description of Artificial Sequence: Synthetic polypeptide"

SEQ ID NO: 21106 - protein, 115 aa, Artificial Sequence; identical to SEQ ID NO: 3997
  source: /note="Description of Artificial Sequence: Synthetic polypeptide"

SEQ ID NO: 21107 - protein, 115 aa, Artificial Sequence; identical to SEQ ID NO: 3998
  source: /note="Description of Artificial Sequence: Synthetic polypeptide"

SEQ ID NO: 21108 - protein, 115 aa, Artificial Sequence; identical to SEQ ID NO: 3999
  source: /note="Description of Artificial Sequence: Synthetic polypeptide"

SEQ ID NO: 21109 - protein, 115 aa, Artificial Sequence; identical to SEQ ID NO: 4000
  source: /note="Description of Artificial Sequence: Synthetic polypeptide"

SEQ ID NO: 21110 - protein, 113 aa, Artificial Sequence; identical to SEQ ID NO: 4001
  source: /note="Description of Artificial Sequence: Synthetic polypeptide"

SEQ ID NO: 21111 - protein, 113 aa, Artificial Sequence; identical to SEQ ID NO: 4001
  source: /note="Description of Artificial Sequence: Synthetic polypeptide"

SEQ ID NO: 21112 - protein, 120 aa, Artificial Sequence; identical to SEQ ID NO: 4003
  source: /note="Description of Artificial Sequence: Synthetic polypeptide"

SEQ ID NO: 21113 - protein, 121 aa, Artificial Sequence; identical to SEQ ID NO: 4004
  source: /note="Description of Artificial Sequence: Synthetic polypeptide"

SEQ ID NO: 21114 - protein, 126 aa, Artificial Sequence; identical to SEQ ID NO: 4005
  source: /note="Description of Artificial Sequence: Synthetic polypeptide"

SEQ ID NO: 21115 - protein, 117 aa, Artificial Sequence; identical to SEQ ID NO: 4006
  source: /note="Description of Artificial Sequence: Synthetic polypeptide"

SEQ ID NO: 21116 - protein, 120 aa, Artificial Sequence; identical to SEQ ID NO: 4007
  source: /note="Description of Artificial Sequence: Synthetic polypeptide"

SEQ ID NO: 21117 - protein, 126 aa, Artificial Sequence; identical to SEQ ID NO: 4008
  source: /note="Description of Artificial Sequence: Synthetic polypeptide"

SEQ ID NO: 21118 - protein, 117 aa, Artificial Sequence; identical to SEQ ID NO: 4009
  source: /note="Description of Artificial Sequence: Synthetic polypeptide"

SEQ ID NO: 21119 - protein, 120 aa, Artificial Sequence; identical to SEQ ID NO: 4010
  source: /note="Description of Artificial Sequence: Synthetic polypeptide"

SEQ ID NO: 21120 - protein, 120 aa, Artificial Sequence; identical to SEQ ID NO: 4011
  source: /note="Description of Artificial Sequence: Synthetic polypeptide"

SEQ ID NO: 21121 - protein, 117 aa, Artificial Sequence; identical to SEQ ID NO: 4012
  source: /note="Description of Artificial Sequence: Synthetic polypeptide"

SEQ ID NO: 21122 - protein, 126 aa, Artificial Sequence; identical to SEQ ID NO: 4013
  source: /note="Description of Artificial Sequence: Synthetic polypeptide"

SEQ ID NO: 21123 - protein, 115 aa, Artificial Sequence; identical to SEQ ID NO: 4014
  source: /note="Description of Artificial Sequence: Synthetic polypeptide"

SEQ ID NO: 21124 - protein, 117 aa, Artificial Sequence; identical to SEQ ID NO: 4015
  source: /note="Description of Artificial Sequence: Synthetic polypeptide"

SEQ ID NO: 21125 - protein, 123 aa, Artificial Sequence; identical to SEQ ID NO: 4016
  source: /note="Description of Artificial Sequence: Synthetic polypeptide"

SEQ ID NO: 21126 - protein, 120 aa, Artificial Sequence; identical to SEQ ID NO: 4800
  source: /note="Description of Artificial Sequence: Synthetic polypeptide"

SEQ ID NO: 21127 - protein, 115 aa, Artificial Sequence; identical to SEQ ID NO: 4801
  source: /note="Description of Artificial Sequence: Synthetic polypeptide"

SEQ ID NO: 21128 - protein, 126 aa, Artificial Sequence; identical to SEQ ID NO: 4802
  source: /note="Description of Artificial Sequence: Synthetic polypeptide"

SEQ ID NO: 21129 - protein, 121 aa, Artificial Sequence; identical to SEQ ID NO: 4803
  source: /note="Description of Artificial Sequence: Synthetic polypeptide"

SEQ ID NO: 21130 - protein, 120 aa, Artificial Sequence; identical to SEQ ID NO: 4804
  source: /note="Description of Artificial Sequence: Synthetic polypeptide"

SEQ ID NO: 21131 - protein, 120 aa, Artificial Sequence; identical to SEQ ID NO: 4805
  source: /note="Description of Artificial Sequence: Synthetic polypeptide"

SEQ ID NO: 21132 - protein, 120 aa, Artificial Sequence; identical to SEQ ID NO: 4806
  source: /note="Description of Artificial Sequence: Synthetic polypeptide"

SEQ ID NO: 21133 - protein, 120 aa, Artificial Sequence; identical to SEQ ID NO: 4807
  source: /note="Description of Artificial Sequence: Synthetic polypeptide"

SEQ ID NO: 21134 - protein, 120 aa, Artificial Sequence; identical to SEQ ID NO: 4808
  source: /note="Description of Artificial Sequence: Synthetic polypeptide"

SEQ ID NO: 21135 - protein, 120 aa, Artificial Sequence; identical to SEQ ID NO: 4809
  source: /note="Description of Artificial Sequence: Synthetic polypeptide"

SEQ ID NO: 21136 - protein, 114 aa, Artificial Sequence; identical to SEQ ID NO: 4810
  source: /note="Description of Artificial Sequence: Synthetic polypeptide"

SEQ ID NO: 21137 - protein, 120 aa, Artificial Sequence; identical to SEQ ID NO: 4811
  source: /note="Description of Artificial Sequence: Synthetic polypeptide"

SEQ ID NO: 21138 - protein, 125 aa, Artificial Sequence; identical to SEQ ID NO: 4812
  source: /note="Description of Artificial Sequence: Synthetic polypeptide"

SEQ ID NO: 21139 - protein, 125 aa, Artificial Sequence; identical to SEQ ID NO: 4813
  source: /note="Description of Artificial Sequence: Synthetic polypeptide"

SEQ ID NO: 21140 - protein, 121 aa, Artificial Sequence; identical to SEQ ID NO: 4814
  source: /note="Description of Artificial Sequence: Synthetic polypeptide"

SEQ ID NO: 21141 - protein, 124 aa, Artificial Sequence; identical to SEQ ID NO: 4815
  source: /note="Description of Artificial Sequence: Synthetic polypeptide"

SEQ ID NO: 21142 - protein, 114 aa, Artificial Sequence; identical to SEQ ID NO: 4816
  source: /note="Description of Artificial Sequence: Synthetic polypeptide"

SEQ ID NO: 21143 - protein, 118 aa, Artificial Sequence; identical to SEQ ID NO: 4817
  source: /note="Description of Artificial Sequence: Synthetic polypeptide"

SEQ ID NO: 21144 - protein, 122 aa, Artificial Sequence; identical to SEQ ID NO: 4818
  source: /note="Description of Artificial Sequence: Synthetic polypeptide"

SEQ ID NO: 21145 - protein, 126 aa, Artificial Sequence; identical to SEQ ID NO: 4819
  source: /note="Description of Artificial Sequence: Synthetic polypeptide"

SEQ ID NO: 21146 - protein, 118 aa, Artificial Sequence; identical to SEQ ID NO: 4820
  source: /note="Description of Artificial Sequence: Synthetic polypeptide"

SEQ ID NO: 21147 - protein, 120 aa, Artificial Sequence; identical to SEQ ID NO: 4821
  source: /note="Description of Artificial Sequence: Synthetic polypeptide"

SEQ ID NO: 21148 - protein, 115 aa, Artificial Sequence; identical to SEQ ID NO: 4822
  source: /note="Description of Artificial Sequence: Synthetic polypeptide"

SEQ ID NO: 21149 - protein, 121 aa, Artificial Sequence; identical to SEQ ID NO: 4823
  source: /note="Description of Artificial Sequence: Synthetic polypeptide"

SEQ ID NO: 21150 - protein, 114 aa, Artificial Sequence; identical to SEQ ID NO: 4824
  source: /note="Description of Artificial Sequence: Synthetic polypeptide"

SEQ ID NO: 21151 - protein, 124 aa, Artificial Sequence; identical to SEQ ID NO: 4825
  source: /note="Description of Artificial Sequence: Synthetic polypeptide"

SEQ ID NO: 21152 - protein, 117 aa, Artificial Sequence; identical to SEQ ID NO: 4826
  source: /note="Description of Artificial Sequence: Synthetic polypeptide"

SEQ ID NO: 21153 - protein, 117 aa, Artificial Sequence; identical to SEQ ID NO: 4827
  source: /note="Description of Artificial Sequence: Synthetic polypeptide"

SEQ ID NO: 21154 - protein, 115 aa, Artificial Sequence; identical to SEQ ID NO: 4834
  source: /note="Description of Artificial Sequence: Synthetic polypeptide"

SEQ ID NO: 21155 - protein, 115 aa, Artificial Sequence; identical to SEQ ID NO: 4835
  source: /note="Description of Artificial Sequence: Synthetic polypeptide"

SEQ ID NO: 21156 - protein, 115 aa, Artificial Sequence; identical to SEQ ID NO: 4836
  source: /note="Description of Artificial Sequence: Synthetic polypeptide"

SEQ ID NO: 21157 - protein, 120 aa, Artificial Sequence; identical to SEQ ID NO: 4837
  source: /note="Description of Artificial Sequence: Synthetic polypeptide"

SEQ ID NO: 21158 - protein, 119 aa, Artificial Sequence; identical to SEQ ID NO: 4838
  source: /note="Description of Artificial Sequence: Synthetic polypeptide"

SEQ ID NO: 21159 - protein, 117 aa, Artificial Sequence; identical to SEQ ID NO: 4839
  source: /note="Description of Artificial Sequence: Synthetic polypeptide"

SEQ ID NO: 21160 - protein, 119 aa, Artificial Sequence; identical to SEQ ID NO: 4840
  source: /note="Description of Artificial Sequence: Synthetic polypeptide"

SEQ ID NO: 21161 - protein, 115 aa, Artificial Sequence; identical to SEQ ID NO: 4841
  source: /note="Description of Artificial Sequence: Synthetic polypeptide"

SEQ ID NO: 21162 - protein, 115 aa, Artificial Sequence; identical to SEQ ID NO: 4842
  source: /note="Description of Artificial Sequence: Synthetic polypeptide"

SEQ ID NO: 21163 - protein, 115 aa, Artificial Sequence; identical to SEQ ID NO: 4843
  source: /note="Description of Artificial Sequence: Synthetic polypeptide"

SEQ ID NO: 21164 - protein, 115 aa, Artificial Sequence; identical to SEQ ID NO: 4844
  source: /note="Description of Artificial Sequence: Synthetic polypeptide"

SEQ ID NO: 21165 - protein, 115 aa, Artificial Sequence; identical to SEQ ID NO: 4845
  source: /note="Description of Artificial Sequence: Synthetic polypeptide"

SEQ ID NO: 21166 - protein, 115 aa, Artificial Sequence; identical to SEQ ID NO: 4845
  source: /note="Description of Artificial Sequence: Synthetic polypeptide"

SEQ ID NO: 21167 - protein, 138 aa, Artificial Sequence; identical to SEQ ID NO: 4847
  source: /note="Description of Artificial Sequence: Synthetic polypeptide"

SEQ ID NO: 21168 - protein, 132 aa, Artificial Sequence; identical to SEQ ID NO: 4848
  source: /note="Description of Artificial Sequence: Synthetic polypeptide"

SEQ ID NO: 21169 - protein, 182 aa, Artificial Sequence; identical to SEQ ID NO: 4849
  source: /note="Description of Artificial Sequence: Synthetic polypeptide"

SEQ ID NO: 21170 - protein, 117 aa, Artificial Sequence; identical to SEQ ID NO: 4828
  source: /note="Description of Artificial Sequence: Synthetic polypeptide"

SEQ ID NO: 21171 - protein, 117 aa, Artificial Sequence; identical to SEQ ID NO: 4829
  source: /note="Description of Artificial Sequence: Synthetic polypeptide"

SEQ ID NO: 21172 - protein, 117 aa, Artificial Sequence; identical to SEQ ID NO: 4830
  source: /note="Description of Artificial Sequence: Synthetic polypeptide"

SEQ ID NO: 21173 - protein, 117 aa, Artificial Sequence; identical to SEQ ID NO: 4831
  source: /note="Description of Artificial Sequence: Synthetic polypeptide"

SEQ ID NO: 21174 - protein, 119 aa, Artificial Sequence; identical to SEQ ID NO: 4832
  source: /note="Description of Artificial Sequence: Synthetic polypeptide"

SEQ ID NO: 21175 - protein, 118 aa, Artificial Sequence; identical to SEQ ID NO: 4833
  source: /note="Description of Artificial Sequence: Synthetic polypeptide"

SEQ ID NO: 21176 - protein, 119 aa, Artificial Sequence; identical to SEQ ID NO: 4850
  source: /note="Description of Artificial Sequence: Synthetic polypeptide"

SEQ ID NO: 21177 - protein, 121 aa, Artificial Sequence; identical to SEQ ID NO: 4851
  source: /note="Description of Artificial Sequence: Synthetic polypeptide"

SEQ ID NO: 21178 - protein, 108 aa, Artificial Sequence; identical to SEQ ID NO: 4852
  source: /note="Description of Artificial Sequence: Synthetic polypeptide"

SEQ ID NO: 21179 - protein, 114 aa, Artificial Sequence; identical to SEQ ID NO: 4853
  source: /note="Description of Artificial Sequence: Synthetic polypeptide"

SEQ ID NO: 21180 - protein, 109 aa, Artificial Sequence; identical to SEQ ID NO: 4854
  source: /note="Description of Artificial Sequence: Synthetic polypeptide"

SEQ ID NO: 21181 - protein, 108 aa, Artificial Sequence; identical to SEQ ID NO: 4855
  source: /note="Description of Artificial Sequence: Synthetic polypeptide"

SEQ ID NO: 21182 - protein, 108 aa, Artificial Sequence; identical to SEQ ID NO: 4856
  source: /note="Description of Artificial Sequence: Synthetic polypeptide"

SEQ ID NO: 21183 - protein, 109 aa, Artificial Sequence; identical to SEQ ID NO: 4857
  source: /note="Description of Artificial Sequence: Synthetic polypeptide"

SEQ ID NO: 21184 - DNA, 714 bp, Artificial Sequence
  source: /note="Description of Artificial Sequence: Synthetic polynucleotide"
atgaagttgcctgttaggctgttggtgctgatgttctggattcctgcttccagcagtgatgttgtgatgacccaaactccactctccctgcctgtcagtcttggagatcaagcctccatctcttgcagatctagtcagagccttgtacacagtaatggaaacacctatttacattggtacctgcagaagccaggccagtctccaaagctcctgatctacaaagtttccaaccgattttctggggtcccagacaggttcagtggcagtggatcagggacagatttcacactcaagatcagcagagtggaggctgaggatctgggagtttatttctgctctcaaagtacacatgttccgctcacgttcggtgctgggaccaagctggagctgaaacgggctgatgctgcaccaactgtatccatcttcccaccatccagtgagcagttaacatctggaggtgcctcagtcgtgtgcttcttgaacaacttctaccccaaagacatcaatgtcaagtggaagattgatggcagtgaacgacaaaatggcgtcctgaacagttggactgatcaggacagcaaagacagcacctacagcatgagcagcaccctcacgttgaccaaggacgagtatgaacgacataacagctatacctgtgaggccactcacaagacatcaacttcacccattgtcaagagcttcaacaggaatgagtgt

SEQ ID NO: 21185 - DNA, 714 bp, Artificial Sequence
  source: /note="Description of Artificial Sequence: Synthetic polynucleotide"
atgagtcctgcccagttcctgtttctgttagtgctctggattcgggaaaccaacggtgatgttgtgatgacccagactccactcactttgtcggttaccattggacaaccagcctccatctcttgcaagtcaagtcagagcctcttagatagtgatggaaagacatatttgaattggttgttacagaggccaggccagtctccaaagcgcctaatctatctggtgtctaaactggactctggagtccctgacagattcactggcagtggatcagggacagatttcacactgaaaattagcagagtggaggctgaggatttgggagtttattattgctggcaaggtacacattttcctcggacgttcggtggaggcaccaagctggaaatcaaacgggctgatgctgcaccaactgtatccatcttcccaccatccagtgagcagttaacatctggaggtgcctcagtcgtgtgcttcttgaacaacttctaccccaaagacatcaatgtcaagtggaagattgatggcagtgaacgacaaaatggcgtcctgaacagttggactgatcaggacagcaaagacagcacctacagcatgagcagcaccctcacgttgaccaaggacgagtatgaacgacataacagctatacctgtgaggccactcacaagacatcaacttcacccattgtcaagagcttcaacaggaatgagtgt

SEQ ID NO: 21186 - DNA, 714 bp, Artificial Sequence
  source: /note="Description of Artificial Sequence: Synthetic polynucleotide"
atgaagttgcctgttaggctgttggtgctgatgttctggattcctgcttccagcagtgatgttttgatgacccaaactccactctccctgcctgtcagtcttggagatcaagcctccatctcttgcaaatctagtcagagcattgtacatagtaatggaaacacctatttagaatggtacctgcagaaaccaggccagtctccaaagctcctggtctacaaagtttccaatcgattttctggggtcccagacaggttcagtggcagtggatcagggacagatttcacactcaagatcagcagagtggaggctgaggatctgggaacttattactgctttcaaggttcacttgttccttgggcgttcggtggaggcaccaagctggaaatcaaacgggctgatgctgcaccaactgtatccatcttcccaccatccagtgagcagttaacatctggaggtgcctcagtcgtgtgcttcttgaacaacttctaccccaaagacatcaatgtcaagtggaagattgatggcagtgaacgacaaaatggcgtcctgaacagttggactgatcaggacagcaaagacagcacctacagcatgagcagcaccctcacgttgaccaaggacgagtatgaacgacataacagctatacctgtgaggccactcacaagacatcaacttcacccattgtcaagagcttcaacaggaatgagtgt

SEQ ID NO: 21187 - protein, 226 aa, Artificial Sequence; identical to SEQ ID NO: 3857
  source: /note="Description of Artificial Sequence: Synthetic polypeptide"

SEQ ID NO: 21188 - protein, 251 aa, Artificial Sequence; identical to SEQ ID NO: 3858
  source: /note="Description of Artificial Sequence: Synthetic polypeptide"

SEQ ID NO: 21189 - protein, 220 aa, Artificial Sequence; identical to SEQ ID NO: 4082
  source: /note="Description of Artificial Sequence: Synthetic polypeptide"

SEQ ID NO: 21190 - protein, 217 aa, Artificial Sequence; identical to SEQ ID NO: 4084
  source: /note="Description of Artificial Sequence: Synthetic polypeptide"

SEQ ID NO: 21191 - protein, 218 aa, Artificial Sequence; identical to SEQ ID NO: 3859
  source: /note="Description of Artificial Sequence: Synthetic polypeptide"

SEQ ID NO: 21192 - protein, 238 aa, Artificial Sequence; identical to SEQ ID NO: 4096
  source: /note="Description of Artificial Sequence: Synthetic polypeptide"

SEQ ID NO: 21193 - protein, 238 aa, Artificial Sequence; identical to SEQ ID NO: 4097
  source: /note="Description of Artificial Sequence: Synthetic polypeptide"

SEQ ID NO: 21194 - protein, 238 aa, Artificial Sequence; identical to SEQ ID NO: 4098
  source: /note="Description of Artificial Sequence: Synthetic polypeptide"

SEQ ID NO: 21195 - protein, 144 aa, Artificial Sequence; identical to SEQ ID NO: 4099
  source: /note="Description of Artificial Sequence: Synthetic polypeptide"

SEQ ID NO: 21196 - protein, 116 aa, Artificial Sequence; identical to SEQ ID NO: 4100
  source: /note="Description of Artificial Sequence: Synthetic polypeptide"

SEQ ID NO: 21197 - protein, 238 aa, Artificial Sequence
  source: /note="Description of Artificial Sequence: Synthetic polypeptide"
MDTRAPTQLLGLLLLLPGATFAQVLTQTPSPVSAAVGGTVTINCQSSQSLYNKNWLSWYQKKPGQPPKLLIYKASTLESGVSSRFKGSGSGTQFTLTISGVQCDDAATYYCQGEFSCSSADCTAFGGGTEVVVKGDPVAPTVLIFPPAADQVATGTVTIVCVANKYFPDVTVTWEVDGTTQTTGIENSKTPQNSADCTYNLSSTLTLTSTQYNSHKEYTCKVTQGTTSVVQSFNRGDC

SEQ ID NO: 21198 - protein, 239 aa, Artificial Sequence; identical to SEQ ID NO: 4940
  source: /note="Description of Artificial Sequence: Synthetic polypeptide"

SEQ ID NO: 21199 - protein, 123 aa, Artificial Sequence; identical to SEQ ID NO: 4941
  source: /note="Description of Artificial Sequence: Synthetic polypeptide"

SEQ ID NO: 21200 - protein, 218 aa, Artificial Sequence; identical to SEQ ID NO: 4942
  source: /note="Description of Artificial Sequence: Synthetic polypeptide"

SEQ ID NO: 21201 - protein, 218 aa, Artificial Sequence; identical to SEQ ID NO: 4943
  source: /note="Description of Artificial Sequence: Synthetic polypeptide"

SEQ ID NO: 21202 - protein, 112 aa, Artificial Sequence; identical to SEQ ID NO: 4944
  source: /note="Description of Artificial Sequence: Synthetic polypeptide"

SEQ ID NO: 21203 - protein, 112 aa, Artificial Sequence; identical to SEQ ID NO: 4349
  source: /note="Description of Artificial Sequence: Synthetic polypeptide"

SEQ ID NO: 21204 - protein, 107 aa, Artificial Sequence [sequence omitted]

SEQ ID NO: 21205 - protein, 219 aa, Artificial Sequence; identical to SEQ ID NO: 4947
  source: /note="Description of Artificial Sequence: Synthetic polypeptide"

SEQ ID NO: 21206 - protein, 219 aa, Artificial Sequence; identical to SEQ ID NO: 4948
  source: /note="Description of Artificial Sequence: Synthetic polypeptide"

SEQ ID NO: 21207 - protein, 441 aa, Artificial Sequence; identical to SEQ ID NO: 4340
  source: /note="Description of Artificial Sequence: Synthetic polypeptide"

SEQ ID NO: 21208 - protein, 112 aa, Artificial Sequence; identical to SEQ ID NO: 4101
  source: /note="Description of Artificial Sequence: Synthetic polypeptide"

SEQ ID NO: 21209 - protein, 109 aa, Artificial Sequence; identical to SEQ ID NO: 4102
  source: /note="Description of Artificial Sequence: Synthetic polypeptide"

SEQ ID NO: 21210 - protein, 114 aa, Artificial Sequence; identical to SEQ ID NO: 4103
  source: /note="Description of Artificial Sequence: Synthetic polypeptide"

SEQ ID NO: 21211 - protein, 110 aa, Artificial Sequence; identical to SEQ ID NO: 4104
  source: /note="Description of Artificial Sequence: Synthetic polypeptide"

SEQ ID NO: 21212 - protein, 116 aa, Artificial Sequence; identical to SEQ ID NO: 4105
  source: /note="Description of Artificial Sequence: Synthetic polypeptide"

SEQ ID NO: 21213 - protein, 112 aa, Artificial Sequence; identical to SEQ ID NO: 4106
  source: /note="Description of Artificial Sequence: Synthetic polypeptide"

SEQ ID NO: 21214 - protein, 112 aa, Artificial Sequence; identical to SEQ ID NO: 4107
  source: /note="Description of Artificial Sequence: Synthetic polypeptide"

SEQ ID NO: 21215 - protein, 234 aa, Artificial Sequence; identical to SEQ ID NO: 4114
  source: /note="Description of Artificial Sequence: Synthetic polypeptide"

SEQ ID NO: 21216 - protein, 234 aa, Artificial Sequence; identical to SEQ ID NO: 4114
  source: /note="Description of Artificial Sequence: Synthetic polypeptide"

SEQ ID NO: 21217 - protein, 238 aa, Artificial Sequence; identical to SEQ ID NO: 4116
  source: /note="Description of Artificial Sequence: Synthetic polypeptide"

SEQ ID NO: 21218 - protein, 237 aa, Artificial Sequence; identical to SEQ ID NO: 4117
  source: /note="Description of Artificial Sequence: Synthetic polypeptide"

SEQ ID NO: 21219 - protein, 238 aa, Artificial Sequence; identical to SEQ ID NO: 4118
  source: /note="Description of Artificial Sequence: Synthetic polypeptide"

SEQ ID NO: 21220 - protein, 237 aa, Artificial Sequence; identical to SEQ ID NO: 4119
  source: /note="Description of Artificial Sequence: Synthetic polypeptide"

SEQ ID NO: 21221 - protein, 237 aa, Artificial Sequence; identical to SEQ ID NO: 4120
  source: /note="Description of Artificial Sequence: Synthetic polypeptide"

SEQ ID NO: 21222 - protein, 237 aa, Artificial Sequence; identical to SEQ ID NO: 4121
  source: /note="Description of Artificial Sequence: Synthetic polypeptide"

SEQ ID NO: 21223 - protein, 238 aa, Artificial Sequence; identical to SEQ ID NO: 4098
  source: /note="Description of Artificial Sequence: Synthetic polypeptide"

SEQ ID NO: 21224 - protein, 238 aa, Artificial Sequence; identical to SEQ ID NO: 4123
  source: /note="Description of Artificial Sequence: Synthetic polypeptide"

SEQ ID NO: 21225 - protein, 214 aa, Artificial Sequence; identical to SEQ ID NO: 4124
  source: /note="Description of Artificial Sequence: Synthetic polypeptide"

SEQ ID NO: 21226 - protein, 213 aa, Artificial Sequence; identical to SEQ ID NO: 4984
  source: /note="Description of Artificial Sequence: Synthetic polypeptide"

SEQ ID NO: 21227 - protein, 112 aa, Artificial Sequence; identical to SEQ ID NO: 4184
  source: /note="Description of Artificial Sequence: Synthetic polypeptide"

SEQ ID NO: 21228 - protein, 112 aa, Artificial Sequence; identical to SEQ ID NO: 4178
  source: /note="Description of Artificial Sequence: Synthetic polypeptide"

SEQ ID NO: 21229 - protein, 112 aa, Artificial Sequence; identical to SEQ ID NO: 4179
  source: /note="Description of Artificial Sequence: Synthetic polypeptide"

SEQ ID NO: 21230 - protein, 112 aa, Artificial Sequence; identical to SEQ ID NO: 4180
  source: /note="Description of Artificial Sequence: Synthetic polypeptide"

SEQ ID NO: 21231 - protein, 112 aa, Artificial Sequence [sequence omitted]

SEQ ID NO: 21232 - protein, 112 aa, Artificial Sequence; identical to SEQ ID NO: 4182
  source: /note="Description of Artificial Sequence: Synthetic polypeptide"

SEQ ID NO: 21233 - protein, 112 aa, Artificial Sequence; identical to SEQ ID NO: 4183
  source: /note="Description of Artificial Sequence: Synthetic polypeptide"

SEQ ID NO: 21234 - protein, 112 aa, Artificial Sequence; identical to SEQ ID NO: 4177
  source: /note="Description of Artificial Sequence: Synthetic polypeptide"

SEQ ID NO: 21235 - protein, 111 aa, Artificial Sequence; identical to SEQ ID NO: 4154
  source: /note="Description of Artificial Sequence: Synthetic polypeptide"

SEQ ID NO: 21236 - protein, 116 aa, Artificial Sequence; identical to SEQ ID NO: 4168
  source: /note="Description of Artificial Sequence: Synthetic polypeptide"

SEQ ID NO: 21237 - protein, 111 aa, Artificial Sequence; identical to SEQ ID NO: 4169
  source: /note="Description of Artificial Sequence: Synthetic polypeptide"

SEQ ID NO: 21238 - protein, 115 aa, Artificial Sequence; identical to SEQ ID NO: 4170
  source: /note="Description of Artificial Sequence: Synthetic polypeptide"

SEQ ID NO: 21239 - protein, 115 aa, Artificial Sequence; identical to SEQ ID NO: 4171
  source: /note="Description of Artificial Sequence: Synthetic polypeptide"

SEQ ID NO: 21240 - protein, 115 aa, Artificial Sequence; identical to SEQ ID NO: 4172
  source: /note="Description of Artificial Sequence: Synthetic polypeptide"

SEQ ID NO: 21241 - protein, 115 aa, Artificial Sequence; identical to SEQ ID NO: 4173
  source: /note="Description of Artificial Sequence: Synthetic polypeptide"

SEQ ID NO: 21242 - protein, 105 aa, Artificial Sequence; identical to SEQ ID NO: 4174
  source: /note="Description of Artificial Sequence: Synthetic polypeptide"

SEQ ID NO: 21243 - protein, 105 aa, Artificial Sequence; identical to SEQ ID NO: 4175
  source: /note="Description of Artificial Sequence: Synthetic polypeptide"

SEQ ID NO: 21244 - protein, 110 aa, Artificial Sequence
  source: /note="Description of Artificial Sequence: Synthetic polypeptide"
TQTPLSLPVSLGDQASISCRSSQSLVHSNGNTYLHWYLQKPGQSPKLLIYRVSNRFSGVPDASGFSGSRSGTDFTLKISRVGAGDLGVYFCSQSTHVPFTFGSGTKLEIK

SEQ ID NO: 21245 - protein, 112 aa, Artificial Sequence; identical to SEQ ID NO: 4177
  source: /note="Description of Artificial Sequence: Synthetic polypeptide"

SEQ ID NO: 21246 - protein, 112 aa, Artificial Sequence; identical to SEQ ID NO: 4178
  source: /note="Description of Artificial Sequence: Synthetic polypeptide"

SEQ ID NO: 21247 - protein, 112 aa, Artificial Sequence; identical to SEQ ID NO: 4179
  source: /note="Description of Artificial Sequence: Synthetic polypeptide"

SEQ ID NO: 21248 - protein, 112 aa, Artificial Sequence; identical to SEQ ID NO: 4180
  source: /note="Description of Artificial Sequence: Synthetic polypeptide"

SEQ ID NO: 21249 - protein, 112 aa, Artificial Sequence [sequence omitted]

SEQ ID NO: 21250 - protein, 112 aa, Artificial Sequence; identical to SEQ ID NO: 4182
  source: /note="Description of Artificial Sequence: Synthetic polypeptide"

SEQ ID NO: 21251 - protein, 112 aa, Artificial Sequence; identical to SEQ ID NO: 4183
  source: /note="Description of Artificial Sequence: Synthetic polypeptide"

SEQ ID NO: 21252 - protein, 112 aa, Artificial Sequence; identical to SEQ ID NO: 4184
  source: /note="Description of Artificial Sequence: Synthetic polypeptide"

SEQ ID NO: 21253 - protein, 112 aa, Artificial Sequence
  source: /note="Description of Artificial Sequence: Synthetic polypeptide"
DIVITQDELSNPVTSGESVSISCRSSKSLLYKDGKTYLNWFLQRPGQSPQLLIYLMSTRASGVSDRFSGSGSGTDFTLEISRVKAEDVGVYYCQQLVEYPLTFGAGTKLELK

SEQ ID NO: 21254 - protein, 112 aa, Artificial Sequence; identical to SEQ ID NO: 5073
  source: /note="Description of Artificial Sequence: Synthetic polypeptide"

SEQ ID NO: 21255 - protein, 114 aa, Artificial Sequence; identical to SEQ ID NO: 4185
  source: /note="Description of Artificial Sequence: Synthetic polypeptide"

SEQ ID NO: 21256 - protein, 113 aa, Artificial Sequence; identical to SEQ ID NO: 4186
  source: /note="Description of Artificial Sequence: Synthetic polypeptide"

SEQ ID NO: 21257 - protein, 234 aa, Artificial Sequence; identical to SEQ ID NO: 4187
  source: /note="Description of Artificial Sequence: Synthetic polypeptide"

SEQ ID NO: 21258 - protein, 246 aa, Artificial Sequence; identical to SEQ ID NO: 4188
  source: /note="Description of Artificial Sequence: Synthetic polypeptide"

SEQ ID NO: 21259 - protein, 132 aa, Artificial Sequence
  source: /note="Description of Artificial Sequence: Synthetic polypeptide"
MDTRAPTQLLGLLLLLPGATFAQVLTQTPSPVSAAVGGTVTINCQSSQSLYNKNWLSYQKKPGQPPKLLIYKASTLESGVSSRFKGSGSGTQFTLTISGVQCDDAATYYCQGEFSCSSADCTAFGGGTEVVV

SEQ ID NO: 21260 - protein, 134 aa, Artificial Sequence; identical to SEQ ID NO: 5280
  source: /note="Description of Artificial Sequence: Synthetic polypeptide"

SEQ ID NO: 21261 - protein, 113 aa, Artificial Sequence; identical to SEQ ID NO: 4189
  source: /note="Description of Artificial Sequence: Synthetic polypeptide"

SEQ ID NO: 21262 - protein, 113 aa, Artificial Sequence; identical to SEQ ID NO: 4190
  source: /note="Description of Artificial Sequence: Synthetic polypeptide"

SEQ ID NO: 21263 - protein, 113 aa, Artificial Sequence; identical to SEQ ID NO: 4191
  source: /note="Description of Artificial Sequence: Synthetic polypeptide"

SEQ ID NO: 21264 - protein, 115 aa, Artificial Sequence; identical to SEQ ID NO: 4192
  source: /note="Description of Artificial Sequence: Synthetic polypeptide"

SEQ ID NO: 21265 - protein, 115 aa, Artificial Sequence; identical to SEQ ID NO: 4193
  source: /note="Description of Artificial Sequence: Synthetic polypeptide"

SEQ ID NO: 21266 - protein, 115 aa, Artificial Sequence; identical to SEQ ID NO: 4194
  source: /note="Description of Artificial Sequence: Synthetic polypeptide"

SEQ ID NO: 21267 - protein, 113 aa, Artificial Sequence; identical to SEQ ID NO: 4195
  source: /note="Description of Artificial Sequence: Synthetic polypeptide"

SEQ ID NO: 21268 - protein, 113 aa, Artificial Sequence; identical to SEQ ID NO: 4196
  source: /note="Description of Artificial Sequence: Synthetic polypeptide"

SEQ ID NO: 21269 - protein, 109 aa, Artificial Sequence; identical to SEQ ID NO: 4197
  source: /note="Description of Artificial Sequence: Synthetic polypeptide"

SEQ ID NO: 21270 - protein, 108 aa, Artificial Sequence; identical to SEQ ID NO: 4198
  source: /note="Description of Artificial Sequence: Synthetic polypeptide"

SEQ ID NO: 21271 - protein, 108 aa, Artificial Sequence; identical to SEQ ID NO: 4199
  source: /note="Description of Artificial Sequence: Synthetic polypeptide"

SEQ ID NO: 21272 - protein, 108 aa, Artificial Sequence; identical to SEQ ID NO: 4200
  source: /note="Description of Artificial Sequence: Synthetic polypeptide"

SEQ ID NO: 21273 - protein, 106 aa, Artificial Sequence; identical to SEQ ID NO: 4201
  source: /note="Description of Artificial Sequence: Synthetic polypeptide"

SEQ ID NO: 21274 - protein, 108 aa, Artificial Sequence; identical to SEQ ID NO: 4202
  source: /note="Description of Artificial Sequence: Synthetic polypeptide"

SEQ ID NO: 21275 - protein, 111 aa, Artificial Sequence; identical to SEQ ID NO: 4203
  source: /note="Description of Artificial Sequence: Synthetic polypeptide"

SEQ ID NO: 21276 - protein, 111 aa, Artificial Sequence; identical to SEQ ID NO: 4204
  source: /note="Description of Artificial Sequence: Synthetic polypeptide"

SEQ ID NO: 21277 - protein, 107 aa, Artificial Sequence; identical to SEQ ID NO: 4205
  source: /note="Description of Artificial Sequence: Synthetic polypeptide"

SEQ ID NO: 21278 - protein, 108 aa, Artificial Sequence; identical to SEQ ID NO: 4206
  source: /note="Description of Artificial Sequence: Synthetic polypeptide"

SEQ ID NO: 21279 - protein, 109 aa, Artificial Sequence; identical to SEQ ID NO: 4207
  source: /note="Description of Artificial Sequence: Synthetic polypeptide"

SEQ ID NO: 21280 - protein, 110 aa, Artificial Sequence; identical to SEQ ID NO: 4208
  source: /note="Description of Artificial Sequence: Synthetic polypeptide"

SEQ ID NO: 21281 - protein, 108 aa, Artificial Sequence; identical to SEQ ID NO: 4209
  source: /note="Description of Artificial Sequence: Synthetic polypeptide"

SEQ ID NO: 21282 - protein, 108 aa, Artificial Sequence; identical to SEQ ID NO: 4210
  source: /note="Description of Artificial Sequence: Synthetic polypeptide"

SEQ ID NO: 21283 - protein, 107 aa, Artificial Sequence; identical to SEQ ID NO: 5307
  source: /note="Description of Artificial Sequence: Synthetic polypeptide"

SEQ ID NO: 21284 - protein, 108 aa, Artificial Sequence; identical to SEQ ID NO: 5308
  source: /note="Description of Artificial Sequence: Synthetic polypeptide"

SEQ ID NO: 21285 - protein, 108 aa, Artificial Sequence; identical to SEQ ID NO: 5309
  source: /note="Description of Artificial Sequence: Synthetic polypeptide"

SEQ ID NO: 21286 - protein, 112 aa, Artificial Sequence; identical to SEQ ID NO: 5310
  source: /note="Description of Artificial Sequence: Synthetic polypeptide"

SEQ ID NO: 21287 - protein, 112 aa, Artificial Sequence; identical to SEQ ID NO: 5311
  source: /note="Description of Artificial Sequence: Synthetic polypeptide"

SEQ ID NO: 21288 - protein, 112 aa, Artificial Sequence; identical to SEQ ID NO: 5312
  source: /note="Description of Artificial Sequence: Synthetic polypeptide"

SEQ ID NO: 21289 - protein, 112 aa, Artificial Sequence; identical to SEQ ID NO: 5313
  source: /note="Description of Artificial Sequence: Synthetic polypeptide"

SEQ ID NO: 21290 - protein, 112 aa, Artificial Sequence; identical to SEQ ID NO: 5314
  source: /note="Description of Artificial Sequence: Synthetic polypeptide"

SEQ ID NO: 21291 - protein, 112 aa, Artificial Sequence; identical to SEQ ID NO: 5315
  source: /note="Description of Artificial Sequence: Synthetic polypeptide"

SEQ ID NO: 21292 - protein, 111 aa, Artificial Sequence; identical to SEQ ID NO: 5316
  source: /note="Description of Artificial Sequence: Synthetic polypeptide"

SEQ ID NO: 21293 - protein, 111 aa, Artificial Sequence; identical to SEQ ID NO: 5317
  source: /note="Description of Artificial Sequence: Synthetic polypeptide"

SEQ ID NO: 21294 - protein, 111 aa, Artificial Sequence; identical to SEQ ID NO: 5318
  source: /note="Description of Artificial Sequence: Synthetic polypeptide"

SEQ ID NO: 21295 - protein, 108 aa, Artificial Sequence; identical to SEQ ID NO: 5319
  source: /note="Description of Artificial Sequence: Synthetic polypeptide"

SEQ ID NO: 21296 - protein, 113 aa, Artificial Sequence; identical to SEQ ID NO: 5320
  source: /note="Description of Artificial Sequence: Synthetic polypeptide"

SEQ ID NO: 21297 - protein, 108 aa, Artificial Sequence; identical to SEQ ID NO: 5321
  source: /note="Description of Artificial Sequence: Synthetic polypeptide"

SEQ ID NO: 21298 - protein, 110 aa, Artificial Sequence; identical to SEQ ID NO: 5322
  source: /note="Description of Artificial Sequence: Synthetic polypeptide"

SEQ ID NO: 21299 - protein, 113 aa, Artificial Sequence; identical to SEQ ID NO: 5323
  source: /note="Description of Artificial Sequence: Synthetic polypeptide"

SEQ ID NO: 21300 - protein, 107 aa, Artificial Sequence; identical to SEQ ID NO: 5324
  source: /note="Description of Artificial Sequence: Synthetic polypeptide"

SEQ ID NO: 21301 - protein, 113 aa, Artificial Sequence; identical to SEQ ID NO: 5325
  source: /note="Description of Artificial Sequence: Synthetic polypeptide"

SEQ ID NO: 21302 - protein, 113 aa, Artificial Sequence; identical to SEQ ID NO: 5326
  source: /note="Description of Artificial Sequence: Synthetic polypeptide"

SEQ ID NO: 21303 - protein, 113 aa, Artificial Sequence; identical to SEQ ID NO: 5327
  source: /note="Description of Artificial Sequence: Synthetic polypeptide"

SEQ ID NO: 21304 - protein, 113 aa, Artificial Sequence; identical to SEQ ID NO: 5328
  source: /note="Description of Artificial Sequence: Synthetic polypeptide"

SEQ ID NO: 21305 - protein, 113 aa, Artificial Sequence; identical to SEQ ID NO: 5329
  source: /note="Description of Artificial Sequence: Synthetic polypeptide"

SEQ ID NO: 21306 - protein, 113 aa, Artificial Sequence; identical to SEQ ID NO: 5330
  source: /note="Description of Artificial Sequence: Synthetic polypeptide"

SEQ ID NO: 21307 - protein, 110 aa, Artificial Sequence; identical to SEQ ID NO: 5331
  source: /note="Description of Artificial Sequence: Synthetic polypeptide"

SEQ ID NO: 21308 - protein, 113 aa, Artificial Sequence; identical to SEQ ID NO: 5332
  source: /note="Description of Artificial Sequence: Synthetic polypeptide"

SEQ ID NO: 21309 - protein, 108 aa, Artificial Sequence; identical to SEQ ID NO: 5333
  source: /note="Description of Artificial Sequence: Synthetic polypeptide"

SEQ ID NO: 21310 - protein, 108 aa, Artificial Sequence; identical to SEQ ID NO: 5334
  source: /note="Description of Artificial Sequence: Synthetic polypeptide"

SEQ ID NO: 21311 - protein, 112 aa, Artificial Sequence; identical to SEQ ID NO: 5335
  source: /note="Description of Artificial Sequence: Synthetic polypeptide"

SEQ ID NO: 21312 - protein, 112 aa, Artificial Sequence; identical to SEQ ID NO: 5336
  source: /note="Description of Artificial Sequence: Synthetic polypeptide"

SEQ ID NO: 21313 - protein, 112 aa, Artificial Sequence; identical to SEQ ID NO: 5337
  source: /note="Description of Artificial Sequence: Synthetic polypeptide"

SEQ ID NO: 21314 - protein, 112 aa, Artificial Sequence; identical to SEQ ID NO: 5338
  source: /note="Description of Artificial Sequence: Synthetic polypeptide"

SEQ ID NO: 21315 - protein, 112 aa, Artificial Sequence; identical to SEQ ID NO: 5339
  source: /note="Description of Artificial Sequence: Synthetic polypeptide"

SEQ ID NO: 21316 - protein, 107 aa, Artificial Sequence; identical to SEQ ID NO: 5340
  source: /note="Description of Artificial Sequence: Synthetic polypeptide"

SEQ ID NO: 21317 - protein, 113 aa, Artificial Sequence; identical to SEQ ID NO: 5341
  source: /note="Description of Artificial Sequence: Synthetic polypeptide"

SEQ ID NO: 21318 - protein, 112 aa, Artificial Sequence; identical to SEQ ID NO: 5342
  source: /note="Description of Artificial Sequence: Synthetic polypeptide"

SEQ ID NO: 21319 - protein, 112 aa, Artificial Sequence; identical to SEQ ID NO: 5343
  source: /note="Description of Artificial Sequence: Synthetic polypeptide"

SEQ ID NO: 21320 - protein, 112 aa, Artificial Sequence; identical to SEQ ID NO: 5344
  source: /note="Description of Artificial Sequence: Synthetic polypeptide"

SEQ ID NO: 21321 - protein, 107 aa, Artificial Sequence; identical to SEQ ID NO: 5345
  source: /note="Description of Artificial Sequence: Synthetic polypeptide"

SEQ ID NO: 21322 - protein, 112 aa, Artificial Sequence; identical to SEQ ID NO: 5346
  source: /note="Description of Artificial Sequence: Synthetic polypeptide"

SEQ ID NO: 21323 - protein, 112 aa, Artificial Sequence; identical to SEQ ID NO: 5347
  source: /note="Description of Artificial Sequence: Synthetic polypeptide"

SEQ ID NO: 21324 - protein, 112 aa, Artificial Sequence; identical to SEQ ID NO: 5348
  source: /note="Description of Artificial Sequence: Synthetic polypeptide"

SEQ ID NO: 21325 - protein, 112 aa, Artificial Sequence; identical to SEQ ID NO: 5349
  source: /note="Description of Artificial Sequence: Synthetic polypeptide"
  MOD_RES (3)..(3): Any amino acid

SEQ ID NO: 21326 - protein, 112 aa, Artificial Sequence; identical to SEQ ID NO: 5350
  source: /note="Description of Artificial Sequence: Synthetic polypeptide"

SEQ ID NO: 21327 - protein, 107 aa, Artificial Sequence; identical to SEQ ID NO: 5351
  source: /note="Description of Artificial Sequence: Synthetic polypeptide"

SEQ ID NO: 21328 - protein, 112 aa, Artificial Sequence; identical to SEQ ID NO: 5352
  source: /note="Description of Artificial Sequence: Synthetic polypeptide"

SEQ ID NO: 21329 - protein, 112 aa, Artificial Sequence; identical to SEQ ID NO: 5353
  source: /note="Description of Artificial Sequence: Synthetic polypeptide"

SEQ ID NO: 21330 - protein, 112 aa, Artificial Sequence; identical to SEQ ID NO: 5354
  source: /note="Description of Artificial Sequence: Synthetic polypeptide"

SEQ ID NO: 21331 - protein, 112 aa, Artificial Sequence; identical to SEQ ID NO: 5355
  source: /note="Description of Artificial Sequence: Synthetic polypeptide"

SEQ ID NO: 21332 - protein, 130 aa, Artificial Sequence; identical to SEQ ID NO: 5356
  source: /note="Description of Artificial Sequence: Synthetic polypeptide"

SEQ ID NO: 21333 - protein, 131 aa, Artificial Sequence; identical to SEQ ID NO: 5357
  source: /note="Description of Artificial Sequence: Synthetic polypeptide"

SEQ ID NO: 21334 - protein, 148 aa, Artificial Sequence; identical to SEQ ID NO: 5358
  source: /note="Description of Artificial Sequence: Synthetic polypeptide"

SEQ ID NO: 21335 - protein, 121 aa, Artificial Sequence; identical to SEQ ID NO: 5359
  source: /note="Description of Artificial Sequence: Synthetic polypeptide"

SEQ ID NO: 21336 - protein, 112 aa, Artificial Sequence; identical to SEQ ID NO: 5360
  source: /note="Description of Artificial Sequence: Synthetic polypeptide"

SEQ ID NO: 21337 - protein, 112 aa, Artificial Sequence; identical to SEQ ID NO: 5361
  source: /note="Description of Artificial Sequence: Synthetic polypeptide"

SEQ ID NO: 21338 - protein, 107 aa, Artificial Sequence; identical to SEQ ID NO: 5362
  source: /note="Description of Artificial Sequence: Synthetic polypeptide"

SEQ ID NO: 21339 - protein, 112 aa, Artificial Sequence; identical to SEQ ID NO: 5363
  source: /note="Description of Artificial Sequence: Synthetic polypeptide"

SEQ ID NO: 21340 - protein, 111 aa, Artificial Sequence; identical to SEQ ID NO: 5364
  source: /note="Description of Artificial Sequence: Synthetic polypeptide"

SEQ ID NO: 21341 - protein, 111 aa, Artificial Sequence; identical to SEQ ID NO: 5365
  source: /note="Description of Artificial Sequence: Synthetic polypeptide"

SEQ ID NO: 21342 - protein, 109 aa, Artificial Sequence; identical to SEQ ID NO: 5366
  source: /note="Description of Artificial Sequence: Synthetic polypeptide"

SEQ ID NO: 21343 - protein, 311 aa, Artificial Sequence; identical to SEQ ID NO: 5396
  source: /note="Description of Artificial Sequence: Synthetic polypeptide"

SEQ ID NO: 21344 - protein, 424 aa, Artificial Sequence; identical to SEQ ID NO: 3790
  source: /note="Description of Artificial Sequence: Synthetic polypeptide"

SEQ ID NO: 21345 - protein, 506 aa, Artificial Sequence; identical to SEQ ID NO: 3791
  source: /note="Description of Artificial Sequence: Synthetic polypeptide"

SEQ ID NO: 21346 - protein, 509 aa, Artificial Sequence; identical to SEQ ID NO: 3792
  source: /note="Description of Artificial Sequence: Synthetic polypeptide"

SEQ ID NO: 21347 - protein, 131 aa, Artificial Sequence; identical to SEQ ID NO: 3793
  source: /note="Description of Artificial Sequence: Synthetic polypeptide"

SEQ ID NO: 21348 - protein, 131 aa, Artificial Sequence; identical to SEQ ID NO: 3793
  source: /note="Description of Artificial Sequence: Synthetic polypeptide"

SEQ ID NO: 21349 - protein, 131 aa, Artificial Sequence; identical to SEQ ID NO: 3793
  source: /note="Description of Artificial Sequence: Synthetic polypeptide"

SEQ ID NO: 21350 - protein, 128 aa, Artificial Sequence; identical to SEQ ID NO: 3796
  source: /note="Description of Artificial Sequence: Synthetic polypeptide"

SEQ ID NO: 21351 - protein, 128 aa, Artificial Sequence; identical to SEQ ID NO: 3797
  source: /note="Description of Artificial Sequence: Synthetic polypeptide"

SEQ ID NO: 21352 - protein, 161 aa, Artificial Sequence; identical to SEQ ID NO: 3798
  source: /note="Description of Artificial Sequence: Synthetic polypeptide"

SEQ ID NO: 21353 - protein, 424 aa, Artificial Sequence; identical to SEQ ID NO: 3799
  source: /note="Description of Artificial Sequence: Synthetic polypeptide"

SEQ ID NO: 21354 - protein, 227 aa, Artificial Sequence; identical to SEQ ID NO: 3800
  source: /note="Description of Artificial Sequence: Synthetic polypeptide"

SEQ ID NO: 21355 - protein, 227 aa, Artificial Sequence; identical to SEQ ID NO: 3800
  source: /note="Description of Artificial Sequence: Synthetic polypeptide"

SEQ ID NO: 21356 - protein, 264 aa, Artificial Sequence; identical to SEQ ID NO: 3802
  source: /note="Description of Artificial Sequence: Synthetic polypeptide"

SEQ ID NO: 21357 - protein, 424 aa, Artificial Sequence; identical to SEQ ID NO: 3803
  source: /note="Description of Artificial Sequence: Synthetic polypeptide"

SEQ ID NO: 21358 - protein, 219 aa, Artificial Sequence; identical to SEQ ID NO: 3804
  source: /note="Description of Artificial Sequence: Synthetic polypeptide"

SEQ ID NO: 21359 - protein, 528 aa, Artificial Sequence; identical to SEQ ID NO: 3805
  source: /note="Description of Artificial Sequence: Synthetic polypeptide"

SEQ ID NO: 21360 - protein, 422 aa, Artificial Sequence; identical to SEQ ID NO: 3787
  source: /note="Description of Artificial Sequence: Synthetic polypeptide"

SEQ ID NO: 21361 - protein, 434 aa, Artificial Sequence; identical to SEQ ID NO: 3788
  source: /note="Description of Artificial Sequence: Synthetic polypeptide"

SEQ ID NO: 21362 - protein, 434 aa, Artificial Sequence; identical to SEQ ID NO: 3807
  source: /note="Description of Artificial Sequence: Synthetic polypeptide"

SEQ ID NO: 21363 - protein, 434 aa, Artificial Sequence; identical to SEQ ID NO: 3788
  source: /note="Description of Artificial Sequence: Synthetic polypeptide"

SEQ ID NO: 21364 - protein, 460 aa, Artificial Sequence; identical to SEQ ID NO: 3808
  source: /note="Description of Artificial Sequence: Synthetic polypeptide"

SEQ ID NO: 21365 - protein, 506 aa, Artificial Sequence; identical to SEQ ID NO: 3809
  source: /note="Description of Artificial Sequence: Synthetic polypeptide"

SEQ ID NO: 21366 - protein, 235 aa, Artificial Sequence; identical to SEQ ID NO: 5399
  source: /note="Description of Artificial Sequence: Synthetic polypeptide"

SEQ ID NO: 21367 - protein, 268 aa, Artificial Sequence; identical to SEQ ID NO: 5400
  source: /note="Description of Artificial Sequence: Synthetic polypeptide"

SEQ ID NO: 21368 - protein, 185 aa, Artificial Sequence; identical to SEQ ID NO: 5401
  source: /note="Description of Artificial Sequence: Synthetic polypeptide"

SEQ ID NO: 21369 - protein, 124 aa, Artificial Sequence
  source: /note="Description of Artificial Sequence: Synthetic polypeptide"
QVQLQESGGGLVQPGGSLRLSCAASEFTLDYYSIAWFRQAPGKEREGVSCISSYDGSTSYADSVKGRFTISRDNAKNTVYLQMNSLKPEDTAIYYCAAGIRDWATLREYEYDDWGQGTQVTVSS

SEQ ID NO: 21370 - protein, 124 aa, Artificial Sequence
  source: /note="Description of Artificial Sequence: Synthetic polypeptide"
AVQLQESGGGLVQDGDSLRLSCAASGRTFSSYVMGWFRQAPGKEREFVAAIGWSGGSTAYADSVKGRFTISRDNARNTVYLQMNSLKPEDTAVYYCASAPTRWVPRDSRFYDRWGQGTQVTVSS

SEQ ID NO: 21371 - protein, 120 aa, Artificial Sequence
  source: /note="Description of Artificial Sequence: Synthetic polypeptide"
EVQLQASGGGLVQAGGSLRLSCAASGFKITHYTMGWFRQAPGKEREFVSRITWGGDNTFYSDSVKGRFTISRDNAKNTVYLQMNSLKPEDTADYYCAAGSTSTATPLRVDYWGKGTQVSS

SEQ ID NO: 21372 - protein, 16 aa, Artificial Sequence
  source: /note="Description of Artificial Sequence: Synthetic peptide"
LPTPPTREPKKVAVVR

SEQ ID NO: 21373 - protein, 18 aa, Artificial Sequence
  source: /note="Description of Artificial Sequence: Synthetic peptide"
  MOD_RES (8)..(8): Any amino acid
  MOD_RES (12)..(12): Any amino acid
KKVAVVRXPPKXPSSAKC

SEQ ID NO: 21374 - protein, 18 aa, Artificial Sequence
  source: /note="Description of Artificial Sequence: Synthetic peptide"
  MOD_RES (9)..(9): Any amino acid
  MOD_RES (12)..(12): Any amino acid
RSGYSSPGXPGXPGSRSR

SEQ ID NO: 21375 - protein, 18 aa, Artificial Sequence
  source: /note="Description of Artificial Sequence: Synthetic peptide"
  MOD_RES (9)..(9): Any amino acid
  MOD_RES (12)..(12): Any amino acid
  MOD_RES (15)..(15): Any amino acid
RSGYSSPGXPGXPGXRSR

SEQ ID NO: 21376 - protein, 15 aa, Artificial Sequence
  source: /note="Description of Artificial Sequence: Synthetic peptide"
  MOD_RES (7)..(7): Any amino acid
SIDMVDXPQLATLAD

SEQ ID NO: 21377 - protein, 120 aa, Artificial Sequence; identical to SEQ ID NO: 4804
  source: /note="Description of Artificial Sequence: Synthetic polypeptide"

SEQ ID NO: 21378 - protein, 450 aa, Artificial Sequence
  source: /note="Description of Artificial Sequence: Synthetic polypeptide"
QVQLVQSGAEVKKPGSSVKVSCKASGGTFSDYVISWVRQAPGQGLEWMGEIFPRSGSTYYNEKFKGRVTITADKSTSTAYMELSSLRSEDTAVYYCARDYYGTSFAMDYWGQGTLVTVSSASTKGPSVFPLAPSSKSTSGGTAALGCLVKDYFPEPVTVSWNSGALTSGVHTFPAVLQSSGLYSLSSVVTVPSSSLGTQTYICNVNHKPSNTKVDKKVEPKSCDKTHTCPPCPAPELLGGPSVFLFPPKPKDTLMISRTPEVTCVVVDVSHEDPEVKFNWYVDGVEVHNAKTKPREEQYNSTYRVVSVLTVLHQDWLNGKEYKCKVSNKALPAPIEKTISKAKGQPREPQVYTLPPSREEMTKNQVSLTCLVKGFYPSDIAVEWESNGQPENNYKTTPPVLDSDGSFFLYSKLTVDKSRWQQGNVFSCSVMHEALHNHYTQKSLSLSPGK

SEQ ID NO: 21379 - protein, 450 aa, Artificial Sequence
  source: /note="Description of Artificial Sequence: Synthetic polypeptide"
QVQLVQSGPEVKKPGSSVKVPCKASGYIFTDYVISWVKQAPGQGLEWIGEIFPRSGSTYYNEKFKGKATLTADKSTSTAYMELSSLRSEDTAVYFCARDYYGTSFAMDYWGQGTLVTVSSASTKGPSVFPLAPSSKSTSGGTAALGCLVKDYFPEPVTVSWNSGALTSGVHTFPAVLQSSGLYSLSSVVTVPSSSLGTQTYICNVNHKPSNTKVDKKVEPKSCDKTHTCPPCPAPELLGGPSVFLFPPKPKDTLMISRTPEVTCVVVDVSHEDPEVKFNWYVDGVEVHNAKTKPREEQYNSTYRVVSVLTVLHQDWLNGKEYKCKVSNKALPAPIEKTISKAKGQPREPQVYTLPPSREEMTKNQVSLTCLVKGFYPSDIAVEWESNGQPENNYKTTPPVLDSDGSFFLYSKLTVDKSRWQQGNVFSCSVMHEALHNHYTQKSLSLSPGK

SEQ ID NO: 21380 - protein, 450 aa, Artificial Sequence
  source: /note="Description of Artificial Sequence: Synthetic polypeptide"
QVQLVQSGPEVKKPGSSVKVPCKASGGTFSDYVISWVRQAPGQGLEWMGEIFPRSGSTYYNEKFKGRVTITADKSTSTAYMELSSLRSEDTAVYYCARDYYGTSFAMDYWGQGTLVTVSSASTKGPSVFPLAPSSKSTSGGTAALGCLVKDYFPEPVTVSWNSGALTSGVHTFPAVLQSSGLYSLSSVVTVPSSSLGTQTYICNVNHKPSNTKVDKKVEPKSCDKTHTCPPCPAPELLGGPSVFLFPPKPKDTLMISRTPEVTCVVVDVSHEDPEVKFNWYVDGVEVHNAKTKPREEQYNSTYRVVSVLTVLHQDWLNGKEYKCKVSNKALPAPIEKTISKAKGQPREPQVYTLPPSREEMTKNQVSLTCLVKGFYPSDIAVEWESNGQPENNYKTTPPVLDSDGSFFLYSKLTVDKSRWQQGNVFSCSVMHEALHNHYTQKSLSLSPGK

SEQ ID NO: 21381 - protein, 450 aa, Artificial Sequence
  source: /note="Description of Artificial Sequence: Synthetic polypeptide"
QVQLVQSGAEVKKPGSSVKVSCKASGYTFSDYVISWVRQAPGQGLEWMGEIFPRSGSTYYNEKFKGRVTITADKSTSTAYMELSSLRSEDTAVYYCARDYYGTSFAMDYWGQGTLVTVSSASTKGPSVFPLAPSSKSTSGGTAALGCLVKDYFPEPVTVSWNSGALTSGVHTFPAVLQSSGLYSLSSVVTVPSSSLGTQTYICNVNHKPSNTKVDKKVEPKSCDKTHTCPPCPAPELLGGPSVFLFPPKPKDTLMISRTPEVTCVVVDVSHEDPEVKFNWYVDGVEVHNAKTKPREEQYNSTYRVVSVLTVLHQDWLNGKEYKCKVSNKALPAPIEKTISKAKGQPREPQVYTLPPSREEMTKNQVSLTCLVKGFYPSDIAVEWESNGQPENNYKTTPPVLDSDGSFFLYSKLTVDKSRWQQGNVFSCSVMHEALHNHYTQKSLSLSPGK

SEQ ID NO: 21382 - protein, 450 aa, Artificial Sequence
  source: /note="Description of Artificial Sequence: Synthetic polypeptide"
QVQLVQSGAEVKKPGSSVKVSCKASGGIFSDYVISWVRQAPGQGLEWMGEIFPRSGSTYYNEKFKGRVTITADKSTSTAYMELSSLRSEDTAVYYCARDYYGTSFAMDYWGQGTLVTVSSASTKGPSVFPLAPSSKSTSGGTAALGCLVKDYFPEPVTVSWNSGALTSGVHTFPAVLQSSGLYSLSSVVTVPSSSLGTQTYICNVNHKPSNTKVDKKVEPKSCDKTHTCPPCPAPELLGGPSVFLFPPKPKDTLMISRTPEVTCVVVDVSHEDPEVKFNWYVDGVEVHNAKTKPREEQYNSTYRVVSVLTVLHQDWLNGKEYKCKVSNKALPAPIEKTISKAKGQPREPQVYTLPPSREEMTKNQVSLTCLVKGFYPSDIAVEWESNGQPENNYKTTPPVLDSDGSFFLYSKLTVDKSRWQQGNVFSCSVMHEALHNHYTQKSLSLSPGK

SEQ ID NO: 21383 - protein, 450 aa, Artificial Sequence
  source: /note="Description of Artificial Sequence: Synthetic polypeptide"
QVQLVQSGAEVKKPGSSVKVSCKASGGTFTDYVISWVRQAPGQGLEWMGEIFPRSGSTYYNEKFKGRVTITADKSTSTAYMELSSLRSEDTAVYYCARDYYGTSFAMDYWGQGTLVTVSSASTKGPSVFPLAPSSKSTSGGTAALGCLVKDYFPEPVTVSWNSGALTSGVHTFPAVLQSSGLYSLSSVVTVPSSSLGTQTYICNVNHKPSNTKVDKKVEPKSCDKTHTCPPCPAPELLGGPSVFLFPPKPKDTLMISRTPEVTCVVVDVSHEDPEVKFNWYVDGVEVHNAKTKPREEQYNSTYRVVSVLTVLHQDWLNGKEYKCKVSNKALPAPIEKTISKAKGQPREPQVYTLPPSREEMTKNQVSLTCLVKGFYPSDIAVEWESNGQPENNYKTTPPVLDSDGSFFLYSKLTVDKSRWQQGNVFSCSVMHEALHNHYTQKSLSLSPGK

SEQ ID NO: 21384 - protein, 450 aa, Artificial Sequence
  source: /note="Description of Artificial Sequence: Synthetic polypeptide"
QVQLVQSGAEVKKPGSSVKVSCKASGGTFSDYVISWVKQAPGQGLEWMGEIFPRSGSTYYNEKFKGRVTITADKSTSTAYMELSSLRSEDTAVYYCARDYYGTSFAMDYWGQGTLVTVSSASTKGPSVFPLAPSSKSTSGGTAALGCLVKDYFPEPVTVSWNSGALTSGVHTFPAVLQSSGLYSLSSVVTVPSSSLGTQTYICNVNHKPSNTKVDKKVEPKSCDKTHTCPPCPAPELLGGPSVFLFPPKPKDTLMISRTPEVTCVVVDVSHEDPEVKFNWYVDGVEVHNAKTKPREEQYNSTYRVVSVLTVLHQDWLNGKEYKCKVSNKALPAPIEKTISKAKGQPREPQVYTLPPSREEMTKNQVSLTCLVKGFYPSDIAVEWESNGQPENNYKTTPPVLDSDGSFFLYSKLTVDKSRWQQGNVFSCSVMHEALHNHYTQKSLSLSPGK

SEQ ID NO: 21385 - protein, 450 aa, Artificial Sequence
  source: /note="Description of Artificial Sequence: Synthetic polypeptide"
QVQLVQSGAEVKKPGSSVKVSCKASGGTFSDYVISWVRQAPGQGLEWIGEIFPRSGSTYYNEKFKGRVTITADKSTSTAYMELSSLRSEDTAVYYCARDYYGTSFAMDYWGQGTLVTVSSASTKGPSVFPLAPSSKSTSGGTAALGCLVKDYFPEPVTVSWNSGALTSGVHTFPAVLQSSGLYSLSSVVTVPSSSLGTQTYICNVNHKPSNTKVDKKVEPKSCDKTHTCPPCPAPELLGGPSVFLFPPKPKDTLMISRTPEVTCVVVDVSHEDPEVKFNWYVDGVEVHNAKTKPREEQYNSTYRVVSVLTVLHQDWLNGKEYKCKVSNKALPAPIEKTISKAKGQPREPQVYTLPPSREEMTKNQVSLTCLVKGFYPSDIAVEWESNGQPENNYKTTPPVLDSDGSFFLYSKLTVDKSRWQQGNVFSCSVMHEALHNHYTQKSLSLSPGK

SEQ ID NO: 21386 - protein, 450 aa, Artificial Sequence
  source: /note="Description of Artificial Sequence: Synthetic polypeptide"
QVQLVQSGAEVKKPGSSVKVSCKASGGTFSDYVISWVRQAPGQGLEWMGEIFPRSGSTYYNEKFKGKVTITADKSTSTAYMELSSLRSEDTAVYYCARDYYGTSFAMDYWGQGTLVTVSSASTKGPSVFPLAPSSKSTSGGTAALGCLVKDYFPEPVTVSWNSGALTSGVHTFPAVLQSSGLYSLSSVVTVPSSSLGTQTYICNVNHKPSNTKVDKKVEPKSCDKTHTCPPCPAPELLGGPSVFLFPPKPKDTLMISRTPEVTCVVVDVSHEDPEVKFNWYVDGVEVHNAKTKPREEQYNSTYRVVSVLTVLHQDWLNGKEYKCKVSNKALPAPIEKTISKAKGQPREPQVYTLPPSREEMTKNQVSLTCLVKGFYPSDIAVEWESNGQPENNYKTTPPVLDSDGSFFLYSKLTVDKSRWQQGNVFSCSVMHEALHNHYTQKSLSLSPGK

SEQ ID NO: 21387 - protein, 450 aa, Artificial Sequence
  source: /note="Description of Artificial Sequence: Synthetic polypeptide"
QVQLVQSGAEVKKPGSSVKVSCKASGGTFSDYVISWVRQAPGQGLEWMGEIFPRSGSTYYNEKFKGRATITADKSTSTAYMELSSLRSEDTAVYYCARDYYGTSFAMDYWGQGTLVTVSSASTKGPSVFPLAPSSKSTSGGTAALGCLVKDYFPEPVTVSWNSGALTSGVHTFPAVLQSSGLYSLSSVVTVPSSSLGTQTYICNVNHKPSNTKVDKKVEPKSCDKTHTCPPCPAPELLGGPSVFLFPPKPKDTLMISRTPEVTCVVVDVSHEDPEVKFNWYVDGVEVHNAKTKPREEQYNSTYRVVSVLTVLHQDWLNGKEYKCKVSNKALPAPIEKTISKAKGQPREPQVYTLPPSREEMTKNQVSLTCLVKGFYPSDIAVEWESNGQPENNYKTTPPVLDSDGSFFLYSKLTVDKSRWQQGNVFSCSVMHEALHNHYTQKSLSLSPGK

SEQ ID NO: 21388 - protein, 450 aa, Artificial Sequence
  source: /note="Description of Artificial Sequence: Synthetic polypeptide"
QVQLVQSGAEVKKPGSSVKVSCKASGGTFSDYVISWVRQAPGQGLEWMGEIFPRSGSTYYNEKFKGRVTLTADKSTSTAYMELSSLRSEDTAVYYCARDYYGTSFAMDYWGQGTLVTVSSASTKGPSVFPLAPSSKSTSGGTAALGCLVKDYFPEPVTVSWNSGALTSGVHTFPAVLQSSGLYSLSSVVTVPSSSLGTQTYICNVNHKPSNTKVDKKVEPKSCDKTHTCPPCPAPELLGGPSVFLFPPKPKDTLMISRTPEVTCVVVDVSHEDPEVKFNWYVDGVEVHNAKTKPREEQYNSTYRVVSVLTVLHQDWLNGKEYKCKVSNKALPAPIEKTISKAKGQPREPQVYTLPPSREEMTKNQVSLTCLVKGFYPSDIAVEWESNGQPENNYKTTPPVLDSDGSFFLYSKLTVDKSRWQQGNVFSCSVMHEALHNHYTQKSLSLSPGK

SEQ ID NO: 21389 - protein, 450 aa, Artificial Sequence
  source: /note="Description of Artificial Sequence: Synthetic polypeptide"
QVQLVQSGAEVKKPGSSVKVSCKASGGTFSDYVISWVRQAPGQGLEWMGEIFPRSGSTYYNEKFKGRVTITADKSTSTAYMELSSLRSEDTAVYFCARDYYGTSFAMDYWGQGTLVTVSSASTKGPSVFPLAPSSKSTSGGTAALGCLVKDYFPEPVTVSWNSGALTSGVHTFPAVLQSSGLYSLSSVVTVPSSSLGTQTYICNVNHKPSNTKVDKKVEPKSCDKTHTCPPCPAPELLGGPSVFLFPPKPKDTLMISRTPEVTCVVVDVSHEDPEVKFNWYVDGVEVHNAKTKPREEQYNSTYRVVSVLTVLHQDWLNGKEYKCKVSNKALPAPIEKTISKAKGQPREPQVYTLPPSREEMTKNQVSLTCLVKGFYPSDIAVEWESNGQPENNYKTTPPVLDSDGSFFLYSKLTVDKSRWQQGNVFSCSVMHEALHNHYTQKSLSLSPGK

SEQ ID NO: 21390 - protein, 450 aa, Artificial Sequence
  source: /note="Description of Artificial Sequence: Synthetic polypeptide"
QVQLVQSGAEVKKPGSSVKVSCKASGYIFSDYVISWVRQAPGQGLEWMGEIFPRSGSTYYNEKFKGRVTITADKSTSTAYMELSSLRSEDTAVYYCARDYYGTSFAMDYWGQGTLVTVSSASTKGPSVFPLAPSSKSTSGGTAALGCLVKDYFPEPVTVSWNSGALTSGVHTFPAVLQSSGLYSLSSVVTVPSSSLGTQTYICNVNHKPSNTKVDKKVEPKSCDKTHTCPPCPAPELLGGPSVFLFPPKPKDTLMISRTPEVTCVVVDVSHEDPEVKFNWYVDGVEVHNAKTKPREEQYNSTYRVVSVLTVLHQDWLNGKEYKCKVSNKALPAPIEKTISKAKGQPREPQVYTLPPSREEMTKNQVSLTCLVKGFYPSDIAVEWESNGQPENNYKTTPPVLDSDGSFFLYSKLTVDKSRWQQGNVFSCSVMHEALHNHYTQKSLSLSPGK

SEQ ID NO: 21391 - protein, 450 aa, Artificial Sequence
  source: /note="Description of Artificial Sequence: Synthetic polypeptide"
QVQLQQSGPELVKPGTSVKMPCKASGYIFTDYVISWVKQRTGQGLEWIGEIFPRSGSTYYNEKFKGKATLTADKSSNTAYMQLSSVTSEDSAVYFCARDYYGTSFAMDYWGQGTSVTVSSASTKGPSVFPLAPSSKSTSGGTAALGCLVKDYFPEPVTVSWNSGALTSGVHTFPAVLQSSGLYSLSSVVTVPSSSLGTQTYICNVNHKPSNTKVDKKVEPKSCDKTHTCPPCPAPELLGGPSVFLFPPKPKDTLMISRTPEVTCVVVDVSHEDPEVKFNWYVDGVEVHNAKTKPREEQYNSTYRVVSVLTVLHQDWLNGKEYKCKVSNKALPAPIEKTISKAKGQPREPQVYTLPPSREEMTKNQVSLTCLVKGFYPSDIAVEWESNGQPENNYKTTPPVLDSDGSFFLYSKLTVDKSRWQQGNVFSCSVMHEALHNHYTQKSLSLSPGK

SEQ ID NO: 21392 - protein, 444 aa, Mus musculus
QVQLQQSGPELVKPGTSVKMPCKASGYIFTDYVISWVKQRTGQGLEWIGEIFPRSGSTYYNEKFKGKATLTADKSSNTAYMQLSSVTSEDSAVYFCARDYYGTSFAMDYWGQGTSVTVSSAKTTPPSVYPLAPGSAAQTNSMVTLGCLVKGYFPEPVTVTWNSGSLSSGVHTFPAVLQSDLYTLSSSVTVPSSTWPSQTVTCNVAHPASSTKVDKKIVPRDCGCKPCICTVPEVSSVFIFPPKPKDVLTITLTPKVTCVVVDISKDDPEVQFSWFVDDVEVHTAQTKPREEQINSTFRSVSELPIMHQDWLNGKEFKCRVNSAAFPAPIEKTISKTKGRPKAPQVYTIPPPKEQMAKDKVSLTCMITNFFPEDITVEWQWNGQPAENYKNTQPIMDTDGSYFVYSKLNVQKSNWEAGNTFTCSVLHEGLHNHHTEKSLSHSPGK

SEQ ID NO: 21393 - protein, 447 aa, Artificial Sequence
  source: /note="Description of Artificial Sequence: Synthetic polypeptide"
QVQLVQSGAEVKKPGSSVKVSCKASGGTFSDYVISWVRQAPGQGLEWMGEIFPRSGSTYYNEKFKGRVTITADKSTSTAYMELSSLRSEDTAVYYCARDYYGTSFAMDYWGQGTLVTVSSASTKGPSVFPLAPCSRSTSESTAALGCLVKDYFPEPVTVSWNSGALTSGVHTFPAVLQSSGLYSLSSVVTVPSSSLGTKTYTCNVDHKPSNTKVDKRVESKYGPPCPPCPAPEFLGGPSVFLFPPKPKDTLMISRTPEVTCVVVDVSQEDPEVQFNWYVDGVEVHNAKTKPREEQFNSTYRVVSVLTVLHQDWLNGKEYKCKVSNKGLPSSIEKTISKAKGQPREPQVYTLPPSQEEMTKNQVSLTCLVKGFYPSDIAVEWESNGQPENNYKTTPPVLDSDGSFFLYSRLTVDKSRWQEGNVFSCSVMHEALHNHYTQKSLSLSLGK

SEQ ID NO: 21394 - protein, 447 aa, Artificial Sequence
  source: /note="Description of Artificial Sequence: Synthetic polypeptide"
QVQLVQSGPEVKKPGSSVKVPCKASGYIFTDYVISWVKQAPGQGLEWIGEIFPRSGSTYYNEKFKGKATLTADKSTSTAYMELSSLRSEDTAVYFCARDYYGTSFAMDYWGQGTLVTVSSASTKGPSVFPLAPCSRSTSESTAALGCLVKDYFPEPVTVSWNSGALTSGVHTFPAVLQSSGLYSLSSVVTVPSSSLGTKTYTCNVDHKPSNTKVDKRVESKYGPPCPPCPAPEFLGGPSVFLFPPKPKDTLMISRTPEVTCVVVDVSQEDPEVQFNWYVDGVEVHNAKTKPREEQFNSTYRVVSVLTVLHQDWLNGKEYKCKVSNKGLPSSIEKTISKAKGQPREPQVYTLPPSQEEMTKNQVSLTCLVKGFYPSDIAVEWESNGQPENNYKTTPPVLDSDGSFFLYSRLTVDKSRWQEGNVFSCSVMHEALHNHYTQKSLSLSLGK

SEQ ID NO: 21395 - protein, 447 aa, Artificial Sequence
  source: /note="Description of Artificial Sequence: Synthetic polypeptide"
QVQLVQSGPEVKKPGSSVKVPCKASGGTFSDYVISWVRQAPGQGLEWMGEIFPRSGSTYYNEKFKGRVTITADKSTSTAYMELSSLRSEDTAVYYCARDYYGTSFAMDYWGQGTLVTVSSASTKGPSVFPLAPCSRSTSESTAALGCLVKDYFPEPVTVSWNSGALTSGVHTFPAVLQSSGLYSLSSVVTVPSSSLGTKTYTCNVDHKPSNTKVDKRVESKYGPPCPPCPAPEFLGGPSVFLFPPKPKDTLMISRTPEVTCVVVDVSQEDPEVQFNWYVDGVEVHNAKTKPREEQFNSTYRVVSVLTVLHQDWLNGKEYKCKVSNKGLPSSIEKTISKAKGQPREPQVYTLPPSQEEMTKNQVSLTCLVKGFYPSDIAVEWESNGQPENNYKTTPPVLDSDGSFFLYSRLTVDKSRWQEGNVFSCSVMHEALHNHYTQKSLSLSLGK

SEQ ID NO: 21396 - protein, 447 aa, Artificial Sequence
  source: /note="Description of Artificial Sequence: Synthetic polypeptide"
QVQLVQSGAEVKKPGSSVKVSCKASGYTFSDYVISWVRQAPGQGLEWMGEIFPRSGSTYYNEKFKGRVTITADKSTSTAYMELSSLRSEDTAVYYCARDYYGTSFAMDYWGQGTLVTVSSASTKGPSVFPLAPCSRSTSESTAALGCLVKDYFPEPVTVSWNSGALTSGVHTFPAVLQSSGLYSLSSVVTVPSSSLGTKTYTCNVDHKPSNTKVDKRVESKYGPPCPPCPAPEFLGGPSVFLFPPKPKDTLMISRTPEVTCVVVDVSQEDPEVQFNWYVDGVEVHNAKTKPREEQFNSTYRVVSVLTVLHQDWLNGKEYKCKVSNKGLPSSIEKTISKAKGQPREPQVYTLPPSQEEMTKNQVSLTCLVKGFYPSDIAVEWESNGQPENNYKTTPPVLDSDGSFFLYSRLTVDKSRWQEGNVFSCSVMHEALHNHYTQKSLSLSLGK

SEQ ID NO: 21397 - protein, 447 aa, Artificial Sequence
  source: /note="Description of Artificial Sequence: Synthetic polypeptide"
QVQLVQSGAEVKKPGSSVKVSCKASGGIFSDYVISWVRQAPGQGLEWMGEIFPRSGSTYYNEKFKGRVTITADKSTSTAYMELSSLRSEDTAVYYCARDYYGTSFAMDYWGQGTLVTVSSASTKGPSVFPLAPCSRSTSESTAALGCLVKDYFPEPVTVSWNSGALTSGVHTFPAVLQSSGLYSLSSVVTVPSSSLGTKTYTCNVDHKPSNTKVDKRVESKYGPPCPPCPAPEFLGGPSVFLFPPKPKDTLMISRTPEVTCVVVDVSQEDPEVQFNWYVDGVEVHNAKTKPREEQFNSTYRVVSVLTVLHQDWLNGKEYKCKVSNKGLPSSIEKTISKAKGQPREPQVYTLPPSQEEMTKNQVSLTCLVKGFYPSDIAVEWESNGQPENNYKTTPPVLDSDGSFFLYSRLTVDKSRWQEGNVFSCSVMHEALHNHYTQKSLSLSLGK

SEQ ID NO: 21398 - protein, 447 aa, Artificial Sequence
  source: /note="Description of Artificial Sequence: Synthetic polypeptide"
QVQLVQSGAEVKKPGSSVKVSCKASGGTFTDYVISWVRQAPGQGLEWMGEIFPRSGSTYYNEKFKGRVTITADKSTSTAYMELSSLRSEDTAVYYCARDYYGTSFAMDYWGQGTLVTVSSASTKGPSVFPLAPCSRSTSESTAALGCLVKDYFPEPVTVSWNSGALTSGVHTFPAVLQSSGLYSLSSVVTVPSSSLGTKTYTCNVDHKPSNTKVDKRVESKYGPPCPPCPAPEFLGGPSVFLFPPKPKDTLMISRTPEVTCVVVDVSQEDPEVQFNWYVDGVEVHNAKTKPREEQFNSTYRVVSVLTVLHQDWLNGKEYKCKVSNKGLPSSIEKTISKAKGQPREPQVYTLPPSQEEMTKNQVSLTCLVKGFYPSDIAVEWESNGQPENNYKTTPPVLDSDGSFFLYSRLTVDKSRWQEGNVFSCSVMHEALHNHYTQKSLSLSLGK

SEQ ID NO: 21399 - protein, 447 aa, Artificial Sequence
  source: /note="Description of Artificial Sequence: Synthetic polypeptide"
QVQLVQSGAEVKKPGSSVKVSCKASGGTFSDYVISWVKQAPGQGLEWMGEIFPRSGSTYYNEKFKGRVTITADKSTSTAYMELSSLRSEDTAVYYCARDYYGTSFAMDYWGQGTLVTVSSASTKGPSVFPLAPCSRSTSESTAALGCLVKDYFPEPVTVSWNSGALTSGVHTFPAVLQSSGLYSLSSVVTVPSSSLGTKTYTCNVDHKPSNTKVDKRVESKYGPPCPPCPAPEFLGGPSVFLFPPKPKDTLMISRTPEVTCVVVDVSQEDPEVQFNWYVDGVEVHNAKTKPREEQFNSTYRVVSVLTVLHQDWLNGKEYKCKVSNKGLPSSIEKTISKAKGQPREPQVYTLPPSQEEMTKNQVSLTCLVKGFYPSDIAVEWESNGQPENNYKTTPPVLDSDGSFFLYSRLTVDKSRWQEGNVFSCSVMHEALHNHYTQKSLSLSLGK

SEQ ID NO: 21400 - protein, 447 aa, Artificial Sequence
  source: /note="Description of Artificial Sequence: Synthetic polypeptide"
QVQLVQSGAEVKKPGSSVKVSCKASGGTFSDYVISWVRQAPGQGLEWIGEIFPRSGSTYYNEKFKGRVTITADKSTSTAYMELSSLRSEDTAVYYCARDYYGTSFAMDYWGQGTLVTVSSASTKGPSVFPLAPCSRSTSESTAALGCLVKDYFPEPVTVSWNSGALTSGVHTFPAVLQSSGLYSLSSVVTVPSSSLGTKTYTCNVDHKPSNTKVDKRVESKYGPPCPPCPAPEFLGGPSVFLFPPKPKDTLMISRTPEVTCVVVDVSQEDPEVQFNWYVDGVEVHNAKTKPREEQFNSTYRVVSVLTVLHQDWLNGKEYKCKVSNKGLPSSIEKTISKAKGQPREPQVYTLPPSQEEMTKNQVSLTCLVKGFYPSDIAVEWESNGQPENNYKTTPPVLDSDGSFFLYSRLTVDKSRWQEGNVFSCSVMHEALHNHYTQKSLSLSLGK

SEQ ID NO: 21401 - protein, 447 aa, Artificial Sequence
  source: /note="Description of Artificial Sequence: Synthetic polypeptide"
QVQLVQSGAEVKKPGSSVKVSCKASGGTFSDYVISWVRQAPGQGLEWMGEIFPRSGSTYYNEKFKGKVTITADKSTSTAYMELSSLRSEDTAVYYCARDYYGTSFAMDYWGQGTLVTVSSASTKGPSVFPLAPCSRSTSESTAALGCLVKDYFPEPVTVSWNSGALTSGVHTFPAVLQSSGLYSLSSVVTVPSSSLGTKTYTCNVDHKPSNTKVDKRVESKYGPPCPPCPAPEFLGGPSVFLFPPKPKDTLMISRTPEVTCVVVDVSQEDPEVQFNWYVDGVEVHNAKTKPREEQFNSTYRVVSVLTVLHQDWLNGKEYKCKVSNKGLPSSIEKTISKAKGQPREPQVYTLPPSQEEMTKNQVSLTCLVKGFYPSDIAVEWESNGQPENNYKTTPPVLDSDGSFFLYSRLTVDKSRWQEGNVFSCSVMHEALHNHYTQKSLSLSLGK

SEQ ID NO: 21402 - protein, 447 aa, Artificial Sequence
  source: /note="Description of Artificial Sequence: Synthetic polypeptide"
QVQLVQSGAEVKKPGSSVKVSCKASGGTFSDYVISWVRQAPGQGLEWMGEIFPRSGSTYYNEKFKGRATITADKSTSTAYMELSSLRSEDTAVYYCARDYYGTSFAMDYWGQGTLVTVSSASTKGPSVFPLAPCSRSTSESTAALGCLVKDYFPEPVTVSWNSGALTSGVHTFPAVLQSSGLYSLSSVVTVPSSSLGTKTYTCNVDHKPSNTKVDKRVESKYGPPCPPCPAPEFLGGPSVFLFPPKPKDTLMISRTPEVTCVVVDVSQEDPEVQFNWYVDGVEVHNAKTKPREEQFNSTYRVVSVLTVLHQDWLNGKEYKCKVSNKGLPSSIEKTISKAKGQPREPQVYTLPPSQEEMTKNQVSLTCLVKGFYPSDIAVEWESNGQPENNYKTTPPVLDSDGSFFLYSRLTVDKSRWQEGNVFSCSVMHEALHNHYTQKSLSLSLGK

SEQ ID NO: 21403 - protein, 447 aa, Artificial Sequence
  source: /note="Description of Artificial Sequence: Synthetic polypeptide"
QVQLVQSGAEVKKPGSSVKVSCKASGGTFSDYVISWVRQAPGQGLEWMGEIFPRSGSTYYNEKFKGRVTLTADKSTSTAYMELSSLRSEDTAVYYCARDYYGTSFAMDYWGQGTLVTVSSASTKGPSVFPLAPCSRSTSESTAALGCLVKDYFPEPVTVSWNSGALTSGVHTFPAVLQSSGLYSLSSVVTVPSSSLGTKTYTCNVDHKPSNTKVDKRVESKYGPPCPPCPAPEFLGGPSVFLFPPKPKDTLMISRTPEVTCVVVDVSQEDPEVQFNWYVDGVEVHNAKTKPREEQFNSTYRVVSVLTVLHQDWLNGKEYKCKVSNKGLPSSIEKTISKAKGQPREPQVYTLPPSQEEMTKNQVSLTCLVKGFYPSDIAVEWESNGQPENNYKTTPPVLDSDGSFFLYSRLTVDKSRWQEGNVFSCSVMHEALHNHYTQKSLSLSLGK

SEQ ID NO: 21404 - protein, 447 aa, Artificial Sequence
  source: /note="Description of Artificial Sequence: Synthetic polypeptide"
QVQLVQSGAEVKKPGSSVKVSCKASGGTFSDYVISWVRQAPGQGLEWMGEIFPRSGSTYYNEKFKGRVTITADKSTSTAYMELSSLRSEDTAVYFCARDYYGTSFAMDYWGQGTLVTVSSASTKGPSVFPLAPCSRSTSESTAALGCLVKDYFPEPVTVSWNSGALTSGVHTFPAVLQSSGLYSLSSVVTVPSSSLGTKTYTCNVDHKPSNTKVDKRVESKYGPPCPPCPAPEFLGGPSVFLFPPKPKDTLMISRTPEVTCVVVDVSQEDPEVQFNWYVDGVEVHNAKTKPREEQFNSTYRVVSVLTVLHQDWLNGKEYKCKVSNKGLPSSIEKTISKAKGQPREPQVYTLPPSQEEMTKNQVSLTCLVKGFYPSDIAVEWESNGQPENNYKTTPPVLDSDGSFFLYSRLTVDKSRWQEGNVFSCSVMHEALHNHYTQKSLSLSLGK

SEQ ID NO: 21405 - protein, 447 aa, Artificial Sequence
  source: /note="Description of Artificial Sequence: Synthetic polypeptide"
QVQLVQSGAEVKKPGSSVKVSCKASGYIFSDYVISWVRQAPGQGLEWMGEIFPRSGSTYYNEKFKGRVTITADKSTSTAYMELSSLRSEDTAVYYCARDYYGTSFAMDYWGQGTLVTVSSASTKGPSVFPLAPCSRSTSESTAALGCLVKDYFPEPVTVSWNSGALTSGVHTFPAVLQSSGLYSLSSVVTVPSSSLGTKTYTCNVDHKPSNTKVDKRVESKYGPPCPPCPAPEFLGGPSVFLFPPKPKDTLMISRTPEVTCVVVDVSQEDPEVQFNWYVDGVEVHNAKTKPREEQFNSTYRVVSVLTVLHQDWLNGKEYKCKVSNKGLPSSIEKTISKAKGQPREPQVYTLPPSQEEMTKNQVSLTCLVKGFYPSDIAVEWESNGQPENNYKTTPPVLDSDGSFFLYSRLTVDKSRWQEGNVFSCSVMHEALHNHYTQKSLSLSLGK

SEQ ID NO: 21406 - protein, 447 aa, Artificial Sequence
  source: /note="Description of Artificial Sequence: Synthetic polypeptide"
QVQLQQSGPELVKPGTSVKMPCKASGYIFTDYVISWVKQRTGQGLEWIGEIFPRSGSTYYNEKFKGKATLTADKSSNTAYMQLSSVTSEDSAVYFCARDYYGTSFAMDYWGQGTSVTVSSASTKGPSVFPLAPCSRSTSESTAALGCLVKDYFPEPVTVSWNSGALTSGVHTFPAVLQSSGLYSLSSVVTVPSSSLGTKTYTCNVDHKPSNTKVDKRVESKYGPPCPPCPAPEFLGGPSVFLFPPKPKDTLMISRTPEVTCVVVDVSQEDPEVQFNWYVDGVEVHNAKTKPREEQFNSTYRVVSVLTVLHQDWLNGKEYKCKVSNKGLPSSIEKTISKAKGQPREPQVYTLPPSQEEMTKNQVSLTCLVKGFYPSDIAVEWESNGQPENNYKTTPPVLDSDGSFFLYSRLTVDKSRWQEGNVFSCSVMHEALHNHYTQKSLSLSLGK

SEQ ID NO: 21407 - DNA, 360 bp, Artificial Sequence
  source: /note="Description of Artificial Sequence: Synthetic polynucleotide"
caggtccaattgcagcagtctggacctgagctggtgaagcctgggacttcagtgaagatgccctgtaaggcttctggatacatattcactgactatgtcataagctgggtgaagcagagaactggacagggccttgagtggattggagagatttttcctagaagtggtagtacttactacaatgagaagttcaagggcaaggccacactgactgcagacaaatcctccaacacagcctacatgcagctcagcagcgtgacatctgaggactctgcggtctatttctgtgcaagagattactacggtacttcatttgctatggactactggggtcaaggaacctcagtcaccgtctcctca

SEQ ID NO: 21408 - DNA, 360 bp, Artificial Sequence
  source: /note="Description of Artificial Sequence: Synthetic polynucleotide"
caggtccagctgcagcagagcggccccgaactggtcaaacccggaacctccgtgaagatgccttgtaaagcctcaggatacattttcaccgattacgtgatctcttgggtcaaacagcgaacaggacagggactggagtggatcggggaaattttccccagatccggatctacttactataacgagaagtttaaaggcaaggccaccctgacagctgacaagagctccaatacagcttacatgcagctgtctagtgtgactagtgaagactcagcagtctatttctgcgccagggattactatgggacaagttttgccatggactattggggacagggcacttccgtgaccgtctcaagc

SEQ ID NO: 21409 - DNA, 360 bp, Artificial Sequence; identical to SEQ ID NO: 21408
  source: /note="Description of Artificial Sequence: Synthetic polynucleotide"

SEQ ID NO: 21410 - DNA, 360 bp, Artificial Sequence
  source: /note="Description of Artificial Sequence: Synthetic polynucleotide"
caggtccagctggtccagagcggagcagaagtgaagaaacccggaagtagcgtgaaggtgtcatgcaaggcaagcggcggaacatttagtgattacgtgatctcctgggtccgacaggctccaggacagggactggagtggatgggggaaattttccctagatcaggaagcacctactataacgagaagtttaaaggccgcgtgaccatcacagcagacaagtccacttctaccgcctacatggagctgagctccctgcggagcgaagacaccgccgtctactattgcgctagagattactatgggacatctttcgccatggactattggggacagggcacactggtgactgtctctagt

SEQ ID NO: 21411 - DNA, 360 bp, Artificial Sequence
  source: /note="Description of Artificial Sequence: Synthetic polynucleotide"
caggtccagctggtgcagtcaggccccgaagtgaagaagcccggaagtagtgtcaaggtcccatgtaaagcatcagggtatatttttactgattacgtgatcagctgggtcaaacaggcaccaggacagggactggagtggatcggggaaattttccctagatcaggaagcacatactataacgagaagtttaaaggcaaggccaccctgacagctgacaagtccacttctaccgcttacatggagctgagctccctgcggagtgaagacaccgcagtgtatttctgcgccagagattactatgggacatcctttgcaatggactattggggacagggcacactggtgactgtctctagt

SEQ ID NO: 21412 - DNA, 360 bp, Artificial Sequence
  source: /note="Description of Artificial Sequence: Synthetic polynucleotide"
caggtccagctggtccagagcggacccgaagtgaagaaacccggaagtagcgtgaaggtgccatgcaaggcaagcggcggaacatttagtgattacgtgatctcctgggtccgacaggctccaggacagggactggagtggatgggggaaattttccctagatcaggaagcacctactataacgagaagtttaaaggccgcgtgaccatcacagcagacaagtccacttctaccgcctacatggagctgagctccctgcggagcgaagacaccgccgtctactattgcgctagagattactatgggacatctttcgccatggactattggggacagggcacactggtgactgtctctagt

SEQ ID NO: 21413 - DNA, 360 bp, Artificial Sequence
  source: /note="Description of Artificial Sequence: Synthetic polynucleotide"
caggtccagctggtccagagcggagcagaagtgaagaaacccggaagtagcgtgaaggtgtcatgcaaggcaagcgggtatacatttagtgattacgtgatctcctgggtccgacaggctccaggacagggactggagtggatgggggaaattttccctagatcaggaagcacctactataacgagaagtttaaaggccgcgtgaccatcacagcagacaagtccacttctaccgcctacatggagctgagctccctgcggagcgaagacaccgccgtctactattgcgctagagattactatgggacatctttcgccatggactattggggacagggcacactggtgactgtctctagt

SEQ ID NO: 21414 - DNA, 360 bp, Artificial Sequence
  source: /note="Description of Artificial Sequence: Synthetic polynucleotide"
caggtccagctggtccagagcggagcagaagtgaagaaacccggaagtagcgtgaaggtgtcatgcaaggcaagcggcggaatttttagtgattacgtgatctcctgggtccgacaggctccaggacagggactggagtggatgggggaaattttccctagatcaggaagcacctactataacgagaagtttaaaggccgcgtgaccatcacagcagacaagtccacttctaccgcctacatggagctgagctccctgcggagcgaagacaccgccgtctactattgcgctagagattactatgggacatctttcgccatggactattggggacagggcacactggtgactgtctctagt

SEQ ID NO: 21415 - DNA, 360 bp, Artificial Sequence
  source: /note="Description of Artificial Sequence: Synthetic polynucleotide"
caggtccagctggtccagagcggagcagaagtgaagaaacccggaagtagcgtgaaggtgtcatgcaaggcaagcggcggaacatttactgattacgtgatctcctgggtccgacaggctccaggacagggactggagtggatgggggaaattttccctagatcaggaagcacctactataacgagaagtttaaaggccgcgtgaccatcacagcagacaagtccacttctaccgcctacatggagctgagctccctgcggagcgaagacaccgccgtctactattgcgctagagattactatgggacatctttcgccatggactattggggacagggcacactggtgactgtctctagt

SEQ ID NO: 21416 - DNA, 360 bp, Artificial Sequence
  source: /note="Description of Artificial Sequence: Synthetic polynucleotide"
caggtccagctggtccagagcggagcagaagtgaagaaacccggaagtagcgtgaaggtgtcatgcaaggcaagcggcggaacatttagtgattacgtgatctcctgggtcaaacaggctccaggacagggactggagtggatgggggaaattttccctagatcaggaagcacctactataacgagaagtttaaaggccgcgtgaccatcacagcagacaagtccacttctaccgcctacatggagctgagctccctgcggagcgaagacaccgccgtctactattgcgctagagattactatgggacatctttcgccatggactattggggacagggcacactggtgactgtctctagt

SEQ ID NO: 21417 - DNA, 360 bp, Artificial Sequence
  source: /note="Description of Artificial Sequence: Synthetic polynucleotide"
caggtccagctggtccagagcggagcagaagtgaagaaacccggaagtagcgtgaaggtgtcatgcaaggcaagcggcggaacatttagtgattacgtgatctcctgggtccgacaggctccaggacagggactggagtggatcggggaaattttccctagatcaggaagcacctactataacgagaagtttaaaggccgcgtgaccatcacagcagacaagtccacttctaccgcctacatggagctgagctccctgcggagcgaagacaccgccgtctactattgcgctagagattactatgggacatctttcgccatggactattggggacagggcacactggtgactgtctctagt

SEQ ID NO: 21418 - DNA, 360 bp, Artificial Sequence
  source: /note="Description of Artificial Sequence: Synthetic polynucleotide"
caggtccagctggtccagagcggagcagaagtgaagaaacccggaagtagcgtgaaggtgtcatgcaaggcaagcggcggaacatttagtgattacgtgatctcctgggtccgacaggctccaggacagggactggagtggatgggggaaattttccctagatcaggaagcacctactataacgagaagtttaaaggcaaggtgaccatcacagcagacaagtccacttctaccgcctacatggagctgagctccctgcggagcgaagacaccgccgtctactattgcgctagagattactatgggacatctttcgccatggactattggggacagggcacactggtgactgtctctagt

SEQ ID NO: 21419 - DNA, 360 bp, Artificial Sequence
  source: /note="Description of Artificial Sequence: Synthetic polynucleotide"
caggtccagctggtccagagcggagcagaagtgaagaaacccggaagtagcgtgaaggtgtcatgcaaggcaagcggcggaacatttagtgattacgtgatctcctgggtccgacaggctccaggacagggactggagtggatgggggaaattttccctagatcaggaagcacctactataacgagaagtttaaaggccgcgccaccatcacagcagacaagtccacttctaccgcctacatggagctgagctccctgcggagcgaagacaccgccgtctactattgcgctagagattactatgggacatctttcgccatggactattggggacagggcacactggtgactgtctctagt

SEQ ID NO: 21420 - DNA, 360 bp, Artificial Sequence
  source: /note="Description of Artificial Sequence: Synthetic polynucleotide"
caggtccagctggtccagagcggagcagaagtgaagaaacccggaagtagcgtgaaggtgtcatgcaaggcaagcggcggaacatttagtgattacgtgatctcctgggtccgacaggctccaggacagggactggagtggatgggggaaattttccctagatcaggaagcacctactataacgagaagtttaaaggccgcgtgaccctgacagcagacaagtccacttctaccgcctacatggagctgagctccctgcggagcgaagacaccgccgtctactattgcgctagagattactatgggacatctttcgccatggactattggggacagggcacactggtgactgtctctagt

SEQ ID NO: 21421 - DNA, 360 bp, Artificial Sequence
  source: /note="Description of Artificial Sequence: Synthetic polynucleotide"
caggtccagctggtccagagcggagcagaagtgaagaaacccggaagtagcgtgaaggtgtcatgcaaggcaagcggcggaacatttagtgattacgtgatctcctgggtccgacaggctccaggacagggactggagtggatgggggaaattttccctagatcaggaagcacctactataacgagaagtttaaaggccgcgtgaccatcacagcagacaagtccacttctaccgcctacatggagctgagctccctgcggagcgaagacaccgccgtctatttctgcgctagagattactatgggacatctttcgccatggactattggggacagggcacactggtgactgtctctagt

SEQ ID NO: 21422 - DNA, 360 bp, Artificial Sequence
  source: /note="Description of Artificial Sequence: Synthetic polynucleotide"
caggtccagctggtccagagcggagcagaagtgaagaaacccggaagtagcgtgaaggtgtcatgcaaggcaagcgggtatatttttagtgattacgtgatctcctgggtccgacaggctccaggacagggactggagtggatgggggaaattttccctagatcaggaagcacctactataacgagaagtttaaaggccgcgtgaccatcacagcagacaagtccacttctaccgcctacatggagctgagctccctgcggagcgaagacaccgccgtctactattgcgctagagattactatgggacatctttcgccatggactattggggacagggcacactggtgactgtctctagt

SEQ ID NO: 21423 - DNA, 1350 bp, Artificial Sequence
  source: /note="Description of Artificial Sequence: Synthetic polynucleotide"
caggtccagctggtccagagcggagcagaagtgaagaaacccggaagtagcgtgaaggtgtcatgcaaggcaagcggcggaacatttagtgattacgtgatctcctgggtccgacaggctccaggacagggactggagtggatgggggaaattttccctagatcaggaagcacctactataacgagaagtttaaaggccgcgtgaccatcacagcagacaagtccacttctaccgcctacatggagctgagctccctgcggagcgaagacaccgccgtctactattgcgctagagattactatgggacatctttcgccatggactattggggacagggcacactggtgactgtctctagtgcctccaccaagggcccttccgtgttccctctggccccttcctccaagtccacctccggcggcaccgccgctctgggctgcctggtgaaggactacttccctgagcctgtgaccgtgtcctggaactctggcgccctgaccagcggcgtgcacaccttccctgccgtgctgcagtcctccggcctgtactccctgtcctccgtggtgaccgtgccttcctcctccctgggcacccagacctacatctgcaacgtgaaccacaagccttccaacaccaaggtggacaagaaggtggagcctaagtcctgcgacaagacccacacgtgccctccatgcccagctcccgagctgctgggcggaccaagcgtgtttctgttccctcctaagcctaaggacaccctgatgatctcccggacccctgaggtgacgtgcgtggtggtggacgtgtcccacgaggacccagaggtgaagttcaattggtacgtggacggcgtggaggtgcacaacgccaagaccaagcctcgggaggaacagtacaactccacctaccgggtggtgtctgtgctgaccgtgctgcaccaggactggctgaacggcaaggaatacaagtgcaaagtctccaacaaggccctgcctgcccccatcgaaaagaccatctccaaggccaagggccagcctcgcgagcctcaggtgtacaccctgcctccaagcagggaggaaatgaccaagaaccaggtgtccctgacctgtctggtgaagggcttctacccttccgatatcgccgtggagtgggagtccaacggccagcctgagaacaactacaagaccacccctcctgtgctggactccgacggctccttcttcctgtactccaagctgaccgtggacaagtcccggtggcagcagggcaacgtgttctcctgctccgtgatgcacgaggccctgcacaaccactacacccagaagagcctctccctgtccccgggtaaa

SEQ ID NO: 21424 - DNA, 1350 bp, Artificial Sequence
  source: /note="Description of Artificial Sequence: Synthetic polynucleotide"
caggtccagctggtgcagtcaggccccgaagtgaagaagcccggaagtagtgtcaaggtcccatgtaaagcatcagggtatatttttactgattacgtgatcagctgggtcaaacaggcaccaggacagggactggagtggatcggggaaattttccctagatcaggaagcacatactataacgagaagtttaaaggcaaggccaccctgacagctgacaagtccacttctaccgcttacatggagctgagctccctgcggagtgaagacaccgcagtgtatttctgcgccagagattactatgggacatcctttgcaatggactattggggacagggcacactggtgactgtctctagtgcctccaccaagggcccttccgtgttccctctggccccttcctccaagtccacctccggcggcaccgccgctctgggctgcctggtgaaggactacttccctgagcctgtgaccgtgtcctggaactctggcgccctgaccagcggcgtgcacaccttccctgccgtgctgcagtcctccggcctgtactccctgtcctccgtggtgaccgtgccttcctcctccctgggcacccagacctacatctgcaacgtgaaccacaagccttccaacaccaaggtggacaagaaggtggagcctaagtcctgcgacaagacccacacgtgccctccatgcccagctcccgagctgctgggcggaccaagcgtgtttctgttccctcctaagcctaaggacaccctgatgatctcccggacccctgaggtgacgtgcgtggtggtggacgtgtcccacgaggacccagaggtgaagttcaattggtacgtggacggcgtggaggtgcacaacgccaagaccaagcctcgggaggaacagtacaactccacctaccgggtggtgtctgtgctgaccgtgctgcaccaggactggctgaacggcaaggaatacaagtgcaaagtctccaacaaggccctgcctgcccccatcgaaaagaccatctccaaggccaagggccagcctcgcgagcctcaggtgtacaccctgcctccaagcagggaggaaatgaccaagaaccaggtgtccctgacctgtctggtgaagggcttctacccttccgatatcgccgtggagtgggagtccaacggccagcctgagaacaactacaagaccacccctcctgtgctggactccgacggctccttcttcctgtactccaagctgaccgtggacaagtcccggtggcagcagggcaacgtgttctcctgctccgtgatgcacgaggccctgcacaaccactacacccagaagagcctctccctgtccccgggtaaa

SEQ ID NO: 21425 - DNA, 1350 bp, Artificial Sequence
  source: /note="Description of Artificial Sequence: Synthetic polynucleotide"
caggtccagctggtccagagcggacccgaagtgaagaaacccggaagtagcgtgaaggtgccatgcaaggcaagcggcggaacatttagtgattacgtgatctcctgggtccgacaggctccaggacagggactggagtggatgggggaaattttccctagatcaggaagcacctactataacgagaagtttaaaggccgcgtgaccatcacagcagacaagtccacttctaccgcctacatggagctgagctccctgcggagcgaagacaccgccgtctactattgcgctagagattactatgggacatctttcgccatggactattggggacagggcacactggtgactgtctctagtgcctccaccaagggcccttccgtgttccctctggccccttcctccaagtccacctccggcggcaccgccgctctgggctgcctggtgaaggactacttccctgagcctgtgaccgtgtcctggaactctggcgccctgaccagcggcgtgcacaccttccctgccgtgctgcagtcctccggcctgtactccctgtcctccgtggtgaccgtgccttcctcctccctgggcacccagacctacatctgcaacgtgaaccacaagccttccaacaccaaggtggacaagaaggtggagcctaagtcctgcgacaagacccacacgtgccctccatgcccagctcccgagctgctgggcggaccaagcgtgtttctgttccctcctaagcctaaggacaccctgatgatctcccggacccctgaggtgacgtgcgtggtggtggacgtgtcccacgaggacccagaggtgaagttcaattggtacgtggacggcgtggaggtgcacaacgccaagaccaagcctcgggaggaacagtacaactccacctaccgggtggtgtctgtgctgaccgtgctgcaccaggactggctgaacggcaaggaatacaagtgcaaagtctccaacaaggccctgcctgcccccatcgaaaagaccatctccaaggccaagggccagcctcgcgagcctcaggtgtacaccctgcctccaagcagggaggaaatgaccaagaaccaggtgtccctgacctgtctggtgaagggcttctacccttccgatatcgccgtggagtgggagtccaacggccagcctgagaacaactacaagaccacccctcctgtgctggactccgacggctccttcttcctgtactccaagctgaccgtggacaagtcccggtggcagcagggcaacgtgttctcctgctccgtgatgcacgaggccctgcacaaccactacacccagaagagcctctccctgtccccgggtaaa

SEQ ID NO: 21426 - DNA, 1350 bp, Artificial Sequence
  source: /note="Description of Artificial Sequence: Synthetic polynucleotide"
caggtccagctggtccagagcggagcagaagtgaagaaacccggaagtagcgtgaaggtgtcatgcaaggcaagcgggtatacatttagtgattacgtgatctcctgggtccgacaggctccaggacagggactggagtggatgggggaaattttccctagatcaggaagcacctactataacgagaagtttaaaggccgcgtgaccatcacagcagacaagtccacttctaccgcctacatggagctgagctccctgcggagcgaagacaccgccgtctactattgcgctagagattactatgggacatctttcgccatggactattggggacagggcacactggtgactgtctctagtgcctccaccaagggcccttccgtgttccctctggccccttcctccaagtccacctccggcggcaccgccgctctgggctgcctggtgaaggactacttccctgagcctgtgaccgtgtcctggaactctggcgccctgaccagcggcgtgcacaccttccctgccgtgctgcagtcctccggcctgtactccctgtcctccgtggtgaccgtgccttcctcctccctgggcacccagacctacatctgcaacgtgaaccacaagccttccaacaccaaggtggacaagaaggtggagcctaagtcctgcgacaagacccacacgtgccctccatgcccagctcccgagctgctgggcggaccaagcgtgtttctgttccctcctaagcctaaggacaccctgatgatctcccggacccctgaggtgacgtgcgtggtggtggacgtgtcccacgaggacccagaggtgaagttcaattggtacgtggacggcgtggaggtgcacaacgccaagaccaagcctcgggaggaacagtacaactccacctaccgggtggtgtctgtgctgaccgtgctgcaccaggactggctgaacggcaaggaatacaagtgcaaagtctccaacaaggccctgcctgcccccatcgaaaagaccatctccaaggccaagggccagcctcgcgagcctcaggtgtacaccctgcctccaagcagggaggaaatgaccaagaaccaggtgtccctgacctgtctggtgaagggcttctacccttccgatatcgccgtggagtgggagtccaacggccagcctgagaacaactacaagaccacccctcctgtgctggactccgacggctccttcttcctgtactccaagctgaccgtggacaagtcccggtggcagcagggcaacgtgttctcctgctccgtgatgcacgaggccctgcacaaccactacacccagaagagcctctccctgtccccgggtaaa

SEQ ID NO: 21427 - DNA, 1350 bp, Artificial Sequence
  source: /note="Description of Artificial Sequence: Synthetic polynucleotide"
caggtccagctggtccagagcggagcagaagtgaagaaacccggaagtagcgtgaaggtgtcatgcaaggcaagcggcggaatttttagtgattacgtgatctcctgggtccgacaggctccaggacagggactggagtggatgggggaaattttccctagatcaggaagcacctactataacgagaagtttaaaggccgcgtgaccatcacagcagacaagtccacttctaccgcctacatggagctgagctccctgcggagcgaagacaccgccgtctactattgcgctagagattactatgggacatctttcgccatggactattggggacagggcacactggtgactgtctctagtgcctccaccaagggcccttccgtgttccctctggccccttcctccaagtccacctccggcggcaccgccgctctgggctgcctggtgaaggactacttccctgagcctgtgaccgtgtcctggaactctggcgccctgaccagcggcgtgcacaccttccctgccgtgctgcagtcctccggcctgtactccctgtcctccgtggtgaccgtgccttcctcctccctgggcacccagacctacatctgcaacgtgaaccacaagccttccaacaccaaggtggacaagaaggtggagcctaagtcctgcgacaagacccacacgtgccctccatgcccagctcccgagctgctgggcggaccaagcgtgtttctgttccctcctaagcctaaggacaccctgatgatctcccggacccctgaggtgacgtgcgtggtggtggacgtgtcccacgaggacccagaggtgaagttcaattggtacgtggacggcgtggaggtgcacaacgccaagaccaagcctcgggaggaacagtacaactccacctaccgggtggtgtctgtgctgaccgtgctgcaccaggactggctgaacggcaaggaatacaagtgcaaagtctccaacaaggccctgcctgcccccatcgaaaagaccatctccaaggccaagggccagcctcgcgagcctcaggtgtacaccctgcctccaagcagggaggaaatgaccaagaaccaggtgtccctgacctgtctggtgaagggcttctacccttccgatatcgccgtggagtgggagtccaacggccagcctgagaacaactacaagaccacccctcctgtgctggactccgacggctccttcttcctgtactccaagctgaccgtggacaagtcccggtggcagcagggcaacgtgttctcctgctccgtgatgcacgaggccctgcacaaccactacacccagaagagcctctccctgtccccgggtaaa

SEQ ID NO: 21428 - DNA, 1350 bp, Artificial Sequence
  source: /note="Description of Artificial Sequence: Synthetic polynucleotide"
caggtccagctggtccagagcggagcagaagtgaagaaacccggaagtagcgtgaaggtgtcatgcaaggcaagcggcggaacatttactgattacgtgatctcctgggtccgacaggctccaggacagggactggagtggatgggggaaattttccctagatcaggaagcacctactataacgagaagtttaaaggccgcgtgaccatcacagcagacaagtccacttctaccgcctacatggagctgagctccctgcggagcgaagacaccgccgtctactattgcgctagagattactatgggacatctttcgccatggactattggggacagggcacactggtgactgtctctagtgcctccaccaagggcccttccgtgttccctctggccccttcctccaagtccacctccggcggcaccgccgctctgggctgcctggtgaaggactacttccctgagcctgtgaccgtgtcctggaactctggcgccctgaccagcggcgtgcacaccttccctgccgtgctgcagtcctccggcctgtactccctgtcctccgtggtgaccgtgccttcctcctccctgggcacccagacctacatctgcaacgtgaaccacaagccttccaacaccaaggtggacaagaaggtggagcctaagtcctgcgacaagacccacacgtgccctccatgcccagctcccgagctgctgggcggaccaagcgtgtttctgttccctcctaagcctaaggacaccctgatgatctcccggacccctgaggtgacgtgcgtggtggtggacgtgtcccacgaggacccagaggtgaagttcaattggtacgtggacggcgtggaggtgcacaacgccaagaccaagcctcgggaggaacagtacaactccacctaccgggtggtgtctgtgctgaccgtgctgcaccaggactggctgaacggcaaggaatacaagtgcaaagtctccaacaaggccctgcctgcccccatcgaaaagaccatctccaaggccaagggccagcctcgcgagcctcaggtgtacaccctgcctccaagcagggaggaaatgaccaagaaccaggtgtccctgacctgtctggtgaagggcttctacccttccgatatcgccgtggagtgggagtccaacggccagcctgagaacaactacaagaccacccctcctgtgctggactccgacggctccttcttcctgtactccaagctgaccgtggacaagtcccggtggcagcagggcaacgtgttctcctgctccgtgatgcacgaggccctgcacaaccactacacccagaagagcctctccctgtccccgggtaaa

SEQ ID NO: 21429 - DNA, 1350 bp, Artificial Sequence
  source: /note="Description of Artificial Sequence: Synthetic polynucleotide"
caggtccagctggtccagagcggagcagaagtgaagaaacccggaagtagcgtgaaggtgtcatgcaaggcaagcggcggaacatttagtgattacgtgatctcctgggtcaaacaggctccaggacagggactggagtggatgggggaaattttccctagatcaggaagcacctactataacgagaagtttaaaggccgcgtgaccatcacagcagacaagtccacttctaccgcctacatggagctgagctccctgcggagcgaagacaccgccgtctactattgcgctagagattactatgggacatctttcgccatggactattggggacagggcacactggtgactgtctctagtgcctccaccaagggcccttccgtgttccctctggccccttcctccaagtccacctccggcggcaccgccgctctgggctgcctggtgaaggactacttccctgagcctgtgaccgtgtcctggaactctggcgccctgaccagcggcgtgcacaccttccctgccgtgctgcagtcctccggcctgtactccctgtcctccgtggtgaccgtgccttcctcctccctgggcacccagacctacatctgcaacgtgaaccacaagccttccaacaccaaggtggacaagaaggtggagcctaagtcctgcgacaagacccacacgtgccctccatgcccagctcccgagctgctgggcggaccaagcgtgtttctgttccctcctaagcctaaggacaccctgatgatctcccggacccctgaggtgacgtgcgtggtggtggacgtgtcccacgaggacccagaggtgaagttcaattggtacgtggacggcgtggaggtgcacaacgccaagaccaagcctcgggaggaacagtacaactccacctaccgggtggtgtctgtgctgaccgtgctgcaccaggactggctgaacggcaaggaatacaagtgcaaagtctccaacaaggccctgcctgcccccatcgaaaagaccatctccaaggccaagggccagcctcgcgagcctcaggtgtacaccctgcctccaagcagggaggaaatgaccaagaaccaggtgtccctgacctgtctggtgaagggcttctacccttccgatatcgccgtggagtgggagtccaacggccagcctgagaacaactacaagaccacccctcctgtgctggactccgacggctccttcttcctgtactccaagctgaccgtggacaagtcccggtggcagcagggcaacgtgttctcctgctccgtgatgcacgaggccctgcacaaccactacacccagaagagcctctccctgtccccgggtaaa

SEQ ID NO: 21430 - DNA, 1350 bp, Artificial Sequence
  source: /note="Description of Artificial Sequence: Synthetic polynucleotide"
caggtccagctggtccagagcggagcagaagtgaagaaacccggaagtagcgtgaaggtgtcatgcaaggcaagcggcggaacatttagtgattacgtgatctcctgggtccgacaggctccaggacagggactggagtggatcggggaaattttccctagatcaggaagcacctactataacgagaagtttaaaggccgcgtgaccatcacagcagacaagtccacttctaccgcctacatggagctgagctccctgcggagcgaagacaccgccgtctactattgcgctagagattactatgggacatctttcgccatggactattggggacagggcacactggtgactgtctctagtgcctccaccaagggcccttccgtgttccctctggccccttcctccaagtccacctccggcggcaccgccgctctgggctgcctggtgaaggactacttccctgagcctgtgaccgtgtcctggaactctggcgccctgaccagcggcgtgcacaccttccctgccgtgctgcagtcctccggcctgtactccctgtcctccgtggtgaccgtgccttcctcctccctgggcacccagacctacatctgcaacgtgaaccacaagccttccaacaccaaggtggacaagaaggtggagcctaagtcctgcgacaagacccacacgtgccctccatgcccagctcccgagctgctgggcggaccaagcgtgtttctgttccctcctaagcctaaggacaccctgatgatctcccggacccctgaggtgacgtgcgtggtggtggacgtgtcccacgaggacccagaggtgaagttcaattggtacgtggacggcgtggaggtgcacaacgccaagaccaagcctcgggaggaacagtacaactccacctaccgggtggtgtctgtgctgaccgtgctgcaccaggactggctgaacggcaaggaatacaagtgcaaagtctccaacaaggccctgcctgcccccatcgaaaagaccatctccaaggccaagggccagcctcgcgagcctcaggtgtacaccctgcctccaagcagggaggaaatgaccaagaaccaggtgtccctgacctgtctggtgaagggcttctacccttccgatatcgccgtggagtgggagtccaacggccagcctgagaacaactacaagaccacccctcctgtgctggactccgacggctccttcttcctgtactccaagctgaccgtggacaagtcccggtggcagcagggcaacgtgttctcctgctccgtgatgcacgaggccctgcacaaccactacacccagaagagcctctccctgtccccgggtaaa

SEQ ID NO: 21431 - DNA, 1350 bp, Artificial Sequence
  source: /note="Description of Artificial Sequence: Synthetic polynucleotide"
caggtccagctggtccagagcggagcagaagtgaagaaacccggaagtagcgtgaaggtgtcatgcaaggcaagcggcggaacatttagtgattacgtgatctcctgggtccgacaggctccaggacagggactggagtggatgggggaaattttccctagatcaggaagcacctactataacgagaagtttaaaggcaaggtgaccatcacagcagacaagtccacttctaccgcctacatggagctgagctccctgcggagcgaagacaccgccgtctactattgcgctagagattactatgggacatctttcgccatggactattggggacagggcacactggtgactgtctctagtgcctccaccaagggcccttccgtgttccctctggccccttcctccaagtccacctccggcggcaccgccgctctgggctgcctggtgaaggactacttccctgagcctgtgaccgtgtcctggaactctggcgccctgaccagcggcgtgcacaccttccctgccgtgctgcagtcctccggcctgtactccctgtcctccgtggtgaccgtgccttcctcctccctgggcacccagacctacatctgcaacgtgaaccacaagccttccaacaccaaggtggacaagaaggtggagcctaagtcctgcgacaagacccacacgtgccctccatgcccagctcccgagctgctgggcggaccaagcgtgtttctgttccctcctaagcctaaggacaccctgatgatctcccggacccctgaggtgacgtgcgtggtggtggacgtgtcccacgaggacccagaggtgaagttcaattggtacgtggacggcgtggaggtgcacaacgccaagaccaagcctcgggaggaacagtacaactccacctaccgggtggtgtctgtgctgaccgtgctgcaccaggactggctgaacggcaaggaatacaagtgcaaagtctccaacaaggccctgcctgcccccatcgaaaagaccatctccaaggccaagggccagcctcgcgagcctcaggtgtacaccctgcctccaagcagggaggaaatgaccaagaaccaggtgtccctgacctgtctggtgaagggcttctacccttccgatatcgccgtggagtgggagtccaacggccagcctgagaacaactacaagaccacccctcctgtgctggactccgacggctccttcttcctgtactccaagctgaccgtggacaagtcccggtggcagcagggcaacgtgttctcctgctccgtgatgcacgaggccctgcacaaccactacacccagaagagcctctccctgtccccgggtaaa

SEQ ID NO: 21432 - DNA, 1350 bp, Artificial Sequence
  source: /note="Description of Artificial Sequence: Synthetic polynucleotide"
caggtccagctggtccagagcggagcagaagtgaagaaacccggaagtagcgtgaaggtgtcatgcaaggcaagcggcggaacatttagtgattacgtgatctcctgggtccgacaggctccaggacagggactggagtggatgggggaaattttccctagatcaggaagcacctactataacgagaagtttaaaggccgcgccaccatcacagcagacaagtccacttctaccgcctacatggagctgagctccctgcggagcgaagacaccgccgtctactattgcgctagagattactatgggacatctttcgccatggactattggggacagggcacactggtgactgtctctagtgcctccaccaagggcccttccgtgttccctctggccccttcctccaagtccacctccggcggcaccgccgctctgggctgcctggtgaaggactacttccctgagcctgtgaccgtgtcctggaactctggcgccctgaccagcggcgtgcacaccttccctgccgtgctgcagtcctccggcctgtactccctgtcctccgtggtgaccgtgccttcctcctccctgggcacccagacctacatctgcaacgtgaaccacaagccttccaacaccaaggtggacaagaaggtggagcctaagtcctgcgacaagacccacacgtgccctccatgcccagctcccgagctgctgggcggaccaagcgtgtttctgttccctcctaagcctaaggacaccctgatgatctcccggacccctgaggtgacgtgcgtggtggtggacgtgtcccacgaggacccagaggtgaagttcaattggtacgtggacggcgtggaggtgcacaacgccaagaccaagcctcgggaggaacagtacaactccacctaccgggtggtgtctgtgctgaccgtgctgcaccaggactggctgaacggcaaggaatacaagtgcaaagtctccaacaaggccctgcctgcccccatcgaaaagaccatctccaaggccaagggccagcctcgcgagcctcaggtgtacaccctgcctccaagcagggaggaaatgaccaagaaccaggtgtccctgacctgtctggtgaagggcttctacccttccgatatcgccgtggagtgggagtccaacggccagcctgagaacaactacaagaccacccctcctgtgctggactccgacggctccttcttcctgtactccaagctgaccgtggacaagtcccggtggcagcagggcaacgtgttctcctgctccgtgatgcacgaggccctgcacaaccactacacccagaagagcctctccctgtccccgggtaaa

SEQ ID NO: 21433 - DNA, 1350 bp, Artificial Sequence
  source: /note="Description of Artificial Sequence: Synthetic polynucleotide"
caggtccagctggtccagagcggagcagaagtgaagaaacccggaagtagcgtgaaggtgtcatgcaaggcaagcggcggaacatttagtgattacgtgatctcctgggtccgacaggctccaggacagggactggagtggatgggggaaattttccctagatcaggaagcacctactataacgagaagtttaaaggccgcgtgaccctgacagcagacaagtccacttctaccgcctacatggagctgagctccctgcggagcgaagacaccgccgtctactattgcgctagagattactatgggacatctttcgccatggactattggggacagggcacactggtgactgtctctagtgcctccaccaagggcccttccgtgttccctctggccccttcctccaagtccacctccggcggcaccgccgctctgggctgcctggtgaaggactacttccctgagcctgtgaccgtgtcctggaactctggcgccctgaccagcggcgtgcacaccttccctgccgtgctgcagtcctccggcctgtactccctgtcctccgtggtgaccgtgccttcctcctccctgggcacccagacctacatctgcaacgtgaaccacaagccttccaacaccaaggtggacaagaaggtggagcctaagtcctgcgacaagacccacacgtgccctccatgcccagctcccgagctgctgggcggaccaagcgtgtttctgttccctcctaagcctaaggacaccctgatgatctcccggacccctgaggtgacgtgcgtggtggtggacgtgtcccacgaggacccagaggtgaagttcaattggtacgtggacggcgtggaggtgcacaacgccaagaccaagcctcgggaggaacagtacaactccacctaccgggtggtgtctgtgctgaccgtgctgcaccaggactggctgaacggcaaggaatacaagtgcaaagtctccaacaaggccctgcctgcccccatcgaaaagaccatctccaaggccaagggccagcctcgcgagcctcaggtgtacaccctgcctccaagcagggaggaaatgaccaagaaccaggtgtccctgacctgtctggtgaagggcttctacccttccgatatcgccgtggagtgggagtccaacggccagcctgagaacaactacaagaccacccctcctgtgctggactccgacggctccttcttcctgtactccaagctgaccgtggacaagtcccggtggcagcagggcaacgtgttctcctgctccgtgatgcacgaggccctgcacaaccactacacccagaagagcctctccctgtccccgggtaaa

SEQ ID NO: 21434 - DNA, 1350 bp, Artificial Sequence
  source: /note="Description of Artificial Sequence: Synthetic polynucleotide"
caggtccagctggtccagagcggagcagaagtgaagaaacccggaagtagcgtgaaggtgtcatgcaaggcaagcggcggaacatttagtgattacgtgatctcctgggtccgacaggctccaggacagggactggagtggatgggggaaattttccctagatcaggaagcacctactataacgagaagtttaaaggccgcgtgaccatcacagcagacaagtccacttctaccgcctacatggagctgagctccctgcggagcgaagacaccgccgtctatttctgcgctagagattactatgggacatctttcgccatggactattggggacagggcacactggtgactgtctctagtgcctccaccaagggcccttccgtgttccctctggccccttcctccaagtccacctccggcggcaccgccgctctgggctgcctggtgaaggactacttccctgagcctgtgaccgtgtcctggaactctggcgccctgaccagcggcgtgcacaccttccctgccgtgctgcagtcctccggcctgtactccctgtcctccgtggtgaccgtgccttcctcctccctgggcacccagacctacatctgcaacgtgaaccacaagccttccaacaccaaggtggacaagaaggtggagcctaagtcctgcgacaagacccacacgtgccctccatgcccagctcccgagctgctgggcggaccaagcgtgtttctgttccctcctaagcctaaggacaccctgatgatctcccggacccctgaggtgacgtgcgtggtggtggacgtgtcccacgaggacccagaggtgaagttcaattggtacgtggacggcgtggaggtgcacaacgccaagaccaagcctcgggaggaacagtacaactccacctaccgggtggtgtctgtgctgaccgtgctgcaccaggactggctgaacggcaaggaatacaagtgcaaagtctccaacaaggccctgcctgcccccatcgaaaagaccatctccaaggccaagggccagcctcgcgagcctcaggtgtacaccctgcctccaagcagggaggaaatgaccaagaaccaggtgtccctgacctgtctggtgaagggcttctacccttccgatatcgccgtggagtgggagtccaacggccagcctgagaacaactacaagaccacccctcctgtgctggactccgacggctccttcttcctgtactccaagctgaccgtggacaagtcccggtggcagcagggcaacgtgttctcctgctccgtgatgcacgaggccctgcacaaccactacacccagaagagcctctccctgtccccgggtaaa

SEQ ID NO: 21435 - DNA, 1350 bp, Artificial Sequence
  source: /note="Description of Artificial Sequence: Synthetic polynucleotide"
caggtccagctggtccagagcggagcagaagtgaagaaacccggaagtagcgtgaaggtgtcatgcaaggcaagcgggtatatttttagtgattacgtgatctcctgggtccgacaggctccaggacagggactggagtggatgggggaaattttccctagatcaggaagcacctactataacgagaagtttaaaggccgcgtgaccatcacagcagacaagtccacttctaccgcctacatggagctgagctccctgcggagcgaagacaccgccgtctactattgcgctagagattactatgggacatctttcgccatggactattggggacagggcacactggtgactgtctctagtgcctccaccaagggcccttccgtgttccctctggccccttcctccaagtccacctccggcggcaccgccgctctgggctgcctggtgaaggactacttccctgagcctgtgaccgtgtcctggaactctggcgccctgaccagcggcgtgcacaccttccctgccgtgctgcagtcctccggcctgtactccctgtcctccgtggtgaccgtgccttcctcctccctgggcacccagacctacatctgcaacgtgaaccacaagccttccaacaccaaggtggacaagaaggtggagcctaagtcctgcgacaagacccacacgtgccctccatgcccagctcccgagctgctgggcggaccaagcgtgtttctgttccctcctaagcctaaggacaccctgatgatctcccggacccctgaggtgacgtgcgtggtggtggacgtgtcccacgaggacccagaggtgaagttcaattggtacgtggacggcgtggaggtgcacaacgccaagaccaagcctcgggaggaacagtacaactccacctaccgggtggtgtctgtgctgaccgtgctgcaccaggactggctgaacggcaaggaatacaagtgcaaagtctccaacaaggccctgcctgcccccatcgaaaagaccatctccaaggccaagggccagcctcgcgagcctcaggtgtacaccctgcctccaagcagggaggaaatgaccaagaaccaggtgtccctgacctgtctggtgaagggcttctacccttccgatatcgccgtggagtgggagtccaacggccagcctgagaacaactacaagaccacccctcctgtgctggactccgacggctccttcttcctgtactccaagctgaccgtggacaagtcccggtggcagcagggcaacgtgttctcctgctccgtgatgcacgaggccctgcacaaccactacacccagaagagcctctccctgtccccgggtaaa

SEQ ID NO: 21436 - DNA, 1350 bp, Artificial Sequence
  source: /note="Description of Artificial Sequence: Synthetic polynucleotide"
caggtccagctgcagcagagcggccccgaactggtcaaacccggaacctccgtgaagatgccttgtaaagcctcaggatacattttcaccgattacgtgatctcttgggtcaaacagcgaacaggacagggactggagtggatcggggaaattttccccagatccggatctacttactataacgagaagtttaaaggcaaggccaccctgacagctgacaagagctccaatacagcttacatgcagctgtctagtgtgactagtgaagactcagcagtctatttctgcgccagggattactatgggacaagttttgccatggactattggggacagggcacttccgtgaccgtctcaagcgcctccaccaagggcccttccgtgttccctctggccccttcctccaagtccacctccggcggcaccgccgctctgggctgcctggtgaaggactacttccctgagcctgtgaccgtgtcctggaactctggcgccctgaccagcggcgtgcacaccttccctgccgtgctgcagtcctccggcctgtactccctgtcctccgtggtgaccgtgccttcctcctccctgggcacccagacctacatctgcaacgtgaaccacaagccttccaacaccaaggtggacaagaaggtggagcctaagtcctgcgacaagacccacacgtgccctccatgcccagctcccgagctgctgggcggaccaagcgtgtttctgttccctcctaagcctaaggacaccctgatgatctcccggacccctgaggtgacgtgcgtggtggtggacgtgtcccacgaggacccagaggtgaagttcaattggtacgtggacggcgtggaggtgcacaacgccaagaccaagcctcgggaggaacagtacaactccacctaccgggtggtgtctgtgctgaccgtgctgcaccaggactggctgaacggcaaggaatacaagtgcaaagtctccaacaaggccctgcctgcccccatcgaaaagaccatctccaaggccaagggccagcctcgcgagcctcaggtgtacaccctgcctccaagcagggaggaaatgaccaagaaccaggtgtccctgacctgtctggtgaagggcttctacccttccgatatcgccgtggagtgggagtccaacggccagcctgagaacaactacaagaccacccctcctgtgctggactccgacggctccttcttcctgtactccaagctgaccgtggacaagtcccggtggcagcagggcaacgtgttctcctgctccgtgatgcacgaggccctgcacaaccactacacccagaagagcctctccctgtccccgggtaaa

SEQ ID NO: 21437 - DNA, 1332 bp, Mus musculus
caggtccaattgcagcagtctggacctgagctggtgaagcctgggacttcagtgaagatgccctgtaaggcttctggatacatattcactgactatgtcataagctgggtgaagcagagaactggacagggccttgagtggattggagagatttttcctagaagtggtagtacttactacaatgagaagttcaagggcaaggccacactgactgcagacaaatcctccaacacagcctacatgcagctcagcagcgtgacatctgaggactctgcggtctatttctgtgcaagagattactacggtacttcatttgctatggactactggggtcaaggaacctcagtcaccgtctcctcagccaaaacgacacccccatctgtctatccactggcccctggatctgctgcccaaactaactccatggtgaccctgggatgcctggtcaagggctatttccctgagccagtgacagtgacctggaactctggatccctgtccagcggtgtgcacaccttcccagctgtcctgcagtctgacctctacactctgagcagctcagtgactgtcccctccagcacctggcccagccagaccgtcacctgcaacgttgcccacccggccagcagcaccaaggtggacaagaaaattgtgcccagggattgtggttgtaagccttgcatatgtacagtcccagaagtatcatctgtcttcatcttccccccaaagcccaaggatgtgctcaccattactctgactcctaaggtcacgtgtgttgtggtagacatcagcaaggatgatcccgaggtccagttcagctggtttgtagatgatgtggaggtgcacacagctcagacgaaaccccgggaggagcagatcaacagcactttccgttcagtcagtgaacttcccatcatgcaccaggactggctcaatggcaaggagttcaaatgcagggtcaacagtgcagctttccctgcccccatcgagaaaaccatctccaaaaccaaaggcagaccgaaggctccacaggtgtacaccattccacctcccaaggagcagatggccaaggataaagtcagtctgacctgcatgataacaaacttcttccctgaagacattactgtggagtggcagtggaatgggcagccagcggagaactacaagaacactcagcccatcatggacacagatggctcttacttcgtctacagcaagctcaatgtgcagaagagcaactgggaggcaggaaatactttcacctgctctgtgttacatgagggcctgcacaaccaccatactgagaagagcctctcccactctcctggtaaa

SEQ ID NO: 21438 - DNA, 1350 bp, Artificial Sequence; identical to SEQ ID NO: 21436
  source: /note="Description of Artificial Sequence: Synthetic polynucleotide"

SEQ ID NO: 21439 - DNA, 1341 bp, Artificial Sequence
  source: /note="Description of Artificial Sequence: Synthetic polynucleotide"
caggtccagctggtccagagcggagcagaagtgaagaaacccggaagtagcgtgaaggtgtcatgcaaggcaagcggcggaacatttagtgattacgtgatctcctgggtccgacaggctccaggacagggactggagtggatgggggaaattttccctagatcaggaagcacctactataacgagaagtttaaaggccgcgtgaccatcacagcagacaagtccacttctaccgcctacatggagctgagctccctgcggagcgaagacaccgccgtctactattgcgctagagattactatgggacatctttcgccatggactattggggacagggcacactggtgactgtctctagtgcctccaccaagggcccatccgtcttccccctggcgccctgctccaggagcacctccgagagcacagccgccctgggctgcctggtcaaggactacttccccgaaccggtgacggtgtcgtggaactcaggcgccctgaccagcggcgtgcacaccttcccggctgtcctacagtcctcaggactctactccctcagcagcgtggtgaccgtgccctccagcagcttgggcacgaagacctacacgtgcaacgtagatcacaagcccagcaacaccaaggtggacaagagagttgagtccaaatatggtcccccatgcccaccatgcccagcacctgagttcctggggggaccatcagtcttcctgttccccccaaaacccaaggacactctcatgatctcccggacccctgaggtcacgtgcgtggtggtggacgtgagccaggaagaccccgaggtccagttcaactggtacgtggatggcgtggaggtgcataatgccaagacaaagccgcgggaggagcagttcaacagcacgtaccgtgtggtcagcgtcctcaccgtcctgcaccaggactggctgaacggcaaggagtacaagtgcaaggtctccaacaaaggcctcccgtcctccatcgagaaaaccatctccaaagccaaagggcagccccgagagccacaggtgtacaccctgcccccatcccaggaggagatgaccaagaaccaggtcagcctgacgtgcctggtcaaaggcttctaccccagcgacatcgccgtggagtgggagagcaatgggcagccggagaacaactacaagaccacgcctcccgtgctggactccgacggctccttcttcctctacagcaggctaaccgtggacaagagcagatggcaggaggggaatgtcttctcatgctccgtgatgcatgaggctctgcacaaccactacacacagaagagcctctccctgtctctgggtaaa

SEQ ID NO: 21440 - DNA, 1341 bp, Artificial Sequence
  source: /note="Description of Artificial Sequence: Synthetic polynucleotide"
caggtccagctggtgcagtcaggccccgaagtgaagaagcccggaagtagtgtcaaggtcccatgtaaagcatcagggtatatttttactgattacgtgatcagctgggtcaaacaggcaccaggacagggactggagtggatcggggaaattttccctagatcaggaagcacatactataacgagaagtttaaaggcaaggccaccctgacagctgacaagtccacttctaccgcttacatggagctgagctccctgcggagtgaagacaccgcagtgtatttctgcgccagagattactatgggacatcctttgcaatggactattggggacagggcacactggtgactgtctctagtgcctccaccaagggcccatccgtcttccccctggcgccctgctccaggagcacctccgagagcacagccgccctgggctgcctggtcaaggactacttccccgaaccggtgacggtgtcgtggaactcaggcgccctgaccagcggcgtgcacaccttcccggctgtcctacagtcctcaggactctactccctcagcagcgtggtgaccgtgccctccagcagcttgggcacgaagacctacacgtgcaacgtagatcacaagcccagcaacaccaaggtggacaagagagttgagtccaaatatggtcccccatgcccaccatgcccagcacctgagttcctggggggaccatcagtcttcctgttccccccaaaacccaaggacactctcatgatctcccggacccctgaggtcacgtgcgtggtggtggacgtgagccaggaagaccccgaggtccagttcaactggtacgtggatggcgtggaggtgcataatgccaagacaaagccgcgggaggagcagttcaacagcacgtaccgtgtggtcagcgtcctcaccgtcctgcaccaggactggctgaacggcaaggagtacaagtgcaaggtctccaacaaaggcctcccgtcctccatcgagaaaaccatctccaaagccaaagggcagccccgagagccacaggtgtacaccctgcccccatcccaggaggagatgaccaagaaccaggtcagcctgacgtgcctggtcaaaggcttctaccccagcgacatcgccgtggagtgggagagcaatgggcagccggagaacaactacaagaccacgcctcccgtgctggactccgacggctccttcttcctctacagcaggctaaccgtggacaagagcagatggcaggaggggaatgtcttctcatgctccgtgatgcatgaggctctgcacaaccactacacacagaagagcctctccctgtctctgggtaaa

SEQ ID NO: 21441 - DNA, 1341 bp, Artificial Sequence
  source: /note="Description of Artificial Sequence: Synthetic polynucleotide"
caggtccagctggtccagagcggacccgaagtgaagaaacccggaagtagcgtgaaggtgccatgcaaggcaagcggcggaacatttagtgattacgtgatctcctgggtccgacaggctccaggacagggactggagtggatgggggaaattttccctagatcaggaagcacctactataacgagaagtttaaaggccgcgtgaccatcacagcagacaagtccacttctaccgcctacatggagctgagctccctgcggagcgaagacaccgccgtctactattgcgctagagattactatgggacatctttcgccatggactattggggacagggcacactggtgactgtctctagtgcctccaccaagggcccatccgtcttccccctggcgccctgctccaggagcacctccgagagcacagccgccctgggctgcctggtcaaggactacttccccgaaccggtgacggtgtcgtggaactcaggcgccctgaccagcggcgtgcacaccttcccggctgtcctacagtcctcaggactctactccctcagcagcgtggtgaccgtgccctccagcagcttgggcacgaagacctacacgtgcaacgtagatcacaagcccagcaacaccaaggtggacaagagagttgagtccaaatatggtcccccatgcccaccatgcccagcacctgagttcctggggggaccatcagtcttcctgttccccccaaaacccaaggacactctcatgatctcccggacccctgaggtcacgtgcgtggtggtggacgtgagccaggaagaccccgaggtccagttcaactggtacgtggatggcgtggaggtgcataatgccaagacaaagccgcgggaggagcagttcaacagcacgtaccgtgtggtcagcgtcctcaccgtcctgcaccaggactggctgaacggcaaggagtacaagtgcaaggtctccaacaaaggcctcccgtcctccatcgagaaaaccatctccaaagccaaagggcagccccgagagccacaggtgtacaccctgcccccatcccaggaggagatgaccaagaaccaggtcagcctgacgtgcctggtcaaaggcttctaccccagcgacatcgccgtggagtgggagagcaatgggcagccggagaacaactacaagaccacgcctcccgtgctggactccgacggctccttcttcctctacagcaggctaaccgtggacaagagcagatggcaggaggggaatgtcttctcatgctccgtgatgcatgaggctctgcacaaccactacacacagaagagcctctccctgtctctgggtaaa

SEQ ID NO: 21442 - DNA, 1341 bp, Artificial Sequence
  source: /note="Description of Artificial Sequence: Synthetic polynucleotide"
caggtccagctggtccagagcggagcagaagtgaagaaacccggaagtagcgtgaaggtgtcatgcaaggcaagcgggtatacatttagtgattacgtgatctcctgggtccgacaggctccaggacagggactggagtggatgggggaaattttccctagatcaggaagcacctactataacgagaagtttaaaggccgcgtgaccatcacagcagacaagtccacttctaccgcctacatggagctgagctccctgcggagcgaagacaccgccgtctactattgcgctagagattactatgggacatctttcgccatggactattggggacagggcacactggtgactgtctctagtgcctccaccaagggcccatccgtcttccccctggcgccctgctccaggagcacctccgagagcacagccgccctgggctgcctggtcaaggactacttccccgaaccggtgacggtgtcgtggaactcaggcgccctgaccagcggcgtgcacaccttcccggctgtcctacagtcctcaggactctactccctcagcagcgtggtgaccgtgccctccagcagcttgggcacgaagacctacacgtgcaacgtagatcacaagcccagcaacaccaaggtggacaagagagttgagtccaaatatggtcccccatgcccaccatgcccagcacctgagttcctggggggaccatcagtcttcctgttccccccaaaacccaaggacactctcatgatctcccggacccctgaggtcacgtgcgtggtggtggacgtgagccaggaagaccccgaggtccagttcaactggtacgtggatggcgtggaggtgcataatgccaagacaaagccgcgggaggagcagttcaacagcacgtaccgtgtggtcagcgtcctcaccgtcctgcaccaggactggctgaacggcaaggagtacaagtgcaaggtctccaacaaaggcctcccgtcctccatcgagaaaaccatctccaaagccaaagggcagccccgagagccacaggtgtacaccctgcccccatcccaggaggagatgaccaagaaccaggtcagcctgacgtgcctggtcaaaggcttctaccccagcgacatcgccgtggagtgggagagcaatgggcagccggagaacaactacaagaccacgcctcccgtgctggactccgacggctccttcttcctctacagcaggctaaccgtggacaagagcagatggcaggaggggaatgtcttctcatgctccgtgatgcatgaggctctgcacaaccactacacacagaagagcctctccctgtctctgggtaaa

SEQ ID NO: 21443 - DNA, 1341 bp, Artificial Sequence
  source: /note="Description of Artificial Sequence: Synthetic polynucleotide"
caggtccagctggtccagagcggagcagaagtgaagaaacccggaagtagcgtgaaggtgtcatgcaaggcaagcggcggaatttttagtgattacgtgatctcctgggtccgacaggctccaggacagggactggagtggatgggggaaattttccctagatcaggaagcacctactataacgagaagtttaaaggccgcgtgaccatcacagcagacaagtccacttctaccgcctacatggagctgagctccctgcggagcgaagacaccgccgtctactattgcgctagagattactatgggacatctttcgccatggactattggggacagggcacactggtgactgtctctagtgcctccaccaagggcccatccgtcttccccctggcgccctgctccaggagcacctccgagagcacagccgccctgggctgcctggtcaaggactacttccccgaaccggtgacggtgtcgtggaactcaggcgccctgaccagcggcgtgcacaccttcccggctgtcctacagtcctcaggactctactccctcagcagcgtggtgaccgtgccctccagcagcttgggcacgaagacctacacgtgcaacgtagatcacaagcccagcaacaccaaggtggacaagagagttgagtccaaatatggtcccccatgcccaccatgcccagcacctgagttcctggggggaccatcagtcttcctgttccccccaaaacccaaggacactctcatgatctcccggacccctgaggtcacgtgcgtggtggtggacgtgagccaggaagaccccgaggtccagttcaactggtacgtggatggcgtggaggtgcataatgccaagacaaagccgcgggaggagcagttcaacagcacgtaccgtgtggtcagcgtcctcaccgtcctgcaccaggactggctgaacggcaaggagtacaagtgcaaggtctccaacaaaggcctcccgtcctccatcgagaaaaccatctccaaagccaaagggcagccccgagagccacaggtgtacaccctgcccccatcccaggaggagatgaccaagaaccaggtcagcctgacgtgcctggtcaaaggcttctaccccagcgacatcgccgtggagtgggagagcaatgggcagccggagaacaactacaagaccacgcctcccgtgctggactccgacggctccttcttcctctacagcaggctaaccgtggacaagagcagatggcaggaggggaatgtcttctcatgctccgtgatgcatgaggctctgcacaaccactacacacagaagagcctctccctgtctctgggtaaa

SEQ ID NO: 21444 - DNA, 1341 bp, Artificial Sequence
  source: /note="Description of Artificial Sequence: Synthetic polynucleotide"
caggtccagctggtccagagcggagcagaagtgaagaaacccggaagtagcgtgaaggtgtcatgcaaggcaagcggcggaacatttactgattacgtgatctcctgggtccgacaggctccaggacagggactggagtggatgggggaaattttccctagatcaggaagcacctactataacgagaagtttaaaggccgcgtgaccatcacagcagacaagtccacttctaccgcctacatggagctgagctccctgcggagcgaagacaccgccgtctactattgcgctagagattactatgggacatctttcgccatggactattggggacagggcacactggtgactgtctctagtgcctccaccaagggcccatccgtcttccccctggcgccctgctccaggagcacctccgagagcacagccgccctgggctgcctggtcaaggactacttccccgaaccggtgacggtgtcgtggaactcaggcgccctgaccagcggcgtgcacaccttcccggctgtcctacagtcctcaggactctactccctcagcagcgtggtgaccgtgccctccagcagcttgggcacgaagacctacacgtgcaacgtagatcacaagcccagcaacaccaaggtggacaagagagttgagtccaaatatggtcccccatgcccaccatgcccagcacctgagttcctggggggaccatcagtcttcctgttccccccaaaacccaaggacactctcatgatctcccggacccctgaggtcacgtgcgtggtggtggacgtgagccaggaagaccccgaggtccagttcaactggtacgtggatggcgtggaggtgcataatgccaagacaaagccgcgggaggagcagttcaacagcacgtaccgtgtggtcagcgtcctcaccgtcctgcaccaggactggctgaacggcaaggagtacaagtgcaaggtctccaacaaaggcctcccgtcctccatcgagaaaaccatctccaaagccaaagggcagccccgagagccacaggtgtacaccctgcccccatcccaggaggagatgaccaagaaccaggtcagcctgacgtgcctggtcaaaggcttctaccccagcgacatcgccgtggagtgggagagcaatgggcagccggagaacaactacaagaccacgcctcccgtgctggactccgacggctccttcttcctctacagcaggctaaccgtggacaagagcagatggcaggaggggaatgtcttctcatgctccgtgatgcatgaggctctgcacaaccactacacacagaagagcctctccctgtctctgggtaaa

SEQ ID NO: 21445 - DNA, 1341 bp, Artificial Sequence
  source: /note="Description of Artificial Sequence: Synthetic polynucleotide"
caggtccagctggtccagagcggagcagaagtgaagaaacccggaagtagcgtgaaggtgtcatgcaaggcaagcggcggaacatttagtgattacgtgatctcctgggtcaaacaggctccaggacagggactggagtggatgggggaaattttccctagatcaggaagcacctactataacgagaagtttaaaggccgcgtgaccatcacagcagacaagtccacttctaccgcctacatggagctgagctccctgcggagcgaagacaccgccgtctactattgcgctagagattactatgggacatctttcgccatggactattggggacagggcacactggtgactgtctctagtgcctccaccaagggcccatccgtcttccccctggcgccctgctccaggagcacctccgagagcacagccgccctgggctgcctggtcaaggactacttccccgaaccggtgacggtgtcgtggaactcaggcgccctgaccagcggcgtgcacaccttcccggctgtcctacagtcctcaggactctactccctcagcagcgtggtgaccgtgccctccagcagcttgggcacgaagacctacacgtgcaacgtagatcacaagcccagcaacaccaaggtggacaagagagttgagtccaaatatggtcccccatgcccaccatgcccagcacctgagttcctggggggaccatcagtcttcctgttccccccaaaacccaaggacactctcatgatctcccggacccctgaggtcacgtgcgtggtggtggacgtgagccaggaagaccccgaggtccagttcaactggtacgtggatggcgtggaggtgcataatgccaagacaaagccgcgggaggagcagttcaacagcacgtaccgtgtggtcagcgtcctcaccgtcctgcaccaggactggctgaacggcaaggagtacaagtgcaaggtctccaacaaaggcctcccgtcctccatcgagaaaaccatctccaaagccaaagggcagccccgagagccacaggtgtacaccctgcccccatcccaggaggagatgaccaagaaccaggtcagcctgacgtgcctggtcaaaggcttctaccccagcgacatcgccgtggagtgggagagcaatgggcagccggagaacaactacaagaccacgcctcccgtgctggactccgacggctccttcttcctctacagcaggctaaccgtggacaagagcagatggcaggaggggaatgtcttctcatgctccgtgatgcatgaggctctgcacaaccactacacacagaagagcctctccctgtctctgggtaaa

SEQ ID NO: 21446 - DNA, 1341 bp, Artificial Sequence
  source: /note="Description of Artificial Sequence: Synthetic polynucleotide"
caggtccagctggtccagagcggagcagaagtgaagaaacccggaagtagcgtgaaggtgtcatgcaaggcaagcggcggaacatttagtgattacgtgatctcctgggtccgacaggctccaggacagggactggagtggatcggggaaattttccctagatcaggaagcacctactataacgagaagtttaaaggccgcgtgaccatcacagcagacaagtccacttctaccgcctacatggagctgagctccctgcggagcgaagacaccgccgtctactattgcgctagagattactatgggacatctttcgccatggactattggggacagggcacactggtgactgtctctagtgcctccaccaagggcccatccgtcttccccctggcgccctgctccaggagcacctccgagagcacagccgccctgggctgcctggtcaaggactacttccccgaaccggtgacggtgtcgtggaactcaggcgccctgaccagcggcgtgcacaccttcccggctgtcctacagtcctcaggactctactccctcagcagcgtggtgaccgtgccctccagcagcttgggcacgaagacctacacgtgcaacgtagatcacaagcccagcaacaccaaggtggacaagagagttgagtccaaatatggtcccccatgcccaccatgcccagcacctgagttcctggggggaccatcagtcttcctgttccccccaaaacccaaggacactctcatgatctcccggacccctgaggtcacgtgcgtggtggtggacgtgagccaggaagaccccgaggtccagttcaactggtacgtggatggcgtggaggtgcataatgccaagacaaagccgcgggaggagcagttcaacagcacgtaccgtgtggtcagcgtcctcaccgtcctgcaccaggactggctgaacggcaaggagtacaagtgcaaggtctccaacaaaggcctcccgtcctccatcgagaaaaccatctccaaagccaaagggcagccccgagagccacaggtgtacaccctgcccccatcccaggaggagatgaccaagaaccaggtcagcctgacgtgcctggtcaaaggcttctaccccagcgacatcgccgtggagtgggagagcaatgggcagccggagaacaactacaagaccacgcctcccgtgctggactccgacggctccttcttcctctacagcaggctaaccgtggacaagagcagatggcaggaggggaatgtcttctcatgctccgtgatgcatgaggctctgcacaaccactacacacagaagagcctctccctgtctctgggtaaa

SEQ ID NO: 21447 - DNA, 1341 bp, Artificial Sequence
  source: /note="Description of Artificial Sequence: Synthetic polynucleotide"
caggtccagctggtccagagcggagcagaagtgaagaaacccggaagtagcgtgaaggtgtcatgcaaggcaagcggcggaacatttagtgattacgtgatctcctgggtccgacaggctccaggacagggactggagtggatgggggaaattttccctagatcaggaagcacctactataacgagaagtttaaaggcaaggtgaccatcacagcagacaagtccacttctaccgcctacatggagctgagctccctgcggagcgaagacaccgccgtctactattgcgctagagattactatgggacatctttcgccatggactattggggacagggcacactggtgactgtctctagtgcctccaccaagggcccatccgtcttccccctggcgccctgctccaggagcacctccgagagcacagccgccctgggctgcctggtcaaggactacttccccgaaccggtgacggtgtcgtggaactcaggcgccctgaccagcggcgtgcacaccttcccggctgtcctacagtcctcaggactctactccctcagcagcgtggtgaccgtgccctccagcagcttgggcacgaagacctacacgtgcaacgtagatcacaagcccagcaacaccaaggtggacaagagagttgagtccaaatatggtcccccatgcccaccatgcccagcacctgagttcctggggggaccatcagtcttcctgttccccccaaaacccaaggacactctcatgatctcccggacccctgaggtcacgtgcgtggtggtggacgtgagccaggaagaccccgaggtccagttcaactggtacgtggatggcgtggaggtgcataatgccaagacaaagccgcgggaggagcagttcaacagcacgtaccgtgtggtcagcgtcctcaccgtcctgcaccaggactggctgaacggcaaggagtacaagtgcaaggtctccaacaaaggcctcccgtcctccatcgagaaaaccatctccaaagccaaagggcagccccgagagccacaggtgtacaccctgcccccatcccaggaggagatgaccaagaaccaggtcagcctgacgtgcctggtcaaaggcttctaccccagcgacatcgccgtggagtgggagagcaatgggcagccggagaacaactacaagaccacgcctcccgtgctggactccgacggctccttcttcctctacagcaggctaaccgtggacaagagcagatggcaggaggggaatgtcttctcatgctccgtgatgcatgaggctctgcacaaccactacacacagaagagcctctccctgtctctgggtaaa

SEQ ID NO: 21448 - DNA, 1341 bp, Artificial Sequence
  source: /note="Description of Artificial Sequence: Synthetic polynucleotide"
caggtccagctggtccagagcggagcagaagtgaagaaacccggaagtagcgtgaaggtgtcatgcaaggcaagcggcggaacatttagtgattacgtgatctcctgggtccgacaggctccaggacagggactggagtggatgggggaaattttccctagatcaggaagcacctactataacgagaagtttaaaggccgcgccaccatcacagcagacaagtccacttctaccgcctacatggagctgagctccctgcggagcgaagacaccgccgtctactattgcgctagagattactatgggacatctttcgccatggactattggggacagggcacactggtgactgtctctagtgcctccaccaagggcccatccgtcttccccctggcgccctgctccaggagcacctccgagagcacagccgccctgggctgcctggtcaaggactacttccccgaaccggtgacggtgtcgtggaactcaggcgccctgaccagcggcgtgcacaccttcccggctgtcctacagtcctcaggactctactccctcagcagcgtggtgaccgtgccctccagcagcttgggcacgaagacctacacgtgcaacgtagatcacaagcccagcaacaccaaggtggacaagagagttgagtccaaatatggtcccccatgcccaccatgcccagcacctgagttcctggggggaccatcagtcttcctgttccccccaaaacccaaggacactctcatgatctcccggacccctgaggtcacgtgcgtggtggtggacgtgagccaggaagaccccgaggtccagttcaactggtacgtggatggcgtggaggtgcataatgccaagacaaagccgcgggaggagcagttcaacagcacgtaccgtgtggtcagcgtcctcaccgtcctgcaccaggactggctgaacggcaaggagtacaagtgcaaggtctccaacaaaggcctcccgtcctccatcgagaaaaccatctccaaagccaaagggcagccccgagagccacaggtgtacaccctgcccccatcccaggaggagatgaccaagaaccaggtcagcctgacgtgcctggtcaaaggcttctaccccagcgacatcgccgtggagtgggagagcaatgggcagccggagaacaactacaagaccacgcctcccgtgctggactccgacggctccttcttcctctacagcaggctaaccgtggacaagagcagatggcaggaggggaatgtcttctcatgctccgtgatgcatgaggctctgcacaaccactacacacagaagagcctctccctgtctctgggtaaa

SEQ ID NO: 21449 - DNA, 1341 bp, Artificial Sequence
  source: /note="Description of Artificial Sequence: Synthetic polynucleotide"
caggtccagctggtccagagcggagcagaagtgaagaaacccggaagtagcgtgaaggtgtcatgcaaggcaagcggcggaacatttagtgattacgtgatctcctgggtccgacaggctccaggacagggactggagtggatgggggaaattttccctagatcaggaagcacctactataacgagaagtttaaaggccgcgtgaccctgacagcagacaagtccacttctaccgcctacatggagctgagctccctgcggagcgaagacaccgccgtctactattgcgctagagattactatgggacatctttcgccatggactattggggacagggcacactggtgactgtctctagtgcctccaccaagggcccatccgtcttccccctggcgccctgctccaggagcacctccgagagcacagccgccctgggctgcctggtcaaggactacttccccgaaccggtgacggtgtcgtggaactcaggcgccctgaccagcggcgtgcacaccttcccggctgtcctacagtcctcaggactctactccctcagcagcgtggtgaccgtgccctccagcagcttgggcacgaagacctacacgtgcaacgtagatcacaagcccagcaacaccaaggtggacaagagagttgagtccaaatatggtcccccatgcccaccatgcccagcacctgagttcctggggggaccatcagtcttcctgttccccccaaaacccaaggacactctcatgatctcccggacccctgaggtcacgtgcgtggtggtggacgtgagccaggaagaccccgaggtccagttcaactggtacgtggatggcgtggaggtgcataatgccaagacaaagccgcgggaggagcagttcaacagcacgtaccgtgtggtcagcgtcctcaccgtcctgcaccaggactggctgaacggcaaggagtacaagtgcaaggtctccaacaaaggcctcccgtcctccatcgagaaaaccatctccaaagccaaagggcagccccgagagccacaggtgtacaccctgcccccatcccaggaggagatgaccaagaaccaggtcagcctgacgtgcctggtcaaaggcttctaccccagcgacatcgccgtggagtgggagagcaatgggcagccggagaacaactacaagaccacgcctcccgtgctggactccgacggctccttcttcctctacagcaggctaaccgtggacaagagcagatggcaggaggggaatgtcttctcatgctccgtgatgcatgaggctctgcacaaccactacacacagaagagcctctccctgtctctgggtaaa

SEQ ID NO: 21450 - DNA, 1341 bp, Artificial Sequence
  source: /note="Description of Artificial Sequence: Synthetic polynucleotide"
caggtccagctggtccagagcggagcagaagtgaagaaacccggaagtagcgtgaaggtgtcatgcaaggcaagcggcggaacatttagtgattacgtgatctcctgggtccgacaggctccaggacagggactggagtggatgggggaaattttccctagatcaggaagcacctactataacgagaagtttaaaggccgcgtgaccatcacagcagacaagtccacttctaccgcctacatggagctgagctccctgcggagcgaagacaccgccgtctatttctgcgctagagattactatgggacatctttcgccatggactattggggacagggcacactggtgactgtctctagtgcctccaccaagggcccatccgtcttccccctggcgccctgctccaggagcacctccgagagcacagccgccctgggctgcctggtcaaggactacttccccgaaccggtgacggtgtcgtggaactcaggcgccctgaccagcggcgtgcacaccttcccggctgtcctacagtcctcaggactctactccctcagcagcgtggtgaccgtgccctccagcagcttgggcacgaagacctacacgtgcaacgtagatcacaagcccagcaacaccaaggtggacaagagagttgagtccaaatatggtcccccatgcccaccatgcccagcacctgagttcctggggggaccatcagtcttcctgttccccccaaaacccaaggacactctcatgatctcccggacccctgaggtcacgtgcgtggtggtggacgtgagccaggaagaccccgaggtccagttcaactggtacgtggatggcgtggaggtgcataatgccaagacaaagccgcgggaggagcagttcaacagcacgtaccgtgtggtcagcgtcctcaccgtcctgcaccaggactggctgaacggcaaggagtacaagtgcaaggtctccaacaaaggcctcccgtcctccatcgagaaaaccatctccaaagccaaagggcagccccgagagccacaggtgtacaccctgcccccatcccaggaggagatgaccaagaaccaggtcagcctgacgtgcctggtcaaaggcttctaccccagcgacatcgccgtggagtgggagagcaatgggcagccggagaacaactacaagaccacgcctcccgtgctggactccgacggctccttcttcctctacagcaggctaaccgtggacaagagcagatggcaggaggggaatgtcttctcatgctccgtgatgcatgaggctctgcacaaccactacacacagaagagcctctccctgtctctgggtaaa

SEQ ID NO: 21451 - DNA, 1341 bp, Artificial Sequence
  source: /note="Description of Artificial Sequence: Synthetic polynucleotide"
caggtccagctggtccagagcggagcagaagtgaagaaacccggaagtagcgtgaaggtgtcatgcaaggcaagcgggtatatttttagtgattacgtgatctcctgggtccgacaggctccaggacagggactggagtggatgggggaaattttccctagatcaggaagcacctactataacgagaagtttaaaggccgcgtgaccatcacagcagacaagtccacttctaccgcctacatggagctgagctccctgcggagcgaagacaccgccgtctactattgcgctagagattactatgggacatctttcgccatggactattggggacagggcacactggtgactgtctctagtgcctccaccaagggcccatccgtcttccccctggcgccctgctccaggagcacctccgagagcacagccgccctgggctgcctggtcaaggactacttccccgaaccggtgacggtgtcgtggaactcaggcgccctgaccagcggcgtgcacaccttcccggctgtcctacagtcctcaggactctactccctcagcagcgtggtgaccgtgccctccagcagcttgggcacgaagacctacacgtgcaacgtagatcacaagcccagcaacaccaaggtggacaagagagttgagtccaaatatggtcccccatgcccaccatgcccagcacctgagttcctggggggaccatcagtcttcctgttccccccaaaacccaaggacactctcatgatctcccggacccctgaggtcacgtgcgtggtggtggacgtgagccaggaagaccccgaggtccagttcaactggtacgtggatggcgtggaggtgcataatgccaagacaaagccgcgggaggagcagttcaacagcacgtaccgtgtggtcagcgtcctcaccgtcctgcaccaggactggctgaacggcaaggagtacaagtgcaaggtctccaacaaaggcctcccgtcctccatcgagaaaaccatctccaaagccaaagggcagccccgagagccacaggtgtacaccctgcccccatcccaggaggagatgaccaagaaccaggtcagcctgacgtgcctggtcaaaggcttctaccccagcgacatcgccgtggagtgggagagcaatgggcagccggagaacaactacaagaccacgcctcccgtgctggactccgacggctccttcttcctctacagcaggctaaccgtggacaagagcagatggcaggaggggaatgtcttctcatgctccgtgatgcatgaggctctgcacaaccactacacacagaagagcctctccctgtctctgggtaaa

SEQ ID NO: 21452 - DNA, 1341 bp, Artificial Sequence
  source: /note="Description of Artificial Sequence: Synthetic polynucleotide"
caggtccagctgcagcagagcggccccgaactggtcaaacccggaacctccgtgaagatgccttgtaaagcctcaggatacattttcaccgattacgtgatctcttgggtcaaacagcgaacaggacagggactggagtggatcggggaaattttccccagatccggatctacttactataacgagaagtttaaaggcaaggccaccctgacagctgacaagagctccaatacagcttacatgcagctgtctagtgtgactagtgaagactcagcagtctatttctgcgccagggattactatgggacaagttttgccatggactattggggacagggcacttccgtgaccgtctcaagcgcctccaccaagggcccatccgtcttccccctggcgccctgctccaggagcacctccgagagcacagccgccctgggctgcctggtcaaggactacttccccgaaccggtgacggtgtcgtggaactcaggcgccctgaccagcggcgtgcacaccttcccggctgtcctacagtcctcaggactctactccctcagcagcgtggtgaccgtgccctccagcagcttgggcacgaagacctacacgtgcaacgtagatcacaagcccagcaacaccaaggtggacaagagagttgagtccaaatatggtcccccatgcccaccatgcccagcacctgagttcctggggggaccatcagtcttcctgttccccccaaaacccaaggacactctcatgatctcccggacccctgaggtcacgtgcgtggtggtggacgtgagccaggaagaccccgaggtccagttcaactggtacgtggatggcgtggaggtgcataatgccaagacaaagccgcgggaggagcagttcaacagcacgtaccgtgtggtcagcgtcctcaccgtcctgcaccaggactggctgaacggcaaggagtacaagtgcaaggtctccaacaaaggcctcccgtcctccatcgagaaaaccatctccaaagccaaagggcagccccgagagccacaggtgtacaccctgcccccatcccaggaggagatgaccaagaaccaggtcagcctgacgtgcctggtcaaaggcttctaccccagcgacatcgccgtggagtgggagagcaatgggcagccggagaacaactacaagaccacgcctcccgtgctggactccgacggctccttcttcctctacagcaggctaaccgtggacaagagcagatggcaggaggggaatgtcttctcatgctccgtgatgcatgaggctctgcacaaccactacacacagaagagcctctccctgtctctgggtaaa

SEQ ID NO: 21453 - protein, 595 aa, Artificial Sequence
  source: /note="Description of Artificial Sequence: Synthetic polypeptide"
MGWSCIILFLVSTATGVHSQVQLQQPGAELVMPGASVKLSCKASGYTFTSYWMHWVKQRPGQGLEWIGEIDPSDSYTNYNQKFKGKSTLTVDKSSSTAYMQLSSLTSEDSAVYYCARSGDGSSPWYFDVWGTGTTVTVSSESQSFPNVFPLVSCESPLSDKNLVAMGCLARDFLPSTISFTWNYQNNTEVIQGIRTFPTLRTGGKYLATSQVLLSPKSILEGSDEYLVCKIHYGGKNKDLHVPIPAVAEMNPNVNVFVPPRDGFSGPAPRKSKLICEATNFTPKPITVSWLKDGKLVESGFTTDPVTIENKGSTPQTYKVISTLTISEIDWLNLNVYTCRVDHRGLTFLKNVSSTCAASPSTDILTFTIPPSFADIFLSKSANLTCLVSNLATYETLNISWASQSGEPLETKIKIMESHPNGTFSAKGVASVCVEDWNNRKEFVCTVTHRDLPSPQKKFISKPNEVHKHPPAVYLLPPAREQLNLRESATVTCLVKGFSPADISVQWLQRGQLLPQEKYVTSAPMPEPGAPGFYFTHSILTVTEEEWNSGETYTCVVGHEALPHLVTERTVDKSTGKPTLYNVSLIMSDTGGTCY

SEQ ID NO: 21454 - protein, 445 aa, Artificial Sequence; identical to SEQ ID NO: 4354
  source: /note="Description of Artificial Sequence: Synthetic polypeptide"

SEQ ID NO: 21455 - protein, 163 aa, Mus musculus
MGVSLQLLGTQDLTMRWSCIILFLVATATGVNSQVQLQQPGAELVKPGASVKMSCKASGYTFTSYWIHWVKQRPGQGLEWIGVIDPSDSYTRYNQKFKGKATLTVDTSSSTAYMQLSSLTSEDSAVYYCTTWEVDYWGQGTTLTVSSAKTTPPSVYPLAPGSL

SEQ ID NO: 21456 - protein, 149 aa, Mus musculus
MKVLSLLYLLTAIPGILSDVQLQESGPGLVKPSQSLSLTCSVTGYSITSGYYWNWIRQFPGNKLEWMGYISYDGSNNYNPSLKNRISITRDTSKNQFFLKLNSVTTEDTATYYCAGLRRDAYWGQGTLVTVSAAKTTPPSVYPLAPGSL

SEQ ID NO: 21457 - protein, 152 aa, Mus musculus
MKCSWVIFFLMAVVTGVTSEVQLQQSGAELVKPGASVKLSCTASGFNIKDTYMHWVKQRPEQGLEWIGRIDPANGNTRYDPKFQGKATITSDTSSNTAYLQLSSLTSEDTAVYYCARRVGYYFDYWGQGTTLTVSSAKTTPPSVYPLVPGSL

SEQ ID NO: 21458 - protein, 450 aa, Artificial Sequence
  source: /note="Description of Artificial Sequence: Synthetic polypeptide"
QVQLVESGGGAVQPGGSLRLSCAASGFTFSDYAMHWVRQAPGKGLQWVAVISYEGTYKYYADSVKGRFTISRDNSKNTLNLQMSSLRVEDTAVYFCVKARAFASGQRSTSTVPDYWGQGTLVTVSSAKTTPPSVYPLAPGSAAQTNSMVTLGCLVKGYFPEPVTVTWNSGSLSSGVHTFPAVLQSDLYTLSSSVTVPSSTWPSETVTCNVAHPASSTKVDKKIVPRDCGCKPCICTVPEVSSVFIFPPKPKDVLTITLTPKVTCVVVDISKDDPEVQFSWFVDDVEVHTAQTQPREEQFQSTFRSVSELPIMHQDWLNGKEFKCRVNSAAFPAPIEKTISKTKGRPKAPQVYTIPPPKEQMAKDKVSLTCMITDFFPEDITVEWQWNGQPAENYKNTQPIMDTDGSYFVYSKLNVQKSNWEAGNTFTCSVLHEGLHNHHTEKSLSHSPGK

SEQ ID NO: 21459 - protein, 445 aa, Artificial Sequence
  source: /note="Description of Artificial Sequence: Synthetic polypeptide"
EVQLVESGGGLVQPGGSLKLSCAASGFNFQISAIHWVRQASGKGLEWVGRIRSKSHNYATLYAASLKGRFTLSRDDSRNTAYLQMSSLQTEDMAVYYCTVLSANYDTFDYWGQGTLVTVSSAKTTPPSVYPLAPGSAAQTNSMVTLGCLVKGYFPEPVTVTWNSGSLSSGVHTFPAVLQSDLYTLSSSVTVPSSTWPSETVTCNVAHPASSTKVDKKIVPRDCGCKPCICTVPEVSSVFIFPPKPKDVLTITLTPKVTCVVVDISKDDPEVQFSWFVDDVEVHTAQTQPREEQFQSTFRSVSELPIMHQDWLNGKEFKCRVNSAAFPAPIEKTISKTKGRPKAPQVYTIPPPKEQMAKDKVSLTCMITDFFPEDITVEWQWNGQPAENYKNTQPIMDTDGSYFVYSKLNVQKSNWEAGNTFTCSVLHEGLHNHHTEKSLSHSPGK

SEQ ID NO: 21460 - protein, 449 aa, Artificial Sequence
  source: /note="Description of Artificial Sequence: Synthetic polypeptide"
QVQLVESGGGVVQPGRSLRVSCAASGFTFSSYDMHWVRQAPGKGLEWVAVIWFDGSNEFYADSVKGRFTISRDNSKNTLFLQMNSLRAEDTAVYYCARDLGASVTTSNAENFHHWGQGTLVTVSSAKTTPPSVYPLAPGSAAQTNSMVTLGCLVKGYFPEPVTVTWNSGSLSSGVHTFPAVLQSDLYTLSSSVTVPSSTWPSETVTCNVAHPASSTKVDKKIVPRDCGCKPCICTVPEVSSVFIFPPKPKDVLTITLTPKVTCVVVDISKDDPEVQFSWFVDDVEVHTAQTQPREEQFQSTFRSVSELPIMHQDWLNGKEFKCRVNSAAFPAPIEKTISKTKGRPKAPQVYTIPPPKEQMAKDKVSLTCMITDFFPEDITVEWQWNGQPAENYKNTQPIMDTDGSYFVYSKLNVQKSNWEAGNTFTCSVLHEGLHNHHTEKSLSHSPGK

SEQ ID NO: 21461 - protein, 444 aa, Artificial Sequence
  source: /note="Description of Artificial Sequence: Synthetic polypeptide"
EVQLVQSGAEVKKPGESLKISCKAFGYSFTNFWIGWVRQVPGKGLEWVGIIYPGDSDTRYSPSFQGQVTISADKSIDTAYLQWGHLKASDSAMYFCARRGFWTGSQIEYWGQGTQVTVSSAKTTPPSVYPLAPGSAAQTNSMVTLGCLVKGYFPEPVTVTWNSGSLSSGVHTFPAVLQSDLYTLSSSVTVPSSTWPSETVTCNVAHPASSTKVDKKIVPRDCGCKPCICTVPEVSSVFIFPPKPKDVLTITLTPKVTCVVVDISKDDPEVQFSWFVDDVEVHTAQTQPREEQFQSTFRSVSELPIMHQDWLNGKEFKCRVNSAAFPAPIEKTISKTKGRPKAPQVYTIPPPKEQMAKDKVSLTCMITDFFPEDITVEWQWNGQPAENYKNTQPIMDTDGSYFVYSKLNVQKSNWEAGNTFTCSVLHEGLHNHHTEKSLSHSPGK

SEQ ID NO: 21462 - protein, 458 aa, Artificial Sequence
  source: /note="Description of Artificial Sequence: Synthetic polypeptide"
EVQLVESGGGLVQPGGSLRLSCAASGFTFPNYVMTWVRQAPGKGLEWVSGISGSGGSTDYADSVKGRFTISRDNSKNTLYLQMNSLRVEDTALYYCAKGSGGIWGQGTMVTVSSASTKGPSVFPLAPSSKSTSGGTAALGCLVKDYFPEPVTVSWNSGALTSGVHTFPAVLQSSGLYSLSSVVTVPSSSLGTQTYICNVNHKPSNTKVDKRVEPKSCDKTHTCPPCPAPELLGGPSVFLFPPKPKDTLMISRTPEVTCVVVDVSHEDPEVKFNWYVDGVEVHNAKTKPREEQYNSTYRVVSVLTVLHQDWLNGKEYKCKVSNKALPAPIEKTISKAKGQPREPQVYTLPPSREEMTKNQVSLTCLVKGFYPSDIAVEWESNGQPENNYKTTPPVLDSDGSFFLYSKLTVDKSRWQQGNVFSCSVMHEALHNHYTQKSLSLSPGQSALTQPRSVSGSPG

SEQ ID NO: 21463 - protein, 121 aa, Artificial Sequence; identical to SEQ ID NO: 4339
  source: /note="Description of Artificial Sequence: Synthetic polypeptide"

SEQ ID NO: 21464 - protein, 120 aa, Artificial Sequence; identical to SEQ ID NO: 4806
  source: /note="Description of Artificial Sequence: Synthetic polypeptide"

SEQ ID NO: 21465 - protein, 112 aa, Homo sapiens; identical to SEQ ID NO: 5311

SEQ ID NO: 21466 - protein, 457 aa, Artificial Sequence
  source: /note="Description of Artificial Sequence: Synthetic polypeptide"
AVTLDESGGGLQTPGGGLSLVCKASGFTLSSYQMMWVRQAPGKGLEWVAGITSRGGVTGYGSAVKGRATISRDNGQSTVRLQLNNLRAEDTGTYYCAKPALDSDQCGFPEAGCIDAWGHGTEVIVSSASTKGPSVFPLAPSSKSTSGGTAALGCLVKDYFPEPVTVSWNSGALTSGVHTFPAVLQSSGLYSLSSVVTVPSSSLGTQTYICNVNHKPSNTKVDKKVEPKSCDKTHTCPPCPAPEAAGAPSVFLFPPKPKDTLMISRTPEVTCVVVDVSHEDPEVKFNWYVDGVEVHNAKTKPREEQYNSTYRVVSVLTVLHQDWLNGKEYKCKVSNKALPAPIEKTISKAKGQPREPQVYTLPPSREEMTKNQVSLTCLVKGFYPSDIAVEWESNGQPENNYKTTPPVLDSDGSFFLYSKLTVDKSRWQQGNVFSCSVMHEALHNHYTQKSLSLSPGK

SEQ ID NO: 21467 - protein, 444 aa, Artificial Sequence
  source: /note="Description of Artificial Sequence: Synthetic polypeptide"
EVQLVESGGGLVQPGGSLRLSCAASGFTFPNYVMTWVRQAPGKGLEWVSGISGSGGSTDYADSVKGRFTISRDNSKNTLYLQMNSLRVEDTALYYCAKGSGGIWGQGTMVTVSSAKTTAPSVYPLAPVCGDTTGSSVTLGCLVKGYFPEPVTLTWNSGSLSSGVHTFPAVLQSDLYTLSSSVTVTSSTWPSQSITCNVAHPASSTKVDKKIEPRGPTIKPCPPCKCPAPNLLGGPSVFIFPPKIKDVLMISLSPIVTCVVVDVSEDDPDVQISWFVNNVEVHTAQTQTHREDYNSTLRVVSALPIQHQDWMSGKEFKCKVNNKDLPAPIERTISKPKGSVRAPQVYVLPPPEEEMTKKQVTLTCMVTDFMPEDIYVEWTNNGKTELNYKNTEPVLDSDGSYFMYSKLRVEKKNWVERNSYSCSVVHEGLHNHHTTKSFSRTPGK

SEQ ID NO: 21468 - protein, 450 aa, Artificial Sequence
  source: /note="Description of Artificial Sequence: Synthetic polypeptide"
EVQLVQSGAEVKKPGESLKISCKAFGYSFTNFWIGWVRQVPGKGLEWVGIIYPGDSDTRYSPSFQGQVTISADKSIDTAYLQWGHLKASDSAMYFCARRGFWTGSQIEYWGQGTQVTVSSAKTTAPSVYPLAPVCGDTTGSSVTLGCLVKGYFPEPVTLTWNSGSLSSGVHTFPAVLQSDLYTLSSSVTVTSSTWPSQSITCNVAHPASSTKVDKKIEPRGPTIKPCPPCKCPAPNLLGGPSVFIFPPKIKDVLMISLSPIVTCVVVDVSEDDPDVQISWFVNNVEVHTAQTQTHREDYNSTLRVVSALPIQHQDWMSGKEFKCKVNNKDLPAPIERTISKPKGSVRAPQVYVLPPPEEEMTKKQVTLTCMVTDFMPEDIYVEWTNNGKTELNYKNTEPVLDSDGSYFMYSKLRVEKKNWVERNSYSCSVVHEGLHNHHTTKSFSRTPGK

SEQ ID NO: 21469 - protein, 455 aa, Artificial Sequence
  source: /note="Description of Artificial Sequence: Synthetic polypeptide"
QVQLVESGGGVVQPGRSLRVSCAASGFTFSSYDMHWVRQAPGKGLEWVAVIWFDGSNEFYADSVKGRFTISRDNSKNTLFLQMNSLRAEDTAVYYCARDLGASVTTSNAENFHHWGQGTLVTVSSAKTTAPSVYPLAPVCGDTTGSSVTLGCLVKGYFPEPVTLTWNSGSLSSGVHTFPAVLQSDLYTLSSSVTVTSSTWPSQSITCNVAHPASSTKVDKKIEPRGPTIKPCPPCKCPAPNLLGGPSVFIFPPKIKDVLMISLSPIVTCVVVDVSEDDPDVQISWFVNNVEVHTAQTQTHREDYNSTLRVVSALPIQHQDWMSGKEFKCKVNNKDLPAPIERTISKPKGSVRAPQVYVLPPPEEEMTKKQVTLTCMVTDFMPEDIYVEWTNNGKTELNYKNTEPVLDSDGSYFMYSKLRVEKKNWVERNSYSCSVVHEGLHNHHTTKSFSRTPGK

SEQ ID NO: 21470 - protein, 444 aa, Artificial Sequence
  source: /note="Description of Artificial Sequence: Synthetic polypeptide"
EVQLVESGGGLVQPGGSLRLSCAASGFTFPNYVMTWVRQAPGKGLEWVSGISGSGGSTDYADSVKGRFTISRDNSKNTLYLQMNSLRVEDTALYYCAKGSGGIRGQGTMVTVSSAKTTAPSVYPLAPVCGDTTGSSVTLGCLVKGYFPEPVTLTWNSGSLSSGVHTFPAVLQSDLYTLSSSVTVTSSTWPSQSITCNVAHPASSTKVDKKIEPRGPTIKPCPPCKCPAPNLLGGPSVFIFPPKIKDVLMISLSPIVTCVVVDVSEDDPDVQISWFVNNVEVHTAQTQTHREDYNSTLRVVSALPIQHQDWMSGKEFKCKVNNKDLPAPIERTISKPKGSVRAPQVYVLPPPEEEMTKKQVTLTCMVTDFMPEDIYVEWTNNGKTELNYKNTEPVLDSDGSYFMYSKLRVEKKNWVERNSYSCSVVHEGLHNHHTTKSFSRTPGK

SEQ ID NO: 21471 - protein, 452 aa, Artificial Sequence
  source: /note="Description of Artificial Sequence: Synthetic polypeptide"
EVQLVESGGGLVQPGGSLRLSCIGSSGMTFSSYAFNWVRQTPGKGLEWVSSISRFGSTVDYTDSVRGRFTISRDDGQRSLYLQMNSLRVEDTAVYYCVRSTASGSRSPGIIWGQGTTVTVSSAKTTAPSVYPLAPVCGDTTGSSVTLGCLVKGYFPEPVTLTWNSGSLSSGVHTFPAVLQSDLYTLSSSVTVTSSTWPSQSITCNVAHPASSTKVDKKIEPRGPTIKPCPPCKCPAPNLLGGPSVFIFPPKIKDVLMISLSPIVTCVVVDVSEDDPDVQISWFVNNVEVHTAQTQTHREDYNSTLRVVSALPIQHQDWMSGKEFKCKVNNKDLPAPIERTISKPKGSVRAPQVYVLPPPEEEMTKKQVTLTCMVTDFMPEDIYVEWTNNGKTELNYKNTEPVLDSDGSYFMYSKLRVEKKNWVERNSYSCSVVHEGLHNHHTTKSFSRTPGK

SEQ ID NO: 21472 - protein, 330 aa, Homo sapiens; identical to SEQ ID NO: 7178

SEQ ID NO: 21473 - protein, 327 aa, Homo sapiens; identical to SEQ ID NO: 7179

SEQ ID NO: 21474 - protein, 330 aa, Homo sapiens; identical to SEQ ID NO: 3890

SEQ ID NO: 21475 - protein, 451 aa, Artificial Sequence; identical to SEQ ID NO: 4437
  source: /note="Description of Artificial Sequence: Synthetic polypeptide"

SEQ ID NO: 21476 - protein, 451 aa, Artificial Sequence; identical to SEQ ID NO: 4436
  source: /note="Description of Artificial Sequence: Synthetic polypeptide"

SEQ ID NO: 21477 - protein, 451 aa, Artificial Sequence; identical to SEQ ID NO: 4436
  source: /note="Description of Artificial Sequence: Synthetic polypeptide"

SEQ ID NO: 21478 - protein, 451 aa, Artificial Sequence; identical to SEQ ID NO: 4437
  source: /note="Description of Artificial Sequence: Synthetic polypeptide"

SEQ ID NO: 21479 - protein, 126 aa, Homo sapiens; identical to SEQ ID NO: 4802

SEQ ID NO: 21480 - protein, 115 aa, Homo sapiens; identical to SEQ ID NO: 4801

SEQ ID NO: 21481 - protein, 121 aa, Homo sapiens; identical to SEQ ID NO: 4803

SEQ ID NO: 21482 - protein, 119 aa, Mus musculus; identical to SEQ ID NO: 4832

SEQ ID NO: 21483 - protein, 118 aa, Mus musculus; identical to SEQ ID NO: 4833

SEQ ID NO: 21484 - protein, 120 aa, Artificial Sequence
  source: /note="Description of Artificial Sequence: Synthetic polypeptide"
QVQLVQSGAEVKKPGSSVKVSCKASGGTFSDYVISWVRQAPGQGLEWMGEIFPRSGSTYYNEKFKGRVTITADKSTSTAYMELSSLRSEDTAVYYCARDYYGTSFAMDYWGQGTLVTVSS

SEQ ID NO: 21485 - protein, 120 aa, Artificial Sequence
  source: /note="Description of Artificial Sequence: Synthetic polypeptide"
QVQLVQSGPEVKKPGSSVKVPCKASGYIFTDYVISWVKQAPGQGLEWIGEIFPRSGSTYYNEKFKGKATLTADKSTSTAYMELSSLRSEDTAVYFCARDYYGTSFAMDYWGQGTLVTVSS

SEQ ID NO: 21486 - protein, 120 aa, Artificial Sequence
  source: /note="Description of Artificial Sequence: Synthetic polypeptide"
QVQLVQSGPEVKKPGSSVKVPCKASGGTFSDYVISWVRQAPGQGLEWMGEIFPRSGSTYYNEKFKGRVTITADKSTSTAYMELSSLRSEDTAVYYCARDYYGTSFAMDYWGQGTLVTVSS

SEQ ID NO: 21487 - protein, 120 aa, Artificial Sequence
  source: /note="Description of Artificial Sequence: Synthetic polypeptide"
QVQLVQSGAEVKKPGSSVKVSCKASGYTFSDYVISWVRQAPGQGLEWMGEIFPRSGSTYYNEKFKGRVTITADKSTSTAYMELSSLRSEDTAVYYCARDYYGTSFAMDYWGQGTLVTVSS

SEQ ID NO: 21488 - protein, 120 aa, Artificial Sequence
  source: /note="Description of Artificial Sequence: Synthetic polypeptide"
QVQLVQSGAEVKKPGSSVKVSCKASGGIFSDYVISWVRQAPGQGLEWMGEIFPRSGSTYYNEKFKGRVTITADKSTSTAYMELSSLRSEDTAVYYCARDYYGTSFAMDYWGQGTLVTVSS

SEQ ID NO: 21489 - protein, 120 aa, Artificial Sequence
  source: /note="Description of Artificial Sequence: Synthetic polypeptide"
QVQLVQSGAEVKKPGSSVKVSCKASGGTFTDYVISWVRQAPGQGLEWMGEIFPRSGSTYYNEKFKGRVTITADKSTSTAYMELSSLRSEDTAVYYCARDYYGTSFAMDYWGQGTLVTVSS

SEQ ID NO: 21490 - protein, 120 aa, Artificial Sequence
  source: /note="Description of Artificial Sequence: Synthetic polypeptide"
QVQLVQSGAEVKKPGSSVKVSCKASGGTFSDYVISWVKQAPGQGLEWMGEIFPRSGSTYYNEKFKGRVTITADKSTSTAYMELSSLRSEDTAVYYCARDYYGTSFAMDYWGQGTLVTVSS

SEQ ID NO: 21491 - protein, 120 aa, Artificial Sequence
  source: /note="Description of Artificial Sequence: Synthetic polypeptide"
QVQLVQSGAEVKKPGSSVKVSCKASGGTFSDYVISWVRQAPGQGLEWIGEIFPRSGSTYYNEKFKGRVTITADKSTSTAYMELSSLRSEDTAVYYCARDYYGTSFAMDYWGQGTLVTVSS

SEQ ID NO: 21492 - protein, 120 aa, Artificial Sequence
  source: /note="Description of Artificial Sequence: Synthetic polypeptide"
QVQLVQSGAEVKKPGSSVKVSCKASGGTFSDYVISWVRQAPGQGLEWMGEIFPRSGSTYYNEKFKGKVTITADKSTSTAYMELSSLRSEDTAVYYCARDYYGTSFAMDYWGQGTLVTVSS

SEQ ID NO: 21493 - protein, 120 aa, Artificial Sequence
  source: /note="Description of Artificial Sequence: Synthetic polypeptide"
QVQLVQSGAEVKKPGSSVKVSCKASGGTFSDYVISWVRQAPGQGLEWMGEIFPRSGSTYYNEKFKGRATITADKSTSTAYMELSSLRSEDTAVYYCARDYYGTSFAMDYWGQGTLVTVSS

SEQ ID NO: 21494 - protein, 120 aa, Artificial Sequence
  source: /note="Description of Artificial Sequence: Synthetic polypeptide"
QVQLVQSGAEVKKPGSSVKVSCKASGGTFSDYVISWVRQAPGQGLEWMGEIFPRSGSTYYNEKFKGRVTLTADKSTSTAYMELSSLRSEDTAVYYCARDYYGTSFAMDYWGQGTLVTVSS

SEQ ID NO: 21495 - protein, 120 aa, Artificial Sequence
  source: /note="Description of Artificial Sequence: Synthetic polypeptide"
QVQLVQSGAEVKKPGSSVKVSCKASGGTFSDYVISWVRQAPGQGLEWMGEIFPRSGSTYYNEKFKGRVTITADKSTSTAYMELSSLRSEDTAVYFCARDYYGTSFAMDYWGQGTLVTVSS

SEQ ID NO: 21496 - protein, 120 aa, Artificial Sequence
  source: /note="Description of Artificial Sequence: Synthetic polypeptide"
QVQLVQSGAEVKKPGSSVKVSCKASGYIFSDYVISWVRQAPGQGLEWMGEIFPRSGSTYYNEKFKGRVTITADKSTSTAYMELSSLRSEDTAVYYCARDYYGTSFAMDYWGQGTLVTVSS

SEQ ID NO: 21497 - protein, 121 aa, Artificial Sequence
  source: /note="Description of Artificial Sequence: Synthetic polypeptide"
QVQLQQPGAELVMPGASVKLSCKASGYTFTSYWMHWVKQRPGQGLEWIGEIDPSDSYTNYNQKFKGKSTLTVDKPSSTAYMQLSSLTSEDSAVYYCARSGDGSSPWYFDVWGTGTTVTVSS

SEQ ID NO: 21498 - protein, 115 aa, Artificial Sequence; identical to SEQ ID NO: 4845
  source: /note="Description of Artificial Sequence: Synthetic polypeptide"

SEQ ID NO: 21499 - protein, 225 aa, Artificial Sequence
  source: /note="Description of Artificial Sequence: Synthetic polypeptide"
MDWVWNLLFLMAAAQSIQAQIQLVQSGPELKKPGETVKISCKASGYPFTYHGMDWVKQAPWGGLEWMGWINTYSGVPTYADDFKGRFAFSLETSVGTAYLQINNLKNEDTATYFCARRRDFTMDFWGQGTSVTVSSAKTTPPSVYPLAPGSAAQTNSMVTLGCLVKGYFPEPVTVTWNSGSLSSGVHTFPAVLQSDLYTLSSSVTVPSSTWPSETVTCNVAHPAS

SEQ ID NO: 21500 - protein, 120 aa, Homo sapiens; identical to SEQ ID NO: 4800

SEQ ID NO: 21501 - protein, 125 aa, Homo sapiens; identical to SEQ ID NO: 4813

SEQ ID NO: 21502 - protein, 121 aa, Homo sapiens; identical to SEQ ID NO: 4814

SEQ ID NO: 21503 - protein, 124 aa, Homo sapiens; identical to SEQ ID NO: 4815

SEQ ID NO: 21504 - protein, 114 aa, Homo sapiens; identical to SEQ ID NO: 4816

SEQ ID NO: 21505 - protein, 114 aa, Artificial Sequence; identical to SEQ ID NO: 4810
  source: /note="Description of Artificial Sequence: Synthetic polypeptide"

SEQ ID NO: 21506 - protein, 118 aa, Homo sapiens; identical to SEQ ID NO: 4817

SEQ ID NO: 21507 - protein, 122 aa, Homo sapiens; identical to SEQ ID NO: 4818

SEQ ID NO: 21508 - protein, 126 aa, Homo sapiens; identical to SEQ ID NO: 4819

SEQ ID NO: 21509 - protein, 118 aa, Homo sapiens; identical to SEQ ID NO: 4820

SEQ ID NO: 21510 - protein, 120 aa, Homo sapiens; identical to SEQ ID NO: 4821

SEQ ID NO: 21511 - protein, 115 aa, Homo sapiens; identical to SEQ ID NO: 4822

SEQ ID NO: 21512 - protein, 121 aa, Homo sapiens; identical to SEQ ID NO: 4823

SEQ ID NO: 21513 - protein, 114 aa, Homo sapiens; identical to SEQ ID NO: 4824

SEQ ID NO: 21514 - protein, 124 aa, Homo sapiens; identical to SEQ ID NO: 4825

SEQ ID NO: 21515 - protein, 117 aa, Homo sapiens; identical to SEQ ID NO: 4827

SEQ ID NO: 21516 - protein, 117 aa, Artificial Sequence
  source: /note="Description of Artificial Sequence: Synthetic polypeptide"
EVQLVESGGGLVQPGGSLRLSCAASGFTFSSFGMHWVRQAPGKGLEWVAYISRGSSTIYYADTVKGRFTISRDNAKNSLYLQMNSLRAEDTAVYYCARGITTALDYWGQGTLVTVSS

SEQ ID NO: 21517 - protein, 71 aa, Artificial Sequence
  source: /note="Description of Artificial Sequence: Synthetic polypeptide"
EVQLVESGGGLVQPGGSLRLSCAASWVRQAPGKGLEWVSRFTISRDNSKNTLYLQMNSLRAEDTAVYYCAR

SEQ ID NO: 21518 - protein, 134 aa, Mus musculus
MKCSWVIFFLMAVVIGVNSEVQLQQSGAELVRPGASVKLPCTASGFNIKDDYMNWVMQRPERGLEWIGWIDPENGDTAYASKFQGKATMTADTSSNTAYLQLSSLTSEDTAVYYCTSGGRFDYWGQGTSLTVSS

SEQ ID NO: 21519 - protein, 124 aa, Homo sapiens; identical to SEQ ID NO: 4713

SEQ ID NO: 21520 - protein, 124 aa, Homo sapiens; identical to SEQ ID NO: 4716

SEQ ID NO: 21521 - protein, 127 aa, Homo sapiens; identical to SEQ ID NO: 4710

SEQ ID NO: 21522 - protein, 121 aa, Homo sapiens; identical to SEQ ID NO: 4711

SEQ ID NO: 21523 - protein, 124 aa, Homo sapiens; identical to SEQ ID NO: 4712

SEQ ID NO: 21524 - protein, 121 aa, Mus musculus
EVHLVESGGELVQPKGSLKLSCAASGFAFNSFAMNWVRQTPGKGLNWVAHIRSKTNNYATFYADSVKDRFTISRDDSQNMLYLQMNNLKTEDTGIYYCVRRGPRDSWFGYWGQGTLVTVSA

SEQ ID NO: 21525 - protein, 121 aa, Mus musculus
EVQLVESGGGLVQPKGSLKLSCAASGFAFNSFALNWVRQAPGKSLEWVVHIRSKTNNYATFYADSVKDRFTVSRDDSQNMVYLQMNNLKTEDTGIYYCVRRGPRDSWFGYWGQGTLVTVSA

SEQ ID NO: 21526 - protein, 121 aa, Mus musculus
EVQLVESGGGLVQPKGSLKLSCAASGFAFNSFALNWVRQAPGKSLEWVVHIRSKTNNYATFYADSVKDRFTVSRDDSQSMVYLQMNNLKTEDTGIYYCVRRGPRDSWFGYWGQGTLVTVSA

SEQ ID NO: 21527 - protein, 121 aa, Mus musculus
EVHLVESGGGLVQPKGSLKLSCAASGFAFNSFAMNWVRQAPGKALDWIAHIRSKTNNYVTFYADSVKGRFSISRDDSQSMVYLQMNNLQTEDTGIYYCVRRGPRDSWFGYWGQGTLVTVSA

SEQ ID NO: 21528 - protein, 121 aa, Mus musculus
EIQLVESGGGLVQPKGSLKLSCAASGFAFSSFALNWVRQAPGKSLDWVAHIRSKANHYVTFYADSVKDRFTVSRDDSQSMVYLQMNNLKTEDTGIYYCVRRGPRDSWFGYWGQGTLVTVSA

SEQ ID NO: 21529 - protein, 121 aa, Mus musculus
EVHLVESGGGLVQPKGSLKLSCAASGFAFNSFAMNWVRQAPGKGLDWIAHIRSKTNNYVTFYADSVKGRFSISRDDSQSMVYLQMNNLQTEDTGIYYCVRRGPRDSWFGYWGQGTLVTVSA

SEQ ID NO: 21530 - protein, 121 aa, Mus musculus
EVQLVESGGGLVQPKGSLKLSCAASGFAFNSFAMNWVRQAPGKGLDWIAHIRSKSNNYVTFYADSVKDRFIISRDDSQSMIYLQMNNLKTEDSGIYYCVRRGPRDSWFGYWGQGTLVTVSA

SEQ ID NO: 21531 - protein, 120 aa, Mus sp.; identical to SEQ ID NO: 4807

SEQ ID NO: 21532 - protein, 120 aa, Artificial Sequence; identical to SEQ ID NO: 4808
  source: /note="Description of Artificial Sequence: Synthetic polypeptide"

SEQ ID NO: 21533 - protein, 120 aa, Artificial Sequence; identical to SEQ ID NO: 4809
  source: /note="Description of Artificial Sequence: Synthetic polypeptide"

SEQ ID NO: 21534 - protein, 117 aa, Artificial Sequence; identical to SEQ ID NO: 4348
  source: /note="Description of Artificial Sequence: Synthetic polypeptide"

SEQ ID NO: 21535 - protein, 117 aa, Artificial Sequence
  source: /note="Description of Artificial Sequence: Synthetic polypeptide"
EVHLVESGGALVKPGGSLKLSCAASGFSFSKYGMSWVRQTPDKRLEWVATISSSGSRTYYPDSVKGQFTISRDNAKNTLYLQMSSLKSEDTAMYYCSISWDGAMDYWGQGTSVTVSS

SEQ ID NO: 21536 - protein, 115 aa, Artificial Sequence
  source: /note="Description of Artificial Sequence: Synthetic polypeptide"
EVKVEESGGGLVQPGGSMKLSCVVSGFTFSNYWVNWVRQSPEKGLEWVAQIRLKSDNYATHYEESVKGRFTISRDDSKSSVYLQMNNLRAEDSGIYYCTNWEDYWGQGTTLTVSS

SEQ ID NO: 21537 - protein, 117 aa, Artificial Sequence
  source: /note="Description of Artificial Sequence: Synthetic polypeptide"
QVQLVESGGGLVQPGGSLRLSCAASGFTFSSYWMHWVRQAPGKGLVWVSRINSDGSDTNYADSVKGRFTFSRDNAKNTLYLQMTSLRAEDTAIYYCTRGRSYGFFDYWGQGALVTVS

SEQ ID NO: 21538 - protein, 124 aa, Artificial Sequence
  source: /note="Description of Artificial Sequence: Synthetic polypeptide"
QVQLVESRGGVVQPGTSLRLSCKASGFTFSTYGMHWVRQAPGKALEWVAVIWFDGNNKYYADSVKGRFTISRDNSKNTVYLQMNSLRGEDTAVYYCARDWWEAGCRPCYFFDYWGQGSLVTVSS

SEQ ID NO: 21539 - protein, 127 aa, Artificial Sequence
  source: /note="Description of Artificial Sequence: Synthetic polypeptide"
EVQLVQSGGGLVQPGGSLRLSCAASGFTFSDYWMSWVRQAPGKGLEWVANINQDGSAAYYVDSVRGRFTISRDSAENSLNLQMNSLRAEDTAVYYCAKDAHYYDRNRNNYYYYFDFWGQGTLVTVSS

SEQ ID NO: 21540 - protein, 127 aa, Artificial Sequence
  source: /note="Description of Artificial Sequence: Synthetic polypeptide"
QVQLLESGPGLVNPSQTLSLTCTVSGGSISSGNYYWSWIRQPAGKGLEWIGRMSSSGSTNYNPSLKSRVTMSEDTSKNQFSLKLSSVTAADTAVYYCARESGSSWQNHYYYYGMDVWGQGTTVTVSS

SEQ ID NO: 21541 - protein, 123 aa, Artificial Sequence
  source: /note="Description of Artificial Sequence: Synthetic polypeptide"
QVQLVESGGGLVQPGGSLRLSCAASGFTFRNYAMSWVRQAPGKGLEWVSGISSDGNTFYADSVKGRFTVSRDNSKNTLYLQVNSLRADDTAVYYCAKESGRWGGGTLYGAHYWGQGTPVTVSS

SEQ ID NO: 21542 - protein, 121 aa, Artificial Sequence
  source: /note="Description of Artificial Sequence: Synthetic polypeptide"
QVQLVQSGAEVKKPGAPVKVSCETSGYRFSDYNVHWVRQAPGQGPEWIGRISPNSGGTKYAQKFQGRVTMTRDMSMNTAYMELSGLRSDDTAVYYCVRGHCDGTTCSRAYWGQGTLVTVSS

SEQ ID NO: 21543 - protein, 120 aa, Artificial Sequence
  source: /note="Description of Artificial Sequence: Synthetic polypeptide"
QVQLVQSGAEVKKPGASVKVSCTASGYTFTGYYLHWVRQAPGQGLEWMGWVNPRSGGTSYPPKFQGRVTMTRDTSINTAYMDLTWLTSDDTAVYYCAVGRIPDVTAFDIWGQGTPVTVSS

SEQ ID NO: 21544 - protein, 122 aa, Artificial Sequence
  source: /note="Description of Artificial Sequence: Synthetic polypeptide"
QVQLVESGPEMRKPGESLKISCKTSGYIFSDYWTAWVRQLPGKGLQWMGIIYSGDSDTRYHPSVQGHVTMSTDSSLTTAYLQWSSLKASDTGIYYCARLDARVDAGWQLDSWGQGTLVTVSS

SEQ ID NO: 21545 - protein, 121 aa, Artificial Sequence
  source: /note="Description of Artificial Sequence: Synthetic polypeptide"
QVQLQQSGAEVKKPGESLKISCEASGYSFTNYWIGWVRQMPGKGLEWMGIIYPGDSDTRYSPPFQGQVTITADRSITTAYLEWSSLKASDTAMYYCARVGRPSKGGWFDPWGQGTLVTVSS

SEQ ID NO: 21546 - protein, 126 aa, Artificial Sequence
  source: /note="Description of Artificial Sequence: Synthetic polypeptide"
EVQLLESGGGLVKPGGSLRLSCVASGITFSDSYMSWIRQTPGKGLEWLSYISRSSSHTNYADSVKGRFTISRDNAKNSLYLQMNSLRGEDTAVYYCARVQTTMIEGKTKLNYFDYWGQGTQVTVSS

SEQ ID NO: 21547 - protein, 126 aa, Artificial Sequence
  source: /note="Description of Artificial Sequence: Synthetic polypeptide"
EVQLVQSGGGLVKPGGSLRLSCVASGITFSDSYMSWIRQTPGKGLEWLSYISRSSSHTNYADSVKGRFTISRDNAKNSLYLQMNSLRGEDTAVYYCARVQTTMIEGKTKLNYFDYWGQGTLVTVSS

SEQ ID NO: 21548 - protein, 122 aa, Artificial Sequence
  source: /note="Description of Artificial Sequence: Synthetic polypeptide"
QLVQSEGGLAEPGGSLRLSCAASGFTFTKAWMSWVRQTPGRGLEWLGRIKSKVDGETTDYAAPVRGRFTISRDDSKSTVYLQMTGLRTEDTGVYFCTTLIHCDLSACLPHFWGRGTLVTVSS

SEQ ID NO: 21549 - protein, 124 aa, Artificial Sequence
  source: /note="Description of Artificial Sequence: Synthetic polypeptide"
QVQLVQSGGEVKKPGESLKISCKGSGYSFSNYWIAWVRQMPGKGLECMGIIYPGDSDTTYSPSFQGQVTISADKSVSTTYLQWSSLKASDSAMYYCARLPRTDGDNSIGYFEYWGQGTMVTVSS

SEQ ID NO: 21550 - protein, 118 aa, Artificial Sequence
  source: /note="Description of Artificial Sequence: Synthetic polypeptide"
EVQLVESGGGLVQPGGSLRLSCAASGFTFSSYSMNWVRQAPGKGLEWVSYISSSTTTIYYADSVKGRFTISRDNVKNSLYLQMHSLRAEDTAVYYCVPAPRLGGSYTYWGQGTLVTVS

SEQ ID NO: 21551 - protein, 119 aa, Artificial Sequence
  source: /note="Description of Artificial Sequence: Synthetic polypeptide"
EVQLVESGGDLVKPGGSLRLSCAASGFVFTDAWMSWVRQSPGKGPEWLGRIKSKNVGETTDYAEHVRGRFTIARDDSNRTLYLQMSNLKIDDTAVYYCTTGLGGGTYGWGRGTRVTVSS

SEQ ID NO: 21552 - protein, 119 aa, Artificial Sequence
  source: /note="Description of Artificial Sequence: Synthetic polypeptide"
QVQLVESGGGLVQPGESLRLSCVASGFNFSIYEMNWVRQAPGKGLEWVSYITNRGSTIYYADSVKGRFTISRDNAQNSLYLQMNSLRAEDTAVYYCAKPRIGARVFDVWGQGTMVTVSS

SEQ ID NO: 21553 - protein, 121 aa, Artificial Sequence
  source: /note="Description of Artificial Sequence: Synthetic polypeptide"
QVQLVESGAVVKKPGESLKISCEASGYMFLDHWIGWVRQMPGKGLEWMGIIFPEDSDTRYSGSFEGQVTISADRSVNTVYLEWSSLKASDTAMYYCARVSVVRKGGWFDPWGQGTLVTVSS

SEQ ID NO: 21554 - protein, 121 aa, Artificial Sequence
  source: /note="Description of Artificial Sequence: Synthetic polypeptide"
QVQLVESGAELKKPGESLKISCEASGYIFADHWIGWVRQMPGKGLEWMGIIFPGDSDIRYSPSFEGQVTISVDRSVSTAFLQWSSLKASDTAMYFCARVAVVRKGGWFDSWGQGTRVTVSS

SEQ ID NO: 21555 - protein, 126 aa, Artificial Sequence
  source: /note="Description of Artificial Sequence: Synthetic polypeptide"
QVQLVQSGAEVKKPWESLKISCLASGYDFASYWIGWVRQMPGKGLEWVGIIYPDDSDTRYNASLEGRVTMSVDTSTNTAYLQWTSLKVSDTGMYYCARRDRNCSGTTCYPRWFDSWGQGTLVTVSS

SEQ ID NO: 21556 - protein, 107 aa, Homo sapiens
EVQLVESGGGLVQPGGSLRLSCAASGFTFSSYWMHWVRQAPGKGLVWVSRINSDGSDTNYADSVKGRFTFSRDNAKNTLYLQMTSLRAEDTAIYYCTRGRSYGFFDY

SEQ ID NO: 21557 - protein, 113 aa, Homo sapiens
QVQLVESRGGVVQPGTSLRLSCKASGFTFSTYGMHWVRQAPGKALEWVAVIWFDGNNKYYADSVKGRFTISRDNSKNTVYLQMNSLRGEDTAVYYCARDWWEAGCRPCYFFDY

SEQ ID NO: 21558 - protein, 116 aa, Homo sapiens
EVQLVESGGGLVQPGGSLRLSCAASGFTFSDYWMSWVRQAPGKGLEWVANINQDGSAAYYVDSVRGRFTISRDSAENSLNLQMNSLRAEDTAVYYCAKDAHYYDRNRNNYYYYFDF

SEQ ID NO: 21559 - protein, 116 aa, Homo sapiens
QVQLQESGPGLVNPSQTLSLTCTVSGGSISSGNYYWSWIRQPAGKGLEWIGRMSSSGSTNYNPSLKSRVTMSEDTSKNQFSLKLSSVTAADTAVYYCARESGSSWQNHYYYYGMDV

SEQ ID NO: 21560 - protein, 112 aa, Homo sapiens
EVQLVESGGGLVQPGGSLRLSCAASGFTFRNYAMSWVRQAPGKGLEWVSGISSDGNTFYADSVKGRFTVSRDNSKNTLYLQVNSLRADDTAVYYCAKESGRWGGGTLYGAHY

SEQ ID NO: 21561 - protein, 110 aa, Homo sapiens
QVQLVQSGAEVKKPGAPVKVSCETSGYRFSDYNVHWVRQAPGQGPEWIGRISPNSGGTKYAQKFQGRVTMTRDMSMNTAYMELSGLRSDDTAVYYCVRGHCDGTTCSRAY

SEQ ID NO: 21562 - protein, 109 aa, Homo sapiens
QVQLVQSGAEVKKPGASVKVSCTASGYTFTGYYLHWVRQAPGQGLEWMGWVNPRSGGTSYPPKFQGRVTMTRDTSINTAYMDLTWLTSDDTAVYYCAVGRIPDVTAFDI

SEQ ID NO: 21563 - protein, 111 aa, Homo sapiens
EVQLVQSGPEMRKPGESLKISCKTSGYIFSDYWTAWVRQLPGKGLQWMGIIYSGDSDTRYHPSVQGHVTMSTDSSLTTAYLQWSSLKASDTGIYYCARLDARVDAGWQLDS

SEQ ID NO: 21564 - protein, 110 aa, Homo sapiens
EVQLVQSGAEVKKPGESLKISCEASGYSFTNYWIGWVRQMPGKGLEWMGIIYPGDSDTRYSPPFQGQVTITADRSITTAYLEWSSLKASDTAMYYCARVGRPSKGGWFDP

SEQ ID NO: 21565 - protein, 115 aa, Homo sapiens
QVQLVESGGGLVKPGGSLRLSCVASGITFSDSYMSWIRQTPGKGLEWLSYISRSSSHTNYADSVKGRFTISRDNAKNSLYLQMNSLRGEDTAVYYCARVQTTMIEGKTKLNYFDY

SEQ ID NO: 21566 - protein, 111 aa, Homo sapiens
QLVESGGGLAEPGGSLRLSCAASGFTFTKAWMSWVRQTPGRGLEWLGRIKSKVDGETTDYAAPVRGRFTISRDDSKSTVYLQMTGLRTEDTGVYFCTTLIHCDLSACLPHF

SEQ ID NO: 21567 - protein, 113 aa, Homo sapiens
EVQLVQSGGEVKKPGESLKISCKGSGYSFSNYWIAWVRQMPGKGLECMGIIYPGDSDTTYSPSFQGQVTISADKSVSTTYLQWSSLKASDSAMYYCARLPRTDGDNSIGYFEY

SEQ ID NO: 21568 - protein, 108 aa, Homo sapiens
EVQLVESGGGLVQPGGSLRLSCAASGFTFSSYSMNWVRQAPGKGLEWVSYISSSTTTIYYADSVKGRFTISRDNVKNSLYLQMHSLRAEDTAVYYCVPAPRLGGSYTY

SEQ ID NO: 21569 - protein, 108 aa, Homo sapiens
EVQLVESGGDLVKPGGSLRLSCAASGFVFTDAWMSWVRQSPGKGPEWLGRIKSKNVGETTDYAEHVRGRFTIARDDSNRTLYLQMSNLKIDDTAVYYCTTGLGGGTYG

SEQ ID NO: 21570 - protein, 108 aa, Homo sapiens
EVQLVESGGGLVQPGESLRLSCVASGFNFSIYEMNWVRQAPGKGLEWVSYITNRGSTIYYADSVKGRFTISRDNAQNSLYLQMNSLRAEDTAVYYCAKPRIGARVFDV

SEQ ID NO: 21571 - protein, 110 aa, Homo sapiens
EVQLVQSGAVVKKPGESLKISCEASGYMFLDHWIGWVRQMPGKGLEWMGIIFPEDSDTRYSGSFEGQVTISADRSVNTVYLEWSSLKASDTAMYYCARVSVVRKGGWFDP

SEQ ID NO: 21572 - protein, 110 aa, Homo sapiens
EVQLVQSGAELKKPGESLKISCEASGYIFADHWIGWVRQMPGKGLEWMGIIFPGDSDIRYSPSFEGQVTISVDRSVSTAFLQWSSLKASDTAMYFCARVAVVRKGGWFDS

SEQ ID NO: 21573 - protein, 115 aa, Homo sapiens
EVQLVQSGAEVKKPWESLKISCLASGYDFASYWIGWVRQMPGKGLEWVGIIYPDDSDTRYNASLEGRVTMSVDTSTNTAYLQWTSLKVSDTGMYYCARRDRNCSGTTCYPRWFDS

SEQ ID NO: 21574 - protein, 117 aa, Mus musculus
LEVQLQQSGPELVKPGASVKISCKTSEYTFTEYTKHWVKQSHGKSLEWIGSINPNNGDTYYNQKFTDKATLTVDKSSTTASMELRSLTFEDSAVYYCAMGDSAWFAYWGQGTLVTVS

SEQ ID NO: 21575 - protein, 120 aa, Mus musculus
EVQLQQSGAELVRPGASVKLSCTASGFNIKDEYMNWVKQRPERGLEWIGWIDPENGDAAYASKFQGKATMTADTSSNTAYLQLSSLTSEDTAVYFCTFFYSNYDGYFDVWGAGTTVTVSS

SEQ ID NO: 21576 - protein, 121 aa, Mus musculus
QVTLKESGPGILQPSQTLSLTCSFSGFSLSTSGMGVGWIRQPSGKGLEWLAHIWWDDDKYYNAVLKSRLTISKDTSKNQVFLKIASVDTADTATYYCARIGIDGPYAMDYWGQGTSVTVSS

SEQ ID NO: 21577 - protein, 127 aa, Artificial Sequence
  source: /note="Description of Artificial Sequence: Synthetic polypeptide"
AVTLDESGGGLQTPGGGLSLVCKASGFTLSSYQMMWVRQAPGKGLEWVAGITSRGGVTGYGSAVKGRATISRDNGQSTVRLQLNNLRAEDTGTYYCAKPALDSDQCGFPEAGCIDAWGHGTEVIVSS

SEQ ID NO: 21578 - protein, 119 aa, Artificial Sequence
  source: /note="Description of Artificial Sequence: Synthetic polypeptide"
AVTLDESGGGLQTPGGALSLVCKASGFTFSSFNMFWVRQAPGKGLEFVAGIGKTGRSTYYGAAVKGRATISRDNGQTTVRLQLNNLRAEDTGIYFCAKGATGPYIIDTWGHGTEVIVSS

SEQ ID NO: 21579 - protein, 125 aa, Artificial Sequence
  source: /note="Description of Artificial Sequence: Synthetic polypeptide"
AVTLDESGGGLQTPGGGLSLVCKASGFTFSSYPMVWVRQVPGKGLEWVADIDAAGSGTWYATAVKGRATISRDNGQSTLRLQLNNLRAEDTGTYFCAKTTPSTSGGWSVGSIDTWGHGTEVIVSS

SEQ ID NO: 21580 - protein, 120 aa, Artificial Sequence
  source: /note="Description of Artificial Sequence: Synthetic polypeptide"
AVTLDESGGGLQTPGGGLSLVCKASGFTFSSYGMAWVRQAPGKGLEFVAGISSSGTYTNYAPAVKGRATISRDNGQSTSRLQLNNLRAEDTGIYYCAKTTGRGAGEIDAWGHGTEVIVSS

SEQ ID NO: 21581 - protein, 127 aa, Artificial Sequence
  source: /note="Description of Artificial Sequence: Synthetic polypeptide"
DRALDESGGGLQTPGGTISLVCKASGFTMSSYGMNWVRQAPGKGLEWVGVISSRGSSTGYGAAVKGRATISRDNGQSTVRLQLNNLRAEDTGTYYCGKDSGGRCGGRSYSGGCIDAWGHGTEVIVSS

SEQ ID NO: 21582 - protein, 115 aa, Artificial Sequence
  source: /note="Description of Artificial Sequence: Synthetic polypeptide"
QVQLLQPGTELVKPGASVKLSCKASGYTFTSYWMHWVKQRPGQGLEWIGNINPNNGGTNYNEKFKNKATLTVDKSSSTAYMHLSSLTSEDSAVYYCAGGRNYDVWGTGTTVTVSS

SEQ ID NO: 21583 - protein, 125 aa, Artificial Sequence
  source: /note="Description of Artificial Sequence: Synthetic polypeptide"
LPEVQLEESGAELVRSGASVTLSCTASGFNIKDYYIHWVKQRPEQGLEWIGWIDPENGDTEYAPKFQGKATMTADTSSNTAYLQLSSLTSEDTAVYYCNGAPGYWGPGTTLTVSSAKTTPPSVYS

SEQ ID NO: 21584 - protein, 127 aa, Artificial Sequence
  source: /note="Description of Artificial Sequence: Synthetic polypeptide"
LPEVQLEESGGGLVQPGGSLSLSCAASGFTFTDYYMSWVRQPPGKALEWVALNRNKTKGYTTEYSASVKGRFTISRDNSQSILYLQMNALRAEDSATYYCARGMDYWGQGTSVTVSSAKTTPPSVYS

SEQ ID NO: 21585 - protein, 128 aa, Artificial Sequence
  source: /note="Description of Artificial Sequence: Synthetic polypeptide"
LPEVQLEESGGGLVKPGGSLKLSCAASGFTFSTYPMSWVRQTPEKRLEWVASISNGGSTYYPDTVKGRFTISRDNARNILYLQMSSLRSEDTAMYYCARGRDYHFDFWGQGTTLTVSSAKTTPPSVYS

SEQ ID NO: 21586 - protein, 125 aa, Artificial Sequence
  source: /note="Description of Artificial Sequence: Synthetic polypeptide"
LPQVQLEESGAELVKPGASVKLSCKASGYTFTNYWINWVKQRPGQGLEWIGNIYPGSTRANYNEKFKSKATLTVDTSSSTAYMQVSSLTSDDSAVYYCTRTHSIWGQGTQVTVSAAKTTPPSVYS

SEQ ID NO: 21587 - protein, 131 aa, Artificial Sequence
  source: /note="Description of Artificial Sequence: Synthetic polypeptide"
LPEVKLEESGAELVKPGASVKLSCKASGYTFISNWMHWVKQRPGQGLEWIGNIDPSDSETHYNQKFKDKATLTVDKSSSTAYMQLSSLTSEDSAVYYCARRDRDGYYFDYWGQGTTLTVSSAKTTPPSVYS

SEQ ID NO: 21588 - protein, 125 aa, Artificial Sequence
  source: /note="Description of Artificial Sequence: Synthetic polypeptide"
LPEVKLEQSGAELVKPGASVKLSCKASGYTFTNYWINWVKQRPGQGLEWIGNIYPGSTRANYNEKFKSKATLTVDTSSSTAYMQVSSLTSDDSAVYYCTRTHSIWGQGTQVTVSAAKTTPPSVYS

SEQ ID NO: 21589 - protein, 131 aa, Artificial Sequence
  source: /note="Description of Artificial Sequence: Synthetic polypeptide"
LPEVQLEQSGAELVKPGASVKLSCKASGYTFISNWMHWVKQRPGQGLEWIGNIDPSDSETHYNQKFKDKATLTVDKSSSTAYMQLSSLTSEDSAVYYCARRDRDGYYFDYWGQGTTLTVSSAKTTPPSVYS

SEQ ID NO: 21590 - protein, 326 aa, Artificial Sequence; identical to SEQ ID NO: 3888
  source: /note="Description of Artificial Sequence: Synthetic polypeptide"

SEQ ID NO: 21591 - protein, 120 aa, Homo sapiens; identical to SEQ ID NO: 4811

SEQ ID NO: 21592 - protein, 125 aa, Homo sapiens; identical to SEQ ID NO: 4812

SEQ ID NO: 21593 - protein, 113 aa, Homo sapiens; identical to SEQ ID NO: 5326

SEQ ID NO: 21594 - protein, 117 aa, Homo sapiens; identical to SEQ ID NO: 4826

SEQ ID NO: 21595 - protein, 111 aa, Artificial Sequence
  source: /note="Description of Artificial Sequence: Synthetic polypeptide"
EVQVLESGGGLVQPGGSLRLSCAVSGFSLSSNAINWVRQAPGKGLEWVGYIAVSGNTYYASWAKGRFTISRDNSKNTVYLQMNSLRAEDTAVYYCGKSNIWGQGTLVTVSS

SEQ ID NO: 21596 - protein, 112 aa, Artificial Sequence
  source: /note="Description of Artificial Sequence: Synthetic polypeptide"
AQVMTQSPSSLSASVGDRVTITCRSSQSVRTNKLAWFQQKPGQPPKRLIYSASTLDFGVPSRFSGSGSGTEFTLTISSLQPEDFATYYCLGYFDSSIADIVAFGGGTKVEIK

SEQ ID NO: 21597 - protein, 117 aa, Artificial Sequence; identical to SEQ ID NO: 4828
  source: /note="Description of Artificial Sequence: Synthetic polypeptide"

SEQ ID NO: 21598 - protein, 117 aa, Artificial Sequence; identical to SEQ ID NO: 4829
  source: /note="Description of Artificial Sequence: Synthetic polypeptide"

SEQ ID NO: 21599 - protein, 117 aa, Artificial Sequence; identical to SEQ ID NO: 4830
  source: /note="Description of Artificial Sequence: Synthetic polypeptide"

SEQ ID NO: 21600 - protein, 117 aa, Artificial Sequence; identical to SEQ ID NO: 4831
  source: /note="Description of Artificial Sequence: Synthetic polypeptide"

SEQ ID NO: 21601 - protein, 118 aa, Artificial Sequence
  source: /note="Description of Artificial Sequence: Synthetic polypeptide"
QVQLVQSGSELKRPGASVKVSCKASGYSFTSYAVNWVRQAPGQGLEWVGWINTNTGNPTYAQGFTGRFVFSLDTSVSTAYLQISSLKAADTAVYYCARARGQNGMDVWGQGTTVTVSS

SEQ ID NO: 21602 - protein, 330 aa, Artificial Sequence; identical to SEQ ID NO: 3789
  source: /note="Description of Artificial Sequence: Synthetic polypeptide"

SEQ ID NO: 21603 - protein, 445 aa, Artificial Sequence; identical to SEQ ID NO: 4354
  source: /note="Description of Artificial Sequence: Synthetic polypeptide"

SEQ ID NO: 21604 - protein, 445 aa, Artificial Sequence; identical to SEQ ID NO: 4355
  source: /note="Description of Artificial Sequence: Synthetic polypeptide"

SEQ ID NO: 21605 - protein, 442 aa, Artificial Sequence; identical to SEQ ID NO: 4353
  source: /note="Description of Artificial Sequence: Synthetic polypeptide"

SEQ ID NO: 21606 - protein, 117 aa, Artificial Sequence
  source: /note="Description of Artificial Sequence: Synthetic polypeptide"
QVQLVQSGSELKKPGASVKVSCKASGYTFTYHGMDWVRQAPGQGLEWMGWINTYSGVPTYADDFKGRFVFSLDTSVSTAYLQISSLKAEDTAVYFCARRRDFTMDFWGQGTTVTVSS

SEQ ID NO: 21607 - protein, 148 aa, Artificial Sequence
  source: /note="Description of Artificial Sequence: Synthetic polypeptide"
MGSSHHHHHHSSGLVPRGSAAAQLQASGGGLVQAGGSLRLSCAASGRSFSGSTMEWYRQAPGKERKFVAAIRTISSRTYYVDSVKGRFTISRDSTKNTVYLQLNSLKVEDTAVYYCAARFSGTIGTTSSVDYWGQGTQVTVGGGSCSA

SEQ ID NO: 21608 - protein, 150 aa, Artificial Sequence
  source: /note="Description of Artificial Sequence: Synthetic polypeptide"
MGSSHHHHHHSSGLVPRGSAAADVQLEASGGGLVQAGGSLRLSCAASGRSFSGSTMEWYRQAPGKERKFVAAIRTGSSRTYYVDSVKGRFTISRDSTKNTVYLQLNSLKGEDTAVYYCAARFSGTIGTTSSVDYWGQGTQVTVGGGSCSA

SEQ ID NO: 21609 - protein, 121 aa, Artificial Sequence
  source: /note="Description of Artificial Sequence: Synthetic polypeptide"
DVQLEASGGGLVQAGGSLRLSCAASGRSFSGSTMEWYRQAPGKERKFVAAIRTGSSRTYYVDSVKGRFTISRDSTKNTVYLQLNSLKGEDTAVYYCAARFSGTIGTTSSVDYWGQGTQVTV

SEQ ID NO: 21610 - protein, 119 aa, Artificial Sequence
  source: /note="Description of Artificial Sequence: Synthetic polypeptide"
QLEASGGGLVQAGGSLRLSCAASGRSFSGSTMEWYRQAPGKERKFVAAIRTGSSRTYYVDSVKGRFTISRDSTKNTVYLQLNSLKGEDTAVYYCAARFSGTIGTTSSVDYWGQGTQVTV

SEQ ID NO: 21611 - protein, 112 aa, Artificial Sequence; identical to SEQ ID NO: 5310
  source: /note="Description of Artificial Sequence: Synthetic polypeptide"

SEQ ID NO: 21612 - protein, 219 aa, Artificial Sequence
  source: /note="Description of Artificial Sequence: Synthetic polypeptide"
DIVMTQSPLSLPVTPGEPASISCKSSQSLLNSRTRKNYLAWYLQKPGQSPQLLIYWASTRESGVPDRFTGSGSGTDFTLKISRVEAEDVGVYYCKQSFYLRTFGQGTKVEIKRTVAAPSVFIFPPSDEQLKSGTASVVCLLNNFYPREAKVQWKVDNALQSGNSQESVTEQDSKDSTYSLSSTLTLSKADYEKHKVYACEVTHQGLSSPVTKSFNRGEC

SEQ ID NO: 21613 - protein, 219 aa, Artificial Sequence
  source: /note="Description of Artificial Sequence: Synthetic polypeptide"
DIVMSQSPSSLAVSAGEKVTMSCKSSQSLLNSRTRKNYLAWYQQKPGQSPKLLIYWASTRESGVPDRFTGSGSGTDFTLTISSVQAEDLAVYYCKQSFYLRTFGGGTKLDIKRTVAAPSVFIFPPSDEQLKSGTASVVCLLNNFYPREAKVQWKVDNALQSGNSQESVTEQDSKDSTYSLSSTLTLSKADYEKHKVYACEVTHQGLSSPVTKSFNRGEC

SEQ ID NO: 21614 - DNA, 336 bp, Artificial Sequence
  source: /note="Description of Artificial Sequence: Synthetic polynucleotide"
gatattgtcatgtcacagtcaccttcatccctggcagtcagcgccggagaaaaagtcactatgtcttgtaagtcttcacagagcctgctgaactcccggaccagaaagaattacctggcatggtatcagcagaagcccggccagtctcctaaactgctgatctactgggcatcaacaagggagagcggagtgccagaccgcttcacaggctctgggagtggaactgattttaccctgacaattagctccgtgcaggccgaagacctggctgtctactattgcaaacagagcttctatctgcgaacttttggcgggggaaccaagctggatatcaaa

SEQ ID NO: 21615 - DNA, 336 bp, Artificial Sequence
  source: /note="Description of Artificial Sequence: Synthetic polynucleotide"
gacatcgtgatgacacagtccccactgtctctgcccgtcactcctggggagccagcatctattagttgcaagagctcccagagtctgctgaactcacggaccagaaagaattacctggcctggtatctgcagaaacccggacagagccctcagctgctgatctactgggctagcaccagggaatccggagtgccagaccgcttcacaggatcaggaagcggaaccgattttacactgaagatcagccgggtggaggccgaagatgtgggcgtctactattgtaaacagtccttctatctgagaacttttggccaggggaccaaggtggagatcaaa

SEQ ID NO: 21616 - DNA, 336 bp, Artificial Sequence
  source: /note="Description of Artificial Sequence: Synthetic polynucleotide"
gacatcgtgatgtctcagagtccactgtctctgccagtcacccctggagagccagcatcaattagctgcaagagctcccagagtctgctgaactcacggacaagaaagaattacctggcctggtatctgcagaaacccggacagagccctcagctgctgatctactgggctagcacaagggaatccggagtgccagaccgcttcactggatccggatctggaaccgattttacactgaagatcagccgggtggaggccgaagatgtgggcgtctactattgtaaacagagtttctatctgagaacttttggccaggggaccaaggtggagatcaaa

SEQ ID NO: 21617 - DNA, 657 bp, Artificial Sequence
  source: /note="Description of Artificial Sequence: Synthetic polynucleotide"
gacatcgtgatgacacagtccccactgtctctgcccgtcactcctggggagccagcatctattagttgcaagagctcccagagtctgctgaactcacggaccagaaagaattacctggcctggtatctgcagaaacccggacagagccctcagctgctgatctactgggctagcaccagggaatccggagtgccagaccgcttcacaggatcaggaagcggaaccgattttacactgaagatcagccgggtggaggccgaagatgtgggcgtctactattgtaaacagtccttctatctgagaacttttggccaggggaccaaggtggagatcaaaagaactgtggcagcaccaagcgtcttcatcttcccgccatctgatgagcagttgaaatctggaactgcctctgttgtgtgcctgctgaataacttctatcccagagaggccaaagtacagtggaaggtggataacgccctccaatcgggtaactcccaggagagtgtcacagagcaggacagcaaggacagcacctacagcctcagcagcaccctgacgctgagcaaagcagactacgagaaacacaaagtctacgcctgcgaagtcacccatcagggcctgagctcgcccgtcacaaagagcttcaacaggggagagtgt

SEQ ID NO: 21618 - DNA, 657 bp, Artificial Sequence
  source: /note="Description of Artificial Sequence: Synthetic polynucleotide"
gacatcgtgatgtctcagagtccactgtctctgccagtcacccctggagagccagcatcaattagctgcaagagctcccagagtctgctgaactcacggacaagaaagaattacctggcctggtatctgcagaaacccggacagagccctcagctgctgatctactgggctagcacaagggaatccggagtgccagaccgcttcactggatccggatctggaaccgattttacactgaagatcagccgggtggaggccgaagatgtgggcgtctactattgtaaacagagtttctatctgagaacttttggccaggggaccaaggtggagatcaaaagaactgtggcagcaccaagcgtcttcatcttcccgccatctgatgagcagttgaaatctggaactgcctctgttgtgtgcctgctgaataacttctatcccagagaggccaaagtacagtggaaggtggataacgccctccaatcgggtaactcccaggagagtgtcacagagcaggacagcaaggacagcacctacagcctcagcagcaccctgacgctgagcaaagcagactacgagaaacacaaagtctacgcctgcgaagtcacccatcagggcctgagctcgcccgtcacaaagagcttcaacaggggagagtgt

SEQ ID NO: 21619 - DNA, 657 bp, Artificial Sequence
  source: /note="Description of Artificial Sequence: Synthetic polynucleotide"
gatattgtcatgtcacagtcaccttcatccctggcagtcagcgccggagaaaaagtcactatgtcttgtaagtcttcacagagcctgctgaactcccggaccagaaagaattacctggcatggtatcagcagaagcccggccagtctcctaaactgctgatctactgggcatcaacaagggagagcggagtgccagaccgcttcacaggctctgggagtggaactgattttaccctgacaattagctccgtgcaggccgaagacctggctgtctactattgcaaacagagcttctatctgcgaacttttggcgggggaaccaagctggatatcaaaagaactgtggcagcaccaagcgtcttcatcttcccgccatctgatgagcagttgaaatctggaactgcctctgttgtgtgcctgctgaataacttctatcccagagaggccaaagtacagtggaaggtggataacgccctccaatcgggtaactcccaggagagtgtcacagagcaggacagcaaggacagcacctacagcctcagcagcaccctgacgctgagcaaagcagactacgagaaacacaaagtctacgcctgcgaagtcacccatcagggcctgagctcgcccgtcacaaagagcttcaacaggggagagtgt

SEQ ID NO: 21620 - protein, 238 aa, Artificial Sequence
  source: /note="Description of Artificial Sequence: Synthetic polypeptide"
MKLPVRLLVLMFWIPASSSDVLMTQTPLSLPVSLGDQASISCRSSQSIVHSNGNTYLEWYLQKPGQSPKLLIYKVSNRFSGVPDRFSGSGSGTDFTLKISRVEAEDLGVYYCFQGSHVPRTFGGGTKLEIKRADAAPTVSIFPPSSEQLTSGGASVVCFLNNFYPKDINVKWKIDGSERQNGVLNSWTDQDSKDSTYSMSSTLTLTKDEYERHNSYTCEATHKTSTSPIVKSFNRNEC

SEQ ID NO: 21621 - protein, 219 aa, Artificial Sequence; identical to SEQ ID NO: 4948
  source: /note="Description of Artificial Sequence: Synthetic polypeptide"

SEQ ID NO: 21622 - protein, 219 aa, Artificial Sequence
  source: /note="Description of Artificial Sequence: Synthetic polypeptide"
DIVMTQTPLSLPVTPGEPASISCRSSQSLVHRNGKTYLHWYLQKPGQSPQLLIYKVSNRFSGVPDRFSGSGSGTDFTLKISRVEAEDVGVYFCSQTARFPYTFGGGTKVEIKRTVAAPSVFIFPPSDEQLKSGTASVVCLLNNFYPREAKVQWKVDNALQSGNSQESVTEQDSKDSTYSLSSTLTLSKADYEKHKVYACEVTHQGLSSPVTKSFNRGEC

SEQ ID NO: 21623 - protein, 219 aa, Artificial Sequence
  source: /note="Description of Artificial Sequence: Synthetic polypeptide"
DIVMTQTPLSLPVTPGEPASISCRSSQSLVHSRGKTYLHWYLQKPGQSPQLLIYKVSNRFFGVPDRFSGSGSGTDFTLKISRVEAEDVGVYFCSQTARFPYTFGGGTKVEIKRTVAAPSVFIFPPSDEQLKSGTASVVCLLNNFYPREAKVQWKVDNALQSGNSQESVTEQDSKDSTYSLSSTLTLSKADYEKHKVYACEVTHQGLSSPVTKSFNRGEC

SEQ ID NO: 21624 - protein, 219 aa, Artificial Sequence
  source: /note="Description of Artificial Sequence: Synthetic polypeptide"
DIVMTQTPLSLPVTPGEPASISCRSSQSLVHSKGKTYLHWYLQKPGQSPQLLIYKVKNRFSGVPDRFSGSGSGTDFTLKISRVEAEDVGVYFCSQTAHFPRTFGGGTKVEIKRTVAAPSVFIFPPSDEQLKSGTASVVCLLNNFYPREAKVQWKVDNALQSGNSQESVTEQDSKDSTYSLSSTLTLSKADYEKHKVYACEVTHQGLSSPVTKSFNRGEC

SEQ ID NO: 21625 - protein, 219 aa, Artificial Sequence
  source: /note="Description of Artificial Sequence: Synthetic polypeptide"
DIVMTQTPLSLPVTPGEPASISCRSSQSLVRSRGKTYLHWYLQKPGQSPQLLIYKVSNRFSGVPDRFSGSGSGTDFTLKISRVEAEDVGVYFCSQTAQFPYTFGGGTKVEIKRTVAAPSVFIFPPSDEQLKSGTASVVCLLNNFYPREAKVQWKVDNALQSGNSQESVTEQDSKDSTYSLSSTLTLSKADYEKHKVYACEVTHQGLSSPVTKSFNRGEC

SEQ ID NO: 21626 - protein, 219 aa, Artificial Sequence
  source: /note="Description of Artificial Sequence: Synthetic polypeptide"
DIVMTQTPLSLPVTPGEPASISCRSSQSLVHKHGKTYLHWYLQKPGQSPQLLIYKVRNRFSGVPDRFSGSGSGTDFTLKISRVEAEDVGVYFCSQTAHFPYTFGGGTKVEIKRTVAAPSVFIFPPSDEQLKSGTASVVCLLNNFYPREAKVQWKVDNALQSGNSQESVTEQDSKDSTYSLSSTLTLSKADYEKHKVYACEVTHQGLSSPVTKSFNRGEC

SEQ ID NO: 21627 - protein, 219 aa, Artificial Sequence
  source: /note="Description of Artificial Sequence: Synthetic polypeptide"
DIVMTQTPLSLPVTPGEPASISCRSSQSLVHSGGKTYLHWYLQKPGQSPQLLIYKVSNRFGGVPDRFSGSGSGTDFTLKISRVEAEDVGVYFCSQTRHFPYTFGGGTKVEIKRTVAAPSVFIFPPSDEQLKSGTASVVCLLNNFYPREAKVQWKVDNALQSGNSQESVTEQDSKDSTYSLSSTLTLSKADYEKHKVYACEVTHQGLSSPVTKSFNRGEC

SEQ ID NO: 21628 - protein, 219 aa, Artificial Sequence
  source: /note="Description of Artificial Sequence: Synthetic polypeptide"
DIVMTQTPLSLPVTPGEPASISCRSSQRLIHRNGKTYLHWYLQKPGQSPQLLIYKVSNRFFGVPDRFSGSGSGTDFTLKISRVEAEDVGVYFCSQTAHFPYTFGGGTKVEIKRTVAAPSVFIFPPSDEQLKSGTASVVCLLNNFYPREAKVQWKVDNALQSGNSQESVTEQDSKDSTYSLSSTLTLSKADYEKHKVYACEVTHQGLSSPVTKSFNRGEC

SEQ ID NO: 21629 - protein, 219 aa, Artificial Sequence
  source: /note="Description of Artificial Sequence: Synthetic polypeptide"
DIVMTQTPLSLPVTPGEPASISCRSSQSLVRSHGKTYLHWYLQKPGQSPQLLIYKVSNRFFGVPDRFSGSGSGTDFTLKISRVEAEDVGVYFCSQTAYFPYTFGGGTKVEIKRTVAAPSVFIFPPSDEQLKSGTASVVCLLNNFYPREAKVQWKVDNALQSGNSQESVTEQDSKDSTYSLSSTLTLSKADYEKHKVYACEVTHQGLSSPVTKSFNRGEC

SEQ ID NO: 21630 - protein, 219 aa, Artificial Sequence
  source: /note="Description of Artificial Sequence: Synthetic polypeptide"
DIVMTQTPLSLPVTPGEPASISCRSSQSLVRSHGKTYLHWYLQKPGQSPQLLIYKVSNRFKGVPDRFSGSGSGTDFTLKISRVEAEDVGVYFCSQTAQFPYTFGGGTKVEIKRTVAAPSVFIFPPSDEQLKSGTASVVCLLNNFYPREAKVQWKVDNALQSGNSQESVTEQDSKDSTYSLSSTLTLSKADYEKHKVYACEVTHQGLSSPVTKSFNRGEC

SEQ ID NO: 21631 - protein, 219 aa, Artificial Sequence
  source: /note="Description of Artificial Sequence: Synthetic polypeptide"
DIVMTQTPLSLPVTPGEPASISCRSSQSLVRSRGKTYLHWYLQKPGQSPQLLIYKVSNRFSGVPDRFSGSGSGTDFTLKISRVEAEDVGVYFCSQTAHFPYTFGGGTKVEIKRTVAAPSVFIFPPSDEQLKSGTASVVCLLNNFYPREAKVQWKVDNALQSGNSQESVTEQDSKDSTYSLSSTLTLSKADYEKHKVYACEVTHQGLSSPVTKSFNRGEC

SEQ ID NO: 21632 - protein, 219 aa, Artificial Sequence
  source: /note="Description of Artificial Sequence: Synthetic polypeptide"
DIVMTQTPLSLPVTPGEPASISCRSSQSLVHSHGRTYLHWYLQKPGQSPQLLIYKVSNRFRGVPDRFSGSGSGTDFTLKISRVEAEDVGVYFCSQTAYFPYTFGGGTKVEIKRTVAAPSVFIFPPSDEQLKSGTASVVCLLNNFYPREAKVQWKVDNALQSGNSQESVTEQDSKDSTYSLSSTLTLSKADYEKHKVYACEVTHQGLSSPVTKSFNRGEC

SEQ ID NO: 21633 - protein, 219 aa, Artificial Sequence
  source: /note="Description of Artificial Sequence: Synthetic polypeptide"
DIVMTQTPLSLPVTPGEPASISCTSSQVLVHSHGKTYLHWYLQKPGQSPQLLIYKVSNRFRGVPDRFSGSGSGTDFTLKISRVEAEDVGVYFCSQTARFPYTFGGGTKVEIKRTVAAPSVFIFPPSDEQLKSGTASVVCLLNNFYPREAKVQWKVDNALQSGNSQESVTEQDSKDSTYSLSSTLTLSKADYEKHKVYACEVTHQGLSSPVTKSFNRGEC

SEQ ID NO: 21634 - protein, 219 aa, Artificial Sequence
  source: /note="Description of Artificial Sequence: Synthetic polypeptide"
DIVMTQTPLSLPVTPGEPASISCRSSQSLVHRHGKTYLHWYLQKPGQSPQLLIYKVSNRFSGVPDRFSGSGSGTDFTLKISRVEAEDVGVYFCSQTAHFPRTFGGGTKVEIKRTVAAPSVFIFPPSDEQLKSGTASVVCLLNNFYPREAKVQWKVDNALQSGNSQESVTEQDSKDSTYSLSSTLTLSKADYEKHKVYACEVTHQGLSSPVTKSFNRGEC

SEQ ID NO: 21635 - protein, 219 aa, Artificial Sequence
  source: /note="Description of Artificial Sequence: Synthetic polypeptide"
DIVMTQTPLSLPVTPGEPASISCRSSQSLVHRRGKTYVHWYLQKPGQSPQLLIYKVSNRFSGVPDRFSGSGSGTDFTLKISRVEAEDVGVYFCSQTAHFPYTFGGGTKVEIKRTVAAPSVFIFPPSDEQLKSGTASVVCLLNNFYPREAKVQWKVDNALQSGNSQESVTEQDSKDSTYSLSSTLTLSKADYEKHKVYACEVTHQGLSSPVTKSFNRGEC

SEQ ID NO: 21636 - protein, 219 aa, Artificial Sequence
  source: /note="Description of Artificial Sequence: Synthetic polypeptide"
DIVMTQTPLSLPVTPGEPASISCRSSQSLVRSHGKTYLHWYLQKPGQSPQLLIYKVSKRFYGVPDRFSGSGSGTDFTLKISRVEAEDVGVYFCSQTAHFPYTFGGGTKVEIKRTVAAPSVFIFPPSDEQLKSGTASVVCLLNNFYPREAKVQWKVDNALQSGNSQESVTEQDSKDSTYSLSSTLTLSKADYEKHKVYACEVTHQGLSSPVTKSFNRGEC

SEQ ID NO: 21637 - protein, 219 aa, Artificial Sequence
  source: /note="Description of Artificial Sequence: Synthetic polypeptide"
DIVMTQTPLSLPVTPGEPASISCRSSQSLVHRHGKTYLHWYLQKPGQSPQLLIYKVSNRFSGVPDRFSGSGSGTDFTLKISRVEAEDVGVYFCSQTAHFPYTFGGGTKVEIKRTVAAPSVFIFPPSDEQLKSGTASVVCLLNNFYPREAKVQWKVDNALQSGNSQESVTEQDSKDSTYSLSSTLTLSKADYEKHKVYACEVTHQGLSSPVTKSFNRGEC

SEQ ID NO: 21638 - protein, 219 aa, Artificial Sequence
  source: /note="Description of Artificial Sequence: Synthetic polypeptide"
DIVMTQTPLSLPVTPGEPASISCRSSQSLVHGHGKTYLHWYLQKPGQSPQLLIYKVRNRFSGVPDRFSGSGSGTDFTLKISRVEAEDVGVYFCSQTAHFPYTFGGGTKVEIKRTVAAPSVFIFPPSDEQLKSGTASVVCLLNNFYPREAKVQWKVDNALQSGNSQESVTEQDSKDSTYSLSSTLTLSKADYEKHKVYACEVTHQGLSSPVTKSFNRGEC

SEQ ID NO: 21639 - protein, 219 aa, Artificial Sequence
  source: /note="Description of Artificial Sequence: Synthetic polypeptide"
DIVMTQTPLSLPVTPGEPASISCRSSQSLVHGHGKTYLHWYLQKPGQSPQLLIYKVSNRFSGVPDRFSGSGSGTDFTLKISRVEAEDVGVYFCSQTARFPYTFGGGTKVEIKRTVAAPSVFIFPPSDEQLKSGTASVVCLLNNFYPREAKVQWKVDNALQSGNSQESVTEQDSKDSTYSLSSTLTLSKADYEKHKVYACEVTHQGLSSPVTKSFNRGEC

SEQ ID NO: 21640 - protein, 219 aa, Artificial Sequence
  source: /note="Description of Artificial Sequence: Synthetic polypeptide"
DIVMTQTPLSLPVTPGEPASISCRSSQSLRHSHGKTYLHWYLQKPGQSPQLLIYKVSHRFSGVPDRFSGSGSGTDFTLKISRVEAEDVGVYFCSQTRHFPYTFGGGTKVEIKRTVAAPSVFIFPPSDEQLKSGTASVVCLLNNFYPREAKVQWKVDNALQSGNSQESVTEQDSKDSTYSLSSTLTLSKADYEKHKVYACEVTHQGLSSPVTKSFNRGEC

SEQ ID NO: 21641 - protein, 219 aa, Artificial Sequence
  source: /note="Description of Artificial Sequence: Synthetic polypeptide"
DIVMTQTPLSLPVTPGEPASISCRSSQSLVHSHGRTYLHWYLQKPGQSPQLLIYKVSNRFFGVPDRFSGSGSGTDFTLKISRVEAEDVGVYFCSQTRHFPYTFGGGTKVEIKRTVAAPSVFIFPPSDEQLKSGTASVVCLLNNFYPREAKVQWKVDNALQSGNSQESVTEQDSKDSTYSLSSTLTLSKADYEKHKVYACEVTHQGLSSPVTKSFNRGEC

SEQ ID NO: 21642 - protein, 219 aa, Artificial Sequence
  source: /note="Description of Artificial Sequence: Synthetic polypeptide"
DIVMTQTPLSLPVTPGEPASISCRSSQSLVRSHGKTYLHWYLQKPGQSPQLLIYKVSNRFLGVPDRFSGSGSGTDFTLKISRVEAEDVGVYFCSQTAHFPYTFGGGTKVEIKRTVAAPSVFIFPPSDEQLKSGTASVVCLLNNFYPREAKVQWKVDNALQSGNSQESVTEQDSKDSTYSLSSTLTLSKADYEKHKVYACEVTHQGLSSPVTKSFNRGEC

SEQ ID NO: 21643 - protein, 166 aa, Mus musculus
MGTDQSPQAVSSGCLLKMKLPVRLLVLMFWIPASNSDVVMTQTPLSLPVSLGDQASISCRSSQSLVHSDGNTYLHWYLQKPGQSPKLLIYKVSNRFSGVPDRFSGSGSGTDFTLKISRLEAEDLGVYFCSQSTHVPWTFGGGTKLEIKRADAAPTVSIFPPSSKLG

SEQ ID NO: 21644 - protein, 145 aa, Mus musculus
MMSSAQFLGLLLLCFQGTRCDIQMTQTTSSLSASLGDRVTISCRASQDISNYLNWYQQKPDGTVKLLIYYTSRLHSGVPSRFSGSGSGTDYSLTISNLEQEDIATYFCQQGNTLPWTFGGGTKLEIKRADAAPTVSIFPPSSKLG

SEQ ID NO: 21645 - protein, 148 aa, Mus musculus
MESQTQVFLSLLLWVSGTCGNIMMTQSPSSLAVSAGEKVTMSCKSSQSVLYSSDLKNYLAWYQQKPGQSPTLLIYWASTRESGVPDRFTGSGSGTDFTLTISSVQAEDLAVYYCHQYLSSYTFGGGTKLEIKRADAAPTVSIFPPSSK

SEQ ID NO: 21646 - protein, 151 aa, Mus musculus
MDSQAQVLMLLLLWVSGTCGDIVMSQSPSSLAVSVGEKVTMSCKSSQSLLYTGNQKNYLAWYQQKPGQSPKLLIYWASTRESGVPDRFTGSGSGTDFTLTISSVKAEDLAVYYCQQYYSYPWTFGGGTKLEIKRADAAPTVSIFPPSSKLG

SEQ ID NO: 21647 - protein, 120 aa, Homo sapiens; identical to SEQ ID NO: 4805

SEQ ID NO: 21648 - protein, 112 aa, Artificial Sequence; identical to SEQ ID NO: 5312
  source: /note="Description of Artificial Sequence: Synthetic polypeptide"

SEQ ID NO: 21649 - protein, 209 aa, Artificial Sequence
  source: /note="Description of Artificial Sequence: Synthetic polypeptide"
ALTQPTSVSANLGGSVEITCSGSDYDYGWYQQKAPGSAPVTVIYWNDKRPSDIPSRFSGSTSGSTSTLTITGVQAEDEAVYYCGAYDGSAGGGIFGAGTTLTVLGQPKAAPSVTLFPPSSEELQANKATLVCLISDFYPGAVTVAWKADSSPVKAGVETTTPSKQSNNKYAASSYLSLTPEQWKSHRSYSCQVTHEGSTVEKTVAPTEC

SEQ ID NO: 21650 - protein, 219 aa, Artificial Sequence
  source: /note="Description of Artificial Sequence: Synthetic polypeptide"
DIVMSQSPLSLPVTPGEPASISCKSSQSLLNSRTRKNYLAWYLQKPGQSPQLLIYWASTRESGVPDRFTGSGSGTDFTLKISRVEAEDVGVYYCKQSFYLRTFGQGTKVEIKRTVAAPSVFIFPPSDEQLKSGTASVVCLLNNFYPREAKVQWKVDNALQSGNSQESVTEQDSKDSTYSLSSTLTLSKADYEKHKVYACEVTHQGLSSPVTKSFNRGEC

SEQ ID NO: 21651 - DNA, 336 bp, Artificial Sequence; identical to SEQ ID NO: 21614
  source: /note="Description of Artificial Sequence: Synthetic polynucleotide"

SEQ ID NO: 21652 - protein, 216 aa, Artificial Sequence
  source: /note="Description of Artificial Sequence: Synthetic polypeptide"
QSALTQPRSVSGSPGQSVTISCTGTSSDVGGYNYVSWHQQHPGKAPKLLIYDVTKRPSGVPDRFSGSKSGNTAALTISGLQAEDEADYYCHSYVGSYTLVFGGGTKLTVLGQPKSSPSVTLFPPSSEELETNKATLVCTITDFYPGVVTVDWKVDGTPVTQGMETTQPSKQSNNKYMASSYLTLTARAWERHSSYSCQVTHEGHTVEKSLSRADCS

SEQ ID NO: 21653 - protein, 214 aa, Artificial Sequence
  source: /note="Description of Artificial Sequence: Synthetic polypeptide"
DIQMTQSPSSLSASVGDRVTITCRASQGIVNNLAWFQQKPGKAPKSLIYAASSLQGGVPSKFSGSASGTDFSLTISNLQPEDFATYFCQQYNSYPWTFGQGTKVEIKRADAAPTVSIFPPSSEQLTSGGASVVCFLNNFYPKDINVKWKIDGSERQNGVLNSWTDQDSKDSTYSMSSTLTLTKDEYERHNSYTCEATHKTSTSPIVKSFNRNEC

SEQ ID NO: 21654 - protein, 217 aa, Artificial Sequence
  source: /note="Description of Artificial Sequence: Synthetic polypeptide"
QSALTQPPSASGSPGHSVTISCTGTSSDVGNYSFVSWYQQYPGKAPKIIIYDVSKRSSGVPDRFFGSKSANTASLTVSGVQEEDEADYFCSSYGGSKYPWVFGGGTKLTVLGQPKSSPSVTLFPPSSEELETNKATLVCTITDFYPGVVTVDWKVDGTPVTQGMETTQPSKQSNNKYMASSYLTLTARAWERHSSYSCQVTHEGHTVEKSLSRADCS

SEQ ID NO: 21655 - protein, 213 aa, Artificial Sequence
  source: /note="Description of Artificial Sequence: Synthetic polypeptide"
YELTQPPSVSVSPGQTARITCSGDALPKRYVYWYQQKSGQAPVLVIYEDSKRPSGIPETFSGSSSGTMATLTISGAQVEDEADYYCYSTDSNGHHWVFGGGTKLTVLGQPKSSPSVTLFPPSSEELETNKATLVCTITDFYPGVVTVDWKVDGTPVTQGMETTQPSKQSNNKYMASSYLTLTARAWERHSSYSCQVTHEGHTVEKSLSRADCS

SEQ ID NO: 21656 - protein, 217 aa, Artificial Sequence
  source: /note="Description of Artificial Sequence: Synthetic polypeptide"
QSALTQPPSASGSPGHSVTISCTGTSSDVGQYSFVSWYQQYPGKAPKIIIYDVSKRSSGVPDRFFGSKSANTASLTVSGVQEEDEADYFCSSYGGSKYPWVFGGGTKLTVLGQPKSSPSVTLFPPSSEELETNKATLVCTITDFYPGVVTVDWKVDGTPVTQGMETTQPSKQSNNKYMASSYLTLTARAWERHSSYSCQVTHEGHTVEKSLSRADCS

SEQ ID NO: 21657 - protein, 107 aa, Homo sapiens [sequence omitted]

SEQ ID NO: 21658 - protein, 106 aa, Homo sapiens; identical to SEQ ID NO: 4042

SEQ ID NO: 21659 - protein, 216 aa, Artificial Sequence
  source: /note="Description of Artificial Sequence: Synthetic polypeptide"
QSALTQPRSVSGSPGQSVTISCTGTSSDVGGYNYVSWHQQHPGKAPKLLIYDVTKRPSGVPDRFSGSKSGNTAALTISGLQAEDEADYYCHSYVGSYTLVFGGGTKLTVLGQPKAAPSVTLFPPSSEELQANKATLVCLISDFYPGAVTVAWKADSSPVKAGVETTTPSKQSNNKYAASSYLSLTPEQWKSHRSYSCQVTHEGSTVEKTVAPTECS

SEQ ID NO: 21660 - protein, 217 aa, Artificial Sequence
  source: /note="Description of Artificial Sequence: Synthetic polypeptide"
QSALTQPPSASGSPGHSVTISCTGTSSDVGQYSFVSWYQQYPGKAPKVIIYDVSKRSSGVPDRFFGSKSANTASLTVSGVQEEDEADYFCSSYGGSKYPWVFGGGTKLTVLGQPKSSPSVTLFPPSSEELETNKATLVCTITDFYPGVVTVDWKVDGTPVTQGMETTQPSKQSNNKYMASSYLTLTARAWERHSSYSCQVTHEGHTVEKSLSRADCS

SEQ ID NO: 21661 - protein, 213 aa, Artificial Sequence; identical to SEQ ID NO: 4984
  source: /note="Description of Artificial Sequence: Synthetic polypeptide"

SEQ ID NO: 21662 - protein, 108 aa, Homo sapiens; identical to SEQ ID NO: 5309

SEQ ID NO: 21663 - protein, 108 aa, Homo sapiens; identical to SEQ ID NO: 5308

SEQ ID NO: 21664 - protein, 107 aa, Homo sapiens; identical to SEQ ID NO: 5307

SEQ ID NO: 21665 - protein, 112 aa, Mus musculus; identical to SEQ ID NO: 5339

SEQ ID NO: 21666 - protein, 107 aa, Mus musculus; identical to SEQ ID NO: 5340

SEQ ID NO: 21667 - protein, 112 aa, Artificial Sequence
  source: /note="Description of Artificial Sequence: Synthetic polypeptide"
DIVMTQSPLSLPVTPGEPASISCKSSQSLLNSRTRKNYLAWYLQKPGQSPQLLIYWASTRESGVPDRFTGSGSGTDFTLKISRVEAEDVGVYYCKQSFYLRTFGQGTKVEIK

SEQ ID NO: 21668 - protein, 112 aa, Artificial Sequence
  source: /note="Description of Artificial Sequence: Synthetic polypeptide"
DIVMSQSPLSLPVTPGEPASISCKSSQSLLNSRTRKNYLAWYLQKPGQSPQLLIYWASTRESGVPDRFTGSGSGTDFTLKISRVEAEDVGVYYCKQSFYLRTFGQGTKVEIK

SEQ ID NO: 21669 - DNA, 336 bp, Artificial Sequence
  source: /note="Description of Artificial Sequence: Synthetic polynucleotide"
gacattgtgatgtcacagtctccatcctccctggctgtgtcagcaggagagaaggtcactatgagctgcaaatccagtcagagtctgctcaacagtagaacccgaaagaactacctggcttggtaccagcagaaaccagggcagtctcctaaactgctgatctactgggcatccactagggaatctggggtccctgatcgcttcacaggcagtggatctgggacagatttcactctcaccatcagcagtgtgcaggctgaagacctggcagtttattactgcaagcaatctttttatcttcggacgttcggtggaggcaccaagctggacatcaaa

SEQ ID NO: 21670 - protein, 107 aa, Homo sapiens
YELTQPPSVSVSPGQTAGITCSGDALPKQFVYWYQKKPGQAPVLLIYKDTERPSRIPERFSGSTSGTTVALTINGVQAEDEADYYCQSADRSGALWVFGGGTKLTVL

SEQ ID NO: 21671 - protein, 112 aa, Artificial Sequence
  source: /note="Description of Artificial Sequence: Synthetic polypeptide"
DIVMTQSTLSLPVSLGDQASISCRSSQSIVHSNGNTYLEWYLQKPGQSPKLLIYKVSNRFSGVPDRFSGSGSGTDFTLKISRVEAEDLGVYYCFQGSHVPRTFGGGTKLEIK

SEQ ID NO: 21672 - protein, 112 aa, Artificial Sequence
  source: /note="Description of Artificial Sequence: Synthetic polypeptide"
DIVMTQTPLSLPVTPGEPASISCRSSQSLVHRNGKTYLHWYLQKPGQSPQLLIYKVSNRFSGVPDRFSGSGSGTDFTLKISRVEAEDVGVYFCSQTARFPYTFGGGTKVEIK

SEQ ID NO: 21673 - protein, 112 aa, Artificial Sequence
  source: /note="Description of Artificial Sequence: Synthetic polypeptide"
DIVMTQTPLSLPVTPGEPASISCRSSQSLVHSRGKTYLHWYLQKPGQSPQLLIYKVSNRFFGVPDRFSGSGSGTDFTLKISRVEAEDVGVYFCSQTARFPYTFGGGTKVEIK

SEQ ID NO: 21674 - protein, 112 aa, Artificial Sequence
  source: /note="Description of Artificial Sequence: Synthetic polypeptide"
DIVMTQTPLSLPVTPGEPASISCRSSQSLVHSKGKTYLHWYLQKPGQSPQLLIYKVKNRFSGVPDRFSGSGSGTDFTLKISRVEAEDVGVYFCSQTAHFPRTFGGGTKVEIK

SEQ ID NO: 21675 - protein, 112 aa, Artificial Sequence
  source: /note="Description of Artificial Sequence: Synthetic polypeptide"
DIVMTQTPLSLPVTPGEPASISCRSSQSLVRSRGKTYLHWYLQKPGQSPQLLIYKVSNRFSGVPDRFSGSGSGTDFTLKISRVEAEDVGVYFCSQTAQFPYTFGGGTKVEIK

SEQ ID NO: 21676 - protein, 112 aa, Artificial Sequence
  source: /note="Description of Artificial Sequence: Synthetic polypeptide"
DIVMTQTPLSLPVTPGEPASISCRSSQSLVHKHGKTYLHWYLQKPGQSPQLLIYKVRNRFSGVPDRFSGSGSGTDFTLKISRVEAEDVGVYFCSQTAHFPYTFGGGTKVEIK

SEQ ID NO: 21677 - protein, 112 aa, Artificial Sequence
  source: /note="Description of Artificial Sequence: Synthetic polypeptide"
DIVMTQTPLSLPVTPGEPASISCRSSQSLVHSGGKTYLHWYLQKPGQSPQLLIYKVSNRFGGVPDRFSGSGSGTDFTLKISRVEAEDVGVYFCSQTRHFPYTFGGGTKVEIK

SEQ ID NO: 21678 - protein, 112 aa, Artificial Sequence
  source: /note="Description of Artificial Sequence: Synthetic polypeptide"
DIVMTQTPLSLPVTPGEPASISCRSSQRLIHRNGKTYLHWYLQKPGQSPQLLIYKVSNRFFGVPDRFSGSGSGTDFTLKISRVEAEDVGVYFCSQTAHFPYTFGGGTKVEIK

SEQ ID NO: 21679 - protein, 112 aa, Artificial Sequence
  source: /note="Description of Artificial Sequence: Synthetic polypeptide"
DIVMTQTPLSLPVTPGEPASISCRSSQSLVRSHGKTYLHWYLQKPGQSPQLLIYKVSNRFFGVPDRFSGSGSGTDFTLKISRVEAEDVGVYFCSQTAYFPYTFGGGTKVEIK

SEQ ID NO: 21680 - protein, 112 aa, Artificial Sequence
  source: /note="Description of Artificial Sequence: Synthetic polypeptide"
DIVMTQTPLSLPVTPGEPASISCRSSQSLVRSHGKTYLHWYLQKPGQSPQLLIYKVSNRFKGVPDRFSGSGSGTDFTLKISRVEAEDVGVYFCSQTAQFPYTFGGGTKVEIK

SEQ ID NO: 21681 - protein, 112 aa, Artificial Sequence
  source: /note="Description of Artificial Sequence: Synthetic polypeptide"
DIVMTQTPLSLPVTPGEPASISCRSSQSLVRSRGKTYLHWYLQKPGQSPQLLIYKVSNRFSGVPDRFSGSGSGTDFTLKISRVEAEDVGVYFCSQTAHFPYTFGGGTKVEIK

SEQ ID NO: 21682 - protein, 112 aa, Artificial Sequence
  source: /note="Description of Artificial Sequence: Synthetic polypeptide"
DIVMTQTPLSLPVTPGEPASISCRSSQSLVHSHGRTYLHWYLQKPGQSPQLLIYKVSNRFRGVPDRFSGSGSGTDFTLKISRVEAEDVGVYFCSQTAYFPYTFGGGTKVEIK

SEQ ID NO: 21683 - protein, 112 aa, Artificial Sequence
  source: /note="Description of Artificial Sequence: Synthetic polypeptide"
DIVMTQTPLSLPVTPGEPASISCTSSQVLVHSHGKTYLHWYLQKPGQSPQLLIYKVSNRFRGVPDRFSGSGSGTDFTLKISRVEAEDVGVYFCSQTARFPYTFGGGTKVEIK

SEQ ID NO: 21684 - protein, 112 aa, Artificial Sequence
  source: /note="Description of Artificial Sequence: Synthetic polypeptide"
DIVMTQTPLSLPVTPGEPASISCRSSQSLVHRHGKTYLHWYLQKPGQSPQLLIYKVSNRFSGVPDRFSGSGSGTDFTLKISRVEAEDVGVYFCSQTAHFPRTFGGGTKVEIK

SEQ ID NO: 21685 - protein, 112 aa, Artificial Sequence
  source: /note="Description of Artificial Sequence: Synthetic polypeptide"
DIVMTQTPLSLPVTPGEPASISCRSSQSLVHRRGKTYVHWYLQKPGQSPQLLIYKVSNRFSGVPDRFSGSGSGTDFTLKISRVEAEDVGVYFCSQTAHFPYTFGGGTKVEIK

SEQ ID NO: 21686 - protein, 112 aa, Artificial Sequence
  source: /note="Description of Artificial Sequence: Synthetic polypeptide"
DIVMTQTPLSLPVTPGEPASISCRSSQSLVRSHGKTYLHWYLQKPGQSPQLLIYKVSKRFYGVPDRFSGSGSGTDFTLKISRVEAEDVGVYFCSQTAHFPYTFGGGTKVEIK

SEQ ID NO: 21687 - protein, 112 aa, Artificial Sequence
  source: /note="Description of Artificial Sequence: Synthetic polypeptide"
DIVMTQTPLSLPVTPGEPASISCRSSQSLVHRHGKTYLHWYLQKPGQSPQLLIYKVSNRFSGVPDRFSGSGSGTDFTLKISRVEAEDVGVYFCSQTAHFPYTFGGGTKVEIK

SEQ ID NO: 21688 - protein, 112 aa, Artificial Sequence
  source: /note="Description of Artificial Sequence: Synthetic polypeptide"
DIVMTQTPLSLPVTPGEPASISCRSSQSLVHGHGKTYLHWYLQKPGQSPQLLIYKVRNRFSGVPDRFSGSGSGTDFTLKISRVEAEDVGVYFCSQTAHFPYTFGGGTKVEIK

SEQ ID NO: 21689 - protein, 112 aa, Artificial Sequence
  source: /note="Description of Artificial Sequence: Synthetic polypeptide"
DIVMTQTPLSLPVTPGEPASISCRSSQSLVHGHGKTYLHWYLQKPGQSPQLLIYKVSNRFSGVPDRFSGSGSGTDFTLKISRVEAEDVGVYFCSQTARFPYTFGGGTKVEIK

SEQ ID NO: 21690 - protein, 112 aa, Artificial Sequence
  source: /note="Description of Artificial Sequence: Synthetic polypeptide"
DIVMTQTPLSLPVTPGEPASISCRSSQSLRHSHGKTYLHWYLQKPGQSPQLLIYKVSHRFSGVPDRFSGSGSGTDFTLKISRVEAEDVGVYFCSQTRHFPYTFGGGTKVEIK

SEQ ID NO: 21691 - protein, 112 aa, Artificial Sequence
  source: /note="Description of Artificial Sequence: Synthetic polypeptide"
DIVMTQTPLSLPVTPGEPASISCRSSQSLVHSHGRTYLHWYLQKPGQSPQLLIYKVSNRFFGVPDRFSGSGSGTDFTLKISRVEAEDVGVYFCSQTRHFPYTFGGGTKVEIK

SEQ ID NO: 21692 - protein, 112 aa, Artificial Sequence
  source: /note="Description of Artificial Sequence: Synthetic polypeptide"
DIVMTQTPLSLPVTPGEPASISCRSSQSLVRSHGKTYLHWYLQKPGQSPQLLIYKVSNRFLGVPDRFSGSGSGTDFTLKISRVEAEDVGVYFCSQTAHFPYTFGGGTKVEIK

SEQ ID NO: 21693 - protein, 112 aa, Artificial Sequence; identical to SEQ ID NO: 5355
  source: /note="Description of Artificial Sequence: Synthetic polypeptide"

SEQ ID NO: 21694 - protein, 111 aa, Homo sapiens; identical to SEQ ID NO: 5318

SEQ ID NO: 21695 - protein, 111 aa, Artificial Sequence; identical to SEQ ID NO: 5316
  source: /note="Description of Artificial Sequence: Synthetic polypeptide"

SEQ ID NO: 21696 - protein, 111 aa, Artificial Sequence; identical to SEQ ID NO: 5317
  source: /note="Description of Artificial Sequence: Synthetic polypeptide"

SEQ ID NO: 21697 - protein, 108 aa, Homo sapiens; identical to SEQ ID NO: 5319

SEQ ID NO: 21698 - protein, 113 aa, Homo sapiens; identical to SEQ ID NO: 5320

SEQ ID NO: 21699 - protein, 108 aa, Homo sapiens; identical to SEQ ID NO: 5321

SEQ ID NO: 21700 - protein, 110 aa, Homo sapiens; identical to SEQ ID NO: 5322

SEQ ID NO: 21701 - protein, 113 aa, Homo sapiens; identical to SEQ ID NO: 5323

SEQ ID NO: 21702 - protein, 107 aa, Homo sapiens; identical to SEQ ID NO: 5324

SEQ ID NO: 21703 - protein, 113 aa, Homo sapiens; identical to SEQ ID NO: 5325

SEQ ID NO: 21704 - protein, 113 aa, Homo sapiens; identical to SEQ ID NO: 5327

SEQ ID NO: 21705 - protein, 113 aa, Homo sapiens; identical to SEQ ID NO: 5328

SEQ ID NO: 21706 - protein, 113 aa, Homo sapiens; identical to SEQ ID NO: 5329

SEQ ID NO: 21707 - protein, 113 aa, Homo sapiens; identical to SEQ ID NO: 5330

SEQ ID NO: 21708 - protein, 110 aa, Homo sapiens; identical to SEQ ID NO: 5331

SEQ ID NO: 21709 - protein, 113 aa, Homo sapiens; identical to SEQ ID NO: 5332

SEQ ID NO: 21710 - protein, 108 aa, Homo sapiens; identical to SEQ ID NO: 5334

SEQ ID NO: 21711 - protein, 112 aa, Artificial Sequence
  source: /note="Description of Artificial Sequence: Synthetic polypeptide"
DVVMTQSPLSLPVTPGEPASISCRSSQSIVHSNGNTYLEWYLQKPGQSPQLLIYKASNRFSGVPDRFSGSGSGTDFTLKISRVEAEDVGVYYCFQGSRLGPSFGQGTKLEIL

SEQ ID NO: 21712 - protein, 70 aa, Artificial Sequence
  source: /note="Description of Artificial Sequence: Synthetic polypeptide"
DIVMTQSPLSLPVTPGEPASISCWYLQKPGQSPQLLIYGVPDRFSGSGSGTDFTLKISRVEAEDVGVYYC

SEQ ID NO: 21713 - protein, 95 aa, Artificial Sequence
  source: /note="Description of Artificial Sequence: Synthetic polypeptide"
PASISCRSSQSIVHSNGNTYLEWYLQKPGQSPQLLIYKASNRFSGVPDRFSGSGSGTDFTLKISRVEAEDVGVYYCFQGSHVPPTFGQGTKLEIK

SEQ ID NO: 21714 - protein, 95 aa, Artificial Sequence
  source: /note="Description of Artificial Sequence: Synthetic polypeptide"
PASISCRSSQSIVHSNGNTYLEWYLQKPGQSPQLLIYKASNRFSGVPDRFSGSGSGTDFTLKISRVEAEDVGVYYCFQGSRLGPSFGQGTKLEIK

SEQ ID NO: 21715 - protein, 95 aa, Artificial Sequence
  source: /note="Description of Artificial Sequence: Synthetic polypeptide"
PASISCRSSQSIVHSNGNTYLEWYLQKPGQSPQLLIYKASNRFSGVPDRFSGSGSGTDFTLKISRVEAEDVGVYYCFQGSRVPASFGQGTKLEIK

SEQ ID NO: 21716 - protein, 95 aa, Artificial Sequence
  source: /note="Description of Artificial Sequence: Synthetic polypeptide"
PASISCRSSQSIVHSNGNTYLEWYLQKPGQSPQLLIYKASNRFSGVPDRFSGSGSGTDFTLKISRVEAEDVGVYYCFQGSRVPPGFGQGTKLEIK

SEQ ID NO: 21717 - protein, 95 aa, Artificial Sequence
  source: /note="Description of Artificial Sequence: Synthetic polypeptide"
PASISCRSSQSIVHSNGNTYLEWYLQKPGQSPQLLIYKASNRFSGVPDRFSGSGSGTDFTLKISRVEAEDVGVYYCFQGSKAHPSFGQGTKLEIK

SEQ ID NO: 21718 - protein, 95 aa, Artificial Sequence
  source: /note="Description of Artificial Sequence: Synthetic polypeptide"
PASISCRSSQSIVHSNGNTYLEWYLQKPGQSPQLLIYKASNRFSGVPDRFSGSGSGTDFTLKISRVEAEDVGVYYCFQGSYAPPGFGQGTKLEIK

SEQ ID NO: 21719 - protein, 95 aa, Artificial Sequence
  source: /note="Description of Artificial Sequence: Synthetic polypeptide"
PASISCRSSQSIVHSNGNTYLEWYLQKPGQSPQLLIYKASNRFSGVPDRFSGSGSGTDFTLKISRVEAEDVGVYYCFQGSRAPPFFGQGTKLEIK

SEQ ID NO: 21720 - protein, 95 aa, Artificial Sequence
  source: /note="Description of Artificial Sequence: Synthetic polypeptide"
PASISCRSSQSIVHSNGNTYLEWYLQKPGQSPQLLIYKASNRFSGVPDRFSGSGSGTDFTLKISRVEAEDVGVYYCFQGSRVPVRFGQGTKLEIK

SEQ ID NO: 21721 - protein, 131 aa, Mus musculus
MKLPVRLLVLMFWIPASSSDVLMTQTPLSLPVSLGDQASISCRSSQSIVHSNGSTYLEWYLQKPGQSPKLLIYKVSNRFSGVPDRFSGSGSGTDFTLKINRVEAEDLGVYYCFQGSHVPWTFGGGTKLEIK

SEQ ID NO: 21722 - protein, 109 aa, Homo sapiens; identical to SEQ ID NO: 5235

SEQ ID NO: 21723 - protein, 110 aa, Homo sapiens; identical to SEQ ID NO: 5230

SEQ ID NO: 21724 - protein, 110 aa, Homo sapiens
QSVLTQPPSASGTPGQRVTISCSGSSSNIGSNYVYWYQQPPGTAPKLLIYRNNQRPSGVPDRFSGSKSGTSASLAISGLRSEDEADYYCAAWDDSLSGYVFGTGTKVTVL

SEQ ID NO: 21725 - protein, 108 aa, Homo sapiens; identical to SEQ ID NO: 5232

SEQ ID NO: 21726 - protein, 107 aa, Homo sapiens; identical to SEQ ID NO: 4715

SEQ ID NO: 21727 - protein, 108 aa, Homo sapiens; identical to SEQ ID NO: 5234

SEQ ID NO: 21728 - protein, 109 aa, Mus musculus
DVLMTQTPLSLPVSLGDHASISCRSSQNIVHSNGNTYLEWYLQKPGQSPKVLIYTVSNRFSGVPDRFSGSGSGTDFTLKISRVEAEDLGVYYCFQGSHLPLTFGGGTKL

SEQ ID NO: 21729 - protein, 109 aa, Mus musculus
DILMTQTPLSLPVSLGDQASISCRSSQNIVHSNGNTYLEWYLQKPGQSPKVLIYTVSNRFSGVPDRFSGSGSGTDFTLKISRVEAEDLGVYYCFQGSHLPLTFGGGTKL

SEQ ID NO: 21730 - protein, 109 aa, Mus musculus
GVLMTQIPLSLPVSLGDQASISCRSSQNIVHSNGNTYLEWYLQKPGQSPKVLIYTVSNRFSGVPDRFSGSGSGTDFTLKISRVEAEDLGVYYCFQGSHLPLTFGGGTKL

SEQ ID NO: 21731 - protein, 109 aa, Mus musculus
DVLLTQTPLSLPVSLGDQASISCRSSQNIVHSNGNTYLEWYLQKPGQSPKVLIYTVSNRFSGVPDRFSGSGSGTDFTLKISRVEAEDLGVYYCFQGSHLPLTFGGGTKL

SEQ ID NO: 21732 - protein, 109 aa, Mus musculus
VVLMTQTPLSLPVSLGDQASISCRSSQNIVHSNGNTYLEWYLQKPGQSPKVLIYTVSNRFSGVPDRFSGSGSGTDFTLKISRVEAEDLGVYYCFQGSHLPLTFGGGTKL

SEQ ID NO: 21733 - protein, 109 aa, Mus musculus
DVLMTQSPLSLPVSLGDQASISCRSSQNIVHTNGNTYLEWYLQKPGQSPKVLIYTVSNRFSGVPDRFSGSGSGTDFTLKISRVEAEDLGVYYCFQGSHLPLTFGGGTKL

SEQ ID NO: 21734 - protein, 112 aa, Mus sp.; identical to SEQ ID NO: 5313

SEQ ID NO: 21735 - protein, 112 aa, Artificial Sequence; identical to SEQ ID NO: 5314
  source: /note="Description of Artificial Sequence: Synthetic polypeptide"

SEQ ID NO: 21736 - protein, 112 aa, Artificial Sequence; identical to SEQ ID NO: 5315
  source: /note="Description of Artificial Sequence: Synthetic polypeptide"

SEQ ID NO: 21737 - protein, 112 aa, Artificial Sequence; identical to SEQ ID NO: 4944
  source: /note="Description of Artificial Sequence: Synthetic polypeptide"

SEQ ID NO: 21738 - protein, 112 aa, Artificial Sequence; identical to SEQ ID NO: 4349
  source: /note="Description of Artificial Sequence: Synthetic polypeptide"

SEQ ID NO: 21739 - protein, 108 aa, Artificial Sequence
  source: /note="Description of Artificial Sequence: Synthetic polypeptide"
DIVMTQSPDTLSLSPGERATLSCRASQIISSNYLAWYQQQPGQAPRLLIYGASSRATGIPDRFSGSGSATDFTLTISRLEPEDFAVYYCQQYGTSPRTFGQGTKLEIK

SEQ ID NO: 21740 - protein, 113 aa, Artificial Sequence
  source: /note="Description of Artificial Sequence: Synthetic polypeptide"
ETTLTQSPDSLAVSLGERATINCKSSQSVLYSSNNKNYLAWYQQKPGQPPKVLIYWASTRESGVPDRFSGSGSGTDFTLTISSLQAEDVAVYYCQQYYSPPLTFGGGTKLEIK

SEQ ID NO: 21741 - protein, 107 aa, Artificial Sequence
  source: /note="Description of Artificial Sequence: Synthetic polypeptide"
EIVMTQSPATLSVSPGERATLSCRASQSVGANLAWYQQKPGQAPRLLIYSASTRATGVPARFSGSGSGTEFTLTISSLQSEDFAVYYCQQYNNWPRTFGQGTKVEIK

SEQ ID NO: 21742 - protein, 113 aa, Artificial Sequence
  source: /note="Description of Artificial Sequence: Synthetic polypeptide"
EIVLTQSPDSLAVSLGERANINCKSSQSVLYSSNNKNYLAWYQQKSGQPPKLLIYWASTRESGVPDRFSGSGSGTDFTLTISSLQAEDVAVYYCQQYYSTPLTFGGGTKVDIK

SEQ ID NO: 21743 - protein, 113 aa, Artificial Sequence
  source: /note="Description of Artificial Sequence: Synthetic polypeptide"
DIQMTQSPDSLAVSLGERATINCKSSQSLLYNSNNKNYLTWYQQKPGQPPKLLIYWASTRESGVPDRFSGSGSGTDFTLTISSLQAEDVAVYYCQQYYSSPLTFGGGTKVEIK

SEQ ID NO: 21744 - protein, 112 aa, Artificial Sequence
  source: /note="Description of Artificial Sequence: Synthetic polypeptide"
DVVMTQSPLSLPVTPGEPASISCRSSQSLLHRSGHKYLHWYLQRPGQSPQVLIYLGSNRASGVPDRFSGSGSGTDFTLKISRVEAEDVGLYYCMQTLQTPWTFGQGTKVEIK

SEQ ID NO: 21745 - protein, 113 aa, Artificial Sequence
  source: /note="Description of Artificial Sequence: Synthetic polypeptide"
DIQMTQSPDSLAVSLGERATINCKSSESLLYDSNNKNYLAWYQQKPGQPPKLLIYWASTRESGVPDRFSGSGSETDFTLTISSLQAEDVAVYHCQQYFSTPWTFGQGTKLEIK

SEQ ID NO: 21746 - protein, 113 aa, Artificial Sequence
  source: /note="Description of Artificial Sequence: Synthetic polypeptide"
DIQLTQSPDSLAVSLGERATINCKSSQSVFSRDNNKNYLAWYQHKSGQPPKLLFFWASSRESGVSDRFSGSGSGTDFTLTIDNLQAEDVALYYCQHYFNTPHNFGQGTKLEIK

SEQ ID NO: 21747 - protein, 113 aa, Artificial Sequence
  source: /note="Description of Artificial Sequence: Synthetic polypeptide"
DIQMTQSPDSLAVSLGERATINCESSQTLLYSSNEKNYLAWYQQKPGQPPKLLISWASTPESGVPDRFSGSGSGTSFTLTISSLQAEDVAVYYCQQYYNSPYTFGQGTRLEIK

SEQ ID NO: 21748 - protein, 113 aa, Artificial Sequence
  source: /note="Description of Artificial Sequence: Synthetic polypeptide"
DIQMTQSPDSLAVSLGERVTITCESSHSLLYRSNNRNYLAWYQQKPRQPPKLLIYWASTRESGVPDRFSGSGSETDFTLTISSLRAEDVAVYYCQQFYTTPYTFGQGTKVEIK

SEQ ID NO: 21749 - protein, 113 aa, Artificial Sequence
  source: /note="Description of Artificial Sequence: Synthetic polypeptide"
AIQLTQSPDSLAVSLGERVTISCESSHSLLYRSNNKNYLAWYQQKPRQPPKLLIYWASTRESGVPDRFSGSGSETDFTLTISSLRAEDVAVYYCQQFYTTPYTFGQGTKLEIK

SEQ ID NO: 21750 - protein, 113 aa, Artificial Sequence
  source: /note="Description of Artificial Sequence: Synthetic polypeptide"
EIVLTQSPDSLAVSLGERVTISCESSHSLLYRSNNKNYLAWYQQKPRQPPKLLIYWASTRESGVPDRFSGSGSETDFTLTISSLRAEDVAVYYCQQFYTTPYTFGQGTKLEIK

SEQ ID NO: 21751 - protein, 113 aa, Artificial Sequence
  source: /note="Description of Artificial Sequence: Synthetic polypeptide"
EIVLTQSPASLAVSLGERATINCKSSQSVLYSSNSENYLAWYQQKPGQPPKLLIYWASTRESGVPDRFSGSGSGTDFTLTISSLQAEDVAVYYCQQYYSTPFTFGQGTRLEIK

SEQ ID NO: 21752 - protein, 108 aa, Artificial Sequence
  source: /note="Description of Artificial Sequence: Synthetic polypeptide"
DIQMTQSPGTLSLSPGERATLSCRASQSVSSSYLAWYQQKPGQAPRLLIYGASSRATGIPDRFSGSGSGTDFTLTISRLEPEDFAVYYCQQYGTSPLTFGGGTKVEIK

SEQ ID NO: 21753 - protein, 108 aa, Artificial Sequence
  source: /note="Description of Artificial Sequence: Synthetic polypeptide"
EIVLTQSPLSLPATLGQPASISCRSSAGLRNNDGDILLSWFHQRPGQSPRRLFYRVSRRDSGVPDRFNGSGSATDFTLRINSVEAEDVGIYYCMRGPYWGQGTRLEIK

SEQ ID NO: 21754 - protein, 113 aa, Artificial Sequence
  source: /note="Description of Artificial Sequence: Synthetic polypeptide"
DIQLTQSPDSLAVSLGERATINCKSSQTLLYKSNNENYLAWYQQKPGQPPKLLIYWASTRESGVPDRFSGSGSGTDFTLTISSLQAEDVAVYYCQQYFTTALTFGGGTKVEIK

SEQ ID NO: 21755 - protein, 113 aa, Artificial Sequence
  source: /note="Description of Artificial Sequence: Synthetic polypeptide"
AIQLTQSPDSLAVSLGERATINCKSSQSLLYTSNNKNYLAWYQQKPGQTPKLLIIWASTRESGVPDRFTGSGSGTDFTLTISSLQAEDVAVYYCQQYYNSPYTFGQGTRLEIK

SEQ ID NO: 21756 - protein, 113 aa, Artificial Sequence
  source: /note="Description of Artificial Sequence: Synthetic polypeptide"
EIVMTQSPESLAVSLGERATINCKSTQSLLWSANNKNYLAWYRQKPRQTPELLITWASTRESGVPDRFSGSGSGTDFTLTITSLQAEDVAVYYCQQYYNSPYTFGQGTRLEIK

SEQ ID NO: 21757 - protein, 112 aa, Artificial Sequence
  source: /note="Description of Artificial Sequence: Synthetic polypeptide"
EIVLTQSPDFLAVSLGERATINCKSSQSLFYSGNSKDFLAWYQQKPGQPPRLLVYWASTRDSGVPERFSGSGSGTDFTLTISRLQAEDVALYYCHQYHSTPLSFGGGTKVEI

SEQ ID NO: 21758 - protein, 98 aa, Homo sapiens
EIVLTQSPDTLSLSPGERATLSCRASQIISSNYLAWYQQQPGQAPRLLIYGASSRATGIPDRFSGSGSATDFTLTISRLEPEDFAVYYCQQYGTSPRT

SEQ ID NO: 21759 - protein, 103 aa, Homo sapiens
DIVMTQSPDSLAVSLGERATINCKSSQSVLYSSNNKNYLAWYQQKPGQPPKVLIYWASTRESGVPDRFSGSGSGTDFTLTISSLQAEDVAVYYCQQYYSPPLT

SEQ ID NO: 21760 - protein, 97 aa, Homo sapiens
EIVMTQSPATLSVSPGERATLSCRASQSVGANLAWYQQKPGQAPRLLIYSASTRATGVPARFSGSGSGTEFTLTISSLQSEDFAVYYCQQYNNWPRT

SEQ ID NO: 21761 - protein, 103 aa, Homo sapiens
DIVMTQSPDSLAVSLGERANINCKSSQSVLYSSNNKNYLAWYQQKSGQPPKLLIYWASTRESGVPDRFSGSGSGTDFTLTISSLQAEDVAVYYCQQYYSTPLT

SEQ ID NO: 21762 - protein, 103 aa, Homo sapiens
DIVMTQSPDSLAVSLGERATINCKSSQSLLYNSNNKNYLTWYQQKPGQPPKLLIYWASTRESGVPDRFSGSGSGTDFTLTISSLQAEDVAVYYCQQYYSSPLT

SEQ ID NO: 21763 - protein, 102 aa, Homo sapiens
DIVMTQSPLSLPVTPGEPASISCRSSQSLLHRSGHKYLHWYLQRPGQSPQVLIYLGSNRASGVPDRFSGSGSGTDFTLKISRVEAEDVGLYYCMQTLQTPWT

SEQ ID NO: 21764 - protein, 103 aa, Homo sapiens
DIVMTQSPDSLAVSLGERATINCKSSESLLYDSNNKNYLAWYQQKPGQPPKLLIYWASTRESGVPDRFSGSGSETDFTLTISSLQAEDVAVYHCQQYFSTPWT

SEQ ID NO: 21765 - protein, 103 aa, Homo sapiens
DIVMTQSPDSLAVSLGERATINCKSSQSVFSRDNNKNYLAWYQHKSGQPPKLLFFWASSRESGVSDRFSGSGSGTDFTLTIDNLQAEDVALYYCQHYFNTPHN

SEQ ID NO: 21766 - protein, 103 aa, Homo sapiens
DIVMTQSPDSLAVSLGERATINCESSQTLLYSSNEKNYLAWYQQKPGQPPKLLISWASTPESGVPDRFSGSGSGTSFTLTISSLQAEDVAVYYCQQYYNSPYT

SEQ ID NO: 21767 - protein, 103 aa, Homo sapiens
DIVMTQSPDSLAVSLGERVTITCESSHSLLYRSNNRNYLAWYQQKPRQPPKLLIYWASTRESGVPDRFSGSGSETDFTLTISSLRAEDVAVYYCQQFYTTPYT

SEQ ID NO: 21768 - protein, 103 aa, Homo sapiens
DIVMTQSPDSLAVSLGERVTISCESSHSLLYRSNNKNYLAWYQQKPRQPPKLLIYWASTRESGVPDRFSGSGSETDFTLTISSLRAEDVAVYYCQQFYTTPYT

SEQ ID NO: 21769 - protein, 103 aa, Homo sapiens
DIVMTQSPASLAVSLGERATINCKSSQSVLYSSNSENYLAWYQQKPGQPPKLLIYWASTRESGVPDRFSGSGSGTDFTLTISSLQAEDVAVYYCQQYYSTPFT

SEQ ID NO: 21770 - protein, 98 aa, Homo sapiens
EIVLTQSPGTLSLSPGERATLSCRASQSVSSSYLAWYQQKPGQAPRLLIYGASSRATGIPDRFSGSGSGTDFTLTISRLEPEDFAVYYCQQYGTSPLT

SEQ ID NO: 21771 - protein, 98 aa, Homo sapiens
DVVMTQSPLSLPATLGQPASISCRSSAGLRNNDGDILLSWFHQRPGQSPRRLFYRVSRRDSGVPDRFNGSGSATDFTLRINSVEAEDVGIYYCMRGPY

SEQ ID NO: 21772 - protein, 103 aa, Homo sapiens
DIVMTQSPDSLAVSLGERATINCKSSQTLLYKSNNENYLAWYQQKPGQPPKLLIYWASTRESGVPDRFSGSGSGTDFTLTISSLQAEDVAVYYCQQYFTTALT

SEQ ID NO: 21773 - protein, 103 aa, Homo sapiens
DIVMTQSPDSLAVSLGERATINCKSSQSLLYTSNNKNYLAWYQQKPGQTPKLLIIWASTRESGVPDRFTGSGSGTDFTLTISSLQAEDVAVYYCQQYYNSPYT

SEQ ID NO: 21774 - protein, 103 aa, Homo sapiens
DIVMTQSPESLAVSLGERATINCKSTQSLLWSANNKNYLAWYRQKPRQTPELLITWASTRESGVPDRFSGSGSGTDFTLTITSLQAEDVAVYYCQQYYNSPYT

SEQ ID NO: 21775 - protein, 103 aa, Homo sapiens
DIVMTQSPDFLAVSLGERATINCKSSQSLFYSGNSKDFLAWYQQKPGQPPRLLVYWASTRDSGVPERFSGSGSGTDFTLTISRLQAEDVALYYCHQYHSTPLS

SEQ ID NO: 21776 - protein, 114 aa, Mus musculus
ELDVQMTQTPLTLSVTIGQPASISCKSSQSLLYSNGKTYLNWLLQRPGQSPKRLIYLVSKLDSGVPDRFTGSGSGTDFTLKISRVEAEDLGVYYCVQGTHSPLTFGAGTKLELK

SEQ ID NO: 21777 - protein, 114 aa, Mus musculus
ELDVVMTQTPLTLSVTIGQPASISCKSSQSLLYSNGKTYLNWLLQRPGQSPKRLIYLVSKLDSGVPDRFTGSGSGTDFTLKISRVEAEDLGVYYCVQGTHSPLTFGAGTKLELK

SEQ ID NO: 21778 - protein, 112 aa, Mus musculus
DVLMTQTPLSLPVSLGDQASISCRSSQNIIHSNGSTYLEWYLQKPGQSPKLLIYKVSNRFSGVPDRFSGSGSGTDFTLKISRVEAEDLGIYYCFQGSHVPWTFGGGTKLEIK

SEQ ID NO: 21779 - protein, 114 aa, Mus musculus
DIVMSQSPSSLAVSIGEKVTMSCKSSQSLLYSNNQKNYLAWYQRKPGQSPKLLIYWASTRESGVPDRFTGSGSGTDFTLTITSVKAEDLAVYYCQQYYSYPLWTFGGGTKLEIK

SEQ ID NO: 21780 - protein, 104 aa, Artificial Sequence
  source: /note="Description of Artificial Sequence: Synthetic polypeptide"
ALTQPTSVSANLGGSVEITCSGSDYDYGWYQQKAPGSAPVTVIYWNDKRPSDIPSRFSGSTSGSTSTLTITGVQAEDEAVYYCGAYDGSAGGGIFGAGTTLTVL

SEQ ID NO: 21781 - protein, 103 aa, Artificial Sequence
  source: /note="Description of Artificial Sequence: Synthetic polypeptide"
ALTQPTSVSANPGETVKITCSGDSSWYGWYQQKSPGSAPVTLIYNNNNRPSNIPSRFSGSKSGSTATLTITGVQAEDEAVYFCGGHDSSYAGIFGAGTTLTVL

SEQ ID NO: 21782 - protein, 109 aa, Artificial Sequence
  source: /note="Description of Artificial Sequence: Synthetic polypeptide"
ALTQPTSVSANLGGTVKITCSGGGSYAGSYYYGWYQQKSPGSAPVTVIYDNTNRPSNIPSRFSGSLSGSTSTLTITGVQAEDEAVYFCGGYDSSTYAGIFGAGTTLTVL

SEQ ID NO: 21783 - protein, 105 aa, Artificial Sequence
  source: /note="Description of Artificial Sequence: Synthetic polypeptide"
ALTQPTSVSANPGETVKITCSGGGSGYGYGWFQQKSPGSAPVTVIYYNDKRPSDIPSRFSGSTSGSTSTLTITGVQVEDEAVYYCGSGDSSGAGIFGAGTTLTVL

SEQ ID NO: 21784 - protein, 103 aa, Artificial Sequence
  source: /note="Description of Artificial Sequence: Synthetic polypeptide"
ALTQPTSVSANLGETVKITCSGESGNYGWYQQKAPGSAPVTVIYQNTQRPSDIPSRFSGSKSGSTGTLTITGVQADDEAVYFCGSGDGNFVGIFGAGTTLTVL

SEQ ID NO: 21785 - protein, 103 aa, Artificial Sequence
  source: /note="Description of Artificial Sequence: Synthetic polypeptide"
ALTQPTSVSANPGETVKITCSGGDSYYGWYQQKSPGSAPVTVIYDNDKRPSDIPSRFSGSKSGSTGTLTITGVQADDEAVYFCGTEDRSGTPIFGAGTTLTVL

SEQ ID NO: 21786 - protein, 112 aa, Artificial Sequence
  source: /note="Description of Artificial Sequence: Synthetic polypeptide"
DVLMTQTPLSLPVSLGDQASISCRSSQNIVYGNGNTYLEWYLQRPGQSPKLLIYKVSNRFSGVPDRFSGSGSGTDFTLKITRVEAEDLGVYYCFQGSHVPLTFGAGTKLELK

SEQ ID NO: 21787 - protein, 122 aa, Artificial Sequence
  source: /note="Description of Artificial Sequence: Synthetic polypeptide"
DIVLTQTPLSLPVSLGDPASISCRSSQTIVHSNGNTYLEWYLQKPGQSPKLLIYKVSNRFSGVPDRFSGSGSGTDFTLKISRVEAEDLGVYYCFQGSHVPFTFGSGTKLEIKRADAAPTVST

SEQ ID NO: 21788 - protein, 121 aa, Artificial Sequence
  source: /note="Description of Artificial Sequence: Synthetic polypeptide"
DIVLTQSPTSLAVSLGQRATISCRASKSVSTSDYSYMHWYQQKPGQPPKLLIYLASNLESGVPARFSGSGSGTDFTLNIHPVEEEDAATYYCQHSRELPFTFGGGTKLEIKRADAAPTVST

SEQ ID NO: 21789 - protein, 122 aa, Artificial Sequence
  source: /note="Description of Artificial Sequence: Synthetic polypeptide"
DIVLTQTPLTLSVTIGQPASISCKSSQSLLYSDGKTFLNWLLQSPGQSPRLLIYLVSKLQSGVPDRFSGSGSGTDFTLKISRVEAEDLGVYYCVQGTHFPYTFGGGTKLEIKRADAAPTVST

SEQ ID NO: 21790 - protein, 122 aa, Artificial Sequence
  source: /note="Description of Artificial Sequence: Synthetic polypeptide"
DIVMTQSPLSLSVTIGQPASISCKSSQSLLYSDGKTYLNWLQQRPGQSPKRLVYQVSKLDPGIPDRFSGSGSETDFTLKLSRVEAEDLGVYYCLQGTYYPHTFGGGTKLEIKRADAAPTVST

SEQ ID NO: 21791 - protein, 122 aa, Artificial Sequence
  source: /note="Description of Artificial Sequence: Synthetic polypeptide"
DIVITQSPLSLSVTIGQPASISCKSSQSLLYSDGKTYLNWLQQRPGQSPKRLVYQVSKLDPGIPDRFSGSGSETDFTLKLSRVEAEDLGVYYCLQGTYYPHTFGGGTKLEIKRADAAPTVST

SEQ ID NO: 21792 - protein, 116 aa, Artificial Sequence
  source: /note="Description of Artificial Sequence: Synthetic polypeptide"
DIVLTQTPSSLSASLGGKVTITCKASQDINKYIAWYQHKPGKGPRLLIHYTSTLQSGIPSRFSGSGSGRDYSFSISNLEPEDIATYYCLQYDHLLTFGAGTKLELKRADAAPTVST

SEQ ID NO: 21793 - protein, 230 aa, Artificial Sequence
  source: /note="Description of Artificial Sequence: Synthetic polypeptide"
MDSQAQVLILLLLWVSGTCGNIVLSQSPSSLAVSPGEKVTMSCKSSQSLLNSRTRKNYLAWFQQKPGQSPKLLIYWASTRESGVPDRFTGSGSGTDFTLTISSVQAEDLAVYYCKQSYTLRTFGGGTNLEIKRADAAPTVSIFPPSSEQLTSGGASVVCFLNNFYPKDINVKWKIDGSERQNGVLNSWTDQDSKDSTYSMSSTLTLTKDEYERHNSYTCEATHKTSTSPI

SEQ ID NO: 21794 - protein, 114 aa, Artificial Sequence
  source: /note="Description of Artificial Sequence: Synthetic polypeptide"
DIVMTQSPDSLAVSLGERATINCKSSQSVLYSSNNKNYLAWYQQKPGQPPKLLIYWASTRESGVPDRFSGSGSGTDFTLTISSLQAEDVAVYYCQQYYSTPQTFGGGTKVEIKR

SEQ ID NO: 21795 - protein, 108 aa, Homo sapiens; identical to SEQ ID NO: 5333

SEQ ID NO: 21796 - protein, 111 aa, Artificial Sequence
  source: /note="Description of Artificial Sequence: Synthetic polypeptide"
AQVMTQSPSSLSASVGDRVTITCRSSQSVRTNKLAWFQQKPGQPPKRLIYSASTLDFGVPSRFSGSGSGTEFTLTISSLQPEDFATYYCLGYFDSSADIVAFGGGTKVEIK

SEQ ID NO: 21797 - protein, 111 aa, Artificial Sequence
  source: /note="Description of Artificial Sequence: Synthetic polypeptide"
AQVMTQSPSSLSASVGDRVTITCRSSQSVRTNRLAWFQQKPGQPPKRLIYSASTLDYGVPSRFSGSGSGTEFTLTISSLQPEDFATYYCLGYFDSSADIVAFGGGTKVEIK

SEQ ID NO: 21798 - protein, 112 aa, Artificial Sequence
  source: /note="Description of Artificial Sequence: Synthetic polypeptide"
DIQMTQSTSTLSASVGDRVTITCQSSQSVRTNKLAWFQQKPGKAPKRLIYSASTLDFGVPSRFSGSGSGTEFTLTISSLQPDDFATYYCLGYFDCSIADCVAFGGGTKVEIK

SEQ ID NO: 21799 - protein, 112 aa, Artificial Sequence
  source: /note="Description of Artificial Sequence: Synthetic polypeptide"
DIQMTQSPSTLSASVGDRVTITCRASQSVRTNKLAWYQQKPGKAPKRLIYSASTLESGVPSRFSGSGSGTEFTLTISSLQPDDFATYYCLGYFDCSIADCVAFGGGTKVEIK

SEQ ID NO: 21800 - protein, 112 aa, Artificial Sequence
  source: /note="Description of Artificial Sequence: Synthetic polypeptide"
DIQMTQSPSSLSASVGDRVTITCRASQGVRTNKLAWFQQKPGQPPKRLIYSASTLQSGVPSRFSGSGSGTEFTLTISSLQPEDFATYYCLGYFDCSIADCVAFGGGTKVEIK

SEQ ID NO: 21801 - protein, 112 aa, Artificial Sequence
  source: /note="Description of Artificial Sequence: Synthetic polypeptide"
DIQMTQSPSSLSASVGDRVTITCRASQGVRTNKLAWFQQKPGQPPKRLIYSASTLQSGVPSRFSGSGSGTEFTLTISSLQPEDFATYYCLGYFDSSIADSVAFGGGTKVEIK

SEQ ID NO: 21802 - protein, 112 aa, Artificial Sequence
  source: /note="Description of Artificial Sequence: Synthetic polypeptide"
DIQMTQSPSSLSASVGDRVTITCRASQGVRTNKLAWFQQKPGQPPKRLIYSASTLQSGVPSRFSGSGSGTEFTLTISSLQPEDFATYYCLGYFDSSIADRVAFGGGTKVEIK

SEQ ID NO: 21803 - protein, 112 aa, Artificial Sequence
  source: /note="Description of Artificial Sequence: Synthetic polypeptide"
DIQMTQSPSSLSASVGDRVTITCRSSQSVRTNKLAWFQQKPGQPPKRLIYSASTLDFGVPSRFSGSGSGTEFTLTISSLQPEDFATYYCLGYFDCSIADCVAFGGGTKVEIK

SEQ ID NO: 21804 - protein, 112 aa, Artificial Sequence
  source: /note="Description of Artificial Sequence: Synthetic polypeptide"
AQVMTQSPSSLSASVGDRVTITCRSSQSVRTNKLAWFQQKPGQPPKRLIYSASTLDFGVPSRFSGSGSGTEFTLTISSLQPEDFATYYCLGYFDCSIADCVAFGGGTKVEIK

SEQ ID NO: 21805 - protein, 111 aa, Artificial Sequence
  source: /note="Description of Artificial Sequence: Synthetic polypeptide"
AIQMTQSPSTLSASVGDRVTITCRSSQSVRTNRLAWFQQKPGKAPKRLIYSASTLDFGVPSRFSGSGSGTEFTLTISSLQPDDFATYYCLGYFDPSADPVAFGGGTKVEIK

SEQ ID NO: 21806 - protein, 112 aa, Artificial Sequence
  source: /note="Description of Artificial Sequence: Synthetic polypeptide"
AIQMTQSPSSLSASVGDRVTITCRSSQSVRTNRLAWFQQKPGQPPKRLIYSASTLDFGVPSRFSGSGSGTEFTLTISSLQPEDFATYYCLGYFDSSIADIVAFGGGTKVEIK

SEQ ID NO: 21807 - protein, 112 aa, Artificial Sequence
  source: /note="Description of Artificial Sequence: Synthetic polypeptide"
AIQMTQSTSSLSASVGDRVTITCRSSQSVRTNRLAWFQQKPGQPPKRLIYSASTLDFGVPSRFSGSGSGTEFTLTISSLQPEDFATYYCLGYFDSSIADIVAFGGGTKVEIK

SEQ ID NO: 21808 - protein, 112 aa, Artificial Sequence
  source: /note="Description of Artificial Sequence: Synthetic polypeptide"
DIQMTQSPSSLSASVGDRVTITCRSSQSVRTNRLAWFQQKPGQPPKRLIYSASTLDFGVPSRFSGSGSGTEFTLTISSLQPEDFATYYCLGYFDPSIADPVAFGGGTKVEIK

SEQ ID NO: 21809 - protein, 111 aa, Artificial Sequence
  source: /note="Description of Artificial Sequence: Synthetic polypeptide"
DIQMTQSPSSLSASVGDRVTITCRSSQSVRTNRLAWFQQKPGQPPKRLIYSASTLDFGVPSRFSGSGSGTEFTLTISSLQPEDFATYYCLGYFDPSADPVAFGGGTKVEIK

SEQ ID NO: 21810 - protein, 111 aa, Artificial Sequence
  source: /note="Description of Artificial Sequence: Synthetic polypeptide"
DIQMTQSPSSLSASVGDRVTITCRSSQSVRTNRLAWFQQKPGQPPKRLIYSASTLDFGVPSRFSGSGSGTEFTLTISSLQPEDFATYYCLGYFDPSADPIAFGGGTKVEIK

SEQ ID NO: 21811 - protein, 111 aa, Artificial Sequence
  source: /note="Description of Artificial Sequence: Synthetic polypeptide"
DIQMTQSPSSLSASVGDRVTITCRSSQSVRTNRLAWFQQKPGKAPKRLIYSASTLDFGVPSRFSGSGSGTEFTLTISSLQPEDFATYYCLGYFDPSADPIAFGGGTKVEIK

SEQ ID NO: 21812 - protein, 110 aa, Artificial Sequence
  source: /note="Description of Artificial Sequence: Synthetic polypeptide"
QQLVESGGGLVQPGGSLRLSCAASGFSLSSNAINWVRQAPGKGLEWVGYIAVSGNTYYASWAKGRFTISRDNSKNTLYLQMNSLRAEDTAVYYCGKSNIWGQGTLVTVSS

SEQ ID NO: 21813 - protein, 110 aa, Artificial Sequence
  source: /note="Description of Artificial Sequence: Synthetic polypeptide"
QSVLESGGGLVQPGGSLRLSCAASGFSLSSNAINWVRQAPGKGLEWVGYIAVSGNTYYASWAKGRFTISRDNSKNTLYLQMNSLRAEDTAVYYCGKSNIWGPGTLVTVSS

SEQ ID NO: 21814 - protein, 110 aa, Artificial Sequence
  source: /note="Description of Artificial Sequence: Synthetic polypeptide"
QSVLESGGGLVQPGGSLRLSCAVSGFSLSSNAINWVRQAPGKGLEWVGYIAVSGNTYYASWAKGRFTISRDNSKNTLYLQMNSLRAEDTAVYYCGKSNIWGPGTLVTVSS

SEQ ID NO: 21815 - protein, 108 aa, Artificial Sequence
  source: /note="Description of Artificial Sequence: Synthetic polypeptide"
QSVLESGGGLVQPGGSLRLSCAVSGFSLSSNAINWVRQAPGKGLEWVGYIAVSGNTYYASWAKGRFTISRDSTTLYLQMNSLRAEDTAVYYCGKSNIWGPGTLVTVSS

SEQ ID NO: 21816 - protein, 110 aa, Artificial Sequence
  source: /note="Description of Artificial Sequence: Synthetic polypeptide"
QQLVESGGGLVQPGGSLRLSCAASGFSLSSNAINWVRQAPGKGLEWVGYIAVSGNTYYASWAKGRFTISRDNSKNTLYLQMNSLRAEDTAVYYCGKSNIWGPGTLVTVSS

SEQ ID NO: 21817 - protein, 110 aa, Artificial Sequence
  source: /note="Description of Artificial Sequence: Synthetic polypeptide"
QSVVESGGGLVQPGGSLRLSCAASGFSLSSNAINWVRQAPGKGLEWVGYIAVSGNTYYASWAKGRFTISRDNSKNTLYLQMNSLRAEDTAVYYCGKSNIWGPGTLVTVSS

SEQ ID NO: 21818 - protein, 110 aa, Artificial Sequence
  source: /note="Description of Artificial Sequence: Synthetic polypeptide"
QQLVESGGGLVQPGGSLRLSCAASGFSLSSNAINWVRQAPGKGLEWVGYIAVSGNTYYADSVKGRFTISRDNSKNTLYLQMNSLRAEDTAVYYCGKSNIWGQGTLVTVSS

SEQ ID NO: 21819 - protein, 110 aa, Artificial Sequence
  source: /note="Description of Artificial Sequence: Synthetic polypeptide"
QQLVESGGGLVQPGGSLRLSCAASGFSLSSNAINWVRQAPGKGLEWVGYIAVSGNTYYADSVKGRFTISKDNSKNTLYLQMNSLRAEDTAVYYCGKSNIWGQGTLVTVSS

SEQ ID NO: 21820 - protein, 111 aa, Artificial Sequence
  source: /note="Description of Artificial Sequence: Synthetic polypeptide"
EVQLLESGGGLVQPGGSLRLSCAASGFSLSSNAINWVRQAPGKGLEWVGYIAVSGNTYYADSVKGRFTISRDNSKNTLYLQMNSLRAEDTAVYYCGKSNIWGQGTLVTVSS

SEQ ID NO: 21821 - protein, 111 aa, Artificial Sequence
  source: /note="Description of Artificial Sequence: Synthetic polypeptide"
EVQVLESGGGLVQPGGSLRLSCAVSGFSLSSNAINWVRQAPGKGLEWVGYIAVSGNTYYADSVKGRFTISKDNSKNTVYLQMNSLRAEDTAVYYCGKSNIWGQGTLVTVSS

SEQ ID NO: 21822 - protein, 111 aa, Artificial Sequence
  source: /note="Description of Artificial Sequence: Synthetic polypeptide"
EVQLLESGGGLVQPGGSLRLSCAASGFSLSSNAINWVRQAPGKGLEWVGYIAVSGNTYYADSVKGRFTISKDNSKNTVYLQMNSLRAEDTAVYYCGKSNIWGQGTLVTVSS

SEQ ID NO: 21823 - protein, 111 aa, Artificial Sequence
  source: /note="Description of Artificial Sequence: Synthetic polypeptide"
EVQVLESGGGLVQPGGSLRLSCAVSGFSLSSNAINWVRQAPGKGLEWVGYIAVSGNTYYASWAKGRFTISKDNSKNTVYLQMNSLRAEDTAVYYCGKSNIWGQGTLVTVSS

SEQ ID NO: 21824 - protein, 112 aa, Artificial Sequence; identical to SEQ ID NO: 5335
  source: /note="Description of Artificial Sequence: Synthetic polypeptide"

SEQ ID NO: 21825 - protein, 112 aa, Artificial Sequence; identical to SEQ ID NO: 5336
  source: /note="Description of Artificial Sequence: Synthetic polypeptide"

SEQ ID NO: 21826 - protein, 112 aa, Artificial Sequence; identical to SEQ ID NO: 5337
  source: /note="Description of Artificial Sequence: Synthetic polypeptide"

SEQ ID NO: 21827 - protein, 112 aa, Artificial Sequence; identical to SEQ ID NO: 5338
  source: /note="Description of Artificial Sequence: Synthetic polypeptide"

SEQ ID NO: 21828 - protein, 113 aa, Artificial Sequence
  source: /note="Description of Artificial Sequence: Synthetic polypeptide"
NIVLTQSPDSLAVSLGERATINCKSSQSLLNSRTRKNYLAWFQQKPGQPPKLLIYWASTRESGVPDRFSGSGSGTDFTLTISSLQAEDVAVYYCKQSYTLRTFGGGTKVEIKR

SEQ ID NO: 21829 - protein, 113 aa, Artificial Sequence
  source: /note="Description of Artificial Sequence: Synthetic polypeptide"
NIVLTQSPDSLAVSLGERATINCKSSQSLLNSRTRKNYLAWFQQKPGQSPKLLIYWASTRESGVPDRFSGSGSGTDFTLTISSLQAEDVAVYYCKQSYTLRTFGGGTKVEIKR

SEQ ID NO: 21830 - protein, 113 aa, Artificial Sequence
  source: /note="Description of Artificial Sequence: Synthetic polypeptide"
DIVLTQSPDSLAVSLGERATINCKSSQSLLNSRTRKNYLAWFQQKPGQSPKLLIYWASTRESGVPDRFSGSGSGTDFTLTISSLQAEDVAVYYCKQSYTLRTFGGGTKVEIKR

SEQ ID NO: 21831 - protein, 250 aa, Artificial Sequence
  source: /note="Description of Artificial Sequence: Synthetic polypeptide"
ELDVVMTQTPLTLSVTIGQPASISCKSSQSLLYSNGKTYLNWLLQRPGQSPKRLIYLVSKLDSGVPDRFTGSGSGTDFTLKISRVEAEDLGVYYCVQGTHSPLTFGAGTKLELKSSGGGGSGGGGGGSSRSSLEVQLQQSGPELVKPGASVKISCKTSEYTFTEYTKHWVKQSHGKSLEWIGSINPNNGDTYYNQKFTDKATLTVDKSSTTASMELRSLTFEDSAVYYCAMGDSAWFAYWGQGTLVTVSA

SEQ ID NO: 21832 - protein, 278 aa, Artificial Sequence
  source: /note="Description of Artificial Sequence: Synthetic polypeptide"
IQEEFKMKKTAIAIAVALAGFATVAQAAELDVVMTQTPLTLSVTIGQPASISCKSSQSLLYSNGKTYLNWLLQRPGQSPKRLIYLVSKLDSGVPDRFTGSGSGTDFTLKISRVEAEDLGVYYCVQGTHSPLTFGAGTKLELKSSGGGGSGGGGGGSSRSSLEVQLQQSGPELVKPGASVKISCKTSEYTFTEYTKHWVKQSHGKSLEWIGSINPNNGDTYYNQKFTDKATLTVDKSSTTASMELRSLTFEDSAVYYCAMGDSAWFAYWGQGTLVTVSA

SEQ ID NO: 21833 - protein, 265 aa, Artificial Sequence
  source: /note="Description of Artificial Sequence: Synthetic polypeptide"
ELDVVMTQTPLTLSVTIGQPASISCKSSQSLLYSNGKTYLNWLLQRPGQSPKRLIYLVSKLDSGVPDRFTGSGSGTDFTLKISRVEAEDLGVYYCVQGTHSPLTFGAGTKLELKSSGGGGSGGGGGGSSRSSLEVQLQQSGPELVKPGASVKISCKTSEYTFTEYTKHWVKQSHGKSLEWIGSINPNNGDTYYNQKFTDKATLTVDKSSTTASMELRSLTFEDSAVYYCAMGDSAWFAYWGQGTLVTVSAAKTTPPSVTSGQAGQ

SEQ ID NO: 21834 - protein, 282 aa, Artificial Sequence
  source: /note="Description of Artificial Sequence: Synthetic polypeptide"
ELDVVMTQTPLTLSVTIGQPASISCKSSQSLLYSNGKTYLNWLLQRPGQSPKRLIYLVSKLDSGVPDRFTGSGSGTDFTLKISRVEAEDLGVYYCVQGTHSPLTFGAGTKLELKSSGGGGSGGGGGGSSRSSLEVQLQQSGPELVKPGASVKISCKTSEYTFTEYTKHWVKQSHGKSLEWIGSINPNNGDTYYNQKFTDKATLTVDKSSTTASMELRSLTFEDSAVYYCAMGDSAWFAYWGQGTLVTVSAKTTPPSVTSGQAGQHHHHHHGAYPYDVPDYAS

SEQ ID NO: 21835 - protein, 293 aa, Artificial Sequence
  source: /note="Description of Artificial Sequence: Synthetic polypeptide"
IQEEFKMKKTAIAIAVALAGFATVAQAAELDVVMTQTPLTLSVTIGQPASISCKSSQSLLYSNGKTYLNWLLQRPGQSPKRLIYLVSKLDSGVPDRFTGSGSGTDFTLKISRVEAEDLGVYYCVQGTHSPLTFGAGTKLELKSSGGGGSGGGGGGSSRSSLEVQLQQSGPELVKPGASVKISCKTSEYTFTEYTKHWVKQSHGKSLEWIGSINPNNGDTYYNQKFTDKATLTVDKSSTTASMELRSLTFEDSAVYYCAMGDSAWFAYWGQGTLVTVSAAKTTPPSVTSGQAGQ

SEQ ID NO: 21836 - protein, 311 aa, Artificial Sequence
  source: /note="Description of Artificial Sequence: Synthetic polypeptide"
IQEEFKMKKTAIAIAVALAGFATVAQAAELDVVMTQTPLTLSVTIGQPASISCKSSQSLLYSNGKTYLNWLLQRPGQSPKRLIYLVSKLDSGVPDRFTGSGSGTDFTLKISRVEAEDLGVYYCVQGTHSPLTFGAGTKLELKSSGGGGSGGGGGGSSRSSLEVQLQQSGPELVKPGASVKISCKTSEYTFTEYTKHWVKQSHGKSLEWIGSINPNNGDTYYNQKFTDKATLTVDKSSTTASMELRSLTFEDSAVYYCAMGDSAWFAYWGQGTLVTVSAAKTTPPSVTSGQAGQHHHHHHGAYPYDVPDYAS

SEQ ID NO: 21837 - protein, 120 aa, Mus musculus
MDSQAQVLILLLLWVSGTCGDIVMSQSPSSLAVSAGEKVTMSCKSSQSLLNSRTRKNYLAWYQQKPGQSPKLLIYWASTRESGVPDRFTGSGSGTDFTLTISSVQAEDLAVYYCKQSYNL

SEQ ID NO: 21838 - protein, 101 aa, Mus musculus
DIVMTQSPSSLSVSAGDKVTMSCKSSQSLLNSRNQKNYLAWYQQKPWQPPKLLIYGASTRESGVPDRFTGSGSGTDFTLTISSVQAEDLAVYYCQNDYSYP

SEQ ID NO: 21839 - protein, 121 aa, Mus musculus
MESQTQVLMSLLFWVSGTCGDIVMTQSPSSLTVTAGEKVTMSCKSSQSLLNSGNQKNYLTWYQQKPGQPPKLLIYWASTRESGVPDRFTGSGSGTDFTLTISSVQAEDLAVYYCQNDYSYP

SEQ ID NO: 21840 - protein, 121 aa, Mus musculus
MDSQAQVLMLLLLWVSGTCGDIVMSQSPSSLAVSVGEKVTMSCKSSQSLLYSSNQKNYLAWYQQKPGQSPKLLIYWASTRESGVPDRFTGSGSGTDFTLTISSVKAEDLAVYYCQQYYSYP

SEQ ID NO: 21841 - protein, 121 aa, Mus musculus
MESQTQVLISLLFWVSGTCGDIVMTQSPSSLSVSAGEKVTMSCKSSQSLLNSGNQKNYLAWYQQKPGQPPKLLIYGASTRESGVPDRFTGSGSGTDFTLTISSVQAEDLAVYYCQNDHSYP

SEQ ID NO: 21842 - protein, 126 aa, Homo sapiens
QLLGLLMLWVSGSSGDIVMTQSPLSLPVTPGEPASISCRSSQSLLHINGYNYLDWYLQKPGQSPQLLIYLGSNRASGVPDRFTGSGSGTDFTLKISRVEAEDVGVYYCMQALQPWTFGQGTKVEIK

SEQ ID NO: 21843 - protein, 98 aa, Mus musculus
QVQLQQSGAELARPGASVKLSCKASGYTFTSYGISWVKQRTGQGLEWIGEIYPRSGNTYYNEKFKGKATLTADKSSSTAYMELRSLTSEDSAVYFCAR

SEQ ID NO: 21844 - protein, 98 aa, Mus musculus
QVQLKQSGAELVKPGASVKISCKASGYTFTDYYINWVKQRPGQGLEWIGKIGPGSGSTYYNEKFKGKATLTADKSSSTAYMQLSSLTSEDSAVYFCAR

SEQ ID NO: 21845 - protein, 97 aa, Mus musculus
VQLQQSGPELVKPGASVKMSCKASGYTFTDYYMHWVKQKPGKGLEWIGEIYPGSGNTYYNEKFKGKATLTADTSSSTAYMQLSSLTSEDSAVYFCAR

SEQ ID NO: 21846 - protein, 98 aa, Mus musculus
QVQLQQSGPELVKPGASVKISCKASGYTFTDYYINWVKQRPGQGLEWIGWIFPGSGSTYYNEKFKGKATLTVDKSSSTAYMLLSSLTSEDSAVYFCAR

SEQ ID NO: 21847 - protein, 98 aa, Mus musculus
QVQLQQSGAELVRPGTSVKVSCKASGYAFTNYLIEWVKQRPGQGLEWIGVINPGSGGTNYNEKFKGKATLTADKSSNTAYMQLSSLTSEDSAVYFCAR

SEQ ID NO: 21848 - protein, 139 aa, Homo sapiens
MDWTWRFLFVVAAVTGVQSQVQLVQSGAEVKKPGSSVKVSCKASGGTFSSYAISWVRQAPGQGLEWMGGIIPIFGTANYAQKFQGRVTITADKSTSTAYMELSSLRSEDTAVYYCARGSTVTTGDFDYWGQGTLVTVSS

SEQ ID NO: 21849 - protein, 330 aa, Artificial Sequence [sequence omitted]

SEQ ID NO: 21850 - protein, 326 aa, Artificial Sequence; identical to SEQ ID NO: 3888
  source: /note="Description of Artificial Sequence: Synthetic polypeptide"

SEQ ID NO: 21851 - protein, 327 aa, Artificial Sequence; identical to SEQ ID NO: 7179
  source: /note="Description of Artificial Sequence: Synthetic polypeptide"

SEQ ID NO: 21852 - protein, 326 aa, Artificial Sequence
  source: /note="Description of Artificial Sequence: Synthetic polypeptide"
ASTKGPSVFPLAPCSRSTSESTAALGCLVKDYFPEPVTVSWNSGALTSGVHTFPAVLQSSGLYSLSSVVTVTSSNFGTQTYTCNVDHKPSNTKVDKTVERKCCVECPPCPAPPVAGPSVFLFPPKPKDTLMISRTPEVTCVVVDVSQEDPEVQFNWYVDGVEVHNAKTKPREEQFNSTFRVVSVLTVLHQDWLNGKEYKCKVSNKGLPSSIEKTISKTKGQPREPQVYTLPPSREEMTKNQVSLTCLVKGFYPSDIAVEWESNGQPENNYKTTPPMLDSDGSFFLYSKLTVDKSRWQQGNVFSCSVMHEALHNHYTQKSLSLSPGK

SEQ ID NO: 21853 - protein, 111 aa, Artificial Sequence
  source: /note="Description of Artificial Sequence: Synthetic polypeptide"
DIVLTQSPASLAVSLGQRATISCRASQSVSTSRYSYIHWYQQKPGQPPKLLIKYASNLESGVPARFSGSGSGTDFTLNIHPLEEEDAATYYCHHSWEIPLTFGAGTKLELK

SEQ ID NO: 21854 - protein, 113 aa, Oryctolagus cuniculus
QSLEESGGRLVTPGTPLTLTCTVSGIDLNSAAMGWVRQPPGKGLEWIGIIGSDHNAFYASWAKGRFTISRTSTTVALKMTSLTTEDTATYFCSRVYLDRHDIWGPGTLVTVSS

SEQ ID NO: 21855 - protein, 112 aa, Oryctolagus cuniculus
AQVLTQTPSSVSAAVGGTVAINCQSSQSVSNSRLSWYQQKPGQPPKLLLYDVAKLASGVPSRFKGSGSGTHFTLTISGVQCDDAATYYCQGTYWSNVWYEAAFGGGTEVVVK

SEQ ID NO: 21856 - protein, 330 aa, Homo sapiens [sequence omitted]

SEQ ID NO: 21857 - protein, 725 aa, Artificial Sequence [sequence omitted]

SEQ ID NO: 21858 - protein, 705 aa, Artificial Sequence
  source: /note="Description of Artificial Sequence: Synthetic polypeptide"
EVQLQQSGPELVKPGASVKMSCKASGYTFTSYVMHWVKQKPGQGLEWIGYVNPYNDDTKYNEKFRGKATLTSDKSSSTAYMELSSLTSEDSAVYYCARSYYYYSMDNWGQGTSVTVSSASTKGPSVFPLAPSSKSTSGGTAALGCLVKDYFPEPVTVSWNSGALTSGVHTFPAVLQSSGLYSLSSVVTVPSSSLGTQTYICNVNHKPSNTKVDKKVEPKSCDKTHTCPPCPAPELLGGPSVFLFPPKPKDTLMISRTPEVTCVVVDVSHEDPEVKFNWYVDGVEVHNAKTKPREEQYNSTYRVVSVLTVLHQDWLNGKEYKCKVSNKALPAPIEKTISKAKGQPREPQVYTLPPSRDELTKNQVSLTCLVKGFYPSDIAVEWESNGQPENNYKTTPPVLDSDGSFFLYSKLTVDKSRWQQGNVFSCSVMHEALHNHYTQKSLSLSPGKGGGGSGGGGSQVQLVESGGGLVKPGGSLRLSCAASGFTFSDYAMSWIRQAPGKCLEWVSSINIGATYIYYADSVKGRFTISRDNAKNSLYLQMNSLRAEDTAVYYCARPGSPYEYDKAYYSMAYWGQGTTVTVSSGGGGSGGGGSGGGGSDIQMTQSPSSLSASVGDRVTITCRASQDIKNYLNWYQQKPGKAPKLLIYYSSTLLSGVPSRFSGSGSGTDFTLTISSLQPEDFATYYCQQSITLPPTFGCGTKVEIK

SEQ ID NO: 21859 - protein, 705 aa, Artificial Sequence
  source: /note="Description of Artificial Sequence: Synthetic polypeptide"
EVQLQQSGPELVKPGASMKISCKASGYSFTGYTMNWVKQSHGENLEWIGRINPHNGGTDYNQKFKDKAPLTVDKSSNTAYMELLSLTSEDSAVYYCARGYYYYSLDYWGQGTSVTVSSASTKGPSVFPLAPSSKSTSGGTAALGCLVKDYFPEPVTVSWNSGALTSGVHTFPAVLQSSGLYSLSSVVTVPSSSLGTQTYICNVNHKPSNTKVDKKVEPKSCDKTHTCPPCPAPELLGGPSVFLFPPKPKDTLMISRTPEVTCVVVDVSHEDPEVKFNWYVDGVEVHNAKTKPREEQYNSTYRVVSVLTVLHQDWLNGKEYKCKVSNKALPAPIEKTISKAKGQPREPQVYTLPPSRDELTKNQVSLTCLVKGFYPSDIAVEWESNGQPENNYKTTPPVLDSDGSFFLYSKLTVDKSRWQQGNVFSCSVMHEALHNHYTQKSLSLSPGKGGGGSGGGGSQVQLVESGGGLVKPGGSLRLSCAASGFTFSDYAMSWIRQAPGKCLEWVSSINIGATYIYYADSVKGRFTISRDNAKNSLYLQMNSLRAEDTAVYYCARPGSPYEYDKAYYSMAYWGQGTTVTVSSGGGGSGGGGSGGGGSDIQMTQSPSSLSASVGDRVTITCRASQDIKNYLNWYQQKPGKAPKLLIYYSSTLLSGVPSRFSGSGSGTDFTLTISSLQPEDFATYYCQQSITLPPTFGCGTKVEIK

SEQ ID NO: 21860 - protein, 108 aa, Oryctolagus cuniculus; identical to SEQ ID NO: 4856

SEQ ID NO: 21861 - protein, 125 aa, Mus musculus
EVQLVESGGGLVKPGGSLKLSCAVSGFTFSDYAMSWIRQTPENRLEWVASINIGATYAYYPDSVKGRFTISRDNAKNTLFLQMSSLGSEDTAMYYCARPGSPYEYDKAYYSMAYWGPGTSVTVSS

SEQ ID NO: 21862 - protein, 125 aa, Artificial Sequence
  source: /note="Description of Artificial Sequence: Synthetic polypeptide"
QVQLVESGGGLVKPGGSLRLSCAASGFTFSDYAMSWIRQAPGKGLEWVSSINIGATYIYYADSVKGRFTISRDNAKNSLYLQMNSLRAEDTAVYYCARPGSPYEYDKAYYSMAYWGQGTTVTVSS

SEQ ID NO: 21863 - protein, 120 aa, Mus musculus
EVQLQQSGAELVKPGASVKLSCTSSGFNNKDTFFQWVKQRPEECLEWIGRIDPANGFTKYDPKFQGKATITVDTSSNTAYLQLNSLTSEDTALYYCTRWDTYGAAWFAYWGQGTLVTVSA

SEQ ID NO: 21864 - protein, 120 aa, Artificial Sequence
  source: /note="Description of Artificial Sequence: Synthetic polypeptide"
QVQLVQSGAEVKKPGSSVKVSCKSSGFNNKDTFFQWVRQAPGQGLEWMGRIDPANGFTKYAQKFQGRVTITADTSTSTAYMELSSLRSEDTAVYYCARWDTYGAAWFAYWGQGTLVTVSS

SEQ ID NO: 21865 - protein, 116 aa, Mus musculus
DVQLQESGPGLVKPSQSLSLTCAVTGYSITSDYAWNWIRQFPGNRLEWMGYIRYSGHTGYNPSLKSRISITRDTFKNQFFLQFNSVTTEDTATYYCARWVDYFDYWGQGTTLTVSS

SEQ ID NO: 21866 - protein, 116 aa, Artificial Sequence
  source: /note="Description of Artificial Sequence: Synthetic polypeptide"
QVQLQESGPGLVKPSQTLSLTCTVSGYSITSDYAWNWIRQHPGKGLEWIGYIRYSGHTGYNPSLKSRVTISRDTSKNQFSLKLSSVTAADTAVYYCARWVDYFDYWGQGTLVTVSS

SEQ ID NO: 21867 - protein, 118 aa, Mus musculus
GVKLDETGGGLVQPGGAMKLSCVTSGFTFGHYWMNWVRQSPEKGLEWVAQFRNKPYNYETYYSDSVKGRFTISRDDSKSSVYLQMNNLRVEDTGIYYCTGASYGMEYLGQGTSVTVSS

SEQ ID NO: 21868 - protein, 119 aa, Artificial Sequence
  source: /note="Description of Artificial Sequence: Synthetic polypeptide"
QVQLVQSGAEVKKPGASVKVSCKASGYTFPEYPIHWVRQAPGQGLEWMGGIVPNNGFTFYAQKLQGRVTMTTDTSTSTAYMELRSLRSDDTAVYYCARKNLGSSPLDYWGQGTTVTVSS

SEQ ID NO: 21869 - protein, 119 aa, Mus musculus
EVQLQQSGPELVKPGASVKISCKTSGYTFPEYPIHWVKQSHGKSLEWIGGIVPNNGFTFYNQKFKGKASLTVDKSSSTAYVEVRSLTSDDSAVYYCARKNLGSSPLDYWGQGTTLTVSS

SEQ ID NO: 21870 - protein, 109 aa, Artificial Sequence
  source: /note="Description of Artificial Sequence: Synthetic polypeptide"
QAVVTQEPSLTVSPGGTVTLTCGSSTGAVTTSNYASWVQQKPGQAFTGLIGGTNNRAPWTPARFSGSLLGGKAALTLSGAQPEDEAEYYCALWYSNHWVFGGGTKLTVL

SEQ ID NO: 21871 - protein, 706 aa, Artificial Sequence
  source: /note="Description of Artificial Sequence: Synthetic polypeptide"
EVQLQQSGPELVKPGASMKISCKASGYSFTGYTMNWVKQSHGENLEWIGRINPHNGGTDYNQKFKDKAPLTVDKSSNTAYMELLSLTSEDSAVYYCARGYYYYSLDYWGQGTSVTVSSASTKGPSVFPLAPSSKSTSGGTAALGCLVKDYFPEPVTVSWNSGALTSGVHTFPAVLQSSGLYSLSSVVTVPSSSLGTQTYICNVNHKPSNTKVDKKVEPKSCDKTHTCPPCPAPELLGGPSVFLFPPKPKDTLMISRTPEVTCVVVDVSHEDPEVKFNWYVDGVEVHNAKTKPREEQYNSTYRVVSVLTVLHQDWLNGKEYKCKVSNKALPAPIEKTISKAKGQPREPQVYTLPPSRDELTKNQVSLTCLVKGFYPSDIAVEWESNGQPENNYKTTPPVLDSDGSFFLYSKLTVDKSRWQQGNVFSCSVMHEALHNHYTQKSLSLSPGKGGGGSGGGGSDIQMTQSPSSLSASVGDRVTITCRASGNIHNYLSWYQQKPGKVPKLLIYSAKTLADGVPSRFSGSGSGTDFTLTISSLQPEDVATYYCQHFWSSIYTFGCGTKLEIKRGGGGSGGGGSGGGGSGGGGSQVQLVQSGAEVKKPGSSVKVSCKSSGFNNKDTFFQWVRQAPGQCLEWMGRIDPANGFTKYAQKFQGRVTITADTSTSTAYMELSSLRSEDTAVYYCARWDTYGAAWFAYWGQGTLVTVSS

SEQ ID NO: 21872 - protein, 244 aa, Artificial Sequence
  source: /note="Description of Artificial Sequence: Synthetic polypeptide"
AHLENEVARLCKGGGRHRQPRGWEQLPTGAEFLGDGGAVSFSTRGTQNWTVERLLQAHRQLEEGGYVFVGYHGTFLEAAQSIVFGGVRARSQDLDAIWAGFYIAGDPALAYGYAQDQEPDAAGRIRNGALLRVYVPRSSLPGFYATSLTLAAPEAAGEVERLIGHPLPLRLDAITGPEESGGRLETILGWPLAERTVVIPSAIPTDPRNVGGDLDPSSIPDSEAAISALPDYASQPGKPPREDL

SEQ ID NO: 21873 - protein, 106 aa, Homo sapiens
GQPKAAPSVTLFPPSSEELQANKATLVCLISDFYPGAVTVAWKADSSPVKAGVETTTPSKQSNNKYAASSYLSLTPEQWKSHRSYSCQVTHEGSTVEKTVAPTECS

SEQ ID NO: 21874 - protein, 213 aa, Artificial Sequence
  source: /note="Description of Artificial Sequence: Synthetic polypeptide"
QIVLTQSPAIMSASPGEKVTVTCSASSSIRYMHWYQQKPGTSPKRWIYDTSELASGVPARFSGSGSGTSYSLTINSMEAEDAATYYCHQRSSYPFTFGGGTKLEIKRTVAAPSVFIFPPSDEQLKSGTASVVCLLNNFYPREAKVQWKVDNALQSGNSQESVTEQDSKDSTYSLSSTLTLSKADYEKHKVYACEVTHQGLSSPVTKSFNRGEC

SEQ ID NO: 21875 - protein, 213 aa, Artificial Sequence
  source: /note="Description of Artificial Sequence: Synthetic polypeptide"
QIVLTQSPAIMSASPGEKVTMTCSASSSIRYIHWYQQRPGTSPKRWIYDTSNLASGVPARFSGSGSGTSYSLTISSMEAEDAATYYCHQRNSYPWTFGGGTRLEIKRTVAAPSVFIFPPSDEQLKSGTASVVCLLNNFYPREAKVQWKVDNALQSGNSQESVTEQDSKDSTYSLSSTLTLSKADYEKHKVYACEVTHQGLSSPVTKSFNRGEC

SEQ ID NO: 21876 - protein, 112 aa, Oryctolagus cuniculus
AQVLTQTTSPVSAAVGSTVTISCQSSQSVRTNKLAWFQQKPGQPPKRLIYSASTLDFGVPSRFSASGSGTQFTLTISDVQCDDAATYYCLGYFDCSIADCVAFGGGTEVVVK

SEQ ID NO: 21877 - protein, 107 aa, Mus musculus
DVQMTQSTSSLSASLGDRVTISCRASQDIKNYLNWYQQKPGGTVKLLIYYSSTLLSGVPSRFSGRGSGTDFSLTITNLEREDIATYFCQQSITLPPTFGGGTKLEIK

SEQ ID NO: 21878 - protein, 108 aa, Artificial Sequence
  source: /note="Description of Artificial Sequence: Synthetic polypeptide"
DIQMTQSPSSLSASVGDRVTITCRASQDIKNYLNWYQQKPGKAPKLLIYYSSTLLSGVPSRFSGSGSGTDFTLTISSLQPEDFATYYCQQSITLPPTFGGGTKVEIKR

SEQ ID NO: 21879 - protein, 107 aa, Mus musculus
DIQMTQSPASLSASVGETVTITCRASGNIHNYLSWFQQKQGKSPQLLVYSAKTLADGVPSRFSGSGSGTQYSLKINSLQPEDFGTYYCQHFWSSIYTFGCGTKLEIK

SEQ ID NO: 21880 - protein, 107 aa, Artificial Sequence
  source: /note="Description of Artificial Sequence: Synthetic polypeptide"
DIQMTQSPSSLSASVGDRVTITCRASGNIHNYLSWYQQKPGKVPKLLIYSAKTLADGVPSRFSGSGSGTDFTLTISSLQPEDVATYYCQHFWSSIYTFGQGTKLEIK

SEQ ID NO: 21881 - protein, 112 aa, Mus musculus
DVVMTQSPLSLPVSLGDQASISCRSSQSIVYNNRYTYLEWFVQKPGQSLKLLIYGVSNRFSGVPDRFSGSGSGTDFTLKISRVEAEDMGVYYCYQGTHAPYTFGGGTKLEIK

SEQ ID NO: 21882 - protein, 112 aa, Artificial Sequence
  source: /note="Description of Artificial Sequence: Synthetic polypeptide"
DVVMTQSPLSLPVTLGQPASISCRSSQSIVYNNRYTYLEWFQQRPGQSPRLLIYGVSNRFSGVPDRFSGSGSGTDFTLKISRVEAEDVGVYYCYQGTHAPYTFGQGTKLEIK

SEQ ID NO: 21883 - protein, 120 aa, Mus musculus
DVVMTQTPLSLPVSLGDQASISCRSSQSLVHSNGNTYLRWYLQKPGQSPKVLIYKVSNRVSGVPDRFSGSGSGTDFTLKINRVEAEDLGVYFCSQSTHVPWTFGGGTKLEIKRTVAAPSV

SEQ ID NO: 21884 - protein, 107 aa, Artificial Sequence
  source: /note="Description of Artificial Sequence: Synthetic polypeptide"
EIVMTQSPATLSVSPGERATLSCRASQSIGTSIHWYQQKPGQAPRLLIKYASESISGIPARFSGSGSGTEFTLTISSLQSEDFAVYYCQQSNRWPLTLGQGTKLEIK

SEQ ID NO: 21885 - protein, 107 aa, Mus musculus
DILLTQSPAILSVSPGERVSFSCRASQSIGTSIHWYQHRTNGSPRLLIKYASESISGIPSRFSGSGSGTDFTLSINSVESEDIADYYCQQSNRWPLTLGAGTKLELK

SEQ ID NO: 21886 - protein, 109 aa, Artificial Sequence
  source: /note="Description of Artificial Sequence: Synthetic polypeptide"
DAVVTQESALTTSPGETVTLTCRSSTGAVTTSNYASWVQEKPDHLFTGLICGTNNRAPGVPARFSGSLIGDKAALTITGAQTEDEAIYFCALWYSNHWVFGGGTKLTVL

SEQ ID NO: 21887 - protein, 109 aa, Artificial Sequence
  source: /note="Description of Artificial Sequence: Synthetic polypeptide"
DAVVTQESALTTSPGETVTLTCRSSTGAVTTSNYASWVQEKPDHLFTGLIGGTNCRAPGVPARFSGSLIGDKAALTITGAQTEDEAIYFCALWYSNHWVFGGGTKLTVL

SEQ ID NO: 21888 - protein, 109 aa, Artificial Sequence
  source: /note="Description of Artificial Sequence: Synthetic polypeptide"
DAVVTQESALTTSPGETVTLTCRSSTGAVTTSNYASWVQEKPDHLFTGLIGGTNNRAPGVPARFSGSLIGDKAALTITGAQTEDEAIYFCALWYSNHWVFGGGTKLTVL

SEQ ID NO: 21889 - protein, 330 aa, Homo sapiens [sequence omitted]

SEQ ID NO: 21890 - protein, 330 aa, Homo sapiens; identical to SEQ ID NO: 7178

SEQ ID NO: 21891 - protein, 327 aa, Homo sapiens; identical to SEQ ID NO: 7171

SEQ ID NO: 21892 - protein, 327 aa, Homo sapiens
ASTKGPSVFPLAPCSRSTSESTAALGCLVKDYFPEPVTVSWNSGALTSGVHTFPAVLQSSGLYSLSSVVTVPSSSLGTKTYTCNVDHKPSNTKVDKRVESKYGPPCPPCPAPEFEGGPSVFLFPPKPKDTLMISRTPEVTCVVVDVSQEDPEVQFNWYVDGVEVHNAKTKPREEQFNSTYRVVSVLTVLHQDWLNGKEYKCKVSNKGLPSSIEKTISKAKGQPREPQVYTLPPSQEEMTKNQVSLTCLVKGFYPSDIAVEWESNGQPENNYKTTPPVLDSDGSFFLYSRLTVDKSRWQEGNVFSCSVMHEALHNHYTQKSLSLSLGK

SEQ ID NO: 21893 - protein, 121 aa, Mus musculus; identical to SEQ ID NO: 4851

SEQ ID NO: 21894 - protein, 108 aa, Oryctolagus cuniculus; identical to SEQ ID NO: 4852

SEQ ID NO: 21895 - protein, 114 aa, Oryctolagus cuniculus; identical to SEQ ID NO: 4853

SEQ ID NO: 21896 - protein, 109 aa, Oryctolagus cuniculus; identical to SEQ ID NO: 4854

SEQ ID NO: 21897 - protein, 108 aa, Oryctolagus cuniculus; identical to SEQ ID NO: 4855

SEQ ID NO: 21898 - protein, 109 aa, Oryctolagus cuniculus; identical to SEQ ID NO: 4857

SEQ ID NO: 21899 - protein, 112 aa, Mus musculus; identical to SEQ ID NO: 5360

SEQ ID NO: 21900 - protein, 112 aa, Oryctolagus cuniculus; identical to SEQ ID NO: 5361

SEQ ID NO: 21901 - protein, 107 aa, Oryctolagus cuniculus; identical to SEQ ID NO: 5362

SEQ ID NO: 21902 - protein, 112 aa, Oryctolagus cuniculus; identical to SEQ ID NO: 5363

SEQ ID NO: 21903 - protein, 111 aa, Oryctolagus cuniculus; identical to SEQ ID NO: 5364

SEQ ID NO: 21904 - protein, 111 aa, Oryctolagus cuniculus; identical to SEQ ID NO: 5365

SEQ ID NO: 21905 - protein, 109 aa, Oryctolagus cuniculus; identical to SEQ ID NO: 5366

SEQ ID NO: 21906 - protein, 123 aa, Artificial Sequence
  source: /note="Description of Artificial Sequence: Synthetic polypeptide"
EVQLVESGGGLVQAGGSLRLSCAASGRTFSGYGMGWFRQAPGKEREFVAAISWRGGNTYYADSVKGRFTISRDNAKNTVWLQMNSLKPEDTAVYYCSGFVRTRDDPSRIRNYWGQGTQVTVST

SEQ ID NO: 21907 - protein, 118 aa, Artificial Sequence
  source: /note="Description of Artificial Sequence: Synthetic polypeptide"
QVQLVESGGDLVQAGGSLRLSCAASGHTFDSYGMGWFRQRPGKGREFVAAITMIGGSTHYADSAKGRFTISRDNTKNTISLQMNSLKPEDTAVYYCHAFSRSRFEGYWGQGIQVTVSS

SEQ ID NO: 21908 - protein, 113 aa, Artificial Sequence
  source: /note="Description of Artificial Sequence: Synthetic polypeptide"
QVQLQESGGGLVQPGGSLRLSCVASGFTFSDNAMSWVRRAPGKGLEWVSAINRAGDSARYADSVKGRFTISRDNAKNTLYLQMNSLKPEDTAVYYCTNGGNYRGQGTQVTVSA

SEQ ID NO: 21909 - protein, 115 aa, Artificial Sequence
  source: /note="Description of Artificial Sequence: Synthetic polypeptide"
EVQLVESGGGLVQPGGSLRLSCVASGRTSRISRMAWFRQVPGNERELVATMSSSGITSYAGSVKGRFTISRDNAKNTVDLQMNSLKPEDTAVYYCKYSSRWNIYWGQGTQVTVSS

SEQ ID NO: 21910 - protein, 114 aa, Artificial Sequence
  source: /note="Description of Artificial Sequence: Synthetic polypeptide"
QVQLVESGGGLVQAGDSLRLSCAASGRTFSSYVMGWFRQAPGKEREFVAAVTGGGISTYYADSVKGRFTISRDNAKNTVYLQMNSLTPEDTAVYYCYARRLNSWGQGTQVTISS

SEQ ID NO: 21911 - protein, 124 aa, Artificial Sequence
  source: /note="Description of Artificial Sequence: Synthetic polypeptide"
QVQLQESGGGLVQPGGSLRLSCAASRFTLDNYAVGWFRQAAGKEREAVSCSSSGDGRTYYADSVKGRFTISRDNAKDTVYLQMNSLKPEDTAVYYCATGFFVRSCSSPDSYDYWGQGTQVIVSS

SEQ ID NO: 21912 - protein, 124 aa, Artificial Sequence
  source: /note="Description of Artificial Sequence: Synthetic polypeptide"
QVQLQESGGGAVQPGGSLRLSCAASRFTLDNYAVGWFRQAPGKEREAVSCSSSSDGRTYYADSVKGRFTISRDNAKDTVYLQMNSLKPEDTAVYYCATGFFVRSCRSPDSYDYWGQGTQVIVSS

SEQ ID NO: 21913 - protein, 124 aa, Artificial Sequence
  source: /note="Description of Artificial Sequence: Synthetic polypeptide"
QVQLQESGGGLVQPGGSLRLSCAASRFTLDNYAVGWFRQAPGKEREAVSCSSSSDGPTYYADSVKGRFTISRDNAKDTVYLQMNSLKPEDTAVYYCATGFFVRSCSSPDSYDYWGQGTQVIVSS

SEQ ID NO: 21914 - protein, 124 aa, Artificial Sequence
  source: /note="Description of Artificial Sequence: Synthetic polypeptide"
QVQLQESGGGLVQPGGSLRLSCAASRFTLDYYAVGWFRQAPGKEREAVSCSSSSDGRTYYADSVKGRFTISRDNAKDTVYLQMNSLKPEDTAVYYCATGFFVRSCSSPDSYDYWGQGTQVIVSS

SEQ ID NO: 21915 - protein, 124 aa, Artificial Sequence
  source: /note="Description of Artificial Sequence: Synthetic polypeptide"
QVQLQESGGGLVQPGGSLRLSCAASRFTLDYYAVGWFRQAPGKEREAVSCSSSSDGHTYYADSVKGRFTISRDNAKDTVYLQMNSLKPEDTAVYYCATGFFVRSCSSPDSYDYWGQGTQVIVSS

SEQ ID NO: 21916 - protein, 124 aa, Artificial Sequence
  source: /note="Description of Artificial Sequence: Synthetic polypeptide"
AVQLVESGGGLVQAGGSLRLSCAASGFTFDYYAVGWFRQAPGKEREAVSCSSSSDGRTYYADSVKGRFTISRDNAKDTVYLQMNSLKPEDTAVYYCATGFFVRSCSSPDSYDYWGQGTRVTVSS

SEQ ID NO: 21917 - protein, 125 aa, Artificial Sequence
  source: /note="Description of Artificial Sequence: Synthetic polypeptide"
AVQLVESGGGLVQAGGSLRLSCAASGFTFDDYAIGWFRQAPGKEREGISCISKSDGNTNYADSVKGRFTISSDNAKNTVFLQMNSLKPEDTAVYYCAVGVLGSCPIMVYLLYDDWGQGTRVTVSS

SEQ ID NO: 21918 - protein, 117 aa, Artificial Sequence
  source: /note="Description of Artificial Sequence: Synthetic polypeptide"
AVQLVESGGDLVQPGGSLRLSCTASGFTFNTYGMSWVRQAPGKGLVWVSSISSGGVPMYADSVKGRFTISRDNTKNTLYLQMNSLKPEDTAVYYCVKGYYTGSFLPPGQGTRVTVSS

SEQ ID NO: 21919 - protein, 117 aa, Artificial Sequence
  source: /note="Description of Artificial Sequence: Synthetic polypeptide"
QVQLQESGGGLVQPGGSLRLSCAASGFTFSTYGMSWVRQAPGKGLRWVSSISSGGVPMYASSVKGRFTISRDNAKNTLYLQMNSLKPEDTAVYYCVKGYYTGDFLPPGQGTQVAVSS

SEQ ID NO: 21920 - protein, 117 aa, Artificial Sequence
  source: /note="Description of Artificial Sequence: Synthetic polypeptide"
QVQLQESGGGLVQPGGSLRLSCAASGFTFSTYGMSWVRQAPGKGVEWVSSINSGGVVPMYAASVKGRFTISRDNANNTLTLQMNSLKPEDTAVYYCVKGYYTGNPPLGQGTQVTVSS

SEQ ID NO: 21921 - protein, 115 aa, Artificial Sequence
  source: /note="Description of Artificial Sequence: Synthetic polypeptide"
AVQLVESGGGLVQAGGSLRLSCAASGSIVSLATMGWYRQAPGNQRELVATMSSSGITSYAGSVKGRFTISRDNAKNTVDLQMNSLKPEDTAVYYCKYSSRWNIYWGQGTLVTVSS

SEQ ID NO: 21922 - protein, 115 aa, Artificial Sequence
  source: /note="Description of Artificial Sequence: Synthetic polypeptide"
QVQLQDSGGGLVQPGGSLRLSCAASGSIFSFSTMGWYRQAPGKQRELVAAITRTGTTNYADSVKGRFTISRDNTKNTVYLQMNSLKPEDTSAYYCKLTHPVYLVWGQGTQVTVSS

SEQ ID NO: 21923 - protein, 115 aa, Artificial Sequence
  source: /note="Description of Artificial Sequence: Synthetic polypeptide"
QVQLQESGGGLVQPGGSLRLSCAASGSIFSFSTMGWYRQAPGKQRELVAAITRTGTTNYADSVKGRFTISRDNTKNTVYLQMNSLKPEDTSAYYCKLTHPVYLVWGQGTQVTVSS

SEQ ID NO: 21924 - protein, 124 aa, Artificial Sequence
  source: /note="Description of Artificial Sequence: Synthetic polypeptide"
EVQLVESGGGLVQPGGSLRLSCAASGSIFRINTMAWYRQAPGKQRELVATITNGGNTNYADSVKGRFTISRDNAKNTVYLQMNSLKPEDTAVYYCKAEIGSTRIRDTYYYRDYWGQGIQVTVSS

SEQ ID NO: 21925 - protein, 122 aa, Artificial Sequence
  source: /note="Description of Artificial Sequence: Synthetic polypeptide"
EVQLVESGGGLVQPGGSLRLSCAGSLDIFSVYVMGWYRQVPGGQRDLVATITKEGMPDYADSVKGRFTISRDNAENTVYLQMNSLKPEDTGVYYCALDRFYGSVLRGSPDYWGQGTQVTVSS

SEQ ID NO: 21926 - protein, 127 aa, Artificial Sequence
  source: /note="Description of Artificial Sequence: Synthetic polypeptide"
  MOD_RES (99)..(99): Any amino acid
  MOD_RES (122)..(122): Any amino acid
QVQLQESGGGLVQAGGSLRLSCAASGLAFSRTAMAWFRQAPGKEREFVAAIAWSAGNTLYEESVKGRFTISRDNAKNTVYLQMNNLKPEDTAVYYCAAXRGGSYYSWDGSLTDFGSWGQGTXFTVSS

SEQ ID NO: 21927 - protein, 128 aa, Artificial Sequence
  source: /note="Description of Artificial Sequence: Synthetic polypeptide"
QVQLQESGGGLVQAGGSLRLSCTASGHTLSSYAMGWFRQAPGKEREFVAAISWSDITYYEDSVKGRFTISRDNAKNTVYLQMNSLNPEDTAVYYCAAAPVFAPLTAQHIRLISMYEYWGQGTQVTVSS

SEQ ID NO: 21928 - protein, 122 aa, Artificial Sequence
  source: /note="Description of Artificial Sequence: Synthetic polypeptide"
QVQLQESGGGLVQAGGSLRLSCTVSGFTVDAYAMGWFRQTPGKGHEVVACISSPDGITTYADSVKGRFTISRDSVQNTVSLQMDSLKPEDTAVYVCAAHSDYDCFSVEYGYWGQGTQVTVSS

SEQ ID NO: 21929 - protein, 124 aa, Artificial Sequence
  source: /note="Description of Artificial Sequence: Synthetic polypeptide"
QVQLQESGGGLVQAGGSLRLSCAASGRTFSSYVMGWFRQAPGKEREFVAAIGWSGGSTAYADSVKGRFTISRDDARNTVYLQMNSLKPEDTAVYYCASAPTRWVPRDSRFYDRWGQGTQVTVSS

SEQ ID NO: 21930 - protein, 126 aa, Artificial Sequence
  source: /note="Description of Artificial Sequence: Synthetic polypeptide"
QVQLQDSGGGLVQAGGSLRLSCAASGRTFSNYAMGWFRQAPEKEREFVAAINGSGGSTYYADSVKGRFTISRDDAKNTVYLQMNSLKPEDTAVYYCASKLYGSGTPRDTGDKYSNWGQGTQVTVSS

SEQ ID NO: 21931 - protein, 124 aa, Artificial Sequence
  source: /note="Description of Artificial Sequence: Synthetic polypeptide"
QVQLQDSGGGLVQAGGSLRLSCAASGRTFSSYVMGWFRQAPGKEREFVAAIGWSGGSTAYADSVKGRFTISRDNARNTVYLQMNSLKPEDTAVYYCASAPTRWVPRDSRFYDRWGQGTQVTVSS

SEQ ID NO: 21932 - protein, 115 aa, Artificial Sequence
  source: /note="Description of Artificial Sequence: Synthetic polypeptide"
QVKLEESGGGLVQPGGSLRLSCAASGRTRTIRAMAWFRQALGKQREFIARITVGGTNYADSVKDRFTISRDDAKNTVYLQMNSLKPEDTAVYYCYSKTWGDRNYWGQGTQVTVPS

SEQ ID NO: 21933 - protein, 124 aa, Artificial Sequence
  source: /note="Description of Artificial Sequence: Synthetic polypeptide"
QVQLQESGGGLVQAGGSLRLSCAASGRTFSSYVMGWFRQAPGKEREFVAAIGWSGGSTAYADSVKGRFTISRDNARNTVYLQMNSLKPEDTAVYYCASAPTRWVPRDSRFYDRWGQGTQVTVSS

SEQ ID NO: 21934 - protein, 124 aa, Artificial Sequence
  source: /note="Description of Artificial Sequence: Synthetic polypeptide"
AVQLVESGGGLVRDGGSLRLSCAASGRTFSSYVMGWFRQAPGKEREFVAAIGWSGGSTAYADSVKGRFTISRDNARNTVYLQMNSLKPEDTAVYYCASAPTRWVPRDSRFYDRWGQGTQVTVSS

SEQ ID NO: 21935 - protein, 123 aa, Artificial Sequence
  source: /note="Description of Artificial Sequence: Synthetic polypeptide"
QVQLQESGGGLVQAGGSLRLSCTASGRTFSSWAMAWFRQAPGKEREFLAASWSGGNTAYANSVKGRFTISRDNAKNTVYLQMNSLKPEDTAVYYCASTGTRWVPRDSRFYDRWGQGTRVTVSS

SEQ ID NO: 21936 - protein, 119 aa, Artificial Sequence
  source: /note="Description of Artificial Sequence: Synthetic polypeptide"
QVQLQESGGGLVQAGGSLRLSCAASGRTFSRYAMGWFRQAPGKEREFVARIRWSGGSTYYADSVKGRFTISRDNAKNTVYLQMNSLKPEDTAVYYCAAGGTSGLSFDYWGQGTQVTVSS

SEQ ID NO: 21937 - protein, 124 aa, Artificial Sequence
  source: /note="Description of Artificial Sequence: Synthetic polypeptide"
QVQLQDSGGGLVQAGGSLRLSCAASGRTFSSLVMGWFRQASGKEREFVAAIGWSGGSTAYADSVKGRFTISRDNARNTVYLQMNSLKPEDTAVYYCASAPTRWVPRDSRFYDRWGQGTQVTVSS

SEQ ID NO: 21938 - protein, 124 aa, Artificial Sequence
  source: /note="Description of Artificial Sequence: Synthetic polypeptide"
AVQLVESGGGLVQAGGSLRLSCAASGRTFSSYVMGWFRQAPGKEREFVAAIGWSGGSTAYADSVKGRFTISRDNARNTVYLQMNSLKPEDTAVYYCASAPTRWVPRDSRFYDRWGQGTQVTVSS

SEQ ID NO: 21939 - protein, 118 aa, Artificial Sequence
  source: /note="Description of Artificial Sequence: Synthetic polypeptide"
QVQLVESGGGLVQAGGSLRLSCAASGRTFSSYTMGWFRQAPGKEREFVAGINWSGVRTYYGDSVKGRFTISRDNAKNTMYLQMNSLKAEDTAVYYCNVRGRYSNTDYWGQGIQVTVSS

SEQ ID NO: 21940 - protein, 125 aa, Artificial Sequence
  source: /note="Description of Artificial Sequence: Synthetic polypeptide"
DVQLVESGGGLVQPGGSLRLSCAASGSIFRLNDMGWYRQPPGKQREMVATITKGGTTNYADSVKARFTISRDNAKNTVYLQMNSLKPEDTAVYYCNADISTYSAFGLFTPPKNYWGQGTQVTVSS

SEQ ID NO: 21941 - protein, 125 aa, Artificial Sequence
  source: /note="Description of Artificial Sequence: Synthetic polypeptide"
QVQLVESGGGLVQPGGSLRLSCAASGSIFRLNDMGWYRQPPGKQREMVATITKGGTTNYADSVKARFTISRDNAKNTVYLQMNSLKPEDTAVYYCNADISTYSAFGLFTPPKNYWGQGTQVTVSS

SEQ ID NO: 21942 - protein, 125 aa, Artificial Sequence
  source: /note="Description of Artificial Sequence: Synthetic polypeptide"
QVQLQESGGGLVQPGGSLRLSCAASGSIFRLNDMGWYRQPPGKQREMVATITKGGTTNYADSVKARFTISRDNAKNTVYLQMNSLKPEDTAVYYCNADISTYSAFGLFTPPKNYWGQGTQVTVSS

SEQ ID NO: 21943 - protein, 124 aa, Artificial Sequence
  source: /note="Description of Artificial Sequence: Synthetic polypeptide"
VQLQESGGSLVQPGGSLRLSCAASGSIFRLNDMRWYRQAPGKQREVVATITSGGTTNYADSVKARFTISRDNAKNTVYLQMNSLKPEDTAVYYCNADISLYSAFGLFSPPKNYWGQGTQVTVSS

SEQ ID NO: 21944 - protein, 125 aa, Artificial Sequence
  source: /note="Description of Artificial Sequence: Synthetic polypeptide"
QVQLQESGGSLVQPGGSLRLSCAASGSIFRLNDMRWYRQAPGKQREMVATITSGGTTNYADSVKARFTISRDNAKSTVYLQMNSLKPEDTAVYYCNADISLYSAFGLFSPPKNYWGQGTQVTVSS

SEQ ID NO: 21945 - protein, 125 aa, Artificial Sequence
  source: /note="Description of Artificial Sequence: Synthetic polypeptide"
QVQLQESGGSLVQPGGSLRLSCAASGSIFRLNDMRWYRQAPGKQREMVATITSGGTTNYADSVKARFTISRDNAKNTVYLQMNSLKPEDTAVYYCNADISLYSAFGLFSPPKNYWGQGTQVTVSS

SEQ ID NO: 21946 - protein, 125 aa, Artificial Sequence
  source: /note="Description of Artificial Sequence: Synthetic polypeptide"
QVQLVESGGSLVQPGGSLRLSCAASGSIFRLNDMRWYRQAPGKQREMVATITSGGTTNYADSVKARFTISRDNAKSTVYLQMNSLKPEDTAVYYCNADISLYSAFGLFSPPKNYWGQGIQVTVSS

SEQ ID NO: 21947 - protein, 125 aa, Artificial Sequence
  source: /note="Description of Artificial Sequence: Synthetic polypeptide"
AVQLVESGGSLVQPGGGLRLSCAASGSIFRLNDMRWYRQAPGKQREMVATITSGGTTNYADPVKARFTISRDNAKSTVYLQMNSLKPEDTAVYYCNADISLYSAFGLFSPPKNYWGQGIQVTVSS

SEQ ID NO: 21948 - protein, 125 aa, Artificial Sequence
  source: /note="Description of Artificial Sequence: Synthetic polypeptide"
DVQLVESGGSLVQPGGGLRLSCAASGSIFRLNDMRWYRQAPGKQREMVATITSGGTTNYADSVKARFTISRDNAKSTVYLQMNSLKPEDTAVYYCNADISLYSAFGLFSPPKNYWGQGTQVTVPS

SEQ ID NO: 21949 - protein, 117 aa, Artificial Sequence
  source: /note="Description of Artificial Sequence: Synthetic polypeptide"
QVQLVESGGGLVQPGGSLRLSCAASGSGFSINVMGWYRQYPGKQREVVAALSAGGSFYYTDSVKGRFTITRDNAKNTMYLQMNSLKPEDTALYYCAAGLLGQRPDYWGQGTQVTISS

SEQ ID NO: 21950 - protein, 117 aa, Artificial Sequence
  source: /note="Description of Artificial Sequence: Synthetic polypeptide"
QVQLVESGGGLVQAGGSLRLSCAASESIFSFKVMGWYRQYPGKQREVVAALSAGGSFYYTDSVKGRFTITRDNAKNTMYLQMNSLKPEDTALYYCAAGLLGQRPDYWGQGTRVTVSS

SEQ ID NO: 21951 - protein, 120 aa, Artificial Sequence
  source: /note="Description of Artificial Sequence: Synthetic polypeptide"
QVQLVESGGGLAQPGGSLSLSCAASGDIFSIYAMGWYRQAPGKKRELVADITNYGSTNYADSVKGRFTISRDNAKTTIYLQMNSLKPEDTAVYYCNADSYSKLRGWVVYWGQGTQVTVST

SEQ ID NO: 21952 - protein, 118 aa, Artificial Sequence
  source: /note="Description of Artificial Sequence: Synthetic polypeptide"
EVQLVESGGGLVQTGDSLRLSCAVSGRTLSSFALGWFRQSPGKEREFVAALTWDGDRTSYSESVKGRFTISRDHAKNTVYLQMNSLKPEDTAVYYCAAGDLGRVPHYWGQGTRVTVSS

SEQ ID NO: 21953 - protein, 122 aa, Artificial Sequence
  source: /note="Description of Artificial Sequence: Synthetic polypeptide"
EVQLVESGGGLAQAGGSLRLSCAASGRTSEIYTMGWFRQAPGKEREFVAGIRWRSDRAAYEDSVKGRFTISRDNANNRVYLQMNSLKPEDTAVYYCAASSIAYRNDMSVSIWGQGTRVTVSS

SEQ ID NO: 21954 - protein, 116 aa, Artificial Sequence
  source: /note="Description of Artificial Sequence: Synthetic polypeptide"
AVQLVESGGGLVQAGGSLRLSCAASGRTLRSYAVGWFRQAPGKEREFVAGINWNGDSTYYSDSVKGRFTISRDNAKNTVYLQMNSLKPDDTAVYYCNAGYIGNYYWGQGTQVTVSS

SEQ ID NO: 21955 - protein, 116 aa, Artificial Sequence
  source: /note="Description of Artificial Sequence: Synthetic polypeptide"
AVQLVESGGGLVQAGGSLRLSCAASGRTFSSYAVGWFRQAPGKDREFVAGINWTGANTYHADSVAGRVTISRDNAKNVVYLQMNSLKPEDTAVYYCNAGTQGGWYWGQGIQVTVSS

SEQ ID NO: 21956 - protein, 122 aa, Artificial Sequence
  source: /note="Description of Artificial Sequence: Synthetic polypeptide"
DVQLVESGGGLVQAGGSLRLSCATSGRSLSSYAMAWFRQAPGKEREFVAGINFSGRRTYYTDSVKGRFNITRDNAKNTVYLQMNSLKPEDTAVYYCNVGGRKVLAGTFFNDWGQGTQVTVST

SEQ ID NO: 21957 - protein, 120 aa, Artificial Sequence
  source: /note="Description of Artificial Sequence: Synthetic polypeptide"
EVQLVESGGGLVQAGGSLTLSCAASGRTLSSYAMGWFRQAPGKEREFVAGINWSGGSTYYADSVKGRFAISRDNAKNTVYLRMNSLKPEDTAVYYCNAGRFERLRLISYWGQGTQVTVST

SEQ ID NO: 21958 - protein, 120 aa, Artificial Sequence
  source: /note="Description of Artificial Sequence: Synthetic polypeptide"
QVQLVESGGGLVQAGGSLRLSCAASGRTFSDYTMGWFRQAPGKEREFVAGINGSGGRTYYADSVKDRFTISRDNAKNTVYLQMNNLKLEDTAVYYCNAGRFERLRLISYWGQGTQVTVPS

SEQ ID NO: 21959 - protein, 116 aa, Artificial Sequence
  source: /note="Description of Artificial Sequence: Synthetic polypeptide"
QVQLVESGGGLVQAGDSLRLSCAASGRTFSSYAMGWFRQAPGKEREFVAGISWSGGNTYYSDSVKGRFTISRDNTKNTVYLQMNSLKPEDTAVYSCNAGTYYKNYWGQGTQVTVSS

SEQ ID NO: 21960 - protein, 125 aa, Artificial Sequence
  source: /note="Description of Artificial Sequence: Synthetic polypeptide"
QVQLVESGGGLVQPGGSLRLSCAASGSIFRLNDMGWYRQPPGKQREMVATITKGGTTNYADSVKARFTISRDNAKNTVYLQMNSLKPEDTAVYYCNADISTYSAFGLFTPPKNYWGQGIQVTVSS

SEQ ID NO: 21961 - protein, 125 aa, Artificial Sequence
  source: /note="Description of Artificial Sequence: Synthetic polypeptide"
QVQLVESGGSLVQPGGSLRLSCAASGSIFRLNDMRWYRQAPGKQREMVATITSGGTTNYADSVKARFTISRDNAKSTVYLQMNSLKPEDTAVYYCNADISLYSAFGLFSPPKNYWGQGTQVTVST

SEQ ID NO: 21962 - protein, 125 aa, Artificial Sequence
  source: /note="Description of Artificial Sequence: Synthetic polypeptide"
DVQLVESGGSLVQPGGSLRLSCAASGSIFRLNDMRWYRQAPGKQREMVATITSGGTTNYADSVKARFTISRDNAKSTVYLQMNSLKPEDTAVYYCNADISLYSAFGLFSPPKNYWGQGIQVTVSS

SEQ ID NO: 21963 - protein, 125 aa, Artificial Sequence
  source: /note="Description of Artificial Sequence: Synthetic polypeptide"
QVQLVESGGSLVQPGGSLRLSCAASGSIFRLNDMRWYRQAPGKQREMVATITSGGTTNYADSVKARFTISRDNAKSTVYLQMNSLKPEDTAVYYCNADISLYSAFGLFSPPKNYWGQGTQVTVSS

SEQ ID NO: 21964 - protein, 125 aa, Artificial Sequence
  source: /note="Description of Artificial Sequence: Synthetic polypeptide"
QVQLQESGGSLVQPGGSLRLSCAASGSIFRLNDMRWYRQAPGKQREMVATITSGGTTNYADSVKARFTISRDNAKSTVYLQMNSLKPEDTAVYYCNADISLYSAFGLFSPPKNYWGQGIQVTVSS

SEQ ID NO: 21965 - protein, 128 aa, Artificial Sequence
  source: /note="Description of Artificial Sequence: Synthetic polypeptide"
QVQLQESGGELVQAGGSLRLSCAASGRTLSSYTIGWFRQAPGNVREFVAHHFASGGVTDYADFVKGRFTISRDNAKNTVYLEMNSLKPEDTAVYYCAASTFTIPGYRNLKAAYEYDYWGQGTQVTVSS

SEQ ID NO: 21966 - protein, 122 aa, Artificial Sequence; identical to SEQ ID NO: 16505
  source: /note="Description of Artificial Sequence: Synthetic polypeptide"

SEQ ID NO: 21967 - protein, 125 aa, Artificial Sequence
  source: /note="Description of Artificial Sequence: Synthetic polypeptide"
EVQLQASGGGLVQAGGSLRLSCSASVRTFSIYTMGWFRQAPGKEREFVAGINRSGDVTKYADFVKGRFSISRDHAKNMVYLQMNSLKPEDTALYYCAATWAYDTVGALTSGYNFWGQGTQVTVSS

SEQ ID NO: 21968 - protein, 474 aa, Artificial Sequence
  source: /note="Description of Artificial Sequence: Synthetic polypeptide"
AMDWTWSILFLVAAATGAHSQVQLVQSGAEVKKPGASVKVSCKASGYTFSSNGIIWVRQAPGQGLEWLGWISGYNGKTRYAQKVQGRVTITTDTSTSTAYMELRSLRSDDTAVYYCAREKTMVRGAISGYSDYWGQGTLVTVSSASTKGPSVFPLAPSSKSTSGGTAALGCLVKDYFPEPVTVSWNSGALTSGVHTFPAVLQSSGLYSLSSVVTVPSSSLGTQTYICNVNHKPSNTKVDKRVEPKSCDKTHTCPPCPAPELLGGPSVFLFPPKPKDTLMISRTPEVTCVVVDVSHEDPEVKFNWYVDGVEVHNAKTKPREEQYNSTYRVVSVLTVLHQDWLNGKEYKCKVSNKALPAPIEKTISKAKGQPREPQVYTLPPSREEMTKNQVSLTCLVKGFYPSDIAVEWESNGQPENNYKTTPPVLDSDGSFFLYSKLTVDKSRWQQGNVFSCSVMHEALHNHYTQKSLSLSPGK

SEQ ID NO: 21969 - protein, 474 aa, Homo sapiens
AMDWTWSILFLVAAATGAHSQVQLVQSGAEVKKPGASVKVSCKASGYTFSSNGIIWVRQAPGQGLEWLGWISGYNGKTRYAQKVQGRVTITTDTSTSTAYMELRSLRSDDTAVYYCAREKTMVRGAISGYSDYWGQGTLVTVSSASTKGPSVFPLAPSSKSTSGGTAALGCLVKDYFPEPVTVSWNSGALTSGVHTFPAVLQSSGLYSLSSVVTVPSSSLGTQTYICNVNHKPSNTKVDKKVEPKSCDKTHTCPPCPAPELLGGPSVFLFPPKPKDTLMISRTPEVTCVVVDVSHEDPEVKFNWYVDGVEVHNAKTKPREEQYNSTYRVVSVLTVLHQDWLNGKEYKCKVSNKALPAPIEKTISKAKGQPREPQVYTLPPSRDELTKNQVSLTCLVKGFYPSDIAVEWESNGQPENNYKTTPPVLDSDGSFFLYSKLTVDKSRWQQGNVFSCSVMHEALHNHYTQKSLSLSPGK

SEQ ID NO: 21970 - protein, 16 aa, Artificial Sequence
  source: /note="Description of Artificial Sequence: Synthetic peptide"
RSSQSLVHSNQNTYLH

SEQ ID NO: 21971 - protein, 8 aa, Artificial Sequence
  source: /note="Description of Artificial Sequence: Synthetic peptide"
YKVDNRFS

SEQ ID NO: 21972 - protein, 9 aa, Artificial Sequence
  source: /note="Description of Artificial Sequence: Synthetic peptide"
SQSTLVPLT

SEQ ID NO: 21973 - protein, 13 aa, Artificial Sequence
  source: /note="Description of Artificial Sequence: Synthetic peptide"
KGSGYTFSNYWIE

SEQ ID NO: 21974 - protein, 17 aa, Artificial Sequence
  source: /note="Description of Artificial Sequence: Synthetic peptide"
EILPGSDSIKYEKNFKG

SEQ ID NO: 21975 - protein, 9 aa, Artificial Sequence
  source: /note="Description of Artificial Sequence: Synthetic peptide"
ARRGNYVDD

SEQ ID NO: 21976 - protein, 16 aa, Artificial Sequence
  source: /note="Description of Artificial Sequence: Synthetic peptide"
KSSQSLLYSDGKTFLN

SEQ ID NO: 21977 - protein, 16 aa, Artificial Sequence
  source: /note="Description of Artificial Sequence: Synthetic peptide"
KSSQSLLYSDGKTYLN

SEQ ID NO: 21978 - protein, 15 aa, Artificial Sequence
  source: /note="Description of Artificial Sequence: Synthetic peptide"
RASQSVSTSRYSYIH

SEQ ID NO: 21979 - protein, 7 aa, Artificial Sequence
  source: /note="Description of Artificial Sequence: Synthetic peptide"
YASNLES

SEQ ID NO: 21980 - protein, 9 aa, Artificial Sequence
  source: /note="Description of Artificial Sequence: Synthetic peptide"
HHSWEIPLT

SEQ ID NO: 21981 - protein, 5 aa, Artificial Sequence
  source: /note="Description of Artificial Sequence: Synthetic peptide"
NYWVN

SEQ ID NO: 21982 - protein, 16 aa, Artificial Sequence
  source: /note="Description of Artificial Sequence: Synthetic peptide"
QIRLKSDNYATHYEES

SEQ ID NO: 21983 - protein, 4 aa, Artificial Sequence
  source: /note="Description of Artificial Sequence: Synthetic peptide"
WEDY

SEQ ID NO: 21984 - protein, 159 aa, Artificial Sequence
  source: /note="Description of Artificial Sequence: Synthetic polypeptide"
QVKLEESGGGLVQPGGSLRLSCAASGFTFSNFAMTWVRQSPGKGLEWVSAIDNDGGRTSYSDSVKGRFTISRDNAKNTLYLQMNSLKPEDTAMYYCAAMNLATRKWELWGQGTQVTVSSETSSPAEPKSCDKTHTCPPCPGSEQKLISEEDLNHHHHHH

SEQ ID NO: 21985 - protein, 224 aa, Artificial Sequence
  source: /note="Description of Artificial Sequence: Synthetic polypeptide"
QVKLEESGGGLVQPGGSLRLSCAASGFTFSNFAMTWVRQSPGKGLEWVSAIDNDGGRTSYSDSVKGRFTISRDNAKNTLYLQMNSLKPEDTAMYYCAAMNLATRKWELWGQGTQVTVSSAEPISCDKTHTCPPCPAPELLGGPSVFLFPPKPKDTLMISRTPEVTCVVVDVSHEDPEVKFNWYVDGVEVHNAKTKPREEQYNSTYRVVSVLTVLHQDWLNGKEY

SEQ ID NO: 21986 - DNA, 2168 bp, Artificial Sequence
  source: /note="Description of Artificial Sequence: Synthetic polynucleotide"
gaggagccaccatggaatggacctgggtctttctcttcctcctgtcagtaactgcaggtgtccactcccaggttcagctgcagcagtctggagctgagctgatgaagcctggggcctcagtgaagatatcctgcaaggctactggctacacattcagtaactactggatagagtgggtaaagcagaggcctggacatggccttgagtggattggagagattttacctggaagtgatagtattaagtacaatgagaatttcaagggcaaggccacattcactgcagatacatcctccaacacagcctacatgcaactcagcagcctgacatctgaggactctgccgtctattactgtgcaagaagggggaactacccagactactggggccaaggcaccactctcacagtctcctcagccaaaacgacacccccatctgtctatccactggcccctggatctgctgcccaaactaactccatggtgaccctgggatgcctggtcaagggctatttccctgagccagtgacagtgacctggaactctggatccctgtccagcggtgtgcacaccttcccagctgtcctgcagtctgacctctacactctgagcagctcagtgactgtcccctccagcacctggcccagcgagaccgtcacctgcaacgttgcccacccggccagcagcaccaaggtggacaagaaaattgtgcccagggattgtggttgtaagccttgcatatgtacagtcccagaagtatcatctgtcttcatcttccccccaaagcccaaggatgtgctcaccattactctgactcctaaggtcacgtgtgttgtggtagacatcagcaaggatgatcccgaggtccagttcagctggtttgtagatgatgtggaggtgcacacagctcagacgcaaccccgggaggagcagttcaacagcactttccgctcagtcagtgaacttcccatcatgcaccaggactggctcaatggcaaggagttcaaatgcagggtcaacagtgcagctttccctgcccccatcgagaaaaccatctccaaaaccaaaggcagaccgaaggctccacaggtgtacaccattccacctcccaaggagcagatggccaaggataaagtcagtctgacctgcatgataacagacttcttccctgaagacattactgtggagtggcagtggaatgggcagccagcggagaactacaagaacactcagcccatcatggacacagatggctcttacttcgtctacagcaagctcaatgtgcagaagagcaactgggaggcaggaaatactttcacctgctctgtgttacatgagggcctgcacaaccaccatactgagaagagcctctcccactctcctggtagaaagaggcgagagggcagaggaagtcttctaacatgcggtgacgtggaggagaatcccggccctatgaagttgcctgttaggctgttggtgctgatgttctggattcctgcttccagcagtgatgttgtgatgacccaaactccactctccctgcctgtcagtcttggagatcaagcctccatctcttgcagatctagtcagagccttgtacacagtaatggaaacacctatttacattggtacctgcagaagccaggccagtctccaaagctcctgatctacaaagtttccaaccgattttctggggtcccagacaggttcagtggcagtggatcagggacagatttcacactcaagatcagcagagtggaggctgaggatctgggagtttatttctgctctcaaagtacacatgttccgctcacgttcggtgctgggaccaagctggagctgaaacgggctgatgctgcaccaactgtatccatcttcccaccatccagtgagcagttaacatctggaggtgcctcagtcgtgtgcttcttgaacaacttctaccccaaagacatcaatgtcaagtggaagattgatggcagtgaacgacaaaatggcgtcctgaacagttggactgatcaggacagcaaagacagcacctacagcatgagcagcaccctcacgttgaccaaggacgagtatgaacgacataacagctatacctgtgaggccactcacaagacatcaacttcacccattgtcaagagcttcaacaggaatgagtgttag

SEQ ID NO: 21987 - protein, 718 aa, Artificial Sequence
  source: /note="Description of Artificial Sequence: Synthetic polypeptide"
MEWTWVFLFLLSVTAGVHSQVQLQQSGAELMKPGASVKISCKATGYTFSNYWIEWVKQRPGHGLEWIGEILPGSDSIKYNENFKGKATFTADTSSNTAYMQLSSLTSEDSAVYYCARRGNYPDYWGQGTTLTVSSAKTTPPSVYPLAPGSAAQTNSMVTLGCLVKGYFPEPVTVTWNSGSLSSGVHTFPAVLQSDLYTLSSSVTVPSSTWPSETVTCNVAHPASSTKVDKKIVPRDCGCKPCICTVPEVSSVFIFPPKPKDVLTITLTPKVTCVVVDISKDDPEVQFSWFVDDVEVHTAQTQPREEQFNSTFRSVSELPIMHQDWLNGKEFKCRVNSAAFPAPIEKTISKTKGRPKAPQVYTIPPPKEQMAKDKVSLTCMITDFFPEDITVEWQWNGQPAENYKNTQPIMDTDGSYFVYSKLNVQKSNWEAGNTFTCSVLHEGLHNHHTEKSLSHSPGRKRREGRGSLLTCGDVEENPGPMKLPVRLLVLMFWIPASSSDVVMTQTPLSLPVSLGDQASISCRSSQSLVHSNGNTYLHWYLQKPGQSPKLLIYKVSNRFSGVPDRFSGSGSGTDFTLKISRVEAEDLGVYFCSQSTHVPLTFGAGTKLELKRADAAPTVSIFPPSSEQLTSGGASVVCFLNNFYPKDINVKWKIDGSERQNGVLNSWTDQDSKDSTYSMSSTLTLTKDEYERHNSYTCEATHKTSTSPIVKSFNRNEC

SEQ ID NO: 21988 - DNA, 2168 bp, Artificial Sequence
  source: /note="Description of Artificial Sequence: Synthetic polynucleotide"
gaggagccaccatggagtggacctgggtgttcctgttcctgctgagcgtgaccgccggcgtgcactcccaagtccagctgcagcagagcggcgccgagctgatgaagcccggcgccagcgtgaagatcagctgcaaggccaccggctacaccttcagcaactactggatcgagtgggtgaagcagcggcccggccacggcctggagtggatcggcgagatcctgcccggcagcgacagcatcaagtacaacgagaacttcaagggcaaggccaccttcaccgccgacaccagcagcaacaccgcctacatgcagctgagcagcctgaccagcgaggacagcgccgtgtactactgcgcccggcggggcaactaccccgactactggggccagggcaccaccctgaccgtctccagcgccaagaccacaccacccagcgtgtacccactggctccaggcagcgctgcccagaccaacagcatggtgaccctgggctgcctggtgaagggctacttccccgagcccgtgaccgtgacctggaacagcggcagcctgagcagcggcgtgcacaccttcccagccgtgctccaaagcgacctgtacacactgagcagcagcgtgaccgtgcccagcagcacctggcccagcgagaccgtgacctgcaacgtggcccaccccgccagcagcaccaaggtggacaagaagatcgtgccccgggactgcggctgcaagccctgcatctgcaccgtgcccgaagtcagcagcgtgttcatcttcccacccaagcccaaggacgtgctgaccatcaccctgacacccaaagtcacctgcgtggtggtggacatcagcaaggacgaccccgaggtgcagttcagctggttcgtggacgacgtggaggtgcacaccgcccagacccagccccgggaggagcagttcaacagcaccttccggagcgtgagcgagctgcccatcatgcaccaggactggctgaacggcaaggagttcaagtgccgggtgaacagcgccgccttccccgcccccatcgagaagaccatcagcaagaccaagggacggcccaaggctccccaggtgtacaccatcccaccacccaaggagcagatggccaaggacaaagtcagcctgacctgcatgatcaccgacttcttccccgaggacatcaccgtggagtggcagtggaacggccagcccgccgagaactacaagaacacccagcccatcatggacaccgacggcagctacttcgtgtacagcaagctgaacgtgcagaagagcaactgggaggccggcaacaccttcacctgcagcgtgctgcacgagggcctgcacaaccatcacaccgagaagagcctgagccacagcccaggacggaagcgccgcgagggcaggggcagcctgctgacctgcggcgacgtggaggagaacccaggccccatgaagctgcccgtgcggctgctggtgctgatgttctggatccccgccagcagcagcgacgtggtgatgacccagaccccactgagcctgcccgtgagcctgggcgaccaggccagcatcagctgccggagcagccagagcctggtgcacagcaacggcaacacctacctgcactggtacctgcagaagcccggccagagccccaagctgctgatctacaaagtcagcaaccggttcagcggcgtgcccgaccggttcagcggcagcggcagcggcaccgacttcaccctgaagatcagccgggtggaggccgaggacctgggcgtgtacttctgcagccagagcacccacgtgcccctgaccttcggcgccggcaccaagctggagctgaagcgggccgacgccgctcccaccgtcagcatcttcccaccctcctccgagcagctgaccagcggaggcgccagcgtggtgtgcttcctgaacaacttctaccccaaggacatcaacgtgaagtggaagatcgacggcagcgagcggcagaacggcgtgctgaacagctggaccgaccaggacagcaaggacagcacctacagcatgagcagcaccctgaccctgaccaaggacgagtacgagcggcacaacagctacacctgcgaggccacccacaagaccagcaccagccccatcgtgaagagcttcaaccggaacgagtgctga

SEQ ID NO: 21989 - DNA, 2174 bp, Artificial Sequence
  source: /note="Description of Artificial Sequence: Synthetic polynucleotide"
gaggagccaccatgggatggagctggatctttctctttctcctgtcaggaactacaggtgtcctctctgaggtccagctgcaacagtctggacctgagctggtgaagcctggggcttcagtgaagatatcctgcaagacttctggatacacattcactgaatacaccatacactgggtgaagcagagccatggagagagccttgagtggattggaggtattaatccaaacgatggtggtactatttacaaccagaagttcaagggcaaggccacattgactgtagacaagtcctccaaaacagcctacatggagctccgcagcctgacatctgaggattctgcagtcttttactgtgcaagagggccctccgccaggtttccttactggggccaagggactctggtcactgtctctgcagccaaaacgacacccccatctgtctatccactggcccctggatctgctgcccaaactaactccatggtgaccctgggatgcctggtcaagggctatttccctgagccagtgacagtgacctggaactctggatccctgtccagcggtgtgcacaccttcccagctgtcctgcagtctgacctctacactctgagcagctcagtgactgtcccctccagcacctggcccagcgagaccgtcacctgcaacgttgcccacccggccagcagcaccaaggtggacaagaaaattgtgcccagggattgtggttgtaagccttgcatatgtacagtcccagaagtatcatctgtcttcatcttccccccaaagcccaaggatgtgctcaccattactctgactcctaaggtcacgtgtgttgtggtagacatcagcaaggatgatcccgaggtccagttcagctggtttgtagatgatgtggaggtgcacacagctcagacgcaaccccgggaggagcagttcaacagcactttccgctcagtcagtgaacttcccatcatgcaccaggactggctcaatggcaaggagttcaaatgcagggtcaacagtgcagctttccctgcccccatcgagaaaaccatctccaaaaccaaaggcagaccgaaggctccacaggtgtacaccattccacctcccaaggagcagatggccaaggataaagtcagtctgacctgcatgataacagacttcttccctgaagacattactgtggagtggcagtggaatgggcagccagcggagaactacaagaacactcagcccatcatggacacagatggctcttacttcgtctacagcaagctcaatgtgcagaagagcaactgggaggcaggaaatactttcacctgctctgtgttacatgagggcctgcacaaccaccatactgagaagagcctctcccactctcctggtagaaagaggcgagagggcagaggaagtcttctaacatgcggtgacgtggaggagaatcccggccctatgatgagtcctgcccagttcctgtttctgttagtgctctggattcgggaaaccaacggtgatgttgtgatgacccagactccactcactttgtcggttaccattggacaaccagcctccatctcttgcaagtcaagtcagagcctcttagatagtgatggaaagacatatttgaattggttgttacagaggccaggccagtctccaaagcgcctaatctatctggtgtctaaactggactctggagtccctgacagattcactggcagtggatcagggacagatttcacactgaaaattagcagagtggaggctgaggatttgggagtttattattgctggcaaggtacacattttcctcggacgttcggtggaggcaccaagctggaaatcaaacgggctgatgctgcaccaactgtatccatcttcccaccatccagtgagcagttaacatctggaggtgcctcagtcgtgtgcttcttgaacaacttctaccccaaagacatcaatgtcaagtggaagattgatggcagtgaacgacaaaatggcgtcctgaacagttggactgatcaggacagcaaagacagcacctacagcatgagcagcaccctcacgttgaccaaggacgagtatgaacgacataacagctatacctgtgaggccactcacaagacatcaacttcacccattgtcaagagcttcaacaggaatgagtgttag

SEQ ID NO: 21990 - protein, 720 aa, Artificial Sequence
  source: /note="Description of Artificial Sequence: Synthetic polypeptide"
MGWSWIFLFLLSGTTGVLSEVQLQQSGPELVKPGASVKISCKTSGYTFTEYTIHWVKQSHGESLEWIGGINPNDGGTIYNQKFKGKATLTVDKSSKTAYMELRSLTSEDSAVFYCARGPSARFPYWGQGTLVTVSAAKTTPPSVYPLAPGSAAQTNSMVTLGCLVKGYFPEPVTVTWNSGSLSSGVHTFPAVLQSDLYTLSSSVTVPSSTWPSETVTCNVAHPASSTKVDKKIVPRDCGCKPCICTVPEVSSVFIFPPKPKDVLTITLTPKVTCVVVDISKDDPEVQFSWFVDDVEVHTAQTQPREEQFNSTFRSVSELPIMHQDWLNGKEFKCRVNSAAFPAPIEKTISKTKGRPKAPQVYTIPPPKEQMAKDKVSLTCMITDFFPEDITVEWQWNGQPAENYKNTQPIMDTDGSYFVYSKLNVQKSNWEAGNTFTCSVLHEGLHNHHTEKSLSHSPGRKRREGRGSLLTCGDVEENPGPMMSPAQFLFLLVLWIRETNGDVVMTQTPLTLSVTIGQPASISCKSSQSLLDSDGKTYLNWLLQRPGQSPKRLIYLVSKLDSGVPDRFTGSGSGTDFTLKISRVEAEDLGVYYCWQGTHFPRTFGGGTKLEIKRADAAPTVSIFPPSSEQLTSGGASVVCFLNNFYPKDINVKWKIDGSERQNGVLNSWTDQDSKDSTYSMSSTLTLTKDEYERHNSYTCEATHKTSTSPIVKSFNRNEC

SEQ ID NO: 21991 - DNA, 2174 bp, Artificial Sequence
  source: /note="Description of Artificial Sequence: Synthetic polynucleotide"
gaggagccaccatgggctggagctggatcttcctgttcctgctgagcggcaccaccggcgtgctgagcgaggtgcagctgcagcagagcggccccgagctggtgaagcccggcgccagcgtgaagatcagctgcaagaccagcggctacaccttcaccgagtacaccatccactgggtgaagcagagccacggcgagagcctggagtggatcggcggcatcaaccccaacgacggcggcaccatctacaaccagaagttcaagggcaaggccaccctgaccgtggacaagagcagcaagaccgcctacatggagctgcggagcctgaccagcgaggacagcgccgtgttctactgcgctcggggccccagcgcccggttcccctactggggccagggcaccctggtgaccgtgagcgccgccaagaccacaccacccagcgtgtacccactggctccaggcagcgctgcccaaaccaacagcatggtgaccctgggctgcctggtgaagggctacttccccgagcccgtgaccgtgacctggaacagcggcagcctgagcagcggcgtgcacaccttcccagctgtgctccagtccgacctgtacaccctgagcagcagcgtgaccgtgcccagcagcacctggcccagcgagaccgtgacctgcaacgtggcccaccccgccagcagcaccaaggtggacaagaagatcgtgccccgggactgcggctgcaagccctgcatctgcaccgtgcctgaggtctccagcgtgttcatcttcccccccaagcccaaggacgtgctgaccatcaccctgacccctaaagtcacctgcgtggtggtggacatcagcaaggacgaccccgaggtgcagttcagctggttcgtggacgacgtggaggtgcacaccgcccagacccagccccgggaggagcagttcaacagcaccttccggagcgtgagcgagctgcccatcatgcaccaggactggctgaacggcaaggagttcaagtgccgggtgaacagcgccgccttccccgcccccatcgagaagaccatcagcaagaccaagggccgacccaaggccccacaggtgtacaccatcccaccacccaaggagcagatggccaaggacaaagtcagcctgacctgcatgatcaccgacttcttccccgaggacatcaccgtggagtggcagtggaacggccagccagccgagaactacaagaacacccagcccatcatggacaccgacggcagctacttcgtgtacagcaagctgaacgtgcagaagagcaactgggaggccggcaacaccttcacctgcagcgtgctgcacgagggcctgcacaaccaccacaccgagaagagcctgagccacagccccggacggaagcggcgcgagggacggggcagcctgctgacctgcggcgacgtggaggagaacccaggccccatgatgagcccagcccagttcctgttcctgctggtgctgtggatccgggagaccaacggcgacgtggtgatgacccagaccccactgaccctgagcgtgaccatcggccagcccgccagcatcagctgcaagagcagccagagcctgctggacagcgacggcaagacctacctgaactggctgctgcagcggccaggccagagccccaagcggctgatctatctcgtcagcaagctggacagcggcgtgcccgaccggttcaccggcagcggcagcggcaccgacttcaccctgaagatcagccgggtggaggccgaggacctgggcgtgtactactgctggcagggcacccactttccccggaccttcggcggcggcaccaagctggagatcaagcgggccgacgccgccccaacagtcagcatctttccaccatcctccgagcagctcaccagcggcggcgccagcgtggtgtgcttcctgaacaacttctaccccaaggacatcaacgtgaagtggaagatcgacggcagcgagcggcagaacggcgtgctgaacagctggaccgaccaggacagcaaggacagcacctacagcatgagcagcaccctgaccctgaccaaggacgagtacgagcggcacaacagctacacctgcgaggccacccacaagaccagcaccagccccatcgtgaagagcttcaaccggaacgagtgctga

SEQ ID NO: 21992 - protein, 118 aa, Mus musculus
DVQLVESGGGLVQPGGSRKLSCAASGFTFSSFGMHWVRQVPEKGLEWVAYISSGSSTIYYADTVKGRFTISRDNPKNTLFLQMTSLRSEDTAMYYCASNQSPTGFAYWGQGTLVTVSA

SEQ ID NO: 21993 - protein, 115 aa, Artificial Sequence
  source: /note="Description of Artificial Sequence: Synthetic polypeptide"
EVKLEESGGGLVQPGGSMRLSCVASEFTFSNYWMNWIRQSPEKGLEWVAQIRLKSDNYATHYAESVKGRFTISRDASNFSVYLQMNNLRAEDTGIYYCTGGTSYWGQGTTLTVSS

SEQ ID NO: 21994 - protein, 117 aa, Artificial Sequence
  source: /note="Description of Artificial Sequence: Synthetic polypeptide"
EVQLVESGGDLVKPGGSLKLSCAASGFTFRSYGMSWVRQTPDKRLEWVATISGGGSYTYYPDSVKGRFTISRDNAKNTLYLQMSSLKSEDTAMYYCAVSYDGAMDYWGQGTSVTVSS

SEQ ID NO: 21995 - protein, 119 aa, Artificial Sequence
  source: /note="Description of Artificial Sequence: Synthetic polypeptide"
EVQLQQSGPELVKPGASVKMSCKASGYTFTDYYMKWVKQSHGKSLEWIGDIDPNNGGTSYNQKFKGKATLTVDKSSSTAYMQLNSLTSEDSAVYYCARSAGFGDSFSFWGLGTLVTVSA

SEQ ID NO: 21996 - protein, 115 aa, Artificial Sequence
  source: /note="Description of Artificial Sequence: Synthetic polypeptide"
EVKLEESGGGLVQPGGSMKLSCVASRFIFSNYWMNWVRQSPEKGLEWVAQIRLKSDNYATHYAESVKGRFTISRDDSKSSVYLQMNNLRAEDTGIYYCTGGTTYWGQGTTLTVSS

SEQ ID NO: 21997 - protein, 114 aa, Artificial Sequence
  source: /note="Description of Artificial Sequence: Synthetic polypeptide"
EVQLQQSGAELVRPGASVKLSCTASGFNIKDDYMHWVKQRPEQGLEWIGWIDPENGDTEYASKFQGKATITTDTSSNTAYLQLSSLTSEDTAVYYCLDFAYGYWGQGTTLTVSS

SEQ ID NO: 21998 - protein, 115 aa, Artificial Sequence
  source: /note="Description of Artificial Sequence: Synthetic polypeptide"
QIQLVQSGPELKKPGETVKISCKASGYTFTNYGMNWVKQAPGKGLKWMGWINMYTGEPTYGDDFKGRFVFSLETSVSTVYLQINNLKKEDTATFFCARGGRPDYWGQGTSVTVSS

SEQ ID NO: 21999 - protein, 120 aa, Artificial Sequence
  source: /note="Description of Artificial Sequence: Synthetic polypeptide"
EVKLVESGGGLVQPGGSLRLSCATSGFTFSDFYMEWVRQSPGKRLEWIAASKNKANDYTTEYNASVKDRFFVSRDTSQSILYLQMNALRAEDTAIYYCARDALGTVFAYWGQGTLVTVSA

SEQ ID NO: 22000 - protein, 119 aa, Artificial Sequence
  source: /note="Description of Artificial Sequence: Synthetic polypeptide"
EVQLQQSGPELVKPGASVMMTCKASGYTFTDYYMKWVKQSNGKSLEWIGDLDPYTGGANYNQKFKGKATLTVDKSSSTAYMHLNSLTSEDSAVYYCARSRGYGDSFAYWGQGTLVTVSA

SEQ ID NO: 22001 - protein, 118 aa, Artificial Sequence
  source: /note="Description of Artificial Sequence: Synthetic polypeptide"
EVQLVESGGGLVQPGGSLRLSCAASGFTFSSYAMHWVRQAPGKGLEWVSAISGSGGRTYYADSVKGRFTISRDNSKNTLYLQMNSLRAEDTAVYYCAKRGLDYAFDYWGQGTLVTVSS

SEQ ID NO: 22002 - protein, 119 aa, Artificial Sequence
  source: /note="Description of Artificial Sequence: Synthetic polypeptide"
EVQLQQSGPELVKPGASVKMSCKASGYTFTDYYMKWVKQSHGKSLEWIGDLNPNNGGTLYNQKFKGQATLTVDKSSSTAYMQFNSLTSEDSAVYYCARSAGYGDSFAYWGQGTLVTVSA

SEQ ID NO: 22003 - protein, 117 aa, Artificial Sequence
  source: /note="Description of Artificial Sequence: Synthetic polypeptide"
EVQLVESGGDLVKPGGSLKLSCAASGFTFSSYGMSWVRQTPDKRLEWVATISSGGTYTYYPDSVKGRFTISRDNAKNTLYLQMSSLKSEDTAMYYCAPSYDGAMDYWGQGTSVTVSS

SEQ ID NO: 22004 - protein, 120 aa, Artificial Sequence
  source: /note="Description of Artificial Sequence: Synthetic polypeptide"
QIQLVQSGPELKKPGETVKISCKASGYTFTDCSIHWVKQAPGEGLKWMGWINTETGEPSYADDFKGRFAFSLETSASTAFLQINNLKSEDTASYFCGTAYYRYDGALDYWGQGTSVTVSS

SEQ ID NO: 22005 - protein, 119 aa, Artificial Sequence
  source: /note="Description of Artificial Sequence: Synthetic polypeptide"
EVQLQQSGPELVKPGASVKMSCKASGYTFTDYYMKWVKQSHGKSLEWIGDLNPKNGGIIYNQKFKGQATLTVDKSSSTAYMQLNSLTSEDSAVFYCARSGGYGDSFAYWGQGTLVTVSA

SEQ ID NO: 22006 - protein, 121 aa, Artificial Sequence
  source: /note="Description of Artificial Sequence: Synthetic polypeptide"
EVHLQQSGAELVRSGASVKLSCTASGFNIKDYYMYWVKQRPEQGLEWIGWIDPENGDTEYFPKFQGKATMTADTSSKTAYLQLSSLTSEDTAVYYCNAWRARATNSALDYWGQGTSVTVSS

SEQ ID NO: 22007 - protein, 117 aa, Artificial Sequence
  source: /note="Description of Artificial Sequence: Synthetic polypeptide"
EVQLVESGGGLVKPGGSLRLSCVVSGFTFSNYSMNWVRQAPGKGLEWVSSISRSSSYIYYADSVKGRFTIARDNAKNSLYLQMNSLRAEDTAVYYCARWFMGGMDVWGQGTTVTVSS

SEQ ID NO: 22008 - protein, 117 aa, Artificial Sequence
  source: /note="Description of Artificial Sequence: Synthetic polypeptide"
EVQLVESGGGLVKPGGSLRLSCVVSGFTFSSYSMNWVRQAPGKGLEWVSSISRSSSYIYYADSVKGRFTIARDNAKNSLYLQMNSLRAEDTAVYYCARWFMGGMDVWGQGTTVTVSS

SEQ ID NO: 22009 - protein, 117 aa, Artificial Sequence
  source: /note="Description of Artificial Sequence: Synthetic polypeptide"
QVQLQQSGAELVRPGASVTLSCKASGYTFTDYEMYWVKQTPVHGLEWIGAIDPETGDTAYNQKFKGKATLTADKSSNTAYMELRSLTSEDSAVYYCIRQYGNWFPYWGQGTLVTVSA

SEQ ID NO: 22010 - protein, 117 aa, Artificial Sequence
  source: /note="Description of Artificial Sequence: Synthetic polypeptide"
EVQLVESGGDLAKPGGSLKLSCTASGLIFRSYGMSWVRQTPDKRLEWVATINSGGTYTYYPDSVKGRFTISRDNAKNTLYLQMSSLKSEDTAMYYCANSYSGAMDYWGQGTSVTVSS

SEQ ID NO: 22011 - protein, 117 aa, Artificial Sequence
  source: /note="Description of Artificial Sequence: Synthetic polypeptide"
EVQLVESGGDLVKPGGSLKLSCAASGFTFSSYGMSWVRQTPDKRLEWVATISSGGTYTYYPDSVKGRFTISRDNAKNTLYLQMSSLKSEDTAMYFCATSYDGAMDYWGQGTSVTVSS

SEQ ID NO: 22012 - protein, 119 aa, Mus musculus
EVQLVESGGGLVQPKGSLKLSCAASGFTFNIYAMNWVRQAPGKGLEWVARIRSKSNNYATYYADSMKDRFTISRDDSQSMLYLQMNNLKTEDTAMYYCVRHGNYYFDYWGQGTTLTVSS

SEQ ID NO: 22013 - protein, 117 aa, Artificial Sequence
  source: /note="Description of Artificial Sequence: Synthetic polypeptide"
QVQLQQSGTELAKPGASVKLSCKASGYTFTHYWMHWIKQRPGQGLEWIGYIYPTNDYTKYNQNFRDKATLTADESSNSAYMQLNSLTYEDSAVYYCARAGNRVFDFWGQGTTLTVSS

SEQ ID NO: 22014 - protein, 117 aa, Artificial Sequence
  source: /note="Description of Artificial Sequence: Synthetic polypeptide"
EVQLVESGGDLVKPGGSLKVSCVASGFTFRSYGMSWVRQTPDKRLDWVATISSGGNYTYYPDSVKGRFTISRDNAKNTLYLQMSSLKSEDTAMYYCASSYSGAMDYWGQGTSVTVSS

SEQ ID NO: 22015 - protein, 120 aa, Artificial Sequence
  source: /note="Description of Artificial Sequence: Synthetic polypeptide"
EVKLEESGGGLVQPGGSMKLSCVASGFTFSNYWMNWVRQSPEKGLEWVAQIRLKSDNYATHYAESVKGRFTISRDDSKSSVYLQMNNLRAEDTGIYYCAGYFYGGYFDVWGTGTTVTVSS

SEQ ID NO: 22016 - protein, 114 aa, Artificial Sequence
  source: /note="Description of Artificial Sequence: Synthetic polypeptide"
QVQLQQSGAELVRPGASVTLSCKASGYTFIDYEMNWVKQTPVHGLEWIGAIDPENGGTAYNQKFKGKAIVTADKSSSTAYMELRSLTSEDSAVYYCSGPHFDYWGQGTTLTVSS

SEQ ID NO: 22017 - protein, 122 aa, Artificial Sequence
  source: /note="Description of Artificial Sequence: Synthetic polypeptide"
QVQLKESGPGLVAPSQSLSITCTISGFSLTSYGVHWVRQPPGKGLEWLVVIWSDGSTTYNSALKSRLSISKDNSKSQVFLKMNSLQTDDTAMYYCARQGGFITTAYYAMDYWGQGTSVTVSS

SEQ ID NO: 22018 - protein, 116 aa, Artificial Sequence
  source: /note="Description of Artificial Sequence: Synthetic polypeptide"
QIQLVQSGPDLKKPGETVKISCKASGYTFTNYGMNWVKQAPGKGLKWMGWINTNTGEPTYAEEFKGRFAFSLETSASTAYLQIDNLKNEDTATYFCARGTVSFPYWGQGTLVTVSA

SEQ ID NO: 22019 - protein, 120 aa, Artificial Sequence
  source: /note="Description of Artificial Sequence: Synthetic polypeptide"
EVQLVESGGGLVQPKGSLKLSCAASGFTFNTYAMNWVRQAPGKGLEWVARIRSKSNNYAAYFADSVKDRFTISRDDSQTMLYLQMNNLKSEDTAMYYCVSGGNYVPFAYWGQGTLVTVSA

SEQ ID NO: 22020 - protein, 115 aa, Artificial Sequence
  source: /note="Description of Artificial Sequence: Synthetic polypeptide"
EVQLQQSGPVLVKPGASVKMSCKASGYTFTDYYVNWVKQSHGKGLEWIGLINPNNGRTSYNQNFNDKATLTVDKSSSTAFMDLNSLTSEDSAVYYCTREGGTGYWGQGTTLSVSS

SEQ ID NO: 22021 - protein, 113 aa, Artificial Sequence
  source: /note="Description of Artificial Sequence: Synthetic polypeptide"
EVQLQQSGPELVKPGASMKISCKASGYSLTGYTMNWVKQSHGKNLEWIGLISPYNGVTSYNQKFKGKATLTVDKSSNTAYMELLSLTFEDSAVYYCARQGAYWGQGTLVTVSA

SEQ ID NO: 22022 - DNA, 2850 bp, Artificial Sequence
  source: /note="Description of Artificial Sequence: Synthetic polynucleotide"
aagcttgccgccaccatgggatggagctgtatcatcctcttcttggtagcaacagctacaggtaaggggctcacagtagcaggcttgaggtctggacatatatatgggtgacaatgacatccactttgcctttctctccacaggtgtccactcccaggtccagctggtgcaatctggagccgaagtgaagaagcctgggtcctcagtgaaggtgtcctgtaaggcttctggatataccttcactgactactacatgaactgggtgaggcaggcccctggacagggccttgagtggattggagatattaatcctaaccgcggtggaactacttacaaccagaagttcaagggcagggtgaccatcactgtggacaagtccaccagcacagcctacatggaactcagcagcctgagatctgaggacaccgcagtctattactgtgcaagttactacgccgtgggctactggggccaaggcaccactgtgacagtctcctcaggtgagtccttacaacctctctcttctattcagcttaaatagattttactgcatttgttgggggggaaatgtgtgtatctgaatttcaggtcatgaaggactagggacaccttgggagtcagaaagggtcattgggagcccgggctgatgcagacagacatcctcagctcccagacttcatggccagagatttataggatccagctttctggggcaggccaggcctgaccttggctgggggcagggagggggctaaggtgacgcaggtggcgccagccaggtgcacacccaatgcccatgagcccagacactggaccctgcatggaccatcgcggatagacaagaaccgaggggcctctgcgccctgggcccagctctgtcccacaccgcggtcacatggcaccacctctcttgcagcttccaccaagggcccatccgtcttccccctggcgccctgctccagatcgacctccgagagcacagccgccctgggctgcctggtcaaggactacttccccgaaccggtgacggtgtcgtggaactcaggcgccctgaccagcggcgtgcacaccttcccggctgtcctacagtcctcaggactctactccctcagcagcgtggtgaccgtgccctccagcagcttgggcacgaagacctacacctgcaacgtagatcacaagcccagcaacaccaaggtggacaagagagttggtgagaggccagcacagggagggagggtgtctgctggaagccaggctcagccctcctgcctggacgcaccccggctgtgcagccccagcccagggcagcaaggcatgccccatctgtctcctcacccggaggcctctgaccaccccactcatgctcagggagagggtcttctggatttttccaccaggctccgggcagccacaggctggatgcccctaccccaggccctgcgcatacaggggcaggtgctgcgctcagacctgccaagagccatatccgggaggaccctgcccctgacctaagcccaccccaaaggccaaactctccactccctcagctcagacaccttctctcctcccagatcgatctgagtaactcccaatcttctctctgcagagtccaaatatggtcccccgtgtcccccatgcccaggtaagccaacccaggcctcgccctccagctcaaggcgggacaggtgccctagagtagcctgcatccagggacaggccccagccgggtgctgacgcatccacctccatctcttcctcagcacctgagttcctggggggaccatcagtcttcctgttccccccaaaacccaaggacactctcatgatctcccggacccctgaggtcacgtgcgtggtggtggacgtgagccaggaagaccccgaggtccagttcaactggtacgtggatggcgtggaggtgcataatgccaagacaaagccgcgggaggagcagttcaacagcacgtaccgtgtggtcagcgtcctcaccgtcctgcaccaggactggctgaacggcaaggagtacaagtgcaaggtctccaacaaaggcctcccgtcctccatcgagaaaaccatctccaaagccaaaggtgggacccacggggtgcgagggccacatggacagaggtcagctcggcccaccctctgccctgggagtgaccgctgtgccaacctctgtccctacagggcagccccgagagccacaggtgtacaccctgcccccatcccaggaggagatgaccaagaaccaggtcagcctgacctgcctggtcaaaggcttctaccccagcgacatcgccgtggagtgggagagcaatgggcagccggagaacaactacaagaccacgcctcccgtcctcgattccgacggctccttcttcctctacagcaggctaaccgtggacaagagcaggtggcaggaggggaatgtcttctcatgctccgtgatgcatgaggctctgcacaaccactacacacagaagagcctctccctgtctctgggttgatgagtgccagggccggcaagcccccgctccccgggctctcggggtcgcgcgaggatgcttggcacgtaccccgtctacatacttcccaggcacccagcatggaaataaagcacccaccactgccctgggcccctgtgagactgtgatggttctttccacgggtcaggccgagtctgaggcctgagtgacatgagggaggcagagcgggtcccactgtccccacactggcccaggctgtgcaggtgtgcctgggccgcctagggtggggctcagccaggggctgccctcggcagggtgggggatttgccagcgtggccctccctccagcagcaggtacctcgag

SEQ ID NO: 22023 - protein, 115 aa, Artificial Sequence
  source: /note="Description of Artificial Sequence: Synthetic polypeptide"
EVQLVESGGGLVQPGGSLRLSCAASRFIFSNYWMNWVRQAPGKGLEWVAQIRLKSDNYATHYAESVKGRFTISRDDSKNTLYLQMNSLRAEDTAVYYCTGGTTYWGQGTLVTVSS

SEQ ID NO: 22024 - protein, 107 aa, Artificial Sequence
  source: /note="Description of Artificial Sequence: Synthetic polypeptide"
DIQMTQSPSSLSASVGDRVTITCKASQNVGTAVAWYQQKPGKSPKLLIYSASIRYTGVPSRFSGSGSGTDFTLTISSLQPEDFATYFCQQFRTYPYTFGQGTKVEIK

SEQ ID NO: 22025 - protein, 115 aa, Artificial Sequence
  source: /note="Description of Artificial Sequence: Synthetic polypeptide"
EVQLVESGGGLVQPGGSLRLSCAASRFIFSNYWMNWVRQAPGKGLEWVAQIRLKSDNYATHYAESVKGRFTISRDNSKNTLYLQMNSLRAEDTAVYYCTGGTTYWGQGTLVTVSS

SEQ ID NO: 22026 - protein, 107 aa, Artificial Sequence
  source: /note="Description of Artificial Sequence: Synthetic polypeptide"
DIQMTQSPSSLSASVGDRVTITCKASQNVGTAVAWYQQKPGKAPKLLIYSASIRYTGVPSRFSGSGSGTDFTLTISSLQPEDFATYFCQQFRTYPYTFGQGTKVEIK

SEQ ID NO: 22027 - protein, 115 aa, Artificial Sequence; identical to SEQ ID NO: 22025
  source: /note="Description of Artificial Sequence: Synthetic polypeptide"

SEQ ID NO: 22028 - protein, 107 aa, Artificial Sequence
  source: /note="Description of Artificial Sequence: Synthetic polypeptide"
DIQMTQSPSSLSASVGDRVTITCKASQNVGTAVAWYQQKPGKAPKLLIYSASIRYTGVPSRFSGSGSGTDFTLTISSLQPEDFATYYCQQFRTYPYTFGQGTKVEIK

SEQ ID NO: 22029 - protein, 115 aa, Artificial Sequence
  source: /note="Description of Artificial Sequence: Synthetic polypeptide"
EVQLVESGGGLVQPGGSLRLSCAASRFIFSNYWMNWVRQAPGKGLEWVAQIRLKSDNYATHYAESVKGRFTISRDDSKNTVYLQMNSLRAEDTAVYYCTGGTTYWGQGTLVTVSS

SEQ ID NO: 22030 - protein, 115 aa, Artificial Sequence
  source: /note="Description of Artificial Sequence: Synthetic polypeptide"
EVQLVESGGGLVQPGGSLRLSCAASRFIFSNYWMNWVRQAPGKGLEWVAQIRLKSDNYATHYAESVKGRFTISRDNSKNTVYLQMNSLRAEDTAVYYCTGGTTYWGQGTLVTVSS

SEQ ID NO: 22031 - protein, 115 aa, Artificial Sequence; identical to SEQ ID NO: 22025
  source: /note="Description of Artificial Sequence: Synthetic polypeptide"

SEQ ID NO: 22032 - protein, 115 aa, Artificial Sequence
  source: /note="Description of Artificial Sequence: Synthetic polypeptide"
EVQLVESGGGLVQPGGSLRLSCAASRFIFSNYYMNWVRQAPGKGLEWVAQIRLKSDNYATHYAESVKGRFTISRDDSKNTVYLQMNSLRAEDTAVYYCTGGTTYWGQGTLVTVSS

SEQ ID NO: 22033 - protein, 115 aa, Artificial Sequence
  source: /note="Description of Artificial Sequence: Synthetic polypeptide"
EVQLVESGGGLVQPGGSLRLSCAASRFIFSNYFMNWVRQAPGKGLEWVAQIRLKSDNYATHYAESVKGRFTISRDDSKNTVYLQMNSLRAEDTAVYYCTGGTTYWGQGTLVTVSS

SEQ ID NO: 22034 - protein, 117 aa, Artificial Sequence
  source: /note="Description of Artificial Sequence: Synthetic polypeptide"
EVQLVESGGGLVQPGGSLRLSCAASGLIFRSYGMSWVRQAPGKGLEWVATINSGGTYTYYPDSVKGRFTISRDNSKNTLYLQMNSLRAEDTAVYYCANSYSGAMDYWGQGTLVTVSS

SEQ ID NO: 22035 - protein, 117 aa, Artificial Sequence; identical to SEQ ID NO: 22034
  source: /note="Description of Artificial Sequence: Synthetic polypeptide"

SEQ ID NO: 22036 - protein, 117 aa, Artificial Sequence; identical to SEQ ID NO: 22034
  source: /note="Description of Artificial Sequence: Synthetic polypeptide"

SEQ ID NO: 22037 - protein, 444 aa, Artificial Sequence
  source: /note="Description of Artificial Sequence: Synthetic polypeptide"
EVQLVESGGGLVQPGGSLRLSCAASGLIFRSYGMSWVRQAPGKGLEWVATINSGGTYTYYPDSVKGRFTISRDNSKNTLYLQMNSLRAEDTAVYYCANSYSGAMDYWGQGTLVTVSSASTKGPSVFPLAPCSRSTSESTAALGCLVKDYFPEPVTVSWNSGALTSGVHTFPAVLQSSGLYSLSSVVTVPSSSLGTKTYTCNVDHKPSNTKVDKRVESKYGPPCPPCPAPEFLGGPSVFLFPPKPKDTLYITREPEVTCVVVDVSQEDPEVQFNWYVDGVEVHNAKTKPREEQFNSTYRVVSVLTVLHQDWLNGKEYKCKVSNKGLPSSIEKTISKAKGQPREPQVYTLPPSQEEMTKNQVSLTCLVKGFYPSDIAVEWESNGQPENNYKTTPPVLDSDGSFFLYSRLTVDKSRWQEGNVFSCSVMHEALHNHYTQKSLSLSLGK

SEQ ID NO: 22038 - protein, 443 aa, Artificial Sequence
  source: /note="Description of Artificial Sequence: Synthetic polypeptide"
EVQLVESGGGLVQPGGSLRLSCAASGLIFRSYGMSWVRQAPGKGLEWVATINSGGTYTYYPDSVKGRFTISRDNSKNTLYLQMNSLRAEDTAVYYCANSYSGAMDYWGQGTLVTVSSASTKGPSVFPLAPCSRSTSESTAALGCLVKDYFPEPVTVSWNSGALTSGVHTFPAVLQSSGLYSLSSVVTVPSSSLGTKTYTCNVDHKPSNTKVDKRVESKYGPPCPPCPAPEFLGGPSVFLFPPKPKDTLYITREPEVTCVVVDVSQEDPEVQFNWYVDGVEVHNAKTKPREEQFNSTYRVVSVLTVLHQDWLNGKEYKCKVSNKGLPSSIEKTISKAKGQPREPQVYTLPPSQEEMTKNQVSLTCLVKGFYPSDIAVEWESNGQPENNYKTTPPVLDSDGSFFLYSRLTVDKSRWQEGNVFSCSVMHEALHNHYTQKSLSLSLG

SEQ ID NO: 22039 - protein, 117 aa, Artificial Sequence; identical to SEQ ID NO: 22034
  source: /note="Description of Artificial Sequence: Synthetic polypeptide"

SEQ ID NO: 22040 - protein, 113 aa, Artificial Sequence
  source: /note="Description of Artificial Sequence: Synthetic polypeptide"
EVQLVQSGAEVKKPGASVKVSCKASGYSLTGYTMNWVRQAPGQGLEWIGLISPYNGVTSYNQKFKGRATLTVDKSTSTAYLELSSLRSEDTAVYYCARQGAYWGQGTLVTVSS

SEQ ID NO: 22041 - protein, 113 aa, Artificial Sequence
  source: /note="Description of Artificial Sequence: Synthetic polypeptide"
EVQLVQSGAEVKKPGASVKVSCKASGYSLTGYTMNWVRQAPGQGLEWIGLISPYNGVTSYNQKFKGRVTLTVDKSTSTAYLELSSLRSEDTAVYYCARQGAYWGQGTLVTVSS

SEQ ID NO: 22042 - protein, 113 aa, Artificial Sequence
  source: /note="Description of Artificial Sequence: Synthetic polypeptide"
EVQLVQSGAEVKKPGASVKVSCKASGYSLTGYTMNWVRQAPGQGLEWIGLISPYNGVTSYNQKFKGRATITVDKSTSTAYLELSSLRSEDTAVYYCARQGAYWGQGTLVTVSS

SEQ ID NO: 22043 - protein, 113 aa, Artificial Sequence
  source: /note="Description of Artificial Sequence: Synthetic polypeptide"
EVQLVQSGAEVKKPGASVKVSCKASGYSLTGYTMNWVRQAPGQGLEWIGLISPYNGVTSYNQKFKGRATLTRDKSTSTAYLELSSLRSEDTAVYYCARQGAYWGQGTLVTVSS

SEQ ID NO: 22044 - protein, 113 aa, Artificial Sequence
  source: /note="Description of Artificial Sequence: Synthetic polypeptide"
EVQLVQSGAEVKKPGASVKVSCKASGYSLTGYTMNWVRQAPGQGLEWIGLISPYNGVTSYNQKFKGRATLTVDTSTSTAYLELSSLRSEDTAVYYCARQGAYWGQGTLVTVSS

SEQ ID NO: 22045 - protein, 113 aa, Artificial Sequence
  source: /note="Description of Artificial Sequence: Synthetic polypeptide"
EVQLVQSGAEVKKPGASVKVSCKASGYSLTGYTMNWVRQAPGQGLEWIGLISPYNGVTSYNQKFKGRVTITVDKSTSTAYLELSSLRSEDTAVYYCARQGAYWGQGTLVTVSS

SEQ ID NO: 22046 - protein, 113 aa, Artificial Sequence
  source: /note="Description of Artificial Sequence: Synthetic polypeptide"
EVQLVQSGAEVKKPGASVKVSCKASGYSLTGYTMNWVRQAPGQGLEWIGLISPYNGVTSYNQKFKGRVTITRDKSTSTAYLELSSLRSEDTAVYYCARQGAYWGQGTLVTVSS

SEQ ID NO: 22047 - protein, 113 aa, Artificial Sequence
  source: /note="Description of Artificial Sequence: Synthetic polypeptide"
EVQLVQSGAEVKKPGASVKVSCKASGYSLTGYTMNWVRQAPGQGLEWIGLISPYNGVTSYNQKFKGRVTITVDTSTSTAYLELSSLRSEDTAVYYCARQGAYWGQGTLVTVSS

SEQ ID NO: 22048 - protein, 113 aa, Artificial Sequence; identical to SEQ ID NO: 22040
  source: /note="Description of Artificial Sequence: Synthetic polypeptide"

SEQ ID NO: 22049 - protein, 108 aa, Oryctolagus cuniculus; identical to SEQ ID NO: 4856

SEQ ID NO: 22050 - protein, 442 aa, Artificial Sequence
  source: /note="Description of Artificial Sequence: Synthetic polypeptide"
EVQLVQSGAEVKKPGESLKISCKGSGYTFSNYWIEWVRQMPGKGLEWMGEILPGSDSIKYEKNFKGQVTISADKSISTAYLQWSSLKASDTAMYYCARRGNYVDDWGQGTLVTVSSASTKGPSVFPLAPCSRSTSESTAALGCLVKDYFPEPVTVSWNSGALTSGVHTFPAVLQSSGLYSLSSVVTVPSSSLGTKTYTCNVDHKPSNTKVDKRVESKYGPPCPPCPAPEAAGGPSVFLFPPKPKDTLMISRTPEVTCVVVDVSQEDPEVQFNWYVDGVEVHNAKTKPREEQFNSTYRVVSVLTVLHQDWLNGKEYKCKVSNKGLPSSIEKTISKAKGQPREPQVYTLPPSQEEMTKNQVSLTCLVKGFYPSDIAVEWESNGQPENNYKTTPPVLDSDGSFFLYSRLTVDKSRWQEGNVFSCSVMHEALHNHYTQKSLSLSLG

SEQ ID NO: 22051 - DNA, 1326 bp, Artificial Sequence
  source: /note="Description of Artificial Sequence: Synthetic polynucleotide"
gaggtgcagctggtgcagtctggagcagaggtgaaaaagcccggggagtctctgaagatctcctgtaagggttctggctacacattcagtaactactggatagagtgggtgcgccagatgcccgggaaaggcctggagtggatgggggagattttacctggaagtgatagtattaagtacgaaaagaatttcaagggccaggtcaccatctcagccgacaagtccatcagcaccgcctacctgcagtggagcagcctgaaggcctcggacaccgccatgtattactgtgcgagaagggggaactacgtggacgactggggccagggcaccctggtcaccgtctcctcagcttctaccaagggcccatcggtcttcccgctagcgccctgctccaggagcacctccgagagcacagccgccctgggctgcctggtcaaggactacttccccgaaccggtgacggtgtcgtggaactcaggcgccctgaccagcggcgtgcacaccttcccggctgtcctacagtcctcaggactctactccctcagcagcgtggtgaccgtgccctccagcagcttgggcacgaagacctacacctgcaacgtagatcacaagcccagcaacaccaaggtggacaagagagttgagtccaaatatggtcccccatgcccaccctgcccagcacctgaggccgccgggggaccatcagtcttcctgttccccccaaaacccaaggacactctcatgatctcccggacccctgaggtcacgtgcgtggtggtggacgtgagccaggaagaccccgaggtccagttcaactggtacgtggatggcgtggaggtgcataatgccaagacaaagccgcgggaggagcagttcaacagcacgtaccgtgtggtcagcgtcctcaccgtcctgcaccaggactggctgaacggcaaggagtacaagtgcaaggtctccaacaaaggcctcccgtcctccatcgagaaaaccatctccaaagccaaagggcagccccgagagccacaggtgtacaccctgcccccatcccaggaggagatgaccaagaaccaggtcagcctgacctgcctggtcaaaggcttctaccccagcgacatcgccgtggagtgggaaagcaatgggcagccggagaacaactacaagaccacgcctcccgtgctggactccgacggctccttcttcctctacagcaggctaaccgtggacaagagcaggtggcaggaggggaatgtcttctcatgctccgtgatgcatgaggctctgcacaaccactacacacagaagagcctctccctgtctctgggt

SEQ ID NO: 22052 - protein, 330 aa, Homo sapiens [sequence omitted]

SEQ ID NO: 22053 - protein, 120 aa, Artificial Sequence; identical to SEQ ID NO: 4804
  source: /note="Description of Artificial Sequence: Synthetic polypeptide"

SEQ ID NO: 22054 - protein, 112 aa, Artificial Sequence; identical to SEQ ID NO: 21806
  source: /note="Description of Artificial Sequence: Synthetic polypeptide"

SEQ ID NO: 22055 - protein, 116 aa, Artificial Sequence
  source: /note="Description of Artificial Sequence: Synthetic polypeptide"
EVQLVQSGAEVKKPGESLKISCKGSGYTFSNYWIEWVRQMPGKGLEWMGEILPGSDSIKYEKNFKGQVTISADKSISTAYLQWSSLKASDTAMYYCARRGNYVDDWGQGTLVTVSS

SEQ ID NO: 22056 - protein, 253 aa, Artificial Sequence
  source: /note="Description of Artificial Sequence: Synthetic polypeptide"
MAEVQLVVSGGGLVKPGGSMILSCAASGFTFSNYSMNWVRQAPGKGLEWVSSISSSSEYIYYADFVKGRFTISRDNAKNSLYLQMDSLRAEDTAVYYCAHWPRLWRFPLWGRGTLVTVSSGGGGSGGGGSGGGGSQSVLTQPASVSGSPGQSITISCAGTSSDVGGYNYVSWYQQHPGKAPKLMIYEDSKRPSGVSNRFSGSKSGNTASLTISGLRAEDEADYYCVLNMHWANFGGGTKLAVLGAAAEQKLIS

SEQ ID NO: 22057 - protein, 252 aa, Artificial Sequence
  source: /note="Description of Artificial Sequence: Synthetic polypeptide"
MAEVQLVVSGGGLVKPGGSMILSCAASGFTFSNYSMNWVRQAPGKGLEWVSSISSSSEYIYYADFVKGRFTISRDNAKNSLYLQMDSLRAEDTAVYYCAITGCECTWGRGTLVTVSSGGGGSGGGGSGGGGSQSVLTQPASVSGSPGQSITISCAGTSSDVGGYNYVSWYQQHPGKAPKLMIYEDSKRPSGVSNRFSGSKSGNTASLTISGLRAEDEADYYCSCIRGLKAAYFGGGTKLAVLGAAAEQKLIS

SEQ ID NO: 22058 - protein, 253 aa, Artificial Sequence
  source: /note="Description of Artificial Sequence: Synthetic polypeptide"
MAEVQLVVSGGGLVKPGGSMILSCAASGFTFSNYSMNWVRQAPGKGLEWVSSISSSSEYIYYADFVKGRFTISRDNAKNSLYLQMDSLRAEDTAVYYCAAAVCNGRPDTWGRGTLVTVSSGGGGSGGGGSGGGGSQSVLTQPASVSGSPGQSITISCAGTSSDVGGYNYVSWYQQHPGKAPKLMIYEDSKRPSGVSNRFSGSKSGNTASLTISGLRAEDEADYYCGYSLLPVLFGGGTKLAVLGAAAEQKLIS

SEQ ID NO: 22059 - protein, 252 aa, Artificial Sequence
  source: /note="Description of Artificial Sequence: Synthetic polypeptide"
MAEVQLVVSGGGLVKPGGSMILSCAASGFTFSNYSMNWVRQAPGKGLEWVSSISSSSEYIYYADFVKGRFTISRDNAKNSLYLQMDSLRAEDTAVYYCAWPGYRKAWGRGTLVTVSSGGGGSGGGGSGGGGSQSVLTQPASVSGSPGQSITISCAGTSSDVGGYNYVSWYQQHPGKAPKLMIYEDSKRPSGVSNRFSGSKSGNTASLTISGLRAEDEADYYCSYCASKGHWLFGGGTKLAVLGAAAEQKLIS

SEQ ID NO: 22060 - protein, 254 aa, Artificial Sequence
  source: /note="Description of Artificial Sequence: Synthetic polypeptide"
  MOD_RES (100)..(100): Any amino acid
  MOD_RES (104)..(105): Any amino acid
  MOD_RES (107)..(107): Any amino acid
  MOD_RES (227)..(229): Any amino acid
  MOD_RES (234)..(234): Any amino acid
MAEVQLVVSGGGLVKPGGSMILSCAASGFTFSNYSMNWVRQAPGKGLEWVSSISSSSEYIYYADFVKGRFTISRDNAKNSLYLQMDSLRAEDTAVYYCAXWPCXXRXTWGRGTLVTVSSGGGGSGGGGSGGGGSQSVLTQPASVSGSPGQSITISCKNSSSDVGGYNYVSWYQQHPGKAPKLMIYEDSKRPSGVSNRFSGSKSGNTASLTISGLRAEDEADYYCSCXXXLHWAXFGGGTKLAVLGAAAEQKLIS

SEQ ID NO: 22061 - protein, 107 aa, Homo sapiens [sequence omitted]

SEQ ID NO: 22062 - protein, 106 aa, Homo sapiens; identical to SEQ ID NO: 21873

SEQ ID NO: 22063 - protein, 112 aa, Mus musculus; identical to SEQ ID NO: 5073

SEQ ID NO: 22064 - protein, 107 aa, Artificial Sequence
  source: /note="Description of Artificial Sequence: Synthetic polypeptide"
DIVMTQSQKIMSTSVGDRVSITCKASQNVGTAVAWYQQRPGHSPKLLIYSASRRFSGVPDRFTGSGSGTDFTLTIINVQSEDLADYFCQQFSTYPYTFGVGTKLEIK

SEQ ID NO: 22065 - protein, 112 aa, Artificial Sequence
  source: /note="Description of Artificial Sequence: Synthetic polypeptide"
DVLMTQTPLSLPVSLGDQASISCRSSQSIVHSNGNTYLEWYLQKPGQSPKLLIYKVSNRFSGVPDRFSGSGSGTDFTLKISRVEAEDLGLYYCFQGSHVPWTFGGGTKLEIK

SEQ ID NO: 22066 - protein, 112 aa, Artificial Sequence
  source: /note="Description of Artificial Sequence: Synthetic polypeptide"
DVLMTQTPLSLPVSLGDQASISCRSSQSIVHSNGNTYLEWYLQKPGQSPKLLIYKVSNRFSGVPDRFSGSGSGTDFTLKISRVEAEDLGFYYCFQGSHVPPTFGGGTKLEIK

SEQ ID NO: 22067 - protein, 107 aa, Artificial Sequence
  source: /note="Description of Artificial Sequence: Synthetic polypeptide"
DIVMTQSQKFLSTSVGDRVNITCKASQNVGTAVAWYQQKPGQSPGLLIYSASIRYTGVPDRFTGNGSGTDFTLTISDMQSEDLADYFCQQFRTYPYTFGGGTKLEIK

SEQ ID NO: 22068 - protein, 106 aa, Artificial Sequence
  source: /note="Description of Artificial Sequence: Synthetic polypeptide"
DVLMTQTPLSLPVSLGDQASISCRSSQSIVHSNGNTYLEWYLQKPGQSPKLLIYKVSNRFSGVPDRFSGSGSGTDFTLKISRVEAEDLGVYYCFQGSHVPPAFGGG

SEQ ID NO: 22069 - protein, 112 aa, Artificial Sequence
  source: /note="Description of Artificial Sequence: Synthetic polypeptide"
DVLMTQTPLSLPVSLGDQASISCRSSQSIVHSNGNTYLEWYLQKPGQSPKLLIYKVFNRFSGVPDRFSGSGSGTDFTLKINRVEAEDLGVYYCLQGSHVPYTFGGGTKLEIK

SEQ ID NO: 22070 - protein, 112 aa, Artificial Sequence
  source: /note="Description of Artificial Sequence: Synthetic polypeptide"
DVVMTQTPLSLPVSLGDQASISCRSSQSLVHSNGNTYLHWYLQKPGQSPKLLIYKVFNRFSGVPDRFSGSGSGTDFTLKISRVEAEDLGVYFCSQSTLVPLTFGAGTKLELK

SEQ ID NO: 22071 - protein, 112 aa, Artificial Sequence
  source: /note="Description of Artificial Sequence: Synthetic polypeptide"
DVLMTQTPLSLPVSLGDQASISCRSSQNIVHSNGNTYLEWYLQKPGQSPKLLIYKVSNRFSGVPDKFSGSGSGTDFTLKISRVEAEDLGVYFCFQGSHVPPTFGGGTKLEIK

SEQ ID NO: 22072 - protein, 108 aa, Artificial Sequence
  source: /note="Description of Artificial Sequence: Synthetic polypeptide"
EIVLTQSPGTLSLSPGERATLSCRASQSVSSSYLAWYQQKPGQAPRLLIYGASSRATGIPDRFSGSGSGTDFTLTINRLEPEDFAVYYCQQYGSSPWTFGQGTKVEIK

SEQ ID NO: 22073 - protein, 112 aa, Artificial Sequence
  source: /note="Description of Artificial Sequence: Synthetic polypeptide"
DVLMTQTPLSLPVSLGDQASISCRSSQNIVHSNGNTYLEWYLQKPGQSPKLLIYKVSNRFSGVPDRFSGSGSGTDFTLKISRVEAEDLGIYFCFQGSHVPPTFGGGTKLEIK

SEQ ID NO: 22074 - protein, 112 aa, Artificial Sequence
  source: /note="Description of Artificial Sequence: Synthetic polypeptide"
DVLMTQTPLSLPVSLGDQASISCRSSQSIVHSNGNTYLEWYLQKPGQSPKLLIYKVSNRFSGVPDRFSGSGSGTDFTLKISRVEAEDLGVYYCFQGSLVPWTFGGGTKLEIK

SEQ ID NO: 22075 - protein, 111 aa, Artificial Sequence
  source: /note="Description of Artificial Sequence: Synthetic polypeptide"
DIVLTQSPASLAVSLGQRATISCRASQSVSTSSYSYMHWFQQKPGQPPKLLIKYASNLESGVPARFSGSGSGTDFTLNIHPVEEEDTATYYCQHSWELPWTFGGGTKLEIK

SEQ ID NO: 22076 - protein, 112 aa, Artificial Sequence; identical to SEQ ID NO: 22073
  source: /note="Description of Artificial Sequence: Synthetic polypeptide"

SEQ ID NO: 22077 - protein, 112 aa, Artificial Sequence
  source: /note="Description of Artificial Sequence: Synthetic polypeptide"
DVVMTQTPLTLSVTIGQPASISCKSSQSLLDSDGKTYLNWLLRRPGQSPKRLIYLVSKLDSGVPDRFTGSGSGTDFTLKISRVEAEDLGVYYCWQGTHFPWTFGGGTKLEIK

SEQ ID NO: 22078 - protein, 112 aa, Artificial Sequence; identical to SEQ ID NO: 22077
  source: /note="Description of Artificial Sequence: Synthetic polypeptide"

SEQ ID NO: 22079 - protein, 107 aa, Artificial Sequence
  source: /note="Description of Artificial Sequence: Synthetic polypeptide"
EIVLTQSPATLSLSPGERATLSCRASQSVSSYLAWYQQKPGQAPRLLIYDASNRATGIPARFSGSGSGTDFTLTISSLEPEDFAVYYCLQRRTWPPTFGQGTKVEIK

SEQ ID NO: 22080 - protein, 112 aa, Artificial Sequence
  source: /note="Description of Artificial Sequence: Synthetic polypeptide"
DVVMTQTPLSLPVSLGDQASISCRSSQSLVHANGNTYLHWFLQKPGLSPKLLIYKVSNRFSGVPDRFSGGGSGTDFTLKITRLEAEDLGVYFCSQSTHVPFTFGSGTKLEIK

SEQ ID NO: 22081 - protein, 112 aa, Artificial Sequence
  source: /note="Description of Artificial Sequence: Synthetic polypeptide"
DDLLTQTPLSLPVSLGDPASISCRSSQSIVHSNGNTYFEWYLQKPGQSPKLLIYKVSNRFSGVPDRFSGSGSGTDFTLKISRVEAEDLGVYYCFQGSLVPWTFGGGTKLEIK

SEQ ID NO: 22082 - protein, 112 aa, Artificial Sequence
  source: /note="Description of Artificial Sequence: Synthetic polypeptide"
EDLLTQTPLSLPVSLGDPASISCRSSQSIVHSNGNTYFEWYLQKPGQSPKLLIYKVSNRFSGVPDRFSGSGSGTDFTLKISRVEAEDLGVYYCFQGSLVPWTFGGGTKLEIK

SEQ ID NO: 22083 - protein, 112 aa, Artificial Sequence
  source: /note="Description of Artificial Sequence: Synthetic polypeptide"
DVLMTQTPLSLPVSLGDQASISCRSSQNIVHSNGNTYLEWYLQKPGQSPKLLIYKVSNRFSGVPDRFSGSGSGTDFTLKISRVEAEDLGVYYCFQGTLVPWTFGGGTKLEIK

SEQ ID NO: 22084 - protein, 110 aa, Mus musculus
ENVLTQSPAIMAASLGQKVTMTCSADSSVSSSYLNWYQQKSGASPKPLIHRTSNLASGVPARFSGSGSGTSYSLTISSVEAEDDATYYCQQWSGYPFIFTFGSGTKLEIK

SEQ ID NO: 22085 - protein, 109 aa, Artificial Sequence
  source: /note="Description of Artificial Sequence: Synthetic polypeptide"
QAVVTQESALTTSPGETVTLTCRSSTGAVTTSNFANWVQEKPDHLFTGLIGGTNNRAPGVPARFSGSLIGDKAALTITGAQTEDEAIYFCALWYSNLWVFGGGTKLTVL

SEQ ID NO: 22086 - protein, 112 aa, Artificial Sequence
  source: /note="Description of Artificial Sequence: Synthetic polypeptide"
DTVMTQSPLSLPVSLGDQASISCRSSQSIVHSNGNTYLEWYLQKPGQSPKLLIYTVSNRFSGVPDRFSGSGSGTDFTLKISRVEAEDLGVYYCFQGSHVPWTFGGGTKLEIK

SEQ ID NO: 22087 - protein, 108 aa, Artificial Sequence
  source: /note="Description of Artificial Sequence: Synthetic polypeptide"
ELVLTQSPTTMAASPGKKITITCSASSSISSNYLHWYQQKPGFSPKLLIYRTSNLASGVPARFSGSGSGTSYSLTIGTMEAEDVATYYCQQGSSLPFTFGSGTKLEIK

SEQ ID NO: 22088 - protein, 113 aa, Artificial Sequence
  source: /note="Description of Artificial Sequence: Synthetic polypeptide"
DIVMTQSPSSLAMSVGQKVTMSCKSSQSLLNSSTQKNYLAWYQQKPGQSPKLLVYFASTRESGVPDRFIGSGSGTDFTLTISSVQAEDLADYFCQQHYSTPYTFGGGTKLEIK

SEQ ID NO: 22089 - protein, 112 aa, Artificial Sequence; identical to SEQ ID NO: 4569
  source: /note="Description of Artificial Sequence: Synthetic polypeptide"

SEQ ID NO: 22090 - protein, 112 aa, Artificial Sequence
  source: /note="Description of Artificial Sequence: Synthetic polypeptide"
DVVMSQTPLSLPVSLGDHASISCRSSQNLVHSDGNTYLHWYLQKPGQSPKLLIYKVSNRFSGVPDRFSGSGSGTDFTLKISRVEAEDLGVYFCSQSTHVIFTFGSGTKLEIK

SEQ ID NO: 22091 - protein, 112 aa, Artificial Sequence
  source: /note="Description of Artificial Sequence: Synthetic polypeptide"
NIMMTQSPSSLAVSAGEKVTMSCKSSQSVFYSSEQRNYLAWYQQKPGQSPKLLISWASTRESGVPDRFTGSGSGTDFTLTISSVQGEDLAVYYCHQYLSSFTFGSGTKLEIK

SEQ ID NO: 22092 - protein, 112 aa, Artificial Sequence
  source: /note="Description of Artificial Sequence: Synthetic polypeptide"
DVVMTQTPLTLSVTIGQPASISCKSSQSLLDSDGKTYLNWLLQRPGQSPRRLIYLVSKLDSGVPDRFTGSGSGTDFTLKISRVAAEDLGVYYCWQGTHFPRTFGGGTKLEIK

SEQ ID NO: 22093 - protein, 112 aa, Artificial Sequence
  source: /note="Description of Artificial Sequence: Synthetic polypeptide"
DVVMTQTPLTLSVTIGQPASISCKSSQSLLDSDGKTYLNWLLQRPGQSPKRLIYLVSKLDSGVPDRFTGSGSGTDFTLKISRVEAEDLGVYYCWQGTHFPWTFGGGTKLEIK

SEQ ID NO: 22094 - DNA, 2067 bp, Artificial Sequence
  source: /note="Description of Artificial Sequence: Synthetic polynucleotide"
aagcttgccgccaccatgggatggagctgtatcatcctcttcttggtagcaacagctacaggtaaggggctcacagtagcaggcttgaggtctggacatatatatgggtgacaatgacatccactttgcctttctctccacaggtgtccactccgatatcgtgatgacccaaactccactctccctgcctgtcacccctggagagcccgcctccatctcttgcagatctagtcagaggcttgtgcacagtcatggaaaaacctatctgcattggtacctgcagaagccaggccagtctccacagctcctgatctacaaagtttccaaccggttttctggggtcccagacaggttcagtggcagtggatcagggacagatttcacactcaagatcagcagagtggaggctgaggatgtgggagtttatttctgttctcaaactgcacattttccctacaccttcggaggggggaccaaggtggaaatcaaacgtgagtagaatttaaactttgcttcctcagttggatccactagtccagtgtggtggaattctaaactctgagggggtcggatgacgtggccattctttgcctaaagcattgagtttactgcaaggtcagaaaagcatgcaaagccctcagaatggctgcaaagagctccaacaaaacaatttagaactttattaaggaatagggggaagctaggaagaaactcaaaacatcaagattttaaatacgcttcttggtctccttgctataattatctgggataagcatgctgttttctgtctgtccctaacatgccctgtgattatccgcaaacaacacacccaagggcagaactttgttacttaaacaccatcctgtttgcttctttcctcaggaactgtggctgcaccatctgtcttcatcttcccgccatctgatgagcagttgaaatctggaactgcctctgttgtgtgcctgctgaataacttctatcccagagaggccaaagtacagtggaaggtggataacgccctccaatcgggtaactcccaggagagtgtcacagagcaggacagcaaggacagcacctacagcctcagcagcaccctgacgctgagcaaagcagactacgagaaacacaaagtctacgcctgcgaagtcacccatcagggcctgagctcgcccgtcacaaagagcttcaacaggggagagtgttagagggagaagtgcccccacctgctcctcagttccagcctgaccccctcccatcctttggcctctgaccctttttccacaggggacctacccctattgcggtcctccagctcatctttcacctcacccccctcctcctccttggctttaattatgctaatgttggaggagaatgaataaataaagtgaatctttgcacctgtggtttctctctttcctcatttaataattattatctgttgttttaccaactactcaatttctcttataagggactaaatatgtagtcatcctaaggcgcataaccatttataaaaatcatccttcattctattttaccctatcatcctctgcaagacagtcctccctcaaacccacaagccttctgtcctcacagtcccctgggccatggtaggagagacttgcttccttgttttcccctcctcagcaagccctcatagtcctttttaagggtgacaggtcttacagtcatatatcctttgattcaattccctgagaatcaaccaaagcaaatttttcaaaagaagaaacctgctataaagagaatcattcattgcaacatgatataaaataacaacacaataaaagcaattaaataaacaaacaatagggaaatgtttaagttcatcatggtacttagacttaatggaatgtcatgccttatttacatttttaaacaggtactgagggactcctgtctgccaagggccgtattgagtactttccacaacctaatttaatccacactatactgtgagattaaaaacattcattaaaatgttgcaaaggttctataaagctgagagacaaatatattctataactcagcaatcccacttctaga

SEQ ID NO: 22095 - protein, 107 aa, Artificial Sequence; identical to SEQ ID NO: 22024
  source: /note="Description of Artificial Sequence: Synthetic polypeptide"

SEQ ID NO: 22096 - protein, 107 aa, Artificial Sequence; identical to SEQ ID NO: 22026
  source: /note="Description of Artificial Sequence: Synthetic polypeptide"

SEQ ID NO: 22097 - protein, 107 aa, Artificial Sequence
  source: /note="Description of Artificial Sequence: Synthetic polypeptide"
DIQMTQSPSSLSASVGDRVTITCKASQNVGTAVAWYQQKPGKSPKLLIYSASIRYTGVPSRFSGSGSGTDFTLTISSLQPEDFATYYCQQFRTYPYTFGQGTKVEIK

SEQ ID NO: 22098 - protein, 107 aa, Artificial Sequence; identical to SEQ ID NO: 22028
  source: /note="Description of Artificial Sequence: Synthetic polypeptide"

SEQ ID NO: 22099 - protein, 112 aa, Artificial Sequence
  source: /note="Description of Artificial Sequence: Synthetic polypeptide"
EDQLTQSPSSLSASVGDRVTITCRSSQSIVHSNGNTYLEWYQQKPGKSPKLLIYKVSNRFSGVPSRFSGSGSGTDFTLTISSLQPEDFATYYCFQGSLVPWTFGQGTKVEIK

SEQ ID NO: 22100 - protein, 112 aa, Artificial Sequence
  source: /note="Description of Artificial Sequence: Synthetic polypeptide"
EDQLTQSPSSLSASVGDRVTITCRSSQSIVHSNTNTYFEWYQQKPGKSPKLLIYKVSNRFSGVPSRFSGSGSGTDFTLTISSLQPEDFATYYCFQGSLVPWTFGQGTKVEIK

SEQ ID NO: 22101 - protein, 112 aa, Artificial Sequence
  source: /note="Description of Artificial Sequence: Synthetic polypeptide"
EDQLTQSPSSLSASVGDRVTITCRSSQSIVHSNGQTYFEWYQQKPGKSPKLLIYKVSNRFSGVPSRFSGSGSGTDFTLTISSLQPEDFATYYCFQGSLVPWTFGQGTKVEIK

SEQ ID NO: 22102 - protein, 112 aa, Artificial Sequence
  source: /note="Description of Artificial Sequence: Synthetic polypeptide"
EDQLTQSPSSLSASVGDRVTITCRSSQSIVHSNGNTYFEWYQQKPGKSPKLLIYKVSNRFSGVPSRFSGSGSGTDFTLTISSLQPEDFATYYCFQGSLVPWTFGQGTKVEIK

SEQ ID NO: 22103 - protein, 112 aa, Artificial Sequence
  source: /note="Description of Artificial Sequence: Synthetic polypeptide"
DDVLTQTPLSLPVTPGQPASISCRSSQSIVHSNGNTYLEWYLQKPGQSPQLLIYKVSNRFSGVPDRFSGSGSGTDFTLKISRVEAEDVGVYYCFQGSLVPWTFGQGTKVEIK

SEQ ID NO: 22104 - protein, 219 aa, Artificial Sequence
  source: /note="Description of Artificial Sequence: Synthetic polypeptide"
DDVLTQTPLSLPVTPGQPASISCRSSQSIVHSNGNTYLEWYLQKPGQSPQLLIYKVSNRFSGVPDRFSGSGSGTDFTLKISRVEAEDVGVYYCFQGSLVPWTFGQGTKVEIKRTVAAPSVFIFPPSDEQLKSGTASVVCLLNNFYPREAKVQWKVDNALQSGNSQESVTEQDSKDSTYSLSSTLTLSKADYEKHKVYACEVTHQGLSSPVTKSFNRGEC

SEQ ID NO: 22105 - protein, 112 aa, Artificial Sequence
  source: /note="Description of Artificial Sequence: Synthetic polypeptide"
EDVLTQTPLSLPVTPGQPASISCRSSQSIVHSNGNTYFEWYLQKPGQSPQLLIYKVSNRFSGVPDRFSGSGSGTDFTLKISRVEAEDVGVYYCFQGSLVPWTFGQGTKVEIK

SEQ ID NO: 22106 - protein, 112 aa, Artificial Sequence
  source: /note="Description of Artificial Sequence: Synthetic polypeptide"
DVVMTQTPLSLPVTPGQPASISCKSSQSLLDSDGKTYLNWLLQKPGQSPQLLIYLVSKLDSGVPDRFSGSGSGTDFTLKISRVEAEDVGVYYCWQGTHFPWTFGQGTKVEIK

SEQ ID NO: 22107 - protein, 112 aa, Artificial Sequence
  source: /note="Description of Artificial Sequence: Synthetic polypeptide"
DVVMTQTPLSLPVTPGQPASISCKSSQSLLDSDGKTYLNWYLQKPGQSPQRLIYLVSKLDSGVPDRFSGSGSGTDFTLKISRVEAEDVGVYYCWQGTHFPWTFGQGTKVEIK

SEQ ID NO: 22108 - protein, 112 aa, Artificial Sequence
  source: /note="Description of Artificial Sequence: Synthetic polypeptide"
DVVMTQTPLSLPVTPGQPASISCKSSQSLLDSDGKTYLNWYLQKPGQSPQLLIYLVSKLDSGVPDRFSGSGSGTDFTLKISRVEAEDVGVYYCWQGTHFPWTFGQGTKVEIK

SEQ ID NO: 22109 - protein, 112 aa, Artificial Sequence
  source: /note="Description of Artificial Sequence: Synthetic polypeptide"
DIVMTQTPLSLPVTPGQPASISCKSSQSLLDSDGKTYLNWLLQKPGQSPQRLIYLVSKLDSGVPDRFSGSGSGTDFTLKISRVEAEDVGVYYCWQGTHFPWTFGQGTKVEIK

SEQ ID NO: 22110 - protein, 112 aa, Artificial Sequence
  source: /note="Description of Artificial Sequence: Synthetic polypeptide"
DIVMTQTPLSLPVTPGQPASISCKSSQSLLDSDGKTYLNWLLQKPGQSPQLLIYLVSKLDSGVPDRFSGSGSGTDFTLKISRVEAEDVGVYYCWQGTHFPWTFGQGTKVEIK

SEQ ID NO: 22111 - protein, 112 aa, Artificial Sequence
  source: /note="Description of Artificial Sequence: Synthetic polypeptide"
DIVMTQTPLSLPVTPGQPASISCKSSQSLLDSDGKTYLNWYLQKPGQSPQRLIYLVSKLDSGVPDRFSGSGSGTDFTLKISRVEAEDVGVYYCWQGTHFPWTFGQGTKVEIK

SEQ ID NO: 22112 - protein, 112 aa, Artificial Sequence
  source: /note="Description of Artificial Sequence: Synthetic polypeptide"
DIVMTQTPLSLPVTPGQPASISCKSSQSLLDSDGKTYLNWYLQKPGQSPQLLIYLVSKLDSGVPDRFSGSGSGTDFTLKISRVEAEDVGVYYCWQGTHFPWTFGQGTKVEIK

SEQ ID NO: 22113 - protein, 112 aa, Artificial Sequence
  source: /note="Description of Artificial Sequence: Synthetic polypeptide"
DVVMTQTPLSLPVTPGQPASISCKSSQSLLDSDGKTYLNWLLQKPGQSPQRLIYLVSKLDSGVPDRFSGSGSGTDFTLKISRVEAEDVGVYYCWQGTHFPWTFGQGTKVEIK

SEQ ID NO: 22114 - protein, 112 aa, Artificial Sequence; identical to SEQ ID NO: 22109
  source: /note="Description of Artificial Sequence: Synthetic polypeptide"

SEQ ID NO: 22115 - protein, 112 aa, Oryctolagus cuniculus; identical to SEQ ID NO: 21876

SEQ ID NO: 22116 - protein, 219 aa, Artificial Sequence
  source: /note="Description of Artificial Sequence: Synthetic polypeptide"
EIVLTQSPGTLSLSPGERATLSCRSSQSLVHSNQNTYLHWYQQKPGQAPRLLIYKVDNRFSGIPDRFSGSGSGTDFTLTISRLEPEDFAVYYCSQSTLVPLTFGGGTKVEIKRTVAAPSVFIFPPSDEQLKSGTASVVCLLNNFYPREAKVQWKVDNALQSGNSQESVTEQDSKDSTYSLSSTLTLSKADYEKHKVYACEVTHQGLSSPVTKSFNRGEC

SEQ ID NO: 22117 - DNA, 657 bp, Artificial Sequence
  source: /note="Description of Artificial Sequence: Synthetic polynucleotide"
gaaattgtgttgacgcagtctccaggcaccctgtctttgtctccaggggaaagagccaccctctcctgcagatctagtcagagccttgtacacagtaatcagaacacctatttacattggtaccagcagaaacctggccaggctcccaggctcctcatctataaagttgacaaccgattttctggcatcccagacaggttcagtggcagtgggtctgggacagacttcactctcaccatcagcagactggagcctgaagattttgcagtgtattactgttctcaaagtacactggttccgctcacgttcggcggagggaccaaggtggagatcaaacggaccgtggctgcaccatctgtcttcatcttcccgccatctgatgagcagttgaaatctggaactgcctctgttgtgtgcctgctgaataacttctatcccagagaggccaaagtacagtggaaggtggataacgccctccaatcgggtaactcccaggagagtgtcacagagcaggacagcaaggacagcacctacagcctcagcagcaccctgacgctgagcaaagcagactacgagaaacacaaagtctacgcctgcgaagtcacccatcagggcctgagctcgcccgtcacaaagagcttcaacaggggagagtgc

SEQ ID NO: 22118 - protein, 107 aa, Homo sapiens; identical to SEQ ID NO: 5307

SEQ ID NO: 22119 - DNA, 2067 bp, Artificial Sequence
  source: /note="Description of Artificial Sequence: Synthetic polynucleotide"
aagcttgccgccaccatgggatggagctgtatcatcctcttcttggtagcaacagctacaggtaaggggctcacagtagcaggcttgaggtctggacatatatatgggtgacaatgacatccactttgcctttctctccacaggtgtccactccgatatcgtgatgacccaaactccactctccctgcctgtcacccctggagagcccgcctccatctcttgcagatctagtcagagccttgtgcacagtcatggaaaaacctatctgcattggtacctgcagaagccaggccagtctccacagctcctgatctacaaagtttccaaccggttttctggggtcccagacaggttcagtggcagtggatcagggacagatttcacactcaagatcagcagagtggaggctgaggatgtgggagtttatttctgttctcaaactgcacattttccctacaccttcggaggggggaccaaggtggaaatcaaacgtgagtagaatttaaactttgcttcctcagttggatccactagtccagtgtggtggaattctaaactctgagggggtcggatgacgtggccattctttgcctaaagcattgagtttactgcaaggtcagaaaagcatgcaaagccctcagaatggctgcaaagagctccaacaaaacaatttagaactttattaaggaatagggggaagctaggaagaaactcaaaacatcaagattttaaatacgcttcttggtctccttgctataattatctgggataagcatgctgttttctgtctgtccctaacatgccctgtgattatccgcaaacaacacacccaagggcagaactttgttacttaaacaccatcctgtttgcttctttcctcaggaactgtggctgcaccatctgtcttcatcttcccgccatctgatgagcagttgaaatctggaactgcctctgttgtgtgcctgctgaataacttctatcccagagaggccaaagtacagtggaaggtggataacgccctccaatcgggtaactcccaggagagtgtcacagagcaggacagcaaggacagcacctacagcctcagcagcaccctgacgctgagcaaagcagactacgagaaacacaaagtctacgcctgcgaagtcacccatcagggcctgagctcgcccgtcacaaagagcttcaacaggggagagtgttagagggagaagtgcccccacctgctcctcagttccagcctgaccccctcccatcctttggcctctgaccctttttccacaggggacctacccctattgcggtcctccagctcatctttcacctcacccccctcctcctccttggctttaattatgctaatgttggaggagaatgaataaataaagtgaatctttgcacctgtggtttctctctttcctcatttaataattattatctgttgttttaccaactactcaatttctcttataagggactaaatatgtagtcatcctaaggcgcataaccatttataaaaatcatccttcattctattttaccctatcatcctctgcaagacagtcctccctcaaacccacaagccttctgtcctcacagtcccctgggccatggtaggagagacttgcttccttgttttcccctcctcagcaagccctcatagtcctttttaagggtgacaggtcttacagtcatatatcctttgattcaattccctgagaatcaaccaaagcaaatttttcaaaagaagaaacctgctataaagagaatcattcattgcaacatgatataaaataacaacacaataaaagcaattaaataaacaaacaatagggaaatgtttaagttcatcatggtacttagacttaatggaatgtcatgccttatttacatttttaaacaggtactgagggactcctgtctgccaagggccgtattgagtactttccacaacctaatttaatccacactatactgtgagattaaaaacattcattaaaatgttgcaaaggttctataaagctgagagacaaatatattctataactcagcaatcccacttctaga

SEQ ID NO: 22120 - protein, 112 aa, Artificial Sequence; identical to SEQ ID NO: 5310
  source: /note="Description of Artificial Sequence: Synthetic polypeptide"

SEQ ID NO: 22121 - protein, 112 aa, Artificial Sequence
  source: /note="Description of Artificial Sequence: Synthetic polypeptide"
EIVLTQSPGTLSLSPGERATLSCRSSQSLVHSNQNTYLHWYQQKPGQAPRLLIYKVDNRFSGIPDRFSGSGSGTDFTLTISRLEPEDFAVYYCSQSTLVPLTFGGGTKVEIK

SEQ ID NO: 22122 - protein, 119 aa, Artificial Sequence
  source: /note="Description of Artificial Sequence: Synthetic polypeptide"
QVKLEESGGGLVQPGGSLRLSCAASGFTFSNFAMTWVRQSPGKGLEWVSAIDNDGGRTSYSDSVKGRFTISRDNAKNTLYLQMNSLKPEDTAMYYCAAMNLATRKWELWGQGTQVTVSS

SEQ ID NO: 22123 - protein, 119 aa, Artificial Sequence
  source: /note="Description of Artificial Sequence: Synthetic polypeptide"
QVQLVESGGGLVQPGGSLKLSCAASGFTGDHYAMSWVRQAPGKGLEWVSTIYSYSPNTYYVDSVKDRFTISLDNAKNTLYLQMNSLKPEDTAVYYCAADLEVAEYYAYWGQGTQVTVSS

SEQ ID NO: 22124 - protein, 117 aa, Oryctolagus cuniculus
  MOD_RES (100)..(100): Any amino acid
QSLEESGGRLVTPGTPLTLTCTVSGIDLSTWRMNWVRQAPGKGLEWIGIIGTGGRTYYANWAKGRFTISKTSTTVDLKVTSPTTEDTATYFCARLGANNXGYPLDLWGPGTLVTVSS

SEQ ID NO: 22125 - protein, 118 aa, Artificial Sequence
  source: /note="Description of Artificial Sequence: Synthetic polypeptide"
QVQLKESGPGLVAPSQSLSITCTVSGIDLSTWRMNWVRQPPGKGLEWIGIIGTGGRTYYANWAKGRFSISKDSTQVFLKMNSLQTEDTATYFCARLGANNNGYPLDLWGAGTTVTVSS

SEQ ID NO: 22126 - protein, 120 aa, Artificial Sequence
  source: /note="Description of Artificial Sequence: Synthetic polypeptide"
ELQLQESGPGLVKPSETLSLTCTVSGIDLSTWRMNWIRQPPGKGLEWIGIIGTGGRTYYANWAKGRVTISKDTSKNQVSLKLSSVTAADTAVYYCARLGANNQGYPLDLWGQGTLVTVSS

SEQ ID NO: 22127 - protein, 120 aa, Artificial Sequence
  source: /note="Description of Artificial Sequence: Synthetic polypeptide"
ELQLQESGPGLVKPSETLSLTCTVSGIDLSTWRMNWIRQPPGKGLEWIGIIGTGGRTYYANWAKGRVTISKDTSKNQVSLKLSSVTAADTAVYYCARLGANNAGYPLDLWGQGTLVTVSS

SEQ ID NO: 22128 - protein, 120 aa, Artificial Sequence
  source: /note="Description of Artificial Sequence: Synthetic polypeptide"
  MOD_RES (103)..(103): Any amino acid
ELQLQESGPGLVKPSETLSLTCTVSGIDLSTWRMNWIRQPPGKGLEWIGIIGTGGRTYYANWAKGRVTISKDTSKNQVSLKLSSVTAADTAVYYCARLGANNXGYPLDLWGQGTLVTVSS

SEQ ID NO: 22129 - protein, 447 aa, Artificial Sequence
  source: /note="Description of Artificial Sequence: Synthetic polypeptide"
ELQLQESGPGLVKPSETLSLTCTVSGIDLSTWRMNWIRQPPGKGLEWIGIIGTGGRTYYANWAKGRVTISKDTSKNQVSLKLSSVTAADTAVYYCARLGANNQGYPLDLWGQGTLVTVSSASTKGPSVFPLAPCSRSTSESTAALGCLVKDYFPEPVTVSWNSGALTSGVHTFPAVLQSSGLYSLSSVVTVPSSSLGTKTYTCNVDHKPSNTKVDKRVESKYGPPCPPCPAPEFLGGPSVFLFPPKPKDTLMISRTPEVTCVVVDVSQEDPEVQFNWYVDGVEVHNAKTKPREEQFNSTYRVVSVLTVLHQDWLNGKEYKCKVSNKGLPSSIEKTISKAKGQPREPQVYTLPPSQEEMTKNQVSLTCLVKGFYPSDIAVEWESNGQPENNYKTTPPVLDSDGSFFLYSRLTVDKSRWQEGNVFSCSVMHEALHNHYTQKSLSLSLGK

SEQ ID NO: 22130 - protein, 447 aa, Artificial Sequence
  source: /note="Description of Artificial Sequence: Synthetic polypeptide"
ELQLQESGPGLVKPSETLSLTCTVSGIDLSTWRMNWIRQPPGKGLEWIGIIGTGGRTYYANWAKGRVTISKDTSKNQVSLKLSSVTAADTAVYYCARLGANNAGYPLDLWGQGTLVTVSSASTKGPSVFPLAPCSRSTSESTAALGCLVKDYFPEPVTVSWNSGALTSGVHTFPAVLQSSGLYSLSSVVTVPSSSLGTKTYTCNVDHKPSNTKVDKRVESKYGPPCPPCPAPEFLGGPSVFLFPPKPKDTLMISRTPEVTCVVVDVSQEDPEVQFNWYVDGVEVHNAKTKPREEQFNSTYRVVSVLTVLHQDWLNGKEYKCKVSNKGLPSSIEKTISKAKGQPREPQVYTLPPSQEEMTKNQVSLTCLVKGFYPSDIAVEWESNGQPENNYKTTPPVLDSDGSFFLYSRLTVDKSRWQEGNVFSCSVMHEALHNHYTQKSLSLSLGK

SEQ ID NO: 22131 - protein, 447 aa, Artificial Sequence
  source: /note="Description of Artificial Sequence: Synthetic polypeptide"
  MOD_RES (103)..(103): Any amino acid
ELQLQESGPGLVKPSETLSLTCTVSGIDLSTWRMNWIRQPPGKGLEWIGIIGTGGRTYYANWAKGRVTISKDTSKNQVSLKLSSVTAADTAVYYCARLGANNXGYPLDLWGQGTLVTVSSASTKGPSVFPLAPCSRSTSESTAALGCLVKDYFPEPVTVSWNSGALTSGVHTFPAVLQSSGLYSLSSVVTVPSSSLGTKTYTCNVDHKPSNTKVDKRVESKYGPPCPPCPAPEFLGGPSVFLFPPKPKDTLMISRTPEVTCVVVDVSQEDPEVQFNWYVDGVEVHNAKTKPREEQFNSTYRVVSVLTVLHQDWLNGKEYKCKVSNKGLPSSIEKTISKAKGQPREPQVYTLPPSQEEMTKNQVSLTCLVKGFYPSDIAVEWESNGQPENNYKTTPPVLDSDGSFFLYSRLTVDKSRWQEGNVFSCSVMHEALHNHYTQKSLSLSLGK

SEQ ID NO: 22132 - protein, 448 aa, Artificial Sequence
  source: /note="Description of Artificial Sequence: Synthetic polypeptide"
ELQLQESGPGLVKPSETLSLTCTVSGIDLSTWRMNWIRQPPGKGLEWIGIIGTGGRTYYANWAKGRVTISKDTSKNQVSLKLSSVTAADTAVYYCARLGANNQGYPLDLWGQGTLVTVSSASTKGPSVFPLAPSSKSTSGGTAALGCLVKDYFPEPVTVSWNSGALTSGVHTFPAVLQSSGLYSLSSVVTVPSSSLGTQTYICNVNHKPSNTKVDKKVEPKSCDKTHTCPPCPAPELLGGPSVFLFPPKPKDTLMISRTPEVTCVVVDVSHEDPEVKFNWYVDGVEVHNAKTKPREEQYNSTYRVVSVLTVLHQDWLNGKEYKCKVSNKALPAPIEKTISKAKGQPREPQVYTLPPSRDELTKNQVSLTCLVKGFYPSDIAVEWESNGQPENNYKTTPPVLDSDGSFFLYSKLTVDKSRWQQGNVFSCSVMHEALHNHYTQKSLSLSP

SEQ ID NO: 22133 - protein, 448 aa, Artificial Sequence
  source: /note="Description of Artificial Sequence: Synthetic polypeptide"
ELQLQESGPGLVKPSETLSLTCTVSGIDLSTWRMNWIRQPPGKGLEWIGIIGTGGRTYYANWAKGRVTISKDTSKNQVSLKLSSVTAADTAVYYCARLGANNAGYPLDLWGQGTLVTVSSASTKGPSVFPLAPSSKSTSGGTAALGCLVKDYFPEPVTVSWNSGALTSGVHTFPAVLQSSGLYSLSSVVTVPSSSLGTQTYICNVNHKPSNTKVDKKVEPKSCDKTHTCPPCPAPELLGGPSVFLFPPKPKDTLMISRTPEVTCVVVDVSHEDPEVKFNWYVDGVEVHNAKTKPREEQYNSTYRVVSVLTVLHQDWLNGKEYKCKVSNKALPAPIEKTISKAKGQPREPQVYTLPPSRDELTKNQVSLTCLVKGFYPSDIAVEWESNGQPENNYKTTPPVLDSDGSFFLYSKLTVDKSRWQQGNVFSCSVMHEALHNHYTQKSLSLSP

SEQ ID NO: 22134 - protein, 450 aa, Artificial Sequence
  source: /note="Description of Artificial Sequence: Synthetic polypeptide"
  MOD_RES (103)..(103): Any amino acid
ELQLQESGPGLVKPSETLSLTCTVSGIDLSTWRMNWIRQPPGKGLEWIGIIGTGGRTYYANWAKGRVTISKDTSKNQVSLKLSSVTAADTAVYYCARLGANNXGYPLDLWGQGTLVTVSSASTKGPSVFPLAPSSKSTSGGTAALGCLVKDYFPEPVTVSWNSGALTSGVHTFPAVLQSSGLYSLSSVVTVPSSSLGTQTYICNVNHKPSNTKVDKKVEPKSCDKTHTCPPCPAPELLGGPSVFLFPPKPKDTLMISRTPEVTCVVVDVSHEDPEVKFNWYVDGVEVHNAKTKPREEQYNSTYRVVSVLTVLHQDWLNGKEYKCKVSNKALPAPIEKTISKAKGQPREPQVYTLPPSRDELTKNQVSLTCLVKGFYPSDIAVEWESNGQPENNYKTTPPVLDSDGSFFLYSKLTVDKSRWQQGNVFSCSVMHEALHNHYTQKSLSLSPGK

SEQ ID NO: 22135 - DNA, 351 bp, Oryctolagus cuniculus
cagtcgctggaggagtccgggggtcgcctggtcacgcctgggacacccctgacactcacctgcacagtctctggaatcgacctcagtacttggagaatgaactgggtccgccaggctccagggaaggggctggaatggatcggaatcattggtactggtggtagaacatactacgcgaactgggcaaaaggccgattcaccatctccaaaacctcgaccacggtggatctgaaggtcaccagtccgacaaccgaggacacggccacctatttctgtgccagattgggtgctaataataatggttatcctttggacttgtggggcccggggaccctggtcaccgtctcgagt

SEQ ID NO: 22136 - protein, 439 aa, Artificial Sequence
  source: /note="Description of Artificial Sequence: Synthetic polypeptide"
QVQLQQSDAELVKPGASVKISCKASGYTFTDRTIHWVKQRPEQGLEWIGYIYPGDGSTKYNENFKGKATLTADKSSSTAYMQLNSLTSEDSAVYFCARRGAMDYWGQGTSVTVSSAKTTPPSVYPLAPGSAAQTNSMVTLGCLVKGYFPEPVTVTWNSGSLSSGVHTFPAVLQSDLYTLSSSVTVPSSTWPSETVTCNVAHPASSTKVDKKIVPRDCGCKPCICTVPEVSSVFIFPPKPKDVLTITLTPKVTCVVVDISKDDPEVQFSWFVDDVEVHTAQTQPREEQFNSTFRSVSELPIMHQDWLNGKEFKCRVNSAAFPAPIEKTISKTKGRPKAPQVYTIPPPKEQMAKDKVSLTCMITDFFPEDITVEWQWNGQPAENYKNTQPIMDTDGSYFVYSKLNVQKSNWEAGNTFTCSVLHEGLHNHHTEKSLSHSPGK

SEQ ID NO: 22137 - protein, 124 aa, Mus musculus
EVKVEESGGGLVQPGGSMKLSCVVSGFTFSNYWVNWVRQSPEKGLEWVAQIRLKSDNYATHYEESVKGRFTISRDDSKSSVYLQMNNLRAEDSGIYYCTNWEDYWGQGTTLTVSSASTKGPSVF

SEQ ID NO: 22138 - protein, 439 aa, Artificial Sequence
  source: /note="Description of Artificial Sequence: Synthetic polypeptide"
QVQLQQSDAELVKPGASVKISCKASGYTFTDRTIHWVKQRPEQGLEWIGYIYPGDDSTKYNDMFKAKATLTADKSSNTAYMQLNSLTSDDSAVYFCARRGTMDYWGQGTSVTVSSAKTTPPSVYPLAPGSAAQTNSMVTLGCLVKGYFPEPVTVTWNSGSLSSGVHTFPAVLQSDLYTLSSSVTVPSSTWPSETVTCNVAHPASSTKVDKKIVPRDCGCKPCICTVPEVSSVFIFPPKPKDVLTITLTPKVTCVVVDISKDDPEVQFSWFVDDVEVHTAQTQPREEQFNSTFRSVSELPIMHQDWLNGKEFKCRVNSAAFPAPIEKTISKTKGRPKAPQVYTIPPPKEQMAKDKVSLTCMITDFFPEDITVEWQWNGQPAENYKNTQPIMDTDGSYFVYSKLNVQKSNWEAGNTFTCSVLHEGLHNHHTEKSLSHSPGK

SEQ ID NO: 22139 - protein, 439 aa, Artificial Sequence
  source: /note="Description of Artificial Sequence: Synthetic polypeptide"
QVQLQQSDAELVNPGASVKISCKASGYTFTDRTIHWVKQRPEQGLEWIGYIYPGDGSTKYNENFKGKATLTADKSSSTAYMQLNSLASEDSAVYFCARRGAMDYWGQGTSVTVSSAKTTPPSVYPLAPGSAAQTNSMVTLGCLVKGYFPEPVTVTWNSGSLSSGVHTFPAVLQSDLYTLSSSVTVPSSTWPSETVTCNVAHPASSTKVDKKIVPRDCGCKPCICTVPEVSSVFIFPPKPKDVLTITLTPKVTCVVVDISKDDPEVQFSWFVDDVEVHTAQTQPREEQFNSTFRSVSELPIMHQDWLNGKEFKCRVNSAAFPAPIEKTISKTKGRPKAPQVYTIPPPKEQMAKDKVSLTCMITDFFPEDITVEWQWNGQPAENYKNTQPIMDTDGSYFVYSKLNVQKSNWEAGNTFTCSVLHEGLHNHHTEKSLSHSPGK

SEQ ID NO: 22140 - protein, 451 aa, Artificial Sequence
  source: /note="Description of Artificial Sequence: Synthetic polypeptide"
QVQLQQSGAELVRPGASVTLSCKASGNTFTDYEIHWVKQTPVHGLEWIGAIDPETGNTAYNQKFKGKARLTADKSSSTAYMELRSLTSEDSAVYYCTRSRGFDYWGQGTTLTVSSAKTTPPSVYPLAPGCGDTTGSSVTLGCLVKGYFPESVTVTWNSGSLSSSVHTFPALLQSGLYTMSSSVTVPSSTWPSQTVTCSVAHPASSTTVDKKLEPSGPISTINPCPPCKECHKCPAPNLEGGPSVFIFPPNIKDVLMISLTPKVTCVVVDVSEDDPDVRISWFVNNVEVHTAQTQTHREDYNSTIRVVSALPIQHQDWMSGKEFKCKVNNKDLPSPIERTISKIKGLVRAPQVYILPPPAEQLSRKDVSLTCLVVGFNPGDISVEWTSNGHTEENYKDTAPVLDSDGSYFIYSKLDIKTSKWEKTDSFSCNVRHEGLKNYYLKKTISRSPGK

SEQ ID NO: 22141 - protein, 444 aa, Artificial Sequence
  source: /note="Description of Artificial Sequence: Synthetic polypeptide"
QVQLVQSGAEVVKPGASVKISCKASGYTFTDRTIHWVRQAPGQGLEWIGYIYPGDGSTKYSQKFQGRATLTADTSASTAYMELSSLRSEDTAVYYCARRGAMDYWGQGTSVTVSSASTKGPSVFPLAPSSKSTSGGTAALGCLVKDYFPEPVTVSWNSGALTSGVHTFPAVLQSSGLYSLSSVVTVPSSSLGTQTYICNVNHKPSNTKVDKRVEPKSCDKTHTCPPCPAPELLGGPSVFLFPPKPKDTLMISRTPEVTCVVVDVSHEDPEVKFNWYVDGVEVHNAKTKPREEQYNSTYRVVSVLTVLHQDWLNGKEYKCKVSNKALPAPIEKTISKAKGQPREPQVYTLPPSREEMTKNQVSLTCLVKGFYPSDIAVEWESNGQPENNYKTTPPVLDSDGSFFLYSKLTVDKSRWQQGNVFSCSVMHEALHNHYTQKSLSLSPG

SEQ ID NO: 22142 - DNA, 354 bp, Rattus norvegicus
gaggtgaagctggaggagtctggacctggcttgatgcagccctcagagaccctgtccctcacctgcactgtctctggcttctcactaaccagcaatgatatagcctgggttcgacaacctctaggaaagggtttggtgtggatgggaacaatatggactgatggaagtacaaattataattcagctgtccaatcccgactgagcatcagcagggacacctccaagagccaatttttcttaaaaatgaacagtctgcaacctgaagacacaggcacttactactgtgccagacatcgcctatactacggggcctttgattactggggccaaggaaccatggtcaccgtctcgagt

SEQ ID NO: 22143 - protein, 117 aa, Rattus norvegicus
EVKLEESGPGLMQPSETLSLTCTVSGFSLTSNDIAWVRQPLGKGLVWMGTIWTDGSTNYNSAVQSRLSISRDTSKSQFFLKMNSLQPEDTGTYYCARHRLYYGAFDYWGQGTMVTVS

SEQ ID NO: 22144 - protein, 118 aa, Artificial Sequence
  source: /note="Description of Artificial Sequence: Synthetic polypeptide"
  MOD_RES (48)..(48): Any amino acid
  MOD_RES (61)..(61): Any amino acid
ZVQLQESGPGLVKPSETLSLTCTVSGFSLTSNDIAWIRQPPGKGLEWXGTIWTDGSTNYNXAVQSRVTISVDTSKNQFSLKLSSVTAADTAVYYCARHRLYYGAFDYWGQGTMVTVSS

SEQ ID NO: 22145 - protein, 118 aa, Artificial Sequence
  source: /note="Description of Artificial Sequence: Synthetic polypeptide"
EVQLQESGPGLVKPSETLSLTCTVSGFSLTSNDIAWIRQPPGKGLEWMGTIWTDGSTNYNSAVQSRVTISVDTSKNQFSLKLSSVTAADTAVYYCARHRLYYGAFDYWGQGTMVTVSS

SEQ ID NO: 22146 - protein, 118 aa, Artificial Sequence
  source: /note="Description of Artificial Sequence: Synthetic polypeptide"
EVQLQESGPGLVKPSETLSLTCTVSGFSLTSNDIAWIRQPPGKGLEWMGTIWTDGSTNYNAAVQSRVTISVDTSKNQFSLKLSSVTAADTAVYYCARHRLYYGAFDYWGQGTMVTVSS

SEQ ID NO: 22147 - protein, 118 aa, Artificial Sequence
  source: /note="Description of Artificial Sequence: Synthetic polypeptide"
EVQLQESGPGLVKPSETLSLTCTVSGFSLTSNDIAWIRQPPGKGLEWMGTIWTDGSTNYNTAVQSRVTISVDTSKNQFSLKLSSVTAADTAVYYCARHRLYYGAFDYWGQGTMVTVSS

SEQ ID NO: 22148 - DNA, 354 bp, Artificial Sequence
  source: /note="Description of Artificial Sequence: Synthetic polynucleotide"
gaggtgcagctgcaggaatccggtcccggcctcgtgaagccttcagaaaccctgtcgctcacatgcactgtgtccgggttctccctgacctctaacgacatcgcctggattcggcagccgccaggaaagggactggagtggatgggcaccatttggaccgacgggtcaaccaactacaatgccgcggtgcaatccagagtgaccatcagcgtggacacgtccaagaaccagttctcgctgaaattgagctccgtgactgccgctgatactgccgtgtattactgtgcccggcaccgcctttactacggcgcatttgactactggggacagggaaccatggtcactgtctcgagt

SEQ ID NO: 22149 - DNA, 354 bp, Artificial Sequence
  source: /note="Description of Artificial Sequence: Synthetic polynucleotide"
gaggtgcaactgcaggaatccggtcccggcctcgtgaagccttcagaaaccctgtcgctcacatgcactgtgtccgggttctccctgacctctaacgacatcgcctggattcggcagccgccaggaaagggactggagtggatgggcaccatttggaccgacgggtcaaccaactacaataccgcggtgcaatccagagtgaccatcagcgtggacacgtccaagaaccagttctcgctgaaattgagctccgtgactgccgctgatactgccgtgtattactgtgcccggcaccgcctttactacggcgcatttgactactggggacagggaaccatggtcactgtctcgagt

SEQ ID NO: 22150 - protein, 448 aa, Artificial Sequence
  source: /note="Description of Artificial Sequence: Synthetic polypeptide"
EVQLQESGPGLVKPSETLSLTCTVSGFSLTSNDIAWIRQPPGKGLEWMGTIWTDGSTNYNAAVQSRVTISVDTSKNQFSLKLSSVTAADTAVYYCARHRLYYGAFDYWGQGTMVTVSSASTKGPSVFPLAPSSKSTSGGTAALGCLVKDYFPEPVTVSWNSGALTSGVHTFPAVLQSSGLYSLSSVVTVPSSSLGTQTYICNVNHKPSNTKVDKKVEPKSCDKTHTCPPCPAPELLGGPSVFLFPPKPKDTLMISRTPEVTCVVVDVSHEDPEVKFNWYVDGVEVHNAKTKPREEQYNSTYRVVSVLTVLHQDWLNGKEYKCKVSNKALPAPIEKTISKAKGQPREPQVYTLPPSRDELTKNQVSLTCLVKGFYPSDIAVEWESNGQPENNYKTTPPVLDSDGSFFLYSKLTVDKSRWQQGNVFSCSVMHEALHNHYTQKSLSLSPGK

SEQ ID NO: 22151 - protein, 448 aa, Artificial Sequence
  source: /note="Description of Artificial Sequence: Synthetic polypeptide"
EVQLQESGPGLVKPSETLSLTCTVSGFSLTSNDIAWIRQPPGKGLEWMGTIWTDGSTNYNTAVQSRVTISVDTSKNQFSLKLSSVTAADTAVYYCARHRLYYGAFDYWGQGTMVTVSSASTKGPSVFPLAPSSKSTSGGTAALGCLVKDYFPEPVTVSWNSGALTSGVHTFPAVLQSSGLYSLSSVVTVPSSSLGTQTYICNVNHKPSNTKVDKKVEPKSCDKTHTCPPCPAPELLGGPSVFLFPPKPKDTLMISRTPEVTCVVVDVSHEDPEVKFNWYVDGVEVHNAKTKPREEQYNSTYRVVSVLTVLHQDWLNGKEYKCKVSNKALPAPIEKTISKAKGQPREPQVYTLPPSRDELTKNQVSLTCLVKGFYPSDIAVEWESNGQPENNYKTTPPVLDSDGSFFLYSKLTVDKSRWQQGNVFSCSVMHEALHNHYTQKSLSLSPGK

SEQ ID NO: 22152 - protein, 445 aa, Artificial Sequence
  source: /note="Description of Artificial Sequence: Synthetic polypeptide"
  MOD_RES (48)..(48): Any amino acid
  MOD_RES (61)..(61): Any amino acid
ZVQLQESGPGLVKPSETLSLTCTVSGFSLTSNDIAWIRQPPGKGLEWXGTIWTDGSTNYNXAVQSRVTISVDTSKNQFSLKLSSVTAADTAVYYCARHRLYYGAFDYWGQGTMVTVSSASTKGPSVFPLAPCSRSTSESTAALGCLVKDYFPEPVTVSWNSGALTSGVHTFPAVLQSSGLYSLSSVVTVPSSSLGTKTYTCNVDHKPSNTKVDKRVESKYGPPCPPCPAPEFLGGPSVFLFPPKPKDTLMISRTPEVTCVVVDVSQEDPEVQFNWYVDGVEVHNAKTKPREEQFNSTYRVVSVLTVLHQDWLNGKEYKCKVSNKGLPSSIEKTISKAKGQPREPQVYTLPPSQEEMTKNQVSLTCLVKGFYPSDIAVEWESNGQPENNYKTTPPVLDSDGSFFLYSRLTVDKSRWQEGNVFSCSVMHEALHNHYTQKSLSLSLGK

SEQ ID NO: 22153 - protein, 445 aa, Artificial Sequence
  source: /note="Description of Artificial Sequence: Synthetic polypeptide"
EVQLQESGPGLVKPSETLSLTCTVSGFSLTSNDIAWIRQPPGKGLEWMGTIWTDGSTNYNSAVQSRVTISVDTSKNQFSLKLSSVTAADTAVYYCARHRLYYGAFDYWGQGTMVTVSSASTKGPSVFPLAPCSRSTSESTAALGCLVKDYFPEPVTVSWNSGALTSGVHTFPAVLQSSGLYSLSSVVTVPSSSLGTKTYTCNVDHKPSNTKVDKRVESKYGPPCPPCPAPEFLGGPSVFLFPPKPKDTLMISRTPEVTCVVVDVSQEDPEVQFNWYVDGVEVHNAKTKPREEQFNSTYRVVSVLTVLHQDWLNGKEYKCKVSNKGLPSSIEKTISKAKGQPREPQVYTLPPSQEEMTKNQVSLTCLVKGFYPSDIAVEWESNGQPENNYKTTPPVLDSDGSFFLYSRLTVDKSRWQEGNVFSCSVMHEALHNHYTQKSLSLSLGK

SEQ ID NO: 22154 - protein, 445 aa, Artificial Sequence
  source: /note="Description of Artificial Sequence: Synthetic polypeptide"
EVQLQESGPGLVKPSETLSLTCTVSGFSLTSNDIAWIRQPPGKGLEWMGTIWTDGSTNYNAAVQSRVTISVDTSKNQFSLKLSSVTAADTAVYYCARHRLYYGAFDYWGQGTMVTVSSASTKGPSVFPLAPCSRSTSESTAALGCLVKDYFPEPVTVSWNSGALTSGVHTFPAVLQSSGLYSLSSVVTVPSSSLGTKTYTCNVDHKPSNTKVDKRVESKYGPPCPPCPAPEFLGGPSVFLFPPKPKDTLMISRTPEVTCVVVDVSQEDPEVQFNWYVDGVEVHNAKTKPREEQFNSTYRVVSVLTVLHQDWLNGKEYKCKVSNKGLPSSIEKTISKAKGQPREPQVYTLPPSQEEMTKNQVSLTCLVKGFYPSDIAVEWESNGQPENNYKTTPPVLDSDGSFFLYSRLTVDKSRWQEGNVFSCSVMHEALHNHYTQKSLSLSLGK

SEQ ID NO: 22155 - protein, 445 aa, Artificial Sequence
  source: /note="Description of Artificial Sequence: Synthetic polypeptide"
EVQLQESGPGLVKPSETLSLTCTVSGFSLTSNDIAWIRQPPGKGLEWMGTIWTDGSTNYNTAVQSRVTISVDTSKNQFSLKLSSVTAADTAVYYCARHRLYYGAFDYWGQGTMVTVSSASTKGPSVFPLAPCSRSTSESTAALGCLVKDYFPEPVTVSWNSGALTSGVHTFPAVLQSSGLYSLSSVVTVPSSSLGTKTYTCNVDHKPSNTKVDKRVESKYGPPCPPCPAPEFLGGPSVFLFPPKPKDTLMISRTPEVTCVVVDVSQEDPEVQFNWYVDGVEVHNAKTKPREEQFNSTYRVVSVLTVLHQDWLNGKEYKCKVSNKGLPSSIEKTISKAKGQPREPQVYTLPPSQEEMTKNQVSLTCLVKGFYPSDIAVEWESNGQPENNYKTTPPVLDSDGSFFLYSRLTVDKSRWQEGNVFSCSVMHEALHNHYTQKSLSLSLGK

SEQ ID NO: 22156 - protein, 124 aa, Artificial Sequence
  source: /note="Description of Artificial Sequence: Synthetic polypeptide"
EVKVVESGGGLVQPGGSMKLSCVVSGFTFSNYWVNWVRQAPGKGLEWVAQIRLKSDNYATHYEESVKGRFTISRDDSKSSVYLQMNNLRAEDSGIYYCTNWEDYWGQGTTVTVSSASTKGPSVF

SEQ ID NO: 22157 - protein, 124 aa, Artificial Sequence
  source: /note="Description of Artificial Sequence: Synthetic polypeptide"
EVKVVESGGGLVQPGGSLKLSCVVSGFTFSNYWVNWVRQAPGKGLEWVAQIRLKSDNYATHYEESVKGRFTISRDDSKSSVYLQMNSLRAEDTGIYYCTNWEDYWGQGTTVTVSSASTKGPSVF

SEQ ID NO: 22158 - protein, 124 aa, Artificial Sequence
  source: /note="Description of Artificial Sequence: Synthetic polypeptide"
EVQVVESGGGLVQPGGSLKLSCVVSGFTFSNYWVNWVRQAPGKGLEWVAQIRLKSDNYATHYEESVKGRFTISRDDSKNSVYLQMNSLRAEDTAIYYCTNWEDYWGQGTTVTVSSASTKGPSVF

SEQ ID NO: 22159 - protein, 124 aa, Artificial Sequence
  source: /note="Description of Artificial Sequence: Synthetic polypeptide"
EVQLVESGGGLVQPGGSLKLSCVVSGFTFSNYWVNWVRQAPGKGLEWVAQIRLKSDNYATHYEESVKGRFTISRDDSKNSLYLQMNSLRAEDTAIYYCTNWEDYWGQGTTVTVSSASTKGPSVF

SEQ ID NO: 22160 - protein, 119 aa, Mus musculus
EVKLVESGGDLVTPGGSLKVSCAASGLTFSDSAMSWVRLTPEKRLEWVASISTGGATYYPDGLKGRFTISRDDARNILFLQMNSLRSEDTAMYYCTRRGVSSGNLFTYWGQGTLVTVSA

SEQ ID NO: 22161 - protein, 120 aa, Mus musculus
EVKLVESGGGLMKPGGSLKLSCAASGFTFSSYAMSWVRQSPEKRLEWVASISSGGQTYSPDSVKGRFTISRDNARNILYLQMRNLRSEDTAMYYCASRGDPTMTATLFVYWGQGTLVTVS

SEQ ID NO: 22162 - protein, 112 aa, Mus musculus
VQLQQSGAELVQPGASVKLSCTASGFNIKDTSMHWVRQRPEQGLEWIGRIAPANGNTKYDPKFQGKATITTDTSSNTAYLQLSSLTSEDTAVYYCSGSGNYDWGQGTTLTVS

SEQ ID NO: 22163 - protein, 121 aa, Mus musculus
EVKLVESGGGLVKPGGSLTLSCAASGFTFSSYAMSWVRQTPEKSLEWVASISSGGNTFYPDTVKGRFTISRDNARNILYLQMSGLRSEDTAIYYCARRGDPNMITTLFGYWGQGTLVTISA

SEQ ID NO: 22164 - DNA, 351 bp, Artificial Sequence
  source: /note="Description of Artificial Sequence: Synthetic polynucleotide"
gaggtgcagttggtggagtctggggaagacttagtgaagcctggagggtccctgaaactctcctgtgtcgcttctggattcgctttcagtagctatggcatgtcttgggttcgccagactccagacatgaggctggagtgggtcgcaacaattagtagcagtggtagtcgcacctactttccagacagtgtgaaggggcgactcaccatctccagagacaatgacaagaacatcctatacctacaaatgagcagtctgaggtctgaggacacagccatgtactattgtacgattacctgggacggtgctatggactactggggtcgtggaatatcagtcaccgtctcctca

SEQ ID NO: 22165 - DNA, 351 bp, Artificial Sequence
  source: /note="Description of Artificial Sequence: Synthetic polynucleotide"
gaggttcatctggtggagtctgggggagccttagtgaagcctggagggtccctgaaactctcctgtgcagcctctggattcagtttcagtaaatatggcatgtcttgggttcgccagactccagacaagaggctggagtgggtcgcaaccattagtagtagtgggagtcgcacctactatccagacagtgtgaagggccaattcaccatctccagagacaatgccaagaacaccctgtacctgcaaatgagcagtctgaagtctgaggacacagccatgtattactgttcaattagctgggacggtgctatggactactggggtcaagggacctcagtcaccgtctcctca

SEQ ID NO: 22166 - DNA, 357 bp, Mus musculus
caggttactctgaaagagtctggccctgggatattgcagtcctcccagaccctcagtctgacttgttctttctctgggttttcactgagcacttctggtatgggtgtgagctggattcgtcagccttcaggaaagggtctggagtggctggcacacatttactgggatgatgacaagcgctataacgcatccctgaagagccggctcacaatctccaaggatacctccagaaaccaggtattcctcaagatcacctgtgtggacactgcagatactgccacatactactgtgctcggttactgcgtccttatgctttggactactggggtcaaggaacctcagtcaccgtctcctca

SEQ ID NO: 22167 - DNA, 345 bp, Mus musculus
gaggtccagctgcaacaatctggacctgagctggtgaagcctggggcttcagtgaagatatcctgtaaggcttctggatacacgttcactgactactacatgaactgggtgaagcagagccatggaaagagccttgagtggattggagatattaatcctaacaatggtggtactagctacaaccagaagttcaagggcaaggccacattgactgtagacaagtcctccagcacagcctacatggagctccgcagtctgacatctgaggactctgcagtctattattgtgtaagagaggggcggtttgcttactggggtcatgggactctggtcactgtctctgca

SEQ ID NO: 22168 - DNA, 345 bp, Mus musculus
caggtccagctgaagcagtctggggctgagctggtgaggcctggggcttcagtgaaactgtcctgcaaggcttctggctacactttcactgactactatataaactgggtgaagcagaggcctggacagggacttgagtggattgcaaggatttatcctggaagaggtaatatttactacaatgagaagttcaagggcaaggccacactgactgcagaaaaatcctccagcactgcctacatgcagctcagcagcctgacatctgaggactctgctgtctatttctgtgcaagattctgggacgtgacttactggggccaagggactctggtcactgtctctgca

SEQ ID NO: 22169 - DNA, 345 bp, Mus musculus
gaggtccagctgcaacaatctggacctgagctggtgaagcctggggcttcagtgaagatatcctgtaaggcttctggattcacgttcactgactactacatgaactgggtgaagcagagccatggaaagagccttgagtggattggagatattaatcctaacaatggtggtactagctaccaccagaagttcaagggcaaggccacattgactgtagacaagtcctccagcacagcctacatggagctccgcagcctgacatctgaggactctgcagtctattactgtgtaagagagggaagatttgcttactggggccaagggactctggtcactgtctctgca

SEQ ID NO: 22170 - DNA, 351 bp, Mus musculus
caggtccaactgcagcagcctggggctgagcttctgaagcctggggcttcagtgaaactgtcctgcaaggcttctggctacaccttcaccagctactggatgcactgggtgaagcagaggcctggacgaggccttgagtggattggaaggattgatcctaatagtgatcgtactaagtacaatgagaagttcaagcgcaaggccacactgactgtagacaaatcctccagcacagcctacatgcagctcagcagcctgacatctgaggactctgcggtctattattgtgcaagggatgattacgcctggtttgcttactggggccaagggactctggtcactgtctctgca

SEQ ID NO: 22171 - DNA, 351 bp, Artificial Sequence
  source: /note="Description of Artificial Sequence: Synthetic polynucleotide"
gaggttcatctggtggagtctgggggagccttagtgaagcctggagggtccctgagactctcctgtgcagcctctggattcagtttcagtaaatatggcatgtcttgggttcgccaggccccaggcaagggcctggagtgggtcgcaaccattagtagtagtgggagtcgcacctactatccagacagtgtgaagggcagattcaccatctccagagacaatgccaagaacaccctgtacctgcaaatgagcagtctgaagtctgaggacacagccatgtattactgttcaattagctgggacggtgctatggactactggggtcaagggacctcagtcaccgtctcctca

SEQ ID NO: 22172 - DNA, 351 bp, Artificial Sequence
  source: /note="Description of Artificial Sequence: Synthetic polynucleotide"
gaggttcatctggtggagtctgggggagccttagtgaagcctggagggtccctgagactctcctgtgcagcctctggattcagtttcagtaaatatggcatgtcttgggttcgccaggccccaggcaagggcctggagtgggtcgcaaccattagtagtagtgggagtcgcacctactatccagacagtgtgaagggcagattcaccatctccagagacaatgccaagaacaccctgtacctgcaaatgaacagtctgagagccgaggacacagccatgtattactgttcaattagctgggacggtgctatggactactggggtcaagggaccaccgtcaccgtctcctca

SEQ ID NO: 22173 - DNA, 351 bp, Artificial Sequence
  source: /note="Description of Artificial Sequence: Synthetic polynucleotide"
gaggttcagctggtggagtctgggggagccttagtgaagcctggagggtccctgagactctcctgtgcagcctctggattcagtttcagtaaatatggcatgtcttgggttcgccaggccccaggcaagggcctggagtgggtcgcaaccattagtagtagtgggagtcgcacctactatccagacagtgtgaagggcagattcaccatctccagagacaatgccaagaacaccctgtacctgcaaatgaacagtctgagagccgaggacacagccatgtattactgttcaattagctgggacggtgctatggactactggggtcaagggaccaccgtcaccgtctcctca

SEQ ID NO: 22174 - DNA, 351 bp, Artificial Sequence
  source: /note="Description of Artificial Sequence: Synthetic polynucleotide"
gaggttcagctggtggagtctgggggagccttagtgaagcctggagggtccctgagactctcctgtgcagcctctggattcagtttcagtaaatatggcatgtcttgggttcgccaggccccaggcaagggcctggagtgggtcgcaaccattagtagtagtgggagtcgcacctactatccagacagtgtgaagggcagattcaccatctccagagacaatgccaagaacaccctgtacctgcaaatgaacagtctgagagccgaggacacagccatgtattactgtgccattagctgggacggtgctatggactactggggtcaagggaccaccgtcaccgtctcctca

SEQ ID NO: 22175 - protein, 111 aa, Artificial Sequence
  source: /note="Description of Artificial Sequence: Synthetic polypeptide"
EVQVLESGGGLVQPGGSLRLSCAVSGISLSSNAINWVRQAPGKGLEWVGYIAVSGNTYYASWAKGRFTISRDNSKNTVYLQMNSLRAEDTAVYYCGKSNIWGQGTLVTVSS

SEQ ID NO: 22176 - protein, 442 aa, Artificial Sequence
  source: /note="Description of Artificial Sequence: Synthetic polypeptide"
EVKVVESGGGLVQPGGSMKLSCVVSGFTFSNYWVNWVRQAPGKGLEWVAQIRLKSDNYATHYEESVKGRFTISRDDSKSSVYLQMNNLRAEDSGIYYCTNWEDYWGQGTTVTVSSASTKGPSVFPLAPCSRSTSESTAALGCLVKDYFPEPVTVSWNSGALTSGVHTFPAVLQSSGLYSLSSVVTVPSSSLGTKTYTCNVDHKPSNTKVDKRVESKYGPPCPPCPAPEFLGGPSVFLFPPKPKDTLMISRTPEVTCVVVDVSQEDPEVQFNWYVDGVEVHNAKTKPREEQFNSTYRVVSVLTVLHQDWLNGKEYKCKVSNKGLPSSIEKTISKAKGQPREPQVYTLPPSQEEMTKNQVSLTCLVKGFYPSDIAVEWESNGQPENNYKTTPPVLDSDGSFFLYSRLTVDKSRWQEGNVFSCSVMHEALHNHYTQKSLSLSLGK

SEQ ID NO: 22177 - protein, 442 aa, Artificial Sequence
  source: /note="Description of Artificial Sequence: Synthetic polypeptide"
EVKVVESGGGLVQPGGSLKLSCVVSGFTFSNYWVNWVRQAPGKGLEWVAQIRLKSDNYATHYEESVKGRFTISRDDSKSSVYLQMNSLRAEDTGIYYCTNWEDYWGQGTTVTVSSASTKGPSVFPLAPCSRSTSESTAALGCLVKDYFPEPVTVSWNSGALTSGVHTFPAVLQSSGLYSLSSVVTVPSSSLGTKTYTCNVDHKPSNTKVDKRVESKYGPPCPPCPAPEFLGGPSVFLFPPKPKDTLMISRTPEVTCVVVDVSQEDPEVQFNWYVDGVEVHNAKTKPREEQFNSTYRVVSVLTVLHQDWLNGKEYKCKVSNKGLPSSIEKTISKAKGQPREPQVYTLPPSQEEMTKNQVSLTCLVKGFYPSDIAVEWESNGQPENNYKTTPPVLDSDGSFFLYSRLTVDKSRWQEGNVFSCSVMHEALHNHYTQKSLSLSLGK

SEQ ID NO: 22178 - protein, 442 aa, Artificial Sequence
  source: /note="Description of Artificial Sequence: Synthetic polypeptide"
EVQVVESGGGLVQPGGSLKLSCVVSGFTFSNYWVNWVRQAPGKGLEWVAQIRLKSDNYATHYEESVKGRFTISRDDSKNSVYLQMNSLRAEDTAIYYCTNWEDYWGQGTTVTVSSASTKGPSVFPLAPCSRSTSESTAALGCLVKDYFPEPVTVSWNSGALTSGVHTFPAVLQSSGLYSLSSVVTVPSSSLGTKTYTCNVDHKPSNTKVDKRVESKYGPPCPPCPAPEFLGGPSVFLFPPKPKDTLMISRTPEVTCVVVDVSQEDPEVQFNWYVDGVEVHNAKTKPREEQFNSTYRVVSVLTVLHQDWLNGKEYKCKVSNKGLPSSIEKTISKAKGQPREPQVYTLPPSQEEMTKNQVSLTCLVKGFYPSDIAVEWESNGQPENNYKTTPPVLDSDGSFFLYSRLTVDKSRWQEGNVFSCSVMHEALHNHYTQKSLSLSLGK

SEQ ID NO: 22179 - protein, 442 aa, Artificial Sequence
  source: /note="Description of Artificial Sequence: Synthetic polypeptide"
EVQLVESGGGLVQPGGSLKLSCVVSGFTFSNYWVNWVRQAPGKGLEWVAQIRLKSDNYATHYEESVKGRFTISRDDSKNSLYLQMNSLRAEDTAIYYCTNWEDYWGQGTTVTVSSASTKGPSVFPLAPCSRSTSESTAALGCLVKDYFPEPVTVSWNSGALTSGVHTFPAVLQSSGLYSLSSVVTVPSSSLGTKTYTCNVDHKPSNTKVDKRVESKYGPPCPPCPAPEFLGGPSVFLFPPKPKDTLMISRTPEVTCVVVDVSQEDPEVQFNWYVDGVEVHNAKTKPREEQFNSTYRVVSVLTVLHQDWLNGKEYKCKVSNKGLPSSIEKTISKAKGQPREPQVYTLPPSQEEMTKNQVSLTCLVKGFYPSDIAVEWESNGQPENNYKTTPPVLDSDGSFFLYSRLTVDKSRWQEGNVFSCSVMHEALHNHYTQKSLSLSLGK

SEQ ID NO: 22180 - protein, 121 aa, Mus musculus
EVQLVESGGGLVKPGGSLKLSCAASGFTFSNYALSWVRQTPEKRLEWVASISSGGNTYYPDSVKGRFTISRDNARNILYLQMSSLRSEDTAMFYCTSRGDTTLITTLFTYWGQGTLVTVSA

SEQ ID NO: 22181 - DNA, 1335 bp, Artificial Sequence
  source: /note="Description of Artificial Sequence: Synthetic polynucleotide"
gaggtgcagctgcaggaatccggtcccggcctcgtgaagccttcagaaaccctgtcgctcacatgcactgtgtccgggttctccctgacctctaacgacatcgcctggattcggcagccgccaggaaagggactggagtggatgggcaccatttggaccgacgggtcaaccaactacaatgccgcggtgcaatccagagtgaccatcagcgtggacacgtccaagaaccagttctcgctgaaattgagctccgtgactgccgctgatactgccgtgtattactgtgcccggcaccgcctttactacggcgcatttgactactggggacagggaaccatggtcactgtctcgagtgcctccaccaagggcccctccgtgttccctctggccccttgctcccggtccacctccgagtctaccgccgctctgggctgcctggtcaaggactacttccccgagcccgtgacagtgtcctggaactctggcgccctgacctccggcgtgcacaccttccctgccgtgctgcagtcctccggcctgtactccctgtcctccgtcgtgaccgtgccctcctccagcctgggcaccaagacctacacctgtaacgtggaccacaagccctccaacaccaaggtggacaagcgggtggaatctaagtacggccctccctgccccccctgccctgcccctgaatttctgggcggaccttccgtgttcctgttccccccaaagcccaaggacaccctgatgatctcccggacccccgaagtgacctgcgtggtggtggacgtgtcccaggaagatcccgaggtccagttcaattggtacgtggacggcgtggaagtgcacaatgccaagaccaagcccagagaggaacagttcaactccacctaccgggtggtgtccgtgctgaccgtgctgcaccaggactggctgaacggcaaagagtacaagtgcaaggtgtccaacaagggcctgccctccagcatcgaaaagaccatctccaaggccaagggccagccccgcgagccccaggtgtacaccctgccccctagccaggaagagatgaccaagaaccaggtgtccctgacctgtctggtcaagggcttctacccctccgacattgccgtggaatgggagtccaacggccagcccgagaacaactacaagaccaccccccctgtgctggacagcgacggctccttcttcctgtactctcggctgaccgtggacaagtcccggtggcaggaaggcaacgtcttctcctgctccgtgatgcacgaggccctgcacaaccactacacccagaagtccctgtccctgagcctgggcaag

SEQ ID NO: 22182 - DNA, 1335 bp, Artificial Sequence
  source: /note="Description of Artificial Sequence: Synthetic polynucleotide"
gaggtgcaactgcaggaatccggtcccggcctcgtgaagccttcagaaaccctgtcgctcacatgcactgtgtccgggttctccctgacctctaacgacatcgcctggattcggcagccgccaggaaagggactggagtggatgggcaccatttggaccgacgggtcaaccaactacaataccgcggtgcaatccagagtgaccatcagcgtggacacgtccaagaaccagttctcgctgaaattgagctccgtgactgccgctgatactgccgtgtattactgtgcccggcaccgcctttactacggcgcatttgactactggggacagggaaccatggtcactgtctcgagtgcctccaccaagggcccctccgtgttccctctggccccttgctcccggtccacctccgagtctaccgccgctctgggctgcctggtcaaggactacttccccgagcccgtgacagtgtcctggaactctggcgccctgacctccggcgtgcacaccttccctgccgtgctgcagtcctccggcctgtactccctgtcctccgtcgtgaccgtgccctcctccagcctgggcaccaagacctacacctgtaacgtggaccacaagccctccaacaccaaggtggacaagcgggtggaatctaagtacggccctccctgccccccctgccctgcccctgaatttctgggcggaccttccgtgttcctgttccccccaaagcccaaggacaccctgatgatctcccggacccccgaagtgacctgcgtggtggtggacgtgtcccaggaagatcccgaggtccagttcaattggtacgtggacggcgtggaagtgcacaatgccaagaccaagcccagagaggaacagttcaactccacctaccgggtggtgtccgtgctgaccgtgctgcaccaggactggctgaacggcaaagagtacaagtgcaaggtgtccaacaagggcctgccctccagcatcgaaaagaccatctccaaggccaagggccagccccgcgagccccaggtgtacaccctgccccctagccaggaagagatgaccaagaaccaggtgtccctgacctgtctggtcaagggcttctacccctccgacattgccgtggaatgggagtccaacggccagcccgagaacaactacaagaccaccccccctgtgctggacagcgacggctccttcttcctgtactctcggctgaccgtggacaagtcccggtggcaggaaggcaacgtcttctcctgctccgtgatgcacgaggccctgcacaaccactacacccagaagtccctgtccctgagcctgggcaag

SEQ ID NO: 22183 - DNA, 1344 bp, Artificial Sequence
  source: /note="Description of Artificial Sequence: Synthetic polynucleotide"
gaggtgcagctgcaggaatccggtcccggcctcgtgaagccttcagaaaccctgtcgctcacatgcactgtgtccgggttctccctgacctctaacgacatcgcctggattcggcagccgccaggaaagggactggagtggatgggcaccatttggaccgacgggtcaaccaactacaatgccgcggtgcaatccagagtgaccatcagcgtggacacgtccaagaaccagttctcgctgaaattgagctccgtgactgccgctgatactgccgtgtattactgtgcccggcaccgcctttactacggcgcatttgactactggggacagggaaccatggtcactgtctcgagtgcctccaccaagggcccctccgtgttcccgctcgctccatcatcgaagtctaccagcggaggcactgcggctctcggttgcctcgtgaaggactacttcccggagccggtgaccgtgtcgtggaacagcggagccctgaccagcggggtgcacacctttccggccgtcttgcagtcaagcggcctttactccctgtcatcagtggtgactgtcccgtccagctcattgggaacccaaacctacatctgcaatgtgaatcacaaacctagcaacaccaaggttgacaagaaagtcgagcccaaatcgtgtgacaagactcacacttgtccgccgtgcccggcacccgaactgctgggaggtcccagcgtctttctgttccctccaaagccgaaagacacgctgatgatctcccgcaccccggaggtcacttgcgtggtcgtggacgtgtcacatgaggacccagaggtgaagttcaattggtacgtggatggcgtcgaagtccacaatgccaaaactaagcccagagaagaacagtacaattcgacctaccgcgtcgtgtccgtgctcacggtgttgcatcaggattggctgaacgggaaggaatacaagtgcaaagtgtccaacaaggcgctgccggcaccgatcgagaaaactatctccaaagcgaagggacagcctagggaacctcaagtctacacgctgccaccatcacgggatgaactgactaagaatcaagtctcactgacttgtctggtgaaggggttttaccctagcgacattgccgtggagtgggaatccaacggccagccagagaacaactacaagactacccctccagtgctcgactcggatggatcgttcttcctttactcgaagctcaccgtggataagtcccggtggcagcagggaaacgtgttctcctgctcggtgatgcatgaagccctccataaccactatacccaaaagtcgctgtccctgtcgccgggaaag

SEQ ID NO: 22184 - DNA, 1344 bp, Artificial Sequence
  source: /note="Description of Artificial Sequence: Synthetic polynucleotide"
gaggtgcaactgcaggaatccggtcccggcctcgtgaagccttcagaaaccctgtcgctcacatgcactgtgtccgggttctccctgacctctaacgacatcgcctggattcggcagccgccaggaaagggactggagtggatgggcaccatttggaccgacgggtcaaccaactacaataccgcggtgcaatccagagtgaccatcagcgtggacacgtccaagaaccagttctcgctgaaattgagctccgtgactgccgctgatactgccgtgtattactgtgcccggcaccgcctttactacggcgcatttgactactggggacagggaaccatggtcactgtctcgagtgcctccaccaagggcccctccgtgttcccgctcgctccatcatcgaagtctaccagcggaggcactgcggctctcggttgcctcgtgaaggactacttcccggagccggtgaccgtgtcgtggaacagcggagccctgaccagcggggtgcacacctttccggccgtcttgcagtcaagcggcctttactccctgtcatcagtggtgactgtcccgtccagctcattgggaacccaaacctacatctgcaatgtgaatcacaaacctagcaacaccaaggttgacaagaaagtcgagcccaaatcgtgtgacaagactcacacttgtccgccgtgcccggcacccgaactgctgggaggtcccagcgtctttctgttccctccaaagccgaaagacacgctgatgatctcccgcaccccggaggtcacttgcgtggtcgtggacgtgtcacatgaggacccagaggtgaagttcaattggtacgtggatggcgtcgaagtccacaatgccaaaactaagcccagagaagaacagtacaattcgacctaccgcgtcgtgtccgtgctcacggtgttgcatcaggattggctgaacgggaaggaatacaagtgcaaagtgtccaacaaggcgctgccggcaccgatcgagaaaactatctccaaagcgaagggacagcctagggaacctcaagtctacacgctgccaccatcacgggatgaactgactaagaatcaagtctcactgacttgtctggtgaaggggttttaccctagcgacattgccgtggagtgggaatccaacggccagccagagaacaactacaagactacccctccagtgctcgactcggatggatcgttcttcctttactcgaagctcaccgtggataagtcccggtggcagcagggaaacgtgttctcctgctcggtgatgcatgaagccctccataaccactatacccaaaagtcgctgtccctgtcgccgggaaag

SEQ ID NO: 22185 - DNA, 360 bp, Artificial Sequence
  source: /note="Description of Artificial Sequence: Synthetic polynucleotide"
gagctccaactgcaagaatccggccctggtctggtcaagccctccgaaaccctgagcctcacctgtactgtgtccgggatcgacttgagcacctggaggatgaactggattcgccagccaccgggaaagggactggagtggatcggcattatcggtactgggggacggacctactacgccaattgggcaaagggcagagtgacgatttcaaaggacacctcgaagaaccaggtgtccctgaaactgtcctccgtgactgcggctgacaccgccgtgtactattgcgcccggctgggagccaacaaccagggctacccgctggatctttggggacagggaaccctcgtgactgtctcgagt

SEQ ID NO: 22186 - DNA, 360 bp, Artificial Sequence
  source: /note="Description of Artificial Sequence: Synthetic polynucleotide"
gagctccaactgcaagaatccggccctggtctggtcaagccctccgaaaccctgagcctcacctgtactgtgtccgggatcgacttgagcacctggaggatgaactggattcgccagccaccgggaaagggactggagtggatcggcattatcggtactgggggacggacctactacgccaattgggcaaagggcagagtgacgatttcaaaggacacctcgaagaaccaggtgtccctgaaactgtcctccgtgactgcggctgacaccgccgtgtactattgcgcccggctgggagccaacaacgccggctacccgctggatctttggggacagggaaccctcgtgactgtctcgagt

SEQ ID NO: 22187 - DNA, 1341 bp, Artificial Sequence
  source: /note="Description of Artificial Sequence: Synthetic polynucleotide"
gagctccaactgcaagaatccggccctggtctggtcaagccctccgaaaccctgagcctcacctgtactgtgtccgggatcgacttgagcacctggaggatgaactggattcgccagccaccgggaaagggactggagtggatcggcattatcggtactgggggacggacctactacgccaattgggcaaagggcagagtgacgatttcaaaggacacctcgaagaaccaggtgtccctgaaactgtcctccgtgactgcggctgacaccgccgtgtactattgcgcccggctgggagccaacaaccagggctacccgctggatctttggggacagggaaccctcgtgactgtctcgagtgcctccaccaagggcccctccgtgttccctctggccccttgctcccggtccacctccgagtctaccgccgctctgggctgcctggtcaaggactacttccccgagcccgtgacagtgtcctggaactctggcgccctgacctccggcgtgcacaccttccctgccgtgctgcagtcctccggcctgtactccctgtcctccgtcgtgaccgtgccctcctccagcctgggcaccaagacctacacctgtaacgtggaccacaagccctccaacaccaaggtggacaagcgggtggaatctaagtacggccctccctgccccccctgccctgcccctgaatttctgggcggaccttccgtgttcctgttccccccaaagcccaaggacaccctgatgatctcccggacccccgaagtgacctgcgtggtggtggacgtgtcccaggaagatcccgaggtccagttcaattggtacgtggacggcgtggaagtgcacaatgccaagaccaagcccagagaggaacagttcaactccacctaccgggtggtgtccgtgctgaccgtgctgcaccaggactggctgaacggcaaagagtacaagtgcaaggtgtccaacaagggcctgccctccagcatcgaaaagaccatctccaaggccaagggccagccccgcgagccccaggtgtacaccctgccccctagccaggaagagatgaccaagaaccaggtgtccctgacctgtctggtcaagggcttctacccctccgacattgccgtggaatgggagtccaacggccagcccgagaacaactacaagaccaccccccctgtgctggacagcgacggctccttcttcctgtactctcggctgaccgtggacaagtcccggtggcaggaaggcaacgtcttctcctgctccgtgatgcacgaggccctgcacaaccactacacccagaagtccctgtccctgagcctgggcaag

SEQ ID NO: 22188 - DNA, 1341 bp, Artificial Sequence
  source: /note="Description of Artificial Sequence: Synthetic polynucleotide"
gagctccaactgcaagaatccggccctggtctggtcaagccctccgaaaccctgagcctcacctgtactgtgtccgggatcgacttgagcacctggaggatgaactggattcgccagccaccgggaaagggactggagtggatcggcattatcggtactgggggacggacctactacgccaattgggcaaagggcagagtgacgatttcaaaggacacctcgaagaaccaggtgtccctgaaactgtcctccgtgactgcggctgacaccgccgtgtactattgcgcccggctgggagccaacaacgccggctacccgctggatctttggggacagggaaccctcgtgactgtctcgagtgcctccaccaagggcccctccgtgttccctctggccccttgctcccggtccacctccgagtctaccgccgctctgggctgcctggtcaaggactacttccccgagcccgtgacagtgtcctggaactctggcgccctgacctccggcgtgcacaccttccctgccgtgctgcagtcctccggcctgtactccctgtcctccgtcgtgaccgtgccctcctccagcctgggcaccaagacctacacctgtaacgtggaccacaagccctccaacaccaaggtggacaagcgggtggaatctaagtacggccctccctgccccccctgccctgcccctgaatttctgggcggaccttccgtgttcctgttccccccaaagcccaaggacaccctgatgatctcccggacccccgaagtgacctgcgtggtggtggacgtgtcccaggaagatcccgaggtccagttcaattggtacgtggacggcgtggaagtgcacaatgccaagaccaagcccagagaggaacagttcaactccacctaccgggtggtgtccgtgctgaccgtgctgcaccaggactggctgaacggcaaagagtacaagtgcaaggtgtccaacaagggcctgccctccagcatcgaaaagaccatctccaaggccaagggccagccccgcgagccccaggtgtacaccctgccccctagccaggaagagatgaccaagaaccaggtgtccctgacctgtctggtcaagggcttctacccctccgacattgccgtggaatgggagtccaacggccagcccgagaacaactacaagaccaccccccctgtgctggacagcgacggctccttcttcctgtactctcggctgaccgtggacaagtcccggtggcaggaaggcaacgtcttctcctgctccgtgatgcacgaggccctgcacaaccactacacccagaagtccctgtccctgagcctgggcaag

SEQ ID NO: 22189 - DNA, 1350 bp, Artificial Sequence
  source: /note="Description of Artificial Sequence: Synthetic polynucleotide"
gagctccaactgcaagaatccggccctggtctggtcaagccctccgaaaccctgagcctcacctgtactgtgtccgggatcgacttgagcacctggaggatgaactggattcgccagccaccgggaaagggactggagtggatcggcattatcggtactgggggacggacctactacgccaattgggcaaagggcagagtgacgatttcaaaggacacctcgaagaaccaggtgtccctgaaactgtcctccgtgactgcggctgacaccgccgtgtactattgcgcccggctgggagccaacaaccagggctacccgctggatctttggggacagggaaccctcgtgactgtctcgagtgcctccaccaagggcccctccgtgttcccgctcgctccatcatcgaagtctaccagcggaggcactgcggctctcggttgcctcgtgaaggactacttcccggagccggtgaccgtgtcgtggaacagcggagccctgaccagcggggtgcacacctttccggccgtcttgcagtcaagcggcctttactccctgtcatcagtggtgactgtcccgtccagctcattgggaacccaaacctacatctgcaatgtgaatcacaaacctagcaacaccaaggttgacaagaaagtcgagcccaaatcgtgtgacaagactcacacttgtccgccgtgcccggcacccgaactgctgggaggtcccagcgtctttctgttccctccaaagccgaaagacacgctgatgatctcccgcaccccggaggtcacttgcgtggtcgtggacgtgtcacatgaggacccagaggtgaagttcaattggtacgtggatggcgtcgaagtccacaatgccaaaactaagcccagagaagaacagtacaattcgacctaccgcgtcgtgtccgtgctcacggtgttgcatcaggattggctgaacgggaaggaatacaagtgcaaagtgtccaacaaggcgctgccggcaccgatcgagaaaactatctccaaagcgaagggacagcctagggaacctcaagtctacacgctgccaccatcacgggatgaactgactaagaatcaagtctcactgacttgtctggtgaaggggttttaccctagcgacattgccgtggagtgggaatccaacggccagccagagaacaactacaagactacccctccagtgctcgactcggatggatcgttcttcctttactcgaagctcaccgtggataagtcccggtggcagcagggaaacgtgttctcctgctcggtgatgcatgaagccctccataaccactatacccaaaagtcgctgtccctgtcgccgggaaag

SEQ ID NO: 22190 - DNA, 1350 bp, Artificial Sequence
  source: /note="Description of Artificial Sequence: Synthetic polynucleotide"
gagctccaactgcaagaatccggccctggtctggtcaagccctccgaaaccctgagcctcacctgtactgtgtccgggatcgacttgagcacctggaggatgaactggattcgccagccaccgggaaagggactggagtggatcggcattatcggtactgggggacggacctactacgccaattgggcaaagggcagagtgacgatttcaaaggacacctcgaagaaccaggtgtccctgaaactgtcctccgtgactgcggctgacaccgccgtgtactattgcgcccggctgggagccaacaacgccggctacccgctggatctttggggacagggaaccctcgtgactgtctcgagtgcctccaccaagggcccctccgtgttcccgctcgctccatcatcgaagtctaccagcggaggcactgcggctctcggttgcctcgtgaaggactacttcccggagccggtgaccgtgtcgtggaacagcggagccctgaccagcggggtgcacacctttccggccgtcttgcagtcaagcggcctttactccctgtcatcagtggtgactgtcccgtccagctcattgggaacccaaacctacatctgcaatgtgaatcacaaacctagcaacaccaaggttgacaagaaagtcgagcccaaatcgtgtgacaagactcacacttgtccgccgtgcccggcacccgaactgctgggaggtcccagcgtctttctgttccctccaaagccgaaagacacgctgatgatctcccgcaccccggaggtcacttgcgtggtcgtggacgtgtcacatgaggacccagaggtgaagttcaattggtacgtggatggcgtcgaagtccacaatgccaaaactaagcccagagaagaacagtacaattcgacctaccgcgtcgtgtccgtgctcacggtgttgcatcaggattggctgaacgggaaggaatacaagtgcaaagtgtccaacaaggcgctgccggcaccgatcgagaaaactatctccaaagcgaagggacagcctagggaacctcaagtctacacgctgccaccatcacgggatgaactgactaagaatcaagtctcactgacttgtctggtgaaggggttttaccctagcgacattgccgtggagtgggaatccaacggccagccagagaacaactacaagactacccctccagtgctcgactcggatggatcgttcttcctttactcgaagctcaccgtggataagtcccggtggcagcagggaaacgtgttctcctgctcggtgatgcatgaagccctccataaccactatacccaaaagtcgctgtccctgtcgccgggaaag

SEQ ID NO: 22191 - protein, 110 aa, Oryctolagus cuniculus
  MOD_RES (91)..(91): Any amino acid
DVVMTQTPASVEAAVGGTVTIKCQASQSVSSYLAWYQQKPGQPPKLLIYAASYLASGVPSRFKGSGSGTEFTLTISDLECADAATYYCQQXYTRTDIDNTFGGGTKVVVE

SEQ ID NO: 22192 - protein, 110 aa, Artificial Sequence
  source: /note="Description of Artificial Sequence: Synthetic polypeptide"
DVVMTQSPASLAVSLGQRATISCQASQSVSSYLAWYQQKPGQPPKLLIYAASYLASGVPSRFKGSGSGTEFTLNIHPVEEEDAATYYCQQGYTRTDIDNTFGGGTKLEIK

SEQ ID NO: 22193 - protein, 110 aa, Artificial Sequence
  source: /note="Description of Artificial Sequence: Synthetic polypeptide"
DIQMTQSPSSLSASVGDRVTITCQASQSVSSYLAWYQQKPGKAPKLLIYAASYLASGVPSRFSGSGSGTDFTLTISSLQPEDFATYYCQQGYTRTDIDNTFGGGTKVEIK

SEQ ID NO: 22194 - protein, 110 aa, Artificial Sequence
  source: /note="Description of Artificial Sequence: Synthetic polypeptide"
DIQMTQSPSSLSASVGDRVTITCQASQSVSSYLAWYQQKPGKAPKLLIYAASYLASGVPSRFSGSGSGTDFTLTISSLQPEDFATYYCQQAYTRTDIDNTFGGGTKVEIK

SEQ ID NO: 22195 - protein, 110 aa, Artificial Sequence
  source: /note="Description of Artificial Sequence: Synthetic polypeptide"
  MOD_RES (91)..(91): Any amino acid
DIQMTQSPSSLSASVGDRVTITCQASQSVSSYLAWYQQKPGKAPKLLIYAASYLASGVPSRFSGSGSGTDFTLTISSLQPEDFATYYCQQXYTRTDIDNTFGGGTKVEIK

SEQ ID NO: 22196 - protein, 217 aa, Artificial Sequence
  source: /note="Description of Artificial Sequence: Synthetic polypeptide"
DIQMTQSPSSLSASVGDRVTITCQASQSVSSYLAWYQQKPGKAPKLLIYAASYLASGVPSRFSGSGSGTDFTLTISSLQPEDFATYYCQQGYTRTDIDNTFGGGTKVEIKRTVAAPSVFIFPPSDEQLKSGTASVVCLLNNFYPREAKVQWKVDNALQSGNSQESVTEQDSKDSTYSLSSTLTLSKADYEKHKVYACEVTHQGLSSPVTKSFNRGEC

SEQ ID NO: 22197 - protein, 217 aa, Artificial Sequence
  source: /note="Description of Artificial Sequence: Synthetic polypeptide"
DIQMTQSPSSLSASVGDRVTITCQASQSVSSYLAWYQQKPGKAPKLLIYAASYLASGVPSRFSGSGSGTDFTLTISSLQPEDFATYYCQQAYTRTDIDNTFGGGTKVEIKRTVAAPSVFIFPPSDEQLKSGTASVVCLLNNFYPREAKVQWKVDNALQSGNSQESVTEQDSKDSTYSLSSTLTLSKADYEKHKVYACEVTHQGLSSPVTKSFNRGEC

SEQ ID NO: 22198 - protein, 217 aa, Artificial Sequence
  source: /note="Description of Artificial Sequence: Synthetic polypeptide"
  MOD_RES (91)..(91): Any amino acid
DIQMTQSPSSLSASVGDRVTITCQASQSVSSYLAWYQQKPGKAPKLLIYAASYLASGVPSRFSGSGSGTDFTLTISSLQPEDFATYYCQQXYTRTDIDNTFGGGTKVEIKRTVAAPSVFIFPPSDEQLKSGTASVVCLLNNFYPREAKVQWKVDNALQSGNSQESVTEQDSKDSTYSLSSTLTLSKADYEKHKVYACEVTHQGLSSPVTKSFNRGEC

SEQ ID NO: 22199 - DNA, 330 bp, Oryctolagus cuniculus
gatgttgtgatgacccagactccagcctccgtggaggcagctgtgggaggcacagtcaccatcaagtgccaggccagtcagagcgttagtagttacttagcctggtatcagcagaaaccagggcagcctcccaagctcctgatctatgctgcatcctatctggcatccggggtcccatcacggttcaaaggcagtggatctgggacagagttcactctcaccatcagcgacctggagtgtgccgatgctgccacttattactgtcaacagggttatactaggactgatattgataatactttcggcggagggaccaaggtggtggtcgaa

SEQ ID NO: 22200 - protein, 214 aa, Artificial Sequence
  source: /note="Description of Artificial Sequence: Synthetic polypeptide"
DVQMIQSPSSLSASLGDIVTMTCQASQGTSINLNWFQQKPGKAPKLLIYGASNLEDGVPSRFSGSRYGTDFTLTISSLEDEDMATYFCLQHTYLPFTFGSGTKLEIKRADAAPTVSIFPPSSEQLTSGGASVVCFLNNFYPKDINVKWKIDGSERQNGVLNSWTDQDSKDSTYSMSSTLTLTKDEYERHNSYTCEATHKTSTSPIVKSFNRNEC

SEQ ID NO: 22201 - protein, 111 aa, Mus musculus; identical to SEQ ID NO: 21853

SEQ ID NO: 22202 - protein, 214 aa, Artificial Sequence
  source: /note="Description of Artificial Sequence: Synthetic polypeptide"
DVQMIQSPSSLSASLGDIVTMTCQASQDTSINLNWFQQKPGKAPKLLIYGASNLEDGVPSRFSGSRYGTDFTLTISSLEDEDMATYFCLQHTYLPFTFGSGTKLEIKRADAAPTVSIFPPSSEQLTSGGASVVCFLNNFYPKDINVKWKIDGSERQNGVLNSWTDQDSKDSTYSMSSTLTLTKDEYERHNSYTCEATHKTSTSPIVKSFNRNEC

SEQ ID NO: 22203 - protein, 214 aa, Artificial Sequence
  source: /note="Description of Artificial Sequence: Synthetic polypeptide"
DVQMIQSPSSLSASLGDIVTMTCQASQGTSINLNWFQQKPGKAPKLLIYGSSNLEDGVPSRFSGSRYGTDFTLTISSLEDEDMATYFCLQHSYLPFTFGSGTKLEIKRADAAPTVSIFPPSSEQLTSGGASVVCFLNNFYPKDINVKWKIDGSERQNGVLNSWTDQDSKDSTYSMSSTLTLTKDEYERHNSYTCEATHKTSTSPIVKSFNRNEC

SEQ ID NO: 22204 - protein, 219 aa, Artificial Sequence
  source: /note="Description of Artificial Sequence: Synthetic polypeptide"
DVMMTQTPLSLPVSLGDQASISCRSSQSLVHSNGNTYLHWHLQKPGQSPKFLIYKVSNRFSGVPDRFSGSGSGTDFTLKISRVEAEDLGVYFCSQSTHVPFTFGSGTKLEIKRADAAPTVSIFPPSSEQLTSGGASVVCFLNNFYPKDINVKWKIDGSERQNGVLNSWTDQDSKDSTYSMSSTLTLTKDEYERHNSYTCEATHKTSTSPIVKSFNRNEC

SEQ ID NO: 22205 - protein, 219 aa, Artificial Sequence
  source: /note="Description of Artificial Sequence: Synthetic polypeptide"
DVVMTQTPLSLPVSLGDQASISCRSSQSLVHSNGNTYLHWHLQKPGQSPKFLIYKVSNRFSGVPDRFSGSGSGTDFTLKISRVEAEDLGVYFCSQSTHVPFTFGSGTKLEIKRADAAPTVSIFPPSSEQLTSGGASVVCFLNNFYPKDINVKWKIDGSERQNGVLNSWTDQDSKDSTYSMSSTLTLTKDEYERHNSYTCEATHKTSTSPIVKSFNRNEC

SEQ ID NO: 22206 - protein, 214 aa, Artificial Sequence
  source: /note="Description of Artificial Sequence: Synthetic polypeptide"
DVQMTQSPSSLSASVGDRVTMTCQASQDTSINLNWFQQKPGKAPKLLIYGASNLETGVPSRFSGSRSGTDFTLTISSLQPEDMATYYCLQHTYLPFTFGSGTKLEIKRTVAAPSVFIFPPSDEQLKSGTASVVCLLNNFYPREAKVQWKVDNALQSGNSQESVTEQDSKDSTYSLSSTLTLSKADYEKHKVYACEVTHQGLSSPVTKSFNRGEC

SEQ ID NO: 22207 - DNA, 336 bp, Rattus norvegicus
gatattgtgatgacccagactccagtttccctgtctgtcacacttggagatcaagcttctatatcttgcaggtctagtcagagcctggaatatagtgatggctacacttatttggaatggtacctacagaagccaggccagtctcctcagctcctcatctatgaagtttccaaccgattttctggggtcccagacaggttcattggcagtgggtcagggacagatttcaccctcaagatcagcagagtagagcctgaggacttgggagtttattactgcttccaagctacacataatccgtacacgtttggagctgggaccaagctggaaataaaa

SEQ ID NO: 22208 - protein, 112 aa, Rattus norvegicus
DIVMTQTPVSLSVTLGDQASISCRSSQSLEYSDGYTYLEWYLQKPGQSPQLLIYEVSNRFSGVPDRFIGSGSGTDFTLKISRVEPEDLGVYYCFQATHNPYTFGAGTKLEIK

SEQ ID NO: 22209 - protein, 112 aa, Artificial Sequence
  source: /note="Description of Artificial Sequence: Synthetic polypeptide"
DIVMTQTPLSLSVTPGQPASISCRSSQSLEYSDGYTYLEWYLQKPGQSPQLLIYEVSNRFSGVPDRFSGSGSGTDFTLKISRVEAEDVGVYYCFQATHNPYTFGQGTKLEIK

SEQ ID NO: 22210 - protein, 219 aa, Artificial Sequence
  source: /note="Description of Artificial Sequence: Synthetic polypeptide"
DIVMTQTPLSLSVTPGQPASISCRSSQSLEYSDGYTYLEWYLQKPGQSPQLLIYEVSNRFSGVPDRFSGSGSGTDFTLKISRVEAEDVGVYYCFQATHNPYTFGQGTKLEIKRTVAAPSVFIFPPSDEQLKSGTASVVCLLNNFYPREAKVQWKVDNALQSGNSQESVTEQDSKDSTYSLSSTLTLSKADYEKHKVYACEVTHQGLSSPVTKSFNRGEC

SEQ ID NO: 22211 - DNA, 336 bp, Artificial Sequence
  source: /note="Description of Artificial Sequence: Synthetic polynucleotide"
gatatcgtgatgactcagaccccactctcactgtccgtcaccccgggacagcccgcgtcaatctcgtgtaggagctcccaatccctcgaatactcggacggctatacttacctggagtggtacttgcagaagcccggacagagcccgcagcttctgatctacgaagtgtccaacagattctccggcgtgcctgaccgcttttcggggtcgggctccggtactgatttcaccctgaaaatctcccgggtggaagccgaggacgtgggagtctactactgcttccaagccacccacaacccttacaccttcggacaggggaccaagctggagatcaag

SEQ ID NO: 22212 - protein, 111 aa, Artificial Sequence
  source: /note="Description of Artificial Sequence: Synthetic polypeptide"
DIVLTQSPDSLAVSLGERATISCRASQSVSTSRYSYIHWYQQKPGQPPKLLIKYASNLESGVPSRFSGSGSGTDFTLNIHPLEEEDFATYYCHHSWEIPLTFGQGTKLEIK

SEQ ID NO: 22213 - protein, 111 aa, Artificial Sequence
  source: /note="Description of Artificial Sequence: Synthetic polypeptide"
DIVLTQSPDSLAVSLGERATISCRASQSVSTSRYSYIHWYQQKPGQPPKLLIKYASNLESGVPSRFSGSGSGTDFTLNIHPLEPEDFATYYCHHSWEIPLTFGQGTKLEIK

SEQ ID NO: 22214 - protein, 111 aa, Artificial Sequence
  source: /note="Description of Artificial Sequence: Synthetic polypeptide"
DIVLTQSPDSLAVSLGERATISCRASQSVSTSRYSYIHWYQQKPGQPPKLLIKYASNLESGVPSRFSGSGSGTDFTLTISSLQPEDFATYYCHHSWEIPLTFGQGTKLEIK

SEQ ID NO: 22215 - protein, 111 aa, Artificial Sequence
  source: /note="Description of Artificial Sequence: Synthetic polypeptide"
DIVMTQSPDSLAVSLGERATISCRASQSVSTSRYSYIHWYQQKPGQPPKLLIKYASNLESGVPSRFSGSGSGTDFTLTISSLQPEDFATYYCHHSWEIPLTFGQGTKLEIK

SEQ ID NO: 22216 - protein, 112 aa, Mus musculus
DVLMTQTPLSLPVSLGDQASISCRSSQSILNSNGNTYLEWYLQKPGQSPKLLIYKVSNRFSGVPDRFSGSGSGTDFTLKISRVEAEDLGVYYCFQGSHVPWTFGGGTKLEIK

SEQ ID NO: 22217 - protein, 112 aa, Mus musculus
DVLMTQTPLSLPVSLGDQASISCRSSQSIINSNGNTYLEWYLQKPGQSPKLLIYKVSNRFSGVPDRFSGSGSGTDFTLKISRVETEDLGIYYCFQGSHVPWTFGGGTKLEIK

SEQ ID NO: 22218 - protein, 108 aa, Mus musculus
DIQMNQSPSSLSASLGDTITISCHASQNINVWLSWYQQKPGNIPKLLIFEASTLYTGVPSRFSGSGSGTGFTLTISSLQPEDIATYYCQQGQSYPWTFGGGTKLEIKR

SEQ ID NO: 22219 - protein, 112 aa, Mus musculus
DVLMTQTPLSLPVSLGDQASISCRSSQSILHRNGNTYLDWFLLKPGQSPKLLIYKVSNRFSGVPDRFSGSGSGTDFTLKISRVEAEDLGVYYCFQGSHVPWTFGGGTKLEIK

SEQ ID NO: 22220 - DNA, 336 bp, Artificial Sequence
  source: /note="Description of Artificial Sequence: Synthetic polynucleotide"
gatgttttgatgacccaaactccgctctccctggcagtcaatcttggagatcaagcctccctctcttgcagatcgagtcagactattttacatagtaatggaaatacctatttagaatggtatttgcagaaaccaggccagtctccaagactcctgatctacaaagtttctaaacgattttctggggtcccagacaggttcagtggcagtggatcagggacagatttcacactcaagatcagcagagtggaggctgacgatctgggaatttattactgctttcaaggttcacttgttccttgggcgttcggtggaggcaccaagctggaaatcaaa

SEQ ID NO: 22221 - DNA, 336 bp, Artificial Sequence
  source: /note="Description of Artificial Sequence: Synthetic polynucleotide"
gatgttttgatgacccaaactccactctccctgcctgtcagtcttggagatcaagcctccatctcttgcaaatctagtcagagcattgtacatagtaatggaaacacctatttagaatggtacctgcagaaaccaggccagtctccaaagctcctggtctacaaagtttccaatcgattttctggggtcccagacaggttcagtggcagtggatcagggacagatttcacactcaagatcagcagagtggaggctgaggatctgggaacttattactgctttcaaggttcacttgttccttgggcgttcggtggaggcaccaagctggaaatcaaa

SEQ ID NO: 22222 - DNA, 336 bp, Mus musculus
aacattttgatgacacagtcgccatcatctctggctgtgtctgcaggagaaaaggtcactatgagctgtaagtccagtcaaagtgttttatacagttcaaatcagaagaactacttggcctggtaccagcagaaaccagggcagtctcctaaactgctgatctactgggcatccactagggaatctggtgtccctgatcgcttcacaggcagtggatctgggacagattttactcttaccatcagcagtgtacaagctgaagacctggcagtttattactgtcttcaatacctctcctcgctcacgttcggtgctgggaccaagctggagctgaaa

SEQ ID NO: 22223 - DNA, 336 bp, Mus musculus
gatattgtgatgactcaggctgcaccctctgtacctgtcactcctggagagtcagtatccatctcctgcaggtctagtaagagtctcctgcatagtaatggcaacacttacttgtattggttcctgcagaggccaggccagtctcctcagctcctgatacatcggatgtccaaccttgcctcaggagtcccagacaggttcagtggcagtgggtcaggaactgctttcacactgagaatcagtagagtggaggctgaggatgtgggtgtttattactgtatgcaacatctaaaatctccgtacacgttcggaggggggaccaagctggaaataaaa

SEQ ID NO: 22224 - DNA, 336 bp, Mus musculus
gatattrtgatgactcaggctgcaccctctgtacctgtcactcctggagagtcagtatccatctcctgcaggtctagtaagagtctcctgcatagtaatggcaacacttacttgtattggttcctgcagaggccaggccagtctcctcagctcctgatatatcggatgtccaaccttgcctcaggagtcccagacaggttcagtggcagtgggtcaggaactgctttcacactgagaatcagtagagtggaggctgaggatgtgggtgtttattactgtatgcaacatctaaaatctccgtacacgttcggaggggggaccaagctggaaataaaa

SEQ ID NO: 22225 - DNA, 336 bp, Mus musculus
gatgttttgatgacccaaactccactctccctgcctgtcagtcttggagatcaagcctccatctcttgcagatctagtcagagcattgtacatagtaatggaaacacctatttagaatggttcctgcagaaaccaggccagtctccaaagctcctgatctacaaagtttccaaccgattttctggggtcccagacaggttcagtggcagtggatcagggacagatttcacactcaagatcagcagagtggaggctgaggatctgggagtttattactgctttcaaggttcacatgttccgtacacgttcggaggggggaccaagctggaaataaaa

SEQ ID NO: 22226 - DNA, 321 bp, Mus musculus
gacattgtgatgacccagtctcaaaaattcatgtccacatcagtaggagacagggtcagcgtcacctgcaaggccagtcagaatgtgggtactaatgtagcctggtatcaacagaaaccagggcaatctcctaaagcactgatttactcggcatcctaccggtacagtggagtccctgatcgcttcacaggcagtggatctgggacagatttcactctcaccatcagcaatgtgcagtctgaagacttggcagagtatttctgtcagcaatataacagctatccgtacacgttcggaggggggaccaagctggaaataaaa

SEQ ID NO: 22227 - DNA, 336 bp, Mus musculus
gatgttttgatgacccaaactccactctccctgcctgtcagtcttggagatcaagcctccatctcttgcagatctagtcagagcattgtacatagtaatggaaacacctatttagaatggtacctgcagaaaccaggccagtctccaaagctcctgatctacaaactttccaaccgattttctggggtcccagacaggttcagtggcagtggatcagggacagatttcacactcaagatcagcagagtggaggctgaggatctgggagtttattactgctttcaaggttcacatgttcctccgacgttcggtggaggcaccaagctggaaatcaaa

SEQ ID NO: 22228 - DNA, 336 bp, Mus musculus
gatattgtgatgactcaggctgcaccctctgtacctgtcactcctggagagtcagtatccatctcctgcaggtctagtaagagtctcctgcatagtaatggcaacacttacttgtattggttcctgcagaggccaggccagtctcctcagctcctgatatatcggatgtccaaccttgcctcaggagtcccagacaggttcagtggcagtgggtcaggaactgctttcacactgagaatcagtagagtggaggctgaggatgtgggtgtttattactgtatgcaacatctaaaatctccgtacacgttcggaggggggaccaagctggaaataaaa

SEQ ID NO: 22229 - DNA, 336 bp, Artificial Sequence
  source: /note="Description of Artificial Sequence: Synthetic polynucleotide"
gatgttttgatgacccaaagcccactctccctgcctgtcacccttggacagcccgcctccatctcttgcaaatctagtcagagcattgtacatagtaatggaaacacctatttagaatggtacctgcagaaaccaggccagtctccacagctcctggtctacaaagtttccaatcgattttctggggtcccagacagattcagtggcagtggatcagggacagatttcacactcaagatcagcagagtggaggctgaggatgtgggaacttattactgctttcaaggctcacttgttccttgggcgttcggtggaggcaccaaggtggaaatcaaa

SEQ ID NO: 22230 - DNA, 336 bp, Artificial Sequence
  source: /note="Description of Artificial Sequence: Synthetic polynucleotide"
gatgttgtgatgacccaaagcccactctccctgcctgtcacccttggacagcccgcctccatctcttgcaaatctagtcagagcattgtacatagtaatggaaacacctatttagaatggtacctgcagaaaccaggccagtctccacagctcctggtctacaaagtttccaatcgattttctggggtcccagacagattcagtggcagtggatcagggacagatttcacactcaagatcagcagagtggaggctgaggatgtgggaacttattactgctttcaaggctcacttgttccttgggcgttcggtggaggcaccaaggtggaaatcaaa

SEQ ID NO: 22231 - DNA, 336 bp, Artificial Sequence
  source: /note="Description of Artificial Sequence: Synthetic polynucleotide"
gatgttgtgatgacccaaagcccactctccctgcctgtcacccttggacagcccgcctccatctcttgcaaatctagtcagagcattgtacatagtaatggaaacacctatttagaatggtacctgcagaaaccaggccagtctccacagctcctggtctacaaagtttccaatcgattttctggggtcccagacagattcagtggcagtggatcagggacagatttcacactcaagatcagcagagtggaggctgaggatgtgggagtgtattactgctttcaaggctcacttgttccttgggcgttcggtggaggcaccaaggtggaaatcaaa

SEQ ID NO: 22232 - DNA, 336 bp, Artificial Sequence
  source: /note="Description of Artificial Sequence: Synthetic polynucleotide"
gatgttgtgatgacccaaagcccactctccctgcctgtcacccttggacagcccgcctccatctcttgcaaatctagtcagagcattgtacatagtaatggaaacacctatttagaatggtacctgcagaaaccaggccagtctccacagctcctgatctacaaagtttccaatcgattttctggggtcccagacagattcagtggcagtggatcagggacagatttcacactcaagatcagcagagtggaggctgaggatgtgggagtgtattactgctttcaaggctcacttgttccttgggcgttcggtggaggcaccaaggtggaaatcaaa

SEQ ID NO: 22233 - protein, 111 aa, Artificial Sequence
  source: /note="Description of Artificial Sequence: Synthetic polypeptide"
AQVMTQSPSSLSASVGDRVTITCRSSQSVRNNKLAWFQQKPGQPPKRLIYSASDLDYGVPSRFSGSGSGTEFTLTISSLQPEDFATYYCLGYFDSSADIVAFGGGTKVEIK

SEQ ID NO: 22234 - protein, 111 aa, Artificial Sequence
  source: /note="Description of Artificial Sequence: Synthetic polypeptide"
AQVMTQSPSSLSASVGDRVTITCRSSQSVRSNKLAWFQQKPGQPPKRLIYSASNLDYGVPSRFSGSGSGTEFTLTISSLQPEDFATYYCLGYFDSSADIVAFGGGTKVEIK

SEQ ID NO: 22235 - protein, 111 aa, Artificial Sequence
  source: /note="Description of Artificial Sequence: Synthetic polypeptide"
AQVMTQSPSSLSASVGDRVTITCRSSQSVRTNKLAWFQQKPGQPPKRLIYSASTLDFGVPSRFSGSGSGTEFTLTISSLQPEDFATYYCLGYFDSPLDIVAFGGGTKVEIK

SEQ ID NO: 22236 - protein, 111 aa, Artificial Sequence
  source: /note="Description of Artificial Sequence: Synthetic polypeptide"
AQVMTQSPSSLSASVGDRVTITCRSSQSVRTNKLAWFQQKPGQPPKRLIYSASTLDFGVPSRFSGSGSGTEFTLTISSLQPEDFATYYCAGYFDPHQDVVAFGGGTKVEIK

SEQ ID NO: 22237 - protein, 111 aa, Artificial Sequence
  source: /note="Description of Artificial Sequence: Synthetic polypeptide"
AQVMTQSPSSLSASVGDRVTITCRSSQSVRTNKLAWFQQKPGQPPKRLIYSASTLDFGVPSRFSGSGSGTEFTLTISSLQPEDFATYYCAGYFEAPADIVAFGGGTKVEIK

SEQ ID NO: 22238 - protein, 111 aa, Artificial Sequence
  source: /note="Description of Artificial Sequence: Synthetic polypeptide"
AQVMTQSPSSLSASVGDRVTITCRSSQSVRTNKLAWFQQKPGQPPKRLIYSASTLDFGVPSRFSGSGSGTEFTLTISSLQPEDFATYYCLGYFDSPADIVAFGGGTKVEIK

SEQ ID NO: 22239 - protein, 218 aa, Artificial Sequence
  source: /note="Description of Artificial Sequence: Synthetic polypeptide"
DIVLTQSPDSLAVSLGERATISCRASQSVSTSRYSYIHWYQQKPGQPPKLLIKYASNLESGVPSRFSGSGSGTDFTLNIHPLEEEDFATYYCHHSWEIPLTFGQGTKLEIKRTVAAPSVFIFPPSDEQLKSGTASVVCLLNNFYPREAKVQWKVDNALQSGNSQESVTEQDSKDSTYSLSSTLTLSKADYEKHKVYACEVTHQGLSSPVTKSFNRGEC

SEQ ID NO: 22240 - protein, 218 aa, Artificial Sequence
  source: /note="Description of Artificial Sequence: Synthetic polypeptide"
DIVLTQSPDSLAVSLGERATISCRASQSVSTSRYSYIHWYQQKPGQPPKLLIKYASNLESGVPSRFSGSGSGTDFTLNIHPLEPEDFATYYCHHSWEIPLTFGQGTKLEIKRTVAAPSVFIFPPSDEQLKSGTASVVCLLNNFYPREAKVQWKVDNALQSGNSQESVTEQDSKDSTYSLSSTLTLSKADYEKHKVYACEVTHQGLSSPVTKSFNRGEC

SEQ ID NO: 22241 - protein, 218 aa, Artificial Sequence
  source: /note="Description of Artificial Sequence: Synthetic polypeptide"
DIVLTQSPDSLAVSLGERATISCRASQSVSTSRYSYIHWYQQKPGQPPKLLIKYASNLESGVPSRFSGSGSGTDFTLTISSLQPEDFATYYCHHSWEIPLTFGQGTKLEIKRTVAAPSVFIFPPSDEQLKSGTASVVCLLNNFYPREAKVQWKVDNALQSGNSQESVTEQDSKDSTYSLSSTLTLSKADYEKHKVYACEVTHQGLSSPVTKSFNRGEC

SEQ ID NO: 22242 - protein, 218 aa, Artificial Sequence
  source: /note="Description of Artificial Sequence: Synthetic polypeptide"
DIVMTQSPDSLAVSLGERATISCRASQSVSTSRYSYIHWYQQKPGQPPKLLIKYASNLESGVPSRFSGSGSGTDFTLTISSLQPEDFATYYCHHSWEIPLTFGQGTKLEIKRTVAAPSVFIFPPSDEQLKSGTASVVCLLNNFYPREAKVQWKVDNALQSGNSQESVTEQDSKDSTYSLSSTLTLSKADYEKHKVYACEVTHQGLSSPVTKSFNRGEC

SEQ ID NO: 22243 - protein, 112 aa, Mus musculus
DVLMTQTPLSLPVSLGDQASISCRSNQSILHSNGNTYLDWYLQKPGQSPKLLIYKVSNRFSGVPDRFSGSGSGTDFTLRISRVEAEDLGVYYCFQGSHIPWTFGGGTKLEIK

SEQ ID NO: 22244 - protein, 108 aa, Mus musculus
ENVLTQSPAIMSASPGEKVTMTCRASSSVSSSYLHWYQQKSGASPKLWIYSTSNLASGVPARFSGSGSGTSYSLTISSVEAEDAATYYCQQYSGYPRTFGGGTKLEIK

SEQ ID NO: 22245 - DNA, 657 bp, Artificial Sequence
  source: /note="Description of Artificial Sequence: Synthetic polynucleotide"
gatatcgtgatgactcagaccccactctcactgtccgtcaccccgggacagcccgcgtcaatctcgtgtaggagctcccaatccctcgaatactcggacggctatacttacctggagtggtacttgcagaagcccggacagagcccgcagcttctgatctacgaagtgtccaacagattctccggcgtgcctgaccgcttttcggggtcgggctccggtactgatttcaccctgaaaatctcccgggtggaagccgaggacgtgggagtctactactgcttccaagccacccacaacccttacaccttcggacaggggaccaagctggagatcaagcggaccgtggccgctccctccgtgttcatcttcccaccctccgacgagcagcttaagtccggcaccgcctccgtcgtgtgcctgctgaacaacttctacccccgcgaggccaaggtgcagtggaaggtggacaacgccctgcagtccggcaactcccaggaatccgtcaccgagcaggactccaaggacagcacctactccctgtcctccaccctgaccctgtccaaggccgactacgagaagcacaaggtgtacgcctgcgaagtgacccaccagggcctgtccagccccgtgaccaagtccttcaaccggggcgagtgc

SEQ ID NO: 22246 - DNA, 330 bp, Artificial Sequence
  source: /note="Description of Artificial Sequence: Synthetic polynucleotide"
gatatccaaatgacccagtccccatcctccctgtccgcttctgtcggtgaccgcgtgaccattacttgtcaagccagccagtcggtgtcctcatacctcgcctggtatcagcagaagccgggaaaggcgcccaaacttttgatctacgccgcctcgtacctggcatccggcgtgccgtcaagattcagcgggtcgggctccggaactgacttcaccctgaccatcagcagcctgcagcctgaggactttgccacttactactgccagcagggatacacccggaccgatattgacaacaccttcggcgggggaactaaggtcgaaatcaag

SEQ ID NO: 22247 - DNA, 330 bp, Artificial Sequence
  source: /note="Description of Artificial Sequence: Synthetic polynucleotide"
gatatccaaatgacccagtccccatcctccctgtccgcttctgtcggtgaccgcgtgaccattacttgtcaagccagccagtcggtgtcctcatacctcgcctggtatcagcagaagccgggaaaggcgcccaaacttttgatctacgccgcctcgtacctggcatccggcgtgccgtcaagattcagcgggtcgggctccggaactgacttcaccctgaccatcagcagcctgcagcctgaggactttgccacttactactgccagcaggcctacacccggaccgatattgacaacaccttcggcgggggaactaaggtcgaaatcaag

SEQ ID NO: 22248 - DNA, 651 bp, Artificial Sequence
  source: /note="Description of Artificial Sequence: Synthetic polynucleotide"
gatatccaaatgacccagtccccatcctccctgtccgcttctgtcggtgaccgcgtgaccattacttgtcaagccagccagtcggtgtcctcatacctcgcctggtatcagcagaagccgggaaaggcgcccaaacttttgatctacgccgcctcgtacctggcatccggcgtgccgtcaagattcagcgggtcgggctccggaactgacttcaccctgaccatcagcagcctgcagcctgaggactttgccacttactactgccagcagggatacacccggaccgatattgacaacaccttcggcgggggaactaaggtcgaaatcaagcggaccgtggccgctccctccgtgttcatcttcccaccctccgacgagcagcttaagtccggcaccgcctccgtcgtgtgcctgctgaacaacttctacccccgcgaggccaaggtgcagtggaaggtggacaacgccctgcagtccggcaactcccaggaatccgtcaccgagcaggactccaaggacagcacctactccctgtcctccaccctgaccctgtccaaggccgactacgagaagcacaaggtgtacgcctgcgaagtgacccaccagggcctgtccagccccgtgaccaagtccttcaaccggggcgagtgc

SEQ ID NO: 22249 - DNA, 651 bp, Artificial Sequence
  source: /note="Description of Artificial Sequence: Synthetic polynucleotide"
gatatccaaatgacccagtccccatcctccctgtccgcttctgtcggtgaccgcgtgaccattacttgtcaagccagccagtcggtgtcctcatacctcgcctggtatcagcagaagccgggaaaggcgcccaaacttttgatctacgccgcctcgtacctggcatccggcgtgccgtcaagattcagcgggtcgggctccggaactgacttcaccctgaccatcagcagcctgcagcctgaggactttgccacttactactgccagcaggcctacacccggaccgatattgacaacaccttcggcgggggaactaaggtcgaaatcaagcgtacggtagcggccccatctgtcttcatcttcccgccatctgatgagcagttgaaatctggaactgcctctgttgtgtgcctgctgaataacttctatcccagagaggccaaagtacagtggaaggtggataacgccctccaatcgggtaactcccaggagagtgtcacagagcaggacagcaaggacagcacctacagcctcagcagcaccctgacgctgagcaaagcagactacgagaaacacaaagtctacgcctgcgaagtcacccatcagggcctgagctcgcccgtcacaaagagcttcaacaggggagagtgt

SEQ ID NO: 22250 - protein, 249 aa, Artificial Sequence
  source: /note="Description of Artificial Sequence: Synthetic polypeptide"
DVLMTQTPLSLPVSLGDQASISCRSSQSILNSNGNTYLEWYLQKPGQSPKLLIYKVSNRFSGVPDRFSGSGSGTDFTLKISRVEAEDLGVYYCFQGSHVPWTFGGGTKLEIKSSGGGGSGGGGGGSSRSSEVKLVESGGDLVTPGGSLKVSCAASGLTFSDSAMSWVRLTPEKRLEWVASISTGGATYYPDGLKGRFTISRDDARNILFLQMNSLRSEDTAMYYCTRRGVSSGNLFTYWGQGTLVTVSA

SEQ ID NO: 22251 - protein, 277 aa, Artificial Sequence
  source: /note="Description of Artificial Sequence: Synthetic polypeptide"
IQEEFKMKKTAIAIAVALAGFATVAQAADVLMTQTPLSLPVSLGDQASISCRSSQSILNSNGNTYLEWYLQKPGQSPKLLIYKVSNRFSGVPDRFSGSGSGTDFTLKISRVEAEDLGVYYCFQGSHVPWTFGGGTKLEIKSSGGGGSGGGGGGSSRSSEVKLVESGGDLVTPGGSLKVSCAASGLTFSDSAMSWVRLTPEKRLEWVASISTGGATYYPDGLKGRFTISRDDARNILFLQMNSLRSEDTAMYYCTRRGVSSGNLFTYWGQGTLVTVSA

SEQ ID NO: 22252 - protein, 264 aa, Artificial Sequence
  source: /note="Description of Artificial Sequence: Synthetic polypeptide"
DVLMTQTPLSLPVSLGDQASISCRSSQSILNSNGNTYLEWYLQKPGQSPKLLIYKVSNRFSGVPDRFSGSGSGTDFTLKISRVEAEDLGVYYCFQGSHVPWTFGGGTKLEIKSSGGGGSGGGGGGSSRSSEVKLVESGGDLVTPGGSLKVSCAASGLTFSDSAMSWVRLTPEKRLEWVASISTGGATYYPDGLKGRFTISRDDARNILFLQMNSLRSEDTAMYYCTRRGVSSGNLFTYWGQGTLVTVSAAKTTPPSVTSGQAGQ

SEQ ID NO: 22253 - protein, 255 aa, Artificial Sequence
  source: /note="Description of Artificial Sequence: Synthetic polypeptide"
DVLMTQTPLSLPVSLGDQASISCRSSQSILNSNGNTYLEWYLQKPGQSPKLLIYKVSNRFSGVPDRFSGSGSGTDFTLKISRVEAEDLGVYYCFQGSHVPWTFGGGTKLEIKSSGGGGSGGGGGGSSRSSEVKLVESGGDLVTPGGSLKVSCAASGLTFSDSAMSWVRLTPEKRLEWVASISTGGATYYPDGLKGRFTISRDDARNILFLQMNSLRSEDTAMYYCTRRGVSSGNLFTYWGQGTLVTVSAHHHHHH

SEQ ID NO: 22254 - protein, 261 aa, Artificial Sequence
  source: /note="Description of Artificial Sequence: Synthetic polypeptide"
DVLMTQTPLSLPVSLGDQASISCRSSQSILNSNGNTYLEWYLQKPGQSPKLLIYKVSNRFSGVPDRFSGSGSGTDFTLKISRVEAEDLGVYYCFQGSHVPWTFGGGTKLEIKSSGGGGSGGGGGGSSRSSEVKLVESGGDLVTPGGSLKVSCAASGLTFSDSAMSWVRLTPEKRLEWVASISTGGATYYPDGLKGRFTISRDDARNILFLQMNSLRSEDTAMYYCTRRGVSSGNLFTYWGQGTLVTVSAGAYPYDVPDYAS

SEQ ID NO: 22255 - protein, 282 aa, Artificial Sequence
  source: /note="Description of Artificial Sequence: Synthetic polypeptide"
DVLMTQTPLSLPVSLGDQASISCRSSQSILNSNGNTYLEWYLQKPGQSPKLLIYKVSNRFSGVPDRFSGSGSGTDFTLKISRVEAEDLGVYYCFQGSHVPWTFGGGTKLEIKSSGGGGSGGGGGGSSRSSEVKLVESGGDLVTPGGSLKVSCAASGLTFSDSAMSWVRLTPEKRLEWVASISTGGATYYPDGLKGRFTISRDDARNILFLQMNSLRSEDTAMYYCTRRGVSSGNLFTYWGQGTLVTVSAAKTTPPSVTSGQAGQHHHHHHGAYPYDVPDYAS

SEQ ID NO: 22256 - protein, 292 aa, Artificial Sequence
  source: /note="Description of Artificial Sequence: Synthetic polypeptide"
IQEEFKMKKTAIAIAVALAGFATVAQAADVLMTQTPLSLPVSLGDQASISCRSSQSILNSNGNTYLEWYLQKPGQSPKLLIYKVSNRFSGVPDRFSGSGSGTDFTLKISRVEAEDLGVYYCFQGSHVPWTFGGGTKLEIKSSGGGGSGGGGGGSSRSSEVKLVESGGDLVTPGGSLKVSCAASGLTFSDSAMSWVRLTPEKRLEWVASISTGGATYYPDGLKGRFTISRDDARNILFLQMNSLRSEDTAMYYCTRRGVSSGNLFTYWGQGTLVTVSAAKTTPPSVTSGQAGQ

SEQ ID NO: 22257 - protein, 283 aa, Artificial Sequence
  source: /note="Description of Artificial Sequence: Synthetic polypeptide"
IQEEFKMKKTAIAIAVALAGFATVAQAADVLMTQTPLSLPVSLGDQASISCRSSQSILNSNGNTYLEWYLQKPGQSPKLLIYKVSNRFSGVPDRFSGSGSGTDFTLKISRVEAEDLGVYYCFQGSHVPWTFGGGTKLEIKSSGGGGSGGGGGGSSRSSEVKLVESGGDLVTPGGSLKVSCAASGLTFSDSAMSWVRLTPEKRLEWVASISTGGATYYPDGLKGRFTISRDDARNILFLQMNSLRSEDTAMYYCTRRGVSSGNLFTYWGQGTLVTVSAHHHHHH

SEQ ID NO: 22258 - protein, 289 aa, Artificial Sequence
  source: /note="Description of Artificial Sequence: Synthetic polypeptide"
IQEEFKMKKTAIAIAVALAGFATVAQAADVLMTQTPLSLPVSLGDQASISCRSSQSILNSNGNTYLEWYLQKPGQSPKLLIYKVSNRFSGVPDRFSGSGSGTDFTLKISRVEAEDLGVYYCFQGSHVPWTFGGGTKLEIKSSGGGGSGGGGGGSSRSSEVKLVESGGDLVTPGGSLKVSCAASGLTFSDSAMSWVRLTPEKRLEWVASISTGGATYYPDGLKGRFTISRDDARNILFLQMNSLRSEDTAMYYCTRRGVSSGNLFTYWGQGTLVTVSAGAYPYDVPDYAS

SEQ ID NO: 22259 - protein, 310 aa, Artificial Sequence
  source: /note="Description of Artificial Sequence: Synthetic polypeptide"
IQEEFKMKKTAIAIAVALAGFATVAQAADVLMTQTPLSLPVSLGDQASISCRSSQSILNSNGNTYLEWYLQKPGQSPKLLIYKVSNRFSGVPDRFSGSGSGTDFTLKISRVEAEDLGVYYCFQGSHVPWTFGGGTKLEIKSSGGGGSGGGGGGSSRSSEVKLVESGGDLVTPGGSLKVSCAASGLTFSDSAMSWVRLTPEKRLEWVASISTGGATYYPDGLKGRFTISRDDARNILFLQMNSLRSEDTAMYYCTRRGVSSGNLFTYWGQGTLVTVSAAKTTPPSVTSGQAGQHHHHHHGAYPYDVPDYAS

SEQ ID NO: 22260 - protein, 250 aa, Artificial Sequence
  source: /note="Description of Artificial Sequence: Synthetic polypeptide"
DVLMTQTPLSLPVSLGDQASISCRSSQSIINSNGNTYLEWYLQKPGQSPKLLIYKVSNRFSGVPDRFSGSGSGTDFTLKISRVETEDLGIYYCFQGSHVPWTFGGGTKLEIKSSGGGGSGGGGGGSSRSSEVKLVESGGGLMKPGGSLKLSCAASGFTFSSYAMSWVRQSPEKRLEWVASISSGGQTYSPDSVKGRFTISRDNARNILYLQMRNLRSEDTAMYYCASRGDPTMTATLFVYWGQGTLVTVS

SEQ ID NO: 22261 - protein, 278 aa, Artificial Sequence
  source: /note="Description of Artificial Sequence: Synthetic polypeptide"
IQEEFKMKKTAIAIAVALAGFATVAQAADVLMTQTPLSLPVSLGDQASISCRSSQSIINSNGNTYLEWYLQKPGQSPKLLIYKVSNRFSGVPDRFSGSGSGTDFTLKISRVETEDLGIYYCFQGSHVPWTFGGGTKLEIKSSGGGGSGGGGGGSSRSSEVKLVESGGGLMKPGGSLKLSCAASGFTFSSYAMSWVRQSPEKRLEWVASISSGGQTYSPDSVKGRFTISRDNARNILYLQMRNLRSEDTAMYYCASRGDPTMTATLFVYWGQGTLVTVS

SEQ ID NO: 22262 - protein, 265 aa, Artificial Sequence
  source: /note="Description of Artificial Sequence: Synthetic polypeptide"
DVLMTQTPLSLPVSLGDQASISCRSSQSIINSNGNTYLEWYLQKPGQSPKLLIYKVSNRFSGVPDRFSGSGSGTDFTLKISRVETEDLGIYYCFQGSHVPWTFGGGTKLEIKSSGGGGSGGGGGGSSRSSEVKLVESGGGLMKPGGSLKLSCAASGFTFSSYAMSWVRQSPEKRLEWVASISSGGQTYSPDSVKGRFTISRDNARNILYLQMRNLRSEDTAMYYCASRGDPTMTATLFVYWGQGTLVTVSAKTTPPSVTSGQAGQ

SEQ ID NO: 22263 - protein, 256 aa, Artificial Sequence
  source: /note="Description of Artificial Sequence: Synthetic polypeptide"
DVLMTQTPLSLPVSLGDQASISCRSSQSIINSNGNTYLEWYLQKPGQSPKLLIYKVSNRFSGVPDRFSGSGSGTDFTLKISRVETEDLGIYYCFQGSHVPWTFGGGTKLEIKSSGGGGSGGGGGGSSRSSEVKLVESGGGLMKPGGSLKLSCAASGFTFSSYAMSWVRQSPEKRLEWVASISSGGQTYSPDSVKGRFTISRDNARNILYLQMRNLRSEDTAMYYCASRGDPTMTATLFVYWGQGTLVTVSHHHHHH

SEQ ID NO: 22264 - protein, 262 aa, Artificial Sequence
  source: /note="Description of Artificial Sequence: Synthetic polypeptide"
DVLMTQTPLSLPVSLGDQASISCRSSQSIINSNGNTYLEWYLQKPGQSPKLLIYKVSNRFSGVPDRFSGSGSGTDFTLKISRVETEDLGIYYCFQGSHVPWTFGGGTKLEIKSSGGGGSGGGGGGSSRSSEVKLVESGGGLMKPGGSLKLSCAASGFTFSSYAMSWVRQSPEKRLEWVASISSGGQTYSPDSVKGRFTISRDNARNILYLQMRNLRSEDTAMYYCASRGDPTMTATLFVYWGQGTLVTVSGAYPYDVPDYAS

SEQ ID NO: 22265 - protein, 283 aa, Artificial Sequence
  source: /note="Description of Artificial Sequence: Synthetic polypeptide"
DVLMTQTPLSLPVSLGDQASISCRSSQSIINSNGNTYLEWYLQKPGQSPKLLIYKVSNRFSGVPDRFSGSGSGTDFTLKISRVETEDLGIYYCFQGSHVPWTFGGGTKLEIKSSGGGGSGGGGGGSSRSSEVKLVESGGGLMKPGGSLKLSCAASGFTFSSYAMSWVRQSPEKRLEWVASISSGGQTYSPDSVKGRFTISRDNARNILYLQMRNLRSEDTAMYYCASRGDPTMTATLFVYWGQGTLVTVSAKTTPPSVTSGQAGQHHHHHHGAYPYDVPDYAS

SEQ ID NO: 22266 - protein, 293 aa, Artificial Sequence
  source: /note="Description of Artificial Sequence: Synthetic polypeptide"
IQEEFKMKKTAIAIAVALAGFATVAQAADVLMTQTPLSLPVSLGDQASISCRSSQSIINSNGNTYLEWYLQKPGQSPKLLIYKVSNRFSGVPDRFSGSGSGTDFTLKISRVETEDLGIYYCFQGSHVPWTFGGGTKLEIKSSGGGGSGGGGGGSSRSSEVKLVESGGGLMKPGGSLKLSCAASGFTFSSYAMSWVRQSPEKRLEWVASISSGGQTYSPDSVKGRFTISRDNARNILYLQMRNLRSEDTAMYYCASRGDPTMTATLFVYWGQGTLVTVSAKTTPPSVTSGQAGQ

SEQ ID NO: 22267 - protein, 284 aa, Artificial Sequence
  source: /note="Description of Artificial Sequence: Synthetic polypeptide"
IQEEFKMKKTAIAIAVALAGFATVAQAADVLMTQTPLSLPVSLGDQASISCRSSQSIINSNGNTYLEWYLQKPGQSPKLLIYKVSNRFSGVPDRFSGSGSGTDFTLKISRVETEDLGIYYCFQGSHVPWTFGGGTKLEIKSSGGGGSGGGGGGSSRSSEVKLVESGGGLMKPGGSLKLSCAASGFTFSSYAMSWVRQSPEKRLEWVASISSGGQTYSPDSVKGRFTISRDNARNILYLQMRNLRSEDTAMYYCASRGDPTMTATLFVYWGQGTLVTVSHHHHHH

SEQ ID NO: 22268 - protein, 290 aa, Artificial Sequence
  source: /note="Description of Artificial Sequence: Synthetic polypeptide"
IQEEFKMKKTAIAIAVALAGFATVAQAADVLMTQTPLSLPVSLGDQASISCRSSQSIINSNGNTYLEWYLQKPGQSPKLLIYKVSNRFSGVPDRFSGSGSGTDFTLKISRVETEDLGIYYCFQGSHVPWTFGGGTKLEIKSSGGGGSGGGGGGSSRSSEVKLVESGGGLMKPGGSLKLSCAASGFTFSSYAMSWVRQSPEKRLEWVASISSGGQTYSPDSVKGRFTISRDNARNILYLQMRNLRSEDTAMYYCASRGDPTMTATLFVYWGQGTLVTVSGAYPYDVPDYAS

SEQ ID NO: 22269 - protein, 311 aa, Artificial Sequence
  source: /note="Description of Artificial Sequence: Synthetic polypeptide"
IQEEFKMKKTAIAIAVALAGFATVAQAADVLMTQTPLSLPVSLGDQASISCRSSQSIINSNGNTYLEWYLQKPGQSPKLLIYKVSNRFSGVPDRFSGSGSGTDFTLKISRVETEDLGIYYCFQGSHVPWTFGGGTKLEIKSSGGGGSGGGGGGSSRSSEVKLVESGGGLMKPGGSLKLSCAASGFTFSSYAMSWVRQSPEKRLEWVASISSGGQTYSPDSVKGRFTISRDNARNILYLQMRNLRSEDTAMYYCASRGDPTMTATLFVYWGQGTLVTVSAKTTPPSVTSGQAGQHHHHHHGAYPYDVPDYAS

SEQ ID NO: 22270 - protein, 238 aa, Mus musculus
DIQMNQSPSSLSASLGDTITISCHASQNINVWLSWYQQKPGNIPKLLIFEASTLYTGVPSRFSGSGSGTGFTLTISSLQPEDIATYYCQQGQSYPWTFGGGTKLEIKRSSGGGGSGGGGGGSSRSSVQLQQSGAELVQPGASVKLSCTASGFNIKDTSMHWVRQRPEQGLEWIGRIAPANGNTKYDPKFQGKATITTDTSSNTAYLQLSSLTSEDTAVYYCSGSGNYDWGQGTTLTVS

SEQ ID NO: 22271 - protein, 251 aa, Artificial Sequence
  source: /note="Description of Artificial Sequence: Synthetic polypeptide"
DVLMTQTPLSLPVSLGDQASISCRSNQSILHSNGNTYLDWYLQKPGQSPKLLIYKVSNRFSGVPDRFSGSGSGTDFTLRISRVEAEDLGVYYCFQGSHIPWTFGGGTKLEIKSSGGGGSGGGGGGSSRSSEVQLVESGGGLVKPGGSLKLSCAASGFTFSNYALSWVRQTPEKRLEWVASISSGGNTYYPDSVKGRFTISRDNARNILYLQMSSLRSEDTAMFYCTSRGDTTLITTLFTYWGQGTLVTVSA

SEQ ID NO: 22272 - protein, 279 aa, Artificial Sequence
  source: /note="Description of Artificial Sequence: Synthetic polypeptide"
IQEEFKMKKTAIAIAVALAGFATVAQAADVLMTQTPLSLPVSLGDQASISCRSNQSILHSNGNTYLDWYLQKPGQSPKLLIYKVSNRFSGVPDRFSGSGSGTDFTLRISRVEAEDLGVYYCFQGSHIPWTFGGGTKLEIKSSGGGGSGGGGGGSSRSSEVQLVESGGGLVKPGGSLKLSCAASGFTFSNYALSWVRQTPEKRLEWVASISSGGNTYYPDSVKGRFTISRDNARNILYLQMSSLRSEDTAMFYCTSRGDTTLITTLFTYWGQGTLVTVSA

SEQ ID NO: 22273 - protein, 266 aa, Artificial Sequence
  source: /note="Description of Artificial Sequence: Synthetic polypeptide"
DVLMTQTPLSLPVSLGDQASISCRSNQSILHSNGNTYLDWYLQKPGQSPKLLIYKVSNRFSGVPDRFSGSGSGTDFTLRISRVEAEDLGVYYCFQGSHIPWTFGGGTKLEIKSSGGGGSGGGGGGSSRSSEVQLVESGGGLVKPGGSLKLSCAASGFTFSNYALSWVRQTPEKRLEWVASISSGGNTYYPDSVKGRFTISRDNARNILYLQMSSLRSEDTAMFYCTSRGDTTLITTLFTYWGQGTLVTVSAAKTTPPSVTSGQAGQ

SEQ ID NO: 22274 - protein, 257 aa, Artificial Sequence
  source: /note="Description of Artificial Sequence: Synthetic polypeptide"
DVLMTQTPLSLPVSLGDQASISCRSNQSILHSNGNTYLDWYLQKPGQSPKLLIYKVSNRFSGVPDRFSGSGSGTDFTLRISRVEAEDLGVYYCFQGSHIPWTFGGGTKLEIKSSGGGGSGGGGGGSSRSSEVQLVESGGGLVKPGGSLKLSCAASGFTFSNYALSWVRQTPEKRLEWVASISSGGNTYYPDSVKGRFTISRDNARNILYLQMSSLRSEDTAMFYCTSRGDTTLITTLFTYWGQGTLVTVSAHHHHHH

SEQ ID NO: 22275 - protein, 263 aa, Artificial Sequence
  source: /note="Description of Artificial Sequence: Synthetic polypeptide"
DVLMTQTPLSLPVSLGDQASISCRSNQSILHSNGNTYLDWYLQKPGQSPKLLIYKVSNRFSGVPDRFSGSGSGTDFTLRISRVEAEDLGVYYCFQGSHIPWTFGGGTKLEIKSSGGGGSGGGGGGSSRSSEVQLVESGGGLVKPGGSLKLSCAASGFTFSNYALSWVRQTPEKRLEWVASISSGGNTYYPDSVKGRFTISRDNARNILYLQMSSLRSEDTAMFYCTSRGDTTLITTLFTYWGQGTLVTVSAGAYPYDVPDYAS

SEQ ID NO: 22276 - protein, 284 aa, Artificial Sequence
  source: /note="Description of Artificial Sequence: Synthetic polypeptide"
DVLMTQTPLSLPVSLGDQASISCRSNQSILHSNGNTYLDWYLQKPGQSPKLLIYKVSNRFSGVPDRFSGSGSGTDFTLRISRVEAEDLGVYYCFQGSHIPWTFGGGTKLEIKSSGGGGSGGGGGGSSRSSEVQLVESGGGLVKPGGSLKLSCAASGFTFSNYALSWVRQTPEKRLEWVASISSGGNTYYPDSVKGRFTISRDNARNILYLQMSSLRSEDTAMFYCTSRGDTTLITTLFTYWGQGTLVTVSAAKTTPPSVTSGQAGQHHHHHHGAYPYDVPDYAS

SEQ ID NO: 22277 - protein, 294 aa, Artificial Sequence
  source: /note="Description of Artificial Sequence: Synthetic polypeptide"
IQEEFKMKKTAIAIAVALAGFATVAQAADVLMTQTPLSLPVSLGDQASISCRSNQSILHSNGNTYLDWYLQKPGQSPKLLIYKVSNRFSGVPDRFSGSGSGTDFTLRISRVEAEDLGVYYCFQGSHIPWTFGGGTKLEIKSSGGGGSGGGGGGSSRSSEVQLVESGGGLVKPGGSLKLSCAASGFTFSNYALSWVRQTPEKRLEWVASISSGGNTYYPDSVKGRFTISRDNARNILYLQMSSLRSEDTAMFYCTSRGDTTLITTLFTYWGQGTLVTVSAAKTTPPSVTSGQAGQ

SEQ ID NO: 22278 - protein, 285 aa, Artificial Sequence
  source: /note="Description of Artificial Sequence: Synthetic polypeptide"
IQEEFKMKKTAIAIAVALAGFATVAQAADVLMTQTPLSLPVSLGDQASISCRSNQSILHSNGNTYLDWYLQKPGQSPKLLIYKVSNRFSGVPDRFSGSGSGTDFTLRISRVEAEDLGVYYCFQGSHIPWTFGGGTKLEIKSSGGGGSGGGGGGSSRSSEVQLVESGGGLVKPGGSLKLSCAASGFTFSNYALSWVRQTPEKRLEWVASISSGGNTYYPDSVKGRFTISRDNARNILYLQMSSLRSEDTAMFYCTSRGDTTLITTLFTYWGQGTLVTVSAHHHHHH

SEQ ID NO: 22279 - protein, 291 aa, Artificial Sequence
  source: /note="Description of Artificial Sequence: Synthetic polypeptide"
IQEEFKMKKTAIAIAVALAGFATVAQAADVLMTQTPLSLPVSLGDQASISCRSNQSILHSNGNTYLDWYLQKPGQSPKLLIYKVSNRFSGVPDRFSGSGSGTDFTLRISRVEAEDLGVYYCFQGSHIPWTFGGGTKLEIKSSGGGGSGGGGGGSSRSSEVQLVESGGGLVKPGGSLKLSCAASGFTFSNYALSWVRQTPEKRLEWVASISSGGNTYYPDSVKGRFTISRDNARNILYLQMSSLRSEDTAMFYCTSRGDTTLITTLFTYWGQGTLVTVSAGAYPYDVPDYAS

SEQ ID NO: 22280 - protein, 312 aa, Artificial Sequence
  source: /note="Description of Artificial Sequence: Synthetic polypeptide"
IQEEFKMKKTAIAIAVALAGFATVAQAADVLMTQTPLSLPVSLGDQASISCRSNQSILHSNGNTYLDWYLQKPGQSPKLLIYKVSNRFSGVPDRFSGSGSGTDFTLRISRVEAEDLGVYYCFQGSHIPWTFGGGTKLEIKSSGGGGSGGGGGGSSRSSEVQLVESGGGLVKPGGSLKLSCAASGFTFSNYALSWVRQTPEKRLEWVASISSGGNTYYPDSVKGRFTISRDNARNILYLQMSSLRSEDTAMFYCTSRGDTTLITTLFTYWGQGTLVTVSAAKTTPPSVTSGQAGQHHHHHHGAYPYDVPDYAS

SEQ ID NO: 22281 - protein, 247 aa, Artificial Sequence
  source: /note="Description of Artificial Sequence: Synthetic polypeptide"
ENVLTQSPAIMSASPGEKVTMTCRASSSVSSSYLHWYQQKSGASPKLWIYSTSNLASGVPARFSGSGSGTSYSLTISSVEAEDAATYYCQQYSGYPRTFGGGTKLEIKSSGGGGSGGGGGGSSRSSEVQLVESGGGLVKPGGSLKLSCAASGFTFSNYALSWVRQTPEKRLEWVASISSGGNTYYPDSVKGRFTISRDNARNILYLQMSSLRSEDTAMFYCTSRGDTTLITTLFTYWGQGTLVTVSA

SEQ ID NO: 22282 - protein, 275 aa, Artificial Sequence
  source: /note="Description of Artificial Sequence: Synthetic polypeptide"
IQEEFKMKKTAIAIAVALAGFATVAQAAENVLTQSPAIMSASPGEKVTMTCRASSSVSSSYLHWYQQKSGASPKLWIYSTSNLASGVPARFSGSGSGTSYSLTISSVEAEDAATYYCQQYSGYPRTFGGGTKLEIKSSGGGGSGGGGGGSSRSSEVQLVESGGGLVKPGGSLKLSCAASGFTFSNYALSWVRQTPEKRLEWVASISSGGNTYYPDSVKGRFTISRDNARNILYLQMSSLRSEDTAMFYCTSRGDTTLITTLFTYWGQGTLVTVSA

SEQ ID NO: 22283 - protein, 262 aa, Artificial Sequence
  source: /note="Description of Artificial Sequence: Synthetic polypeptide"
ENVLTQSPAIMSASPGEKVTMTCRASSSVSSSYLHWYQQKSGASPKLWIYSTSNLASGVPARFSGSGSGTSYSLTISSVEAEDAATYYCQQYSGYPRTFGGGTKLEIKSSGGGGSGGGGGGSSRSSEVQLVESGGGLVKPGGSLKLSCAASGFTFSNYALSWVRQTPEKRLEWVASISSGGNTYYPDSVKGRFTISRDNARNILYLQMSSLRSEDTAMFYCTSRGDTTLITTLFTYWGQGTLVTVSAAKTTPPSVTSGQAGQ

SEQ ID NO: 22284 - protein, 253 aa, Artificial Sequence
  source: /note="Description of Artificial Sequence: Synthetic polypeptide"
ENVLTQSPAIMSASPGEKVTMTCRASSSVSSSYLHWYQQKSGASPKLWIYSTSNLASGVPARFSGSGSGTSYSLTISSVEAEDAATYYCQQYSGYPRTFGGGTKLEIKSSGGGGSGGGGGGSSRSSEVQLVESGGGLVKPGGSLKLSCAASGFTFSNYALSWVRQTPEKRLEWVASISSGGNTYYPDSVKGRFTISRDNARNILYLQMSSLRSEDTAMFYCTSRGDTTLITTLFTYWGQGTLVTVSAHHHHHH

SEQ ID NO: 22285 - protein, 259 aa, Artificial Sequence
  source: /note="Description of Artificial Sequence: Synthetic polypeptide"
ENVLTQSPAIMSASPGEKVTMTCRASSSVSSSYLHWYQQKSGASPKLWIYSTSNLASGVPARFSGSGSGTSYSLTISSVEAEDAATYYCQQYSGYPRTFGGGTKLEIKSSGGGGSGGGGGGSSRSSEVQLVESGGGLVKPGGSLKLSCAASGFTFSNYALSWVRQTPEKRLEWVASISSGGNTYYPDSVKGRFTISRDNARNILYLQMSSLRSEDTAMFYCTSRGDTTLITTLFTYWGQGTLVTVSAGAYPYDVPDYAS

SEQ ID NO: 22286 - protein, 280 aa, Artificial Sequence
  source: /note="Description of Artificial Sequence: Synthetic polypeptide"
ENVLTQSPAIMSASPGEKVTMTCRASSSVSSSYLHWYQQKSGASPKLWIYSTSNLASGVPARFSGSGSGTSYSLTISSVEAEDAATYYCQQYSGYPRTFGGGTKLEIKSSGGGGSGGGGGGSSRSSEVQLVESGGGLVKPGGSLKLSCAASGFTFSNYALSWVRQTPEKRLEWVASISSGGNTYYPDSVKGRFTISRDNARNILYLQMSSLRSEDTAMFYCTSRGDTTLITTLFTYWGQGTLVTVSAAKTTPPSVTSGQAGQHHHHHHGAYPYDVPDYAS

SEQ ID NO: 22287 - protein, 290 aa, Artificial Sequence
  source: /note="Description of Artificial Sequence: Synthetic polypeptide"
IQEEFKMKKTAIAIAVALAGFATVAQAAENVLTQSPAIMSASPGEKVTMTCRASSSVSSSYLHWYQQKSGASPKLWIYSTSNLASGVPARFSGSGSGTSYSLTISSVEAEDAATYYCQQYSGYPRTFGGGTKLEIKSSGGGGSGGGGGGSSRSSEVQLVESGGGLVKPGGSLKLSCAASGFTFSNYALSWVRQTPEKRLEWVASISSGGNTYYPDSVKGRFTISRDNARNILYLQMSSLRSEDTAMFYCTSRGDTTLITTLFTYWGQGTLVTVSAAKTTPPSVTSGQAGQ

SEQ ID NO: 22288 - protein, 281 aa, Artificial Sequence
  source: /note="Description of Artificial Sequence: Synthetic polypeptide"
IQEEFKMKKTAIAIAVALAGFATVAQAAENVLTQSPAIMSASPGEKVTMTCRASSSVSSSYLHWYQQKSGASPKLWIYSTSNLASGVPARFSGSGSGTSYSLTISSVEAEDAATYYCQQYSGYPRTFGGGTKLEIKSSGGGGSGGGGGGSSRSSEVQLVESGGGLVKPGGSLKLSCAASGFTFSNYALSWVRQTPEKRLEWVASISSGGNTYYPDSVKGRFTISRDNARNILYLQMSSLRSEDTAMFYCTSRGDTTLITTLFTYWGQGTLVTVSAHHHHHH

SEQ ID NO: 22289 - protein, 287 aa, Artificial Sequence
  source: /note="Description of Artificial Sequence: Synthetic polypeptide"
IQEEFKMKKTAIAIAVALAGFATVAQAAENVLTQSPAIMSASPGEKVTMTCRASSSVSSSYLHWYQQKSGASPKLWIYSTSNLASGVPARFSGSGSGTSYSLTISSVEAEDAATYYCQQYSGYPRTFGGGTKLEIKSSGGGGSGGGGGGSSRSSEVQLVESGGGLVKPGGSLKLSCAASGFTFSNYALSWVRQTPEKRLEWVASISSGGNTYYPDSVKGRFTISRDNARNILYLQMSSLRSEDTAMFYCTSRGDTTLITTLFTYWGQGTLVTVSAGAYPYDVPDYAS

SEQ ID NO: 22290 - protein, 308 aa, Artificial Sequence
  source: /note="Description of Artificial Sequence: Synthetic polypeptide"
IQEEFKMKKTAIAIAVALAGFATVAQAAENVLTQSPAIMSASPGEKVTMTCRASSSVSSSYLHWYQQKSGASPKLWIYSTSNLASGVPARFSGSGSGTSYSLTISSVEAEDAATYYCQQYSGYPRTFGGGTKLEIKSSGGGGSGGGGGGSSRSSEVQLVESGGGLVKPGGSLKLSCAASGFTFSNYALSWVRQTPEKRLEWVASISSGGNTYYPDSVKGRFTISRDNARNILYLQMSSLRSEDTAMFYCTSRGDTTLITTLFTYWGQGTLVTVSAAKTTPPSVTSGQAGQHHHHHHGAYPYDVPDYAS

SEQ ID NO: 22291 - protein, 251 aa, Artificial Sequence
  source: /note="Description of Artificial Sequence: Synthetic polypeptide"
DVLMTQTPLSLPVSLGDQASISCRSSQSILHRNGNTYLDWFLLKPGQSPKLLIYKVSNRFSGVPDRFSGSGSGTDFTLKISRVEAEDLGVYYCFQGSHVPWTFGGGTKLEIKSSGGGGSGGGGGGSSRSSEVKLVESGGGLVKPGGSLTLSCAASGFTFSSYAMSWVRQTPEKSLEWVASISSGGNTFYPDTVKGRFTISRDNARNILYLQMSGLRSEDTAIYYCARRGDPNMITTLFGYWGQGTLVTISA

SEQ ID NO: 22292 - protein, 279 aa, Artificial Sequence
  source: /note="Description of Artificial Sequence: Synthetic polypeptide"
IQEEFKMKKTAIAIAVALAGFATVAQAADVLMTQTPLSLPVSLGDQASISCRSSQSILHRNGNTYLDWFLLKPGQSPKLLIYKVSNRFSGVPDRFSGSGSGTDFTLKISRVEAEDLGVYYCFQGSHVPWTFGGGTKLEIKSSGGGGSGGGGGGSSRSSEVKLVESGGGLVKPGGSLTLSCAASGFTFSSYAMSWVRQTPEKSLEWVASISSGGNTFYPDTVKGRFTISRDNARNILYLQMSGLRSEDTAIYYCARRGDPNMITTLFGYWGQGTLVTISA

SEQ ID NO: 22293 - protein, 266 aa, Artificial Sequence
  source: /note="Description of Artificial Sequence: Synthetic polypeptide"
DVLMTQTPLSLPVSLGDQASISCRSSQSILHRNGNTYLDWFLLKPGQSPKLLIYKVSNRFSGVPDRFSGSGSGTDFTLKISRVEAEDLGVYYCFQGSHVPWTFGGGTKLEIKSSGGGGSGGGGGGSSRSSEVKLVESGGGLVKPGGSLTLSCAASGFTFSSYAMSWVRQTPEKSLEWVASISSGGNTFYPDTVKGRFTISRDNARNILYLQMSGLRSEDTAIYYCARRGDPNMITTLFGYWGQGTLVTISAAKTTPPSVTSGQAGQ

SEQ ID NO: 22294 - protein, 257 aa, Artificial Sequence
  source: /note="Description of Artificial Sequence: Synthetic polypeptide"
DVLMTQTPLSLPVSLGDQASISCRSSQSILHRNGNTYLDWFLLKPGQSPKLLIYKVSNRFSGVPDRFSGSGSGTDFTLKISRVEAEDLGVYYCFQGSHVPWTFGGGTKLEIKSSGGGGSGGGGGGSSRSSEVKLVESGGGLVKPGGSLTLSCAASGFTFSSYAMSWVRQTPEKSLEWVASISSGGNTFYPDTVKGRFTISRDNARNILYLQMSGLRSEDTAIYYCARRGDPNMITTLFGYWGQGTLVTISAHHHHHH

SEQ ID NO: 22295 - protein, 263 aa, Artificial Sequence
  source: /note="Description of Artificial Sequence: Synthetic polypeptide"
DVLMTQTPLSLPVSLGDQASISCRSSQSILHRNGNTYLDWFLLKPGQSPKLLIYKVSNRFSGVPDRFSGSGSGTDFTLKISRVEAEDLGVYYCFQGSHVPWTFGGGTKLEIKSSGGGGSGGGGGGSSRSSEVKLVESGGGLVKPGGSLTLSCAASGFTFSSYAMSWVRQTPEKSLEWVASISSGGNTFYPDTVKGRFTISRDNARNILYLQMSGLRSEDTAIYYCARRGDPNMITTLFGYWGQGTLVTISAGAYPYDVPDYAS

SEQ ID NO: 22296 - protein, 284 aa, Artificial Sequence
  source: /note="Description of Artificial Sequence: Synthetic polypeptide"
DVLMTQTPLSLPVSLGDQASISCRSSQSILHRNGNTYLDWFLLKPGQSPKLLIYKVSNRFSGVPDRFSGSGSGTDFTLKISRVEAEDLGVYYCFQGSHVPWTFGGGTKLEIKSSGGGGSGGGGGGSSRSSEVKLVESGGGLVKPGGSLTLSCAASGFTFSSYAMSWVRQTPEKSLEWVASISSGGNTFYPDTVKGRFTISRDNARNILYLQMSGLRSEDTAIYYCARRGDPNMITTLFGYWGQGTLVTISAAKTTPPSVTSGQAGQHHHHHHGAYPYDVPDYAS

SEQ ID NO: 22297 - protein, 294 aa, Artificial Sequence
  source: /note="Description of Artificial Sequence: Synthetic polypeptide"
IQEEFKMKKTAIAIAVALAGFATVAQAADVLMTQTPLSLPVSLGDQASISCRSSQSILHRNGNTYLDWFLLKPGQSPKLLIYKVSNRFSGVPDRFSGSGSGTDFTLKISRVEAEDLGVYYCFQGSHVPWTFGGGTKLEIKSSGGGGSGGGGGGSSRSSEVKLVESGGGLVKPGGSLTLSCAASGFTFSSYAMSWVRQTPEKSLEWVASISSGGNTFYPDTVKGRFTISRDNARNILYLQMSGLRSEDTAIYYCARRGDPNMITTLFGYWGQGTLVTISAAKTTPPSVTSGQAGQ

SEQ ID NO: 22298 - protein, 285 aa, Artificial Sequence
  source: /note="Description of Artificial Sequence: Synthetic polypeptide"
IQEEFKMKKTAIAIAVALAGFATVAQAADVLMTQTPLSLPVSLGDQASISCRSSQSILHRNGNTYLDWFLLKPGQSPKLLIYKVSNRFSGVPDRFSGSGSGTDFTLKISRVEAEDLGVYYCFQGSHVPWTFGGGTKLEIKSSGGGGSGGGGGGSSRSSEVKLVESGGGLVKPGGSLTLSCAASGFTFSSYAMSWVRQTPEKSLEWVASISSGGNTFYPDTVKGRFTISRDNARNILYLQMSGLRSEDTAIYYCARRGDPNMITTLFGYWGQGTLVTISAHHHHHH

SEQ ID NO: 22299 - protein, 291 aa, Artificial Sequence
  source: /note="Description of Artificial Sequence: Synthetic polypeptide"
IQEEFKMKKTAIAIAVALAGFATVAQAADVLMTQTPLSLPVSLGDQASISCRSSQSILHRNGNTYLDWFLLKPGQSPKLLIYKVSNRFSGVPDRFSGSGSGTDFTLKISRVEAEDLGVYYCFQGSHVPWTFGGGTKLEIKSSGGGGSGGGGGGSSRSSEVKLVESGGGLVKPGGSLTLSCAASGFTFSSYAMSWVRQTPEKSLEWVASISSGGNTFYPDTVKGRFTISRDNARNILYLQMSGLRSEDTAIYYCARRGDPNMITTLFGYWGQGTLVTISAGAYPYDVPDYAS

SEQ ID NO: 22300 - protein, 312 aa, Artificial Sequence
  source: /note="Description of Artificial Sequence: Synthetic polypeptide"
IQEEFKMKKTAIAIAVALAGFATVAQAADVLMTQTPLSLPVSLGDQASISCRSSQSILHRNGNTYLDWFLLKPGQSPKLLIYKVSNRFSGVPDRFSGSGSGTDFTLKISRVEAEDLGVYYCFQGSHVPWTFGGGTKLEIKSSGGGGSGGGGGGSSRSSEVKLVESGGGLVKPGGSLTLSCAASGFTFSSYAMSWVRQTPEKSLEWVASISSGGNTFYPDTVKGRFTISRDNARNILYLQMSGLRSEDTAIYYCARRGDPNMITTLFGYWGQGTLVTISAAKTTPPSVTSGQAGQHHHHHHGAYPYDVPDYAS

SEQ ID NO: 22301 - protein, 135 aa, Artificial Sequence
  source: /note="Description of Artificial Sequence: Synthetic polypeptide"
QLQLVESGGGLVQPGGSLRLSCEASGFTLDYYGIGWFRQPPGKEREAVSYISASARTILYADSVKGRFTISRDNAKNAVYLQMNSLKREDTAVYYCARRRFSASSVNRWLADDYDVWGRGTQVAVSSEPKTPKPQ

SEQ ID NO: 22302 - protein, 119 aa, Artificial Sequence
  source: /note="Description of Artificial Sequence: Synthetic polypeptide"
QVQLVESGGGLVQTGGSLRLSCASSGSIAGFETVTWSRQAPGKSLQWVASMTKTNNEIYSDSVKGRFIISRDNAKNTVYLQMNSLKPEDTGVYFCKGPELRGQGIQVTVSSEPKTPKPQ

SEQ ID NO: 22303 - protein, 129 aa, Artificial Sequence
  source: /note="Description of Artificial Sequence: Synthetic polypeptide"
QVQLVESGGGLVQPGGSLRLSCAASGFTFSDYVMTWVRQAPGKGPEWIATINTDGSTMRDDSTKGRFTISRDNAKNTLYLQMTSLKPEDTALYYCARGRVISASAIRGAVRGPGTQVTVSSEPKTPKPQ

SEQ ID NO: 22304 - protein, 675 aa, Artificial Sequence
  source: /note="Description of Artificial Sequence: Synthetic polypeptide"
METDTLLLWVLLLWVPGSTGDAAQPARRARRTKLSGAPVPYPDPLEPRAAAQVQLVESGGGLVQPGGSLRLSCAASGFTLDYSSIGWFRQAPGKEREGVSCISSSGDSTKYADSVKGRFTTSRDNAKNTVYLQMNSLKPDDTAVYYCAAFRATMCGVFPLSPYGKDDWGKGTLVTVSSEPKTPKPQPTSAIAGGGGSGGGGSGGGGSAAAQLQLVESGGGLVQPGGSLRLSCEASGFTLDYYGIGWFRQPPGKEREAVSYISASARTILYADSVKGRFTISRDNAKNAVYLQMNSLKREDTAVYYCARRRFSASSVNRWLADDYDVWGRGTQVAVSSEPKTPKPQTSALVGGGGSGGGGSGGGGSLQAMAAAQVQLVESGGGLVQTGGSLRLSCASSGSIAGFETVTWSRQAPGKSLQWVASMTKTNNEIYSDSVKGRFIISRDNAKNTVYLQMNSLKPEDTGVYFCKGPELRGQGIQVTVSSEPKTPKPQAIAGGGGSGGGGSGGGGSLQGQVQLVESGGGLVQPGGSLRLSCAASGFTFSDYVMTWVRQAPGKGPEWIATINTDGSTMRDDSTKGRFTISRDNAKNTLYLQMTSLKPEDTALYYCARGRVISASAIRGAVRGPGTQVTVSSEPKTPKPQPARQGAPVPYPDPLEPRGGGSDICLPRWGCLWED

SEQ ID NO: 22305 - protein, 117 aa, Artificial Sequence
  source: /note="Description of Artificial Sequence: Synthetic polypeptide"
QVQLVQSGAEVKKPGASVKVSCKASGYTFNDHNIHWVRQAPGQGLEWIGYIYPYIGTTVYNQKFKSKATLTVDTSTSTAYMELRSLRSDDTAVYYCSRWGHRGFPYWGQGTLVTVSS

SEQ ID NO: 22306 - protein, 117 aa, Artificial Sequence
  source: /note="Description of Artificial Sequence: Synthetic polypeptide"
QVQLVQSGAEVKKPGASVKVSCKASGYTFNDHNIHWVRQAPGQGLEWIGYIYPYIGTTVYNQKFKSKATLTVDNSTSTAYMELRSLRSDDTAVYYCSRWGHRGFPYWGQGTLVTVSS

SEQ ID NO: 22307 - protein, 118 aa, Artificial Sequence
  source: /note="Description of Artificial Sequence: Synthetic polypeptide"
QVQLVQSGAEVKKPGASVKVSCKASGYTFTDYNMDWVRQAPGQRLEWIGDINPKYDIIGHNPKFMGKATLTVDKSASTAYMELSSLRSEDTAVYYCARSDRGWYFDVWGQGTLVTVSS

SEQ ID NO: 22308 - protein, 118 aa, Artificial Sequence
  source: /note="Description of Artificial Sequence: Synthetic polypeptide"
QVQLVQSGAEVKKPGASVKVSCKASGYTFTDYNMDWVRQAPGQRLEWIGDINPKYDIIGHNPKFMGKATITVDKSASTAYMELSSLRSEDTAVYYCARSDRGWYFDVWGQGTLVTVSS

SEQ ID NO: 22309 - protein, 117 aa, Artificial Sequence; identical to SEQ ID NO: 22305
  source: /note="Description of Artificial Sequence: Synthetic polypeptide"

SEQ ID NO: 22310 - protein, 117 aa, Artificial Sequence; identical to SEQ ID NO: 22306
  source: /note="Description of Artificial Sequence: Synthetic polypeptide"

SEQ ID NO: 22311 - protein, 118 aa, Artificial Sequence; identical to SEQ ID NO: 22307
  source: /note="Description of Artificial Sequence: Synthetic polypeptide"

SEQ ID NO: 22312 - protein, 118 aa, Artificial Sequence; identical to SEQ ID NO: 22308
  source: /note="Description of Artificial Sequence: Synthetic polypeptide"

SEQ ID NO: 22313 - protein, 119 aa, Artificial Sequence
  source: /note="Description of Artificial Sequence: Synthetic polypeptide"
QIQLVESGGGVVQPGRSLRLSCVASGFTLSGHGMHWVRQAPGKGLEWVAFISFDGGHQDYTDAAEGRFTISRDNSKNTLYLEMVSLRPADTAIYYCVKGSDSSRGFGYWGRGILVTVSS

SEQ ID NO: 22314 - protein, 119 aa, Artificial Sequence
  source: /note="Description of Artificial Sequence: Synthetic polypeptide"
QVQLVESGGDVVQPGRSLRLSCAASGFTFSGHGMHWVRQAPGKGLEWVALILYDGSSEDYTDSVKGRFTVSRDNSKNTLYLQMNSLRAEDTAVYYCARGSILNRPFDYWGQGTLVTVSS

SEQ ID NO: 22315 - protein, 119 aa, Artificial Sequence
  source: /note="Description of Artificial Sequence: Synthetic polypeptide"
EVQLLESGGGLAQPGGSLRLSCAASGFNFGTHDMSWVRQAPGKGLEWVSGLTSTGGSASSADSVKGRFTISRDNSKNILYLQMNSLRAEDTAVYYCAKTFNWNSYFDYWGQGTLVTVSS

SEQ ID NO: 22316 - protein, 124 aa, Artificial Sequence
  source: /note="Description of Artificial Sequence: Synthetic polypeptide"
DVQLVESGGDFVQPGGSLRLSCAASGVAFNDYEMNWIRQAPGKRLEWISHIDSSGTIIYYADSVKGRFTISRDSAKNSLFLQMDSLRAEDTAVYYCARERYSHYGYYYFGMDVWGQGTTVTVSS

SEQ ID NO: 22317 - protein, 124 aa, Artificial Sequence
  source: /note="Description of Artificial Sequence: Synthetic polypeptide"
EVQLVESGGDLVQPGGSLRLSCAASGVTFRTYEMNWVRQAPGKGLEWISHISSSGDIIYYTKSVKGRFTISRDNAKNSLFLQMTSLRAEDTAVYYCARERYSQYGYYYFGMDVWGQGTTVTVSS

SEQ ID NO: 22318 - protein, 124 aa, Artificial Sequence
  source: /note="Description of Artificial Sequence: Synthetic polypeptide"
EIQLIESGGDMVQPGGSLRLSCAASGISLNSYEMNWVRQTPGMGLEWISHISSSGTSIYYANSVKGRFTIFRDSAKNSLLLQMNSLRAEDTAIYYCARERYDHSGYYYLGMDVWGLGTTVTVSS

SEQ ID NO: 22319 - protein, 124 aa, Artificial Sequence
  source: /note="Description of Artificial Sequence: Synthetic polypeptide"
EVQLVESGGGLVQPGGSLTLSCAASRFTFSNYDMHWVRQATGKGLEWVSAIGTVGDTYYAGSVKGRFTISRDDAKNSLYLQMNSLRAGDTAVYYCARDRGGAGTYSFYYGMDVWGQGTTVTVSS

SEQ ID NO: 22320 - protein, 124 aa, Artificial Sequence
  source: /note="Description of Artificial Sequence: Synthetic polypeptide"
EVQLVESGGGLVQPGGSLRLSCAASGFTFSSYDMHWVRQVIGKGLEWVSAIGTVGDTYYAGSVKGRFTISRENAKNSLYLQMNSLRAGDTAVYYCARDRGGANIYSFYYGMDVWGQGTTVTVSS

SEQ ID NO: 22321 - protein, 131 aa, Artificial Sequence
  source: /note="Description of Artificial Sequence: Synthetic polypeptide"
EVQLVESGGGLVQPGGSLRLSCAASGFTFNSFVMSWVRQAPGKGLEWVSAISGYGGSTYYADSMKGRFTVSRDNSKNTLYLQMNSLRAEDTAVYYCAKDHKDFYASGSYFNRDYYYGMDVWGQGTTVTVSS

SEQ ID NO: 22322 - protein, 123 aa, Artificial Sequence
  source: /note="Description of Artificial Sequence: Synthetic polypeptide"
QVQLVESGGGVVQPGGSLRLSCAASGFTFSSYAMHWVRQAPGKGLEWVAIIWFDGSNEDYADSVKGRFTISRDNSKNMVYLQINSLRAEDTAVYYCARSANWNYEGGPLFDYWGQGTLVTVSS

SEQ ID NO: 22323 - protein, 116 aa, Artificial Sequence
  source: /note="Description of Artificial Sequence: Synthetic polypeptide"
QVQLVESGGGLVKPGGSLTLSCVASGFTFTDYYISWIRQAPGKGLEWISYIGTGGAAKYYADSVKGRFTVSRDNAKNSLYLLMNNLRAEDTAVYYCARDLGIFDLWGQGTLVTVSS

SEQ ID NO: 22324 - protein, 116 aa, Artificial Sequence
  source: /note="Description of Artificial Sequence: Synthetic polypeptide"
EVQLVESGGGLVQPGGSLRLSCVASGFTFTSYAMSWVRQAPGRGLQWVSAIGGSGDSIYYADSVKGRFTISRDNSKNTLYLQMDSLRAEDTAVYYCARGWELLNYWGQGTLVTVSS

SEQ ID NO: 22325 - protein, 116 aa, Artificial Sequence
  source: /note="Description of Artificial Sequence: Synthetic polypeptide"
EVQLVESGGGLVRPGGSLRLSCAASGFTFRIYAMSWVRQAPGKGLEWVSGISGSGDNTYYTDSVKGRFIISRDNSKSTLYLQMNSLRAEDTAVYYCARGWELLNYWGQGTLVTVSS

SEQ ID NO: 22326 - protein, 116 aa, Artificial Sequence
  source: /note="Description of Artificial Sequence: Synthetic polypeptide"
EVQLVESGGGLVQPGGSLRLSCAASGFTFKIYAMSWVRQGPGKGLEWVSAISGNGDKTYYTDSVQGRFTISRDNSKNTLFLQMNSLRAEDTAIYYCARGWELLNYWGQGTLVTVSS

SEQ ID NO: 22327 - protein, 116 aa, Artificial Sequence
  source: /note="Description of Artificial Sequence: Synthetic polypeptide"
EVQLVESGGGLVQPGGSLRLSCAVSGFTFSIYAMSWVRQAPGKGLEWVSAISGSGDKTYYADSVKGRFTISRDNSKNTLYLQMNSLRAEDTAVFYCARGWELLNYWGQGTLVTVSS

SEQ ID NO: 22328 - protein, 116 aa, Artificial Sequence
  source: /note="Description of Artificial Sequence: Synthetic polypeptide"
EVQLVESGGGLVQPGGSLRLSCAASGFTFSIYAMSWVRQAPGKGLEWVSGISGSGGRTYYADSVKGRFTISRDNSKNTLYLQMNSLRVEDTAVYYCARGWELLNFWGQGTLVTVSS

SEQ ID NO: 22329 - protein, 116 aa, Artificial Sequence
  source: /note="Description of Artificial Sequence: Synthetic polypeptide"
EVQLVESGGGLVQPGGSLRLSCVASGFNFRIYAMSWVRQAPGKGPEWVSGISGSGDNTYYAASVKGRFTVSRDNSKNTLYLQMTSLRAEDTAVFYCARGWELLNYWGQGTLVTVSS

SEQ ID NO: 22330 - protein, 117 aa, Artificial Sequence
  source: /note="Description of Artificial Sequence: Synthetic polypeptide"
EVQLVESGGGLVQPGGSLRLSCAASGFTFSRYGMNWVRQAPGKGLEWVSAISGSGGSTYHADSVKGRFTISRDNSKNTLYLQMNSLRAADTAIYFCASYNWNDGVDVWGQGTTVTVS

SEQ ID NO: 22331 - protein, 120 aa, Artificial Sequence
  source: /note="Description of Artificial Sequence: Synthetic polypeptide"
QVQLQQSGPGLVKPSQTLSLTCAISGDSVSSNSAAWNWIRQSPSRGLEWLGRTYYRSKWYHDYAFSVKSRILINPDTSKNLFSLQVNSVTPEDTAVYYCARDRRSYFDYWGQGTLVTVSS

SEQ ID NO: 22332 - protein, 121 aa, Artificial Sequence
  source: /note="Description of Artificial Sequence: Synthetic polypeptide"
QVQLVESGGGVVQPGRSLRLSCAASGFTFSSFGMHWVRQAPGKGLEWVSMISTDGSKKNYADSVKGRFTITRDNSKNTLYLEMNSLRAEDTAVYYGVRVGYYDSGSYYNYWGQGTLVTVSS

SEQ ID NO: 22333 - protein, 123 aa, Artificial Sequence
  source: /note="Description of Artificial Sequence: Synthetic polypeptide"
EVQLVESGGGLVQPGRSLRLSCTASGFVFEDYAMHWVRQAPGKGLEWVSGISWNSGRIGYTDSVKGRFTVSRDNAKNSLYLQMNSLTTEDTALYYCAKDKSPSKWNLLGMDVWGQGTTVTVSS

SEQ ID NO: 22334 - protein, 121 aa, Artificial Sequence
  source: /note="Description of Artificial Sequence: Synthetic polypeptide"
QVQLVQSGAEVQKPGASVKVSCKASGYTFTDYYIHWVRQAPGQGLEWMGWINPKTGGTNYAPKFQGRVTMTRDSSIITAYMDLTRLTSDDTAVFYCARRGYNSRWSVFDYWGQGTLVTVSS

SEQ ID NO: 22335 - protein, 122 aa, Artificial Sequence
  source: /note="Description of Artificial Sequence: Synthetic polypeptide"
QVQLVESGGGVVQPGRSLRLSCEASGFTFSSYGMHWVRQAPGNGLEWIAVISSDGNNKYYIESVKGRFTMSRDNSKNTLYLQLNSLRTEDTAVYYCATYNWNDDGDGVFDYWGQGTLVTVSS

SEQ ID NO: 22336 - protein, 119 aa, Artificial Sequence
  source: /note="Description of Artificial Sequence: Synthetic polypeptide"
QVQLVQSGAEVKKPGASVKVSCKASGYPFTNYFMHWVRQAPGQRLEWIGRINPYNGATSYSLNFRDKATLTLDKSASTAYMELSSLRSEDTAVYYCARSTITSPLLDFWGQGTLVTVSS

SEQ ID NO: 22337 - protein, 119 aa, Artificial Sequence
  source: /note="Description of Artificial Sequence: Synthetic polypeptide"
QVQLVQSGAEVKKPGASVKVSCKASGYPFTNYFMHWVRQAPGQRLEWIGRINPYNGATSYSLNFRDKATITLDKSASTAYMELSSLRSEDTAVYYCARSTITSPLLDFWGQGTLVTVSS

SEQ ID NO: 22338 - protein, 119 aa, Artificial Sequence; identical to SEQ ID NO: 22336
  source: /note="Description of Artificial Sequence: Synthetic polypeptide"

SEQ ID NO: 22339 - protein, 119 aa, Artificial Sequence; identical to SEQ ID NO: 22337
  source: /note="Description of Artificial Sequence: Synthetic polypeptide"

SEQ ID NO: 22340 - protein, 122 aa, Artificial Sequence
  source: /note="Description of Artificial Sequence: Synthetic polypeptide"
QVQLVESGGGVVQPGRSLRLSCAASGFSFSNYGMHWVRQAPGKGLEWVALIWYDGSNEDYTDSVKGRFTISRDNSKNTLYLQMNSLRAEDTAVYYCARWGMVRGVIDVFDIWGQGTVVTVSS

SEQ ID NO: 22341 - protein, 114 aa, Artificial Sequence
  source: /note="Description of Artificial Sequence: Synthetic polypeptide"
QMQLVESGGGVVQPGRSLRLSCEASGFSFNSYGMHWVRQAPGKGLEWVSVIWASGNKKYYIESVEGRFTISRDNSKNTLYLQMNSLRAEDTAVYYCARANFDYWGQGTLVTVSS

SEQ ID NO: 22342 - protein, 116 aa, Artificial Sequence
  source: /note="Description of Artificial Sequence: Synthetic polypeptide"
QVQLVESGGGVVQPGRSLRLSCAASGFTFNKYGMHWVRQAPGKGLEWVAVIWYDGTNKYYADSMKGRFTISRDNSKNMLYLQMNSLRAEDTAVYYCARDPPTANYWGQGTLVTVSS

SEQ ID NO: 22343 - protein, 118 aa, Artificial Sequence
  source: /note="Description of Artificial Sequence: Synthetic polypeptide"
QVQLVQSGSELKKPGASVKVSCKASGYTFTNQGMNWVRQAPGQGLEWMGWINTNTGEPTYAQGFTGRFVFSLDTSVSTAYLQISSLKAEDTAVYYCYVNYDYYTMDFWGQGTTVTVSS

SEQ ID NO: 22344 - protein, 118 aa, Artificial Sequence
  source: /note="Description of Artificial Sequence: Synthetic polypeptide"
QIQLVQSGPELKKPGETVKISCKASGYTFTNQGMNWVKQAPGKGLKWMGWINTNTGEPTYTADFTGRFAFSLETSVSTAYLQINSLKAEDTATYFCYVNYDYYTMDFWGQGTLVTVSS

SEQ ID NO: 22345 - protein, 135 aa, Artificial Sequence
  source: /note="Description of Artificial Sequence: Synthetic polypeptide"
QVQLVESGGGLVQPGGSLRLSCAASGFSLDYYGIGWFRQAPGKERQEVSYISASAKTKLYSDSVKGRFTISRDNAKNAVYLEMNSLKREDTAVYYCARRRFDASASNRWLAADYDYWGQGTQVTVSSEPKTPKPQ

SEQ ID NO: 22346 - protein, 437 aa, Artificial Sequence
  source: /note="Description of Artificial Sequence: Synthetic polypeptide"
EVQLVQSGAEVKKSGESLKISCKGSGYSFTSYWIGWVRQMPGKGLEWMGIFYPGDSSTRYSPSFQGQVTISADKSVNTAYLQWSSLKASDTAMYYCARRRNWGNAFDIWGQGTMVTVSSASTKGPSVFPLAPSSKSTSGGTAALGCLVKDYFPEPVTVSWNSGALTSGVHTFPAVLQSSGLYSLSSVVTVPSSSLGTQTYICNVNHKPSNTKVDKRVEPKSCDKTHTCPPCPAPELLGGPSVFLFPPKPKDTLMISRTPEVTCVVVDVSHEDPEVKFNWYVDGVEVHNAKTKPREEQYNSTYRVVSVLTVLHQDWLNGKEYKCKVSNKALPAPIEKTISKAKGQPREPQVYTLPPSREEMTKNQVSLTCLVKGFYPSDIAVEWESNGQPENNYKTTPPVLDSDGSFFLYSKLTVDKSRWQQGNVFSCSVMHEALHNH

SEQ ID NO: 22347 - protein, 135 aa, Artificial Sequence
  source: /note="Description of Artificial Sequence: Synthetic polypeptide"
QVQLVETGGLVQPGGSLRLSCAASGFTLDYSSIGWFRQAPGKEREGVSCISSSGDSTKYADSVKGRFTTSRDNAKNTVYLQMNSLKPDDTAVYYCAAFRATMCGVFPLSPYGKDDWGKGTLVTVSSEPKTPKPQP

SEQ ID NO: 22348 - protein, 130 aa, Artificial Sequence
  source: /note="Description of Artificial Sequence: Synthetic polypeptide"
QLQLVETGGGLVQPGGSLRLSCAASGFTFSDYVMTWVRQAPGKGPEWIATINTDGSTMRDDSTKGRFTISRDNAKNTLYLQMTSLKPEDTALYYCARGRVISASAIRGAVRGPGTQVTVSSEPKTPKPQP

SEQ ID NO: 22349 - protein, 137 aa, Artificial Sequence
  source: /note="Description of Artificial Sequence: Synthetic polypeptide"
QVQLVESGGGLVQPGGSLRLSCAASGFTLDYYAIGWERQAPGKEREGVSGISSVDGSTYYADSVRGRFTISRDNAKNTVYLQMNSLKPEDTAVYYCAADQSPIPIHYSRTYSGPYGMDYWGKGTLVTVSSAHHSEDP

SEQ ID NO: 22350 - protein, 139 aa, Artificial Sequence
  source: /note="Description of Artificial Sequence: Synthetic polypeptide"
QLQLVESGGGLVQPGGSLRLSCAASGFTLDYYAIGWFRQAPGKEREGVSGISFVDGSTYYADSVKGRFAISRGNAKNTVYLQMNSLKPEDTAVYYCAADQSSIPMHYSSTYSGPSGMDYWGKGTLVTVSSEPKTPKPQP

SEQ ID NO: 22351 - protein, 136 aa, Artificial Sequence
  source: /note="Description of Artificial Sequence: Synthetic polypeptide"
QLQLVETGGGLVQAGGSLRLSCAASGRTLSNYPMGWERQAPGKEREEVAAIRRIADGTYYADSVKGRFTISRDNAWNTLYLQMNGLKPEDTAVYFCATGPGAFPGMVVTNPSAYPYWGQGTQVTVSSEPKTPKPQP

SEQ ID NO: 22352 - protein, 139 aa, Artificial Sequence
  source: /note="Description of Artificial Sequence: Synthetic polypeptide"
QLQLVESGGGLVQPGGSLRLSCAASGFTLDYYAIGWFRQAPGKEREGVSGISSSDGSTYYADSVKGRFTISRDNATNTVYLQMNSLKPEDTAVYYCAADQAAIPMHYSASYSGPRGMDYWGKGTLVTVSSEPKTPKPQP

SEQ ID NO: 22353 - protein, 453 aa, Artificial Sequence
  source: /note="Description of Artificial Sequence: Synthetic polypeptide"
MSDKIIHLTDDSFDTDVLKADGAILVDFWAEWCGPCKMIAPILDEIADEYQGKLTVAKLNIDQNPGTAPKYGIRGIPTLLLFKNGEVAATKVGALSKGQLKEFLDANLAGSGSGHMHHHHHHSSGLVPRGSGMKETAAAKFERQHMDSPDLGTDDDDKAMAISDPNSQVQLVESGGGLVQPGGSLRLSCEASGFTLDYYGIGWFRQPPGKEREAVSYISASARTILYADSVKGRFTISRDNAKNAVYLQMNSLKREDTAVYYCARRRFSASSVNRWLADDYDVWGRGTQVAVSSEPKTPKPQTSAIAGGGGSGGGGSGGGGSLQAMAAASQVQLVESGGGLVQTGGSLRLSCASSGSIAGFETVTWSRQAPGKSLQWVASMTKTNNEIYSDSVKGRFIISRDNAKNTVYLQMNSLKPEDTGVYFCKGPELRGQGIQVTVSSEPKTPKPQPARR

SEQ ID NO: 22354 - protein, 505 aa, Artificial Sequence
  source: /note="Description of Artificial Sequence: Synthetic polypeptide"
MSDKIIHLTDDSFDTDVLKADGAILVDFWAEWCGPCKMIAPILDEIADEYQGKLTVAKLNIDQNPGTAPKYGIRGIPTLLLFKNGEVAATKVGALSKGQLKEFLDANLAGSGSGHMHHHHHHSSGLVPRGSGMKETAAAKFERQHMDSPDLGTDDDDKAMAISDPNSQVQLVETGGLVQPGGSLRLSCAASGFTLDYSSIGWFRQAPGKEREGVSCISSSGDSTKYADSVKGRFTTSRDNAKNTVYLQMNSLKPDDTAVYYCAAFRATMCGVFPLSPYGKDDWGKGTLVTVSSEPKTPKPQPTSAIAGGGGSGGGGSGGGGSLQAMAAAQLQLVETGGGLVQPGGSLRLSCAASGFTFSDYVMTWVRQAPGKGPEWIATINTDGSTMRDDSTKGRFTISRDNAKNTLYLQMTSLKPEDTALYYCARGRVISASAIRGAVRGPGTQVTVSSEPKTPKPQPARQTSPSTVRLESRVRELEDRLEELRDELERAERRANEMSIQLDEC

SEQ ID NO: 22355 - protein, 119 aa, Artificial Sequence
  source: /note="Description of Artificial Sequence: Synthetic polypeptide"
EVQLVQSGAEVKKSGESLKISCKGSGYSFTSYWIGWVRQMPGKGLEWMGIFYPGDSSTRYSPSFQGQVTISADKSVNTAYLQWSSLKASDTAMYYCARRRNWGNAFDIWGQGTMVTVSS

SEQ ID NO: 22356 - protein, 123 aa, Artificial Sequence
  source: /note="Description of Artificial Sequence: Synthetic polypeptide"
QVQLVESGGGLVQAGGSLRLSCVSSERNPGINAMGWYRQAPGSQRELVAIWQTGGSLNYADSVKGRFTISRDNLKNTVYLQMNSLKPEDTAVYYCYLKKWRDQYWGQGTQVTVSSEPKTPKPQ

SEQ ID NO: 22357 - protein, 135 aa, Artificial Sequence
  source: /note="Description of Artificial Sequence: Synthetic polypeptide"
QVQLVESGGGLVQPGGSLRLSCEASGFTLDYYGIGWFRQPPGKEREAVSYISASARTILYADSVKGRFTISRDNAKNAVYLQMNSLKREDTAVYYCARRRFSASSVNRWLADDYDVWGRGTQVAVSSEPKTPKPQ

SEQ ID NO: 22358 - protein, 119 aa, Artificial Sequence; identical to SEQ ID NO: 22302
  source: /note="Description of Artificial Sequence: Synthetic polypeptide"

SEQ ID NO: 22359 - protein, 124 aa, Artificial Sequence
  source: /note="Description of Artificial Sequence: Synthetic polypeptide"
QVQLVESGGGLVEAGGSLRLSCVVTGSSFSTSTMAWYRQPPGKQREWVASFTSGGAIKYTDSVKGRFTMSRDNAKKMTYLQMENLKPEDTAVYYCALHNAVSGSSWGRGTQVTVSSEPKTPKPQ

SEQ ID NO: 22360 - protein, 123 aa, Artificial Sequence
  source: /note="Description of Artificial Sequence: Synthetic polypeptide"
VQLVESGGGLVQAGGSLRLSCAASGLMFGAMTMGWYRQAPGKEREMVAYITAGGTESYSESVKGRFTISRINANNMVYLQMTNLKVEDTAVYYCNAHNFWRTSRNWGQGTQVTVSSEPKTPKP

SEQ ID NO: 22361 - protein, 131 aa, Artificial Sequence
  source: /note="Description of Artificial Sequence: Synthetic polypeptide"
VQLVESGGGLVQAGDSLTLSCAASESTFNTFSMAWFRQAPGKEREYVAAFSRSGGTTNYADSVKGRATISTDNAKNTVYLHMNSLKPEDTAVYFCAADRPAGRAYFQSRSYNYWGQGTQVTVSSAHHSEDP

SEQ ID NO: 22362 - protein, 125 aa, Artificial Sequence
  source: /note="Description of Artificial Sequence: Synthetic polypeptide"
VQLVESGGGSVQIGGSLRLSCVASGFTFSKNIMSWARQAPGKGLEWVSTISIGGAATSYADSVKGRFTISRDNANDTLYLQMNNLKPEDTAVYYCSRGPRTYINTASRGQGTQVTVSSEPKTPKP

SEQ ID NO: 22363 - protein, 121 aa, Artificial Sequence
  source: /note="Description of Artificial Sequence: Synthetic polypeptide"
VQLVESGGGLVQAGGSLRLSCVGSGRNPGINAMGWYRQAPGSQRELVAVWQTGGSTNYADSVKGRFTISRDNLKNTVYLQMNSLKPEDTAVYYCYLKKWRDEYWGQGTQVTVSSAHHSEDP

SEQ ID NO: 22364 - protein, 124 aa, Artificial Sequence
  source: /note="Description of Artificial Sequence: Synthetic polypeptide"
VQLVESGGGLVQAGESLRLSCVVSESIFRINTMGWYRQTPGKQREVVARITLRNSTTYADSVKGRFTISRDDAKNTLYLKMDSLKPEDTAVYYCHRYPLIFRNSPYWGQGTQVTVSSEPKTPKP

SEQ ID NO: 22365 - protein, 122 aa, Artificial Sequence
  source: /note="Description of Artificial Sequence: Synthetic polypeptide"
VQLVESGGGLVQAGESLRLSCVVSESIFRINTMGWYRQTPGKQREVVARITLRNSTTYADSVKGRFTISRDDAKNTLYLKMDSLKPEDTAVYYCHRYPLIFRNSPYWGQGTQVTVSSEPKTP

SEQ ID NO: 22366 - protein, 129 aa, Artificial Sequence
  source: /note="Description of Artificial Sequence: Synthetic polypeptide"
VQLVESGGGLVQAGGSLRLSCAAPGLTFTSYRMGWFRQAPGKEREYVAAITGAGATNYADSAKGRFTISKNNTASTVHLQMNSLKPEDTAVYYCAASNRAGGYWRASQYDYWGQGTQVTVSSAHHSEDP

SEQ ID NO: 22367 - protein, 107 aa, Artificial Sequence
  source: /note="Description of Artificial Sequence: Synthetic polypeptide"
DIQMTQSPSSLSASVGDRVTITCKASQNVGTNVAWYQQKPGKAPKALIYSASYRYSGVSSRFSGSGSGTDFTLTISSLQPEDFAVYYCQQYYSYPYTFGQGTKLEIK

SEQ ID NO: 22368 - protein, 107 aa, Artificial Sequence
  source: /note="Description of Artificial Sequence: Synthetic polypeptide"
DIQMTQSPSSLSASVGDRVTITCKASQNVGTNVAWYQQKPGKAPKVLIYSASYRYSGVSSRFSGSGSGTDFTLTISSLQPEDFAVYYCQQYYSYPYTFGQGTKLEIK

SEQ ID NO: 22369 - protein, 104 aa, Artificial Sequence
  source: /note="Description of Artificial Sequence: Synthetic polypeptide"
EIVLTQSPATLSLSPGERATLSCRASSSVNYMNWYQQKPGQAPRPRIYATSNLASGVPARFSGSGSGTDYTLTISSLEPEDFAVYYCQQWSSRTFGGGTKVEIK

SEQ ID NO: 22370 - protein, 107 aa, Artificial Sequence; identical to SEQ ID NO: 22367
  source: /note="Description of Artificial Sequence: Synthetic polypeptide"

SEQ ID NO: 22371 - protein, 107 aa, Artificial Sequence; identical to SEQ ID NO: 22368
  source: /note="Description of Artificial Sequence: Synthetic polypeptide"

SEQ ID NO: 22372 - protein, 104 aa, Artificial Sequence; identical to SEQ ID NO: 22369
  source: /note="Description of Artificial Sequence: Synthetic polypeptide"

SEQ ID NO: 22373 - protein, 113 aa, Artificial Sequence
  source: /note="Description of Artificial Sequence: Synthetic polypeptide"
DIVMTQSPDSLAVSLGERATINCKSSQSVLFSSDNKNYLAWYQLKPGQPPHLLIYWASIRDSGVPDRFSGSGSGTDFTLTISSLQAEDVAVYSCHQYYSAPLTFGGGTKVEIK

SEQ ID NO: 22374 - protein, 113 aa, Artificial Sequence
  source: /note="Description of Artificial Sequence: Synthetic polypeptide"
DIVMTQSPDSLAVSLGERATINCKSSQSILFSSNNKIYLAWFQQKPGQPPKLLIYWTSTRESGVPDRFSGSGSGTDFTLTISSLQAEDVAVYYCQQYYTLPFTFGPGTKVDIK

SEQ ID NO: 22375 - protein, 108 aa, Artificial Sequence
  source: /note="Description of Artificial Sequence: Synthetic polypeptide"
EIVLTQSPGTLSLSPGERATLSCRASQSISTYYLAWYQQKPDQPPRLLIYGTSSRATGIPDRFSGSGSGTDFTLTISRLDPEDFAVYYCQQYGNSLYTFGQGTKLEIK

SEQ ID NO: 22376 - protein, 107 aa, Artificial Sequence
  source: /note="Description of Artificial Sequence: Synthetic polypeptide"
DIQMTQSPSTLSASVGDRVTITCRASQNIDNWLAWYQQKTGKAPNLLIYKASTLESGVPSRFSGSGSGTEFTLTIISLQPDDFATYYCQEYNTYSRTFGQGTKVEIK

SEQ ID NO: 22377 - protein, 107 aa, Artificial Sequence
  source: /note="Description of Artificial Sequence: Synthetic polypeptide"
DIQMTQSPSTLSASIGDRVTITCRASQNTDKWMAWYQQKAGKAPKLLIYKASILESGVPSRFSGSGSGTEFTLTISSLQPDDFATYYCQEYNTYFRAFGQGTKVETR

SEQ ID NO: 22378 - protein, 107 aa, Artificial Sequence
  source: /note="Description of Artificial Sequence: Synthetic polypeptide"
DIQMTQSPSTLSASLGDRVTITCRASQNIDNWMAWYQQKVGKAPKLLIYRASTLETGVPSRFGGSGFGTEFTLTISSLQPGDFATYYCQEYNSYFRTFGQGTKVEIK

SEQ ID NO: 22379 - protein, 108 aa, Artificial Sequence
  source: /note="Description of Artificial Sequence: Synthetic polypeptide"
DIQMTQSPSSLSASVGDRVTITCRASQDISNYLAWYQQKPGKVPKLLIYAASTLQSGVPSRFSGSGSGTDFTLTVSSLQPEDVATYYCQKYTSAPFTFGPGTKVDIKR

SEQ ID NO: 22380 - protein, 108 aa, Artificial Sequence
  source: /note="Description of Artificial Sequence: Synthetic polypeptide"
DIQMTQSPSSLSVSVGDRVTITCRASQDISNYLAWYQQKPGKVPKLLIYAASTLQSGVPSRFSGSGSGTDFTLTISSLQPEDVATYFCQKYNSAPFTFGPGTKVDIKR

SEQ ID NO: 22381 - protein, 108 aa, Artificial Sequence
  source: /note="Description of Artificial Sequence: Synthetic polypeptide"
DIQMTQSPSTLSASVGDRVTITCRASQSISSWLAWYQQKPGKAPKVLIYKASSLESGVPSRFSGSGSGTEFTLTISSLQPDDFATYYCQQYNSYSRTFGQGTKVEIKR

SEQ ID NO: 22382 - protein, 108 aa, Artificial Sequence
  source: /note="Description of Artificial Sequence: Synthetic polypeptide"
DIQMTQSPSSLSASVGDRVTITCRASQTISTFLNWYQQKPGKGPELLIYTASSLQSGVPSRFSGSGSGTDFALTISSLQPEDFATYYCQQNYNDPPTFGQGTRLEIKR

SEQ ID NO: 22383 - protein, 109 aa, Artificial Sequence
  source: /note="Description of Artificial Sequence: Synthetic polypeptide"
EIVMTQSPATLSVSPGERATLSCRASQSVSSSLAWYHQKPGQAPRLLIHGVSTRATGIPARFSGTGSGTEFTLTISSLQSEDFAVYYCQQYHNWPPYTFGQGTKLEIKR

SEQ ID NO: 22384 - protein, 108 aa, Artificial Sequence
  source: /note="Description of Artificial Sequence: Synthetic polypeptide"
DIQMTQSPSSLSASVGDRVTITCRASQDIGNFLAWFQQKPGKAPKSLIYAASSLKSGVPSKISGSGSGTDFTLTINSLQPEDFATYYCQQYNIYPPTFGPGTKVDIKR

SEQ ID NO: 22385 - protein, 108 aa, Artificial Sequence
  source: /note="Description of Artificial Sequence: Synthetic polypeptide"
DIQMTQSPSSLSAFVGDRVTITCRASQDISNHLAWFQQKPGKVPKSLIYAASSLQSGVPSKFSGSGSGTDFTLTISSLQPEDFATYYCQQYGLYPPTFGPGTKVDIKR

SEQ ID NO: 22386 - protein, 108 aa, Artificial Sequence
  source: /note="Description of Artificial Sequence: Synthetic polypeptide"
DIQMTQSPSSLSASIGDRVTITCRASQDISNSLAWFQQKPGKAPKSLIYAASSLQSGVPSRFSGSGSGTDFTLTISSLQPEDFATYYCQQYIPFPPTFGPGTKVDIKR

SEQ ID NO: 22387 - protein, 108 aa, Artificial Sequence
  source: /note="Description of Artificial Sequence: Synthetic polypeptide"
DIQMTQSPSSLSASVGDRVTITCRASLDISNFLAWFQQKPGTAPKSLIYSASSLRTGVPSKFSGSGSGTDFTLTISSLQPEDFATYYCQQYSSYPPTFGPGTKVDIKR

SEQ ID NO: 22388 - protein, 108 aa, Artificial Sequence
  source: /note="Description of Artificial Sequence: Synthetic polypeptide"
DIQMTQSPSSLSASVGDRVTITCRASQGISNNLAWFQQKPGKAPKSLIYAASSLKSGVPSKFSGSGSGTDFTLTINSLQPEDFATYYCHQYNSYPPTFGPGTKVDIKR

SEQ ID NO: 22389 - protein, 146 aa, Artificial Sequence
  source: /note="Description of Artificial Sequence: Synthetic polypeptide"
DIQMTQSPSSLSASVGDRVTITCRASLDISNFLAWFQQDIQMTQSPSSLSASVGDRVTITCRASLDIGNFLAWFQQKPGTAPKSLIYSASSLQTGVPSKFSGSGSGTDFTLTISSLQPEDFATYYCQQYNSYPPTFGPGTKVDIKR

SEQ ID NO: 22390 - protein, 108 aa, Artificial Sequence
  source: /note="Description of Artificial Sequence: Synthetic polypeptide"
DIQMTQSPSSVSASIGDRVTITCRASQGISNWLAWYQQKPGKAPKLLIYGASSLQSGVSSRFSGSGSGTDFTLTIISLQPEDFATYYCQQANSFPYTFGQGTKLEIKR

SEQ ID NO: 22391 - protein, 108 aa, Artificial Sequence
  source: /note="Description of Artificial Sequence: Synthetic polypeptide"
EIVLTQSPATLSLSPGERATLSCRASRSVSSSLAWYQQKPGQAPRLLIYDASNRATGIPARFSGGGSGTDFTLTISSLEPEDFAVYYCQQRNNWPPTFGQGTKLEIKR

SEQ ID NO: 22392 - protein, 108 aa, Artificial Sequence
  source: /note="Description of Artificial Sequence: Synthetic polypeptide"
DIQMTQSPSSVSASVGDRVTITCRASQGIRSWLAWFQQRPGKAPNLLIYAASSLQSGVSSRFSGSGSGTEFTLSISSLQPEDFATYYCQQAYSFPLTFGGGTKVEIKR

SEQ ID NO: 22393 - protein, 108 aa, Artificial Sequence
  source: /note="Description of Artificial Sequence: Synthetic polypeptide"
AIQMTQSPSSLSASVGDRVTITCRASQDIRNDLGWFQQKPGRAPNLLIFGASSLQSGVPSRFSGSGSGTDFTLTISGLQPEDFSTYYCLQDYTYPFTFGPGTKVDIKR

SEQ ID NO: 22394 - protein, 109 aa, Artificial Sequence
  source: /note="Description of Artificial Sequence: Synthetic polypeptide"
EIVLTQSPGTLSLSPGERATLSCRASQSVYSNYLAWYQQKRGLAPRLLIYGASSRATGIPDRFSGSGSGTDFTLTISRLEPEDFAVYYCQQHGGSPVTFGGGTKVEIKR

SEQ ID NO: 22395 - protein, 108 aa, Artificial Sequence
  source: /note="Description of Artificial Sequence: Synthetic polypeptide"
DIQMTQSPSSVSASVGDRVTITCRASQGISNWLAWYQQKPGKAPKLLIYGTSSLQSGVPSRFSGSGSGTDFTLTISSLQPEDFATYYCQQVKSFPYTFGQGTKLEIKR

SEQ ID NO: 22396 - protein, 107 aa, Artificial Sequence
  source: /note="Description of Artificial Sequence: Synthetic polypeptide"
EIVLTQSPATLSLSPGERATLSCRASQSVGTSIHWYQQKPGQAPRLLIKFASESISGIPARFSGSGSGTDFTLTISSLEPEDFAVYYCQQSNKWPFTFGQGTKLEIK

SEQ ID NO: 22397 - protein, 107 aa, Artificial Sequence; identical to SEQ ID NO: 22396
  source: /note="Description of Artificial Sequence: Synthetic polypeptide"

SEQ ID NO: 22398 - protein, 107 aa, Artificial Sequence
  source: /note="Description of Artificial Sequence: Synthetic polypeptide"
DIQMTQSPSSVSASVGDRVTITCRASQGISSWLAWYQHKPGKAPKLLIYAASSLQSGVPSRFSGSGSGTDFTLTISSLQPEDFATYYCQQANSFPWTFGQGTKVEIK

SEQ ID NO: 22399 - protein, 108 aa, Artificial Sequence
  source: /note="Description of Artificial Sequence: Synthetic polypeptide"
EIVLTQSPATLSLSPGERATLSCRASQSVSSYLAWYQQKPGQAPRLLIYDASNRATGIPARFSGSGSGTDFTLTISSLEPEDFAVYYCQQRSNWSQFTFGPGTKVDIK

SEQ ID NO: 22400 - protein, 107 aa, Artificial Sequence
  source: /note="Description of Artificial Sequence: Synthetic polypeptide"
DIQMTQSPSSLSASVGDRVTITCRASQGISSWLAWYQQKPEKAPKSLIYAASSLQSGVPSRFSGSGSGTDFTLTISSLQPEDFATYYCQQYKSYPVTFGGGTKVEIK

SEQ ID NO: 22401 - protein, 108 aa, Artificial Sequence
  source: /note="Description of Artificial Sequence: Synthetic polypeptide"
DIQMTQSPSSLSASVGDRVTITCRASSSVISTYLNWYQQKPGKAPKLLIYSTSSLQSGVPSRFSGSGSGTDFTLTISSLQPEDFATYYCLQYHRSPRTFGGGTKVEIK

SEQ ID NO: 22402 - protein, 108 aa, Artificial Sequence
  source: /note="Description of Artificial Sequence: Synthetic polypeptide"
DVQLTQSPSIMSASLGDRVTMTCTASSSVISTYLHWYQQKPGSSPKLWIYSTSTLASGVPPRFSGSGSGTDYSLTISSMEPEDAATYYCLQYHRSPRTFGGGTKVEIK

SEQ ID NO: 22403 - protein, 108 aa, Artificial Sequence
  source: /note="Description of Artificial Sequence: Synthetic polypeptide"
EIVLTQSPGTLSLSPGERATLSCRASQSVSSSYLAWYQQKPGQAPRLLIYGASSRATGIPDRFSGSGSGTDFTLTISRLEPEDFAVYYCQQYGSSTWTFGQGTKVEIK

SEQ ID NO: 22404 - protein, 215 aa, Artificial Sequence
  source: /note="Description of Artificial Sequence: Synthetic polypeptide"
EIVLTQSPGTLSLSPGERATLSCRASQSVSSSYLAWYQQKPGQAPRLLIYGASSRATGIPDRFSGSGSGTDFTLTISRLEPEDFAVYYCQQYGSSTWTFGQGTKVEIKRTVAAPSVFIFPPSDEQLKSGTASVVCLLNNFYPREAKVQWKVDNALQSGNSQESVTEQDSKDSTYSLSSTLTLSKADYEKHKVYACEVTHQGLSSPVTKSFNRGEC

SEQ ID NO: 22405 - protein, 453 aa, Artificial Sequence; identical to SEQ ID NO: 22353
  source: /note="Description of Artificial Sequence: Synthetic polypeptide"

SEQ ID NO: 22406 - protein, 505 aa, Artificial Sequence; identical to SEQ ID NO: 22354
  source: /note="Description of Artificial Sequence: Synthetic polypeptide"

SEQ ID NO: 22407 - protein, 135 aa, Artificial Sequence; identical to SEQ ID NO: 22347
  source: /note="Description of Artificial Sequence: Synthetic polypeptide"

SEQ ID NO: 22408 - protein, 130 aa, Artificial Sequence; identical to SEQ ID NO: 22348
  source: /note="Description of Artificial Sequence: Synthetic polypeptide"

SEQ ID NO: 22409 - protein, 137 aa, Artificial Sequence
  source: /note="Description of Artificial Sequence: Synthetic polypeptide"
QVQLVESGGGLVQPGGSLRLSCAASGFTLDYYAIGWFRQAPGKEREGVSGISSVDGSTYYADSVRGRFTISRDNAKNTVYLQMNSLKPEDTAVYYCAADQSPIPIHYSRTYSGPYGMDYWGKGTLVTVSSAHHSEDP

SEQ ID NO: 22410 - protein, 139 aa, Artificial Sequence; identical to SEQ ID NO: 22350
  source: /note="Description of Artificial Sequence: Synthetic polypeptide"

SEQ ID NO: 22411 - protein, 136 aa, Artificial Sequence
  source: /note="Description of Artificial Sequence: Synthetic polypeptide"
QLQLVETGGGLVQAGGSLRLSCAASGRTLSNYPMGWFRQAPGKEREFVAAIRRIADGTYYADSVKGRFTISRDNAWNTLYLQMNGLKPEDTAVYFCATGPGAFPGMVVTNPSAYPYWGQGTQVTVSSEPKTPKPQP

SEQ ID NO: 22412 - protein, 139 aa, Artificial Sequence; identical to SEQ ID NO: 22352
  source: /note="Description of Artificial Sequence: Synthetic polypeptide"

SEQ ID NO: 22413 - protein, 135 aa, Artificial Sequence; identical to SEQ ID NO: 22345
  source: /note="Description of Artificial Sequence: Synthetic polypeptide"

SEQ ID NO: 22414 - protein, 123 aa, Artificial Sequence; identical to SEQ ID NO: 22356
  source: /note="Description of Artificial Sequence: Synthetic polypeptide"

SEQ ID NO: 22415 - protein, 135 aa, Artificial Sequence; identical to SEQ ID NO: 22357
  source: /note="Description of Artificial Sequence: Synthetic polypeptide"

SEQ ID NO: 22416 - protein, 119 aa, Artificial Sequence; identical to SEQ ID NO: 22302
  source: /note="Description of Artificial Sequence: Synthetic polypeptide"

SEQ ID NO: 22417 - protein, 124 aa, Artificial Sequence; identical to SEQ ID NO: 22359
  source: /note="Description of Artificial Sequence: Synthetic polypeptide"

SEQ ID NO: 22418 - protein, 123 aa, Artificial Sequence; identical to SEQ ID NO: 22360
  source: /note="Description of Artificial Sequence: Synthetic polypeptide"

SEQ ID NO: 22419 - protein, 131 aa, Artificial Sequence; identical to SEQ ID NO: 22361
  source: /note="Description of Artificial Sequence: Synthetic polypeptide"

SEQ ID NO: 22420 - protein, 125 aa, Artificial Sequence; identical to SEQ ID NO: 22362
  source: /note="Description of Artificial Sequence: Synthetic polypeptide"

SEQ ID NO: 22421 - protein, 121 aa, Artificial Sequence; identical to SEQ ID NO: 22363
  source: /note="Description of Artificial Sequence: Synthetic polypeptide"

SEQ ID NO: 22422 - protein, 124 aa, Artificial Sequence; identical to SEQ ID NO: 22364
  source: /note="Description of Artificial Sequence: Synthetic polypeptide"

SEQ ID NO: 22423 - protein, 122 aa, Artificial Sequence; identical to SEQ ID NO: 22365
  source: /note="Description of Artificial Sequence: Synthetic polypeptide"

SEQ ID NO: 22424 - protein, 129 aa, Artificial Sequence; identical to SEQ ID NO: 22366
  source: /note="Description of Artificial Sequence: Synthetic polypeptide"

SEQ ID NO: 22425 - protein, 452 aa, Artificial Sequence
  source: /note="Description of Artificial Sequence: Synthetic polypeptide"
QVQLVESGGGVVQPGRSLRLSCAASGFSFSNYGMHWVRQAPGKGLEWVALIWYDGSNEDYTDSVKGRFTISRDNSKNTLYLQMNSLRAEDTAVYYCARWGMVRGVIDVFDIWGQGTVVTVSSASTKGPSVFPLAPSSKSTSGGTAALGCLVKDYFPEPVTVSWNSGALTSGVHTFPAVLQSSGLYSLSSVVTVPSSSLGTQTYICNVNHKPSNTKVDKRVEPKSCDKTHTCPPCPAPELLGGPSVFLFPPKPKDTLMISRTPEVTCVVVDVSHEDPEVKFNWYVDGVEVHNAKTKPREEQYNSTYRVVSVLTVLHQDWLNGKEYKCKVSNKALPAPIEKTISKAKGQPREPQVYTLPPSREEMTKNQVSLTCLVKGFYPSDIAVEWESNGQPENNYKTTPPVLDSDGSFFLYSKLTVDKSRWQQGNVFSCSVMHEALHNHYTQKSLSLSPGK

SEQ ID NO: 22426 - protein, 214 aa, Artificial Sequence
  source: /note="Description of Artificial Sequence: Synthetic polypeptide"
DIQMTQSPSSVSASVGDRVTITCRASQGISSWLAWYQHKPGKAPKLLIYAASSLQSGVPSRFSGSGSGTDFTLTISSLQPEDFATYYCQQANSFPWTFGQGTKVEIKRTVAAPSVFIFPPSDEQLKSGTASVVCLLNNFYPREAKVQWKVDNALQSGNSQESVTEQDSKDSTYSLSSTLTLSKADYEKHKVYACEVTHQGLSSPVTKSFNRGEC

SEQ ID NO: 22427 - protein, 122 aa, Artificial Sequence; identical to SEQ ID NO: 22340
  source: /note="Description of Artificial Sequence: Synthetic polypeptide"

SEQ ID NO: 22428 - protein, 107 aa, Artificial Sequence; identical to SEQ ID NO: 22398
  source: /note="Description of Artificial Sequence: Synthetic polypeptide"

SEQ ID NO: 22429 - protein, 119 aa, Artificial Sequence; identical to SEQ ID NO: 22355
  source: /note="Description of Artificial Sequence: Synthetic polypeptide"

SEQ ID NO: 22430 - protein, 108 aa, Artificial Sequence; identical to SEQ ID NO: 22403
  source: /note="Description of Artificial Sequence: Synthetic polypeptide"

SEQ ID NO: 22431 - protein, 125 aa, Artificial Sequence
  source: /note="Description of Artificial Sequence: Synthetic polypeptide"
QVKLEESGGGLVQAGGSLRLSCAASGRTFNTLSMGWFRQAPGKEREFVAAVSRSGGSTYYADSVKGRFTISRDNAKNTVYLQMNSLKPEDTAVYYCAAAATKSNTTAYRLSFDYWGQGTQVTVSS

SEQ ID NO: 22432 - protein, 124 aa, Artificial Sequence [sequence omitted]

SEQ ID NO: 22433 - protein, 128 aa, Artificial Sequence
  source: /note="Description of Artificial Sequence: Synthetic polypeptide"
QVKLEESGGGLVQPGGSLRLSCAASGRTLSSYIVAWFRQAPGKEREFVAGISRRGGNSAYVESVKGRFTISRDNAKNTVYLQMNSLKPEDTAVYYCAADGSVAGWGRRSVSVSSYDYWGQGTQVTVSS

SEQ ID NO: 22434 - protein, 123 aa, Artificial Sequence
  source: /note="Description of Artificial Sequence: Synthetic polypeptide"
QVQLVESGGGLAQAGGSLRLSCAASGRTFSMDPMAWFRQPPGKEREFVAAGSSTGRTTYYADSVKGRFTISRDNAKNTVYLQMNSLKPEDTAVYYCAAAPYGANWYRDEYAYWGQGTQVTVSS

SEQ ID NO: 22435 - protein, 124 aa, Artificial Sequence [sequence omitted]

SEQ ID NO: 22436 - protein, 124 aa, Artificial Sequence
  source: /note="Description of Artificial Sequence: Synthetic polypeptide"
QVKLEESGGGLVQAGGSLRLSCAASERTFSRYPVAWFRQAPGAEREFVAVISSTGTSTYYADSVKGRFTISRDNAKVTVYLQMNNLKREDTAVYFCAVNSQRTRLQDPNEYDYWGQGTQVTVSS

SEQ ID NO: 22437 - protein, 121 aa, Artificial Sequence
  source: /note="Description of Artificial Sequence: Synthetic polypeptide"
QVQLVESGGGLVQPGGSLRLSCAASGNIFSINTMGWYRQAPGKQLELVAAITSGGTTSYTDSVEGRFTISRDNAKNAVYLQMNSLKAEDTAVYYCNTVKVVGGRLDNPDYWGQGTQVTVSS

SEQ ID NO: 22438 - protein, 127 aa, Artificial Sequence
  source: /note="Description of Artificial Sequence: Synthetic polypeptide"
QVKLEESGGGLVQPGGSLRLSCAASGRTASGYGMGWFRQAPGKEREFVAAISRSGAGTLNADFVKGRFTISRDNAKNTVYLQMNSLKPEDTAVYYCVARPTKVDRDYATRREMYNYWGQGTQVTVSS

SEQ ID NO: 22439 - protein, 121 aa, Artificial Sequence
  source: /note="Description of Artificial Sequence: Synthetic polypeptide"
QVKLEESGGGLVQAGGSLRLSCSASGRTFSSGVMGWFRQAPGKQRELVAAITTGGSTSYTDSVKGRFTISRDNAKNIVYLQMNSLKPEDTAVYYCNSVAVVGGVIKSPDYWGQGTQVTVSS

SEQ ID NO: 22440 - protein, 122 aa, Artificial Sequence
  source: /note="Description of Artificial Sequence: Synthetic polypeptide"
QVQLVESGGGSVQAGGSLRLSCAASGLSRYAMAWFRQGTGKEREFVASTNWSSGNTPYADSVKGRFIISRDNAKNTVYLQMNSLKPGDTAIYYCAARKLDVPSRYSQHYDYWGQGTQVTVSS

SEQ ID NO: 22441 - protein, 121 aa, Artificial Sequence
  source: /note="Description of Artificial Sequence: Synthetic polypeptide"
QVQLVESGGDLVQAGGSLRLSCAASGSISRISTMGWYRQAPGKQRELVATISTGGTTNYAESVKGRFTVSRDNAKNTMYLQMNSLKPEDTAVYYCAAGWKVVRGSLEYEYSGQGTQVTVSS

SEQ ID NO: 22442 - protein, 125 aa, Artificial Sequence
  source: /note="Description of Artificial Sequence: Synthetic polypeptide"
  MOD_RES (3)..(3): Any amino acid
  MOD_RES (5)..(5): Any amino acid
  MOD_RES (49)..(49): Any amino acid
  MOD_RES (70)..(70): Any amino acid
QVXLXESGGGLVQAGGSRRLSCATSGLTFRNFHMAWFRQVAGKEREVVXAISWSRDRQYYPDPVKGRFTXTRDNAKNTVYLQMNSLKPEDTAVYYCAARTASASGDWYKGSYQYWGQGTQVTVSS

SEQ ID NO: 22443 - protein, 125 aa, Artificial Sequence
  source: /note="Description of Artificial Sequence: Synthetic polypeptide"
QVKLEESGGGLVQAGGSRRLSCATSGLTFRNFHMAWFRQVAGKEREVVAAISWSRDRQYYPDPVKGRFTITRDNAKNTVYLQMNSLKPEDTAVYYCAARTASASGDWYKGSYQYWGQGTQVTVSS

SEQ ID NO: 22444 - protein, 125 aa, Artificial Sequence
  source: /note="Description of Artificial Sequence: Synthetic polypeptide"
QVQLVESGGGLVQAGGSRRLSCATSGLTFRNFHMAWFRQVAGKEREVVAAISWSRDRQYYPDPVKGRFTITRDNAKNTVYLQMNSLKPEDTAVYYCAARTASASGDWYKGSYQYWGQGTQVTVSS

SEQ ID NO: 22445 - protein, 125 aa, Artificial Sequence
  source: /note="Description of Artificial Sequence: Synthetic polypeptide"
QVKLEESGGGLVQAGGSRRLSCATSGLTFRNFHMAWFRQVAGKEREVVCAISWSRDRQYYPDPVKGRFTCTRDNAKNTVYLQMNSLKPEDTAVYYCAARTASASGDWYKGSYQYWGQGTQVTVSS

SEQ ID NO: 22446 - protein, 125 aa, Artificial Sequence
  source: /note="Description of Artificial Sequence: Synthetic polypeptide"
QVQLVESGGGLVQAGGSRRLSCATSGLTFRNFHMAWFRQVAGKEREVVCAISWSRDRQYYPDPVKGRFTCTRDNAKNTVYLQMNSLKPEDTAVYYCAARTASASGDWYKGSYQYWGQGTQVTVSS

SEQ ID NO: 22447 - protein, 128 aa, Artificial Sequence
  source: /note="Description of Artificial Sequence: Synthetic polypeptide"
  MOD_RES (3)..(3): Any amino acid
  MOD_RES (5)..(5): Any amino acid
  MOD_RES (49)..(49): Any amino acid
  MOD_RES (69)..(69): Any amino acid
QVXLXESGGGLVQAGGSLRVSCTASVSTFSINALGWYRQAPGKARELVXAIGSDGTVYYTDSVKGRFTXSRDNAKNTVSLQMSSLKPEDTAVYYCNAAGKRIGSDGSIWFAVASFGSWGQGTQVTVSS

SEQ ID NO: 22448 - protein, 128 aa, Artificial Sequence
  source: /note="Description of Artificial Sequence: Synthetic polypeptide"
QVKLEESGGGLVQAGGSLRVSCTASVSTFSINALGWYRQAPGKARELVAAIGSDGTVYYTDSVKGRFTISRDNAKNTVSLQMSSLKPEDTAVYYCNAAGKRIGSDGSIWFAVASFGSWGQGTQVTVSS

SEQ ID NO: 22449 - protein, 128 aa, Artificial Sequence
  source: /note="Description of Artificial Sequence: Synthetic polypeptide"
QVQLVESGGGLVQAGGSLRVSCTASVSTFSINALGWYRQAPGKARELVAAIGSDGTVYYTDSVKGRFTISRDNAKNTVSLQMSSLKPEDTAVYYCNAAGKRIGSDGSIWFAVASFGSWGQGTQVTVSS

SEQ ID NO: 22450 - protein, 128 aa, Artificial Sequence
  source: /note="Description of Artificial Sequence: Synthetic polypeptide"
QVKLEESGGGLVQAGGSLRVSCTASVSTFSINALGWYRQAPGKARELVCAIGSDGTVYYTDSVKGRFTCSRDNAKNTVSLQMSSLKPEDTAVYYCNAAGKRIGSDGSIWFAVASFGSWGQGTQVTVSS

SEQ ID NO: 22451 - protein, 128 aa, Artificial Sequence
  source: /note="Description of Artificial Sequence: Synthetic polypeptide"
QVQLVESGGGLVQAGGSLRVSCTASVSTFSINALGWYRQAPGKARELVCAIGSDGTVYYTDSVKGRFTCSRDNAKNTVSLQMSSLKPEDTAVYYCNAAGKRIGSDGSIWFAVASFGSWGQGTQVTVSS

SEQ ID NO: 22452 - protein, 108 aa, Artificial Sequence
  source: /note="Description of Artificial Sequence: Synthetic polypeptide"
QLQLVESGGGLVQAGGAMGWFRQAPGKEREFVAAISRSGVNTRYEDSVKGRSTISRDNAKRSVFLQMDSLKRDDTAVYYCAARRGPGTSVLSDDYDYWGQGTQVTVSS

SEQ ID NO: 22453 - protein, 178 aa, Artificial Sequence
  source: /note="Description of Artificial Sequence: Synthetic polypeptide"
DVQLQASGGGSVQAGGSLRLSCAASGYTIGPYCMGWFRQAPGKEREGVAAINMGGGITYYADSVKGRFTISQDNAKNTVYLLMNSLEPEDTAIYYCAADSTIYASYYECGHGLSTGGYGYDSWGQGTQVTVSSEPKIPQPQPKPQPQPQPQPKPQPKPEPMECGRYPYDVPDYGSGRA

SEQ ID NO: 22454 - protein, 128 aa, Artificial Sequence
  source: /note="Description of Artificial Sequence: Synthetic polypeptide"
EVQLQASGGGSVQAGQSLRLSCATSGATSSSNCMGWFRQAPGKEREGVAVIDTGRGNTAYADSVQGRLTISLDNAKNTLYLQMNSLKPEDTAMYYCAADTSTWYRGYCGTNPNYFSYWGQGTQVTVSS

SEQ ID NO: 22455 - protein, 303 aa, Artificial Sequence
  source: /note="Description of Artificial Sequence: Synthetic polypeptide"
DVQLQASGGGSVQAGGSLRLSCAASGYTIGPYCMGWFRQAPGKEREGVAAINMGGGITYYADSVKGRFTISQDNAKNTVYLLMNSLEPEDTAIYYCAADSTIYASYYECGHGLSTGGYGYDSWGQGTQVTVSSEPKIPQPQPKPQPQPQPQPKPQPKPEPMAEVQLQASGGGSVQAGQSLRLSCATSGATSSSNCMGWFRQAPGKEREGVAVIDTGRGNTAYADSVQGRLTISLDNAKNTLYLQMNSLKPEDTAMYYCAADTSTWYRGYCGTNPNYFSYWGQGTQVTVSSGRYDVPDYGSGRA

SEQ ID NO: 22456 - protein, 231 aa, Artificial Sequence
  source: /note="Description of Artificial Sequence: Synthetic polypeptide"
QVQLVQSGGGLVKPGGSLRLSCAASGFTFSSYSMNWVRQAPGKGLEWVSSISSSSSYIYYADSVKGRFTISRDNAKNSLYLQMNSLRAEDTAVYYCARGGVAGRTEIYYYYYGMDVWGQGTTVTVSSGSASAPTLFPLVSCENSPSDTSSVAVGCLAQDFLPDSITFSWKYKNNSDISSTRGFPSVLRGGKYAATSQVLLPSKDVMQGTDEHVVCKVQHPNGNKEKNVPLP

SEQ ID NO: 22457 - protein, 113 aa, Artificial Sequence
  source: /note="Description of Artificial Sequence: Synthetic polypeptide"
QVQLQQSGAELVGPGASVTLSCKASGHTFTDYEMHWVKQTPVHGLEWIGGIDPETGGTAYNQKLKGEATLTADKSSNTAYMELRSLTSEDSAVYYCTIYLDYWGRGTTLTVSS

SEQ ID NO: 22458 - protein, 119 aa, Artificial Sequence
  source: /note="Description of Artificial Sequence: Synthetic polypeptide"
EVQLLESGGALVQPGGSLRLSCAASGFTFSSYAMSWARQAPGKGLEWLSGISGSADNTYYAESVKGRFTTSRDNSMNMLYLQMNSLRDEDTAFYYCAKGDQDRGPLEFWGQGTLVTVSS

SEQ ID NO: 22459 - protein, 113 aa, Artificial Sequence; identical to SEQ ID NO: 22457
  source: /note="Description of Artificial Sequence: Synthetic polypeptide"

SEQ ID NO: 22460 - protein, 169 aa, Artificial Sequence
  source: /note="Description of Artificial Sequence: Synthetic polypeptide"
AAANSPFADPNTAFAGFDENKVTVLTIVTEHTDLTMGWSSIILFLLATATGVHSQVQLQQPGAELVRPGASVKLSCKASGYSFTSDWMNWVKQRPGQGLEWIGIIHPSDSETKINQYFKDKATLTIDKSSSTAYMQLSSPTSEDSAVYYCVRWVGYHAQVWGQGTTLTV

SEQ ID NO: 22461 - protein, 120 aa, Artificial Sequence
  source: /note="Description of Artificial Sequence: Synthetic polypeptide"
QVQLVQSGGGIGQPGGSLRLACEASGFTFNLFEMAWVRQAPGQSLEVISYIGSSGSTTRYADSVKGRFIVSRDNDKESMFLQLNSLRVDDTATYFCARLNGWAGSGLDHWGQGTLVAVSS

SEQ ID NO: 22462 - protein, 98 aa, Artificial Sequence
  source: /note="Description of Artificial Sequence: Synthetic polypeptide"
EVQLVESGGGLVQPGGSLRLSCAASGFTFSSYEMNWVRQAPGKGLEWVSYISSSGSTIYYADSVKGRFTISRDNAKNSLYLQMNSLRAEDTAVYYCAR

SEQ ID NO: 22463 - protein, 120 aa, Artificial Sequence
  source: /note="Description of Artificial Sequence: Synthetic polypeptide"
QVQLVQSGGGIGQPGGSLRLACEASGFTFNLFEMAWVRQAPGQGLEVISYIGSSGSTTRYADSVKGRFIVSRDNDKESMFLQLNSLRVDDTATYFCARLNGWAGSGLDHWGQGTLVAVSS

SEQ ID NO: 22464 - protein, 120 aa, Artificial Sequence
  source: /note="Description of Artificial Sequence: Synthetic polypeptide"
QVQLVQSGGAWGQPGASLRLSCEVSGFPFNLYEMIWVRQAPGKGLEWVAYIGSSGTLMKYADSVKGRLTISRDNSKNSLYLHLNSPEVEDTAIYYCARFNGWSGSGLDYWGQGTLVAVSS

SEQ ID NO: 22465 - protein, 98 aa, Artificial Sequence
  source: /note="Description of Artificial Sequence: Synthetic polypeptide"
QVQLVQSGAEVKKPGASVKVSCKASGYTFTSYGISWVRQAPGQGLEWMGWISAYNGNTNYAQKLQGRVTMTTDTSTSTAYMELRSLRSDDTAVYYCAR

SEQ ID NO: 22466 - protein, 124 aa, Artificial Sequence
  source: /note="Description of Artificial Sequence: Synthetic polypeptide"
QVQLQQSGAEVKTPGASVKVSCKASGYDFKAHGMSWVRQAPGQGPEWMGWISGNNYNTTYAQSVRGRVTVTTDTSTTTVYMELKNLRSDDTAVYFCARDQGGSRFGELLILDYWGQGTLVTVSS

SEQ ID NO: 22467 - protein, 171 aa, Artificial Sequence
  source: /note="Description of Artificial Sequence: Synthetic polypeptide"
DSHAKRHHGYKRKFHEKHHSHRGYSGGGGSGGGGSGGGGSDVKLVESGGGLVNPGGSLKLSCAASGFTFSSYTMSWVRGINTPEKRLEWVASISSGGTYTYYPDSVKGRFTISRDNAKNTLYLGINMTSLKSEDTAMYYCSRDDGSYGSYYYAMDYWGGINGTSVTVSSAS

SEQ ID NO: 22468 - protein, 125 aa, Artificial Sequence
  source: /note="Description of Artificial Sequence: Synthetic polypeptide"
DVKLVESGGGLVNPGGSLKLSCAASGFTFSSYTMSWVRQTPEKRLEWVASISSGGTYTYYPDSVKGRFTISRDNAKNTLYLQMTSLKSEDTAMYYCSRDDGSYGSYYYAMDYWGQGTSVTVSSAS

SEQ ID NO: 22469 - protein, 125 aa, Artificial Sequence; identical to SEQ ID NO: 22468
  source: /note="Description of Artificial Sequence: Synthetic polypeptide"

SEQ ID NO: 22470 - protein, 439 aa, Artificial Sequence; identical to SEQ ID NO: 19673
  source: /note="Description of Artificial Sequence: Synthetic polypeptide"

SEQ ID NO: 22471 - protein, 441 aa, Artificial Sequence; identical to SEQ ID NO: 19680
  source: /note="Description of Artificial Sequence: Synthetic polypeptide"

SEQ ID NO: 22472 - protein, 441 aa, Artificial Sequence; identical to SEQ ID NO: 19681
  source: /note="Description of Artificial Sequence: Synthetic polypeptide"

SEQ ID NO: 22473 - protein, 439 aa, Artificial Sequence; identical to SEQ ID NO: 19682
  source: /note="Description of Artificial Sequence: Synthetic polypeptide"

SEQ ID NO: 22474 - protein, 441 aa, Artificial Sequence; identical to SEQ ID NO: 19683
  source: /note="Description of Artificial Sequence: Synthetic polypeptide"

SEQ ID NO: 22475 - protein, 441 aa, Artificial Sequence; identical to SEQ ID NO: 19684
  source: /note="Description of Artificial Sequence: Synthetic polypeptide"

SEQ ID NO: 22476 - protein, 440 aa, Artificial Sequence; identical to SEQ ID NO: 19685
  source: /note="Description of Artificial Sequence: Synthetic polypeptide"

SEQ ID NO: 22477 - protein, 441 aa, Artificial Sequence; identical to SEQ ID NO: 19686
  source: /note="Description of Artificial Sequence: Synthetic polypeptide"

SEQ ID NO: 22478 - protein, 439 aa, Artificial Sequence; identical to SEQ ID NO: 19687
  source: /note="Description of Artificial Sequence: Synthetic polypeptide"

SEQ ID NO: 22479 - protein, 441 aa, Artificial Sequence; identical to SEQ ID NO: 19674
  source: /note="Description of Artificial Sequence: Synthetic polypeptide"

SEQ ID NO: 22480 - protein, 439 aa, Artificial Sequence; identical to SEQ ID NO: 19675
  source: /note="Description of Artificial Sequence: Synthetic polypeptide"

SEQ ID NO: 22481 - protein, 441 aa, Artificial Sequence; identical to SEQ ID NO: 19676
  source: /note="Description of Artificial Sequence: Synthetic polypeptide"

SEQ ID NO: 22482 - protein, 441 aa, Artificial Sequence; identical to SEQ ID NO: 19677
  source: /note="Description of Artificial Sequence: Synthetic polypeptide"

SEQ ID NO: 22483 - protein, 441 aa, Artificial Sequence; identical to SEQ ID NO: 19679
  source: /note="Description of Artificial Sequence: Synthetic polypeptide"

SEQ ID NO: 22484 - protein, 216 aa, Artificial Sequence
  source: /note="Description of Artificial Sequence: Synthetic polypeptide"
MLVESGGGLVQPGGSMKLSCRLEVSGFTFSYYWMSWVRQSPEKGFEWVAERLERLKSENYATNYTESVKGKFTRLESRDDSKSRLYLQMNSLGAEDTGRLEYYCLTGYAWFAYWGQGTLVTVSAAKTTPPSVYPLAPGSAAQTNSMVTLGCLVKGYFPEPVTVTWNSGSLSSGVHTFPAVLQSDLYTLSSSVTVPSSTWPSETVTCNVAHPASSTK

SEQ ID NO: 22485 - protein, 464 aa, Artificial Sequence
  source: /note="Description of Artificial Sequence: Synthetic polypeptide"
MGRLTSSFLLLIVPAYVLSQVTLKESGPGILQPSQTLSLTCSFSGISLTTSGMGVGWIRQPSGEGLEWLADIFWDDNKYYNPSLKSRLTISKDTSTKQVFFKITSVDTADTATYYCVRVYYKNDGYFDVWGAGTTVTVSSAKTTPPSVYPLAPGSAAQTNSMVTLGCLVKGYFPEPVTVTWNSGSLSSGVHTFPAVLQSDLYTLSSSVTVPSSTWPSETVTCNVAHPASSTKVDKKIVPRDCGCKPCICTVPEVSSVFIFPPKPKDVLTITLTPKVTCVVVDISKDDPEVQFSWFVDDVEVHTAQTQPREEQFNSTFRSVSELPIMHQDWLNGKEFKCRVNSAAFPAPIEKTISKTKGRPKAPQVYTIPPPKEQMAKDKVSLTCMITDFFPEDITVEWQWNGQPAENYKNTQPIMDTDGSYFVYSKLNVQKSNWEAGNTFTCSVLHEGLHNHHTEKSLSHSPGK

SEQ ID NO: 22486 - protein, 86 aa, Artificial Sequence
  source: /note="Description of Artificial Sequence: Synthetic polypeptide"
  MOD_RES (1)..(1): Any amino acid
  MOD_RES (16)..(16): Any amino acid
  MOD_RES (24)..(24): Any amino acid
  MOD_RES (27)..(27): Any amino acid
  MOD_RES (29)..(29): Any amino acid
  MOD_RES (37)..(37): Any amino acid
  MOD_RES (39)..(39): Any amino acid
  MOD_RES (41)..(42): Any amino acid
  MOD_RES (44)..(44): Any amino acid
  MOD_RES (48)..(48): Any amino acid
  MOD_RES (55)..(55): Any amino acid
  MOD_RES (58)..(58): Any amino acid
  MOD_RES (63)..(63): Any amino acid
  MOD_RES (69)..(69): Any amino acid
  MOD_RES (75)..(75): Any amino acid
XVQLQASGGGSVQAGXSLRLSCAXSGXWXRQAPGKEXEXVXXRXTISXDNAKNTXYLXMNSLXPEDTAXYYCAAXWGQGTQVTVSS

SEQ ID NO: 22487 - protein, 87 aa, Artificial Sequence
  source: /note="Description of Artificial Sequence: Synthetic polypeptide"
  MOD_RES (1)..(1): Any amino acid
  MOD_RES (16)..(16): Any amino acid
  MOD_RES (24)..(24): Any amino acid
  MOD_RES (27)..(28): Any amino acid
  MOD_RES (30)..(30): Any amino acid
  MOD_RES (38)..(38): Any amino acid
  MOD_RES (40)..(40): Any amino acid
  MOD_RES (42)..(43): Any amino acid
  MOD_RES (45)..(45): Any amino acid
  MOD_RES (49)..(49): Any amino acid
  MOD_RES (56)..(56): Any amino acid
  MOD_RES (59)..(59): Any amino acid
  MOD_RES (64)..(64): Any amino acid
  MOD_RES (70)..(70): Any amino acid
  MOD_RES (76)..(76): Any amino acid
XVQLQASGGGSVQAGXSLRLSCAXSGXXWXRQAPGKEXEXVXXRXTISXDNAKNTXYLXMNSLXPEDTAXYYCAAXWGQGTQVTVSS

SEQ ID NO: 22488 - protein, 472 aa, Artificial Sequence
  source: /note="Description of Artificial Sequence: Synthetic polypeptide"
MGWSCIILFLVATATGVHSEVQLVESGGGLVQPGGSLRLSCSASGFTFSSYWMSWVRQAPGKGLEWVANIIQDGSEKYYADSVKGRLTISRDNAKNSLYLQMNSLRVDDTAVYYCARGYEGCSATRCYLYYFDYWGPGTLVTVSSASTKGPSVFPLAPSSKSTSGGTAALGCLVKDYFPEPVTVSWNSGALTSGVHTFPAVLQSSGLYSLSSVVTVPSSSLGTQTYICNVNHKPSNTKVDKRVEPKSGPPCPPCPAPELLGGPSVFLFPPKPKDTLMISRTPEVTCVVVDVSHEDPEVKFNWYVDGVEVHNAKTKPREEQYNSTYRVVRVLTVLHQDWLNGKEYKCKVSNKALPAPIEKTISKAKGQPREPQVYTLPPSREEMTKNQVSLTCLVKGFYPSDIAVEWESNGQPEDNYKTTPPVLDSDGSFFLYSKLTVDKSRWQQGNVFSCSVMHEALHNHYTQKSLSLSLGK

SEQ ID NO: 22489 - protein, 470 aa, Artificial Sequence
  source: /note="Description of Artificial Sequence: Synthetic polypeptide"
MGWSCIILFLVATATGVHSEVQLLQSGAGLLKPSETLSLTCAVYGGSFSGYYWSWIRQAPGKGLEWIGEIDHSGTTNYNPSLKSRVTISVETSKNQFSLRLSSVTAADSAVYYCASSGYCSHGLCPQEDWGQGTLVTVSSASTKGPSVFPLAPSSKSTSGGTAALGCLVKDYFPEPVTVSWNSGALTSGVHTFPAVLQSSGLYSLSSVVTVPSSSLGTQTYICNVNHKPSNTKVDKKVEPKSCDKTHTCPPCPAPELLGGPSVFLFPPKPKDTLMISRTPEVTCVVVDVSHEDPEVKFNWYVDGVEVHNAKTKPREEQYNSTYRVVSVLTVLHQDWLNGKEYKCKVSNKALPAPIEKTISKAKGQPREPQVYTLPPSRDELTKNQVSLTCLVKGFYPSDIAVEWESNGQPENNYKTTPPVLDSDGSFFLYSKLTVDKSRWQQGNVFSCSVMHEALHNHYTQKSLSLSPGK

SEQ ID NO: 22490 - protein, 470 aa, Artificial Sequence
  source: /note="Description of Artificial Sequence: Synthetic polypeptide"
MGWSCIILFLVATATGVHSEVQLEESGAGLLKPSETLSLTCAVYGGSFSGYYWSWIRQAPGKGLEWIGEIDHSGTTNYNPSLKSRVTISVETSKNQFSLRLSSVTAADSAVYYCASSGYCSHGLCPQEDWGQGTLVTVSSASTKGPSVFPLAPSSKSTSGGTAALGCLVKDYFPEPVTVSWNSGALTSGVHTFPAVLQSSGLYSLSSVVTVPSSSLGTQTYICNVNHKPSNTKVDKRVEPKSCDKTHTCPPCPAPELLGGPSVFLFPPKPKDTLMISRTPEVTCVVVDVSHEDPEVKFNWYVDGVEVHNAKTKPREEQYNSTYRVVSVLTVLHQDWLNGKEYKCKVSNKAVPAPIEKTISKAKGQPREPQVYTLPPSREEMTKNQVSLTCLVKGFYPSDIAVEWESNGQPENNYKTTPPVLDSDGSFFLYSKLTVDKSRWQQGNVFSCSVMHEALHNHYTQKSLSLSPGK

SEQ ID NO: 22491 - protein, 475 aa, Artificial Sequence
  source: /note="Description of Artificial Sequence: Synthetic polypeptide"
MGWSCIILFLVATATGVHSQVQLLESGGGLVQPGGSLRLSCAASGFSFGDYWMSWVRQAPGKGLEWVADIKPDGSDKDYVDSVKGRFTISRDNAKNSLYLQMSSLRGEDTAVYYCARDYVVVAPSQPPNIHPEYFQNWGQGTLVIVSSASTKGPSVFPLAPSSKSTSGGTAALGCLVKDYFPEPVTVSWNSGALTSGVHTFPAVLQSSGLYSLSSVVTVPSSSLGTQTYICNVNHKPSNTKVDKRVSCDKTHTCPPCPAPELLGGPSVFLFPPKPKDTLMISRTPEVTCVVVDVSHEDPEVKFNWYVDGVEVHNAKTKPREEQYNSTYRVVSVLTVLHQDWLNGKEYKCKVSNKALPAPIEKTISKAKGQPREPQVYTLPPSREEMTKNQVSLTCLVKGFYPSDIAVEWESNGQPENNYKTTPPVLDSDGSFFLYSKLTVDKSRWQQGNVFSCSVMHEALHNHYTQKSLSLSPGK

SEQ ID NO: 22492 - protein, 106 aa, Artificial Sequence
  source: /note="Description of Artificial Sequence: Synthetic polypeptide"
QIVLTQSPAIMSASPGEKVTMTCSANSSINYMHWYQQKPGTSPKRWIYDTTILASGVPARFSGSGSGTSYSLTISSMEAEDAATYYCHQRSSYPFTFGSGTKLEIK

SEQ ID NO: 22493 - protein, 108 aa, Artificial Sequence
  source: /note="Description of Artificial Sequence: Synthetic polypeptide"
SYELTQPPSVSVSPGQTARITCSGDALPKQYAYWYQQKPGQAPVLLIYQDTKRPSGIPERFSGSSSGTTVALTISGVQAEDEADYYCQSADSNDSYYVFGTGTKVTVL

SEQ ID NO: 22494 - protein, 113 aa, Artificial Sequence; identical to SEQ ID NO: 19969
  source: /note="Description of Artificial Sequence: Synthetic polypeptide"

SEQ ID NO: 22495 - protein, 106 aa, Artificial Sequence; identical to SEQ ID NO: 22492
  source: /note="Description of Artificial Sequence: Synthetic polypeptide"

SEQ ID NO: 22496 - protein, 140 aa, Artificial Sequence
  source: /note="Description of Artificial Sequence: Synthetic polypeptide"
ISQEQKFKDKMDFQVQIFSFLLISFSVIMSRGQIVLTQSPAIMSVSPGEKVTLTCNASSSVSSSYLYWYRQKPGSSPNLWIYSTSNLASGVPARFSGSGSGTSYSLTISSMEAEDVASYFCHQWSSYPLTFGAGTKLELK

SEQ ID NO: 22497 - protein, 107 aa, Artificial Sequence
  source: /note="Description of Artificial Sequence: Synthetic polypeptide"
DIQMTQSPSSLSASVGDRVTITCRASQSISSYLNWYQQKPGKAPKLLIYAASSLQSGVPSRFSGSGSGTDFTLTISSLQPEDFATYYCQQSYSTLWTFGQGTKVEIK

SEQ ID NO: 22498 - protein, 155 aa, Artificial Sequence
  source: /note="Description of Artificial Sequence: Synthetic polypeptide"
KRLFKELKFSLRKYSGGGGSGGGGSGGGGSDVKLVESGGGLVNPGGSLKLSCAASGFTFSSYTMSWVRQTPEKRLEWVASISSGGTYTYYPDSVKGRFTISRDNAKNTLYLQMTSLKSEDTAMYYCSRDDGSYGSYYYAMDYWGQGTSVTVSSAS

SEQ ID NO: 22499 - protein, 219 aa, Artificial Sequence; identical to SEQ ID NO: 19970
  source: /note="Description of Artificial Sequence: Synthetic polypeptide"

SEQ ID NO: 22500 - protein, 439 aa, Artificial Sequence; identical to SEQ ID NO: 19673
  source: /note="Description of Artificial Sequence: Synthetic polypeptide"

SEQ ID NO: 22501 - protein, 219 aa, Artificial Sequence; identical to SEQ ID NO: 19976
  source: /note="Description of Artificial Sequence: Synthetic polypeptide"

SEQ ID NO: 22502 - protein, 441 aa, Artificial Sequence; identical to SEQ ID NO: 19680
  source: /note="Description of Artificial Sequence: Synthetic polypeptide"

SEQ ID NO: 22503 - protein, 219 aa, Artificial Sequence; identical to SEQ ID NO: 19976
  source: /note="Description of Artificial Sequence: Synthetic polypeptide"

SEQ ID NO: 22504 - protein, 441 aa, Artificial Sequence; identical to SEQ ID NO: 19681
  source: /note="Description of Artificial Sequence: Synthetic polypeptide"

SEQ ID NO: 22505 - protein, 219 aa, Artificial Sequence; identical to SEQ ID NO: 19978
  source: /note="Description of Artificial Sequence: Synthetic polypeptide"

SEQ ID NO: 22506 - protein, 439 aa, Artificial Sequence; identical to SEQ ID NO: 19682
  source: /note="Description of Artificial Sequence: Synthetic polypeptide"

SEQ ID NO: 22507 - protein, 219 aa, Artificial Sequence; identical to SEQ ID NO: 19979
  source: /note="Description of Artificial Sequence: Synthetic polypeptide"

SEQ ID NO: 22508 - protein, 441 aa, Artificial Sequence; identical to SEQ ID NO: 19683
  source: /note="Description of Artificial Sequence: Synthetic polypeptide"

SEQ ID NO: 22509 - protein, 219 aa, Artificial Sequence; identical to SEQ ID NO: 19979
  source: /note="Description of Artificial Sequence: Synthetic polypeptide"

SEQ ID NO: 22510 - protein, 441 aa, Artificial Sequence; identical to SEQ ID NO: 19684
  source: /note="Description of Artificial Sequence: Synthetic polypeptide"

SEQ ID NO: 22511 - protein, 219 aa, Artificial Sequence; identical to SEQ ID NO: 19981
  source: /note="Description of Artificial Sequence: Synthetic polypeptide"

SEQ ID NO: 22512 - protein, 440 aa, Artificial Sequence; identical to SEQ ID NO: 19685
  source: /note="Description of Artificial Sequence: Synthetic polypeptide"

SEQ ID NO: 22513 - protein, 219 aa, Artificial Sequence; identical to SEQ ID NO: 19982
  source: /note="Description of Artificial Sequence: Synthetic polypeptide"

SEQ ID NO: 22514 - protein, 441 aa, Artificial Sequence; identical to SEQ ID NO: 19686
  source: /note="Description of Artificial Sequence: Synthetic polypeptide"

SEQ ID NO: 22515 - protein, 219 aa, Artificial Sequence; identical to SEQ ID NO: 19983
  source: /note="Description of Artificial Sequence: Synthetic polypeptide"

SEQ ID NO: 22516 - protein, 439 aa, Artificial Sequence; identical to SEQ ID NO: 19687
  source: /note="Description of Artificial Sequence: Synthetic polypeptide"

SEQ ID NO: 22517 - protein, 219 aa, Artificial Sequence; identical to SEQ ID NO: 19971
  source: /note="Description of Artificial Sequence: Synthetic polypeptide"

SEQ ID NO: 22518 - protein, 441 aa, Artificial Sequence; identical to SEQ ID NO: 19674
  source: /note="Description of Artificial Sequence: Synthetic polypeptide"

SEQ ID NO: 22519 - protein, 219 aa, Artificial Sequence; identical to SEQ ID NO: 19972
  source: /note="Description of Artificial Sequence: Synthetic polypeptide"

SEQ ID NO: 22520 - protein, 439 aa, Artificial Sequence; identical to SEQ ID NO: 19675
  source: /note="Description of Artificial Sequence: Synthetic polypeptide"

SEQ ID NO: 22521 - protein, 219 aa, Artificial Sequence; identical to SEQ ID NO: 19973
  source: /note="Description of Artificial Sequence: Synthetic polypeptide"

SEQ ID NO: 22522 - protein, 441 aa, Artificial Sequence; identical to SEQ ID NO: 19676
  source: /note="Description of Artificial Sequence: Synthetic polypeptide"

SEQ ID NO: 22523 - protein, 219 aa, Artificial Sequence; identical to SEQ ID NO: 19974
  source: /note="Description of Artificial Sequence: Synthetic polypeptide"

SEQ ID NO: 22524 - protein, 441 aa, Artificial Sequence; identical to SEQ ID NO: 19677
  source: /note="Description of Artificial Sequence: Synthetic polypeptide"

SEQ ID NO: 22525 - protein, 219 aa, Artificial Sequence; identical to SEQ ID NO: 19971
  source: /note="Description of Artificial Sequence: Synthetic polypeptide"

SEQ ID NO: 22526 - protein, 441 aa, Artificial Sequence; identical to SEQ ID NO: 19679
  source: /note="Description of Artificial Sequence: Synthetic polypeptide"

SEQ ID NO: 22527 - protein, 113 aa, Artificial Sequence; identical to SEQ ID NO: 19984
  source: /note="Description of Artificial Sequence: Synthetic polypeptide"

SEQ ID NO: 22528 - protein, 219 aa, Artificial Sequence; identical to SEQ ID NO: 19976
  source: /note="Description of Artificial Sequence: Synthetic polypeptide"

SEQ ID NO: 22529 - protein, 113 aa, Artificial Sequence; identical to SEQ ID NO: 19986
  source: /note="Description of Artificial Sequence: Synthetic polypeptide"

SEQ ID NO: 22530 - protein, 219 aa, Artificial Sequence; identical to SEQ ID NO: 19979
  source: /note="Description of Artificial Sequence: Synthetic polypeptide"

SEQ ID NO: 22531 - protein, 219 aa, Artificial Sequence; identical to SEQ ID NO: 19979
  source: /note="Description of Artificial Sequence: Synthetic polypeptide"

SEQ ID NO: 22532 - protein, 113 aa, Artificial Sequence; identical to SEQ ID NO: 19989
  source: /note="Description of Artificial Sequence: Synthetic polypeptide"

SEQ ID NO: 22533 - protein, 113 aa, Artificial Sequence; identical to SEQ ID NO: 19990
  source: /note="Description of Artificial Sequence: Synthetic polypeptide"

SEQ ID NO: 22534 - protein, 219 aa, Artificial Sequence; identical to SEQ ID NO: 19983
  source: /note="Description of Artificial Sequence: Synthetic polypeptide"

SEQ ID NO: 22535 - protein, 113 aa, Artificial Sequence; identical to SEQ ID NO: 19992
  source: /note="Description of Artificial Sequence: Synthetic polypeptide"

SEQ ID NO: 22536 - protein, 219 aa, Artificial Sequence; identical to SEQ ID NO: 19972
  source: /note="Description of Artificial Sequence: Synthetic polypeptide"

SEQ ID NO: 22537 - protein, 219 aa, Artificial Sequence; identical to SEQ ID NO: 19973
  source: /note="Description of Artificial Sequence: Synthetic polypeptide"

SEQ ID NO: 22538 - protein, 219 aa, Artificial Sequence; identical to SEQ ID NO: 19974
  source: /note="Description of Artificial Sequence: Synthetic polypeptide"

SEQ ID NO: 22539 - protein, 219 aa, Artificial Sequence; identical to SEQ ID NO: 19971
  source: /note="Description of Artificial Sequence: Synthetic polypeptide"

SEQ ID NO: 22540 - protein, 177 aa, Artificial Sequence
  source: /note="Description of Artificial Sequence: Synthetic polypeptide"
DVQMIQSPKRLIYLVSKLDSGVPDRFTGSGSGTDFTLKISRVEAEDLGVYYCVQHTHFPTFGGGTKLEIKRADAAPTVSIFPPSSEQLTSGGASVVCFLNNFYPKDINVKWKIDGSERQNGVLNSWTDQDSKDSTYSMSSTLTLTKDEYERHNSYTCEATHKTSTSPIVKSFNRNEC

SEQ ID NO: 22541 - protein, 238 aa, Artificial Sequence
  source: /note="Description of Artificial Sequence: Synthetic polypeptide"
METDTLLLWVLLLWVPGSTGDIVLTQSPASLAVSLGQRATISCRASKSVTTSGYSFMHWYQQKPGQPPKLLIYLASNLEPGVPARFSGSGSGTDFALNILPVEEEDAATYYCQHSRELPYTFGGGTKLEMKRADAAPTVSIFPPSSEQLTSGGASVVCFLNNFYPKDINVKWKIDGSERQNGVLNSWTDQDSKDSTYSMSSTLTLTKDEYERHNSYTCEATHKTSTSPIVKSFNRNEC

SEQ ID NO: 22542 - protein, 214 aa, Artificial Sequence
  source: /note="Description of Artificial Sequence: Synthetic polypeptide"
DVELTQSPSTLSASVGDRVTITCRASQSISSWLAWYQQKPGKAPKLLIYKASSLESGVPSRFSGSGSGTEFTLTISSLQPDDFATYYCQQYNSYPWTFGQGTKVEIKRTVAAPSVFIFPPSDEQLKSGTASVVCLLNNFYPREAKVQWKVDNALQSGNSQESVTEQDSKDSTYSLSSTLTLSKADYEKHKVYACEVTHQGLSSPVTKSFNRGEC

SEQ ID NO: 22543 - protein, 233 aa, Artificial Sequence
  source: /note="Description of Artificial Sequence: Synthetic polypeptide"
MGWSCIILFLVATATGVHSSYVLTQPPSVSVSPGQTARITCSGDALPKQYTYWYQQKPGQAPVVVIYKDSERPSGIPERFSGSSSGTTVTVTISGVQAEDEADYYCQSADSSGTSLVFGGGTKLTVLGQPKAAPSVTLFPPSSEELQANKATLVCLISDFYPGAVTVAWKADSSPVKAGVETTTPSKQSNNKYAASSYLSLTPEQWKSHKSYSCQVTHEGSTVEKTVAPTESS

SEQ ID NO: 22544 - protein, 232 aa, Artificial Sequence
  source: /note="Description of Artificial Sequence: Synthetic polypeptide"
MGWSCIILFLVATATGVHSDIELTQSPSFLSASVGDRVAITCRASQGISNYLAWYQQKPGKAPKLLIYAAFVLQSGVPSRFSGSGSGTEFTLTISNLQPEDFATYYCQQLNSYPRAFGPGTKVDIKRTVAAPSVFIFPPSDEQLKSGTASVVCLLNNFYPREAKVQWKVDNALQSGNSQESVTEQDSKDSTYSLSSTLTLSKADYEKHKVYACEVTHQGLSSPVTKSFNRGE

SEQ ID NO: 22545 - protein, 229 aa, Artificial Sequence
  source: /note="Description of Artificial Sequence: Synthetic polypeptide"
MGWSCIILFLVATATGVHSLCADSATLSVSGPRRDGQHSCGGNNIGTKSVHWYQQRPGQAPLLVLYHDTRRPSRIPERFSGSNSGNTATLTISRVEAGDEADYYCQVWDSRRVFGGGTKLTVLGQPKAAPSVTLFPPSSEELQANKATLVCLISDFYPGAVTVAWKADSSPVKAGVETTTPSKQSNNKYAASSYLSLTPEQWKSHKSYSCQVTHEGSTVEKTVAPTESS

SEQ ID NO: 22546 - protein, 244 aa, Artificial Sequence
  source: /note="Description of Artificial Sequence: Synthetic polypeptide"
MQVKLQESGPELVKPGALVKISCKASGYTFTSYDINWVKQRPGQGLEWIGWIYPGDGSTKYNEKFKGKATLTADKSSSTAYMQLSSLTSENSAVYFCARYYRYYFDYWGQGTTVTVSSGGGGSGGGGSGGGGSDNVLTQSPAIMSASPGEKVTMTCSASSSVSYMHWFQQKPGTSPKLWIYSTSNLASGVPARFSGSGSGTSYSLTISRMEAEDAATYYCQQRSSYPFTFGSGTKLEIKRAAAE

SEQ ID NO: 22547 - protein, 243 aa, Artificial Sequence
  source: /note="Description of Artificial Sequence: Synthetic polypeptide"
MEVKLQETGPEVVKPGASVKLSCKASGYIFTSYDINWVRQTPEQGLEWIGWIFPGEGSTEYNEKFKGRATLSVDKSSSTAYMELTSLTSEDSAVYFCARGDYYRRYFDYWGQGTTVTVSSGGGGSGGGGSGGGGSDIELTQSPASLAVSLGQRATISYRASKSVSTSGYSYMHWNQQKPGQPPRLLIYLVSNLESGVPARFSGSGSGTDFTLNIHPVEEEDYCAYATQHIRELTRSEGGPSWK

SEQ ID NO: 22548 - protein, 127 aa, Artificial Sequence
  source: /note="Description of Artificial Sequence: Synthetic polypeptide"
EVQLQASGGGSVQAGGSLRLSCTAANYAFDSKTVGWFRQVPGKEREGVAGISSGGSTTAYSDSVKGRYTVSLENAKNTVYLLIDNLQPEDTAIYYCAGVSGWRGRQWLLLAETYRFWGQGTQVTVSS

SEQ ID NO: 22549 - protein, 119 aa, Artificial Sequence
  source: /note="Description of Artificial Sequence: Synthetic polypeptide"
EVQLQASGGGSVQAGGSLRLSCAASGGQTFDSYAMAWFRQAPGKECELVSSIIGDDNRNYADSVKGRFTISRDNAKNTVYLQMDRLNPEDTAVYYCAQLGSARSAMYCAGQGTQVTVSS

SEQ ID NO: 22550 - protein, 123 aa, Artificial Sequence
  source: /note="Description of Artificial Sequence: Synthetic polypeptide"
LESGGGLVQPGGSLRLSCAGSGFTFSSSAMSWVRQSPGKGLEWVSTISGFGGSTYYTDSVKGRFTISRDNYKNTLYLQMKSLRAEDTAVYYCAKVPFSGYDYVWGSYGYFDYWGQGTLVTVSS

SEQ ID NO: 22551 - protein, 120 aa, Artificial Sequence
  source: /note="Description of Artificial Sequence: Synthetic polypeptide"
LESGGGSVQPGGSLILSCAGSGFTFSSSAMSWVRQSPGKGLEWVSTISGFGGSTYYTDSVKGRFTISRDNYKNTLYLQMNSLRAEDTAVYYCAKVPLVDMITLGGVWLFDYWGQGTLVTV

SEQ ID NO: 22552 - protein, 123 aa, Artificial Sequence
  source: /note="Description of Artificial Sequence: Synthetic polypeptide"
LESGGGLVQPGGSLILSCAGSGFTFSSSAMSWVRQSPGKGLEWVSTISGFGGSTYYTDSVKGRFTISRDNYKNTLYLQMNSLRAEDTAVYYCAKVPFSGYDTLGGSYGYFDYWGQGTLVTVSS

SEQ ID NO: 22553 - protein, 128 aa, Artificial Sequence
  source: /note="Description of Artificial Sequence: Synthetic polypeptide"
LESGGGLVQPGGSLRLSCAGSGFTFSSSAMSWVRQSPGKGLEWVSTISGFGGSTYYTDSVKGRFTISRDNSKNTLYLQMKSLRAEDTAVYYCAKVPFSGYDTFGGVWLFDYWGQGTLVTVTCCTCASS

SEQ ID NO: 22554 - protein, 122 aa, Artificial Sequence
  source: /note="Description of Artificial Sequence: Synthetic polypeptide"
LESGGGLVQPGGSLILSCAGSGFTFSSSAMSWVRQSPGKGLEWVSTISGFGGSTYYTDSVKGRFTISRDNYKNTLYLQMKSLRAEDTAVYYCAKVPFSGYDTFGGVWLFDYWGQGTLVTVSS

SEQ ID NO: 22555 - protein, 117 aa, Artificial Sequence
  source: /note="Description of Artificial Sequence: Synthetic polypeptide"
DVQLQESGPGLVKPSQSLSLSCSVTGYSITSGYYWNWIRQFPGNKLEWMGYIGYDGSNKYNPSLKNRISITRDTSKNQFFLKLTSVTTGDTATYYCVRDVKYYFDYWGQGTTVTVSS

SEQ ID NO: 22556 - protein, 116 aa, Artificial Sequence
  source: /note="Description of Artificial Sequence: Synthetic polypeptide"
EVQLQQSGPELVKPGASVKMSCKASGYKFTSYVMHWVKQKPGQGLEWIGYINPSNDNIKYNEKFKGKAILTLDKSSSTAYMAFSSLTSEDSAVYYCATLTGVDYWGQGTTLTVSSA

SEQ ID NO: 22557 - protein, 124 aa, Artificial Sequence
  source: /note="Description of Artificial Sequence: Synthetic polypeptide"
QVTLKESGPGILQPSQTLSLTCSFSGFSLSTSGMGVGWIRQPSGKGLEWLAHIWWDDVKRYSPALKSRLTISKDTSSSQLFLKIASVDTADTATYYCARIKSVITTGDYALDYWGQGTSVAVSS

SEQ ID NO: 22558 - protein, 117 aa, Artificial Sequence
  source: /note="Description of Artificial Sequence: Synthetic polypeptide"
QVQLKESGPGLVAPSQSLSITCTVSGFSLIGYGVNWVRQPPEKGLEWLGMIWGDGSTDYNSALKSRLSITKDNSKSQVFLKMNSLQTDDTARYYCAMGVRPDPFDYWGQGTLVTVSA

SEQ ID NO: 22559 - protein, 131 aa, Artificial Sequence
  source: /note="Description of Artificial Sequence: Synthetic polypeptide"
EVQLLESGGSLVQPGGSLRLSCAASGFIFSNHAIHWVRQTSDKGLEWVATISGGGGATYYPDSVKGRETISRDNSKNMVYLQMNSLRAEDTAVYYCAKDVLNVFEAERNYGWSTGYSFDYWGQGTRVTVSS

SEQ ID NO: 22560 - protein, 126 aa, Artificial Sequence
  source: /note="Description of Artificial Sequence: Synthetic polypeptide"
EVQLLESGGSLVQPGGSLRLSCAASGFTFSDSWMHWVRQVPGKGLEWDDTISSDGDSTRYADSVQGRFIISRDNAKNTYLLQMNSLRVEDTAVYYCTRSPQYCSTTRCDWIHYDYWGQGTLVTVSS

SEQ ID NO: 22561 - protein, 124 aa, Artificial Sequence
  source: /note="Description of Artificial Sequence: Synthetic polypeptide"
QVQLQQWGAGLLKPSDTLSLTCTVYGGFLSGYYWTWVRQTPGKGLEWIGEIYYSGSTEYNPSLGSRVTMSVDRSKNQLSLKLSSVTAADTAVYYCARSSSFREFDVRRGAFDIWGQGTMVTVSS

SEQ ID NO: 22562 - protein, 129 aa, Artificial Sequence
  source: /note="Description of Artificial Sequence: Synthetic polypeptide"
QVQLQEWGPGLVRPSETLSLTCTVSGGSISPDYWSWIRQPPGKELEWIGYIYYSGSTNYNPSLKSRVAISVDTSKNQFSLKLSSVTAADTAVYYCARFSDYYVRDYYGSGTQRYGLDVWGQGTTVTVSS

SEQ ID NO: 22563 - protein, 123 aa, Artificial Sequence
  source: /note="Description of Artificial Sequence: Synthetic polypeptide"
EVQLLETGGGLVQPGGSLRLSCAASGFTFRNYGMNWVRQAPGKGLEWVAVIYGGGGRTHYADSVQGRFIISRDDSTNTMYLQMNSLRAEDTAVYYCAKDRMTSKVWDYGMDVWGQGTTVTVSS

SEQ ID NO: 22564 - protein, 129 aa, Artificial Sequence
  source: /note="Description of Artificial Sequence: Synthetic polypeptide"
QLQLQESGPGLVKPSGTLSLTCTVSGGSISRASDYWGWVRQSPGKGLEWLGSVYYSGTTFYNPSLKSRVTISVDTSKKRLSLKLSSVTAADTAVYYCARGGNDYGDHQTGSFYYGMDAWGHGTTVIVSS

SEQ ID NO: 22565 - protein, 229 aa, Artificial Sequence
  source: /note="Description of Artificial Sequence: Synthetic polypeptide"
QLQQSGPELVKPGASVKISCKASGYTFTDFNMHWVKQSHGKSLEWIGYIYPYNGITGQNQKFKSKATLTVDNSSSSAYMELRSLTSEDSAVYYCARERFGVGNNYAWFTYWGQGTLVTVSSAKTTPPSVYPLAPGPVSAAQTNSMVTLGCLVKGYFPEPVTVTWNSGSLSSGVHTFPAVLQSDLYTLSSSVTVPSSTWPSETVTCNVAHPASSTKVDKKIVPRDCTSKP

SEQ ID NO: 22566 - protein, 230 aa, Artificial Sequence
  source: /note="Description of Artificial Sequence: Synthetic polypeptide"
QVTLKESGPGILQPSQTLSLTCSFSGFSLSTSGMGVGWIRQPSGKGLEWLAHIWWDDVKRYSPALKSRLTISKDTSSSQLFLKIASVDTADTATYYCARIKSVITTGDYALDYWGQGTSVAVSSAKTTPPSVYPLAPGSAAQTNSMVTLGCLVKGYFPEPVTVTWNSGSLSSGVHTFPAVLQSDLYTLSSSVTVPSSTWPSETVTCNVAHPASSTKVDKKIVPRDCTSKP

SEQ ID NO: 22567 - protein, 124 aa, Artificial Sequence
  source: /note="Description of Artificial Sequence: Synthetic polypeptide"
EVQLLEQSGAEVKKPGESLKISCKVSGSRSTNYWIAWVRQMPGKGLEWMGIISPSDSTTKYSPAFQGQVTISADKSINTAYLQWSSLRASDTAIYYCAKSTIGVWDYYYYMDVWGEGTSVTISS

SEQ ID NO: 22568 - protein, 124 aa, Artificial Sequence
  source: /note="Description of Artificial Sequence: Synthetic polypeptide"
EVQLLEQSGAEVKKPGASVKVSCKASGYRFSNYAMHWVRQAPGQSLEWMGWINPVSGKTQFSQKFQGRVTITRDTSASTVYMEVTSLTSEDTAVYYCTRDLPGTWNFVDVFDIWGQGTMVTVSS

SEQ ID NO: 22569 - protein, 124 aa, Artificial Sequence
  source: /note="Description of Artificial Sequence: Synthetic polypeptide"
EVQLLEQSGAEVKKPGESLTISCQGSGDIFTNYWIGWVRQMPGKGLEWMGIIYPRNSDTKYSPSFQGLVTISADKSTNTAYLQWNSLGASDTAIYYCVRASYGNYNYFYNMDVWGRGTTVTISS

SEQ ID NO: 22570 - protein, 137 aa, Artificial Sequence
  source: /note="Description of Artificial Sequence: Synthetic polypeptide"
EVQLLEQSGPRLVKPSQTLSLTCSVSGASLTRGNYYWSWMRQPPGKGLEWIGTIHSRGRPAYNTSLASRVAMSVDASNNQFSLNLNSVTAADTAVYYCARVFQSKGGAVWAPTTEWTYSYYYYMDVWGRGTTVTVSS

SEQ ID NO: 22571 - protein, 110 aa, Artificial Sequence
  source: /note="Description of Artificial Sequence: Synthetic polypeptide"
ELTQPPSVSGALGQRVTIPCTGGSSNIGSSYHVHWYRQLPGTAPRLLIYADTRRPSGVPGRFSASKSGTSASLAITDLQAGDEADYYCQTYDSDLGGSVFGGGTRVTVLG

SEQ ID NO: 22572 - protein, 110 aa, Artificial Sequence; identical to SEQ ID NO: 22571
  source: /note="Description of Artificial Sequence: Synthetic polypeptide"

SEQ ID NO: 22573 - protein, 110 aa, Artificial Sequence
  source: /note="Description of Artificial Sequence: Synthetic polypeptide"
ELTQPPSVSGAPGQSVTIPCAGSSSNIGAAYDVHWYQQFPGTVPKLLIYSNSNRPSGVPARFSGSKSGTSGSLAITGLQAEDEAYYYCQSYDRSLNGVVFGGGTKLTVLG

SEQ ID NO: 22574 - protein, 110 aa, Artificial Sequence; identical to SEQ ID NO: 22571
  source: /note="Description of Artificial Sequence: Synthetic polypeptide"

SEQ ID NO: 22575 - protein, 110 aa, Artificial Sequence; identical to SEQ ID NO: 22573
  source: /note="Description of Artificial Sequence: Synthetic polypeptide"

SEQ ID NO: 22576 - protein, 109 aa, Artificial Sequence
  source: /note="Description of Artificial Sequence: Synthetic polypeptide"
MGKEWLERKLLIDVGVYLNRARPFLAWSANIGGTGTGTAAPRNGPKVIIYRNAQRPSGVPDRFSGSKSGTSASLAVSGLQSEDEADYCAAWDDSLNAWVFGGGTVTVLG

SEQ ID NO: 22577 - protein, 107 aa, Artificial Sequence
  source: /note="Description of Artificial Sequence: Synthetic polypeptide"
DIQMTQSPSSLSASIGDRVTVTCRASQDIGTYLHWYQQKPGKAPKLLIYAASSLRRGVPSRFSGSGSGTDFTLTISSLHGEDFATYYCQQSYTTMWTFGQGTIVESK

SEQ ID NO: 22578 - protein, 107 aa, Artificial Sequence
  source: /note="Description of Artificial Sequence: Synthetic polypeptide"
DIQMTQSPSSLSASVGDRVTITCRASQSISSYLNWYQQKPGQAPKLLIFAASSLQSGVPSRFSGSGSGTDFTLTLSSLQPEDFATYYCQQSYSTPYTFGQGTKVEIK

SEQ ID NO: 22579 - protein, 107 aa, Artificial Sequence
  source: /note="Description of Artificial Sequence: Synthetic polypeptide"
DIQMTQSPSSLSASVGDRVTITCRASQSISSYLNWYQQKPGKAPKLLIYAASSLQSGVPSRFSGSGSGTDFTLTISSLQPEDFATYYCQQSYSTTWTFGQGTKVEIK

SEQ ID NO: 22580 - protein, 107 aa, Artificial Sequence
  source: /note="Description of Artificial Sequence: Synthetic polypeptide"
DIQMTQSPSSLSASVGDRVTITCRASQSISSYLNWYQQKPGKAPKLLIYAASSLQSGVPSRFSGSGSGTDFTLTISSLQPEDFATYYCQQSFSTPYTFGQGTKLEIK

SEQ ID NO: 22581 - protein, 108 aa, Artificial Sequence
  source: /note="Description of Artificial Sequence: Synthetic polypeptide"
DIQMTQSPASLSVSVGETVTITCRASENIYSNLAWYQQKQGKSPQLLVYAATNLADGVPSRFSGSGSGTQYSLKISSLQSEDFGSYYCQHFWGSPWTFGGGTKLEIKR

SEQ ID NO: 22582 - protein, 112 aa, Artificial Sequence
  source: /note="Description of Artificial Sequence: Synthetic polypeptide"
DVVMTQTPLSLSVTIGQPASISCKSSQSLLYRNGKIYLNWLQQRPGQAPKHLMSQVSKLDPGIPDRFSGSGSETDFTLKISRVEAEDLGVYYCLQGTHYPYTFGGGTKLEIK

SEQ ID NO: 22583 - protein, 108 aa, Artificial Sequence
  source: /note="Description of Artificial Sequence: Synthetic polypeptide"
DIQMTQSPASLSVSVGETVTITCRASEIIYSNLAWYQQKQGKSPQLLVYSATNLAEGVPSRFSGSGSGTQYSLKINSLQSEDFGSYYCQHFWGNPWTFGGGTKLEIKR

SEQ ID NO: 22584 - protein, 112 aa, Artificial Sequence
  source: /note="Description of Artificial Sequence: Synthetic polypeptide"
NIMMTQSPSSLAVSAGEKVTMSCKSSQSVLYSSNQKNYLAWYQQKPGQSPKLLIYWASARESGVPDRFTGSGSGTDFTLTINSVQTEDLAVYYCHQYLSSYTFGGGTKLEIK

SEQ ID NO: 22585 - protein, 112 aa, Artificial Sequence
  source: /note="Description of Artificial Sequence: Synthetic polypeptide"
AELQMTQSPSSLSASVGDRVTITCRASHKMYDYVSWYHQRPGEAPRLLIYAASTLQTGAPTRFSGSGSGTDFTLTIGGLQPEDFGTYYCQRAFGTQLTFGGGTKVEIKRTVA

SEQ ID NO: 22586 - protein, 112 aa, Artificial Sequence
  source: /note="Description of Artificial Sequence: Synthetic polypeptide"
AELTQSPSSLSASVGDRVTITCRASGDVGHYLGWFQQKPGQAPKRLIYAASNLQSGVPSRFSGSGSGTEFTLTISSLQPEDFATYYCLQHNSYPWTFGQGTKLEIKRTVAAP

SEQ ID NO: 22587 - protein, 212 aa, Artificial Sequence
  source: /note="Description of Artificial Sequence: Synthetic polypeptide"
DIQMTQSPASLSVSVGETVTITCRASENIYSNLVWYQQKQGKSPQVLVYAATNLPDGVPSRFSGSGSGTQYSLKINSLQSEDSGSYYCQHFWETPFTFGSGTKLEIKRADAAPTVSIFPPSSEKVLSGGASVVCFLNNFYPKDINVKWKIDGSERQNGVLNSWTDQDSKDSTYSMSSTLTLTKDEYERHNSYTCEATHKTSTSPIVKSFNRN

SEQ ID NO: 22588 - protein, 214 aa, Artificial Sequence
  source: /note="Description of Artificial Sequence: Synthetic polypeptide"
DIQMTQSPASLSVSVGETVTITCRASEIIYSNLAWYQQKQGKSPQLLVYSATNLAEGVPSRFSGSGSGTQYSLKINSLQSEDFGSYYCQHFWGNPWTFGGGTKLEIKRADAAPTVSIFPPSSEQLTSGGASVVCFLNNFYPKDINVKWKIDGSERQNGVLNSWTDQDSKDSTYSMSSTLTLTKDEYERHNSYTCEATHKTSTSPIVKSFNRNEC

SEQ ID NO: 22589 - protein, 121 aa, Artificial Sequence
  source: /note="Description of Artificial Sequence: Synthetic polypeptide"
QVTLRSLVLRWGNPHRPSRGPAPSLGSHSALVEGGVGWIRQPPGKALEWLALIYWNDDKRYSPSLKSRLTITKDTSKNQVVLTMTNMDPVDTATYYCAHRRLPAAVRIFNIGQGTLVTVSS

SEQ ID NO: 22590 - protein, 242 aa, Artificial Sequence
  source: /note="Description of Artificial Sequence: Synthetic polypeptide"
MGKEVVLERKLLIPVGWLNRARPFLAWSAIGGTGTGTAAPRNGPKVIIYRAQRPSGVPDRFSGSKSGTSASLAVSGLQSEDEADYYCAAWDDSLNAWVFGGGTKVTVLGGGGGSGGGGSGGGGSQVTLRSLVLRWGNPHRPSRGPAPSLGSHSALVEGGVGWIRQPPGALEWLALIYWNDDRYSPSLKSRLTITKDTSKNQVVLTMTNMDPVDTATYYCAHRRLPAAVRIFIGQGTLVTVSS

SEQ ID NO: 22591 - protein, 117 aa, Artificial Sequence
  source: /note="Description of Artificial Sequence: Synthetic polypeptide"
EVQLEESGGDLVQPGGSLTLSCAASGFTFSRYWMSWVRQAPGKGPEWVASIKKDGSETFYADSVKGRFIISRDIAKTSLYLQMNSLRADDTAVYYCLRAWYSSAYDFWGQGTLVTVS

SEQ ID NO: 22592 - protein, 108 aa, Artificial Sequence
  source: /note="Description of Artificial Sequence: Synthetic polypeptide"
ELELTQSPSSLSASVGDRVTITCRASQSISNYLNWYQQKPGKAPNLLIYYASTLQSGVPSRFSGSGSGTDFTLTISSLQPEDFATYYCQHGYGAIAFGQGTRLEIKRT

SEQ ID NO: 22593 - protein, 148 aa, Artificial Sequence
  source: /note="Description of Artificial Sequence: Synthetic polypeptide"
EVQLEQSGAEVKKPGSSVKVSCKISGGTFSRHPISWVRQAPGQGLLWMGAIILRAGTTKYEQRFQGRITITADESTGTAYMELHSLTSEDTGLYFCATDRMGTFDELLFDSWGQGTLVTVSSASTELQMTQSPASLSASVGDRVTITC

SEQ ID NO: 22594 - protein, 109 aa, Artificial Sequence
  source: /note="Description of Artificial Sequence: Synthetic polypeptide"
ELQMTQSPASLSASVGDRVTITCRASQGIRNNLGWYQQKPGKPPKLLIYAASTLQSGVPSRFSGSGSGTGFTLTISSLQPEDFATYYCLQDYDFPLTFGGGTKVEIKRT

SEQ ID NO: 22595 - protein, 106 aa, Artificial Sequence
  source: /note="Description of Artificial Sequence: Synthetic polypeptide"
EVQLEESGGVLVKPGGSLRLSCAASGFTFSSHAMHWVRQAPGKGLEWVAIINSGHRADYADSVKDRFTISRDNSKNTLYLQMDSLRPEDTAFYYCAREGDQQDVAD

SEQ ID NO: 22596 - protein, 107 aa, Artificial Sequence
  source: /note="Description of Artificial Sequence: Synthetic polypeptide"
ELTQSPSTLSASVGDRVTITCRASEDIMSYLAWYQQKPAKAPRLLIYYASSLQSGVPSRFSGSGSGTEFTLTISSLQPEDFATYYCQQLHTFPITFGPGTRLDIKRT

SEQ ID NO: 22597 - protein, 132 aa, Artificial Sequence
  source: /note="Description of Artificial Sequence: Synthetic polypeptide"
LEEVQLVESGPGLVKPSETLSLTCAVSGASIRRANWWGWIRQAPGKGLEWLGSIFINAGTIYNPSLTGRVTVSADTSKNLFSLKLGSVTAADTAVYYCVKSYGDGDDNYNSFYYYMDVWGKGTSVIVSSAST

SEQ ID NO: 22598 - protein, 110 aa, Artificial Sequence
  source: /note="Description of Artificial Sequence: Synthetic polypeptide"
DVVMTQSPSSLSASVGDRVTITCRASQDIRNNLAWYQHKPGKAPKLLIYYASKLQSGVPLRFSGSGSGTDYTLFISSLQPEDFATYYCQQYKTDTPYSFGQGTKVDIKRT

SEQ ID NO: 22599 - protein, 118 aa, Artificial Sequence
  source: /note="Description of Artificial Sequence: Synthetic polypeptide"
EVQLEESGGGLVQPGGSLRVSCAASGFPFNGYWIHWVRQAPGKGLEWVSRVNSDGRITNFADSVMGRFTMSRDNAKSTVYLQMNSLRAEDTAMYYCSRGGYTGYPEGHWGQGTLVTVS

SEQ ID NO: 22600 - protein, 109 aa, Artificial Sequence
  source: /note="Description of Artificial Sequence: Synthetic polypeptide"
ELQMTQSPSSLSAAVGDSVTITCRASQGISIHLAWYQQKPGKVPNLLIYAASTLQSGVPSRFSGSGSGTDFTLTINSLQPEVFATYYCQKYDSAPFTFGPGTKVDIKRT

SEQ ID NO: 22601 - protein, 124 aa, Artificial Sequence
  source: /note="Description of Artificial Sequence: Synthetic polypeptide"
EVQLEQSGGGLIKPGGSLRLSCAASGFTFTKYVMHWVRQAPEKGLQWVSAIGGSGGSAWYADSVKGRFTISRDNSKNTLYLQMNSLRAEDTAVYYCARDHARYSGYNSPHEVDSWGQGTLVAVS

SEQ ID NO: 22602 - protein, 109 aa, Artificial Sequence
  source: /note="Description of Artificial Sequence: Synthetic polypeptide"
ELELTQSPSSLSASVGDRVTITCRASQGISNYLAWYQQKPGKVPKLLIYAASTLQSGVPSRFSGSGSGTDFTLTISSLQPEDVATYYCQKYNSAPLTFGGGTKVEIKRT

SEQ ID NO: 22603 - protein, 129 aa, Artificial Sequence
  source: /note="Description of Artificial Sequence: Synthetic polypeptide"
EVQLVETGGSLVQPGGSLRLSCAASGFSVSIYHMSWVRQAPGKGLEWVSLLYSGGSTYYADSVKGRFTISRDNSKNTLYLQMNSLRAEDTAVYYCARDYSGSWVGDEARSYYYYYYMDVWGKGTTVTVS

SEQ ID NO: 22604 - protein, 109 aa, Artificial Sequence
  source: /note="Description of Artificial Sequence: Synthetic polypeptide"
ELQVTQSPSSLSASVGDRVTITCQASQDISYYLNWYQQRPGKVPKLLIYSASYLHSGVPSRFSGSGSGTDFTLTISSLQPEDVATYYCQRTYNAPYTFGQGTKVEIKRT

SEQ ID NO: 22605 - protein, 127 aa, Artificial Sequence
  source: /note="Description of Artificial Sequence: Synthetic polypeptide"
EVQLEQSGGGLVKPGGSLRLSCAGSGFSFSAHTINWVRQAPGKGLEWVGFIRSQAQGGTREYAASVKGRIILSRDDSENSAYLQMNSLNTGDTAVYYCARDSSRGYYSYYLDVWGKGTTVTVSSAST

SEQ ID NO: 22606 - protein, 107 aa, Artificial Sequence
  source: /note="Description of Artificial Sequence: Synthetic polypeptide"
ELTQSPSSLSASVGDRVTITCRASQGISNRLNWYQQKPGKAPKLLIYDASSLESGVPSRFSGSGSGTDFTLTISSQQPEDFATYYCQQFNSYPLTFGGGTKVEIKRT

SEQ ID NO: 22607 - protein, 115 aa, Artificial Sequence
  source: /note="Description of Artificial Sequence: Synthetic polypeptide"
EVQLEESGGGLVKPGGSLRLSCAASGFTFSHYVMYWVRQAPEKGLEWVSTISGSGSSTWYPDSVKGRFTVSRDNSKNTLYLQMNSLRGDDTAVYYCARLQGQLVYWGLGTLVTVS

SEQ ID NO: 22608 - protein, 110 aa, Artificial Sequence
  source: /note="Description of Artificial Sequence: Synthetic polypeptide"
ELQMTQSPSTLSASVGDRVTITCRASQGISSWLAWYQQKPGRAPKLLIYKSSTLESGVPSRFSGSGSGTEFTLTISSLQPDDFATYFCQQYSSNPPLTFGGGTKVEIKRT

SEQ ID NO: 22609 - protein, 131 aa, Artificial Sequence
  source: /note="Description of Artificial Sequence: Synthetic polypeptide"
QVQLQESGGGLVQPGGSLRLSCAASESTPSINTMGWYRQAPGKERELVATITSGGMTNYADSVKGRFTISRDNGKNTVYLQMNSLEPGDTAVYYCNLKRRDLQARFGGYWGQGTQVTVSSEPKTQTTTSGR

SEQ ID NO: 22610 - protein, 132 aa, Artificial Sequence
  source: /note="Description of Artificial Sequence: Synthetic polypeptide"
QVKLQQSGGGLVQPGGSLRLSCAASESTISINTLGWYRQAPGNQRELVATITTGGTTNYADSVKGRFTISRDNAKNTVYLQMNNLEPGDTAVYYCNLKRRDLQSRFGGYWGQGTQVTVSSEPQDTKTTTSGR

SEQ ID NO: 22611 - protein, 131 aa, Artificial Sequence
  source: /note="Description of Artificial Sequence: Synthetic polypeptide"
QVQLQQSGGGLVQPGGSLRLSCVASESTVSINIMGWYRQAPGKQRELVATITTGGTTNYADSVKGRFTISRDNAKNTVYLQMNSLEPEDTAVYYCNLKRRDLQARFGGYWGQGTQVTVSSEPKTPKPTSGR

SEQ ID NO: 22612 - protein, 131 aa, Artificial Sequence
  source: /note="Description of Artificial Sequence: Synthetic polypeptide"
QVKLQQSGGGLVQPGGSLRLSCAASESTPSINTMGWYRQAPGKERELVATITSGGMTNYADSVKGRFTISRDNGKNTVYLQMNSLEPGDTAVYYCNLKRRDLQARFGGYWGQGTQVTVSSEPKTPKPQSGR

SEQ ID NO: 22613 - protein, 132 aa, Artificial Sequence
  source: /note="Description of Artificial Sequence: Synthetic polypeptide"
QVKLQQSGGGLVQPGGSLRLSCAASGFTFRNYAMSWVRQAPGKGLEWVSAIAAGGAVTKYADSVKGRFTISRDNARDTLYLQMNSLKPEDTAVYYCAKPRDFWYSPEFDFRGQGTQVTVSSEPKNQNQTSGR

SEQ ID NO: 22614 - protein, 133 aa, Artificial Sequence
  source: /note="Description of Artificial Sequence: Synthetic polypeptide"
QVQLQQSGGGLVQAGDSLTISCASSLFTFSTSTMGWFRQAPGKEREFVAAIKSSGSSMYYADSVQGRFTISRDNAKKTVTLQMNSLKPEDTAVYYCAKGVYGSRRSADFGSWGQGTQVTVSSEPKTPKPQSGR

SEQ ID NO: 22615 - protein, 133 aa, Artificial Sequence
  source: /note="Description of Artificial Sequence: Synthetic polypeptide"
QVQLQQSGGGLVQAGDSLRISCAASLFTFSTSTMGWFRQAPGKEREFVAAIRSTGDSMYYADSVQGRFTISRDNAKKMVYLQMNNLKPEDTAVYYCAKGVYGSRRSADFGSWGQGTQVTVSSEPKTPKPQSGR

SEQ ID NO: 22616 - protein, 133 aa, Artificial Sequence
  source: /note="Description of Artificial Sequence: Synthetic polypeptide"
DVQLQASGGGLVQAGGSLRISCTADGYTFSTSTMGWFRQAPGKEREFVAAIKSDGSIMYYADSVAGRFIISRDNAKKMVFLQMDRLKPEDTAVYYCAKGVYGSRRSADFGWWGQGTQVTVSSEPKTPKPQSGR

SEQ ID NO: 22617 - protein, 134 aa, Artificial Sequence
  source: /note="Description of Artificial Sequence: Synthetic polypeptide"
QVKLQESGGGLVQAGESLRLSCAASGSNFSINGVGWYRQAPGKQRELVAGITNGGYTSYADSVKGRFTISTDNAKNTVYLQMNSLRPEDTAVYYCNANFQIHRSGADYVRNYWGQGTQVTVSAEPRTKTTTSGR

SEQ ID NO: 22618 - protein, 134 aa, Artificial Sequence
  source: /note="Description of Artificial Sequence: Synthetic polypeptide"
QVKLQQSGGGLVQAGGSLRLSCAASGNFFTLNGVAWYRQAPGKQRELVAGITSGGWTNYADSVKGRFTISADNAKNTVYLQMNSLRPEDTAVYYCNANLQIHRDSSGDVRNVWGQGTQVTVSSEPKTPKPQSGR

SEQ ID NO: 22619 - protein, 136 aa, Artificial Sequence
  source: /note="Description of Artificial Sequence: Synthetic polypeptide"
DVQLQASGGGLVQAGGSLRLSCAASGSFFSINGVGWYRQAPGKQRELVAGITNGGFTNYADSVKGRFTISRDNAKNTVYLQMNSLKPEDTAVYYCNANLQISRSEDGAYVVRNYWGQGTQITVSSEPKTPKPQSGR

SEQ ID NO: 22620 - protein, 134 aa, Artificial Sequence
  source: /note="Description of Artificial Sequence: Synthetic polypeptide"
DVQLQASGGGLVQAGGSLRLSCAASGSGFSINGVGWYRQTPGRQRELVAGITIGGYTNYADSVKGRFTISSDNAKNTVYLQMNSLKPEDTAVYYCNANLQFYRGGGSDVKNYWGQGTQVTVSSEPKTPKPQSGR

SEQ ID NO: 22621 - protein, 135 aa, Artificial Sequence
  source: /note="Description of Artificial Sequence: Synthetic polypeptide"
QVQLQESGGGLVQAGGSLRLSCAASGLTFSSYAMGWFHQAPGKEREFVAAINWSGRDTYYADSVKGRFTISRDNRKNTVYLQMNSLKPEDTAVYYCAAAEFFSSGDPLPGMDYWGKGTLVTVSSEPKTQNHNSGR

SEQ ID NO: 22622 - protein, 135 aa, Artificial Sequence
  source: /note="Description of Artificial Sequence: Synthetic polypeptide"
QVKLQQSGGGLVQAGGSLRLSCAASGLTFSSYAMGWFRQAPGKEREFVAAINWSGRDTYYADSVKGRFTISRDNAKNTVYLQTNSLKPEDTAVYYCAAAEFLPTQRSPREYDYWGLGTQVTVSSEPKTPKPQSGR

SEQ ID NO: 22623 - protein, 136 aa, Artificial Sequence
  source: /note="Description of Artificial Sequence: Synthetic polypeptide"
QVKLQQSGGGLVQAGGSLRLSCAASGYAFNTYTMAWFRQAPGKEREFVALVGMKVDGKIYADSVKGRFTISRDNEQKTVLLEMNHLEPEDTAIYYCAASRRFWTAALNGADYPYWGQGTQVTVSSEPKTPKPQSGR

SEQ ID NO: 22624 - protein, 129 aa, Artificial Sequence
  source: /note="Description of Artificial Sequence: Synthetic polypeptide"
QVKLQQSGGGLVQAGGSLRLSCAASGIVFSFNAMGWYRVPPGKQRELVADILKSGGTNVVDSVKGRFAISRDSAQNTLYLQMNRLKPEDTAVYYCNARDWSDGFDEYWGQGTQVTVSSEPKTPKPQSGR

SEQ ID NO: 22625 - protein, 135 aa, Artificial Sequence
  source: /note="Description of Artificial Sequence: Synthetic polypeptide"
QVQLQQSGGGLVQAGGSLRLSCSASGRTFSNYVMGWFRQAPGKEREFVATISASGGSTYCADSVEGRFTISRDNAKNTAYLQMNNLEPEDTAVYYCASGPRANASIRRSGYNYWGQGTQVTVSSEPKTPKPQSGR

SEQ ID NO: 22626 - protein, 136 aa, Artificial Sequence
  source: /note="Description of Artificial Sequence: Synthetic polypeptide"
QVQLQQSGGGLVQAGGSLRLSCAASGLAFSSYAITWLRQAPGTEREFVALISGSGSSTYYADSVKGRFTISRNNAKNTVYLQMNSLKPEDTAVYYCTASEFLLHPPPPNQKYDYWGQGTQVTVSSEPKTPKHTSGR

SEQ ID NO: 22627 - protein, 135 aa, Artificial Sequence
  source: /note="Description of Artificial Sequence: Synthetic polypeptide"
QVQLQQSGGGLVRAGGSLRLSCSASGRTFGNEVMGWFRQAPGKEREFVAAINWSSGNTYYRDSVKGRFTISRDNAKNTVYLQMNSLEPEDTAVYYCAARSRPAISTRRPDYFAWGQGTQVTVSSEPKTPKPQSGR

SEQ ID NO: 22628 - protein, 133 aa, Artificial Sequence
  source: /note="Description of Artificial Sequence: Synthetic polypeptide"
QVQLQQSGGGLVQAGGSLRLSCTASGRIDRTYTVSWFRQGPGKEREFVATISWDGSIYYDNAVEGRFSISGDNAKTTVALQMNSLKPEDTAVYYCAARRRVFSRAAAAYNYWGQGTQVTVSSEPKTPKPQSGR

SEQ ID NO: 22629 - protein, 124 aa, Artificial Sequence
  source: /note="Description of Artificial Sequence: Synthetic polypeptide"
QVKLQQSGGGLVQPGGSLRLTCAASGFPFSTYAIRWVRRPPGKGLEWVSTIHPDFTTNYADSVSRRFTISRDNAKNTVYLQMNSLKPEDTAVYYCSRGVSGERGQGTQVTVSSEPKTPKPHSGR

SEQ ID NO: 22630 - protein, 132 aa, Artificial Sequence
  source: /note="Description of Artificial Sequence: Synthetic polypeptide"
QVQLQQSGGGLVQPGGSLRLSCAASGSIFSIHTMGWYRQAPGKQRELVTTITTGGTTNYADSVKGRFTISRDDAKNTVYLQMNNLKPEDTAVYYCYALIQTASTTWYRQYWGQGTQVTVSSEPKTQNHNSGR

SEQ ID NO: 22631 - protein, 126 aa, Artificial Sequence
  source: /note="Description of Artificial Sequence: Synthetic polypeptide"
QVKLQESGGGLVQPGGSLRLSCTASRSIFTRAMAWYRQAPGKQRELVAAIDSGDRTHYADSVKGRFTISRNNAKDTLYLQMNSLKSEDTAVYYCNANLGALLDYWGQGTQVTVSSEPKTQTTTSGR

SEQ ID NO: 22632 - protein, 129 aa, Artificial Sequence
  source: /note="Description of Artificial Sequence: Synthetic polypeptide"
QVKLQESGGGLVQAGGSLRLSCAASGFTFATYAMAWYRQAPGKQRELVASISNFGSTAYGDSVKGRFTISRDNAKNTVYLEMNSLKSEDTAVYYCKRVRDVIGRPELWGQGTQVTVSSEPKTPKPHSGR

SEQ ID NO: 22633 - protein, 132 aa, Artificial Sequence
  source: /note="Description of Artificial Sequence: Synthetic polypeptide"
QVKLQESGGGLVQPGGSLRLSCLPSINIFSLAAMGWYRQAPGKQRELVASISSGGTANYADSYADSVKGRFTISRDIAKNTVDLQMNSLKPEDTAVYYCKVDSYTYGTDIWGKGVLVTVSSEPQDTKTTSGR

SEQ ID NO: 22634 - protein, 140 aa, Artificial Sequence
  source: /note="Description of Artificial Sequence: Synthetic polypeptide"
QVKLQQSGGGLVQAGGSLRLSCAASGTFSRYAMGWFRQAPGKEREFVAAINWTGGSTYYADSVKGRFTISGDNAKNTVYLQMNSLKPGDTAVYYCAAEVHPGDYGLTYMQSQYEYDYWGQGTQVTVSSEPKTPKPTTSGR

SEQ ID NO: 22635 - protein, 131 aa, Artificial Sequence
  source: /note="Description of Artificial Sequence: Synthetic polypeptide"
DVQLQASGGGLVQAGGSLRLSCAASTSRFSSYAMGWSRQAPGKQRELVASISSSGLTTNYADSVKGRFTISRDNAKNTVYLQMNSLKPEDTAVYYCKADGRRYSLNEYWGQGTQVTVSSEPKTPKPQPSGR

SEQ ID NO: 22636 - protein, 133 aa, Artificial Sequence
  source: /note="Description of Artificial Sequence: Synthetic polypeptide"
DVQLQASGGGLVQAGGSLRLSCAASGSTISSYAMAWYRQAPGKRRELVAHISSGGSTNYADSVKGRFTISRDNAKNTVYLQMNSLKPEDTAVYYCNIYYGGDYYYTGVKPNPWGQGTQVTVSSAHHSEDPRGR

SEQ ID NO: 22637 - protein, 137 aa, Artificial Sequence
  source: /note="Description of Artificial Sequence: Synthetic polypeptide"
QVKLQESGGGWVQAGGSLRLSCAASALTASITTMGWFRQTPEKEREFLAAINWTGDYKYYADSVKGRFTISRDNAKNTVDLQMNQLKPEDTAVYYCAASKIRNDIYLNDYTWYQYWGQGTQVTVSSEPKTPKPQSGR

SEQ ID NO: 22638 - protein, 143 aa, Artificial Sequence
  source: /note="Description of Artificial Sequence: Synthetic polypeptide"
DVQLQASGGGLVQAGGSLRLSCVASARTFSSYAMGWFRQAPGKEREFVAAISWSGASTDYADSVKGRFTISRDNAKKTVYLQMNTLKPEDTAVYYCAAHHITPTGSYYYSEPLPVDMVYDYWGQGTQVTVSSEPKTKTTTSGR

SEQ ID NO: 22639 - protein, 123 aa, Artificial Sequence
  source: /note="Description of Artificial Sequence: Synthetic polypeptide"
QVQLQDSGGGLVQAGDRLSLSCAASGRTFSSYDMAWFRQAPGKEREFVAAITTSEGTWYGDAGKGRFTIARVNAKNTVYLHMNRLKPEDTAVYYCAASNQGGSLQISTNYNYWGQGTQVTVSS

SEQ ID NO: 22640 - protein, 123 aa, Artificial Sequence
  source: /note="Description of Artificial Sequence: Synthetic polypeptide"
QVQLQESGGGLVQAGDSLRLSCAASGRTFSSYAMGWFRQAPGKEREFVAAVSSSNSPWYGDSIKGRSTIHRDNAKNTVYLYMNNLKPEDTAVYYCAADLEGERLGESSEYDYWGQGTQVTVSS

SEQ ID NO: 22641 - protein, 127 aa, Artificial Sequence
  source: /note="Description of Artificial Sequence: Synthetic polypeptide"
QVQLQESGGGLVQPGGSLRLSCAASGFTFKYYAMSWVRQAPGKGLEWVSYINDNGGYTDYSDSVKGRFTISRDNAKNTLYLHMNRLKPEDTAVYFCAKWDTDAVSSSRYKTHNGDIRGPGTQVTVSS

SEQ ID NO: 22642 - protein, 123 aa, Artificial Sequence
  source: /note="Description of Artificial Sequence: Synthetic polypeptide"
QVQLQESGGGLVQPGGSLRLSCAASGRTFSSYAMGWFRQAPGKERQFVAAVSSSDSPWYGDSMKGRSTIHRDNAKNTVYLYMNNLKPEDTAVYYCAADLEGERLGESSEYDYWGQGTQVTVSS

SEQ ID NO: 22643 - protein, 125 aa, Artificial Sequence
  source: /note="Description of Artificial Sequence: Synthetic polypeptide"
QVQLQESGGGLVQAGDSLRLSCAASGGALYDMAWFRQAPGKEREFVAVISYDGSATSYRDSVKGRFTISRENAKNMARNMAYLQMNALKPEDTAVYYCAAKGPTGTLHTSGYRIWGQGTQVTVSS

SEQ ID NO: 22644 - protein, 125 aa, Artificial Sequence; identical to SEQ ID NO: 22643
  source: /note="Description of Artificial Sequence: Synthetic polypeptide"

SEQ ID NO: 22645 - protein, 126 aa, Artificial Sequence
  source: /note="Description of Artificial Sequence: Synthetic polypeptide"
QVQLQESGGGLVRPGGSLRLTCATSGFSLDYYPIAWFRQAPGKEREGLSCISSSDGGAYYGDAVKGRFTMSRDSAENTVYLHMNSLKPEDTAVYYCATSKRYWRNCDVTDYDYHYWGQGTQVTVSS

SEQ ID NO: 22646 - protein, 126 aa, Artificial Sequence
  source: /note="Description of Artificial Sequence: Synthetic polypeptide"
QVQLQESGGGLVQPGGSLRLSCATSGFSLDYYPIAWFRQAPGKEREGLSCVSSSDGGTYYGDAAKGRFTMSRDSAENTVTLHMNSLKPEDTAVYYCATSKRYWRNCDVTDYDYHYWGQGTQVTVSS

SEQ ID NO: 22647 - protein, 126 aa, Artificial Sequence
  source: /note="Description of Artificial Sequence: Synthetic polypeptide"
QVQLQESGGGLVQAGDSLTLSCAVSGGTLSMFSMGWFRQAPGLEREFVAIINDRESIRRYQDSVKGRFTISKDNAKNLVYLQMNNLKPVDTAVYYCAADTTYPAVAPTSVGQYDYWGQGTQVTVSS

SEQ ID NO: 22648 - protein, 125 aa, Artificial Sequence
  source: /note="Description of Artificial Sequence: Synthetic polypeptide"
QVQVQKSEGGLVQPGGSLRLSCAVSGRTDSISAMGWFRQAPGKEREFVVAIRWIEGGTWYGDPAAGRFTIARDIAKNTGYLQMNRLNPDDTAVYFCAAAKFGPSKLQFSQGYDYWGQGTQVTVSS

SEQ ID NO: 22649 - protein, 118 aa, Artificial Sequence
  source: /note="Description of Artificial Sequence: Synthetic polypeptide"
QVKLAGTLGGLVQLGDSLQLSCVASGRTDVMGWFRQAPGKEREFAAAITGSDGTFYGDAGRGRFTIARDNTKNTVYLNLNRLKPEDTAVYYCAADGSPLQIASTYKYWGQGTQVTVSS

SEQ ID NO: 22650 - protein, 124 aa, Artificial Sequence
  source: /note="Description of Artificial Sequence: Synthetic polypeptide"
QVQLQDSGGGLVQAGTSLRLSCVAKGGLYGLGWFRQAPGKEREFVAAISGSGGSTYYGDSVRGRFTISRDNTKNTMYLQMNSLKPEDTAIYFCAARTQYSASDYWWQQGEYGYWGQGTQVTVSS

SEQ ID NO: 22651 - protein, 127 aa, Artificial Sequence
  source: /note="Description of Artificial Sequence: Synthetic polypeptide"
QVQLQESGGGLVQPGGSLRLSCEASGFTFSYYAMSWVRQAPGKGLEWVSYINSDGGYTSYADSVKGRFIISRDNAKNILYLHMNSLKPEDTAVYFCAKWRTDAVSSSRYKTNDYEYRGPGTQVTVSS

SEQ ID NO: 22652 - protein, 125 aa, Artificial Sequence
  source: /note="Description of Artificial Sequence: Synthetic polypeptide"
QVQLQKSGGGLVQAGGSLRLSCARGSGTFSPYAMGWFRQAPGEERQFVAAITWSSDSPWYGDSAKGRCTIARDITKNTVYLNIFGLKPEDTAVYYCAESSGATYGLALPSAYEHWGRGTQVTASS

SEQ ID NO: 22653 - protein, 127 aa, Artificial Sequence
  source: /note="Description of Artificial Sequence: Synthetic polypeptide"
QVQGAGLWGGLVQLGGSLRLSCAASGFTFGYYAMSWVRQAPGKGLEWVSYINDNGGYTAYTDPVKGRFTISRDNAKNILYLHMNNLKPEDTAVYFCAKWGTDAVSSSRYKSHDYDSRGPGTQVTVSS

SEQ ID NO: 22654 - protein, 125 aa, Artificial Sequence
  source: /note="Description of Artificial Sequence: Synthetic polypeptide"
QVQLQESGEGLVQAGASLKLSCEASLGGLYGMGWFRQAPGKEREFVAAISGSGGTTYYEDSVRGRFTISRDNAKSTVFLQMNNLKPEDTAVYYCAARTSYSASNAWNQLREYGYWGQGTQVTVSS

SEQ ID NO: 22655 - protein, 122 aa, Artificial Sequence
  source: /note="Description of Artificial Sequence: Synthetic polypeptide"
QVQLQESGGGLVQAGGSLRLSCAGVGRTISPYNMGWFRQALGKERDFVAAIRWSGSDTNYADSVKGRFTISRDNAENTVYLQMRNLNPEDTAVYYCAAGGDVFGSALTYHHWGQGTQVTVSS

SEQ ID NO: 22656 - protein, 119 aa, Artificial Sequence
  source: /note="Description of Artificial Sequence: Synthetic polypeptide"
QVQLQESGGGLVQPGGSLRLSCAASGSIRSINAMGWYRQAPGKQREFVARITTGGTIGYADSVKGRFTISRDNAKNTMYLQMNSLKPEDTAVYYCNADIGTWSSPYYYWGQGTQVTVSS

SEQ ID NO: 22657 - protein, 122 aa, Artificial Sequence
  source: /note="Description of Artificial Sequence: Synthetic polypeptide"
QVQLQDSGGGLVQAGGSLRLSCAGVGRTISPYNMGWFRQALGKERDFVAAIRWSGSDTNYADSVKGRFTISRDNARNTVYLQMNNLNPEDTAVYYCAAGGDVFGSALTYHHWGQGTQVTVSS

SEQ ID NO: 22658 - protein, 119 aa, Artificial Sequence
  source: /note="Description of Artificial Sequence: Synthetic polypeptide"
QVQLQESGGGLVQPGGSLRLSCAASGSIRSINVMGWYRQAPGKQRELVALITTGGSPSYVDSVKGRFTISRDNAKSTIYLQMDSLKPEDTAVYYCNADIGTWSSPFYYWGQGTQVTVSS

SEQ ID NO: 22659 - protein, 122 aa, Artificial Sequence
  source: /note="Description of Artificial Sequence: Synthetic polypeptide"
QVQLQESGGGLVQAGGSLRLSCEGVGRSISPYNMGWFRQAPGKERDFVAAIRWSGSDTNYADSVKGRFTISRDNARNTVYLHMNSLNPEDTAVYYCAAGGDVSGSALSYHYWGQGTQVTVSS

SEQ ID NO: 22660 - protein, 397 aa, Artificial Sequence
  source: /note="Description of Artificial Sequence: Synthetic polypeptide"
MDVLYSISRTLKDARDKIVEGTLYSNVSDLIQQFNQMLVTMNGNEFQTGGIGNLPLRNWNFDFGLLGTTLLNLDANYVESARTTIDYFVDFIDNVCMDEMMRESQRNGIAPQSDALRKLSGVKFRRINFNNSSEYIENWNLQNRRQRTGFTFHKPNIFPYSASFTLNRSQPQHDNLMGTMWLNAGSEIQVAGFDYSCAINAPANIQQFEHIVQLRRVLTTATITLLPDAERFSFPRVINSADGATTWYFNPVILRPNNVEVEFLLNGQVINTYQARFGTIVARNFDTIRLSFQLMRPPNMTPAVTALFPNAQPFEHHATVGLTLRIDSAICESVLADASETMLANVTSVRQEYAIPVGPVFPPGMNWTDLITNYSPSREDNLQRVFTVASIRSMLVK

SEQ ID NO: 22661 - protein, 397 aa, Artificial Sequence
  source: /note="Description of Artificial Sequence: Synthetic polypeptide"
MEVLYSLSKTLKDARDRIVEGTLYSNVSDLIQQFNQMIVTMNGNDFQTGGIGNLPIRNWTFDFGLLGTTLLNLDANYVENARTTIEYFIDFIDNVCMDEMARESQRNGVAPQSEALRKLSGIKFKRINFDNSSEYIENWNLQNKRQRTGFVFHKPNIFPYSASFTLNRSQPMHDNLMGTMWLNAGSEIQVAGFDYSCAINAPANIQQFEHIVQLRRALTTATITLLPDAERFSFPRVINSADGATTWFFNPVILRPNNVEVEFLLNGQIINTYQARFGTIIARNFDTIRLSFQLMRPPNMTPVVNALFPQAQPFQHHATVGLTLRIESAVCESVLADANETLLANVTAVRQEYAIPVGPVFPPGMNWTELITNYSPSREDNLQRVFTVASIRSMLIK

SEQ ID NO: 22662 - protein, 223 aa, Artificial Sequence
  source: /note="Description of Artificial Sequence: Synthetic polypeptide"
EFQLVESGAEVKKPGASVKVSCKASGYSFTSYYVHWVREAPGEGLEWMGMINPSDGSTYYAQRFQPRVTMTRDTSTTTVFMEMSGLRSEDTAVYYCARGVVGATNEIDFWGQGTTVTVSSASFKGPSVFPLAPSSKSTSGGTAALGCLVKDYFPEPVTVSWNSGALTSGVHTFPAVLQSSGLYSLSSVVTVPSSSLGTQTYICNVNHKPSNTKVDKKVEPKSC

SEQ ID NO: 22663 - protein, 213 aa, Artificial Sequence
  source: /note="Description of Artificial Sequence: Synthetic polypeptide"
DIRLTQSPSSLSASVGDRVTITCRASQSISNYLNWYQKKPGQAPKLLIYAATSLQSGVPSRFSGSGSGTDFTLTISSVQPEDFATYYCQKTLRTWTFGQGTKVEIKRTAAAPSVFIFPPSDEQLKSGTASVVCLLNNFYPREAKVQWKVDNALQSGNSQESVTEQDSKDSTYSLSSTLTLSKADYEKHKVYACEVTHQGLSSPVTKSFNRGEC

SEQ ID NO: 22664 - protein, 220 aa, Artificial Sequence
  source: /note="Description of Artificial Sequence: Synthetic polypeptide"
QVQLVQSGGGVVQPGRSLRLSCEVSGITFKGYPMHWVRQAPGKGLEWVAVISNDGRNEDYADSVKGRFTISRDNSNNTLYLQMNSLTAEDTALYFCARSTGRRYYMDVWGKGTTVTVSSASTKGPSVFPLAPSSKSTSGGTAALGCLVKDYFPEPVTVSWNSGALTSGVHTFPAVLQSSGLYSLSSVVTVPSSSLGTQTYICNVNHKPSNTKVDKTVERK

SEQ ID NO: 22665 - protein, 222 aa, Artificial Sequence
  source: /note="Description of Artificial Sequence: Synthetic polypeptide"
QVQLVQSGAEVKKPGASVKVSCKASGYTFNIHYIHWVRQAPGQGLEWMGIIDSDGGRTIYAQKFHGRITMTTDRSTTTVYLELSALRSEDTAVYYCARDGFGGRTWRLDWWGPGTVVTVSSASTKGPSVFPLAPSSKSTSGGTAALGCLVKDYFPEPVTVSWNSGALTSGVHTFPAVLQSSGLYSLSSVVTVPSSSLGTKTYTCNVDHKPSNTKVDKTVERK

SEQ ID NO: 22666 - protein, 226 aa, Artificial Sequence
  source: /note="Description of Artificial Sequence: Synthetic polypeptide"
QVQLVQSGAEVKKPGASVKMSCTLSGTTFTRYGISWLRQAPGQGPEWMGWINPYNGDTNLAQKFQGRLSMTKDTSTSTAYMELRSLTSDDTAVYYCAREHSSAYSMRRKGVFHYWGQGTLVTVSSASTKGPSVFPLAPCSRSTSESTAALGCLVKDYFPEPVTVSWNSGALTSGVHTFPAVLQSSGLYSLSSVVTVPSSNFGTQTYTCNVDHKPSNTKVDKTVERK

SEQ ID NO: 22667 - protein, 220 aa, Artificial Sequence
  source: /note="Description of Artificial Sequence: Synthetic polypeptide"
QVQLQQSGPGLVKPSETLSLTCTVSGGSINNYYWSWIRQPAGKGLEWIGRIYSSGSTNYNPSLKSRVTMSVDTSKNQFSLKLSSVTAADTAVYYCAREVTHFDYWGQGTLVTVSSGSASAPTLFPLVSCENSPSDTSSVAVGCLAQDFLPDSITFSWKYKNNSDISSTRGFPSVLRGGKYAATSQVLLPSKDVMQGTDEHVVCKVQHPNGNKEKNVPLPV

SEQ ID NO: 22668 - protein, 226 aa, Artificial Sequence
  source: /note="Description of Artificial Sequence: Synthetic polypeptide"
QVQLVQSGGGVVQPGRSLRLSCATSEFTFSSHAMHWVRQAPGKGLEWVAVIWYDGVNTYYADSVKGRFTISRDNSKNTLYLQMNSLRAEDTAVYYCAREGLRFLEHIRGYFDYWGQGTLVTVSSASTKGPSVFPLAPCSRSTSESTAALGCLVKDYFPEPVTVSWNSGALTSGVHTFPAVLQSSGLYSLSSVVTVPSSNFGTQTYTCNVDHKPSNTKVDKKIVPRD

SEQ ID NO: 22669 - protein, 221 aa, Artificial Sequence
  source: /note="Description of Artificial Sequence: Synthetic polypeptide"
EVQLVESGGGLVKPGGSLRLSCAASGFTFSSYNMNWVRQAPGKGLEWVASISHSSSYMFHADSLKGRFTISRDNAKNSLYLHMNSLRAEDMAVYYCARDGSRGWYFDYWGQGTLVTVSSASTKGPSVFPLAPCSRSTSESTAALGCLVKDYFPEPVTVSWNSGALTSGVHTFPAVLQSSGLYSLSSVVTVPSSNFGTQTYTCNVDHKPSNTKVDKKIVPRD

SEQ ID NO: 22670 - protein, 223 aa, Artificial Sequence
  source: /note="Description of Artificial Sequence: Synthetic polypeptide"
QVQLVESGGGLVQPGGSLRLSCAASGFTFSTYGMNWVRQAPGKGLEWISFISSSSSTVYYADSVKGRFTMSRDNAKNSLYLQMNSLRDEDTAVYYCARAHYDWNFDGMDVWGQGTTVTVSSASTKGPSVFPLAPCSRSTSESTAALGCLVKDYFPEPVTVSWNSGALTSGVHTFPAVLQSSGLYSLSSVVTVPSSNFGTQTYTCNVDHKPSNTKVDKKIVPRD

SEQ ID NO: 22671 - protein, 219 aa, Artificial Sequence
  source: /note="Description of Artificial Sequence: Synthetic polypeptide"
DIVMTQSPLSLPVTPGEPASISCRSSQSLLHSNGFNFLDWYLRKPGQSPQLLIYLGSNRASGVPDRFSGSGSGTDFTLKISRVEAEDIGVYYCMQALESLPTFGQGTKVEIKRTVAAPSVFIFPPSDEQLKSGTASVVCLLNNFYPREAKVQWKVDNALQSGNSQESVTEQDSKDSTYSLSSTLTLSKADYEKHKVYACEVTHQGLSSPVTKSFNRGEC

SEQ ID NO: 22672 - protein, 220 aa, Artificial Sequence
  source: /note="Description of Artificial Sequence: Synthetic polypeptide"
DIELTQSPDSLAVSLGERATINCKSSQSVFYNSINKNFLAWYQQRPGQPPKLLIYWASTRASGVPDRFSGSGSGTDFTLTISSLQAEDVAVYYCQQYYNTPPTFGQGTKVEIKRTVAAPSVFIFPPSDEQLKSGTASVVCLLNNFYPREAKVQWKVDNALQSGNSQESVTEQDSKDSTYSLSSTLTLSKADYEKHKVYACEVTHQGLSSPVTKSFNRGEC

SEQ ID NO: 22673 - protein, 214 aa, Artificial Sequence
  source: /note="Description of Artificial Sequence: Synthetic polypeptide"
EIVLTQSPATLSVSPGERATLSCRASQSVSSNLAWYQQKPGQAPRLLIYGASTRATGIPARFNGGGSGTDFTLSISSPQSENFAVYHCQHYNNWPLTFGGGTKVEIKRTVAAPSVFIFPPSDEQLKSGTASVVCLLNNFYPREAKVQWKVDNALQSGNSQESVTEQDSKDSTYSLSSTLTLSKADYEKHKVYACEVTHQGLSSPVTKSFNRGEC

SEQ ID NO: 22674 - protein, 214 aa, Artificial Sequence
  source: /note="Description of Artificial Sequence: Synthetic polypeptide"
EIVMTQSPATLSMSPGERATLSCRASQSISSNFAWYQQKPGQSPRLLIYGASTRATGIPARFSGSGSGTEFTLTISSLQSEDFAVYYCQQYNNWPLTFGGGTKVEIKRTVAAPSVFIFPPSDEQLKSGTASVVCLLNNFYPREAKVQWKVDNALQSGNSQESVTEQDSKDSTYSLSSTLTLSKADYEKHKVYACEVTHQGLSSPVTKSFNRGEC

SEQ ID NO: 22675 - protein, 214 aa, Artificial Sequence
  source: /note="Description of Artificial Sequence: Synthetic polypeptide"
DIVLTQSPSSLSASVGDRVTITCRSSQSISSYLNWYQQKPGKAPKLLIYAASSLQSGVPSRFSGSGSGTDFTLTISSLQPEDLATYYCQQSYSIPLTFGQGTRLEIKRTVAAPSVFIFPPSDEQLKSGTASVVCLLNNFYPREAKVQWKVDNALQSGNSQESVTEQDSKDSTYSLSSTLTLSKADYEKHKVYACEVTHQGLSSPVTKSFNRGEC

SEQ ID NO: 22676 - protein, 215 aa, Artificial Sequence
  source: /note="Description of Artificial Sequence: Synthetic polypeptide"
AIQMTQSPSFLSASVGDRVTITCRASQGISSYLAWYQQKPGKAPKLLIYAASTLQSGVPSRFSGSGSGTEFTLTISSLQPEDFATYYCQQLNSYLALTFGGGTKVEIKRTVAAPSVFIFPPSDEQLKSGTASVVCLLNNFYPREAKVQWKVDNALQSGNSQESVTEQDSKDSTYSLSSTLTLSKADYEKHKVYACEVTHQGLSSPVTKSFNRGEC

SEQ ID NO: 22677 - protein, 214 aa, Artificial Sequence
  source: /note="Description of Artificial Sequence: Synthetic polypeptide"
DIQMTQSPSTLSASVGDRVTITCRASESIDGWLAWYQQKPGKPPKLLIYKASNLHSGVPSRFSGSGSGTEFTLTISSLQPDDFATYHCQQYFRSPHTFGQGTNLETRRTVAAPSVFIFPPSDEQLKSGTASVVCLLNNFYPREAKVQWKVDNALQSGNSQESVTEQDSKDSTYSLSSTLTLSKADYEKHKVYACEVTHQGLSSPVTKSFNRGEC

SEQ ID NO: 22678 - protein, 274 aa, Artificial Sequence
  source: /note="Description of Artificial Sequence: Synthetic polypeptide"
GGSGGGGSASQVQLQESGPGLVRPSQTLSLTCTVSGVSISSPNWWSWIRQSPGKGLEWIGEVYHSGDTDYNPSLKSRLSISLDKSKNQFSLRLSSMTAADTAVYYCARAKGIAAAGADYWGQGTLVTVSSGILGSGGGGSGGGGSGGGGSQPVLTQSPSVSGTPGQRVTISCSGTSSNIGDNYVYWYQQLPGRAPKLLIFKSNQRPPGVPDRFSASSSGTSASLAISGLQSEDEADYHCAAWDDSLSGWVFGGGTKLTVLSGILEQKLISEEDL

SEQ ID NO: 22679 - protein, 287 aa, Artificial Sequence
  source: /note="Description of Artificial Sequence: Synthetic polypeptide"
VQASGGGGSGGGGSGGGGSASQVQLQQSGPGLVKPSQTLSLTCAISGDSVSSNSAAWNWIRQSPSRGLEWLGRTYYRSKWYNDYAVSVKSRITINPDTSKNQFSLQLNSVTPEDTAVYYCARSSYSRGWSVDVWGQGTLVTVSSGILGSGGGGSGGGGSGGGGSQPVLTQSPSASATPGQRVTISCSGSSSNIGRHYVYWYQQLPGTAPKLLIYRNNQRPSGVPDRFSGSKSGTSASLAITGLQAEDEADYYCQSYDSSLRVVFGGGTKLTVLSGILEQKLISEEDL

SEQ ID NO: 22680 - protein, 736 aa, Artificial Sequence
  source: /note="Description of Artificial Sequence: Synthetic polypeptide"
KVTLKESGPTLVKPRQTLTLTCTFSGFSLSTSGMRVSWVRQPPGKALEWIARIDWDDDKFYSTSLKTRLTISKDTFKNQVVLTMTNMDPVDTAMYYCVRTPYNWNDGPRGALDIWGQGTMVTVSSGGDRSDGGASGGGGSQSMLTQSPSVSAAPGQNVTISCSGDYPNIRNNYVSWYQQLPGAAPKLLIYDNNKRPSGIPDRFSGSKSGTSATLDITGLQTGDEADYYCGAWDSRLSAVVFGGGTKLTVLGGQAGQGPDKTHTCPPCPAPEGGPSVFLFPPKPKDTLMISRTPEVTCVVVDVSHEDPEVKFNWYVDGVEVHNAKTKPREEQYNSTYRVVSVLTVLHQDWLNGKEYKCKVSNKALPAPIEKTISKAKGQPREPQVYTLPPSRDELTKNQVSLTCLVKGFYPSDIAVEWESNGQPENNYKTTPPVLDSDGSFFLYSKLTVDKSRWQQGNVFSCSVMHEALHNHYTQKSLSLSPGKAAAGGGGSQLQLQESGGGLVQPGGSLRLSCAASGFTFSSHSMNWIRQAPGKRLEWVSSISSSSSYIYYADSVRGRFTISRDNAKNSLYLQMDSLRAEDTAVYYCARYMAGIWTFDIWGQGTMVTVSSGGGGSGGGASGGGGSSYELTQPPSVSVAPGKTASISCGGDNIGRKSVHWFQQKPGQAPVLVLYDDSDRPSGIPARFSGSNSGNTATLTISGVEAGDEADYYCQVWARSSDLPNWVFGGGTKLTVLG

SEQ ID NO: 22681 - protein, 230 aa, Artificial Sequence
  source: /note="Description of Artificial Sequence: Synthetic polypeptide"
EVQLVESGGGVVQPGRSLRLSCAASGFSFSSYGMHWVRQAPGKGLEWVAVIWYDGSKTYYGDSVKGRFTISKDNSKKMVNLQMDSLGVEDTAFYYCARGIAGGWAFWGIDLWGQGTLVTVSSDVVMTQSPGTLSLSPGERATLSCRASQNVYSYLGWYQHKPGRSPRLLIFGVTSRATGVPDRFSGSGSGTDFTLTISRLEPEDFAVYYCQQYAGSAYTFGQGTKVEIKR

SEQ ID NO: 22682 - protein, 135 aa, Artificial Sequence
  source: /note="Description of Artificial Sequence: Synthetic polypeptide"
WVPGSWAQVQLVQSGAELRKPGSSVKVSCRASGGTFSSYTFNWVRQAPGQGLEWMGGFIPVFNTTNYAQTFQGRVTIAADKSTSTAYMELRSLRSEDTAIYYCARDKELLFSRAFDIWGQGTMVTVSSAGTKGPS

SEQ ID NO: 22683 - protein, 272 aa, Artificial Sequence
  source: /note="Description of Artificial Sequence: Synthetic polypeptide"
EVQLVESGGGLVQPGGSLRLSCSASGFTFSTYSMHWVRQAPGKGLEYVSAITGEGDSAFYADSVKGRFTISRDNSKNTLYFEMNSLRPEDTAVYYCVGGYSNFYYYYTMDVWGQGTTVTVSSASTKGPSVFPLAPSSKSTSGGTAALGCLVKDYFPEPVTVSWNSGALTSGVHTFPAVLQSSGLYSLSSVVTVPSSSLGTQTYICNVNHKPSNTKVDKRVEPKSCDKTHTCPPCPLEDDDDKAGWSHPQFEKGGGSGGGSGGGSWSHPQFEK

SEQ ID NO: 22684 - protein, 217 aa, Artificial Sequence
  source: /note="Description of Artificial Sequence: Synthetic polypeptide"
DVQLVEPGAELVQPGASVKMSCKASGYTFSSYWINWEKQRPGKGLEWIGNIYPGSGTVNYDDKFKSKATLTIDTSSNTAYMQLSSLTSEDSAVYYCTRGGSHAMDYWGQGTSVTVSSAKTTPPSVYPLAPGCGDTTGSSVTLGCLVKGYFPESVTVTWNSGSLSSSVHTFPALLQSGLYTMSSSVTVPSSTWPSQTVTCSVAHPASSTTVDKKLEPR

SEQ ID NO: 22685 - protein, 232 aa, Artificial Sequence
  source: /note="Description of Artificial Sequence: Synthetic polypeptide"
GSWAQVQLVESGGGVVQPGRSLRLSCAASGFTFSAYGMHWVRQAPGKGLEWVAIIWYDGSNKYYADSVKGRFTISRDNSKNTLHLQMNSLRAEDTAIYYCARDKNPGTKPYYHYGMDVWGQGTTVTVSSAGTKGPSVFPLAPSSKSTSGGTAALGCLVKDYFPEPVTVSWNSGALTSGVHTFPAVLQSSGLYSLSSVVTVPSSSLGTQTYICNVNHKPSNTKVDKKVEPKSC

SEQ ID NO: 22686 - protein, 109 aa, Artificial Sequence
  source: /note="Description of Artificial Sequence: Synthetic polypeptide"
LQQSGAELVRPGASVKLSCKALGYRFTDYEMYWVKQTPAHGLEWIGGIHPRSGNTAYNQKFKDKATLTADKSSSTAYMELSSLTSEDSVVYYCTTSLYWGQGTTVTVSS

SEQ ID NO: 22687 - protein, 109 aa, Artificial Sequence; identical to SEQ ID NO: 22686
  source: /note="Description of Artificial Sequence: Synthetic polypeptide"

SEQ ID NO: 22688 - protein, 111 aa, Artificial Sequence
  source: /note="Description of Artificial Sequence: Synthetic polypeptide"
SYELTQPPSVSVAPGKTASISCGGDNIGRKSVHWFQQKPGQAPVLVLYDDSDRPSGIPARFSGSNSGNTATLTISRVEAGDEADYYCQVWARSSDHPNWVFGGGTKLTVLG

SEQ ID NO: 22689 - protein, 111 aa, Artificial Sequence
  source: /note="Description of Artificial Sequence: Synthetic polypeptide"
SYELTQPPSVSVAPGKTASISCGGDNIGRKSVHWFQQKPGQAPVLVLYDDSDRPSGIPARFSGSNSGNTATLTISGVEAGDEADYYCQVWARSSDLPNWVFGGGTKLTVLG

SEQ ID NO: 22690 - protein, 125 aa, Artificial Sequence
  source: /note="Description of Artificial Sequence: Synthetic polypeptide"
KVTLKESGPTLVKPRQTLTLTCTFSGFSLSTSGMRVSWVRQPPGKALEWIARIDWDDDKFYSTSLKTRLTISKDTFKNQVVLTMTNMDPVDTAMYYCVRTPYNWNDGPRGALDIWGQGTMVTVSS

SEQ ID NO: 22691 - protein, 126 aa, Artificial Sequence
  source: /note="Description of Artificial Sequence: Synthetic polypeptide"
EVQLVESGGGLVKPGGSLRLSCTASGFSFSSSSMNWVRQAPGKGLQWVSYISTSGNYIYYADSVKGRFTISRDNAKNSVYLQMNSLRVEDTAVYYCARDPCSSTTCYFGYYAMDVWGQGTTVAVSS

SEQ ID NO: 22692 - protein, 121 aa, Artificial Sequence
  source: /note="Description of Artificial Sequence: Synthetic polypeptide"
QVQLQESGPTLVKPSQTLSLTCSVSGGSISSASYYWSWIRQPAGKGLEWIGQIYTSGSTKYNPSLKSRLTLSMDTSKNQFTLKLSSVTAADTALYYCAREWAARGGIVDYWGQGTLVTVSS

SEQ ID NO: 22693 - protein, 127 aa, Artificial Sequence
  source: /note="Description of Artificial Sequence: Synthetic polypeptide"
QVQLQESGPGLVKSSQTLSLTCTVSGGSISSSGYSWNWIRQPAGKGLEWIGRISASGTTNYNPSVKSRGTVSVDTSKNQFSLRLTSVTAADTAVYYCARDTECSDTSCFPSIWFDTWGQGALVTVSS

SEQ ID NO: 22694 - protein, 118 aa, Artificial Sequence
  source: /note="Description of Artificial Sequence: Synthetic polypeptide"
QLQMHESGPGLVKPSETLSLTCIVSSGSISTSDYYWGWIRQPPGKGLEWIGSVYYSESTYYSPSLKSRITISVDTSRNQFSLNVSSVTAADTAIYFCARQRGNWFDSWGQGTLVTVSS

SEQ ID NO: 22695 - protein, 118 aa, Artificial Sequence
  source: /note="Description of Artificial Sequence: Synthetic polypeptide"
QLQMHESGPGLVKPSETLSLTCTVSSGSISTSDYYWGWIRQPPGKGLEWIGSVYYSESTYYSPSLKSRITISVDTSRNQFSLNVSSVTAADTAIYFCARQRGNWFDSWGQGTLVTVSS

SEQ ID NO: 22696 - protein, 124 aa, Artificial Sequence
  source: /note="Description of Artificial Sequence: Synthetic polypeptide"
QAHLVESGGGVVQPGRSLRLSCAASAFNFSTNAMHWVRQAPGKGLEWVAVISYDGSHKYYADSVKGRFTISRDNSKNTLYLQMNSLRAADTAVYYCATVGVLTWPVNAEYFHHWGQGSLVSVSS

SEQ ID NO: 22697 - protein, 124 aa, Artificial Sequence
  source: /note="Description of Artificial Sequence: Synthetic polypeptide"
EVQLVESGGGLVQPGRSLRLSCAASGFTFDDYAMFWVRQAPGKGLEWISGISWNSATIGYADSVKGRFTISRDNAKKSLDLQMNSLRPDDTALYYCAKGGPRGLQLLSSWVDYWGQGTLVTVSS

SEQ ID NO: 22698 - protein, 128 aa, Artificial Sequence
  source: /note="Description of Artificial Sequence: Synthetic polypeptide"
EVQLVESGGGWVQPGGSLRLSCAASGFTFSRYDMHWVRQVTGKGLEWVSAITTAGDTYYPDSVKGRFTISRENAKSSLYLQMNNLRAGDTALYYCARGPPTDCSSGRCLGVGVGLDPWGQGTLVTVSS

SEQ ID NO: 22699 - protein, 127 aa, Artificial Sequence
  source: /note="Description of Artificial Sequence: Synthetic polypeptide"
QVQLVQSGAEVKKPGASVRLSCKASGYTFTNYYLHWVRQAPGQGLEWMGIIDPTGGTTPYAQKFHGRFTMTSDTSTSTVFMELSSLRLDDTAVYYCARGGGYSRNWYSYQNYGLDVWGRGTTVTVSS

SEQ ID NO: 22700 - protein, 122 aa, Artificial Sequence
  source: /note="Description of Artificial Sequence: Synthetic polypeptide"
EVQLVESGGGLVQPGGSLRLSCAASGFTFNRSWMNWVRQAPGKGLEWVANIIPDGSEKYYMDSVKGRFTVSRDNTKNSVYLQMNSLRAEDTAVYYCARVAEFDYVWGSFDFWGQGTLVTVSS

SEQ ID NO: 22701 - protein, 122 aa, Artificial Sequence
  source: /note="Description of Artificial Sequence: Synthetic polypeptide"
EVQLVESGGGLVQPGGSLRLSCAASGFTFSRSWMNWVRQAPGKGLEWVANIIPDGSEKYYMDSVKGRFTVSRDNTKNSVYLQMNSLRAEDTAVYYCARVAEFDYVWGSFDFWGQGTLVTVSS

SEQ ID NO: 22702 - protein, 125 aa, Artificial Sequence
  source: /note="Description of Artificial Sequence: Synthetic polypeptide"
EEQLVESGGGLVKPGGSLRLSCGASGFTFSYAWMSWVRQAPGKGLEWVARIKSKMNGETTDYAAPVKGRFTISRDDSKNTLYLQMSSLKTEDTAVYYCITDPGNAGSASYGMDVWGQGTTVTVSS

SEQ ID NO: 22703 - protein, 122 aa, Artificial Sequence
  source: /note="Description of Artificial Sequence: Synthetic polypeptide"
EVQLVESGGGLVRPGGSLRLSCAASGFTFNTFDMNWVRQAPGRGLEWVSSISGSSSYIYYADSVKGRFTISRDNAKNSLYLQMNSLRAEDTAVYYCSRVLWDSSSTGTFDSWGQGTRVTVSS

SEQ ID NO: 22704 - protein, 119 aa, Artificial Sequence
  source: /note="Description of Artificial Sequence: Synthetic polypeptide"
QVQLQESGPGLLKASETLSLTCTVSGGSVSSGSYYWTWIRQPPGKGLEWIGYIYYSGPTNYNPSLKSRVTMSVDTSKNQFSLKVRSVTAADTAVYYCARAFAKNWFDPWGQGTLVTVSS

SEQ ID NO: 22705 - protein, 116 aa, Artificial Sequence
  source: /note="Description of Artificial Sequence: Synthetic polypeptide"
QVQLVQSGAEVKKPGASVKVSCKASGFNIKDTYMSWVRQAPEQGLEWMGRIDPENGDTKYDPKLQGRVTMTADTSTNTAYMELRSLRSDDTAVYYCVRGWEGFAYWGQGTLVTVSS

SEQ ID NO: 22706 - protein, 116 aa, Artificial Sequence
  source: /note="Description of Artificial Sequence: Synthetic polypeptide"
QVQLVQSGAEVKKPGASVKVSCKASGFNIKDTYMSWVRQAPEQGLEWMGRIDPENGDTKYDPKLQGRVTMTADTSTNTAYMELRSLRSDDTAVYYCSRGWEGFAYWGQGTLVTVSS

SEQ ID NO: 22707 - protein, 116 aa, Artificial Sequence
  source: /note="Description of Artificial Sequence: Synthetic polypeptide"
QVQLVQSGAEVKKPGASVKVSCKASYWNIKDTYMSWVRQAPEQGLEWMGRIDPENGDTKYDPKLQGRVTMTADTSTNTAYMELRSLRSDDTAVYYCARGWEGFAYWGQGTLVTVSS

SEQ ID NO: 22708 - protein, 116 aa, Artificial Sequence
  source: /note="Description of Artificial Sequence: Synthetic polypeptide"
QVQLVQSGAEVKKPGASVKVSCKASGFNIKDVYMSWVRQAPEQGLEWMGRIDPENGDTKYDPKLQGRVTMTADTSTNTAYMELRSLRSDDTAVYYCVRGWEGFAYWGQGTLVTVSS

SEQ ID NO: 22709 - protein, 117 aa, Artificial Sequence
  source: /note="Description of Artificial Sequence: Synthetic polypeptide"
QVKLLEQSGAELVKPGASVRLSCTASGFNIKDTYMSWVKQRPEQGLEWIGRIDPENGDTKYDPKFQGKATITADTSSNTAYLHLSSLTSGDTAVYYCSRGWEGFAYWGQGTLVTVSA

SEQ ID NO: 22710 - protein, 116 aa, Artificial Sequence
  source: /note="Description of Artificial Sequence: Synthetic polypeptide"
QVKLLEQSGAELVKPGASVRLSCTAGFNIKDTYMSWVKQRPEQGLEWIGRIDPENGDTKYDPKFQGKATITADTSSNTAYLHLSSLTSGDTAVYYCSRGWEGFAYWGQGTLVTVSA

SEQ ID NO: 22711 - protein, 115 aa, Artificial Sequence
  source: /note="Description of Artificial Sequence: Synthetic polypeptide"
QVQLVQSGAEVKKPGASVKVSCKAGFNIKDVYMSWVRQAPEQGLEWMGRIDPENGDTKYDPKLQGRVTMTADTSTNTAYMELRSLRSDDTAVYYCARGWEGFAYWGQGTLVTVSS

SEQ ID NO: 22712 - protein, 123 aa, Artificial Sequence
  source: /note="Description of Artificial Sequence: Synthetic polypeptide"
TRVLSQVQLVQSGAEVKKPGASVKVSCKASGYTFSGYSTHWLRQVPGQGLEWIGWDNPSSGDTTYAENFRGRVTLTRDTSITTDYLEVRGLRSDDTAVYYCARGGDDYSFDHWGQGTLVTVSS

SEQ ID NO: 22713 - protein, 115 aa, Artificial Sequence
  source: /note="Description of Artificial Sequence: Synthetic polypeptide"
QVQLVQSGAEVKKPGASVKVSCKAGFNIKDVYMSWVRQAPGQGLEWMGRIDPENGDTKYDPKLQGRVTMTADTSTNTAYMELRSLRSDDTAVYYCARGWEGFAYWGQGTLVTVSS

SEQ ID NO: 22714 - protein, 116 aa, Artificial Sequence
  source: /note="Description of Artificial Sequence: Synthetic polypeptide"
QVQLVQSGAEVKKPGASVKVSCKASGFNIKDTYMSWVRQAPEQGLEWMGRIDPENGDTKYDPKLQGRVTMTADTSTNTAYMELRSLRSDDTAVYYCARGWEGFAYWGQGTLVTVSS

SEQ ID NO: 22715 - protein, 116 aa, Artificial Sequence
  source: /note="Description of Artificial Sequence: Synthetic polypeptide"
QVQLVQSGAEVKKPGASVKVSCKASGFNIKDVYMSWVRQAPEQGLEWMGRIDPENGDTKYDPKLQGRVTMTADTSTNTAYMELRSLRSDDTAVYYCARGWEGFAYWGQGTLVTVSS

SEQ ID NO: 22716 - protein, 116 aa, Artificial Sequence
  source: /note="Description of Artificial Sequence: Synthetic polypeptide"
QVQLVQSGAEVKKPGASVKVSCKASGFNIKDVYMSWVRQAPGQGLEWMGRIDPENGDTKYDPKLQGRVTMTADTSTNTAYMELRSLRSDDTAVYYCARGWEGFAYWGQGTLVTVSS

SEQ ID NO: 22717 - protein, 115 aa, Artificial Sequence
  source: /note="Description of Artificial Sequence: Synthetic polypeptide"
QVQLVQSGAEVKKPGASVKVSCKAGFNIKDTYMSWVRQAPEQGLEWMGRIDPENGDTKYDPKLQGRVTMTADTSTNTAYMELRSLRSDDTAVYYCARGWEGFAYWGQGTLVTVSS

SEQ ID NO: 22718 - protein, 128 aa, Artificial Sequence
  source: /note="Description of Artificial Sequence: Synthetic polypeptide"
EVQLVESGAEVKKPGSSVKVSCKASGGTFNNYAISWVRQAPGQGLEWMGGIIPIFGGANYAQKFQGRVTITADRSTSTVYMELSGLRSEDTAVYYCARRPQSIFDWNFDLWGRGTLVTVSSAGTKGPS

SEQ ID NO: 22719 - protein, 148 aa, Artificial Sequence
  source: /note="Description of Artificial Sequence: Synthetic polypeptide"
AATMEWSWVFLFFLSVTTGVHSQVQLVQSGAEVKKPGASVKVSCKASGYTFTNYFLHWVRQAPGQGLEWMGIIKPSSGGTTNAQKFQGRVTMTRDTSTNTFYMELSSLISEDTAVYYCARESTPISVADDYYFGMDVWGQGTTVTVSS

SEQ ID NO: 22720 - protein, 118 aa, Artificial Sequence
  source: /note="Description of Artificial Sequence: Synthetic polypeptide"
QVQLQQSGAELVKPGASVKLSCTASGFNIKDTYIHWVKQRPGQGLEWIGRIDPENGNAKYDPNFQAKATITADTSSNTAYLHLSSLTSEDTAVYYSVRTGSFWYFDVWGAGTTVTVSS

SEQ ID NO: 22721 - protein, 118 aa, Artificial Sequence
  source: /note="Description of Artificial Sequence: Synthetic polypeptide"
EVQLQQSGAELVRPGVSVKISCKGSGYTFTDYAITWVKESHAKSLEWIGLISTYYGDSFYNQKFKGKATMTVDKSSRTAYMELARLTSEDSAIYYCTIRDGKGAMDYWGQGTSVTVSS

SEQ ID NO: 22722 - protein, 129 aa, Artificial Sequence
  source: /note="Description of Artificial Sequence: Synthetic polypeptide"
EVKLVESGGGLVKPGGSLKLSCATSGFTFSTYGMSWVRQTPEKRLEWVATISGDGSYTYYPDTVKGRFTISRDNAKNNLYLQMSSLRSEDTALYYCASYNYGGFAYWGQGTLVSVSAAKTTPPSDYPLA

SEQ ID NO: 22723 - protein, 128 aa, Artificial Sequence
  source: /note="Description of Artificial Sequence: Synthetic polypeptide"
EVQLQQSGSELVRPGVSVKISCKGSGYTFTDYAHWVRQSHDKSLEWIGLISTYYGDVSYNQKFKGKATTVDKSSSTAYLELARLTSEDSAIYYCARLGGDFFADYWGQGTSVTVSSAKTTPPSDYPLA

SEQ ID NO: 22724 - protein, 124 aa, Artificial Sequence
  source: /note="Description of Artificial Sequence: Synthetic polypeptide"
QVQLKESGPGLVQPSQSLSITCTVSGFSLTDYGVHWIRQSPGKGLEWLGVIWRGGITDYNAAFMSRLSITKDNSKSQVFFKMDSLQPDDSAIYYCAKNFGTHYYGSNYGNFDYWGQGTTLTVSS

SEQ ID NO: 22725 - protein, 134 aa, Artificial Sequence
  source: /note="Description of Artificial Sequence: Synthetic polypeptide"
EVKLVESGGDLVKPGGSLKLSCAASGFTFSNFAMSWVRQTPEKRLEWVATIGGGGDSYFPDSVKGRFTISRDNARNILYLQMSSLRSDDTAMYFCTREGGDDDQYYYSMDYWGQGTSVTVSSAKTTPPSDYPLA

SEQ ID NO: 22726 - protein, 122 aa, Artificial Sequence
  source: /note="Description of Artificial Sequence: Synthetic polypeptide"
EVQLLESGGGLVQPGGSRRLSCAASGFTISDNVMHWVRQAPGKGLEWVALIYSADTTHYADSVKGRFTISRDNSKNTLYLQMDSLRPEDTAVYYCAREYCTGDTCFAHFDYWGQGTLVSVSS

SEQ ID NO: 22727 - protein, 122 aa, Artificial Sequence
  source: /note="Description of Artificial Sequence: Synthetic polypeptide"
EVQLLESGGGLVQPGGSRRLSCAASGFTISDNVMHWVRQAPGKGLEWVALIYSADSTHYADSVKGRFTISRDNSKNTLYLQMDGLRPEDTAVYYCAREYCTGGTCFAHFDYWGQGTLVTVSS

SEQ ID NO: 22728 - protein, 122 aa, Artificial Sequence; identical to SEQ ID NO: 22726
  source: /note="Description of Artificial Sequence: Synthetic polypeptide"

SEQ ID NO: 22729 - protein, 123 aa, Artificial Sequence
  source: /note="Description of Artificial Sequence: Synthetic polypeptide"
EVQLLEQSGGGLVQPGGSRRLSCAVSGFTISDNVMHWVRQAPGKGLEWVALIYSADTTHYADSVKGRFTISRDNSKNTLYLQMDSLRPEDTAVYYCAREYCTGGTCFAHFDYWGQGTLVTVSS

SEQ ID NO: 22730 - protein, 125 aa, Artificial Sequence
  source: /note="Description of Artificial Sequence: Synthetic polypeptide"
EVQLLESGPGLVKPSQTLSLTCAVSGGSITSDHYFWSWMRQAPGRGLEWIGYISYRGTTYYNPSLKSRVTMSVTAAKNTLYLQMDGLRPEDTAVYYCARASVTAGMPAAGTLDHWGQGTLVTVSS

SEQ ID NO: 22731 - protein, 121 aa, Artificial Sequence
  source: /note="Description of Artificial Sequence: Synthetic polypeptide"
EVQLLEESGAEVKKPGSSVKVSCKVSGGTFSRNPISWVRQAPGQGLEWMGVIVPIVGTTKHAQKFQGRVTIIADESTSTAYMELSSLRSEDTAVYYCATYYADGSSYSEYWGQGTLVTVSS

SEQ ID NO: 22732 - protein, 123 aa, Artificial Sequence
  source: /note="Description of Artificial Sequence: Synthetic polypeptide"
EVQLLESGPGLVKPSETLSLTCTVSGGSISDFYWSWLRQSPGKGLEWIGYAHSRVSAYYNPSLKSRVTISVDTSKNQLSLRLSAVTAADTALYYCARQGTGTTGVSEDPFDLWGQGTKVIVSL

SEQ ID NO: 22733 - protein, 129 aa, Artificial Sequence
  source: /note="Description of Artificial Sequence: Synthetic polypeptide"
EVQLLESGGGLVQPGGSLRLSCAASGVTFSSYWMHWVRQAPGKGLEWVSRINSDGSSTNYADSVEGRFTISRDNAKNTLYLQMNSLRAEDTAVYYCSRGGLWDWSPRRIEETKTPFDYWGQGTLVTVSS

SEQ ID NO: 22734 - protein, 122 aa, Artificial Sequence
  source: /note="Description of Artificial Sequence: Synthetic polypeptide"
EVQLLESGAEVKKPGGSVKVSCKVSGGTLSSYGISWVRQAPGQGPEWMGVIIPIRGTANYAQKFQGRVTYTADESTSTVYMELSSLRSEDTAVYYCATGRRGRYPTGSFDYWGQGALVTVSS

SEQ ID NO: 22735 - protein, 123 aa, Artificial Sequence
  source: /note="Description of Artificial Sequence: Synthetic polypeptide"
EVQLLEQSGAEVKKPGGSVKVSCKVSGGTFSRNPISWVRQAPGQGLEWMSVIVPIVGTTKHAQKFQGRVTITADESTSTAYMELSSLRSEDTAVYYCATYRRYADVSSYSEYWGQGTLVTVSS

SEQ ID NO: 22736 - protein, 123 aa, Artificial Sequence
  source: /note="Description of Artificial Sequence: Synthetic polypeptide"
EVQLLESGGGLVQPGGSLTLSCAASGFTFSSYWMHWVRQAPGKGPEWVALIKKDGSEKYYAESVKGRFTISRDNAKNSLYLQMNSLRAEDTAVYYCTRRITTLTVISDAFDIWGQGTMVTVSS

SEQ ID NO: 22737 - protein, 123 aa, Artificial Sequence
  source: /note="Description of Artificial Sequence: Synthetic polypeptide"
EVQLLESGPGLVKPSETLSLTCTVSGGSISDFYWSWLRQSPGKGLEWIGVAHSRVSAYYNPSLKSRVTISVDTSKNQLSLRLSAVTAADAALYYCARQGTGTTGVSEDPFDLWGQGTKVIVSL

SEQ ID NO: 22738 - protein, 122 aa, Artificial Sequence
  source: /note="Description of Artificial Sequence: Synthetic polypeptide"
EVQLVESGGGVVQPGRSLRLSCAASGFSFSSYGMHWVRQAPGKGLEWVAVIWYDGSKTYYGDSVKGRFTISKDNSKKMVNLQMDSLGVEDTAFYYCARGIAGGWAFWGIDLWGQGTLVTVSS

SEQ ID NO: 22739 - protein, 117 aa, Artificial Sequence
  source: /note="Description of Artificial Sequence: Synthetic polypeptide"
EVKLLEQSGAELVKPGASVRLSCTASGFNIKDTYMSWVKQRPEQGLEWIGRIDPANGDTKYDPKFQGKATITADTSSNTAYLHLSSLTSGDTAVYYCSRGWEGFAYWGQGTLVTVSA

SEQ ID NO: 22740 - protein, 117 aa, Artificial Sequence
  source: /note="Description of Artificial Sequence: Synthetic polypeptide"
EVKLLEQSGAELVKPGASVRLSCTASGFNIKDTYMSWVKQRPEQGLEWIGRIDPENGDTKYDPKFQGKATITADTSSNTAYLHLSSLTSGDTAVYYCSRGWEGFAYWGQGTLVTVSA

SEQ ID NO: 22741 - protein, 117 aa, Artificial Sequence; identical to SEQ ID NO: 22740
  source: /note="Description of Artificial Sequence: Synthetic polypeptide"

SEQ ID NO: 22742 - protein, 118 aa, Artificial Sequence
  source: /note="Description of Artificial Sequence: Synthetic polypeptide"
WVPGVHSDIQMTQSPSSLSASVGDRVTITCRASQSISRYLNWYQREPGKAPKLLIYGASSLQRGVPSRFSGSGSGTDFTLTISSLQPEDFATYYCQQSQYIPYTFGQGTKVDIKRTVA

SEQ ID NO: 22743 - protein, 217 aa, Artificial Sequence
  source: /note="Description of Artificial Sequence: Synthetic polypeptide"
RSEIVLTQSPATLSLSPGERATLSCRASQSISTFLAWYQHKPGQAPRLLIYDASTRATGVPARFSGSRSGTDFTLTISTLEPEDFAVYYCQQRYNWPPYTFGQGTKVEIKRTVAAPSVFIFPPSDEQLKSGTASVVCLLNNFYPREAKVQWKVDNALQSGNSQESVTEQDSKDSTYSLSSTLTLSKADYEKHKVYACEVTHQGLSSPVTKSFNRGEC

SEQ ID NO: 22744 - protein, 213 aa, Artificial Sequence
  source: /note="Description of Artificial Sequence: Synthetic polypeptide"
DIVMTQSQKFMSTSVGDRVSITCKASQNVRTSVAWYQQKPGQSPKALIYLASNRHTGVPDRFTGSGSGTDFTLTISNVQSEDLADYFCLQHWTYPYTFGGGTKLEIKRADAAPTVSIFPPSSEQLTSGGASVVCFLNNFYPKDINVKWKIDGSERQNGVLNSWTDQDSKDSTYSMSSTLTLTKDEYERHNSYTCEATHKTSTSPIVKSFNRNE

SEQ ID NO: 22745 - protein, 239 aa, Artificial Sequence
  source: /note="Description of Artificial Sequence: Synthetic polypeptide"
LATMAWMMLLLLTLITHCAGSWAQSVLTQPPSVSEAPRQRVTISCSGSSSNIGNNAVNWYQQFPGKAPKLLIYYDDLLPSGVSDRFSGSKSGTSASLAISGLQSEDEAYYYCAAWDDSLIGVVFGGGTKLTVLGQPKAAPSVTLFPPSSEELQANKATLVCLISDFYPGAVTVAWKADSSPVKAGVETTTPSKQSNNKYAASSYLSLTPEQWKSHRSYSCQVTHEGSTVEKTVAPTECS

SEQ ID NO: 22746 - protein, 205 aa, Artificial Sequence
  source: /note="Description of Artificial Sequence: Synthetic polypeptide"
ILGDQASISCRSSQSLVHSNGNTYLHWYLQKPGQSPKLLIYSIFNRFSGVPDRFSGSGSGTDFTLKISRVEAEDLGVYFCSQGTHVPWTFGGGTNLEIKRADAAPTVSIFPPSSEQLTSGGASVVCFLNNFYPKDINVKWKIDGSERQNGVLNSWTDQDSKDSTYSMSSTLTLTKDEYERHNSYTCEATHKTSTSPIVKSFNRNE

SEQ ID NO: 22747 - protein, 99 aa, Artificial Sequence
  source: /note="Description of Artificial Sequence: Synthetic polypeptide"
LGDQASISCRSSQSLVHSNGNTYLHWYLQKPGQSPKLLIYSIFNRFSGVPDRFSGSGSGTDFTLKISRVEAEDLGVYFCSQGTHVPWTFGGGTNLEIKR

SEQ ID NO: 22748 - protein, 119 aa, Artificial Sequence
  source: /note="Description of Artificial Sequence: Synthetic polypeptide"
QLQLQESGGGLVQPGGSLRLSCAASGFTFSSHSMNWIRQAPGKRLEWVSSISSSSSYIYYADSVRGRFTISRDNAKNSLYLQMDSLRAEDTAVYYCARYMAGIWTFDIWGQGTMVTVSS

SEQ ID NO: 22749 - protein, 125 aa, Artificial Sequence; identical to SEQ ID NO: 22690
  source: /note="Description of Artificial Sequence: Synthetic polypeptide"

SEQ ID NO: 22750 - protein, 111 aa, Artificial Sequence
  source: /note="Description of Artificial Sequence: Synthetic polypeptide"
QSMLTQSPSVSAAPGQNVTISCSGDYPNIRNNYVSWYQQLPGAAPKLLIYDNNKRPSGIPDRFSGSKSGTSATLDITGLQTGDEADYYCGAWDSRLSAVVFGGGTKLTVLG

SEQ ID NO: 22751 - protein, 106 aa, Artificial Sequence
  source: /note="Description of Artificial Sequence: Synthetic polypeptide"
SYELTQPLSVSVALGQTARVTCGGNNIGSKTVHWYQQRPGQAPVLVIYRDTNRPSGIPERFSGSKSGSAATLTISRAQAGDEAEYYCQVWDGTSVVFGGGTKLTVL

SEQ ID NO: 22752 - protein, 107 aa, Artificial Sequence
  source: /note="Description of Artificial Sequence: Synthetic polypeptide"
DIQMTQSPSSLSASVGDRVTITCRASQSISYYLNWYQQKPGKAPKVLIYGASSLQSGVPSRFSGSGSETDFTLTISSLQPEDFATYYCQQSYDFPRTFGQGTKVEIK

SEQ ID NO: 22753 - protein, 111 aa, Artificial Sequence
  source: /note="Description of Artificial Sequence: Synthetic polypeptide"
SYELTQPPSVSVAPGKTATITCGGNNIGTKGVHWYQRKAGQAPVLVIYYDSVRPSGIPERFSGSNSGNTATLTISRVEAGDEADYYCQVWDNTDDSSDHPVFGGGSKLTVL

SEQ ID NO: 22754 - protein, 107 aa, Artificial Sequence
  source: /note="Description of Artificial Sequence: Synthetic polypeptide"
AIQLTQSPSSLSASVGDRVTITCRASQGISNYLAWYQQKPGKAPKLLIYAASTLQSGVPSRFSGSGSGTDFTLTISSLQPEDFATYYCQQLNNYEFTFGPGTKVDIK

SEQ ID NO: 22755 - protein, 111 aa, Artificial Sequence
  source: /note="Description of Artificial Sequence: Synthetic polypeptide"
QSVLTQPPSVSGAPGQRVTISCTGSSSNIGAGYDVHWYQQLPGTAPKLLICGNNNRPSGVPDRFSGSKSGTSASLAITGLQAEDEADYYCQSYDSSLTGVVFGGGTKLTVL

SEQ ID NO: 22756 - protein, 107 aa, Artificial Sequence
  source: /note="Description of Artificial Sequence: Synthetic polypeptide"
DIQMTQSPSSLSASVGDRVTITCRASQDIRRYLNWYQQRPGRVPQLLIYTTSTLQSGVPSRFSGSGSVTDFTLTISSLQPEDFGTYYCQQSYSPPHTFGQGTKLEIK

SEQ ID NO: 22757 - protein, 107 aa, Artificial Sequence
  source: /note="Description of Artificial Sequence: Synthetic polypeptide"
DILMTQSPSFVSASVGDRVTITCRASQGISNWLAWYQQKPGKAPNLLISAASSLQSGVPSRFSGSGSGTDFTLTISSLQPEDFATYFCQQANSFPPTFGQGTKVESK

SEQ ID NO: 22758 - protein, 107 aa, Artificial Sequence
  source: /note="Description of Artificial Sequence: Synthetic polypeptide"
SYEVTQPPSVSVSPGQTASITCSGDKLGKKYTSWYQQKPGQSPLLVIYQDTKRPSGIPERFSGSNSGNTATLTISGTQAMDEADYYCQAWDSTTHVIFGGGTKLTVL

SEQ ID NO: 22759 - protein, 111 aa, Artificial Sequence
  source: /note="Description of Artificial Sequence: Synthetic polypeptide"
QAVLTQPPSVSGAPGQRVTISCTGSSSNIGAGYDVHWYQQFPGTAPKLLIYGNSDRPSGVPDRFSGSQSGTSASLAITELQAADEADFYCQSYDSSLSGFVFGTGTKVTVL

SEQ ID NO: 22760 - protein, 106 aa, Artificial Sequence
  source: /note="Description of Artificial Sequence: Synthetic polypeptide"
SYELTQTPSVSVSPGHAASITCSGDKLGYKYTSWYQQKPGQSPVLVIYQDTKRPSGIPERFSGSNSGNTATLTISATQAMDEADYYCQAWDSRTGVFGGGTKLTVL

SEQ ID NO: 22761 - protein, 111 aa, Artificial Sequence
  source: /note="Description of Artificial Sequence: Synthetic polypeptide"
DIVMTQTPLSLSVTPGQPASISCKSSQSLLHSDGKTYLYWYLQKPGQAPQLLIFEVSTRFPGVPHRFSGSGSGTDFTLKISRVEAEDVGVYYCMQSVQSLGFGGGTKVEIK

SEQ ID NO: 22762 - protein, 109 aa, Artificial Sequence
  source: /note="Description of Artificial Sequence: Synthetic polypeptide"
SYVLTQPPSVSVAPGQTARITCGGNNIGSKSVHWYQQKPGQAPVLVVYDDSDRPSGIPERLSGSNSGNTATLTISRVEAGDEADYYCQVWDSSSGPFVVFGGGTKLTVL

SEQ ID NO: 22763 - protein, 108 aa, Artificial Sequence
  source: /note="Description of Artificial Sequence: Synthetic polypeptide"
SYVLTQPPSVSVAPGKTARITCGGNNIGSRNVHWYQQKPGQAPVLVIYYDSDRPSGIPERFSGSNSGNTATLTISRVEAGDEADYYCQVWDGSSDVAIFGGGTKLTVL

SEQ ID NO: 22764 - protein, 111 aa, Artificial Sequence
  source: /note="Description of Artificial Sequence: Synthetic polypeptide"
DIVMTQSPASLAVSLGERATISCRASENVDKYGNSFMHWYQQKPGQPPKLLIYRASELQWGVPDRFSGSGSGTDFTLTISSLQAEDVAVYYCQRSNEVPWTFGQGTKLEIK

SEQ ID NO: 22765 - protein, 116 aa, Artificial Sequence
  source: /note="Description of Artificial Sequence: Synthetic polypeptide"
QVQLVQSGAEVKKPGASVKVSCKASGFNIQDVYMSWVRQAPEQGLEWMGRIDPENGDTKYDPKLQGRVTMTADTSTNTAYMELRSLRSDDTAVYYCARGWEGFAYWGQGTLVTVSS

SEQ ID NO: 22766 - protein, 116 aa, Artificial Sequence
  source: /note="Description of Artificial Sequence: Synthetic polypeptide"
QVQLVQSGAEVKKPGASVKVSCKASGFNISDVYMSWVRQAPEQGLEWMGRIDPENGDTKYDPKLQGRVTMTADTSTNTAYMELRSLRSDDTAVYYCARGWEGFAYWGQGTLVTVSS

SEQ ID NO: 22767 - protein, 116 aa, Artificial Sequence
  source: /note="Description of Artificial Sequence: Synthetic polypeptide"
QVQLVQSGAEVKKPGASVKVSCKASAFNIKDTYMSWVRQAPEQGLEWMGRIDPENGDTKYDPKLQGRVTMTADTSTNTAYMELRSLRSDDTAVYYCARGWEGFAYWGQGTLVTVSS

SEQ ID NO: 22768 - protein, 116 aa, Artificial Sequence
  source: /note="Description of Artificial Sequence: Synthetic polypeptide"
QVQLVQSGAEVKKPGASVKVSCKASAFNIKDVYMSWVRQAPEQGLEWMGRIDPENGDTKYDPKLQGRVTMTADTSTNTAYMELRSLRSDDTAVYYCARGWEGFAYWGQGTLVTVSS

SEQ ID NO: 22769 - protein, 116 aa, Artificial Sequence
  source: /note="Description of Artificial Sequence: Synthetic polypeptide"
QVQLVQSGAEVKKPGASVKVSCKASGFNIKDVYMSWVRQAPEQGLEWMGRIDPENGDTKYDPKLQGRVTMTADTSTNTAYMELRSLRSDDTAVYYCSRGWEGFAYWGQGTLVTVSS

SEQ ID NO: 22770 - protein, 111 aa, Artificial Sequence
  source: /note="Description of Artificial Sequence: Synthetic polypeptide"
ELVMTQTPASLAVSLGQRATISCRASENVDKYGNSFMHWYQQKAGQPPKLLIYRASELQWGIPARFSGSGSRTDFTLTINPVEADDVATYFCQRSNEVPWTFGGGTKLEIK

SEQ ID NO: 22771 - protein, 105 aa, Artificial Sequence
  source: /note="Description of Artificial Sequence: Synthetic polypeptide"
SSELTQDPAVSVALGQTVRITCRGDSLRSYYASWYQQKPGQAPVLVIYGENNRPSGIPDRFSGSSSGDTASLTITGAQAEDEADYYCNSRDSSDHLLLFGQGTKL

SEQ ID NO: 22772 - protein, 115 aa, Artificial Sequence
  source: /note="Description of Artificial Sequence: Synthetic polypeptide"
QSVLTQPPSASGTPGQRVTISCSGSSSNVGSNYVYWYQQLPGTAPKLLIYRNNRRPSGVPDRFSGSKSGTSASLAISGLRSEDEADYYCATWDDSLSGLVFGGGTKLTVLGQPKA

SEQ ID NO: 22773 - protein, 238 aa, Artificial Sequence
  source: /note="Description of Artificial Sequence: Synthetic polypeptide"
KLTMGVPTQVLGLLLLWLTDARCQSVLTQPPSASGTPGQRVTISCSGSTSNIGSNTVNWYQQLPGTAPKLLIYSNDQRPSGVPDRFSGSKSGTSASLAISGLQSEDEADYYCAAWDDSLNGLFGGGTKLTVLGQPKAAPSVTLFPPSSEELQANKATLVCLISDFYPGAVTVAWKADSSPVKAGVETTTPSKQSNNKYAASSYLSLTPEQWKSHRSYSCQVTHEGSTVEKTVAPTECS

SEQ ID NO: 22774 - protein, 111 aa, Artificial Sequence
  source: /note="Description of Artificial Sequence: Synthetic polypeptide"
DIVLTQSPASLAVSLGQRATISCRASESVDKYGITFLNWFQQKPGQPPKLLIHSASNRGSGVPARFSGSGSGTDFSLNIHPMEEDDIAMYFCQQSKEVPWTFGGGTKLEIK

SEQ ID NO: 22775 - protein, 116 aa, Artificial Sequence
  source: /note="Description of Artificial Sequence: Synthetic polypeptide"
DIVMTQSHKFMSTSVGDRVSITCKASQDVGIAVAWYQQKPRQSPKLLIYWASTRHTGVPDRFTGSGSGTDLTLTINNVQSEDLADYFCQQFNSYPLTFGGGTKLEIKRADAAPTVS

SEQ ID NO: 22776 - protein, 120 aa, Artificial Sequence
  source: /note="Description of Artificial Sequence: Synthetic polypeptide"
DVLTQTPLSLPVSLGDQASISCRSSQSVVNSNGNTYLEWYLQKPGQSPKLLIYKVSNRFSGVPDRFSGSGSGTDFTLKISRVEAEDLGVYYCFQGSHFPRTFGGGTKLEIKRADAAPTVS

SEQ ID NO: 22777 - protein, 106 aa, Artificial Sequence
  source: /note="Description of Artificial Sequence: Synthetic polypeptide"
VVMTQTPKFLLVSAGDRVTITCKASQSVSNDVAWYQQKPGQSPKLLIYYVSNRYSGVPDRFTGSGYGTDFTFTINTVQAEDLAVYFCQQDYSSPYTFGGGTKLEIK

SEQ ID NO: 22778 - protein, 120 aa, Artificial Sequence
  source: /note="Description of Artificial Sequence: Synthetic polypeptide"
QAVVTQESALTTSPGETVTLTCRSSTGAVTTSNYANWVQEKPDRLFNGLIGGTNNRAPGVPARFSGSLIGDKAALTITGAQPEDEAIYFCALWYSNHFWVFGGGTKLTVLGQPKSTPTLT

SEQ ID NO: 22779 - protein, 109 aa, Artificial Sequence
  source: /note="Description of Artificial Sequence: Synthetic polypeptide"
ELQMTQSPSSLSASVGDRVTITCRASQDISIRLNWYQQKPGKAPKLLIYDASTLESGVPSRFSGSGSGTDFTLTISSLQPEDFATYYCQQFNSYPLTFGGGTKVEIKRT

SEQ ID NO: 22780 - protein, 108 aa, Artificial Sequence
  source: /note="Description of Artificial Sequence: Synthetic polypeptide"
ELTQGPATLSLSPGERATLSCRAGQSLDSSLLSWYQQKPGQAPRLLMYDASTRAPGVPARFSGSGSGTDFTLTISSLQPEDFAVYYCQQHYNLPRTFGQGTKLEIKRT

SEQ ID NO: 22781 - protein, 109 aa, Artificial Sequence
  source: /note="Description of Artificial Sequence: Synthetic polypeptide"
ELQMTQSPSTLSASVGDRVTVTCRASEDLNKWLAWYQQKPGKAPKLLIYKASSLESGVPSRFSGSGSGTEFTLTISSLQPDDFATYYCQQYQSYPYTFGPGTKLEIKRT

SEQ ID NO: 22782 - protein, 112 aa, Artificial Sequence
  source: /note="Description of Artificial Sequence: Synthetic polypeptide"
ELTQSPLSLPVTLGQPASISCRSSQNLVHSDGNTYLSWIQQRPGQPPRLLIYKVSNRDSGVPDRFSGSGAGTDFTLKITRVEAEDVGLYYCVQGVQFPITFGQGTKLEIKRT

SEQ ID NO: 22783 - protein, 107 aa, Artificial Sequence
  source: /note="Description of Artificial Sequence: Synthetic polypeptide"
ELTQSPSTLSASVGDRVTITCRASQGISSWLAWYQQKPGKAPKFLIYKASSLESGVPSRFSGSGSGTEFTLTISSLQPDDFATYYCQQYGSYPLTFGPGTKVDIKRT

SEQ ID NO: 22784 - protein, 107 aa, Artificial Sequence
  source: /note="Description of Artificial Sequence: Synthetic polypeptide"
ELTQSPSSLSASVGDRVTITCRASQGISNRLNWYQQKPGQGPKFLMYDASSLVSGVPSRFSGSGSGTDFTLTISSLQPEDFAVYYCQQFNSYPLTFGGGTKLEIKRT

SEQ ID NO: 22785 - protein, 108 aa, Artificial Sequence
  source: /note="Description of Artificial Sequence: Synthetic polypeptide"
ELQMTQSPSSVSASVGDTVTIACRASQSITNYLSWYQQKPGKAPKLLIYHASTLQSGIPSRFSGSGSGTDFTLTISSLQPDDFATYYCHYGYGTHTFGQGTKLEIKRT

SEQ ID NO: 22786 - protein, 108 aa, Artificial Sequence
  source: /note="Description of Artificial Sequence: Synthetic polypeptide"
ELQMTQSPSSLSASVGDRVTITCRASQSITNYLSWYQQKPGKAPKLLISYSSTLQSGVPSRFSGSGSGTDFTLTISSLQPEDFATYYCHYGYGTHTFGPGTKVDIKRT

SEQ ID NO: 22787 - protein, 106 aa, Artificial Sequence
  source: /note="Description of Artificial Sequence: Synthetic polypeptide"
ELTQSPSSVSASVGDRVTITCRASQTITNYVSWYQQKPGKAPNLLIYFASTLHSGVPSRFSGSGSGTDFTLTINSLQPDDFATYYCQYGYGTQTFGQGTKLEVKRT

SEQ ID NO: 22788 - protein, 106 aa, Artificial Sequence
  source: /note="Description of Artificial Sequence: Synthetic polypeptide"
ELTQSPSSVSASVGDTVTIACRASQSITNYLSWYQQKPGKAPKLLIYHASTLQSGIPSRFSGSGSGTDFTLTISSLQPDDFATYYCHYGYGTHTFGQGTKLEIKRT

SEQ ID NO: 22789 - protein, 109 aa, Artificial Sequence
  source: /note="Description of Artificial Sequence: Synthetic polypeptide"
ELQMTQSPSSLSASVGDRVTITCRASQGISSELNWYQQKPGKAPKLLIYDASSLESGVPSRFSGSGSGTDFTLTISSLQPEDFATYYCQHFNSFPWTFGQGTKLEIKRT

SEQ ID NO: 22790 - protein, 114 aa, Artificial Sequence
  source: /note="Description of Artificial Sequence: Synthetic polypeptide"
ELQMTQSPLSLSVAPGQPASISCKSSQSLLHSDGNTYLFWYLQKSGQSPQLLIYGLSNRASGVPDRFSGSGSGTDFTLKISQVEAEDVGVFYCMQGTQLPYTFGQGTKLEIKRT

SEQ ID NO: 22791 - protein, 108 aa, Artificial Sequence
  source: /note="Description of Artificial Sequence: Synthetic polypeptide"
DVVMTQSPGTLSLSPGERATLSCRASQNVYSYLGWYQHKPGRSPRLLIFGVTSRATGVPDRFSGSGSGTDFTLTISRLEPEDFAVYYCQQYAGSAYTFGQGTKVEIKR

SEQ ID NO: 22792 - protein, 112 aa, Artificial Sequence
  source: /note="Description of Artificial Sequence: Synthetic polypeptide"
ELVMTQTPASLAVSLGQRATISCRASENVDRYGNSFMHWYQQKAGQPPKLLIYRASNLESGIPARFSGSGSRTDFTLTINPVEADDVATYFCQRSNEVPWTFGGGTKLEIKR

SEQ ID NO: 22793 - protein, 112 aa, Artificial Sequence
  source: /note="Description of Artificial Sequence: Synthetic polypeptide"
ELVMTQTPASLAVSLGQRATISCRASENVDKYGNSFMHWYQQKAGQPPKLLIYRASELQWGIPARFSGSGSRTDFTLTINPVEADDVATYFCQRSNEVPWTFGGGTKLEIKR

SEQ ID NO: 22794 - protein, 112 aa, Artificial Sequence; identical to SEQ ID NO: 22793
  source: /note="Description of Artificial Sequence: Synthetic polypeptide"

SEQ ID NO: 22795 - protein, 229 aa, Artificial Sequence
  source: /note="Description of Artificial Sequence: Synthetic polypeptide"
LQQSGAELVRPGASVKLSCKALGYRFTDYEMYWVKQTPAHGLEWIGGIHPRSGNTAYNQKFKDKATLTADKSSSTAYMELSSLTSEDSVVYYCTTSLYWGQGTTVTVSSGGGGSGGGGSGGGGSLGDQASISCRSSQSLVHSNGNTYLHWYLQKPGQSPKLLIYSIFNRFSGVPDRFSGSGSGTDFTLKISRVEAEDLGVYFCSQGTHVPWTFGGGTNLEIKRADAAPT

SEQ ID NO: 22796 - protein, 153 aa, Artificial Sequence
  source: /note="Description of Artificial Sequence: Synthetic polypeptide"
GASQSVLTQPVSVSGSPGQSITISCTGTSSNADTYNLVSWYQQRPGKAPKLMIYEGTKRPSGVSNRFSASKSATAASLTISGLQPEDEADYYCCSYATSRTLVFGGGTKLTVVAAADDDDKAGWSHPQFEKGGGSGGGSGGGSSAWSHPQFEK

SEQ ID NO: 22797 - protein, 150 aa, Artificial Sequence
  source: /note="Description of Artificial Sequence: Synthetic polypeptide"
EVQLVESGGGLVRPGGSLRLSCAASGFSYSNHWMHWVRQAPGKGLVWVSRINSDGSTRNYADFVKGRFTISRDNAENTLYLEMNSLTADDTAVYYCVRDGVRFYYDSTGYYPDSFFKYGMDVWGQGTTVTVSSGTGGSGGGGSGGGGSGG

SEQ ID NO: 22798 - protein, 218 aa, Artificial Sequence
  source: /note="Description of Artificial Sequence: Synthetic polypeptide"
RSQSVLTQPVSVSGSPGQSITISCTGTSSNADTYNLVSWYQQRPGKAPKLMIYEGTKRPSGVSNRFSASKSATAASLTISGLQPEDEADYYCCSYATSRTLVFGGGTKLTVVGQPKAAPSVTLFPPSSEELQANKATLVCLISDFYPGAVTVAWKADSSPVKAGVETTTPSKQSNNKYAASSYLSLTPEQWKSHRSYSCQVTHEGSTVEKTVAPTECS

SEQ ID NO: 22799 - protein, 154 aa, Artificial Sequence
  source: /note="Description of Artificial Sequence: Synthetic polypeptide"
SGGGASQSALTQPASVSGSPGQSITISCTGTSSDVGGFNYVSWFQQHPGKAPKLMLYDVTSRPSGVSSRFSGSKSGNTASLTISGLQAEDEADYYCSSHTSRGTWVFGGGTKLTVLAAADDDDKAGWSHPQFEKGGGSGGGSGGGSWSHPQFEK

SEQ ID NO: 22800 - protein, 144 aa, Artificial Sequence
  source: /note="Description of Artificial Sequence: Synthetic polypeptide"
MAEVQLVESGAEVKKPGASVKVSCKASGYTFTSYAMHWVRQAPGQRLEWMGWINAGNGNTKYSQKFQDRVTITRDTSASTAYMELSSLRSEDTAIYYCARDKVDDYGDYWFPTLWYFDYWGQGTLVTVSSGTGGSGGGGSGGGG

SEQ ID NO: 22801 - protein, 218 aa, Artificial Sequence
  source: /note="Description of Artificial Sequence: Synthetic polypeptide"
RSQSALTQPASVSGSPGQSITISCTGISSDVETYNLVSWYEQHPGKAPKLIIYEASKRPSGVSNRFSGSKSGNTASLAISGLQAEDEADYYCCSYAGGKSLVFGGGTRLTVLGQPKAAPSVTLFPPSSEELQANKATLVCLISDFYPGAVTVAWKADSSPVKAGVETTTPSKQSNNKYAASSYLSLTPEQWKSHRSYSCQVTHEGSTVEKTVAPTECS

SEQ ID NO: 22802 - protein, 283 aa, Artificial Sequence
  source: /note="Description of Artificial Sequence: Synthetic polypeptide"
EVQLVESGGGLVQPGGSLKLSCAASGFTFSSHWMHWVRQAPGKGLVWVSRTNSDGSSTSYADSVKGRFMISRDNSKNTVYLHMNGLRAEDTAVYFCARDGVRYYYDSTGYYPDNFFQYGLDVWGQGTTVTVSSASTKGPSVFPLAPSSKSTSGGTAALGCLVKDYFPEPVTVSWNSGALTSGVHTFPAVLQSSGLYSLSSVVTVPSSSLGTQTYICNVNHKPSNTKVDKRVEPKSCDKTHTCPPCPLEDDDDKAGWSHPQFEKGGGSGGGSGGGSWSHPQFEK

SEQ ID NO: 22803 - protein, 226 aa, Artificial Sequence
  source: /note="Description of Artificial Sequence: Synthetic polypeptide"
ELLESGGGLVQPGGSLRLSCAASGFTFSSYAMSWVRQAPGKGLEWVSSINRSGDITTYADSVKGRFTISRDNSKNTLYLQMNSLRAEDTAVYYCAKKTRRFDYWGQGTLVTVSSASTKGPSVFPLAPSSKSTSGGTAALGCLVKDYFPEPVTVSWNSGALTSGVHTFPAVLQSSGLYSLSSVVTVPSSSLGTQTYICNVNHKPSNTKVDKKVEPKSCDKTSGQAGQ

SEQ ID NO: 22804 - protein, 218 aa, Artificial Sequence
  source: /note="Description of Artificial Sequence: Synthetic polypeptide"
ESALTQPRSVSGSPGQSVTISCTGTSSDIGGYNFVSWYQQHPGKAPKLMIYDATKRPSGVPDRFSGSKSGNTASLTISGLQAEDEADYYCCSYAGDYTPGVVFGGGTKLTVLGQPKAAPSVTLFPPSSEELQANKATLVCLISDFYPGAVTVAWKADGSPVKAGVETTTPSKQSNNKYAASSYLSLTPEQWKSHRSYSCQVTHEGSTVEKTVAPTECS

SEQ ID NO: 22805 - protein, 474 aa, Artificial Sequence [sequence omitted]

SEQ ID NO: 22806 - protein, 518 aa, Artificial Sequence [sequence omitted]

SEQ ID NO: 22807 - protein, 242 aa, Artificial Sequence [sequence omitted]

SEQ ID NO: 22808 - protein, 449 aa, Artificial Sequence
  source: /note="Description of Artificial Sequence: Synthetic polypeptide"
QVQLVESGGGAVQPGRSLRLSCAASGFTFSSYGMHWVRQAPGKGLEWVAVILYDGSDKFYADSVKGRFTISRDNSKNTLYLQMNSLRAEDTAVYYCAKVAVAGTHFDYWGQGTLVTVSSASTKGPSVFPLAPSSKSTSGGTAALGCLVKDYFPEPVTVSWNSGALTSGVHTFPAVLQSSGLYSLSSVVTVPSSSLGTQTYICNVNHKPSNTKVDKRVEPKSCDKTHTCPPCPAPELLGGPSVFLFPPKPKDTLMISRTPEVTCVVVDVSHEDPEVKFNWYVDGVEVHNAKTKPREEQYNSTYRVVSVLTVLHQDWLNGKEYKCKVSNKALPAPIEKTISKAKGQPREPQVYTLPPSREEMTKNQVSLTCLVKGFYPSDIAVEWESNGQPENNYKTTPPVLDSDGSFFLYSKLTVDKSRWQQGNVFSCSVMHEALHNHYTQKSLSLSPGK

SEQ ID NO: 22809 - protein, 457 aa, Artificial Sequence
  source: /note="Description of Artificial Sequence: Synthetic polypeptide"
QVQLVQSGAEVKKPGSSVKVSCKASGGTFNRYTVNWVRQAPGQGLEWMGGIIPIFGTANYAQRFQGRLTITADESTSTAYMELSSLRSDDTAVYFCARENLDNSGTYYYFSGWFDPWGQGTLVTVSSASTKGPSVFPLAPSSKSTSGGTAALGCLVKDYFPEPVTVSWNSGALTSGVHTFPAVLQSSGLYSLSSVVTVPSSSLGTQTYICNVNHKPSNTKVDKRVEPKSCDKTHTCPPCPAPELLGGPSVFLFPPKPKDTLMISRTPEVTCVVVDVSHEDPEVKFNWYVDGVEVHNAKTKPREEQYNSTYRVVSVLTVLHQDWLNGKEYKCKVSNKALPAPIEKTISKAKGQPREPQVYTLPPSREEMTKNQVSLTCLVKGFYPSDIAVEWESNGQPENNYKTTPPVLDSDGSFFLYSKLTVDKSRWQQGNVFSCSVMHEALHNHYTQKSLSLSPGK

SEQ ID NO: 22810 - protein, 456 aa, Artificial Sequence
  source: /note="Description of Artificial Sequence: Synthetic polypeptide"
EVQLVQSGAEVKKPGSSVKVSCKASGGTFNRYTVNWVRQAPGQGLEWMGGIIPIFGTANYAQRFQGRLTITADESTSTAYMELSSLRSDDTAVYFCARENLDNSGTYYYFSGWFDPWGQGTLVTVSSASTKGPSVFPLAPSSKSTSGGTAALGCLVKDYFPEPVTVSWNSGALTSGVHTFPAVLQSSGLYSLSSVVTVPSSSLGTQTYICNVNHKPSNTKVDKRVEPKSCDKTHTCPPCPAPELLGGPSVFLFPPKPKDTLMISRTPEVTCVVVDVSHEDPEVKFNWYVDGVEVHNAKTKPREEQYNSTYRVVSVLTVLHQDWLNGKEYKCKVSNKALPAPIEKTISKAKGQPREPQVYTLPPSREEMTKNQVSLTCLVKGFYPSDIAVEWESNGQPENNYKTTPPVLDSDGSFFLYSKLTVDKSRWQQGNVFSCSVMHEALHNHYTQKSLSLSPG

SEQ ID NO: 22811 - protein, 452 aa, Artificial Sequence
  source: /note="Description of Artificial Sequence: Synthetic polypeptide"
QITLKETGPTLVKPTQTLTLTCTFSGFSLSTSGVGVGWIRQPPGKALEWVTLIYWDDDKRYSPSLENRVTIRKDTSKNQVALTMTNMDPLDTGTYYCAHRQHISSFPWFDSWGQGTLVTVSSASTKGPSVFPLAPSSKSTSGGTAALGCLVKDYFPEPVTVSWNSGALTSGVHTFPAVLQSSGLYSLSSVVTVPSSSLGTQTYICNVNHKPSNTKVDKRVEPKSCDKTHTCPPCPAPELLGGPSVFLFPPKPKDTLMISRTPEVTCVVVDVSHEDPEVKFNWYVDGVEVHNAKTKPREEQYNSTYRVVSVLTVLHQDWLNGKEYKCKVSNKALPAPIEKTISKAKGQPREPQVYTLPPSREEMTKNQVSLTCLVKGFYPSDIAVEWESNGQPENNYKTTPPVLDSDGSFFLYSKLTVDKSRWQQGNVFSCSVMHEALHNHYTQKSLSLSPGK

SEQ ID NO: 22812 - protein, 448 aa, Artificial Sequence
  source: /note="Description of Artificial Sequence: Synthetic polypeptide"
EVQLVESGGGAVQPGRSLRLSCAASGFTFSSYGMHWVRQAPGKGLEWVAVILYDGSDKFYADSVKGRFTISRDNSKNTLYLQMNSLRAEDTAVYYCAKVAVAGTHFDYWGQGTLVTVSSASTKGPSVFPLAPSSKSTSGGTAALGCLVKDYFPEPVTVSWNSGALTSGVHTFPAVLQSSGLYSLSSVVTVPSSSLGTQTYICNVNHKPSNTKVDKRVEPKSCDKTHTCPPCPAPELLGGPSVFLFPPKPKDTLMISRTPEVTCVVVDVSHEDPEVKFNWYVDGVEVHNAKTKPREEQYNSTYRVVSVLTVLHQDWLNGKEYKCKVSNKALPAPIEKTISKAKGQPREPQVYTLPPSREEMTKNQVSLTCLVKGFYPSDIAVEWESNGQPENNYKTTPPVLDSDGSFFLYSKLTVDKSRWQQGNVFSCSVMHEALHNHYTQKSLSLSPG

SEQ ID NO: 22813 - protein, 518 aa, Artificial Sequence [sequence omitted]

SEQ ID NO: 22814 - protein, 114 aa, Artificial Sequence
  source: /note="Description of Artificial Sequence: Synthetic polypeptide"
ELLESGGGLVQPGGSLRLSCAASGFTFSSYAMSWVRQAPGKGLEWVSSINRSGDITTYADSVKGRFTISRDNSKNTLYLQMNSLRAEDTAVYYCAKKTRRFDYWGQGTLVTVSS

SEQ ID NO: 22815 - protein, 117 aa, Artificial Sequence
  source: /note="Description of Artificial Sequence: Synthetic polypeptide"
EVQLVESGGGVVRPGGSLRLSCAASGFTFDDYGMSWVRQAPGKGLEWVSGINWNGGSTGYADSVKGRFTISRDNAKNSLYLQMNSLRAEDTAVYYCAKGLYGELFDYWGQGTLVTVS

SEQ ID NO: 22816 - protein, 118 aa, Artificial Sequence
  source: /note="Description of Artificial Sequence: Synthetic polypeptide"
EVQLVESGGGLVQPGGSLRLSCAASGFTFSNYWMNWVRQAPGKGLEWVSAISGSGGSTYYADSVKGRFTISRDNSKNTLYLQMNSLRAEDTAVYYCAKDYLYPTTDFDYWGQGTLVTV

SEQ ID NO: 22817 - protein, 120 aa, Artificial Sequence
  source: /note="Description of Artificial Sequence: Synthetic polypeptide"
QVTLKESGPTLVKPTQTLTLTCTFSGFSLSTSGVGVGWIRQPPGKALEWLARIDWDDDKYYSTSLKTRLTISKDTSKNQVVLTMTNMDPVDTATYYCARMGFTGTYFDYWGQGTLVTVSS

SEQ ID NO: 22818 - protein, 123 aa, Artificial Sequence
  source: /note="Description of Artificial Sequence: Synthetic polypeptide"
QVQLVQSGGDLVQPGRSLRLSCAASGFTFSSYGMHWVRQAPGKGLEWVADISYDGSNKYYADSVKGRFTISRDNSKNTLYLQMNSLRAEDTAVYYCAKDGLDLTGTIQPFGYWGQGTLVTVSS

SEQ ID NO: 22819 - protein, 119 aa, Artificial Sequence
  source: /note="Description of Artificial Sequence: Synthetic polypeptide"
EVQLVESGPGLVRPSGTLSLTCAVSGGSISSSNWWSWVRQPPGKGLEWIGEIYHSGSTNYNPSLKSRVTISVDKSKNQFSLKLSSVTAADTAVYYCARVSVTTGAFNIWGQGTMVTVSS

SEQ ID NO: 22820 - protein, 119 aa, Artificial Sequence
  source: /note="Description of Artificial Sequence: Synthetic polypeptide"
EVQLVESGGGVVQPGRSLRLSCAASGFTFSSYGMHWVRQAPGKGLEWVAVISYDGSSKYYADSVKGRFTISRDNSKNTLYLQMNSLRAEDTAVYYCAKGSVLGDAFDIWGQGTMVTVSS

SEQ ID NO: 22821 - protein, 121 aa, Artificial Sequence
  source: /note="Description of Artificial Sequence: Synthetic polypeptide"
EVQLVESGAEVKKPGESLKISCKGSGYNFPYSWIAWVRQMPGKGLEWMGIIFPGDSDTRYSPPFQGQVTISADNSKSTAYLQWSSLKASDTAMYYCARTSNWNYLDRFDPWGQGTLVTVSS

SEQ ID NO: 22822 - protein, 119 aa, Artificial Sequence
  source: /note="Description of Artificial Sequence: Synthetic polypeptide"
EVQLVESGGGVVQPGRSLRLSCAASGFTFSSYGMHWVRQAPGKGLEWVAVISYDGSNKYYADSVKGRFTISRDNSKNTLYLQMNSLRAEDTAVYYCAKGSVLGDAFDIWGQGTMVTVSS

SEQ ID NO: 22823 - protein, 119 aa, Artificial Sequence
  source: /note="Description of Artificial Sequence: Synthetic polypeptide"
QVQLVQSGGGVVQPGRSLRLSCAASGFTFSSYGMHWVRQAPGKGLEWVAVISYDGSSKYYADSVKGRFTISRDNSKNTLYLQMNSLRAEDTAVYYCAKGSVLGDAFDIWGQGTMVTVSS

SEQ ID NO: 22824 - protein, 118 aa, Artificial Sequence
  source: /note="Description of Artificial Sequence: Synthetic polypeptide"
QVQLVQSGGGVVQPGRSLRLSCAASGFTFGSYGMHWVRQAPGKGLEWVATIFYDGSYKDYADSVKGRFTISRDNSKNTLYLQMNSLRAEDTAVYYCAKGSKVGDFDYWGQGTLVTVSS

SEQ ID NO: 22825 - protein, 128 aa, Artificial Sequence
  source: /note="Description of Artificial Sequence: Synthetic polypeptide"
QVQLVESGPGLVKASETLSLTCTVSDGSISSFYWSWIRQPPGKGLEWVGEIQDTGRTNYNPSLKSRVTISLDTSKNQFSLTLSSVTAADTAVYYCAREKEKYSDRSGYSYYYYYMDVWGKGTTVTVSS

SEQ ID NO: 22826 - protein, 123 aa, Artificial Sequence
  source: /note="Description of Artificial Sequence: Synthetic polypeptide"
QVQLVQSGGGVAQPGRSLRLSCAASGFTFSSYGMHWVRQAPGKGLEWVADISYDGSNKYYADSVKGRFTISRDNSKNTLYLQMNSLRAEDTAVYYCAKDGLDLTGTIQPFGYWGQGTLVTVSS

SEQ ID NO: 22827 - protein, 121 aa, Artificial Sequence
  source: /note="Description of Artificial Sequence: Synthetic polypeptide"
EVQLVQSGGHLVQPGGSLRLSCAASGFTFSSYAMSWVRQAPGKGLEWVSLIIGSGRSTYYADSVKGRFTISRDNSKNTLYLQMNSLRAEDTAVYYCAKTASNLGRGGMDVWGQGTTVTVSS

SEQ ID NO: 22828 - protein, 119 aa, Artificial Sequence
  source: /note="Description of Artificial Sequence: Synthetic polypeptide"
EVQLVQSGGGAVQPGRSLRLSCAASGFTFSSYGMHWVRQAPGKGLEWVAVILYDGSDKFYADSVKGRFTISRDNSKNTLYLQMNSLRAEDTAVYYCAKVAVAGTHFDYWGQGTLVTVSS

SEQ ID NO: 22829 - protein, 119 aa, Artificial Sequence
  source: /note="Description of Artificial Sequence: Synthetic polypeptide"
QVQLQESGGGVVQPGRSLRLSCAASGFTFSSYGMHWVRQAPGKGLEWVAVILYDGSDKYYADSVKGRFTISRDNSKNTLYLQMNSLRAEDTAVYYCAKVAVAGESFDSWGRGTLVTVSS

SEQ ID NO: 22830 - protein, 121 aa, Artificial Sequence
  source: /note="Description of Artificial Sequence: Synthetic polypeptide"
QVQLQESGGGVVQPGRSLRLSCAASGFTFSSYGMHWVRQAPGKGLEWVATISYDGNVKDYADSVKGRFTISRDNSKNTLYLQMNSLRTEDTAVYYCAKIVVVTALDAFDIWGQGTMVTVSS

SEQ ID NO: 22831 - protein, 120 aa, Artificial Sequence
  source: /note="Description of Artificial Sequence: Synthetic polypeptide"
EVQLVQSGGGLVQPGGSLRLSCAASGFTFSSYGMHWVRQAPGKGLEWVAVILYDGSDKFYADSVKGRFTISRDNSKDTLYLQMNSLRAEDTAVYYCAKFMIVADDAFDIWGQGTMVTVSS

SEQ ID NO: 22832 - protein, 118 aa, Artificial Sequence
  source: /note="Description of Artificial Sequence: Synthetic polypeptide"
EVQLVQSGGGLVQPGRSLRLSCAASGFTFSTYGMHWVRQAPGKGLEWVATISYDGSIKDYADSEKGRFTISRDNSKNTLYLQMNSLRAEDTAVYYCAKGGKTGEFDYWGQGTLVTVSS

SEQ ID NO: 22833 - protein, 119 aa, Artificial Sequence
  source: /note="Description of Artificial Sequence: Synthetic polypeptide"
QVQLVESGGGVVQPGRSLRLSCAASGFTFSSYGMHWVRQAPGKGLEWVAVISYDGSDKYYADSVKGRFTISRDNSKNTLYLQMNSLRAEDTAVYYCAKIATAGTGFDYWGQGTLVTVSS

SEQ ID NO: 22834 - protein, 120 aa, Artificial Sequence
  source: /note="Description of Artificial Sequence: Synthetic polypeptide"
QVTLKESGPTLVNPTQTLTLTCTFSGFSLSTGGVGVGWFRQPPGKALEWLARIDWDDDKYYSTSLKTRLTISKDTSKIQVVLTMTNMDPVDTATYYCARMGFTGTYFDYWGQGTLVTVSS

SEQ ID NO: 22835 - protein, 119 aa, Artificial Sequence
  source: /note="Description of Artificial Sequence: Synthetic polypeptide"
QMQLVQSGGGVVQPGRSLRLSCAASGFTFSSYGMHWVRQAPGKGLEWVAVILYDGSNKYYADSVKGRFTISRDNSKNALYLQMNSLRAEDTAVYYCAKVTNPGDAFDIWGQGTMVTVSS

SEQ ID NO: 22836 - protein, 118 aa, Artificial Sequence
  source: /note="Description of Artificial Sequence: Synthetic polypeptide"
QVQLQELGGGVVQPGRSLRLSCAASGFTFGSYGMHWVRQAPGKGLEWVATISYDGSIKDYADSEKGRFTISRDNSKNTLYLQMNSLRAEDTAVYYCAKGGKTGEFDYWGQGTLVTVSS

SEQ ID NO: 22837 - protein, 118 aa, Artificial Sequence
  source: /note="Description of Artificial Sequence: Synthetic polypeptide"
EVQLVQSGGGVVQPGRSLRLSCAASGFTFSSYGMHWVRQAPGKGLEWVATISYDGSIKDYADSEEGRFTISRDNSKNTLYLQMNSLRAEDTAVYYCAKGGKTGEFDYWGQGTLVTVSS

SEQ ID NO: 22838 - protein, 119 aa, Artificial Sequence; identical to SEQ ID NO: 22820
  source: /note="Description of Artificial Sequence: Synthetic polypeptide"

SEQ ID NO: 22839 - protein, 223 aa, Artificial Sequence
  source: /note="Description of Artificial Sequence: Synthetic polypeptide"
LESGPGLVKPSETLSLTCTVSGGPVSSVNFYWSWIRQPPGKGLEWIGYIYYSGSTNYNPSLKSRITTSVDTSKNQFSLKLSAVTAADTAVYYCARERLTTGAMDVWGQGTTVTVSSASTKGPSVFPLAPSSKSTSGGTAALGCLVKDYFPEPVTVSWNSGALTSGVHTFPAVLQSSGLYSLSSVVTVPSSSLGTQTYICNVNHKPSNTKVDKRVEPKSCDKTS

SEQ ID NO: 22840 - protein, 223 aa, Artificial Sequence
  source: /note="Description of Artificial Sequence: Synthetic polypeptide"
LESGPGLVKPSETLSLTCTVSGGSISSVNSYWGWIRQPPGKGLEWIGNFYYSGNTHYNPSLKSRVTISVGTSKNQFSLKLNSVTAADTAVYYCARQSTIGGFFDYWGQGTLVTVSSASTKGPSVFPLAPSSKSTSGGTAALGCLVKDYFPEPVTVSWNSGALTSGVHTFPAVLQSSGLYSLSSVVTVPSSSLGTQTYICNVNHKPSNTKVDKKVEPKSCDKTS

SEQ ID NO: 22841 - protein, 119 aa, Artificial Sequence
  source: /note="Description of Artificial Sequence: Synthetic polypeptide"
QVQLQESGGGVVQPGRSLRLSCAGSGFTLDDYAMHWVRQFPGKGLEWVSGINWNGSIKGYSDSVKGRFSVSRDNAKNVLYLQMTNLRPEDTALYYCAKETILATWGRGTLVTVSSASTK

SEQ ID NO: 22842 - protein, 119 aa, Artificial Sequence
  source: /note="Description of Artificial Sequence: Synthetic polypeptide"
QVQLQESGGGVVQPGRSLRLSCAGSGFTLDDYAMHWVRQFPGKCLEWVSGINWNGSIKGYSDSVKGRFSVSRDNAKNVLYLQMTNLRPEDTALYYCAKETILATWGRGTLVTVSSASTK

SEQ ID NO: 22843 - protein, 122 aa, Artificial Sequence
  source: /note="Description of Artificial Sequence: Synthetic polypeptide"
MAEVQLVESGPGLVKPSETLSLTCTVSGGSMRRSNYYWDWIRQPPGKGLEWIGSIYYSGTTYYNPSLKSRVTISVDTSKNQFSLKLSSVTAADTAVYYCASESTVTAKLDNWGQGTLVTVSS

SEQ ID NO: 22844 - protein, 122 aa, Artificial Sequence
  source: /note="Description of Artificial Sequence: Synthetic polypeptide"
MAEVQLVQSGPGLVKPSETLSLTCTVSGGSMRRSNYYWDWIRQPPGKGLEWIGSIYYSGTTYYNPSLKSRVTISVDTSKNQFSLKLSSVTAADTAVYYCASESTVTAKLDNWGQGTLVTVSS

SEQ ID NO: 22845 - protein, 122 aa, Artificial Sequence
  source: /note="Description of Artificial Sequence: Synthetic polypeptide"
MAQVQLVQSGPGLVKPSETLSLTCTVSGGSMRRSNYYWDWIRQPPGKGLEWIGSIYYSGTTYYNPSLKSRVTISVDTSKNQFSLKLSSVTAADTAVYYCASESTVTAKLDNWGQGTLVTVSS

SEQ ID NO: 22846 - protein, 125 aa, Artificial Sequence
  source: /note="Description of Artificial Sequence: Synthetic polypeptide"
QVQLLQSGAEVKKPGASVKVSCKASGYTFTSYYIHWLRQAPGQGLEWMGTINPGGGSTSYAEKFQDRVTMTRDTSASTAYMGLSSLRSEDTAVYYCARDLRGYISNWSTLGMDVWGQGTPVTVSS

SEQ ID NO: 22847 - protein, 474 aa, Artificial Sequence [sequence omitted]

SEQ ID NO: 22848 - protein, 234 aa, Artificial Sequence [sequence omitted]

SEQ ID NO: 22849 - protein, 232 aa, Artificial Sequence [sequence omitted]

SEQ ID NO: 22850 - protein, 476 aa, Artificial Sequence [sequence omitted]

SEQ ID NO: 22851 - protein, 213 aa, Artificial Sequence
  source: /note="Description of Artificial Sequence: Synthetic polypeptide"
DIQMTQSPSSLSASVGDRVTITCRASQGIRNDLGWYQQKPGKAPKLLIYAASSLQSGVPSRFSGSGSGTDFTLTISSLQPEDFATYYCQQLNSYPPTFGGGTKVEIKTVAAPSVFIFPPSDEQLKSGTASVVCLLNNFYPREAKVQWKVDNALQSGNSQESVTEQDSKDSTYSLSSTLTLSKADYEKHKVYACEVTHQGLSSPVTKSFNRGEC

SEQ ID NO: 22852 - protein, 218 aa, Artificial Sequence
  source: /note="Description of Artificial Sequence: Synthetic polypeptide"
QSALTQPRSVSGSPGQSVTISCTGTSSDIGGYNFVSWYQQHPGKAPKLMIYDATKRPSGVPDRFSGSKSGNTASLTISGLQAEDEADYYCCSYAGDYTPGVVFGGGTKLTVLGQPKAAPSVTLFPPSSEELQANKATLVCLISDFYPGAVTVAWKADSSPVKAGVETTTPSKQSNNKYAASSYLSLTPEQWKSHRSYSCQVTHEGSTVEKTVAPTECS

SEQ ID NO: 22853 - protein, 218 aa, Artificial Sequence
  source: /note="Description of Artificial Sequence: Synthetic polypeptide"
ESALTQPRSVSGSPGQSVTISCTGTSSDIGGYNFVSWYQQHPGKAPKLMIYDATKRPSGVPDRFSGSKSGNTASLTISGLQAEDEADYYCCSYAGDYTPGVVFGGGTKLTVLGQPKAAPSVTLFPPSSEELQANKATLVCLISDFYPGAVTVAWKADSSPVKAGVETTTPSKQSNNKYAASSYLSLTPEQWKSHRSYSCQVTHEGSTVEKTVAPTECS

SEQ ID NO: 22854 - protein, 213 aa, Artificial Sequence
  source: /note="Description of Artificial Sequence: Synthetic polypeptide"
SYVLTQPPSVSVAPGKTARINCGGNNIEYRSVHWYQQKSGQAPVAVIYDNSDRPSGIPERFSGSKSGNTATLTISRVEAGDEADYYCQVWDISSDVVFGGGTKLTVLGQPKAAPSVTLFPPSSEELQANKATLVCLISDFYPGAVTVAWKADSSPVKAGVETTTPSKQSNNKYAASSYLSLTPEQWKSHRSYSCQVTHEGSTVEKTVAPTECS

SEQ ID NO: 22855 - protein, 214 aa, Artificial Sequence
  source: /note="Description of Artificial Sequence: Synthetic polypeptide"
DIQMTQSPSSLSASVGDRVTITCRASQGIRNDLGWYQQKPGKAPKLLIYAASSLQSGVPSRFSGSGSGTDFTLTISSLQPEDFATYYCQQLNSYPPTFGGGTKVEIKRTVAAPSVFIFPPSDEQLKSGTASVVCLLNNFYPREAKVQWKVDNALQSGNSQESVTEQDSKDSTYSLSSTLTLSKADYEKHKVYACEVTHQGLSSPVTKSFNRGEC

SEQ ID NO: 22856 - protein, 234 aa, Artificial Sequence [sequence omitted]

SEQ ID NO: 22857 - protein, 476 aa, Artificial Sequence [sequence omitted]

SEQ ID NO: 22858 - protein, 242 aa, Artificial Sequence [sequence omitted]

SEQ ID NO: 22859 - protein, 232 aa, Artificial Sequence [sequence omitted]

SEQ ID NO: 22860 - protein, 108 aa, Artificial Sequence; identical to SEQ ID NO: 19100
  source: /note="Description of Artificial Sequence: Synthetic polypeptide"

SEQ ID NO: 22861 - protein, 103 aa, Artificial Sequence
  source: /note="Description of Artificial Sequence: Synthetic polypeptide"
TQSPSSLSASVGDRVTITCRASQSISSYLNWYQQKPGKAPKLLIYAASSLQSGVPSRFSGSGSGTDFTLTISSLQPEDFATYYCQQSYSTPPTFGQGTKVEIK

SEQ ID NO: 22862 - protein, 109 aa, Artificial Sequence
  source: /note="Description of Artificial Sequence: Synthetic polypeptide"
QAVLTQPSSVSVAPGETASVTCGGDNIGSKSVHWYQKKPGQAPVLVVFDDSDRPSGIPERFSGSTSGNTAALTISRVEAGDEADYYCQVWDSSNDHLYVFGPGTQLTVL

SEQ ID NO: 22863 - protein, 107 aa, Artificial Sequence
  source: /note="Description of Artificial Sequence: Synthetic polypeptide"
DIQMTQSPSSLSASVGDRVTITCRASQGIRNDLGWYQQKPGKAPKLLIYAASSLQSGVPSRFSGSGSGTDFTLTISSLQPEDFATYYCLQDYNYPRTFGQGTKVEIK

SEQ ID NO: 22864 - protein, 110 aa, Artificial Sequence
  source: /note="Description of Artificial Sequence: Synthetic polypeptide"
QPVLTQPLSASGTPGQRVTISCSGDTSNIGSNTVHWYQRLPGTAPKLLIHNNNQRPSGVPDRFSGAKSGTSASLAISGLQSEDEADYFCAAWDDNLNGYVFGTGTKVTVL

SEQ ID NO: 22865 - protein, 107 aa, Artificial Sequence
  source: /note="Description of Artificial Sequence: Synthetic polypeptide"
DIQMTQSPFSLSASVGDRVTITCRASQGIGSSLAWYQQKPGKAPKLLIYAASSLQSGVPSRFSGSGSGTDFTLTISSLQPEDFATYFCLQHHDYPLTFGGGTKLEIK

SEQ ID NO: 22866 - protein, 112 aa, Artificial Sequence
  source: /note="Description of Artificial Sequence: Synthetic polypeptide"
DVVMTQSPLSLPVTPGEPASISCRSSQSLLHSNGHDYLDWYVQKPGQSPQPLIYLGSDRASGVPDRFSGSGSGTHFTLNISRVEAEDVGVYYCMQSLQTPWTFGQGTKLEIK

SEQ ID NO: 22867 - protein, 107 aa, Artificial Sequence
  source: /note="Description of Artificial Sequence: Synthetic polypeptide"
DIQMTQSPSFVSASVGDRVTITCRASQGISSWLAWYQQKPGKAPKLLIYAASSLQSGVPSRFSGSGSGTDFTLTISSLQPEDFATYYCQQANSFPLTFGGGTKVEIK

SEQ ID NO: 22868 - protein, 107 aa, Artificial Sequence
  source: /note="Description of Artificial Sequence: Synthetic polypeptide"
DIQLTQSPSSVSASVGDRVTITCRASQGISGWLAWYQQKPEKAPKLLIYAASSLQRGVPSRFSGSGSGTDFTLTISSLQPEDFATYYCQQANSFPPTFGQGTRLEIK

SEQ ID NO: 22869 - protein, 108 aa, Artificial Sequence
  source: /note="Description of Artificial Sequence: Synthetic polypeptide"
QPVLTQPPSVSVAPGQTARISCGGDNIGTNTVQWYQQKPGQAPVLVVYDDSDRPSGIPERFSGSNSGDTATLTISRVEAGDEADYYCQVWDDSSDLVVFGGGTKVTVL

SEQ ID NO: 22870 - protein, 107 aa, Artificial Sequence
  source: /note="Description of Artificial Sequence: Synthetic polypeptide"
DIQMTQSPSSLSASVGDRVTITCRASQGISTYLNWYQQKPGKAPNLLIYGASNLQSGVPSRFSGSESGTDFTLTISSLQPEDFATYYCQQSFTTPRTFGQGTKLEIK

SEQ ID NO: 22871 - protein, 107 aa, Artificial Sequence
  source: /note="Description of Artificial Sequence: Synthetic polypeptide"
DIQLTQSPSFLSASVGDRVTITCRASHSISSWLAWYQQKPGKAPKLLIYKASSLESGVPSRFSGSGSGTDFTLTISSLQPEDFATYYCLQDYNYPRTFGQGTKLEIK

SEQ ID NO: 22872 - protein, 107 aa, Artificial Sequence
  source: /note="Description of Artificial Sequence: Synthetic polypeptide"
DIQLTQSPSSLSASVGDRVTITCRASQGISSHLAWYQQKPGKAPKLLIYAASSLQSGVPSRFSGSGSGTEFTLTISSLQPEDFATYYCQQFNSYPITFGQGTRLEIK

SEQ ID NO: 22873 - protein, 107 aa, Artificial Sequence
  source: /note="Description of Artificial Sequence: Synthetic polypeptide"
DIQMTQSPSSLSASVGDRVTITCRASQGIRNDLGWYQQKPGKAPKLLIYAASSLQSGVPSRFSGSGSGTDFTLTISSLQPEDFATYYCQQLNSYPPTFGGGTKVEIK

SEQ ID NO: 22874 - protein, 107 aa, Artificial Sequence
  source: /note="Description of Artificial Sequence: Synthetic polypeptide"
DIQLTQSPSSVSASVGDRVTITCRASQGISSWLAWYQQKPGKAPRSLIYDASSLQSGVPSRFSGSGSGTDFTLTISSLQPEDFATYYCQQADSFPITFGQGTRLEIK

SEQ ID NO: 22875 - protein, 109 aa, Artificial Sequence
  source: /note="Description of Artificial Sequence: Synthetic polypeptide"
DIQLTQSPSTLSASVGDRVTITCRASQILGHWLPLSWYQQKPGKAPKLLISKASSLESGVPPRFSGSGSGSDFTLTISSLQPDDFATYYCLQYHEYPLTFGGGTKLEIK

SEQ ID NO: 22876 - protein, 107 aa, Artificial Sequence
  source: /note="Description of Artificial Sequence: Synthetic polypeptide"
DIQLTQSPSSLSASVGDRVTITCRASQGISSHLVWYQQKPGKAPKSLIYAASSLQSGVPSRFSGSESATDFTLTISSLQPEDFATYYCQQYYSYPITFGQGTRLEIK

SEQ ID NO: 22877 - protein, 107 aa, Artificial Sequence
  source: /note="Description of Artificial Sequence: Synthetic polypeptide"
DIQLTQSPSTLSASVGDRVTITCRASQGINSYLAWYQQEPGKAPKLLIYAASTLQSGVPSRFSGSGSGTEFTLTISSLQPEDFATYYCQQLNSYPFTFGPGTKVDIK

SEQ ID NO: 22878 - protein, 107 aa, Artificial Sequence
  source: /note="Description of Artificial Sequence: Synthetic polypeptide"
DIQMTQSPSSVSASVGDRVTITCRASQGISSYLAWYQQKPGKAPKLLIYDASSLESGVPSRFSGSGSGTEFTLTISSLQPDDFATYYCQQLNSYPLTFGGGTKVEIK

SEQ ID NO: 22879 - protein, 109 aa, Artificial Sequence
  source: /note="Description of Artificial Sequence: Synthetic polypeptide"
QSVLTQPPSVSVAPGKTARITCGGNNIGSKSVHWYQQKPGQAPVLVIYYDSDRPSGIPERFSGSNSGNTATLTISRVEAGDEADYYCQVWDSSSDHPYVFGTGTKLTVL

SEQ ID NO: 22880 - protein, 107 aa, Artificial Sequence
  source: /note="Description of Artificial Sequence: Synthetic polypeptide"
DIQMTQSPSSLSASVGDRVTITCRASQGISSALAWYQQKPGKAPKLLIYDASSLESGVPSRFSGSGSGTDFTLTISSLQPEDFATYYCQQFNSYPLTFGGGTKVEIK

SEQ ID NO: 22881 - protein, 107 aa, Artificial Sequence
  source: /note="Description of Artificial Sequence: Synthetic polypeptide"
DIQLTQSPSSLSASVGDRVTITCRASQGISSYLAWYQQKPGKGPKLLIYAASTLQSGVPSRFSGSGSGTDFSLTISSLQPEDLATYYCQQYDSYPLTFGGGTKVEIK

SEQ ID NO: 22882 - protein, 107 aa, Artificial Sequence
  source: /note="Description of Artificial Sequence: Synthetic polypeptide"
DVVMTQSPATLSVSPGESATLFCRASESVYSNLAWYQHKPGRAPRLLIYGASTRATGIPARFDGTGSGTDFTLTISSLQSEDFAVYYCQQYNDWPITFGQGTRLEIK

SEQ ID NO: 22883 - protein, 107 aa, Artificial Sequence
  source: /note="Description of Artificial Sequence: Synthetic polypeptide"
DIQLTQSPSSVSASVGDRVTITCRASQGISSWLAWYQQKPGKAPKLLIYAASSLQSGVPSRFSGSGSGTDFTLTISSLQPEDFATYYCQQANSFPLTFGGGTKVDIK

SEQ ID NO: 22884 - protein, 214 aa, Artificial Sequence
  source: /note="Description of Artificial Sequence: Synthetic polypeptide"
ELQPPSVSAAPGQKVTISCSGSSSNIGSNYVSWYQQLPGAAPKLLIYDNNKRPSGIPDRFSGSKSGTSATLGITGLQTGDEADYYCGTWDSSLSAWVFGGGTKLTVLGQPKAAPSVTLFPPSSEELQANKATVVCLISDFYPGAVTVAWKADSSPVKAGVETTTPSKQSNSKYAASSYLSLTPEQWKSHRRYSCQVTHEGSTVEKTVAPTECSF

SEQ ID NO: 22885 - protein, 215 aa, Artificial Sequence
  source: /note="Description of Artificial Sequence: Synthetic polypeptide"
ELQPASVSGSLGQSITISCTGTSSDIGNYNLVSWYQQHPGKAPKLIIYEVTKRPSGVSNRFSGSKSGNTASLTISGLQAEDEANYYCSSYTATKNYWIFGGGTKLTVRGQPKAAPSVTLFPPSSEELQANKATLVCLISDFYPGAVTVAWKADSSPVKAGVETTTPSKQSNNKYAASSYLSLTPEQWKSHRSYSCQVTHEGSTVEKTVAPTECSF

SEQ ID NO: 22886 - protein, 112 aa, Artificial Sequence
  source: /note="Description of Artificial Sequence: Synthetic polypeptide"
DIQMTQSPSTLSASVGDRVTITCRASHNINSWLAWYQQRPGKAPKLLIYKASSLESGVPSRFSGSGAGTDFNLTISSPQPDDFAAYYCQHYNTFSATFGQGTKVEIKRTVAA

SEQ ID NO: 22887 - protein, 112 aa, Artificial Sequence
  source: /note="Description of Artificial Sequence: Synthetic polypeptide"
DIQMTQSPSTLSASVGDRVTITCRASHNINSWLAWYQQRPGKAPKLLIYKASSLESGVPSRFSGSGAGTDFNLTISSPQPDDFAAYYCQHYNTFSATFGCGTKVEIKRTVAA

SEQ ID NO: 22888 - protein, 111 aa, Artificial Sequence
  source: /note="Description of Artificial Sequence: Synthetic polypeptide"
NFMLTQPPSVSGAPGQRVTISCSGSLSNIGASYDVHWYQQLPGAAPKLLVYANDNRPSGVPDRFSGSRSGTSASLAITGLQAEDEADYYCQSYDSSLSAQVFGEGTKLTVL

SEQ ID NO: 22889 - protein, 110 aa, Artificial Sequence
  source: /note="Description of Artificial Sequence: Synthetic polypeptide"
NFMLTQPHSVSESPGKTVTISCTRSSGSIASNYVQWYQQRPGSAPTTVIYEDNQRPSGVPDRFSGSIDSSSNSASLTISGLKTEDEADYYCQSYDSSNAVFGGGTQLTVL

SEQ ID NO: 22890 - protein, 110 aa, Artificial Sequence
  source: /note="Description of Artificial Sequence: Synthetic polypeptide"
QLVLTQPPSASGTPGQRVTISCSGSSSNIGSNYVYWYQQLPGTAPKLLIYRNNQRPSGVPDRFSGSKSGTSASLAITGLQAEDEADYFCATWDDSLRGPVFGGGTKLTVL

SEQ ID NO: 22891 - protein, 110 aa, Artificial Sequence
  source: /note="Description of Artificial Sequence: Synthetic polypeptide"
SYVLTQPPSASGTPGQRVTISCSGSSSNIGSNTVNWYQQFPGTAPQVVIYRNHQRPSGVPDRFSASKSGTSASLVITGLQSQDEADYYCATWDDRLDGLLFGGGTQLTVL

SEQ ID NO: 22892 - protein, 112 aa, Artificial Sequence
  source: /note="Description of Artificial Sequence: Synthetic polypeptide"
ESALTQPRSVSGSPGQSVTISCTGTSSDIGGYNFVSWYQQHPGKAPKLMIYDATKRPSGVPDRFSGSKSGNTASLTISGLQAEDEADYYCCSYAGDYTPGVVFGGGTKLTVL

SEQ ID NO: 22893 - protein, 109 aa, Artificial Sequence
  source: /note="Description of Artificial Sequence: Synthetic polypeptide"
EIVLTQSPSFLSASVGDRVTITCRASQDIRKSLNWYQQRPGKAPKLLISDASNLEAGVPSRFSGSGSGTDFTFTISNLQPEDFATYFCQQYHHLPPWTFGQGTKVEIKR

SEQ ID NO: 22894 - protein, 222 aa, Artificial Sequence
  source: /note="Description of Artificial Sequence: Synthetic polypeptide"
VKLQQSGVELVRPGTSVKMSCKAVGYTFTYDWIGWVKQRPGHGLEWIGDIYLGGGYINYNEKFKGKVILTADTSSSTAYMQLSSLTSEDSAIYYCARGHYDGSYFDYWGQGTTLTVSSAKTTAPSVYPLAPVCGDTSGSSVTLGCLVKGYFPEPVTLTWNSGSLSSGVHTFPAVLQSDLYTLSSSVTVTSSTWPSQSITCNVAHPASSTKVDKKIEPRGPTI

SEQ ID NO: 22895 - protein, 213 aa, Artificial Sequence
  source: /note="Description of Artificial Sequence: Synthetic polypeptide"
DVLMTQTPTIMSASIGEEITLTCSASSSVSHMHWYQHKSGTSPKLLIYITSYLASGVPSRFSGSGSGTFYSLTISSVEAEDAADYYCHQWSTFPSTFGSGTKLEIKRADAAPTVSIFPPSSEQLTSGGASVVCFLNNFYPKDINVKWKIDGSERQNGVLNSWTDQDSKDSTYSMSSTLTLTKDEYERHNSYTCEATHKTSTSPIVKSFNRNEC

SEQ ID NO: 22896 - protein, 218 aa, Artificial Sequence
  source: /note="Description of Artificial Sequence: Synthetic polypeptide"
QVQLQQPGAELVRPGSSVKLSCKASGYTFTSKWMHWVKQRPIQGLEWIGNIDPSDSETHYNQKFKDKATLTVDKSSSTAYMQLSSLTSEDSAVYYCARGVTRGYFDVWGTGTTVTVSSAKTTAPSVYPLAPVCGGTTGSSVTLGCLVKGYFPEPVTLTWNSGSLSSGVHTFPALLQSGLYTLSSSVTVTSNTWPSQTITCNVAHPASSTKVDKKIEPR

SEQ ID NO: 22897 - protein, 118 aa, Artificial Sequence
  source: /note="Description of Artificial Sequence: Synthetic polypeptide"
QVQLVQSGSELKKPGASVKVSCKASGYTLTRYAMTWVRQAPGQGLEWMGWINTYTGNPTYVQGFTGRFVFSLDTSVSTAFLHITSLKAEDTAVYFCAREGGARGFDYWGQGTLVTVSS

SEQ ID NO: 22898 - protein, 123 aa, Artificial Sequence
  source: /note="Description of Artificial Sequence: Synthetic polypeptide"
QVQLQESGPGLVKPSETLSLTCTVSGDSISSYSWSWIRQPPGKGLEWIGYIHYTGSTNYNPSLKSRLTISVDASKNQFSLKLSSVTAADTAVYYCARDWGGYSSSWTYGMDVWGQGTTVTVSS

SEQ ID NO: 22899 - protein, 212 aa, Artificial Sequence
  source: /note="Description of Artificial Sequence: Synthetic polypeptide"
QIVLTQSPAIMSASPGEKVTMTCSASSSVTYMYWYQQKPGSSPRLLIYDTSNLASGVPVRFSGSGSGTSYSLTISRMEAEDAATYYCQQRTNYPLTFGAGTKLELKRADAAPTVSIFPPSSEQLTSGGASVVCFLNNFYPKDINVKWKIDGSERQNGVLNSWTDQDSKDSTYSMSSTLTLTKDEYERHNSYTCEATHKTSTSPIVKSFNRNE

SEQ ID NO: 22900 - protein, 112 aa, Artificial Sequence
  source: /note="Description of Artificial Sequence: Synthetic polypeptide"
QSVLTQPPSVSGAPGQRVTISCTGSSSNIGASHDVHWYQQLPGTAPTLLIYVNSNRPSGVPDRFSGSKSGTSASLAITGLQAEDEADYYCQSYDSNLSGSAVFGGGTKLTVL

SEQ ID NO: 22901 - protein, 107 aa, Artificial Sequence
  source: /note="Description of Artificial Sequence: Synthetic polypeptide"
DIQMTQSPSSLSASVGDRVTITCRASQGISNSLAWYQQKPGKAPKLLLYAASRLESGVPSRFSGSGSGTDYTLTISSLQPEDFATYYCQQYYSTPYTFGQGTKLEIK

SEQ ID NO: 22902 - protein, 127 aa, Artificial Sequence
  source: /note="Description of Artificial Sequence: Synthetic polypeptide"
QVQLVESGGGLVQPGGSLRLSCAASGFTLDDYAIGWFRQVPGKEREGVACVKDGSTYYADSVKGRFTISRDNGAVYLQMNSLKPEDTAVYYCASRPCFLGVPLIDFGSWGQGTQVTVSSEPKTPKPQ

SEQ ID NO: 22903 - protein, 135 aa, Artificial Sequence
  source: /note="Description of Artificial Sequence: Synthetic polypeptide"
QVQLVESGGGLVQAGGSLRLSCATSGGTFSDYGMGWFRQAPGKEREFVAAIRRNGNGGNGIEYADSVKGRFTISRDNAKNTVHLQMNSLTPEDTAVYYCAASISGYAYNTIERYNYWGQGTQVTVSSEPKTPKPQ

SEQ ID NO: 22904 - protein, 137 aa, Artificial Sequence
  source: /note="Description of Artificial Sequence: Synthetic polypeptide"
QVQLVESGGGLVQAGGSLSLSCAASGGDFSRNAMAWFRQAPGKEREFVASINWTGSGTYYLDSVKGRFTISRDNAKNALYLQMNNLKPEDTAVYYCARSTVFAEITGLAGYQSGSYDYWGQGTQVTVSSEPKTPKPQ

SEQ ID NO: 22905 - protein, 137 aa, Artificial Sequence
  source: /note="Description of Artificial Sequence: Synthetic polypeptide"
QVQLVETGGGTVQTGGSLRLSCSASGGSFSRNAMGWFRQAPGKEREFVAAINWSASSTYYRDSVKGRFTVSRDNAKNTVYLHLNSLKLEDTAAYYCAGSSVYAEMPYADSVKATSYNYWGQGTQVTVSSEPKTPKPQ

SEQ ID NO: 22906 - protein, 131 aa, Artificial Sequence
  source: /note="Description of Artificial Sequence: Synthetic polypeptide"
QVQLVETGGGLVQAGGSLRLPCSFSGFPFDNYFVGWFRQAPGKEREGVSCISSSDGSTYYADSVKGRFTISRDNAKNTVYLQMNSLKPEDTAVYYCGADFLTPHRCPALYDYWGQGTQVTVSSAHHSEDPS

SEQ ID NO: 22907 - protein, 127 aa, Artificial Sequence
  source: /note="Description of Artificial Sequence: Synthetic polypeptide"
QVQLVESGGGLVQPGGSLRLHCAASGSIASIYRTCWYRQGTGKQRELVAAITSGGNTYYADSVKGRFTISRDNAKNTIDLQMNSLKPEDTAVYYCNADEAGIGGFNDYWGQGTQVTVSSAHHSEDPS

SEQ ID NO: 22908 - protein, 134 aa, Artificial Sequence
  source: /note="Description of Artificial Sequence: Synthetic polypeptide"
QVQLVESGGGLVQAGGSLRLSCAASGRTFSRSSMGWFRQAPGKEREFVASIVWADGTTLYGDSVKGRFTVSRDNVKNMVYLQMNNLKPEDTALYYCADNKFVRGLVAVRAIDYDYWGQGTQVTVSSEPKTPKPQ

SEQ ID NO: 22909 - protein, 135 aa, Artificial Sequence
  source: /note="Description of Artificial Sequence: Synthetic polypeptide"
QVQLVESGGLVQAGGSLRLSCAASGRADIIYAMGWFRQAPGKEREFVAAVDWSGGSTYYADSVKGRFTISRDNAKNSVYLQMNSLKPEDTAVYYCAARRSWYRDALSPSRVYEYDYWGQGTQVTVSSEPKTPKPQ

SEQ ID NO: 22910 - protein, 125 aa, Artificial Sequence
  source: /note="Description of Artificial Sequence: Synthetic polypeptide"
QVQLVETGGGLVQPGGSLTLSCAGSGGTLEHYAIGWFRQAPGKEHEWLVCNRGEYGSTVYVDSVKGRFTASRDNAKNTVYLQLNSLKPDDTGIYYCVSGCYSWRGPWGQGTQVTVSSAHHSEDPS

SEQ ID NO: 22911 - protein, 126 aa, Artificial Sequence
  source: /note="Description of Artificial Sequence: Synthetic polypeptide"
QVQLVESGGGLVQPGGSLKLSCRASGSIVSIYAVGWYRQAPGKQRELLAAITTDGSTKYSDSVKGRFTISRDNAKNTVYLQMNNLKPEDTAIYSCIGDAAGWGDQYYWGQGTQVTVSSEPKTPKPQ

SEQ ID NO: 22912 - protein, 129 aa, Artificial Sequence
  source: /note="Description of Artificial Sequence: Synthetic polypeptide"
QVQLVESGGGLVQAGGSLRLSCAASGSIVNFETMGWYRQAPGKERELVATITNEGSSNYADSVKGRFTISGDNAKNTVSLQMNSLKPEDTAVYYCSATFGSRWPYAHSDHWGQGTQVTVSSEPKTPKPQ

SEQ ID NO: 22913 - protein, 125 aa, Artificial Sequence
  source: /note="Description of Artificial Sequence: Synthetic polypeptide"
QVQLVETGGALVHTGGSLRLSCEVSGSTFSSYGMAWYRQAPGEQRKWVAGIMPDGTPSYVNSVKGRFTISRDNAKNSVYLHMNNLRPEDTAVYYCNQWPRTMPDANWGRGTQVTVSSEPKTPKPQ

SEQ ID NO: 22914 - protein, 117 aa, Artificial Sequence
  source: /note="Description of Artificial Sequence: Synthetic polypeptide"
QVQLVETGGSLRLTCVTSGSTFNNPAITWYRQPPGKQREWVASLRSGDGPVYRESVKGRFTIFRDNATDALYLRMNSLKPEDTAVYHCNTASPASWLDWGQGTQVTVSSEPKTPKPQ

SEQ ID NO: 22915 - protein, 130 aa, Artificial Sequence
  source: /note="Description of Artificial Sequence: Synthetic polypeptide"
QVQLVETGGGLVQPGGSLRLSCATSGFPFSTERMSWVRQAPGKGLEWVSGITEGGETTLAAPSVKGRFNISRDNARNILYLQMNSLKPEDAAVYYCFRGVFFRTSFPPELARGQGTQVTVSSEPKTPKPQ

SEQ ID NO: 22916 - protein, 127 aa, Artificial Sequence
  source: /note="Description of Artificial Sequence: Synthetic polypeptide"
QVQLVESGGGLVQAGGSLRLSCAASGSAVSDSFSTYAISWHRQAPGKQREWIAGISNRGATSYRDSVKGRFTISRDNAKNTVYLQMNNLKPEDTGVYYCEPWPREGLGGGQGTQVTVSSEPKTPKPQ

SEQ ID NO: 22917 - protein, 124 aa, Artificial Sequence
  source: /note="Description of Artificial Sequence: Synthetic polypeptide"
QVQLVESGGGSVQTGGSLTLSCVVSGSTFSDYAVAWYRQVPGKSRAWVAGVSTTGSTSYTDSVRGRFTISRDNHKKTVYLSMNSLKPEDTGIYYCNLWPFTNPPSWGQGTQVTVSSAHHSEDPS

SEQ ID NO: 22918 - protein, 132 aa, Artificial Sequence
  source: /note="Description of Artificial Sequence: Synthetic polypeptide"
QVQLVESGGAVVQPGGSLRLSCATSGFTFSDDRMSWARQAPGKGLEWVSGISTASEGFATLYAPSVKGRFTISRDNAKHMLYLQMDTLKPEDTAVYYCLRGVFFRTNIPPEVLRGQGTQVTVSSAHHSEDPS

SEQ ID NO: 22919 - protein, 126 aa, Artificial Sequence
  source: /note="Description of Artificial Sequence: Synthetic polypeptide"
QVQLVETGGDLVQPGGSLRLSCAASGSSFSRAAVGWYRQAPGKEREWVARLASGDMTDYTESVRGRFTISRDNAKHTVYLQMDNLKPEDTAVYYCKARIPPYYSIEYWGKGTRVTVSSEPKTPKPQ

SEQ ID NO: 22920 - protein, 124 aa, Artificial Sequence
  source: /note="Description of Artificial Sequence: Synthetic polypeptide"
QVQLVETGGGLVQAGGSLRLSCVVSSPLFNLYDMAWYRQAPGNQRELVAGILTDGRATYSDSVKGRFTISRNNLTNTVFLQMSSLKPEDTAVYYCNRKNSIYWDSWGQGTQVTVSSEPKTPKPQ

SEQ ID NO: 22921 - protein, 134 aa, Artificial Sequence
  source: /note="Description of Artificial Sequence: Synthetic polypeptide"
QVQLVESGGGLVQAGGSLRLSCVASGLTFSRYGMGWFRQAPGQERVVVSVISPDGGSAYYADSVKGRFTISRDNAKNTVYLQMSTLRFEDTGVYYCTAGPRNGATTVLRPGDYDYWGQGTQVTVSSEPKTPKPQ

SEQ ID NO: 22922 - protein, 125 aa, Artificial Sequence
  source: /note="Description of Artificial Sequence: Synthetic polypeptide"
QVQLVESGGGLVQPGGSLRLSCAASGSSFSRYAMRWYRQAPGKQRELVANINSRGTSNYADSVKGRFTISRDNAKNTVYLQMNSLKPEDTAVYYCNAEWLGRSEPSWGQGTQVTVSSEPKTPKPQ

SEQ ID NO: 22923 - protein, 126 aa, Artificial Sequence
  source: /note="Description of Artificial Sequence: Synthetic polypeptide"
QVQLVESGGGLVQPGGSLRLSCAASGFIFSLYTMRWHRQAPGKERELVATITSATGITNYADSVKGRFIISRDDAKKTGYLQMNSLKPEDTAVYYCNAVRTTVSRDYWGQGTQVTVSSEPKTPKPQ

SEQ ID NO: 22924 - protein, 125 aa, Artificial Sequence
  source: /note="Description of Artificial Sequence: Synthetic polypeptide"
QVQLVESGGGLVQPGGSLRLSCAASGIIFSIYTMGWYRQAPGKQRELVAAIPSGPSANATDSVGGRFTITRDNAENTVYLQMNDLKPEDTAVYYCNARRGPGIKNYWGQGTQVTVSSEPKTPKPQ

SEQ ID NO: 22925 - protein, 130 aa, Artificial Sequence
  source: /note="Description of Artificial Sequence: Synthetic polypeptide"
QVQLVESGGGLVQPGGSLSVSCAASGSIARPGAMAWYRQAPGKERELVASITPGGLTNYADSVTGRFTISRDNAKRTVYLQMNSLQPEDTAVYYCHARIIPLGLGSEYRDHWGQGTQVTVSSAHHSEDPS

SEQ ID NO: 22926 - protein, 123 aa, Artificial Sequence
  source: /note="Description of Artificial Sequence: Synthetic polypeptide"
QVQLVETGGGLVQPGGSLGLSCVVASGRSINNYGMGWYRQAPGKQRELVAQISSGGTTNYAGSVEGRFTISRDNVKKMVYLQMNSLKPEDTAVYYCNSLLRTFSWGQGTQVTVSSAHHSEDPS

SEQ ID NO: 22927 - protein, 133 aa, Artificial Sequence
  source: /note="Description of Artificial Sequence: Synthetic polypeptide"
QVQLVETGGLVQPGGSLRLSCAASGLTFSSTAMAWFRQAPGKEREFVARISGAGITIYYSDSVKDRFTISRNNVENTVYLQMNSLKTEDTAVYYCAARRNTYTSDYNIPARYPYWGQGTQVTVSSEPKTPKPQ

SEQ ID NO: 22928 - protein, 126 aa, Artificial Sequence
  source: /note="Description of Artificial Sequence: Synthetic polypeptide"
QVQLVETGGLVQPGGSLRLSCAASRSTTATIYSMNWYRQAPGKQRELVAGMTSDGQTNYATSVKGRFTISRDNAKNTVYLLMNSLKLEDTAVYYCYVKPWRLQGWDYWGQGTQVTVSSEPKTPKPQ

SEQ ID NO: 22929 - protein, 122 aa, Artificial Sequence
  source: /note="Description of Artificial Sequence: Synthetic polypeptide"
QVQLVESGGGLVQPGGSLRLSCAAPESIVNSRTMAWYRQAPGKQRERVATITTAGSPNYADSVKGRFAISRDNAKNTVYLQMNSLKPEDTAVYYCNTLLSTLPYGQGTQVTVSSAHHSEDPS

SEQ ID NO: 22930 - protein, 123 aa, Artificial Sequence
  source: /note="Description of Artificial Sequence: Synthetic polypeptide"
QVQLVESGGGLVQPGGSLGLSCVVASERSINNYGMGWYRQAPGKQRELVAQISSGGTTNYADSVEGRFTISRDNVKKMVHLQVNSLKPEDTAVYYCNSLLRTFSWGQGTQVTVSSEPKTPKPQ

SEQ ID NO: 22931 - protein, 126 aa, Artificial Sequence
  source: /note="Description of Artificial Sequence: Synthetic polypeptide"
QVQLVETGGGLVQPGGSLRLSCAASGFTFSSYRMSWYRQAAGKERDVVATITANGVPTGYADSVMGRFTISRDNAKNTVYLEMNSLNPEDTAVYYCNAPRLHTSVGYWGQGTQVTVSSEPKTPKPQ

SEQ ID NO: 22932 - protein, 135 aa, Artificial Sequence
  source: /note="Description of Artificial Sequence: Synthetic polypeptide"
QVQLVESGGGLVQAGNSLRLSCTASGVIFSIYTMGWFRQAPGKEREFVAAIGVADGTALVADSVTGRFTISRDNAKNTVYLHMNSLKPEDTAVYSCAAYLSPRVQSPYITDSRYQLWGQGTQVTVSSEPKTPKPQ

SEQ ID NO: 22933 - protein, 119 aa, Artificial Sequence
  source: /note="Description of Artificial Sequence: Synthetic polypeptide"
TGGGLVQAGGSLRLSCAASGRYAMGWFRQAPGKEREFVATISRSGAIREYADSVKGRFTISRDGAENTVYLEMNSLKPDDTAIYVCAEGRGATFNPEYAYWGQGTQVTVSSAHHSEDPS

SEQ ID NO: 22934 - protein, 12 aa, Artificial Sequence
  source: /note="Description of Artificial Sequence: Synthetic peptide"
HTSTYWWLDGAP

SEQ ID NO: 22935 - protein, 12 aa, Artificial Sequence
  source: /note="Description of Artificial Sequence: Synthetic peptide"
HQLPYQYWWLSP

SEQ ID NO: 22936 - protein, 4 aa, Artificial Sequence
  source: /note="Description of Artificial Sequence: Synthetic peptide"
YWWL

SEQ ID NO: 22937 - protein, 213 aa, Artificial Sequence
  source: /note="Description of Artificial Sequence: Synthetic polypeptide"
DIQMTQSPSSLSASVGDRVTITCRASQDIRNYLNWYQQKPGKAVKLLIYYTSRLLPGVPSRFSGSGSGTDYSLTISSQEQEDIGTYFCQQGNTLPWTFGQGTKVEIRTVAAPSVFIFPPSDEQLKSGTASVVCLLNNFYPREAKVQWKVDNALQSGNSQESVTEQDSKDSTYSLSSTLTLSKADYEKHKVYACEVTHQGLSSPVTKSFNRGEC

SEQ ID NO: 22938 - protein, 468 aa, Artificial Sequence
  source: /note="Description of Artificial Sequence: Synthetic polypeptide"
MDWIWRILFLVAAATGAHSQVQLVQSGAEVKKPGASVKVSCKASGYTFTSNAIQWVRQAPGQRLEWVGWINGGDGNTKYSQKFQGRVTISRDISASTAYMELSSLRSEDTAVYYCARHRLQRGGFDPWGQGTLVTVSSASTKGPSVFPLAPSSKSTSGGTAALGCLVKDYFPEPVTVSWNSGALTSGVHTFPAVLQSSGLYSLSSVVTVPSSSLGTQTYICNVNHKPSNTKVDKRVEPKSCDKTHTCPPCPAPELLGGPSVFLFPPKPKDTLMISRTPEVTCVVVDVSHEDPEVKFNWYVDGVEVHNAKTKPREEQYNSTYRVVSVLTVLHQDWLNGKEYKCKVSNKALPAPIEKTISKAKGQPREPQVYTLPPSREEMTKNQVSLTCLVKGFYPSDIAVEWESNGQPENNYKTTPPVLDSDGSFFLYSKLTVDKSRWQQGNVFSCSVMHEALHNHYTQKSLSLSPGK

SEQ ID NO: 22939 - protein, 470 aa, Artificial Sequence
  source: /note="Description of Artificial Sequence: Synthetic polypeptide"
MELGLCWLFLVAILKGVQCEVQLLESGGGLVQPGGSLRLSCSGSGFMFSSYAMSWVRQAPGKGLEWVSGISGSGGTTNYADSVKGRFTISRDNSKNTLYMQMNSLRAEDTAVYYCAKDGVYGRLGGSDYWGQGTLVTVSSASTKGPSVFPLAPSSKSTSGGTAALGCLVKDYFPEPVTVSWNSGALTSGVHTFPAVLQSSGLYSLSSVVTVPSSSLGTQTYICNVNHKPSNTKVDKKVEPKSCDKTHTCPPCPAPELLGGPSVFLFPPKPKDTLMISRTPEVTCVVVDVSHEDPEVKFNWYVDGVEVHNAKTKPREEQYNSTYRVVSVLTVLHQDWLNGKEYKCKVSNKALPAPIEKTISKAKGQPREPQVYTLPPSRDELTKNQVSLTCLVKGFYPSDIAVEWESNGQPENNYKTTPPVLDSDGSFFLYSKLTVDKSRWQQGNVFSCSVMHEGLHNHYTQKSLSLSPGK

SEQ ID NO: 22940 - protein, 449 aa, Artificial Sequence
  source: /note="Description of Artificial Sequence: Synthetic polypeptide"
ELINLQESGPGLVKPSETLSLTCTVSGGAMNSHFWSWIRQSPGKGLEWIGYIYSGGTTNYDPSLKSRVAISIDTSKKQFSLKLRSVTAADTAVYYCARGDMVTGDPGDYWGQGTLVTVSSASTKGPSVFPLAPSSKSTSGGTAALGCLVKDYFPEPVTVSWNSGALTSGVHTFPAVLQSSGLYSLSSVVTVPSSSLGTQTYICNVNHKPSNTKVDKTVERKCWARHTCPPCPAPELLGGPSVFLFPPKPKDTLMISRTPEVTCVVVDVSHEDPEVKFNWYVDGVEVHNAKTKPREEQYNSTYRVVSVLTVLHQDWLNGKEYKCKVSNKALPAPIEKTISKAKGQPREPQVYTLPPSRDELTKNQVSLTCLVKGFYPSDIAVEWESNGQPENNYKTTPPVLDSDGSFFLYSKLTVDKSRWQQGNVFSCSVMHEALHNHYTQKSLSLSPGK

SEQ ID NO: 22941 - protein, 451 aa, Artificial Sequence
  source: /note="Description of Artificial Sequence: Synthetic polypeptide"
ELINLVQSGHEVKQPGASVKLSCKASGYSFSSYFVHWVRQAPGQGFEWMGMINPRGGSTNYAQKFQGRVTMTRETSTTTVYMELSGLRSDDSAVYYCARVNWAYGDYDFDYWGQGTLVTVSSASTKGPSVFPLAPCSRSTSGGTAALGCLVKDYFPEPVTVSWNSGALTSGVHTFPAVLQSSGLYSLSSVVTVPSSSLGTQTYTCNVNHKPSNTKVDKTVERKCWARHTCPPCPAPELLGGPSVFLFPPKPKDTLMISRTPEVTCVVVDVSHEDPEVKFNWYVDGVEVHNAKTKPREEQYNSTYRVVSVLTVLHQDWLNGKEYKCKVSNKALPAPIEKTISKAKGQPREPQVYTLPPSRDELTKNQVSLTCLVKGFYPSDIAVEWESNGQPENNYKTTPPVLDSDGSFFLYSKLTVDKSRWQQGNVFSCSVMHEALHNHYTQKSLSLSPGK

SEQ ID NO: 22942 - protein, 451 aa, Artificial Sequence
  source: /note="Description of Artificial Sequence: Synthetic polypeptide"
ELINLVESGGGLVQPGRSLRLSCAASGFTFDDYAMHWVRQVAGKGLEWVSGINWNSANIAYADSVKGRFTISRDNAKKLVYLQMHSLRAEDTAVYYCAKDMYGGGGYFFAKWGQGSLVTVSSASTKGPSVFPLAPSSKSTSGGTAALGCLVKDYFPEPVTVSWNSGALTSGVHTFPAVLQSSGLYSLSSVVTVPSSSLGTQTYICNVNHKPSNTKVDKTVERKCWARHTCPPCPAPELLGGPSVFLFPPKPKDTLMISRTPEVTCVVVDVSHEDPEVKFNWYVDGVEVHNAKTKPREEQYNSTYRVVSVLTVLHQDWLNGKEYKCKVSNKALPAPIEKTISKAKGQPREPQVYTLPPSRDELTKNQVSLTCLVKGFYPSDIAVEWESNGQPENNYKTTPPVLDSDGSFFLYSKLTVDKSRWQQGNVFSCSVMHEALHNHYTQKSLSLSPGK

SEQ ID NO: 22943 - protein, 454 aa, Artificial Sequence
  source: /note="Description of Artificial Sequence: Synthetic polypeptide"
ELINLVESGGGLIQPGGSLRLSCTASGFTVNSMYMNWFRQAPGKGLEWVSIIYSDGSTFYADSVKGRFTISRDNSKNTLYLQLSSLRAEDTAVYYCARAPQYDLWTGPLYGMDVWGQGTTVTVSSASTKGPSVFPLAPCSRSTSESTAALGCLVKDYFPEPVTVSWNSGALTSGVHTFPAVLQSSGLYSLSSVVTVTSSNFGTQTYTCNVDHKPSNTKVDKTVERKCWARHTCPPCPAPELLGGPSVFLFPPKPKDTLMISRTPEVTCVVVDVSHEDPEVKFNWYVDGVEVHNAKTKPREEQYNSTYRVVSVLTVLHQDWLNGKEYKCKVSNKALPAPIEKTISKAKGQPREPQVYTLPPSRDELTKNQVSLTCLVKGFYPSDIAVEWESNGQPENNYKTTPPVLDSDGSFFLYSKLTVDKSRWQQGNVFSCSVMHEALHNHYTQKSLSLSPGK

SEQ ID NO: 22944 - protein, 450 aa, Artificial Sequence
  source: /note="Description of Artificial Sequence: Synthetic polypeptide"
LQESGPGLVKPSETLSLTCTVSGGSISGNYWSWIRQPAGKGLEWIGRIYISGSTTYKPSLKSRVTMSVDTSKNQFSLKLTSVTAADTAVYYCARDKDYFISGSYYNWFDPWGQGTLVTVSSASTKGPSVFPLAPSSKSTSGGTAALGCLVKDYFPEPVTVSWNSGALTSGVHTFPAVLQSSGLYSLSSVVTVPSSSLGTQTYICNVNHKPSNTKVDKTVERKCWARHTCPPCPAPELLGGPSVFLFPPKPKDTLMISRTPEVTCVVVDVSHEDPEVKFNWYVDGVEVHNAKTKPREEQYNSTYRVVSVLTVLHQDWLNGKEYKCKVSNKALPAPIEKTISKAKGQPREPQVYTLPPSRDELTKNQVSLTCLVKGFYPSDIAVEWESNGQPENNYKTTPPVLDSDGSFFLYSKLTVDKSRWQQGNVFSCSVMHEALHNHYTQKSLSLSPGK

SEQ ID NO: 22945 - protein, 457 aa, Artificial Sequence
  source: /note="Description of Artificial Sequence: Synthetic polypeptide"
ELINLVESGGGVVRPGRSLRLSCAASGIIFSSYTMHWVRQAPGKGLEWVALISYDGTNKNYGDSVTGRFTISRDNSKNTLYLQMNSLRPEDTAVYYCARARVIVPAGSNYNQYGMDVWGQGTTVTVSSASTKGPSVFPLAPSSKSTSGGTAALGCLVKDYFPEPVTVSWNSGALTNGVHTFPAVLQSSGLYSLSSVVTVPSSSLGTQTYICNVNHKPSNTKVDKTVERKCWARHTCPPCPAPELLGGPSVFLFPPKPKDTLMISRTPEVTCVVVDVSHEDPEVKFNWYVDGVEVHNAKTKPREEQYNSTYRVVSVLTVLHQDWLNGKEYKCKVSNKALPAPIEKTISKAKGQPREPQVYTLPPSRDELTKNQVSLTCLVKGFYPSDIAVEWESNGQPENNYKTTPPVLDSDGSFFLYSKLTVDKSRWQQGNVFSCSVMHEALHNHYTQKSLSLSPGK

SEQ ID NO: 22946 - protein, 122 aa, Artificial Sequence
  source: /note="Description of Artificial Sequence: Synthetic polypeptide"
QVQLVESGGGVVQPGRSLRLSCAASGFAFDSTAMHWVRQAPGKGLEWVAVISTGGSTYYADSVKGRFTISRDNSNNTLYLQMNSLRAEDTAVYYCAKAVRGYIGSRGPLDVWGQGTMVTVSS

SEQ ID NO: 22947 - protein, 133 aa, Artificial Sequence
  source: /note="Description of Artificial Sequence: Synthetic polypeptide"
LEQVQLVESGGGLVQPGGSLRLSCAASGFTFSRFWMNWVRQAPGKGLEWVANIKQDGSGKYYVDSVKGRFTISRDNAKNSLYLQMDSLRAEDTAVYYCARARTNGGYDIYYYYDMDVWGQGTTVTVSSASTKG

SEQ ID NO: 22948 - protein, 121 aa, Artificial Sequence
  source: /note="Description of Artificial Sequence: Synthetic polypeptide"
LEQVQLVESGGGLVQPGGSPRLSCAASGFTFSTDWMNWVRQAPGKGLECVANINQDGSERYYVDSVKGRFTISRDNAKNSLYLQMNSLRAEDTAVYYCVRNARGDWGQGTLVTVSSASTKG

SEQ ID NO: 22949 - protein, 136 aa, Artificial Sequence
  source: /note="Description of Artificial Sequence: Synthetic polypeptide"
LEEVQLLESGGGLVKPGGSLRLSCAGSGFTFRSYNMNWVRQAPGKGLEWASAITSTGSDIYYADSVRGRFTISRDNAQNSLLLQMNSLRAEDTAVYYCARDPGRGYGPNALGPYFYGMDVWGPGTTVTVSSASTKG

SEQ ID NO: 22950 - protein, 132 aa, Artificial Sequence
  source: /note="Description of Artificial Sequence: Synthetic polypeptide"
LEQVQLVESGGGLVKPGGSLRLSCAASGFTFSDYSMTWIRQAPGKGLEWISYITGSGSAISYADSVKGRFTISRDNANNSLFQQMNSLGAEGTALYYCARDREYGDSLLYFYGMDVWGQGTTVTVSSASTKG

SEQ ID NO: 22951 - protein, 126 aa, Artificial Sequence
  source: /note="Description of Artificial Sequence: Synthetic polypeptide"
LEEVQLLESGGGLVKPGGSLRLSCAASGFTFSSYGMNWVRQTPGKGLEWVASITDRGTYKDYAESLRGRFTISRDNAQNSMSLQMDSLTAEDTAVYFCARERFGDDGMDVWGQGTTVTVSSASTKG

SEQ ID NO: 22952 - protein, 130 aa, Artificial Sequence
  source: /note="Description of Artificial Sequence: Synthetic polypeptide"
LEEVQLVESGGGLVQPGESLRLSCEASGFTFPDYAMHWVRQRPGKGLEWVSVINWNGITRRYAASVKGRFIIDRDSAKNSLYLQMSSLRPEDTALYYCARDRDGGGNGGSGMDVWGQGTTVIVSSASTKG

SEQ ID NO: 22953 - protein, 134 aa, Artificial Sequence
  source: /note="Description of Artificial Sequence: Synthetic polypeptide"
LEQVQLVESGEGEVQPGRSLRLSCAASGFIFRSFGMHWVRQAPGKGLEWVAAISYDGTNKDYGDSVKGRFTISRDNSRNMVYLQMNSLRAEDTAVYYCAKEGVIIPAATKDRSNYFDYWGQGTLVTVSSASTKG

SEQ ID NO: 22954 - protein, 134 aa, Artificial Sequence
  source: /note="Description of Artificial Sequence: Synthetic polypeptide"
LEQVQLVESGGGEVQPGRSLRLSCAASGFIFRSFGMHWVRQAPGKGLEWVAAISYDGTNKDYGDSVKGRFTISRDNSRNMVYLQMNSLRAEDTAVYYCAKEGVIIPAATKDRSNYFDYWGQGTLVTVSSASTKG

SEQ ID NO: 22955 - protein, 134 aa, Artificial Sequence
  source: /note="Description of Artificial Sequence: Synthetic polypeptide"
LEQVQLVESGGGEVQPGRSLRLSCAASGFIFRSFGMHWVRQAPGKGLEWVAAISYDGTNKDYGDSVKGRFTISRDNFRNMVYLQMNSLRAEDTAVYYCAKEGVIIPAATKDRSNYFDYWGQGTLVTVSSASTKG

SEQ ID NO: 22956 - protein, 134 aa, Artificial Sequence
  source: /note="Description of Artificial Sequence: Synthetic polypeptide"
LEQVQLVESGGGEVQPGRSLRLSCAASGFIFRSFGMHWVRQAPGKGLEWVAATSYDGTNKDYGDSVKGRFTISRDNSRNMVYLQMNSLRAEDTAVYYCAKEGVIIPAATKDRSNYFDYWGQGTLVTVSSASTKG

SEQ ID NO: 22957 - protein, 134 aa, Artificial Sequence
  source: /note="Description of Artificial Sequence: Synthetic polypeptide"
LEEVQLVESGGGEVQPGRSLRLSCAASGFIFRSFGMHWVRQAPGKGLEWVAAISYDGTNKDYGDSVKGRFTISRDNSRNMVYLQMNSLRAEDTAVYYCAKEGVIIPAATKDRSNYFDYWGQGTLVTVSSASTKG

SEQ ID NO: 22958 - protein, 134 aa, Artificial Sequence
  source: /note="Description of Artificial Sequence: Synthetic polypeptide"
LEEVQLVESGGGEVQPGRSLRLSCAASGFIFRSFGMHWVRQAPGKGLEWVAAISYDGTNKDYGDSVKGRFTISRDNSRNMVYLQMNSLRAEDTAVYYCAKEGVIIPAATKDRSNYFDYWGQGTLVTVSSASAKG

SEQ ID NO: 22959 - protein, 134 aa, Artificial Sequence
  source: /note="Description of Artificial Sequence: Synthetic polypeptide"
LEQVQLVESGGGEVQPGRSLRLSCAASGFIFRSFGMHWVRQAPGKGLEWVAAISYDGTNKDYGDSVKGRFTISRDNSRNVVYLQMNSLRAEDTAVYYCAKEGVIIPAATKDRSNYFDYWGQGTLVTVSSASTKG

SEQ ID NO: 22960 - protein, 134 aa, Artificial Sequence
  source: /note="Description of Artificial Sequence: Synthetic polypeptide"
LEQVQLVESGGGVVQPGMSLRLSCAASGFIFSSYGMHWVRQAPGKGLEWVAVIPYDGTNKYYADSVKGRFTISRDNSKNTVYLQMNSLRAEDTAVYYCAKEGVIIPAATNDRSNYFDYWGQGTLVTVSSASTKG

SEQ ID NO: 22961 - protein, 134 aa, Artificial Sequence
  source: /note="Description of Artificial Sequence: Synthetic polypeptide"
  MOD_RES (40)..(40): Any amino acid
  MOD_RES (98)..(98): Any amino acid
  MOD_RES (107)..(107): Any amino acid
LEEVQLLESGGGVVQPGTSLRLSCAASGFIFSSYGMHWVXQAPGKGLEWVAVIPYDGTNKYYADSVKGRFTISRDNSKNTVYLQMNSLRAEDTAVYYXAKEGVIIPXSTNDRSNYFDYWGQGTLVTVSSASTKG

SEQ ID NO: 22962 - protein, 134 aa, Artificial Sequence
  source: /note="Description of Artificial Sequence: Synthetic polypeptide"
LEQVQLVESGGGVVQPGRSLRLSCAASGFIFSSYGIHWVRQAPGKGLEWVALISYDGSNKYYADSVKGRFTISRDNSKNTLYLQMNSLRAEDTAVYYCAKEGVIIPAATNDRSNYFDYWGQGTLVTVSSASTKG

SEQ ID NO: 22963 - protein, 134 aa, Artificial Sequence
  source: /note="Description of Artificial Sequence: Synthetic polypeptide"
  MOD_RES (81)..(81): Any amino acid
  MOD_RES (110)..(110): Any amino acid
LEQVQLVESGGGVVQPGRSLRLSCAASGFIFSSYGIHWVRQAPGKGLEWVALISYDGSNKYYADSVKGRFTISRDNSKNTXYLQMNSLRAEDTAVYYCAKEGVIIPAATXDRSNYFDYWGQGTLVTVSSASTKG

SEQ ID NO: 22964 - protein, 135 aa, Artificial Sequence
  source: /note="Description of Artificial Sequence: Synthetic polypeptide"
LEEVQLVESGGGVVQPGRSLRLSCAASRFIFSSYGMHWVRQAPGKGLEWVAVISYDGSNKHYADSVKGRFTISRDNSKNTLYLQMNSLRAEDTAVYYCAKNRVIVPARNVDYIYYGMDVWGQGTTVTVSSASTKG

SEQ ID NO: 22965 - protein, 135 aa, Artificial Sequence
  source: /note="Description of Artificial Sequence: Synthetic polypeptide"
LEEVQLVESGGGVVQPGRSLRLSCAASRFIFSSYGMHWVRQAPGKGLEWVAVISYDGSNKHYADSVKGRFTISRDNSKNTLYLQMNSLRAEDTAVYYCAKNRVIVPARNVDYIYYGMDAWGQGTTVTVSSASTKG

SEQ ID NO: 22966 - protein, 135 aa, Artificial Sequence
  source: /note="Description of Artificial Sequence: Synthetic polypeptide"
LEEVQLVESGGGVVQPGRSLRLSCVGSGLIFSSYGMHWVRQAPGKGLEWVALISYDGSKKYYADSVKGRFTISRDNSKNTLYLQMNSLRATDTAVYFCAKDRVIVPAANDYYFYYGMDVWGQGTTVTVSSASTKG

SEQ ID NO: 22967 - protein, 135 aa, Artificial Sequence
  source: /note="Description of Artificial Sequence: Synthetic polypeptide"
  MOD_RES (26)..(26): Any amino acid
LEEVQLVESGGGVVQPGRSLRLSCAXSGFIFSSYGLHWVRQAPGKGLEWVAFISYDGSKKNYADSVKGRFIISRDNSKNTLYLQMNSLRAEDTAVYYCAKDRVIVPAANKYYYYYGMDVWGQGTTVTVSSASTKG

SEQ ID NO: 22968 - protein, 137 aa, Artificial Sequence
  source: /note="Description of Artificial Sequence: Synthetic polypeptide"
LEQVQLVESGGGVVQPGRSLRVSCAASGFIFRSYGMHWVRQAPGKGLEWVAVISYDGSKKYYGDSVKGRFTISRDNSKNMVYLQMNSLRPEDTAVYYCTKDRIIVPAQNHPTGFYYYGMDVWGQGATVTVSSASTKG

SEQ ID NO: 22969 - protein, 134 aa, Artificial Sequence
  source: /note="Description of Artificial Sequence: Synthetic polypeptide"
  MOD_RES (101)..(101): Any amino acid
LEQVQLVQSGGGVVQPGRSLRLSCAASGFIFGSYAMYWVRQAPGKGLEWVALISYDGSIKYYADSVKGRFTISRDKSNKTLFLQMSSLRPEDTAVYYCARXGVIVPASTRTRYYRMDVWGQGTAVSVSSASTKG

SEQ ID NO: 22970 - protein, 129 aa, Artificial Sequence
  source: /note="Description of Artificial Sequence: Synthetic polypeptide"
LEQVQLVESGGGVVQPGGSLRLSCTASAFTFRDFGMHWVRQAPGKGLEWVALISHDGAQTSYVDSVKGRFTISRDNSKETVFLQMSGLRPEDTAIYYCSKSTAKTYYYYGMDVWGPGTAVTASSASTKG

SEQ ID NO: 22971 - protein, 138 aa, Artificial Sequence
  source: /note="Description of Artificial Sequence: Synthetic polypeptide"
LEQVQLVESGGGVVQPGGSLRLSCAASGFNFDDYAMHWVRQAPGKGREWVSLISEDGYNTYYADSVKGRFTISRDNSKNSLYLQMNNLGPEDTAFYFCAKAGPQRRYYDRLPGYYPSYYFDSWGQGTLVSVSSASTKG

SEQ ID NO: 22972 - protein, 127 aa, Artificial Sequence
  source: /note="Description of Artificial Sequence: Synthetic polypeptide"
LEEVQLLESGGGLVQPGGSLRLSCAASGFTYRSWGMSWVRQAPGKGLEWVSAISASGGSTYYADSVRGRFTISRDNSKNTLYLQMNSLRAEDTAVYYCAKGTLVAPDGSDSWGQGTLVTVSSASTKG

SEQ ID NO: 22973 - protein, 133 aa, Artificial Sequence
  source: /note="Description of Artificial Sequence: Synthetic polypeptide"
LEEVQLVESGGGLVQPGGSLRLSCSASGFTFSNYALTWVRQVPGKGLEWVSGISARSGSTYYADSVKGRFTISRDNSKNTMYVQMDSLRAEDTALYYCARYKLAYCTGDCYPYAFDIWGQGTMVTVSSASTKG

SEQ ID NO: 22974 - protein, 132 aa, Artificial Sequence
  source: /note="Description of Artificial Sequence: Synthetic polypeptide"
LEEVQLVESGGGLAQPGGSLRLPCVVSGYTLRNYAVSWVRQAPGKGLEWVSSVSGSGSDAYYADSVKGRFTISRDISKDTLFLQMNSLRSEDTAVYYCARLYSSGWDFYHYYGMDVWGQGTTVTVSSASTKG

SEQ ID NO: 22975 - protein, 126 aa, Artificial Sequence
  source: /note="Description of Artificial Sequence: Synthetic polypeptide"
LEQMQLVQSGGGLVQPGGSLRLSCAASGFTLSDHYMDWVRQAPGKGLDWVGRTKNKANSYTIEYAASVKGRFTISRDDSKNSFYLQMNSLKAEDTAVYYCARWTSGACNYWGQGTLVTVSSASTKG

SEQ ID NO: 22976 - protein, 124 aa, Artificial Sequence
  source: /note="Description of Artificial Sequence: Synthetic polypeptide"
LEQVQLVQSGAEVKKPGASVKVSCKASGYTFTYYAMHWVRQAPGQRPEWMGWINGGDGKTKYAQKFQGRLAITRDTSARTAYMELISLTSEDTAVYYCAKGAEMTVGSWGPGTLVTVSSASTKG

SEQ ID NO: 22977 - protein, 136 aa, Artificial Sequence
  source: /note="Description of Artificial Sequence: Synthetic polypeptide"
LEQVQLVQSGAEVKKPGASVKVSCKASGYTFTGYYMHWVRQAPGQGLEWMGWINPNTGDTNYAQNFQGWVTMTRDTSIRTAYTELSRLRSDDTAVYYCARDFYSDSSGYYYGYYSYGMDVWGQGTTVTVSSASTKG

SEQ ID NO: 22978 - protein, 134 aa, Artificial Sequence
  source: /note="Description of Artificial Sequence: Synthetic polypeptide"
LEQVQLVQSGAEVKKPGSSVKVSCKASGGNFNTFAISWVRQAPGQGLEWMGRIIPIVGIADYAQKFQGRVTITADKSTSTAYMELSSLRSEDTAVYYCARDESGYTNRGTYYYYGTDVWGQGTTVTVSSASTKG

SEQ ID NO: 22979 - protein, 134 aa, Artificial Sequence
  source: /note="Description of Artificial Sequence: Synthetic polypeptide"
LEQVQLVQSGAEVKKPGSSVKVSCKASGGNFNTFAISWVRQAPGQGLEWMGRIIPIVGIADYAQKFQGRVTITADKSTGTAYMELSSLRSEDTAVYYCARDESGYTNRGTYYYYGTDVWGQGTTVTVSSASTKG

SEQ ID NO: 22980 - protein, 134 aa, Artificial Sequence
  source: /note="Description of Artificial Sequence: Synthetic polypeptide"
LEQMQLVQSGAEVKKPGSSVKVSCKASGGTFSNYATSWVRQAPGQGLEWLGGIIPVFGTANYAQKFQGRVTITADESTSTAYMELNSLTFDDTAVYYCARGGGGWGGRNYYYYYYMDVWGKGTTVTVSSASTKG

SEQ ID NO: 22981 - protein, 128 aa, Artificial Sequence
  source: /note="Description of Artificial Sequence: Synthetic polypeptide"
LEQVQLVQSGAEVKKPGESLKISCKASGYSFTTHWIGWVRQMPGKGLEWMGIIYPDDSDTKYGPSFQGEVTISCDKSINTAYLQWRSLKASDTAMYYCARYRRQLNPYAFDMWGQGTMVTVSLASTKG

SEQ ID NO: 22982 - protein, 110 aa, Artificial Sequence
  source: /note="Description of Artificial Sequence: Synthetic polypeptide"
SREIVMTQSPATLSVSPGDTATLSCRASQSVGSNLAWYQQKPGQAPRLLIHGASTRATGIPGRFSGAGSGTEFTLTISSLQSDDFAVYYCQQYHNWPPLTFGGGTKVEIK

SEQ ID NO: 22983 - protein, 112 aa, Artificial Sequence
  source: /note="Description of Artificial Sequence: Synthetic polypeptide"
SRQSALTQPHSASGPPDQTVTISCSGSSSNIEGNTVNWYQQFPGKAPQLLIYGKDQRPSGVPDRFSASKSGTSASLTISGLQAEDEADYYCAAWDDSLNGWVFGGGTKLTVL

SEQ ID NO: 22984 - protein, 110 aa, Artificial Sequence
  source: /note="Description of Artificial Sequence: Synthetic polypeptide"
SRSYVLTQPPSVSVAPGQTARITCGGNNIGSKSVHWYQQRPGQAPVLVVYDDSDRPSGIPDRFSGSNSGNTATLTISRVEAGDEADYHCQVWDSSSDHVVFGGGTKLTVL

SEQ ID NO: 22985 - protein, 123 aa, Artificial Sequence
  source: /note="Description of Artificial Sequence: Synthetic polypeptide"
EVQLLESGGGLIQPGGSLRLSCAASGFSVGTNSMTWVRQAPGKGLEWVSFISIGGTTYEADSVKGRFTISRDSSKNTLYLQMNTLRAEDTAVYYCASQLWFGELFGHDVFDIWGQGTVVTVSS

SEQ ID NO: 22986 - protein, 129 aa, Artificial Sequence
  source: /note="Description of Artificial Sequence: Synthetic polypeptide"
  MOD_RES (66)..(66): Any amino acid
  MOD_RES (92)..(92): Any amino acid
EVQLVESGGGVVQPGRSLRLSCAASGFTFDRYGMHWVRQAPGKGPEWVAVISHDGSHEEYADSGKXRFTISRDNSKNTLYLQMNSLRAEDTXVYYCAKDGAYYYDYSGYPYDYNGIDVWGQGTTVVVSS

SEQ ID NO: 22987 - protein, 123 aa, Artificial Sequence; identical to SEQ ID NO: 22985
  source: /note="Description of Artificial Sequence: Synthetic polypeptide"

SEQ ID NO: 22988 - protein, 247 aa, Artificial Sequence
  source: /note="Description of Artificial Sequence: Synthetic polypeptide"
DIQMTQTTSSLSASLGDRVTISCRASQDIRNYLNWYQQKPDGTVKLLIYYTSRLQSGVPSRFSGSGSGTDYSLTISNQEQEDIGTYFCQQGNTLPWTFGGGTKLEIKRGGGGSGGGGSGGGGSGGGGSEVQLQQSGPELVKPGASVKISCKDSGYAFSSSWMNWVKQRPGQGLEWIGRIYPGDGDTNYNGKFKGKATLTADKSSSTAYMQLSSLTSVDSAVYFCARSGLLRYAMDYWGQGTSVTVSS

SEQ ID NO: 22989 - protein, 121 aa, Artificial Sequence
  source: /note="Description of Artificial Sequence: Synthetic polypeptide"
EVQLLETGGGLVQPGGSLRLSCAASGFTLRSYHMSWVRRAPGKGLEWVSVIYDGGSTSYADSVKGRFTISRDNSKNTLYLQMTSLRAEDTAVYYCARSGRPLQNYYYMDVWGKGTTVTVSS

SEQ ID NO: 22990 - protein, 121 aa, Artificial Sequence
  source: /note="Description of Artificial Sequence: Synthetic polypeptide"
EVQLVETGGGLVQPGGSLRLSCAASGFTLRSYHMSWVRKAPGKGLEWVSVIYDGGSTSYADSVKGRFTISRDNSKNTLYLQMTSLRAEDTAVYYCARSGRPLQNYYYMDVWGKGTTVTVSS

SEQ ID NO: 22991 - protein, 125 aa, Artificial Sequence
  source: /note="Description of Artificial Sequence: Synthetic polypeptide"
QVQLQESGPGLVKPSQTLSLTCAVSADSITSGYYYWNWIRQPPGKGLEWIAYIDYRGTTTYNPSLKSRVTMSLDTSKNQFSLKLSSVTAADTAVYYCARGGGYPQYGDYAWFDPWGQGTTVTVSS

SEQ ID NO: 22992 - protein, 125 aa, Artificial Sequence
  source: /note="Description of Artificial Sequence: Synthetic polypeptide"
EVQLVETGGGFVKPGGSLRVSCAASGFTFSDYAMHWVRQAPEKGLEWVSTISGSGTSWTYNPSLKSRFTISRDNSKNTLYLQMNSLRAEDTAVYYCARNPMVGVPQFYYYYIDPWGKGTTVTVSS

SEQ ID NO: 22993 - protein, 124 aa, Artificial Sequence
  source: /note="Description of Artificial Sequence: Synthetic polypeptide"
EVQLVETGGGVVQPGRSLRLSCAASGFTFSSYGMHWVRQAPGKGLEWVAFIAFDEGNQHYNPSLRSRFTISRDNSKNTLYLQMNRLRTEDTAVYYCVRGRAAGHPGASYYFDYWGQGTPVTVSS

SEQ ID NO: 22994 - protein, 129 aa, Artificial Sequence
  source: /note="Description of Artificial Sequence: Synthetic polypeptide"
EVQLVESGAEVKKPGESLKISCKASGYSFTNYWIGWVRQMPGKGLEWMGSIYPGDSDTRYSPSFQSQVTISADKSINTAYLQWSSLKASDTAIYYCARVGIYCSGNTCLAPSGYYMDVWGNGTTVTVSS

SEQ ID NO: 22995 - protein, 449 aa, Artificial Sequence
  source: /note="Description of Artificial Sequence: Synthetic polypeptide"
QVQLQQSGPELKKPGASVKVSCKDSGYAFSSSWMNWVRQAPGQGLEWIGRIYPGDGDTNYNGKFQGRVTITADKSSSTAYMELSSLRSEDTAVYFCARSGLLRYAMDYWGQGTLVTVSSASTKGPSVFPLAPSSKSTSGGTAALGCLVKDYFPEPVTVSWNSGALTSGVHTFPAVLQSSGLYSLSSVVTVPSSSLGTQTYICNVNHKPSNTKVDKKVEPKSCDKTHTCPPCPAPELLGGPSVFLFPPKPKDTLMISRTPEVTCVVVDVSHEDPEVKFNWYVDGVEVHNAKTKPREEQYNSTYRVVSVLTVLHQDWLNGKEYKCKVSNKALPAPIEKTISKAKCQPREPQVYTLPPSRDELTKNQVSLTCLVKGFYPSDIAVEWESNGQPENNYKTTPPVLDSDGSFFLYSKLTVDKSRWQQGNVFSCSVMHEALHNHYTQKSLSLSPGK

SEQ ID NO: 22996 - protein, 125 aa, Artificial Sequence
  source: /note="Description of Artificial Sequence: Synthetic polypeptide"
QVQLQESGPGLLKPSETLSLTCAVSGDSISGGYYWSWIRQSPGKGLEWIGLIYGSTADTRYNPSLKGRVTISKDTSKNQLSLQLRSVTAADTAVYYCARSGYNFWSGEYYGLDSWGQGAVVTVSS

SEQ ID NO: 22997 - protein, 103 aa, Artificial Sequence
  source: /note="Description of Artificial Sequence: Synthetic polypeptide"
TQSPSSLSAYVGDKVTITCHASQGINSWLAWYQQKPGKAPKLLIYKASSLQSGVPSRFSGSGSGTDYTLTISSLQSEDFASYYCLQYDSAPLAFGPGTKLDIK

SEQ ID NO: 22998 - protein, 121 aa, Artificial Sequence
  source: /note="Description of Artificial Sequence: Synthetic polypeptide"
  MOD_RES (3)..(3): Any amino acid
  MOD_RES (13)..(13): Any amino acid
  MOD_RES (16)..(16): Any amino acid
  MOD_RES (28)..(28): Any amino acid
  MOD_RES (50)..(51): Any amino acid
  MOD_RES (53)..(53): Any amino acid
  MOD_RES (55)..(56): Any amino acid
  MOD_RES (64)..(65): Any amino acid
  MOD_RES (67)..(67): Any amino acid
  MOD_RES (72)..(72): Any amino acid
  MOD_RES (76)..(76): Any amino acid
  MOD_RES (93)..(93): Any amino acid
  MOD_RES (95)..(95): Any amino acid
  MOD_RES (102)..(102): Any amino acid
  MOD_RES (104)..(104): Any amino acid
  MOD_RES (106)..(108): Any amino acid
  MOD_RES (111)..(111): Any amino acid
  MOD_RES (117)..(117): Any amino acid
LEXSGGGLVKPGXSLXLSCAASGFTFSXYAMHWVRQAPEKGLEWVSTIGXXGXTXXSDSVKGRXXIXRDNSXNTLXLQMNSLRAEDTAVYYCXRXGYCSSTXCXSXXXFDXWGQGTXVTVS

SEQ ID NO: 22999 - protein, 121 aa, Artificial Sequence
  source: /note="Description of Artificial Sequence: Synthetic polypeptide"
LEESGGGLVKPGDSLRLSCAASGFTFSVYAMHWVRQAPEKGLEWVSTIGAGGNTWHSDSVKGRYTIARDNSQNTLSLQMNSLRAEDTAVYYCVRRGYCSSTRCDSNDAFDIWGQGTMVTVS

SEQ ID NO: 23000 - protein, 120 aa, Artificial Sequence
  source: /note="Description of Artificial Sequence: Synthetic polypeptide"
LESGGGLVKPGGSLTLSCAASGFTFSTYAMHWVRQAPEKGLEWVSTIGRSGDTLYSDSVKGRFSISRDNSKNTLYLQMNSLRAEDTAVYYCARKGYCSSTNCQSQYYFDYWGQGTLVTVS

SEQ ID NO: 23001 - protein, 122 aa, Artificial Sequence
  source: /note="Description of Artificial Sequence: Synthetic polypeptide"
PFEVQLEESGGDLVKPGGSLKLSCAASGFTFSDYGMSWIRQTPDRRLEWVATISTGGTYTYYLDSVKGRFTISRDNAKNTLYLQMNSLKSEDTAMYYCSNDDLGQGTSVTVSSAKTTPPSKG

SEQ ID NO: 23002 - protein, 125 aa, Artificial Sequence
  source: /note="Description of Artificial Sequence: Synthetic polypeptide"
PFEVQLEESGPELVKPGASVKVSCKASGYSFTDYNMYWVKQSHGTSLEWIGVIDPNNGVTSYNQKFKDKATLTADKSSSTAFMHLNSLTSEDSAVYYCSRGGLDYWGQGTTLTVSSAKTTPPSKG

SEQ ID NO: 23003 - protein, 134 aa, Artificial Sequence
  source: /note="Description of Artificial Sequence: Synthetic polypeptide"
NSPFEVQLEESGPELVSPGVSVKISCEGSGYTFTDYAMHWVKQSHARGLEWIGVIGSYSGNAHHNLNFKDKATMTVDKSSSTAYMELARLTSDDSAIYYCAYTRTTLWATLGLPEATGLWSLSLQPKRHPHLRA

SEQ ID NO: 23004 - protein, 125 aa, Artificial Sequence
  source: /note="Description of Artificial Sequence: Synthetic polypeptide"
QVQLQESGPGLLKPSETLSLTCAVSGDSISSGYYWSWIRQSPGKGLEWIGHIYGSTADTKYNPSLRSRVTISKDTSKNQLSLQLRSVTAADTAVYYCARSGYNFWSGEYYGLDSWGQGAVVTVSS

SEQ ID NO: 23005 - protein, 125 aa, Artificial Sequence; identical to SEQ ID NO: 22996
  source: /note="Description of Artificial Sequence: Synthetic polypeptide"

SEQ ID NO: 23006 - protein, 125 aa, Artificial Sequence
  source: /note="Description of Artificial Sequence: Synthetic polypeptide"
QVQLQESGPGLLKPSETLSLTCAVSGDSISGGYYWSWIRQSPGKGLEWIGHIYGSTADTRYNPSLKSRVTISKDTSKNQLSLQLRSVTAADTAVYYCARSGYNFWSGEYYGLDLWGQGAVVTVSS

SEQ ID NO: 23007 - protein, 125 aa, Artificial Sequence
  source: /note="Description of Artificial Sequence: Synthetic polypeptide"
QVQLQESGPGLLKPSETLSLTCAVSGDSISGGYYWSWIRQSPGKGLEWIGHIYGSTADTRYNPSLKSRVTISKDTSKNQLSLQLRSVTAADTAVYYCARSGYNFWSGEYYGLDSWGQGAVVTVSS

SEQ ID NO: 23008 - protein, 125 aa, Artificial Sequence
  source: /note="Description of Artificial Sequence: Synthetic polypeptide"
QVQLQESGPGLVKPSETLSLTCTVSGDSISSGYYWSWIRQPPGKGLEWIGHIYGSTADTNYNPSLRSRVTISKDTSKNQFSLQLSSVTAADTAVYYCARSGYNFWSGEYYGLDSWGQGTLVTVSS

SEQ ID NO: 23009 - protein, 125 aa, Artificial Sequence
  source: /note="Description of Artificial Sequence: Synthetic polypeptide"
QVQLQESGPGLVKPSETLSLTCTVSGDSISGGYYWSWIRQPPGKGLEWIGLIYGSTADTNYNPSLKGRVTISKDTSKNQFSLQLSSVTAADTAVYYCARSGYNFWSGEYYGLDSWGQGTLVTVSS

SEQ ID NO: 23010 - protein, 125 aa, Artificial Sequence
  source: /note="Description of Artificial Sequence: Synthetic polypeptide"
QVQLQESGPGLVKPSETLSLTCTVSGDSISGGYYWSWIRQPPGKGLEWIGHIYGSTADTNYNPSLKSRVTISKDTSKNQFSLQLSSVTAADTAVYYCARSGYNFWSGEYYGLDLWGQGTLVTVSS

SEQ ID NO: 23011 - protein, 125 aa, Artificial Sequence
  source: /note="Description of Artificial Sequence: Synthetic polypeptide"
QVQLQESGPGLVKPSETLSLTCTVSGDSISGGYYWSWIRQPPGKGLEWIGHIYGSTADTNYNPSLKSRVTISKDTSKNQFSLQLSSVTAADTAVYYCARSGYNFWSGEYYGLDSWGQGTLVTVSS

SEQ ID NO: 23012 - protein, 123 aa, Artificial Sequence
  source: /note="Description of Artificial Sequence: Synthetic polypeptide"
QVQLVESGGGVVQPGRSLRLSCAASGFTFSYYGMHWVRQAPGKGLEWVAVIWHDESIVYYADSVKGRFTISRDNSKNTLYLQMNSLRAEDTAVYYCTRDPGDPYYYYYGLDVWGQGTTVTVSS

SEQ ID NO: 23013 - protein, 118 aa, Artificial Sequence
  source: /note="Description of Artificial Sequence: Synthetic polypeptide"
QVQLVESGGGVVQPGRSLRLSCAASGFTFSSYGMHWVRQAPGKGLEWVAVIWNDGSNKYYADSVKGRFTISRDNSKNTLYLQMNSLRAEDTAVYYCARENWGEYFDYWGQGTLVTVSS

SEQ ID NO: 23014 - protein, 129 aa, Artificial Sequence
  source: /note="Description of Artificial Sequence: Synthetic polypeptide"
EVHLVESGGGLVQPGGSLRLSCAASGFTFSSYWMSWVRQAPGKGLEWVANINQYGSEKYYVDSVKGRFTISRDNAKNSLYLQMNSLRAEDTAVYYCARDSPYYYGSGSYYRGYWYFDLWGRGTLVTVSS

SEQ ID NO: 23015 - protein, 121 aa, Artificial Sequence
  source: /note="Description of Artificial Sequence: Synthetic polypeptide"
QVQLVESGGGVVQPGRSLRLSCAASGFTFSSYGMHWVRQAPGKGLEWVAVIWYDGSNKYYADSVKGRFTISRDNSKNTLYLQMNSLRAEDTAVYYCAREGNRSHYIPFAYWGQGTLVTVSS

SEQ ID NO: 23016 - protein, 118 aa, Artificial Sequence
  source: /note="Description of Artificial Sequence: Synthetic polypeptide"
QVKLQESGAELVRPGASVKLSCKTSGYIFTNYWIHWVKQRSGQGLERIARIYPGTGGTYYNEKFKGKATLTADKSSSTAYMQLSSLKSEDSAVYFCARWDLHFSMDYWGQGTTVTVSS

SEQ ID NO: 23017 - protein, 115 aa, Artificial Sequence
  source: /note="Description of Artificial Sequence: Synthetic polypeptide"
EVKLQESGGGLVQPGGSMKLSCAASGFSFSDAWMDWVRQSPEKGLEWVAEIRSKAKNHATFYAESVKGRFTISRDDSKSSVYLQMNSLRGEDTGIYYCTAGTGVWGQGTTVTVSS

SEQ ID NO: 23018 - protein, 112 aa, Artificial Sequence
  source: /note="Description of Artificial Sequence: Synthetic polypeptide"
EVQLQQSGAELVKPGASVKLSCTASGFNIKDSFIHWVKQRPEQGLDWIGRIDPANGNTKYDPKFQGKATLTADTSSNTAYLQLSSLTSEDTAVYYCTRLDYWGQGTALTVSS

SEQ ID NO: 23019 - protein, 247 aa, Artificial Sequence
  source: /note="Description of Artificial Sequence: Synthetic polypeptide"
DIQMTQTTSSLSASLGDRVTVSCRASQDIRNYLNWYQQKPDGTVKFLIYYTSRLQPGVPSRFSGSGSGTDYSLTINNLEQEDIGTYFCQQGNTPPWTFGGGTKLEIKRGGGGSDGGGSGGGGSGGGGSEVQLQQSGPELVKPGASVKISCKDSGYAFNSSWMNWVKQRPGQGLEWIGRIYPGDGDSNYNGKFEGKAILTADKSSSTAYMQLSSLTSVDSAVYFCARSGLLRYAMDYWGQGTSVTVSS

SEQ ID NO: 23020 - protein, 121 aa, Artificial Sequence
  source: /note="Description of Artificial Sequence: Synthetic polypeptide"
QVQLQQSGGAVVQPGGSLRLSCAASGFTLDDYAMHWVRQVSGKGLEWVCLVSWDGHATHYADSVKGRFTISRDNSRNSLFLQMDGLRPEDTALYYCVKAFSSGWSDAFHFWGQGTLVTVSS

SEQ ID NO: 23021 - protein, 125 aa, Artificial Sequence
  source: /note="Description of Artificial Sequence: Synthetic polypeptide"
QVQLQQSGGGLVQPGGSLKLSCAASGFTFSDSAIHWVRQASGKGLEWVGRIRSKANGYATAYTASVKGRFTISRDDSLNTAYLQMNSLKTEDTAVYYCTRHDSTTWFLRDVFDIWGQGTKVTVSS

SEQ ID NO: 23022 - protein, 126 aa, Artificial Sequence
  source: /note="Description of Artificial Sequence: Synthetic polypeptide"
QVQLLESGPGLVKPSETLSLTCTVSGASISTKSYSWGWIRQPPGKGLEWIGIAYNSGRTYFNPSLKSRVTISVDTSKNRFSLQLTSVTAADTSAYFCVSSRITTFGVVTHYGMDVWGRGTTVTVSS

SEQ ID NO: 23023 - protein, 125 aa, Artificial Sequence
  source: /note="Description of Artificial Sequence: Synthetic polypeptide"
QVQLQQSGGGLVKPGGSLRLSCTASGFIFSDYYMSWIRQAPGKGLEWVSYMKNSDGSKYYADSVKGRFTISRDNAKNSLYLQMNSLRAGDTAVYYCVRDLDYYDRSGYHRWFDPWGQGTLVTVSS

SEQ ID NO: 23024 - protein, 139 aa, Artificial Sequence
  source: /note="Description of Artificial Sequence: Synthetic polypeptide"
PLGYSSLNQGESSYCALSLLSVGKIHMSTWIRCVWLTRGSVQVISRGSGPSKFGTDSKDNSKSQVFLKMNSLQTDDTAMYYCARDYYGNYVWYFDVWGAGTTVTVSSAKTTPPSVYPLAPGCGDTTGSSVTLGCLVKGY

SEQ ID NO: 23025 - protein, 129 aa, Artificial Sequence
  source: /note="Description of Artificial Sequence: Synthetic polypeptide"
FTFTNYYMSWVRQPPGKALEWLGFIINKANGYTTEYSASVKGRFTISRDNSQSILYLQMNTLRAEDSATYYCARAYYGNYPAWFAYWGQGTLVTVSAAKTTAPSVYQLAPVCGDTTGSSVTLGCLVKGY

SEQ ID NO: 23026 - protein, 143 aa, Artificial Sequence
  source: /note="Description of Artificial Sequence: Synthetic polypeptide"
GGLVKPGGSLKLSCAASGFTFSSYAMSWVRQTPEKRLEWVATISSGGSYTYYPDSVKGRFTISRDNAKNTLYLQMSSLRSEDTAMYYCARQGLRRYAMDYWGQGTSVTVSSAKTTPPSVYPLAPGFGDTTGSSVTLGCLVKGY

SEQ ID NO: 23027 - protein, 142 aa, Artificial Sequence
  source: /note="Description of Artificial Sequence: Synthetic polypeptide"
GGLVKPAGSLKLSCAASGFTFSSYAMSWVRQTPEKRLEWVATISSGGSYTYYPDSVKGRFTISIDNAKNTLYLQMSSLRSEDTAMYYCARQGLRRVAMDYWGQGTSVTVSSAKTTAPSVYQLAPGFGDTTGSSVTLGCLVKG

SEQ ID NO: 23028 - protein, 141 aa, Artificial Sequence
  source: /note="Description of Artificial Sequence: Synthetic polypeptide"
GGLVKPWRSLKFSCAASGFTFSSYAMPWVRQTPEKRLEWVATIRSGGSYTYYPDSVKGRFTISRDNAKNTLYLQMSSLRSEDTAMYYCPIYDGHAMDYWGQGTSVTVSSATTTAPSVYPLVPGCADTTGSSVTLGCLVKGY

SEQ ID NO: 23029 - protein, 141 aa, Artificial Sequence; identical to SEQ ID NO: 23028
  source: /note="Description of Artificial Sequence: Synthetic polypeptide"

SEQ ID NO: 23030 - protein, 145 aa, Artificial Sequence
  source: /note="Description of Artificial Sequence: Synthetic polypeptide"
GADSLGVFKTPFGSGSSYLGKMLSSWCVARQTPDKRLEWVATISSGGSYTYYPDSVKGRFTISRDNAKNTLYLQMSSLKSEDTAMYYCARRGITTAIYAMDYWGQGTSVTVSSESQSFPNVFPLVSCESPLSDKNLVAMGCLARD

SEQ ID NO: 23031 - protein, 142 aa, Artificial Sequence
  source: /note="Description of Artificial Sequence: Synthetic polypeptide"
AELARPGPSVKMSCKASGYTFTRYTMHWVKQRPGQGLEWIGYINPSSGYTNYNQKFKDKATLTADKSSRTAYMQLSSLTSEDSAVYYCARVTARYAMDYWGQGTSVTVSSAKTTAPSVYPLAPVCGDTTGSSVTLGCLVKGY

SEQ ID NO: 23032 - protein, 141 aa, Artificial Sequence
  source: /note="Description of Artificial Sequence: Synthetic polypeptide"
ELGASVKLSCKASGYTFTSYWMHWVKLRHGQGLEWIGNIYPGSGSTNYDEKFKDKGTLTVDTSSSTAYMHLSSLTSEDSAVYYCTRKGRGSGYDTMDYWGQGTSVTVSSAKTTAPSVYPLAPVCGDTTGSSVTVGCLVKGY

SEQ ID NO: 23033 - protein, 146 aa, Artificial Sequence
  source: /note="Description of Artificial Sequence: Synthetic polypeptide"
GAELAKPGASVKMSCKASGYTFTSYWMHWVKQRPGQGLEWIGNINPSPGYTEYNQKFKDKGTLTADKSSSTAYMQLSSLTSEDSAVYYCARIGSGYVGYAMDYWGQGTSVTVSSESQSFPNVFPLVSCESPLSEKQLVAMGCLARD

SEQ ID NO: 23034 - protein, 121 aa, Artificial Sequence
  source: /note="Description of Artificial Sequence: Synthetic polypeptide"
EGAAARVWGRLGKAWGFPETLVCSLWIHLSADYAMHWVRQAPEKGLEWVSSIIDGGAGTWSPDSVKGRFTISRDNAKNTLYLQMNSLRAEDTAVYYCVRGVSGSYYVDHEYWGQGTLVTVS

SEQ ID NO: 23035 - protein, 121 aa, Artificial Sequence
  source: /note="Description of Artificial Sequence: Synthetic polypeptide"
EVQLLESGAEVKKPGSSVKVSCKVSGGTFSSFGISWVRQAPGQGLEWMGLIIPILGTANYAQKFQGRLTITADESTSTVYMELSSLRSEDTAVYYCATDPYHNWGEWDLDYWGQGTLVTVS

SEQ ID NO: 23036 - protein, 129 aa, Artificial Sequence
  source: /note="Description of Artificial Sequence: Synthetic polypeptide"
EVQLLEESGGGLVKPGGSLRLSCAASGFTFSNYSMNWVRQAPGKGLEWVGFIRTKAKGGTTEYAASVKGRFTISRDDSKSIAYLQMNSLKTEDTAVYYCTPAGIIIRLVTPIYYYYMDVWGKGTTVTVS

SEQ ID NO: 23037 - protein, 123 aa, Artificial Sequence
  source: /note="Description of Artificial Sequence: Synthetic polypeptide"
EVQLLEESGGGVVQPGRSLRLSCTASGFTFSNYGMQWVRQAPGKRLEWVAFISYSGSNKQYADSVRGRFTISRDNSKNILYLQMNSLRSEDTAVYYCARDSHYLDYLPDAFDYWGQGTVVTVS

SEQ ID NO: 23038 - protein, 126 aa, Artificial Sequence
  source: /note="Description of Artificial Sequence: Synthetic polypeptide"
AEVQLLESGGGLVKPGGSLRLSCAASGFTFSSYAMHWVRQTPEKGLEWVSTISSIGGSTWYSDSVKGRFTISRDNSKNTLFLHMKSLRAEDTAVYYCARDFFSQVGWSTPNNWFDPWGQGTLVTVS

SEQ ID NO: 23039 - protein, 121 aa, Artificial Sequence
  source: /note="Description of Artificial Sequence: Synthetic polypeptide"
AEVQLLESGGGLVKPGGSLRLTCAASGFTFSSYAMHWVRQAPEKGLEWVSSISGSGGGTWYADSVKGRFTISRDNSRNTLYLQLNSLRAEDTAVYYCARPKYTGYENPFDYWGQGTLVTVS

SEQ ID NO: 23040 - protein, 449 aa, Artificial Sequence
  source: /note="Description of Artificial Sequence: Synthetic polypeptide"
QVQLQQSGPELKKPGASVKVSCKDSGYAFSSSWMNWVRQAPGQGLEWIGRIYPGDGDTNYNGKFQGRVTITADKSSSTAYMELSSLRSEDTAVYFCARSGLLRYAMDYWGQGTLVTVSSASTKGPSVFPLAPSSKSTSGGTAALGCLVKDYFPEPVTVSWNSGALTSGVHTFPAVLQSSGLYSLSSVVTVPSSSLGTQTYICNVNHKPSNTKVDKKVEPKSCDKTHTCPPCPAPELLGGPSVFLFPPKPKDTLMISRTPEVTCVVVDVSHEDPEVKFNWYVDGVEVHNAKTKPREEQYNSTYRVVSVLTVLHQDWLNGKEYKCKVSNKALPAPIEKTISKAKGQPREPQVYTLPPSRDELTKNQVSLTCLVKGFYPSDIAVEWESNGQPENNYKTTPPVLDSDGSFFLYSKLTVDKSRWQQGNVFSCSVMHEALHNHYTQKSLSLSPGK

SEQ ID NO: 23041 - protein, 162 aa, Artificial Sequence
  source: /note="Description of Artificial Sequence: Synthetic polypeptide"
SRAIQLTSPSTLSASVGDRVTITCRASQSIGGWLAWYQQKPGKAPNLLIYKASSLESGVPSRFSGSGSGTEFTLTISSLQPDDFATYHCQQYSGNWTFGQGTKVEIKRTVAAPSVFIFPPSDEQLKSGTASVVCLLNNFYPREAKVQWKVDNALQSGNSQES

SEQ ID NO: 23042 - protein, 163 aa, Artificial Sequence
  source: /note="Description of Artificial Sequence: Synthetic polypeptide"
SRDIQMTQSPSSLSASVGDRVTLTCRASQGVRNALVWYQKPGKAPERLIYAASILQSGVPSRFSGSGSGTEFTLTIGGLQPEDFATYYCLQHNSYPWTFGQGTKVEIKRTVAAPSVFIFPPSDEQLKSGTASVVCLLNNFYPREAKVQWKVDNALQSGNSQES

SEQ ID NO: 23043 - protein, 164 aa, Artificial Sequence
  source: /note="Description of Artificial Sequence: Synthetic polypeptide"
SRDIQMTQSPSSLSASVGDRVTITCQASQDISNYLNWYQQKPGKAPKLLIYDASNLETGVPSRFSGSGSGTDFTFTISSLQPEDIATYYCQQYDNLGVTFGPGTKVDIKRTVAAPSVFIFPPSDEQLKSGTASVVCLLNNFYPREAKVQWKVDNALQSGNSQES

SEQ ID NO: 23044 - protein, 166 aa, Artificial Sequence
  source: /note="Description of Artificial Sequence: Synthetic polypeptide"
SRVIWMTQSPSSLSASVGDRVTITCQASQDITNYLNWYQQKPGKAPNLVIYDTSNLATGVPSRFSGAGSGTDFTFTISSLQPEDIGTYYCQSYDKFPPVFNFGPGTTVDIKRTVAAPSVFIFPPSDEQLKSGTASVVCLLNNFYPREAKVQWKVDNALQSGNSQES

SEQ ID NO: 23045 - protein, 164 aa, Artificial Sequence
  source: /note="Description of Artificial Sequence: Synthetic polypeptide"
SRDIQLTQSPSSLSASVGDRVTITCRASSISSYLNWYQQKPGKAPKLLIYAASNLQSGVPSRFSGSGSGTDFTLTISSLQPEDFATYYCQLSYSALGFTFGPGTTVDIKRTVAAPSVFIFPPSDEQLKSGTASVVCLLNNFYPREAKVQWKVDNALQSGNSQES

SEQ ID NO: 23046 - protein, 164 aa, Artificial Sequence
  source: /note="Description of Artificial Sequence: Synthetic polypeptide"
SRDIQLAQSPSSLSASVGDRVTITCQASQGISNFLNWYQQRPGKAPKLLIYDASSLETGVPSRFSGSGSGTDFTFTISSLQPEDFATYYCQQYDDLPLTFGGGTKVEIRGTVAAPSVFIFPPSDEQLKSGTASVVCLLNNFYPREAKVQWKVDNALQSGNSQES

SEQ ID NO: 23047 - protein, 165 aa, Artificial Sequence
  source: /note="Description of Artificial Sequence: Synthetic polypeptide"
SREIVMTQSPDTLSVSPGERATLSCRASQSVSSNLAWFQQRPGQAPRLLIYGASTRATGVPARFSGSGSGTEFTLTISSLQSEDFAVYYCQQYDNWPPWTFGQGTKVEVKRTVAAPSVFIFPPSDEQLKSGTASVVCLLNNFYPREAKVQWKVDNALQSGNSQES

SEQ ID NO: 23048 - protein, 165 aa, Artificial Sequence
  source: /note="Description of Artificial Sequence: Synthetic polypeptide"
SRDIVMTQSPDSLAVSLGERATINCKSSRSILFSSNNKNFLAWQQRPGQPPKLLVSWASTRESGVPDRFSGSGSGTDFTLTIDSLQAEDVAVYYCQQYYSTPHTFGQGTKLEIKGTVAAPSVFIFPPSDEQLKSGTASVVCLLNNFYPREAKVQWKVDNALQSGN

SEQ ID NO: 23049 - protein, 114 aa, Artificial Sequence
  source: /note="Description of Artificial Sequence: Synthetic polypeptide"
SREIVMTQSPDTLSVSPGERATLSCRASQSVSSNLAWFQQRPGQAPRLLIYGASTRATGVPARFSGSGSGTEFTLTISSLQSEDFAVYYCQQYDNWPPWTFGQGTKVEVKRTVA

SEQ ID NO: 23050 - protein, 113 aa, Artificial Sequence
  source: /note="Description of Artificial Sequence: Synthetic polypeptide"
SREIVLTQSPATLSVSPGERATLSCRASQSVRTNVAWYQHKPGQAPRLLIYAASTRATDIPARFSGSGSGTEFTLTLSSLQSEDFALYFCQHYDSWPVTFGQGTRLEIKRTVA

SEQ ID NO: 23051 - protein, 109 aa, Artificial Sequence
  source: /note="Description of Artificial Sequence: Synthetic polypeptide"
  MOD_RES (5)..(5): Any amino acid
  MOD_RES (15)..(15): Any amino acid
  MOD_RES (17)..(17): Any amino acid
  MOD_RES (26)..(26): Any amino acid
  MOD_RES (33)..(34): Any amino acid
  MOD_RES (65)..(65): Any amino acid
  MOD_RES (87)..(87): Any amino acid
  MOD_RES (96)..(97): Any amino acid
  MOD_RES (99)..(99): Any amino acid
SRDIXMTQSPSTLSXSXGERATLSCXASQSVSXXLAWYQQKPGQAPRLLIYGASTRATGIPSRFXGSGSGTEFTLTISSLQSEDFAXYYCQQYKKXXPXTFGQGTKLEI

SEQ ID NO: 23052 - protein, 112 aa, Artificial Sequence
  source: /note="Description of Artificial Sequence: Synthetic polypeptide"
SRAIQLTQSPSTLSASVGDRVTITCRASQSIGGWLAWYQQKPGKAPNLLIYKASSLESGVPSRFSGSGSGTEFTLTISSLQPDDFATYHCQQYSGNWTFGQGTKVEIKRTVA

SEQ ID NO: 23053 - protein, 106 aa, Artificial Sequence
  source: /note="Description of Artificial Sequence: Synthetic polypeptide"
TQSPSSLSASVGDRVTITCRASQSIGGWLAWYQQKPGKAPNLLIYKASSLESGVPSRFSGSGSGTEFTLTISSLQPDDFATYHCQQYSGNWTFGQGTKVEIKRTVA

SEQ ID NO: 23054 - protein, 113 aa, Artificial Sequence
  source: /note="Description of Artificial Sequence: Synthetic polypeptide"
SRDIQMTQSPSTLSASVGDRVTITCRASQDITRYLAWYQQKPGKAPKLLIYRASILESGVSSRFSGSGSGTEFTLTISSLQPDDFATYYCQQFNDYPATFGQGTKVEIKRTVA

SEQ ID NO: 23055 - protein, 113 aa, Artificial Sequence
  source: /note="Description of Artificial Sequence: Synthetic polypeptide"
SRDIQMTQSPSTLSASVGDRVTITCRASQDITRYLAWHQQKPGKAPKLLIYRASILESGVSSRFSGSGSGTEFTLTISSLQPDDFATYYCRQFNDYPATFGQGTKVEIKRTVA

SEQ ID NO: 23056 - protein, 113 aa, Artificial Sequence
  source: /note="Description of Artificial Sequence: Synthetic polypeptide"
SRDIQLTQSPSTLSASVGDRVTITCRASQDITRYLAWYQQKPGKAPKLLIYRASILESGVSSRFSGSGSGTEFTLTISSLQPDDFATYYCQQFNDYPATFGQGTKVEIKRTVA

SEQ ID NO: 23057 - protein, 113 aa, Artificial Sequence
  source: /note="Description of Artificial Sequence: Synthetic polypeptide"
SRDIQMTQSPSSLSASVGDRVTLTCRASQGVRNALVWYQQKPGKAPERLIYAASILQSGVPSRFSGSGSGTEFTLTIGGLQPEDFATYYCLQHNSYPWTFGQGTKVEIKRTVA

SEQ ID NO: 23058 - protein, 113 aa, Artificial Sequence
  source: /note="Description of Artificial Sequence: Synthetic polypeptide"
SRDIQLTQSPSSVSASVGDRVTITCRASQDISTWLAWYQQKAGKAPRLLIYAASSLQSGVPSRFSGSGSGTEFSLTITNLQPEDFATYYCQQANAVPPAFGGGTKVEMNRTVA

SEQ ID NO: 23059 - protein, 113 aa, Artificial Sequence
  source: /note="Description of Artificial Sequence: Synthetic polypeptide"
SRDIQMTQSPSSLSASVGDRVTITCQASQDISNYLNWYQQKPGKAPKLLIYDASNLETGVPSRFSGSGSGTDFTFTISSLQPEDIATYYCQQYDNLGVTFGPGTKVDIKRTVA

SEQ ID NO: 23060 - protein, 115 aa, Artificial Sequence
  source: /note="Description of Artificial Sequence: Synthetic polypeptide"
SRVIWMTQSPSSLSASVGDRVTITCQASQDITNYLNWYQQKPGKAPNLVIYDTSNLATGVPSRFSGAGSGTDFTFTISSLQPEDIGTYYCQSYDKFPPVFNFGPGTTVDIKRTVA

SEQ ID NO: 23061 - protein, 112 aa, Artificial Sequence
  source: /note="Description of Artificial Sequence: Synthetic polypeptide"
SRDIQLTQSPSSLSASVGDRVTITCQASQDIANYLNWYQQKPGKAPKLLIYDVSNLEPGVPSRFSGSGSGTDFTFTINSLQPEDVATYYCQQYHNLITFGQGTRLEIKRTVA

SEQ ID NO: 23062 - protein, 113 aa, Artificial Sequence
  source: /note="Description of Artificial Sequence: Synthetic polypeptide"
SRAIQMTQSPSSLSASVGDRVTITCQASQDINNHLNWYQHKPGKAPKVLIYDVSNLETGVPSRFSGSGSGTDFTLSISSLQPEDVATYFCHQYESVRPTFGQGTKLEIKRTVA

SEQ ID NO: 23063 - protein, 113 aa, Artificial Sequence
  source: /note="Description of Artificial Sequence: Synthetic polypeptide"
SRDIQLAQSPSSLSASVGDRVTITCQASQGISNFLNWYQQRPGKAPKLLIYDASSLETGVPSRFSGSGSGTDFTFTISSLQPEDFATYYCQQYDDLPLTFGGGTKVEIRGTVA

SEQ ID NO: 23064 - protein, 114 aa, Artificial Sequence
  source: /note="Description of Artificial Sequence: Synthetic polypeptide"
SRDIQLTQSPSSLSASVGDRVTITCRASQSISSYLNWYQQKPGKAPKLLIYAASNLQSGVPSRFSGSGSGTDFTLTISSLQPEDFATYYCQLSYSALGFTFGPGTTVDIKRTVA

SEQ ID NO: 23065 - protein, 113 aa, Artificial Sequence
  source: /note="Description of Artificial Sequence: Synthetic polypeptide"
SRAIQMTQSPSSLSASVGDRVTITCRASQSISNYLNWYQQKPGKAPSLLIYAASRLQSGVPSRFSGSGSGTDFTLTISSLQPEDFATYYCQQSSRTSLTFGGGTKVEIKRTVA

SEQ ID NO: 23066 - protein, 113 aa, Artificial Sequence
  source: /note="Description of Artificial Sequence: Synthetic polypeptide"
SRDIQMTQSPSSLSASVGDTVTITCRASQTISGSLNWYQQKPGKAPKLLIYGASTLYSGVPSRFSGGASGTDFTLTIRSLQPEDFATYYCQQSSSNTVTFGPGTKVDIKRTVA

SEQ ID NO: 23067 - protein, 113 aa, Artificial Sequence
  source: /note="Description of Artificial Sequence: Synthetic polypeptide"
SRDIQMTQSPSSLSASVGDRVTITCRASQGISNYLNWYQQKPGRAPNLLIYGASTLLRGVPARFSGSGSGTDFTLNISNLQPEDFATYYCQQSDSIPMTFGQGTRLDIKRTVA

SEQ ID NO: 23068 - protein, 113 aa, Artificial Sequence
  source: /note="Description of Artificial Sequence: Synthetic polypeptide"
SRDIVMTQSPSSLSASVGDRVTITCRASQDIRNYLNWYQYRPGRAPNLLIYGASTLYRGAPARFTGSGSGTDFTLNITNLQPEDFATYYCQQSDSTPMTFGQGTRLDIERTVA

SEQ ID NO: 23069 - protein, 113 aa, Artificial Sequence
  source: /note="Description of Artificial Sequence: Synthetic polypeptide"
SRDIQMTQSPSSLSTSVGDRVTITCRASQDITKNLNWYQQKPGRAPNLLIYGASTLLRGVPARFSGSGSGTDFTLSISSLQPEDFATYYCQQSDSTPMTFGQGTRLDIKRTVA

SEQ ID NO: 23070 - protein, 113 aa, Artificial Sequence
  source: /note="Description of Artificial Sequence: Synthetic polypeptide"
MTQSPLSLPVTPGEPASISCRSSQSLLHSNGYNYLDWYLQKPGQSPQLLIYMGSSRASGVPDRFSGSGSGTDFTLKISRVEAEDVGVYYCMQPLQTPYTFGQGTKLEIKRTVA

SEQ ID NO: 23071 - protein, 104 aa, Artificial Sequence
  source: /note="Description of Artificial Sequence: Synthetic polypeptide"
MTQSPLSLPVTPGEPASISCRSSQSLLHSNGYNYVDWYLQKPGQSPQLLIYMGSSRASGVPDRFSGSGSGSDFTLKISRVEAEDVGVYYCMQPLQTPYTFGQGT

SEQ ID NO: 23072 - protein, 165 aa, Artificial Sequence
  source: /note="Description of Artificial Sequence: Synthetic polypeptide"
SRSYVLTQPPSASGTPGQRVTISCSGTSSNIGRNRVNWYQQLPGTAPKLLIYSNNQRPSGVLDRFSGSKSGTSASLAISGLQSEDEGDYYCAAWDDSLHGGVFGGGTQLTVLGSKAAPSVTLFPPSSEELQANKATLVCLVSDFYPGALTVAWKADSSPVKAGVE

SEQ ID NO: 23073 - protein, 166 aa, Artificial Sequence
  source: /note="Description of Artificial Sequence: Synthetic polypeptide"
SRQSVLTQPPSASGTPGQRVTISCSGSSSNIGSNTVNWYQQLPGTAPKLLIYNNIERPSGVPDRFSGSKSGTSASLAISGLQSEDEADYYCATWDDSLNGVVFGGGTQLTVLGQPKAAPSVTLFPPSSEELQANKATLVCLVSDFYPGALTVAWKADSSPVKAGVE

SEQ ID NO: 23074 - protein, 165 aa, Artificial Sequence
  source: /note="Description of Artificial Sequence: Synthetic polypeptide"
SRSVLTQPPSTSGTPGQSVTISCSGSSSNIGSNTVNWYRHLPGTAPKLLIYGDNLRPSGVSDRFSGSKSGTSASLAISGLQSDDEADYYCATWDETLNGVIYGGGTKLTALGQPKAAPSVTLFPPSSEELQANKATLVCLISDFYPGALTVAWKADSSPVKAGVE

SEQ ID NO: 23075 - protein, 166 aa, Artificial Sequence
  source: /note="Description of Artificial Sequence: Synthetic polypeptide"
SRQSVLTQPPSVSGAPGQRVTISCTGSSSNIGAGYDVHWYQQLPGTAPKLLIYGNSNRPSGVPDRFSGSKSGTSASLAITGLQAEDEADYYCQSYDSSLSGSTFGGGTKLTVLGQPKTAPSVTLFPPSSEELQANKATLVCLISDFYPGALTVAWKADSSPVKAGV

SEQ ID NO: 23076 - protein, 166 aa, Artificial Sequence
  source: /note="Description of Artificial Sequence: Synthetic polypeptide"
SRQSVLTQPPSVSGAPGQRVTISCTGSSSNIGAGYDVHWYQQLPGTAPKLLIYGNSNRPSGVPDRFSGSKSGTSASLAITGLQAEDEADYYCQSYDSSLSGLVFGGGTRLTALGQPKAAPSVTLFPPSSEELQANKATLVCLISDFYPGALTVAWKADSSPVKAGV

SEQ ID NO: 23077 - protein, 166 aa, Artificial Sequence
  source: /note="Description of Artificial Sequence: Synthetic polypeptide"
  MOD_RES (12)..(12): Any amino acid
SRQSVLTQPPSXSGAPGQRVTISCTGSDSNIGSGYHVHWYQHLPGKGPKLLIANNDNRPSGVPDRFSGSKSEFSAFLAITGLHPEDEGDYYCQSYDNTLPGSLFGGGTRLTVLGQPKAAPSVTLFPPSSEELQANKATLVCLISDFYPGALTVAWKADSSPVKAGV

SEQ ID NO: 23078 - protein, 165 aa, Artificial Sequence
  source: /note="Description of Artificial Sequence: Synthetic polypeptide"
SRQSVLTQPASVSGSPGSITISCTGTRNDVGSYNLVSWYQQFPGKAPKLIIYADNQRPSGEYNRFSGSKSGNTASLTISGLRAEDEADYFCCSYSLTNDVIFGGGTRLTVLGQPKAAPSVTLFPPSSEELQANKATLVCLISDFYPGALTVAWKADSSPVKAGVE

SEQ ID NO: 23079 - protein, 165 aa, Artificial Sequence
  source: /note="Description of Artificial Sequence: Synthetic polypeptide"
SRQSVLTPASVSGSPGQSITISCTGTSSDVGSYKLVSWYQQHPDKAPKLIIYEINQRPSGVSDRFSASKSGNTASLTISGLQAEDEADYYCCSYTDIPSLIFGGGTKLTVLGQPKAAPSVTLFPPSSEELQANKATLVCLISDFYPGALTVAWKADSSPVKAGVE

SEQ ID NO: 23080 - protein, 166 aa, Artificial Sequence
  source: /note="Description of Artificial Sequence: Synthetic polypeptide"
SRQSALTQPASVSGSPGQSITISCTGTSSDVGAYNYVSWYHHHPGKAPKLMIYDVYRRPSWVSSRFSGSKSGNTASLTISGLQPEDEGDYYCISYTTRDTLLFGGGTKVTVLGQPKAAPSVTLFPPSSEELQANKATLVCLISDFYPGALTVAWKADSSPVKAGVE

SEQ ID NO: 23081 - protein, 166 aa, Artificial Sequence
  source: /note="Description of Artificial Sequence: Synthetic polypeptide"
SRQSALTQPPSASGSPGQSVTISCAGTSSDVGGYNHVSQYQQYPGKAPKLMISDVNKRPSGVSNRFSGSKSGNTASLTISGLQAEDEADYYCSSYTNTNTLVFGGGTKLTVLGQPKAAPSVTLFPPSSEELQANKATLVCLISDFYPGALTVAWKADSSPVKAGVE

SEQ ID NO: 23082 - protein, 166 aa, Artificial Sequence
  source: /note="Description of Artificial Sequence: Synthetic polypeptide"
SRNFMLTQPHSVSQSPGKTVIISCTRSSGSIVGNYVQWYQQRPGSSPTTLIYKGNQRPSGVPDRFSGSIDSSSNSASLTISGLETEDEADYYCQSYDSSYQVFGGGTKLTVLGQPKAAPSVTLFPPSSEELQANKATLVCLISDFYPGALTVAWKADSSPVKAGVE

SEQ ID NO: 23083 - protein, 165 aa, Artificial Sequence
  source: /note="Description of Artificial Sequence: Synthetic polypeptide"
SRQAVLTPSSLSASPGASASLTCTLRSGFYVGSYMINWYQQKPGSPPQFLLRYRSDSDIQRGSGVPSRFSGSKDTSANAGILLISGLQPEDEADYYCMIWHIDTVFFGGGSKLTVLGQSKAAPSVTLFPPSSEELQANKATLVCLISDFYPGALTVAWKADSSPV

SEQ ID NO: 23084 - protein, 162 aa, Artificial Sequence
  source: /note="Description of Artificial Sequence: Synthetic polypeptide"
SRQSALTQPSSVSGSPGQSITISCTGTSSDVGGYNYVSWYQQHPGKAPKLMIYEVSNRPSGVPNRFSGSKSGNTASLTISGLQAEDEADYYCSSYTSSSTNWVFGGGTKLTVLGQPKAAPSVTLFPPSSEELQANKATLVCLISDFYPGALTVAWKADSSPV

SEQ ID NO: 23085 - protein, 161 aa, Artificial Sequence
  source: /note="Description of Artificial Sequence: Synthetic polypeptide"
SRQSALTQPASVSGSPGQSITISCTGTSSDVGAYNYVSWYHHHPGKAPKLMIYDVYRRPSWVSSRFSGSKSGNTASLTISGLQPEDEGDYYCISYTTRDTLLFGGGTKVTVLGQPKAAPSVTLFPPSSEELQANKATLVCLISDFYPGALTVAWKADSSPV

SEQ ID NO: 23086 - protein, 161 aa, Artificial Sequence
  source: /note="Description of Artificial Sequence: Synthetic polypeptide"
SRQSVLTQPASVSGSPGQSITISCTGTSSDVGSYKLVSWYQQHPDKAPKLIIYEINQRPSGVSDRFSASKSGNTASLTISGLQAEDEADYYCCSYTDIPSLIFGGGTKLTVLGQPKAAPSVTLFPPSSEELQANKATLVCLISDFYPGALTVAWKADSSPV

SEQ ID NO: 23087 - protein, 161 aa, Artificial Sequence
  source: /note="Description of Artificial Sequence: Synthetic polypeptide"
SRQSVLTQPASVSGSPGQSITISCTGTRNDVGSYNLVSWYQQFPGKAPKLIIYADNQRPSGEYNRFSGSKSGNTASLTISGLRAEDEADYFCCSYSLTNDVIFGGGTRLTVLGQPKAAPSVTLFPPSSEELQANKATLVCLISDFYPGALTVAWKADSSPV

SEQ ID NO: 23088 - protein, 162 aa, Artificial Sequence
  source: /note="Description of Artificial Sequence: Synthetic polypeptide"
SRQSVLTQPPSVSGAPGQRVTISCTGSSSNIGAGYDVHWYQQLPGTAPKLLIYGNSNRPSGVPDRFSGSKSGTSASLAITGLQAEDEADYYCQSYDSSLSGLVFGGGTRLTALGQPKAAPSVTLFPPSSEELQANKATLVCLISDFYPGALTVAWKADSSPV

SEQ ID NO: 23089 - protein, 162 aa, Artificial Sequence
  source: /note="Description of Artificial Sequence: Synthetic polypeptide"
SRQSVLTQPPSVSGAPGQRVTISCTGSSSNIGAGYDVHWYQQLPGTAPKLLIYGNSNRPSGVPDRFSGSKSGTSASLAITGLQAEDEADYYCQSYDSSLSGSTFGGGTKLTVLGQPKTAPSVTLFPPSSEELQANKATLVCLISDFYPGALTVAWKADSSPV

SEQ ID NO: 23090 - protein, 162 aa, Artificial Sequence
  source: /note="Description of Artificial Sequence: Synthetic polypeptide"
  MOD_RES (12)..(12): Any amino acid
SRQSVLTQPPSXSGAPGQRVTISCTGSDSNIGSGYHVHWYQHLPGKGPKLLIANNDNRPSGVPDRFSGSKSEFSAFLAITGLHPEDEGDYYCQSYDNTLPGSLFGGGTRLTVLGQPKAAPSVTLFPPSSEELQANKATLVCLISDFYPGALTVAWKADSSPV

SEQ ID NO: 23091 - protein, 161 aa, Artificial Sequence
  source: /note="Description of Artificial Sequence: Synthetic polypeptide"
SRQSVLTQPPSASGTPGQRVTISCSGSSSNIGSNTVNWYQQLPGTAPKLLIYNNIERPSGVPDRFSGSKSGTSASLAISGLQSEDEADYYCATWDDSLNGVVFGGGTQLTVLGQPKAAPSVTLFPPSSEELQANKATLVCLVSDFYPGALTVAWKADSSPV

SEQ ID NO: 23092 - protein, 116 aa, Artificial Sequence
  source: /note="Description of Artificial Sequence: Synthetic polypeptide"
SRQSVLTQPPSASGTPGQRVTISCSGSSSNIGSNTVNWYQQLPGTAPKLLIYNNIERPSGVPDRFSGSKSGTSASLAISGLQSEDEADYYCATWDDSLNGVVFGGGTQLTVLGQPK

SEQ ID NO: 23093 - protein, 151 aa, Artificial Sequence
  source: /note="Description of Artificial Sequence: Synthetic polypeptide"
SASGTPGQRVTISCSGSSSNIGSNTVNWYQQLPGTAPKLLIYNNIERPSGVPDRFSGSKSGTSASLAISGLQSEDEADYYCATWDDSLNGVVFGGGTQLTVLGQPKAAPSVTLFPPSSEELQANKATLVCLVSDFYPGALTVAWKADSSPV

SEQ ID NO: 23094 - protein, 161 aa, Artificial Sequence
  source: /note="Description of Artificial Sequence: Synthetic polypeptide"
SRSYVLTQPPSASGTPGQRVTISCSGTSSNIGRNRVNWYQQLPGTAPKLLIYSNNQRPSGVLDRFSGSKSGTSASLAISGLQSEDEGDYYCAAWDDSLHGGVFGGGTQLTVLGQSKAAPSVTLFPPSSEELQANKATLVCLVSDFYPGALTVAWKADSSPV

SEQ ID NO: 23095 - protein, 162 aa, Artificial Sequence
  source: /note="Description of Artificial Sequence: Synthetic polypeptide"
SRQYVLTQPPSVSGTPGQRVTISCSGSSSNIGTNSVTWYQRLPGTAPKLLIYGSHQRPSGVPDRFSGSKSGTSASLAITGLQSGDEADYFCVVWDDNLNGAVLFGGGTKLTVLGQPKAAPSVTLFPPSSEELQANKATLVCLISDFYPGALTVAWKADSSPV

SEQ ID NO: 23096 - protein, 161 aa, Artificial Sequence
  source: /note="Description of Artificial Sequence: Synthetic polypeptide"
SRQSVLTQPPSTSGTPGQSVTISCSGSSSNIGSNTVNWYRHLPGTAPKLLIYGDNLRPSGVSDRFSGSKSGTSASLAISGLQSDDEADYYCATWDETLNGVIYGGGTKLTALGQPKAAPSVTLFPPSSEELQANKATLVCLISDFYPGALTVAWKADSSPV

SEQ ID NO: 23097 - protein, 157 aa, Artificial Sequence
  source: /note="Description of Artificial Sequence: Synthetic polypeptide"
SRSYVLTQPPSESVAPGQTARISCGGSNIGSYGVHWYQQKAGQAPVLVVHDDSDRPSGIPERFSGSNSGNTATLTISSVEAGDEADYYCQVWDNSAVIFGGGTKLTVLSQPKAAPSVTLFPPSSEELQANKATLVCLISDFYPGALTVAWKADSSPV

SEQ ID NO: 23098 - protein, 161 aa, Artificial Sequence
  source: /note="Description of Artificial Sequence: Synthetic polypeptide"
SRNFMLTQPHSVSQSPGKTVIISCTRSSGSIVGNYVQWYQQRPGSSPTTLIYKGNQRPSGVPDRFSGSIDSSSNSASLTISGLETEDEADYYCQSYDSSYQVFGGGTKLTVLGQPKAAPSVTLFPPSSEELQANKATLVCLISDFYPGALTVAWKADSSPV

SEQ ID NO: 23099 - protein, 166 aa, Artificial Sequence
  source: /note="Description of Artificial Sequence: Synthetic polypeptide"
SRQAVLTQPSSLSASPGASASLTCTLRSGFYVGSYMINWYQQKPGSPPQFLLRYRSDSDIQRGSGVPSRFSGSKDTSANAGILLISGLQPEDEADYYCMIWHIDTVFFGGGSKLTVLGQSKAAPSVTLFPPSSEELQANKATLVCLISDFYPGALTVAWKADSSPV

SEQ ID NO: 23100 - protein, 449 aa, Artificial Sequence; identical to SEQ ID NO: 22995
  source: /note="Description of Artificial Sequence: Synthetic polypeptide"

SEQ ID NO: 23101 - protein, 235 aa, Artificial Sequence
  source: /note="Description of Artificial Sequence: Synthetic polypeptide"
MEAPAQLLFLLLLWLPDTTGEIVLTQSPGTLSLSPGERATLSCRASQSVSYSSLAWYQQKPGQAPSLLIYGASSRATGIPDRFSGSGSGPDFTLTISRLEPEDFAVYYCQHYGNSPYTFGQGTKLEIKRTVAAPSVFIFPPSDEQLKSGTASVVCLLNNFYPREAKVQWKVDNALQSGNSQESVTEQDSKDSTYSLSSTLTLSKADYEKHKVYACEVTHQGLSSPVTKSFNRGEC

SEQ ID NO: 23102 - protein, 233 aa, Artificial Sequence
  source: /note="Description of Artificial Sequence: Synthetic polypeptide"
MLPSQLIGFLLLWVPASRGEIVLTQSPDFQSVSPKEKVTITCRASQSVGSSLHWYQQKPDQSPKLLIKYASQSFSGVPSRFSGSGSGTDFTLTINSLETEDAATYYCHQSSSLPLTFGGGTKVEIKRTVAAPSVFIFPPSDEQLKSGTASVVCLLNNFYPREAKVQWKVDNALQSGNSQESVTEQDSKDSTYSLSSTLTLSKADYEKHKVYACEVTHQGLSSPVTKSFNRGEC

SEQ ID NO: 23103 - protein, 224 aa, Artificial Sequence
  source: /note="Description of Artificial Sequence: Synthetic polypeptide"
EAGQVMTQTPLSLPVTLGQSASISCRSSQSLVSSDGKTYLNWFHQRPGQSPRRLIYKVSKRDSGVPDRFSGSGSGTDFTLKISRVEAEDVGVYFCMQATHWLWTFGQGTKVEIKRTVAAPSVFIFPPSDEQLKSGTASVVCLLNNFYPREAKVQWKVDNALQSGNSQESVTEQDSKDSTYSLSSTLTLSKADYEKHKVYACEVTHQGLSSPVTKSFNRGECAAA

SEQ ID NO: 23104 - protein, 219 aa, Artificial Sequence
  source: /note="Description of Artificial Sequence: Synthetic polypeptide"
EAGQQMTQSPSSLSASVGDRVTITCRASQSIARYLNWYQQRPGKAPKVLIYDASSLHTGVPSRFSGSGSGTDFTLTISSLRPEDFATYYCQQTYSTPLTFGGGTKVEIKRTVAAPSVFIFPPSDEQLKSGTASVVCLLNNFYPREAKVQWKVDNALQSGNSQESVTEQDSKDSTYSLSSTLTLSKADYEKHKVYACEVTHQGLSSPVTKSFNRGECAAA

SEQ ID NO: 23105 - protein, 218 aa, Artificial Sequence
  source: /note="Description of Artificial Sequence: Synthetic polypeptide"
EAGQQLTQSPSSLSASEGDRVTITCRASQSISNWLAWYQQKPGKAPKLLIYKASSLESGVPSRFSGSGSGTEFTLTISSLQPDDFATYYCQQYSGSATFGQGTKVEIKRTVAAPSVFIFPPSDEQLKSGTASVVCLLNNFYPREAKVQWKVDNALQSGNSQESVTEQDSKDSTYSLSSTLTLSKADYEKHKLYACEVTHQGLSSPVTKSFNRGECAAA

SEQ ID NO: 23106 - protein, 219 aa, Artificial Sequence
  source: /note="Description of Artificial Sequence: Synthetic polypeptide"
EAGQQLTQSPSSLSASVGDRVTITCRASQGISRYLAWYQQKPGKAPKLLIYAASTLQSGVPSRFSGSGSGTDFTLTISSLQPEDFATYYCQQLNSYPLTFGGGTRVEVKRTVAAPSVFIFPPSDEQLKSGTASVACLLNNFYPREAKVQWKVDNALQSGNSQESVTEQDSKDSTYSLSSTLTLSKADYEKHKVYACEVTHQGLSSPVTKSFNRGECAAA

SEQ ID NO: 23107 - protein, 215 aa, Artificial Sequence
  source: /note="Description of Artificial Sequence: Synthetic polypeptide"
EAGQVLTQSPATLSVSPGERATLSCRASQSVGSNLAWYQQKPGQAPRLLIYGASTRATGIPARFSGSGSGTEFTLTISSLQSEDFAVYYCQQGWTFGQGTKVEIKRTVAAPSVFIFPPSDEQLKSGTASVVCLLNNFYPREAKVQWKVDNALQSGNSQESVTEQDSKDSTYSLSSTLTLSKADYEKHKLYACEVTHQGLSSPVTKSFNRGECAAA

SEQ ID NO: 23108 - protein, 215 aa, Artificial Sequence
  source: /note="Description of Artificial Sequence: Synthetic polypeptide"
EAGQSVLTQPPSVSVSPGQTASITCSGNKLGNKYACWYQQKPGQSPILIIYQDKKRPSGIPERFSGSNSGNTATLTISGTQAMDEADYYCQAWDSDTVVFGGGTKLTVLGQPKAAPSVTLFPPSSEELQANKATLVCLISDFYPGAVTVAWKADSSPVKAGVETTTPSKQSNNKYAASSYLSLTPEQWKSHRSYSCQVTHEGSTVEKTVAPTECS

SEQ ID NO: 23109 - protein, 107 aa, Artificial Sequence
  source: /note="Description of Artificial Sequence: Synthetic polypeptide"
DIQMTQSPSSVSASVGDRVTITCRASQGISSWLAWYQQKPGKAPKLLIYKASSLQSGVPSRFSGSGSGTDFTLTISSLQPEDFATYYCQQYSTSPITFGGGTKVEIK

SEQ ID NO: 23110 - protein, 214 aa, Artificial Sequence
  source: /note="Description of Artificial Sequence: Synthetic polypeptide"
DIQMTQSPSSLSASVGDRVTITCRASQDIRNYLNWYQQKPGKAVKLLIYYTSRLLPGVPSRFSGSGSGTDYSLTISSQEQEDIGTYFCQQGNTLPWTFGQGTKVEIRRTVAAPSVFIFPPSDEQLKSGTASVVCLLNNFYPREAKVQWKVDNALQSGNSQESVTEQDSKDSTYSLSSTLTLSKADYEKHKVYACEVTHQGLSSPVTKSFNRGEC

SEQ ID NO: 23111 - protein, 113 aa, Artificial Sequence
  source: /note="Description of Artificial Sequence: Synthetic polypeptide"
EIVMTQSPLSLPVTPGEPASISCRSSQSLLHSNRYNYLDWYLQKPGQSPQLLIYLGSNRASGVPDRFSGSGSGTDFTLKISRVEAEDVGVYYCMQALQTPFTFGPGTKVEIKR

SEQ ID NO: 23112 - protein, 113 aa, Artificial Sequence
  source: /note="Description of Artificial Sequence: Synthetic polypeptide"
EIVMTQSPLSLPVTPGEPASISCRSSQSLLHSNTYNYLDWYLQKPGQSPQLLIYLGSNRASGVPGRFSGSGSGTDFTLKISRVEAEDIGVYYCMQALQTPLTFGQGTKVKIKA

SEQ ID NO: 23113 - protein, 113 aa, Artificial Sequence
  source: /note="Description of Artificial Sequence: Synthetic polypeptide"
DIVMTQSPLSLSVTPGQPASISCKSSQSLLHSDGNTYLYWYLQKPGQSPQLLIYRVSNRASGVPDRFSGSGSGTDFTLKISQVEAEDVGVYYCMQGIQLPLTFGGGTKVEIKA

SEQ ID NO: 23114 - protein, 108 aa, Artificial Sequence
  source: /note="Description of Artificial Sequence: Synthetic polypeptide"
DILMTQSPSSLSASVGDRVTITCRASQGISNYLAWYQQKPGKAPKLLIYYASKLESGVPSRFSGSGSGPDYTLTISSLQPEDSATYFCQQYSTNPLSFGGGTKLEIKA

SEQ ID NO: 23115 - protein, 108 aa, Artificial Sequence
  source: /note="Description of Artificial Sequence: Synthetic polypeptide"
DIRLTQSPSSLSASVGDRVTITCRASQGISTWLAWYQQKPGRAPKPLIYAASNLQSGVPSRFSGSGSGTEFTLTISSLQPEDFATYYCQQYNSYPITFGQGTRLEIKR

SEQ ID NO: 23116 - protein, 108 aa, Artificial Sequence
  source: /note="Description of Artificial Sequence: Synthetic polypeptide"
DIVLTQSPSSLSASLGDRVTITCWASQGITTRLNWYQHKPGKPPKLLIYDASRLGSGVPSHFSGSGSGTDFTLTINSLQPEDFATYFCQQFKMYPPTFGQGTKVDIKA

SEQ ID NO: 23117 - protein, 110 aa, Artificial Sequence
  source: /note="Description of Artificial Sequence: Synthetic polypeptide"
AELQMTQSPSSLSASVGDRVTITCRASQGIRNDLGWYQQKPGKAPKLLIYAASSLQSGVPSRFSGSGSGTDFTLTISSLQPEDFATYYCLQDYTYPWTFGQGTKLEIKRT

SEQ ID NO: 23118 - protein, 121 aa, Artificial Sequence
  source: /note="Description of Artificial Sequence: Synthetic polypeptide"
RVQLLEQSGAEVKKPGESLKISCKGSGYSFTNYWIGWVRQMPGKGLEWMGIIYPDDSDTRYSPSFQGQVTISFDKSINTAYLQWSSLKASDTAIYYCARALWFRDWGKMDVWGKGTTVTVS

SEQ ID NO: 23119 - protein, 110 aa, Artificial Sequence
  source: /note="Description of Artificial Sequence: Synthetic polypeptide"
AELQMTQSPSSLSASVGDRVTITCRASQDIRNYLAWYQQEPGKAPRLLIYYASKLQSGVPSRFSGRGSGTDYSLTISSLQPEDFATYYCQQYDSVPLTFGGGTKMEIKRT

SEQ ID NO: 23120 - protein, 107 aa, Artificial Sequence
  source: /note="Description of Artificial Sequence: Synthetic polypeptide"
AIQLTQSPSSLSAYVGDKVTITCHASQGINSWLAWYQQKPGKAPKLLIYKASSLLSGVPSRFSGSGSGTDYTLTISSLQSEDFASYYCLQYDSAPLAFGPGTKLDIK

SEQ ID NO: 23121 - protein, 119 aa, Artificial Sequence
  source: /note="Description of Artificial Sequence: Synthetic polypeptide"
SGPGLLKPSETLSLTCAVSGDSISSGYYWSWIRQSPGKGLEWIGHIYGSTADTKYNPSLRSRVTISKDTSKNQLSLQLRSVTAADTAVYYCARSGYNFWSGEYYGLDSWGQGAVVTVSS

SEQ ID NO: 23122 - protein, 108 aa, Artificial Sequence
  source: /note="Description of Artificial Sequence: Synthetic polypeptide"
  MOD_RES (1)..(3): Any amino acid
  MOD_RES (16)..(16): Any amino acid
  MOD_RES (19)..(19): Any amino acid
  MOD_RES (28)..(28): Any amino acid
  MOD_RES (30)..(31): Any amino acid
  MOD_RES (35)..(35): Any amino acid
  MOD_RES (45)..(45): Any amino acid
  MOD_RES (48)..(50): Any amino acid
  MOD_RES (58)..(58): Any amino acid
  MOD_RES (69)..(69): Any amino acid
  MOD_RES (76)..(76): Any amino acid
  MOD_RES (78)..(78): Any amino acid
  MOD_RES (88)..(88): Any amino acid
  MOD_RES (90)..(92): Any amino acid
  MOD_RES (95)..(95): Any amino acid
  MOD_RES (99)..(99): Any amino acid
  MOD_RES (103)..(103): Any amino acid
  MOD_RES (106)..(106): Any amino acid
XXXTQSPSSLSASVGXRVXITCRASQDXNXXLAWXQQKPGKAPKXLIXXXSSLQGGVXSRFSGSGSGTXFTLTISXLXPEDFATYYCXQXXXYPXTFGXGTKXEIXRT

SEQ ID NO: 23123 - protein, 108 aa, Artificial Sequence
  source: /note="Description of Artificial Sequence: Synthetic polypeptide"
APMTQSPSSLSASVGDRVSITCRASQDINDFLAWFQQKPGKAPKRLIFRTSSLQGGVSSRFSGSGSGTEFTLTISNLRPEDFATYYCLQHSSYPPTFGQGTKLEISRT

SEQ ID NO: 23124 - protein, 107 aa, Artificial Sequence
  source: /note="Description of Artificial Sequence: Synthetic polypeptide"
ELTQSPSSLSASVGGRVTITCRASQDVNTWLAWYQQKPGKAPKPLIYAASSLQGGVPSRFSGSGSGTDFTLTISSLQPEDFATYYCQQYKHYPLTFGGGTKVEIKRT

SEQ ID NO: 23125 - protein, 132 aa, Artificial Sequence
  source: /note="Description of Artificial Sequence: Synthetic polypeptide"
MFWIPASSSDVLMTQTPLSLPVSLGDQASISCRSSQSIIHSNGDTFLEWFLQKPGQSPKLLIYKVSNRFSGVPDRFSGSGSGTDFTLKISRVEAEDLGVYYCFQGSHVPLTFGAGTKLELKRADAAPTVSKG

SEQ ID NO: 23126 - protein, 124 aa, Artificial Sequence
  source: /note="Description of Artificial Sequence: Synthetic polypeptide"
ELVMTQSPLSLPVSLGDQASISCRSSQSIIHSNGDTFLEWFLQKPGQSPKLLIYKVSNRFSGVPDRFSGSGSGTDFTLKISRVEAEDLGVYYCFQGSHVPLTFGAGTKLELKRADAAPTVKGEF

SEQ ID NO: 23127 - protein, 134 aa, Artificial Sequence; identical to SEQ ID NO: 23003
  source: /note="Description of Artificial Sequence: Synthetic polypeptide"

SEQ ID NO: 23128 - protein, 107 aa, Artificial Sequence
  source: /note="Description of Artificial Sequence: Synthetic polypeptide"
AIQLTQSPSSLSAYVGDKVTITCHASQGINSWLAWYQQKPGKAPKLLIYKASSLQSGVPSRFSGSGSGTDYTLTISSLQSEDFASYYCLQYDSAPLAFGPGTKLDIK

SEQ ID NO: 23129 - protein, 107 aa, Artificial Sequence; identical to SEQ ID NO: 23120
  source: /note="Description of Artificial Sequence: Synthetic polypeptide"

SEQ ID NO: 23130 - protein, 107 aa, Artificial Sequence
  source: /note="Description of Artificial Sequence: Synthetic polypeptide"
AIQLTQSPSSLSAYVGDKVTITCHASQGINSWLAWYQQKPGKAPKLLIYKARSLQSGVPSRFSGSGSGTDYTLTISSLQSEDFASYYCLQYDSAPLAFGPGTKLDIK

SEQ ID NO: 23131 - protein, 107 aa, Artificial Sequence
  source: /note="Description of Artificial Sequence: Synthetic polypeptide"
AIQLTQSPSSLSAYVGDKVTITCRASQGINSWLAWYQQKPGKAPKLLIYKASSLQEGVPSRFSGSGSGTDYTLTISSLQSEDFASYYCLQYDSAPLAFGPGTKLDIK

SEQ ID NO: 23132 - protein, 107 aa, Artificial Sequence
  source: /note="Description of Artificial Sequence: Synthetic polypeptide"
AIQLTQSPSSLSASVGDRVTITCRASQGINSWLAWYQQKPGKAPKLLIYKASSLQSGVPSRFSGSGSGTDFTLTISSLQPEDFATYYCLQYDSAPLAFGPGTKVDIK

SEQ ID NO: 23133 - protein, 107 aa, Artificial Sequence
  source: /note="Description of Artificial Sequence: Synthetic polypeptide"
AIQLTQSPSSLSASVGDRVTITCRASQGINSWLAWYQQKPGKAPKLLIYKASSLLSGVPSRFSGSGSGTDFTLTISSLQPEDFATYYCLQYDSAPLAFGPGTKVDIK

SEQ ID NO: 23134 - protein, 107 aa, Artificial Sequence
  source: /note="Description of Artificial Sequence: Synthetic polypeptide"
AIQLTQSPSSLSASVGDRVTITCRASQGINSWLAWYQQKPGKAPKLLIYKARSLQSGVPSRFSGSGSGTDFTLTISSLQPEDFATYYCLQYDSAPLAFGPGTKVDIK

SEQ ID NO: 23135 - protein, 107 aa, Artificial Sequence
  source: /note="Description of Artificial Sequence: Synthetic polypeptide"
AIQLTQSPSSLSASVGDRVTITCRASQGINSWLAWYQQKPGKAPKLLIYKASSLQEGVPSRFSGSGSGTDFTLTISSLQPEDFATYYCLQYDSAPLAFGPGTKVDIK

SEQ ID NO: 23136 - protein, 108 aa, Artificial Sequence
  source: /note="Description of Artificial Sequence: Synthetic polypeptide"
EIVLTQSPGTLSLSPGERATLSCRASQSVSSSYLAWYQQKPGQAPRLLIYGASSRATGIPDRFSGSGSGTDFTLTISRLEPEDFAVYYCQQYGSSPPTFGGGTKVEIK

SEQ ID NO: 23137 - protein, 108 aa, Artificial Sequence
  source: /note="Description of Artificial Sequence: Synthetic polypeptide"
EIVLTQSPGTLSLSPGERATLSCRASQSVSSSYLAWYQQKPGQAPRLLIYGASSRATGIPDRFSGSGSGTDFTLTISRLEPEDFAVYYCQQYGSSMYTFGQGTKLEIK

SEQ ID NO: 23138 - protein, 106 aa, Artificial Sequence
  source: /note="Description of Artificial Sequence: Synthetic polypeptide"
AIQLTQSPSSLSASVGDRVTITCRASQGISSALAWYQQKPGKAPKLLIYDASSLKSGVPSRFSGSGSGTDFTLTISSLQPEDFATYYCQQFNSYWTFGQGTKVEIK

SEQ ID NO: 23139 - protein, 107 aa, Artificial Sequence
  source: /note="Description of Artificial Sequence: Synthetic polypeptide"
DIQMTQSPSSLSASVGDRVTITCRASQGISSWLAWYQQKPEKAPKSLIYAASSLQSGVPSRFSGSGSGTDFTLTISSLQPEDFATYYCQQYNSYPPTFGQGTRLEIK

SEQ ID NO: 23140 - protein, 107 aa, Artificial Sequence
  source: /note="Description of Artificial Sequence: Synthetic polypeptide"
DIQMTQSPSSLSASVGDRVTITCRASQGISSWLAWYQQKPEKAPKSLIYAASSLQSGVPSRFSGSGSGTDFTLTISSLQPEDFATYYCQQYNSYPRTFGGGTKVEIK

SEQ ID NO: 23141 - protein, 107 aa, Artificial Sequence
  source: /note="Description of Artificial Sequence: Synthetic polypeptide"
QIVLTQSPAIMSASPGEKVTMTCSASSSVRYMHWYQQKSGTSPKRWIYDTSKLASGVPARFSGSGSGTSYSLTISSMEAEDAATYYCQQWSGNPLTFGAGTKLEIKR

SEQ ID NO: 23142 - protein, 113 aa, Artificial Sequence
  source: /note="Description of Artificial Sequence: Synthetic polypeptide"
DIQMTQSPLTLSVTFGQPASISCKSSQSLLASDGETYLNWLLQRPDQSLKRLIYLVSKLDSGVPDRFTGSGSGTDFTLKISRVEAEDLGVYYCWQGTHFPQTFGGGTELEFKR

SEQ ID NO: 23143 - protein, 107 aa, Artificial Sequence
  source: /note="Description of Artificial Sequence: Synthetic polypeptide"
ENVLTQSPAIMSASLGEKVTMSCRASPSINNMYWYQQKADASPKLWIYYTSNLAPGPARFSGSGSGNSYSLTISSMEGEDAATYYCQQFTSSPSALTFGAGTKLELK

SEQ ID NO: 23144 - protein, 134 aa, Artificial Sequence
  source: /note="Description of Artificial Sequence: Synthetic polypeptide"
DIQMTQTTSSLSASLGDRVTVSCRASQDIRNYLNWYQQKPDGTVKFLIYYTSRLLPGVPSRFSGSGSGTDYSLTINNLEQEDIGTYFCQQGNTPPWTFGGGTKLEIKRGGGGSDGGGSGGGGSGGGGSEVQLQQ

SEQ ID NO: 23145 - protein, 106 aa, Artificial Sequence
  source: /note="Description of Artificial Sequence: Synthetic polypeptide"
EIVLTQSPSTLSASVGDRVIITCRASQRIRNELAWYQQKPGKAPKVLIYKASTLESGVPSRFSGSGSGTEFTLTISSLQPDDFATYYCQQYSGLWTFGQGTKLEIK

SEQ ID NO: 23146 - protein, 109 aa, Artificial Sequence
  source: /note="Description of Artificial Sequence: Synthetic polypeptide"
DIQVTQSPSSLSASVGDRVTITCRASQGIDRALAWYQQKSGRPPKLLIYDASSLESGVPSRFSGSGSGTDFTLTISSLQPEDFATYYCQQYKSYLRELTFGGGTKVEIK

SEQ ID NO: 23147 - protein, 111 aa, Artificial Sequence
  source: /note="Description of Artificial Sequence: Synthetic polypeptide"
QSVLTQPPSVSVAPGTTARITCAGNNFASKNVHWYQQKPGQAPVLVVSADSDRPSEIPERFSASSTGNTATLTISRVDAGDEADYYCQVWDSSRDDRFVVFGGGTKLTVLG

SEQ ID NO: 23148 - protein, 108 aa, Artificial Sequence
  source: /note="Description of Artificial Sequence: Synthetic polypeptide"
QSVLTQPPSVSVSPGQTASITCSGDKLGHKYACWYQQKPGQSPVLVIYRDNKRPSGIPERFSGSNSGHTATLTISGTQALDEADYYCQAWDSSTHVIFGGGTKLTVLG

SEQ ID NO: 23149 - protein, 213 aa, Artificial Sequence; identical to SEQ ID NO: 22937
  source: /note="Description of Artificial Sequence: Synthetic polypeptide"

SEQ ID NO: 23150 - protein, 108 aa, Artificial Sequence
  source: /note="Description of Artificial Sequence: Synthetic polypeptide"
AAELTQSPATLSLSPGERATLSCRASQSVSTYLAWYQQRPGQSPRLLIYGASNRATGIPARFSGSGSGTDFTLTINSVEPEDFAVYYCHQYDAQPTFGHGTRVDFKRT

SEQ ID NO: 23151 - protein, 109 aa, Artificial Sequence
  source: /note="Description of Artificial Sequence: Synthetic polypeptide"
AAELTQSPSSLSASVGDRVSITCRASQSISNYLSWYQQKPGKAPQLLIYDASTLQSGVPSRFSGSGSGTDFTLTISSLQPEDFATYYCQCGYGTYPTFGGGTQVEIKRT

SEQ ID NO: 23152 - protein, 109 aa, Artificial Sequence
  source: /note="Description of Artificial Sequence: Synthetic polypeptide"
AAELTQSPSSLSASVGDRVTITCRASQGIRNYLAWYQQKPGKVPKLLIYAASTLQSGVPSRFSGSGSGTDFTLTISSLQPEDVATYYCQKYSSAPFTFGPGTKVGIKRT

SEQ ID NO: 23153 - protein, 109 aa, Artificial Sequence
  source: /note="Description of Artificial Sequence: Synthetic polypeptide"
ELVMTQSPSLLSASVGDRVTITCRASQGISNYLAWFQQKPGKAPKRLIFTAYRLESGVPSRFSGSMSGTEFTLTISSLEPEDFATYYCLQHSAYPPTFGQGTKLEIKRT

SEQ ID NO: 23154 - protein, 248 aa, Artificial Sequence
  source: /note="Description of Artificial Sequence: Synthetic polypeptide"
QVQLVESGGGVVQSGGSLRLSCSASGFTFSDYGMHWVRQAPGKGLEWVAVVSYDGSNIYYIDSVKGRFTISRDDSKNTLYLQMNSLRAEDTALYYCAKAGRRTQLQPRDFLFEYWGQGTLVTVSSGGGGSGGGGSGGGGSSELTQDPAVSVALGQTVRITCQGDSLRSYYASWYQQKPGQAPVLVIYGKNNRPSGIPDRFSGSSSGNTASLTITGAQAEDEADYYCNSRDSSGNHVVFGGGTKLTVLG

SEQ ID NO: 23155 - protein, 251 aa, Artificial Sequence
  source: /note="Description of Artificial Sequence: Synthetic polypeptide"
QVQLVQSGAEVRKPGASVKVSCKASGYMFTGYYMHWVRQAPGQGLEWMGWIKPYSGGTNYAQKFHDRVTMTRDTSISTAYMEVMRLTSDDSAVFYCARSRYSSSPFRGGLDVWGRGTMVTVSSGGGGSGGGGSGGGGSAQAVLTQPSSVSGAPGQRVTISCTGSSSNIGDGYDVHWYQQLPGTAPKLLIYGNTNRPSGVPDRFSGSKSDTSASLAITGLQVEDEADYFCHSYDSSISGWIFGGGTKVTVLG

SEQ ID NO: 23156 - protein, 246 aa, Artificial Sequence
  source: /note="Description of Artificial Sequence: Synthetic polypeptide"
EVQLLESGGGLVQPGGSLRLSCAASGFTFSSYATSWVRQAPGKGLEWVSAISGSGGSTYYADSVKGRFTISRDNSKNTLYLQMNSLRAEDTAVYYCARVGGAIRFDSWGRGTLVTVSSGGGGSGGGGSGGGGSALSYELTQPPSASETPGQRVSISCSGGTSNIGSNTINWYQQVPGTAPKLLIYFNNRRPAGVPARFSASKSGTSASLTISGLQSEDEADYYCSAWDDSLSGVVFGGGTKLTVLG

SEQ ID NO: 23157 - protein, 244 aa, Artificial Sequence
  source: /note="Description of Artificial Sequence: Synthetic polypeptide"
EVQLLESGGGLVQPGGSLRLSCAASGFTFSSYAMSWVRQAPGKGLEWVSAISGSGGSTYYADSVKGRFTISRDNSKNTLYLQMNSLRAEDTAVYYCARQIWGRFEYWGRGTTVTVSSGGGGSGGGGSGGGGSAQAVLTQPSSASGTPGQRVTISCSGSSSNIGTNTVNWYQQLPGTAPKLLIFSNNQRPSGVPDRFSGSKSGPSASLAISGLQSEDEADYYCAAWDDRLNGYVFGTGTKLTVLG

SEQ ID NO: 23158 - protein, 244 aa, Artificial Sequence
  source: /note="Description of Artificial Sequence: Synthetic polypeptide"
EVQLLESGGGLVQPGGSLRLSCAASGFTFSSYAMSWVRQAPGKGLEWVSAISGSGGSTYYADSVKGRFTISRDNSKNTLYLQMNSLRAEDTAVYYCATQAFARFEFWGRGTLVTVSSGGGGSGGGGSGGGGSAQSVVTQPPSVSGTPGQRVTISCSGSSSNIGTNTVNWYQQLPGTAPKLLIYSNNQRPSGVPDRFSGSKSGTSASVAISGLQSEDEADYYCSSWDDSLNGVVFGGGTKLTVLG

SEQ ID NO: 23159 - protein, 244 aa, Artificial Sequence
  source: /note="Description of Artificial Sequence: Synthetic polypeptide"
EVQLLESGGGLVQPGGSLRLSCAASGFTFSSYAMSWVRQAPGKGLEWVSAISGSGGSTYYADSVKGRFTISRDNSKNTLYLQMNSLRAEDTAVYYCARQIWGRFEYWGRGTTVTVSSGGGGSGGGGSGGGGSAQSVLTQPPSASGTPGQRVTISCSGSSSNIGSNTVNWYQQLPGTAPKLLIYSNNQRPSGVPDRFSGSKSGTSASLAISGLQSEDEADYYCAAWDDSLNGVVFGGGTKLTVLG

SEQ ID NO: 23160 - protein, 248 aa, Artificial Sequence
  source: /note="Description of Artificial Sequence: Synthetic polypeptide"
EVQLLESGGGLLQPGGSLRLSCAASGFSFISYAMSWVRQAPGKGLEWVSAISGSGGSTYYADSVKGRFTISRDNSKNTLYLQMNSLRAEDTAVYYCARVDHKWDLPFDYWGRGTLVTVSSGGGGSGGGGSGGGGSALSYVLTQPPSASGTPGQRVVVSCSGGSSNIGKNPVTWYQHLPGTAPKLLISRNTQRPSGVPDRFSGSKSGTSASLAISGLQSEDEADYYCAAWDDSLKGWVFGGGTKLTVLG

SEQ ID NO: 23161 - protein, 244 aa, Artificial Sequence
  source: /note="Description of Artificial Sequence: Synthetic polypeptide"
EVQLLESGGGLVQPGGSLRLSCAASGFTFSSYAMSWVRQAPGKGLEWVSAISGSGGSTYYADSVKGRFTISRDNSKNTLYLQMNSLRAEDTAVYYCARQIWGRFEYWGRGTTVTVSSGGGGSGGGGSGGGGSAQSVLTQPPSASGTPGQRVTISCSGSSSNIGSNTVNWYQQLPGTAPKLLIYSNNQRPSGVPDRFSGSKSGTSASLAVSGLQSEDEADYYCAAWDDSLNGVVFGGGTKLTVLG

SEQ ID NO: 23162 - protein, 244 aa, Artificial Sequence
  source: /note="Description of Artificial Sequence: Synthetic polypeptide"
EVQLLESGGGLVQPGGSLRLSCAASGFTFSSYAMSWVRQAPGKGLEWVSAISGSGGSTYYADSVKGRFTISRDNSKNTLYLQMNSLRAEDTAVYYCARQIWGRFEYWGKGTMVTVSSGGGGSGGGGSGGGGSAQSVLTQPPSASGTPGQRVTISCSGSSSNIGSNTVNWYQQLPGTAPKLLIYSNNQRPSGVPDRFSGSKSGTSASLAISGLQSEDEADYYCAAWDDSLNGVVFGGGTKLTVLG

SEQ ID NO: 23163 - protein, 247 aa, Artificial Sequence
  source: /note="Description of Artificial Sequence: Synthetic polypeptide"
QVQLVESGGGVVQSGGSLRLSCSASGFTFSDYGMHWVRQAPGKGLEWVAVVSYDGSNIYYIDSVKGRFTISRDDSKNTLYLQMNSLRAEDTALYYCAKAGRRTQLQPRDFLEYWGQGTLVTVSSGGGGSGGGGSGGGGSSELTQDPAVSVALGQTVRITCQGDSLRSYYASWYQQKPGQAPVLVIYGKNNRPSGIPDRFSGSSSGNTASLTITGAQAEDEADYYCNSRDSSGNHVVFGGGTKLTVLG

SEQ ID NO: 23164 - protein, 239 aa, Artificial Sequence
  source: /note="Description of Artificial Sequence: Synthetic polypeptide"
QVQLVQSGAEVRKPGASVKVSCKASGYMFTGYYMHWVRQAPGQGLEWMGWIKPYSGGTNYAQKFHDRVTMTRDTSISTAYMEVMRLTSDDSAVFYCARSRYSSSPFRGGLDVWGRGTMVTVSSGGGGSGGGGSGGGGSAQAVLTQPSSVSGAPGQRVTISCTGSSSNIGDGYDVHWYQQLPGTAPKLLIYGNTNRPSGVPDRFSGSKSDTSASLAITGLQVEDEADYFCHSYDSFGGGT

SEQ ID NO: 23165 - protein, 137 aa, Artificial Sequence
  source: /note="Description of Artificial Sequence: Synthetic polypeptide"
MAWVWTLLFLMAAAQSAQAQVQLVQSGAEVKKPGASVKVSCKASGYTFTSYAISWNWVRQAPGQKLEWMGWINGNGDTNYAQKFQGRVTITADTSTSTAYMELSSLRSEDTAVYYCARAPGYGSDYWGQGTLVTVSS

SEQ ID NO: 23166 - protein, 126 aa, Artificial Sequence
  source: /note="Description of Artificial Sequence: Synthetic polypeptide"
MAWVWTLLFLMAAAQSAQADIQMTQSPSSLSASVGDRVTITCRASQSISNYLAWYQQKPGKAPKLLIYAASSLESGVPSRFSGSGSGTRFTLTISSLQPEDFATYYCQQYNSLPWTFGQGTKVEIK

SEQ ID NO: 23167 - protein, 111 aa, Artificial Sequence
  source: /note="Description of Artificial Sequence: Synthetic polypeptide"
LVQVGGSLRLSCVVSGSDISGIAMGWYRQAPGKRREMVADIFSGGSTDYAGSVKGRFTISRDNAKKTSYLQMNNVKPEDTGVYYCRLYGSGDYWGQGTQVTVSSAHHSEDP

SEQ ID NO: 23168 - protein, 115 aa, Artificial Sequence
  source: /note="Description of Artificial Sequence: Synthetic polypeptide"
LVHPGGSLRLSCAPSASLPSTPFNPFNNMVGWYRQAPGKQREMVASIGLRINYADSVKGRFTISRDNAKNTVDLQMDSLRPEDSATYYCHIEYTHYWGKGTLVTVSSEPKTPKPQ

SEQ ID NO: 23169 - protein, 269 aa, Artificial Sequence
  source: /note="Description of Artificial Sequence: Synthetic polypeptide"
QVQLVESGGGLVQVGGSLRLSCVVSGSDISGIAMGWYRQAPGKRREMVADIFSGGSTDYAGSVKGRFTISRDNAKKTSYLQMNNVKPEDTGVYYCRLYGSGDYWGQGTQVTVSSAHHSEDPTSAIAGGGGSGGGGSGGGGSLQGQLQLVESGGGLVHPGGSLRLSCAPSASLPSTPFNPENNMVGWYRQAPGKQREMVASIGLRINYADSVKGRFTISRDNAKNTVDLQMDSLRPEDSATYYCHIEYTHYWGKGTLVTVSSEPKTPKPQ

SEQ ID NO: 23170 - protein, 132 aa, Artificial Sequence
  source: /note="Description of Artificial Sequence: Synthetic polypeptide"
QVQLVESGGGLVQPGGSLRLSCVVSGSDFNTYIMGWYRQVPGKPRELVADITTEGKTNYGGSVKGRFTISRDNAKNTVYLQMFGLKPEDAGNYVCNADWKMGAWTAGDYGIDYWGKGTLVTVSSEPKTPKPQ

SEQ ID NO: 23171 - protein, 136 aa, Artificial Sequence
  source: /note="Description of Artificial Sequence: Synthetic polypeptide"
QVQLVESGGGLVQPGGSLRLSCAASAGNLDYYAIGWFRQAPGKEREGVSCISSSDGSTVYTDSVKGRFTISRDNTKNTVDLQMDNLKPEDTAVYYCATVVNYYCTAGGSIHASPYEIWGQGTQVTVSSAHHSEDPS

SEQ ID NO: 23172 - protein, 133 aa, Artificial Sequence
  source: /note="Description of Artificial Sequence: Synthetic polypeptide"
QVQLVESGGGLVHPGGSLRLSCAPSASLPSTPFNPFNNMVGWYRQAPGKQREMVASIGLRINYADSVKGRFTISRDNAKNTVDLQMDSLRPEDSATYYCHIEYTHYWGKGTLVTVSSEPKTPKPQEPKTPKPQ

SEQ ID NO: 23173 - protein, 126 aa, Artificial Sequence
  source: /note="Description of Artificial Sequence: Synthetic polypeptide"
QVQLVESGGGLAQPGGSLRLSCEASGFGTWFRFDENTVNWYRQPPGKSREFDELVARYPKSGIVTYLDSVKGRFTISRDNAKKMAFLQMDNLKPEDTAVYYCNVGEFWGQGTQVTISSEPKTPKPQ

SEQ ID NO: 23174 - protein, 128 aa, Artificial Sequence
  source: /note="Description of Artificial Sequence: Synthetic polypeptide"
QVQLVESGGGLVQPGGSLRLSCAASGFTLGSRYMSWVRQAPGEGFEWVSSIEPSGTAWDGDSAKGRFTTSRDDAKNTLYLQMSNLQPEDTGVYYCATGYRTDTRIPGGSWGQGTQVTVSSEPKTPKPQ

SEQ ID NO: 23175 - protein, 120 aa, Artificial Sequence
  source: /note="Description of Artificial Sequence: Synthetic polypeptide"
QVQLVESGGGLVQPGGSLRLSCQVSGFTFGDWVMSWFRQAPGKEREFVASITATSSLKYYADSVKGRFTISRDNVNNTLFLQMDRLKSEDTAVYYCRSPNYWGQGTQVTVSAEPKTPKPQ

SEQ ID NO: 23176 - protein, 122 aa, Artificial Sequence
  source: /note="Description of Artificial Sequence: Synthetic polypeptide"
QVQLVESGGGLVQVGGSLRLSCVVSGSDISGIAMGWYRQAPGKRREMVADIFSGGSTDYAGSVKGRFTISRDNAKKTSYLQMNNVKPEDTGVYYCRLYGSGDYWGQGTQVTVSSAHHSEDPS

SEQ ID NO: 23177 - protein, 137 aa, Artificial Sequence
  source: /note="Description of Artificial Sequence: Synthetic polypeptide"
QVQLVESGGGLVQPGGSLKLSCAASGFTLGHHRVGWFRQAPGKKREGVACISATGLSTHYSDSVTGRFTVSRDNLNNVAYLQLNSLKPEDAGVYYCASRFSLNSVDANMCLSEPQYDNWGQGTQVRISSEPKTPKPQ

SEQ ID NO: 23178 - protein, 133 aa, Artificial Sequence
  source: /note="Description of Artificial Sequence: Synthetic polypeptide"
QVQLVESGGGLVQAGGSLRLSCAGSGRSFSAAVMGWFRQAPGKEREFVAALRQIIGSTHYADSVKGRFTISRDNAKNMLYLDMNSLKPTDTAAYYCTAGPPTMLDVSTDREYDTWGQGTQVTVSSAHHSEDPS

SEQ ID NO: 23179 - protein, 121 aa, Artificial Sequence
  source: /note="Description of Artificial Sequence: Synthetic polypeptide"
QVQLVESGGGLVRPGGSLRLSCVVSGFAYEMPMMGWYRQAPGNQRELVATIGTGGRMNYADSVKGRFTISRDNAKNTVYLQMNSLKPEDTAAYYCKIEFTNYWGQGTQVTVSSEPKTPKPQ

SEQ ID NO: 23180 - protein, 122 aa, Artificial Sequence
  source: /note="Description of Artificial Sequence: Synthetic polypeptide"
QVQLVESGGGLVQPGGSLRLSCTVSGSIFDLPGMNWYRQAPGAQRELVADISSDGRRTNYADSVKGRFTMSRDNAKKTVYLQMDSLKPDDTAVYYCNVKFTHHWGQGIQVTVSSEPKTPKPQ

SEQ ID NO: 23181 - protein, 122 aa, Artificial Sequence
  source: /note="Description of Artificial Sequence: Synthetic polypeptide"
QVQLVESGGGLVQPGGSLRLSCTVSGSIFGLPGMSWYRQAPGAQRELVADISSDGGRTHYADSVKGRFTISRDNDKKTVYLQMDSLKPDDTAVYYCNVKFTHHWGQGIQVTVSSEPKTPKPQ

SEQ ID NO: 23182 - protein, 122 aa, Artificial Sequence
  source: /note="Description of Artificial Sequence: Synthetic polypeptide"
QVQLVESGGGLVQDGGSLRLSCTTSGSIDSFNAIEWYRQAPGKQRELVASISSDGRRTNYADSVKGRFTISGDNAKNTVYLQMNSLKPEDTAVYYCHRPFTHYWGQGTQVTVSSEPKTPKPQ

SEQ ID NO: 23183 - protein, 303 aa, Artificial Sequence
  source: /note="Description of Artificial Sequence: Synthetic polypeptide"
MSDKIIHLTDDSFDTDVLKADGAILVDFWAEWCGPCKMIAPILDEIADEYQGKLTVAKLNIDQNPGTAPKYGIRGIPTLLLFKNGEVAATKVGALSKGQLKEFLDANLAGSGSGHMHHHHHHSSGLVPRGSGMKETAAAKFERQHMDSPDLGTDDDDKAMAISDPNSQVQLVESGGGLVQVGGSLRLSCVVSGSDISGIAMGWYRQAPGKRREMVADIFSGGSTDYAGSVKGRFTISRDNAKKTSYLQMNNVKPEDTGVYYCRLYGSGDYWGQGTQVTVSSAHHSEDPTSGAPVPYPDPLEPR

SEQ ID NO: 23184 - protein, 307 aa, Artificial Sequence
  source: /note="Description of Artificial Sequence: Synthetic polypeptide"
MSDKIIHLTDDSFDTDVLKADGAILVDFWAEWCGPCKMIAPILDEIADEYQGKLTVAKLNIDQNPGTAPKYGIRGIPTLLLFKNGEVAATKVGALSKGQLKEFLDANLAGSGSGHMHHHHHHSSGLVPRGSGMKETAAAKFERQHMDSPDLGTDDDDKAMAISDPNSQVQLVESGGGLVHPGGSLRLSCAPSASLPSTPFNPFNNMVGWYRQAPGKQREMVASIGLRINYADSVKGRFTISRDNAKNTVDLQMDSLRPEDSATYYCHIEYTHYWGKGTLVTVSSEPKTPKPQTSGAPVPYPDPLEPR

SEQ ID NO: 23185 - protein, 449 aa, Artificial Sequence
  source: /note="Description of Artificial Sequence: Synthetic polypeptide"
MSDKIIHLTDDSFDTDVLKADGAILVDFWAEWCGPCKMIAPILDEIADEYQGKLTVAKLNIDQNPGTAPKYGIRGIPTLLLFKNGEVAATKVGALSKGQLKEFLDANLAGSGSGHMHHHHHHSSGLVPRGSGMKETAAAKFERQHMDSPDLGTDDDDKAMAAAQVQLVESGGGLVQVGGSLRLSCVVSGSDISGIAMGWYRQAPGKRREMVADIFSGGSTDYAGSVKGRFTISRDNAKKTSYLQMNNVKPEDTGVYYCRLYGSGDYWGQGTQVTVSSAHHSEDPTSAIAGGGGSGGGGSGGGGSLQGQLQLVESGGGLVHPGGSLRLSCAPSASLPSTPFNPFNNMVGWYRQAPGKQREMVASIGLRINYADSVKGRFTISRDNAKNTVDLQMDSLRPEDSATYYCHIEYTHYWGKGTLVTVSSEPKTPKPQPARQGAPVPYPDPLEPR

SEQ ID NO: 23186 - protein, 469 aa, Artificial Sequence
  source: /note="Description of Artificial Sequence: Synthetic polypeptide"
MSDKIIHLTDDSFDTDVLKADGAILVDFWAEWCGPCKMIAPILDEIADEYQGKLTVAKLNIDQNPGTAPKYGIRGIPTLLLFKNGEVAATKVGALSKGQLKEFLDANLAGSGSGHMHHHHHHSSGLVPRGSGMKETAAAKFERQHMDSPDLGTDDDDKAMAISDPNSGAPVPYPDPLEPRAAAQVQLVESGGGLVQVGGSLRLSCVVSGSDISGIAMGWYRQAPGKRREMVADIFSGGSTDYAGSVKGRFTISRDNAKKTSYLQMNNVKPEDTGVYYCRLYGSGDYWGQGTQVTVSSAHHSEDPTSAIAGGGGSGGGGSGGGGSLQGQLQLVESGGGLVHPGGSLRLSCAPSASLPSTPFNPFNNMVGWYRQAPGKQREMVASIGLRINYADSVKGRFTISRDNAKNTVDLQMDSLRPEDSATYYCHIEYTHYWGKGTLVTVSSEPKTPKPQPARQGAPVPYPDPLEPR

SEQ ID NO: 23187 - protein, 111 aa, Artificial Sequence; identical to SEQ ID NO: 23167
  source: /note="Description of Artificial Sequence: Synthetic polypeptide"

SEQ ID NO: 23188 - protein, 115 aa, Artificial Sequence; identical to SEQ ID NO: 23168
  source: /note="Description of Artificial Sequence: Synthetic polypeptide"

SEQ ID NO: 23189 - protein, 269 aa, Artificial Sequence
  source: /note="Description of Artificial Sequence: Synthetic polypeptide"
QVQLVESGGGLVQVGGSLRLSCVVSGSDISGIAMGWYRQAPGKRREMVADIFSGGSTDYAGSVKGRFTISRDNAKKTSYLQMNNVKPEDTGVYYCRLYGSGDYWGQGTQVTVSSAHHSEDPTSAIAGGGGSGGGGSGGGGSLQGQLQLVESGGGLVHPGGSLRLSCAPSASLPSTPFNPFNNMVGWYRQAPGKQREMVASIGLRINYADSVKGRFTISRDNAKNTVDLQMDSLRPEDSATYYCHIEYTHYWGKGTLVTVSSEPKTPKPQ

SEQ ID NO: 23190 - protein, 272 aa, Artificial Sequence
  source: /note="Description of Artificial Sequence: Synthetic polypeptide"
  MOD_RES (16)..(17): Any amino acid
QAVLTQPSSVSGSPGXXVSITCSGSRSNVGTYGVGWFQQLPGSGLRTIIYYNDKRPSGVPDRFSASKSGNTATLIISSLQAEDEADYFCGSADGSSYGIFGSGTRLTVLGQPAAAGGGGSGGGGSGGGGSARQVGLQESGPSLVKPSQTLSLTCTVSGFSLSNSVVGWVRQAPGKVPEWLGSIDSGGYTVADPALKSRLSITRDTSKSQVSLSLNSVTTEDTAVYYCTRAYSITYYAYPPYIDYWGPGLLVTVSSTSGAPVPYPDPLEPRAA

SEQ ID NO: 23191 - protein, 275 aa, Artificial Sequence
  source: /note="Description of Artificial Sequence: Synthetic polypeptide"
QAVLTQPSSVSRSLGQSVSITCSGSSSNVGYGDYVGWFQRVPGSAPKLLIYGATTRASGVPDRFSGSRSGNTATLTISSLQAEDEADYYCSSYDSSHYSIFGSGTSLTVLGQPAAAGGGGSGGGGSGGGGSARQVELQESGPSLVKPSQTLSLTCTVSGFSLSSNAVGWVRQAPGKAPEWVGGIDIDGRPVYKPGLKSRLSITRDTSNAQVSLSLSSVTTEDTAVYFCASYYGGYLYNYAPGAYIEHLSPGLLITVSSTSGAPVPYPDPLEPRAA

SEQ ID NO: 23192 - protein, 272 aa, Artificial Sequence
  source: /note="Description of Artificial Sequence: Synthetic polypeptide"
SYELTQPPSMSVALGQTAKVTCQGDNLENFYVQWHQQKPGQAPVTVIFQDNKRPSGIPDRFSGSNSGNTATLTISGARTEDEADYYCQSGHSSIGGVFGSGTSLTVLGQPAAAGGGGSGGGGSGGGGSARQVQLQESGPSLVKPSQTLSLTCTVSGFSLTGNSVTWVRQAPGNVPEWLGGISRGGRTYYDTALKSRLSITRDTSKRQVSLSLSSVTTEDTAMYFCARSAYSTLYDYEYAADIYDWGPGLLVTVSSTSGAPVPYPDPLEPRAA

SEQ ID NO: 23193 - protein, 265 aa, Artificial Sequence
  source: /note="Description of Artificial Sequence: Synthetic polypeptide"
  MOD_RES (16)..(17): Any amino acid
SYELTQPPSVSVVWGXXAEITCQGDLLDKKYTAWYQQKPGQAPMKIINKDSERPSGIRDRFSGSSSGKTATLTINGARPEDEADYYCLSGDSNNNGVFGSGTSLTVLGQPAAAGGGGSGGGGSGGGGSARQVELQGSGPSLVKPSQTLSLTCTVSGFSWPNNAVDWVRQAPGKAPEWLGGIADNGRTNYNTALKARLSITRDTAKSHVSLSLSSVTAEDTAVYYCTAGVMVMHATDYWGPGLLVTVSSTSGAPVPYPDPLEPRAA

SEQ ID NO: 23194 - protein, 270 aa, Artificial Sequence
  source: /note="Description of Artificial Sequence: Synthetic polypeptide"
  MOD_RES (16)..(17): Any amino acid
QAVVTQPSSVSGSPGXXVSITCSGSSSNVGRYAVGWFQQLPGSGLRTVIYYNSNRPSGVPDRFSGSKSGNTATLTISSLQAEDEADYFCGSYDSSIYGVFGSGTRLTVLGQPAAAGGGGSGGGGSGGGGSARQVQLQESGPSLVRPSQTLSLTCTISGFSLREYGVGWVRQAPGKALEWLGRIDDSGYTLHNPALKSRLTITRDISKSQVSLSLSSVTLEDTAEYYCVYASRGTAWLGDIDVWGPGLLLTVSSTSGAPVPYPDPLEPRAA

SEQ ID NO: 23195 - protein, 272 aa, Artificial Sequence
  source: /note="Description of Artificial Sequence: Synthetic polypeptide"
  MOD_RES (16)..(17): Any amino acid
QAVLTQPSSVSRSLGXXVSITCSGGSSNVGQGDYVAWFQQVPGSAPKLLIYDATNRASGVPDRFVGSRYGNSATLIITSVQAEDEADYYCASYDSSMYTIFGSGTSLTVLGQPAAAGGGGSGGGGSGGGGSARQVELQGSGPSQVKPSQTLSLICTISGFSLTSNNVAWVRQAPGKGLEWVGVISDGGTPYYNSALKSRLSITRDTSKSQVSLSLSSVTTEDTAVYYCARTLDYSHIWLYSADQWGPGLLVTVSSTSGAPVPYPDPLEPRAA

SEQ ID NO: 23196 - protein, 287 aa, Artificial Sequence
  source: /note="Description of Artificial Sequence: Synthetic polypeptide"
GAPVPYPDPLEPRAGSYELTQPPSMSVALGQTAKVTCQGDNLENFYVQWHQQKPGQAPVTVIFQDNKRPSGIPDRFSGSNSGNTATLTISGARTEDEADYYCQSGHSSIGGVFGSGTSLTVLGQPAAAGGGGSGGGGSGGGGSARQVQLQESGPSLVKPSQTLSLTCTVSGFSLTGNSVTWVRQAPGNVPEWLGGISRGGRTYYDTALKSRLSITRDTSKRQVSLSLSSVTTEDTAMYFCARSAYSTLYDYEYAADIYDWGPGLLVTVSSTSGAPVPYPDPLEPRAA

SEQ ID NO: 23197 - protein, 133 aa, Artificial Sequence
  source: /note="Description of Artificial Sequence: Synthetic polypeptide"
QVQLVETGGGLVQAGDPLRLSCVASGRTVSRYDKAWFRQAPGKEREFVAGISWNGDTKIYADSVKGRFTISRENSRDTLDLQIDNLKPEDTAAYYCAVGIAGVQSMARMLGVRYWGQGTQVTVSSEPKTPKPQ

SEQ ID NO: 23198 - protein, 138 aa, Artificial Sequence
  source: /note="Description of Artificial Sequence: Synthetic polypeptide"
QVQLVETGGGLVQPGGSLRLSCAASGFSLDPYVIGWFRQAPGKEREGVSCITSRAASRTSVDSVNERFTISRDNAKNTVDLHINNLKPEDSGVYYCAAVPPAKLPLFSLCRSLPAKYDYWGQGTQVTVSSAHHSEDPS

SEQ ID NO: 23199 - protein, 119 aa, Artificial Sequence
  source: /note="Description of Artificial Sequence: Synthetic polypeptide"
EVQLQQPGPELEKPGASVKLSCKASGYSFTDYNMNWVKQNNGESLEWIGKIDPYYGGPSYNQKFKDKATLTVDKSSSTAYMQFKSLTSEDSAVYYCTRGGNRDWYFDVWGAGTTLTVSA

SEQ ID NO: 23200 - protein, 108 aa, Artificial Sequence
  source: /note="Description of Artificial Sequence: Synthetic polypeptide"
DIVMSQSHKFMSTSVGDRVSITCKASQDVGTAVAWYQQNPGQSPKFLIYWASTRHTGVPDRFTGSGSGTDFTLTITNVQSEDLADYFCQQYSSYPLTFGAGTSLELKR

SEQ ID NO: 23201 - protein, 122 aa, Artificial Sequence
  source: /note="Description of Artificial Sequence: Synthetic polypeptide"
QVQLQESGAELVRSGASVRMSCDASGYTFTSYNMHWVKQTPGQGLEWIGYIYPGNGGTNYIQKFKGKAILTADTSSSTAYMQISSLTSEDSAVYFCTRSPSHYSSDPYFDYWGQGTTLTVSS

SEQ ID NO: 23202 - protein, 108 aa, Artificial Sequence; identical to SEQ ID NO: 23200
  source: /note="Description of Artificial Sequence: Synthetic polypeptide"

SEQ ID NO: 23203 - protein, 119 aa, Artificial Sequence; identical to SEQ ID NO: 23199
  source: /note="Description of Artificial Sequence: Synthetic polypeptide"

SEQ ID NO: 23204 - protein, 113 aa, Artificial Sequence
  source: /note="Description of Artificial Sequence: Synthetic polypeptide"
DIVLSQSPSSLVVSVGEKVTMSCKSSQSLLYSRNQKNYLAWYQQKPGQSPKVLIYWASTRESGVPDRLTGSGSGTDFTLTISSVKAEDLAVYYCQQYYSYPLTFGAGTKLELK

SEQ ID NO: 23205 - protein, 113 aa, Artificial Sequence
  source: /note="Description of Artificial Sequence: Synthetic polypeptide"
EVQLQESGGGLVQPGGSLKLACAASGITFRNKAIGWYRQAPGKGLELVARIDSFDTTDYADSVKGRFSISRDNSKNTLYLQMNSLRAEDTAVYYCNLRGSNYWGQGTLVTVSS

SEQ ID NO: 23206 - protein, 113 aa, Artificial Sequence
  source: /note="Description of Artificial Sequence: Synthetic polypeptide"
EVQLQESGGGLVQPGGSLRLSCAASGITFRNKAIGWYRQAPGKGLELVARIDSFDTTDYADSVKGRFTISRDNSKNTLYLQMNSLRAEDTAVYYCNLRGSNYWGQGTLVTVSS

SEQ ID NO: 23207 - protein, 113 aa, Artificial Sequence
  source: /note="Description of Artificial Sequence: Synthetic polypeptide"
QVQLQESGGGLVQPGGSLKLACAASGITFRNKAIGWYRQAPGKGRELVARIDSFDTTDYADSVKGRFSISRDNAKNTVYLQMNSLKSEDTAVYYCNLRGSNYWGQGTQVTVSS

SEQ ID NO: 23208 - protein, 113 aa, Artificial Sequence
  source: /note="Description of Artificial Sequence: Synthetic polypeptide"
QVQLQESGGGLVQAGGSLRLSCAASGITFRRKAIGWYRQAPGKQRELVARIDSDDITDYADSVKGRFSISRDNAKNTVYLQMNSLKSEDTAVYYCNLRGSNYWGQGTQVTVSS

SEQ ID NO: 23209 - protein, 113 aa, Artificial Sequence
  source: /note="Description of Artificial Sequence: Synthetic polypeptide"
QVQLQESGGGLVQAGGSLRLSCAASGITFRRKAIGWYRQAPGKQRELVARIDSDDITDYADSVKGRFSISRDNAKNMVYLQMNSLKSEDTAVYYCNLRGSNYWGQGTQVTVSS

SEQ ID NO: 23210 - protein, 113 aa, Artificial Sequence
  source: /note="Description of Artificial Sequence: Synthetic polypeptide"
QVQLQESGGGLVQAGGSLRISCAASGITFRRRAIGWYRQAPGKQRELVARIDSDDITNYADSVKGRFSISRDNAKNTVFLQMNSLKSEDTAIYYCNLRGSNYWGQGTQVTVSS

SEQ ID NO: 23211 - protein, 113 aa, Artificial Sequence
  source: /note="Description of Artificial Sequence: Synthetic polypeptide"
QVQLQESGGGLVQAGGSLRISCAASGITFRRKAIGWYRQAPGKQRELVARIDSDDITNYADSVKGRFSISRDNAKNTVFLQMNSLKSEDTAIYYCNLRGSNYWGQGTQVTVSS

SEQ ID NO: 23212 - protein, 113 aa, Artificial Sequence
  source: /note="Description of Artificial Sequence: Synthetic polypeptide"
QVQLQESGGGLVQAGGSLRLSCAASGITFRRKAIGWYRQAPGKQRELVARIDSDDITNYADSVKGRFSISRDNAKNTVFLQMNSLKSEDTAVYYCNLRGSNYWGQGTQVTVSS

SEQ ID NO: 23213 - protein, 113 aa, Artificial Sequence
  source: /note="Description of Artificial Sequence: Synthetic polypeptide"
QVQLQESGGGLVQPGGSLRLSCVASGFSFRRKAIGWYRQAPGKQRELVARIDSDDITNYADSVKGRFSISRDNAKNTVFLQMNSLKSEDTAVYYCNLRGSNYWGQGTQVTVSS

SEQ ID NO: 23214 - protein, 113 aa, Artificial Sequence
  source: /note="Description of Artificial Sequence: Synthetic polypeptide"
QVQLQESGGGLVQPGGSLRLSCAASGITFRNKAIGWYRQAPGKQRELVARIDSGDITDYADSVKGRFSISRDNAKNTVYLQMNSLKSEDTAVYYCNLRGSNYWGQGTQVTVSS

SEQ ID NO: 23215 - protein, 113 aa, Artificial Sequence
  source: /note="Description of Artificial Sequence: Synthetic polypeptide"
QVQLQESGGGLVQAGGSLRLSCAASGITFRGKAIGWYRQAPGKQRELVARIDSGDITDYADSVKGRFSISRDNAKNTVYLQMNSLKSEDTAVYYCNLRGSNYWGQGTQVTVSS

SEQ ID NO: 23216 - protein, 113 aa, Artificial Sequence
  source: /note="Description of Artificial Sequence: Synthetic polypeptide"
QVQLQESGGGLVQAGGSLRLSCAASGIIFRNKAIGWYRQAPGKQRELVARIDSYDSTVYADSVKGRFSISRDNAKNTVYLQMNNPKSEDTAVYYCNLRGSNYWGQGTQVTVSS

SEQ ID NO: 23217 - protein, 113 aa, Artificial Sequence
  source: /note="Description of Artificial Sequence: Synthetic polypeptide"
QVQLQESGGGLVQAGGSLRLSCAASGITFRNKAIGWYRQAPGKQRELVARIDSYDITNYADSVKGRFSISRDNSKNTVYLQMNSLKSEDTAVYYCNLRGSNYWGQGTQVTVSS

SEQ ID NO: 23218 - protein, 113 aa, Artificial Sequence
  source: /note="Description of Artificial Sequence: Synthetic polypeptide"
QVQLQESGGGLVQAGGSLRLSCAASGITFRSKSVGWYRQAPGKQRELVGYISGGDITDYTDSVKGRFSISRDNAKNTVYLQMNSLKSEDTAVYYCNLRGSNYWGQGTQVTVSS

SEQ ID NO: 23219 - protein, 113 aa, Artificial Sequence
  source: /note="Description of Artificial Sequence: Synthetic polypeptide"
QVQLQESGGGLVQAGGSLRLSCAASGITFRGKSVGWYRQAPGKQRELVGYMSGGEITDYADSVKGRFSISRDNAKNTVYLQMNSLKSEDTAVYYCNLRGSNYWGQGTQVTVSS

SEQ ID NO: 23220 - protein, 113 aa, Artificial Sequence
  source: /note="Description of Artificial Sequence: Synthetic polypeptide"
QVQLQESGGGLVQAGGSLRLSCAASGITFRSKSVGWYRQHPGKQRELVGYISGADNIEYADSVKGRFSISRDNAKNTVYLQMNSLKSEDTAVYYCNLRGSNYWGQGTQVTVSS

SEQ ID NO: 23221 - protein, 113 aa, Artificial Sequence
  source: /note="Description of Artificial Sequence: Synthetic polypeptide"
QVQLQESGGGLVQAGGFLRLSCAASGITFRSKSVGWYRQAPGKQRELVAYISGDDITNYADSVKGRFSISRDNAKNTVYLQMNSLKSEDTAVYYCNLRGSNYWGQGTQVTVSS

SEQ ID NO: 23222 - protein, 113 aa, Artificial Sequence
  source: /note="Description of Artificial Sequence: Synthetic polypeptide"
QVQLQESGGGLVQPGGSLRLSCAASGIIFKSKAVGWYRQAPGTQREWVAYITGDDSTSYQDFVKGRFTISRDNAKNTVYLQMNNLKPEDTAVYYCNLRGSNYWGQGTQVTVSS

SEQ ID NO: 23223 - protein, 113 aa, Artificial Sequence
  source: /note="Description of Artificial Sequence: Synthetic polypeptide"
QVQLQESGGGLVQPGGSLRLSCAASGILFRSKAVGWYRQAPGTQREWVAYITGDDLTSYEDFVKGRFTISRDNAKNMVYLQMNSLKPEDTAVYYCNLRGSNYWGQGTQVTVSS

SEQ ID NO: 23224 - protein, 113 aa, Artificial Sequence
  source: /note="Description of Artificial Sequence: Synthetic polypeptide"
QVQLQESGGGLVQAGGSLRLSCAASGIIFRNKAIGWYRQAPGKQRELVARIDSADITNYPDSVKGRFSISRDNAKNTVYLQMNSLKSEDTAVYYCNLRGTNYWGQGTQVTVSS

SEQ ID NO: 23225 - protein, 113 aa, Artificial Sequence; identical to SEQ ID NO: 23224
  source: /note="Description of Artificial Sequence: Synthetic polypeptide"

SEQ ID NO: 23226 - protein, 113 aa, Artificial Sequence
  source: /note="Description of Artificial Sequence: Synthetic polypeptide"
QVQLQESGGGLVQAGGSLRLSCAASGIIFRGKAIGWYRQAPGKQRELVARIDAGDITNYADSVKGRFSISRDHAKNTVYLQMNSLKSEDTAVYYCNLRGTNYWGQGTQVTVSS

SEQ ID NO: 23227 - protein, 113 aa, Artificial Sequence
  source: /note="Description of Artificial Sequence: Synthetic polypeptide"
QVQLQESGGGLVQAGGSLRLSCAASGITFRRKAVGWYRQAPGKQRELVARIDSDDITNYADSVKGRFSISRDHAKNTVYLQMNSLKSEDTAVYYCNLRGTNYWGQGTQVTVSS

SEQ ID NO: 23228 - protein, 113 aa, Artificial Sequence
  source: /note="Description of Artificial Sequence: Synthetic polypeptide"
QVQLQESGGGLVQAGGSLRLSCAASGITLRNKSVGWYRQAPGRQRELVGYISGDDITNYVDSVKARFSISRDNAKNTVYLQMNSLKSEDTAVYYCNLRGANYWGQGTQVTVSS

SEQ ID NO: 23229 - protein, 113 aa, Artificial Sequence; identical to SEQ ID NO: 23228
  source: /note="Description of Artificial Sequence: Synthetic polypeptide"

SEQ ID NO: 23230 - protein, 118 aa, Artificial Sequence
  source: /note="Description of Artificial Sequence: Synthetic polypeptide"
QVQLQESGGGLVQAGGSLRLSCTASGSIFNTATMAWSRQAPGKQRELVASITQGRITYPVDSVKGRFTLSRDNSKNTVYLQMNSLEPEDTAVYYCGVDTIPTSRPRYWGQGTQVTVSS

SEQ ID NO: 23231 - protein, 116 aa, Artificial Sequence
  source: /note="Description of Artificial Sequence: Synthetic polypeptide"
QVQLQESGGGLVQAGGSLRLSCAASENPSSISTMAWYRQAPGKQRELVARIITGGYTNYLDSVMGRFTISRGNRESTAYLQMNSLKPEDTAVYICNARTWSSADYWGQGTQVTVSS

SEQ ID NO: 23232 - protein, 128 aa, Artificial Sequence
  source: /note="Description of Artificial Sequence: Synthetic polypeptide"
QVQLQESGGGLVQAGGSLRLSCAVSGRTGNIYAAMGWFRQAPGKQREFVSADSWNAGTTDYADSVKGRFTISRDNAKSTVYLQMNSLKPEDTAVYYCAAKIGLYDTSRGRFENEYDYWGQGTQVTVSS

SEQ ID NO: 23233 - protein, 126 aa, Artificial Sequence
  source: /note="Description of Artificial Sequence: Synthetic polypeptide"
QVQLQESGGGLVQAGGSLRLSCAASGRTGNIYAAMGWFRQAPGKQREFVSSDSWNGGSTDYADSVKGRFTISRDNAKSTVYLQMNSLKPEDTAVYYCAAKIGLHDTSRFENEYDYWGQGTQVTVSS

SEQ ID NO: 23234 - protein, 125 aa, Artificial Sequence
  source: /note="Description of Artificial Sequence: Synthetic polypeptide"
QVQLQESGGGLVQAGGSLRLSCAASGRTDIYAAMGWFRQAPGKQREFVASDSWNGGSTDYADSVKGRFTISRDNAKSTVNLQMNSLKPEDTAVYVCAAKIGLYGTTRFENEYDYWGQGTQVTVSS

SEQ ID NO: 23235 - protein, 126 aa, Artificial Sequence
  source: /note="Description of Artificial Sequence: Synthetic polypeptide"
QVQLQESGGGLVQAGGSLRLSCAVSGRTGSIYAAMGWFRQAPGKQREFVASDSWNALSTDYGDSVKGRFTISRDNAKNTVYLQMTTLKPEDTAVYYCAAKIGLYGTTRFENEYDYWGQGTQVTVSS

SEQ ID NO: 23236 - protein, 125 aa, Artificial Sequence
  source: /note="Description of Artificial Sequence: Synthetic polypeptide"
QVQLQESGGGLVQAGGSLRLDCAASARTSIYATVGWFRQVPGKQREFVSSVSWNGGSTDYTDSVKGRFTISRDNAKNTVVLQMNSLKPEDTAVYYCAAKIGLYGTRRFETDYDYWGQGTQVTVSS

SEQ ID NO: 23237 - protein, 121 aa, Artificial Sequence
  source: /note="Description of Artificial Sequence: Synthetic polypeptide"
QVQLQESGGGLAQAGGSLRLSCAASGFDFDYYAIGWFRQAPGKEREGVACITDSDGSTIYADSVRGRFTITADNAENTVYLQMNSLKPEDTAEYFCAAECFACSGYACHSWGRGTQVTVSS

SEQ ID NO: 23238 - protein, 124 aa, Artificial Sequence
  source: /note="Description of Artificial Sequence: Synthetic polypeptide"
QVQLQESGGGLVQPGGSLRLSCAASGFTIDYYAIAWFRQAPGEEREWVSCIRSGDGSTWYVDSVKGRFSISSDNAKNAVYLQISSLKPEDTAVYYCAASRGSPYCPAVIDYDYWGQGTQVTVSS

SEQ ID NO: 23239 - protein, 126 aa, Artificial Sequence
  source: /note="Description of Artificial Sequence: Synthetic polypeptide"
QVQLQESGGGLVQPGGSLRLSCAASGIIFRSKSVGWYRQAPGTQREWVAYISGDDSTNYEDFVKGRFTISRDNAKNTVYLQMNSVKPEDTAIYYCAADYRDYDELLLPVPPPYDYWGQGTQVTVSS

SEQ ID NO: 23240 - protein, 124 aa, Artificial Sequence
  source: /note="Description of Artificial Sequence: Synthetic polypeptide"
QVQLQESGGGLVQAGGSLRLSCVVSGGTFRLYGIGWFRQAPGKDREFVGFITWSSGRTYYSDSLKGRLTISRDNAKNSVDLQMNRLQPEDTAIYYCAANPTDTLRLSTPSYNHWGQGTQVTVSS

SEQ ID NO: 23241 - protein, 384 aa, Artificial Sequence
  source: /note="Description of Artificial Sequence: Synthetic polypeptide"
MAQVQLQESGGGLVQPGGSLKLACAASGITFRNKAIGWYRQAPGKGRELVARIDSFDTTDYADSVKGRFSISRDNAKNTVYLQMNSLKSEDTAVYYCNLRGSNYWGQGTQVTVSSGGGGSGGGGSGGGGSQVQLQESGGGLVQAGGSLRLSCAASGRNISEYVMGWFRQAPGKEREFVAAISWSAGNIYYADSVKGRFTISRDNAKNTVHLQMNTLRPEDTAVYYCAAGRYSAWYVAAYEYDYWGQGTQVTVSSGGGGSGGGGSGGGGSQVQLQESGGGLVQPGGSLKLACAASGITFRNKAIGWYRQAPGKGRELVARIDSFDTTDYADSVKGRFSISRDNAKNTVYLQMNSLKSEDTAVYYCNLRGSNYWGQGTQVTVSSHH

SEQ ID NO: 23242 - protein, 380 aa, Artificial Sequence
  source: /note="Description of Artificial Sequence: Synthetic polypeptide"
EVQLQESGGGLVQPGGSLKLACAASGITFRNKAIGWYRQAPGKGLELVARIDSFDTTDYADSVKGRFSISRDNSKNTLYLQMNSLRAEDTAVYYCNLRGSNYWGQGTLVTVSSGGGGSGGGGSGGGGSQVQLQESGGGLVQAGGSLRLSCAASGRNISEYVMGWFRQAPGKEREFVAAISWSAGNIYYADSVKGRFTISRDNAKNTVHLQMNTLRPEDTAVYYCAAGRYSAWYVAAYEYDYWGQGTQVTVSSGGGGSGGGGSGGGGSEVQLQESGGGLVQPGGSLKLACAASGITFRNKAIGWYRQAPGKGLELVARIDSFDTTDYADSVKGRFSISRDNSKNTLYLQMNSLRAEDTAVYYCNLRGSNYWGQGTLVTVSS

SEQ ID NO: 23243 - protein, 380 aa, Artificial Sequence
  source: /note="Description of Artificial Sequence: Synthetic polypeptide"
EVQLQESGGGLVQPGGSLKLACAASGITFRNKAIGWYRQAPGKGLELVARIDSFDTTDYADSVKGRFSISRDNSKNTLYLQMNSLRAEDTAVYYCNLRGSNYWGQGTLVTVSSGGGGSGGGGSGGGGSQVQLQESGGGLVQPGGSLRLSCAASGRNISEYVMGWFRQAPGKGLEFVAAISWSAGNIYYADSVKGRFTISRDNSKNTLYLQMNSLRAEDTAVYYCAAGRYSAWYVAAYEYDYWGQGTLVTVSSGGGGSGGGGSGGGGSEVQLQESGGGLVQPGGSLKLACAASGITFRNKAIGWYRQAPGKGLELVARIDSFDTTDYADSVKGRFSISRDNSKNTLYLQMNSLRAEDTAVYYCNLRGSNYWGQGTLVTVSS

SEQ ID NO: 23244 - protein, 380 aa, Artificial Sequence
  source: /note="Description of Artificial Sequence: Synthetic polypeptide"
EVQLQESGGGLVQPGGSLRLSCAASGITFRNKAIGWYRQAPGKGLELVARIDSFDTTDYADSVKGRFTISRDNSKNTLYLQMNSLRAEDTAVYYCNLRGSNYWGQGTLVTVSSGGGGSGGGGSGGGGSQVQLQESGGGLVQAGGSLRLSCAASGRNISEYVMGWFRQAPGKEREFVAAISWSAGNIYYADSVKGRFTISRDNAKNTVHLQMNTLRPEDTAVYYCAAGRYSAWYVAAYEYDYWGQGTQVTVSSGGGGSGGGGSGGGGSEVQLQESGGGLVQPGGSLRLSCAASGITFRNKAIGWYRQAPGKGLELVARIDSFDTTDYADSVKGRFTISRDNSKNTLYLQMNSLRAEDTAVYYCNLRGSNYWGQGTLVTVSS

SEQ ID NO: 23245 - protein, 380 aa, Artificial Sequence
  source: /note="Description of Artificial Sequence: Synthetic polypeptide"
EVQLQESGGGLVQPGGSLRLSCAASGITFRNKAIGWYRQAPGKGLELVARIDSFDTTDYADSVKGRFTISRDNSKNTLYLQMNSLRAEDTAVYYCNLRGSNYWGQGTLVTVSSGGGGSGGGGSGGGGSQVQLQESGGGLVQPGGSLRLSCAASGRNISEYVMGWFRQAPGKGLEFVAAISWSAGNIYYADSVKGRFTISRDNSKNTLYLQMNSLRAEDTAVYYCAAGRYSAWYVAAYEYDYWGQGTLVTVSSGGGGSGGGGSGGGGSEVQLQESGGGLVQPGGSLRLSCAASGITFRNKAIGWYRQAPGKGLELVARIDSFDTTDYADSVKGRFTISRDNSKNTLYLQMNSLRAEDTAVYYCNLRGSNYWGQGTLVTVSS

SEQ ID NO: 23246 - protein, 129 aa, Artificial Sequence
  source: /note="Description of Artificial Sequence: Synthetic polypeptide"
QVQLVETGGGLAQAGDSLRLSCVEPGRTLDMYAMGWIRQAPGEEREFVASISGVGGSPRYADSVKGRFTISKDNTKSTIWLQMNSLKPEDTAVYYCAAGGDIYYGGSPQWRGQGTRVTVSSEPKTPKPQ

SEQ ID NO: 23247 - protein, 132 aa, Artificial Sequence
  source: /note="Description of Artificial Sequence: Synthetic polypeptide"
QVQLVESGGGLVQAGGSLRLSCAASGRINGDYAMGWFRQAPGEEREFVAVNSWIGGSTYYTDSVKGRFTLSRDNAKNTLSLQMNSLKPEDTAVYYCAAGHYTDFPTYFKEYDYWGQGTQVTVSSEPKTPKPQ

SEQ ID NO: 23248 - protein, 132 aa, Artificial Sequence
  source: /note="Description of Artificial Sequence: Synthetic polypeptide"
QVQLVETGGLVQAGGSLRLSCAASGVPFSDYTMAWFRQAPGKEREVVARITWRGGGPYYGNSGNGRFAISRDIAKSMVYLHMDSLKPEDTAVYYCAASRLRPALASMASDYDYWGQGTQVSVSSEPKTPKPQ

SEQ ID NO: 23249 - protein, 124 aa, Artificial Sequence
  source: /note="Description of Artificial Sequence: Synthetic polypeptide"
QVQLVESGGGLVQPGESLRLSCVASASTFSTSLMGWVRQAPGKGLESVAEVRTTGGTFYAKSVAGRFTISRDNAKNTLYLQMNSLKAEDTGVYYCTAGAGPIATRYRGQGTQVTVSSAHHSEDP

SEQ ID NO: 23250 - protein, 137 aa, Artificial Sequence
  source: /note="Description of Artificial Sequence: Synthetic polypeptide"
QVQLVESGGGLVQPGGSLKLSCAASGFTLADYVTVWFRQAPGKSREGVSCISSSRGTPNYADSVKGRATVSRNNANNTVYLQMNGLKPDDTAIYYCAAIRPARLRAYRECLSSQAEYDYWGQGTQVTVSSAHHSEDP

SEQ ID NO: 23251 - protein, 134 aa, Artificial Sequence
  source: /note="Description of Artificial Sequence: Synthetic polypeptide"
QVQLVESGGGLVQPGGSLGLSCAMSGTTQDYSAVGWFRQAPGKEREGVSCISRSGRRTNYADSVRGRFTISRDNAKDTVYLWINSLKPDDTAVYYCAARKTDMSDPYYVGCNGMDYWGKGTLVTVSSAHHSEDP

SEQ ID NO: 23252 - protein, 130 aa, Artificial Sequence
  source: /note="Description of Artificial Sequence: Synthetic polypeptide"
QVQLVESGGGLVQPGGSLTLSCTASGFTLNSYKIGWFRQAPGKEREGVSCINSGGNLRSVEGRFTISRDNTKNTVSLHMDSLKPEDTGVYHCAAAPALNVFSPCVLAPRYDYWGQGTQVTVSSAHHSEDP

SEQ ID NO: 23253 - protein, 134 aa, Artificial Sequence
  source: /note="Description of Artificial Sequence: Synthetic polypeptide"
QVQLVESGGGLVQPGGSLRLSCAASGFTLGSYHIGWFRHPPGKEREGTSCLSSRGDYTKYAEAVKGRFTISRDNTKSTVYLQMNNLKPEDTGIYVCAAIRPVLSDSHCTLAARYNYWGQGTQVTVSSAHHSEDP

SEQ ID NO: 23254 - protein, 133 aa, Artificial Sequence
  source: /note="Description of Artificial Sequence: Synthetic polypeptide"
QVQLVESGGGLVQPGGSLRLSCAALEFTLEDYAIAWFRQAPGKEREGVSCISKSGVTKYTDSVKGRFTVARDNAKSTVILQMNNLRPEDTAVYNCAAVRPVFVDSVCTLATRYTYWGEGTQVTVSSAHHSEDP

SEQ ID NO: 23255 - protein, 134 aa, Artificial Sequence
  source: /note="Description of Artificial Sequence: Synthetic polypeptide"
QVQLVETGGGLVQPGGSLKLSCAASEFTLDDYHIGWFRQAPGKEREGVSCINKRGDYINYKDSVKGRFTISRDGAKSTVFLQMNNLRPEDTAVYYCAAVNPVFPDSRCTLATRYTHWGQGTQVTVSSAHHSEDP

SEQ ID NO: 23256 - protein, 113 aa, Artificial Sequence; identical to SEQ ID NO: 23204
  source: /note="Description of Artificial Sequence: Synthetic polypeptide"

SEQ ID NO: 23257 - protein, 122 aa, Artificial Sequence; identical to SEQ ID NO: 23201
  source: /note="Description of Artificial Sequence: Synthetic polypeptide"

SEQ ID NO: 23258 - protein, 129 aa, Artificial Sequence; identical to SEQ ID NO: 23246
  source: /note="Description of Artificial Sequence: Synthetic polypeptide"

SEQ ID NO: 23259 - protein, 132 aa, Artificial Sequence; identical to SEQ ID NO: 23247
  source: /note="Description of Artificial Sequence: Synthetic polypeptide"

SEQ ID NO: 23260 - protein, 134 aa, Artificial Sequence; identical to SEQ ID NO: 23253
  source: /note="Description of Artificial Sequence: Synthetic polypeptide"

SEQ ID NO: 23261 - protein, 133 aa, Artificial Sequence; identical to SEQ ID NO: 23254
  source: /note="Description of Artificial Sequence: Synthetic polypeptide"

SEQ ID NO: 23262 - protein, 134 aa, Artificial Sequence; identical to SEQ ID NO: 23255
  source: /note="Description of Artificial Sequence: Synthetic polypeptide"

SEQ ID NO: 23263 - protein, 132 aa, Artificial Sequence; identical to SEQ ID NO: 23248
  source: /note="Description of Artificial Sequence: Synthetic polypeptide"

SEQ ID NO: 23264 - protein, 124 aa, Artificial Sequence; identical to SEQ ID NO: 23249
  source: /note="Description of Artificial Sequence: Synthetic polypeptide"

SEQ ID NO: 23265 - protein, 137 aa, Artificial Sequence; identical to SEQ ID NO: 23250
  source: /note="Description of Artificial Sequence: Synthetic polypeptide"

SEQ ID NO: 23266 - protein, 134 aa, Artificial Sequence
  source: /note="Description of Artificial Sequence: Synthetic polypeptide"
QVQLVESGGGLVQPGGSLGLSCAMSGTTQDYSAVGWFRQAPGKEREGVSCISRSGRRTNYADSVRGRFTISRDNAKDTVYLQMNSLKPDDTAVYYCAARKTDMSDPYYVGCNGMDYWGKGTLVTVSSAHHSEDP

SEQ ID NO: 23267 - protein, 130 aa, Artificial Sequence; identical to SEQ ID NO: 23252
  source: /note="Description of Artificial Sequence: Synthetic polypeptide"

SEQ ID NO: 23268 - protein, 128 aa, Artificial Sequence
  source: /note="Description of Artificial Sequence: Synthetic polypeptide"
VQLEESGAEVKKPGASVKVSCKASRYTFTNYYMHWVRQAPGQGLEWMGIINPSGGSTSYAQKFQGRVTMTRDTSTSTVYMELSSLRSEDTAMYYCARDLGHKYVGGRFLEINNWFNPWGQGTTVTVSS

SEQ ID NO: 23269 - protein, 119 aa, Artificial Sequence
  source: /note="Description of Artificial Sequence: Synthetic polypeptide"
MAKISWWQSGGEVKKPGESLKISCKGSGYIFASHWIGWVRQMPGKGLEWIGFIFPGDSDTRYSPSFQGQVTISADKSINTAYLQWTTLEASDTAMYYCARRGSSYDAFDIWGQGTMVTV

SEQ ID NO: 23270 - protein, 113 aa, Artificial Sequence
  source: /note="Description of Artificial Sequence: Synthetic polypeptide"
QVQLVQSGGGVVQPGRSLRLSCAASGFTFSSYAMHWVRQAPGKGLEWVAVISYDGSNKYYADSVKGRFTISRDNSKNTLYLQMSSLRAEDTAVYYCVKGASSWSTGTLVTVSS

SEQ ID NO: 23271 - protein, 118 aa, Artificial Sequence
  source: /note="Description of Artificial Sequence: Synthetic polypeptide"
QIQLVQSGPELKKPGETVKISCKASGYTFTNYGINWVKQAPGKGLKWMGWINTITEEPTFAEEFTGRFAFSLETSASTAYLQINNLKNEDTATYFCARGSEFGRLVYWGQGASVTVSS

SEQ ID NO: 23272 - protein, 114 aa, Artificial Sequence
  source: /note="Description of Artificial Sequence: Synthetic polypeptide"
QVQLVQSGGGVVQPGRSLRLSCAASGFTFSSYAMHWVRQAPGKGLEWVAVISYDGSNKYYADSVKGRFTISRDNSKNTLYLQMSSLRAEDTAVYYCVKGASSWSTGTLVTVSSA

SEQ ID NO: 23273 - protein, 121 aa, Artificial Sequence
  source: /note="Description of Artificial Sequence: Synthetic polypeptide"
QVQLQESGGGLVKPGGSLKLSCAASGFTFSSYGMSWVRQTPDKRLEWVATISSGGSYTYYPDSVKGRFTISRDNAKNTLYLQMSSLKSEDTAMYYCARLYYGYRYYFDYWGQGTMVTVSSA

SEQ ID NO: 23274 - protein, 125 aa, Artificial Sequence
  source: /note="Description of Artificial Sequence: Synthetic polypeptide"
QVQLVQSGGGVVQPGRSLRLSCAASGFTFSSYAMHWVRQAPGKGLEWVAVISYDGSNKYYADSVKGRFTISRDNSKNTLYLQMNSLRAEDKAVYYCARDSGGIAARLGGYFDLWGRGTTVTVSSA

SEQ ID NO: 23275 - protein, 108 aa, Artificial Sequence
  source: /note="Description of Artificial Sequence: Synthetic polypeptide"
EIVLTQSPDILSLSPGERATLSCRASQALTAKYLAWYQQKPGQVPRLLIYGSSTRATGIPDRFRGSGSGTDFTLTISRLEPADSAVYYCQQYEDSPWTFGQGTKLEIK

SEQ ID NO: 23276 - protein, 151 aa, Artificial Sequence
  source: /note="Description of Artificial Sequence: Synthetic polypeptide"
MKSQTQVFVFLLLCVSGAHGSIVMTQTPKFLLVSAGDRVTITCKASQSVTNDVTWYQQKPGQSPKLLIYYASNRYTGVPDRFTGSGYGTDFTFTISTVQAEDLAVYFCQQDYSSPFTFGSGTKLEIKRADAAPTVSIFPPSSEQLSNSCSP

SEQ ID NO: 23277 - protein, 122 aa, Artificial Sequence; identical to SEQ ID NO: 7233
  source: /note="Description of Artificial Sequence: Synthetic polypeptide"

SEQ ID NO: 23278 - protein, 115 aa, Artificial Sequence
  source: /note="Description of Artificial Sequence: Synthetic polypeptide"
EVQLVESGGGLVQPGGSLRLSCEAFGFSFSRYWMHWVRQAPGKGLVWVARMSRDGSTVSYADSVKGRFTVSRDNAKNTLFLQMNSLTADDTAVYYCVSQIFLGYWGQGTLVTVSS

SEQ ID NO: 23279 - protein, 122 aa, Artificial Sequence
  source: /note="Description of Artificial Sequence: Synthetic polypeptide"
EVQLVESGGGLVQPGRSLRLSCTASGFNFDDYAMSWFRQAPGKGLEWVGYIRNKAYGGTTEYAASMRGRFTISRDDSKTIAYLQINSLKTEDTAIYYCTREGTAMVHTFDIWGQGTMVTVSS

SEQ ID NO: 23280 - protein, 120 aa, Artificial Sequence
  source: /note="Description of Artificial Sequence: Synthetic polypeptide"
QVQLVESGGGLVKPGGSLRLSCAASGFDFTDYYMNWIRQVPGKGLEWVASISSSAGTIYYADSVKGRFTISRDNAKRSLFLQMYSLRAEDMAVYYCARDQDRWNYPFDHWGQGTLVTVSS

SEQ ID NO: 23281 - protein, 118 aa, Artificial Sequence
  source: /note="Description of Artificial Sequence: Synthetic polypeptide"
QVQLVQSGPEVKKPGASVKVSCKAAGYMFTTYGISWVRRAPGQGLEWMGWIRTYNGDTNYALKVQDRVTMTTDTSTNTAYMDLRSLRSDDTAVYYCARGRVAAGFDYWGQGTTVTVSS

SEQ ID NO: 23282 - protein, 124 aa, Artificial Sequence
  source: /note="Description of Artificial Sequence: Synthetic polypeptide"
QVQLQESGPGLVKPSQTLSLTCNVSESISSSDYYWAWIRQPPGKGLEWLGQIYYRGTTYYNPSLKSRVSISVDTSKDQFSLNLMSVTAADTAVYYCARRSFSDIFTGVNSFDVWGQGTMVTVSS

SEQ ID NO: 23283 - protein, 120 aa, Artificial Sequence
  source: /note="Description of Artificial Sequence: Synthetic polypeptide"
EVQLVESGGGWRPGGSLRLSCAASGFIFDEYGLNWVRQAPGKGLEWISVINWSGDNTAYADSVKGRFNISRDNAKNSLYLYMSDLRVGDTALYFCTRGGDYDRGDTIDFWGRGTMVTVSS

SEQ ID NO: 23284 - protein, 121 aa, Artificial Sequence
  source: /note="Description of Artificial Sequence: Synthetic polypeptide"
EVQLVESGGGWQPGGSLRLSCTTSGFIFRNYFMHWVRHIPGKGPEWVARIQSDGAFTKYAESAQGRFEISRDNVKNILYLQMNSLRVEDSAIYYCARGLVPLAPGRAFDLWGQGTMVTVSS

SEQ ID NO: 23285 - protein, 116 aa, Artificial Sequence
  source: /note="Description of Artificial Sequence: Synthetic polypeptide"
EVQLVESGAEVKKPGESLRISCKASKDAFPNYWIAWVRHIPGKGLEWMGLIYPRDSDTRYSPSFQGQVTFSVDKSITTAYLQWSSLKASDTAIYYCAIGQFRFAPWGQGTLVTVSS

SEQ ID NO: 23286 - protein, 118 aa, Artificial Sequence
  source: /note="Description of Artificial Sequence: Synthetic polypeptide"
QVQLVESGPGLVKPSETLSLTCTVSGDSMRSHYWSWIRQPPGKGLEWIGSIYFDGRTDYNPSLYNRVAISVDTSKNQFSLKLRFVTAADTAVYYCARIGGSREGFQHWGHGTLVTVFS

SEQ ID NO: 23287 - protein, 122 aa, Artificial Sequence
  source: /note="Description of Artificial Sequence: Synthetic polypeptide"
EVQLVESGGGWRPGGSLRLSCAASGFKFDDYGMSWVRQVPGKGPEWVSGTNWNGGRTAYADFVLGRFTISRDNARNSLYLQMNSLSGDDTAIYYCARVPLSNGWHLSYFDYWGQGSPVIVSS

SEQ ID NO: 23288 - protein, 123 aa, Artificial Sequence
  source: /note="Description of Artificial Sequence: Synthetic polypeptide"
EVQLVESGGGLAQSGGSLRLSCVASGVTFVYSAMNWVRQAPGRGLEWVSTISAAGDNTFYADSLKGRFTISRDNSKNMLYLQMNSLRVDDTALYFCARELRRHYYDLRAFDIWGQGTMVTVSS

SEQ ID NO: 23289 - protein, 122 aa, Artificial Sequence
  source: /note="Description of Artificial Sequence: Synthetic polypeptide"
QVQLRESGPRLVKPLEILSLTCTVFGVNIGSYYGTRIPHTAGKGLEWIGRIFIRKGTNYSPYLQSRVTMSKDTSKKQISLKLTSVTAADTAVYYCAKALHTARGLEDAFDVWGKGTMVTVSS

SEQ ID NO: 23290 - protein, 124 aa, Artificial Sequence
  source: /note="Description of Artificial Sequence: Synthetic polypeptide"
QVQLQQWGAGLLKPSETLSLTCAVYGGSFSGYYWSWIRQPPGKNLEWIGEINDSGSTNYNPSLKSRVTISVDTSKNQFSLKLSSVTAADTAVYYCARDVLRYFDWLSERGLDYWGQGTLVTVSS

SEQ ID NO: 23291 - protein, 120 aa, Artificial Sequence
  source: /note="Description of Artificial Sequence: Synthetic polypeptide"
QVRLVKSGAEVKKPGSSVKVSCKASGGTFRSYTINRVLQAPGQGLEWMGRIIPFLCMSNSAQRFQDRVTMTADESTSTAHKELCCLRFEDTAVYYCARGWGDGYKGALDCWGQGTLVSVS

SEQ ID NO: 23292 - protein, 122 aa, Artificial Sequence
  source: /note="Description of Artificial Sequence: Synthetic polypeptide"
QVQLVESGGGSVKPGGSLRLSCSTSGFMFSYYYMSWFRQAPGKGLEWISYICGHGDHIYYADSVKGRFTISRDNATESLHLQMNNLKVEDTAIYYCAREGESDVLTGPYAFWGQGNTVTVSS

SEQ ID NO: 23293 - protein, 215 aa, Artificial Sequence
  source: /note="Description of Artificial Sequence: Synthetic polypeptide"
VQLQQSGPELVKPGTSVKISCKTSGYTFTENTMHWVKQSHGESLDWVGGINTDNGGTTYSQKFKGKATLTVDKSSSTAYMELRSLTSEDSAVYYCSTGYDAMDYWGQGTSVTVSSAKTTPPSVYPLAPGSAAQTNSMVTLGCLVKGYFPEPVTVTWNSGSLSSGVHTFPAVLQSDLYTLSSSVTVPSSTWPSETVTCNVAHPASSTKVDKKIVPR

SEQ ID NO: 23294 - protein, 233 aa, Artificial Sequence
  source: /note="Description of Artificial Sequence: Synthetic polypeptide"
EVQLQQSGAELVKPGASVKLSCTASGFNIKDNYMHWVKQRPEQGLEWIGRIDPANGNTKYDPKFQGKATITADTSSNTAYLQLSSLTSEDTAVYYCARHYDGYFLYYFEYWGQGTTLTVSSAKTTPPSVYPLAPGSAAQTNSMVTLGCLVKGYFPEPVTVTWNSGSLSSGVHTFPAVLQSDLYTLSSSVTVPSSTWPSETVTCNVAHPASSTKVDKKIVPRDCGCKPCICTVP

SEQ ID NO: 23295 - protein, 119 aa, Artificial Sequence
  source: /note="Description of Artificial Sequence: Synthetic polypeptide"
MAQMQLVQSGGEVKKPGESLKISCKGSGYIFASHWIGWVRQMPGKGLEWIGFIFPGDSDTRYSPSFQGQVTISADKSINTAYLQWTTLEASDTAMYYCARRGSSYDAFDIWGQGTMVTV

SEQ ID NO: 23296 - protein, 110 aa, Artificial Sequence
  source: /note="Description of Artificial Sequence: Synthetic polypeptide"
ALDIVMTQSPSSVSASVGDRVTITCRASQGIRSWLAWYQQKPGKAPKLLISAASSLQSGVPSRFSGSGSGTDFTLTVSSLQPEDFATYYCQQANSFPLTFGGGTKVEIKR

SEQ ID NO: 23297 - protein, 107 aa, Artificial Sequence
  source: /note="Description of Artificial Sequence: Synthetic polypeptide"
DIELTQSPSSVSASVGDRVTITCRASQAIASYLAWYQQRPGRAPRLLIYDVSNLQSGVPSRFSGSGSGTDFTLTISSLQGEDFASYYCQQSYSTPYSFGQGTKVKSN

SEQ ID NO: 23298 - protein, 108 aa, Artificial Sequence
  source: /note="Description of Artificial Sequence: Synthetic polypeptide"
DIVMMQSPATLSASVGDRVTITCRASQSISSWLAWYQQKPGKAPNLLIYKASSLESGVPSRFSGSGSGTEFTLTISSLQPDDFATYYCQQYKSFPYTFGQGTRLEIKR

SEQ ID NO: 23299 - protein, 108 aa, Artificial Sequence
  source: /note="Description of Artificial Sequence: Synthetic polypeptide"
DIQMTQTTSSLSASLGDRVTISCSASQGISNYLNWYQQKPDGTVKLLIFYTSTLYSGVPSRFSGSGSGTDYSLTISNLEPEDIATYYCQQYSRFPYVFGGGTKLEIKR

SEQ ID NO: 23300 - protein, 108 aa, Artificial Sequence; identical to SEQ ID NO: 23298
  source: /note="Description of Artificial Sequence: Synthetic polypeptide"

SEQ ID NO: 23301 - protein, 108 aa, Artificial Sequence
  source: /note="Description of Artificial Sequence: Synthetic polypeptide"
DIQLTQSPSSLSASIGDRVTITCQASQDITNSLNWYQQRPGQAPKLLIYDAFTLKTGVPSRFSGRGSGTSFTIAINSFQAEDIGTYFCQQSHRVPFTFGGGTRVEIKR

SEQ ID NO: 23302 - protein, 104 aa, Artificial Sequence
  source: /note="Description of Artificial Sequence: Synthetic polypeptide"
DIRMTQSPSFLSASVGDRVTITCRASQGISSYLAWYQQKPGKAPKLLIYAASTLQSGVPSRFSGSGSGTEFTLTISSLQPEDFATYYCQQGPTFGGGTKVEIKR

SEQ ID NO: 23303 - protein, 127 aa, Artificial Sequence
  source: /note="Description of Artificial Sequence: Synthetic polypeptide"
EVQLVESGGDLVKPGGSLRLSCVVSGFRISTSAMSWVRQVPGKGLEWVSDISESGGSKDYADSVRGRFTISRDTSKNTLYLQMNSLGADDTALYYCAKSVGYFDTSGYYRWDYFDSWGQGTLVTVSS

SEQ ID NO: 23304 - protein, 108 aa, Artificial Sequence
  source: /note="Description of Artificial Sequence: Synthetic polypeptide"
EIVLTQSPDTLSLSPGETATLSCRASQTVRRNSLAWYQQKPGQAPRLLIYGASDRATGIPDRFSGSGFGTDFTLTVSGLEPEDFAVYYCQQYGTSPRTFGQGTKLEIK

SEQ ID NO: 23305 - protein, 179 aa, Artificial Sequence
  source: /note="Description of Artificial Sequence: Synthetic polypeptide"
MEWIWIFLFILSGTAGVQSQVHLQQSGGEVARPGASVKLSCKASGYTFTGYGLSWVKQRTGQGLEWIGEIYPRSGNTYYNEKFKGKATLTADKSSSTAYMELRSLTSEDSAVYFCARSWGNSSFVYWGQGTLVTVSAAKTTPPSVYPLAPGSAAQTNSMVTLGCLVKGYFPEPVTVTWN

SEQ ID NO: 23306 - protein, 107 aa, Artificial Sequence; identical to SEQ ID NO: 10057
  source: /note="Description of Artificial Sequence: Synthetic polypeptide"

SEQ ID NO: 23307 - protein, 108 aa, Artificial Sequence
  source: /note="Description of Artificial Sequence: Synthetic polypeptide"
EIVLTQSPGTLSLSPGDRTTLSCRASQNVGRDFVAWYQQRPGQTPRLLIYAASDRATGIPDRFSGNGSGTDFTLTINSLEPEDFALYYCLQYGSSPHSFGQGTKLEIK

SEQ ID NO: 23308 - protein, 110 aa, Artificial Sequence
  source: /note="Description of Artificial Sequence: Synthetic polypeptide"
QLVLTQPASVSGSPGQSITISCTGTSSDIGGYKYVSWYQKHPGKAPKLMIFDVSNRPSGVSNRFSGSKSGNTASLTISGLQAEDEADYYCSSYTSSSSLVFGLGTRVTVL

SEQ ID NO: 23309 - protein, 106 aa, Artificial Sequence
  source: /note="Description of Artificial Sequence: Synthetic polypeptide"
EIVMTQSPATLSVSPGERATLSCRASQSVGSNLAWYQQKPGQAPRLLIYGASTRAAGIPARFSGSGSGTEFTLTISSLQSEDFAVYLCQQYNTWPTFGQGTKVEIK

SEQ ID NO: 23310 - protein, 110 aa, Artificial Sequence
  source: /note="Description of Artificial Sequence: Synthetic polypeptide"
QSVLTQSPSASGTPGQWVSISCSGSNSNIGTNTVNWYQQLPETAPKLLIYSNNQRPSGVPDRFSGSKSGTSASLAISGLQSEDEADYYCAVWDDSLNGPVFGGGTKLTVL

SEQ ID NO: 23311 - protein, 111 aa, Artificial Sequence
  source: /note="Description of Artificial Sequence: Synthetic polypeptide"
DIVMTQTPLSSPVTLGQPASISCRSSQSLEHSDENTYLSWFLQRPGQPPRLLIYKISHRFSGVPDRFSGSGAGTDFTLKISRVEAEDAGVYYCMQAKQFPWTFGQGTKVEI

SEQ ID NO: 23312 - protein, 113 aa, Artificial Sequence
  source: /note="Description of Artificial Sequence: Synthetic polypeptide"
DIVMTQSPDSLAVSLGDRATINCRSNQTLFYRSHNKNYLAWYQQRPPQPPKLIFYGASTRESGVPDRFSGSGSGTDFTLTITGLQTEDVAVYYCQQYYSNPITFGQGTRLEIK

SEQ ID NO: 23313 - protein, 108 aa, Artificial Sequence
  source: /note="Description of Artificial Sequence: Synthetic polypeptide"
EIVLTQSPDTLSLSPGERATLSCRANQSVTTDYLAWYKVKFGQAPRLLIYHTSRRAIGIPDRFSGSGSGTDFTLTISRLEPDDFVLYYCQQYENSPGTFGQGTKVEIK

SEQ ID NO: 23314 - protein, 104 aa, Artificial Sequence
  source: /note="Description of Artificial Sequence: Synthetic polypeptide"
DIQMTQSPSSLSASWGRVTIICQASQDIGNYLNWYQQKPGKAPKLLISDASNLQTGVPSRFSGSGSGADFTFTISSLQPQDVATYYCQQSHIVPVTFGPGTEVE

SEQ ID NO: 23315 - protein, 107 aa, Artificial Sequence
  source: /note="Description of Artificial Sequence: Synthetic polypeptide"
SYVLTQAPSVSVAPGQTASISCGGNNIGSKSVQWYRQTPGQAPVLWSDDSDRPSGIPERFSGSNSGNTATLTITRVEAGDEADYYCQVWDTTTDHVVFGGGTKLTVL

SEQ ID NO: 23316 - protein, 108 aa, Artificial Sequence
  source: /note="Description of Artificial Sequence: Synthetic polypeptide"
EIVLTQSPGTLSLSPGDRATLSCRTSQSLASINLAWYRQKPGQAPRLLIYDTSTRATGIPDRFSGSGSGTDFTLTISRLEPEDFAVYYCQQYGTLPRTFGPGTKVDIK

SEQ ID NO: 23317 - protein, 109 aa, Artificial Sequence
  source: /note="Description of Artificial Sequence: Synthetic polypeptide"
QAWTQSPSASGTPGQRVTISCSGTTSNIGSNSVSWYRQFPGTTPKLLIYTNNQRSSGVPGRFSGSKSGTSASLAISGLQSEDEADYFCASWDDSLNGHVFGGGTKLTVL

SEQ ID NO: 23318 - protein, 113 aa, Artificial Sequence
  source: /note="Description of Artificial Sequence: Synthetic polypeptide"
DIVMTQSPDSLAVSLGERATISCRSSQPLLFKSNNKNYLAWYQHKPGQPPRLLVYWASTRESGVPDRFSGSGSGTDFNLTISNLQAEDVAVYYCQQYYTTSYAFGQGTKLEIK

SEQ ID NO: 23319 - protein, 109 aa, Artificial Sequence
  source: /note="Description of Artificial Sequence: Synthetic polypeptide"
SMLTQPPSASGTPGQRVTISCSGSGSNIGSNYVYWFQQLPGTAPKLLIYRNNQRPSGVPDRFSGSKSGTSASLAISGLRSEDEADYYCAAWDDSLSVWVFGGGTKLTVL

SEQ ID NO: 23320 - protein, 112 aa, Artificial Sequence
  source: /note="Description of Artificial Sequence: Synthetic polypeptide"
NFMVTQPHSVSESPGKTVTISCTRSSGSIASNYVQWYQQRPGSSPTTVIYEDDQRPSGVPDRFSGSIDSSSNSASLTISGLKTEDEADYYCQSYDASNHLWVFGGGTKLTVL

SEQ ID NO: 23321 - protein, 110 aa, Artificial Sequence
  source: /note="Description of Artificial Sequence: Synthetic polypeptide"
QSVLTQSPSASASLGASVKLTCTLSSGHSSYAIAWHQQQPEKGPRYLMKLNSDGSHSKGDGIPDRFSGSSSGAERYLTISSLQSEDEADYYCQTWGTGIWFGGGTKLTVL

SEQ ID NO: 23322 - protein, 214 aa, Artificial Sequence
  source: /note="Description of Artificial Sequence: Synthetic polypeptide"
NIVLTQSPASLAVSLGQRATISCRASKGVDSYGNSFMHWYQQRPGQPPKLLIYLASHLESGVPARFSGSGSRTDFTLTIDPVEADDAATYYCQQNNEDPFTFGSGTKLEIKRADAAPTVSIFPPSSEQLTPGGASVVCFLNNFYPKDINVKWKIDGSERQNGVLNSWTDQDSKDSTYSMSSTLTLTKDEYERHNSYTCEATHKKGEFQHTGGRY

SEQ ID NO: 23323 - protein, 234 aa, Artificial Sequence
  source: /note="Description of Artificial Sequence: Synthetic polypeptide"
LSLDMMSSAQFLGLLLLCFQGTRCDIQMTQTTSSLSASLGDRVTITCRAGQDISNYLNWYQQKPDGTVKLLIYYTSRLHSGVPSRFSGSGSGTDYSLTISNLEQEDIATYFCQQGSTFPWTFGGGTKLEIKRADAAPTVSIFPPSSEQLTSGGASVVCFLNNFYPKDINVKWKIDGSERQNGVLNSWTDQDSKDSTYSMSSTLTLTKDEYERHNSYTCEATHKKGEFQHTGGRY

SEQ ID NO: 23324 - protein, 213 aa, Artificial Sequence
  source: /note="Description of Artificial Sequence: Synthetic polypeptide"
  MOD_RES (1)..(1): Any amino acid
XSVLSQSPAILSASPGEKVTMTCRARSSVSYMHWYQQKSGSSPKPWIHATSNLASGVPARFSGSGSGTSYSLTISRVEAEDAATYYCQQWSSHPPTFGSGTKLEIKRADAAPTVSIFPPSSEQLTSGGASVVCFLNNFYPKDINVKWKIDGSERQNGVLNSWTDQDSKDSTYSMSSTLTLTKDEYERHNSYTCEATHKTSTSPIVKSFNRNEC

SEQ ID NO: 23325 - protein, 212 aa, Artificial Sequence
  source: /note="Description of Artificial Sequence: Synthetic polypeptide"
DIVMTQSHKFMSTSVGDRVTITCKASQDVTTAVAWYQQKPGHSPKLLIYWASTRHTGVPDRFTGSGSGTAFTLTLNSVQAEDLALYYCQQHYSTPLTFGAGTKLELKRADAAPTVSIFPPSSEQLTSGGASVVCFLNNFYPKDINVKWKIDGSERQNGVLNSWTDQDSKDSTYSMSSTLTLTKDEYERHNSYTCEATHKTSTSPIVKSFNRN

SEQ ID NO: 23326 - protein, 220 aa, Artificial Sequence
  source: /note="Description of Artificial Sequence: Synthetic polypeptide"
EVQLVESGGGLVTPGGSLKLSCAASGFAFNYYDMFWVRQNTEKRLEWVAYINSGGGNTYYPDTVKGRFTISRDNAKKTLFLQMSSLRSEDTAMYYCARQLYGNSFFDYWGQGTSLTVSAAKTTPPSVYPLAPGSAAAAASMVTLGCLVKGYFPEPVTVTWNSGSLSSGVHTFPAVLQSDLYTLSSSVTVPSSPRPSETVTCNVAHPASSTKVDKKIVPRD

SEQ ID NO: 23327 - protein, 218 aa, Artificial Sequence
  source: /note="Description of Artificial Sequence: Synthetic polypeptide"
QLVLTQSSSASFSLGASAKLTCTLSRQHSTYTIEWYQQQPLKPPRYVMELKKDGSHSTGDGIPDRFSGSSSGADRYLSISNIQPEDEAIYICGVGDTIKEQFVYVFGGGTKVTVLGQPKSTPTLTVFPPSSEELKENKATLVCLISNFSPSGVTVAWKANGTPITQGVDTSNPTKEGNKFMASSFLHLTSDQWRSHNSFTCQVTHEGDTVEKSLSPAE

SEQ ID NO: 23328 - protein, 222 aa, Artificial Sequence
  source: /note="Description of Artificial Sequence: Synthetic polypeptide"
EVQVVESGGGLVKPGGSLKLSCAASGFAFSSYDMSWVRQTPEKRLEWVAYISRGGGYTYYPDTVKGRFTISRDNAKNTLYLQMSSLKSEDTAMYYCSRHIYYGSSHYYAMDYWGQGTSVTVSSAKTTAPSVYPLAPVCGDTTGSSVTLGCLVKGYFPEPVTLTWNSGSLSSGVHTFPAVLQSDLYTLSSSVTVTSSTWPSQSITCNVAHPASSTKVDKKIEP

SEQ ID NO: 23329 - protein, 226 aa, Artificial Sequence
  source: /note="Description of Artificial Sequence: Synthetic polypeptide"
QLQLQESGPGLVKPSETLSLTCTVSGGSISSSSYYWGWIRQPPGKGLEWIGSVYYSGGASYNPSLKSRATISVDTSKNQFSLNLDSVSAADTAIYYCASIYGSGTFYYYFYMDVWGKGSTVTVSSASTKGPSVFPLAPSSKSTSGGTAALGCLVKDYFPEPVTVSWNSGALTSGVHTFPAVLQSSGLYSLSSVVTVPSSSLGTQTYICNVNHKPSNTKVDKKVEPK

SEQ ID NO: 23330 - protein, 211 aa, Artificial Sequence
  source: /note="Description of Artificial Sequence: Synthetic polypeptide"
DIQMTQSPSSLSASVGDRVTITCQASQVISNYLNWYQQKPGKAPKLLIYDTSNLKTGVPSRFSGSGSGTDFTFTISSLQPEDIATYYCQQYENLQFTFGPGTKVDIKRTVAAPSVFIFPPSDEQLKSGTASVVCLLNNFYPREAKVQWKVDNALQSGNSQESVTEQDSKDSTYSLSSTLTLSKADYEKHKVYACEVTHQGLRSPVTKSFNR

SEQ ID NO: 23331 - protein, 861 aa, Artificial Sequence
  source: /note="Description of Artificial Sequence: Synthetic polypeptide"
MGVTGILQLPRDRFKRTSFFLWVIILFQRTFSIPLGVIHNSTLQVSDVDKLVCRDKLSSTNQLRSVGLNLEGNGVATDVPSATKRWGFRSGVPPKVVNYEAGEWAENCYNLEIKKPDGSECLPAAPDGIRGFPRCRYVHKVSGTGPCAGDFAFHKEGAFFLYDRLASTVIYRGTTFAEGVVAFLILPQAKKDFFSSHPLREPVNATEDPSSGYYSTTIRYQATGFGTNETEYLFEVDNLTYVQLESRFTPQFLLQLNETIYTSGKRSNTTGKLIWKVNPEIDTTIGEWAFWETKKNLTRKIRSEELSFTVVSNGAKNISGQSPARTSSDPGTNTTTEDHKIMASENSSAMVQVHSQGREAAVSHLTTLATISTSPQSLTTKPGPDNSTHNTPVYKLDISEATQVEQHHRRTDNDSTASDTPSATTAAGPPKAENTNTSKSTDFLDPATTTSPQNHSETAGNNNTHHQDTGEESASSGKLGLITNTIAGVAGLITGGRRTRREAIVNAQPKCNPNLHYWTTQDEGAAIGLAWIPYFGPAAEGIYIEGLMHNQDGLICGLRQLANETTQALQLFLRATTELRTFSILNRKAIDFLLQRWGGTCHILGPDCCIEPHDWTKNITDKIDQIIHDFVDKTLPDGTCPPCPAPELLGGPSVFLFPPKPKDTLMISRTPEVTCVVVDVSHEDPEVKFNWYVDGVEVHNAKTKPREEQYNSTYRVVSVLTVLHQDWLNGKEYKCKVSNKALPAPIEKTISKAKGQPREPQVYTLPPSRDELTKNQVSLTCLVKGFYPSDIAVEWESNGQPENNYKTTPPVLDSDGPFFLYSKLTVDKSRWQQGNVFSCSVMHEALHNHYTQKSLSLSPGK

SEQ ID NO: 23332 - protein, 213 aa, Artificial Sequence
  source: /note="Description of Artificial Sequence: Synthetic polypeptide"
QVQLQQSGPELVKPGASVKMSCKASGYTFTDYVISWVKQRTGQGLEWIGEFYPGTDSTYYTENFKGRATLTADKSSKTAYMQLSSLTSEDSAVYFCATAFDYWGQGTTLTVSSAATTPPSVYPLAPGSAAQTNSMVTLGCLVKGYFPEPVTVTWNSGSLSSGVHTFPAVLQSDLYTLSSSVTVPSSTWPSETVTCNVAHPASSTKVDKKIVPR

SEQ ID NO: 23333 - protein, 46 aa, Artificial Sequence
  source: /note="Description of Artificial Sequence: Synthetic polypeptide"
EVQLVESGGGLVQPGGSLRLSCAASGFAFNYYDIHWVRQAPGKGLE

SEQ ID NO: 23334 - protein, 46 aa, Artificial Sequence
  source: /note="Description of Artificial Sequence: Synthetic polypeptide"
EVQLVESGGGLVQPGGSLRLSCAASGFAFNYYDLHWVRQAPGKGLE

SEQ ID NO: 23335 - protein, 46 aa, Artificial Sequence
  source: /note="Description of Artificial Sequence: Synthetic polypeptide"
EVQLVESGGGLVQPGGSLRLSCAASGFAFNYYDMHWVRQAPGKGLE

SEQ ID NO: 23336 - protein, 46 aa, Artificial Sequence
  source: /note="Description of Artificial Sequence: Synthetic polypeptide"
WVAYINPGGGNTYYADSVKGRFTISADTSKNTAYLQMNSLRAEDTA

SEQ ID NO: 23337 - protein, 25 aa, Artificial Sequence
  source: /note="Description of Artificial Sequence: Synthetic peptide"
VYYCARQLYGNSFMDYWGQGTLVTV

SEQ ID NO: 23338 - protein, 25 aa, Artificial Sequence
  source: /note="Description of Artificial Sequence: Synthetic peptide"
VYYCARQLYGNSFFDYWGQGTLVTV

SEQ ID NO: 23339 - protein, 120 aa, Artificial Sequence
  source: /note="Description of Artificial Sequence: Synthetic polypeptide"
ERQLVESGGGVVKPGESLKLSCAASGFAFSSYDMSWVRQTPEKRLEWVAYSSRGGGFTYYPDTVKGRFTIARDNAKNTLHLQMSSLKSEDTAMYYCATHYYGPLYAMDYWGQGTSVTVSS

SEQ ID NO: 23340 - protein, 119 aa, Artificial Sequence
  source: /note="Description of Artificial Sequence: Synthetic polypeptide"
QVTLKESGPGILQPSQTLSLTCSFSGFSLSTSGMSVGWFRQPSGKGLEWLAHIWWTDDKYYNPALKSRLTISKDTSNNQVFLKIASVVTAESATYYCARIGYDGPPDYWGQGTIFTVSS

SEQ ID NO: 23341 - protein, 121 aa, Artificial Sequence
  source: /note="Description of Artificial Sequence: Synthetic polypeptide"
EVQLQQSGPELVKPGASVKMSCKASGYTFTSYVMHWVKQKPGQGLEWIGYINPYNDGPKYNEKFKGKATLTSDKSSRTAYMELSSLTTEDSAVFYCARGRGDAYFYVLDYWGQGTSVTVSS

SEQ ID NO: 23342 - protein, 150 aa, Artificial Sequence
  source: /note="Description of Artificial Sequence: Synthetic polypeptide"
WSWVILFLFSVTAGVHSQVQLQQSGAELAKPGASVKMSCKASGYTFTSYWMHWVKQRPGQGLEWIGYINPSTGYTEYNQKFKDKATLTADKSSTTAYMQLSSLTSEDSAVYYCARSGAYYYGSSPYFDYWGQGTTLTVSSAKTTPPSVYP

SEQ ID NO: 23343 - protein, 150 aa, Artificial Sequence
  source: /note="Description of Artificial Sequence: Synthetic polypeptide"
EFMEWSWVILFLLSVTAGVHSQVQLQQSGAELMKPGASVKISCKATGYTFSSYWIEWVKQRPGHGLEWIGEILPGSGSTNYNEKFKGKATFTADTSSNTAYMQLSSLTSEDSAVYYCARNYAYWGQGTLVTVSAAKTTPPSVYPLAPGSL

SEQ ID NO: 23344 - protein, 142 aa, Artificial Sequence
  source: /note="Description of Artificial Sequence: Synthetic polypeptide"
  MOD_RES (77)..(77): Any amino acid
VVPGILSDVQLQESGPGLVKPSQTVSLTCTVTGISITAGNYRWSWIREFPGNKLEWIGNIYYSGTIAYNPSLTSRTXITRDSSKNQFFLEMNSLTAEDTATYYCARDRGWLLLDYWGQGTTLTVSSEKQQPHPFIHWPLEAW

SEQ ID NO: 23345 - protein, 157 aa, Artificial Sequence
  source: /note="Description of Artificial Sequence: Synthetic polypeptide"
  MOD_RES (149)..(149): Any amino acid
  MOD_RES (151)..(151): Any amino acid
  MOD_RES (153)..(153): Any amino acid
LVDMDSRLNLVFLVLTLKGVKCEVQLVESGGGLVTPGGSLKLSCAASGFAFNYYDMFWVRQNTEKRLEWVAYINSGGGNTYYPDTVKGRFTISRDNAKKTLFLQMSSLRSEDTAMYYCARQLYGNSFFDYWGQGTSLTVSAAKTTPPSXYXLXPGSL

SEQ ID NO: 23346 - protein, 150 aa, Artificial Sequence
  source: /note="Description of Artificial Sequence: Synthetic polypeptide"
MDFGLIFFIVALLKGVQCDVKLLESGGGLVQPGGSLKLSCAASGFDFSRYWMSWVRQAPGKGLEWIGEINPDSSTINYTPSLKDKFIISRDNAKNTLYLQMSKVRSEDTALYYCTRQGYGYNYWGQGTTLIVSSAKTTAPPVYPLVPGSL

SEQ ID NO: 23347 - protein, 158 aa, Artificial Sequence
  source: /note="Description of Artificial Sequence: Synthetic polypeptide"
MELGLSWIFLVLTLKGVKCEVQVVESGGGLVKPGGSLKLSCAASGFAFSSYDMSWVRQTPEKRLEWVAYISRGGGYTYYPDTVKGRFTISRDNAKNTLYLQMSSLKSEDTAMYYCSRHIYYGSSHYYAMDYWGQGTSVTVSSAKTTAPPVYPLAPGSL

SEQ ID NO: 23348 - protein, 157 aa, Artificial Sequence
  source: /note="Description of Artificial Sequence: Synthetic polypeptide"
  MOD_RES (19)..(19): Any amino acid
MGRLTSSFLLLIVPAYVLXQLTLKESGPGILKPSQTLSLTCSLSGFSLSTSGVGVGWFRQPSGKGLEWLALIWWDDDKYYNPSLKSQLSISKDFSRNQVFLKISNVDIADTATYYCARRDPFGYDNAMGYWGQGTSVTVSSAKTTAPPVYPLVPGSL

SEQ ID NO: 23349 - protein, 119 aa, Artificial Sequence
  source: /note="Description of Artificial Sequence: Synthetic polypeptide"
EVQLVESGGGLVQPKGSLKLSCAASGFAFNSYAMHWVCQAPGKGLEWVARIRIKSGNYATSYAGSVTDRFTVSRDDSQNLFYLQMNNLKTEDTAMYYCVREWEGAMDYWGQGTSVTVSS

SEQ ID NO: 23350 - protein, 116 aa, Artificial Sequence
  source: /note="Description of Artificial Sequence: Synthetic polypeptide"
QVQLQQSGTELVRPGTSVKISCKASGYDFTNFWLGWIKQRPGHGLEWIGDIYPGGDNTYYNEKFKGKVTLTADKSSNTAYMQFSSLTSEDSAVYFCFMILYTLDYWGQGTSVTVSS

SEQ ID NO: 23351 - protein, 119 aa, Artificial Sequence
  source: /note="Description of Artificial Sequence: Synthetic polypeptide"
DVQLVESGGGLVQPGGSRKLSCTASGFTFSSFGMHWVRQAPEKGLEWVAYISSGSSKIYYADTVKGRFTISRDNPKNTLFLQMTSLRSEDTAMYYCARGWYEGAWFAYWGQGTLVTVSA

SEQ ID NO: 23352 - protein, 114 aa, Artificial Sequence
  source: /note="Description of Artificial Sequence: Synthetic polypeptide"
EVQLQQSGPELVKPGASVKISCRTSGYTFTEYTIHWVKQSRGKSLEWIGGINPNHGGTLYNQKFKVKATLTVDKSSSTAYMELRSLTSEDSAVYYCARFTYDYWGQGTTLTVSS

SEQ ID NO: 23353 - protein, 116 aa, Artificial Sequence
  source: /note="Description of Artificial Sequence: Synthetic polypeptide"
QIQLVQSGPELKKPGETVKISCKASGYTFTNYGMNWVKQAPGKGLKWMGWINTYTGKPTYVDDFKGRFAFSLETSANTAYLQINNLKNEDTATYFCESGGYDEDYWGQGTTLTVSS

SEQ ID NO: 23354 - protein, 119 aa, Artificial Sequence
  source: /note="Description of Artificial Sequence: Synthetic polypeptide"
QVQLKESGPGLVAPSQSLSITCTVSGFSLTDYGITWIRQPPGKGLEWLGVIWGGGSAYYNLVLKSRLSISKDNSKSQVFLKMNSLQTDDTAMYYCAKHRTLITTAMDYWGQGISVTVSS

SEQ ID NO: 23355 - protein, 121 aa, Artificial Sequence
  source: /note="Description of Artificial Sequence: Synthetic polypeptide"
EVKLVESGGGLVKSGGSLKLSCAVSGFTFSTYAMSWVRQIPEKRLEWVATISNGGSYIYYSDSVKGRFTISRDNAKNTLYLQMSSLRSEDTAMYYCARHRESYRYDWFAYWGQGTLVTVSA

SEQ ID NO: 23356 - protein, 226 aa, Artificial Sequence
  source: /note="Description of Artificial Sequence: Synthetic polypeptide"
  MOD_RES (34)..(34): Any amino acid
  MOD_RES (83)..(83): Any amino acid
  MOD_RES (108)..(108): Any amino acid
  MOD_RES (120)..(120): Any amino acid
EVQLLESGGGLVKPGGSLRLSCAASGFTLINYRXNWVRQAPGKGLEWVSSISSSSSYIHYADSVKGRFTISRDNAENSLYLQXNSLRAEDTAVYYCVREGPRATGYSXADVFDIWGQGTXVTVSSASTKGPSVFPLAPSSKSTSGGTAALGCLVKDYFPEPVTVSWNSGALTSGVHTFPAVLQSSGLYSLSSVVTVPSSSLGTQTYICNVNHKPSNTKVDKKVEPK

SEQ ID NO: 23357 - protein, 144 aa, Artificial Sequence
  source: /note="Description of Artificial Sequence: Synthetic polypeptide"
EFMETQTQVFVFVFLWLSGVDGDIVMTQSHKFMSTSVGDRVTITCKASQDVTTAVAWYQQKPGHSPKLLIYWASTRHTGVPDRFTGSGSGTDFTLTLNSVQAEDLALYYCQQHYSTPLTFGAGTKLELKRADAAPTVSIFPPSS

SEQ ID NO: 23358 - protein, 149 aa, Artificial Sequence
  source: /note="Description of Artificial Sequence: Synthetic polypeptide"
MKLPVRLLVLMFWIPASSSDVLLTQIPLSLPVSLGDQASISCRSSQSIVHSNGNTYLEWYLQKPGQSPKLLIYKASNRFSGVPDRFSGSGSGTDFTLKINRVEAEDLGVYYCLQGSHVPSTFGGGTKLEIKRADAAPTVSIFPPSSKLG

SEQ ID NO: 23359 - protein, 238 aa, Artificial Sequence
  source: /note="Description of Artificial Sequence: Synthetic polypeptide"
  MOD_RES (5)..(5): Any amino acid
MAWIXLIFFVLHCSGSFSQLVLTQSSSASFSLGASAKLTCTLSRQHSTYTIEWYQQQPLKPPRYVMELKKDGSHSTGDGIPDRFSGSSSGADRYLSISNIQPEDEAIYICGVGDTIKEQFVYVFGGGTKVTVLGQPKSTPTLTVFPPSSEELKENKATLVCLISNFSPSGVTVAWKANGTPITQGVDTSNPTKEGNKFMASSFLHLTSDQWRSHNSFTCQVTHEGDTVEKSLSPAECL

SEQ ID NO: 23360 - protein, 145 aa, Artificial Sequence
  source: /note="Description of Artificial Sequence: Synthetic polypeptide"
MGIKMKSQTQAFVFAFLWLSGVDGDIVMTQSQKFMSTSVGDRVSLTCKASQNVGTAVAWYQQKPGQSPKLLIYSASNRYTGVPDRFTGSGSGTDFTLTISNMQSEDLADYFCQQYSSYPLTFGAGTKLELRRADAAPTVSIFPPS

SEQ ID NO: 23361 - protein, 112 aa, Artificial Sequence
  source: /note="Description of Artificial Sequence: Synthetic polypeptide"
DIVLTQSPLSLPVSLGDQASISCRSSQSLVHSNGNTYLHWYLQKPGQSPNLLIYKVSNRFSGVPDRFSGSGSGTDFTLKISRVEAEDLGVYFCSQSTHVPWTFGGGTKLEIK

SEQ ID NO: 23362 - protein, 112 aa, Artificial Sequence
  source: /note="Description of Artificial Sequence: Synthetic polypeptide"
DVVMTQTPLTLSVTIGQPASISCTSSQSLLNSDGETYLNWLLQRPGQSPKRLIHLVSKLDSGVPDRITGSGSGTDFTLKINRVEAEDLGIYYCWQGTHFPWTFGGGTKLEIK

SEQ ID NO: 23363 - protein, 112 aa, Artificial Sequence
  source: /note="Description of Artificial Sequence: Synthetic polypeptide"
DVLMTQTPLSLPVSLGDQASISCRSSQSIVHSNGDTYLEWYLQKPGQSPKLLIYKVSNRFSGVPDRFSGSGSGTDFTLRISRVEAEDLGVYYCFQGSHFPWTFGGGTKLEIK

SEQ ID NO: 23364 - protein, 111 aa, Artificial Sequence
  source: /note="Description of Artificial Sequence: Synthetic polypeptide"
DIVLTQSPASLAVSLGQRASISCKASQSVDHDGDSYMNWYQQKPGQPPKLLIYATSNLESGIPARFSGSGSGTDFTLNIHPVEEEDAATYYCQQSYEVPLTFGAGTKLELK

SEQ ID NO: 23365 - protein, 106 aa, Artificial Sequence
  source: /note="Description of Artificial Sequence: Synthetic polypeptide"
ENVLTQSPAIMSASPGEKVTMTCSASSSVTYMHWYQQKSSTSPKLWIYDTSKLASGVPGRFSGSGSGNSYSLTISSMEAEDVATYYCFQGSGYPYTFGGGTKLEIK

SEQ ID NO: 23366 - protein, 112 aa, Artificial Sequence
  source: /note="Description of Artificial Sequence: Synthetic polypeptide"
DVLMTQTPLSLPVSLGDQASISCRSSQNIVHSNGNTYLEWYLQKSGQSPKLLIYKVSNRFSGVPDRFSGSGSGTDFTLKISRVEAEDLGVYYCFQGSHFPWTFGGGTKLEIK

SEQ ID NO: 23367 - protein, 112 aa, Artificial Sequence
  source: /note="Description of Artificial Sequence: Synthetic polypeptide"
DVLMTQTPLSLPVSLGDQASISCRSSQNIVHSDGNTYLEWYLQKPGQSPKLLIYKFSNRFSGVPDRFSGSGSGTDFTLKISRVEAEDLGVYYCFQGSHVPPTFGAGTKLELK

SEQ ID NO: 23368 - protein, 115 aa, Artificial Sequence
  source: /note="Description of Artificial Sequence: Synthetic polypeptide"
QLVLTQSSSASFSLGASAKLTCTLSSQHSTFTIEWYQQQPLKAPKYVMELKKDGSHSTGDGIPDRFSGSSSGADRYLWISNIQPEDEAMYICGVGDTIKEQFVYVFGGGTKVTVL

SEQ ID NO: 23369 - protein, 107 aa, Artificial Sequence
  source: /note="Description of Artificial Sequence: Synthetic polypeptide"
EIVLTQSPALMAASPGEKVTITCSVSSSISSSNLHWYQQKSETSPKPWIYGTSNLASGVPDRFTGSGSGTDFTLTISSVQAEDLTLYYCHQYLSSWTFGGGTKLEIK

SEQ ID NO: 23370 - protein, 106 aa, Artificial Sequence
  source: /note="Description of Artificial Sequence: Synthetic polypeptide"
QIVLSQSPAILSASPGEKVTMTCRASSSVSYMHWYHQNPGSSPKPWIYATSNLASGVPARFSGSGSGTSYSLTISRVEAEDAATYYCQQWSSNPPTFGGGTKLAIK

SEQ ID NO: 23371 - protein, 217 aa, Artificial Sequence
  source: /note="Description of Artificial Sequence: Synthetic polypeptide"
  MOD_RES (4)..(4): Any amino acid
ELVXTQSPDSLAVSLGERATINCKSSQSVLYSSNNKSYLAWYQQKPGQPPKLLIYWASTRESGVPDRFSGSGSGTDFTLTISSLQAEDVAVYYCQQYYSAPLTFGGGTKVEIKRTVAAPSVFIFPPSDEQLKSGTASVVCLLNNFYPREAKVQWKVDNALQSGNSQESVTEQDSKDSTYSLSSTLTLSKADYEKHKVYACEVTHQGLRSPVTKSFNR

SEQ ID NO: 23372 - protein, 217 aa, Artificial Sequence
  source: /note="Description of Artificial Sequence: Synthetic polypeptide"
DIVLTQSPASLAVSLGQRATISCRASKSVSTSGYSYMHWNQQKPGQPPRLLIYLVSNLESGVPARFSGSGSGTDFTLNIAPVEEEDAATYYCQHIAELTRTFGGGTKLEIKRADAAPTVSIFPPSSEQLTSGGASVVCFLNNFYPKDINVKWKIDGSERQNGVLNSWTDQDSKDSTYSMSSTLTLTKDEYERHNSYTCEATHKTSTSPIVKSFNRNE

SEQ ID NO: 23373 - protein, 48 aa, Artificial Sequence
  source: /note="Description of Artificial Sequence: Synthetic polypeptide"
DIQMTQSPSSLSASVGDRVTITCKRQASQDVTTAVAWYQQKPGKAPKL

SEQ ID NO: 23374 - protein, 44 aa, Artificial Sequence
  source: /note="Description of Artificial Sequence: Synthetic polypeptide"
LIYAASGRHKGVPSRFSGSGSGTDFTLTISSLQPEDFATYYCQQ

SEQ ID NO: 23375 - protein, 44 aa, Artificial Sequence
  source: /note="Description of Artificial Sequence: Synthetic polypeptide"
LIYAASRLHNGVPSRFSGSGSGTDFTLTISSLQPEDFATYYCQQ

SEQ ID NO: 23376 - protein, 44 aa, Artificial Sequence
  source: /note="Description of Artificial Sequence: Synthetic polypeptide"
LIYAASTRHTGVPSRFSGSGSGTDFTLTISSLQPEDFATYYCQQ

SEQ ID NO: 23377 - protein, 16 aa, Artificial Sequence
  source: /note="Description of Artificial Sequence: Synthetic peptide"
HYSTPLTFGQGTKVFI

SEQ ID NO: 23378 - protein, 127 aa, Artificial Sequence
  source: /note="Description of Artificial Sequence: Synthetic polypeptide"
MVSSAQFLGLLLLCFQGTRCDIQMTQTTSSLSASLGDRVTISCRASQDINNYLNWYQQKPDGTVKLLIYYTSRLHSGVPSRFSGSGSGTDYSLTISNLQQEDIAAYFCQQGNTLPLTFGAGTKLELK

SEQ ID NO: 23379 - protein, 137 aa, Artificial Sequence
  source: /note="Description of Artificial Sequence: Synthetic polypeptide"
MAWVWTLLFLMAAAQSFQAQIQLVQSGPELKKPGETVKISCKASGYTFTVYSMHWVKQAPGKGLKWMGWINPETGEPTYADDFKGRFAFSLEISASTASLQINNLKNEDTATYFCARGGDNYAVDYWGQGTSVTVSS

SEQ ID NO: 23380 - protein, 104 aa, Artificial Sequence
  source: /note="Description of Artificial Sequence: Synthetic polypeptide"
MTQSPKFLLVSAGDRVTLTCKASQSVNNDVYWYQQEPGQSPKLLIYWASTRESGVPDRFTGSGSGTDFTLTISSVQAEDLAVYYCKQSYNLYTFGGGTKLEIKR

SEQ ID NO: 23381 - protein, 106 aa, Artificial Sequence
  source: /note="Description of Artificial Sequence: Synthetic polypeptide"
QSPSSLAVSAGEKVTMSCKSSQSLLNSRTRKNYLAWYQQKPGQSPKLLIYWASTRESGVPDRFTGSGSGTDFTLTISSVQAEDLAVYYCKQSNLYTFGGGTKLEIK

SEQ ID NO: 23382 - protein, 107 aa, Artificial Sequence
  source: /note="Description of Artificial Sequence: Synthetic polypeptide"
QSPSSLAVSAGEKVTMSCKSSQSLLNSRTRKNYLAWYQQKPGQSPKLLIYWASTRESGVPDRFTGSGSGTDFTLTISSVQAEDLAVYYCKQSYNLYTFGGGTKLEIK

SEQ ID NO: 23383 - protein, 117 aa, Artificial Sequence
  source: /note="Description of Artificial Sequence: Synthetic polypeptide"
QVQLMESGPELKKPGETVKISCTTSGYTPTYAMHWVKQAPGKGLEWMGWINTATGEPTYAYDFKERFGFSLETSASTAFLQISNLKIEDTATYFCASDGRYWYFGVWGAGTTVTVSS

SEQ ID NO: 23384 - protein, 130 aa, Artificial Sequence
  source: /note="Description of Artificial Sequence: Synthetic polypeptide"
QVQLVQSGAEVKKPGESLKISCKGSGYSFTSYWIGWVRQMPGKGLEWMGIIYPGDSDTRYSPSFQGQVTISADRSISTAYLQWSSLKASDTAMYYCARLRGPYYDFWNGYRETHDAFNVWGQGTTVTVSS

SEQ ID NO: 23385 - protein, 130 aa, Artificial Sequence
  source: /note="Description of Artificial Sequence: Synthetic polypeptide"
EVQLVQSGAEVKKSGESLKISCKGSGYTFNTYWIGWVRQMPGKGLEWMGIIYPGDSDTIYSPSFQGQVTISADKSISTAYLQWSSLKASDSAMYYCARLTFRRGYSGSDSFLPPGDFDYWGQGTLVTVSS

SEQ ID NO: 23386 - protein, 125 aa, Artificial Sequence
  source: /note="Description of Artificial Sequence: Synthetic polypeptide"
QMQLVQSGAEVKKPGESLRISCKGSGYSFTSNWITWVRQMPGKGLEWMGRIDPSDSYTNYSPSFQGHVTISADKSISTAYLQWSSLKASDTAMYYCARDVVGVGASDYYYYMDVWGKGTTVTVSS

SEQ ID NO: 23387 - protein, 119 aa, Artificial Sequence
  source: /note="Description of Artificial Sequence: Synthetic polypeptide"
EVQLVQSGGGVVQPGRSLRLSCVASGFTFSKDAMHWVRQAPGKGLEWVAVISYDGSDKHYADSVKGRVTISRDNSRKTLYLRMDSLRAEDTALYYCARGYNSGHYFDYWGQGTLITVSS

SEQ ID NO: 23388 - protein, 117 aa, Artificial Sequence
  source: /note="Description of Artificial Sequence: Synthetic polypeptide"
QMQLVQSGAEVKKPGSSVKVSCKASGDTFSSYAISWVRQAPGQGLEWMGGIFGTASYAQKFQGRVTITADESTSTAYMELSSLRSEDTAVYYCARGGMATTPGLDYWGQGTLVTVSS

SEQ ID NO: 23389 - protein, 127 aa, Artificial Sequence
  source: /note="Description of Artificial Sequence: Synthetic polypeptide"
EVQLVQSGGGVVQPGRSLRLSCAASGFTFSNYAMHWVRQAPGKGLEWVAVISYDGGNKYYADSVKGRFTMSRDNSKNTLYLQMNSLRAEDTAVYYCARDFWSGYSMVDSYYYYMDVWGKGTTVTVSS

SEQ ID NO: 23390 - protein, 130 aa, Artificial Sequence
  source: /note="Description of Artificial Sequence: Synthetic polypeptide"
EVQLVQSGAEVKKPGESLKISCKASGFSFSTYWIGWVRQMPGKGLEWMGIIYPADSDTRYSPSFQGQVTISADKSISTAYLQWSSLKASDTAMYYCARLRGPYYDFWNGYRETHDAFNVWGQGTMVTVSS

SEQ ID NO: 23391 - protein, 130 aa, Artificial Sequence
  source: /note="Description of Artificial Sequence: Synthetic polypeptide"
QVTLKESGPALVKPTQTLTLTCTFSGFSLSTSGVGVGWIRQPPGKALEWLAVIYWNDDKLYRPSLKSRLTITKDTSKNQVVLTMTKMDPVDTATYYCAHRHRYYDISGYYRLFSDAFDIWGQGTMVTVSS

SEQ ID NO: 23392 - protein, 130 aa, Artificial Sequence
  source: /note="Description of Artificial Sequence: Synthetic polypeptide"
QVTLKESGPTLVKPTQTLTLTCTFSGFSLSTSGVGVGWIRQPPGKALEWLAVIYWNDDKLYRPSLKSRLTITKDTSKNQVVLTMTKMDPVDTATYYCAHRHRYYDISGYYRLFSDAFDIWGQGTMVTVSS

SEQ ID NO: 23393 - protein, 130 aa, Artificial Sequence; identical to SEQ ID NO: 23392
  source: /note="Description of Artificial Sequence: Synthetic polypeptide"

SEQ ID NO: 23394 - protein, 123 aa, Artificial Sequence; identical to SEQ ID NO: 22712
  source: /note="Description of Artificial Sequence: Synthetic polypeptide"

SEQ ID NO: 23395 - protein, 456 aa, Artificial Sequence
  source: /note="Description of Artificial Sequence: Synthetic polypeptide"
EVQLVESGGGLVQPGRSLRLSCAASGFTFDDYAMHWVRQAPGKGLEWVSGISWNSGNIGYADSVKGRFTISRDNAKNSLYLQMNSLRAEDTALYYCAKDKSYYYGSGTSGGWFDPWGQGTLVTVSSASTKGPSVFPLAPSSKSTSGGTAALGCLVKDYFPEPVTVSWNSGALTSGVHTFPAVLQSSGLYSLSSVVTVPSSSLGTQTYICNVNHKPSNTKVDKRVEPKSCDKTHTCPPCPAPELLGGPSVFLFPPKPKDTLMISRTPEVTCVVVDVSHEDPEVKFNWYVDGVEVHNAKTKPREEQYNSTYRVVSVLTVLHQDWLNGKEYKCKVSNKALPAPIEKTISKAKGQPREPQVYTLPPSREEMTKNQVSLTCLVKGFYPSDIAVEWESNGQPENNYKTTPPVLDSDGSFFLYSKLTVDKSRWQQGNVFSCSVMHEALHNHYTQKSLSLSPGK

SEQ ID NO: 23396 - protein, 453 aa, Artificial Sequence
  source: /note="Description of Artificial Sequence: Synthetic polypeptide"
QVQLVQSGAEVRKPGASVKVSCKASGYTFTHYYMHWVRQAPGQGLEWMGIINPSGGSTTYAQKLQGRVTMTRDTSTSTVYMELSSLRSEDTAVYYCARDWGSNYVWGSYPKYWGQGTLVTVSSASTKGPSVFPLAPSSKSTSGGTAALGCLVKDYFPEPVTVSWNSGALTSGVHTFPAVLQSSGLYSLSSVVTVPSSSLGTQTYICNVNHKPSNTKVDKRVEPKSCDKTHTCPPCPAPELLGGPSVFLFPPKPKDTLMISRTPEVTCVVVDVSHEDPEVKFNWYVDGVEVHNAKTKPREEQYNSTYRVVSVLTVLHQDWLNGKEYKCKVSNKALPAPIEKTISKAKGQPREPQVYTLPPSREEMTKNQVSLTCLVKGFYPSDIAVEWESNGQPENNYKTTPPVLDSDGSFFLYSKLTVDKSRWQQGNVFSCSVMHEALHNHYTQKSLSLSPGK

SEQ ID NO: 23397 - protein, 448 aa, Artificial Sequence
  source: /note="Description of Artificial Sequence: Synthetic polypeptide"
QVQLVQSGVEVKRPGASVKVSCKASGYTFTSYTLHWVRQAPGQRPEWMGWIHPVNGDTKYSQKFQGRVTITRDTSASTAYMELSSLRSEDTAVYYCARGYDSWSFDYWGQGTLVTVSSASTKGPSVFPLAPSSKSTSGGTAALGCLVKDYFPEPVTVSWNSGALTSGVHTFPAVLQSSGLYSLSSVVTVPSSSLGTQTYICNVNHKPSNTKVDKRVEPKSCDKTHTCPPCPAPELLGGPSVFLFPPKPKDTLMISRTPEVTCVVVDVSHEDPEVKFNWYVDGVEVHNAKTKPREEQYNSTYRVVSVLTVLHQDWLNGKEYKCKVSNKALPAPIEKTISKAKGQPREPQVYTLPPSREEMTKNQVSLTCLVKGFYPSDIAVEWESNGQPENNYKTTPPVLDSDGSFFLYSKLTVDKSRWQQGNVFSCSVMHEALHNHYTQKSLSLSPGK

SEQ ID NO: 23398 - protein, 459 aa, Artificial Sequence
  source: /note="Description of Artificial Sequence: Synthetic polypeptide"
QVQLVQSGTEVKKPGSSVKVSCKASGGTFSNYAISWVRQAPGQGLEWMGGIVPKFATTSYAQRFQGRVTITADESTSTVYMELSSLRSEDTAVYFCARFGVVVAADRQGAYYYYGMDVWGQGTTVTVSSASTKGPSVFPLAPSSKSTSGGTAALGCLVKDYFPEPVTVSWNSGALTSGVHTFPAVLQSSGLYSLSSVVTVPSSSLGTQTYICNVNHKPSNTKVDKRVEPKSCDKTHTCPPCPAPELLGGPSVFLFPPKPKDTLMISRTPEVTCVVVDVSHEDPEVKFNWYVDGVEVHNAKTKPREEQYNSTYRVVSVLTVLHQDWLNGKEYKCKVSNKALPAPIEKTISKAKGQPREPQVYTLPPSREEMTKNQVSLTCLVKGFYPSDIAVEWESNGQPENNYKTTPPVLDSDGSFFLYSKLTVDKSRWQQGNVFSCSVMHEALHNHYTQKSLSLSPGK

SEQ ID NO: 23399 - protein, 448 aa, Artificial Sequence
  source: /note="Description of Artificial Sequence: Synthetic polypeptide"
QVQLVQSGAEMKKPGASVKVSCKASGYTFTSYAMHWVRQAPGQRLEWMGWINAGNGNTKYSQKFQGRVTITRDTSASTAYMELSSLRSEDTAVYYCARGYDSWSFDYWGQGTLVTVSSASTKGPSVFPLAPSSKSTSGGTAALGCLVKDYFPEPVTVSWNSGALTSGVHTFPAVLQSSGLYSLSSVVTVPSSSLGTQTYICNVNHKPSNTKVDKRVEPKSCDKTHTCPPCPAPELLGGPSVFLFPPKPKDTLMISRTPEVTCVVVDVSHEDPEVKFNWYVDGVEVHNAKTKPREEQYNSTYRVVSVLTVLHQDWLNGKEYKCKVSNKALPAPIEKTISKAKGQPREPQVYTLPPSREEMTKNQVSLTCLVKGFYPSDIAVEWESNGQPENNYKTTPPVLDSDGSFFLYSKLTVDKSRWQQGNVFSCSVMHEALHNHYTQKSLSLSPGK

SEQ ID NO: 23400 - protein, 449 aa, Artificial Sequence
  source: /note="Description of Artificial Sequence: Synthetic polypeptide"
QVQLVESGGGVVQPGRSLRLSCVASGFTFSKDAMHWVRQAPGKGLEWVAVISYDGSDKHYADSVKGRVTISRDNSRKTLHLRMDSLRAEDTALYYCARGYNSGHYFDYWGQGTLVTVSSASTKGPSVFPLAPSSKSTSGGTAALGCLVKDYFPEPVTVSWNSGALTSGVHTFPAVLQSSGLYSLSSVVTVPSSSLGTQTYICNVNHKPSNTKVDKRVEPKSCDKTHTCPPCPAPELLGGPSVFLFPPKPKDTLMISRTPEVTCVVVDVSHEDPEVKFNWYVDGVEVHNAKTKPREEQYNSTYRVVSVLTVLHQDWLNGKEYKCKVSNKALPAPIEKTISKAKGQPREPQVYTLPPSREEMTKNQVSLTCLVKGFYPSDIAVEWESNGQPENNYKTTPPVLDSDGSFFLYSKLTVDKSRWQQGNVFSCSVMHEALHNHYTQKSLSLSPGK

SEQ ID NO: 23401 - protein, 456 aa, Artificial Sequence
  source: /note="Description of Artificial Sequence: Synthetic polypeptide"
QVQLVQSGAEVKKPGASVKVSCKTSGYTFTDYYLHWVRHAPGQGLEWMGWINPNSGDTNYAQKFQGRVTMTRDTSISTAYMDLSRLRSDDAAVYYCARDWNTVTTYYYYYYGMDVWGQGTTVTVSSASTKGPSVFPLAPSSKSTSGGTAALGCLVKDYFPEPVTVSWNSGALTSGVHTFPAVLQSSGLYSLSSVVTVPSSSLGTQTYICNVNHKPSNTKVDKRVEPKSCDKTHTCPPCPAPELLGGPSVFLFPPKPKDTLMISRTPEVTCVVVDVSHEDPEVKFNWYVDGVEVHNAKTKPREEQYNSTYRVVSVLTVLHQDWLNGKEYKCKVSNKALPAPIEKTISKAKGQPREPQVYTLPPSREEMTKNQVSLTCLVKGFYPSDIAVEWESNGQPENNYKTTPPVLDSDGSFFLYSKLTVDKSRWQQGNVFSCSVMHEALHNHYTQKSLSLSPGK

SEQ ID NO: 23402 - protein, 576 aa, Artificial Sequence
  source: /note="Description of Artificial Sequence: Synthetic polypeptide"
QVQLVQSGAEVRKPGASVKVSCKASGYTFTHYYMHWVRQAPGQGLEWMGIINPSGGSTTYAQKLQGRVTMTRDTSTSTVYMELSSLRSEDTAVYYCARDWGSNYVWGSYPKYWGQGTLVTVSSASAPTLFPLVSCENSPSDTSSVAVGCLAQDFLPDSITFSWKYKNNSDISSTRGFPSVLRGGKYAATSQVLLPSKDVMQGTDEHVVCKVQHPNGNKEKNVPLPGEVIAELPPKVSVFVPPRDGFFGNPRKSKLICQATGFSPRQIQVSWLREGKQVGSGVTTDQVQAEAKESGPTTYKVTSTLTIKESDWLSQSMFTCRVDHRGLTFQQNASSMCVPDQDTAIRVFAIPPSFASIFLTKSTKLTCLVTDLTTYDSVTISWTRQNGEAVKTHTNISESHPNATFSAVGEASICEDDWNSGERFTCTVTHTDLPSPLKQTISRPKGVALHRPDVYLLPPAREQLNLRESATITCLVTGFSPADVFVQWMQRGQPLSPEKYVTSAPMPEPQAPGRYFAHSILTVSEEEWNTGETYTCVVAHEALPNRVTERTVDKSTGKPTLYNVSLVMSDTAGTCY

SEQ ID NO: 23403 - protein, 121 aa, Artificial Sequence
  source: /note="Description of Artificial Sequence: Synthetic polypeptide"
QVQLVQSGAEVRKPGASVKVSCKASGYTFTHYYMHWVRQAPGQGLEWMGIINPSGGSTTYAQKLQGRVTMTRDTSTSTVYMELSSLRSEDTAVYYCARDWGSNYVWGSYPKYWGQGTLVTV

SEQ ID NO: 23404 - protein, 119 aa, Artificial Sequence
  source: /note="Description of Artificial Sequence: Synthetic polypeptide"
QVQLVQSGAEVKKPGASVKVSCKASGYTFTDYWIEWVRQAPGQGLEWMGDILCGTGRTRYNEKLKARVTMTTDTSTSTAYMELRSLRSDDTAVYYCARSASYGDYADYWGQGTTVTVSS

SEQ ID NO: 23405 - protein, 119 aa, Artificial Sequence
  source: /note="Description of Artificial Sequence: Synthetic polypeptide"
QVQLVQSGAEVKKPGASVKVSCKASGYTFTDYWIEWVRQAPGQGLEWMGDILCGTGRTRYNEKLKARATFTADTSTSTAYMELRSLRSDDTAVYYCARSASYGDYADYWGQGTTVTVSS

SEQ ID NO: 23406 - protein, 119 aa, Artificial Sequence
  source: /note="Description of Artificial Sequence: Synthetic polypeptide"
QVQLVQSGAEVKKPGASVKVSCKASGYTFTDYWIEWVRQAPGQGLEWMGDILCGTGRTRYNEKLKARVTMTADTSTSTAYMELRSLRSDDTAVYYCARSASYGDYADYWGQGTTVTVSS

SEQ ID NO: 23407 - protein, 124 aa, Artificial Sequence
  source: /note="Description of Artificial Sequence: Synthetic polypeptide"
EVQLVESGGGLVQPGRSLRLSCAASGFTFDDYAMHWVRQAPGKGLEWVSGISWNSGNIGYADSVKGRFTISRDNAKNSLYLQMNSLRAEDTALYYCAKDKSYYYGSGTSGGWFDPWGQGTLVTV

SEQ ID NO: 23408 - protein, 449 aa, Artificial Sequence
  source: /note="Description of Artificial Sequence: Synthetic polypeptide"
QVQLVQSGAEVKKPGASVKVSCKASGYTFTDYWIEWVRQAPGQGLEWMGDILCGTGRTRYNEKLKARVTMTADTSTSTAYMELRSLRSDDTAVYYCARSASYGDYADYWGQGTTVTVSSASTKGPSVFPLAPSSKSTSGGTAALGCLVKDYFPEPVTVSWNSGALTSGVHTFPAVLQSSGLYSLSSVVTVPSSSLGTQTYICNVNHKPSNTKVDKRVEPKSCDKTHTCPPCPAPELLGGPSVFLFPPKPKDTLMISRTPEVTCVVVDVSHEDPEVKFNWYVDGVEVHNAKTKPREEQYNSTYRVVSVLTVLHQDWLNGKEYKCKVSNKALPAPIEKTISKAKGQPREPQVYTLPPSRDELTKNQVSLTCLVKGFYPSDIAVEWESNGQPENNYKTTPPVLDSDGSFFLYSKLTVDKSRWQQGNVFSCSVMHEALHNHYTQKSLSLSPGK

SEQ ID NO: 23409 - protein, 449 aa, Artificial Sequence; identical to SEQ ID NO: 23408
  source: /note="Description of Artificial Sequence: Synthetic polypeptide"

SEQ ID NO: 23410 - protein, 119 aa, Artificial Sequence
  source: /note="Description of Artificial Sequence: Synthetic polypeptide"
QVQLQQSGSELMKPGASVQISCKATGYTFSDYWIEWVKQRPGHGLEWIGDILCGTGRTRYNEKLKAMATFTADTSSNTAFMQLSSLTSEDSAVYYCARSASYGDYADYWGHGTTLTVSS

SEQ ID NO: 23411 - protein, 119 aa, Artificial Sequence
  source: /note="Description of Artificial Sequence: Synthetic polypeptide"
QVQLQQSGPELVKPGALVKISCKASGHTFTSYDINWVKQRPGQGLEWIGWIYPGDGRIKYNEKFKGKAILTADKSSSTAYMQLSSLTSENSAVYFCARGGSSGTYFDYWGQGTTLTVSS

SEQ ID NO: 23412 - protein, 119 aa, Artificial Sequence
  source: /note="Description of Artificial Sequence: Synthetic polypeptide"
QVQLQQSGPELVKPGTLVKISCKTSGYTFTSYDINWVKQRPGQGLEWIGWIFPGDGRIKYNEQIKDKATLTADKSSSTAYMELSSLTSENSAVYFCARASYYGSIFDYWGQGTTLTVSS

SEQ ID NO: 23413 - protein, 118 aa, Artificial Sequence
  source: /note="Description of Artificial Sequence: Synthetic polypeptide"
QVQLVQSGAEVKKPGASVKVSCKASGYTFSGYSTHWLRQVPGQGLEWIGWDNPSSGDTTYAENFRGRVTLTRDTSITTDYLEVRGLRSDDTAVYYCARGGDDYSFDHWGQGTLVTVSS

SEQ ID NO: 23414 - protein, 118 aa, Artificial Sequence; identical to SEQ ID NO: 23413
  source: /note="Description of Artificial Sequence: Synthetic polypeptide"

SEQ ID NO: 23415 - protein, 118 aa, Artificial Sequence; identical to SEQ ID NO: 23413
  source: /note="Description of Artificial Sequence: Synthetic polypeptide"

SEQ ID NO: 23416 - protein, 118 aa, Artificial Sequence; identical to SEQ ID NO: 23413
  source: /note="Description of Artificial Sequence: Synthetic polypeptide"

SEQ ID NO: 23417 - protein, 118 aa, Artificial Sequence; identical to SEQ ID NO: 23413
  source: /note="Description of Artificial Sequence: Synthetic polypeptide"

SEQ ID NO: 23418 - protein, 118 aa, Artificial Sequence; identical to SEQ ID NO: 23413
  source: /note="Description of Artificial Sequence: Synthetic polypeptide"

SEQ ID NO: 23419 - protein, 118 aa, Artificial Sequence; identical to SEQ ID NO: 23413
  source: /note="Description of Artificial Sequence: Synthetic polypeptide"

SEQ ID NO: 23420 - protein, 118 aa, Artificial Sequence
  source: /note="Description of Artificial Sequence: Synthetic polypeptide"
QVQLVQSGAEVKKPGSSVKVSCKASGYTFSGYSTHWLRQVPGQGLEWIGWDNPSSGDTTYAENFRGRVTLTRDTSITTDYLEVRGLRSDDTAVYYCARGGDDYSFDHWGQGTLVTVSS

SEQ ID NO: 23421 - protein, 127 aa, Artificial Sequence
  source: /note="Description of Artificial Sequence: Synthetic polypeptide"
QVQLVQSGAEVKEPGSSVKVSCKASGGTFSNYPISWVRQAPGQGLEWMGGIIPITNSPGYAQKFQGRVTISADESTGTVYMELSSLRSEDTAIYYCAKDPNRYESGVLHYWHGLDVWGQGTTVTVSS

SEQ ID NO: 23422 - protein, 120 aa, Artificial Sequence
  source: /note="Description of Artificial Sequence: Synthetic polypeptide"
QVQLVQSGAEVKKPGSSVKVSCKASGGTFSSYAISWVRQAPGQGLEWMGWMNSNTGDTGYAQKFQGRVTMTRNTSTSTAYMELSSLRSEDTAVYYCAKISNYHYYAMDVWGQGTLVTVSS

SEQ ID NO: 23423 - protein, 120 aa, Artificial Sequence
  source: /note="Description of Artificial Sequence: Synthetic polypeptide"
EVQLVQSGAEVKKPGASVKVSCKASGYTFTSYGISWVRQAPGQGLEWLGWINPNSGDTVYSQKFQGRVTMTSDKSVSTAYMELSSLRSDDTAVYYCASPGKNYYYGMDVWGQGTLVTVSS

SEQ ID NO: 23424 - protein, 109 aa, Artificial Sequence; identical to SEQ ID NO: 22686
  source: /note="Description of Artificial Sequence: Synthetic polypeptide"

SEQ ID NO: 23425 - protein, 122 aa, Artificial Sequence
  source: /note="Description of Artificial Sequence: Synthetic polypeptide"
EVQLVETGAEVKKPGESLRISCKGSGYTFNNYWIGWVRQMPGKGLEWMGIIYPGDSDTRYSPSVQGHVTISADKSINTAYLQWSSLKASDTAVYYCARRPGYDYGFYYFDYWGQGTLVTVSS

SEQ ID NO: 23426 - protein, 468 aa, Artificial Sequence
  source: /note="Description of Artificial Sequence: Synthetic polypeptide"
MGWSCIILFLVATATGVHSQVQLVQSGAEVKKPGASVKVSCKASGYTFTDYWIEWVRQAPGQGLEWMGDILCGTGRTRYNEKLKARVTMTADTSTSTAYMELRSLRSDDTAVYYCARSASYGDYADYWGQGTTVTVSSASTKGPSVFPLAPSSKSTSGGTAALGCLVKDYFPEPVTVSWNSGALTSGVHTFPAVLQSSGLYSLSSVVTVPSSSLGTQTYICNVNHKPSNTKVDKKVEPKSCDKTHTCPPCPAPELLGGPSVFLFPPKPKDTLMISRTPEVTCVVVDVSHEDPEVKFNWYVDGVEVHNAKTKPREEQYNSTYRVVSVLTVLHQDWLNGKEYKCKVSNKALPAPIEKTISKAKGQPREPQVYTLPPSRDELTKNQVSLTCLVKGFYPSDIAVEWESNGQPENNYKTTPPVLDSDGSFFLYSKLTVDKSRWQQGNVFSCSVMHEALHNHYTQKSLSLSPGK

SEQ ID NO: 23427 - protein, 140 aa, Artificial Sequence
  source: /note="Description of Artificial Sequence: Synthetic polypeptide"
MNFGLSLIFLVLVLKGVQCEVKLVESGGGLVKPGGSLKLSCAASGFTFTNYAMSWVRQTPEKRLEWVASISSGHTPYYPDSVKGRFTISRDNARNILFLQMSSLRSEDTAMYYCARGDYYGSVYSAMDYWGQGTSVTVSS

SEQ ID NO: 23428 - protein, 115 aa, Artificial Sequence
  source: /note="Description of Artificial Sequence: Synthetic polypeptide"
ESGRGLVQPGGSRKLSCAASGFTFSTSGMHWVRQAPEKGLEWVAYISSGSTTIYHADTVKGRFTISRDNPKNTLFLQMTSLRSEDTAMYYCCARSGQFGNYFDYWGQGTTLTVSS

SEQ ID NO: 23429 - protein, 116 aa, Artificial Sequence
  source: /note="Description of Artificial Sequence: Synthetic polypeptide"
QVQLEESGPELVKPGASVKLSCKASGYTFTEYIIHWVKQRSGQGLEWIGWFYPGSGSIKYNEKFKDKATLTADKSSSTVYMELSGLTSEDSAVYFCARHDGYSYFDYWGQGTTLTV

SEQ ID NO: 23430 - protein, 117 aa, Artificial Sequence
  source: /note="Description of Artificial Sequence: Synthetic polypeptide"
QVQLEQSGPELVKPGASVKLSCKASGYTFTEYIIHWVKQRSGQGLEWIGWFYPGSGSIKYNEKFKDKATLTADKSSSTVYMELSGLTSEDSAVYFCARHDGYSYFDYWGQGGTTLTV

SEQ ID NO: 23431 - protein, 107 aa, Artificial Sequence
  source: /note="Description of Artificial Sequence: Synthetic polypeptide"
DIVLTQSPASLAVSLGQRATISYRASQSVSTSGYSYMHWNQQKPGQPPRLLIYLVSNLESGVPARFSGSGSGTDFYLNIHPVEEEDAATYYCQHIRELTRSEAGPSW

SEQ ID NO: 23432 - protein, 105 aa, Artificial Sequence; identical to SEQ ID NO: 22771
  source: /note="Description of Artificial Sequence: Synthetic polypeptide"

SEQ ID NO: 23433 - protein, 215 aa, Artificial Sequence
  source: /note="Description of Artificial Sequence: Synthetic polypeptide"
STDIQMTQSPSSLSASVGDRVTITCRASQSISSYLNWYQQKPGKAPKLLIYAASSLQSGVPSRFSGSGSGTDFTLTISSLQPEDFATYYCQQSYSTPRTFGQGTKLEIKRAAAPSVFIFPPSDEQLKSGTASVVCLLNNFYPREAKVQWKVDNALQSGNSQESVTEQDSKDSTYSLSSTLTLSKADYEKHKVYACEVTHQGLSSPVTKSFNRGEC

SEQ ID NO: 23434 - protein, 216 aa, Artificial Sequence
  source: /note="Description of Artificial Sequence: Synthetic polypeptide"
QSVLTQPPSVSAAPGQKVTISCSGSSSNIGSNTVNWYQQLPGTAPKLLIYSNNQRPSGIPDRFSGSKSGTSASLAISGLQSEDEADYYCAAWDDSLNGPVFGGGTKLTVLGQPKAAPSVTLFPPSSEELQANKATLVCLISDFYPGAVTVAWKADSSPVKAGVETTTPSKQSNNKYAASSYLSLTPEQWKSHRSYSCQVTHEGSTVEKTVAPTECS

SEQ ID NO: 23435 - protein, 223 aa, Artificial Sequence
  source: /note="Description of Artificial Sequence: Synthetic polypeptide"
STQAVLTQPSSASGTPGQRVTISCSGSSPNIGSNNVNWYQQLPGTAPKLLIYSNNQRPSGVPGRFSGSKSGTSASLAISGLQSEDEADYYCAAWDDGLSGNYVFGAGTQLTVLSAAAGQPKAAPSVTLFPPSSEELQANKATLVCLISDFYPGAVTVAWKADSSPVKAGVETTTPSKQSNNKYAASSYLSLTPEQWKSHRSYSCQVTHEGSTVEKTVAPTECS

SEQ ID NO: 23436 - protein, 216 aa, Artificial Sequence
  source: /note="Description of Artificial Sequence: Synthetic polypeptide"
QSVLTQPPSASGTPGQRVTISCSGSSSNIGSNTVNWYQQLPGTAPKLLIYSNNQRPSGVPDRFSGSKSGTSASLAISGLQSEDEADYYCAAWDDTLNGYVFGTGTKLTVLGQPKAAPSVTLFPPSSEELQANKATLVCLISDFYPGAVTVAWKADSSPVKAGVETTTPSKQSNNKYAASSYLSLTPEQWKSHRSYSCQVTHEGSTVEKTVAPTECS

SEQ ID NO: 23437 - protein, 222 aa, Artificial Sequence
  source: /note="Description of Artificial Sequence: Synthetic polypeptide"
STQAVLTQPSSVSGTPGQRVTISCSGSSSNIGSNTVNWYQQLPGTAPKLLIYGNNNRPSGVPARFSGSRSGTSASLAISGLRSEDEADYYCAAWDDSLNGPVFGGGTKLTVLGAAAGQPKAAPSVTLFPPSSEELQANKATLVCLISDFYPGAVTVAWKADSSPVKAGVETTTPSKQSNNKYAASSYLSLTPEQWKSHRSYSCQVTHEGSTVEKTVAPTECS

SEQ ID NO: 23438 - protein, 222 aa, Artificial Sequence
  source: /note="Description of Artificial Sequence: Synthetic polypeptide"
STQSVLTQPPSTSGTPGQRVTISCSGSDSNIGSNTVNWYQQLPGMAPKLLIYRNNQRPSGVPDRFSGSKSGTSASLAISGLQSEDEADYFCASWDANLGGPLFGGGTKVTVLGAAAGQPKAAPSVTLFPPSSEELQANKATLVCLISDFYPGAVTVAWKADSSPVKAGVETTTPSKQSNNKYAASSYLSLTPEQWKSHRSYSCQVTHEGSTVEKTVAPTECS

SEQ ID NO: 23439 - protein, 222 aa, Artificial Sequence
  source: /note="Description of Artificial Sequence: Synthetic polypeptide"
STQSVLTQPPSASGTPGQRVTISCSGGISNIGSNSVNWFQQLPGTAPKLLLYSNNQRASGVPDRFSGSKSGTSASLAISGLQSEDEVDYYCAAWDDRLIGYVFGTGTKVTVLGAAAGQPKAAPSVTLFPPSSEELQANKATLVCLISDFYPGAVTVAWKADSSPVKAGVETTTPSKQSNNKYAASSYLSLTPEQWKSHRSYSCQVTHEGSTVEKTVAPTECS

SEQ ID NO: 23440 - protein, 110 aa, Artificial Sequence
  source: /note="Description of Artificial Sequence: Synthetic polypeptide"
STDIQMTQSPSSLSASVGDRVTITCRASQSISSYLNWYQQKPGKAPKLLIYAASSLQSGVPSRFSGSGSGTDFTLTISSLQPEDFATYYCQQSYSTPRTFGQGTKLEIKR

SEQ ID NO: 23441 - protein, 111 aa, Artificial Sequence
  source: /note="Description of Artificial Sequence: Synthetic polypeptide"
QSVLTQPPSVSAAPGQKVTISCSGSSSNIGSNTVNWYQQLPGTAPKLLIYSNNQRPSGIPDRFSGSKSGTSASLAISGLQSEDEADYYCAAWDDSLNGPVFGGGTKLTVLG

SEQ ID NO: 23442 - protein, 107 aa, Artificial Sequence
  source: /note="Description of Artificial Sequence: Synthetic polypeptide"
DIVMTQSHKFMSTSVGDRVSITCKASQDVSTAVAWYQQKPGQSPKLLISWASTRHTGVPDRFTGSGSGTDYTLTISSVQAEDLALYYCQQHYTTPLTFGAGTKLELK

SEQ ID NO: 23443 - protein, 107 aa, Artificial Sequence
  source: /note="Description of Artificial Sequence: Synthetic polypeptide"
DIVMTQSHKFMSTSVGDRVSITCKASQDVSTAVAWYQQKPGQSPKVLIYWASTRHTGVPDRFTGSGSGTDYTLTISSVQAEDLALYYCQQHYSNPPTFGGGTKLEIK

SEQ ID NO: 23444 - protein, 107 aa, Artificial Sequence
  source: /note="Description of Artificial Sequence: Synthetic polypeptide"
DIVMTQSHKFMSTSVGDRVNITCKASQDVSTAVAWYQQKPGQSPKLLIYWASTRHTGVPDRFTGSGSGTHYTLTISSVQAEDLALYYCQQHYTTPLTFGAGTKLELK

SEQ ID NO: 23445 - protein, 107 aa, Artificial Sequence
  source: /note="Description of Artificial Sequence: Synthetic polypeptide"
DIVMTQSPDSLAVSLGERATINCKASQDVSTAVAWYQQKPGQPPKLLIYWASTRHTGVPDRFSGSGSGTDFTLTISSLQAEDVAVYYCQQHYTTPLTFGQGTKLEIK

SEQ ID NO: 23446 - protein, 107 aa, Artificial Sequence
  source: /note="Description of Artificial Sequence: Synthetic polypeptide"
DIVMTQSPDSLAVSLGERATINCKASQDVSTAVAWYQQKPGQPPKLLISWASTRHTGVPDRFSGSGSGTDFTLTISSLQAEDVAVYYCQQHYTTPLTFGQGTKLEIK

SEQ ID NO: 23447 - protein, 105 aa, Artificial Sequence
  source: /note="Description of Artificial Sequence: Synthetic polypeptide"
SSELTQDPAVSVALGQTVRITCRGDSLRSYYASWYQQKPGQAPVLVIYGENNRPSGIPDRFSGSSSGDTASLTITGAQAEDEADYYCNSRDSSDHLLLFGGGTKL

SEQ ID NO: 23448 - protein, 111 aa, Artificial Sequence
  source: /note="Description of Artificial Sequence: Synthetic polypeptide"
SYELTQPPSASGTTGQRVTISCSGSSSNIGSNTVNWYQQLPGTAPKLLIYSNNQRPSGVPDRLSGSKSGTSASLAISGLQSEDEADYYCAAWDARLTGPLFGGGTKLSVLR

SEQ ID NO: 23449 - protein, 111 aa, Artificial Sequence
  source: /note="Description of Artificial Sequence: Synthetic polypeptide"
SYELTQPPSASGTPGQRVTISCSGSSSNIGSNTVNWYQQLPGTAPKLLIYSNNQRPSGVPDRFSGSKSGTSASLAISGLQSEDEADYYCAAWDARLTGPLFGGGTKLSVLR

SEQ ID NO: 23450 - protein, 109 aa, Artificial Sequence
  source: /note="Description of Artificial Sequence: Synthetic polypeptide"
SSELTQDPAVSVALGQTVTITCQGGGLRNYYASWYQQKPGQAPVLLVYGRDNRPSGIPDRFSGSSSGNTASLTITGAQAEDEADYYCNSRDSSGNHLVFGGGTKLTVLG

SEQ ID NO: 23451 - protein, 110 aa, Artificial Sequence
  source: /note="Description of Artificial Sequence: Synthetic polypeptide"
QSALTQPASVSGSPGQSITISCTGTNSDVGIYNLVSWYQQHPGKAPKLMIYDVSNRPSGVSSRFSGSNSGNTATLTISGLQAEDEADYYCSAHAGDNTQFGGGTKLTVLS

SEQ ID NO: 23452 - protein, 111 aa, Artificial Sequence
  source: /note="Description of Artificial Sequence: Synthetic polypeptide"
  MOD_RES (61)..(61): Any amino acid
  MOD_RES (65)..(65): Any amino acid
QSALTQPASVSGSPGQSITISCTGTSSDLGGHNFVSWYQQHPGKAPKLMIYDVFNRPSGVXSRFXGSKSGNTASLTISGLQAEDEADYFCSSYTITSIVVFGGGTKLTVLG

SEQ ID NO: 23453 - protein, 110 aa, Artificial Sequence
  source: /note="Description of Artificial Sequence: Synthetic polypeptide"
QSVLTQPPSVSVAPGKTARIPCGGNNSGTKSVHWYQQKPGQAPVLVIYDDRVRPSGIPERFSGSNSGDTATLTISRVAAGDEADYYCQVSDGSGDPPTWVFGGGTRLTVL

SEQ ID NO: 23454 - protein, 111 aa, Artificial Sequence
  source: /note="Description of Artificial Sequence: Synthetic polypeptide"
QTVVTQEPSFSVSPGGTITLTCGLSSGSVFTSYYPSWYQQTPGQAPRTLIYSTNTRSSGVPDRFSGSILGNKAALTITGAQADDESDYYCVLYMGSGIGVFGTGTKVTVLG

SEQ ID NO: 23455 - protein, 110 aa, Artificial Sequence
  source: /note="Description of Artificial Sequence: Synthetic polypeptide"
LPVLTQPPSASGTPGQTVTLSCSGSSSNIGSNTVNWYQQLPGTAPKLLIYSNNQRPSGVPDRFSASKSGTSASLAITGLQAEDEADYFCAAWDDSLVYVFGTGTKVTVLG

SEQ ID NO: 23456 - protein, 111 aa, Artificial Sequence
  source: /note="Description of Artificial Sequence: Synthetic polypeptide"
LPVLTQPPSASGTSGQTVTISCSGGSSNIGSHLVTWYQQFPGTAPKVLIHTNDQRPSGVPDRISGSKSGTSASLAISGLQSDDEGDYYCAAWDDSLNGYVFGTGTKVTVLG

SEQ ID NO: 23457 - protein, 111 aa, Artificial Sequence
  source: /note="Description of Artificial Sequence: Synthetic polypeptide"
QPVLTQPPSASGTPGQRVTISCSGSSSNIGSNLIYWYQQLPGTAPKLLIYSNNQRPSGVPDRFSGSKSGTSASLAISGLRSEDEADYFCSAWDDSLGGEVFGTGTKVNVLG

SEQ ID NO: 23458 - protein, 205 aa, Artificial Sequence; identical to SEQ ID NO: 22746
  source: /note="Description of Artificial Sequence: Synthetic polypeptide"

SEQ ID NO: 23459 - protein, 111 aa, Artificial Sequence
  source: /note="Description of Artificial Sequence: Synthetic polypeptide"
QSALTQPRSVSGSPGQSVTISCTGTSSDVGGYNYVSWYQHHPGKAPKLMIYDVSNRPLGVSNRFSGSKSGNTASLTISGLQAEDEADYYCSSYTSSSTYVFGTGTHLTVLS

SEQ ID NO: 23460 - protein, 114 aa, Artificial Sequence
  source: /note="Description of Artificial Sequence: Synthetic polypeptide"
DIQMTQSPDSLAVSLGERATINCKSSQSVLYSSNNKNYLAWYQQKPGQPPKLLIYWASTRESGVPDRFSGSGSGTDFTLTISSLQAEDVAVYYCQQYYSTPPTFGGGTKVEIKR

SEQ ID NO: 23461 - protein, 108 aa, Artificial Sequence
  source: /note="Description of Artificial Sequence: Synthetic polypeptide"
DIQMTQSPSTLSASVGDRVTITCRASQSISSWLAWYQQKPGKAPNLLIYAASSLQSGVPSRFSGSGSGTDFTLTISSLQPDDSATYYCQQYNTYPLTFGGGTKVEIKR

SEQ ID NO: 23462 - protein, 110 aa, Artificial Sequence
  source: /note="Description of Artificial Sequence: Synthetic polypeptide"
EIVLTQSPGTLSLSPGETATLSCRTSQSVSSSYLGWYQQKPGQAPRLLIYGASIRATGIPARFSGSGSGTEFTLTIDSLQSEDFAVYYCQQYNNWPPITFGQGTRLEIKR

SEQ ID NO: 23463 - protein, 111 aa, Artificial Sequence
  source: /note="Description of Artificial Sequence: Synthetic polypeptide"
SYVLTQPPSLSAAPRQRVTISCSGSSSNIGNYGVNWYQQLPGKAPKLLIYYDDLLPSGVSDRFSGSKSGTSASLAISGLQSEDEGDYYCAAWDDTLSAWVFGGGTKLTVLG

SEQ ID NO: 23464 - protein, 124 aa, Artificial Sequence
  source: /note="Description of Artificial Sequence: Synthetic polypeptide"
EVQLVETGGGVVQPGRSLRLSCAASGFTFSGYAMHWVRQAPGKGLDWVAVISYDGSEKYSADSVKGRFTISRDNSKNTLYLQMNSLRAEDTAVYYCAKESGGPIWYKYYGVDVWGQGTTVTVSS

SEQ ID NO: 23465 - protein, 111 aa, Artificial Sequence
  source: /note="Description of Artificial Sequence: Synthetic polypeptide"
QSVLTQPPSVSAAPGQKVTISCSGTSSNIGDNYVSWYQHLPGTAPKLLIYDNNKRPSGIPDRFSGSKSGTSATLGVTGLQTGDEADYYCGTWDSSLTAVVFGGGTKLTVLG

SEQ ID NO: 23466 - protein, 114 aa, Artificial Sequence
  source: /note="Description of Artificial Sequence: Synthetic polypeptide"
DIQLTQSPDSLAVSLGERATINCKSSQSVLYSSNNKNYLAWYQQKPGQPPKLLIYWASTRESGVPDRFSGSGSGTDFTLTISSLQAEDVAVYYCQQYYSTPLTFGQGTKVEIKR

SEQ ID NO: 23467 - protein, 108 aa, Artificial Sequence
  source: /note="Description of Artificial Sequence: Synthetic polypeptide"
ETTLTQSPGTLSLSPGERATLSCRASQSVSNTFLAWYQQKPGQAPRLLIYGASSRATGIPDRFSGSGSGTDFTLTISRLEPEDFAAYYCQQYGSSLTFGPGTKVDIKR

SEQ ID NO: 23468 - protein, 114 aa, Artificial Sequence
  source: /note="Description of Artificial Sequence: Synthetic polypeptide"
DVVMTQSPDSLAVSLGERATINCKSSQNILDNSDNKNFLAWYQQKPGQPPKLLIYWASARESGVPDRFSGSGSGTDFTLTISSLQAEDVALYYCQQYYNTPITFGQGTRLEIKR

SEQ ID NO: 23469 - protein, 115 aa, Artificial Sequence
  source: /note="Description of Artificial Sequence: Synthetic polypeptide"
QAVLTQPSSVSGAPGQRVTISCTGSSSNIGAGYDVHWYQQLPGTAPKLLIYGNSNRPSGVPDRFSGSKSGTSASLAITGLQAEDEADYYCQSYDSSLSGSDNYVFGTGTKVTVLG

SEQ ID NO: 23470 - protein, 112 aa, Artificial Sequence
  source: /note="Description of Artificial Sequence: Synthetic polypeptide"
QSVVTQPPSVSGAPGQRVTISCTGSSSNIGAGYDVHWYQQLPGTAPKLLIYGNSNRPSGVPDRFSGSKSGTSASLAITGLQAEDEADYYCQSYDSSLSGSVFGGGTKLTVLG

SEQ ID NO: 23471 - protein, 112 aa, Artificial Sequence
  source: /note="Description of Artificial Sequence: Synthetic polypeptide"
QSVVTQPPSVSGAPGQRVTISCTGSSSNIGAGYDVHWYQQLPGTAPKLVIYGSNNRPSGVPGRFSGSKSGTSASLAITGLQAEDEADYYCQSYDSSLSAAVFGGGTKVTVLG

SEQ ID NO: 23472 - protein, 233 aa, Artificial Sequence
  source: /note="Description of Artificial Sequence: Synthetic polypeptide"
MGWSCIILFLVATATGVHSDIVMTQSPDSLAVSLGERATINCKASQDVSTAVAWYQQKPGQPPKLLISWASTRHTGVPDRFSGSGSGTDFTLTISSLQAEDVAVYYCQQHYTTPLTFGQGTKLEIKRTVAAPSVFIFPPSDEQLKSGTASVVCLLNNFYPREAKVQWKVDNALQSGNSQESVTEQDSKDSTYSLSSTLTLSKADYEKHKVYACEVTHQGLSSPVTKSFNRGEC

SEQ ID NO: 23473 - protein, 127 aa, Artificial Sequence
  source: /note="Description of Artificial Sequence: Synthetic polypeptide"
MRAPAHFFGFLLLWFPGINCDIRMTQSPSSMYASLGERVTVTCKASQDINSYLSWLQQKPGKSPKTLIYRANRLFDGVPSRFSGSGSGQDYSLTISSLEYEDMGIFYCLQYDEFPFTFGSGTKLEIK

SEQ ID NO: 23474 - protein, 229 aa, Artificial Sequence; identical to SEQ ID NO: 22795
  source: /note="Description of Artificial Sequence: Synthetic polypeptide"

SEQ ID NO: 23475 - protein, 328 aa, Artificial Sequence
  source: /note="Description of Artificial Sequence: Synthetic polypeptide"
ASTKGPSVFPLAPSSKSTSGGTAALGCLVKDYFPEPVTVSWNSGALTSGVHTFPAVLQSSGLYSLSSWTVPSSSLGTQTYICNVNHKPSNTKVDKKAEPKSCDKTHTCPPCPAPELLGGPSVFLFPPKPKDTLMISRTPEVTCVWDVSHEDPEVKFNWYVDGVEVHNAKTKPREEQYNSTYRVVSVLTVLHQDWLNGKEYKCKVSNKALPAPIEKTISKAKGQPREPQVYTLPPSRDELTKNQVSLTCLVKGFYPSDIAVEWESNGQPENNYKTTPPVLDSDGSFFLYSKLTVDKSRWQQGNVFSCSVMHEALHNHYTQKSLSLSPGK

SEQ ID NO: 23476 - protein, 328 aa, Artificial Sequence
  source: /note="Description of Artificial Sequence: Synthetic polypeptide"
ASTKGPSVFPLAPSSKSTSGGTAALGCLVKDYFPEPVTVSWNSGALTSGVHTFPAVLQSSGLYSLSSVVTVPSSSLGTQTYICNVNHKPSNTKVDKKAEPKSCDKTHTCPPCPAPEAAGGPSVFLFPPKPKDTLMISRTPEVTCVWDVSHEDPEVKFNWYVDGVEVHNAKTKPREEQYNSTYRWSVLTVLHQDWLNGKEYKCKVSNKALPAPIEKTISKAKGQPREPQVYTLPPSRDELTKNQVSLTCLVKGFYPSDIAVEWESNGQPENNYKTTPPVLDSDGSFFLYSKLTVDKSRWQQGNVFSCSVMHEALHNHYTQKSLSLSPGK

SEQ ID NO: 23477 - protein, 264 aa, Artificial Sequence
  source: /note="Description of Artificial Sequence: Synthetic polypeptide"
MAQVQLVQSGAEVKKPGASVKVSCKASGYTFSGYSTHWLRQVPGQGLEWIGWDNPSSGDTTYAENFRGRVTLTRDTSITTDYLEVRGLRSDDTAVYYCARGGDDYSFDHWGQGTLVTVSSGGGGSGGGGSGGGGSSSELTQDPAVSVALGQTVRITCRGDSLRSYYASWYQQKPGQAPVLVIYGENNRPSGIPDRFSGSSSGDTASLTITGAQAEDEADYYCNSRDSSDHLLLFGGGTKLTVLGQPKATPSAAAEQKLISEEDL

SEQ ID NO: 23478 - protein, 266 aa, Artificial Sequence
  source: /note="Description of Artificial Sequence: Synthetic polypeptide"
MAQVQLVQSGAEVKKPGASVKVSCKASGYTFSGYSTHWLRQVPGQGLEWIGWDNPSSGDTTYAENFRGRVTLTRDTSITTDYLEVRGLRSDDTAVYYCARGGDDYSFDHWGQGTLVTVSSGGGGSGGGGSGGGGSSYELTQPPSASGTTGQRVTISCSGSSSNIGSNTVNWYQQLPGTAPKLLIYSNNQRPSGVPDRLSGSKSGTSASLAISGLQSEDEADYYCAAWDARLTGPLFGGGTKLSVLRQPKAAPSAAAEQKLISEEDL

SEQ ID NO: 23479 - protein, 266 aa, Artificial Sequence
  source: /note="Description of Artificial Sequence: Synthetic polypeptide"
MAQVQLVQSGAEVKKPGASVKVSCKASGYTFSGYSTHWLRQVPGQGLEWIGWDNPSSGDTTYAENFRGRVTLTRDTSITTDYLEVRGLRSDDTAVYYCARGGDDYSFDHWGQGTLVTVSSGGGGSGGGGSGGGGSSYELTQPPSASGTPGQRVTISCSGSSSNIGSNTVNWYQQLPGTAPKLLIYSNNQRPSGVPDRFSGSKSGTSASLAISGLQSEDEADYYCAAWDARLTGPLFGGGTKLSVLRQPKAAPSAAAEQKLISEEDL

SEQ ID NO: 23480 - protein, 264 aa, Artificial Sequence
  source: /note="Description of Artificial Sequence: Synthetic polypeptide"
MAQVQLVQSGAEVKKPGASVKVSCKASGYTFSGYSTHWLRQVPGQGLEWIGWDNPSSGDTTYAENFRGRVTLTRDTSITTDYLEVRGLRSDDTAVYYCARGGDDYSFDHWGQGTLVTVSSGGGGSGGGGSGGGGSSSELTQDPAVSVALGQTVTITCQGGGLRNYYASWYQQKPGQAPVLLVYGRDNRPSGIPDRFSGSSSGNTASLTITGAQAEDEADYYCNSRDSSGNHLVFGGGTKLTVLGQPKATPSAAAEQKLISEEDL

SEQ ID NO: 23481 - protein, 265 aa, Artificial Sequence
  source: /note="Description of Artificial Sequence: Synthetic polypeptide"
MAQVQLVQSGAEVKKPGASVKVSCKASGYTFSGYSTHWLRQVPGQGLEWIGWDNPSSGDTTYAENFRGRVTLTRDTSITTDYLEVRGLRSDDTAVYYCARGGDDYSFDHWGQGTLVTVSSGGGGSGGGGSGGGGSQSALTQPASVSGSPGQSITISCTGTNSDVGIYNLVSWYQQHPGKAPKLMIYDVSNRPSGVSSRFSGSNSGNTATLTISGLQAEDEADYYCSAHAGDNTQFGGGTKLTVLSQPKAAPSAAAEQKLISEEDL

SEQ ID NO: 23482 - protein, 307 aa, Artificial Sequence
  source: /note="Description of Artificial Sequence: Synthetic polypeptide"
  MOD_RES (237)..(237): Any amino acid
  MOD_RES (241)..(241): Any amino acid
EQLDHDYAKLACKFYFKETVIMKYLLPTAAAGLLLLAAQPAMAQVQLVQSGAEVKKPGASVKVSCKASGYTFSGYSTHWLRQVPGQGLEWIGWDNPSSGDTTYAENFRGRVTLTRDTSITTDYLEVRGLRSDDTAVYYCARGGDDYSFDHWGQGTLVTVSSGGGGSGGGGSGGGGSQSALTQPASVSGSPGQSITISCTGTSSDLGGHNFVSWYQQHPGKAPKLMIYDVFNRPSGVXSRFXGSKSGNTASLTISGLQAEDEADYFCSSYTITSIVVFGGGTKLTVLGQPKATPSAAAEQKLISEEDL

SEQ ID NO: 23483 - protein, 266 aa, Artificial Sequence
  source: /note="Description of Artificial Sequence: Synthetic polypeptide"
MAQVQLVQSGAEVKKPGASVKVSCKASGYTFSGYSTHWLRQVPGQGLEWIGWDNPSSGDTTYAENFRGRVTLTRDTSITTDYLEVRGLRSDDTAVYYCARGGDDYSFDHWGQGTLVTVSSGGGGSGGGGSGGGGSQSVLTQPPSVSVAPGKTARIPCGGNNSGTKSVHWYQQKPGQAPVLVIYDDRVRPSGIPERFSGSNSGDTATLTISRVAAGDEADYYCQVSDGSGDPPTWVFGGGTRLTVLGQPKAAPSAAAEQKLISEEDL

SEQ ID NO: 23484 - protein, 266 aa, Artificial Sequence
  source: /note="Description of Artificial Sequence: Synthetic polypeptide"
MAQVQLVQSGAEVKKPGSSVKVSCKASGYTFSGYSTHWLRQVPGQGLEWIGWDNPSSGDTTYAENFRGRVTLTRDTSITTDYLEVRGLRSDDTAVYYCARGGDDYSFDHWGQGTLVTVSSSGGGSGGGGSGGGGSQTVVTQEPSFSVSPGGTITLTCGLSSGSVFTSYYPSWYQQTPGQAPRTLIYSTNTRSSGVPDRFSGSILGNKAALTITGAQADDESDYYCVLYMGSGIGVFGTGTKVTVLGQPKAAPSAAAEQKLISEEDL

SEQ ID NO: 23485 - protein, 274 aa, Artificial Sequence
  source: /note="Description of Artificial Sequence: Synthetic polypeptide"
MAQVQLVQSGAEVKEPGSSVKVSCKASGGTFSNYPISWVRQAPGQGLEWMGGIIPITNSPGYAQKFQGRVTISADESTGTVYMELSSLRSEDTAIYYCAKDPNRYESGVLHYWHGLDVWGQGTTVTVSSGGGGSGGGGSGGGGSLPVLTQPPSASGTPGQTVTLSCSGSSSNIGSNTVNWYQQLPGTAPKLLIYSNNQRPSGVPDRFSASKSGTSASLAITGLQAEDEADYFCAAWDDSLVYVFGTGTKVTVLGQPKAAPSAAAEQKLISEEDL

SEQ ID NO: 23486 - protein, 268 aa, Artificial Sequence
  source: /note="Description of Artificial Sequence: Synthetic polypeptide"
MAQVQLVQSGAEVKKPGSSVKVSCKASGGTFSSYAISWVRQAPGQGLEWMGWMNSNTGDTGYAQKFQGRVTMTRNTSTSTAYMELSSLRSEDTAVYYCAKISNYHYYAMDVWGQGTLVTVSSGGGGSGGGGSGGGGSLPVLTQPPSASGTSGQTVTISCSGGSSNIGSHLVTWYQQFPGTAPKVLIHTNDQRPSGVPDRISGSKSGTSASLAISGLQSDDEGDYYCAAWDDSLNGYVFGTGTKVTVLGQPKATPSAAAEQKLISEEDL

SEQ ID NO: 23487 - protein, 268 aa, Artificial Sequence
  source: /note="Description of Artificial Sequence: Synthetic polypeptide"
MAEVQLVQSGAEVKKPGASVKVSCKASGYTFTSYGISWVRQAPGQGLEWLGWINPNSGDTVYSQKFQGRVTMTSDKSVSTAYMELSSLRSDDTAVYYCASPGKNYYYGMDVWGQGTLVTVSSGGGGSGGGGSGGGGSQPVLTQPPSASGTPGQRVTISCSGSSSNIGSNLIYWYQQLPGTAPKLLIYSNNQRPSGVPDRFSGSKSGTSASLAISGLRSEDEADYFCSAWDDSLGGEVFGTGTKVNVLGQPKAAPSAAAEQKLISEEDL

SEQ ID NO: 23488 - protein, 250 aa, Artificial Sequence
  source: /note="Description of Artificial Sequence: Synthetic polypeptide"
EVQLVQSGGGLVQPGRSLRLSCAASGFTFDDYAMHWVRQAPGKGLEWVSGISWNSGNIGYADSVKGRFTISRDNAKNSLYLQMNSLRAEDTALYYCAKDKSYYYGSGTSGGWFDPWGQGTLVTVSSGTGGSGGTGSGTGGSTDIQMTQSPSSLSASVGDRVTITCRASQSISSYLNWYQQKPGKAPKLLIYAASSLQSGVPSRFSGSGSGTDFTLTISSLQPEDFATYYCQQSYSTPRTFGQGTKLEIKR

SEQ ID NO: 23489 - protein, 250 aa, Artificial Sequence
  source: /note="Description of Artificial Sequence: Synthetic polypeptide"
EVQLVQSGAEVRKPGASVKVSCKASGYTFTHYYMHWVRQAPGQGLEWMGIINPSGGSTTYAQKLQGRVTMTRDTSTSTVYMELSSLRSEDTAVYYCARDWGSNYVWGSYPKYWGQGTLVTVSSGTGGSGGTGSGTGGSTQSVLTQPPSVSAAPGQKVTISCSGSSSNIGSNTVNWYQQLPGTAPKLLIYSNNQRPSGIPDRFSGSKSGTSASLAISGLQSEDEADYYCAAWDDSLNGPVFGGGTKLTVLG

SEQ ID NO: 23490 - protein, 254 aa, Artificial Sequence
  source: /note="Description of Artificial Sequence: Synthetic polypeptide"
EVQLVESGPGLVKPSETLSLTCTVSGGSTYNHHWSWIRQPPGRGLEWIGYISYSGKSNYNPSLKSRVTISLEPSTTQFSLKLNSLTAADTAVYYCAREYRDDTNYYYYSLDVWGPGTLVTVSSGGGGSGGGGSGGGGSGGGSAQIQMTQSPSTLSASVGDRVTITCRASQSISSWLAWYQQKPGKAPNLLIYKASNLETGVPSRFSGSGSGTEFTLTITSLQPDDFATYYCQQYNSFPITFGQGTRLEIKRAAA

SEQ ID NO: 23491 - protein, 254 aa, Artificial Sequence
  source: /note="Description of Artificial Sequence: Synthetic polypeptide"
EVQLVESGPGLVKPSEALSLTCTVSGGSTYNHHWSWIRQPPGRGLEWIGYISYSGKSNYNPSLKSRVTISLEPSTTQFSLKLNSLTAADTAVYYCAREYRDDTNYYYYSLDVWGPGTTVTVSSGGGGSGGGGSGGGGSGGGSAQIQMTQSPSTLSASVGDRVTITCRASQSISSWLAWYQQKPGKAPKLLIYKASSLESGVPSRFSGSGSGTEFTLTISSLQPDDFATYYCQQYNSYPFTFGPGTKLEIKRAAA

SEQ ID NO: 23492 - protein, 254 aa, Artificial Sequence
  source: /note="Description of Artificial Sequence: Synthetic polypeptide"
EVQLVESGPRLVKPSETLSLTCTVSGGSTYNHHWSWIRQPPGRGLEWIGYISYSGKSNYNPSLKSRVTISLEPSTTQFSLKLNSLTAADTAVYYCAREYRDDTNYYYYSLDVWGPGTMVTVSSGGGGSGGGGSGGGGSGGGSAQIVMTQSPSTLSASVGDRVTITCRASQSIGSWLAWYQQKPGKAPKLLIYKASSLESGVPSRFSGSGSGTEFTLTISSLQPEDFATYYCQQYNNYSYTFGPGTKLEIKRAAA

SEQ ID NO: 23493 - protein, 254 aa, Artificial Sequence
  source: /note="Description of Artificial Sequence: Synthetic polypeptide"
QVQLVESGGGLVKPGGSLRLSCAASGFTFSDYYMSWIRQAPGKGLEWVSYVTSSGRTKYYADSVKGRFTISRDNAKNSLYLQMNSLRAEDTAVYYCARPQEASEAFDIWGQGTLVTVSSGGGGSGGGGSGGGGSGGGSAQSVLTQPPSVSAAPGQKVTISCSGSSSNIGNNYVSWYQQLPGTAPKLLIYDNDKRPSGIPDRFSGSKSGTSATLGITGLQTGDEADYYCGTWDTSLSAPYVFGTGTKVTVLGAAA

SEQ ID NO: 23494 - protein, 255 aa, Artificial Sequence
  source: /note="Description of Artificial Sequence: Synthetic polypeptide"
QVQLVESGGGLVKPGGSLRLSCAASGFTFSDYYMSWIRQAPGKGLEWVSYVTSSGRTKYYADSVKGRFTISRDNAKNSLYLQMNSLRAEDTAVYYCARPQEASEAFDIWGQGTMVTVSSGGGGSGGGGSGGGGSGGGSAQSVLTQPPSVSAAPGQKVTISCSGSSSNIGNNYVSWYQQLPGTAPKLLIYDNNKRPSGIPDRFSGSKSGTSATLGITGLQTGDEADYYCGTWDSSLSAGSYVFGTGTKLTVLGAAA

SEQ ID NO: 23495 - protein, 252 aa, Artificial Sequence
  source: /note="Description of Artificial Sequence: Synthetic polypeptide"
EVQLVESGGGLVKPGGSLRLSCAASGFTFSDYYMSWIRQAPGKGLEWVSYVTSSGRTKYYADSVKGRFTISRDNAKNSLYLQMNSLRAEDTAVYYCARPQEASEAFDIWGQGTLVTVSSGGGGSGGGGSGGGGSGGGSAQSVLTQPPSVSVAPGQTARITCGGNNIGSKSVHWYQQKPGQAPVLVVYDDSDRPSGIPERFSGSNSGNTATLTISRVEAGDEADYYCQVWDSSSDHSYVFGTGTQLTVLGAAA

SEQ ID NO: 23496 - protein, 227 aa, Artificial Sequence
  source: /note="Description of Artificial Sequence: Synthetic polypeptide"
EVQLVQSGAEVKKPGASVKVSCKASGYTFTDYHINWVRQAPGQGLEWMGWIHPNSGDTNYAQKFQGWVTMTRDTAISTAYMEVNGLKSDDTAVYYCARGGLEPRSVDYYYYGMDVWGQGTTVTVSSASTKGPSVFPLAPSSKSTSGGTAALGCLVKDYFPEPVTVSWNSGALTSGVHTFPAVLQSSGLYSLSSVVTVPSSSLGTQTYICNVNHKPSNTKVDKRVEPK

SEQ ID NO: 23497 - protein, 242 aa, Artificial Sequence
  source: /note="Description of Artificial Sequence: Synthetic polypeptide"
QVQLVESGAEVKKPGSSVKVSCKASGGPFRSYAISWVRQAPGQGPEWMGGIIPIFGTTKYAPKFQGRVTITADDFAGTVYMELSSLRSEDTAMYYCAKHMGYQVRETMDVWGKGTTVTVSSASTKGPSVFPLAPSSKSTSGGTAALGCLVKDYFPEPVTVSWNSGALTSGVHTFPAVLQSSGLYSLSSVVTVPSSSLGTQTYICNVNHKPSNTKVDKRVEPKSCDKSGRLVPRGSGHHHHHH

SEQ ID NO: 23498 - protein, 227 aa, Artificial Sequence
  source: /note="Description of Artificial Sequence: Synthetic polypeptide"
  MOD_RES (1)..(1): Any amino acid
XVQLVESGPALVKPTQTLTLTCSFSGFSLSTSGMSVSWIRQPPGKALEWLALIDWDDDTYYSSSLKTRLTISKDTSKSQVVLTMTNMDPVDTATYYCARTLRVSGDYVRDFDLWGRGTLVTVSSASTKGPSVFPLAPSSKSTSGGTAALGCLVKDYFPEPVTVSWNSGALTSGVHTFPAVLQSSGLYSLSSVVTVPSSSLGTQTYICNVNHKPSNTKVDKRVEPKSC

SEQ ID NO: 23499 - protein, 230 aa, Artificial Sequence
  source: /note="Description of Artificial Sequence: Synthetic polypeptide"
EVQLVQSGAEVKKPGESLKISCKGSGYSFSDYWIGWVRQMPGEGLEWMGIIYPASSEIRYSPSFQGLVTISRDKSINTASLQWSSLKASDTAIYYCARHASCSARSCYWGPVDYWGQGTLVTVSSASTKGPSVFPLAPSSKSTSGGTAALGCLVKDYFPEPVTVSWNSGALTSGVHTFPAVLQSSGLYSLSSVVTVPSSSLGTQTYICNVNHKPSNTKVDKRVEPKSCDK

SEQ ID NO: 23500 - protein, 227 aa, Artificial Sequence
  source: /note="Description of Artificial Sequence: Synthetic polypeptide"
QVQLQESGPGLVKPSGTVSLTCAVSGGSISSSYWWSWVRQPPGKGLEWIGEIYHSGNTNYNPSLKSRVTISVDKSKNLFSLKLSSVTAADTAVYYCARVALFDILTGGWFDPWGQGTLVTVSSASTKGPSVFPLAPSSKSTSGGTAALGCLVKDYFPEPVTVSWNSGALTSGVHTFPAVLQSSGLYSLSSVVTVPSSSLGTQTYICNVNHKPSNTKVDKRVELKTPT

SEQ ID NO: 23501 - protein, 233 aa, Artificial Sequence
  source: /note="Description of Artificial Sequence: Synthetic polypeptide"
EVQLVESGPGLVKPSDILSLTCAVSGYSISSNYYWGWIRQPPGKGLEWIGSIYHSGSTYYKPSLESRLGISVDTSKNQFSLKLSFVSAADTAVYYCARHVRSGYPDTAYYFDKWGQGTLVTVSSASTKGPSVFPLAPSSKSTSGGTAALGCLVKDYFPEPVTVSWNSGALTSGVHTFPAVLQSSGLYSLSSVVTVPSSSLGTQTYICNVNHKPSNTKVDKRVEPKSCHHHHHH

SEQ ID NO: 23502 - protein, 226 aa, Artificial Sequence
  source: /note="Description of Artificial Sequence: Synthetic polypeptide"
EVQLVESGAEVKKPGSSVKVSCKASGGPFRSYAISWVRQAPGQGPEWMGGIIPIFGTTKYAPKFQGRVTITADDFAGTVYMELSSLRSEDTAMYYCAKHMGYQVRETMDVWGKGTTVTVSSASTKGPSVFPLAPSSKSTSGGTAALGCLVKDYFPEPVTVSWNSGALTSGVHTFPAVLQSSGLYSLSSVVTVPSSSLGTQTYICNVNHKPSNTKVDKRVEPKSCDK

SEQ ID NO: 23503 - protein, 220 aa, Artificial Sequence
  source: /note="Description of Artificial Sequence: Synthetic polypeptide"
SVLTQPPSVSAAPGQKVTISCSGSSSNIGNDYVSWYQQLPGTAPKLLIYDNNKRPSGIPDRFSGSKSGTSATLGITGLQTGDEANYYCATWDRRPTAYVVFGGGTKLTVLGAAAGQPKAAPSVTLFPPSSEELQANKATLVCLISDFYPGAVTVAWKADSSPVKAGVETTTPSKQSNNKYAASSYLSLTPEQWKSHRSYSCQVTHEGSTVEKTVAPTECS

SEQ ID NO: 23504 - protein, 217 aa, Artificial Sequence
  source: /note="Description of Artificial Sequence: Synthetic polypeptide"
QSVLTQPPSVSAAPGQKVTISCSGSSSNIGNNYVSWYQQLPGTAPKLLIYDNNKRPSGIPDRFSGSKSGTSATLGITGLQTGDEADYYCGTWDSSLSAYVVFGGGTKLTVLGQPKANPTVTLFPPSSEELQANKATLVCLISDFYPGAVTVAWKADGSPVKAGVETTKPSKQSNNKYAASSYLSLTPEQWKSHRSYSCQVTHEGSTVEKTVAPTECS

SEQ ID NO: 23505 - protein, 217 aa, Artificial Sequence
  source: /note="Description of Artificial Sequence: Synthetic polypeptide"
  MOD_RES (1)..(1): Any amino acid
XPVLTQPPSASGTPGQRVTISCSGSSSNIGSNTVSWYQQVPGTAPKLLIYGNNERPSGVPDRFSGSKSATSASLAISGLQSEDEADYYCAAWDDSLNGFWVFGGGTKLTVLGQPKAAPSVTLFPPSSEELQANKATLVCLISDFYPGAVTVAWKADSSPVKAGVETTTPSKQSNNKYAASSYLSLTPEQWKSHKSYSCQVTHEGSTVEKTVAPTECS

SEQ ID NO: 23506 - protein, 219 aa, Artificial Sequence
  source: /note="Description of Artificial Sequence: Synthetic polypeptide"
DIVMTQSPLSLPVSPGEPASISCRSSQSLLHGNGYNYLDWYLQKPGQSPRLLIYLGSNRASGVPDRFSGSGSGTDFTLKISRVEAEDVGVYYCMQALQTPLTFGGGTKVEIKRTVAAPSVFIFPPSDEQLKSGTASVVCLLNNFYPREAKVQWKVDNALQSGNSQESVTEQDSKDSTYSLSSTLTLSKADYEKHKVYACEVTHQGLSSPVTKSFNRGEC

SEQ ID NO: 23507 - protein, 240 aa, Artificial Sequence
  source: /note="Description of Artificial Sequence: Synthetic polypeptide"
EVQLVESGAEVKKPGSSVKVSCRASGTFYKYAINWVRQAPGQGLEWMGGIIPFFGTTNYAQKFQGRLTITADGSTNTAYMQLDSLRSEDTAVYYCAGPSITESHYCLDCAAKDYYYGLDVWGQGTTVTVSSASTKGPSVFPLAPSSKSTSGGTAALGCLVKDYFPEPVTVSWNSGALTSGVHTFPAVLQSSGLYSLSSVVTVPSSSLGTQTYICNVNHKPSNTKVDKRVEPKSCHHHHHH

SEQ ID NO: 23508 - protein, 216 aa, Artificial Sequence
  source: /note="Description of Artificial Sequence: Synthetic polypeptide"
QSVLTQPPSASGTPGQSVTISCSGSRSNIGGNTVNWYQHLPGMAPKLLIYSSNQRSSGVPDRFSGSKSGTSASLAISGLQSEDDADYYCASWDDSLNGVVFGGGTKLTVLGQPKAAPSVTLFPPSSEELQANKATLVCLISDFYPGAVTVAWKADSSPVKAGVETTTPSKQSNNKYAASSYLSLTPEQWKSHRSYSCQVTHEGSTVEKTVAPTECS

SEQ ID NO: 23509 - protein, 208 aa, Artificial Sequence
  source: /note="Description of Artificial Sequence: Synthetic polypeptide"
YELTQPPSVSVSPGQTVNITCSGDTLGDKYVCWYQQKPGQSPVLVIYQDTKRPSGIPERFSGSNSGDTATLTVSGTQAMDEADYYCQAWDSSSFVFGTGTKVTVLGQPKANPTVTLFPPSSEELQANKATLVCLISDFYPGAVTVAWKADGSPVKAGVETTKPSKQSNNKYAASSYLSLTPEQWKSHRSYSCQVTHEGSTVEKTVAPT

SEQ ID NO: 23510 - protein, 469 aa, Artificial Sequence [sequence omitted]

SEQ ID NO: 23511 - protein, 138 aa, Artificial Sequence
  source: /note="Description of Artificial Sequence: Synthetic polypeptide"
MELGLCWVFLVAILKGVQCEVQLVESGGGLVQPGGSLRISCAASGFTVSSNYMSWVRQAPGKGLEWVSVIYSGGSTYYADSVKGRFSFSRDNSKNTVFLQMNSLRAEDTAVYYCARCLSRMRGYGLDVWGQGTTVTVS

SEQ ID NO: 23512 - protein, 450 aa, Artificial Sequence
  source: /note="Description of Artificial Sequence: Synthetic polypeptide"
EVQLVESGAEVKKPGSSVKVSCKASGGPFRSYAISWVRQAPGQGPEWMGGIIPIFGTTKYAPKFQGRVTITADDFAGTVYMELSSLRSEDTAMYYCAKHMGYQVRETMDVWGKGTTVTVSSASTKGPSVFPLAPSSKSTSGGTAALGCLVKDYFPEPVTVSWNSGALTSGVHTFPAVLQSSGLYSLSSVVTVPSSSLGTQTYICNVNHKPSNTKVDKRVEPKSCDKTHTCPPCPAPELLGGPSVFLFPPKPKDTLMISRTPEVTCVVVDVSHEDPEVKFNWYVDGVEVHNAKTKPREEQYNSTYRVVSVLTVLHQDWLNGKEYKCKVSNKALPAPIEKTISKAKGQPREPQVYTLPPSREEMTKNQVSLTCLVKGFYPSDIAVEWESNGQPENNYKTTPPVLDSDGSFFLYSKLTVDKSRWQQGNVFSCSVMHEALHNHYTQKSLSLSPG

SEQ ID NO: 23513 - protein, 453 aa, Artificial Sequence
  source: /note="Description of Artificial Sequence: Synthetic polypeptide"
QVQLVQSGAEVKMPGSSVKVSCKTSGVFFSSHAISWVRQAPGQGLEWMGGISPMFGTTHYAQKFQGRVTITADQSTTTAYMELTSLTSEDTAVYYCARDGAGSYYPLNWFDPWGQGTLVTVSSASTKGPSVFPLAPSSKSTSGGTAALGCLVKDYFPEPVTVSWNSGALTSGVHTFPAVLQSSGLYSLSSVVTVPSSSLGTQTYICNVNHKPSNTKVDKRVEPKSCDKTHTCPPCPAPELLGGPSVFLFPPKPKDTLMISRTPEVTCVVVDVSHEDPEVKFNWYVDGVEVHNAKTKPREEQYNSTYRVVSVLTVLHQDWLNGKEYKCKVSNKALPAPIEKTISKAKGQPREPQVYTLPPSRDELTKNQVSLTCLVKGFYPSDIAVEWESNGQPENNYKTTPPVLDSDGSFFLYSKLTVDKSRWQQGNVFSCSVMHEGLHNHYTQKSLSLSPGK

SEQ ID NO: 23514 - protein, 472 aa, Artificial Sequence
  source: /note="Description of Artificial Sequence: Synthetic polypeptide"
MDWTWRFLFVVAAATGVQCQVQLVQSGAEVKMPGSSVKVSCKTSGVFFSSHAISWVRQAPGQGLEWMGGISPMFGTTHYAQKFQGRVTITADQSTTTAYMELTSLTSEDTAVYYCARDGAGSYYPLNWFDPWGQGTLVTVSSASTKGPSVFPLAPSSKSTSGGTAALGCLVKDYFPEPVTVSWNSGALTSGVHTFPAVLQSSGLYSLSSVVTVPSSSLGTQTYICNVNHKPSNTKVDKRVEPKSCDKTHTCPPCPAPELLGGPSVFLFPPKPKDTLMISRTPEVTCVVVDVSHEDPEVKFNWYVDGVEVHNAKTKPREEQYNSTYRVVSVLTVLHQDWLNGKEYKCKVSNKALPAPIEKTISKAKGQPREPQVYTLPPSRDELTKNQVSLTCLVKGFYPSDIAVEWESNGQPENNYKTTPPVLDSDGSFFLYSKLTVDKSRWQQGNVFSCSVMHEGLHNHYTQKSLSLSPGK

SEQ ID NO: 23515 - protein, 456 aa, Artificial Sequence
  source: /note="Description of Artificial Sequence: Synthetic polypeptide"
QVQLVQSGAEVKKPGASVKVSCKTSGYSFSTYGVSWVRQAPGQGPEWVGWISAYTGITDYAQKFQGRVTLTTDATTATAFLDLRSLRPDDTATYFCARDKVQGRVEVGSGGRHDYWGQGTLVIVSSASTKGPSVFPLAPSSKSTSGGTAALGCLVKDYFPEPVTVSWNSGALTSGVHTFPAVLQSSGLYSLSSVVTVPSSSLGTQTYICNVNHKPSNTKVDKKVEPKSCDKTHTCPPCPAPELLGGPSVFLFPPKPKDTLMISRTPEVTCVVVDVSHEDPEVKFNWYVDGVEVHNAKTKPREEQYNSTYRVVSVLTVLHQDWLNGKEYKCKVSNKALPAPIEKTISKAKGQPREPQVYTLPPSRDELTKNQVSLTCLVKGFYPSDIAVEWESNGQPENNYKTTPPVLDSDGSFFLYSKLTVDKSRWQQGNVFSCSVMHEGLHNHYTQKSLSLSPGK

SEQ ID NO: 23516 - protein, 128 aa, Artificial Sequence
  source: /note="Description of Artificial Sequence: Synthetic polypeptide"
QVQLVQSGAEVRKPGASVKVSCKASGYTFTRHGISWVRQAPGQGLEWMGWISAYTGDTDYAQKFQGRVTMTTDTSTNTAYMELRSLRSDDAAVYYCARLRLQGEVVVPPSQSNWFDPWGQGTLVTVSS

SEQ ID NO: 23517 - protein, 120 aa, Artificial Sequence
  source: /note="Description of Artificial Sequence: Synthetic polypeptide"
QVHLVQSGAEVRKPGASVKVSCKVSGYTLNELSIHWLRQAPGRGLEWMGSFDPEDGETIYAQKFQGRVTMTGDTSTDTAYLELTSLRSEDTALYYCARGWGAVTSPFDFWGQGTLVTVSS

SEQ ID NO: 23518 - protein, 123 aa, Artificial Sequence
  source: /note="Description of Artificial Sequence: Synthetic polypeptide"
QLQLQESGPRLVKPSETLSLTCSVSGVSISSSNYYWGWIRQPPGKGLEWIGTIYHSGSTYYNPSLKSRLIISVDTSKNQFYLQLTSLTAADSAVYYCATGGGFGWSQTYFGYWGQGTLVTASS

SEQ ID NO: 23519 - protein, 125 aa, Artificial Sequence
  source: /note="Description of Artificial Sequence: Synthetic polypeptide"
EVQLLESGGGLVQPGGSLRLSCAASGFSFSTYAMSWVRQAPGKGLEWVSGISGSGESTYYADSVKGRFTVSRDNSKNTLYLQMNSLRAEDTAVYYCAKQGDHIAWLLRGINFDYWGQGVLVTVSS

SEQ ID NO: 23520 - protein, 126 aa, Artificial Sequence
  source: /note="Description of Artificial Sequence: Synthetic polypeptide"
QVQLVQSGAEVKKPGSSVKVSCKASGGAFSNYAISWVRQAPGQGLEWMGGIIPIFGTTNYAQKFQGRVTITADKFTTIAYMELRSLRSEDTAVYYCARHGGVYYYGSASSGWFDPWGQGTLVTVSS

SEQ ID NO: 23521 - protein, 469 aa, Artificial Sequence
  source: /note="Description of Artificial Sequence: Synthetic polypeptide"
MDWTWRFLFVVAAATGVQSQVQLVQSGAEVKKPGSSVKVSCKASGGTLNNYAISWVRQAPGQGLEWMGGISPIFGTLNYAERFQGRVTITADVFTNTVYMELSSLRSEDTAVYFCARGCGYNCYYFDGWGQGTLVTVSSASTKGPSVFPLAPSSKSTSGGTAALGCLVKDYFPEPVTVSWNSGALTSGVHTFPAVLQSSGLYSLSSVVTVPSSSLGTQTYICNVNHKPSNTKVDKKVEPKSCDKTHTCPPCPAPELLGGPSVFLFPPKPKDTLMISRTPEVTCVVVDVSHEDPEVKFNWYVDGVEVHNAKTKPREEQYNSTYRVVSVLTVLHQDWLNGKEYKCKVSNKALPAPIEKTISKAKGQPREPQVYTLPPSRDELTKNQVSLTCLVKGFYPSDIAVEWESNGQPENNYKTTPPVLDSDGSFFLYSKLTVDKSRWQQGNVFSCSVMHEGLHNHYTQKSLSLSPGK

SEQ ID NO: 23522 - protein, 472 aa, Artificial Sequence; identical to SEQ ID NO: 23514
  source: /note="Description of Artificial Sequence: Synthetic polypeptide"

SEQ ID NO: 23523 - protein, 476 aa, Artificial Sequence
  source: /note="Description of Artificial Sequence: Synthetic polypeptide"
MEFGLSWVFLVALLRGVQCQVQLVESGGGVVQPGRSLRLSCAASGFTFSRFGIHWVRQAPGKGLEWMAVIWYDGSNKFYADSVKGRFTISRDNSKNTVYLQMNSLRAEDTAVYYCAKDSRGYCSSIICFEGGLDNWGQGTLVTVSSASTKGPSVFPLAPSSKSTSGGTAALGCLVKDYFPEPVTVSWNSGALTSGVHTFPAVLQSSGLYSLSSVVTVPSSSLGTQTYICNVNHKPSNTKVDKRVEPKSCDKTHTCPPCPAPELLGGPSVFLFPPKPKDTLMISRTPEVTCVVVDVSHEDPEVKFNWYVDGVEVHNAKTKPREEQYNSTYRVVSVLTVLHQDWLNGKEYKCKVSNKALPAPIEKTISKAKGQPREPQVYTLPPSRDELTKNQVSLTCLVKGFYPSDIAVEWESNGQPENNYKTTPPVLDSDGSFFLYSKLTVDKSRWQQGNVFSCSVMHEGLHNHYTQKSLSLSPGK

SEQ ID NO: 23524 - protein, 123 aa, Artificial Sequence
  source: /note="Description of Artificial Sequence: Synthetic polypeptide"
QVQLVQSGAEVKKPGSSVKVSCKASGGTFSDNAISWVRQAPGQGLEWMGGIIPIFGKPNYAQKFQGRVTITADESTSTAYMDLRSLRSEDTAVYYCARDSDAYYYGSGGMDVWGQGTLVTVSS

SEQ ID NO: 23525 - protein, 456 aa, Artificial Sequence
  source: /note="Description of Artificial Sequence: Synthetic polypeptide"
QVQLVQSGAEVKKPGASVTVSCQVSGYTLTSYGLSWVRQAPGQGLEWVGWINTYDGQTKYVKKFQGRVTMTTHTGTNTAYMEMKSLRSDDTAVYYCARVEGVRGVMGFHYYPMDVWGQGTMVTVSSASTKGPSVFPLAPSSKSTSGGTAALGCLVKDYFPEPVTVSWNSGALTSGVHTFPAVLQSSGLYSLSSVVTVPSSSLGTQTYICNVNHKPSNTKVDKKVEPKSCDKTHTCPPCPAPELLGGPSVFLFPPKPKDTLMISRTPEVTCVVVDVSHEDPEVKFNWYVDGVEVHNAKTKPREEQYNSTYRVVSVLTVLHQDWLNGKEYKCKVSNKALPAPIEKTISKAKGQPREPQVYTLPPSRDELTKNQVSLTCLVKGFYPSDIAVEWESNGQPENNYKTTPPVLDSDGSFFLYSKLTVDKSRWQQGNVFSCSVMHEAPHNHYTQKSLSLSPGK

SEQ ID NO: 23526 - protein, 122 aa, Artificial Sequence
  source: /note="Description of Artificial Sequence: Synthetic polypeptide"
EVQLVQSGPGLVKPSETLSLTCTVSGSSMRTHYWTWIRQPPGKGLEWIGNIYYSGSTDYNPSLKSRVTISVDTSKNQFSLKLSSVTAADTAVYFCARTKHFDILPGGVFDMWGRGTTVTVSS

SEQ ID NO: 23527 - protein, 120 aa, Artificial Sequence
  source: /note="Description of Artificial Sequence: Synthetic polypeptide"
QVQLQESGPGLVKPSETLSLTCTVSGSSMRTHYWTWIRQPPGKGLEWIGNIYYSGSTDYNPSLKSRVTISVDTSKNQFSLKLSSVTAADTAVYFCARTKHFDILPGGVFDMWGRGTTVSS

SEQ ID NO: 23528 - protein, 125 aa, Artificial Sequence
  source: /note="Description of Artificial Sequence: Synthetic polypeptide"
QVQLQESGPGLVKPSQTLSLTCAVSGGSISSRGYYWSWIRQPPGKGLEWIGYIFYTGGTDYNPSLKSRITISRDTPKNQISLNLSSVTAADTAVYYCARVVDGSSGYHHYYFDYWGQGTLVTVSS

SEQ ID NO: 23529 - protein, 128 aa, Artificial Sequence
  source: /note="Description of Artificial Sequence: Synthetic polypeptide"
RGQLVQSGGGVVQPGRSLRLSCAASGFVFNVFGIHWVRQAPGKGLEWLATISYDGLNKYYADSVKGRITISRDNSKNTLYLQMNSLRAEDTAVYYCVRDSEESTYYGDYMWVYNWFDLWGQGTLVTVS

SEQ ID NO: 23530 - protein, 460 aa, Artificial Sequence
  source: /note="Description of Artificial Sequence: Synthetic polypeptide"
EVQLLESGGGLVKPGQSLKLSCAASGFTFTSYGMHWVRQPPGKGLEWVAVISYDGSYKYYADSVQGRFTISRDNSKNTLYLQMNSLRAEDTAVYYCAKDSRLRSLLYFEWLSQGYFNPWGAGTTLTVSSASTKGPSVFPLAPSSKSTSGGTAALGCLVKDYFPEPVTVSWNSGALTSGVHTFPAVLQSSGLYSLSSVVTVPSSSLGTQTYICNVNHKPSNTKVDKKVEPPKSCDKTHTCPPCPGTELLGGPSVFLFPPKPKDTLMISRTPEVTCVVVDVSHEDPEVKFNWYVDGVEVHNAKTKPREEQYNSTYRVVSVLTVLHQDWLNGKEYKCKVSNKALPAPIEKTISKAKGEPREPQVYTLPPSRDELTKNQVSLTCLVKGFYPSDIAVEWESNGQPENNYKTTPPVLDSDGSFFLYSKLTVDKSRWQQGNVFSCSVMHEALHNHYTQKSLSLSPGK

SEQ ID NO: 23531 - protein, 129 aa, Artificial Sequence
  source: /note="Description of Artificial Sequence: Synthetic polypeptide"
EVQLLESGGGLVKPGQSLKLSCAASGFTFTSYGMHWVRQPPGKGLEWVAVISYDGSYKYYADSVQGRFTISRDNSKNTLYLQMNSLRAEDTAVYYCAKDSRLRSLLYFEWLSQGYFNPWGAGTTLTVSS

SEQ ID NO: 23532 - protein, 129 aa, Artificial Sequence
  source: /note="Description of Artificial Sequence: Synthetic polypeptide"
EVQLLESGGGLVKPGQSLKLSCAASGFTFSSYGMHWVRQPPGKGLEWVAVVSYDGSNKYYADSVQGRFTISRDNSKNTLYLQMNSLRAEDTAVYYCAKDTKLRSLLYFEWLSSGLLDYWGQGAMVTVSS

SEQ ID NO: 23533 - protein, 129 aa, Artificial Sequence
  source: /note="Description of Artificial Sequence: Synthetic polypeptide"
EVQLLESGGGLVKPGQSLKLSCAASGFSFSTYAMHWVRQPPGKGLEWVAVVSYDGNYKYYADTVQGRFTISRDNSKNTLYLQMNSLRAEDTAVYYCAKDSRLRSLLYFEWLSQGYFNPWGQGTTLTVSS

SEQ ID NO: 23534 - protein, 129 aa, Artificial Sequence
  source: /note="Description of Artificial Sequence: Synthetic polypeptide"
EVQLLESGGGLRKPGQSLKLSCAASGFSFSTYAMHWVRQPPGKGLEWVAVVSYDGNYKYYADSVQGRFTISRDNSKNTLYLQMNSLRAEDTAVYYCAKDSRLRSLLYFEWLSQGYFNPWGQGTTLTVSS

SEQ ID NO: 23535 - protein, 129 aa, Artificial Sequence
  source: /note="Description of Artificial Sequence: Synthetic polypeptide"
QVQLLETGGGLVKPGQSLKLSCAASGFTFTSYAMHWVRQPPGKGLEWVAVVSYDGNYKYYADSVQGRFTISRDNSKNTLYLQMNSLRAEDTAVYYCAKDSRLRSLLYFEWLSQGYFNPWGQGTTVTVSS

SEQ ID NO: 23536 - protein, 129 aa, Artificial Sequence
  source: /note="Description of Artificial Sequence: Synthetic polypeptide"
EVQLLESGGGLVKPGQSLKLSCAASGFTFTSYGMHWVRQPPGKGLEWVAVVSYDGNYKYYADSVQGRFTISRDNSKNTLYLQMNSLRAEDTAVYYCAKDSRLRSLLYFEWLSQGYFNPWGAGTTLTVSS

SEQ ID NO: 23537 - protein, 129 aa, Artificial Sequence
  source: /note="Description of Artificial Sequence: Synthetic polypeptide"
EVQLLESGGGLVKPGQSLKLSCAASGFTFTSYGMHWVRQPPGKGLEWVAVLSYDGNYKYYADSVQGRFTISRDNSKNTLYLQMNSLRAEDTAVYYCAKDSRLRSLLYFEWLSQGYFNPWGAGTTLTVSS

SEQ ID NO: 23538 - protein, 129 aa, Artificial Sequence
  source: /note="Description of Artificial Sequence: Synthetic polypeptide"
EVQLLESGGGLVKPGQSLKLSCAASGFTFTTYAMHWVRQPPGKGLEWVAVLSYDGNYKYYADSVQGRFTISRDNSKNTLYLQMNSLRAEDTAVYYCAKDSRLRSLLYFEWLSQGYFNPWGAGTTLTVSS

SEQ ID NO: 23539 - protein, 129 aa, Artificial Sequence
  source: /note="Description of Artificial Sequence: Synthetic polypeptide"
EVQLLESGGGLVKPGQSLKLSCAASGFTFTTYAMHWVRQPPGKGLEWVAVVSFDGNNRYYADSVQGRFTISRDNSKNTLYLQMNSLRAEDTAVYYCAKDSQLRSLLYFEWLSSGVLDYWGQGAMVTVSS

SEQ ID NO: 23540 - protein, 129 aa, Artificial Sequence
  source: /note="Description of Artificial Sequence: Synthetic polypeptide"
EVQLLESGGGLVKPGQSLKLSCAASGFTFSSYGMHWVRQPPGKGLEWVAVVSYDGNNKYYADSVQGRFTISRDNSKNTLYLQMNSLRAEDTAVYYCAKDSKLRSLLYFEWLSSGLLDYWGQGAMVTVSS

SEQ ID NO: 23541 - protein, 129 aa, Artificial Sequence
  source: /note="Description of Artificial Sequence: Synthetic polypeptide"
EVQLLESGGGLVKPGQSLKLSCAASGFTFTTYAMHWVRQPPGKGLEWVAVVSYDGNNKYYADSVQGRFTISRDNSKNTLYLQMNSLRAEDTAVYYCAKDSKLRSLLYFEWLSSGLLDYWGQGAMVTVSS

SEQ ID NO: 23542 - protein, 129 aa, Artificial Sequence
  source: /note="Description of Artificial Sequence: Synthetic polypeptide"
EVQLLESGGGLVKPGQSLKLSCAASGFTFTSYGMHWVRQPPGKGLEWVAVVSYDGNYKYYADSVQGRFTISRDNSKNTLYLQMNSLRAEDTAVYYCAKDSKLRSLLYFEWLSQGYFNPWGAGTTLTVSS

SEQ ID NO: 23543 - protein, 129 aa, Artificial Sequence
  source: /note="Description of Artificial Sequence: Synthetic polypeptide"
EVQLLESGGGLVKPGQSLKLSCAASGFTFTSYAMHWVRQPPGKGLEWVAVVSYDGNYKYYADSVQGRFTISRDNSKNTLYLQMNSLRAEDTAVYYCAKDSRLRSLLYFEWLSQGYFNPWGQGTTLTVSS

SEQ ID NO: 23544 - protein, 129 aa, Artificial Sequence
  source: /note="Description of Artificial Sequence: Synthetic polypeptide"
QVQLLETGGGLVKPGQSLKLSCAASGFTFTSYAMHWVRQPPGKGLEWVAVVSYDGNYKYYADSVQGRFTISRDNSKNTLYLQMNSLRAEDTAVYYCAKDSRLRSLLYFEWLSQGYFNPWGQGTTLTVSS

SEQ ID NO: 23545 - protein, 129 aa, Artificial Sequence
  source: /note="Description of Artificial Sequence: Synthetic polypeptide"
EVQLLESGGGLVKPGQSLKLSCAASGFTFTSYAMHWVRQPPGKGLEWVAVVSYDGNYKYYADSVQGRFTISRDNSKNTLYLQMNSLRAEDTAVYYCAKDSQLRTLLYFEWLSQGYFNPWGQGTTLTVSS

SEQ ID NO: 23546 - protein, 129 aa, Artificial Sequence
  source: /note="Description of Artificial Sequence: Synthetic polypeptide"
EVQLLESGGGLVKPGQSLKLSCAASGFTFTSYAMHWVRQPPGKGLEWVAVVSYDGNYKYYADSVQGRFTISRDNSKNTLYLQMNSLRAEDTAVYYCAKDSRLRTLLYFEWLSQGYFDPWGQGTTLTVSS

SEQ ID NO: 23547 - protein, 452 aa, Artificial Sequence
  source: /note="Description of Artificial Sequence: Synthetic polypeptide"
QVQLVQSGAEVKKPGASVTVSCQVSGYTLTSYGLSWVRQAPGQGLEWVGWINTYDGQTKYVKKFQGRVTMTTHTGTNTAYMEMKSLRSDDTAVYYCARVEGVRGVMGFHYYPMDVWGQGTMVTVSSASTKGPSVFPLAPSSKSTSGGTAALGCLVKDYFPEPVTVSWNSGALTSGVHTFPAVLQSSGLYSLSSWTVPSSSLGTQTYICNVNHKPSNTKVDKKVEPKSCDKTHTCPPCPAPELLGGPSVFLFPPKPKDTLMISRTPEVTCVWDVSHEDPEVKFNYVDGVEVHNAKTKPREEQYNSTYRWSVLTVLHQDWLNGKEYKCKVSNKALPAPIEKTISKAKGQPREPQVYTLPPSRDELTKNQVSLTCLVKGFYPSDIAVEWESNGQPENNYKTTPPVLDSDGSFFLYSKLTVDKSRWQQGNVFSCSVMHEAPHNHYTQKSLSLSPGK

SEQ ID NO: 23548 - protein, 122 aa, Artificial Sequence
  source: /note="Description of Artificial Sequence: Synthetic polypeptide"
EVQLLESGGGLVQPGGSLRLSCAASGFAFSSYGMSWVRQAPGKGLEWVSAFSGSGTSTYYADSVKGRFTISRDKSKNTLYLQMNSLRAEDTAIYYCAKPPGPYIVVAGLFENWGRGTLVTVS

SEQ ID NO: 23549 - protein, 118 aa, Artificial Sequence
  source: /note="Description of Artificial Sequence: Synthetic polypeptide"
EVQLVESGAEVKKPGASVKVSCKASGYTFSRYYIHWVRQAPGQELEWMGWINPDSGDTNYAQKFRGRVTMARDTSISTVYMELNSLRYDDTAVYFCARIIWSSSGMDVWGQGTTVTVS

SEQ ID NO: 23550 - protein, 122 aa, Artificial Sequence
  source: /note="Description of Artificial Sequence: Synthetic polypeptide"
EVQLVESGGGVVQPGRSLRLSCAASGFSFSNYAMHWVRQAPGKGLEWVALISFDGSDKYYADSVKGRFTMSRDNSKNTLYLQMNSLRAEDTAVYYCARDEPYCGGDCFAFDVWGQGTMVTVS

SEQ ID NO: 23551 - protein, 120 aa, Artificial Sequence
  source: /note="Description of Artificial Sequence: Synthetic polypeptide"
QVQLQESGPGLVKPSETLSLTCSVSGGSINYYYWSWIRQPPGKGLECIGYISDTGRTYYNPSLRSRVTISVDTSKNQFSLNLTSMTAADTAVYYCARDPTGSRQKNAFDMWGQGTMVTVS

SEQ ID NO: 23552 - protein, 123 aa, Artificial Sequence
  source: /note="Description of Artificial Sequence: Synthetic polypeptide"
EVQLVESGGGLVQPGRSLRLSCVGSGFNFDGYAMQWVRQVPGKGLEWVSGISWHSDSTGYADSVRGRFTISRDNAKNSLYLQMDSLRPEDTAFYYCGKSIGHVGGSYRHPIDYWGQGTLVTVS

SEQ ID NO: 23553 - protein, 126 aa, Artificial Sequence
  source: /note="Description of Artificial Sequence: Synthetic polypeptide"
EVQLVESGAEVKKPGASVKVSCKASGYTFTSFDINWVRQAPGQGLEWMGWMTPTSGKTGYAQKFQGRITMTRNTSINTAYMELSSLRSEDTAVYFCARGPERRTTIFDVILDWFDPWGQGTLVTVS

SEQ ID NO: 23554 - protein, 118 aa, Artificial Sequence
  source: /note="Description of Artificial Sequence: Synthetic polypeptide"
EVQLLESGGGVVQPGRSLRLSCAASGFTFRTYGMHWVRQAPGKGLEWVAVISHDGNLKYYGGSVKGRFTISRDNSKNALYLQMNSLRVDDTALYYCARGIGITDAFDIRGQGTMVVVS

SEQ ID NO: 23555 - protein, 123 aa, Artificial Sequence
  source: /note="Description of Artificial Sequence: Synthetic polypeptide"
EVQLVESGAEVKKPGSSVKVSCKASGGTFRSYAVSWVRQAPGQGLEWMGGIIAIFGTTNYAQKFQDRVTITADDLPSTAYMELTSLRSEDTAVYFCVRGRGYYLGGDYGSLDSWGQGTLVTVS

SEQ ID NO: 23556 - protein, 119 aa, Artificial Sequence
  source: /note="Description of Artificial Sequence: Synthetic polypeptide"
EVQLVESGAGVKKPGSSVKVSCKASGNTFSSNAISWVRQAPGQGLEWMGGILGMLRTTNYAQKFQGRVTITADEFMNTAYMELSSLTSEDTAVYYCARSSGYYPDYFHLWGQGTLVTVS

SEQ ID NO: 23557 - protein, 471 aa, Artificial Sequence
  source: /note="Description of Artificial Sequence: Synthetic polypeptide"
MGWSWIFLLSVTAGVHSQVQLQQSGAELVRPGTSVKMSCKAAGYTFTNYWIGWVKQRPGHGLEWIGDIYPENDFSNYNEKFKDKATLTADTSSRTAYMQLSSLTSEDSAIYYCVRANEGWYLDVWGTGTTVSVSSAKTTPPSVYPLAPGCGDTTGSSVTLGCLVKGYFPESVTVTWNSGSLSSSVHTFPALLQSGLYTMSSSVTVPSSTWPSQTVTCSVAHPASSTTVDKKLEPSGPTSTINPCPPCKECHKCPAPNLEGGPSVFIFPPNIKDVLMISLTPKVTCVVVDVSEDDPDVQISWFVNNVEVLTAQTQTHREDYNSTIRVVSALPIQHQDWMSGKEFKCKVNNKDLPAPIERTISKIKGIVRAPQVYILSPPPEQLSRKDVSLTCLAVGFSPEDISVEWTSNGHTEENYKNTAPVLDSDGSYFIYSKLDIKTSKWEKTDSFSCNVRHEGLHSYYLKKTISRSPGK

SEQ ID NO: 23558 - protein, 268 aa, Artificial Sequence
  source: /note="Description of Artificial Sequence: Synthetic polypeptide"
MDSRLNLVFLVLILKGVQCDVQLVESGGGLVQPGGSRKLSCAASGFTFSSFGMHWVRQAPEKGLEWVAYISSGSSTIYYADTVKGRFTISRDNPKNTLFLQMTSLRSEDTAMYYCARNYDEDFDVWGAGTTVTVSSAKTTPPSVYPLAPGCGDTTGSSVTLGCLVKGYFPESVTVTWNSGSLSSSVHTFPALLQSGLYTMSSSVTVPSSTWPSQTVTCSVAHPASSTTVDKKLEPSGPISTINPCPPCKECHKCPAPNLEGGPSVFIF

SEQ ID NO: 23559 - protein, 257 aa, Artificial Sequence
  source: /note="Description of Artificial Sequence: Synthetic polypeptide"
MAVLGLLFCLVTFPSCVLSQVHLEQSGPGLVQPSQSLSITCTVSGFSLTTYGVHWVRQSPGKGLEWLGVIWRGGSIDYNAAFISRLSISKDNSKSQVFFKMNSLQANDTAIYYCARNWGRYGYFDVWGAGTTVTVSSAKTTPPSVYPLAPGSAAQTNSMVTLGCLVKGYFPEPVTVTWNSGSLSSGVHTFPAVLQSDLYTLSSSVTVPSSTWPSETVTCNVAHPASSTKVDKKIVPRDCGCKPCICTVPEVSSVFIF

SEQ ID NO: 23560 - protein, 247 aa, Artificial Sequence
  source: /note="Description of Artificial Sequence: Synthetic polypeptide"
SKLATMETDTLLLWVLLLWVPGSWAQVQLQQSGPELKKPGETVKISCKASGYTFTNYGMNWVKQAPGKDLKWLGWINTDTGEPTYAEEFKGRFAFSLETSASTAYLEINNLKNEDAATYFCARNKKYEAWFTHWGQGTLVTVSSAKTTPPSVYPLAPGSAAQTNSMVTLGCLVKGYFPEPVTVTWNSGSLSSGVHTFPAVLQSDLYTLSSSVTVPSSTWPSQTVTCNVAHPASSTKVDKKIVPRDCG

SEQ ID NO: 23561 - protein, 125 aa, Artificial Sequence
  source: /note="Description of Artificial Sequence: Synthetic polypeptide"
EVQLVQSGGGLVQPGGSLRLSCAASGFTFSSYAMHWVRQAPGKGLEWVAVISYDGSNKYYADSVKGRFTISRDNSKNTLYLQMNSLRAEDTAVYYCARDFWVSYYYDSSAPPAIWGQGTMVTVSS

SEQ ID NO: 23562 - DNA, 366 bp, Homo sapiens
gaggtgcagctggtgcagtctggggctgaggtgcagaactctgggtcctcggtgagggtctcctgcaaaccttctggaggcaccttcaacaactatgctatcaactgggtgcgacaggcccctggacaaggacttgagtgggtgggagggatcagccctatctttggttcaacaaactacgcacagaagttccagggcagagtcacgattaccgcgaacatattcaagagcacagtctacatggacctgaacagcctgacatctgaggacacggccatatattactgtgcgaaaggccagggatactactactattacgctatggacgtctggggccaaggcaccctggtcaccgtctcccctgcc

SEQ ID NO: 23563 - DNA, 369 bp, Homo sapiens
caggtgcagctggtgcagtctgggggaggcgtggtccagcctgggaggtccctgagactctcctgtgcagcctctgaattcaccttcagaatgtatgctacccactgggtccgccaggctccaggcaaggggctggagtgggtggctcttatctcatatgatggaagtaataaatactatgcagactccgtgaagggccgattcaccatctccagagacaattccatgaacacggtgtatctgcaaatgaacaccctgagacctgaggacacggctgtctattactgtgcgagagatttaggaggttatttcataaggggcattatggacgtctggggccaaggaaccctggtcaccgtctcctcagcc

SEQ ID NO: 23564 - protein, 452 aa, Artificial Sequence
  source: /note="Description of Artificial Sequence: Synthetic polypeptide"
QCQLVESGGDVVQPGRSLRLSCAASGFTFNNYGMHWVRQAPGKGLEWVAVVWYDGLIKYYADSVKGRFTISRDNSKNTLYLQMNTLRAEDMGVYYCARDLQPPHSPYGMDVWGQGTTVTVSSASTKGPSVFPLAPSSKSTSGGTAALGCLVKDYFPEPVTVSWNSGALTSGVHTFPAVLQSSGLYSLSSVVTVPSSSLGTQTYICNVNHKPSNTKVDKKVEPKSCDKTHTCPPCPAPELLGGPSVFLFPPKPKDTLMISRTPEVTCVVVDVSHEDPEVKFNWYVDGVEVHNAKTKPREEQYNSTYRVVSVLTVLHQDWLNGKEYKCKVSNKALPAPIEKTISKAKGQPREPQVYTLPPSRDELTKNQVSLTCLVKGFYPSDIAVEWESNGQPENNYKTTPPVLDSDGSFFLYSKLTVDKSRWQQGNVFSCSVMHEALHNHYTQKSLSLSPGK

SEQ ID NO: 23565 - protein, 462 aa, Artificial Sequence
  source: /note="Description of Artificial Sequence: Synthetic polypeptide"
QVQLVQSGAEVKKPGASVKVSCKTSGYTFTAYTIHWVRQAPGQRLEWMGWINAGNGHTKYSQRFKGRVTITRDTSARTTYMELRSLTSEDTALYFCARGPETYYYDKTNWLNSHPDEYFQHWGHGTQVTVSSASTKGPSVFPLAPSSKSTSGGTAALGCLVKDYFPEPVTVSWNSGALTSGVHTFPAVLQSSGLYSLSSVVTVPSSSLGTQTYICNVNHKPSNTKVDKKVEPKSCDKTHTCPPCPAPELLGGPSVFLFPPKPKDTLMISRTPEVTCVVVDVSHEDPEVKFNWYVDGVEVHNAKTKPREEQYNSTYRVVSVLTVLHQDWLNGKEYKCKVSNKALPAPIEKTISKAKGQPREPQVYTLPPSRDELTKNQVSLTCLVKGFYPSDIAVEWESNGQPENNYKTTPPVLDSDGSFFLYSKLTVDKSRWQQGNVFSCSVMHEALHNHYTQKSLSLSPGK

SEQ ID NO: 23566 - protein, 462 aa, Artificial Sequence; identical to SEQ ID NO: 23565
  source: /note="Description of Artificial Sequence: Synthetic polypeptide"

SEQ ID NO: 23567 - protein, 455 aa, Artificial Sequence
  source: /note="Description of Artificial Sequence: Synthetic polypeptide"
QVQLVQSGPELKKPGSSVKLSCMATGGTFINYAFSWVRQAPGQGLEWLGGIIPVYGTSNHVEKLQGRVTITADASTNTAYMELSGLRFDDTAVYFCAASTATSGTYYAMRPFDFWGQGTLVSVSSASTKGPSVFPLAPSSKSTSGGTAALGCLVKDYFPEPVTVSWNSGALTSGVHTFPAVLQSSGLYSLSSVVTVPSSSLGTQTYICNVNHKPSNTKVDKKVEPKSCDKTHTCPPCPAPELLGGPSVFLFPPKPKDTLMISRTPEVTCVVVDVSHEDPEVKFNWYVDGVEVHNAKTKPREEQYNSTYRVVSVLTVLHQDWLNGKEYKCKVSNKALPAPIEKTISKAKGQPREPQVYTLPPSRDELTKNQVSLTCLVKGFYPSDIAVEWESNGQPENNYKTTPPVLDSDGSFFLYSKLTVDKSRWQQGNVFSCSVMHEALHNHYTQKSLSLSPGK

SEQ ID NO: 23568 - protein, 450 aa, Artificial Sequence
  source: /note="Description of Artificial Sequence: Synthetic polypeptide"
QVQLVQSGGGVVQPGRSLRLSCAASGFTFRSHAMHWVRQAPGKGPEWVALISYDEVNKFYADSVKGRFTISRDVSKNTVFLQMNSLSADDTAVYYCARGHSGSYRLFDFWGQGTLVTVSSASTKGPSVFPLAPSSKSTSGGTAALGCLVKDYFPEPVTVSWNSGALTSGVHTFPAVLQSSGLYSLSSVVTVPSSSLGTQTYICNVNHKPSNTKVDKKVEPKSCDKTHTCPPCPAPELLGGPSVFLFPPKPKDTLMISRTPEVTCVVVDVSHEDPEVKFNWYVDGVEVHNAKTKPREEQYNSTYRVVSVLTVLHQDWLNGKEYKCKVSNKALPAPIEKTISKAKGQPREPQVYTLPPSRDELTKNQVSLTCLVKGFYPSDIAVEWESNGQPENNYKTTPPVLDSDGSFFLYSKLTVDKSRWQQGNVFSCSVMHEALHNHYTQKSLSLSPGK

SEQ ID NO: 23569 - protein, 459 aa, Artificial Sequence
  source: /note="Description of Artificial Sequence: Synthetic polypeptide"
QVQLVESGAEVKKPGASVKLSCTASGYNFAAYYIHWVRQAPGQGLEWMGWSNPNTGGANYAQDFQGRVTMTAVTSTSTAYMELSRLTSDDTALYFCARVPRDRLLTLYYESSTYGFDYWGQGTLVTVSSASTKGPSVFPLAPSSKSTSGGTAALGCLVKDYFPEPVTVSWNSGALTSGVHTFPAVLQSSGLYSLSSVVTVPSSSLGTQTYICNVNHKPSNTKVDKKVEPKSCDKTHTCPPCPAPELLGGPSVFLFPPKPKDTLMISRTPEVTCVVVDVSHEDPEVKFNWYVDGVEVHNAKTKPREEQYNSTYRVVSVLTVLHQDWLNGKEYKCKVSNKALPAPIEKTISKAKGQPREPQVYTLPPSRDELTKNQVSLTCLVKGFYPSDIAVEWESNGQPENNYKTTPPVLDSDGSFFLYSKLTVDKSRWQQGNVFSCSVMHEALHNHYTQKSLSLSPGK

SEQ ID NO: 23570 - protein, 454 aa, Artificial Sequence
  source: /note="Description of Artificial Sequence: Synthetic polypeptide"
QVQLVESGAEVKKFGASVKVSCKASGYTLIDYYMHWVRVAPGQGLEWMGWINPINGGTNYAQKFQGRVTMTRDTSINTAYMDLSSLRSDDTAMYYCTRGRPIGRNWEPRDKDYWGQGTPVTVSSASTKGPSVFPLAPSSKSTSGGTAALGCLVKDYFPEPVTVSWNSGALTSGVHTFPAVLQSSGLYSLSSVVTVPSSSLGTQTYICNVNHKPSNTKVDKKVEPKSCDKTHTCPPCPAPELLGGPSVFLFPPKPKDTLMISRTPEVTCVVVDVSHEDPEVKFNWYVDGVEVHNAKTKPREEQYNSTYRVVSVLTVLHQDWLNGKEYKCKVSNKALPAPIEKTISKAKGQPREPQVYTLPPSRDELTKNQVSLTCLVKGFYPSDIAVEWESNGQPENNYKTTPPVLDSDGSFFLYSKLTVDKSRWQQGNVFSCSVMHEALHNHYTQKSLSLSPGK

SEQ ID NO: 23571 - protein, 456 aa, Artificial Sequence
  source: /note="Description of Artificial Sequence: Synthetic polypeptide"
QVQLLESGGGVVRPGRSLRLACAGSGFTFSAYAMHWVRQAPGKGLEWVAHTSYDGRDSYYVDSVKGRFTISRDDSKNTLYLQMNSLRPEDTAVYYCAKVGPYTGYDDYNYYGMDVWGHGTTVTVSSASTKGPSVFPLAPSSKSTSGGTAALGCLVKDYFPEPVTVSWNSGALTSGVHTFPAVLQSSGLYSLSSVVTVPSSSLGTQTYICNVNHKPSNTKVDKKVEPKSCDKTHTCPPCPAPELLGGPSVFLFPPKPKDTLMISRTPEVTCVVVDVSHEDPEVKFNWYVDGVEVHNAKTKPREEQYNSTYRVVSVLTVLHQDWLNGKEYKCKVSNKALPAPIEKTISKAKGQPREPQVYTLPPSRDELTKNQVSLTCLVKGFYPSDIAVEWESNGQPENNYKTTPPVLDSDGSFFLYSKLTVDKSRWQQGNVFSCSVMHEALHNHYTQKSLSLSPGK

SEQ ID NO: 23572 - protein, 451 aa, Artificial Sequence
  source: /note="Description of Artificial Sequence: Synthetic polypeptide"
QVQLVESGGGVVQPGRSLRLSCAASGFTFTNYAMHWVRQAPGKGLEWVAVISFDEDNKSYADYVKGRFTISRDNSNNRLYLQMNSLRAEDTAVYYCARGPEGVWGRSIDSWGQGTLVTVSSASTKGPSVFPLAPSSKSTSGGTAALGCLVKDYFPEPVTVSWNSGALTSGVHTFPAVLQSSGLYSLSSVVTVPSSSLGTQTYICNVNHKPSNTKVDKKVEPKSCDKTHTCPPCPAPELLGGPSVFLFPPKPKDTLMISRTPEVTCVVVDVSHEDPEVKFNWYVDGVEVHNAKTKPREEQYNSTYRVVSVLTVLHQDWLNGKEYKCKVSNKALPAPIEKTISKAKGQPREPQVYTLPPSRDELTKNQVSLTCLVKGFYPSDIAVEWESNGQPENNYKTTPPVLDSDGSFFLYSKLTVDKSRWQQGNVFSCSVMHEALHNHYTQKSLSLSPGK

SEQ ID NO: 23573 - protein, 452 aa, Artificial Sequence
  source: /note="Description of Artificial Sequence: Synthetic polypeptide"
QVQLVQSGGGVVQPGRSLRLSCAASGFNFSSYGMHWVRQAPGKGLEWLSVIWSGGSNKYYADSVKGRFTISRDDSKNTVYLQMNSLRDEDTAVYYCARAHTALTRFRWLDPWGQGILVTVSSASTKGPSVFPLAPSSKSTSGGTAALGCLVKDYFPEPVTVSWNSGALTSGVHTFPAVLQSSGLYSLSSVVTVPSSSLGTQTYICNVNHKPSNTKVDKKVEPKSCDKTHTCPPCPAPELLGGPSVFLFPPKPKDTLMISRTPEVTCVVVDVSHEDPEVKFNWYVDGVEVHNAKTKPREEQYNSTYRVVSVLTVLHQDWLNGKEYKCKVSNKALPAPIEKTISKAKGQPREPQVYTLPPSRDELTKNQVSLTCLVKGFYPSDIAVEWESNGQPENNYKTTPPVLDSDGSFFLYSKLTVDKSRWQQGNVFSCSVMHEALHNHYTQKSLSLSPGK

SEQ ID NO: 23574 - protein, 450 aa, Artificial Sequence
  source: /note="Description of Artificial Sequence: Synthetic polypeptide"
QVQLVESGGGLVQPGGSLRLSCAASGFIFGDFAIHWVRQASGKGLEWVARIRSGLNRFETAYAASVEGRLTISRDDSKSMAYLQMNNVKAEDTAVYLCTYLVGAVGFQHWGQGTLVTVSSASTKGPSVFPLAPSSKSTSGGTAALGCLVKDYFPEPVTVSWNSGALTSGVHTFPAVLQSSGLYSLSSVVTVPSSSLGTQTYICNVNHKPSNTKVDKKVEPKSCDKTHTCPPCPAPELLGGPSVFLFPPKPKDTLMISRTPEVTCVVVDVSHEDPEVKFNWYVDGVEVHNAKTKPREEQYNSTYRVVSVLTVLHQDWLNGKEYKCKVSNKALPAPIEKTISKAKGQPREPQVYTLPPSRDELTKNQVSLTCLVKGFYPSDIAVEWESNGQPENNYKTTPPVLDSDGSFFLYSKLTVDKSRWQQGNVFSCSVMHEALHNHYTQKSLSLSPGK

SEQ ID NO: 23575 - protein, 456 aa, Artificial Sequence
  source: /note="Description of Artificial Sequence: Synthetic polypeptide"
QVQLVESGGGVVQPGGSLRLSCAASGFNFDEYVMYWVRQSPGKGLEWVSLIGADGRGTYNSDSVKGRFTISRDNRKNSLYLQMNSLRSDDTALYYCAKVERSFYDGSGYGDALEIWGQGTMVTVSSASTKGPSVFPLAPSSKSTSGGTAALGCLVKDYFPEPVTVSWNSGALTSGVHTFPAVLQSSGLYSLSSVVTVPSSSLGTQTYICNVNHKPSNTKVDKKVEPKSCDKTHTCPPCPAPELLGGPSVFLFPPKPKDTLMISRTPEVTCVVVDVSHEDPEVKFNWYVDGVEVHNAKTKPREEQYNSTYRVVSVLTVLHQDWLNGKEYKCKVSNKALPAPIEKTISKAKGQPREPQVYTLPPSRDELTKNQVSLTCLVKGFYPSDIAVEWESNGQPENNYKTTPPVLDSDGSFFLYSKLTVDKSRWQQGNVFSCSVMHEALHNHYTQKSLSLSPGK

SEQ ID NO: 23576 - protein, 458 aa, Artificial Sequence
  source: /note="Description of Artificial Sequence: Synthetic polypeptide"
QVQLVESGPGLMKPSETLSLTCTVSGGSVSNYYWSWIRQPPGKGLEWIGYVFYSGSSNYNPSLNNPSLKSRVTISIDTSNNQFSLKLSSVTAADTAVYYCARGRVNSGYDWGPNFDSWGQGALVTVSSASTKGPSVFPLAPSSKSTSGGTAALGCLVKDYFPEPVTVSWNSGALTSGVHTFPAVLQSSGLYSLSSVVTVPSSSLGTQTYICNVNHKPSNTKVDKKVEPKSCDKTHTCPPCPAPELLGGPSVFLFPPKPKDTLMISRTPEVTCVVVDVSHEDPEVKFNWYVDGVEVHNAKTKPREEQYNSTYRVVSVLTVLHQDWLNGKEYKCKVSNKALPAPIEKTISKAKGQPREPQVYTLPPSRDELTKNQVSLTCLVKGFYPSDIAVEWESNGQPENNYKTTPPVLDSDGSFFLYSKLTVDKSRWQQGNVFSCSVMHEALHNHYTQKSLSLSPGK

SEQ ID NO: 23577 - protein, 460 aa, Artificial Sequence
  source: /note="Description of Artificial Sequence: Synthetic polypeptide"
QVQLLESGPGLVKPSQTLLLTCTVSGASISTGGNYWSWIRQHPGKDLEWIGYIFYSGTTKYNPSVDNPSLKSRVTMSVDTSENQFSLKLSSVTAADTAVYFCARGSPNSGYDWGPHFDYWGQGTLVTVSSASTKGPSVFPLAPSSKSTSGGTAALGCLVKDYFPEPVTVSWNSGALTSGVHTFPAVLQSSGLYSLSSVVTVPSSSLGTQTYICNVNHKPSNTKVDKKVEPKSCDKTHTCPPCPAPELLGGPSVFLFPPKPKDTLMISRTPEVTCVVVDVSHEDPEVKFNWYVDGVEVHNAKTKPREEQYNSTYRVVSVLTVLHQDWLNGKEYKCKVSNKALPAPIEKTISKAKGQPREPQVYTLPPSRDELTKNQVSLTCLVKGFYPSDIAVEWESNGQPENNYKTTPPVLDSDGSFFLYSKLTVDKSRWQQGNVFSCSVMHEALHNHYTQKSLSLSPGK

SEQ ID NO: 23578 - protein, 458 aa, Artificial Sequence
  source: /note="Description of Artificial Sequence: Synthetic polypeptide"
QVQLVQSGAEVKKPGSSVKVSCKASGGTFSYYAISWVRQAPGQGLEWMGGIIPIVGTAHYTQKFQGRVTITADESTSTAYMELSSLRSEDTAVYFCARAADESVESLTIKAFRTNYHWGQGTLVTVSSASTKGPSVFPLAPSSKSTSGGTAALGCLVKDYFPEPVTVSWNSGALTSGVHTFPAVLQSSGLYSLSSVVTVPSSSLGTQTYICNVNHKPSNTKVDKKVEPKSCDKTHTCPPCPAPELLGGPSVFLFPPKPKDTLMISRTPEVTCVVVDVSHEDPEVKFNWYVDGVEVHNAKTKPREEQYNSTYRVVSVLTVLHQDWLNGKEYKCKVSNKALPAPIEKTISKAKGQPREPQVYTLPPSRDELTKNQVSLTCLVKGFYPSDIAVEWESNGQPENNYKTTPPVLDSDGSFFLYSKLTVDKSRWQQGNVFSCSVMHEALHNHYTQKSLSLSPGK

SEQ ID NO: 23579 - protein, 457 aa, Artificial Sequence
  source: /note="Description of Artificial Sequence: Synthetic polypeptide"
QVQLVQSGAEVRKPGESLRISCRGSGYNFPKYWIGWVRQMPGKGLEWMGMIYPGDSDVRYNPSFQGQVTISADESINTAYLQWSSLRTSDTARYYCARHLGQQLVSNTYYYYGMDVWGQGTTVTVSSASTKGPSVFPLAPSSKSTSGGTAALGCLVKDYFPEPVTVSWNSGALTSGVHTFPAVLQSSGLYSLSSVVTVPSSSLGTQTYICNVNHKPSNTKVDKKVEPKSCDKTHTCPPCPAPELLGGPSVFLFPPKPKDTLMISRTPEVTCVVVDVSHEDPEVKFNWYVDGVEVHNAKTKPREEQYNSTYRVVSVLTVLHQDWLNGKEYKCKVSNKALPAPIEKTISKAKGQPREPQVYTLPPSRDELTKNQVSLTCLVKGFYPSDIAVEWESNGQPENNYKTTPPVLDSDGSFFLYSKLTVDKSRWQQGNVFSCSVMHEALHNHYTQKSLSLSPGK

SEQ ID NO: 23580 - protein, 221 aa, Artificial Sequence
  source: /note="Description of Artificial Sequence: Synthetic polypeptide"
DIVLTQSPLSLPVTPGEPASISCRSSQSLLDSNGYNYLDWYLQKPGQSPQLLIYLASYRAPGVPDRFSGSGSGTDFTLKISRVEAEDVGLYYCMQALQTPPMYTFGQGTKLEIKRTVAAPSVFIFPPSDEQLKSGTASVVCLLNNFYPREAKVQWKVDNALQSGNSQESVTEQDSKDSTYSLSSTLTLSKADYEKHKVYACEVTHQGLSSPVTKSFNRGEC

SEQ ID NO: 23581 - protein, 215 aa, Artificial Sequence
  source: /note="Description of Artificial Sequence: Synthetic polypeptide"
DIVMTQSPGTLSLSPGERATLYCRASQSVRSGYLAWYQHKPGQAPLLLFYDASGRATGIPDRFSGSGSGTDFTLTISRLEPEDFAVYYCLQYGSSPRTFGQGTKVEIKRTVAAPSVFIFPPSDEQLKSGTASVVCLLNNFYPREAKVQWKVDNALQSGNSQESVTEQDSKDSTYSLSSTLTLSKADYEKHKVYACEVTHQGLSSPVTKSFNRGEC

SEQ ID NO: 23582 - protein, 216 aa, Artificial Sequence
  source: /note="Description of Artificial Sequence: Synthetic polypeptide"
DIVLTQSPSASGSPGQSVTISCTGTSSDVGGYDYVSWYQQHPGKAPKLMIYEVRKRPSGVPDRFSGSKSGNTASLTVSGLQAEDEAYYYCASYAGTYIHLFGGGTKLTVLGQPKAAPSVTLFPPSSEELQANKATLVCLISDFYPGAVTVAWKADSSPVKAGVETTTPSKQSNNKYAASSYLSLTPEQWKSHRSYSCQVTHEGSTVEKTVVPAECS

SEQ ID NO: 23583 - protein, 214 aa, Artificial Sequence
  source: /note="Description of Artificial Sequence: Synthetic polypeptide"
DIVMTQPPATLSVSPGERATLSCGASQGLGSNLAWYQQKPGQAPRLLIYAASTRATGITARFSGSGSGTEFTLTINSLQSEDFALYYCQQYTYWPLTFGGGTKVEIKRTVAAPSVFIFPPSDEQLKSGTASVVCLLNNFYPREAKVQWKVDNALQSGNSQESVTEQDSKDSTYSLSSTLTLSKADYEKHKVYACEVTHQGLSSPVTKSFNRGEC

SEQ ID NO: 23584 - protein, 217 aa, Artificial Sequence
  source: /note="Description of Artificial Sequence: Synthetic polypeptide"
DIVLTQPPSVSVAPGQTATITCGGNYIGSKSVNWYQQRPGHAPVLVVYDDSDRPSGIPDRFSGSNSRSTATTATLTISRVEAGDEADYYCQVWETSEDLWVFGGGTKLTVLGQPKAAPSVTLFPPSSEELQANKATLVCLISDFYPGAVTVAWKADSSPVKAGVETTTPSKQSNNKYAASSYLSLTPEQWKSHRSYSCQVTHEGSTVEKTVVPAECS

SEQ ID NO: 23585 - protein, 215 aa, Artificial Sequence
  source: /note="Description of Artificial Sequence: Synthetic polypeptide"
DIVLTQSPSFLSASVGDRVTITCRASQLISSYFAWYQQKPGKPPKLLIYAASTLQSGVPSRFSGSGSGTQFSLTISSLQPEDFATYYCQQLNSYPPITFGQGTRLEIKRTVAAPSVFIFPPSDEQLKSGTASVVCLLNNFYPREAKVQWKVDNALQSGNSQESVTEQDSKDSTYSLSSTLTLSKADYEKHKVYACEVTHQGLSSPVTKSFNRGEC

SEQ ID NO: 23586 - protein, 459 aa, Artificial Sequence
  source: /note="Description of Artificial Sequence: Synthetic polypeptide"
QVQLVESGGGLVQPGGSLRLSCTVSGFTFNSYAMNWVRQAPGKGLEWVSGIRGSGENTYYAETVKGRFTISRDNSKNTLYLEMNSLRAEDTAVYYCARKWGRMTVFGVATDQLYYFDYWGQGTLVTVSSASTKGPSVFPLAPSSKSTSGGTAALGCLVKDYFPEPVTVSWNSGALTSGVHTFPAVLQSSGLYSLSSVVTVPSSSLGTQTYICNVNHKPSNTKVDKKVEPKSCDKTHTCPPCPAPELLGGPSVFLFPPKPKDTLMISRTPEVTCVVVDVSHEDPEVKFNWYVDGVEVHNAKTKPREEQYNSTYRVVSVLTVLHQDWLNGKEYKCKVSNKALPAPIEKTISKAKGQPREPQVYTLPPSRDELTKNQVSLTCLVKGFYPSDIAVEWESNGQPENNYKTTPPVLDSDGSFFLYSKLTVDKSRWQQGNVFSCSVMHEALHNHYTQKSLSLSPGK

SEQ ID NO: 23587 - protein, 451 aa, Artificial Sequence
  source: /note="Description of Artificial Sequence: Synthetic polypeptide"
QVQLVESGGGLVQPGGSLRLSCVASGFTFSRFSMNWVRQAPGMGLEWVSYISDTGRTIYYADSVKGRFTISRDNDKNTLYLQMKSLRDEDSAFYYCARDPDTPFVRAFDSWGQGVLVTVSSASTKGPSVFPLAPSSKSTSGGTAALGCLVKDYFPEPVTVSWNSGALTSGVHTFPAVLQSSGLYSLSSVVTVPSSSLGTQTYICNVNHKPSNTKVDKKVEPKSCDKTHTCPPCPAPELLGGPSVFLFPPKPKDTLMISRTPEVTCVVVDVSHEDPEVKFNWYVDGVEVHNAKTKPREEQYNSTYRVVSVLTVLHQDWLNGKEYKCKVSNKALPAPIEKTISKAKGQPREPQVYTLPPSRDELTKNQVSLTCLVKGFYPSDIAVEWESNGQPENNYKTTPPVLDSDGSFFLYSKLTVDKSRWQQGNVFSCSVMHEALHNHYTQKSLSLSPGK

SEQ ID NO: 23588 - protein, 215 aa, Artificial Sequence
  source: /note="Description of Artificial Sequence: Synthetic polypeptide"
DIVMTQSPSFLSASVGDRVTITCRTSQVISSYLAWYQQRPGKAPKLLIYAASTLQSGVPSRFSGSGSGTRFSLTISNLQPEDFATYFCQQLTTYPPITFGQGTRLEIKRTVAAPSVFIFPPSDEQLKSGTASVVCLLNNFYPREAKVQWKVDNALQSGNSQESVTEQDSKDSTYSLSSTLTLSKADYEKHKVYACEVTHQGLSSPVTKSFNRGEC

SEQ ID NO: 23589 - protein, 459 aa, Artificial Sequence
  source: /note="Description of Artificial Sequence: Synthetic polypeptide"
QVQLVESGPGLVKPSQTLSLTCTVSGGSISNGGYHWSWIRQHPGKGLEWIGNIYYRGSTFYDPSLKSRVTISVDTSKSQFSLKLTSVTAADTAVYYCARMPLANYDLLTGLYIGAFDLWGQGTMVTVSSASTKGPSVFPLAPSSKSTSGGTAALGCLVKDYFPEPVTVSWNSGALTSGVHTFPAVLQSSGLYSLSSVVTVPSSSLGTQTYICNVNHKPSNTKVDKKVEPKSCDKTHTCPPCPAPELLGGPSVFLFPPKPKDTLMISRTPEVTCVVVDVSHEDPEVKFNWYVDGVEVHNAKTKPREEQYNSTYRVVSVLTVLHQDWLNGKEYKCKVSNKALPAPIEKTISKAKGQPREPQVYTLPPSRDELTKNQVSLTCLVKGFYPSDIAVEWESNGQPENNYKTTPPVLDSDGSFFLYSKLTVDKSRWQQGNVFSCSVMHEALHNHYTQKSLSLSPGK

SEQ ID NO: 23590 - protein, 453 aa, Artificial Sequence
  source: /note="Description of Artificial Sequence: Synthetic polypeptide"
QVQLVESGAEVRKPGESLRISCKAHGDSFTSYWIGWVRQLPGKGLEWMAVIYPRDSETKFSPAFHGQVSISVDKSTSTVHLQWNSLKASDTAVYYCARSPGYSGYLYGWFDPWGQGTPVTVSSASTKGPSVFPLAPSSKSTSGGTAALGCLVKDYFPEPVTVSWNSGALTSGVHTFPAVLQSSGLYSLSSVVTVPSSSLGTQTYICNVNHKPSNTKVDKKVEPKSCDKTHTCPPCPAPELLGGPSVFLFPPKPKDTLMISRTPEVTCVVVDVSHEDPEVKFNWYVDGVEVHNAKTKPREEQYNSTYRVVSVLTVLHQDWLNGKEYKCKVSNKALPAPIEKTISKAKGQPREPQVYTLPPSRDELTKNQVSLTCLVKGFYPSDIAVEWESNGQPENNYKTTPPVLDSDGSFFLYSKLTVDKSRWQQGNVFSCSVMHEALHNHYTQKSLSLSPGK

SEQ ID NO: 23591 - protein, 459 aa, Artificial Sequence
  source: /note="Description of Artificial Sequence: Synthetic polypeptide"
QVQLVESGAEVKKPGASVRVSCKGSGYTFTAYHMHWVRQAPGQGFEWVGWINPNSGATYYTSTFEGRVTMTRDTSITTAYMELSSLRSDDTAVYYCATDIVVERDASLGGFNSYGMDVWGQGTTVTVSSASTKGPSVFPLAPSSKSTSGGTAALGCLVKDYFPEPVTVSWNSGALTSGVHTFPAVLQSSGLYSLSSVVTVPSSSLGTQTYICNVNHKPSNTKVDKKVEPKSCDKTHTCPPCPAPELLGGPSVFLFPPKPKDTLMISRTPEVTCVVVDVSHEDPEVKFNWYVDGVEVHNAKTKPREEQYNSTYRVVSVLTVLHQDWLNGKEYKCKVSNKALPAPIEKTISKAKGQPREPQVYTLPPSRDELTKNQVSLTCLVKGFYPSDIAVEWESNGQPENNYKTTPPVLDSDGSFFLYSKLTVDKSRWQQGNVFSCSVMHEALHNHYTQKSLSLSPGK

SEQ ID NO: 23592 - protein, 452 aa, Artificial Sequence
  source: /note="Description of Artificial Sequence: Synthetic polypeptide"
QVQLVESGGGLVQPGGSLRLSCAASGFTFSDYWMVWVRQAPGKGLVWVSRISSDGSTTSYADSVKGPFTISRDNAKNTLYLQMNSLRAEDTAVYYCARVATPYYYESGFDYWGQGALVTVSSASTKGPSVFPLAPSSKSTSGGTAALGCLVKDYFPEPVTVSWNSGALTSGVHTFPAVLQSSGLYSLSSVVTVPSSSLGTQTYICNVNHKPSNTKVDKKVEPKSCDKTHTCPPCPAPELLGGPSVFLFPPKPKDTLMISRTPEVTCVVVDVSHEDPEVKFNWYVDGVEVHNAKTKPREEQYNSTYRVVSVLTVLHQDWLNGKEYKCKVSNKALPAPIEKTISKAKGQPREPQVYTLPPSRDELTKNQVSLTCLVKGFYPSDIAVEWESNGQPENNYKTTPPVLDSDGSFFLYSKLTVDKSRWQQGNVFSCSVMHEALHNHYTQKSLSLSPGK

SEQ ID NO: 23593 - protein, 453 aa, Artificial Sequence
  source: /note="Description of Artificial Sequence: Synthetic polypeptide"
QVQLVESGPGLVKPSETLSLTCTVSGDSVINSAYYWDWIRQPPGKGLEWVGSVYYSGITYYNPSLKSRVTISVDTSKNQFSLRLSYVTAADTALYYCARRGGGWQYYYGMDVWGQGTTVTVSSASTKGPSVFPLAPSSKSTSGGTAALGCLVKDYFPEPVTVSWNSGALTSGVHTFPAVLQSSGLYSLSSVVTVPSSSLGTQTYICNVNHKPSNTKVDKKVEPKSCDKTHTCPPCPAPELLGGPSVFLFPPKPKDTLMISRTPEVTCVVVDVSHEDPEVKFNWYVDGVEVHNAKTKPREEQYNSTYRVVSVLTVLHQDWLNGKEYKCKVSNKALPAPIEKTISKAKGQPREPQVYTLPPSRDELTKNQVSLTCLVKGFYPSDIAVEWESNGQPENNYKTTPPVLDSDGSFFLYSKLTVDKSRWQQGNVFSCSVMHEALHNHYTQKSLSLSPGK

SEQ ID NO: 23594 - protein, 115 aa, Artificial Sequence
  source: /note="Description of Artificial Sequence: Synthetic polypeptide"
EVQLVESGGGLVQPGGSLRLSCAASGFTVSTYAMSWVRQTPEKRLEWVASMSSGGSLYYPDTVKGRFTISRDNSKNTVYLQMNSLRAEDTAMYYCVRGGYGTSYWGQGTLVTVSS

SEQ ID NO: 23595 - protein, 227 aa, Artificial Sequence
  source: /note="Description of Artificial Sequence: Synthetic polypeptide"
EVQLVESGGGLVQPGGSLRLSCAASGFTVSTYAMSWVRQTPEKRLEWVASMSSGGSLYYPDTVKGRFTISRDNSKNTVYLQMNSLRAEDTAMYYCVRGGYGTSYWGQGTLVTVSSDIVMTQTPLSLSVTPGEPASISCRSSQSIVHSIGDTYLEWYLQKPGQSPQLLIYKVSNRFSGVPDRFSGSGSGTDFTLKISRVEAEDVGIYYCFQGSHFPYTFGQGTKLEIK

SEQ ID NO: 23596 - protein, 115 aa, Artificial Sequence; identical to SEQ ID NO: 23594
  source: /note="Description of Artificial Sequence: Synthetic polypeptide"

SEQ ID NO: 23597 - protein, 115 aa, Artificial Sequence
  source: /note="Description of Artificial Sequence: Synthetic polypeptide"
EVQLVESGGGLVQPGGSLRLSCAASGFTVSTYAMSWVRQTPGKRLEWVASMSSGGSLYYPDTVKGRFTISRDTSKNTVYLQMNSLRAEDTAVYYCVRGGYGTSYWGQGTLVTVSS

SEQ ID NO: 23598 - protein, 115 aa, Artificial Sequence; identical to SEQ ID NO: 23597
  source: /note="Description of Artificial Sequence: Synthetic polypeptide"

SEQ ID NO: 23599 - protein, 115 aa, Artificial Sequence; identical to SEQ ID NO: 23597
  source: /note="Description of Artificial Sequence: Synthetic polypeptide"

SEQ ID NO: 23600 - protein, 115 aa, Artificial Sequence
  source: /note="Description of Artificial Sequence: Synthetic polypeptide"
EVQLVESGGGLVQPGGSLRLSCAASGFTVSTYAMSWVRQTPEKRLEWVASMSSGGSLYYPDTVKGRFTISRDNSKNIVYLQMNSLRAEDTAVYYCVRGGYGTSYWGQGTLVTVSS

SEQ ID NO: 23601 - protein, 115 aa, Artificial Sequence; identical to SEQ ID NO: 23600
  source: /note="Description of Artificial Sequence: Synthetic polypeptide"

SEQ ID NO: 23602 - protein, 115 aa, Artificial Sequence; identical to SEQ ID NO: 23600
  source: /note="Description of Artificial Sequence: Synthetic polypeptide"

SEQ ID NO: 23603 - protein, 115 aa, Artificial Sequence
  source: /note="Description of Artificial Sequence: Synthetic polypeptide"
EVQLLESGGGSVKPGGSLKLSCSASGFSLSTYAMSWVRQTPEKRLEWVASMSSGGSLYYPDTVKGRFTISRDTVKNIVYLQMSSLRSEDTAMYYCVRGGYGTSYWGQGTTVTVSS

SEQ ID NO: 23604 - protein, 129 aa, Artificial Sequence
  source: /note="Description of Artificial Sequence: Synthetic polypeptide"
QVQLVQSGAEVKKPGSSVTVSCKASGGTFSNYGISWVRQAPGQGLDWMGGIIPLFGTANYAQKFQGRVTITADESTSSSNMELSSLRSEDTAVYYCARDVHNYDFLTGYPLHLYGMDVWGQGTTVTVSS

SEQ ID NO: 23605 - protein, 125 aa, Artificial Sequence
  source: /note="Description of Artificial Sequence: Synthetic polypeptide"
QVQLQESGPGLVKPSQTLSLTCTVSGGSISSGTYYWSWIRHHPGKGLEWIGYIYHSGSAYYNPSLESRVTMSVDTSKNQFSLKLSSVTAADTAIYYCARAENLLSPYLAEGFDPWGQGTLVTVSS

SEQ ID NO: 23606 - protein, 125 aa, Artificial Sequence
  source: /note="Description of Artificial Sequence: Synthetic polypeptide"
EVQLVQSGAEVKKPGESLKISCQASGYSFTSRWIGWVRQMPGKGLEWVGFIYPSDSDVRYSPSFRGQVTISADKSISTAYLQWSSLKASDTAMYFCARLGGNKDYGDYLWYFDLWGRGALVTVSS

SEQ ID NO: 23607 - protein, 120 aa, Artificial Sequence
  source: /note="Description of Artificial Sequence: Synthetic polypeptide"
QVQLVQSGAEVKEPGSAMKVSCKASGGTFSSDAFCWVRQAPGRGLEWMGGIIPVFQTANYGPNFQGRVTISADVYTTTLYLELSGLTSEDTAVYFCARSGDGYNYYFPLWGQGTLVTVSS

SEQ ID NO: 23608 - protein, 129 aa, Artificial Sequence
  source: /note="Description of Artificial Sequence: Synthetic polypeptide"
QVQLQESGPGLVKPSETLSLICAVSGASISSSYWSWIRQPPGKGLEWIGYIYYSGVTKYNPSLKSRVTLSVDTSKNHFSLKLSYVTAADTAVYYCARNLPDIAVVTAVQDATPVWFDPWGPGTLVSVSS

SEQ ID NO: 23609 - protein, 127 aa, Artificial Sequence
  source: /note="Description of Artificial Sequence: Synthetic polypeptide"
WWQLVQSGAEVKKPGSSVKVSCKASGGTFSSYDISWVRQAPGQGLEWMGGIIPIYGTANYAQKFQGRVTITADESTSTAYMELSSLRSEDTAVYYCARAGGDSSGYYGALGRFFQHWGQGTLVTVSS

SEQ ID NO: 23610 - protein, 123 aa, Artificial Sequence
  source: /note="Description of Artificial Sequence: Synthetic polypeptide"
QFQLVQSGPEVKKPGTSVKVSCKASGYTSTTYGISWVRQVPGQGLEWMGWINPYNGNPHYGQKFQGRVTLTRDTSTNTAYLEILSLRSDDTAVYYCARDGWGQQLVPYYFDYWGQGTLVTVSS

SEQ ID NO: 23611 - protein, 125 aa, Artificial Sequence
  source: /note="Description of Artificial Sequence: Synthetic polypeptide"
QVQLVESGGGVVQPGRSLRLSCAASGFTFSSYGMHWVRQAPGKGLEWVAVIWYDGDNKYYGDSVKGRFTISRDNSKNTLFLQMNSLRAEDTAVYYCAKDTADHGDYVDLGFFDAWGQGTLVTVSS

SEQ ID NO: 23612 - protein, 129 aa, Artificial Sequence
  source: /note="Description of Artificial Sequence: Synthetic polypeptide"
EVQLVESGGGLVQPGRSLRLSCAASGFTFSDFWMSWVRQAPGKGLEWVANIDQDGNERFYADSVKGRFTISRDNAKNSLYLQMTSLRADDTAVYYCARDGREGYFYGSGSFYNLKGLNWGQGTLLTVSS

SEQ ID NO: 23613 - protein, 125 aa, Artificial Sequence
  source: /note="Description of Artificial Sequence: Synthetic polypeptide"
EVQLVQSGAELKMPGESLKISCKASGYTFTNYWIGWVRQTPGKGLEWMGIIFPPDSQTSYSPSFQGQVTFSVDNSISVAYIQWSSLKASDTAIYYCARSGIFDWSAPLVEAFDIWGQGTVVTVSS

SEQ ID NO: 23614 - protein, 125 aa, Artificial Sequence
  source: /note="Description of Artificial Sequence: Synthetic polypeptide"
EVQLVQSGAEVKKPGESLKISCKGSGYSFSDYWIGWVRQMPGEGLEWMGIIYPASSEIRYSPSFQGLVTISADKSINTASLQWSSLKASDTAIYYCARHASCSARSCYWGPVDYWGQGTLVTVSS

SEQ ID NO: 23615 - protein, 455 aa, Artificial Sequence
  source: /note="Description of Artificial Sequence: Synthetic polypeptide"
QVQLVQSGAELKRPGASVKVSCKTSGYSFNNYGINWVRQAPGQGLEWMGWISAYTGNTHYAKNFEGRVTLTTDTSTSTAYMEVRSLRSDDSAVYFCARAMIQGVVTLYLRPGDYWGQGTLVTVSSASTKGPSVFPLAPSSKSTSGGTAALGCLVKDYFPEPVTVSWNSGALTSGVHTFPAVLQSSGLYSLSSVVTVPSSSLGTQTYICNVNHKPSNTKVDKKVEPKSCDKTHTCPPCPAPELLGGPSVFLFPPKPKDTLMISRTPEVTCVVVDVSHEDPEVKFNWYVDGVEVHNAKTKPREEQYNSTYRVVSVLTVLHQDWLNGKEYKCKVSNKALPAPIEKTISKAKGQPREPQVYTLPPSREEMTKNQVSLTCLVKGFYPSDIAVEWESNGQPENNYKTTPPVLDSDGSFFLYSKLTVDKSRWQQGNVFSCSVMHEALHNHYTQKSLSLSPGK

SEQ ID NO: 23616 - protein, 447 aa, Artificial Sequence
  source: /note="Description of Artificial Sequence: Synthetic polypeptide"
QVQLQESGPGLVKPSETLSLTCTVSGGLIGTGSYYWGWIRQTPGKGMEWIGSISYSGSTYYHPSLKSRVTISDDTSKNQLFLKLRSVTAADTAQYYCARYNWGIRYFDFWGRGTLVTVSSASTKGPSVFPLAPCSRSTSESTAALGCLVKDYFPEPVTVSWNSGALTSGVHTFPAVLQSSGLYSLSSVVTVPSSSLGTKTYTCNVDHKPSNTKVDKTRESKYGPPCPSCPAPEFLGGPSVFLFPPKPKDTLMISRTPEVTCVVVDVSQEDPEVQFNWYVDGVEVHNAKTKPREEQFNSTYRVVSVLTVLHQDWLNGKEYKCKVSNKGLPSSIEKTISKAKGQPREPQVYTLPPAQEEMTKNQVSLTCLVKGFYPSDIAVEWESNGQPENNYKTTPPVLDSDGSFFLYSRLTVDKSRWQEGNVFSCSVMHEALHNHYTQKSLSLSLGK

SEQ ID NO: 23617 - protein, 231 aa, Artificial Sequence
  source: /note="Description of Artificial Sequence: Synthetic polypeptide"
  MOD_RES (1)..(1): Any amino acid
XVQLVQSGGGVVQPRRSLRLSCAASGFTFSSYAMHWVRQAPGKGLEWVAVISYDGRNKYYADSVKGRFTVSRDNSKNTLYLQMNSLRAEDTSVYYCARELLMDYYDHIGYSPGPTWGQGTLVTVSSASTKGPSVFPLAPSSKSTSGGTAALGCLVKDYFPEPVTVSWNSGALTSGVHTFPAVLQSSGLYSLSSVVTVPSSSLGTQTYICNVNHKPSNTKVDKRVEPKSCDK

SEQ ID NO: 23618 - protein, 247 aa, Artificial Sequence
  source: /note="Description of Artificial Sequence: Synthetic polypeptide"
  MOD_RES (1)..(1): Any amino acid
XVQLQESGGGLVQPGESLRLSCVGSGSSFGESTLSYYAVSWVRQAPGKGLEWLSIINAGGGDIDYADSVEGRFTISRDNSKETLYLQMTNLRVEDTGVYYCAKHMSMQQVVSAGWERADLVGDAFDVWGQGTMVTVSSASTKGPSVFPLAPSSKSTSGGTAALGCLVKDYFPEPVTVSWNSGALTSGVHTFPAVLQSSGLYSLSSVVTVPSSSLGTQTYICNVNHKPSNTKVDKRVEPKSCHHHHHH

SEQ ID NO: 23619 - protein, 227 aa, Artificial Sequence
  source: /note="Description of Artificial Sequence: Synthetic polypeptide"
  MOD_RES (1)..(1): Any amino acid
XVQLQQSGAEVKTPGASVKVSCKASGYTFTSFGVSWIRQAPGQGLEWIGWISAYNGDTYYAQKFQARVTMTTDTSTTTAYMEMRSLRSDDTAVYYCAREPPLFYSSWSLDNWGQGTLVTVSSASTKGPSVFPLAPSSKSTSGGTAALGCLVKDYFPEPVTVSWNSGALTSGVHTFPAVLQSSGLYSLSSVVTVPSSSLGTQTYICNVNHKPSNTKVDKRVEPKSCDK

SEQ ID NO: 23620 - protein, 230 aa, Artificial Sequence
  source: /note="Description of Artificial Sequence: Synthetic polypeptide"
QVQLVQSGAEVKKPGASVKLSCKASGYTFTAYSMHWVRQAPGQSLEWLGWINTAIGNTQYSQKFQDRVTITRDTSARTSYMELSSLRSGDTAVYFCARGASWDARGWSGYWGKGTLVTVSSASTKGPSVFPLAPSSKSTSGGTAALGCLVKDYFPEPVTVSWNSGALTSGVHTFPAVLQSSGLYSLSSVVTVPSSSLGTQTYICNVNHKPSNTKVDKRVEPKSCHHHHHH

SEQ ID NO: 23621 - protein, 234 aa, Artificial Sequence
  source: /note="Description of Artificial Sequence: Synthetic polypeptide"
QVQLVQSGAEVKKPGASVRVSCRASGYIFTESGITWVRQAPGQGLEWMGWISGYSGDTKYAQKLQGRVTMTKDTSTTTAYMELRSLRYDDTAVYYCARDVQYSGSYLGAYYFDYWSPGTLVTVSSASTKGPSVFPLAPSSKSTSGGTAALGCLVKDYFPEPVTVSWNSGALTSGVHTFPAVLQSSGLYSLSSVVTVPSSSLGTQTYICNVNHKPSNTKVDKRVEPKSCHHHHHH

SEQ ID NO: 23622 - protein, 234 aa, Artificial Sequence; identical to SEQ ID NO: 23621
  source: /note="Description of Artificial Sequence: Synthetic polypeptide"

SEQ ID NO: 23623 - protein, 224 aa, Artificial Sequence
  source: /note="Description of Artificial Sequence: Synthetic polypeptide"
QVQLVQSGAEVKKPGSSVKVSCKSSGGTSNNYAISWVRQAPGQGLDWMGGISPIFGSTAYAQKFQGRVTISADIFSNTAYMELNSLTSEDTAVYFCARHGNYYYYSGMDVWGQGTTVTVSSASTKGPSVFPLAPSSKSTSGGTAALGCLVKDYFPEPVTVSWNSGALTSGVHTFPAVLQSSGLYSLSSVVTVPSSSLGTQTYICNVNHKPSNTKVDKRVEPKSC

SEQ ID NO: 23624 - protein, 231 aa, Artificial Sequence
  source: /note="Description of Artificial Sequence: Synthetic polypeptide"
QVQLVQSGAEVRKPGASVKVSCKASGYTFTDNYIHWVRQAPGQGLEWMGWIHPNSGATKYAQKFEGWVTMTRDTSISTVYMELSRSRSDDTAVYYCARAGLEPRSVDYYFYGLDVWGQGTAVTVSSASTKGPSVFPLAPSSKSTSGGTAALGCLVKDYFPEPVTVSWNSGALTSGVHTFPAVLQSSGLYSLSSVVTVPSSSLGTQTYICNVNHKPSNTKVDKRVEPKSCDK

SEQ ID NO: 23625 - protein, 220 aa, Artificial Sequence
  source: /note="Description of Artificial Sequence: Synthetic polypeptide"
EVLLVESGGDLVKPGGFLKLSCAASGFTFSSFGMSWVRHTPDKRLEWVATISNGGGYTYYQDSVKGRFTISRDNAKNTLFLEMTSLKSEDAGLYYCARRERYDEKGFAYWGRGTLVTVSAAKTTAPSVYPLAPVCGDTTGSSVTLGCLVKGYFPEPVTLTWNSGSLSSGVHTFPAVLQSDLYTLSSSVTVTSSTWPSQSITCNVAHPASSTKVDKKIEPR

SEQ ID NO: 23626 - protein, 219 aa, Artificial Sequence
  source: /note="Description of Artificial Sequence: Synthetic polypeptide"
QVQLVQSGGGVVQPGRSLRLSCAASEFTFRMYATHWVRQAPGKGLEWVALISYDGSNKYYADSVKGRFTISRDNSMNTVYLQMNTLRPEDTAVYYCARDLGGYFIRGIMDVWGQGTLVTVSSASTKGPSVFPLAPSSGGTAALGCLVKDYFPEPVTVSWNSGALTSGVHTFPAVLQSSGLYSLSSVVTVPSSSLGTQTYICNVNHKPSNTKVDKRVEPK

SEQ ID NO: 23627 - protein, 223 aa, Artificial Sequence
  source: /note="Description of Artificial Sequence: Synthetic polypeptide"
EVQLVESGAEVKKPGSSVKVSCKASGGTFITHVFTWVRQAPGQGLEWVGGFIAIFGTSNYAQKFQGRVTITADESTSTAYMELTSLTSEDTAVYYCARGISGSYGWFDPWGQGTLVTVSSASTKGPSVFPLAPSSKSTSGGTAALGCLVKDYFPEPVTVSWNSGALTSGVHTFPAVLQSSGLYSLSSVVTVPSSSLGTQTYICNVNHKPSNTKVDKRVEPKSC

SEQ ID NO: 23628 - protein, 226 aa, Artificial Sequence
  source: /note="Description of Artificial Sequence: Synthetic polypeptide"
EVQLVESGADMKPPGSSVKVPCKASGDTFSSYTITWVRQAPGQGLEWMGGITPIFGSPNYAQRFQDRVIITADESTSTAYMEVSNLRSEDTAVYFCARVGGEWGSGRYYLDHWGQGTLVTVSSASTKGPSVFPLAPSSKSTSGGTAALGCLVKDYFPEPVTVSWNSGALTSGVHTFPAVLQSSGLYSLSSVVTVPSSSLGTQTYICNVNHKPSNTKVDKRVEPKSC

SEQ ID NO: 23629 - protein, 233 aa, Artificial Sequence
  source: /note="Description of Artificial Sequence: Synthetic polypeptide"
EVQLVESGGGVVQPGRSLRLSCAASGFMFSSYVMHWVRQPPGKGLEWVAVIWYDGSKTYFADSMRGRLTVSRDNSKNALYLQMNRLRAEDTAVYYCARQQDSGYSGPEVSYYSHYGMDVWGQGTMVTVSSASTKGPSVFPLAPSSKSTSGGTAALGCLVKDYFPEPVTVSWNSGALTSGVHTFPAVLQSSGLYSLSSVVTVPSSSLGTQTYICNVNHKPSNTKVDKRVEPKSC

SEQ ID NO: 23630 - protein, 230 aa, Artificial Sequence
  source: /note="Description of Artificial Sequence: Synthetic polypeptide"
EVQLVESGPALVKPTQTLTLTCSFSGFSLSTSGMSVSWIRQPPGKALEWLALIDWDDDTYYITYSSSLKTRLTISKDTSKSQVVLTMTNMDPVDTATYYCARTLRVSGDYVRDFDLWGRGTLVTVSSASTKGPSVFPLAPSSKSTSGGTAALGCLVKDYFPEPVTVSWNSGALTSGVHTFPAVLQSSGLYSLSSVVTVPSSSLGTQTYICNVNHKPSNTKVDKRVEPKSC

SEQ ID NO: 23631 - protein, 226 aa, Artificial Sequence
  source: /note="Description of Artificial Sequence: Synthetic polypeptide"
QVQLVESGGGVVQPGRSLRLSCAASGFTFSTYAMHWVRQAPGKGLEWVAVISYDANYKYYADSVKGRFTISRDNSKNTLYLQMNSLRAEDTAVYYCAKDSQLRSLLYFEWLSQGYFDYWGQGTLVTVSSASTKGPSVFPLAPSSGGTAALGCLVKDYFPEPVTVSWNSGALTSGVHTFPAVLQSSGLYSLSSVVTVPSSSLGTQTYICNVNHKPSNTKVDKRVEPK

SEQ ID NO: 23632 - protein, 226 aa, Artificial Sequence
  source: /note="Description of Artificial Sequence: Synthetic polypeptide"
QVQLVQSGAEVKKPGASVTVSCQVSGYTLTSYGLSWVRQAPGQGLEWVGWINTYDGQTKYVKKFQGRVTMTTHTGTNTAYMEMKSLRSDDTAVYYCARVEGVRGVMGFHYYPMDVWGQGTMVTVSSASTKGPSVFPLAPSSKSTSGGTAALGCLVKDYFPEPVTVSWNSGALTSGVHTFPAVLQSSGLYSLSSVVTVPSSSLGTQTYICNVNHKPSNTKVDKKVEP

SEQ ID NO: 23633 - protein, 123 aa, Artificial Sequence
  source: /note="Description of Artificial Sequence: Synthetic polypeptide"
EVQLQESGPGLVKPSGTLSLTCAVSGASLSSSDWWTWVRQPPGKGLEWIGEIHHGGSTNSNPSLQSRVTISIDKSKKQFSLKLTSVTVADTAIYYCARAPGADAGPYSENIHHWGQGTLVTVS

SEQ ID NO: 23634 - protein, 126 aa, Artificial Sequence
  source: /note="Description of Artificial Sequence: Synthetic polypeptide"
EVQLVESGPALVKPTQTLTLTCSFSGFSLSTSGMSVSWIRQPPGKALEWLALIDWDDDTYYITYSSSLKTRLTISKDTSKSQVVLTMTNMDPVDTATYYCARTLRVSGDYVRDFDLWGRGTLVTVS

SEQ ID NO: 23635 - protein, 456 aa, Artificial Sequence
  source: /note="Description of Artificial Sequence: Synthetic polypeptide"
EVQLVQSGGGVVQPRRSLRLSCAASGFTFSSYAMHWVRQAPGKGLEWVAVISYDGRNKYYADSVKGRFTVSRDNSKNTLYLQMNSLRAEDTSVYYCARELLMDYYDHIGYSPGPTWGQGTLVTVSSASTKGPSVFPLAPSSKSTSGGTAALGCLVKDYFPEPVTVSWNSGALTSGVHTFPAVLQSSGLYSLSSVVTVPSSSLGTQTYICNVNHKPSNTKVDKRVEPKSCDKTHTCPPCPAPELLGGPSVFLFPPKPKDTLMISRTPEVTCVVVDVSHEDPEVKFNWYVDGVEVHNAKTKPREEQYNSTYRVVSVLTVLHQDWLNGKEYKCKVSNKALPAPIEKTISKAKGQPREPQVYTLPPSREEMTKNQVSLTCLVKGFYPSDIAVEWESNGQPENNYKTTPPVLDSDGSFFLYSKLTVDKSRWQQGNVFSCSVMHEALHNHYTQKSLSLSPGK

SEQ ID NO: 23636 - protein, 127 aa, Artificial Sequence
  source: /note="Description of Artificial Sequence: Synthetic polypeptide"
EVQLVQSGGAVVQPGRSLRLSCAASGFTFSIYAMHWVRQTPGKGLEWVALISYDGNNKYYADSVKGRFTISRDNYKNTLYLQMKGLRAEDTALYYCARRITEKGYYNDSGRPNWFDPWGQGTLVTVS

SEQ ID NO: 23637 - protein, 126 aa, Artificial Sequence
  source: /note="Description of Artificial Sequence: Synthetic polypeptide"
EVQLVESGGGVVQPGGSLRLSCIASAFNLGIFGMHWVRQAPGKGLEWVAFIRYDGGKTFYADSVKGRFTISRDNSKNTLYLQMNSLRTEDTALYYCARDATADYYGPGSYPNWLDPWGQGTLVTVS

SEQ ID NO: 23638 - protein, 119 aa, Artificial Sequence
  source: /note="Description of Artificial Sequence: Synthetic polypeptide"
EVQLVESGPVLVKPTETLTVTCTVSGFSVDNDRMGVSWIRQPPGKALEWLAHIFSNDEKSYSTSLRSRLTISKDTSKRQVVLSMTDMDPVDTATYYCARAPSEYAAMDVWGQGTMVTVS

SEQ ID NO: 23639 - protein, 448 aa, Artificial Sequence
  source: /note="Description of Artificial Sequence: Synthetic polypeptide"
EVQLQESGPGLVKPSQTLSLTCNVSGGSITGDYKWSWIRQPPGKGLEWIGHIHSTGTTYYNPSLRSRITISMDTSKNNLSLRLTSVTAADTAVYYCASHTLTSGHYPRDFDFWGQGTLVTVSSASTKGPSVFPLAPCSRSTSESTAALGCLVKDYFPEPVTVSWNSGALTSGVHTFPAVLQSSGLYSLSSVVTVTSSNFGTQTYTCNVDHKPSNTKVDKTVERKCCVECPPCPAPPVAGPSVFLFPPKPKDTLMISRTPEVTCVVVDVSHEDPEVQFNWYVDGMEVHNAKTKPREEQFNSTFRVVSVLTVVHQDWLNGKEYKCKVSNKGLPAPIEKTISKTKGQPREPQVYTLPPSREEMTKNQVSLTCLVKGFYPSDIAVEWESNGQPENNYKTTPPMLDSDGSFFLYSKLTVDKSRWQQGNVFSCSVMHEALHNHYTQKSLSLSGK

SEQ ID NO: 23640 - protein, 122 aa, Artificial Sequence
  source: /note="Description of Artificial Sequence: Synthetic polypeptide"
QVQLQESGGGLVQPGGSLRLSCAASGFPFSSYVMIWVRQVPGKGLEWVSAIGGSGGSTYYADSVKGRFTISRDNSKNTLYLQMNSLRADDTAVYYCVLSPKSYYDNSGIYFDFWGKGTLVRV

SEQ ID NO: 23641 - protein, 98 aa, Artificial Sequence; identical to SEQ ID NO: 4699
  source: /note="Description of Artificial Sequence: Synthetic polypeptide"

SEQ ID NO: 23642 - protein, 108 aa, Artificial Sequence
  source: /note="Description of Artificial Sequence: Synthetic polypeptide"
LPELTQPPSVSVAPGKTARITCGGNNIGSKSVYWYQQKPGQAPVLVVYEDSDRPSGLPERFSGSNSGNTATLTISRVEAGDEADYYCQVWDSTSDHWVFGGRTKLTVL

SEQ ID NO: 23643 - protein, 96 aa, Artificial Sequence
  source: /note="Description of Artificial Sequence: Synthetic polypeptide"
SYVLTQPPSVSVAPGKTARITCGGNNIGSKSVHWYQQKPGQAPVLVIYYDSDRPSGIPERFSGSNSGNTATLTISRVEAGDEADYYCQVWDSSSDH

SEQ ID NO: 23644 - protein, 110 aa, Artificial Sequence
  source: /note="Description of Artificial Sequence: Synthetic polypeptide"
QAVLTQPPSASGTPGQRVTISCSGSSSNIGSYTVNWYQQLPGSAPKLLIYSNNHRPSGVPDRFSGSKSGTSASLAISGLQSEDEADYYCAAWADRQNWVFGGGTKLTVLG

SEQ ID NO: 23645 - protein, 98 aa, Artificial Sequence
  source: /note="Description of Artificial Sequence: Synthetic polypeptide"
QSVLTQPPSASGTPGQRVTISCSGSSSNIGSNTVNWYQQLPGTAPKLLIYSNNQRPSGVPDRFSGSKSGTSASLAISGLQSEDEADYYCAAWDDSLNG

SEQ ID NO: 23646 - protein, 122 aa, Artificial Sequence
  source: /note="Description of Artificial Sequence: Synthetic polypeptide"
EVQLVESGGGLVQPGGSLRLSCAASGFPFSSYVMIWVRQVPGKGLEWVSAIGGSGGSTYYADSVKGRFTISRDNSKNTLYLQMNSLRADDTAVYYCVLSPKSYYDNSGIYFDFWGQGTLVRV

SEQ ID NO: 23647 - protein, 112 aa, Artificial Sequence
  source: /note="Description of Artificial Sequence: Synthetic polypeptide"
NFMLTQPHSVSESPGKTITISCTASSGSIASNYVQWYQQRPGSAPITVIYEDNQRPSGVPDRFSGSIDTSSNSASLTISGLKTEDEADYYCQSYDNTNHWVFGGGTKVTVLG

SEQ ID NO: 23648 - protein, 98 aa, Artificial Sequence
  source: /note="Description of Artificial Sequence: Synthetic polypeptide"
NFMLTQPHSVSESPGKTVTISCTRSSGSIASNYVQWYQQRPGSSPTTVIYEDNQRPSGVPDRFSGSIDSSSNSASLTISGLKTEDEADYYCQSYDSSN

SEQ ID NO: 23649 - protein, 122 aa, Artificial Sequence
  source: /note="Description of Artificial Sequence: Synthetic polypeptide"
EVQLVESGGGLVQPGGSLRLSCAASGFPFSSYVMIWVRQVPGKGLEWVSAIGGSGGSTYYADSVKGRFTISRDNSKNTLYLQMNSLRADDTAVYYCVLSPKSYYDNSGIYFDFWGRGTLVRV

SEQ ID NO: 23650 - protein, 112 aa, Artificial Sequence
  source: /note="Description of Artificial Sequence: Synthetic polypeptide"
QSVLTQPPSVSGAPGQRVTISCTGSSSNTGAGNHVHWYQQVAGAAPKLLISNNNNRPSGVPDRFSASKSGTSASLDITGLQAEDEADYYCQSYDNSLNDWVFGGGTKLTVLG

SEQ ID NO: 23651 - protein, 99 aa, Artificial Sequence
  source: /note="Description of Artificial Sequence: Synthetic polypeptide"
QSVLTQPPSVSGAPGQRVTISCTGSSSNIGAGYDVHWYQQLPGTAPKLLIYGNSNRPSGVPDRFSGSKSGTSASLAITGLQAEDEADYYCQSYDSSLSG

SEQ ID NO: 23652 - protein, 120 aa, Artificial Sequence
  source: /note="Description of Artificial Sequence: Synthetic polypeptide"
QVQLVQSGGGLVQPGGSLRLSCAASGFTLSTYGMHWVRQAAGKGLEWVAVSSYDGRNEYYADSVKGRFTISRDNFKDTLYLQMNNLRAEDTAVYYCAKEVGMRSYDSYGMDVWGKGTLVR

SEQ ID NO: 23653 - protein, 107 aa, Artificial Sequence
  source: /note="Description of Artificial Sequence: Synthetic polypeptide"
DIQLTQSPSTLSASVGGRVTITCRASQSIGPWLAWYQQKPGKAPELLIYEASSLESGVPSRFSGGGSGTEFTLTISRLQPDDIATYYCQQYSSPWTFGQGTKLEIKR

SEQ ID NO: 23654 - protein, 95 aa, Artificial Sequence
  source: /note="Description of Artificial Sequence: Synthetic polypeptide"
DIQMTQSPSTLSASVGDRVTITCRASQSISSWLAWYQQKPGKAPKLLIYDASSLESGVPSRFSGSGSGTEFTLTISSLQPDDFATYYCQQYNSYS

SEQ ID NO: 23655 - protein, 98 aa, Artificial Sequence
  source: /note="Description of Artificial Sequence: Synthetic polypeptide"
QVQLVESGGGVVQPGRSLRLSCAASGFTFSSYGMHWVRQAPGKGLEWVAVISYDGSNKYYADSVKGRFTISRDNSKNTLYLQMNSLRAEDTAVYYCAK

SEQ ID NO: 23656 - protein, 121 aa, Artificial Sequence
  source: /note="Description of Artificial Sequence: Synthetic polypeptide"
EVQLVESGGGVVQPGRSLRLSCAASGFTFSSYGMHWVRQAPGKGLEWVAHISYDGTETHYTDSVKGRFTISRDNSMETAYLQMDSLRAEDTAVYYCAKDVSLRAYDHYGMDVWGRGTLVRV

SEQ ID NO: 23657 - protein, 109 aa, Artificial Sequence
  source: /note="Description of Artificial Sequence: Synthetic polypeptide"
SSELTQDPAVSVALGQTVRITCQGESLRNYYANWYQQRPGQAPVLVIYGGNSRPSGIADRFSGSSSGITASLTITGAQAEDEADYYCDSRDSSDNHRVFGGRTQLTVLS

SEQ ID NO: 23658 - protein, 96 aa, Artificial Sequence
  source: /note="Description of Artificial Sequence: Synthetic polypeptide"
SSELTQDPAVSVALGQTVRITCQGDSLRSYYASWYQQKPGQAPVLVIYGKNNRPSGIPDRFSGSSSGNTASLTITGAQAEDEADYYCNSRDSSGNH

SEQ ID NO: 23659 - protein, 121 aa, Artificial Sequence
  source: /note="Description of Artificial Sequence: Synthetic polypeptide"
QVQLVQSGGGVVQPGRSLRLSCGASGFTLSTYGMHWVRQAAGKGLEWVAVSSYDGRNEYYADSVKGRFTISRDNFKDTLYLQMNNLRAEDTAVYYCAKEVGMRSYDSYGMDVWGRGTLVRV

SEQ ID NO: 23660 - protein, 108 aa, Artificial Sequence
  source: /note="Description of Artificial Sequence: Synthetic polypeptide"
DIQLTQSPSSVSASVGDRVTITCRASQDINSWLAWYQQKPGEAPKVLFGAASSLQSGVPSRFSGSGSGTEFTLTISSLQAEDFATYYCQQSNNFPYTFGQGTKLEIKR

SEQ ID NO: 23661 - protein, 95 aa, Artificial Sequence
  source: /note="Description of Artificial Sequence: Synthetic polypeptide"
DIQMTQSPSSVSASVGDRVTITCRASQGISSWLAWYQQKPGKAPKLLIYAASSLQSGVPSRFSGSGSGTDFTLTISSLQPEDFATYYCQQANSFP

SEQ ID NO: 23662 - protein, 120 aa, Artificial Sequence
  source: /note="Description of Artificial Sequence: Synthetic polypeptide"
EVQLVESGGGVVQPGRTLRLSCAASGFTFTSYGMHWVRQAPGKGLEWVAVISYDGRKKYYLDSVKGRFTISRDNSMETAYLQMDSLRPEDTAVYYCAKDVSLRAYDHYGMDVWGQGTLVR

SEQ ID NO: 23663 - protein, 108 aa, Artificial Sequence
  source: /note="Description of Artificial Sequence: Synthetic polypeptide"
DIQMTQSPSSLSASVGDRVTITCRASQGISNYLAWYQQKPGKVPKLLIYAASTLQSGVPSRFSGSGSGTDFTLTISSLQPEDVATYFCQQSYSTPFTFGGGTKVDIKR

SEQ ID NO: 23664 - protein, 95 aa, Artificial Sequence
  source: /note="Description of Artificial Sequence: Synthetic polypeptide"
DIQMTQSPSSLSASVGDRVTITCRASQGISNYLAWYQQKPGKVPKLLIYAASTLQSGVPSRFSGSGSGTDFTLTISSLQPEDVATYYCQKYNSAP

SEQ ID NO: 23665 - protein, 455 aa, Artificial Sequence
  source: /note="Description of Artificial Sequence: Synthetic polypeptide"
EVQLVESGGGVVQPGRSLRLSCAASGFAFHNRAMHWVRQAPGKGLEWVALIYFDGSKQYYADSVKGRFTISRDNSKNTVFLQMNSLRPEDTAVYYCAVPGPIFGIFPPWSYFDHWGQGILVTVSSASTKGPSVFPLAPSSKSTSGGTAALGCLVKDYFPEPVTVSWNSGALTSGVHTFPAVLQSSGLYSLSSVVTVPSSSLGTQTYICNVNHKPSNTKVDKKVEPKSCDKTHTCPPCPAPELLGGPSVFLFPPKPKDTLMISRTPEVTCVVVDVSHEDPEVKFNWYVDGVEVHNAKTKPREEQYNSTYRVVSVLTVLHQDWLNGKEYKCKVSNKALPAPIEKTISKAKGQPREPQVYTLPPSREEMTKNQVSLTCLVKGFYPSDIAVEWESNGQPENNYKTTPPVLDSDGSFFLYSKLTVDKSRWQQGNVFSCSVMHEALHNHYTQKSLSLSPGK

SEQ ID NO: 23666 - protein, 236 aa, Artificial Sequence
  source: /note="Description of Artificial Sequence: Synthetic polypeptide"
EVQLVESGGGLVQPGRSLRLSCAASGFSFDEYTMHWVRQAPGKGLEWVAGINWKGNFMGYADSVQGRFTISRDNGKNSLYLQMNSLRAEDTALYYCAKDRLESSAMDILEGGTFDIWGQGTMVTVSSASTKGPSVFPLAPSSKSTSGGTAALGCLVKDYFPEPVTVSWNSGALTSGVHTFPAVLQSSGLYSLSSVVTVPSSSLGTQTYICNVNHKPSNTKVDKRVEPKSCHHHHHH

SEQ ID NO: 23667 - protein, 122 aa, Artificial Sequence
  source: /note="Description of Artificial Sequence: Synthetic polypeptide"
LEESGGGVVQPGRSLRLSCAASGFPFSSYGMHWVRQAPGKGLEWVAGVSYDGSYKYYADSVKGRFTISRDSSKSTLYLQMNSLRPEDTAVYYCARPSAIFGIYIILNGLDVWGQGTTVTVSS

SEQ ID NO: 23668 - protein, 127 aa, Artificial Sequence
  source: /note="Description of Artificial Sequence: Synthetic polypeptide"
QVKLLESGGGLVQPGGSLRLSCAASGITFSSYAMSWVRQAPGKGLEWVSTVNSGGGSTYYGDSVRGRFTISRDNSKSTLYLQLNSLRAEDTAIYYCAKDKGRPIFGLVTPSYYMDVWGNGTTVTVSS

SEQ ID NO: 23669 - protein, 10 aa, Artificial Sequence
  source: /note="Description of Artificial Sequence: Synthetic peptide"
GYTFTSFIMY

SEQ ID NO: 23670 - protein, 15 aa, Artificial Sequence
  source: /note="Description of Artificial Sequence: Synthetic peptide"
DPYNDGTKYNEKFEG

SEQ ID NO: 23671 - protein, 10 aa, Artificial Sequence
  source: /note="Description of Artificial Sequence: Synthetic peptide"
RGNYGNGFAY

SEQ ID NO: 23672 - protein, 113 aa, Artificial Sequence
  source: /note="Description of Artificial Sequence: Synthetic polypeptide"
WGQGTLVIVSSASTKGPSVFPLAPSSKSTSGGTAALGCLVKDYFPEPVTVSWNSGALTSGVHTFPAVLQSSGLYSLSSVVTVPSSSLGTQTYICNVNHKPSNTKVDKKVEPKS

SEQ ID NO: 23673 - protein, 456 aa, Artificial Sequence
  source: /note="Description of Artificial Sequence: Synthetic polypeptide"
  MOD_RES (219)..(219): Any amino acid
QVQLVQSGGELKKPGASVRVSCKASGYTFTTYGISWVRQAPGQGLEWVGWISAYTGNTDYAQKVQGRVTMTTDTSTSTAYMELRSLTSDDTAVYYCARDKVQGRVEAGSGGRHDYWGQGTLVTVSSASTKGPSVFPLAPSSKSTSGGTAALGCLVKDYFPEPVTVSWNSGALTSGVHTFPAVLQSSGLYSLSSVVTVPSSSLGTQTYICNVNHKPSNTXVDKKVEPKSCDKTHTCPPCPAPELLGGPSVFLFPPKPKDTLMISRTPEVTCVVVDVSHEDPEVKFNWYVDGVEVHNAKTKPREEQYNSTYRVVSVLTVLHQDWLNGKEYKCKVSNKALPAPIEKTISKAKGQPREPQVYTLPPSRDELTKNQVSLTCLVKGFYPSDIAVEWESNGQPENNYKTTPPVLDSDGSFFLYSKLTVDKSRWQQGNVFSCSVMHEGLHNHYTQKSLSLSPGK

SEQ ID NO: 23674 - protein, 456 aa, Artificial Sequence
  source: /note="Description of Artificial Sequence: Synthetic polypeptide"
QVQLVQSGVEVKKPGASVKVSCKTSGYPFSTYGVSWVRQAPGQGLEWVGWISGYTGITDYAQKSQGRVTLTTDASTATAFLELRSLRPDDTATYFCARDKVQGRVEAGSGGRHDYWGQGTLVIVSSASTKGPSVFPLAPSSKSTSGGTAALGCLVKDYFPEPVTVSWNSGALTSGVHTFPAVLQSSGLYSLSSVVTVPSSSLGTQTYICNVNHKPSNTKVDKKVEPKSCDKTHTCPPCPAPELLGGPSVFLFPPKPKDTLMISRTPEVTCVVVDVSHEDPEVKFNWYVDGVEVHNAKTKPREEQYNSTYRVVSVLTVLHQDWLNGKEYKCKVSNKALPAPIEKTISKAKGQPREPQVYTLPPSRDELTKNQVSLTCLVKGFYPSDIAVEWESNGQPENNYKTTPPVLDSDGSFFLYSKLTVDKSRWQQGNVFSCSVMHEGLHNHYTQKSLSLSPGK

SEQ ID NO: 23675 - protein, 456 aa, Artificial Sequence
  source: /note="Description of Artificial Sequence: Synthetic polypeptide"
QVQLVQSGAEVKKPGASVKVSCKTSGYSFSTYGVSWVRQAPGQGLEWVGWISGYTGITDYAQKFQGRVTLTTDATTATAFLELRSLRPDDTATYFCARDKVQGRVEVGSGGRHDYWGQGTLVIVSSASTKGPSVFPLAPSSKSTSGGTAALGCLVKDYFPEPVTVSWNSGALTSGVHTFPAVLQSSGLYSLSSVVTVPSSSLGTQTYICNVNHKPSNTKVDKKVEPKSCDKTHTCPPCPAPELLGGPSVFLFPPKPKDTLMISRTPEVTCVVVDVSHEDPEVKFNWYVDGVEVHNAKTKPREEQYNSTYRVVSVLTVLHQDWLNGKEYKCKVSNKALPAPIEKTISKAKGQPREPQVYTLPPSRDELTKNQVSLTCLVKGFYPSDIAVEWESNGQPENNYKTTPPVLDSDGSFFLYSKLTVDKSRWQQGNVFSCSVMHEGLHNHYTQKSLSLSPGK

SEQ ID NO: 23676 - protein, 464 aa, Artificial Sequence
  source: /note="Description of Artificial Sequence: Synthetic polypeptide"
MGWSLILLFLVAVATRVHSQVQLVQSGSELKKPGASVKMSCKAAGYTFTNYWIGWVRQAPGQGLEWIGDIYPENDFSNYNEKFKDRATLTADTSTRTAYMELSSLRSEDTAVYYCVRANEGWYLDVWGQGTTVTVSSASTKGPSVFPLAPCSRSTSESTAALGCLVKDYFPEPVTVSWNSGALTSGVHTFPAVLQSSGLYSLSSVVTVPSSSLGTKTYTCNVDHKPSNTKVDKRVESKYGPPCPSCPAPEFLGGPSVFLFPPKPKDTLMISRTPEVTCVVVDVSQEDPEVQFNWYVDGVEVHNAKTKPREEQFNSTYRVVSVLTVLHQDWLNGKEYKCKVSNKGLPSSIEKTISKAKGQPREPQVYTLPPSQEEMTKNQVSLTCLVKGFYPSDIAVEWESNGQPENNYKTTPPVLDSDGSFFLYSRLTVDKSRWQEGNVFSCSVMHEALHNHYTQKSLSLSLGK

SEQ ID NO: 23677 - protein, 464 aa, Artificial Sequence
  source: /note="Description of Artificial Sequence: Synthetic polypeptide"
MGWSLILLFLVAVATRVHSQVQLVQSGSELKKPGASVKVSCKAAGYTFTNYWIGWVRQAPGQGLEWIGDIYPENDFSNYNEKFKDRVTITADTSTSTAYMELSSLRSEDTAVYYCVRANEGWYLDVWGQGTTVTVSSASTKGPSVFPLAPCSRSTSESTAALGCLVKDYFPEPVTVSWNSGALTSGVHTFPAVLQSSGLYSLSSVVTVPSSSLGTKTYTCNVDHKPSNTKVDKRVESKYGPPCPSCPAPEFLGGPSVFLFPPKPKDTLMISRTPEVTCVVVDVSQEDPEVQFNWYVDGVEVHNAKTKPREEQFNSTYRVVSVLTVLHQDWLNGKEYKCKVSNKGLPSSIEKTISKAKGQPREPQVYTLPPSQEEMTKNQVSLTCLVKGFYPSDIAVEWESNGQPENNYKTTPPVLDSDGSFFLYSRLTVDKSRWQEGNVFSCSVMHEALHNHYTQKSLSLSLGK

SEQ ID NO: 23678 - protein, 133 aa, Artificial Sequence
  source: /note="Description of Artificial Sequence: Synthetic polypeptide"
EVQLLESGGGLVKPGQSLKLSCAASGFTFTSYGMHWVRQPPGKGLEWVAVISYDGSYKYYADSVQGRFTISRDNSKNTLYLQMNSLRAEDTAVYYCAKDSELRSLLYFEWLSQGYFNPWGAGTTLTVSSASTK

SEQ ID NO: 23679 - protein, 133 aa, Artificial Sequence
  source: /note="Description of Artificial Sequence: Synthetic polypeptide"
EVQLLESGGGVVQPGRSLKLSCAASGFTFSSYGMHWVRQAPGKGLEWVAVISYDGSNKYYADSVEGRFTISRDNSKNTLYLQMNSLRAEDTAVYYCAKDGKLRSLLYFEWLSSGLLDYWGQGAMVTVSSASTK

SEQ ID NO: 23680 - protein, 133 aa, Artificial Sequence
  source: /note="Description of Artificial Sequence: Synthetic polypeptide"
EVQLLESGGGVVQPGRSLKLSCAASGFTFSSYGMHWVRQAPGKGLEWVAVVSYDGSNKYYADSVEGRFTISRDNSKNTLYLQMNSLRAEDTAVYYCAKDGKLRSLLYFEWLSSGLLDYWGQGAMVTVSSASTK

SEQ ID NO: 23681 - protein, 133 aa, Artificial Sequence
  source: /note="Description of Artificial Sequence: Synthetic polypeptide"
EVQLLESGGGVVQPGRSLKLSCAASGFTFSSYGMHWVRQAPGKGLEWVAVVSYDGSNKYYAPKFEGRFTISRDNSKNTLYLQMNSLRAEDTAVYYCAKDGKLRSLLYFEWLSSGLLDYWGQGAMVTVSSASTK

SEQ ID NO: 23682 - protein, 133 aa, Artificial Sequence
  source: /note="Description of Artificial Sequence: Synthetic polypeptide"
EVQLLESGGGLVKPGQSLKLSCAASGFTFSSYGMHWVRQPPGKGLEWVAVVSYDGSNKYYADSVQGRFTISRDNSKNTLYLQMNSLRAEDTAVYYCAKDGKLRSLLYFEWLSSGLLDYWGQGAMVTVSSASTK

SEQ ID NO: 23683 - protein, 133 aa, Artificial Sequence
  source: /note="Description of Artificial Sequence: Synthetic polypeptide"
EVQLLESGGGLVKPGQSLKLSCAASGFTFSSYGMHWVRQPPGKGLEWVAVVSYDGSNKYYADSVQGRFTISRDNSKNTLYLQMNSLRAEDTAVYYCGKDSQLRSLVYFEWLSSGLLDYWGQGAMVTVSSASTK

SEQ ID NO: 23684 - protein, 133 aa, Artificial Sequence
  source: /note="Description of Artificial Sequence: Synthetic polypeptide"
EVQLLESGGGLVKPGQSLKLSCAASGFTFSSYGMHWVRQPPGKGLEWVAVVSYDGSNKYYADSVQGRFTISRDNSKNTLYLQMNSLRAEDTAVYYCAKDSQLRSLLYFEWLSSGLLDYWGQGAMVTVSSASTK

SEQ ID NO: 23685 - protein, 133 aa, Artificial Sequence
  source: /note="Description of Artificial Sequence: Synthetic polypeptide"
EVQLLESGGGLVKPGQSLKLSCAASGFTFSSYGMHWVRQPPGKGLEWVAVVSYDGSNKYYADSVQGRFTISRDNSKNTLYLQMNSLRAEDTAVYYCAKDSKLRSLLYFEWLSSGLLDYWGQGAMVTVSSASTK

SEQ ID NO: 23686 - protein, 133 aa, Artificial Sequence
  source: /note="Description of Artificial Sequence: Synthetic polypeptide"
EVQLLESGGGLVKPGQSLKLSCAASGFTFSSYGMHWVRQPPGKGLEWVAVVSYDGSNKYYADSVQGRFTISRDNSKNTLYLQMNSLRAEDTAVYYCAKDTQLRTIVYFEWLSQGFYDIWGQGAMVTVSSASTK

SEQ ID NO: 23687 - protein, 133 aa, Artificial Sequence
  source: /note="Description of Artificial Sequence: Synthetic polypeptide"
EVQLLESGGGLVKPGQSLKLSCAASGFTFSSYGMHWVRQPPGKGLEWVAVVSYDGSNKYYADSVQGRFTISRDNSKNTLYLQMNSLRAEDTAVYYCAKDSQLRTIVYFEWLSQGYFDPWGQGAMVTVSSASTK

SEQ ID NO: 23688 - protein, 133 aa, Artificial Sequence
  source: /note="Description of Artificial Sequence: Synthetic polypeptide"
EVQLLESGGGLVKPGQSLKLSCAASGFTFSSYGMHWVRQPPGKGLEWVAVVSYDGSYKYYADSVQGRFTISRDNSKNTLYLQMNSLRAEDTAVYYCAKDSQLRSLLYFEWLSSGLLDYWGQGAMVTVSSASTK

SEQ ID NO: 23689 - protein, 133 aa, Artificial Sequence
  source: /note="Description of Artificial Sequence: Synthetic polypeptide"
EVQLLESGGGLVKPGQSLKLSCAASGFTFTSYGMHWVRQPPGKGLEWVAVISYDGSYKYYADSVQGRFTISRDNSKNTLYLQMNSLRAEDTAVYYCGKDSQLRSLIYFEWLSNGYFDIWGAGTTLTVSSASTK

SEQ ID NO: 23690 - protein, 133 aa, Artificial Sequence
  source: /note="Description of Artificial Sequence: Synthetic polypeptide"
EVQLLESGGGLVKPGQSLKLSCAASGFTFTSYGMHWVRQPPGKGLEWVAVISYDGSYKYYADSVQGRFTISRDNSKNTLYLQMNSLRAEDTAVYYCAKDSQLRSLLYFEWLSNGFYDIWGAGTTLTVSSASTK

SEQ ID NO: 23691 - protein, 133 aa, Artificial Sequence
  source: /note="Description of Artificial Sequence: Synthetic polypeptide"
EVQLLESGGGLVKPGQSLKLSCAASGFTFTSYGMHWVRQPPGKGLEWVAVISYDGSYKYYADSVQGRFTISRDNSKNTLYLQMNSLRAEDTAVYYCAKDSNLRTIVYFEWLSSGLLDYWGAGTTLTVSSASTK

SEQ ID NO: 23692 - protein, 133 aa, Artificial Sequence
  source: /note="Description of Artificial Sequence: Synthetic polypeptide"
EVQLLESGGGLVKPGQSLKLSCAASGFTFTSYGMHWVRQPPGKGLEWVAVISYDGSYKYYADSVQGRFTISRDNSKNTLYLQMNSLRAEDTAVYYCAKDSQLRTIVYFEWLSQGYFDPWGAGTTLTVSSASTK

SEQ ID NO: 23693 - protein, 133 aa, Artificial Sequence
  source: /note="Description of Artificial Sequence: Synthetic polypeptide"
EVQLLESGGGLVKPGQSLKLSCAASGFTFTSYGMHWVRQPPGKGLEWVAVISYDGSYKYYADSVQGRFTISRDNSKNTLYLQMNSLRAEDTAVYYCAKDTQLRTIVYFEWLSQGFYDIWGAGTTLTVSSASTK

SEQ ID NO: 23694 - protein, 115 aa, Artificial Sequence
  source: /note="Description of Artificial Sequence: Synthetic polypeptide"
EVQLVQSGAEVKKPGASVKVSCKASGYTFTGYYVYWVRQAPGQGLEWMGWISAYNGNTNYAQKFQGRVTITADKSTSTAYMELSSLRSEDTAVYYCARSRSLDVWGQGTTVTVSS

SEQ ID NO: 23695 - protein, 120 aa, Artificial Sequence
  source: /note="Description of Artificial Sequence: Synthetic polypeptide"
EVQLVQSGAEVKKPGSSMKVSCKASGSIFSNYGISWVRQAPGQGLEWMGGIIPIFGAANYAQKFQGRVTITADESTSTVYMEVRSLRSEDTAVYYCARRQQLYKGYYHHWGQGTLVTVSS

SEQ ID NO: 23696 - protein, 120 aa, Artificial Sequence
  source: /note="Description of Artificial Sequence: Synthetic polypeptide"
QVQLVQSGAGVKKPGSSMKVSCKASGSIFSNYGISWVRQAPGQGLEWMGGIIPIFGAANYAQKFQGRVTITADESTSTVYMEVRSLRSEDTAVYYCARRQQLYKGYYHHWGQGTLVTVSS

SEQ ID NO: 23697 - protein, 234 aa, Artificial Sequence
  source: /note="Description of Artificial Sequence: Synthetic polypeptide"
DIQMTQSPSSLSASLGERVSLTCRASQEISGYLSWLQQKPDGTIKRLIYAASTLDSGVPKRFSGSRSGSDYSLSISSLESEDFADYYCLQYANYPWSFGGGTKLEIKQIQLVQSGPELKKPGETVKISCKASGYTFTNYGMNWVKQAPGKGLKWMGWINIYSGESTYVDDFTGRFAFSLETSASTAYLQINNLKNEDMATYFCARSGDTMITAGRSFFAMDYWGQGTSVTVSSA

SEQ ID NO: 23698 - protein, 141 aa, Artificial Sequence
  source: /note="Description of Artificial Sequence: Synthetic polypeptide"
MEFGLSWIFLTAILKGVQCEVQLVESGGGLVKPGGSLRLSCAASGFTFSNALMSWVRQAPGKGLEWVGRIKSKTNGGTTDYAAPVKGRFTISRDDSKNTLYLQMNSLKTEDTAVYYCTTHLRYFDWLSDYWGQGTLVTVSS

SEQ ID NO: 23699 - protein, 146 aa, Artificial Sequence
  source: /note="Description of Artificial Sequence: Synthetic polypeptide"
MEFGLSWVFLVAILKGVQCEVQLVESGGGVVRPGGSLRLSCAASGFTFDDYGMSWVRQAPGKGLEWVSGINWNGGSTGYADSVKGRFTISRDNAKNSLYLQMNSLRAEDTALYYCARDRVTMVRGVIMDYYGMDVWGQGTTVTVSS

SEQ ID NO: 23700 - protein, 144 aa, Artificial Sequence
  source: /note="Description of Artificial Sequence: Synthetic polypeptide"
MKHLWFFLLLVAAPRWVLSQLQLQESGPGLVKPSETLSLTCTVSGGSISSSFYYCGWIRQPPGKGLEWIGSIYYRGSTYYNPSLKSRVTISVDTSKNQFSLKLSSVTAADTAVYYCARRVTMVRGVKGDYFDYWGQGTLVTVSS

SEQ ID NO: 23701 - protein, 119 aa, Artificial Sequence
  source: /note="Description of Artificial Sequence: Synthetic polypeptide"
QVQLQQSGPEVVRPGVSVKISCKGSGYIFTDYAMHWVKQSHAKSLEWIGVISTYTGKTNYSQKFKGKATMTVDKSSSTAYMELARLTSEDSSVYYCARRGDYDAWFAYWGQGTLVTVSA

SEQ ID NO: 23702 - protein, 119 aa, Artificial Sequence
  source: /note="Description of Artificial Sequence: Synthetic polypeptide"
QVQLVQSGAEVKKPGASVKVSCKASGYTFTDYAMHWVRQAPGQGLEWIGVISTYTGKTNYSQKFKGRATMTVDKSISTAYMELSRLRSDDTAVYYCARRGDYDAWFAYWGQGTLVTVSS

SEQ ID NO: 23703 - protein, 130 aa, Artificial Sequence
  source: /note="Description of Artificial Sequence: Synthetic polypeptide"
QVQLLQPGVELVRPGASVKLSCKASGYTFTSFWMNWVKQRPDQGLEWIGRIDPYDSETHYNQKFKDKAILTVDKSSSTAYMQLSSLTSEDSAVYYCGRGIATLMVLPDYWGQGTTVTESLEDPRVPSSNS

SEQ ID NO: 23704 - protein, 133 aa, Artificial Sequence
  source: /note="Description of Artificial Sequence: Synthetic polypeptide"
QVQLQQSGAELMKPGASVKISCKATGYTFSGHWIEWVKQRPGHGLEWIGEILPGSGNIHYNEKFKGKATFAADTSSNTAYMQLSSLTSEDSAVYYCARLGTTAVERDWYFDVWGQGTTVTESLEDPRVPSSNS

SEQ ID NO: 23705 - protein, 123 aa, Artificial Sequence
  source: /note="Description of Artificial Sequence: Synthetic polypeptide"
QVQLQQSGAELMKPGASVKISCKATGYTFSGHWIEWVKQRPGHGLEWIGEILPGSGNIHYNEKFKGKATFAADTSSNTAYMQLSSLTSEDSAVYYCARLGTTAVERDWYFDVWGQGTSVTVSS

SEQ ID NO: 23706 - protein, 120 aa, Artificial Sequence
  source: /note="Description of Artificial Sequence: Synthetic polypeptide"
QVQLQESGPDLVKPGASVKMSCKASGYSFTYYHMHWVKQTHGKSLEWIGRIPYNGGTNYSQRFKGKAVFTVDMSSSTAYMELRSLTSEDSAVYYCARDANYEGDWYFDVWGQGTTVTVSS

SEQ ID NO: 23707 - protein, 121 aa, Artificial Sequence
  source: /note="Description of Artificial Sequence: Synthetic polypeptide"
QVQLQESGPDLVKPGASVMISCKASGYSFTYYYMHWVKQSHGKTLEWIGRIYPYNGDTNYNRRFKDKAILTVDESSSTAYMELRSLTSEDSAVYFCARDANYEGDWYFDVWGQGTTVTVSS

SEQ ID NO: 23708 - protein, 129 aa, Artificial Sequence
  source: /note="Description of Artificial Sequence: Synthetic polypeptide"
QVQLVQSGGGVVQPGRSLRLSCVASGFTFSTYAMHWVRQAPGRGLEWVAVISYDGNYKYYADSVKGRFSISRDNSNSTLHLEMNTLRTEDTALYYCAKDSQLRSLLYFEWLSQGYFDPWGQGTLVTVTS

SEQ ID NO: 23709 - protein, 129 aa, Artificial Sequence
  source: /note="Description of Artificial Sequence: Synthetic polypeptide"
QVQLVQSGGGVVQPGRSLRLSCVASGFTFSTYAMHWVRQAPGRGLEWVAVISYDGNYKYYADSVKGRFSISRDNSNNTLHLEMNTLRTEDTALYYCAKDSQLRSLLYFEWLSQGYFDPWGQGTLVTVTS

SEQ ID NO: 23710 - protein, 129 aa, Artificial Sequence
  source: /note="Description of Artificial Sequence: Synthetic polypeptide"
QVQLVESGGGVVQPGRSLRLSCAASGFTFSTYAMHWVRQAPGKGLEWVAVISYDANYKYYADSVKGRFTISRDNSKNTLYLQMNSLRAEDTAVYYCAKDSQLRSLLYFEWLSQGYFDYWGQGTLVTVSS

SEQ ID NO: 23711 - protein, 129 aa, Artificial Sequence
  source: /note="Description of Artificial Sequence: Synthetic polypeptide"
QVQLVQSGGGVVQPGRSLRLSCVASGFTFSTYAMHWVRQAPGRGLEWVAVISYDANYKYYADSVKGRFSISRDNSQNTLHLEMNTLRTEDTALYYCAKDSQLRSLLYFEWLSQGYFEPWGQGTLVTVTS

SEQ ID NO: 23712 - protein, 129 aa, Artificial Sequence
  source: /note="Description of Artificial Sequence: Synthetic polypeptide"
EVQLVESGGGAVQPGESLKLSCAASGFTFSNYGMHWVRQAPGKGLEWVAVISYDGSNKYYADSVKGRFTISRDNSKDTLYLQMNSLRAEDTALFYCAKERPLRLLRYFDWLSGGANDYWGQGTLVTVSS

SEQ ID NO: 23713 - protein, 129 aa, Artificial Sequence
  source: /note="Description of Artificial Sequence: Synthetic polypeptide"
EVQLVESGGGAVQPGESLKLPCAASGFTFSNYGMHWVRQAPGKGLEWVAVISYDGSNKYYADSVKGRFTISRDNSKDTLYLQMNSLRAEDTALFYCAKERPLRLLRYFDWLSGGANDYWGQGTLVTVSS

SEQ ID NO: 23714 - protein, 119 aa, Artificial Sequence
  source: /note="Description of Artificial Sequence: Synthetic polypeptide"
QVQLQESGPGLVKPSETLSLTCTVSGSSISNYYWSWIRQSPGKGLEWIGFIYYGGNTKYNPSLKSRVTISQDTSKSQVSLTMSSVTAAESAVYFCARASCSGGYCILDYWGQGTLVTVS

SEQ ID NO: 23715 - protein, 122 aa, Artificial Sequence
  source: /note="Description of Artificial Sequence: Synthetic polypeptide"
QVQLQQSGPGLVKPSQTLSLTCTVSGGPVSGGGYSWNWIRQRPGQGLEWVGFMFHSGSPRYNPTLKSRITISVDTSKNLVSLKLSSVTAADTAVYFCARVGQMDKYYAMDVWGQGTTVTVSS

SEQ ID NO: 23716 - protein, 121 aa, Artificial Sequence
  source: /note="Description of Artificial Sequence: Synthetic polypeptide"
QVQLQESGPGLLKPSDTLALTCTVSGGSITSDYWSWIRQPPGRGLDWIGFFYNGGSTKYNPSLKSRVTISADTSKNQLSLKLTSVTAADTGVYYCARHDAKFSGSYYVASWGQGTRVTVSS

SEQ ID NO: 23717 - protein, 121 aa, Artificial Sequence
  source: /note="Description of Artificial Sequence: Synthetic polypeptide"
QVQLQESGPGLLKPSDTLALTCTVSGGSITSDYWSWIRQPPGRGLDWIGFFYNGGSTKYNPSLKSRVTISADTSKNQLSLKLTSVTAADTGVYYCARHDVKFSGSYYVASWGQGTRVTVSS

SEQ ID NO: 23718 - protein, 120 aa, Artificial Sequence
  source: /note="Description of Artificial Sequence: Synthetic polypeptide"
QVQLQESGPRVVRPSETLSLTCTVSGGSISSYNWIWIRQPPGKGLEWIGHIYDYGRTFYNSSLQSRPTISVDASKNQLSLRLTSVTASDTAVYYCARPLGILHYYAMDLWGQGTTVTVSS

SEQ ID NO: 23719 - protein, 118 aa, Artificial Sequence
  source: /note="Description of Artificial Sequence: Synthetic polypeptide"
EVQLVESGGGLVQPGGSLRLSCTASGLSVSSTYMNWVRQAPGKGLEWVSVFYSETRTYYADSVKGRFTVSRHNSNNTLYLQMNSLRVEDTAVYYCARVQRLSYGMDVWGQGTTVTVSS

SEQ ID NO: 23720 - protein, 118 aa, Artificial Sequence
  source: /note="Description of Artificial Sequence: Synthetic polypeptide"
EVQLVESGGGLVQPGGSLRLSCTASGLSVSSTYMNWVRQAPGKGLEWVSVFYSETRTYYADSVKGRFTVSRHNSNNTLYLQMNSLRAEDTAVYYCARVQRLSYGMDVWGQGTTVTVSS

SEQ ID NO: 23721 - protein, 120 aa, Artificial Sequence
  source: /note="Description of Artificial Sequence: Synthetic polypeptide"
QVQLQESGPGLVKPSETLSLTCSVSGGSISSDFWSWIRQPPGKGLEWIGYVYNRGSTKYSPSLKSRVTISADMSKNQFSLNMSSVTAADTAVYYCAKNGRSSTSWGIDVWGKGTTVTVSS

SEQ ID NO: 23722 - protein, 119 aa, Artificial Sequence
  source: /note="Description of Artificial Sequence: Synthetic polypeptide"
QVQLQESGPGLVKPSETLSLTCTVSGASISSDYWSWIRLPPGKGLEWIGYIYNRGSTKYTPSLKSRVTISLDTAENQFSLRLRSVTAADTAIYYCARHVGGHTYGIDYWGQGTLVTVSS

SEQ ID NO: 23723 - protein, 119 aa, Artificial Sequence
  source: /note="Description of Artificial Sequence: Synthetic polypeptide"
QVQLQESGPGLVKPSETLSLTCTVSGASISSDYWSWIRLPPGKGLEWIGYIYNRGSTKYTPSLKSRVTISLDTAENQFSLRLRSVTAADTAVYYCARHVGGHTYGIDYWGQGTLVTVSS

SEQ ID NO: 23724 - protein, 121 aa, Artificial Sequence
  source: /note="Description of Artificial Sequence: Synthetic polypeptide"
QVQLQESGPGLVKPSETLSVTCKVSGDSISSYSWSWIRQPPGKGLEWVGYLYYSGSTKYNPSLKSRTTISVDTSTNQLSLKLSFVTAADTAVYFCARTGSESTTGYGMDVWGQGTTVTVSS

SEQ ID NO: 23725 - protein, 119 aa, Artificial Sequence
  source: /note="Description of Artificial Sequence: Synthetic polypeptide"
QVQLQESGPRLVKPSESLSLTCTVSGGSISNSFWGWIRQPPGEGLEWIGYVYNSGNTKYNPSLKSRVTISRDTSKSQLYMKLRSVTAADTAVYYCARHDDASHGYSISWGHGTLVTVSS

SEQ ID NO: 23726 - protein, 107 aa, Artificial Sequence
  source: /note="Description of Artificial Sequence: Synthetic polypeptide"
DIQMTQSPSSLSASVGDRVTITCRASQTISTYLNWYQQKSGKAPKLLIYAASGLQSGVPSRFSGSGSGTDFTLTISSLQPEDFATYFCQQSYNTPLTFGQGTKVEIK

SEQ ID NO: 23727 - protein, 106 aa, Artificial Sequence
  source: /note="Description of Artificial Sequence: Synthetic polypeptide"
DIQMTQSPSSLSASVGDRVTITCRASQSISRYLNWYQQKPGKAPKLLIYGASTLQNGAPSRFSGSGSGTDFTLTISSLQPEDSATYLCQQSYSVPAFGGGTKVEVK

SEQ ID NO: 23728 - protein, 107 aa, Artificial Sequence
  source: /note="Description of Artificial Sequence: Synthetic polypeptide"
DIQMTQSPSSLSASVGDRVTISCRASQSISTYLNWYQQQPGKAPKVLISGATDLQSGVPSRFSGSGSGTDFTLTISSLQPEDFATYYCQQSYNTPLIFGQGTKLEIK

SEQ ID NO: 23729 - protein, 106 aa, Artificial Sequence
  source: /note="Description of Artificial Sequence: Synthetic polypeptide"
GIQMTQSPSSLSASVGDRVTITCRASQSISRYLNWYLQKPGKAPKLLISGASSLQSGVPSRFSGTGSGTEFTLTISSLQPEDFATYYCQQTFSIPLFGQGTKVEIK

SEQ ID NO: 23730 - protein, 123 aa, Artificial Sequence
  source: /note="Description of Artificial Sequence: Synthetic polypeptide"
QVQLQASGPGLVKPSETLSLTCTVSGDSITSGAYYWTWIRQHPGKGLEWIGYIYYSGNTYYNPSLKSRVTISLDTSKNQFSLKVNSVTAADTAVYYCARAASTSVLGYGMDVWGQGTTVTVSS

SEQ ID NO: 23731 - protein, 118 aa, Artificial Sequence
  source: /note="Description of Artificial Sequence: Synthetic polypeptide"
DMQLVESGGGLVPPGGSLRLSCAASGFSVSDNYINWVRQAPGKGLDWVSVFYSADRTSYADSVKGRFTVSSHDSKNTVYLQMNSLRAEDTAVYYCARVQKSYYGMDVWGQGTTVTVSS

SEQ ID NO: 23732 - protein, 124 aa, Artificial Sequence
  source: /note="Description of Artificial Sequence: Synthetic polypeptide"
EVQLVESGGGLVQPGGSLRLSCVASTFSLINYWMTWVRQAPGKGLEWVANIKQDGFEKYYVDSVKGRFTISRDNAKNSLYLQMNSLRVEDTAVYYCARQGSYADTYFYHYGMDVWGQGTTVTVS

SEQ ID NO: 23733 - protein, 124 aa, Artificial Sequence
  source: /note="Description of Artificial Sequence: Synthetic polypeptide"
EVQLVESGGGLVQPGGSLRLSCAASGFTFNSYWMTWVRQAPGKGLEWVANINQDGSEKFFVDSVKGRFTISRDNAKTSLYLQMNSLRVEDTAVYYCAREGAPYDTYYYYYAMDVWGQGTTVTVS

SEQ ID NO: 23734 - protein, 124 aa, Artificial Sequence
  source: /note="Description of Artificial Sequence: Synthetic polypeptide"
EVQLVESGGGLVQPGGSLRLSCAASEFNFKSYWMTWVRQAPGKGLEWVANINQDGSEKNYVDSVKGRFTISRDNAKNSLHLQMSSLRVDDTAVYYCARTGSSWDTYYYYYAMDVWGQGTTVTVS

SEQ ID NO: 23735 - protein, 124 aa, Artificial Sequence
  source: /note="Description of Artificial Sequence: Synthetic polypeptide"
EVQLVESGGGLVQPGGSLRLSCAASGFIFESYWMTWVRQAPGKGLEWVANIKQDGSEKNYVDSVKGRFTISRDNAKTSLYLQMNSLRAEDTAMYYCARSGSNWDTYYYYYGMDVWGQGTTVTVS

SEQ ID NO: 23736 - protein, 129 aa, Artificial Sequence
  source: /note="Description of Artificial Sequence: Synthetic polypeptide"
  MOD_RES (2)..(2): Any amino acid
MXEVQLVESGPVLVKPTETLTVTCTVSGFSVDNDRMGVSWIRQPPGKALEWLAHIFSNDEKSYSTSLRSRLTISKDTSKRQVVLSMTDMDPVDTATYYCARAPSEYAAMDVWGQGTMVTVSSYQGPSRE

SEQ ID NO: 23737 - protein, 126 aa, Artificial Sequence
  source: /note="Description of Artificial Sequence: Synthetic polypeptide"
EVQLQESGPGLVKPSQTLSLTCNVSGGSITGDYKWSWIRQPPGKGLEWIGHIHSTGTTYYNPSLRSRITISMDTSKNNLSLRLTSVTAADTAVYYCASHTLTSGHYPRDFDFWGQGTLVTVSSAGT

SEQ ID NO: 23738 - protein, 119 aa, Artificial Sequence; identical to SEQ ID NO: 23556
  source: /note="Description of Artificial Sequence: Synthetic polypeptide"

SEQ ID NO: 23739 - protein, 122 aa, Artificial Sequence
  source: /note="Description of Artificial Sequence: Synthetic polypeptide"
EVQLVQSGAEWKKPGSSVRVSCKASGPIFSSRSISWVRQAPGQGLEWMGGVIPIFGGPTVPQKFQGRLTMTADDSTSTAYMELNRLTSDDTAVYYCARTGYYSGSGTYAFDYWGQGTLVTVS

SEQ ID NO: 23740 - protein, 123 aa, Artificial Sequence
  source: /note="Description of Artificial Sequence: Synthetic polypeptide"
QVQLVQSGAEVKKPGSSVKVSCKASGGPFSMTAFTWLRQAPGQGLEWMGGISPIFRTPKYAQKFQGRVTITADESTNTANMELTSLKSEDTAVYYCARTLSSYQPNNDAFAIWGQGTMVTVSS

SEQ ID NO: 23741 - protein, 121 aa, Artificial Sequence
  source: /note="Description of Artificial Sequence: Synthetic polypeptide"
QVQLVQSGAEVKKPGSSVKVSCKAPGGIFNTNAFSWVRQAPGQGLEWVGGVIPLFRTASYAQNVQGRVTITADESTNTAYMELTSLRSADTAVYYCARSSGYHFRSHFDSWGLGTLVTVSS

SEQ ID NO: 23742 - protein, 120 aa, Artificial Sequence
  source: /note="Description of Artificial Sequence: Synthetic polypeptide"
QVQLVQSGAEVKKPGSSVKVSCKASGGTFSAYAFTWVRQAPGQGLEWMGGITGMFGTANYAQKFQGRVTITADELTSTAYMELSSLTSEDTALYYCARGLYYYESSLDYWGQGTLVTVSS

SEQ ID NO: 23743 - protein, 123 aa, Artificial Sequence; identical to SEQ ID NO: 23740
  source: /note="Description of Artificial Sequence: Synthetic polypeptide"

SEQ ID NO: 23744 - protein, 124 aa, Artificial Sequence
  source: /note="Description of Artificial Sequence: Synthetic polypeptide"
QVQLVQSGAEVKKPGSSVKVSCTSSEVTFSSFAISWVRQAPGQGLEWLGGISPMFGTPNYAQKFQGRVTITADQSTRTAYMDLRSLRSEDTAVYYCARSPSYICSGGTCVFDHWGQGTLVTVSS

SEQ ID NO: 23745 - protein, 108 aa, Artificial Sequence
  source: /note="Description of Artificial Sequence: Synthetic polypeptide"
KKPGSSVKVSCTSSEVTFSSFAISWVRQAPGQGLEWLGGISPMFGTPNYAQKFQGRVTITADQSTRTAYMDLRSLRSEDTAVYYCARSPSYICSGGTCVFDHWGQGTL

SEQ ID NO: 23746 - protein, 122 aa, Artificial Sequence
  source: /note="Description of Artificial Sequence: Synthetic polypeptide"
QVQLVQSGAEVKKPGASVKVSCKTSGVTFSSYAISWVRQAPGQGLEWMGGIIGVFGVPKYAQNFQGRVTITADKPTSTVYMELNSLRAEDTAVYYCAREPGYYVGKNGFDVWGQGTMVTVSS

SEQ ID NO: 23747 - protein, 126 aa, Artificial Sequence
  source: /note="Description of Artificial Sequence: Synthetic polypeptide"
QVQLVQSGAEVRKPGASVKVSCKASGYTFTGYYIHWVRQAPGQGLEWMGWINPMTGGTNYAQKFQVWVTMTRDTSINTAYMEVSRLTSDDTAVYYCARGASVLRYFDWQPEALDIWGLGTTVTVSS

SEQ ID NO: 23748 - protein, 108 aa, Artificial Sequence
  source: /note="Description of Artificial Sequence: Synthetic polypeptide"
QSVLTQPPSVSVAPGQTARITCGGNDIGRKSVHWNQQKPGQAPVLVVCYDSDRPSGIPERFSGSNSGNTATLTISRVEAGDEADYYCQVWDSSSDHVIFGGGTKLTVL

SEQ ID NO: 23749 - protein, 108 aa, Artificial Sequence
  source: /note="Description of Artificial Sequence: Synthetic polypeptide"
QSALTQPPSVSVAPGQTARITCGGNDIGRKSVHWNQQKPGQAPVLVVCYDSDRPSGIPERFSGSNSGNTATLTISRVEAGDEADYYCQVWDSSSDHVVFGGGTKLTVL

SEQ ID NO: 23750 - protein, 108 aa, Artificial Sequence
  source: /note="Description of Artificial Sequence: Synthetic polypeptide"
QSALTQPPSVSVAPGQTATITCGGNNIGRKRVDWFQQKPGQAPVLVVYEDSDRPSGIPERFSDSNSGTTATLTISRVEAGDEADYYCQVWDSDSDHVVFGGGTKLTVL

SEQ ID NO: 23751 - protein, 108 aa, Artificial Sequence
  source: /note="Description of Artificial Sequence: Synthetic polypeptide"
QSVLTQPPSVSVAPGQTARITCGGNNIGSKSVHWYQQKPGQAPVLVVYDDSDRPSGIPERFSGSNSGNTATLTISRVEAGDEADYYCQVWDSSSDHVVFGGGTKLTVL

SEQ ID NO: 23752 - protein, 128 aa, Artificial Sequence
  source: /note="Description of Artificial Sequence: Synthetic polypeptide"
QIQLQESGPGLVKPSQTLSLTCAISGDSVSSNNAVWNWIRQSPSRGLEWLGRTYYRSKWYNDYAESVKSRITVNPDTSKNQFSLHLKSVTPEDTAVFYCVRSGHITVFGVNVDAFDMWGQGTMVTVSS

SEQ ID NO: 23753 - protein, 128 aa, Artificial Sequence
  source: /note="Description of Artificial Sequence: Synthetic polypeptide"
QVQLQESGPGLVKPSQTLSLTCAISGDSVSSNNAVWNWIRQSPSRGLEWLGRTYYRSKWYNDYAESVKSRITVNPDTSKNQFSLHLKSVTPEDTAVFYCVRSGHITVFGVNVDAFDMWGQGTMVTVSS

SEQ ID NO: 23754 - protein, 128 aa, Artificial Sequence; identical to SEQ ID NO: 23753
  source: /note="Description of Artificial Sequence: Synthetic polypeptide"

SEQ ID NO: 23755 - protein, 128 aa, Artificial Sequence
  source: /note="Description of Artificial Sequence: Synthetic polypeptide"
QVQLQQSGPGLVKPSQTLSLTCAISGDRVSSNSAVWNWIRQSPSRGLEWLGRTYYRSKWYYDYAESVKSRIVIDPDTSKNQVSLQLNSVTPEDSAIYYCARGGHITVFGLNIDAYDIWGQGAKVTVSS

SEQ ID NO: 23756 - protein, 128 aa, Artificial Sequence
  source: /note="Description of Artificial Sequence: Synthetic polypeptide"
QVQLQQSGPGLVKPSQTLSLTCAISGDRVSSNSAVWNWIRQSPSRGLEWLGRTYYRSKWYYDYAESVKSRIVIDPDTSKNQVSLQLNSVTPEDSAIYYCARGGHITVFGLNIDAYDIWGQGAMVTVSS

SEQ ID NO: 23757 - protein, 128 aa, Artificial Sequence
  source: /note="Description of Artificial Sequence: Synthetic polypeptide"
QVQLQQSGPGLVKPSQTLSLTCAISGDRVSSNSAVWNWIRQSPSRGLEWLGRTYYRSKWYYDYAESVKSRIVIDPDTSKNQVSLQLNSVTPEDSAIYYCARGGHITEFGLNIDAYDIWGQGAMVTVSS

SEQ ID NO: 23758 - protein, 128 aa, Artificial Sequence
  source: /note="Description of Artificial Sequence: Synthetic polypeptide"
QVQLQQSGPGLVKPSQTLSLTCVISGDTVSSNRATWNWMRQSPLRGLEWLGRTYYRSKWYNDYAVSVKSRVVINPDTSKNQVSLQLNTVTPDDSGVYFCARGGHITVFGVNIDAFDIWGLGTKVTVSS

SEQ ID NO: 23759 - protein, 128 aa, Artificial Sequence; identical to SEQ ID NO: 23758
  source: /note="Description of Artificial Sequence: Synthetic polypeptide"

SEQ ID NO: 23760 - protein, 128 aa, Artificial Sequence
  source: /note="Description of Artificial Sequence: Synthetic polypeptide"
QVELQQSGPGLVKPSQTLSLTCAISGDSVSSNSATWNWIRQSPSRGLEWLGRTYYRSKWYNDYADFLKRRITINPDTSNNEVSLRLTSVTPDDTALYYCARGGHITVFGVNIDAFDVWGQGTMATVSS

SEQ ID NO: 23761 - protein, 128 aa, Artificial Sequence
  source: /note="Description of Artificial Sequence: Synthetic polypeptide"
QVQLQQSGPGLVKPSQTLSLTCAISGDSVSSNSATWNWIRQSPSRGLEWLGRTYYRSKWYNDYADFLKRRITINPDTSNNEVSLRLTSVTPDDTALYYCARGGHITVFGVNIDAFDVWGQGTMVTVSS

SEQ ID NO: 23762 - protein, 128 aa, Artificial Sequence
  source: /note="Description of Artificial Sequence: Synthetic polypeptide"
QVQLQQSGPGLVKPSQTLSLTCAISGDSVSSYNAVWNWIRQSPSRGLEWLGRTYYRSGWYNDYAESVKSRITINPDTSKNQFSLQLNSVTPEDTAVYYCARSGHITVFGVNVDAFDMWGQGTMVTVSS

SEQ ID NO: 23763 - protein, 128 aa, Artificial Sequence; identical to SEQ ID NO: 23762
  source: /note="Description of Artificial Sequence: Synthetic polypeptide"

SEQ ID NO: 23764 - protein, 128 aa, Artificial Sequence; identical to SEQ ID NO: 23762
  source: /note="Description of Artificial Sequence: Synthetic polypeptide"

SEQ ID NO: 23765 - protein, 128 aa, Artificial Sequence
  source: /note="Description of Artificial Sequence: Synthetic polypeptide"
QVQLQQSGPGLVKPSQTLSLTCAISGDSVSSNNAVWNWIRQSPSRGLEWLGRTYYRSKWYNDYAESVKSRITINPDTSKNQFSLQLNSVTPEDTAVYYCARSGHITVFGVNVDAFDMWGQGTTVTVSS

SEQ ID NO: 23766 - protein, 128 aa, Artificial Sequence; identical to SEQ ID NO: 23765
  source: /note="Description of Artificial Sequence: Synthetic polypeptide"

SEQ ID NO: 23767 - protein, 128 aa, Artificial Sequence; identical to SEQ ID NO: 23765
  source: /note="Description of Artificial Sequence: Synthetic polypeptide"

SEQ ID NO: 23768 - protein, 125 aa, Artificial Sequence
  source: /note="Description of Artificial Sequence: Synthetic polypeptide"
EVQLVESGGGLVKPGGSLRLSCSASGFTFNIYAMNWVRQVPGKGLDWVSSISSRGDYIYYAESVEGRFTISRDNAKNSLYLEMNSLRAEDTAVYYCARAGLGTVDLRWGGAFDHWGKGILVTVSS

SEQ ID NO: 23769 - protein, 98 aa, Artificial Sequence
  source: /note="Description of Artificial Sequence: Synthetic polypeptide"
QVQLVQSGPEVKKPGASIKVSCRASGYTFSNYGITWVRQAPGQGLEWMGWISAYNGHTNSAQKFQGRVTMTTDTSTSTAYMEVRSLRSDDTAVYYCAR

SEQ ID NO: 23770 - protein, 122 aa, Artificial Sequence
  source: /note="Description of Artificial Sequence: Synthetic polypeptide"
QVQLVQSGPEVKKPGASIKVSCRASGYTFSNYGITWVRQAPGQGLEWMGWISAYNGHTNSAQKFQGRVTMTTDTSTSTAYMEVRSLRSDDTAVYYCARDRRDLLTGSLGDYWGQGTLVTVSS

SEQ ID NO: 23771 - protein, 97 aa, Artificial Sequence
  source: /note="Description of Artificial Sequence: Synthetic polypeptide"
QVQLVQSGAEVKRPGSSVTVSCKASGGSFTSFVISWVRQAPGQGLEWMGGVIPIFATPKYAQKFQGRLTITADKSTNTAYMELTSLRSEDTAMYYCA

SEQ ID NO: 23772 - protein, 125 aa, Artificial Sequence
  source: /note="Description of Artificial Sequence: Synthetic polypeptide"
QVQLVQSGAEVKRPGSSVTVSCKASGGSFTSFVISWVRQAPGQGLEWMGGVIPIFATPKYAQKFQGRLTITADKSTNTAYMELTSLRSEDTAMYYCASPDLTMVFVPHTGPLDFWGQGTLVTVSS

SEQ ID NO: 23773 - protein, 99 aa, Artificial Sequence
  source: /note="Description of Artificial Sequence: Synthetic polypeptide"
RLQLQESGPGLVKPSETLSLTCTVSGGSITSNTYYWGWIRQPPGKGLESIGSISFSGRTYYSPSLKSRVTMSVDTSKNQFSLKLSSVTAADTAFYYCAR

SEQ ID NO: 23774 - protein, 127 aa, Artificial Sequence
  source: /note="Description of Artificial Sequence: Synthetic polypeptide"
RLQLQESGPGLVKPSETLSLTCTVSGGSITSNTYYWGWIRQPPGKGLESIGSISFSGRTYYSPSLKSRVTMSVDTSKNQFSLKLSSVTAADTAFYYCARQLTGMVYAILLPSYFDFWGQGTLVTVSS

SEQ ID NO: 23775 - protein, 97 aa, Artificial Sequence
  source: /note="Description of Artificial Sequence: Synthetic polypeptide"
QVQLVQSGAEVKKPGSSVKVSCRASGGIFRSNAISWVRQAPGQGLEWMGEIIAVFGTANYAQKFQGRVTITADESTSTAYMELSSLRSEDTAVYYCA

SEQ ID NO: 23776 - protein, 132 aa, Artificial Sequence
  source: /note="Description of Artificial Sequence: Synthetic polypeptide"
QVQLQQSGAEVKKPGSSVKVSCKASGGTFNKYAINWVRQAPGKGLEWMGGIIPFFGTTNYAQKFQGRVTITADETTRTAYMELSSLRSEDTAVYYCARPSINESPYCLDCAAKDYYYGLDVWGQGTTVTVSS

SEQ ID NO: 23777 - protein, 132 aa, Artificial Sequence
  source: /note="Description of Artificial Sequence: Synthetic polypeptide"
QVQLVQSGAEVKKPGSSVTVSCKASGGSFSKYAINWVRQAPGQGLEWMGGIIPFFGTTNYAQKFQGRVTITADASTSTAYMALSSLSSEDTAVYYCARPSINESPYCLDCAAKDYYYGLDVWGQGTTVTVSS

SEQ ID NO: 23778 - protein, 132 aa, Artificial Sequence
  source: /note="Description of Artificial Sequence: Synthetic polypeptide"
QVQLVQSGAEVKKPGSSVKVSCKASGGTFSKYAINWVRQAPGQGLEWMGGIIPFFGTTNYAQKFQGRLTITADASTRTAYMELSSLRSEDTAVYYCARPSITETQYCLDCAAKDYYYGLDVWGQGTTVTVSS

SEQ ID NO: 23779 - protein, 132 aa, Artificial Sequence
  source: /note="Description of Artificial Sequence: Synthetic polypeptide"
QVQLVQSGAEVKKPGSSVKVSCKASGGTFSKYAINWVRQAPAQGLEWMGGIIPFFGTTNYAQKFQGRLTITADASTRTAYMELSSLRSEDTAVYYCARPSITESQYCLDCAAKDYYYGLDVWGQGTTVTVSS

SEQ ID NO: 23780 - protein, 132 aa, Artificial Sequence
  source: /note="Description of Artificial Sequence: Synthetic polypeptide"
EVQLVESGAEVKKPGSSVKVSCKASGGTFSKYAINWVRQAPGQGLEWMGGIIPFFGTTNYAQKFQGRLTITADASTRTAYMELSSLRSEDTAVYYCARPSITESQYCLDCAAKDYYYGLDVWGQGTMVTVSS

SEQ ID NO: 23781 - protein, 125 aa, Artificial Sequence
  source: /note="Description of Artificial Sequence: Synthetic polypeptide"
QVQLVESGGGVVQPGRSLRLSCAASGFAFHNRAMHWVRQAPGKGLEWVALIYFDGSKQYYADSVKGRFTISRDNSKNTVFLQMNSLRPEDTAVYYCAVPGPIFGIFPPWSYFDHWGQGILVTVSS

SEQ ID NO: 23782 - protein, 125 aa, Artificial Sequence
  source: /note="Description of Artificial Sequence: Synthetic polypeptide"
EVQLVESGGGVVQPGRSLRLSCAASGFAFHNRAMHWVRQAPGKGLEWVALIYFDGSKQYYADSVKGRFTISRDNSKNTVFLQMNSLRPEDTAVYYCAVPGPIFGIFPPWSYFDHWGQGILVTVSS

SEQ ID NO: 23783 - protein, 125 aa, Artificial Sequence
  source: /note="Description of Artificial Sequence: Synthetic polypeptide"
EVQLVQSGGGVVQPGKSLRLSCAASGLTFSSYAVHWVRQAPGKGLEWVTLISYDGANQYYADSVKGRFTISRDNSKNTVYLQMNSLRPEDTAVYYCAVPGPVFGIFPPWSYFDNWGQGILVTVSS

SEQ ID NO: 23784 - protein, 125 aa, Artificial Sequence
  source: /note="Description of Artificial Sequence: Synthetic polypeptide"
QVQLVESGGGVVQPGKSLRLSCAASGLTFSSYAVHWVRQAPGKGLEWVTLISYDGANQYYADSVKGRFTISRDNSKNTVYLQMNSLRPEDTAVYYCAVPGPVFGIFPPWSYFDNWGQGILVTVSS

SEQ ID NO: 23785 - protein, 125 aa, Artificial Sequence
  source: /note="Description of Artificial Sequence: Synthetic polypeptide"
QVQLVESGGGVVQPGKSPRLSCAASGPTFSSYAVHWVRQAPGKGLEWVTLISYDGANQYYADSVKGRFTISRDNSKNTVYLQMNSLRPEDTAVYYCAVPGPVFGIFPPWSYFDNWGQGILVTVSS

SEQ ID NO: 23786 - protein, 125 aa, Artificial Sequence
  source: /note="Description of Artificial Sequence: Synthetic polypeptide"
EVQLVESGGGVVQPGKSLRLSCAASGLTFSSYAVHWVRQAPGKGLEWVTLISYDGANQYYADSVKGRFTISRDNSKNTVYLQMNSLRPEDTAVYYCAVPGPVFGIFPPWSYFDNWGQGILVTVSS

SEQ ID NO: 23787 - protein, 125 aa, Artificial Sequence
  source: /note="Description of Artificial Sequence: Synthetic polypeptide"
QVQLVQSGAELKRPGASVKVSCKTSGYSFNNYGINWVRQAPGQGLEWMGWISAYTGNTHYAKNFEGRVTLTTDTSTSTAYMEVRSLRSDDSAVYFCARAMIQGVVTLYLRPGDYWGQGTLVTVSS

SEQ ID NO: 23788 - protein, 125 aa, Artificial Sequence
  source: /note="Description of Artificial Sequence: Synthetic polypeptide"
QVQLVQSGAEVKQPGASVKVSCKASGYTFNAYYIHWVRQAPGQGLEWMGWINPNFGGTHYARKFQGRVTMTRDASINTAYMELDRLISDDTAVYYCVRWRAAAVIMDQFYKMDVWGQGTLVTVSS

SEQ ID NO: 23789 - protein, 120 aa, Artificial Sequence
  source: /note="Description of Artificial Sequence: Synthetic polypeptide"
QVQLQESGPGLVKPSETLSLTCTVSGGLIGTGSYYWGWIRQTPGKGMEWIGSISYSGSTYYHPSLKSRVTISDDTSKNQLFLKLRSVTAADTAQYYCARYNWGIRYFDFWGRGTLVTVSS

SEQ ID NO: 23790 - protein, 125 aa, Artificial Sequence; identical to SEQ ID NO: 23786
  source: /note="Description of Artificial Sequence: Synthetic polypeptide"

SEQ ID NO: 23791 - protein, 129 aa, Artificial Sequence; identical to SEQ ID NO: 23711
  source: /note="Description of Artificial Sequence: Synthetic polypeptide"

SEQ ID NO: 23792 - protein, 129 aa, Artificial Sequence; identical to SEQ ID NO: 23710
  source: /note="Description of Artificial Sequence: Synthetic polypeptide"

SEQ ID NO: 23793 - protein, 129 aa, Artificial Sequence; identical to SEQ ID NO: 23709
  source: /note="Description of Artificial Sequence: Synthetic polypeptide"

SEQ ID NO: 23794 - protein, 120 aa, Artificial Sequence
  source: /note="Description of Artificial Sequence: Synthetic polypeptide"
QVQLVQPGAEVKKPGSSVKVSCKASGGIFSPYAISWVRQAPGQGLEWMGGIIAIFGTTNYAQKFQGRVTITADKSTTTAYLELNSLRFEDTAVYYCARGGRYYVDYFDYWGQGTLVSVSS

SEQ ID NO: 23795 - protein, 122 aa, Artificial Sequence
  source: /note="Description of Artificial Sequence: Synthetic polypeptide"
QVHLVQSGAEVKKPGSSVRLSCSASGGPFSGFAISWLRQAPGQGLEWLGGISAVFGTATYAQKFQGRVTITADQFTSTSHMDLSRLTYDDTAVYYCARSGGYLPQNNWIDPWGQGTLVIVSS

SEQ ID NO: 23796 - protein, 127 aa, Artificial Sequence
  source: /note="Description of Artificial Sequence: Synthetic polypeptide"
EVQLLESGGGLVHPGGSLRLSCAASGFTFSNYAMSWVRQAPGKGLEWVSSINSGGGATYYADSVKGRFTISRDNSKNTLSLQMNSLRAEDTAVYYCAKEGGNTIFGLVTMAYYFDSWGQGTLVTVSS

SEQ ID NO: 23797 - protein, 127 aa, Artificial Sequence
  source: /note="Description of Artificial Sequence: Synthetic polypeptide"
QPQLQESGPGLVRPSETLSLTCTVSGDSVTRGGFYWGWIRQPPGKGLEWIGSIYYNYNIYHSPSLKSRVSLSVDTSKNQVSLKLASVTAADTAVYYCARHYPYYDLPTGFYSQFDFWGQGTPVTVSS

SEQ ID NO: 23798 - protein, 124 aa, Artificial Sequence
  source: /note="Description of Artificial Sequence: Synthetic polypeptide"
QVQLVQSGAEVKKPGSSVKVSCKASGGIFISQAISWVRQAPGQGLEWMGGIIPMFGATNYAQKFQGRVTITADKSTNTVYMELSSLTSEDTAVYYCARLGSGSYHNGPNWFDPWGQGTLVTVSS

SEQ ID NO: 23799 - protein, 129 aa, Artificial Sequence
  source: /note="Description of Artificial Sequence: Synthetic polypeptide"
QVQLVESGGGVVQPGRSLRLSCAVSGFTFSSYAMHWVRQAPGKGLEWVAVISYDGSNQYYADSVKGRFTISRDNSKNTLYLQMNSLRAEDTALYYCAKDPRLRHLLYFPFTSMIYFDYWGQGTLVTVSS

SEQ ID NO: 23800 - protein, 122 aa, Artificial Sequence
  source: /note="Description of Artificial Sequence: Synthetic polypeptide"
QGQLVQSGAEVKKSGSSVKVSCKTSGGTFNSHAISWVRQAPGQGLEWIGGIIPMFGTTNYAQKLKGRIAITADQLPTTAYLELSSLRSEDTAVYYCARGQRYYYDRDGMDVWGQGTMVTVSS

SEQ ID NO: 23801 - protein, 125 aa, Artificial Sequence
  source: /note="Description of Artificial Sequence: Synthetic polypeptide"
QVQLVQSGAEVKKPGSSVKVSCKASGVTSSNYPITWVRQAPGQGLEWMGGVLPLFGVTNYAQKFQGRVTISADKSTNTAYMELSSLRSEDTAVYYCARGKRPGYCSGGVCSSDYWGQGTLVTVSS

SEQ ID NO: 23802 - protein, 268 aa, Artificial Sequence; identical to SEQ ID NO: 23558
  source: /note="Description of Artificial Sequence: Synthetic polypeptide"

SEQ ID NO: 23803 - protein, 257 aa, Artificial Sequence; identical to SEQ ID NO: 23559
  source: /note="Description of Artificial Sequence: Synthetic polypeptide"

SEQ ID NO: 23804 - protein, 247 aa, Artificial Sequence; identical to SEQ ID NO: 23560
  source: /note="Description of Artificial Sequence: Synthetic polypeptide"

SEQ ID NO: 23805 - protein, 169 aa, Artificial Sequence
  source: /note="Description of Artificial Sequence: Synthetic polypeptide"
EENLLQSGGGLVQPGGSLRLSCAGSGFTFSTYAMTWVRQAPGQGLEWVSSISGSGEISYYADSVGLFTISRDNSKDTVFLQMTSLRAEDTAVYYCAKSDVWEGYRPSKDALHMWGQGTMVTVSSASTKGPSVFPLAPSSKSTSGGTAALGCLVKDYFPEPVTVSWNSGA

SEQ ID NO: 23806 - protein, 177 aa, Artificial Sequence
  source: /note="Description of Artificial Sequence: Synthetic polypeptide"
QVQLVQSGSELKKPGASVKVSCKASGYTFTSYSIYWVRQAPGQGLEWMGWINTNTGNPSYAQGFTGRFVFSFDTSVSTAYLEISSLKAEDTAVYYCAREGDYDILTGYYYYFDYWGQGTLVTVSSASTKGPSVFPLAPSSKSTSGGTAALGCLVKDYFPEPVTVSWNSGALTSGVHT

SEQ ID NO: 23807 - protein, 173 aa, Artificial Sequence
  source: /note="Description of Artificial Sequence: Synthetic polypeptide"
QVQLQESGPGLVKPLQTLSLTCVVSGDSISRGGYYWSWVRQPPERGLEWIGDIYHSGSTNYNPALKSRTTISVETSKNQFSLQLNSVTAADTAVYYCAREPPPDYSDYKVGKGYFDYWGQGALVTVSSASTKGPSVFPLAPSSKSTSGGTAALGCLVKDYFPEPVTVSWNSGA

SEQ ID NO: 23808 - protein, 175 aa, Artificial Sequence
  source: /note="Description of Artificial Sequence: Synthetic polypeptide"
QVKLVQSGGGAVQPGRSLRLSCEASGFDFTVYDIHWVRQAPGKGLEWVASIWHNGGKAYYADSVKGRFTVSRDNPQKTVYLQMSGLRPEDTATYYCAREFPFMGIYDYGMDAWGQGTTVTVASASTKGPSVFPLAPSSKSTSGGTAALGCLVKDYFPEPVTVSWNSGALTSGVHT

SEQ ID NO: 23809 - protein, 147 aa, Artificial Sequence
  source: /note="Description of Artificial Sequence: Synthetic polypeptide"
MKHLWFFLLLVAAPRWVLSQVQLVESGPGLVKPSETLSLTCTVSSGSISSYYWSWIRQPPGKGLEWIGYVYNSGSTRYNPSLKSRLTMSVDASRKQVSLKLSSVSAADTAVYYCARAPDDYYDSVGYYYGCPYFDSWGQGTLVTVSS

SEQ ID NO: 23810 - protein, 141 aa, Artificial Sequence
  source: /note="Description of Artificial Sequence: Synthetic polypeptide"
MEFGLSWVLLVALLRGVQCQVQLVESGGDVVQPGRSLRLSCAASGFTFNNYGMHWVRQAPGKGLEWVAVVWYDGLIKYYADSVKGRFTISRDNSKNTLYLQMNTLRAEDMGVYYCARDLQPPHSPYGMDVWGQGTTVTVSS

SEQ ID NO: 23811 - protein, 152 aa, Artificial Sequence
  source: /note="Description of Artificial Sequence: Synthetic polypeptide"
MEFGLSWLFLVAILKGVQCEVQLLESGGGLVQPGGSLRLSCAASGFTFSNYAMSWVRQAPGKGLEWVSAISGGGDWTYYADSVKGRFSISSDNSKNTLYLQMNSLRAEDTAVYYCAKDVTYLYDSSGYYYGGADRDYYFDYWGQGTLVTVSS

SEQ ID NO: 23812 - protein, 117 aa, Artificial Sequence
  source: /note="Description of Artificial Sequence: Synthetic polypeptide"
LESGGGLVQPGGSLRLSCAASGITFSSYAMSWVRQAPGKGLEWVSTVNSGGGSTYYGDSVRGRFTISRDNSKSTLYLQLNSLRAEDTAIYYCAKDKGRPIFGLVTPSYYMDVWGNGT

SEQ ID NO: 23813 - protein, 122 aa, Artificial Sequence; identical to SEQ ID NO: 23667
  source: /note="Description of Artificial Sequence: Synthetic polypeptide"

SEQ ID NO: 23814 - protein, 127 aa, Artificial Sequence
  source: /note="Description of Artificial Sequence: Synthetic polypeptide"
QVQLQQWGAGLLKPSETLSLTCTVSGGSLTDYSWNWIRQPPGKGLEWIGDTLHNGYTNYNPSLRGRVSISIDTSKNQVSLRLTSVTAADTALYYCARGSGGYGGFDYFGKLRTWDFWGQGTLVTVSS

SEQ ID NO: 23815 - protein, 119 aa, Artificial Sequence
  source: /note="Description of Artificial Sequence: Synthetic polypeptide"
EVQLVESGGGLVQPGGSLRLSCGASGISVSTSAMSWVRQVPGKGLEWVSGISGSGATTYYAGSVKGRFTISRDKSKNTLHLQMSRLRAEDTAIYYCAKDTSLFEYDTSGFTAPGNAFDI

SEQ ID NO: 23816 - protein, 111 aa, Artificial Sequence
  source: /note="Description of Artificial Sequence: Synthetic polypeptide"
QVQLQQSGAEVKTPGASVKVSCKASGYTFTRFGVSWIRQAPGQGLEWIGWISAYNGDTYYAQKFQARVTMTTDTSTTTAYMEMRSLRSDDTAVYYCAREPPLFYSSWSLDN

SEQ ID NO: 23817 - protein, 110 aa, Artificial Sequence
  source: /note="Description of Artificial Sequence: Synthetic polypeptide"
EVQLVESGGGLIQPGGSLRLSCAASGFTFSAYAMNWVRQAPGKGLEWVSAIGGSGGSTYYADSVKGRFTISRDNSKKILYLQMNGLRAEDTAIYYCAKGRDWTGGYFFDS

SEQ ID NO: 23818 - protein, 109 aa, Artificial Sequence
  source: /note="Description of Artificial Sequence: Synthetic polypeptide"
VQLVDSGGGLVQPGGSLRLSCAASGFAFSGYAMSWVRQAPGKGLEWVSDIGGSGGGTYYADSVKGRFTISRDNAKNTLYLQMNSLRAEDTAVYYCAKSSSWDRAYFFDS

SEQ ID NO: 23819 - protein, 112 aa, Artificial Sequence
  source: /note="Description of Artificial Sequence: Synthetic polypeptide"
QLQLQESGPGLVKPSETLSLTCTVSGGSIGSYYWSWIRQPPGKGLEWIGYIYYRGGTSYNPSLKSRVTISVDTSKSQFTLKLNSVTAADTAVYYCARKDWGSAAGSVWYFDL

SEQ ID NO: 23820 - protein, 111 aa, Artificial Sequence
  source: /note="Description of Artificial Sequence: Synthetic polypeptide"
EVQLVESGGGVVQPGRSLRLSCAASGFAFSSYGMHWVRQAPGKGLEWVTFIWYDGSNKHYADSMKGRFTISRDNSKNTLYLQMSSLRAEDTAVYYCARDGGYSTWEWYFDL

SEQ ID NO: 23821 - protein, 111 aa, Artificial Sequence
  source: /note="Description of Artificial Sequence: Synthetic polypeptide"
QVQLVQSGAEVKKPGASVKVSCQASGYTFTSFGLSWVRQAPGQGPEWMGWISAYNGEIKYAQKFQGRVSMTTDTSTRTAYMEVRSLRPDDTAVYYCAREPPLYFSSWSLDF

SEQ ID NO: 23822 - protein, 110 aa, Artificial Sequence
  source: /note="Description of Artificial Sequence: Synthetic polypeptide"
QVQLVQSGAEVKKPGASVKLSCKASGYTFTAYSMHWVRQAPGQSLEWLGWINTAIGNTQYSQKFQDRVTITRDTSARTSYMELSSLRSGDTAVYFCARGASWDARGWSGY

SEQ ID NO: 23823 - protein, 115 aa, Artificial Sequence
  source: /note="Description of Artificial Sequence: Synthetic polypeptide"
QVTLKESGPVLVKPKETLTLTCTVSGFSLSNTRMGVSWIRQPPGKALEWLAHIFSNDETSYRTSLKRRLTISQDISKSQVVLSMTNVDPADTATYFCARIGSGYESSAYSTWLDP

SEQ ID NO: 23824 - protein, 113 aa, Artificial Sequence
  source: /note="Description of Artificial Sequence: Synthetic polypeptide"
QVQLQQWGAGLLKPSETLSLTCAVYGGSFTDHYWSWIRQSPGKGLEWIGEVVHSGDTNYTPSLRNRVSISVDSSKNQFSLRLGSVTAADTAVYYCARGRNVAVVGAIQRHYDY

SEQ ID NO: 23825 - protein, 119 aa, Artificial Sequence
  source: /note="Description of Artificial Sequence: Synthetic polypeptide"
QVQLQESGPGLVKPSETLSLTCTVSGGSVSSGTYYWSWIRQPPGKGLEWIGDISYSGSTNYNPSLKSRVTISRDTSKNLVSLKLTSVTAADTAVHYCARAMAAYNYDRGGYNDYYYMDV

SEQ ID NO: 23826 - protein, 111 aa, Artificial Sequence
  source: /note="Description of Artificial Sequence: Synthetic polypeptide"
EVQLVESGGGVVQPGRSLRLSCAASGFSFTTYGMHWVRQAPGKGLEWVAFIWYDGSNKHYQDSVKGRFTISKDNSNNMLYLQMDSLRVADTAVYYCVRDGGYSTWEWYFDL

SEQ ID NO: 23827 - protein, 116 aa, Artificial Sequence
  source: /note="Description of Artificial Sequence: Synthetic polypeptide"
EVQLVESGGGLVQPGGSLRLSCAASGFTDSVIFMSWVRQAPGKGLECVSIIYIDDSTYYADSVKGRFTISRHNSMGTVFLEMNSLRPDDTAVYYCATESGDFGDQTGPYHYYAMDV

SEQ ID NO: 23828 - protein, 112 aa, Artificial Sequence
  source: /note="Description of Artificial Sequence: Synthetic polypeptide"
EVQLVETGGVVVQPGGSLRLSCAASGFTFEDYTMHWVRQVPGKGLEWVALISWDGGMSNYADSVKGRFTISRDNSKNSLYLQVSSLRSEDTALYYCAKDIRPRMPARHFMDV

SEQ ID NO: 23829 - protein, 451 aa, Artificial Sequence
  source: /note="Description of Artificial Sequence: Synthetic polypeptide"
EVQLVESGAEVKKPGSSVKVSCKASGGPFRSYAISWVRQAPGQGPEWMGGIIPIFGTTKYAPKFQGRVTITADDFAGTVYMELSSLRSEDTAMYYCAKHMGYQVRETMDVWGKGTTVTVSSASTKGPSVFPLAPSSKSTSGGTAALGCLVKDYFPEPVTVSWNSGALTSGVHTFPAVLQSSGLYSLSSVVTVPSSSLGTQTYICNVNHKPSNTKVDKRVEPKSCDKTHTCPPCPAPELLGGPSVFLFPPKPKDTLMISRTPEVTCVVVDVSHEDPEVKFNWYVDGVEVHNAKTKPREEQYNSTYRVVSVLTVLHQDWLNGKEYKCKVSNKALPAPIEKTISKAKGQPREPQVYTLPPSREEMTKNQVSLTCLVKGFYPSDIAVEWESNGQPENNYKTTPPVLDSDGSFFLYSKLTVDKSRWQQGNVFSCSVMHEALHNHYTQKSLSLSPGK

SEQ ID NO: 23830 - protein, 451 aa, Artificial Sequence
  source: /note="Description of Artificial Sequence: Synthetic polypeptide"
QVQLVQSGAEVKKPGSSVKVSCKASGGPFRSYAISWVRQAPGQGPEWMGGIIPIFGTTKYAPKFQGRVTITADDFAGTVYMELSSLRSEDTAMYYCAKHMGYQVRETMDVWGKGTTVTVSSASTKGPSVFPLAPSSKSTSGGTAALGCLVKDYFPEPVTVSWNSGALTSGVHTFPAVLQSSGLYSLSSVVTVPSSSLGTQTYICNVNHKPSNTKVDKRVEPKSCDKTHTCPPCPAPELLGGPSVFLFPPKPKDTLMISRTPEVTCVVVDVSHEDPEVKFNWYVDGVEVHNAKTKPREEQYNSTYRVVSVLTVLHQDWLNGKEYKCKVSNKALPAPIEKTISKAKGQPREPQVYTLPPSREEMTKNQVSLTCLVKGFYPSDIAVEWESNGQPENNYKTTPPVLDSDGSFFLYSKLTVDKSRWQQGNVFSCSVMHEALHNHYTQKSLSLSPGK

SEQ ID NO: 23831 - protein, 451 aa, Artificial Sequence; identical to SEQ ID NO: 23829
  source: /note="Description of Artificial Sequence: Synthetic polypeptide"

SEQ ID NO: 23832 - protein, 451 aa, Artificial Sequence; identical to SEQ ID NO: 23829
  source: /note="Description of Artificial Sequence: Synthetic polypeptide"

SEQ ID NO: 23833 - protein, 450 aa, Artificial Sequence
  source: /note="Description of Artificial Sequence: Synthetic polypeptide"
QVQLQQSGAEVKKPGSSVKVSCKVSGVIFSGSAISWVRQAPGQGLEWMGGISPLFGTTNYAQKFQGRVTITADQSTNTTYMEVNSLRYEDTAVYFCARGPKYYSEYMDVWGKGTTVTVSSASTKGPSVFPLAPSSKSTSGGTAALGCLVKDYFPEPVTVSWNSGALTSGVHTFPAVLQSSGLYSLSSVVTVPSSSLGTQTYICNVNHKPSNTKVDKRVEPKSCDKTHTCPPCPAPELLGGPSVFLFPPKPKDTLMISRTPEVTCVVVDVSHEDPEVKFNWYVDGVEVHNAKTKPREEQYNSTYRVVSVLTVLHQDWLNGKEYKCKVSNKALPAPIEKTISKAKGQPREPQVYTLPPSREEMTKNQVSLTCLVKGFYPSDIAVEWESNGQPENNYKTTPPVLDSDGSFFLYSKLTVDKSRWQQGNVFSCSVMHEALHNHYTQKSLSLSPGK

SEQ ID NO: 23834 - protein, 450 aa, Artificial Sequence
  source: /note="Description of Artificial Sequence: Synthetic polypeptide"
QVQLVQSGAEVKKPGSSVKVSCKASGGTFSSYAISWVRQAPGQGLEWMGGIMGMFGTTNYAQKFQGRVTITADEFTSAAYMELRSLRSEDTAVYYCARSSGYYPEYFQDWGQGTLVTVSSASTKGPSVFPLAPSSKSTSGGTAALGCLVKDYFPEPVTVSWNSGALTSGVHTFPAVLQSSGLYSLSSVVTVPSSSLGTQTYICNVNHKPSNTKVDKRVEPKSCDKTHTCPPCPAPELLGGPSVFLFPPKPKDTLMISRTPEVTCVVVDVSHEDPEVKFNWYVDGVEVHNAKTKPREEQYNSTYRVVSVLTVLHQDWLNGKEYKCKVSNKALPAPIEKTISKAKGQPREPQVYTLPPSREEMTKNQVSLTCLVKGFYPSDIAVEWESNGQPENNYKTTPPVLDSDGSFFLYSKLTVDKSRWQQGNVFSCSVMHEALHNHYTQKSLSLSPGK

SEQ ID NO: 23835 - protein, 452 aa, Artificial Sequence
  source: /note="Description of Artificial Sequence: Synthetic polypeptide"
QVQLVQSGGGLVKPGGSLRLSCAASGFTFSSYSMNWVRQAPGKGLEWVSSISSSSSYIYYVDSVKGRFTISRDNAKNSLYLQMNSLRAEDTAVYYCARGGGSYGAYEGFDYWGQGTLVTVSSASTKGPSVFPLAPSSKSTSGGTAALGCLVKDYFPEPVTVSWNSGALTSGVHTFPAVLQSSGLYSLSSVVTVPSSSLGTQTYICNVNHKPSNTKVDKRVEPKSCDKTHTCPPCPAPELLGGPSVFLFPPKPKDTLMISRTPEVTCVVVDVSHEDPEVKFNWYVDGVEVHNAKTKPREEQYNSTYRVVSVLTVLHQDWLNGKEYKCKVSNKALPAPIEKTISKAKGQPREPQVYTLPPSREEMTKNQVSLTCLVKGFYPSDIAVEWESNGQPENNYKTTPPVLDSDGSFFLYSKLTVDKSRWQQGNVFSCSVMHEALHNHYTQKSLSLSPGK

SEQ ID NO: 23836 - protein, 451 aa, Artificial Sequence; identical to SEQ ID NO: 23829
  source: /note="Description of Artificial Sequence: Synthetic polypeptide"

SEQ ID NO: 23837 - protein, 451 aa, Artificial Sequence; identical to SEQ ID NO: 23829
  source: /note="Description of Artificial Sequence: Synthetic polypeptide"

SEQ ID NO: 23838 - protein, 450 aa, Artificial Sequence
  source: /note="Description of Artificial Sequence: Synthetic polypeptide"
EVQLVESGAEVKKPGSSVKVSCKASGGTFSSYGISWVRQAPGQGLEWMGDIIGMFGSTNYAQNFQGRLTITADESTSTAYMELSSLRSEDTAVYYCARSSGYYPAYLPHWGQGTLVTVSSASTKGPSVFPLAPSSKSTSGGTAALGCLVKDYFPEPVTVSWNSGALTSGVHTFPAVLQSSGLYSLSSVVTVPSSSLGTQTYICNVNHKPSNTKVDKRVEPKSCDKTHTCPPCPAPELLGGPSVFLFPPKPKDTLMISRTPEVTCVVVDVSHEDPEVKFNWYVDGVEVHNAKTKPREEQYNSTYRVVSVLTVLHQDWLNGKEYKCKVSNKALPAPIEKTISKAKGQPREPQVYTLPPSREEMTKNQVSLTCLVKGFYPSDIAVEWESNGQPENNYKTTPPVLDSDGSFFLYSKLTVDKSRWQQGNVFSCSVMHEALHNHYTQKSLSLSPGK

SEQ ID NO: 23839 - protein, 451 aa, Artificial Sequence
  source: /note="Description of Artificial Sequence: Synthetic polypeptide"
EVQLVESGAEVKKPGSSVKVSCKASGGTFSFYSMSWVRQAPGQGLEWMGGIIPMFGTTNYAQKFQGRVTITAVESTSTAYMEVSSLRSEDTAVYYCARGDKGIYYYYMDVWGKGTTVTVSSASTKGPSVFPLAPSSKSTSGGTAALGCLVKDYFPEPVTVSWNSGALTSGVHTFPAVLQSSGLYSLSSVVTVPSSSLGTQTYICNVNHKPSNTKVDKRVEPKSCDKTHTCPPCPAPELLGGPSVFLFPPKPKDTLMISRTPEVTCVVVDVSHEDPEVKFNWYVDGVEVHNAKTKPREEQYNSTYRVVSVLTVLHQDWLNGKEYKCKVSNKALPAPIEKTISKAKGQPREPQVYTLPPSREEMTKNQVSLTCLVKGFYPSDIAVEWESNGQPENNYKTTPPVLDSDGSFFLYSKLTVDKSRWQQGNVFSCSVMHEALHNHYTQKSLSLSPGK

SEQ ID NO: 23840 - protein, 450 aa, Artificial Sequence
  source: /note="Description of Artificial Sequence: Synthetic polypeptide"
EVQLVESGAEVKKPGSSVKVSCKASGGTFSSYAISWVRQAPGQGLEWMGGIIGMFGTANYAQKFQGRVTITADEFTSTAYMELSSLRSEDTAVYYCARGNYYYESSLDYWGQGTLVTVSSASTKGPSVFPLAPSSKSTSGGTAALGCLVKDYFPEPVTVSWNSGALTSGVHTFPAVLQSSGLYSLSSVVTVPSSSLGTQTYICNVNHKPSNTKVDKRVEPKSCDKTHTCPPCPAPELLGGPSVFLFPPKPKDTLMISRTPEVTCVVVDVSHEDPEVKFNWYVDGVEVHNAKTKPREEQYNSTYRVVSVLTVLHQDWLNGKEYKCKVSNKALPAPIEKTISKAKGQPREPQVYTLPPSREEMTKNQVSLTCLVKGFYPSDIAVEWESNGQPENNYKTTPPVLDSDGSFFLYSKLTVDKSRWQQGNVFSCSVMHEALHNHYTQKSLSLSPGK

SEQ ID NO: 23841 - protein, 453 aa, Artificial Sequence
  source: /note="Description of Artificial Sequence: Synthetic polypeptide"
QVQLVQSGAEVKKPGSSVRVSCKASGSIFRNYAMSWVRQAPGQGLEWMGGIIAIFGTPKYAQKFQGRVTITADESTSTVYMELSGLRSEDTAMYYCARIPHYNFGSGSYFDYWGQGTLVTVSSASTKGPSVFPLAPSSKSTSGGTAALGCLVKDYFPEPVTVSWNSGALTSGVHTFPAVLQSSGLYSLSSVVTVPSSSLGTQTYICNVNHKPSNTKVDKRVEPKSCDKTHTCPPCPAPELLGGPSVFLFPPKPKDTLMISRTPEVTCVVVDVSHEDPEVKFNWYVDGVEVHNAKTKPREEQYNSTYRVVSVLTVLHQDWLNGKEYKCKVSNKALPAPIEKTISKAKGQPREPQVYTLPPSREEMTKNQVSLTCLVKGFYPSDIAVEWESNGQPENNYKTTPPVLDSDGSFFLYSKLTVDKSRWQQGNVFSCSVMHEALHNHYTQKSLSLSPGK

SEQ ID NO: 23842 - protein, 445 aa, Artificial Sequence
  source: /note="Description of Artificial Sequence: Synthetic polypeptide"
EVQLVQSGAEVKKPGASVKVSCKASGYTFTGYYVYWVRQAPGQGLEWMGWISAYNGNTNYAQKFQGRVTITADKSTSTAYMELSSLRSEDTAVYYCARSRSLDVWGQGTTVTVSSASTKGPSVFPLAPSSKSTSGGTAALGCLVKDYFPEPVTVSWNSGALTSGVHTFPAVLQSSGLYSLSSVVTVPSSSLGTQTYICNVNHKPSNTKVDKRVEPKSCDKTHTCPPCPAPELLGGPSVFLFPPKPKDTLMISRTPEVTCVVVDVSHEDPEVKFNWYVDGVEVHNAKTKPREEQYNSTYRVVSVLTVLHQDWLNGKEYKCKVSNKALPAPIEKTISKAKGQPREPQVYTLPPSREEMTKNQVSLTCLVKGFYPSDIAVEWESNGQPENNYKTTPPVLDSDGSFFLYSKLTVDKSRWQQGNVFSCSVMHEALHNHYTQKSLSLSPGK

SEQ ID NO: 23843 - protein, 450 aa, Artificial Sequence
  source: /note="Description of Artificial Sequence: Synthetic polypeptide"
QMQLVQSGAEVKKPGSSVKVSCKASGGTFSSYAITWVRQAPGQGLEWMGGIIGMFGSTNYAQNFQGRVTITADESTSTAYMELSSLRSEDTAVYYCARSTGYYPAYLHHWGQGTLVTVSSASTKGPSVFPLAPSSKSTSGGTAALGCLVKDYFPEPVTVSWNSGALTSGVHTFPAVLQSSGLYSLSSVVTVPSSSLGTQTYICNVNHKPSNTKVDKRVEPKSCDKTHTCPPCPAPELLGGPSVFLFPPKPKDTLMISRTPEVTCVVVDVSHEDPEVKFNWYVDGVEVHNAKTKPREEQYNSTYRVVSVLTVLHQDWLNGKEYKCKVSNKALPAPIEKTISKAKGQPREPQVYTLPPSREEMTKNQVSLTCLVKGFYPSDIAVEWESNGQPENNYKTTPPVLDSDGSFFLYSKLTVDKSRWQQGNVFSCSVMHEALHNHYTQKSLSLSPGK

SEQ ID NO: 23844 - protein, 451 aa, Artificial Sequence
  source: /note="Description of Artificial Sequence: Synthetic polypeptide"
EVQLVETGAEVKKPGASVKVSCKASGYTFTSYYMHWVRQAPGQGLEWMGWINPNSGGTNYAQKFQGRVTMTRDTSISTAYMELSRLRSDDTAVYYCAREGKWGPQAAFDIWGQGTMVTVSSASTKGPSVFPLAPSSKSTSGGTAALGCLVKDYFPEPVTVSWNSGALTSGVHTFPAVLQSSGLYSLSSVVTVPSSSLGTQTYICNVNHKPSNTKVDKRVEPKSCDKTHTCPPCPAPELLGGPSVFLFPPKPKDTLMISRTPEVTCVVVDVSHEDPEVKFNWYVDGVEVHNAKTKPREEQYNSTYRVVSVLTVLHQDWLNGKEYKCKVSNKALPAPIEKTISKAKGQPREPQVYTLPPSREEMTKNQVSLTCLVKGFYPSDIAVEWESNGQPENNYKTTPPVLDSDGSFFLYSKLTVDKSRWQQGNVFSCSVMHEALHNHYTQKSLSLSPGK

SEQ ID NO: 23845 - protein, 447 aa, Artificial Sequence
  source: /note="Description of Artificial Sequence: Synthetic polypeptide"
EVQLVESGGGLVQPGGSLRLSCAASGFTFSIYAMSWVRQAPGKGLEWVSAISSSGDSTYYADSVKGRFTISRDNARNTLYLQMNSLRAEDTAVYYCARAYGYTFDPWGQGTLVTVSSASTKGPSVFPLAPSSKSTSGGTAALGCLVKDYFPEPVTVSWNSGALTSGVHTFPAVLQSSGLYSLSSVVTVPSSSLGTQTYICNVNHKPSNTKVDKRVEPKSCDKTHTCPPCPAPELLGGPSVFLFPPKPKDTLMISRTPEVTCVVVDVSHEDPEVKFNWYVDGVEVHNAKTKPREEQYNSTYRVVSVLTVLHQDWLNGKEYKCKVSNKALPAPIEKTISKAKGQPREPQVYTLPPSREEMTKNQVSLTCLVKGFYPSDIAVEWESNGQPENNYKTTPPVLDSDGSFFLYSKLTVDKSRWQQGNVFSCSVMHEALHNHYTQKSLSLSPGK

SEQ ID NO: 23846 - protein, 451 aa, Artificial Sequence
  source: /note="Description of Artificial Sequence: Synthetic polypeptide"
EVQLVETGAEVKKPGSSVKVSCKASGGTFRTHAISWVRQAPGQGLEWMGGIIAIFGTANYAQKFQGRITITADESTSTAYMELSSLRSEDTAVYFCARGSGYHISTPFDNWGQGTLVTVSSASTKGPSVFPLAPSSKSTSGGTAALGCLVKDYFPEPVTVSWNSGALTSGVHTFPAVLQSSGLYSLSSVVTVPSSSLGTQTYICNVNHKPSNTKVDKRVEPKSCDKTHTCPPCPAPELLGGPSVFLFPPKPKDTLMISRTPEVTCVVVDVSHEDPEVKFNWYVDGVEVHNAKTKPREEQYNSTYRVVSVLTVLHQDWLNGKEYKCKVSNKALPAPIEKTISKAKGQPREPQVYTLPPSREEMTKNQVSLTCLVKGFYPSDIAVEWESNGQPENNYKTTPPVLDSDGSFFLYSKLTVDKSRWQQGNVFSCSVMHEALHNHYTQKSLSLSPGK

SEQ ID NO: 23847 - protein, 458 aa, Artificial Sequence
  source: /note="Description of Artificial Sequence: Synthetic polypeptide"
EVQLVESGAEVKKPGSSVKVSCKASGHIFSGYAISWVRQAPGQGLEWMGGIIPIFGTTNYAQKFQGRVTITADQSTSTAYMDLSNLRSEDTAVYYCARVKDGYCTLTSCPVGWYFDLWGRGTLVTVSSASTKGPSVFPLAPSSKSTSGGTAALGCLVKDYFPEPVTVSWNSGALTSGVHTFPAVLQSSGLYSLSSVVTVPSSSLGTQTYICNVNHKPSNTKVDKRVEPKSCDKTHTCPPCPAPELLGGPSVFLFPPKPKDTLMISRTPEVTCVVVDVSHEDPEVKFNWYVDGVEVHNAKTKPREEQYNSTYRVVSVLTVLHQDWLNGKEYKCKVSNKALPAPIEKTISKAKGQPREPQVYTLPPSREEMTKNQVSLTCLVKGFYPSDIAVEWESNGQPENNYKTTPPVLDSDGSFFLYSKLTVDKSRWQQGNVFSCSVMHEALHNHYTQKSLSLSPGK

SEQ ID NO: 23848 - protein, 451 aa, Artificial Sequence
  source: /note="Description of Artificial Sequence: Synthetic polypeptide"
EVQLVQSGAEVKKPGSSVKVSCKASGGIFRSNSISWVRQAPGQGLEWMGGIFALFGTTDYAQKFQGRVTITADESSTTVYLELSSLTSEDTAVYYCARGSGYTTRNYFDYWGQGTLVTVSSASTKGPSVFPLAPSSKSTSGGTAALGCLVKDYFPEPVTVSWNSGALTSGVHTFPAVLQSSGLYSLSSVVTVPSSSLGTQTYICNVNHKPSNTKVDKRVEPKSCDKTHTCPPCPAPELLGGPSVFLFPPKPKDTLMISRTPEVTCVVVDVSHEDPEVKFNWYVDGVEVHNAKTKPREEQYNSTYRVVSVLTVLHQDWLNGKEYKCKVSNKALPAPIEKTISKAKGQPREPQVYTLPPSREEMTKNQVSLTCLVKGFYPSDIAVEWESNGQPENNYKTTPPVLDSDGSFFLYSKLTVDKSRWQQGNVFSCSVMHEALHNHYTQKSLSLSPGK

SEQ ID NO: 23849 - protein, 450 aa, Artificial Sequence
  source: /note="Description of Artificial Sequence: Synthetic polypeptide"
QVQLVQSGAEVKKPGSSVKVSCKASGGPFRNFAINWVRQAPGQGLEWMGGIIAVFGTTKYAHKFQGRVTITADDSTNTAYMELGSLKSEDTAVYYCARGPHYYSSYMDVWGEGTTVTVSSASTKGPSVFPLAPSSKSTSGGTAALGCLVKDYFPEPVTVSWNSGALTSGVHTFPAVLQSSGLYSLSSVVTVPSSSLGTQTYICNVNHKPSNTKVDKRVEPKSCDKTHTCPPCPAPELLGGPSVFLFPPKPKDTLMISRTPEVTCVVVDVSHEDPEVKFNWYVDGVEVHNAKTKPREEQYNSTYRVVSVLTVLHQDWLNGKEYKCKVSNKALPAPIEKTISKAKGQPREPQVYTLPPSREEMTKNQVSLTCLVKGFYPSDIAVEWESNGQPENNYKTTPPVLDSDGSFFLYSKLTVDKSRWQQGNVFSCSVMHEALHNHYTQKSLSLSPGK

SEQ ID NO: 23850 - protein, 450 aa, Artificial Sequence [sequence omitted]

SEQ ID NO: 23851 - protein, 450 aa, Artificial Sequence
  source: /note="Description of Artificial Sequence: Synthetic polypeptide"
QMQLVQSGAEVKKPGSSVKVSCKASGGTFSSYAISWVRQAPGQGLEWMGGIFGMFGTANYAQKFQGRVTITADEFTSAAYMELSSLGSEDTAMYYCARSSGYYPQYFQDWGQGTLVTVSSASTKGPSVFPLAPSSKSTSGGTAALGCLVKDYFPEPVTVSWNSGALTSGVHTFPAVLQSSGLYSLSSVVTVPSSSLGTQTYICNVNHKPSNTKVDKRVEPKSCDKTHTCPPCPAPELLGGPSVFLFPPKPKDTLMISRTPEVTCVVVDVSHEDPEVKFNWYVDGVEVHNAKTKPREEQYNSTYRVVSVLTVLHQDWLNGKEYKCKVSNKALPAPIEKTISKAKGQPREPQVYTLPPSREEMTKNQVSLTCLVKGFYPSDIAVEWESNGQPENNYKTTPPVLDSDGSFFLYSKLTVDKSRWQQGNVFSCSVMHEALHNHYTQKSLSLSPGK

SEQ ID NO: 23852 - protein, 451 aa, Artificial Sequence
  source: /note="Description of Artificial Sequence: Synthetic polypeptide"
EVQLVESGAEVKKPGSSVKVSCKASGGIFNSYAISWVRQAPGQGLEWMGGIIAIFHTPKYAQKFQGRVTITADESTNTAYMELRSLKSEDTALYYCARGSTYDFSSGLDYWGQGTLVTVSSASTKGPSVFPLAPSSKSTSGGTAALGCLVKDYFPEPVTVSWNSGALTSGVHTFPAVLQSSGLYSLSSVVTVPSSSLGTQTYICNVNHKPSNTKVDKRVEPKSCDKTHTCPPCPAPELLGGPSVFLFPPKPKDTLMISRTPEVTCVVVDVSHEDPEVKFNWYVDGVEVHNAKTKPREEQYNSTYRVVSVLTVLHQDWLNGKEYKCKVSNKALPAPIEKTISKAKGQPREPQVYTLPPSREEMTKNQVSLTCLVKGFYPSDIAVEWESNGQPENNYKTTPPVLDSDGSFFLYSKLTVDKSRWQQGNVFSCSVMHEALHNHYTQKSLSLSPGK

SEQ ID NO: 23853 - protein, 456 aa, Artificial Sequence
  source: /note="Description of Artificial Sequence: Synthetic polypeptide"
QVQLVQSGAEVKKPGSSVKVSCKASGGFFSSYAISWVRQAPGQGLEWMGGVIPIFRTANYAQNFQGRVTITADEFTSYMELSSLRSDDTAVYYCARLNYHDSGTYYNAPRGWFDPWGQGTLVTVSSASTKGPSVFPLAPSSKSTSGGTAALGCLVKDYFPEPVTVSWNSGALTSGVHTFPAVLQSSGLYSLSSVVTVPSSSLGTQTYICNVNHKPSNTKVDKRVEPKSCDKTHTCPPCPAPELLGGPSVFLFPPKPKDTLMISRTPEVTCVVVDVSHEDPEVKFNWYVDGVEVHNAKTKPREEQYNSTYRVVSVLTVLHQDWLNGKEYKCKVSNKALPAPIEKTISKAKGQPREPQVYTLPPSREEMTKNQVSLTCLVKGFYPSDIAVEWESNGQPENNYKTTPPVLDSDGSFFLYSKLTVDKSRWQQGNVFSCSVMHEALHNHYTQKSLSLSPGK

SEQ ID NO: 23854 - protein, 450 aa, Artificial Sequence
  source: /note="Description of Artificial Sequence: Synthetic polypeptide"
QVQLVQSGAEVKKPGSSVKVSCKASGVTFSYYAMSWVRQAPGQGLEWMGGISPMFGTTTYAQKFQGRVTITADDSTSTAYMEVRSLRSEDTAVYYCARSSNYYDSVYDYWGQGTLVTVSSASTKGPSVFPLAPSSKSTSGGTAALGCLVKDYFPEPVTVSWNSGALTSGVHTFPAVLQSSGLYSLSSVVTVPSSSLGTQTYICNVNHKPSNTKVDKRVEPKSCDKTHTCPPCPAPELLGGPSVFLFPPKPKDTLMISRTPEVTCVVVDVSHEDPEVKFNWYVDGVEVHNAKTKPREEQYNSTYRVVSVLTVLHQDWLNGKEYKCKVSNKALPAPIEKTISKAKGQPREPQVYTLPPSREEMTKNQVSLTCLVKGFYPSDIAVEWESNGQPENNYKTTPPVLDSDGSFFLYSKLTVDKSRWQQGNVFSCSVMHEALHNHYTQKSLSLSPGK

SEQ ID NO: 23855 - protein, 118 aa, Artificial Sequence
  source: /note="Description of Artificial Sequence: Synthetic polypeptide"
EVQLVESGAEVKKAGSSVKVSCKSSGGTSNNFGISWVRQAPGQGLEWMGGISPIFGSTVYAQKFQGRVTISADIFSHTAYMEMNSLTSEDTAVYFCARHGNYYFYSGMDLWGQGTTVT

SEQ ID NO: 23856 - protein, 118 aa, Artificial Sequence
  source: /note="Description of Artificial Sequence: Synthetic polypeptide"
QVQLVQSGAEVKKPGSSVKVSCKSSGGTSNNYAISWVRQAPGQGLDWMGGVSPIFGSTAYAQKFQGRVTISADIFSNTAYMELNSLTSEDTAVYYCARHGNYYYNSGMDVWGQGTTVT

SEQ ID NO: 23857 - protein, 118 aa, Artificial Sequence
  source: /note="Description of Artificial Sequence: Synthetic polypeptide"
QVQLVQSGAEVKRPGSSVKVSCKSSGGTSNNYAISWVRQAPGQGLDWMGGISPIFGSTVYAQKFQGRVTISADIFSNTAYMELNSLTSEDTAVYFCARHGNYYYYSGMDLWGQGTTVT

SEQ ID NO: 23858 - protein, 118 aa, Artificial Sequence
  source: /note="Description of Artificial Sequence: Synthetic polypeptide"
EVQLVESGAEVKRPGSSVKVSCKSSGGTSNNYAISWVRQAPGQGLDWMGGISPIFGSTVYAQKFQGRVTISADIFSNTAYMELNSLTSEDTAVYFCARHGNYYYYSGMDLWGQGTTVT

SEQ ID NO: 23859 - protein, 121 aa, Artificial Sequence
  source: /note="Description of Artificial Sequence: Synthetic polypeptide"
QVQLVQSGAEVKKPGSSVKVSCKSSGGTSNNYAISWVRQAPGQGLDWMGGISPIFGSAAYAQKFQGRVTITADIFSNTVYMELNSLTSEDTAVYYCARHGNYYYYSGMDVWGQGTTVTVSS

SEQ ID NO: 23860 - protein, 121 aa, Artificial Sequence
  source: /note="Description of Artificial Sequence: Synthetic polypeptide"
EVQLVQSGAEVKKPGSSVRVSCKSSGGTSNNYAISWVRQAPGQGLDWMGGISPIFGSTAYAQKFQGRVTISADIFSNTAYMELNSLTSEDTAVYFCARHGNYYYYSGMDVWGQGTTVTVSS

SEQ ID NO: 23861 - protein, 121 aa, Artificial Sequence
  source: /note="Description of Artificial Sequence: Synthetic polypeptide"
QVQLVQSGAEVKKPGSSVKVSCKSSGGTSNNYAISWVRQAPGQGLDWMGGISPIFGSTAYAQKFQGRVTISADIFSNTAYMELNSLASEDTAVYFCARHGNYYYYSGMDVWGQGTTVTVSS

SEQ ID NO: 23862 - protein, 121 aa, Artificial Sequence
  source: /note="Description of Artificial Sequence: Synthetic polypeptide"
EVQLVESGAEVKKPGSSVKVSCKSSGGTSNNYAISWVRQAPGQGLDWMGGISPIFGSTAYAQKFQGRVTISADIFSNTAYMELNSLTSEDTAVYYCARHGNYYYYSGMDVWGQGTTVTVSS

SEQ ID NO: 23863 - protein, 121 aa, Artificial Sequence
  source: /note="Description of Artificial Sequence: Synthetic polypeptide"
EVQLVQSGAEVKKPGSSVKVSCKSSGGTSNNYAISWVRQAPGQGLDWMGGISPIFGSAAYAQKFQGRVTITADIFSNTVYMELNSLTSEDTAVYYCARHGNYYYYSGTDVWGQGTTVTVSS

SEQ ID NO: 23864 - protein, 121 aa, Artificial Sequence
  source: /note="Description of Artificial Sequence: Synthetic polypeptide"
EVQLVQSGAEVKKPGSSVKVSCKSSGGTSNNYAISWVRQAPGQGLDWMGGISPIFGSAVYAQKFQGRVTITADIFSNTVYMELNSLTSEDTAVYYCARHGTYYYYSGMDVWGQGTTVTVSS

SEQ ID NO: 23865 - protein, 121 aa, Artificial Sequence; identical to SEQ ID NO: 23862
  source: /note="Description of Artificial Sequence: Synthetic polypeptide"

SEQ ID NO: 23866 - protein, 121 aa, Artificial Sequence
  source: /note="Description of Artificial Sequence: Synthetic polypeptide"
QMQLVQSGAEVKKPGSSVKVSCKSSGGTSNNYAISWVRQAPGQGLDWMGGISPIFGSTAYAQKFQGRVTISADIFSNTAYMELNSLTSEDTAVYFCARHGNYYYYSGMDVWGQGTTVTVSS

SEQ ID NO: 23867 - protein, 121 aa, Artificial Sequence
  source: /note="Description of Artificial Sequence: Synthetic polypeptide"
QVQLVQSGAEVERPGSSVKVSCKSSGGTSNNYAISWVRQAPGQGLDWMGGISPIFGSTAYAQKFQGRVTISADIFSNTAYMELNSLTSEDTAVYYCARHGNYYYNSGMDVWGQGTTVTVSS

SEQ ID NO: 23868 - protein, 121 aa, Artificial Sequence
  source: /note="Description of Artificial Sequence: Synthetic polypeptide"
QVQLVQSGAEVKKPGSSVKVSCKSSGGTSNNYAISWVRQAPGQGLDWMGGISPIFGSTAYAQKFQGRVTISADIFSNTAYMELNSLTSEDTAVYYCARHGNYYYYSGMDVWGQGTTVTVSS

SEQ ID NO: 23869 - protein, 121 aa, Artificial Sequence
  source: /note="Description of Artificial Sequence: Synthetic polypeptide"
QMQLVQSGAEVKKAGSSVKVSCKSSGGTSNNYAISWVRQAPGQGLEWMGGISPIFGSTVYAQKFQGRVTISADIFSHTAYMELNSLTSEDTAAYFCARHGNYYYYSGMDLWGQGTTVTVSS

SEQ ID NO: 23870 - protein, 121 aa, Artificial Sequence
  source: /note="Description of Artificial Sequence: Synthetic polypeptide"
QVQLVQSGAEVKKPGSSVKVSCKSSGGTSNNYAISWVRQAPGQGLDWMGGISPIFGSTAYAQKFQGRVTISADIFSNTAYMELNSLTSEDTAVYFCARHGNYYYYSGMDVWGQGTTVTVSS

SEQ ID NO: 23871 - protein, 124 aa, Artificial Sequence
  source: /note="Description of Artificial Sequence: Synthetic polypeptide"
EVQLVETGGGLVQPGRSLRLSCAASGFSFDEYTMHWVRQAPGKGLEWVAGINWKGNFMGYADSVQGRFTISRDNGKNSLYLQMNSLRAEDTALYYCAKDRLESSAMDILEGGTFDIWGQGTMVT

SEQ ID NO: 23872 - protein, 125 aa, Artificial Sequence
  source: /note="Description of Artificial Sequence: Synthetic polypeptide"
EVQLVQSGAEVKKPGASVRVSCRASGYIFTESGITWVRQAPGQGLEWMGWISGYSGDTKYAQKLQGRVTMTKDTSTTTAYMELRSLRYDDTAVYYCARDVQYSGSYLGAYYFDYWSPGTLVTVSS

SEQ ID NO: 23873 - protein, 126 aa, Artificial Sequence
  source: /note="Description of Artificial Sequence: Synthetic polypeptide"
QVQLVQSGAEVKKPGASVRVSCRASGYIFTESGITWVRQAPGQGLEWMGWISGYSGDTKYAQKLQGRVTMTKDTSTTTAYMELRSLRYDDTAVYYCARDVQYSGSYLGAYYFDYWSPGTLVTVSSN

SEQ ID NO: 23874 - protein, 129 aa, Artificial Sequence
  source: /note="Description of Artificial Sequence: Synthetic polypeptide"
EVQLVQSGAEVKKPGASVELSCKASGDTFTNYHIHWVRQAPGQGLEWMGIINPSGGDTDYSQKFQGRVTLTRDRSTNTFYMKLASLRSEDTAVYYCATDESPGLLTGLRDYWYYYGMDVWGQGTTVTVS

SEQ ID NO: 23875 - protein, 122 aa, Artificial Sequence
  source: /note="Description of Artificial Sequence: Synthetic polypeptide"
EVQLVESGGGLVQPGGSLRLSCAASGFTFSSYAMSWVRQAPGKGLEWVSRLSDESTTYYADSVKGRFTISRDNSKNTLYLQMNSLKADDTAIYYCAEDLGTVMDSYYYGMNVWGPGTTVTVS

SEQ ID NO: 23876 - protein, 127 aa, Artificial Sequence
  source: /note="Description of Artificial Sequence: Synthetic polypeptide"
EVQLVETGGGLVQPGRSLRLSCAASGFTFDDYAMHWVRQAPGKGLEWVSGINWVSTTMGYADSVKGRFTISRDNAKNSLYLQMNSLRAEDTALYYCAKDRLESAAIDILEGGTFDIRGQGTMVTVSS

SEQ ID NO: 23877 - protein, 126 aa, Artificial Sequence
  source: /note="Description of Artificial Sequence: Synthetic polypeptide"
QVQLQESGPGLVKPSGTLSLTCNVSGGSINSSPYKWAWIRQSPGKGLEWIGTFYYDGSTDYNPSLQSRLTISGDMSSNHFSLRLRSVTAADTAVYYCAAYCSSISCHAYYDYMNVWGKGTTVTVSS

SEQ ID NO: 23878 - protein, 121 aa, Artificial Sequence
  source: /note="Description of Artificial Sequence: Synthetic polypeptide"
QVQLVQSGAEVKKPGSSVKVSCKTSGYAFNGYGISWVRQAPGQGLEWVAWINTYKVNTHYAQNLRGRVTVSIDTSTTTAYMELRSLRSDDTAVYYCARDWGGPFGNAFDFWGQGTMVTVSS

SEQ ID NO: 23879 - protein, 125 aa, Artificial Sequence
  source: /note="Description of Artificial Sequence: Synthetic polypeptide"
EVQLVQSGAEVKKPGASVTVSCKASGYAFTSYYLHWVRQAPGQGLEWMGIMNLHGGSTTYAQKFQGRVTMTRDTSTRTVYMELSGLRSEDSAVYYCARESPDSSGYPGYYGMDVWGQGTTVTVSS

SEQ ID NO: 23880 - protein, 125 aa, Artificial Sequence
  source: /note="Description of Artificial Sequence: Synthetic polypeptide"
EVQLVESGAEVKKPGASVKVSCKASGYAFTSYYLHWVRQAPGQGLEWMGIMNPHGGSTTYAQKFQGRVTMTRDTSTSTVYMELSSLRSEDTAVYYCARESPDSSGYPGYYGMDVWGQGTTVTVSS

SEQ ID NO: 23881 - protein, 121 aa, Artificial Sequence
  source: /note="Description of Artificial Sequence: Synthetic polypeptide"
EVQLVQSGAEVKKPGESVKISCKTSGYAFTGYGISWVRQAPGQGLEWMGWINTYKFNTNYAQNLQGRVTMTIDTSTSAAYMELRSLRYEDTAVYFCARDWAGPFGNAFDVWGQGTMVTVSS

SEQ ID NO: 23882 - protein, 124 aa, Artificial Sequence
  source: /note="Description of Artificial Sequence: Synthetic polypeptide"
EVQLVESGGGLVQPGRSLRLSCAASGFTFDEYIMHWVRQAPGKGPEWVAGINWKGNFMGYADSVQGRFTISRDNAKNSLYLQMNSLRADDTALYYCAKDRLESSAMDILEGGTFDIWGQGTMVT

SEQ ID NO: 23883 - protein, 127 aa, Artificial Sequence
  source: /note="Description of Artificial Sequence: Synthetic polypeptide"
EVQLVESGGGLVQPGRSLRLSCAASGFSFDEYIMHWVRQAPGKGLEWVAGINWKGNFMGYADSVQGRFTISRDNGKNSLYLQMNSLRAEDTALYYCAKDRLESSAMDILEGGTFDIWGQGTMVTVSS

SEQ ID NO: 23884 - protein, 127 aa, Artificial Sequence
  source: /note="Description of Artificial Sequence: Synthetic polypeptide"
EVQLVETGGGLVQPGRSLRLSCAASGFTFDEYIMHWVRQAPGKGPEWVAGINWKGNFMGYADSVQGRFTISRDNAKNSLYLQMNSLRADDTALYYCAKDRLESSAMDILEGGTFDIWGQGTMVTVSS

SEQ ID NO: 23885 - protein, 127 aa, Artificial Sequence
  source: /note="Description of Artificial Sequence: Synthetic polypeptide"
EVQLVESGGGLVQPGRSLRLSCAASGFTFDEYIMHWVRQAPGKGPEWVAGINWKGNFMGYADSVQGRFTISRDNAKNSLYLQMNSLRADDTALYYCAKDRLESSAMDILEGGTFDIWGQGTMVTVSS

SEQ ID NO: 23886 - protein, 108 aa, Artificial Sequence
  source: /note="Description of Artificial Sequence: Synthetic polypeptide"
QESGAELVRPGASVKLSCKDSGYTFTTYWMNWVKQRPEQGLEWIGRIDPYDSETHYNQKFKDKAILTVDKSSNTAYMQLSSLTSEDSAVYYCVRGGSTVAYFGVWGQG

SEQ ID NO: 23887 - protein, 119 aa, Artificial Sequence; identical to SEQ ID NO: 23702
  source: /note="Description of Artificial Sequence: Synthetic polypeptide"

SEQ ID NO: 23888 - protein, 117 aa, Artificial Sequence
  source: /note="Description of Artificial Sequence: Synthetic polypeptide"
  MOD_RES (2)..(2): Any amino acid
RXGGGLVQPGGSLRLSCAASRFTFSRYAMNWVRQAPGKGLEWVSSITGSGGRTFYADSVKGRFTISRDNSKNTLYLQMNSLRAEDTALYYCAKPPTVTTGDPFDIWGQGTMVTVSSP

SEQ ID NO: 23889 - protein, 134 aa, Artificial Sequence
  source: /note="Description of Artificial Sequence: Synthetic polypeptide"
EVQLVQSGGGLIQPGGSLRLSCAASGFTVSNNYISWVRQAPGKGLEWVSVIYSGGSRYYPESVKGRFTISRDNSKNTLYLQMNSLRYEDTAVYYCARVSCNSTSCHPVYVRTTVWTSGAKGPQSPSPQPPPRAH

SEQ ID NO: 23890 - protein, 95 aa, Artificial Sequence
  source: /note="Description of Artificial Sequence: Synthetic polypeptide"
SSAFSSLAMSWVRQAPGQGLEWVSAIIGSGGSTYYADSVKGDFTISRDNSKNTPLQMNSLRAEDTAPYYCLKTPTCTTGVLLDYCGQGTLVSVSS

SEQ ID NO: 23891 - protein, 124 aa, Artificial Sequence
  source: /note="Description of Artificial Sequence: Synthetic polypeptide"
EVQLVESGGGLVQPGGSLRLSCAASGFSFSSYWMTWVRQAPGKGLEWVANIKQYGSEKYYVDSVKGRFTISRDNAKNSLYLQMNSLRDDDTAVYYCARMGSYLDTYYYHYGMDVWGQGTTVTVS

SEQ ID NO: 23892 - protein, 129 aa, Artificial Sequence; identical to SEQ ID NO: 23736
  source: /note="Description of Artificial Sequence: Synthetic polypeptide"
  MOD_RES (2)..(2): Any amino acid

SEQ ID NO: 23893 - protein, 127 aa, Artificial Sequence; identical to SEQ ID NO: 23814
  source: /note="Description of Artificial Sequence: Synthetic polypeptide"

SEQ ID NO: 23894 - protein, 122 aa, Artificial Sequence
  source: /note="Description of Artificial Sequence: Synthetic polypeptide"
EVQLVQSGGGLVQPGGSLRLACVVSGFTVTSNYITWVRQAPGKGLEWVSVIYSHGRAYYSASVNGRFTISRHTSKNTVYLEMNSLRPEDTAVYYCAGGGLVGGYDEYFFDYWGQGTLATVSS

SEQ ID NO: 23895 - protein, 118 aa, Artificial Sequence
  source: /note="Description of Artificial Sequence: Synthetic polypeptide"
QVQLVQSGAEVKKPGSSVKVSCKASGGSFSNYAFSWVRQAPGQGLEWMGGTIPLLGTTNYAQKFQGRVTISADQFTSTAYMELGSLRSEDTAVYYCTRRKMTTAFDSWGQGTLVTVSS

SEQ ID NO: 23896 - protein, 123 aa, Artificial Sequence
  source: /note="Description of Artificial Sequence: Synthetic polypeptide"
QVQLAQSGAEVKRPGSSVKVSCTASGGIFRKNAISWVRQAPGQGLEWMGGIIAVFNTANYAQKFQGRVKITADESGNTAYMELSSLRSDDTAVYYCASHPKYFYGSGSYPDFWGQGTLVTVSS

SEQ ID NO: 23897 - protein, 129 aa, Artificial Sequence
  source: /note="Description of Artificial Sequence: Synthetic polypeptide"
EVLMVESGGGLVQPGGSVRLSCVASGFSFSSHWMTWVRQAPGKGLEWVANIEDDGGDKYYVDSVKGRFIISRDNAKNSVYLQMNSLRAEDTAVYFCARGSGSSDRSDYDPHYYYYLDVWGKGATVTVSS

SEQ ID NO: 23898 - protein, 124 aa, Artificial Sequence
  source: /note="Description of Artificial Sequence: Synthetic polypeptide"
QVQLQESGPGLVKPSETLSLNCAVSGGSISNYYWSWIRQPPGKGLEWIGYISYNGRPKYNPSLTSRVTISVDTSKDQFSLELRSVTAADTALYYCARETRFGELLSPYDAFEIWGQGTMVTVSS

SEQ ID NO: 23899 - protein, 133 aa, Artificial Sequence
  source: /note="Description of Artificial Sequence: Synthetic polypeptide"
QVQLVQSGSEVKKPGASVKVSCKASGYTFTNYDINWIRQAPGQGLEWMGWINPNSGTTGSAQRFQGRVTITVDTSITTVYMELSSLRSDDTAIYYCARGRELLRLQHFLTDSQSERRDCFDPWGQGTLVTVSS

SEQ ID NO: 23900 - protein, 120 aa, Artificial Sequence
  source: /note="Description of Artificial Sequence: Synthetic polypeptide"
QITLRESGPTLVKPTQTLTLTCTFSGFSLSTNGVNVGWIRQPPGKALEWLALIYWDDDKRYSPSLKRRLTITKDTSKNQVVLTLTNMDPVDTATYYCAHRPDFYGDFEYWGPGTLVTVSS

SEQ ID NO: 23901 - protein, 121 aa, Artificial Sequence
  source: /note="Description of Artificial Sequence: Synthetic polypeptide"
QVQLVQSGAEVRKPGSSVKVSCKASGGPFMSYAIGWVRQAPGQGLEWMGGINPVFGRPHYAQKFQGRVTIATDDSTKTSYMELSSLTSEDTGMYYCASRYSRSSPGTFESWGQGTLVTVSS

SEQ ID NO: 23902 - protein, 129 aa, Artificial Sequence
  source: /note="Description of Artificial Sequence: Synthetic polypeptide"
EVQLVESGGDLVQPGRSLKLSCTGSGFTFGDYGVTWVRQAPGKGLEWVGFIRTRPWGGTADTAASVKGRFTISRDDSKSLAYLQMNSLKTEDTAVYYCCRDAPPNVEVASMTNWYFDLWGRGTLVTVSS

SEQ ID NO: 23903 - protein, 124 aa, Artificial Sequence
  source: /note="Description of Artificial Sequence: Synthetic polypeptide"
QVQLQESGPGLVKPSETLSLTCTVSGGSVSSETYYWSWIRQPPGKGLEWIGYIYYIGNTDYRPSLKSRVTISLDTSKNQFSLKLSSVTAADTAVYYCARGAYYDSSGYPAFYIWGQGTMVTVSS

SEQ ID NO: 23904 - protein, 118 aa, Artificial Sequence
  source: /note="Description of Artificial Sequence: Synthetic polypeptide"
QVQLVQSGADVKKPGSSVTVSCKASGGSFSNYGINWVRQAPGQGLEWMGGIIPLINAPNYAPKFQGRVTITADMFSNIVSLQLTSLRTDDTAVYYCARRKMTTAIDYWGQGTLVTVSS

SEQ ID NO: 23905 - protein, 118 aa, Artificial Sequence
  source: /note="Description of Artificial Sequence: Synthetic polypeptide"
QVQLVQSGAEVKKPGSSVKVSCRESGGTFNGYTITWVRQAPGQGLEWMGGIIPMMGTVNYAQKLQGRVTITTDYFTKTAYMDLNNLRSEDTAMYYCVKIRYTGQQLLWGQGTLVTVSS

SEQ ID NO: 23906 - protein, 120 aa, Artificial Sequence
  source: /note="Description of Artificial Sequence: Synthetic polypeptide"
QVQLVQSGSEVKKPGTSVKVSCTASGSVFTNYGISWVRQAPGQGLEWMGGIIPLFGAAKYAQKFQGRVTITADESTKTVYMELSRLTSKDTAIYFCAKAPRVYEYYFDQWGQGTPVTVSS

SEQ ID NO: 23907 - protein, 130 aa, Artificial Sequence
  source: /note="Description of Artificial Sequence: Synthetic polypeptide"
QVQLQQWGAGLLKPSETLSLTCAVYGGSFSVSGYYWSWIRQPPGRGLEWIGEISHGGSTNYNPSLKSRVTISVDTTKNQFSLRLSSVTAADTAVYYCARGTDPDTEVYCRVGNCAAFDYWGQGSLVTVSS

SEQ ID NO: 23908 - protein, 128 aa, Artificial Sequence
  source: /note="Description of Artificial Sequence: Synthetic polypeptide"
QVQLQQWGSGLLKPSETLSLTCAVYGGSFRDDYWTWIRQPPGKGLEWIGEINHSGRTNYNPSLKSRVTISVDTSLKQFSLKVISVTAADTAVYYCARGTSHVSRYFDWLPPTNWFDPWGQGTQVTVSS

SEQ ID NO: 23909 - protein, 132 aa, Artificial Sequence
  source: /note="Description of Artificial Sequence: Synthetic polypeptide"
QITLKESGPTLVKPTQTLTLTCVFSGFSLSITGVRVGWIRQPPGKALEWLALISWDDEKHYSPSLQSRLTITKDTSKNQVVLTMTNLDPVDTATYYCARSTDRGHVLRYFGWMLPGDAFDVWGQGTMVTVSS

SEQ ID NO: 23910 - protein, 125 aa, Artificial Sequence
  source: /note="Description of Artificial Sequence: Synthetic polypeptide"
QVQLVESGGGVVQPGRSLRLSCAASEITFITYAMHWVRQAPGKGLEWVALISDDGSNKFYADSVKGRFTISRDNSKNTLYLQMNSLRAEDTAAYYCAREGVYFDSGTYRGYFDYWGQETLVTVSS

SEQ ID NO: 23911 - protein, 121 aa, Artificial Sequence
  source: /note="Description of Artificial Sequence: Synthetic polypeptide"
QVQLVQSGGGVVQPGRSLRLSCAASGFTFSSYAMHWVRQAPGKGLEWVAIISYDGNDQYYTDSVKGRFTISRDSSKVYLQMHRLRPEDTAVYYCAKEFETSGYFHGSFDYWGQGILVTVSS

SEQ ID NO: 23912 - protein, 126 aa, Artificial Sequence
  source: /note="Description of Artificial Sequence: Synthetic polypeptide"
QVQLQESGPGLVKPSETLSLTCTVSGGSINSYYWNWIRQPPGKGLEWIGYIYHSGSTNYNPSLKSRVTISVDTSKNQFSLQLSSVTAADTAVYYCARLRTDYGDPDSVYYYGMDVWGQGTTVTVSS

SEQ ID NO: 23913 - protein, 125 aa, Artificial Sequence
  source: /note="Description of Artificial Sequence: Synthetic polypeptide"
QVQLQESGPGLVKPSQTLSLTCTVSGGSISSGNYYWNWVRQHPGKGLEWIGYIYYRGSTFYNPSLKSRVTISIDTSKNQFSLRLSSVTAADTAVYYCAKDTRSSLDNYQYGMDVWGQGTTVTVSS

SEQ ID NO: 23914 - protein, 126 aa, Artificial Sequence
  source: /note="Description of Artificial Sequence: Synthetic polypeptide"
QVHLVQSGAEVRKPGDSVKVSCKTSGYTFSTYPVAWVRQVPGQGLEWMGWISTYNGNTNFAQNFQGRVTLTTDTTTNTAYMEVRSLKFDDTAVYYCARVEGSYRDFWNNQNRFDPWGQGTLVTVSS

SEQ ID NO: 23915 - protein, 123 aa, Artificial Sequence
  source: /note="Description of Artificial Sequence: Synthetic polypeptide"
QVQLQESGPGLVKPSETLSLTCTVSRGSIGHYFWSWIRQPPGKGLEWIGYISYSGSTKYNPSLRSRVTISVDTSKNQFSLNLNSVTATDTALYYCAREDYDILTGAGPGMEVWGQGTTVTVSS

SEQ ID NO: 23916 - protein, 128 aa, Artificial Sequence
  source: /note="Description of Artificial Sequence: Synthetic polypeptide"
QVQLQQWGAGLLKPSETLSLSCAVFGGSFSDYYWTWIRQPPGKGLEWIGEIKHSGRTNYNPSLESRVTISVDTSKNQFSLKLSSVTAADTAIYYCARGTDPDTEGYCRSGSCSAFDFWGQGTLVTVSS

SEQ ID NO: 23917 - protein, 128 aa, Artificial Sequence
  source: /note="Description of Artificial Sequence: Synthetic polypeptide"
QVQLQQWGAGLLKPSETLSLTCGVYGGSLSDYYWSWIRQPPGKGLEWIGEINHSGGTNYNPSLKRRVTISVDTSKKQFSLKMNSVTAADTAVYYCARGTDPDTEVYCRAGNCAAFDFWGQGTLVTVSS

SEQ ID NO: 23918 - protein, 128 aa, Artificial Sequence
  source: /note="Description of Artificial Sequence: Synthetic polypeptide"
QVQLQESGPGLVKPSQTLSLTCTVSGDSISSVDHYWSWIRQHPVKGLEWIGFMYYSASTYYNPSLKSRVTISTDTSKNQFSLRLSSVTAADTAVYYCARGTCAGDCSLHYYYYGLDVWGQGRTVTVSS

SEQ ID NO: 23919 - protein, 132 aa, Artificial Sequence
  source: /note="Description of Artificial Sequence: Synthetic polypeptide"
QVQLQESGPGLVKPSETLSLTCTVSSGPMSDYYWSWIRQPPGKGLEWIGHVSVSHGGRTKSNPSVMSRVTISVETSKNQFSLKLTSVTAADTAVYYCARLNYYDRSGYHSPDGPSNNWFDPWGQGTLVTVSS

SEQ ID NO: 23920 - protein, 122 aa, Artificial Sequence
  source: /note="Description of Artificial Sequence: Synthetic polypeptide"
QVQLVQSGAEVKKPGASVKVSCKASGYTFTGYYMHWVRQAPGQGLEWMGWINPNSGDTNYAQKFQGRVTMTRDTSITTAYMELSSLRSDDTAVYYCARDSPYSSSWSFFDYWGQGPLVTVSS

SEQ ID NO: 23921 - protein, 123 aa, Artificial Sequence
  source: /note="Description of Artificial Sequence: Synthetic polypeptide"
QVQLQESGPGLVKPSETLSLTCTVSGASINSHYWSWIRQPPGKGLEWIGYVYYSGSTTYNPSLKSRVTLSVDTSKNQFSLNLSSVTAADTAFYYCARHPYDVLTGSGDWFDPWGQGTLVTVSS

SEQ ID NO: 23922 - protein, 128 aa, Artificial Sequence
  source: /note="Description of Artificial Sequence: Synthetic polypeptide"
EVQLVQSGSEVKKPGESLKISCKGSGYSFSNYWIGWVRHMPGKGLEWMGHYPGDSDTRYSPSFQGQVTMSADKSSSTVYLQWSSLKASDTAIYYCARRGGHSFGYGSGGDTHSEFDSWGQGTLVTVSS

SEQ ID NO: 23923 - protein, 121 aa, Artificial Sequence
  source: /note="Description of Artificial Sequence: Synthetic polypeptide"
QVQVVQSGAEVKKPGSSVRVSCQASGGTFMNYAIIWVRRAPGQGLEWMGGIIPVFPTPNYAQMFQGRVTISTDESRSTSFLELTNLRYEDTAVYYCARRIYHGGNSGFDFWGQGTLVTVSS

SEQ ID NO: 23924 - protein, 119 aa, Artificial Sequence
  source: /note="Description of Artificial Sequence: Synthetic polypeptide"
QVQVVQSGTEVKKPGSSVKVSCQTSGGRFMSYAITWVRQAPGQGLEWMGGIVPVFGTANYAQKFQGRVTITTDDSTRTAYMELSSLRSEDTAVYYCGFRYGSGYGFDSWGQGTLVTVSS

SEQ ID NO: 23925 - protein, 120 aa, Artificial Sequence
  source: /note="Description of Artificial Sequence: Synthetic polypeptide"
QVQLVQSGADLKKPGASVKVSCKASGYTFTDYYIHWVRQAPGQGLEWMGWINPESGDTKYAQKFQGRVTMTRDTSITTAYMELGRLRSDDTAVYYCARDVSTTWSWFAPWGQGTLVTVSS

SEQ ID NO: 23926 - protein, 123 aa, Artificial Sequence
  source: /note="Description of Artificial Sequence: Synthetic polypeptide"
QVQLVQSGAEVKRPGSSVKVSCTASGGIFRKNAISWVRQAPGQGLEWMGGIIAVFNTANYAQKFQNRVKITADESGNTAYMELSSLTSDDTAVYYCASHPKYFYGSGSYPDFWGQGTLVTVSS

SEQ ID NO: 23927 - protein, 127 aa, Artificial Sequence
  source: /note="Description of Artificial Sequence: Synthetic polypeptide"
QVQLVQSGAEVKKPGASVKVSCKASGYTFIGYDMHWVRQAPGQGLEWMGWINAKRGGTNYAQKFQGRVTMTRDTSISTAYMELNSLRSDDTAVYYCARGVGSRTTIFGVLNPEFDYWGQGTLVTVSS

SEQ ID NO: 23928 - protein, 118 aa, Artificial Sequence
  source: /note="Description of Artificial Sequence: Synthetic polypeptide"
QVQLVQSGAEVKKPGASVKVSCKASGHTFTGYYIHWVRQAPGQGLEWMGWINPDSGATSSAQNFQGRVTMTGDTSSSTAYMELSRLSFDDTAVYYCARVLFTSPFDFWGEGTLVTVSS

SEQ ID NO: 23929 - protein, 117 aa, Artificial Sequence
  source: /note="Description of Artificial Sequence: Synthetic polypeptide"
QEQLVQSGAEVKKPGASVKVSCKASRKSFIGYYVHWVRQAPGQGLEWMGWISPDSDATKYAQKFQGSVIMTRDTSVSTVYMELSRLTSDDTALYYCLLFRGGNSLSWGQGTLVTVSS

SEQ ID NO: 23930 - protein, 122 aa, Artificial Sequence
  source: /note="Description of Artificial Sequence: Synthetic polypeptide"
EVQLVESGGGLVQPGGSLRLSCAASGFIFRNYWMSWVRQAPGKGLEWVANIKQDGREKYYVDSLRGRVNISRDNAENSLYLHMNSLRVEDTAVYFCARARMVVVTGDGFDVWGHGTMVTVSS

SEQ ID NO: 23931 - protein, 124 aa, Artificial Sequence
  source: /note="Description of Artificial Sequence: Synthetic polypeptide"
QVQLQESGPGLVKPSETLSLTCAVSGVSISNIDFYWGWIRQPPGKGLEWIGNIYYTGITFYNPSLSSRVAISIDTSKNQFSLTLTSVTAADTAMYYCARHYGDSEAINDAFDIWGQGTMLTVSS

SEQ ID NO: 23932 - protein, 115 aa, Artificial Sequence
  source: /note="Description of Artificial Sequence: Synthetic polypeptide"
QVQLVQSGAEVKKPGSSVRVSCKTSGGTFSSYAVTWVRQAPGQGLEWMGGIIGMFGTTNYAQKFQGRLTITADEMTSTAYMELSSLRSEDTAVYYCARGSYYYETTLDYWGRGTL

SEQ ID NO: 23933 - protein, 115 aa, Artificial Sequence
  source: /note="Description of Artificial Sequence: Synthetic polypeptide"
QVQLVQSGAEVKKPGSSVKVSCKTSGGTFSSYAVTWVRQAPGQGLEWMGGIIGMFGTTNYAQKFQGRVTITADELTSTAYMELSSLRSEDTAVYYCARGSYYYESSLDYWGRGTL

SEQ ID NO: 23934 - protein, 115 aa, Artificial Sequence
  source: /note="Description of Artificial Sequence: Synthetic polypeptide"
EVQLVQSGAEVKKPGSSVKVSCKTSGGTFSSYAVTWVRQAPGQGLEWMGAIIGMFGTTNYAQKFQGRVTITADELTSTAYMELSSLRSDDTAVYYCARGSYYYESSLDYWGKGTL

SEQ ID NO: 23935 - protein, 118 aa, Artificial Sequence
  source: /note="Description of Artificial Sequence: Synthetic polypeptide"
QVQLQESGPGLVKPSETLSLTCTVSGYSFDSGYYWGWLRQPPGKGLEWIGSIYHSRNTYYNPSLKSRVTISVDTSKNQFSLQLSSVTAADTAVYYCARGTWYSSNLRYWFDPWGKGTL

SEQ ID NO: 23936 - protein, 120 aa, Artificial Sequence; identical to SEQ ID NO: 23706
  source: /note="Description of Artificial Sequence: Synthetic polypeptide"

SEQ ID NO: 23937 - protein, 121 aa, Artificial Sequence; identical to SEQ ID NO: 23707
  source: /note="Description of Artificial Sequence: Synthetic polypeptide"

SEQ ID NO: 23938 - protein, 138 aa, Artificial Sequence
  source: /note="Description of Artificial Sequence: Synthetic polypeptide"
QVQLQESGGGLVQPGESLRLSCVGSGSSFGESTLSYYAVSWVRQAPGKGLEWLSIINAGGGDIDYADSVEGRFTISRDNSKETLYLQMTNLRVEDTGVYYCAKHMSMQQVVSAGWERADLVGDAFDVWGQGTMVTVSS

SEQ ID NO: 23939 - protein, 127 aa, Artificial Sequence
  source: /note="Description of Artificial Sequence: Synthetic polypeptide"
QVQLQQSGPRLVKPSQTLSLTCAISGDSVSGDSGTWNWIRQSPSRGLEWLGRTYYRSKWYNDYAESVKSRIVIKADTSKNEFSLQLNSVTPEDTAIYYCARAGVKIFGLIVGALDNWGRGTLVTVSS

SEQ ID NO: 23940 - protein, 113 aa, Artificial Sequence
  source: /note="Description of Artificial Sequence: Synthetic polypeptide"
EVQLVESGGGLIQPGGSLRLSCAASGFTVSSNYVSWVRQAPGKGLEWLSLIYTGGTTYYADSVKGRFTISRDNSKNTVFLQMNSLRAEDAAMYYCARVSALRFLQWPNYAMDV

SEQ ID NO: 23941 - protein, 114 aa, Artificial Sequence
  source: /note="Description of Artificial Sequence: Synthetic polypeptide"
EVQLVETGGDLVQPGGSLRLSCSASEFSFSSYWMSWVRQAPGKGLEWVANMKQDGSEKYYVDSVKGRFTISRDNAKNSLYLQMNSLRGEDTAVYYCARGSCDDSWTGCHDAFDI

SEQ ID NO: 23942 - protein, 114 aa, Artificial Sequence
  source: /note="Description of Artificial Sequence: Synthetic polypeptide"
QVQLQESGGDLVQPGGSLRLSCSASEFSFSSYWMSWVRQAPGKGLEWVANMKQDGSEKYYVDSVKGRFTISRDNAKNSLYLQMNSLRGEDTAVYYCARGSCDDSWTGCHDAFDI

SEQ ID NO: 23943 - protein, 114 aa, Artificial Sequence
  source: /note="Description of Artificial Sequence: Synthetic polypeptide"
EVQLVESGGDLVQPGGSLRLSCSASEFSFSSYWMSWVRQAPGKGLEWVANMKQDGSEKYYVDSVKGRFTISRDNAKNSLYLQMNSLRGEDTAVYYCARGSCDDSWTGCHDAFDI

SEQ ID NO: 23944 - protein, 114 aa, Artificial Sequence; identical to SEQ ID NO: 23941
  source: /note="Description of Artificial Sequence: Synthetic polypeptide"

SEQ ID NO: 23945 - protein, 114 aa, Artificial Sequence; identical to SEQ ID NO: 23941
  source: /note="Description of Artificial Sequence: Synthetic polypeptide"

SEQ ID NO: 23946 - protein, 145 aa, Artificial Sequence
  source: /note="Description of Artificial Sequence: Synthetic polypeptide"
MAEVQLVESGPALVKPTQTLTLTCSFSGFSLSTSGMSVSWIRQPPGKALEWLALIDWDDDTYYITYSSSLKTRLTISKDTSKSQVVLTMTNMDPVDTATYYCARTLRVSGDYVRDFDLWGRGTLVTVSSAGTKGPVENDSITSEF

SEQ ID NO: 23947 - protein, 123 aa, Artificial Sequence
  source: /note="Description of Artificial Sequence: Synthetic polypeptide"
EVQLQQSGPELVKPGASVKMSCKASGYTFTSFIMYWVKQKPGQGLEWLGYIDPYNDGTKYNEKFEGKATLTSDKSSSTAYMELSSLTSEDSAVYYCAKRGNYGNGFAYWGQGTLVTVSAAKTS

SEQ ID NO: 23948 - protein, 126 aa, Artificial Sequence
  source: /note="Description of Artificial Sequence: Synthetic polypeptide"
QVQLQQSGAELVRPGTSVKISCKASGYAFSNYWLGWVKQRPGHGLEWIGDIYPGSGNNHYNEKFKGKATLTADKSSRTVYMQLSSLTSEDSSVYFCTRGPIFTTAWFAYWGQGTLVTVSAAQKQTW

SEQ ID NO: 23949 - protein, 120 aa, Artificial Sequence
  source: /note="Description of Artificial Sequence: Synthetic polypeptide"
EVQLVESGGGLVQPGGSLRISCAASGFTVSSNYMSWVRQAPGKGLEWVSVIYSGGSTYYADSVKGRFSFSRDNSKNTVFLQMNSLRAEDTAVYYCARCLSRMRGYGLDVWGQGTTVTVSS

SEQ ID NO: 23950 - protein, 120 aa, Artificial Sequence
  source: /note="Description of Artificial Sequence: Synthetic polypeptide"
QVQLQESGPGLVKPSETLSLTCTVSGSSISNYYWSWIRQSPGKGLEWIGFIYYGGNTKYNPSLKSRVTISQDTSKSQVSLTMSSVTAAESAVYFCARASCSGGYCILDYWGQGTLVTVSS

SEQ ID NO: 23951 - protein, 123 aa, Artificial Sequence; identical to SEQ ID NO: 23730
  source: /note="Description of Artificial Sequence: Synthetic polypeptide"

SEQ ID NO: 23952 - protein, 118 aa, Artificial Sequence; identical to SEQ ID NO: 23731
  source: /note="Description of Artificial Sequence: Synthetic polypeptide"

SEQ ID NO: 23953 - protein, 121 aa, Artificial Sequence; identical to SEQ ID NO: 23716
  source: /note="Description of Artificial Sequence: Synthetic polypeptide"

SEQ ID NO: 23954 - protein, 120 aa, Artificial Sequence
  source: /note="Description of Artificial Sequence: Synthetic polypeptide"
QVQLQESGPGLVKPSETLSLTCTVSGGSISAYHWSWIRQPPGKGLEWIGHIFDSGSTYYNPSLKSRVTISLDASKNQLSLRLTSVTASDTAIYYCARPLGSRYYYGMDVWGQGTTVTVSS

SEQ ID NO: 23955 - protein, 119 aa, Artificial Sequence; identical to SEQ ID NO: 23725
  source: /note="Description of Artificial Sequence: Synthetic polypeptide"

SEQ ID NO: 23956 - protein, 121 aa, Artificial Sequence; identical to SEQ ID NO: 23724
  source: /note="Description of Artificial Sequence: Synthetic polypeptide"

SEQ ID NO: 23957 - protein, 119 aa, Artificial Sequence; identical to SEQ ID NO: 23723
  source: /note="Description of Artificial Sequence: Synthetic polypeptide"

SEQ ID NO: 23958 - protein, 119 aa, Artificial Sequence; identical to SEQ ID NO: 23722
  source: /note="Description of Artificial Sequence: Synthetic polypeptide"

SEQ ID NO: 23959 - protein, 120 aa, Artificial Sequence; identical to SEQ ID NO: 23721
  source: /note="Description of Artificial Sequence: Synthetic polypeptide"

SEQ ID NO: 23960 - protein, 118 aa, Artificial Sequence; identical to SEQ ID NO: 23720
  source: /note="Description of Artificial Sequence: Synthetic polypeptide"

SEQ ID NO: 23961 - protein, 118 aa, Artificial Sequence; identical to SEQ ID NO: 23719
  source: /note="Description of Artificial Sequence: Synthetic polypeptide"

SEQ ID NO: 23962 - protein, 120 aa, Artificial Sequence; identical to SEQ ID NO: 23718
  source: /note="Description of Artificial Sequence: Synthetic polypeptide"

SEQ ID NO: 23963 - protein, 121 aa, Artificial Sequence; identical to SEQ ID NO: 23717
  source: /note="Description of Artificial Sequence: Synthetic polypeptide"

SEQ ID NO: 23964 - protein, 121 aa, Artificial Sequence; identical to SEQ ID NO: 23716
  source: /note="Description of Artificial Sequence: Synthetic polypeptide"

SEQ ID NO: 23965 - protein, 122 aa, Artificial Sequence; identical to SEQ ID NO: 23715
  source: /note="Description of Artificial Sequence: Synthetic polypeptide"

SEQ ID NO: 23966 - protein, 141 aa, Artificial Sequence
  source: /note="Description of Artificial Sequence: Synthetic polypeptide"
MKHLWFFLLLVAAPRWVLSQVQLQESGPGLVKPSETLSLTCTVSGGSISHDYWSWIRQPPGKGLEWIGYIYYSGSTNYNPSLKSRVTISVDTSRNQFSLKLSSVTAADTAVYYCASLVGASEVLGYYFVYWGQGTLVTVSS

SEQ ID NO: 23967 - protein, 121 aa, Artificial Sequence
  source: /note="Description of Artificial Sequence: Synthetic polypeptide"
QLQLQESGLGLVKPSETLSLTCTVSGDSVSSGSYYWSWLRQPPGKGLEWIGNMHGSGHTNYNPSLKSRVTITPDTSKNHFSLRLSSVTAADTAVYYCARALLTTVTTFEYWGQGTLVTVSS

SEQ ID NO: 23968 - protein, 120 aa, Artificial Sequence
  source: /note="Description of Artificial Sequence: Synthetic polypeptide"
QVQLVQSGAEVKKSGSSVKVSCKASGGTFSNYAISWVRQAPGQGLEWMGGIIPVFGTPNYAQKFQGKIRIIADESTSTMYMELSSLRSEDTAVYYCASGRDFYYYGMDVWGQGTTVTVSS

SEQ ID NO: 23969 - protein, 127 aa, Artificial Sequence
  source: /note="Description of Artificial Sequence: Synthetic polypeptide"
QVQLVQSGAEVKKPGASVKVSCKASGYTFTNYAIHWVRQAPGQRLEWMGWINAGKGNTKYSQKFQDRVTITRDTSASAAYMELNSLISEDTTVYYCARGNPNHDFWSSYYPGSFDCWGQGTLVTVSS

SEQ ID NO: 23970 - protein, 129 aa, Artificial Sequence
  source: /note="Description of Artificial Sequence: Synthetic polypeptide"
QLQLVESGGGVVQPGRSLTLSCAASGFTFSTYGMHWVRQAPGKGLEWLAVISFDGNYKYYADYVKGRFTISRDNSRDTLYLQMNSLRPEDTGVFYCAKEERARILRYFDWLAHAAFDVWGQGTLVTVSS

SEQ ID NO: 23971 - protein, 132 aa, Artificial Sequence
  source: /note="Description of Artificial Sequence: Synthetic polypeptide"
QVQLQESGPGLVKPSETLSLTCTVSGGSVSSGFNYWAWIRQPPGKGLEWIGYIYSSGSTSYNPSLKSRVTISIDRSKNQFSLKLSSVTAADTALYYCARAPDRRFTMNIFGGDFAPTGMDVWGQGTTVTVSS

SEQ ID NO: 23972 - protein, 127 aa, Artificial Sequence
  source: /note="Description of Artificial Sequence: Synthetic polypeptide"
EVQLVESGGGLVQPGRSLRLSCAASGFTFHDYAMHWVRQAPGKGLEWVSGINWNSGSRNYADSVKGRFSISRDNAKNSLYLQMNSLRTEDTALYFCAKAFSGGDAYNWGLWDYFDYWGQGTLVTVSS

SEQ ID NO: 23973 - protein, 121 aa, Artificial Sequence
  source: /note="Description of Artificial Sequence: Synthetic polypeptide"
QVQLVQSGAEVKKPGSSVKVSCKASGVIFNNKALSWVRQAPGQGLEWIGGIVATFGTPKYAQKFQGRVTLTADESTTTVYLELSSLRSEDTAIYYCARDAGYYSGSYYEQWGQGTLVTVSP

SEQ ID NO: 23974 - protein, 126 aa, Artificial Sequence
  source: /note="Description of Artificial Sequence: Synthetic polypeptide"
EVQLVESGAEMKKPGASVKVSCRASGYSFNGYYIHWVRQAPGQGLEWLGWINPTSGGTNYAQKFLAWVTMTRDTSISTAYMELTSLRSDDTAVYYCVRGEAVLQYFDWQINWFDTWGQGTLVIVSS

SEQ ID NO: 23975 - protein, 120 aa, Artificial Sequence
  source: /note="Description of Artificial Sequence: Synthetic polypeptide"
QVQLVQSGAEVRKPGSSVKVSCRTSGGIIRKYALSWVRQAPGQGLEWMGGIIAIFGTTNYAQKFQGRVTITADESTSTVYLELSSLRYEDTAIYYCAGSATYYESRFDYWGQGTLVTVSS

SEQ ID NO: 23976 - protein, 122 aa, Artificial Sequence
  source: /note="Description of Artificial Sequence: Synthetic polypeptide"
QVQLQESGPGLVTASQTLSLTCTVSGDSIRDSDYFWTWIRQSSGKGLEWLGYMYHTGDTYLNPSLKSRLSMSIDTSKNQFSLRLSSVTAADTAVYFCARRPNIFGYNWFDPWGQGFPVTISS

SEQ ID NO: 23977 - protein, 125 aa, Artificial Sequence
  source: /note="Description of Artificial Sequence: Synthetic polypeptide"
QVQLVQSGAELKKPGSSVKVSCKASGGIFNSYAISWLRQAPGQGLEWMGGINAIFATAEYAQNFQGRVTITADESTTTAYMELTSLRSDDTAVYYCARGQGYCISPNCPNWFDPWGQGTLVTVSS

SEQ ID NO: 23978 - protein, 126 aa, Artificial Sequence
  source: /note="Description of Artificial Sequence: Synthetic polypeptide"
QVQLVQSGAEVKKPGASVKVSCKASGYNFNTYSINWMRQAPGQGLEWMGGISSYQGHTNYAQKFQGRVTMTRDTSTNTAYMELRSLRLDDTAVYYCAREEGTYYDFWSANNWFDPWGQGTLVTVSS

SEQ ID NO: 23979 - protein, 129 aa, Artificial Sequence
  source: /note="Description of Artificial Sequence: Synthetic polypeptide"
QVQLVESGAEVRKPGSSVKVSCKASGGTFSTFVINWVRQAPGQGLEWMGGIIPMFGAANYGQRLQGRVTITADESTRTGYMELRRLRSDDTAVYYCAKAQYYDSPRDAADFYFYAMDVWGQGTTVTVSS

SEQ ID NO: 23980 - protein, 119 aa, Artificial Sequence
  source: /note="Description of Artificial Sequence: Synthetic polypeptide"
QITLRESGPTLVKPTQTLTLTCTFSGFSLSTSGVGVGWIRQPPGKAPQLLALIYWDDDKRYSPSLKTRLTITKDTSKNQVVLTMTNMDPVDTATYFCALNVPPRPFDHWGPGSLVTVSS

SEQ ID NO: 23981 - protein, 120 aa, Artificial Sequence
  source: /note="Description of Artificial Sequence: Synthetic polypeptide"
QVQLVESGAEVKKPGSSVKVSCKASGGPFISYAIAWVRQAPGQGLEWMGGINPVFGAPNYAQKFQGRVTITADESTSTTYMELSSLRSEDTAIYFCAKRYSSGWYSFDYWGQGTLVTVSS

SEQ ID NO: 23982 - protein, 120 aa, Artificial Sequence
  source: /note="Description of Artificial Sequence: Synthetic polypeptide"
QVQLVQSGAEVRKPGSSVKVSCRTSGGIIRKYALSWVRQAPGQGLEWMGGIIAIFGTTNYAQKFQGRVTITADESTSTVYLELSSLRSEDTAIYYCAGSATYYESRFDYWGQGTLVTVSS

SEQ ID NO: 23983 - protein, 227 aa, Artificial Sequence
  source: /note="Description of Artificial Sequence: Synthetic polypeptide"
VQLVESGGGVVQPGKSPRLSCAASGPTFSSYAVHWVRQAPGKGLEWVTLISYDGANQYYADSVKGRFTISRDNSKNTVYLQMNSLRPEDTAVYYCAVPGPVFGIFPPWSYFDNWGQGILVTVSSASTKGPSVFPLAPSSKSTSGGTAALGCLVKDYFPEPVTVSWNSGALTSGVHTFPAVLQSSGLYSLSSVVTVPSSSLGTQTYICNVNHKPSNTKVDKKVEPKSC

SEQ ID NO: 23984 - protein, 222 aa, Artificial Sequence
  source: /note="Description of Artificial Sequence: Synthetic polypeptide"
EVHLQQSGPELVKPGASVKMSCKTSGYTFTEYTIHWMKQSHGKSLEWIGGIFPNNGDTTYNQKFKVRATLTVGRSSSTAYMDLRSLTSEDSAVYYCVRNYGSSYGYFDVWGAGTTVTVSSAKTTPPSVYPLAPGSAAQTNSMVTLGCLVKGYFPEPVTVTWNSGSLSSGVHTFPAVLQSDLYTLSSSVTVPSSTWPSETVTCNVAHPASSTKVDKKIVPRDC

SEQ ID NO: 23985 - protein, 124 aa, Artificial Sequence
  source: /note="Description of Artificial Sequence: Synthetic polypeptide"
QVQLVESGGNLVQPGGSLRLSCAASGFIFSNYALTWVRQAPGKGLEWVSSVTGGGSSTYYADSLKGRFTISRDNSKNMLYLQMNSLRPEDTAVYYCAKSVETQYFYDSNGYAYWGRGTPVTVSS

SEQ ID NO: 23986 - protein, 106 aa, Artificial Sequence; identical to SEQ ID NO: 4042
  source: /note="Description of Artificial Sequence: Synthetic polypeptide"

SEQ ID NO: 23987 - protein, 110 aa, Artificial Sequence
  source: /note="Description of Artificial Sequence: Synthetic polypeptide"
EIVMTQSPFSLSLSPGDRATLSCRASQSVTNSYLAWYQQKPGQAPRLLISGASSRATGIPDRFSGSGSGTDFTLTISRLEPEDFAVYYCQQYSSSPRTFGQGTKVEIKRT

SEQ ID NO: 23988 - protein, 110 aa, Artificial Sequence
  source: /note="Description of Artificial Sequence: Synthetic polypeptide"
EIVMTQSPATVSVSPGERATLSCRASQSVSNNLAWYQQKPGQAPRLLIYGASTRATGIPARFSGSGSGTEFTLTISSLQSEDFAIYYCQQYHNWPPLTFGGGTKVEIKRT

SEQ ID NO: 23989 - protein, 236 aa, Artificial Sequence
  source: /note="Description of Artificial Sequence: Synthetic polypeptide"
MDMRVLAQLLGLLLLWLRGARCDIQMTQSPSSLSASVGDRVTITCRASQNIYKYLNWYQQRPGKAPKGLISAASGLQSGVPSRFSGSGSGTDFTLTITSLQPEDFATYYCQQSYSPPLTFGGGTRVEIKRTVAAPSVFIFPPSDEQLKSGTASVVCLLNNFYPREAKVQWKVDNALQSGNSQESVTEQDSKDSTYSLSSTLTLSKADYEKHKVYACEVTHQGLSSPVTKSFNRGEC

SEQ ID NO: 23990 - protein, 128 aa, Artificial Sequence
  source: /note="Description of Artificial Sequence: Synthetic polypeptide"
MDMRVLAQLLGLLLLWLRGARCDIQMTQSPSSLSASVGDRVTITCRTSQSISSYLNWYQQKPGKAPKLLIYAASSLQSGVPSRFSGSGSGTDFTLTISGLQPEDFATYYCQQSYSMPAFGQGTKLEIK

SEQ ID NO: 23991 - protein, 107 aa, Artificial Sequence
  source: /note="Description of Artificial Sequence: Synthetic polypeptide"
DIQLTQSPVSLSLSPGERATLSCRASQSVSSSYLVWYQQKPGQAPRLLIYGASSRAPGIPDRFSGSGSGTDFTLTISRLEREDFAVYYCQQYGRSFGQGTKVEIKRT

SEQ ID NO: 23992 - protein, 107 aa, Artificial Sequence
  source: /note="Description of Artificial Sequence: Synthetic polypeptide"
EIVLTQSPGTLSLSPGERATLSCRASQSVDSNYLGWYQQRPGQAPRLLIYGASSRATGVPDRFSASGSGTDFTLSISRLEPEDFAVYYCQQYGSSFGQGTKVEIKRT

SEQ ID NO: 23993 - protein, 109 aa, Artificial Sequence
  source: /note="Description of Artificial Sequence: Synthetic polypeptide"
DILMTQSPSSMSVSLGDTVSITCHASQDISSNMGWLQQKPGKSLKGLIYHGTNLEDGVPSRFSGSGSGPDYSLTISSLESEDFADYYCVQYIQFPWTFGGGTKLEIKRA

SEQ ID NO: 23994 - protein, 108 aa, Artificial Sequence
  source: /note="Description of Artificial Sequence: Synthetic polypeptide"
DIVMTQSQKFMSASVGDRVSVTCKASQNVGTHLAWYQQKPGQSPKALIYSASYRYSGVPDRFTGSGSGTDFTLTISNVQSGDLADYFCQQYNNFPLTFGAGTKLEIKR

SEQ ID NO: 23995 - protein, 108 aa, Artificial Sequence; identical to SEQ ID NO: 23994
  source: /note="Description of Artificial Sequence: Synthetic polypeptide"

SEQ ID NO: 23996 - protein, 107 aa, Artificial Sequence
  source: /note="Description of Artificial Sequence: Synthetic polypeptide"
DIQMTQSPSSLSASVGDRVTISCQASQDITNFLNWYQQKSGEAPKLLIYDASDLETGVPSRFSGSGSGTDFTFTISRLQPEDTATYYCQQYDDLPYTFGQGTKVEIK

SEQ ID NO: 23997 - protein, 218 aa, Artificial Sequence
  source: /note="Description of Artificial Sequence: Synthetic polypeptide"
DIVLTQSPGSLTVSLGQRATISCRASESVDNFGKSFMHWYQQKPGQSPKLLIYRASNREFGIPARFNGSGSGTDFALTINPVEADDVATYFCQQSNEDPRTFGGGTKLEIKRADAAPTVSIFPPSSEQLTSGGASVVCFLNNFYPKDINVKWKIDGSERQNGVLNSWTDQDSKDSTYSMSSTLTLTKDEYERHNSYTCEATHKTSTSPIVKSFNRNEC

SEQ ID NO: 23998 - protein, 217 aa, Artificial Sequence
  source: /note="Description of Artificial Sequence: Synthetic polypeptide"
  MOD_RES (215)..(215): Any amino acid
QLVLTQSPSASASLGASVKLTCTLSSRHSDYAIGWHQQQPGKGPRYLMKLNPDGSHTKGDGIPDRFSGSSSGAERYLTISNLLSEDEADYYCQTWGTGIQVFGGGTRLTVISQPKAAPSVTLFPPSSEELQANKATLVCLISDFYPGAVTVAWKADSSPVKAGVETTTPSKQSNNKYAASSYLSLTPEQWKSHKSYSCQVTHEGSTVEKTVAPTXCS

SEQ ID NO: 23999 - protein, 234 aa, Artificial Sequence [sequence omitted]

SEQ ID NO: 24000 - protein, 237 aa, Artificial Sequence [sequence omitted]

SEQ ID NO: 24001 - protein, 126 aa, Artificial Sequence
  source: /note="Description of Artificial Sequence: Synthetic polypeptide"
MAWFPLFLGVLAYCTGSMASYELTQPPSVSVSPGQTASITCSGDKLGDKFVSWYHQKPGQSPLKVIYQDNRRPSGIPERFSGSNSGNTATLTISGTQAMDEADYYCQTWDSSTVVFGGGTKLTVLG

SEQ ID NO: 24002 - protein, 113 aa, Artificial Sequence
  source: /note="Description of Artificial Sequence: Synthetic polypeptide"
QSVLTQPPSVSGAPGQRVTISCTGSSSNIGAGYDVHWYQLLPGTAPKLLIYAFSDRPSGVPDRFSGSKSGTSASLAITGLQAEDEGDYYCQSYDTGLSGLEVVFGGGTKLTVL

SEQ ID NO: 24003 - protein, 217 aa, Artificial Sequence
  source: /note="Description of Artificial Sequence: Synthetic polypeptide"
QSVLTQPPSVSAAPGQKVTISCSGSSSNIGNDYVSWYQQLPGTAPKLLIYDNNKRPSGIPDRFSGSKSGTSATLGITGLQTGDEANYYCATWDRRPTAYVVFGGGTKLTVLGQPKAAPSVTLFPPSSEELQANKATLVCLISDFYPGAVTVAWKADSSPVKAGVETTTPSKQSNNKYAASSYLSLTPEQWKSHRSYSCQVTHEGSTVEKTVAPTECS

SEQ ID NO: 24004 - protein, 214 aa, Artificial Sequence
  source: /note="Description of Artificial Sequence: Synthetic polypeptide"
EIVLTQSPATLSLSPGERATLSCRASENIWNNLAWYQQKPGQAPRLLISGASTGATGVPSRFRGSGSRTEFTLTISSLQSEDFAIYFCQQYNSWPRTFGPGTKVEIKRTVAAPSVFIFPPSDEQLKSGTASVVCLLNNFYPREAKVQWKVDNALQSGNSQESVTEQDSKDSTYSLSSTLTLSKADYEKHKVYACEVTHQGLSSPVTKSFNRGEC

SEQ ID NO: 24005 - protein, 215 aa, Artificial Sequence
  source: /note="Description of Artificial Sequence: Synthetic polypeptide"
EVVLTQSPGTLALPPGERATLSCRASHRVGSTYIAWYQQKSGQAPRRLIYGASNRATDIPDRFSGSGSGTDFTLTIRRLEPEDSAVYYCQQFSVSPWTFGQGTRVEIKRTVAAPSVFIFPPSDEQLKSGTASVVCLLNNFYPREAKVQWKVDNALQSGNSQESVTEQDSKDSTYSLSSTLTLSKADYEKHKVYACEVTHQGLSSPVTKSFNRGEC

SEQ ID NO: 24006 - protein, 114 aa, Artificial Sequence
  source: /note="Description of Artificial Sequence: Synthetic polypeptide"
EIVLTQSPATLSLYPGERATLSCRASQSVSRYLAWYQQKPGQAPRLLIYDASNRATGIPARFSGSGSGTDFTLTISSLEPEDFAVYYCCDRQQRSNWLKITFGQGTRLEIKGTV

SEQ ID NO: 24007 - protein, 115 aa, Artificial Sequence
  source: /note="Description of Artificial Sequence: Synthetic polypeptide"
DIVMTQSPLSLPVTPGEPASISCRSSQSLLHSNGHIYFDWYLQKPGQSPQLLIYLVSKRASGVPDRFSGSGSGTDFTLKISRVEAEDVGVYYCMQALETPFTFGPGTKVHIKRTV

SEQ ID NO: 24008 - protein, 115 aa, Artificial Sequence
  source: /note="Description of Artificial Sequence: Synthetic polypeptide"
QSALTQPASVSGSPGQSITISCTGTSSDVGAYNYVSWYQHHPGKAPKLMIYDVTYRPSGVSTRFSGSKSGNTASLTISGLQAEDEADYYCSSQSRSSTLVIFGGGTKLTVLGQPK

SEQ ID NO: 24009 - protein, 112 aa, Artificial Sequence
  source: /note="Description of Artificial Sequence: Synthetic polypeptide"
EIVLTQSPGTLSLSPGERATLSCRASQSVSSSYLAWYQQKPGQAPRLLIYGASTRATGIPDRFSGRGSGTDFTLTISSLEPEDFAVYYCQNYGSPFLFTFGPGTKVDIKRTV

SEQ ID NO: 24010 - protein, 111 aa, Artificial Sequence
  source: /note="Description of Artificial Sequence: Synthetic polypeptide"
EIVLTQSPGTLSLSPGERATLSCRASQSVSSSYLAWYQQKPGQAPRLLIFGASTRATGIPDRFSGSGSGTDFTLTISRLEPEDFAVFYCQQYGSLPLTFGGGTKVEIKGTV

SEQ ID NO: 24011 - protein, 235 aa, Artificial Sequence
  source: /note="Description of Artificial Sequence: Synthetic polypeptide"
METPAQLLFLLLLWLPDTTGEIVLTQSPGTLSLSPGERATLSCRASQSLSSSSLVWYQQKPGQAPRLLIYGASSRATGIPDRFSGSGSGTDFTLTISRLEPEDFAVYYCQQYGNSPYTFGQGTQVEIKRTVAAPSVFIFPPSDEQLKSGTASVVCLLNNFYPREAKVQWKVDNALQSGNSQESVTEQDSKDSTYSLSSTLTLSKADYEKHKVYACEVTHQGLSSPVTKSFNRGEC

SEQ ID NO: 24012 - protein, 234 aa, Artificial Sequence
  source: /note="Description of Artificial Sequence: Synthetic polypeptide"
MEAPAQLLFLLLLWLPDTTGEIVLTQSPATLSLSPGERATLSCRASENIWNNLAWYQQKPGQAPRLLISGASTGATGVPSRFRGSGSRTEFTLTISSLQSEDFAIYFCQQYNSWPRTFGPGTKVEIKRTVAAPSVFIFPPSDEQLKSGTASVVCLLNNFYPREAKVQWKVDNALQSGNSQESVTEQDSKDSTYSLSSTLTLSKADYEKHKVYACEVTHQGLSSPVTKSFNRGEC

SEQ ID NO: 24013 - protein, 235 aa, Artificial Sequence
  source: /note="Description of Artificial Sequence: Synthetic polypeptide"
METPAQLLFLLLLWLPDTTGETVLTQSPGTLSLSPGERATLSCRASQSVSISYLAWYQRKPGQAPRLLIYGASRRATGIPDRFSGSGSGTDFTLTISRLEPEDFAVYYCQQYGSSPYTFGQGTKLEIKRTVAAPSVFIFPPSDEQLKSGTASVVCLLNNFYPREAKVQWKVDNALQSGNSQESVTEQDSKDSTYSLSSTLTLSKADYEKHKVYACEVTHQGLSSPVTKSFNRGEC

SEQ ID NO: 24014 - protein, 111 aa, Artificial Sequence
  source: /note="Description of Artificial Sequence: Synthetic polypeptide"
LPVLTQSSSASASLGSSVKLTCTLSSGHSNYIIAWHQQQPGKAPRYLMKVNSDGSHTKGDGIPDRFSGSSSGADRYLTISNLQSEDEASYFCETWDTKIHVFGTGTKVSVL

SEQ ID NO: 24015 - protein, 219 aa, Artificial Sequence
  source: /note="Description of Artificial Sequence: Synthetic polypeptide"
QSVLTQPPSVSGAPGQRVTISCTGSSSNIGAGYAVHWYQQLPGTAPKLLISGNSNRPSGVPDRFSGSKSGTSASLAITGLQAEDEADYYCQSYDSSLSGSVFGGGTKLTVLGQPKAAPSVTLFPPSSEELQANKATLVCLISDFYPGAVTVAWKADSSPVKAGVETTTPSKQSNNKYAASSYLSLTPEQWKSHRSYSCQVHEGSTVEKTVAPTECSARQ

SEQ ID NO: 24016 - protein, 106 aa, Artificial Sequence
  source: /note="Description of Artificial Sequence: Synthetic polypeptide"
SYELTQLPSVSVSPGQTATITCSGDRLGDKYACWYQQKPGQSPVLVIFQDTKRPSGIPERFSGSNSGNTATLTISGTQAMDEADYYCQAWDSNIGVFGGGTKLTVL

SEQ ID NO: 24017 - protein, 110 aa, Artificial Sequence
  source: /note="Description of Artificial Sequence: Synthetic polypeptide"
DIVMTQSPASLAVSLGQRATISYRASKSVSTSGYSYMHWNQQKPGQPPRLLIYLVSNLESGVPARFSGSGSGTDFTLNIHPVEEEDAATYYCQHIRELTRSEGGPKWISN

SEQ ID NO: 24018 - protein, 110 aa, Artificial Sequence
  source: /note="Description of Artificial Sequence: Synthetic polypeptide"
DIQMTQSPASLAVSLGQRATISYRASKSVSTSGYSYMHWNQQKPGQPPRLLIYLVSNLESGVPARFSGSGSGTDFTLNIHPVEEEDAATYYCQHIRELTRSEGGPSWRSN

SEQ ID NO: 24019 - protein, 217 aa, Artificial Sequence
  source: /note="Description of Artificial Sequence: Synthetic polypeptide"
QPVLTQPPSASGTPGQRVTISCSGSSSNIGSNTVSWYQQVPGTAPKLLIYGNNERPSGVPDRFSGSKSATSASLAISGLQSEDEADYYCAAWDDSLNGFWVFGGGTKLTVLGQPKAAPSVTLFPPSSEELQANKATLVCLISDFYPGAVTVAWKADSSPVKAGVETTTPSKQSNNKYAASSYLSLTPEQWKSHKSYSCQVTHEGSTVEKTVAPTECS

SEQ ID NO: 24020 - protein, 217 aa, Artificial Sequence
  source: /note="Description of Artificial Sequence: Synthetic polypeptide"
QPVLTQPPSASGSPGQRVTISCSGSSSNIGSYTVNWYQQLPGTAPKLLIYSLNQRPSGVPDRFSGSKSGTSASLAISGLQSEDEAVYYCAAWDDSLSAHVVFGGGTKLTVLGQPKAAPSVTLFPPSSEELQANKATLVCLISDFYPGAVTVAWKADSSPVKAGVETTTPSKQSNNKYAASSYLSLTPEQWKSHRSYSCQVTHEGSTVEKTVAPTECS

SEQ ID NO: 24021 - protein, 214 aa, Artificial Sequence
  source: /note="Description of Artificial Sequence: Synthetic polypeptide"
SYVLTQPPSVSVAPGETATVTCGGNNIGSKSVHWYQQKPGQAPVVVIYYDGDRPSGIPERFSGSNSGDTATLTISRVEAGDEADYYCLVWDYTSVHYVFGTGTKVTVLGQPKANPTVTLFPPSSEELQANKATLVCLISDFYPGAVTVAWKADGSPVKAGVETTKPSKQSNNKYAASSYLSLTPEQWKSHRSYSCQVTHEGSTVEKTVAPTECS

SEQ ID NO: 24022 - protein, 218 aa, Artificial Sequence
  source: /note="Description of Artificial Sequence: Synthetic polypeptide"
EIVMTQSPDSLAVSLGERATINCKSSQSVTYNYKNYLAWYQQKPGQPPKLLIYWASTRESGVPDRFSGSGSGTDFTLTISSLQAEDVAVYYCQQYYRTPPTFGGGTKLDIKGSVAAPSVFIFPPSDEQLKSGTASVVCLLNNFYPREAKVQWKVDNALQSGNSQESVTEQDSKDSTYSLSSTLTLSKADYEKHKVYACEVTHQGLSSPVTKSFNRGEC

SEQ ID NO: 24023 - protein, 111 aa, Artificial Sequence
  source: /note="Description of Artificial Sequence: Synthetic polypeptide"
EIVMTQSPDSLAVSLGERATINCKSSQSVTYNYKNYLAWYQQKPGQPPKLLIYWASTRESGVPDRFSGSGSGTDFTLTISSLQAEDVAVYYCQQYYRTPPTFGGGTKLDIK

SEQ ID NO: 24024 - protein, 111 aa, Artificial Sequence
  source: /note="Description of Artificial Sequence: Synthetic polypeptide"
DIQMTQSPSSLSASVGDRVTITCRSSQSITFQYKNYLAWYQQKPGKAPKLLIYWGSYLESGVPSRFSGSGSGTDFTLTISSLQPEDFATYYCQQHYRTPPSFGQGTKVEIK

SEQ ID NO: 24025 - protein, 111 aa, Artificial Sequence
  source: /note="Description of Artificial Sequence: Synthetic polypeptide"
DIQMTQSPSSLSASVGDRVTITCRSSQSITFRYKNYLAWYQQKPGKAPKLLIYWGSYLESGVPSRFSGSGSGTDFTLTISSLQPEDFATYYCQQHYRTPPSFGQGTKVEIK

SEQ ID NO: 24026 - protein, 111 aa, Artificial Sequence
  source: /note="Description of Artificial Sequence: Synthetic polypeptide"
DIQMTQSPSSLSASVGDRVTITCRSSQSITFEYKNYLAWYQQKPGKAPKLLIYWGSYLESGVPSRFSGSGSGTDFTLTISSLQPEDFATYYCQQHYRTPPSFGQGTKVEIK

SEQ ID NO: 24027 - protein, 111 aa, Artificial Sequence
  source: /note="Description of Artificial Sequence: Synthetic polypeptide"
DIQMTQSPSSLSASVGDRVTITCRSSQSITFDYKNYLAWYQQKPGKAPKLLIYWGSTRESGVPSRFSGSGSGTDFTLTISSLQPEDFATYYCQQHYRTPPSFGQGTKVEIK

SEQ ID NO: 24028 - protein, 111 aa, Artificial Sequence
  source: /note="Description of Artificial Sequence: Synthetic polypeptide"
DIQMTQSPSSLSASVGDRVTITCRSSQSITWNYKNYLAWYQQKPGKAPKLLIYWGSYLESGVPSRFSGSGSGTDFTLTISSLQPEDFATYYCQQHYRTPPSFGQGTKVEIK

SEQ ID NO: 24029 - protein, 111 aa, Artificial Sequence
  source: /note="Description of Artificial Sequence: Synthetic polypeptide"
DIQMTQSPSSLSASVGDRVTITCRSSQSITWDYKNYLAWYQQKPGKAPKLLIYWGSYLESGVPSRFSGSGSGTDFTLTISSLQPEDFATYYCQQHYRTPPSFGQGTKVEIK

SEQ ID NO: 24030 - protein, 111 aa, Artificial Sequence
  source: /note="Description of Artificial Sequence: Synthetic polypeptide"
DIQMTQSPSSLSASVGDRVTITCRSSQSITWQYKNYLAWYQQKPGKAPKLLIYWGSYLESGVPSRFSGSGSGTDFTLTISSLQPEDFATYYCQQHYRTPPSFGQGTKVEIK

SEQ ID NO: 24031 - protein, 111 aa, Artificial Sequence
  source: /note="Description of Artificial Sequence: Synthetic polypeptide"
DIQMTQSPSSLSASVGDRVTITCRSSQSITWRYKNYLAWYQQKPGKAPKLLIYWGSYLESGVPSRFSGSGSGTDFTLTISSLQPEDFATYYCQQHYRTPPSFGQGTKVEIK

SEQ ID NO: 24032 - protein, 111 aa, Artificial Sequence
  source: /note="Description of Artificial Sequence: Synthetic polypeptide"
DIQMTQSPSSLSASVGDRVTITCRSSQSITWEYKNYLAWYQQKPGKAPKLLIYWGSYLESGVPSRFSGSGSGTDFTLTISSLQPEDFATYYCQQHYRTPPSFGQGTKVEIK

SEQ ID NO: 24033 - protein, 111 aa, Artificial Sequence
  source: /note="Description of Artificial Sequence: Synthetic polypeptide"
EIVMTQSPDSLAVSLGERATINCKSSQSVTFSYKNYLAWYQQKPGQPPKLLIYWASTRESGVPDRFSGSGSGTDFTLTISSLQAEDVAVYYCQQYYRTPPTFGGGTKLDIK

SEQ ID NO: 24034 - protein, 111 aa, Artificial Sequence
  source: /note="Description of Artificial Sequence: Synthetic polypeptide"
EIVMTQSPDSLAVSLGERATINCKSSQSVTFDYKNYLAWYQQKPGQPPKLLIYWASTRESGVPDRFSGSGSGTDFTLTISSLQAEDVAVYYCQQYYRTPPTFGGGTKLDIK

SEQ ID NO: 24035 - protein, 111 aa, Artificial Sequence
  source: /note="Description of Artificial Sequence: Synthetic polypeptide"
EIVMTQSPDSLAVSLGERATINCKSSQTVTFNYKNYLAWYQQKPGQPPKLLIYWASTRESGVPDRFSGSGSGTDFTLTISSLQAEDVAVYYCQQHYRTPPSFGGGTKLDIK

SEQ ID NO: 24036 - protein, 111 aa, Artificial Sequence
  source: /note="Description of Artificial Sequence: Synthetic polypeptide"
EIVMTQSPDSLAVSLGERATINCKSSQTLSFNYKNYLAWYQQKPGQPPKLLIYWASTRESGVPDRFSGSGSGTDFTLTISSLQAEDVAVYYCQQHYRTPPSFGGGTKLDIK

SEQ ID NO: 24037 - protein, 111 aa, Artificial Sequence
  source: /note="Description of Artificial Sequence: Synthetic polypeptide"
EIVMTQSPDSLAVSLGERATINCKSSQTVTFNYKNYLAWYQQKPGQPPKLLIYFASTRESGVPDRFSGSGSGTDFTLTISSLQAEDVAVYYCQQHYRTPPSFGGGTKLDIK

SEQ ID NO: 24038 - protein, 111 aa, Artificial Sequence
  source: /note="Description of Artificial Sequence: Synthetic polypeptide"
EIVMTQSPDSLAVSLGERATINCKSSQTLSFNYKNYLAWYQQKPGQPPKLLIYFASTRESGVPDRFSGSGSGTDFTLTISSLQAEDVAVYYCQQHYRTPPSFGGGTKLDIK

SEQ ID NO: 24039 - protein, 111 aa, Artificial Sequence
  source: /note="Description of Artificial Sequence: Synthetic polypeptide"
EIVMTQSPDSLAVSLGERATINCKSSQSVTWSYKNYLAWYQQKPGQPPKLLIYWASTRESGVPDRFSGSGSGTDFTLTISSLQAEDVAVYYCQQYYRTPPTFGGGTKLDIK

SEQ ID NO: 24040 - protein, 111 aa, Artificial Sequence
  source: /note="Description of Artificial Sequence: Synthetic polypeptide"
EIVMSQSPDTLAVTLGERASINCKSSQTVTFNYKNYLAWYQQKPGQPPKVLIYWASARETGVPERFSGSGSGTDFTLTISSLQAEDVAVYYCQQHYRTPPSFGQGTKLEIK

SEQ ID NO: 24041 - protein, 111 aa, Artificial Sequence
  source: /note="Description of Artificial Sequence: Synthetic polypeptide"
EIVMTQSPDSLAVSLGERATINCKSSQTVTFNYKNYLAWYQQKPGQPPKLLIYWASTRESGVPDRFSGSGSGTDFTLTISSLQAEDVAVYYCQQHYRTPPSFGTGTKLDIK

SEQ ID NO: 24042 - protein, 111 aa, Artificial Sequence
  source: /note="Description of Artificial Sequence: Synthetic polypeptide"
EIVMTQSPDSLAVSLGERATINCKSSQTVTFNYKNYLAWYQQKPGQPPKLLIYWASTRESGVPDRFSGSGSGTDFTLTISSLQAEDVAVYYCQQHYRTPPSFGSGTKLDIK

SEQ ID NO: 24043 - protein, 111 aa, Artificial Sequence
  source: /note="Description of Artificial Sequence: Synthetic polypeptide"
EIVMTQSPDSLAVSLGERATINCKSSQTVTFNYKNYLAWYQQKPGQPPKLLIYWASTRESGVPDRFSGSGSGTDFTLTISSLQAEDVAVYYCQQHYRTPPSFGQGTKLDIK

SEQ ID NO: 24044 - protein, 111 aa, Artificial Sequence
  source: /note="Description of Artificial Sequence: Synthetic polypeptide"
EIVMTQSPDSLAVSLGERATINCKSSQTVTFNYKNYLAWYQQKPGQPPKLLIYWASTRESGVPDRFSGSGSGTDFTLTISSLQAEDVAVYYCQQHYRTPPSFGNGTKLDIK

SEQ ID NO: 24045 - protein, 111 aa, Artificial Sequence
  source: /note="Description of Artificial Sequence: Synthetic polypeptide"
EIVMTQSPDSLAVSLGERATINCKSSQTLSFNYKNYLAWYQQKPGQPPKLLIYWASTRESGVPDRFSGSGSGTDFTLTISSLQAEDVAVYYCQQHYRTPPSFGTGTKLDIK

SEQ ID NO: 24046 - protein, 111 aa, Artificial Sequence
  source: /note="Description of Artificial Sequence: Synthetic polypeptide"
EIVMTQSPDSLAVSLGERATINCKSSQTLSFNYKNYLAWYQQKPGQPPKLLIYWASTRESGVPDRFSGSGSGTDFTLTISSLQAEDVAVYYCQQHYRTPPSFGSGTKLDIK

SEQ ID NO: 24047 - protein, 111 aa, Artificial Sequence
  source: /note="Description of Artificial Sequence: Synthetic polypeptide"
EIVMTQSPDSLAVSLGERATINCKSSQTLSFNYKNYLAWYQQKPGQPPKLLIYWASTRESGVPDRFSGSGSGTDFTLTISSLQAEDVAVYYCQQHYRTPPSFGQGTKLDIK

SEQ ID NO: 24048 - protein, 111 aa, Artificial Sequence
  source: /note="Description of Artificial Sequence: Synthetic polypeptide"
EIVMTQSPDSLAVSLGERATINCKSSQTLSFNYKNYLAWYQQKPGQPPKLLIYWASTRESGVPDRFSGSGSGTDFTLTISSLQAEDVAVYYCQQHYRTPPSFGNGTKLDIK

SEQ ID NO: 24049 - protein, 111 aa, Artificial Sequence
  source: /note="Description of Artificial Sequence: Synthetic polypeptide"
DIQMTQSPSSLSASVGDRVTITCRSSQSITFNYKNYLAWYQQKPGKAPKLLIYWGSYLESGVPSRFSGSGSGTDFTLTISSLQPEDFATYYCQQHYRTPPSFGQGTKVEIK

SEQ ID NO: 24050 - protein, 111 aa, Artificial Sequence
  source: /note="Description of Artificial Sequence: Synthetic polypeptide"
DIQMTQSPSSLSASVGDRVTITCRSSQSITFNYKNYLGWYQQKPGKAPKLLIYWGSYLESGVPSRFSGSGSGTDFTLTISSLQPEDFATYYCQQHYRTPPSFGQGTKVEIK

SEQ ID NO: 24051 - protein, 111 aa, Artificial Sequence
  source: /note="Description of Artificial Sequence: Synthetic polypeptide"
DIVMTQSPDTLAVTLGERATIQCKSSQTVTFNYKNYLAWYQQKPGQPPKLLIYWASTRESGVPDRFSGSGSGTDFTLTITSLQAEDVAVYYCQQHYRTPPSFGQGTKLDIK

SEQ ID NO: 24052 - protein, 111 aa, Artificial Sequence
  source: /note="Description of Artificial Sequence: Synthetic polypeptide"
DIVMTQSPDTVAVTVGERATINCKSSQTVTFNYKNYLAWYQQKPGQPPKLLIYWASTRESGVPDRFSGSGSGTDFTLTISSLQAEDVAVYYCQQHYRTPPSFGQGTKLDIK

SEQ ID NO: 24053 - protein, 111 aa, Artificial Sequence
  source: /note="Description of Artificial Sequence: Synthetic polypeptide"
DIVMTQSPDTVAVTLGERATIDCKSSQTVTFNYKNYLAWYQQKPGQPPKLLIYWASTRESGVPDRFSGSGSGTDFTLTISSLQAEDVAVYYCQQHYRTPPSFGQGTKLDIK

SEQ ID NO: 24054 - protein, 111 aa, Artificial Sequence
  source: /note="Description of Artificial Sequence: Synthetic polypeptide"
DIVMTQSPDTLAVTVGERATIRCKSSQTVTFNYKNYLAWYQQKPGQPPKLLIYWASTRESGVPDRFSGSGSGTDFTLTISSLQAEDVAVYYCQQHYRTPPSFGQGTKLDIK

SEQ ID NO: 24055 - protein, 111 aa, Artificial Sequence
  source: /note="Description of Artificial Sequence: Synthetic polypeptide"
DIVMTQSPDTLAVSRGERATIDCKSSQTVTFNYKNYLAWYQQKPGQPPKLLIYWASTRESGVPDRFSGSGSGTDFTLTISSLQAEDEAVYYCQQHYRTPPSFGQGTKLDIK

SEQ ID NO: 24056 - protein, 111 aa, Artificial Sequence
  source: /note="Description of Artificial Sequence: Synthetic polypeptide"
DIQMTQSPSSLSASVGDRVTITCRSSQSITFDYKNYLAWYQQKPGKAPKLLIYWGSYLESGVPSRFSGSGSGTDFTLTISSLQPEDFATYYCQQHYRTPPSFGQGTKVEIK

SEQ ID NO: 24057 - protein, 111 aa, Artificial Sequence
  source: /note="Description of Artificial Sequence: Synthetic polypeptide"
DIQMTQSPSSLSASVGDRVTITCRSSQSITFNYKNYLAWYQQKPGKAPKLLIYWGSTLESGVPSRFSGSGSGTDFTLTISSLQPEDFATYYCQQHYRTPPSFGQGTKVEIK

SEQ ID NO: 24058 - protein, 111 aa, Artificial Sequence
  source: /note="Description of Artificial Sequence: Synthetic polypeptide"
DIQMTQSPSSLSASVGDRVTITCRSSQSITFNYKNYLAWYQQKPGKAPKLLIYWGSHLESGVPSRFSGSGSGTDFTLTISSLQPEDFATYYCQQHYRTPPSFGQGTKVEIK

SEQ ID NO: 24059 - protein, 111 aa, Artificial Sequence
  source: /note="Description of Artificial Sequence: Synthetic polypeptide"
DIQMTQSPSSLSASVGDRVTITCRSSQSITFNYKNYLAWYQQKPGKAPKLLIYWGSKLESGVPSRFSGSGSGTDFTLTISSLQPEDFATYYCQQHYRTPPSFGQGTKVEIK

SEQ ID NO: 24060 - protein, 111 aa, Artificial Sequence
  source: /note="Description of Artificial Sequence: Synthetic polypeptide"
DIQMTQSPSSLSASVGDRVTITCRSSQSITFNYKNYLAWYQQKPGKAPKLLIYWGSDLESGVPSRFSGSGSGTDFTLTISSLQPEDFATYYCQQHYRTPPSFGQGTKVEIK

SEQ ID NO: 24061 - protein, 111 aa, Artificial Sequence
  source: /note="Description of Artificial Sequence: Synthetic polypeptide"
DIQMTQSPSSLSASVGDRVTITCRSSQSITFNYKNYLAWYQQKPGKAPKLLIYWGSYLESGVPSRFSGSGSGTDFTLTISSLQPEDVATYYCQQHYRTPPSFGQGTKVEIK

SEQ ID NO: 24062 - protein, 111 aa, Artificial Sequence
  source: /note="Description of Artificial Sequence: Synthetic polypeptide"
DIQMTQSPSSLSASVGDRVTITCRSSQSITFNYKNYLAWYQQKPGKAPKLLIYWGSYLESGVPSRFSGSGSGTDFTLTISSLQPEDKATYYCQQHYRTPPSFGQGTKVEIK

SEQ ID NO: 24063 - protein, 111 aa, Artificial Sequence
  source: /note="Description of Artificial Sequence: Synthetic polypeptide"
DIQMTQSPSSLSASVGDRVTITCRSSQSITFNYKNYLAWYQQKPGKAPKLLIYWGSYLESGVPSRFSGSGSGTDFTLTISSLQPEDDATYYCQQHYRTPPSFGQGTKVEIK

SEQ ID NO: 24064 - protein, 111 aa, Artificial Sequence
  source: /note="Description of Artificial Sequence: Synthetic polypeptide"
DIQMTQSPSSLSASVGDRVTITCRSSQSITFNYKNYLAWYQQKPGKAPKLLIYWGSYLESGVPSRFSGSGSGTDFTLTISSLQPEDFATYYCQQYYRTPPSFGQGTKVEIK

SEQ ID NO: 24065 - protein, 111 aa, Artificial Sequence
  source: /note="Description of Artificial Sequence: Synthetic polypeptide"
DIQMTQSPSSLSASVGDRVTITCRSSQSITFNYKNYLAWYQQKPGKAPKLLIYWGSTRESGVPSRFSGSGSGTDFTLTISSLQPEDFATYYCQQHYRTPPSFGQGTKVEIK

SEQ ID NO: 24066 - protein, 219 aa, Artificial Sequence; identical to SEQ ID NO: 24015
  source: /note="Description of Artificial Sequence: Synthetic polypeptide"

SEQ ID NO: 24067 - protein, 110 aa, Artificial Sequence
  source: /note="Description of Artificial Sequence: Synthetic polypeptide"
EIVMTQSPATLSVSPGERVTLSCRASQSITDGLAWYQQKSGQAPRLLIYGASTRATGIPARFSGSGSGTEFTLTISSLQSEDFAVYYCQQYNNWPPVTFGQGTKVEIKRT

SEQ ID NO: 24068 - protein, 216 aa, Artificial Sequence
  source: /note="Description of Artificial Sequence: Synthetic polypeptide"
QSALTQPASVSGSPGQSITISCTGTSSDVGSYNLVSWYQQHPGKAPKLMIYEVSKRPSGVSNRFSGSKSGNTASLTISGLQAEDEADYYCHLYVGSSNWVFGGGTKLAVLGQPKAAPSVTLFPPSSKELQANKATLVCPISDFYPGAVTVAWKADSSPVKAGVETTTPSKQSNNKYAASSYLSLTPEQWKSHKSYSCQVTHEGSTVEKTVAPTECS

SEQ ID NO: 24069 - protein, 111 aa, Artificial Sequence
  source: /note="Description of Artificial Sequence: Synthetic polypeptide"
DIQLTQSPSSLSASAGDRVSMTCRASQIISSSLNWYQQKPGKAPKLLIYAASNLQSGVPSRFSGSGSGTDFTLTISSLQPEDFATYYCQQSYSTPPELTFGGGTKVDIKRT

SEQ ID NO: 24070 - protein, 109 aa, Artificial Sequence
  source: /note="Description of Artificial Sequence: Synthetic polypeptide"
AIQMTQSPSSLSASVGDRVTITCRASQNIRSYLNWYQQKPGKAPNLLIYGTTSLESGVPSRFSGSGSGTDFTLTISSLQPEDFATYYCQQSYHTPQTFGQGTKVEIKRT

SEQ ID NO: 24071 - protein, 109 aa, Artificial Sequence
  source: /note="Description of Artificial Sequence: Synthetic polypeptide"
DIQLTQSPSSLSASVGDRVTITCRASQGITDYLAWYQQKPGTIPKLLIYAASTLQSGVPSRFSGGGYGTDFTLTISSLQPEDVATYYCQKYNSAPLTFGGGTKVEIKRT

SEQ ID NO: 24072 - protein, 109 aa, Artificial Sequence
  source: /note="Description of Artificial Sequence: Synthetic polypeptide"
DIVMTQSPFSLSLSPGERATLSCRASQSISNYLAWYQQKPGQAPRLLIYDSSNRATGVPARFSGSGSGTDFTLTISSLEPEDFAVYYCQQRSNWMYTFGQGTKVEIKRT

SEQ ID NO: 24073 - protein, 237 aa, Artificial Sequence [sequence omitted]

SEQ ID NO: 24074 - protein, 109 aa, Artificial Sequence
  source: /note="Description of Artificial Sequence: Synthetic polypeptide"
DIQMTQSPSSLSASVGDRITITCRASQGIDNYLAWFQQKPGKVPELLIYAASTLQSGVPSRFSGSGSGTGFTLTISSLQPEDVATYYCQKYDSAPLTFGGGTKVDIKRT

SEQ ID NO: 24075 - protein, 110 aa, Artificial Sequence; identical to SEQ ID NO: 24067
  source: /note="Description of Artificial Sequence: Synthetic polypeptide"

SEQ ID NO: 24076 - protein, 234 aa, Artificial Sequence
  source: /note="Description of Artificial Sequence: Synthetic polypeptide"
MRFPAQFLGLLLVWLTGARCDIQMTQSPASLSESVGETVTITCRASENIYSYLAWYQQKQGKSPQLLVYFAKTLAEGVPSTFSGSGSGTLFSLKINSLQPEDFGNYYCQHHYGTPYTFGGGTKLEIKRADAAPTVSIFPPSSEQLTSGGASVVCFLNNFYPKDINVKWKIDGSERQNGVLNSWTDQDSKDSTYSMSSTLTLTKDEYERHNSYTCEATHKTSTSPIVKSFNRNEC

SEQ ID NO: 24077 - protein, 238 aa, Artificial Sequence
  source: /note="Description of Artificial Sequence: Synthetic polypeptide"
MKLPVRLLVLMFWIPASSSDVVMTQTPLSLPVSLGDQASISCRSSQSLVHSNGNTYLHWYLQKPGQSPKLLIYKVSNRFSGVPDRFSGSGSGTDFTLKISRVEAEDLGVYFCSQSTHVPWTFGGGTKLEIKRADAAPTVSIFPPSSEQLTSGGASVVCFLNNFYPKDINVKWKIDGSERQNGVLNSWTDQDSKDSTYSMSSTLTLTKDEYERHNSYTCEATHKTSTSPIVKSFNRNEC

SEQ ID NO: 24078 - protein, 238 aa, Artificial Sequence
  source: /note="Description of Artificial Sequence: Synthetic polypeptide"
METDTLLLWVLLLWVPGSTGDIVLTQSPASLAVSLGQRATISCRASESVDSYGNSFMHWYQQKPGQPPKVLIYRASNLESGIPARFSGSGSRTDFTLTINPVEADDVATYYCQQSNGDPRTFGGGTKLEIKRADAAPTVSIFPPSSEQLTSGGASVVCFLNNFYPKDINVKWKIDGSERQNGVLNSWTDQDSKDSTYSMSSTLTLTKDEYERHNSYTCEATHKTSTSPIVKSFNRNEC

SEQ ID NO: 24079 - protein, 242 aa, Artificial Sequence
  source: /note="Description of Artificial Sequence: Synthetic polypeptide"
SKLATMETDTLLLWVLLLWVPGSTGNIVLTQSPASLAVSLGQRATISCKASESVDSYGTSFMHWYQQKPGQPPKLLIYLASNLESGVPARFSGSGSRTDFTLTIDPVEADDAATYYCQQNNEHPMFGGGTKLEIKRADAAPTVSIFPPSSEQLTSGGASVVCFLNNFYPKDINVKWKIDGSERQNGVLNSWTDQDSKDSTYSMSSTLTLTKDEYERHNSYTCEATHKTSTSPIVKSFNRNEC

SEQ ID NO: 24080 - protein, 234 aa, Artificial Sequence
  source: /note="Description of Artificial Sequence: Synthetic polypeptide"
LETTLTQSPATLSVSPGERATLSCRASQSVSSNLAWYQQKPGQAPRLLIYGASTRATGIPARFSGSGSGTDFTLTISSLQSEDFAVYYCQQNYNWPLTFGGGTKVEIKRTVAAPSVFIFPPSDEQLKSGTASVVCLLNNFYPREAKVQWKVDNALQSGNSQESVTEQDSKDSTYSLSSTLTLSKADYEKHKLYACEVTHQGLSSPVTKSFNRGECAPGSLHHILDAQKMVWNHR

SEQ ID NO: 24081 - DNA, 324 bp, Homo sapiens
gagctccagatgacccagtctccgtcctccctgtctgcatctctaggagacagagtcaccatcacttgccgggcaagtcaggacattaccacctatttaaattggtatcaacagaaaccagggaaagcccctaacctcctgatctctcttgcatccactttacaaagtggggtcccatcaaggttcagtggcaggggatctgggacagatttcactctcaccatcaacggtctccaacctgaagattttgcaacttactactgtcaacagagttacaggacccctccgacgttcggccaagggaccaaggtggacatcaagcga

SEQ ID NO: 24082 - DNA, 324 bp, Homo sapiens
gagctccagatgacccagtctccatcttccgtgtctgcatctgtaggagacagagtcaccatcacttgtcgggcgagtcagggtattagcagctggttagcctggtatcagcagaaaccagggaaagcccctaagctcctgatctatgctgcatccagtttgcaaagtggggtcccatcaaggttcagcggcagtggatctgggacagatttcactctcaccatcagcagcctgcagcctgaagattttgcaacttactattgtcaacaggctaacagtttcccgctcactttcggcggagggaccaaggtggagatcaaacga

SEQ ID NO: 24083 - protein, 215 aa, Artificial Sequence
  source: /note="Description of Artificial Sequence: Synthetic polypeptide"
QSVLTQPPSASGTPGQRVTISCSGSSSNIGSNDVYWYQNLPGTAPKLLIYNNNQRPSGVPDRFSGSKSGTSASLAISGLRSEDEADYYCAAWDDSLTVSFGTGTKVTVLGQPKAAPSVTLFPPSSEELQANKATLVCLISDFYPGAVTVAWKADSSPVKAGVETTTPSKQSNNKYAASSYLSLTPEQWKSHRSYSCQVTHEGSTVEKTVVPAECS

SEQ ID NO: 24084 - protein, 216 aa, Artificial Sequence
  source: /note="Description of Artificial Sequence: Synthetic polypeptide"
EIVLTQSPGTLSLSPGERATLSCRASQSVRSNNLAWYQHKPGQAPRLLIFGASSRATGIPDRFSGSGSGTDFTLTISRLEPEDFAVYYCQQYGSSPALTFGGGTKVEIKRTVAAPSVFIFPPSDEQLKSGTASVVCLLNNFYPREAKVQWKVDNALQSGNSQESVTEQDSKDSTYSLSSTLTLSKADYEKHKVYACEVTHQGLSSPVTKSFNRGEC

SEQ ID NO: 24085 - protein, 215 aa, Artificial Sequence
  source: /note="Description of Artificial Sequence: Synthetic polypeptide"
DIQMTQSPSTLSASVGDRVTITCRASQTINNYLAWYQQKPGKAPKLLIYKASSLESGVPSRFSGSGSGTEFTLTISSLQPDDFATYYCQEYNNDSPLTFGGGTKVEIKRTVAAPSVFIFPPSDEQLKSGTASVVCLLNNFYPREAKVQWKVDNALQSGNSQESVTEQDSKDSTYSLSSTLTLSKADYEKHKVYACEVTHQGLSSPVTKSFNRGEC

SEQ ID NO: 24086 - protein, 214 aa, Artificial Sequence
  source: /note="Description of Artificial Sequence: Synthetic polypeptide"
DIELTQDPSVSVAPGQTARIPCVRFNMGPTSVHWYQQKPGQAPVLVVYDDSDRPSGIPERFSGSNSGDSATLTISRVEAGDEADYYCQVWDMSSDRRVFGGGTTLTVLGQPKAAPSVTLFPPSSEELQANKATLVCLISDFYPGAVTVAWKADSSPVKAGVETTTPSKQSNNKYAASSYLSLTPEQWKSHRSYSCQVTHEGSTVEKTVVPAECS

SEQ ID NO: 24087 - protein, 214 aa, Artificial Sequence
  source: /note="Description of Artificial Sequence: Synthetic polypeptide"
DIVMTQSPATLSVSPGERATLSCRASQVVGTNLAWYQQKPGQAPRLLIYAASTRATGIPARFSGSGFGTDFTLTISSLQSEDFAVYYCQQYNNWPLSFGGGTKVEIRRTVAAPSVFIFPPSDEQLKSGTASVVCLLNNFYPREAKVQWKVDNALQSGNSQESVTEQDSKDSTYSLSSTLTLSKADYEKHKVYACEVTHQGLSSPVTKSFNRGEC

SEQ ID NO: 24088 - protein, 214 aa, Artificial Sequence
  source: /note="Description of Artificial Sequence: Synthetic polypeptide"
DIQMTQSPSSLSASVGDRVTIVCRASQGINTHLHWYQQKPGKAPKLLIYSASTLHTGVPSRLSGSGSGTDFTLSISSLQPEDFATYYCQQSYNYPRTFGQGTNVDIKRTVAAPSVFIFPPSDEQLKSGTASVVCLLNNFYPREAKVQWKVDNALQSGNSQESVTEQDSKDSTYSLSSTLTLSKADYEKHKVYACEVTHQGLSSPVTKSFNRGEC

SEQ ID NO: 24089 - protein, 219 aa, Artificial Sequence
  source: /note="Description of Artificial Sequence: Synthetic polypeptide"
DIEMTQSPLSLPVTPGESASISCRSSQSLLHSNGYNYLDWYLQKPGQSPQLLIYLGSSRASGVPDRFSGSGSGTDFTLKISRVEAEDVGVYYCMQGLQTPYTFGQGTKLEIKRTVAAPSVFIFPPSDEQLKSGTASVVCLLNNFYPREAKVQWKVDNALQSGNSQESVTEQDSKDSTYSLSSTLTLSKADYEKHKVYACEVTHQGLSSPVTKSFNRGEC

SEQ ID NO: 24090 - protein, 220 aa, Artificial Sequence
  source: /note="Description of Artificial Sequence: Synthetic polypeptide"
DIVLTQSPVSLAVSLGESATVNCKSSQSVLSNSKNLNYLAWYQHKPGQPPKLLIYWASTRESGVPDRFSGSGSGTDFTLTISSLQAEDVAVYYCQQHYSIPLTFGPGTKVDIKRTVAAPSVFIFPPSDEQLKSGTASVVCLLNNFYPREAKVQWKVDNALQSGNSQESVTEQDSKDSTYSLSSTLTLSKADYEKHKVYACEVTHQGLSSPVTKSFNRGEC

SEQ ID NO: 24091 - protein, 214 aa, Artificial Sequence
  source: /note="Description of Artificial Sequence: Synthetic polypeptide"
DILMTQSPSSLSASVGDRVTITCRASQDIRNRLAWYQQKPGKAPKRLIYAASSLQSGVPSRFSGSGSGTEFTLTINSLQPEDFATYYCLQHNSYPWTFGPGTKVEIKRTVAAPSVFIFPPSDEQLKSGTASVVCLLNNFYPREAKVQWKVDNALQSGNSQESVTEQDSKDSTYSLSSTLTLSKADYEKHKVYACEVTHQGLSSPVTKSFNRGEC

SEQ ID NO: 24092 - protein, 214 aa, Artificial Sequence
  source: /note="Description of Artificial Sequence: Synthetic polypeptide"
DIVMTQSPATLSVSPGEGATLSCRASQGIGSNLAWYQHKPGQAPRLLIYAASTRATGVPARFSGSGSGTEFTLTISSLQSEDLAVYFCQQYNTWPLTFGGGTKVEIIRTVAAPSVFIFPPSDEQLKSGTASVVCLLNNFYPREAKVQWKVDNALQSGNSQESVTEQDSKDSTYSLSSTLTLSKADYEKHKVYACEVTHQGLSSPVTKSFNRGEC

SEQ ID NO: 24093 - protein, 214 aa, Artificial Sequence
  source: /note="Description of Artificial Sequence: Synthetic polypeptide"
DIVMTQSPSTLSASVGDRVTITCRASQTIYRWLAWYQQKPGKAPKVLIYKASTLESGVPSRFSGSGSGTEFTLAISSLQPDDFATYYCQQYNSFPYRFGQGTKVEIKRTVAAPSVFIFPPSDEQLKSGTASVVCLLNNFYPREAKVQWKVDNALQSGNSQESVTEQDSKDSTYSLSSTLTLSKADYEKHKVYACEVTHQGLSSPVTKSFNRGEC

SEQ ID NO: 24094 - protein, 214 aa, Artificial Sequence
  source: /note="Description of Artificial Sequence: Synthetic polypeptide"
DIVMTQSPSSLSASVGDRVSITCRASQTITRFLNWYQQKPGKGPKLLIYAASTVHRGVPSRFSGSGSGTDFTLTISSLQPEDFATYYCQQSYSAPFTFGPGTTVDIRRTVAAPSVFIFPPSDEQLKSGTASVVCLLNNFYPREAKVQWKVDNALQSGNSQESVTEQDSKDSTYSLSSTLTLSKADYEKHKVYACEVTHQGLSSPVTKSFNRGEC

SEQ ID NO: 24095 - protein, 212 aa, Artificial Sequence
  source: /note="Description of Artificial Sequence: Synthetic polypeptide"
DIVLTQAPSVSVSPGQTASITCSGDRLGEKFASWYQQKPGQSPVLVIYEDSKRPSGIPDRFSGSNSGNTATLTISGTQIMDEGDFFCQAWDSSTVVFGGGTKLTVLGQPKAAPSVTLFPPSSEELQANKATLVCLISDFYPGAVTVAWKADSSPVKAGVETTTPSKQSNNKYAASSYLSLTPEQWKSHRSYSCQVTHEGSTVEKTVVPAECS

SEQ ID NO: 24096 - protein, 212 aa, Artificial Sequence
  source: /note="Description of Artificial Sequence: Synthetic polypeptide"
DIELTQSPSVSVSPGQTASITCSGDKLGDKFVCWYQQKAGQSPIVVIYQDDKRPSGIPERFSGSNSGNTATLTISGTQAMDEADYFCQAWDSTTVVFGGGTKLTVLGQPKAAPSVTLFPPSSEELQANKATLVCLISDFYPGAVTVAWKADSSPVKAGVETTTPSKQSNNKYAASSYLSLTPEQWKSHRSYSCQVTHEGSTVEKTVVPAECS

SEQ ID NO: 24097 - protein, 216 aa, Artificial Sequence
  source: /note="Description of Artificial Sequence: Synthetic polypeptide"
DIELTQEPSASGTPGQRVTISCSGDTSNIGSNTVSWFQLLPGTAPKLLIFTDNQRPSGVPGRFSGSKSGTSASLAISGLQSEDETDYYCAAWDDSLNGWVFGGGTKLTVLGQPKAAPSVTLFPPSSEELQANKATLVCLISDFYPGAVTVAWKADSSPVKAGVETTTPSKQSNNKYAASSYLSLTPEQWKSHRSYSCQVTHEGSTVEKTVVPAECS

SEQ ID NO: 24098 - protein, 454 aa, Artificial Sequence
  source: /note="Description of Artificial Sequence: Synthetic polypeptide"
QVQLVQSGAEVKKPGSSVTVSCKTSGHTFISYAISWLRQAPGQGLEWMGGIVPIFGTVNYTQKFQGRLTITADESTSTAYMDLSRLTFEDTAIYFCAREAGYHSSFSGVYFDYWGQGTLLTVSSASTKGPSVFPLAPSSKSTSGGTAALGCLVKDYFPEPVTVSWNSGALTSGVHTFPAVLQSSGLYSLSSVVTVPSSSLGTQTYICNVNHKPSNTKVDKKVEPKSCDKTHTCPPCPAPELLGGPSVFLFPPKPKDTLMISRTPEVTCVVVDVSHEDPEVKFNWYVDGVEVHNAKTKPREEQYNSTYRVVSVLTVLHQDWLNGKEYKCKVSNKALPAPIEKTISKAKGQPREPQVYTLPPSRDELTKNQVSLTCLVKGFYPSDIAVEWESNGQPENNYKTTPPVLDSDGSFFLYSKLTVDKSRWQQGNVFSCSVMHEALHNHYTQKSLSLSPGK

SEQ ID NO: 24099 - protein, 452 aa, Artificial Sequence
  source: /note="Description of Artificial Sequence: Synthetic polypeptide"
QVQLVQSGGGVVQRGRSLRLSCAASGFTFRTYGMHWVRQAPGKGLECVALISYDGTNKYYADSVKGRFTISRDNSKDTLYLQMNSLRAEDTGVYYCASLDYDFSYYYHRDVWGPGTTVTVSSASTKGPSVFPLAPSSKSTSGGTAALGCLVKDYFPEPVTVSWNSGALTSGVHTFPAVLQSSGLYSLSSVVTVPSSSLGTQTYICNVNHKPSNTKVDKKVEPKSCDKTHTCPPCPAPELLGGPSVFLFPPKPKDTLMISRTPEVTCVVVDVSHEDPEVKFNWYVDGVEVHNAKTKPREEQYNSTYRVVSVLTVLHQDWLNGKEYKCKVSNKALPAPIEKTISKAKGQPREPQVYTLPPSRDELTKNQVSLTCLVKGFYPSDIAVEWESNGQPENNYKTTPPVLDSDGSFFLYSKLTVDKSRWQQGNVFSCSVMHEALHNHYTQKSLSLSPGK

SEQ ID NO: 24100 - protein, 450 aa, Artificial Sequence
  source: /note="Description of Artificial Sequence: Synthetic polypeptide"
QVQLVESGGGVVQPGRSLRLSCAASGFTFSSYGIYWVRQAPGKGLEWVAFISYDEINKFYADSVKGRFTISRDNSKNTVFLQMNSLRDEDTAVYYCAKPLRGSYRYFDLWGRGTVVTVSSASTKGPSVFPLAPSSKSTSGGTAALGCLVKDYFPEPVTVSWNSGALTSGVHTFPAVLQSSGLYSLSSVVTVPSSSLGTQTYICNVNHKPSNTKVDKKVEPKSCDKTHTCPPCPAPELLGGPSVFLFPPKPKDTLMISRTPEVTCVVVDVSHEDPEVKFNWYVDGVEVHNAKTKPREEQYNSTYRVVSVLTVLHQDWLNGKEYKCKVSNKALPAPIEKTISKAKGQPREPQVYTLPPSRDELTKNQVSLTCLVKGFYPSDIAVEWESNGQPENNYKTTPPVLDSDGSFFLYSKLTVDKSRWQQGNVFSCSVMHEALHNHYTQKSLSLSPGK

SEQ ID NO: 24101 - protein, 453 aa, Artificial Sequence
  source: /note="Description of Artificial Sequence: Synthetic polypeptide"
QVQLLESGGDVVQPGTSLRLSCAASGFSLWTSGMHWVRQAPGKGLEWVAVMSYDETKKYYADSVRGRFSISRDNSRNTLYLQMNSLRVEDTAVYFCAKPRLDYLDYFHAADSWGQGTLVSVSSASTKGPSVFPLAPSSKSTSGGTAALGCLVKDYFPEPVTVSWNSGALTSGVHTFPAVLQSSGLYSLSSVVTVPSSSLGTQTYICNVNHKPSNTKVDKKVEPKSCDKTHTCPPCPAPELLGGPSVFLFPPKPKDTLMISRTPEVTCVVVDVSHEDPEVKFNWYVDGVEVHNAKTKPREEQYNSTYRVVSVLTVLHQDWLNGKEYKCKVSNKALPAPIEKTISKAKGQPREPQVYTLPPSRDELTKNQVSLTCLVKGFYPSDIAVEWESNGQPENNYKTTPPVLDSDGSFFLYSKLTVDKSRWQQGNVFSCSVMHEALHNHYTQKSLSLSPGK

SEQ ID NO: 24102 - protein, 451 aa, Artificial Sequence
  source: /note="Description of Artificial Sequence: Synthetic polypeptide"
QVQLVQSGGDLVQPGGSLRLSCAASGFTFSRYSMNWVRQAPGMGLEWVAYISDTSRTIYYADSVKGRFTISRDNAKNSLYLQMKSLRDEDTAVYYCARDPDTPFVRAFDSWGQGTLVTVSSASTKGPSVFPLAPSSKSTSGGTAALGCLVKDYFPEPVTVSWNSGALTSGVHTFPAVLQSSGLYSLSSVVTVPSSSLGTQTYICNVNHKPSNTKVDKKVEPKSCDKTHTCPPCPAPELLGGPSVFLFPPKPKDTLMISRTPEVTCVVVDVSHEDPEVKFNWYVDGVEVHNAKTKPREEQYNSTYRVVSVLTVLHQDWLNGKEYKCKVSNKALPAPIEKTISKAKGQPREPQVYTLPPSRDELTKNQVSLTCLVKGFYPSDIAVEWESNGQPENNYKTTPPVLDSDGSFFLYSKLTVDKSRWQQGNVFSCSVMHEALHNHYTQKSLSLSPGK

SEQ ID NO: 24103 - protein, 215 aa, Artificial Sequence
  source: /note="Description of Artificial Sequence: Synthetic polypeptide"
DITLTQSPATLSVSPGERATLSCRASQSVSSNLAWYQQKPGQAPRLLIYGASNRATDIPARFSGSGSGTEFTLTISSLQSEDFAVYYCQQFNDWPFLTFGGGTKVEIKRTVAAPSVFIFPPSDEQLKSGTASVVCLLNNFYPREAKVQWKVDNALQSGNSQESVTEQDSKDSTYSLSSTLTLSKADYEKHKVYACEVTHQGLSSPVTKSFNRGEC

SEQ ID NO: 24104 - protein, 215 aa, Artificial Sequence; identical to SEQ ID NO: 23588
  source: /note="Description of Artificial Sequence: Synthetic polypeptide"

SEQ ID NO: 24105 - protein, 217 aa, Artificial Sequence; identical to SEQ ID NO: 23584
  source: /note="Description of Artificial Sequence: Synthetic polypeptide"

SEQ ID NO: 24106 - protein, 214 aa, Artificial Sequence
  source: /note="Description of Artificial Sequence: Synthetic polypeptide"
DIVLTQSPATLSVSPGERATLSCRASQSVNRNLAWFQQIPGQAPRLLIFDASTRAADIPARFSGGGSGAEFTLTVSSLQPEDFAVYYCQQYDKWPPGFGQGTKVEIKRTVAAPSVFIFPPSDEQLKSGTASVVCLLNNFYPREAKVQWKVDNALQSGNSQESVTEQDSKDSTYSLSSTLTLSKADYEKHKVYACEVTHQGLSSPVTKSFNRGEC

SEQ ID NO: 24107 - protein, 219 aa, Artificial Sequence; identical to SEQ ID NO: 24089
  source: /note="Description of Artificial Sequence: Synthetic polypeptide"

SEQ ID NO: 24108 - protein, 219 aa, Artificial Sequence
  source: /note="Description of Artificial Sequence: Synthetic polypeptide"
DIEMTQSPLSLPVTPGEPASISCRSSQSLLHSNGYNHLAWYLQKPGRSPHLLIYLASTRASGVPDRFSGSGSGTDFTLKISRVEAEDVGIYYCMQSLQTSITFGQGTRLEIKRTVAAPSVFIFPPSDEQLKSGTASVVCLLNNFYPREAKVQWKVDNALQSGNSQESVTEQDSKDSTYSLSSTLTLSKADYEKHKVYACEVTHQGLSSPVTKSFNRGEC

SEQ ID NO: 24109 - protein, 214 aa, Artificial Sequence
  source: /note="Description of Artificial Sequence: Synthetic polypeptide"
DIVLTQSPSVSVAPGQTARITCGGNDIGSKSVHWYQQKPGQAPVLVVFDDRDRPSGIPERFSGSNSGNTATLTISRVEAGDEADYYCQVWDITSDLVVFGGGTKLTVVGQPKAAPSVTLFPPSSEELQANKATLVCLISDFYPGAVTVAWKADSSPVKAGVETTTPSKQSNNKYAASSYLSLTPEQWKSHRSYSCQVTHEGSTVEKTVVPAECS

SEQ ID NO: 24110 - protein, 215 aa, Artificial Sequence
  source: /note="Description of Artificial Sequence: Synthetic polypeptide"
DIVMTQPPGTLSVSPGERATLSCRASQSVSTNLAWYQQKPGQAPRLLIHGASTRATGIPARFSGSGSGAEFTLTISSLQSEDVAVYYCQQYDNWLPITFGPGTKVDIQRTVAAPSVFIFPPSDEQLKSGTASVVCLLNNFYPREAKVQWKVDNALQSGNSQESVTEQDSKDSTYSLSSTLTLSKADYEKHKVYACEVTHQGLSSPVTKSFNRGEC

SEQ ID NO: 24111 - protein, 112 aa, Artificial Sequence
  source: /note="Description of Artificial Sequence: Synthetic polypeptide"
EVQLVESGGGLVQPGGSLRLSCAASGFTVSTYAMSWVRQTPEKRLEWVASMSSGGSLYYPDTVKGRFTISRDNSKNTVYLQMNSLRAEDTAMYYCVRGGYGTSYWGQGTLVT

SEQ ID NO: 24112 - protein, 112 aa, Artificial Sequence
  source: /note="Description of Artificial Sequence: Synthetic polypeptide"
DIVMTQTPLSLSVTPGEPASISCRSSQSIVHSIGDTYLEWYLQKPGQSPQLLIYKVSNRFSGVPDRFSGSGSGTDFTLKISRVEAEDVGVYYCFQGSHFPYTFGQGTKLEIK

SEQ ID NO: 24113 - protein, 112 aa, Artificial Sequence
  source: /note="Description of Artificial Sequence: Synthetic polypeptide"
DIVMTQTPLSLSVTPGEPASISCRSSQSIVHSIGDTYLEWYLQKPGQSPKLLIYKVSNRFSGVPDRFSGSGSGTDFTLKISRVEAEDVGVYYCFQGSHFPYTFGQGTKLEIK

SEQ ID NO: 24114 - protein, 112 aa, Artificial Sequence
  source: /note="Description of Artificial Sequence: Synthetic polypeptide"
DIVMTQTPLSLSVTPGEPASISCRSSQSIVHSIGDTYLEWYLQKPGQSPQLLIYKVSNRFSGVPDRFSGSGSGTDFTLKISRVEAEDVGIYYCFQGSHFPYTFGQGTKLEIK

SEQ ID NO: 24115 - protein, 112 aa, Artificial Sequence; identical to SEQ ID NO: 24112
  source: /note="Description of Artificial Sequence: Synthetic polypeptide"

SEQ ID NO: 24116 - protein, 112 aa, Artificial Sequence; identical to SEQ ID NO: 24113
  source: /note="Description of Artificial Sequence: Synthetic polypeptide"

SEQ ID NO: 24117 - protein, 112 aa, Artificial Sequence; identical to SEQ ID NO: 24114
  source: /note="Description of Artificial Sequence: Synthetic polypeptide"

SEQ ID NO: 24118 - protein, 112 aa, Artificial Sequence; identical to SEQ ID NO: 24112
  source: /note="Description of Artificial Sequence: Synthetic polypeptide"

SEQ ID NO: 24119 - protein, 112 aa, Artificial Sequence; identical to SEQ ID NO: 24113
  source: /note="Description of Artificial Sequence: Synthetic polypeptide"

SEQ ID NO: 24120 - protein, 112 aa, Artificial Sequence
  source: /note="Description of Artificial Sequence: Synthetic polypeptide"
ELLLTQTPLSLPVSLGDQASISCRSSQSIVHSIGDTYLEWYLQKPGQSPKLLIYKVSNRFSGVPDRFSGSGSGTDFTLKISRVEAEDLGIYYCFQGSHFPYTFGGGTKLEIK

SEQ ID NO: 24121 - protein, 107 aa, Artificial Sequence
  source: /note="Description of Artificial Sequence: Synthetic polypeptide"
DIQMTQSPSSLSASVGDRVTITCRASQSISTYLNWYQQKPGIPPKLLINVASSLQSGVPSRFSGSGSGTDFTLTISSLQPEDFASYYCQQTYSSPPTFGQGTKVEIK

SEQ ID NO: 24122 - protein, 111 aa, Artificial Sequence
  source: /note="Description of Artificial Sequence: Synthetic polypeptide"
QSVLTQPPSASGTPGQRVTISCSGSTSNIGSNAVNWYQQLPGTAPKLLIYSNNQRPSGVPDRFSGSKSGTSASLAISGLQSEDEADYYCAAWDDSLSGSWVFGGGTKLTVL

SEQ ID NO: 24123 - protein, 106 aa, Artificial Sequence
  source: /note="Description of Artificial Sequence: Synthetic polypeptide"
EIVMTQSPDTLSVSPGERATLSCRASQSVNRRLAWYQQKPGQAPRLLIHDASTRATGIPARFSGSGSGTEFTLTISSLQSEDFAVYYCQQYDNWLSFGQGTRLEIK

SEQ ID NO: 24124 - protein, 107 aa, Artificial Sequence
  source: /note="Description of Artificial Sequence: Synthetic polypeptide"
DIQMTQSPSTLSGSVGDRVTITCRASQNIGPWLAWYQQESGKAPKLLISRASILESGVPSRFSGTGTGTEFTLTISSLQPDDFATYYCQHYNAYWGTFGQGTKVEIN

SEQ ID NO: 24125 - protein, 108 aa, Artificial Sequence
  source: /note="Description of Artificial Sequence: Synthetic polypeptide"
DIQLTQSPSSLSASVGDRVTITCRASQGIITYLNWYQQKPGKAPKLLIYATYSLQNGVPSRFSGSGSGTDFTLTISSLQPEDFATYYCQQSYSSLMFTFGQGTKLDIK

SEQ ID NO: 24126 - protein, 107 aa, Artificial Sequence
  source: /note="Description of Artificial Sequence: Synthetic polypeptide"
VIWMTQSPSLLSASTGDRVTISCRMSQGISSYLAWYQQKPGKAPELLIHTAYTLKSGVPSRFSGSGSGKDFTLTISGLQSEDFATYYCQQYYSFPYTFGQGTKVEIK

SEQ ID NO: 24127 - protein, 112 aa, Artificial Sequence
  source: /note="Description of Artificial Sequence: Synthetic polypeptide"
DIVMTQSPLSLPVTPGEPASISCRASQSLLHSNGYNYLDWYLQKPGQSPQLLIQLGSTRASGVPDRFSGSGSGTDFTLEISRVEAEDVGVYYCMQALQLPLAFGQGTRLEIK

SEQ ID NO: 24128 - protein, 107 aa, Artificial Sequence
  source: /note="Description of Artificial Sequence: Synthetic polypeptide"
DIQMTQSPSSVSASVGDRVTITCRASQDVSTWLAWYQLKPGKAPKLLIYAASSLQSGVPSRFSGSGSGTDFTLTVSSLQPEDFATYYCQQANSFPFTFGPGTKVDIK

SEQ ID NO: 24129 - protein, 110 aa, Artificial Sequence
  source: /note="Description of Artificial Sequence: Synthetic polypeptide"
QSVLTQPPSVSAAPGQRVTISCSGTSSNIGKNYVSWYQQLPGAAPKLLIYDNDKRPSGIPDRFSGSKSGTSATLGITGLQTGDEADYYCGTWDSSLSVGMFGGGTRLTVL

SEQ ID NO: 24130 - protein, 107 aa, Artificial Sequence
  source: /note="Description of Artificial Sequence: Synthetic polypeptide"
DIQLTQSPSFLSASVGDGVTITCRASQDIYIYLAWYQQKPGKAPKLLIYAASTLQGGVPSRFSGSGSGTEFTLTINNLQPEDFATYFCQQLNGYPLTFGGGTKVEIK

SEQ ID NO: 24131 - protein, 112 aa, Artificial Sequence
  source: /note="Description of Artificial Sequence: Synthetic polypeptide"
DIVMTQSPLSLPVSPGEPASISCRSSQSLLHGNGYNYLDWYLQKPGQSPRLLIYLGSNRASGVPDRFSGSGSGTDFTLKISRVEAEDVGVYYCMQALQTPLTFGGGTKVEIK

SEQ ID NO: 24132 - protein, 216 aa, Artificial Sequence
  source: /note="Description of Artificial Sequence: Synthetic polypeptide"
EIVLTQSPATLSVSPGERATLSCRASQSVSHNLAWYQQKPGQAPRLLVYSASTRATGIPARFSGSGSGTEFTLAISSLQSEDFAVYYCQHYTNYPPRLTFGGGSKVEIKRTVAAPSVFIFPPSDEQLKSGTASVVCLLNNFYPREAKVQWKVDNALQSGNSQESVTEQDSKDSTYSLSSTLTLSKADYEKHKVYACEVTHQGLSSPVTKSFNRGEC

SEQ ID NO: 24133 - protein, 216 aa, Artificial Sequence
  source: /note="Description of Artificial Sequence: Synthetic polypeptide"
DIVMTQSPSTLSASVGDRVTITCRASQSIGNWLAWYQQKPGKAPKLLIYKVSTLESGVPSRFSGSGSGTEFTLTINSLQPDDFATYYCQRYTSNSQGFTFGQGTKLEIKRTVAAPSVFIFPPSDEQLKSGTASVVCLLNNFYPREAKVQWKVDNALQSGNSQESVTEQDSKDSTYSLSSTLTLSKADYEKHKVYACEVTHQGLSSPVTKSFNRGEC

SEQ ID NO: 24134 - protein, 216 aa, Artificial Sequence
  source: /note="Description of Artificial Sequence: Synthetic polypeptide"
DIQLTQSPLSPPVTLGQPASISCRSSQSLLYTDGFTYLSWYHQRPGQSPRRLIYKISNRDSGVPDRFSGSGSGTDFTLKISRVEAEDVGVYYCMQATHWPLTFGEGTKVEIKPKAAPSVTLFPPSSEELQANKATLVCLISDFYPGAVTVAWKADSSPVKAGVETTTPSKQSNNKYAASSYLSLTPEQWKSHKSYSCQVTHEGSTVEKTVAPTECS

SEQ ID NO: 24135 - protein, 234 aa, Artificial Sequence; identical to SEQ ID NO: 24012
  source: /note="Description of Artificial Sequence: Synthetic polypeptide"

SEQ ID NO: 24136 - protein, 214 aa, Artificial Sequence
  source: /note="Description of Artificial Sequence: Synthetic polypeptide"
DIQLTQSPSSLSASVGDRVTLTCQASQDIRKFLNWYQQKPGKGPKLLIYDASNLQRGVPSRFSGGGSGTDFTLIISSLQPEDVGTYYCQQYDGLPFTFGGGTKVVIKRTVAAPSVFIFPPSDEQLKSGTASVVCLLNNFYPREAKVQWKVDNALQSGNSQESVTEQDSKDSTYSLSSTLTLSKADYEKHKVYACEVTHQGLSSPVTKSFNRGEC

SEQ ID NO: 24137 - protein, 216 aa, Artificial Sequence
  source: /note="Description of Artificial Sequence: Synthetic polypeptide"
QEIVMTQSPGTLSLSPGERATLSCRASQSVSMNYLAWFQQKPGQAPRLLIYGASRRATGIPDRISGSGSGTDFTLTISRLEPADFAVYYCQQYGTSPRTFGQGAKVEIKRTVAAPSVFIFPPSDEQLKSGTASVVCLLNNFYPREAKVQWKVDNALQSGNSQESVTEQDSKDSTYSLSSTLTLSKADYEKHKVYACEVTHQGLSSPVTKSFNRGEC

SEQ ID NO: 24138 - protein, 215 aa, Artificial Sequence
  source: /note="Description of Artificial Sequence: Synthetic polypeptide"
EIVLTQSPGTLSLSPGERATLSCRASQSVSSSYLAWYQQKPGQAPRLLIYGASTRATGIPARFSGSGSGTDFTLTISRLEPEDLAVYYCQQYGSSPWTFGQGTKVEIKRTVAAPSVFIFPPSDEQLKSGTASVVCLLNNFYPREAKVQWKVDNALQSGNSQESVTEQDSKDSTYSLSSTLTLSKADYEKHKVYACEVTHQGLSSPVTKSFNRGEC

SEQ ID NO: 24139 - protein, 220 aa, Artificial Sequence
  source: /note="Description of Artificial Sequence: Synthetic polypeptide"
DIQMTQSPDSLAVSLGERATINCKSSQSVFSSSTNKNYLAWYQQKPGQPPKVLIYWSSTRESGVPDRFSASGSGTDFTLTISSLQAADVAVYYCHQYYTAPWTFGQGTKVEIKRTVAAPSVFIFPPSDEQLKSGTASVVCLLNNFYPREAKVQWKVDNALQSGNSQESVTEQDSKDSTYSLSSTLTLSKADYEKHKVYACEVTHQGLSSPVTKSFNRGEC

SEQ ID NO: 24140 - protein, 216 aa, Artificial Sequence
  source: /note="Description of Artificial Sequence: Synthetic polypeptide"
QSVLTQPPSASGTPGQRVTISCSGSSSNIGTNYVYWYQQFPGTAPKLLIYRSYQRPSGVPDRFSGSKSGSSASLAISGLQSEDEADYYCATWDDSLNGWVFGGGTKLTVLRQPKAAPSVTLFPPSSEELQANKATLVCLISDFYPGAVTVAWKADSSPVKAGVETTTPSKQSNNKYAASSYLSLTPEQWKSHRSYSCQVTHEGSTVEKTVAPTECS

SEQ ID NO: 24141 - protein, 216 aa, Artificial Sequence
  source: /note="Description of Artificial Sequence: Synthetic polypeptide"
QSVLTQPPSASGTPGQRVTISCSGSSSNIGTNYVYWYQQFPGTAPKLLIYRSYQRPSGVPDRFSGSKSGSSASLAISGLQSEDEADYYCATWDDSLDGWVFGGGTKLTVLRQPKAAPSVTLFPPSSEELQANKATLVCLISDFYPGAVTVAWKADSSPVKAGVETTTPSKQSNNKYAASSYLSLTPEQWKSHRSYSCQVTHEGSTVEKTVAPTECS

SEQ ID NO: 24142 - protein, 216 aa, Artificial Sequence
  source: /note="Description of Artificial Sequence: Synthetic polypeptide"
QSALTQPPAVSGTPGQRVTISCSGSDSNIGRRSVNWYQQFPGTAPKLLIYSNDQRPSVVPDRFSGSKSGTSASLAISGLQSEDEAEYYCAAWDDSLKGAVFGGGTQLTVLGQPKAAPSVTLFPPSSEELQANKATLVCLISDFYPGAVTVAWKADSSPVKAGVETTTPSKQSNNKYAASSYLSLTPEQWKSHRSYSCQVTHEGSTVEKTVAPTECS

SEQ ID NO: 24143 - protein, 214 aa, Artificial Sequence
  source: /note="Description of Artificial Sequence: Synthetic polypeptide"
QSALTQPPSVSVAPGQTATITCGGNNIGRKRVDWFQQKPGQAPVLVVYEDSDRPSGIPERFSDSNSGTTATLTISRVEAGDEADYYCQVWDSDSDHVVFGGGTKLTVLGQPKAAPSVTLFPPSSEELQANKATLVCLISDFYPGAVTVAWKADSSPVKAGVETTTPSKQSNNKYAASSYLSLTPEQWKSHRSYSCQVTHEGSTVEKTVAPTECS

SEQ ID NO: 24144 - protein, 217 aa, Artificial Sequence
  source: /note="Description of Artificial Sequence: Synthetic polypeptide"
DIVMTQSPSSLTVTAGEKVTMSCKSSQSLFNSGKRKNFLTWYHQKPGQPPKLLIYWASTRESGVPDRFSGSGSGTDFTLTITSVQAEDLAIYYCQNDYSHPLTFGAGTKLELKRADAAPTVSIFPPSSEQLTSGGASVVCFLNNFYPKDINVKWKIDGSERQNGVLNSWTDQDSKDSTYSMSSTLTLTKDEYERHNSYTCEATHKTSTSPIVKSFNR

SEQ ID NO: 24145 - protein, 214 aa, Artificial Sequence
  source: /note="Description of Artificial Sequence: Synthetic polypeptide"
ELQMTQSPSSVSASVGDRVTITCRASQGISSWLAWYQQKPGKAPKLLIYAASSLQSGVPSRFSGSGSGTDFTLTISSLQPEDFATYYCQQANSFPLTFGGGTKVEIKRTVAAPSVFIFPPSDEQLKSGTASVVCLLNNFYPREAKVQWKVDNALQSGNSQESVTEQDSKDSTYSLSSTLTLSKADYEKHKVYACEVTHQGLSSPVTKSFNRGEC

SEQ ID NO: 24146 - protein, 214 aa, Artificial Sequence
  source: /note="Description of Artificial Sequence: Synthetic polypeptide"
DIQLTQSPSSLSASVGDRVTITCQASQDIRKYLNWYQQKPGKAPNLLIYDASNVKTGVPSRFRGSGSGTDFTFTISSLQPEDIATYYCQQYDNLPITFGQGTRLEIKRTVAAPSVFIFPPSDEQLKSGTASVVCLLNNFYPREAKVQWKVDNALQSGNSQESVTEQDSKDSTYSLSSTLTLSKADYEKHKVYACEVTHQGLSSPVTKSFNRGEC

SEQ ID NO: 24147 - protein, 215 aa, Artificial Sequence
  source: /note="Description of Artificial Sequence: Synthetic polypeptide"
DIQLTQSPASLSVSPGERATLSCRASQSVAGNLAWYQQKPGQAPRLLIYGASTRATGIPARFSGSGSGTEFTLTITSLQSEDFAVYYCQQYNNWPPWTFGQGTKVDIKRTVAAPSVFIFPPSDEQLKSGTASVVCLLNNFYPREAKVQWKVDNALQSGNSQESVTEQDSKDSTYSLSSTLTLSKADYEKHKVYACEVTHQGLSSPVTKSFNRGEC

SEQ ID NO: 24148 - protein, 218 aa, Artificial Sequence
  source: /note="Description of Artificial Sequence: Synthetic polypeptide"
QSVLTQSPSASGTPGQAITISCSGSSSNIGSNPVNWYQQLPGAAPKLLIYADEHRPSGVPDRFSGSKSGTSASLAISGLQSEDEADYYCAAWDDSLSGPAVVFGGGTKLTVLGQPKAAPSVTLFPPSSEELQANKATLVCLISDFYPGAVTVAWKADSSPVKAGVETTTPSKQSNNKYAASSYLSLTPEQWKSHRSYSCQVTHEGSTVEKTVAPTECS

SEQ ID NO: 24149 - protein, 217 aa, Artificial Sequence; identical to SEQ ID NO: 24019
  source: /note="Description of Artificial Sequence: Synthetic polypeptide"

SEQ ID NO: 24150 - protein, 218 aa, Artificial Sequence
  source: /note="Description of Artificial Sequence: Synthetic polypeptide"
DIVMTQSPDSLAVSLGERATINCKSSQSVTFNYKNYLAWYQQKPGQPPKLLIYWASTRESGVPDRFSGSGSGTDFTLTISSLQAEDVAVYYCQQHYRTPPTFGQGTKVEIKRTVAAPSVFIFPPSDEQLKSGTASVVCLLNNFYPREAKVQWKVDNALQSGNSQESVTEQDSKDSTYSLSSTLTLSKADYEKHKVYACEVTHQGLSSPVTKSFNRGEC

SEQ ID NO: 24151 - protein, 220 aa, Artificial Sequence
  source: /note="Description of Artificial Sequence: Synthetic polypeptide"
QSVLTQPPSVSGAPGQRVTISCTGSSSNIGAGYAVHWYQQLPGTAPKLLISGNSNRPSGVPDRFSGSKSGTSASLAITGLQAEDEADYYCQSYDSSLSGSVFGGGTKLTVLGQPKAAPSVTLFPPSSEELQANKATLVCLISDFYPGAVTVAWKADSSPVKAGVETTTPSKQSNNKYAASSYLSLTPEQWKSHRSYSCQVTHEGSTVEKTVAPTECSARQ

SEQ ID NO: 24152 - protein, 105 aa, Artificial Sequence
  source: /note="Description of Artificial Sequence: Synthetic polypeptide"
ELTQSPSSVSASVGDRVTITCRATQGISSWLAWYQQKPGKPPKLLIFGASSLQSGVPSRFSGSGSGTDFTLTISSLQPEDFATYFCQQAHSFPLTFGGGTKVEIK

SEQ ID NO: 24153 - protein, 105 aa, Artificial Sequence
  source: /note="Description of Artificial Sequence: Synthetic polypeptide"
ELTQSPSSLSASVGDSVTITCRTSERISTYLNWYQQKPGKAPRLLVSGASTLQGGVPSRFSGSGSGTAFTLTINSLQPEDFATYYCQQSYSTPLTFGGGTKVEIK

SEQ ID NO: 24154 - protein, 214 aa, Artificial Sequence
  source: /note="Description of Artificial Sequence: Synthetic polypeptide"
SYVLTQPPSVSVAPGETARISCGGNNIGTKVLHWYQQTPGQAPVLVVYDDSDRPSGIPERFSGSNSGNTATLTISRVEVGDEADYYCQVWDISTDQAVFGGGTKLTVLGQPKAAPSVTLFPPSSEELQANKATLVCLISDFYPGAVTVAWKADSSPVKAGVETTTPSKQSNNKYAASSYLSLTPEQWKSHRSYSCQVTHEGSTVEKTVAPTECS

SEQ ID NO: 24155 - protein, 11 aa, Artificial Sequence
  source: /note="Description of Artificial Sequence: Synthetic peptide"
KASQNVGSNVA

SEQ ID NO: 24156 - protein, 7 aa, Artificial Sequence
  source: /note="Description of Artificial Sequence: Synthetic peptide"
SASHRYS

SEQ ID NO: 24157 - protein, 9 aa, Artificial Sequence
  source: /note="Description of Artificial Sequence: Synthetic peptide"
QQYYSYPYT

SEQ ID NO: 24158 - protein, 215 aa, Artificial Sequence
  source: /note="Description of Artificial Sequence: Synthetic polypeptide"
EIVLTQSPGTLSVSPGERATLSCRASRRVGSTYLAWYQQKPGQAPRRLIYGASSRAAGIPDRFSGTGSGTDFTLTISRVDPEDFAVYYCQQYAASPWTFGQGTTVEIKRTVAAPSVFIFPPSDEQLKSGTASVVCLLNNFYPREAKVQWKVDNALQSGNSQESVTEQDSKDSTYSLSSTLTLSKADYEKHKVYACEVTHQGLSSPVTKSFNRGEC

SEQ ID NO: 24159 - protein, 215 aa, Artificial Sequence
  source: /note="Description of Artificial Sequence: Synthetic polypeptide"
EVVLTQSPGTLTLPPGDRATLSCRASHSVGSTYIAWFQQKSGQAPRRLIYGASNRATDIPDRFSGSGSGTDFTLTIRRLEPEDSAVYYCQQFSVSPWTFGQGTRVEIKRTVAAPSVFIFPPSDEQLKSGTASVVCLLNNFYPREAKVQWKVDNALQSGNSQESVTEQDSKDSTYSLSSTLTLSKADYEKHKVYACEVTHQGLSSPVTKSFNRGEC

SEQ ID NO: 24160 - protein, 215 aa, Artificial Sequence
  source: /note="Description of Artificial Sequence: Synthetic polypeptide"
EVVLTQSPGTLALPPGERATLSCRASHSIGSTYIAWYQQKSGQAPRRLIYGASNRASDIPDRFSGSGSGTDFTLTIRRLEPEDSAVYYCQQFSVSPWTFGQGTRVEIKRTVAAPSVFIFPPSDEQLKSGTASVVCLLNNFYPREAKVQWKVDNALQSGNSQESVTEQDSKDSTYSLSSTLTLSKADYEKHKVYACEVTHQGLSSPVTKSFNRGEC

SEQ ID NO: 24161 - protein, 215 aa, Artificial Sequence
  source: /note="Description of Artificial Sequence: Synthetic polypeptide"
IVLTQSPATLSVSPGERATLSCRASQVISHNLAWYQQKPGQAPRLLIYGASTRASGIPARFSGSGSGTDYTLTITSLQPEDFAVYYCQHYSNWPPRLTFGGGTKVEIKRTVAAPSVFIFPPSDEQLKSGTASVVCLLNNFYPREAKVQWKVDNALQSGNSQESVTEQDSKDSTYSLSSTLTLSKADYEKHKVYACEVTHQGLSSPVTKSFNRGEC

SEQ ID NO: 24162 - protein, 234 aa, Artificial Sequence
  source: /note="Description of Artificial Sequence: Synthetic polypeptide"
MRVPAQLLGLLLLWLPGARCDIQMTQSPSSLSASVGDRVTITCRASENIYSYLAWYQQKPGKAPKLLVYFAKTLAEGVPSRFSGSGSGTEFTLTISSLQPDDFANYYCQHHYGTPYTFGQGTKLEIKRTVAAPSVFIFPPSDEQLKSGTASVVCLLNNFYPREAKVQWKVDNALQSGNSQESVTEQDSKDSTYSLSSTLTLSKADYEKHKVYACEVTHQGLSSPVTKSFNRGEC

SEQ ID NO: 24163 - protein, 234 aa, Artificial Sequence
  source: /note="Description of Artificial Sequence: Synthetic polypeptide"
MRVPAQLLGLLLLWLPGARCDIQMTQSPSSLSASVGDRVTITCRASENIYSYLAWYQQKPGKAPKLLVYFAKTLAEGVPSRFSGSGSGTEFTLTISSLQPDDFATYYCQHHYGTPYTFGQGTKLEIKRTVAAPSVFIFPPSDEQLKSGTASVVCLLNNFYPREAKVQWKVDNALQSGNSQESVTEQDSKDSTYSLSSTLTLSKADYEKHKVYACEVTHQGLSSPVTKSFNRGEC

SEQ ID NO: 24164 - protein, 236 aa, Artificial Sequence
  source: /note="Description of Artificial Sequence: Synthetic polypeptide"
MAWMMLLLTLLAHCTGSWAQSVLTQPPSLSGAPGQRVTISCTGSSSNIGADYDVYWYQHLPGTAPKLLMYGDGYRPSGVPDRFSGSKSGTSASLAITGLQAEDEADYYCQSYDSSLSRRVVFGGGTKLTVLGQPKAAPSVLFPPSSEELQANKATLMCLISDFYPGAVTVAWKADSSPVKAGVETTTPSKQSNNKYAASSYLSLTPEQWKSHRSYSCQVTHEGSTVEKTVAPTECS

SEQ ID NO: 24165 - protein, 113 aa, Artificial Sequence
  source: /note="Description of Artificial Sequence: Synthetic polypeptide"
EIVMTQSPDSLAVSLGERATINCKSSQSVTYNYKNYLAWYQQKPGQPPKLLIYWASTRESGVPDRFSGSGSGTDFTLTISSLQAEDVAVYYCQQYYRTPPTFGGGTKLDIKGS

SEQ ID NO: 24166 - protein, 109 aa, Artificial Sequence
  source: /note="Description of Artificial Sequence: Synthetic polypeptide"
DIQMTQSPSSLSASVGDRVTITCRASQDVNTAVAWYQQKPGKAPKLLIYSASFLYSGVPSRFSGSRSGTDFTLTISSLQPEDFATYYCQQHYTTPPTFGQGTKVEIKGS

SEQ ID NO: 24167 - protein, 113 aa, Artificial Sequence
  source: /note="Description of Artificial Sequence: Synthetic polypeptide"
DIQMTQSPSSLSASVGDRVTITCRASQDIPRSISGYVAWYQQKPGKAPKLLIYWGSYLYSGVPSRFSGSRSGTDFTLTISSLQPEDFATYYCQQHYTTPPTFGQGTKVEIKGS

SEQ ID NO: 24168 - protein, 113 aa, Artificial Sequence
  source: /note="Description of Artificial Sequence: Synthetic polypeptide"
DIQMTQSPSSLSASVGDRVTITCRASQDIPFSYKGYVAWYQQKPGKAPKLLIYWGSYLESGVPSRFSGSGSGTDFTLTISSLQPEDFATYYCQQHYTTPPTFGQGTKVEIKGS

SEQ ID NO: 24169 - protein, 112 aa, Artificial Sequence
  source: /note="Description of Artificial Sequence: Synthetic polypeptide"
DIQMTQSPSSLSASVGDRVTITCRASQSITFDYKNYVAWYQQKPGKAPKLLIYWGSYLEGVPSRFSGSGSGTDFTLTISSLQPEDFATYYCQQHYTTPPTFGQGTKVEIKGS

SEQ ID NO: 24170 - protein, 113 aa, Artificial Sequence
  source: /note="Description of Artificial Sequence: Synthetic polypeptide"
DIQMTQSPSSLSASVGDRVTITCRASQSITFNYKNYVAWYQQKPGKAPKLLIYWGSYLESGVPSRFSGSGSGTDFTLTISSLQPEDFATYYCQQHYTTPPTFGQGTKVEIKGS

SEQ ID NO: 24171 - protein, 113 aa, Artificial Sequence
  source: /note="Description of Artificial Sequence: Synthetic polypeptide"
DIQMTQSPSSLSASVGDRVTITCRASQSITFSYKNYVAWYQQKPGKAPKLLIYWGSYLESGVPSRFSGSGSGTDFTLTISSLQPEDFATYYCQQHYTTPPTFGQGTKVEIKGS

SEQ ID NO: 24172 - protein, 113 aa, Artificial Sequence
  source: /note="Description of Artificial Sequence: Synthetic polypeptide"
DIQMTQSPSSLSASVGDRVTITCRASQDIPFSYKGYVAWYQQKPGKAPKVLIYWGSYLESGVPSRFSGSGSGTDFTLTISSLQPEDFATYYCQQHYTTPPTFGQGTKVEIKGS

SEQ ID NO: 24173 - protein, 113 aa, Artificial Sequence
  source: /note="Description of Artificial Sequence: Synthetic polypeptide"
DIQMTQSPSSLSASVGDRVTITCRASQSITFDYKNYVAWYQQKPGKAPKVLIYWGSYLESGVPSRFSGSGSGTDFTLTISSLQPEDFATYYCQQHYTTPPTFGQGTKVEIKGS

SEQ ID NO: 24174 - protein, 113 aa, Artificial Sequence
  source: /note="Description of Artificial Sequence: Synthetic polypeptide"
DIQMTQSPSSLSASVGDRVTITCRASQSITFNYKNYVAWYQQKPGKAPKVLIYWGSYLESGVPSRFSGSGSGTDFTLTISSLQPEDFATYYCQQHYTTPPTFGQGTKVEIKGS

SEQ ID NO: 24175 - protein, 113 aa, Artificial Sequence
  source: /note="Description of Artificial Sequence: Synthetic polypeptide"
DIQMTQSPSSLSASVGDRVTITCRASQSITFSYKNYVAWYQQKPGKAPKVLIYWGSYLESGVPSRFSGSGSGTDFTLTISSLQPEDFATYYCQQHYTTPPTFGQGTKVEIKGS

SEQ ID NO: 24176 - protein, 109 aa, Artificial Sequence
  source: /note="Description of Artificial Sequence: Synthetic polypeptide"
EIVLTQSPATLSVSPGERVTLSCRASQSVANNLAWYQQKPGQSPRLLIYGASTRDTGIPARFSGSGSGTEFTLTISSLQSEDFAVYYCQQYNNWPPMYTFGQGTKLEIK

SEQ ID NO: 24177 - protein, 107 aa, Artificial Sequence
  source: /note="Description of Artificial Sequence: Synthetic polypeptide"
DIQMTQSPSSLSASLGERVSLTCRASQEISGYLSWLQQKPDGTIKRLIYAASTLDSGVPKRFSGSRSGSDYSLSISSLESEDFADYYCLQYANYPWSFGGGTKLEIK

SEQ ID NO: 24178 - protein, 124 aa, Artificial Sequence
  source: /note="Description of Artificial Sequence: Synthetic polypeptide"
MTCSPLLLTLLIHCTGSWAQSVLTQPPSMSAPGQKVTISCSGSSSNIGYISWYQQLPGTAPLIYDNNKRPSGIPDRFSGSKSGTSATLGITGLQTGDEAYYCGSWDSSLSAGVFGTGTKVTVLG

SEQ ID NO: 24179 - protein, 129 aa, Artificial Sequence
  source: /note="Description of Artificial Sequence: Synthetic polypeptide"
MAWTPLFLFLLTCCPGSNSQTVVTQEPSLTVSPRGTVTLTCSSSTGAVTSGYYPGWFQLKPGQAPMSLIYSARKKHSWTPARFSGSLLGGKAALTLSGVQPEDEAEYYCLLYYGGAYVFGTGTKVTVLG

SEQ ID NO: 24180 - protein, 128 aa, Artificial Sequence
  source: /note="Description of Artificial Sequence: Synthetic polypeptide"
MRVLAQLLGLLLLCFPGARCDIQMTQSPSSLSASVGDRVTITCRASQGISSWLAWYQQKPEKVPKSLIYAASSLQSGVPSRFSGSGSGTDFTLTISSLQPEDFATYYCQQYNYYPLTFGGGTKVEIKR

SEQ ID NO: 24181 - protein, 113 aa, Artificial Sequence
  source: /note="Description of Artificial Sequence: Synthetic polypeptide"
DIVMSQSPSSLAVSVGEKVSMTCKSSQRLLYSSDQKNYLAWYQQKPGQSPKVLIYWASTRVSGVPDRFTGSESGTDFTLTISSVKAEDLAVYYCQQYYTYPLTFGAGTKLELK

SEQ ID NO: 24182 - protein, 113 aa, Artificial Sequence
  source: /note="Description of Artificial Sequence: Synthetic polypeptide"
DIVMTQSPDSLAVSLGERATMNCKSSQRLLYSSDQKNYLAWYQQKPGQPPKVLIYWASTRVSGVPDRFSGSESGTDFTLTISSLQAEDVAVYYCQQYYTYPLTFGQGTKVEIK

SEQ ID NO: 24183 - protein, 107 aa, Artificial Sequence
  source: /note="Description of Artificial Sequence: Synthetic polypeptide"
DIQMTQSPSSFSVSLGDRVTITCKASEDIYNRLAWYQQKPGNAPRLLISDTTNLWIGVPSRFSGSGSGKDYTLSITSLQSEDVATYYCQQYWSSRTFGGGTKLEIKR

SEQ ID NO: 24184 - protein, 107 aa, Artificial Sequence
  source: /note="Description of Artificial Sequence: Synthetic polypeptide"
DIQMTQSPSSFSVSLGDRVTITCKASEDIYNRVAWYQQKPGNAPRLLMSDATSLGAGVPSRFSGSGSGKDHTLSITSLQTEDVATYYCQQYWNTRTFGGGTKLEIKR

SEQ ID NO: 24185 - protein, 111 aa, Artificial Sequence
  source: /note="Description of Artificial Sequence: Synthetic polypeptide"
DIQMTQSPDSLAVSLGARATINCKSSQSVTFNYKNYLAWYQQKPGQPPKVLIYWASARESGVPDRFSGSGSGTDFTLTISSLQAEDVAVYYCQQHYRTPPTFGQGTKVEIK

SEQ ID NO: 24186 - protein, 111 aa, Artificial Sequence
  source: /note="Description of Artificial Sequence: Synthetic polypeptide"
DIVMTQSPDSLAVSLGERATINCKSSQSVTFNYKNYLAWYQQKPGQPPKLLIYWASTRESGVPDRFSGSGSGTDFTLTISSLQAEDVAVYYCQQHYRTPPTFGQGTKVEIK

SEQ ID NO: 24187 - protein, 111 aa, Artificial Sequence
  source: /note="Description of Artificial Sequence: Synthetic polypeptide"
DIVMTQSPDSLAVSLGERATINCKSSQSVTFNNKNYLAWYQQKPGQPPKLLIYWASTRESGVPDRFSGSGSGTDFTLTISSLQAEDVAVYYCQQHYRTPPTFGQGTKVEIK

SEQ ID NO: 24188 - protein, 112 aa, Artificial Sequence
  source: /note="Description of Artificial Sequence: Synthetic polypeptide"
DIVMTQSPDSLAVSLGERATINCKSSQSVLYSSNNKNYLAWYQQKPGQPPKLLIDWASTRESGVPDRFSGSGSGTDFTLTISNLQVEDVAVYYCQQYYRSPSFGQGTKLEIK

SEQ ID NO: 24189 - protein, 107 aa, Artificial Sequence
  source: /note="Description of Artificial Sequence: Synthetic polypeptide"
DIQMTQSPSSLSASVGDRVTITCRASQNIYKYLNWYQQRPGKAPKGLISAASGLQSGVPSRFSGSGSGTDFTLTITSLQPEDFATYYCQQSYSPPLTFGGGTRVEIK

SEQ ID NO: 24190 - protein, 107 aa, Artificial Sequence
  source: /note="Description of Artificial Sequence: Synthetic polypeptide"
DIQMTQSPSSLSSSVGDRVTITCRASQSIGAYVNWYQQKAGKAPQVLIFGASNLQSGVPSRFSGSGSGTDFTLTISSLQPEDFATYFCQQTYSTPITFGQGTRLEIK

SEQ ID NO: 24191 - protein, 107 aa, Artificial Sequence
  source: /note="Description of Artificial Sequence: Synthetic polypeptide"
DIQMTQSPSSLSASVGDRVTISCRASQSISTYLNWYQQQPGKAPKVLIFGATNLQSGVPSRFSGSGSGTDFTLTISSLQPEDFATYYCQQSYNTPLIFGQGTKLEIK

SEQ ID NO: 24192 - protein, 107 aa, Artificial Sequence
  source: /note="Description of Artificial Sequence: Synthetic polypeptide"
DIQMTQSPSSLSASVGDRVTISCRASQSISTYLNWYQQQPGKAPKVLISGATNLQSGVPSRFSGSGSGTDFTLTISSLQPEDFATYYCQQSYNTPLIFGQGTKLEIK

SEQ ID NO: 24193 - protein, 106 aa, Artificial Sequence
  source: /note="Description of Artificial Sequence: Synthetic polypeptide"
DIQMTQSPLSVSVSVGDRVTIACRASQSIDKFLNWYQQKPGKAPKLLIYGASNLHSGAPSRFSASGSGTDFTLTITNIQTEDFATYLCQQSFSVPAFGGGTKVEIK

SEQ ID NO: 24194 - protein, 106 aa, Artificial Sequence
  source: /note="Description of Artificial Sequence: Synthetic polypeptide"
DIQMTQSPSSLSASVGDRVTITCRASQSISTYLNWYQKRPGKAPKLLVYGASTLQSGVPSRFSGSGSGTDFTLTIASLQPEDSATYYCQQTYSIPLFGQGTRLEIK

SEQ ID NO: 24195 - protein, 106 aa, Artificial Sequence
  source: /note="Description of Artificial Sequence: Synthetic polypeptide"
DIQMTQSPSSLSASVGDRVTITCRASQSISTYLNWYQKRPGKAPKLLVYGASSLQSGVPSRFSGSGSGTDFTLTIASLQPEDSAVYYCQQTYSIPLFGQGTRLEIK

SEQ ID NO: 24196 - protein, 107 aa, Artificial Sequence
  source: /note="Description of Artificial Sequence: Synthetic polypeptide"
DIQMTQSPSSLSASVGDRLTITCRASQSISTYLHWYQQKPGKAPKLLIYAASSLQSGVPSRFSGSRSGTDFTLTISSLQPDDFATYYCQQSYSPPLTFGPGTKVDMK

SEQ ID NO: 24197 - protein, 107 aa, Artificial Sequence
  source: /note="Description of Artificial Sequence: Synthetic polypeptide"
DIQMTQSPSSLSASVGDRVTITCRASQSISNYLNWYQHKPGEAPKLLNYAASSLQSGVPSRFSASGSGTDFTLTISSLQPEDFATYYCQQSYNTPITFGQGTRLEIK

SEQ ID NO: 24198 - protein, 107 aa, Artificial Sequence
  source: /note="Description of Artificial Sequence: Synthetic polypeptide"
DIQMTQSPSSLSASVGDRVTITCRASQSISNYLNWYQHKPGEAPKLLNYAASSLQSGVPSRFSASGSGTDFTLSISGLQPEDFATYYCQQSYNTPITFGPGTRLEIK

SEQ ID NO: 24199 - protein, 107 aa, Artificial Sequence
  source: /note="Description of Artificial Sequence: Synthetic polypeptide"
DIQMTQSPSSLSASVGDRVTITCRASQSISTYLNWYQQKPGKAPKLLIYAASSLHSGVPSRFSGSGSGTDFALTISSLQPEDFATYYCQQSYSPPITFGQGTRLEIK

SEQ ID NO: 24200 - protein, 120 aa, Artificial Sequence; identical to SEQ ID NO: 23954
  source: /note="Description of Artificial Sequence: Synthetic polypeptide"

SEQ ID NO: 24201 - protein, 121 aa, Artificial Sequence; identical to SEQ ID NO: 23716
  source: /note="Description of Artificial Sequence: Synthetic polypeptide"

SEQ ID NO: 24202 - protein, 118 aa, Artificial Sequence; identical to SEQ ID NO: 23731
  source: /note="Description of Artificial Sequence: Synthetic polypeptide"

SEQ ID NO: 24203 - protein, 107 aa, Artificial Sequence
  source: /note="Description of Artificial Sequence: Synthetic polypeptide"
DIQMTQSPSSLSASVGDRVTITCRASQSISRYLNWYQQEPGKAPKLLVYAASSLQSGVPSRFSGSGSGTDFTLTISSLQPEDFATYYCQQSYSTPLTFGQGTRLEIK

SEQ ID NO: 24204 - protein, 106 aa, Artificial Sequence; identical to SEQ ID NO: 23729
  source: /note="Description of Artificial Sequence: Synthetic polypeptide"

SEQ ID NO: 24205 - protein, 106 aa, Artificial Sequence
  source: /note="Description of Artificial Sequence: Synthetic polypeptide"
EIVLTQSPATLSLSPGERATLSCRASQSVSSYLAWYQQKPGQAPRLLIYDASNRATGIPARFSGSGSGTDFTLTISRLEPEDFAVYFCQQYGSSPQFGQGTRLEIK

SEQ ID NO: 24206 - protein, 17 aa, Artificial Sequence
  source: /note="Description of Artificial Sequence: Synthetic peptide"
NFMLTQPHSVSASPGKT

SEQ ID NO: 24207 - protein, 110 aa, Artificial Sequence
  source: /note="Description of Artificial Sequence: Synthetic polypeptide"
QSVLTQPPSASGSPGQSVTISCTGTSSDVGGYNSVSWYQQHPGKAPKLMIYEVTKRPSGVPDRFSASKSGNTASLTVSGLQAEDEADYFCCSYAGHSAYVFGTGTKVTVL

SEQ ID NO: 24208 - protein, 108 aa, Artificial Sequence
  source: /note="Description of Artificial Sequence: Synthetic polypeptide"
EIVLTQSPGTLSLSPGERATLSCRASQSLSSKYLAWYQQKPGQAPRLLIYGASSRATGIPDRFSGSGSGTDFTLTISRLEPEDFAVYSCQQYDGVPRTFGQGTTVEIK

SEQ ID NO: 24209 - protein, 110 aa, Artificial Sequence
  source: /note="Description of Artificial Sequence: Synthetic polypeptide"
LPVLTQPPSASGTPGQRVTISCSGSSSNIGSNTVNWYQQLPGTAPKLLIYSNNQRPSGVPDRFSGSRSGTSASLAIIGLRPEDEADYYCQSYDSRLSASLFGTGTTVTVL

SEQ ID NO: 24210 - protein, 107 aa, Artificial Sequence
  source: /note="Description of Artificial Sequence: Synthetic polypeptide"
DIQMTQSPSSLSASVGDRVTITCRASQSISSYLNWYQQKPGKAPKLLIYAASSLQRGVPSRFSGSGSGTDFTLTISSLQPEDFAVYYCQQYDSSPYTFGQGTKVEIK

SEQ ID NO: 24211 - protein, 110 aa, Artificial Sequence
  source: /note="Description of Artificial Sequence: Synthetic polypeptide"
QPGLTQPPSVSKGLRQTATLTCTGNSNNVGNQGAAWLQQHQGHPPKLLSYRNNDRPSGISERFSASRSGNTASLTITGLQPEDEADYYCSTWDSSLSAVVFGGGTKLTVL

SEQ ID NO: 24212 - protein, 110 aa, Artificial Sequence
  source: /note="Description of Artificial Sequence: Synthetic polypeptide"
SYELTQPPSVSKGLRQTAILTCTGDSNNVGHQGTAWLQQHQGHPPKLLSYRNGNRPSGISERFSASRSGNTASLTIIGLQPEDEADYYCSVWDSSLSAWVFGGGTKLTVL

SEQ ID NO: 24213 - protein, 108 aa, Artificial Sequence
  source: /note="Description of Artificial Sequence: Synthetic polypeptide"
QPVLTQPPSVSVAPGQTASIPCGGNNIGGYSVHWYQQKPGQAPLLVIYDDKDRPSGIPERFSGANSGSTATLTISRVEAGDEGDYYCQVWDSGNDRPLFGGGTKLTVL

SEQ ID NO: 24214 - protein, 110 aa, Artificial Sequence
  source: /note="Description of Artificial Sequence: Synthetic polypeptide"
SYELTQPPSASGKHGQRVTISCSGGTSNIGRNHVNWYQQLPGTAPKLLIYSNEQRPSGVPDRFSGSKSGTSASLAVSGLQSEDEADYYCASWDDNLSGWVFGGGTKLTVL

SEQ ID NO: 24215 - protein, 126 aa, Artificial Sequence
  source: /note="Description of Artificial Sequence: Synthetic polypeptide"
EVQLVQSGAEVKKPGASVKVSCKASGYTFTDYHINWVRQAPGQGLEWMGWIHPNSGDTNYAQKFQGWVTMTRDTAISTAYMEVNGLKSDDTAVYYCARGGLEPRSVDYYYYGMDVWGQGTTVTVSS

SEQ ID NO: 24216 - protein, 126 aa, Artificial Sequence
  source: /note="Description of Artificial Sequence: Synthetic polypeptide"
QVQLVQSGAEVKKPGASVKVSCKASGYTFTDYHINWVRQAPGQGLEWMGWIHPNSGDTNYAQKFQGWVTMTRDTSISTAYMEVNGLKSDDTAVYYCARGGLEPRSVDYYYYGMDVWGQGTTVTVSS

SEQ ID NO: 24217 - protein, 126 aa, Artificial Sequence
  source: /note="Description of Artificial Sequence: Synthetic polypeptide"
QVQLVQSGAEVRKPGASVKVSCKASGYTFTDNYIHWVRQAPGQGLEWMGWIHPNSGATKYAQKFEGWVTMTRDTSISTVYMELSRSRSDDTAVYYCARAGLEPRSVDYYFYGLDVWGQGTAVTVSS

SEQ ID NO: 24218 - protein, 126 aa, Artificial Sequence
  source: /note="Description of Artificial Sequence: Synthetic polypeptide"
QVQLVQSGAEVKKPGASVKVSCKASGYTFTGYYMHWVRQAPGQGLEWMGWINPNSGGTNYAQKFQGWVTMTRDTSISTAYMELSRLRSDDTAVYYCARGGLEPRSVDYYYYGMDVWGQGTTVTVSS

SEQ ID NO: 24219 - protein, 103 aa, Artificial Sequence
  source: /note="Description of Artificial Sequence: Synthetic polypeptide"
DIQITQSPSSLSASVGDRVTITCRTSQSLSSYLHWYQQKPGKAPKLLIYAASSLQSGVPSRFSGSGSGTDFTLTISSLQPEDFATYYCQQSRTFGQGTKVEIK

SEQ ID NO: 24220 - protein, 103 aa, Artificial Sequence
  source: /note="Description of Artificial Sequence: Synthetic polypeptide"
DIQMTQSPSSLSASVGDRVTITCRTSQSLSSYLHWYQQKPGKAPKLLIYAASSLQSGVPSRFSGSGSGTDFTLTISSLQPEDFATYYCQQSRTFGQGTKVEIK

SEQ ID NO: 24221 - protein, 103 aa, Artificial Sequence; identical to SEQ ID NO: 24220
  source: /note="Description of Artificial Sequence: Synthetic polypeptide"

SEQ ID NO: 24222 - protein, 102 aa, Artificial Sequence
  source: /note="Description of Artificial Sequence: Synthetic polypeptide"
DIQVTQSPSSLSASVGDRVTISCRAQSLSSYLHWYQQKPGQPPKLLIYAATTLQSGVPSRFSGSGSGTDFTLTISTFQAEDVATYYCQQSRTFGQGTKVEIK

SEQ ID NO: 24223 - protein, 102 aa, Artificial Sequence
  source: /note="Description of Artificial Sequence: Synthetic polypeptide"
DIQMTQSPSSLSASVGDRVTISCRAQSLSSYLHWYQQKPGQPPKLLIYAATTLQSGVPSRFSGSGSGTDFTLTISTFQAEDVATYYCQQSRTFGQGTKVEIK

SEQ ID NO: 24224 - protein, 102 aa, Artificial Sequence; identical to SEQ ID NO: 24223
  source: /note="Description of Artificial Sequence: Synthetic polypeptide"

SEQ ID NO: 24225 - protein, 103 aa, Artificial Sequence
  source: /note="Description of Artificial Sequence: Synthetic polypeptide"
DIQVTQSPSSLSASVGDRVTISCRASQRLNSYLHWYQQTPGQAPKLLIYATSTLQSGVSPRFSGSGSGTDFTLTISSLQPEDVATYYCQLSRTFGHGTKVEIK

SEQ ID NO: 24226 - protein, 103 aa, Artificial Sequence
  source: /note="Description of Artificial Sequence: Synthetic polypeptide"
DIQMTQSPSSLSASVGDRVTISCRASQRLNSYLHWYQQTPGQAPKLLIYATSTLQSGVSPRFSGSGSGTDFTLTISSLQPEDVATYYCQLSRTFGHGTKVEIK

SEQ ID NO: 24227 - protein, 103 aa, Artificial Sequence
  source: /note="Description of Artificial Sequence: Synthetic polypeptide"
DIQVTQSPSSLSASVGDRITISCRTSQSLRSYLHWYQQKPGKAPKLLIYASSTLQSGVPSRFSGSGSGTDFTLTISNLQPEDFATYYCQLSRTFGQGTKVEIK

SEQ ID NO: 24228 - protein, 103 aa, Artificial Sequence
  source: /note="Description of Artificial Sequence: Synthetic polypeptide"
DIQMTQSPSSLSASVGDRITISCRTSQSLRSYLHWYQQKPGKAPKLLIYASSTLQSGVPSRFSGSGSGTDFTLTISNLQPEDFATYYCQLSRTFGQGTKVEIK

SEQ ID NO: 24229 - protein, 103 aa, Artificial Sequence
  source: /note="Description of Artificial Sequence: Synthetic polypeptide"
DIQMTQSPSSLSASVGDRVTITCRTSQSLSSYTHWYQQKPGKAPKLLIYAASSRLSGVPSRFSGSGSGTDFTLTISSLQPEDFATYYCQQSRTFGQGTKVEIK

SEQ ID NO: 24230 - protein, 103 aa, Artificial Sequence
  source: /note="Description of Artificial Sequence: Synthetic polypeptide"
DIQMTQSPSSLSASVGDRVTITCRTSQSLSSYTHWYQQKPGKAPKLLIYAASSRGSGVPSRFSGSGSGTDFTLTISSLQPEDFATYYCQQSRTFGQGTKVEIK

SEQ ID NO: 24231 - protein, 103 aa, Artificial Sequence
  source: /note="Description of Artificial Sequence: Synthetic polypeptide"
DIQMTQSPSSLSASVGDRVTITCRTSQSLSSYDHWYQQKPGKAPKLLIYAASSRLSGVPSRFSGSGSGTDFTLTISSLQPEDFATYYCQQSRTFGQGTKVEIK

SEQ ID NO: 24232 - protein, 103 aa, Artificial Sequence; identical to SEQ ID NO: 24229
  source: /note="Description of Artificial Sequence: Synthetic polypeptide"

SEQ ID NO: 24233 - protein, 103 aa, Artificial Sequence; identical to SEQ ID NO: 24230
  source: /note="Description of Artificial Sequence: Synthetic polypeptide"

SEQ ID NO: 24234 - protein, 103 aa, Artificial Sequence; identical to SEQ ID NO: 24220
  source: /note="Description of Artificial Sequence: Synthetic polypeptide"

SEQ ID NO: 24235 - protein, 99 aa, Artificial Sequence
  source: /note="Description of Artificial Sequence: Synthetic polypeptide"
DVVMTQSPLSLPVTLGQPASISCRSSRGLLYIDGNTYLNWFQQRPGQSPRRLIHNVSNRDSGVPDRFSGSGSRTDFTLKISRVEAEDVGVYYCMQGTYW

SEQ ID NO: 24236 - protein, 112 aa, Artificial Sequence
  source: /note="Description of Artificial Sequence: Synthetic polypeptide"
DVVMTQSPLSLPVTLGQPASISCRSSRGLLYIDGNTYLNWFQQRPGQSPRRLIHNVSNRDSGVPDRFSGSGSRTDFTLKISRVEAEDVGVYYCMQGTYWPFTFGQGTKVEIK

SEQ ID NO: 24237 - protein, 94 aa, Artificial Sequence
  source: /note="Description of Artificial Sequence: Synthetic polypeptide"
DIQMTQSPSTLSASVGDRVTITCRASQSIDNWLAWYQQKPGKAPNLLIYKASSLRSGVPSRFSGSGSGTEFTLTISSLQPDDFATYYCQHYDTY

SEQ ID NO: 24238 - protein, 107 aa, Artificial Sequence
  source: /note="Description of Artificial Sequence: Synthetic polypeptide"
DIQMTQSPSTLSASVGDRVTITCRASQSIDNWLAWYQQKPGKAPNLLIYKASSLRSGVPSRFSGSGSGTEFTLTISSLQPDDFATYYCQHYDTYSGTFGQGTKVEIK

SEQ ID NO: 24239 - protein, 94 aa, Artificial Sequence
  source: /note="Description of Artificial Sequence: Synthetic polypeptide"
DIQMTQSPSTLSASVGDRVTITCRASQSIGSWLAWYQQKPGKAPKLLIYKASTLESGVPSRFSGSGSGTEFTLTISSLQPDDLATYYCQQHNSY

SEQ ID NO: 24240 - protein, 125 aa, Artificial Sequence; identical to SEQ ID NO: 23772
  source: /note="Description of Artificial Sequence: Synthetic polypeptide"

SEQ ID NO: 24241 - protein, 96 aa, Artificial Sequence
  source: /note="Description of Artificial Sequence: Synthetic polypeptide"
EIVLTQSPGTLSLSPGERATLSCRASQSVSSNYLAWYQQKPGQAPRLLIYGASNRATGIPDRFSGSGSGTDFTLAISRLEPEDFAVYYCQQYGTSP

SEQ ID NO: 24242 - protein, 131 aa, Artificial Sequence
  source: /note="Description of Artificial Sequence: Synthetic polypeptide"
EVQLVESGAEVKKPGSSVKVSCRASGTFYKYAINWVRQAPGQGLEWMGGIIPFFGTTNYAQKFQGRLTITADGSTNTAYMQLDSLRSEDTAVYYCAGPSITESHYCLDCAAKDYYYGLDVWGQGTTVTVSS

SEQ ID NO: 24243 - protein, 111 aa, Artificial Sequence
  source: /note="Description of Artificial Sequence: Synthetic polypeptide"
QSVLTQPPSASGTPGQRVTISCSGSSSNIGSNFVYWYQQLPGTAPKLLIYRNNQRPSGVPDRFSGSRSGTSASLAISGLRSEDEADYYCAAWDDSLSGAVFGGGTQLTVLG

SEQ ID NO: 24244 - protein, 111 aa, Artificial Sequence
  source: /note="Description of Artificial Sequence: Synthetic polypeptide"
QSVLTQPPSVSAAPGQKVTISCSGSSSNIGNNYVSWYQQLPGTAPKLLIYDNNKRPSGIPDRFSGSKSGTSATLGITGLQTGDEADYYCGTWDSSLSAGVFGGGTKLTVLG

SEQ ID NO: 24245 - protein, 111 aa, Artificial Sequence
  source: /note="Description of Artificial Sequence: Synthetic polypeptide"
QSVLTQPPSVSAAPGQKVTISCSGSTSNIGDNYVSWYQQVPGTAPKLLIYDNNQRPSGIPDRFSGSKSGTSATLGITGLQTGDEADYYCGTWDSSLSAVLFGGGTKLTVLR

SEQ ID NO: 24246 - protein, 111 aa, Artificial Sequence
  source: /note="Description of Artificial Sequence: Synthetic polypeptide"
QSVLTQPPSASGTPGQRVTISCSGGTSNIGSNTVNWYQQLPGTAPKLLMYSNNQRPSGVPDRFSGSKSGTSASLAISGLQSEDEADYYCAAWDDSLNGVVFGGGTKLTVLG

SEQ ID NO: 24247 - protein, 111 aa, Artificial Sequence
  source: /note="Description of Artificial Sequence: Synthetic polypeptide"
QSVLTQPPSASGTPGQRVTISCSGSSSNIGSNTVNWYQQLPGTAPKLLIYSNNQRPSGVPDRFSGSKSGTSASLAISGLQSEDEADYYCAAWDDSLNGVVFGGGTKLTVLG

SEQ ID NO: 24248 - protein, 112 aa, Artificial Sequence
  source: /note="Description of Artificial Sequence: Synthetic polypeptide"
QSVLTQPPSASGTPGQRVTISCSGSSSNIGSNTVNWYQQLPGTAPKLLIYSNNQRPSGVPDRFSGSKSGTSASLAISGLQSEDEADYYCAAWDDSLNGHAVFGGGTQLTVLG

SEQ ID NO: 24249 - protein, 111 aa, Artificial Sequence
  source: /note="Description of Artificial Sequence: Synthetic polypeptide"
QSVLTQPPSASGTPGQRVTISCSGGTSNIGSNTVNWYQQLPGTAPKLLMYNNNQRPSGVPDRFSGSKSGTSASLAISGLQSEDEADYYCAAWDDSLNGVVFGGGTKLTVLG

SEQ ID NO: 24250 - protein, 111 aa, Artificial Sequence
  source: /note="Description of Artificial Sequence: Synthetic polypeptide"
QSVLTQPPSASGTPGQRVTISCSGSSSNIGSNTVNWYQQLPGTAPKLLIYSNNQRPSGAPDRFSGSKSGTSASLAISGLQSEDEADYYCAAWDDSLNGYVFGTGTKVTVLG

SEQ ID NO: 24251 - protein, 111 aa, Artificial Sequence
  source: /note="Description of Artificial Sequence: Synthetic polypeptide"
QSVLTQPPSVSAAPGQKVTISCSGSSSNIGNNDVSWYQQLPGTAPKLLLYDDNKRPSGVSDRFSGSKSGASATLDITGLQTGDEADYYCGTWDNILSVVLFGGGTRLTVLS

SEQ ID NO: 24252 - protein, 111 aa, Artificial Sequence
  source: /note="Description of Artificial Sequence: Synthetic polypeptide"
QSVLTQPPSASGTPGQRVTISCSGSNSNIGSNTVNWYQQLPGTAPKLLIYTNNQRPSGVPDRFSGSKSGTSASLAISGLQSEDEADYYCASWDDSLNGVVFGGGTKLTVLG

SEQ ID NO: 24253 - protein, 111 aa, Artificial Sequence
  source: /note="Description of Artificial Sequence: Synthetic polypeptide"
QSVLTQPPSASGTPGQSVTISCSGSRSNIGGNTVNWYQHLPGMAPKLLIYSSNQRSSGVPDRFSGSKSGTSASLAISGLQSEDDADYYCASWDDSLNGVVFGGGTKLTVLG

SEQ ID NO: 24254 - protein, 111 aa, Artificial Sequence; identical to SEQ ID NO: 24251
  source: /note="Description of Artificial Sequence: Synthetic polypeptide"

SEQ ID NO: 24255 - protein, 109 aa, Artificial Sequence
  source: /note="Description of Artificial Sequence: Synthetic polypeptide"
EIVLTQSPATLSVSPGERATLSCRASQSVDSNLAWYQQKPGQAPRLLVYSASTRATGIPARFSGSGSGTEFTLAISSLQSEDFAVYYCQHYTNWPPRLTFGGGSKVEIK

SEQ ID NO: 24256 - protein, 109 aa, Artificial Sequence
  source: /note="Description of Artificial Sequence: Synthetic polypeptide"
EIVLTQSPATLSVSPGERATLSCRASQSVSHNLAWYQQKPGQAPRLLVYSASTRATGIPARFSGSGSGTEFTLAISSLQSEDFAVYYCQHYTNYPPRLTFGGGSKVEIK

SEQ ID NO: 24257 - protein, 109 aa, Artificial Sequence
  source: /note="Description of Artificial Sequence: Synthetic polypeptide"
EIVMTQSPATLSVSPGERATLSCRASQSVDSNLAWYQQKPGQAPRLLVYSASTRATGIPARFSGSGSGTEFTLAISSLQSEDFAVYYCQHYTNWPPRLTFGGGSKVEIK

SEQ ID NO: 24258 - protein, 109 aa, Artificial Sequence
  source: /note="Description of Artificial Sequence: Synthetic polypeptide"
EIVLTQSPATLSVSPGERATLSCRASQSVSSNLAWYQQKPGQAPRLLVYSASTRATGIPARFSGSGSGTEFTLAISSLQSEDFAVYYCQHYTNWPPRLTFGGGSKVEIK

SEQ ID NO: 24259 - protein, 109 aa, Artificial Sequence
  source: /note="Description of Artificial Sequence: Synthetic polypeptide"
EIVLTQSPATLSVSPGERATLSCRASQSVDHNLAWYQQKPGQAPRLLVYSASTRATGIPARFSGSGSGTEFTLAISSLQSEDFAVYYCQHYTNWPPRLTFGGGSKVEIK

SEQ ID NO: 24260 - protein, 109 aa, Artificial Sequence
  source: /note="Description of Artificial Sequence: Synthetic polypeptide"
EIVLTQSPATLSVSPGERATLSCRASQSVSHNLAWYQQKPGQAPRLLVYSASTRATGIPARFSGSGSGTEFTLAISSLQSEDFAVYYCQHYTNWPPRLTFGGGSKVEIK

SEQ ID NO: 24261 - protein, 109 aa, Artificial Sequence
  source: /note="Description of Artificial Sequence: Synthetic polypeptide"
EIVLTQSPATLSVSPGERATLSCRASQSVSHNLAWYQQKPGQAPRLLVYSASTRATGIPARFSGSGSGTEFTLAISSLQSEDFAVYYCQHYTNFPPRLTFGGGSKVEIK

SEQ ID NO: 24262 - protein, 109 aa, Artificial Sequence
  source: /note="Description of Artificial Sequence: Synthetic polypeptide"
EIVLTQSPATLSVSPGERATLSCRASQSVDSNLAWYQQKPGQAPRLLVYSASTRATGIPARFSGSGSGTEFTLAISSLQSEDFAVYYCQHYTNFPPRLTFGGGSKVEIK

SEQ ID NO: 24263 - protein, 109 aa, Artificial Sequence
  source: /note="Description of Artificial Sequence: Synthetic polypeptide"
EIVLTQSPATLSVSPGERATLSCRASQSVDSNLAWYQQKPGQAPRLLVYSASTRATGIPARFSGSGSGTEFTLAISSLQSEDFAVYYCQHYTNYPPRLTFGGGSKVEIK

SEQ ID NO: 24264 - protein, 109 aa, Artificial Sequence
  source: /note="Description of Artificial Sequence: Synthetic polypeptide"
ETTLTQSPATLSVSPGERATLSCRASQVISHNLAWYQQKPGQAPRLLIYGASTRASGIPARFSGSGSGTDYTLTITSLQSEDFAVYYCQHYSNWPPRLTFGGGTKVEIK

SEQ ID NO: 24265 - protein, 109 aa, Artificial Sequence
  source: /note="Description of Artificial Sequence: Synthetic polypeptide"
EIVLTQSPATLSVSPGERATLSCRASQVISHNLAWYQQKPGQAPRLLIYGASTRASGIPARFSGSGSGTDYTLTITSLQSEDFAVYYCQHYSNWPPRLTFGGGTKVEIK

SEQ ID NO: 24266 - protein, 109 aa, Artificial Sequence
  source: /note="Description of Artificial Sequence: Synthetic polypeptide"
EIVLTQSPATLSVSPGERATLSCRASQVISHNLAWYQQKPGQAPRLLIYGASTRASGIPARFSGSGSGTDYTLTITSLQPEDFAVYYCQHYSNWPPRLTFGGGTKVEIK

SEQ ID NO: 24267 - protein, 109 aa, Artificial Sequence
  source: /note="Description of Artificial Sequence: Synthetic polypeptide"
EIVMTQSPATLSVSPGERATLSCRASQVISHNLAWYQQKPGQAPRLLIYGASTRASGIPARFSGSGSGTDYTLTITSLQSEDFAVYYCQHYSNWPPRLTFGGGTKVEIK

SEQ ID NO: 24268 - protein, 109 aa, Artificial Sequence
  source: /note="Description of Artificial Sequence: Synthetic polypeptide"
EIVLTQSPATLSVSPGERATLSCRASQVISHNLAWYQQKPGQAPRLLIYGASTRASGIPARFSGSGSGTDYTLTITSLQSEDFAVYYCQHYSNFPPRLTFGGGTKVEIK

SEQ ID NO: 24269 - protein, 109 aa, Artificial Sequence
  source: /note="Description of Artificial Sequence: Synthetic polypeptide"
EIVLTQSPATLSVSPGERATLSCRASQVISHNLAWYQQKPGQAPRLLIYGASTRASGIPARFSGSGSGTDYTLTITSLQSEDFAVYYCQHYSNYPPRLTFGGGTKVEIK

SEQ ID NO: 24270 - protein, 109 aa, Artificial Sequence
  source: /note="Description of Artificial Sequence: Synthetic polypeptide"
DIVMTQSPSTLSASVGDRVTITCRASQSIGNWLAWYQQKPGKAPKLLIYKVSTLESGVPSRFSGSGSGTEFTLTINSLQPDDFATYYCQRYTSNSQGFTFGQGTKLEIK

SEQ ID NO: 24271 - protein, 110 aa, Artificial Sequence
  source: /note="Description of Artificial Sequence: Synthetic polypeptide"
SSELTQPPSASGTPGQRVTISCSGSTSNIGYNPVSWYQQVPGTAPKLLIYSNTERPSGVPDRFSGSKSGTSASLAISGLQSEDEADYYCAAWDDTLNGPVFGGGTKVTVL

SEQ ID NO: 24272 - protein, 112 aa, Artificial Sequence
  source: /note="Description of Artificial Sequence: Synthetic polypeptide"
DIQLTQSPLSPPVTLGQPASISCRSSQSLLYTDGFTYLSWYHQRPGQSPRRLIYKISNRDSGVPDRFSGSGSGTDFTLKISRVEAEDVGVYYCMQATHWPLTFGEGTKVEIK

SEQ ID NO: 24273 - protein, 109 aa, Artificial Sequence; identical to SEQ ID NO: 24265
  source: /note="Description of Artificial Sequence: Synthetic polypeptide"

SEQ ID NO: 24274 - protein, 111 aa, Artificial Sequence; identical to SEQ ID NO: 24186
  source: /note="Description of Artificial Sequence: Synthetic polypeptide"

SEQ ID NO: 24275 - protein, 111 aa, Artificial Sequence; identical to SEQ ID NO: 24187
  source: /note="Description of Artificial Sequence: Synthetic polypeptide"

SEQ ID NO: 24276 - protein, 108 aa, Artificial Sequence
  source: /note="Description of Artificial Sequence: Synthetic polypeptide"
EIVLTQSPGTLSVSPGERATLSCRASQSISSGYLAWYQQKPGQAPRLLIYGASSRATGIPDRFSGSGSGTDFTLTISRLEPEDFAVYYCQQYGTSPQTFGQGTKVEIK

SEQ ID NO: 24277 - protein, 112 aa, Artificial Sequence
  source: /note="Description of Artificial Sequence: Synthetic polypeptide"
DIVMTQTPLSLSVTPGQPASISCKSSQSLLHSDGKTYLYWYLQKPGQSPQLLIYEVSNRFSGVPDRFSGSGSGTDFTLKISRVEAEDVGVYYCMQNILLPLTFGGGTKVEIK

SEQ ID NO: 24278 - protein, 111 aa, Artificial Sequence
  source: /note="Description of Artificial Sequence: Synthetic polypeptide"
QSALTQPASVSGSPGQSITISCTGTGSDVGSSNLVSWYQQHPAKAPKLIIYEVTKRPSGVSNRFSGSKSGNTASLTISGLQAEDEADYYCCSYAGSSSSRVFGTGTKVTVL

SEQ ID NO: 24279 - protein, 110 aa, Artificial Sequence
  source: /note="Description of Artificial Sequence: Synthetic polypeptide"
QSVLTQPPSASGAPGQRVTLSCSGSGSNIGSNTVSWYQQLPGTAPKLLVFTNNQRPSGVPDRFSGSKSGTSASLAISGLQSEDEADYYCAAWDDSLNGQLFGGGTKLTVL

SEQ ID NO: 24280 - protein, 112 aa, Artificial Sequence
  source: /note="Description of Artificial Sequence: Synthetic polypeptide"
EIVMTQTPLSLSVTPGQPASISCRSSQSLLHSDGKTYLYWYLQKPGQPPQLLISEVFNRFSGVPDRFSGSGSGTDFTLKISRVEAEDVGVYYCMQSLQLPLTFGGGTKVEIK

SEQ ID NO: 24281 - protein, 107 aa, Artificial Sequence
  source: /note="Description of Artificial Sequence: Synthetic polypeptide"
DIQMTQSPSSLSASVGDRVSITCQASQDISRYLNWYQQKPGEAPKLLIYDASNLETGVPSRFSGSGSGTDFTFTISSLQPEDIATYFCQQYGYLPLTFGPGTKVDSK

SEQ ID NO: 24282 - protein, 238 aa, Artificial Sequence; identical to SEQ ID NO: 24077
  source: /note="Description of Artificial Sequence: Synthetic polypeptide"

SEQ ID NO: 24283 - protein, 238 aa, Artificial Sequence; identical to SEQ ID NO: 24078
  source: /note="Description of Artificial Sequence: Synthetic polypeptide"

SEQ ID NO: 24284 - protein, 242 aa, Artificial Sequence; identical to SEQ ID NO: 24079
  source: /note="Description of Artificial Sequence: Synthetic polypeptide"

SEQ ID NO: 24285 - protein, 177 aa, Artificial Sequence
  source: /note="Description of Artificial Sequence: Synthetic polypeptide"
DVQMTQSPSSLSASVGDRVTITCRASQSVSNYVNWYQQKPGRAPRLLISSASNLWAGVPPRFSGRGEETDFTLTITSLQPEDSAVYYCQQSYSDLLSFGGGTKVEIKRTVAAPSVFTFPPSDEQLKSGTASVVCLLNNFYPREAKVQWKVDNALQSGNSQESVTEQDSKDSTYSLSS

SEQ ID NO: 24286 - protein, 210 aa, Artificial Sequence
  source: /note="Description of Artificial Sequence: Synthetic polypeptide"
QTVVTQEPSFSVSPGGTVTLTCGLSSGSVSPSYYASWYQQTPGQAPRTLIYNTNTRSSGVPDRFSGSFLGSDAALTITGAQADDESDYFCVLYMPSGDWVFGGGTKLTVLGQPKAAPSVTLFPPSSEELQANKATLVCLISDFYPGAVTVARKADSSPVKAGVETTTPSKQSNNKYAASSYLSLTPEQWKSHKSYSCQVTHEESTVEKTM

SEQ ID NO: 24287 - protein, 171 aa, Artificial Sequence
  source: /note="Description of Artificial Sequence: Synthetic polypeptide"
EIVLAQSPATLSLSPGERATLSCRASETVDTYLAWYQQKPGQAPRLLINDASKRATGIPARFSGSGSGTDFTLTISGLEPEDFAVYWCQQHSNWPPTFGQGSRLEIKRTVAAPSVFIFPPSDEQLKSGTASVVCLLNNFYPREAKVQWKVDNALQSGNSQESVTEQDSKDS

SEQ ID NO: 24288 - protein, 210 aa, Artificial Sequence
  source: /note="Description of Artificial Sequence: Synthetic polypeptide"
QSVLAQPPSASGTPGQRVIISCSGTSSNIGGNSVNWYQHPPGAAPRLLIYTTDQRPSGVPDRFSGSKSGTSASLAISGLQSEDEADYYCEVWDDSLTRPVFGGGTKLTVLRQPKAAPSVTLFPPSSEELQANKATLVCLISDFYPGAVTVAWKADSSPVKAGVETTTPSKQSNNKYAASSYLSLTPEQWKSHKSYSCQVTHEESTVEKTM

SEQ ID NO: 24289 - protein, 127 aa, Artificial Sequence
  source: /note="Description of Artificial Sequence: Synthetic polypeptide"
MEAPAQLLFLLLLWLPDTSGEIGMTQSPATLSVSPGERATLFCRASPSISDNLAWYQQKPGQAPRLLFYGASTRATGIPARFSGSGSGTEFTLTISSVQSEDIGVYYCQQYSNWPRTFGQGTKLQIK

SEQ ID NO: 24290 - protein, 129 aa, Artificial Sequence
  source: /note="Description of Artificial Sequence: Synthetic polypeptide"
MAWVSFYLTLLTHCAGSWAQSVLTQPPSASGTPGQRVTISCSGSSSNIGSNDVYWYQNLPGTAPKLLIYNNNQRPSGVPDRFSGSKSGTSASLAISGLRSEDEADYYCAAWDDSLTVSFGTGTKVTVLG

SEQ ID NO: 24291 - protein, 130 aa, Artificial Sequence
  source: /note="Description of Artificial Sequence: Synthetic polypeptide"
MPWALLLLTLLTHCAGSWAQSVLTQPPSASGTPGQRVSISCSGGSSNIGSNTVNWYQQLPGTAPRLLIYSNNQRPLGVPDRFSESKSGTSASLAISGLRSEDEADYYCAAWDDSLNGWVFGGGTRLTVLG

SEQ ID NO: 24292 - protein, 100 aa, Artificial Sequence
  source: /note="Description of Artificial Sequence: Synthetic polypeptide"
ELTQSPSSLSASVGDSVTITCRTSERISTYLNWYQQKPGKAPRLLVSGASTLQGGVPSRFSGSGSGTAFTLTINSLQPEDFATYYCQQSYSTPLTFGGGT

SEQ ID NO: 24293 - protein, 105 aa, Artificial Sequence; identical to SEQ ID NO: 24152
  source: /note="Description of Artificial Sequence: Synthetic polypeptide"

SEQ ID NO: 24294 - protein, 107 aa, Artificial Sequence
  source: /note="Description of Artificial Sequence: Synthetic polypeptide"
DIQLTQSPSSLSASVGDRVTITCRASQGIRNDLGWYQQKPGNAPKRLIFGASSLQSGVPSRFSGSGSGTEFTLTISSLQPEDFATYYCLQHNSYPYTFGQGTKLEIK

SEQ ID NO: 24295 - protein, 101 aa, Artificial Sequence
  source: /note="Description of Artificial Sequence: Synthetic polypeptide"
QSALTQPASVSGSPGQSITISCTGTSSDVGGYNYVSWYQQHPGKAPKLMIYEVSHRPSGVSNRFSGSKSGSTASLTISGLQSEDEADYYCSSYTGEGPLGV

SEQ ID NO: 24296 - protein, 98 aa, Artificial Sequence
  source: /note="Description of Artificial Sequence: Synthetic polypeptide"
  MOD_RES (4)..(4): Any amino acid
DIQXTQSPSSLSASVDDRVTITCRASQSISGYLNWYQQKPGKAPNLLIYGASTLQSGVPSRFSGSGSGTDFTLTITSLQPEDYATYYCQQTYTSPPYA

SEQ ID NO: 24297 - protein, 98 aa, Artificial Sequence
  source: /note="Description of Artificial Sequence: Synthetic polypeptide"
  MOD_RES (4)..(4): Any amino acid
EIVXTQSPGTLSLSPGERATLSCRASQSVSMNYLAWFQQKPGQAPRLLIYGASRRATGIPDRISGSGSGTDFTLTISRLEPADFAVYYCQQYGTSPRT

SEQ ID NO: 24298 - protein, 103 aa, Artificial Sequence
  source: /note="Description of Artificial Sequence: Synthetic polypeptide"
  MOD_RES (4)..(4): Any amino acid
DIQXTQSPDSLAVSLGERATINCKSSQSIFYSSNNKNYLTWYQQKPGQPPKLLIYWASTRESGVPDRFSGSGSGTDFTLTISSLQAEDVAVYYCQQYYSIPYT

SEQ ID NO: 24299 - protein, 103 aa, Artificial Sequence
  source: /note="Description of Artificial Sequence: Synthetic polypeptide"
DIVMTQTPDSLAVSLGERATINCKSSQSVLYSSIHKNYLAWYQQKPGQPPKLLIYWASTRESGVPDRFSGSGSGTDFTLTISSLQAEDVAVYYCQQYYRSPPT

SEQ ID NO: 24300 - protein, 100 aa, Artificial Sequence
  source: /note="Description of Artificial Sequence: Synthetic polypeptide"
QSALTQPPSASGSPGQSVTISCTGTSSDVGGYNYVSWYQQHPGKAPKLMIREVSKRPSGVPDRFSGSKSGNTASLTVSGLQAEDEAEYYCSSYAGSNNLI

SEQ ID NO: 24301 - protein, 97 aa, Artificial Sequence
  source: /note="Description of Artificial Sequence: Synthetic polypeptide"
EIVLTQSPDFQSVTPKERVTITCRASQGIGSNLHWYQQKPDQSPKLLIKYASQSITGVPSRFSGRGSGTDFTLTINSLEVEDAAVYYCHQSSSLPLT

SEQ ID NO: 24302 - protein, 98 aa, Artificial Sequence
  source: /note="Description of Artificial Sequence: Synthetic polypeptide"
EIVLTQSPGTLSLSPGERATLSCRASQSVSSNYLAWFQQKPGQAPRLLIYGASRRATGIPDRFSGSGSGTDFTLTISRLEPEDFAVYYCQQYDSSPRT

SEQ ID NO: 24303 - protein, 103 aa, Artificial Sequence
  source: /note="Description of Artificial Sequence: Synthetic polypeptide"
  MOD_RES (4)..(4): Any amino acid
DIQXTQSPDSLAVSLGERATINCKSSQSVFSSSTNKNYLAWYQQKPGQPPKVLIYWSSTRESGVPDRFSASGSGTDFTLTISSLQAADVAVYYCHQYYTAPWT

SEQ ID NO: 24304 - protein, 98 aa, Artificial Sequence
  source: /note="Description of Artificial Sequence: Synthetic polypeptide"
QSVLTQPPSVSVAPGQTARLTCEGDTIGSKSVHWYQQRPGQAPVLVVYNDRDRPSGIPERFSGSNSGRTATLTISRVEAGDEADYFCQVWESGGDQTV

SEQ ID NO: 24305 - protein, 98 aa, Artificial Sequence
  source: /note="Description of Artificial Sequence: Synthetic polypeptide"
EIVMTQSPGTLSLSPGERATLSCRASQSVSRNYLAWYQQKPGLAPRLLISGASSRATGVPDRFSGRGSDTDFTLTISRLEPEDFAVYYCQHYGSVLVA

SEQ ID NO: 24306 - protein, 97 aa, Artificial Sequence
  source: /note="Description of Artificial Sequence: Synthetic polypeptide"
DIQLTQSPSSLSASVGDRVTITCRASQGINTYLNWYQQKPGKAPKVLIFAASTLQSGVPSRFSGSGSGTEFTLNINNLQPEDFATYYCQQSYSTAIT

SEQ ID NO: 24307 - protein, 97 aa, Artificial Sequence
  source: /note="Description of Artificial Sequence: Synthetic polypeptide"
EIVLTQSPDFQSVAPKEKVTITCRASRSIGSDLHWFQQRPDQSPKLLIKFASQSMSGVPSRFSGSGSGRDFTLTISSLEAEDAATYYCHQSSSLPLT

SEQ ID NO: 24308 - protein, 100 aa, Artificial Sequence
  source: /note="Description of Artificial Sequence: Synthetic polypeptide"
QSALTQPASVSGSPGQSITISCTGSSGDIGGYNAVSWYQHHPGKAPKLMIYEVTSRPSGVSDRFSASRSGDTASLTVSGLQAEDEAHYYCCSFADSNILI

SEQ ID NO: 24309 - protein, 99 aa, Artificial Sequence
  source: /note="Description of Artificial Sequence: Synthetic polypeptide"
EIVLTQSPATLSVSPGERATLSCRASQNVNYNLAWYQQKPGQAPRLLIYVASTRATGIPDRFSGSGSGTEFTLTISSLQSEDFAVYYCQQYNNWPPAIT

SEQ ID NO: 24310 - protein, 220 aa, Artificial Sequence
  source: /note="Description of Artificial Sequence: Synthetic polypeptide"
SYVLTQPPSASGTPGQRVTISCSGSTFNIGSNAVDWYRQLPGTAPKLLIYSNNQRPSGVPDRFSGSRSGTSASLAISGLQSEDEADYYCAAWDDILNVPVFGGGTKLTVLGAAAGQPKAAPSVTLFPPSSEELQANKATLVCLISDFYPGAVTVAWKADSSPVKAGVETTTPSKQSNNKYAASSYLSLTPEQWKSHRSYSCQVTHEGSTVEKTVAPTECS

SEQ ID NO: 24311 - protein, 220 aa, Artificial Sequence
  source: /note="Description of Artificial Sequence: Synthetic polypeptide"
QSALTQPAAVSGSPGQSITISCTGTSSDVGGYNYVSWYQQHPGKAPKLMIYEVSNRPSGVSNRFSGSKSGNTASLTISGLQAEDEADYYCSSYTSSSTYVFGTGTKVTVLGAAAGQPKAAPSVTLFPPSSEELQANKATLVCLISDFYPGAVTVAWKADSSPVKAGVETTTPSKQSNNKYAASSYLSLTPEQWKSHRSYSCQVTHEGSTVEKTVAPTECS

SEQ ID NO: 24312 - protein, 220 aa, Artificial Sequence
  source: /note="Description of Artificial Sequence: Synthetic polypeptide"
SYVLTQPPSVSGTPGQRVTISCSGSRSNVGDNSVYWYQHVPEMAPKLLVYKNTQRPSGVPARFSGSKSGTSASLAIIGLQSGDEADYYCVAWDDSVDGYVFGSGTKVTVLGAAAGQPKAAPSVTLFPPSSEELQANKATLVCLISDFYPGAVTVAWKADSSPVKAGVETTTPSKQSNNKYAASSYLSLTPEQWKSHRSYSCQVTHEGSTVEKTVAPTECS

SEQ ID NO: 24313 - protein, 221 aa, Artificial Sequence
  source: /note="Description of Artificial Sequence: Synthetic polypeptide"
QSVLTQPPSVSAAPGQKVTISCSGSSSNIGNDYVSWYQQLPGTAPKLLIYDNNKRPSGIPDRFSGSKSGTSATLGITGLQTGDEANYYCATWDRRPTAYVVFGGGTKLTVLGAAAGQPKAAPSVTLFPPSSEELQANKATLVCLISDFYPGAVTVAWKADSSPVKAGVETTTPSKQSNNKYAASSYLSLTPEQWKSHRSYSCQVTHEGSTVEKTVAPTECS

SEQ ID NO: 24314 - protein, 214 aa, Artificial Sequence
  source: /note="Description of Artificial Sequence: Synthetic polypeptide"
DIQMTQSPSSLSASVGDRVTITCRASQGISSYLAWYQQKPGKVPTLLIYDASTLRSGVPSRFSGSGSATDFTLTISSLQPEDVATYYCQRYNSAPPITFGQGTRLEIKRAAAPSVFIFPPSDEQLKSGTASVVCLLNNFYPREAKVQWKVDNALQSGNSQESVTEQDSKDSTYSLSSTLTLSKADYEKHKVYACEVTHQGLSSPVTKSFNRGEC

SEQ ID NO: 24315 - protein, 216 aa, Artificial Sequence
  source: /note="Description of Artificial Sequence: Synthetic polypeptide"
QSVLTQPPSESVSPGQTASVTCSGHKLGDKYVSWYQQKPGQSPVLLIYQDNRRPSGIPERFIGSNSGNTATLTISGTQALDEADYYCQAWDSSTAVFGGGTKLTVLGAAAGQPKAAPSVTLFPPSSEELQANKATLVCLISDFYPGAVTVAWKADSSPVKAGVETTTPSKQSNNKYAASSYLSLTPEQWKSHRSYSCQVTHEGSTVEKTVAPTECS

SEQ ID NO: 24316 - protein, 213 aa, Artificial Sequence
  source: /note="Description of Artificial Sequence: Synthetic polypeptide"
EIVLTQSPGTLSLSPGERATLSCRASQRVSSYLAWYQQKPGQAPRLLIYGASTRAAGIPDRFSGSGSGTDFTLTISRLEPEDSAVYYCQQYGRTPLTFGGGTKVEIKRAAAPSVFIFPPSDEQLKSGTASVVCLLNNFYPREAKVQWKVDNALQSGNSQESVTEQDSKDSTYSLSSTLTLSKADYEKHKVYACEVTHQGLSSPVTKSFNRGEC

SEQ ID NO: 24317 - protein, 218 aa, Artificial Sequence
  source: /note="Description of Artificial Sequence: Synthetic polypeptide"
SYVLTQPPSVSVAPGQTARITCGGNNIGSKSVHWYQQKPGQAPVLVVYDDSDRPSGIPERFSGSNSGNTATLTISRVEAGDEADYYCQVWDSSSDHAVFGGGTQLTVLGAAAGQPKAAPSVTLFPPSSEELQANKATLVCLISDFYPGAVTVAWKADSSPVKAGVETTTPSKQSNNKYAASSYLSLTPEQWKSHRSYSCQVTHEGSTVEKTVAPTECS

SEQ ID NO: 24318 - protein, 220 aa, Artificial Sequence
  source: /note="Description of Artificial Sequence: Synthetic polypeptide"
SYVLTQPPSASGTPGQRVTISCSGSSSNIGSNYVYWYQQLPGTAPKLLIYRDGQRPSGVPDRFSGSKSGTSASLAISGLRSDDEADYYCATWDDNLSGPVFGGGTKLTVLGAAAGQPKAAPSVTLFPPSSEELQANKATLVCLISDFYPGAVTVAWKADSSPVKAGVETTTPSKQSNNKYAASSYLSLTPEQWKSHRSYSCQVTHEGSTVEKTVAPTECS

SEQ ID NO: 24319 - protein, 214 aa, Artificial Sequence
  source: /note="Description of Artificial Sequence: Synthetic polypeptide"
EIVLTQSPGTLSLSPGERATLSCRASQSVSSSYLAWYQQKPGQAPRLLIYGASSRATGIPDRFSGSGSGTDFTLTISRLEPEDFAVYYCQQYGSSPRTFGGGTKVEIKRAAAPSVFIFPPSDEQLKSGTASVVCLLNNFYPREAKVQWKVDNALQSGNSQESVTEQDSKDSTYSLSSTLTLSKADYEKHKVYACEVTHQGLSSPVTKSFNRGEC

SEQ ID NO: 24320 - protein, 220 aa, Artificial Sequence
  source: /note="Description of Artificial Sequence: Synthetic polypeptide"
QSALTQPASVSGSPGQSITISCTGTSSDVGGYNYVSWYQQHPGKAPKLMIYEVSNRPSGVSNRFSGSKSGNTASLTISGLQAEDEADYYCSSYTSSSTLVFGTGTKVTVLGAAAGQPKAAPSVTLFPPSSEELQANKATLVCLISDFYPGAVTVAWKADSSPVKAGVETTTPSKQSNNKYAASSYLSLTPEQWKSHRSYSCQVTHEGSTVEKTVAPTECS

SEQ ID NO: 24321 - protein, 218 aa, Artificial Sequence
  source: /note="Description of Artificial Sequence: Synthetic polypeptide"
QSVVTQPPSVSVAPGQTARITCGGNNIGSKSVHWYQQKPGQAPVLVVYDDSDRPSGIPERFSGSNSGNTATLTISRVEAGDEADYYCQVWDSSSDHYVFGTGTKVTVLGAAAGQPKAAPSVTLFPPSSEELQANKATLVCLISDFYPGAVTVAWKADSSPVKAGVETTTPSKQSNNKYAASSYLSLTPEQWKSHRSYSCQVTHEGSTVEKTVAPTECS

SEQ ID NO: 24322 - protein, 220 aa, Artificial Sequence
  source: /note="Description of Artificial Sequence: Synthetic polypeptide"
TVLTQPPSVSGAPGQRVTISCTGSSSNIGAGYDVHWYQQLPGTAPKLLIYGNSNRPSGVPDRFSGSKSGTSATLGITGLQTGDEADYYCGTWDSSLSAYVFGTGTKVTVLGAAAGQPKAAPSVTLFPPSSEELQANKATLVCLISDFYPGAVTVAWKADSSPVKAGVETTTPSKQSNNKYAASSYLSLTPEQWKSHRSYSCQVTHEGSTVEKTVAPTECS

SEQ ID NO: 24323 - protein, 219 aa, Artificial Sequence
  source: /note="Description of Artificial Sequence: Synthetic polypeptide"
DVVMTQSPDSLAVSLGERATINCKSSQSVLYSSNNKNYLAWYQQKPGQPPKLLIYWASTRESGVPDRFSGSGSGTDFTLTISSLQAEDVAVYYCQQYYSTPLTFGGGTKVDIKRAAAPSVFIFPPSDEQLKSGTASVVCLLNNFYPREAKVQWKVDNALQSGNSQESVTEQDSKDSTYSLSSTLTLSKADYEKHKVYACEVTHQGLSSPVTKSFNRGEC

SEQ ID NO: 24324 - protein, 220 aa, Artificial Sequence
  source: /note="Description of Artificial Sequence: Synthetic polypeptide"
QSALTQPRSVSGSPGQSVTISCTGTSSDVGGYNYVSWYQQHPGKAPKLMIYDVSKRPSGVPDRFSGSKSGNTASLTISGLQAEDEADYYCSSYTSSSTHVFGTGTKVTVLGAAAGQPKAAPSVTLFPPSSEELQANKATLVCLISDFYPGAVTVAWKADSSPVKAGVETTTPSKQSNNKYAASSYLSLTPEQWKSHRSYSCQVTHEGSTVEKTVAPTECS

SEQ ID NO: 24325 - protein, 214 aa, Artificial Sequence
  source: /note="Description of Artificial Sequence: Synthetic polypeptide"
EIVMTQSPGTLSLSPGERATLSCRASQSVSSSYLAWYQQKPGQAPRLLIYDASSRATDIPDRFSGSGSGTDFTLTISRLEPEDFAVYYCQQYGSSLWTFGQGTKVEIKRAAAPSVFIFPPSDEQLKSGTASVVCLLNNFYPREAKVQWKVDNALQSGNSQESVTEQDSKDSTYSLSSTLTLSKADYEKHKVYACEVTHQGLSSPVTKSFNRGEC

SEQ ID NO: 24326 - protein, 218 aa, Artificial Sequence
  source: /note="Description of Artificial Sequence: Synthetic polypeptide"
EIVLTQSPLSLPVTPGEPASISCRSSQSLLHSNGYNYLDWYLQKPGQSPQLLIYLGSNRASGVPDRFSGSGSGTDFTLKISRVEAEDVGVYYCMQALQTPLTFGGGTKVEIKRAAAPSVFIFPPSDEQLKSGTASVVCLLNNFYPREAKVQWKVDNALQSGNSQESVTEQDSKDSTYSLSSTLTLSKADYEKHKVYACEVTHQGLSSPVTKSFNRGEC

SEQ ID NO: 24327 - protein, 218 aa, Artificial Sequence
  source: /note="Description of Artificial Sequence: Synthetic polypeptide"
SYVLTQPPSVSVAPGQTARITCGGNNIGSKGVHWYQQKPGQAPVLVVYDDSDRPSGIPERFSGSNSGNTATLTISRVEAGDEADYYCQVWDSSSDHVVFGGGTKLTVLGAAAGQPKAAPSVTLFPPSSEELQANKATLVCLISDFYPGAVTVAWKADSSPVKAGVETTTPSKQSNNKYAASSYLSLTPEQWKSHRSYSCQVTHEGSTVEKTVAPTECS

SEQ ID NO: 24328 - protein, 213 aa, Artificial Sequence
  source: /note="Description of Artificial Sequence: Synthetic polypeptide"
EIVMTQSPGTLSLSPGERATLSCRASQSVSSSYLAWYQQKPGQAPRLLIFGASSRATGIPDRFSGSGSGTDFTLTISRLEPEDFAVYYCQQYGSSLTFGGGTKLEIKRAAAPSVFIFPPSDEQLKSGTASVVCLLNNFYPREAKVQWKVDNALQSGNSQESVTEQDSKDSTYSLSSTLTLSKADYEKHKVYACEVTHQGLSSPVTKSFNRGEC

SEQ ID NO: 24329 - protein, 218 aa, Artificial Sequence
  source: /note="Description of Artificial Sequence: Synthetic polypeptide"
EIVLTQSPGTLSLSPGERATLSCRASQSVSSNYLGWYQQKPGQAPRLLIYGASSRASGIPDRFSGGGSGTDFTLTISRLEPEDFAVYYCQQYGSSPLTFGGGTKVEIKRAAAGQPKAAPSVTLFPPSSEELQANKATLVCLISDFYPGAVTVAWKADSSPVKAGVETTTPSKQSNNKYAASSYLSLTPEQWKSHRSYSCQVTHEGSTVEKTVAPTECS

SEQ ID NO: 24330 - protein, 212 aa, Artificial Sequence
  source: /note="Description of Artificial Sequence: Synthetic polypeptide"
DIQLTQSPSSLSASVGDRVTITCRASQGISTYLAWYQQKPGKVPKLLIYAASTLQSGVPSRFSGSGSGTDFTLTISSLQPEDVATYYCQKYNSAPSFGPGTKVDIKRAAAPSVFIFPPSDEQLKSGTASVVCLLNNFYPREAKVQWKVDNALQSGNSQESVTEQDSKDSTYSLSSTLTLSKADYEKHKVYACEVTHQGLSSPVTKSFNRGEC

SEQ ID NO: 24331 - protein, 218 aa, Artificial Sequence
  source: /note="Description of Artificial Sequence: Synthetic polypeptide"
SYVLTQPPSESVAPGQTARITCGGNNIGRNSVHWYQQKPGQAPVLVVYDDSDRPSGIPERFSGSKSGNTATLIISRVEVGDEADYYCQVWHSSSDHYVFGTGTKVTVLGAAAGQPKAAPSVTLFPPSSEELQANKATLVCLISDFYPGAVTVAWKADSSPVKAGVETTTPSKQSNNKYAASSYLSLTPEQWKSHRSYSCQVTHEGSTVEKTVAPTECS

SEQ ID NO: 24332 - protein, 214 aa, Artificial Sequence
  source: /note="Description of Artificial Sequence: Synthetic polypeptide"
EIVMTQSPGTLSLSPGQRATLSCRASQSVSSSYLAWYQQKPGQAPRLLMYGASSRATGIPDRFSGSGSGTDFTLTISRLEPEDFAVYYCQQYGSSSLTFGGGTKLEIKRAAAPSVFIFPPSDEQLKSGTASVVCLLNNFYPREAKVQWKVDNALQSGNSQESVTEQDSKDSTYSLSSTLTLSKADYEKHKVYACEVTHQGLSSPVTKSFNRGEC

SEQ ID NO: 24333 - protein, 218 aa, Artificial Sequence
  source: /note="Description of Artificial Sequence: Synthetic polypeptide"
QAGLTQPPSVSVAPGQTARITCGGNNIGSKSVHWYQQKPGQAPVLVVYDDSDRPSGIPERFSGSNSGNTATLTISRVEAGDEADYYCQVWDSSSDHVVFGGGTKLTVLGAAAGQPKAAPSVTLFPPSSEELQANKATLVCLISDFYPGAVTVAWKADSSPVKAGVETTTPSKQSNNKYAASSYLSLTPEQWKSHRSYSCQVTHEGSTVEKTVAPTECS

SEQ ID NO: 24334 - protein, 219 aa, Artificial Sequence
  source: /note="Description of Artificial Sequence: Synthetic polypeptide"
DIQMTQSPDSLAVSLGEKATINCKSSQSILNSSNNKNYLAWYQQKPGQPPKLLIYWASTRESGVPDRFSGSGSGTDFTLTISSLQAEDVAVYYCQQYYSSPPTFGQGTKVEIKRAAAPSVFIFPPSDEQLKSGTASVVCLLNNFYPREAKVQWKVDNALQSGNSQESVTEQDSKDSTYSLSSTLTLSKADYEKHKVYACEVTHQGLSSPVTKSFNRGEC

SEQ ID NO: 24335 - protein, 218 aa, Artificial Sequence
  source: /note="Description of Artificial Sequence: Synthetic polypeptide"
QSVVTQPPSESVAPGQTARITCGGHNIGSNSVHWYQQKPGQAPVLVVYDNSDRPSGIPERFSGSNSGNTATLTISRVEAGDEADYYCQVWGSSSDHYVFGTGTKVTVLGAAAGQPKAAPSVTLFPPSSEELQANKATLVCLISDFYPGAVTVAWKADSSPVKAGVETTTPSKQSNNKYAASSYLSLTPEQWKSHRSYSCQVTHEGSTVEKTVAPTECS

SEQ ID NO: 24336 - protein, 108 aa, Artificial Sequence
  source: /note="Description of Artificial Sequence: Synthetic polypeptide"
SYVLTQPPSVSVAPGQTATISCGGDNVGSNSVHWYQQKPGQAPVLVVYDDRDRPSGIPERFSGSNSGNTATLTISRVEAGDEADYYCQVWDSSSDHRVFGTGTKVTVL

SEQ ID NO: 24337 - protein, 110 aa, Artificial Sequence
  source: /note="Description of Artificial Sequence: Synthetic polypeptide"
QSVLTQPPAVSGTPGQRVTISCSGSDSNIGRRSVNWYQQFPGTAPKLLIYSNDQRPSVVPDRFSGSKSGTSASLAISGLQSEDEAEYYCAAWDDSLKGAVFGGGTQLTVL

SEQ ID NO: 24338 - protein, 110 aa, Artificial Sequence
  source: /note="Description of Artificial Sequence: Synthetic polypeptide"
QSALTQPASVSGSPGQSITISCTGTSSDVGGYNYVSWYQQHPGKAPKLLIFDVSDRPSGVSDRFSGSKSADTASLTISGLQAQDEADYYCCSYAGSAKGVFGTGTKVTVL

SEQ ID NO: 24339 - protein, 110 aa, Artificial Sequence
  source: /note="Description of Artificial Sequence: Synthetic polypeptide"
SYVLTQPPSVSVAPGQTARITCGGNNIGSKTVHWYQQNSGQAPVLVVYGDSDRPSGIPERFSGSNSGTTATLTISRVEAGDEADYYCQVWDSSSDHPGAVFGGGTQLTVL

SEQ ID NO: 24340 - protein, 110 aa, Artificial Sequence
  source: /note="Description of Artificial Sequence: Synthetic polypeptide"
SYVLTQPPSASGTPGQRVTISCSGSSSNIGSNTVNWYQQVPGTAPKLLIYGDDQRPSGVPDRFSGSKSGTSASLAISGLQSEDEADYYCATWDDSLNGHVFGGGTQLTVL

SEQ ID NO: 24341 - protein, 110 aa, Artificial Sequence; identical to SEQ ID NO: 24339
  source: /note="Description of Artificial Sequence: Synthetic polypeptide"

SEQ ID NO: 24342 - protein, 107 aa, Artificial Sequence
  source: /note="Description of Artificial Sequence: Synthetic polypeptide"
DIQMTQSPSSVSASVGDRVTITCRASQHISSWLAWYQQKPGKGPQLLIYSASRLQSGVPSRFSGSGSGTDFTLTISSLQPEDFATYYCQQANSFPLTFGPGTKVDIK

SEQ ID NO: 24343 - protein, 110 aa, Artificial Sequence
  source: /note="Description of Artificial Sequence: Synthetic polypeptide"
SYVLTQPPSVSVAPGQTARITCGGNNIGSKTVHWYQQNSGQAPVLVVFVDSDRPSGIHERFCGSNSGSTATLTISSVEAGDEADYYCQVWDSNSDHPGAVFGGGTQLTVL

SEQ ID NO: 24344 - protein, 110 aa, Artificial Sequence
  source: /note="Description of Artificial Sequence: Synthetic polypeptide"
SYVLTQPPAVSGTPGQRVTISCSGSDSNIGRRSVNWYQQFPGTAPKLLIYSNDQRPSVVPDRFSGSKSGTSASLAISGLQSEDEAEYYCAAWDDSLKGAVFGGGTQLTVL

SEQ ID NO: 24345 - protein, 111 aa, Artificial Sequence
  source: /note="Description of Artificial Sequence: Synthetic polypeptide"
QSVVTQPPSVSGAPGQRVTISCTGSSSNIGAGYDVHWYQQLPGTAPKLLIYGNNNRPSGVPDRFSGSKSGTSASLAITGLQVEDEADYYCQSYDQNLSEGVFGGGTKLTVL

SEQ ID NO: 24346 - protein, 107 aa, Artificial Sequence
  source: /note="Description of Artificial Sequence: Synthetic polypeptide"
EIVMTQSPGTLSLSPGERGTLSCRASQSVSSYLAWYQQKPGQAPRLLIYGASTRATGIPDRFTGSGSGTDFTLTISRLEPEDFAVYYCQQYGSSPFAFGPGTKVEIK

SEQ ID NO: 24347 - protein, 110 aa, Artificial Sequence
  source: /note="Description of Artificial Sequence: Synthetic polypeptide"
SYVLTQPPSVSVAPGQTARITCGGNNIGSKSVHWYQQKPGQAPVLVVYGDSDRPSGIPERFSGSNSGTTATLTISRVEAGDEADYYCQVWDSSSDHPGAVFGGGTQLTVL

SEQ ID NO: 24348 - protein, 113 aa, Artificial Sequence
  source: /note="Description of Artificial Sequence: Synthetic polypeptide"
QSVLTQPPSVSGAPGQRVTISCTGSSSNIGAGYDVHWYQQLPETAPKLLIYDNNNRPSGVSDRFSGSKSGTSASLAITGLQAEDEADYYCQSYDSGLSASPYVFGAGTKVTVL

SEQ ID NO: 24349 - protein, 111 aa, Artificial Sequence
  source: /note="Description of Artificial Sequence: Synthetic polypeptide"
QSVLTQPPSVSGAPGQRVTISCTGSSANIGAGYDVHWYQQFPGTAPKLLIYGNNNRPSGVPDRFSGSKSGTSASLAITGLQAEDEADYYCQSYDSSLSGALFGGGTKLTVL

SEQ ID NO: 24350 - protein, 110 aa, Artificial Sequence
  source: /note="Description of Artificial Sequence: Synthetic polypeptide"
QSVLTQPPAVSGTPGQRVTISCSGSDSNIGRRSVNWYQQFPGTAPKLLIYSNDQRPSVVPDRFSGSKSGTSASLAISGLQAEDEADYYCAAWDASLSGPVFGGGTQLTVL

SEQ ID NO: 24351 - protein, 110 aa, Artificial Sequence; identical to SEQ ID NO: 24344
  source: /note="Description of Artificial Sequence: Synthetic polypeptide"

SEQ ID NO: 24352 - protein, 108 aa, Artificial Sequence
  source: /note="Description of Artificial Sequence: Synthetic polypeptide"
EIVLTQSPGTLSLSPGERATLSCRASQSVSSSYLAWYQQKPGQAPRLLIYGASTRATGIPARFSGSGSGTDFTLTISRLEPEDLAVYYCQQYGSSPWTFGQGTKVEIK

SEQ ID NO: 24353 - protein, 110 aa, Artificial Sequence
  source: /note="Description of Artificial Sequence: Synthetic polypeptide"
SYVLTQPPSASGTPGQRVTISCSGSSSNIGTNYVYWYQQFPGTAPKLLIYRSYQRPSGVPDRFSGSKSGSSASLAISGLQSEDEADYYCATWDDSLNGWVFGGGTKLTVL

SEQ ID NO: 24354 - protein, 112 aa, Artificial Sequence
  source: /note="Description of Artificial Sequence: Synthetic polypeptide"
QSVLTQPPSASGTPGQRVTISCSGSSSNIGTNYVYWYQQFPGTAPKLLIYRSYQRPSGVPDRFSGSKSGSSASLAISGLQSEDEADYYCATWDDSLDGWVFGGGTKLTVLRK

SEQ ID NO: 24355 - protein, 109 aa, Artificial Sequence
  source: /note="Description of Artificial Sequence: Synthetic polypeptide"
EIVLTQSPGTLSLSPGERATLSCRASQSVSSSYLAWYQQKPGQAPRLLIYGASSRATGIPDRFSGSGSGTDFTLTISRLEPEDFAVYYCQQYGSSPLCSFGQGTKLEIK

SEQ ID NO: 24356 - protein, 112 aa, Artificial Sequence
  source: /note="Description of Artificial Sequence: Synthetic polypeptide"
DVVMTQSPLSLPVTPGEPASISCRSSQSLLHSNGLNYLDWYLQKPGQSPQLLIYLGSNRASGVPDRFSGSGSGTDFTLKISRVEAEDVGVYYCMQALQTPFTFGGGTKVEIK

SEQ ID NO: 24357 - protein, 110 aa, Artificial Sequence
  source: /note="Description of Artificial Sequence: Synthetic polypeptide"
QSALTQPPSASGSPGQSVTISCTGTSSDVGGYNYVSWYQQHPGKAPKLMIYDVSKRPSGVPDRFSGSKSGNTASLTISGLQAEDEAEYYCSSYASGSTYVFGTGTKVTVL

SEQ ID NO: 24358 - protein, 111 aa, Artificial Sequence
  source: /note="Description of Artificial Sequence: Synthetic polypeptide"
EIVLTQSPLSLPVTPGEPASISCRSSQSLRHENGYNYLDWYLQKPGQSPQLLMYLGSVRASGVPDRFSGSGSGTDFTLKISRVEAEDVGVYYCMQALQTLTFGGGTKLEIK

SEQ ID NO: 24359 - protein, 107 aa, Artificial Sequence
  source: /note="Description of Artificial Sequence: Synthetic polypeptide"
DIQMTQSPSSLAASIGDSVTITCRASQSVGSYLNWYQQKPGKAPKLLIYGASNVQSGVPSRFSGSESGTESTLTINNLQPEDSATYYCQQSYSTPRTFGQGTKVEIK

SEQ ID NO: 24360 - protein, 108 aa, Artificial Sequence
  source: /note="Description of Artificial Sequence: Synthetic polypeptide"
EIVLTQSPGTLSLSPGERATLSCRASQSVSSDFFAWYQQKRGQTPTLLIYGTSTRATGIPDRFSGSGSGTDFTLSVARLEPEDFAVYYCQQYGSSTWTFGQGTKVEIK

SEQ ID NO: 24361 - protein, 110 aa, Artificial Sequence
  source: /note="Description of Artificial Sequence: Synthetic polypeptide"
SYELTQPPSASGTPGQRVTMSCSGSRSNIGSNPVSWFQQLPGMVPKLLIYTNDQRPSGVPDRFSGSKSGPSASLAISGLQSEDEADYYCAAWDDSLKGWVFGGGTKLTVL

SEQ ID NO: 24362 - protein, 106 aa, Artificial Sequence
  source: /note="Description of Artificial Sequence: Synthetic polypeptide"
IQMTQSPSSLSASIGDRVAITCQASQDISDYLNWYQQQPGKAPKLLLYGASNLETGVPSRFSGSGSGTDFTFTISSLQPEDIATYYCQQYGNLPPTFGGGTKLEIK

SEQ ID NO: 24363 - protein, 110 aa, Artificial Sequence
  source: /note="Description of Artificial Sequence: Synthetic polypeptide"
QSALTQPASVSGSPGQSITISCTGTSSDVGGYNYVSWYQQHPGKAPKLMIYDVSSRPSGVSNRFSGSKSGDTASLSISGLQAEDEADYYCSSYTSSSTHVFGTGTKVTVL

SEQ ID NO: 24364 - protein, 110 aa, Artificial Sequence
  source: /note="Description of Artificial Sequence: Synthetic polypeptide"
QSALTQPASVSGSPGQSITISCTGTRRDVGDYKYVSWYQQHPGKAPKLMIYDVSNRPSGVSNRFSGSKSGTTASLTISGLQAEDEADYYCSSYTTSNTRVFGGGTKLTVL

SEQ ID NO: 24365 - protein, 107 aa, Artificial Sequence
  source: /note="Description of Artificial Sequence: Synthetic polypeptide"
DIQMTQSPSSLSASVGDRVTITCRASQGIRNDLGWYQQKPGKAPKRLIYAASSLQSGVPSRFSGSGSGTDFTLTISSLQPEDFATYYCQQANTYPLTFGGGTKLEIK

SEQ ID NO: 24366 - protein, 100 aa, Artificial Sequence
  source: /note="Description of Artificial Sequence: Synthetic polypeptide"
MTQSPSSMSVSLGDTVSITCHASQDISGHIGWLQQKPGKSFKGLIYHGTNLEDGVPSRFSGSGSGADFSLTISSLESEDFADYYCVQYVQFPWTFGGGTK

SEQ ID NO: 24367 - protein, 113 aa, Artificial Sequence; identical to SEQ ID NO: 24182
  source: /note="Description of Artificial Sequence: Synthetic polypeptide"

SEQ ID NO: 24368 - protein, 122 aa, Artificial Sequence
  source: /note="Description of Artificial Sequence: Synthetic polypeptide"
  MOD_RES (122)..(122): Any amino acid
VLTQPPSASGTPGQRVTISCSGSSSNIGSNTVNWYQQLPGTAPKLLIYSNNQRPSGVPDRFSGSKSGTSASLAISGLQSEDEADYYCAAWDDSLNGPVFGGGTKLTVLGNPKAAPSVTLFPX

SEQ ID NO: 24369 - protein, 128 aa, Artificial Sequence
  source: /note="Description of Artificial Sequence: Synthetic polypeptide"
  MOD_RES (125)..(125): Any amino acid
  MOD_RES (128)..(128): Any amino acid
LTQPPSVSGAPGQKVTISCTGSQSVSSNIGAGYDVHWYQQLPGTAPKLLIYGNSNRPSGVPDRFSGSKSGTSASLAITGLQAEDEADYHCQSYDSSLNGYYVFGTGTKVTVLGQPKANPTVTLFXPSX

SEQ ID NO: 24370 - protein, 121 aa, Artificial Sequence
  source: /note="Description of Artificial Sequence: Synthetic polypeptide"
VSAAPGQKPTISCSGSSSNIGTDYVSWQQLPGTAPKLIYDNNKRPSGMPDRFSSKSGTSATLGITGLQTGDEADYYGTWDSSLNGPVVFGGGTKLTVLGHHAAASVTLFLPSSPDVTIKIK

SEQ ID NO: 24371 - protein, 121 aa, Artificial Sequence [sequence omitted]

SEQ ID NO: 24372 - protein, 118 aa, Artificial Sequence [sequence omitted]

SEQ ID NO: 24373 - protein, 59 aa, Artificial Sequence
  source: /note="Description of Artificial Sequence: Synthetic polypeptide"
LTISKDTSKRQVVLSMTDMDPVDTATYYCARAPSEYAAMDVWGQGTMVTVSSYQGPSRE

SEQ ID NO: 24374 - protein, 116 aa, Artificial Sequence
  source: /note="Description of Artificial Sequence: Synthetic polypeptide"
SYVLTQPPSVSGTPGQRVIISCSGYSSNIGSNTVNWYQQFPGTAPRLLIYANNQRPPGVPDRFSGSKSGTSASLAISGLQSDDESDYYCAAWDDSLNGHWVFGGGTKVTVLRTVAS

SEQ ID NO: 24375 - protein, 108 aa, Artificial Sequence
  source: /note="Description of Artificial Sequence: Synthetic polypeptide"
EIVLTQSPGTLSLSPGERATLSCRASQSVSSSQLAWYQQKPGQAPRLIIYGASTRATGIPDRFSGSGSGTDFTLTIGRLEPEDFAVFFCQQYSTSPPTFGQGTKVDFK

SEQ ID NO: 24376 - protein, 109 aa, Artificial Sequence
  source: /note="Description of Artificial Sequence: Synthetic polypeptide"
EIILAQSPGTLSLSPGERATLSCRASQFVSTRSLAWYQQRPGQAPRLLIYGASSRATGIPDRFSGSGSGTDFTLTISRLEPEDFAVYYCQHYGYSPRYAFGQGSKVEIK

SEQ ID NO: 24377 - protein, 108 aa, Artificial Sequence
  source: /note="Description of Artificial Sequence: Synthetic polypeptide"
DIVLTQSPGTLSLSPGERATLSCRASQSVSSSYLAWYQQKPGQAPRLVMYGAATRATGIPDRFSGSGSGPDFTLTISRLEPEDFAMYYCQQYGNSPITFGQGTRLEIK

SEQ ID NO: 24378 - protein, 113 aa, Artificial Sequence
  source: /note="Description of Artificial Sequence: Synthetic polypeptide"
DIVMTQSPDFLPVSLGERATINCKSSQRVLYSSNNKNYLAWYQLKPGQPPKLIIYWASTRESGVPDRFSGSGSGTEFTLTISSLQAEDVAVYYCQQYYSRPYTFGQGTKLEIK

SEQ ID NO: 24379 - protein, 108 aa, Artificial Sequence
  source: /note="Description of Artificial Sequence: Synthetic polypeptide"
EIVLTQSPATLSLSPGERATLSCRASQSVSSYLAWYQQKPGQAPRLLIYDASNRATGIPARFSGSGSGTDFTLTISSLEPEDFAVYYCQQRSHWPPITFGQGTRLEIK

SEQ ID NO: 24380 - protein, 110 aa, Artificial Sequence
  source: /note="Description of Artificial Sequence: Synthetic polypeptide"
QSALTQPASVSGSPGQSITISCTGTSSDVGGYNYVSWYQQHPGKAPKLLIYEVTNWPSGVSNRFSGSKSGNTASLTISGLQAEDEADYYCSSYAGSSTWVFGGGTRVTVL

SEQ ID NO: 24381 - protein, 108 aa, Artificial Sequence
  source: /note="Description of Artificial Sequence: Synthetic polypeptide"
SYELTQPPSVSVSPGQTARITCSGDALPKQNAYWYQQKPGQAPVLLIYKDSERPSGIPERFSGSSSGTTVTLTISGVQAEDEADYYCQSADSSGTSWVFGGGTKLTVL

SEQ ID NO: 24382 - protein, 110 aa, Artificial Sequence
  source: /note="Description of Artificial Sequence: Synthetic polypeptide"
QTVVTQEPSLTVSPGGTVTLTCASSTGAVTSSYFPNWFQQKPGQAPRPLIYSTTIRHSWTPARFSGSLLGGKAALTLSGVQPEDEADYYCLLYSGGDPVAFGGGTKLTVL

SEQ ID NO: 24383 - protein, 106 aa, Artificial Sequence
  source: /note="Description of Artificial Sequence: Synthetic polypeptide"
SYVLTQPPSVSVAPGQTARISCGGSNIGGKSVHWYQQKPGQAPVLVVYDDSGRPSGIPERFSGSNSGDTATLTISRVEAGDEADYFCQVWDNFGGVFGTGTKVTVL

SEQ ID NO: 24384 - protein, 111 aa, Artificial Sequence
  source: /note="Description of Artificial Sequence: Synthetic polypeptide"
QSMLTQPPSASGTPGQRVTISCSGSSSNIGSNTVNWFKHLPGTAPKLLIYRNDLRPSGVPDRFSGSKSGTSASLAISGLQSEDEADYYCATWDDSLNGFYVFGTGTKVTVL

SEQ ID NO: 24385 - protein, 109 aa, Artificial Sequence
  source: /note="Description of Artificial Sequence: Synthetic polypeptide"
EIVLTQSPGTLSLSPGERATLSCRASHFVNYRSLAWYQQTPGQVPRLLIYGASTRATGIPDRFSGSGSGTDFTLTISRLEPEDFAVYFCQQYGGSPRYTFGQGTRLEIK

SEQ ID NO: 24386 - protein, 109 aa, Artificial Sequence
  source: /note="Description of Artificial Sequence: Synthetic polypeptide"
EIVLTQSPGTLSLSPGERATLSCRASHFVIGRAVAWYQQKPGQAPRLLIYGASSRATGIPDRFSGSGSGTDFTLTISRLETEDFAVFYCQHYGSSPRYAFGQGTKLEIK

SEQ ID NO: 24387 - protein, 107 aa, Artificial Sequence
  source: /note="Description of Artificial Sequence: Synthetic polypeptide"
DIQMTQSPSSLSASVGDRVTITCRASQSISSYLNWYQHKPGKAPKVLMYAVSILQSGVPSRFSGSGSGADFTLTISSLQPEDFATYYCQQSYSSPLTFGGGTKVEIK

SEQ ID NO: 24388 - protein, 113 aa, Artificial Sequence
  source: /note="Description of Artificial Sequence: Synthetic polypeptide"
DIVMTQSPDSLAVSLGERATINCKSSQSVLYSSNNKNYLAWYQQKPGQPPKLLIYWASTRESGVPDRISGSGSGADFTLTISSLQAEDVAVYYCQQYFATPRTFGQGTKVEIK

SEQ ID NO: 24389 - protein, 113 aa, Artificial Sequence
  source: /note="Description of Artificial Sequence: Synthetic polypeptide"
DIVMTQSPDSLAVSLGERATINCKSSQSVLYSSNNKSHLAWYQQKPGQPPKLLIYWASTRESGVPDRFSGSGSGTDFTLIISSLQAEDVAVYYCQQYYFSPLTFGGGTKVEIK

SEQ ID NO: 24390 - protein, 108 aa, Artificial Sequence
  source: /note="Description of Artificial Sequence: Synthetic polypeptide"
SYVLTQAPSVSVAPGQTARITCGGNAIGSKKVHWYQHKAGQAPVLVVYDDTDRPSGIPERFSGSNSWSTATLTINRVEAGDEADYYCQVWDFTIDHVVFGGGTKLTVL

SEQ ID NO: 24391 - protein, 110 aa, Artificial Sequence
  source: /note="Description of Artificial Sequence: Synthetic polypeptide"
QSVLTQSPSVSAAPGQKVTISCSGSDSNIGDYFVCWYQHLPGKPPQLLIYENNKRPSGIPDRFSGSKSGTSATLGITGIQTGDEADYYCATWDGSLSAWVFGGGTKLTVL

SEQ ID NO: 24392 - protein, 109 aa, Artificial Sequence
  source: /note="Description of Artificial Sequence: Synthetic polypeptide"
EIVLTQSPATLSLSPGERATLSCRASQSVGNYLAWYQQKPGQAPRLLIYDSSNRAPGIPARFSGSGSGTDFTLTISSLAPEDFAVYYCQQRSKWPPMYSFGHGTKLEIK

SEQ ID NO: 24393 - protein, 108 aa, Artificial Sequence
  source: /note="Description of Artificial Sequence: Synthetic polypeptide"
EIVLTQSPGTLSLSPGERATLSCRASQSVSSSYLAWYQKKPGQAPRLLIYGASTRATGIPDRFTGSGSGTDFTLSISRLEPEDFAVYYCQHFGTSVFTFGGGTKVEIK

SEQ ID NO: 24394 - protein, 113 aa, Artificial Sequence
  source: /note="Description of Artificial Sequence: Synthetic polypeptide"
DIVMTQSPDSLAVSLGERATINCRSSQSIFHNSNNENYLAWYQQKPGQPPKLLIYWASTRESGVPDRFSGSGSGTDFTLTISSLQAEDVAVYFCQQYYNAPLTFGGGTKVEIK

SEQ ID NO: 24395 - protein, 110 aa, Artificial Sequence
  source: /note="Description of Artificial Sequence: Synthetic polypeptide"
QSALTQPRSVSGSPGQSITISCTGGSSDIGASNSVSWYQQHPGKAPKLVIFDVTERPSGVPHRFSGSKSGNTASLTVSGLQPDDEADYFCCAYGGKYLVVFGGGTKVTVL

SEQ ID NO: 24396 - protein, 110 aa, Artificial Sequence
  source: /note="Description of Artificial Sequence: Synthetic polypeptide"
QSALTQPPSASGSPGQSVTISCTGSSSDVGGYDYVSWYQQHPGKAPKLLIYEVTKRPSGVPDRFSGSKSGNTASLTVSGLQAEDEADYYCSSYAGNYNHVFGPGTKVTVL

SEQ ID NO: 24397 - protein, 110 aa, Artificial Sequence
  source: /note="Description of Artificial Sequence: Synthetic polypeptide"
QAVVTQEPSLAVSPGGTVTLTCGSSTGAVTRGHYPYWFQQKPGQAPRALIYDSAGNRHSWTPARFSGSLLGGKAALTLSGAQPEDEAEYYCLLSYSGVWVFGGGTKLTVL

SEQ ID NO: 24398 - protein, 109 aa, Artificial Sequence
  source: /note="Description of Artificial Sequence: Synthetic polypeptide"
QAVVTQEPSLTVSPGGTVTLTCGSSTGPVTSGHYPYWFQQKPGQAPRTLISATSNTHSWTPARFSGSLLGGRAALTLSGAQPEDEADYYCFLSYSGAWVFGGGTTLTVL

SEQ ID NO: 24399 - protein, 107 aa, Artificial Sequence
  source: /note="Description of Artificial Sequence: Synthetic polypeptide"
DIQMTQSPSSLSASVGDRVTITCRASQNIKRYFNWYQQKPGKAPKLLIYAASNLENGVPSRFSGSGSGTDFTLTISSLQPEDFATYYCQQSFSKSWTFGQGTNVDIK

SEQ ID NO: 24400 - protein, 118 aa, Artificial Sequence
  source: /note="Description of Artificial Sequence: Synthetic polypeptide"
QPVLSQPPSASASLGASVTLTCTLSSGFDNYQVAWYQQRPGKGPRFVMRVGNGGNVASKGDGIPDRFSVSGSGLNRYLTIKNIQEDDESDYYCGADHGSGNNFVSPYVFGGGTKLTVL

SEQ ID NO: 24401 - protein, 101 aa, Artificial Sequence
  source: /note="Description of Artificial Sequence: Synthetic polypeptide"
QSALTQPASVSGSPGRSITISCSGTRSDVGGHNYVSWYQQHPGKAPKLMIYEVSHRPSGVSNRFSGSKSGSTASLTISGLQSEDEADYYCSSYTGEGPLGV

SEQ ID NO: 24402 - protein, 97 aa, Artificial Sequence
  source: /note="Description of Artificial Sequence: Synthetic polypeptide"
VLTQPPSVSVAPGQTARIACGGNNIGSKSVHWYQQKPGQAPVLVVYDDSARPSGIPERFSGSNSGNTATLTISRVEAGDEADYYCQVWESGSDLRLL

SEQ ID NO: 24403 - protein, 96 aa, Artificial Sequence
  source: /note="Description of Artificial Sequence: Synthetic polypeptide"
VLTQPPSVSVAPGQTAKITCGGDNIGRKSVHWYQQKPGLAPVLVVNDNSDRPSGIPARFSGSNSGNTATLTISRVEAGDEADYYCHVWGSSRDHYV

SEQ ID NO: 24404 - protein, 101 aa, Artificial Sequence
  source: /note="Description of Artificial Sequence: Synthetic polypeptide"
QSVVTQPPSVSGAPGQRVTISCTGSSSNIGAGYDVHWYQQLPGTAPKLLIYGNNNRPSGVPDRFSGSRSGPLALLAITGLQAEDEADYYCQSYDSSLSVYV

SEQ ID NO: 24405 - protein, 98 aa, Artificial Sequence
  source: /note="Description of Artificial Sequence: Synthetic polypeptide"
SSELTQDPAVSVALGQTVRITCQGDSLRSYYASWYQQKPGQAPVLVIYAKTNRPSGIPDRFSGSTSGNTASLTITGAQAEDEADYYCNSRDSSGNHVV

SEQ ID NO: 24406 - protein, 107 aa, Artificial Sequence; identical to SEQ ID NO: 24294
  source: /note="Description of Artificial Sequence: Synthetic polypeptide"

SEQ ID NO: 24407 - protein, 108 aa, Artificial Sequence
  source: /note="Description of Artificial Sequence: Synthetic polypeptide"
ETVLTQSPGTLSLTPGERATLSCRVGQSVSGSHLAWYQQKPGQAPRLLIYGASSRATGIPDRFGGSVSGTDFTLTISRLEPEDSAVYYCQQYGDSRYTFGQGTKLEIK

SEQ ID NO: 24408 - protein, 118 aa, Artificial Sequence
  source: /note="Description of Artificial Sequence: Synthetic polypeptide"
QPVLTQPPSASASLGASVTLTCTLSSAYSNYKVDWYQQRPGKGPRFVMRVGTGGIVGSKGDGIPDRFSVLGSGLNRYLTIKNIQEEDESDYHCGADHGSGSNFVSPYVFGGGTKLTVL

SEQ ID NO: 24409 - protein, 110 aa, Artificial Sequence
  source: /note="Description of Artificial Sequence: Synthetic polypeptide"
QSALTQPRSVSGSPGQSVTISCTGSSSDVGASNSVSWYQQHPGKAPKLVIYDVTERPSGVPHRFSGSKSGNTASLTVSGLQPEDEADYFCCAYGGKYLVVFGGGTKVTVL

SEQ ID NO: 24410 - protein, 107 aa, Artificial Sequence
  source: /note="Description of Artificial Sequence: Synthetic polypeptide"
DIQLTQSPSSLSASVGDRVTITCRASQSISRYLNWYQQKPGKAPKLLLFAASTLLDGVPSRFSGSGSGTDFTLTISSLQPEDFATYYCQRNHSPSWTFGQGTRVEIK

SEQ ID NO: 24411 - protein, 107 aa, Artificial Sequence
  source: /note="Description of Artificial Sequence: Synthetic polypeptide"
DIQMTQSPSSLSASVGDRVTMTCRASQNIRSYLNWYQQRPGTAPKLLIYAASTLHSGVPSRFSGGGSGTDFTLTINNLQPEDFASYYCQQSYDNPQTFGQGTKVEIK

SEQ ID NO: 24412 - protein, 107 aa, Artificial Sequence
  source: /note="Description of Artificial Sequence: Synthetic polypeptide"
DIQMTQSPSSLSASVGDRVTITCRANQDIGIYLNWYQQNPGKVPKLLLHGASSLQGGVPSRFSASGSGTDFTLTIHSLQPEDLATYYCQQSRRLPYTFGQGTRVELK

SEQ ID NO: 24413 - protein, 110 aa, Artificial Sequence
  source: /note="Description of Artificial Sequence: Synthetic polypeptide"
QSALTQPASVSGSPGQSITISCTGSSSDIGGYNYVSWYQQHPGKAPKLMIYDVNNRPSGVSNRFSGSKSGNTASLTISGLQTDDEADYYCGSYTGSPHYVFGTGTKVTVL

SEQ ID NO: 24414 - protein, 109 aa, Artificial Sequence
  source: /note="Description of Artificial Sequence: Synthetic polypeptide"
EIVMTQFPATLSVSPGERVTLSCRASQSVSNNLAWYQQKPGQPPRLLIYDASTRATGVPAKFSGTGSGTEFTLSISSLQSEDFAVYYCQQYHNWPPSYSFGLGTKLEIK

SEQ ID NO: 24415 - protein, 106 aa, Artificial Sequence
  source: /note="Description of Artificial Sequence: Synthetic polypeptide"
DIQLTQSPSSLSASVGDRVTITCRASQGILNCLAWYQQKPGKVPNLLMYAASTLQSGVPSRFSGSGFGTDFTLTISSLQPEDVATYYCQTYGGVSTFGGGTKVEIR

SEQ ID NO: 24416 - protein, 112 aa, Artificial Sequence
  source: /note="Description of Artificial Sequence: Synthetic polypeptide"
QSVLTQPPSVSGAPGQRVTISCTGSSSNIGSDYDVHWYKQLPGTAPKLLIFGNSNRPSGVPDRFSGSKSGTSASLAITGLQAEDEADYYCQSYDSSLSGFHVFGSGTKVTVL

SEQ ID NO: 24417 - protein, 107 aa, Artificial Sequence
  source: /note="Description of Artificial Sequence: Synthetic polypeptide"
DIQMTQSPSTLSASIGDRVTITCRASQSIASWLAWYQQKPGKAPKLLIYEAVNLESGVPSRFSGSGSGTDFTLTISSLQPDDFATYFCQHYGTISQTFGGGTKVEIK

SEQ ID NO: 24418 - protein, 108 aa, Artificial Sequence
  source: /note="Description of Artificial Sequence: Synthetic polypeptide"
EIVMTQSPATLSVSPGERATLSCRASQSVGNSLAWYQQRPGQAPRLLIYGASTRATGIPPRFSGSGSGTEFTLTISSLQTEDFAVYYCQQYINWRPLSFGGGTKVEIK

SEQ ID NO: 24419 - protein, 111 aa, Artificial Sequence
  source: /note="Description of Artificial Sequence: Synthetic polypeptide"
ETTLTQSPGTLSLSPGERATLSCRVSQSVSSNYLAWYQQKPGQAPRLLIYGASSRATGIPDRFSGSGSGTDFTLTISRLEPEDFAVYYCQQYGTSPRAFGHGTKVEIKRTV

SEQ ID NO: 24420 - protein, 110 aa, Artificial Sequence
  source: /note="Description of Artificial Sequence: Synthetic polypeptide"
ETTLTQSPATLSVSPGERATLSCRASQSVSRNLAWYQQKPGQAPRLLIYGASSRATGIPDRFSGSGSGTDFTLTISRLEPEDFAVYYCQQYGSSSITFGQGTRLEIKRTV

SEQ ID NO: 24421 - protein, 111 aa, Artificial Sequence
  source: /note="Description of Artificial Sequence: Synthetic polypeptide"
QSVLTQPPSVSGAPGQRVTISCGGSRSNIGAGYDVHWYQQFPGTAPKVVIYGNNNRPSGVPDRFSGSKSGTSASLAITGLQAEDEANYYCQSYDTNLGGSIFGGGTQVTVL

SEQ ID NO: 24422 - protein, 109 aa, Artificial Sequence
  source: /note="Description of Artificial Sequence: Synthetic polypeptide"
NFMLTQPHSVSESPGKTVTISCTGSGGNIARNYVQWYQQRPGSAPVTVILEDDKRPSGIPDRFSGSIDRSSNSASLTISGLRTEDEALYYCQSYDDSDLVVFGGGTKLT

SEQ ID NO: 24423 - protein, 111 aa, Artificial Sequence
  source: /note="Description of Artificial Sequence: Synthetic polypeptide"
NFMLTQPHSVSESPGKTVTISCTGSSGSIASNYVQWYQQRPGSAPTTVIYEDYQRPSGVPDRFSGSIDSSSNSASLTISGLKTEDEADYYCQSYDDSDHLIFGGGTKLTVL

SEQ ID NO: 24424 - protein, 110 aa, Artificial Sequence
  source: /note="Description of Artificial Sequence: Synthetic polypeptide"
QSVLTQPPSASGTPGQRVTISCSGSSSNIGSNTVNWYKQLPGTAPRLLIYSNDQRPSGVPDRFSGSKSGTSASLAISGLQSEDEANYYCAAWDDSLSGWVFGGGTKLTVL

SEQ ID NO: 24425 - protein, 107 aa, Artificial Sequence; identical to SEQ ID NO: 24183
  source: /note="Description of Artificial Sequence: Synthetic polypeptide"

SEQ ID NO: 24426 - protein, 107 aa, Artificial Sequence; identical to SEQ ID NO: 24184
  source: /note="Description of Artificial Sequence: Synthetic polypeptide"

SEQ ID NO: 24427 - protein, 112 aa, Artificial Sequence
  source: /note="Description of Artificial Sequence: Synthetic polypeptide"
QSVLTQPPSVSGAPGQRVTISCTGSSSNIGAGYDVHWYQQLPGTAPKLLIYDNNNRPSGVPDRFSGSKSGASASLAITGLQAEDEAHYYCQSYDNSLSGSVFGGGTQLTVLS

SEQ ID NO: 24428 - protein, 107 aa, Artificial Sequence
  source: /note="Description of Artificial Sequence: Synthetic polypeptide"
DIQLTQSPSSLSASVGDRVTLTCQASQDIRKFLNWYQQKPGKGPKLLIYDASNLQRGVPSRFSGGGSGTDFTLIISSLQPEDVGTYYCQQYDGLPFTFGGGTKLEIK

SEQ ID NO: 24429 - protein, 107 aa, Artificial Sequence
  source: /note="Description of Artificial Sequence: Synthetic polypeptide"
DIQLTQSPSSLSASIGDRVTITCQASQDIRNSLNWYEHKPGKAPKLLIHDASNLETGVPSRFSGGGSGTDFTLTISSLQPEDFATYYCQQANSFPLTFGGGTKVEIK

SEQ ID NO: 24430 - protein, 109 aa, Artificial Sequence
  source: /note="Description of Artificial Sequence: Synthetic polypeptide"
EIVMTQSPGTLSLSPGERATLSCRASQSVSSSYLAWYQQKPGQAPRLLIYGASTRATGVPDRFHGGGSGTDFTLTISRLEPEDFAVYYCQQYDTSSGLTFGGGTKVEIK

SEQ ID NO: 24431 - protein, 114 aa, Artificial Sequence
  source: /note="Description of Artificial Sequence: Synthetic polypeptide"
DIVMTQSQKFVSTSVGDRVSVTCKASQNVGSNVAWYQHKPGHSPTALIYSASHRYSGVPDRFTGSESGTDFTLTISNVQSEDLAEYFCQQYYSYPYTFGGGTKLEIKRADAAPT

SEQ ID NO: 24432 - protein, 114 aa, Artificial Sequence
  source: /note="Description of Artificial Sequence: Synthetic polypeptide"
DIVMTQSQKFMSTSVGDRVSVTCKASQNVDTYVAWYQQKPGQSPKALIYSASYRYSGVPDRFTGSGSGTDFTLTISNVQSEDLAEYFCQQYKTYPFTFGSGTKLEIKRADAAPT

SEQ ID NO: 24433 - protein, 106 aa, Artificial Sequence
  source: /note="Description of Artificial Sequence: Synthetic polypeptide"
DIQMTQSPSSLSASVGDRVTITCRTSQSISSYLNWYQQKPGKAPKLLIYAASSLQSGVPSRFSGSGSGTDFTLTISGLQPEDFATYYCQQSYSMPAFGQGTKLEIK

SEQ ID NO: 24434 - protein, 107 aa, Artificial Sequence; identical to SEQ ID NO: 24189
  source: /note="Description of Artificial Sequence: Synthetic polypeptide"

SEQ ID NO: 24435 - protein, 107 aa, Artificial Sequence; identical to SEQ ID NO: 24203
  source: /note="Description of Artificial Sequence: Synthetic polypeptide"

SEQ ID NO: 24436 - protein, 106 aa, Artificial Sequence; identical to SEQ ID NO: 23729
  source: /note="Description of Artificial Sequence: Synthetic polypeptide"

SEQ ID NO: 24437 - protein, 107 aa, Artificial Sequence; identical to SEQ ID NO: 23728
  source: /note="Description of Artificial Sequence: Synthetic polypeptide"

SEQ ID NO: 24438 - protein, 106 aa, Artificial Sequence; identical to SEQ ID NO: 23727
  source: /note="Description of Artificial Sequence: Synthetic polypeptide"

SEQ ID NO: 24439 - protein, 107 aa, Artificial Sequence; identical to SEQ ID NO: 23726
  source: /note="Description of Artificial Sequence: Synthetic polypeptide"

SEQ ID NO: 24440 - protein, 108 aa, Artificial Sequence
  source: /note="Description of Artificial Sequence: Synthetic polypeptide"
DIQMTQSPSSLSASVGDRVTITCRASQSISTYLNWYQQKPGKAPKLLIYAASSLHSGVPSRFSGSGSGTDFALTISSLQPEDFATYYCQQSYSPPITFGQGTRLEIKR

SEQ ID NO: 24441 - protein, 108 aa, Artificial Sequence
  source: /note="Description of Artificial Sequence: Synthetic polypeptide"
DIQMTQSPSSLSASVGDRVTITCRASQSISNYLNWYQHKPGEAPKLLNYAASSLQSGVPSRFSASGSGTDFTLSISGLQPEDFATYYCQQSYNTPITFGPGTRLEIKR

SEQ ID NO: 24442 - protein, 108 aa, Artificial Sequence
  source: /note="Description of Artificial Sequence: Synthetic polypeptide"
DIQMTQSPSSLSASVGDRVTITCRASQSISNYLNWYQHKPGEAPKLLNYAASSLQSGVPSRFSASGSGTDFTLTISSLQPEDFATYYCQQSYNTPITFGQGTRLEIKR

SEQ ID NO: 24443 - protein, 108 aa, Artificial Sequence
  source: /note="Description of Artificial Sequence: Synthetic polypeptide"
DIQMTQSPSSLSASVGDRLTITCRASQSISTYLHWYQQKPGKAPKLLIYAASSLQSGVPSRFSGSRSGTDFTLTISSLQPDDFATYYCQQSYSPPLTFGPGTKVDMKR

SEQ ID NO: 24444 - protein, 107 aa, Artificial Sequence
  source: /note="Description of Artificial Sequence: Synthetic polypeptide"
DIQMTQSPSSLSASVGDRVTITCRASQSISTYLNWYQKRPGKAPKLLVYGASSLQSGVPSRFSGSGSGTDFTLTIASLQPEDSAVYYCQQTYSIPLFGQGTRLEIKR

SEQ ID NO: 24445 - protein, 107 aa, Artificial Sequence
  source: /note="Description of Artificial Sequence: Synthetic polypeptide"
DIQMTQSPSSLSASVGDRVTITCRASQSISTYLNWYQKRPGKAPKLLVYGASTLQSGVPSRFSGSGSGTDFTLTIASLQPEDSATYYCQQTYSIPLFGQGTRLEIKR

SEQ ID NO: 24446 - protein, 107 aa, Artificial Sequence
  source: /note="Description of Artificial Sequence: Synthetic polypeptide"
DIQMTQSPLSVSVSVGDRVTIACRASQSIDKFLNWYQQKPGKAPKLLIYGASNLHSGAPSRFSASGSGTDFTLTITNIQTEDFATYLCQQSFSVPAFGGGTKVEIKR

SEQ ID NO: 24447 - protein, 108 aa, Artificial Sequence
  source: /note="Description of Artificial Sequence: Synthetic polypeptide"
DIQMTQSPSSLSASVGDRVTISCRASQSISTYLNWYQQQPGKAPKVLISGATNLQSGVPSRFSGSGSGTDFTLTISSLQPEDFATYYCQQSYNTPLIFGQGTKLEIKR

SEQ ID NO: 24448 - protein, 108 aa, Artificial Sequence
  source: /note="Description of Artificial Sequence: Synthetic polypeptide"
DIQMTQSPSSLSASVGDRVTISCRASQSISTYLNWYQQQPGKAPKVLIFGATNLQSGVPSRFSGSGSGTDFTLTISSLQPEDFATYYCQQSYNTPLIFGQGTKLEIKR

SEQ ID NO: 24449 - protein, 108 aa, Artificial Sequence
  source: /note="Description of Artificial Sequence: Synthetic polypeptide"
DIQMTQSPSSLSSSVGDRVTITCRASQSIGAYVNWYQQKAGKAPQVLIFGASNLQSGVPSRFSGSGSGTDFTLTISSLQPEDFATYFCQQTYSTPITFGQGTRLEIKR

SEQ ID NO: 24450 - protein, 112 aa, Artificial Sequence
  source: /note="Description of Artificial Sequence: Synthetic polypeptide"
QSVLTQPPSVSGAPGQRVTISCTGGSSNIGAGYSVHWYQQLPGTAPKLLIYGSNSRPSGVPDRFSGSKSGTSASLAITGLRPEDEADYYCQSYDSSLSGSQVFGAGTRVTVL

SEQ ID NO: 24451 - protein, 211 aa, Artificial Sequence
  source: /note="Description of Artificial Sequence: Synthetic polypeptide"
QSVLTQPPSVSVAPGQTARITCGGNDIGRKSVHWNQQKPGQAPVLVVCYDSDRPSGIPERFSGSNSGNTATLTISRVEAGDEADYYCQVWDSSSDHVIFGGGTKLTVLGQPKAAPSVTLFPPSSEELQANKATLVCLISDFYPGAVTVAWKADSSPVKAGVETTTPSKQSNNKYAASSYLSLTPEQWKSHRSYSCQVTHEGSTVEKTVAPT

SEQ ID NO: 24452 - protein, 109 aa, Artificial Sequence
  source: /note="Description of Artificial Sequence: Synthetic polypeptide"
DIRLTQSPATLSVSPGERATLSCRASHSVSRNLAWYQQKPGRAPRLLVYDTSSRATGIPARFSGSGSGTEFTLTISSLQSEDFAVYYCQQYNNWPRTFGQGTKVDIKRT

SEQ ID NO: 24453 - protein, 217 aa, Artificial Sequence
  source: /note="Description of Artificial Sequence: Synthetic polypeptide"
SYVLTQPPSVSGTPGQRVIISCSGYSSNIGSNTVNWYQQFPGTAPRLLIYANNQRPPGVPDRFSGSKSGTSASLAISGLQSDDESDYYCAAWDDSLNGHWVFGGGTKLTVLGQPKAAPSVTLFPPSSEELQANKATLVCLISDFYPGAVTVAWKADSSPVKAGVETTTPSKQSNNKYAASSYLSLTPEQWKSHRSYSCQVTHEGSTVEKTVAPTECS

SEQ ID NO: 24454 - protein, 226 aa, Artificial Sequence
  source: /note="Description of Artificial Sequence: Synthetic polypeptide"
QVQLVQSGAEVKKPGASVKVSCKTSGYSFSTYGVSWVRQAPGQGPEWVGWISAYTGITDYAQKFQGRVTLTTDATTATAFLDLRSLRPDDTATYFCARDKVQGRVEVGSGGRHDYWGQGTLVIVSSASTKGPSVFPLAPSSKSTSGGTAALGCLVKDYFPEPVTVSWNSGALTSGVHTFPAVLQSSGLYSLSSVVTVPSSSLGTQTYICNVNHKPSNTKVDKKVEP

SEQ ID NO: 24455 - protein, 215 aa, Artificial Sequence; identical to SEQ ID NO: 24005
  source: /note="Description of Artificial Sequence: Synthetic polypeptide"

SEQ ID NO: 24456 - protein, 120 aa, Artificial Sequence
  source: /note="Description of Artificial Sequence: Synthetic polypeptide"
QVQLQQPGVELVRPGASVKLSCKASGYTFTSFWMNWVKQRPDQGLEWIGRIDPYDSETHYNQKFKDKAILTVDKSSSTAYMQLSSLTSEDSAVYYCGRGIATLMVLPDYWGQGTSVTVSS

SEQ ID NO: 24457 - protein, 123 aa, Artificial Sequence
  source: /note="Description of Artificial Sequence: Synthetic polypeptide"
QVQLQQSGAELMKPGASVKISCKATGYTFSGHWIEWVKQRPGHGLEWIGEILPGSGNIHYNEKFKGKATFAADTSSNTAYMQLSSLTSEDSAVYYCARLGTTAVERDWYFDVWGQGTLVTVSS

SEQ ID NO: 24458 - protein, 123 aa, Artificial Sequence; identical to SEQ ID NO: 23705
  source: /note="Description of Artificial Sequence: Synthetic polypeptide"

SEQ ID NO: 24459 - protein, 118 aa, Artificial Sequence
  source: /note="Description of Artificial Sequence: Synthetic polypeptide"
EVQLVESGGGLVQPGGSLRLSCTGSGFTFSSYWMDWVRQTPGKDLEYVSGISPSGSNTDYADSVKGRFTISRDNAKNTLYLQMNSLKPEDTALYYCRRSLTLTDSPDLRSQGQVTVSS

SEQ ID NO: 24460 - protein, 121 aa, Artificial Sequence
  source: /note="Description of Artificial Sequence: Synthetic polypeptide"
EVQLVESGGGLVQPGGSLRLSCAASGFTFSSYAMGWVRRAPGEGLEWVSSISSGGALPTYADSVKGRFTISRDNVKNTLYLQMNSLKPEDTAVYSCEKYAGSMWTSERDAWGQGTQVTVSS

SEQ ID NO: 24461 - protein, 119 aa, Artificial Sequence
  source: /note="Description of Artificial Sequence: Synthetic polypeptide"
EVQLVESGGGLVQPGGSLRLSCTGSGFTFSSYWMDWVRQTPGKDLEYVSGISPSGGNTDYADSVKGRFTISRDNAKNTLYLQMNSLQPEDTALYYCRRSLTLTDSPDLRSQGTQVTVSS

SEQ ID NO: 24462 - protein, 252 aa, Artificial Sequence
  source: /note="Description of Artificial Sequence: Synthetic polypeptide"
MAAVTLDESGGGLQTPGGGLSLVCKASGFIFSDRGMHWVRQAPGKGLEWVGGIGSSGSSTWYGAAVKGRATISRDNGQSTVRLQLNNLRAEDTGTYYCAKDASSGGGGSPYGVARIDAWGHGTEVMVSSGSASAPKLEEGEFSEARVALTQPSSVSANLGGTVEITCSGGGGSYGWYQQKSPGSAPVTVIYYNDKRPSDIPSRFSGSASGSTATLTITGVQVGDEAVYYCASADSSAAAFGAGTTLTVLGAA

SEQ ID NO: 24463 - protein, 252 aa, Artificial Sequence
  source: /note="Description of Artificial Sequence: Synthetic polypeptide"
MAAVTLDESGGGLQTPGGALSLVCKASGFIFSDRGMHWVRQAPGKGLEWVGGIGSSGSSTWYGAAVKGRATISRDNGQSTVRLQLNNLRAEDTGTYYCAKDASSGGGGSPYGVARIDAWGHGTEVMVSSGSASAPKLEEGEFSEARVALTQPSSVSANLGGTVEITCSGSWGSYGWYQQRAPGSAPVTVIYETTKRPSNIPSRFSGSKSGSTHTLTITGVQAEDEAVYYCGSADSSVGIFGAGTTLTVLAAA

SEQ ID NO: 24464 - protein, 259 aa, Artificial Sequence
  source: /note="Description of Artificial Sequence: Synthetic polypeptide"
MAAVTLDESGGGLQTPGGALSLVCKASGFSISGYNMNWVRQAPGKGLEWVAEISDDGSYTYYGAAVKGRATISRDNGQSTVRLQLNNLRAEDTGIYYCAKSAGNAGGSGYSYTGLIDAWGHGTEVMVSSGSASAPKLEEGEFSEARVALTQPSSVSANPGETVKITCSGGGSYAGSYYYGWYQQKSPGSAPVTVIYSNDKRPSDIPSRFSGALSGSTATLTITGVQADDEAVYFCGSADSSNSAGIFGAGTTLTVLGAA

SEQ ID NO: 24465 - protein, 252 aa, Artificial Sequence
  source: /note="Description of Artificial Sequence: Synthetic polypeptide"
MAAVTLDESGGGLRTPGGALSLVCKASGFTFSDRGMHWVRQAPGKGLEWVGGIGSSGSSTWYATAVKGRATISRNNGQSTVRLQLNSLRAEDTGTYYCAKDASSGGGGSPYGVARIDAWGHGTEVMVSSGSASAPKLEEGEFSEARVALTQPSSVSANPGGTVKITCSGSSGSYGWYQQKSPGSAPVTVIYYNDKRPSDIPSRFSGSKSGSTGTLTITGVQAEDEAVYYCGNADSSSTALFGAGTTLTVLAA

SEQ ID NO: 24466 - protein, 252 aa, Artificial Sequence
  source: /note="Description of Artificial Sequence: Synthetic polypeptide"
MAAVTLDESGGGLQTPGGALSLVCKASGFIFSDRGMHWVRQAPGKGLEWVGGIGSSGSSTWYATAVKGRATISRDNGQSTVRLQLNNLRAEDTGTYYCAKDASSGGGGSPYGVARIDAWGHGTEVMVSSGSASAPKLEEGEFSEARVALTQPSSVSANPGETVEITCSGSSGRYGWYQQKSPGSAPVTLIYSNDKRPSDIPSRFSGSASGSTNTLTITGVQVEDEAVYFCGSYDGNSDVFGAGTTLTVLAAA

SEQ ID NO: 24467 - protein, 249 aa, Artificial Sequence
  source: /note="Description of Artificial Sequence: Synthetic polypeptide"
MAAVTLDESGGGLQTPGGALSLVCKGSGFSVGSYAMFWVRQAPGKGLEYVAGIENDGSSTWYATAVKGRATISRDNGQSTVRLQLNNLRAEDTGTYYCARGDGPDSFDAWGHGTEVMVSSGSASAPKLEEGEFSEARVALTQPSSVSANPGETVKITCSGGSSYAGSYYYGWYQQKSPGSAPVTVIYSNNQRPSDIPSRFSGSTSGSTSTLTITGVQADDEAVYHCGAYDSTYLGIFGAGTTLTVLAAA

SEQ ID NO: 24468 - protein, 254 aa, Artificial Sequence
  source: /note="Description of Artificial Sequence: Synthetic polypeptide"
MAAVTLDESGGGLQTPGGGFSLVCKASGFTFSSYAMMWVRQAPGKRLEWVAGISGAGSYTNYGAAVKGRATISRDNGQSTARLQLNNLRAEDTGTYFCARSSGYCGFSCAEYIDAWGHGTEVMVSSGSASAPKLEEGEFSEARVALTQPSSVSANLGGTVKITCSGGGSYYGWYQQKAPNSAPVSVIYDNTNRPSNIPSRFSGSKSGSTATLTITGVQADDEAVYFCGSYDSSTDSGYVGIFGAGTTLTVLGAA

SEQ ID NO: 24469 - protein, 252 aa, Artificial Sequence
  source: /note="Description of Artificial Sequence: Synthetic polypeptide"
MAAVTLDESGGGLQKPGGGLSLVCKASGFPFSSYSMQWVRQAPGKGLEWVAGIGNAGSYTGYGAAVKGRATISRDNGQSTVRLQLNNLRAEDTGTYYCAKSAYAGSCAGCVDSIDAWGHGTEVMVSSGSASAPKLEEGEFSEARVALTQPSSVSANPGETVKITCSGDDSWYGWYQQKSPGSAPVTVIYYNNNRPSDIPLRFSGSTSGSTSTLTITGVQADDEAVYFCGSWDRSSGAGIFGAGTTLTVLGAA

SEQ ID NO: 24470 - protein, 269 aa, Artificial Sequence
  source: /note="Description of Artificial Sequence: Synthetic polypeptide"
QSVLTQPLSAPGTPGQRVTISCSGSSSNVGTNAVDWYQRLPGTAPKLLIYYNNQRPSGVPDRFSGSKSGTSASLAISGLRSEDEADYYCATWDNSLNDRVFGGGTKLTVLGGGGGGSGGGGSGGGGSQVQLVQSGAEVRKPGSSVKVSCKASRGTFSNHAVSWVRQAPGHGLEWLGGLIPIFSTPHYAQKFQGRVTITADESTNTVHMELSSLRSEDTAVYYCAREIPGATSGPDHFFFYGMDVWGQGTTVAVSSASGSSGSGHHHHHH

SEQ ID NO: 24471 - protein, 238 aa, Artificial Sequence
  source: /note="Description of Artificial Sequence: Synthetic polypeptide"
RVQLVESGGGLVQPGGSLRLSCAASGFTFSSYAMSWVRQAPGKGLEWVSAISGSGGSTYYADSVKGRFTISRDNTKNTLYLQMNSLRAEDTAVYYCAKIVPKRVFDYWGQGTLVTVSRGGGGSGGGGSGGGGSSELTQDPAVSVALGQTVRITCQGDGLRSYYASWYQQKPGQAPVLVIYGKNNRPSGIPDRFSGSSSGNTASLTITGAQAEDEADYYCNSSQPPFGSVVFGGGTKLT

SEQ ID NO: 24472 - protein, 239 aa, Artificial Sequence
  source: /note="Description of Artificial Sequence: Synthetic polypeptide"
EVQLLESGGGLVQPGGSLRLSCAASGFTFSSYAMSWVRQAPGKGLEWVSAISGSGGSTYYADSVKGRFTISRDNSKNTLYLQMNSLRAEDTAVYYCAKRKRGFDYWGQGTLVTVSRGGGGSGGGGSGGGGSSELTQDPAVSVALGQTVRITCQGDSLRSYYASWYQQKPGQAPVLVIYGKNNRPSGIPDRFSGSSSGNTASLTITGAQAEDEADYYCNSSPSPLLGVVFGGGTKLTVLG

SEQ ID NO: 24473 - protein, 238 aa, Artificial Sequence
  source: /note="Description of Artificial Sequence: Synthetic polypeptide"
EVQLLESGGGLVQPGGSLRLSCAASGFTFSSYAMSWVRQAPGKGLEWVSAISGSGGSTYYADSVKGRFTISRDNSKNTLYLQMNSLRAEDTAVYYCAKHGTRRAFDYWGQGTLVTVSRGGGGSGGGGSGGGGSSELTQDPAVSVALGQTVRITCQGDSLRSYYASWYQQRPGQAPVLVIYGKNNRPSGIPDRFSGSSSGNTASLTITGAQAEDEADYYCNSSEPPMAGVVFGGGTKLT

SEQ ID NO: 24474 - protein, 244 aa, Artificial Sequence
  source: /note="Description of Artificial Sequence: Synthetic polypeptide"
EVQLLESGGGLVQPGGSLRLSCAASGFTFGSYAMSWVRQAPGKGLEWVSAISGSGGSTYYADSVKGRFTISRDNSKNTLYLQMNSLRAEDTAVYYCAKPTHAGTFDYWGQGTLVTVSRGGGGSGGGGSGGGGSSELTQDPAVSVALGQTVRITCQGDSLRSYYASWYQQKPGQAPVLVIYGKNNRPSGIPDRFSGSSSGNTASLTITGAQAEDEADYYCNSSPPLPVYVVFGGGTKLTVLGAAA

SEQ ID NO: 24475 - protein, 179 aa, Artificial Sequence
  source: /note="Description of Artificial Sequence: Synthetic polypeptide"
EVQLLESGGGLVQPGGSLRLSCAASGFTFSSYAMSWVRQAPGKGLEWVSAISGSGGSTYYADSVKGRFTISRDNSKNTLYLQMNSLRAEDTAVYYCAKRQTLAFDYWGQGTLVTVSRGGGGSGGGGSGGGGSSELTQDPAVSVALGQTVRITCQGDSLRSYYASWYQQRPGQAPVLVIY

SEQ ID NO: 24476 - protein, 115 aa, Artificial Sequence; identical to SEQ ID NO: 23694
  source: /note="Description of Artificial Sequence: Synthetic polypeptide"

SEQ ID NO: 24477 - protein, 121 aa, Artificial Sequence [sequence omitted]

SEQ ID NO: 24478 - protein, 121 aa, Artificial Sequence
  source: /note="Description of Artificial Sequence: Synthetic polypeptide"
QVQLVQSGAEVKKPGSSVKVSCKASGGPFRSYAISWVRQAPGQGPEWMGGIIPIFGTTKYAPKFQGRVTITADDFAGTVYMELSSLRSEDTAMYYCAKHMGYQVRETMDVWGKGTTVTVSS

SEQ ID NO: 24479 - protein, 121 aa, Artificial Sequence [sequence omitted]

SEQ ID NO: 24480 - protein, 121 aa, Artificial Sequence [sequence omitted]

SEQ ID NO: 24481 - protein, 120 aa, Artificial Sequence
  source: /note="Description of Artificial Sequence: Synthetic polypeptide"
QVQLQQSGAEVKKPGSSVKVSCKVSGVIFSGSAISWVRQAPGQGLEWMGGISPLFGTTNYAQKFQGRVTITADQSTNTTYMEVNSLRYEDTAVYFCARGPKYYSEYMDVWGKGTTVTVSS

SEQ ID NO: 24482 - protein, 120 aa, Artificial Sequence
  source: /note="Description of Artificial Sequence: Synthetic polypeptide"
QVQLVQSGAEVKKPGSSVKVSCKASGGTFSSYAISWVRQAPGQGLEWMGGIMGMFGTTNYAQKFQGRVTITADEFTSAAYMELRSLRSEDTAVYYCARSSGYYPEYFQDWGQGTLVTVSS

SEQ ID NO: 24483 - protein, 120 aa, Artificial Sequence
  source: /note="Description of Artificial Sequence: Synthetic polypeptide"
QMQLVQSGAEVKKPGSSVKVSCKASGGTFSSYAITWVRQAPGQGLEWMGGIIGMFGSTNYAQNFQGRVTITADESTSTAYMELSSLRSEDTAVYYCARSTGYYPAYLHHWGQGTLVTVSS

SEQ ID NO: 24484 - protein, 121 aa, Artificial Sequence
  source: /note="Description of Artificial Sequence: Synthetic polypeptide"
EVQLVETGAEVKKPGASVKVSCKASGYTFTSYYMHWVRQAPGQGLEWMGWINPNSGGTNYAQKFQGRVTMTRDTSISTAYMELSRLRSDDTAVYYCAREGKWGPQAAFDIWGQGTMVTVSS

SEQ ID NO: 24485 - protein, 117 aa, Artificial Sequence
  source: /note="Description of Artificial Sequence: Synthetic polypeptide"
EVQLVESGGGLVQPGGSLRLSCAASGFTFSIYAMSWVRQAPGKGLEWVSAISSSGDSTYYADSVKGRFTISRDNARNTLYLQMNSLRAEDTAVYYCARAYGYTFDPWGQGTLVTVSS

SEQ ID NO: 24486 - protein, 122 aa, Artificial Sequence
  source: /note="Description of Artificial Sequence: Synthetic polypeptide"
QVQLVQSGGGLVKPGGSLRLSCAASGFTFSSYSMNWVRQAPGKGLEWVSSISSSSSYIYYVDSVKGRFTISRDNAKNSLYLQMNSLRAEDTAVYYCARGGGSYGAYEGFDYWGQGTLVTVSS

SEQ ID NO: 24487 - protein, 121 aa, Artificial Sequence [sequence omitted]

SEQ ID NO: 24488 - protein, 121 aa, Artificial Sequence [sequence omitted]

SEQ ID NO: 24489 - protein, 120 aa, Artificial Sequence
  source: /note="Description of Artificial Sequence: Synthetic polypeptide"
EVQLVESGAEVKKPGSSVKVSCKASGGTFSSYGISWVRQAPGQGLEWMGDIIGMFGSTNYAQNFQGRLTITADESTSTAYMELSSLRSEDTAVYYCARSSGYYPAYLPHWGQGTLVTVSS

SEQ ID NO: 24490 - protein, 121 aa, Artificial Sequence
  source: /note="Description of Artificial Sequence: Synthetic polypeptide"
EVQLVESGAEVKKPGSSVKVSCKASGGTFSFYSMSWVRQAPGQGLEWMGGIIPMFGTTNYAQKFQGRVTITAVESTSTAYMEVSSLRSEDTAVYYCARGDKGIYYYYMDVWGKGTTVTVSS

SEQ ID NO: 24491 - protein, 121 aa, Artificial Sequence
  source: /note="Description of Artificial Sequence: Synthetic polypeptide"
EVQLVETGAEVKKPGSSVKVSCKASGGTFRTHAISWVRQAPGQGLEWMGGIIAIFGTANYAQKFQGRITITADESTSTAYMELSSLRSEDTAVYFCARGSGYHISTPFDNWGQGTLVTVSS

SEQ ID NO: 24492 - protein, 128 aa, Artificial Sequence
  source: /note="Description of Artificial Sequence: Synthetic polypeptide"
EVALVESGAEVKKPGSSVKVSCKASGHIFSGYAISWVRQAPGQGLEWMGGIIPIFGTTNYAQKFQGRVTITADQSTSTAYMDLSNLRSEDTAVYYCARVKDGYCTLTSCPVGWYFDLWGRGTLVTVSS

SEQ ID NO: 24493 - protein, 121 aa, Artificial Sequence
  source: /note="Description of Artificial Sequence: Synthetic polypeptide"
EVQLVQSGAEVKKPGSSVKVSCKASGGIFRSNSISWVRQAPGQGLEWMGGIFALFGTTDYAQKFQGRVTITADESSTTVYLELSSLTSEDTAVYYCARGSGYTTRNYFDYWGQGTLVTVSS

SEQ ID NO: 24494 - protein, 120 aa, Artificial Sequence
  source: /note="Description of Artificial Sequence: Synthetic polypeptide"
EVQLVESGAEVKKPGSSVKVSCKASGGTFSSYAISWVRQAPGQGLEWMGGIIGMFGTANYAQKFQGRVTITADEFTSTAYMELSSLRSEDTAVYYCARGNYYYESSLDYWGQGTLVTVSS

SEQ ID NO: 24495 - protein, 120 aa, Artificial Sequence
  source: /note="Description of Artificial Sequence: Synthetic polypeptide"
QVQLVQSGAEVKKPGSSVKVSCKASGGPFRNFAINWVRQAPGQGLEWMGGIIAVFGTTKYAHKFQGRVTITADDSTNTAYMELGSLKSEDTAVYYCARGPHYYSSYMDVWGEGTTVTVSS

SEQ ID NO: 24496 - protein, 120 aa, Artificial Sequence
  source: /note="Description of Artificial Sequence: Synthetic polypeptide"
EVALVETGAEVKKPGSSVKVPCKSSGSPFRSNAVSWVRQAPGQGLEWVGGILGVFGSPSYAQKFQGRVTITADESTNTVHMELRGLRSEDTAVYYCARGPTYYYSYMDVWGKGTTVTVSS

SEQ ID NO: 24497 - protein, 120 aa, Artificial Sequence
  source: /note="Description of Artificial Sequence: Synthetic polypeptide"
QMQLVQSGAEVKKPGSSVKVSCKASGGTFSSYAISWVRQAPGQGLEWMGGIFGMFGTANYAQKFQGRVTITADEFTSAAYMELSSLGSEDTAMYYCARSSGYYPQYFQDWGQGTLVTVSS

SEQ ID NO: 24498 - protein, 121 aa, Artificial Sequence
  source: /note="Description of Artificial Sequence: Synthetic polypeptide"
EVQLVESGAEVKKPGSSVKVSCKASGGIFNSYAISWVRQAPGQGLEWMGGIIAIFHTPKYAQKFQGRVTITADESTNTAYMELRSLKSEDTALYYCARGSTYDFSSGLDYWGQGTLVTVSS

SEQ ID NO: 24499 - protein, 126 aa, Artificial Sequence
  source: /note="Description of Artificial Sequence: Synthetic polypeptide"
QVQLVQSGAEVKKPGSSVKVSCKASGGFFSSYAISWVRQAPGQGLEWMGGVIPIFRTANYAQNFQGRVTITADEFTSYMELSSLRSDDTAVYYCARLNYHDSGTYYNAPRGWFDPWGQGTLVTVSS

SEQ ID NO: 24500 - protein, 120 aa, Artificial Sequence
  source: /note="Description of Artificial Sequence: Synthetic polypeptide"
QVQLVQSGAEVKKPGSSVKVSCKASGVTFSYYAMSWVRQAPGQGLEWMGGISPMFGTTTYAQKFQGRVTITADDSTSTAYMEVRSLRSEDTAVYYCARSSNYYDSVYDYWGQGTLVTVSS

SEQ ID NO: 24501 - protein, 123 aa, Artificial Sequence
  source: /note="Description of Artificial Sequence: Synthetic polypeptide"
QVQLVQSGAEVKKPGSSVRVSCKASGSIFRNYAMSWVRQAPGQGLEWMGGIIAIFGTPKYAQKFQGRVTITADESTSTVYMELSGLRSEDTAMYYCARIPHYNFGSGSYFDYWGQGTLVTVSS

SEQ ID NO: 24502 - protein, 121 aa, Artificial Sequence [sequence omitted]

SEQ ID NO: 24503 - protein, 121 aa, Artificial Sequence; identical to SEQ ID NO: 24478
  source: /note="Description of Artificial Sequence: Synthetic polypeptide"

SEQ ID NO: 24504 - protein, 121 aa, Artificial Sequence [sequence omitted]

SEQ ID NO: 24505 - protein, 121 aa, Artificial Sequence [sequence omitted]

SEQ ID NO: 24506 - protein, 120 aa, Artificial Sequence; identical to SEQ ID NO: 24481
  source: /note="Description of Artificial Sequence: Synthetic polypeptide"

SEQ ID NO: 24507 - protein, 120 aa, Artificial Sequence; identical to SEQ ID NO: 24482
  source: /note="Description of Artificial Sequence: Synthetic polypeptide"

SEQ ID NO: 24508 - protein, 120 aa, Artificial Sequence; identical to SEQ ID NO: 24483
  source: /note="Description of Artificial Sequence: Synthetic polypeptide"

SEQ ID NO: 24509 - protein, 121 aa, Artificial Sequence; identical to SEQ ID NO: 24484
  source: /note="Description of Artificial Sequence: Synthetic polypeptide"

SEQ ID NO: 24510 - protein, 117 aa, Artificial Sequence; identical to SEQ ID NO: 24485
  source: /note="Description of Artificial Sequence: Synthetic polypeptide"

SEQ ID NO: 24511 - protein, 122 aa, Artificial Sequence; identical to SEQ ID NO: 24486
  source: /note="Description of Artificial Sequence: Synthetic polypeptide"

SEQ ID NO: 24512 - protein, 121 aa, Artificial Sequence [sequence omitted]

SEQ ID NO: 24513 - protein, 121 aa, Artificial Sequence [sequence omitted]

SEQ ID NO: 24514 - protein, 120 aa, Artificial Sequence; identical to SEQ ID NO: 24489
  source: /note="Description of Artificial Sequence: Synthetic polypeptide"

SEQ ID NO: 24515 - protein, 121 aa, Artificial Sequence; identical to SEQ ID NO: 24490
  source: /note="Description of Artificial Sequence: Synthetic polypeptide"

SEQ ID NO: 24516 - protein, 121 aa, Artificial Sequence; identical to SEQ ID NO: 24491
  source: /note="Description of Artificial Sequence: Synthetic polypeptide"

SEQ ID NO: 24517 - protein, 128 aa, Artificial Sequence
  source: /note="Description of Artificial Sequence: Synthetic polypeptide"
EVQLVESGAEVKKPGSSVKVSCKASGHIFSGYAISWVRQAPGQGLEWMGGIIPIFGTTNYAQKFQGRVTITADQSTSTAYMDLSNLRSEDTAVYYCARVKDGYCTLTSCPVGWYFDLWGRGTLVTVSS

SEQ ID NO: 24518 - protein, 121 aa, Artificial Sequence; identical to SEQ ID NO: 24493
  source: /note="Description of Artificial Sequence: Synthetic polypeptide"

SEQ ID NO: 24519 - protein, 120 aa, Artificial Sequence; identical to SEQ ID NO: 24494
  source: /note="Description of Artificial Sequence: Synthetic polypeptide"

SEQ ID NO: 24520 - protein, 120 aa, Artificial Sequence; identical to SEQ ID NO: 24495
  source: /note="Description of Artificial Sequence: Synthetic polypeptide"

SEQ ID NO: 24521 - protein, 120 aa, Artificial Sequence
  source: /note="Description of Artificial Sequence: Synthetic polypeptide"
EVQLVETGAEVKKPGSSVKVPCKSSGSPFRSNAVSWVRQAPGQGLEWVGGILGVFGSPSYAQKFQGRVTITADESTNTVHMELRGLRSEDTAVYYCARGPTYYYSYMDVWGKGTTVTVSS

SEQ ID NO: 24522 - protein, 120 aa, Artificial Sequence; identical to SEQ ID NO: 24497
  source: /note="Description of Artificial Sequence: Synthetic polypeptide"

SEQ ID NO: 24523 - protein, 121 aa, Artificial Sequence; identical to SEQ ID NO: 24498
  source: /note="Description of Artificial Sequence: Synthetic polypeptide"

SEQ ID NO: 24524 - protein, 126 aa, Artificial Sequence; identical to SEQ ID NO: 24499
  source: /note="Description of Artificial Sequence: Synthetic polypeptide"

SEQ ID NO: 24525 - protein, 120 aa, Artificial Sequence; identical to SEQ ID NO: 24500
  source: /note="Description of Artificial Sequence: Synthetic polypeptide"

SEQ ID NO: 24526 - protein, 123 aa, Artificial Sequence; identical to SEQ ID NO: 24501
  source: /note="Description of Artificial Sequence: Synthetic polypeptide"

SEQ ID NO: 24527 - protein, 114 aa, Artificial Sequence
  source: /note="Description of Artificial Sequence: Synthetic polypeptide"
DVVMTQSPDSLAVSLGERATINCKSSQSVLYSSNNKNYLAWYQQKPGQPPKLLIYWASTRESGVPDRFSGSGSGTDFTLTISSLQAEDVAVYYCQQYYSTPLTFGGGTKVDIKR

SEQ ID NO: 24528 - protein, 111 aa, Artificial Sequence
  source: /note="Description of Artificial Sequence: Synthetic polypeptide"
SYVLTQPPSASGTPGQRVTISCSGSTFNIGSNAVDWYRQLPGTAPKLLIYSNNQRPSGVPDRFSGSRSGTSASLAISGLQSEDEADYYCAAWDDILNVPVFGGGTKLTVLG

SEQ ID NO: 24529 - protein, 111 aa, Artificial Sequence
  source: /note="Description of Artificial Sequence: Synthetic polypeptide"
QSALTQPAAVSGSPGQSITISCTGTSSDVGGYNYVSWYQQHPGKAPKLMIYEVSNRPSGVSNRFSGSKSGNTASLTISGLQAEDEADYYCSSYTSSSTYVFGTGTKVTVLG

SEQ ID NO: 24530 - protein, 111 aa, Artificial Sequence
  source: /note="Description of Artificial Sequence: Synthetic polypeptide"
SYVLTQPPSVSGTPGQRVTISCSGSRSNVGDNSVYWYQHVPEMAPKLLVYKNTQRPSGVPARFSGSKSGTSASLAIIGLQSGDEADYYCVAWDDSVDGYVFGSGTKVTVLG

SEQ ID NO: 24531 - protein, 111 aa, Artificial Sequence
  source: /note="Description of Artificial Sequence: Synthetic polypeptide"
SVLTQPPSVSAAPGQKVTISCSGSSSNIGNDYVSWYQQLPGTAPKLLIYDNNKRPSGIPDRFSGSKSGTSATLGITGLQTGDEANYYCATWDRRPTAYVVFGGGTKLTVLG

SEQ ID NO: 24532 - protein, 109 aa, Artificial Sequence
  source: /note="Description of Artificial Sequence: Synthetic polypeptide"
DIQMTQSPSSLSASVGDRVTITCRASQGISSYLAWYQQKPGKVPTLLIYDASTLRSGVPSRFSGSGSATDFTLTISSLQPEDVATYYCQRYNSAPPITFGQGTRLEIKR

SEQ ID NO: 24533 - protein, 107 aa, Artificial Sequence
  source: /note="Description of Artificial Sequence: Synthetic polypeptide"
QSVLTQPPSESVSPGQTASVTCSGHKLGDKYVSWYQQKPGQSPVLLIYQDNRRPSGIPERFIGSNSGNTATLTISGTQALDEADYYCQAWDSSTAVFGGGTKLTVLG

SEQ ID NO: 24534 - protein, 111 aa, Artificial Sequence
  source: /note="Description of Artificial Sequence: Synthetic polypeptide"
QSALTQPRSVSGSPGQSVTISCTGTSSDVGGYNYVSWYQQHPGKAPKLMIYDVSKRPSGVPDRFSGSKSGNTASLTISGLQAEDEADYYCSSYTSSSTHVFGTGTKVTVLG

SEQ ID NO: 24535 - protein, 109 aa, Artificial Sequence
  source: /note="Description of Artificial Sequence: Synthetic polypeptide"
EIVMTQSPGTLSLSPGERATLSCRASQSVSSSYLAWYQQKPGQAPRLLIYDASSRATDIPDRFSGSGSGTDFTLTISRLEPEDFAVYYCQQYGSSLWTFGQGTKVEIKR

SEQ ID NO: 24536 - protein, 113 aa, Artificial Sequence
  source: /note="Description of Artificial Sequence: Synthetic polypeptide"
EIVLTQSPLSLPVTPGEPASISCRSSQSLLHSNGYNYLDWYLQKPGQSPQLLIYLGSNRASGVPDRFSGSGSGTDFTLKISRVEAEDVGVYYCMQALQTPLTFGGGTKVEIKR

SEQ ID NO: 24537 - protein, 108 aa, Artificial Sequence
  source: /note="Description of Artificial Sequence: Synthetic polypeptide"
EIVLTQSPGTLSLSPGERATLSCRASQRVSSYLAWYQQKPGQAPRLLIYGASTRAAGIPDRFSGSGSGTDFTLTISRLEPEDSAVYYCQQYGRTPLTFGGGTKVEIKR

SEQ ID NO: 24538 - protein, 109 aa, Artificial Sequence
  source: /note="Description of Artificial Sequence: Synthetic polypeptide"
SYVLTQPPSVSVAPGQTARITCGGNNIGSKSVHWYQQKPGQAPVLVVYDDSDRPSGIPERFSGSNSGNTATLTISRVEAGDEADYYCQVWDSSSDHAVFGGGTQLTVLG

SEQ ID NO: 24539 - protein, 111 aa, Artificial Sequence
  source: /note="Description of Artificial Sequence: Synthetic polypeptide"
SYVLTQPPSASGTPGQRVTISCSGSSSNIGSNYVYWYQQLPGTAPKLLIYRDGQRPSGVPDRFSGSKSGTSASLAISGLRSDDEADYYCATWDDNLSGPVFGGGTKLTVLG

SEQ ID NO: 24540 - protein, 109 aa, Artificial Sequence
  source: /note="Description of Artificial Sequence: Synthetic polypeptide"
EIVLTQSPGTLSLSPGERATLSCRASQSVSSSYLAWYQQKPGQAPRLLIYGASSRATGIPDRFSGSGSGTDFTLTISRLEPEDFAVYYCQQYGSSPRTFGGGTKVEIKR

SEQ ID NO: 24541 - protein, 111 aa, Artificial Sequence
  source: /note="Description of Artificial Sequence: Synthetic polypeptide"
QSALTQPASVSGSPGQSITISCTGTSSDVGGYNYVSWYQQHPGKAPKLMIYEVSNRPSGVSNRFSGSKSGNTASLTISGLQAEDEADYYCSSYTSSSTLVFGTGTKVTVLG

SEQ ID NO: 24542 - protein, 109 aa, Artificial Sequence
  source: /note="Description of Artificial Sequence: Synthetic polypeptide"
SYVLTQPPSVSVAPGQTARITCGGNNIGSKGVHWYQQKPGQAPVLVVYDDSDRPSGIPERFSGSNSGNTATLTISRVEAGDEADYYCQVWDSSSDHVVFGGGTKLTVLG

SEQ ID NO: 24543 - protein, 108 aa, Artificial Sequence
  source: /note="Description of Artificial Sequence: Synthetic polypeptide"
EIVMTQSPGTLSLSPGERATLSCRASQSVSSSYLAWYQQKPGQAPRLLIFGASSRATGIPDRFSGSGSGTDFTLTISRLEPEDFAVYYCQQYGSSLTFGGGTKLEIKR

SEQ ID NO: 24544 - protein, 109 aa, Artificial Sequence
  source: /note="Description of Artificial Sequence: Synthetic polypeptide"
EIVLTQSPGTLSLSPGERATLSCRASQSVSSNYLGWTQQKPGQAPRLLIYGASSRASGIPDRFSGGGSGTDFTLTISRLEPEDFAVYYCQQYGSSPLTFGGGTKVEIKR

SEQ ID NO: 24545 - protein, 109 aa, Artificial Sequence
  source: /note="Description of Artificial Sequence: Synthetic polypeptide"
QSVVTQPPSVSVAPGQTARITCGGNNIGSKSVHWYQQKPGQAPVLVVYDDSDRPSGIPERFSGSNSGNTATLTISRVEAGDEADYYCQVWDSSSDHYVFGTGTKVTVLG

SEQ ID NO: 24546 - protein, 107 aa, Artificial Sequence
  source: /note="Description of Artificial Sequence: Synthetic polypeptide"
DIQLTQSPSSLSASVGDRVTITCRASQGISTYLAWYQQKPGKVPKLLIYAASTLQSGVPSRFSGSGSGTDFTLTISSLQPEDVATYYCQKYNSAPSFGPGTKVDIKR

SEQ ID NO: 24547 - protein, 109 aa, Artificial Sequence
  source: /note="Description of Artificial Sequence: Synthetic polypeptide"
SYVLTQPPSESVAPGQTARITCGGNNIGRNSVHWYQQKPGQAPVLVVYDDSDRPSGIPERFSGSKSGNTATLIISRVEVGDEADYYCQVWHSSSDHYVFGTGTKVTVLG

SEQ ID NO: 24548 - protein, 109 aa, Artificial Sequence
  source: /note="Description of Artificial Sequence: Synthetic polypeptide"
EIVMTQSPGTLSLSPGQRATLSCRASQSVSSSYLAWYQQKPGQAPRLLMYGASSRATGIPDRFSGSGSGTDFTLTISRLEPEDFAVYYCQQYGSSSLTFGGGTKLEIKR

SEQ ID NO: 24549 - protein, 109 aa, Artificial Sequence
  source: /note="Description of Artificial Sequence: Synthetic polypeptide"
QAGLTQPPSVSVAPGQTARITCGGNNIGSKSVHWYQQKPGQAPVLVVYDDSDRPSGIPERFSGSNSGNTATLTISRVEAGDEADYYCQVWDSSSDHVVFGGGTKLTVLG

SEQ ID NO: 24550 - protein, 114 aa, Artificial Sequence
  source: /note="Description of Artificial Sequence: Synthetic polypeptide"
DIQMTQSPDSLAVSLGEKATINCKSSQSILNSSNNKNYLAWYQQKPGQPPKLLIYWASTRESGVPDRFSGSGSGTDFTLTISSLQAEDVAVYYCQQYYSSPPTFGQGTKVEIKR

SEQ ID NO: 24551 - protein, 109 aa, Artificial Sequence
  source: /note="Description of Artificial Sequence: Synthetic polypeptide"
QSVVTQPPSESVAPGQTARITCGGHNIGSNSVHWYQQKPGQAPVLVVYDNSDRPSGIPERFSGSNSGNTATLTISRVEAGDEADYYCQVWGSSSDHYVFGTGTKVTVLG

SEQ ID NO: 24552 - protein, 111 aa, Artificial Sequence
  source: /note="Description of Artificial Sequence: Synthetic polypeptide"
TVLTQPPSVSGAPGQRVTISCTGSSSNIGAGYDVHWYQQLPGTAPKLLIYGNSNRPSGVPDRFSGSKSGTSATLGITGLQTGDEADYYCGTWDSSLSAYVFGTGTKVTVLG

SEQ ID NO: 24553 - protein, 114 aa, Artificial Sequence; identical to SEQ ID NO: 24527
  source: /note="Description of Artificial Sequence: Synthetic polypeptide"

SEQ ID NO: 24554 - protein, 111 aa, Artificial Sequence; identical to SEQ ID NO: 24528
  source: /note="Description of Artificial Sequence: Synthetic polypeptide"

SEQ ID NO: 24555 - protein, 111 aa, Artificial Sequence; identical to SEQ ID NO: 24529
  source: /note="Description of Artificial Sequence: Synthetic polypeptide"

SEQ ID NO: 24556 - protein, 111 aa, Artificial Sequence; identical to SEQ ID NO: 24530
  source: /note="Description of Artificial Sequence: Synthetic polypeptide"

SEQ ID NO: 24557 - protein, 112 aa, Artificial Sequence
  source: /note="Description of Artificial Sequence: Synthetic polypeptide"
QSVLTQPPSVSAAPGQKVTISCSGSSSNIGNDYVSWYQQLPGTAPKLLIYDNNKRPSGIPDRFSGSKSGTSATLGITGLQTGDEANYYCATWDRRPTAYVVFGGGTKLTVLG

SEQ ID NO: 24558 - protein, 109 aa, Artificial Sequence; identical to SEQ ID NO: 24532
  source: /note="Description of Artificial Sequence: Synthetic polypeptide"

SEQ ID NO: 24559 - protein, 107 aa, Artificial Sequence; identical to SEQ ID NO: 24533
  source: /note="Description of Artificial Sequence: Synthetic polypeptide"

SEQ ID NO: 24560 - protein, 111 aa, Artificial Sequence
  source: /note="Description of Artificial Sequence: Synthetic polypeptide"
GSALTQPRSVSGSPGQSVTISCTGTSSDVGGYNYVSWYQQHPGKAPKLMIYDVSKRPSGVPDRFSGSKSGNTASLTISGLQAEDEADYYCSSYTSSSTHVFGTGTKVTVLG

SEQ ID NO: 24561 - protein, 109 aa, Artificial Sequence; identical to SEQ ID NO: 24535
  source: /note="Description of Artificial Sequence: Synthetic polypeptide"

SEQ ID NO: 24562 - protein, 113 aa, Artificial Sequence; identical to SEQ ID NO: 24536
  source: /note="Description of Artificial Sequence: Synthetic polypeptide"

SEQ ID NO: 24563 - protein, 108 aa, Artificial Sequence
  source: /note="Description of Artificial Sequence: Synthetic polypeptide"
EIVLYQSPGTLSLSPGERATLSCRASQRVSSYLAWYQQKPGQAPRLLIYGASTRAAGIPDRFSGSGSGTDFTLTISRLEPEDSAVYYCQQYGRTPLTFGGGTKVEIKR

SEQ ID NO: 24564 - protein, 109 aa, Artificial Sequence; identical to SEQ ID NO: 24538
  source: /note="Description of Artificial Sequence: Synthetic polypeptide"

SEQ ID NO: 24565 - protein, 111 aa, Artificial Sequence; identical to SEQ ID NO: 24539
  source: /note="Description of Artificial Sequence: Synthetic polypeptide"

SEQ ID NO: 24566 - protein, 109 aa, Artificial Sequence; identical to SEQ ID NO: 24540
  source: /note="Description of Artificial Sequence: Synthetic polypeptide"

SEQ ID NO: 24567 - protein, 111 aa, Artificial Sequence; identical to SEQ ID NO: 24541
  source: /note="Description of Artificial Sequence: Synthetic polypeptide"

SEQ ID NO: 24568 - protein, 109 aa, Artificial Sequence; identical to SEQ ID NO: 24542
  source: /note="Description of Artificial Sequence: Synthetic polypeptide"

SEQ ID NO: 24569 - protein, 108 aa, Artificial Sequence; identical to SEQ ID NO: 24543
  source: /note="Description of Artificial Sequence: Synthetic polypeptide"

SEQ ID NO: 24570 - protein, 109 aa, Artificial Sequence
  source: /note="Description of Artificial Sequence: Synthetic polypeptide"
EIVLTQSPGTLSLSPGERATLSCRASQSVSSNYLGWYQQKPGQAPRLLIYGASSRASGIPDRFSGGGSGTDFTLTISRLEPEDFAVYYCQQYGSSPLTFGGGTKVEIKR

SEQ ID NO: 24571 - protein, 109 aa, Artificial Sequence; identical to SEQ ID NO: 24545
  source: /note="Description of Artificial Sequence: Synthetic polypeptide"

SEQ ID NO: 24572 - protein, 107 aa, Artificial Sequence; identical to SEQ ID NO: 24546
  source: /note="Description of Artificial Sequence: Synthetic polypeptide"

SEQ ID NO: 24573 - protein, 109 aa, Artificial Sequence; identical to SEQ ID NO: 24547
  source: /note="Description of Artificial Sequence: Synthetic polypeptide"

SEQ ID NO: 24574 - protein, 109 aa, Artificial Sequence; identical to SEQ ID NO: 24548
  source: /note="Description of Artificial Sequence: Synthetic polypeptide"

SEQ ID NO: 24575 - protein, 109 aa, Artificial Sequence; identical to SEQ ID NO: 24549
  source: /note="Description of Artificial Sequence: Synthetic polypeptide"

SEQ ID NO: 24576 - protein, 114 aa, Artificial Sequence; identical to SEQ ID NO: 24550
  source: /note="Description of Artificial Sequence: Synthetic polypeptide"

SEQ ID NO: 24577 - protein, 109 aa, Artificial Sequence; identical to SEQ ID NO: 24551
  source: /note="Description of Artificial Sequence: Synthetic polypeptide"

SEQ ID NO: 24578 - protein, 111 aa, Artificial Sequence; identical to SEQ ID NO: 24552
  source: /note="Description of Artificial Sequence: Synthetic polypeptide"

SEQ ID NO: 24579 - protein, 236 aa, Artificial Sequence
  source: /note="Description of Artificial Sequence: Synthetic polypeptide"
QVQLQESGPGLVKPSETLSLTCTVSGGSISSYYWSWIRQPPGKGLEWIGYIYYSGSTDYNPSLKSRVTISVDTSKNQFSLKLSSVTAADTAVYYCARRRSDFETVDFIYHYMDVWGKGTTVTVSSASTKGPSVFPLAPSSKSTSGGTAALGCLVKDYFPEPVTVSWNSGALTSGVHTFPAVLQSSGLYSLSSVVTVPSSSLGTQTYICNVNHKPSNTKVDKRVEPKSCDKHHHHHH

SEQ ID NO: 24580 - protein, 214 aa, Artificial Sequence
  source: /note="Description of Artificial Sequence: Synthetic polypeptide"
DIQMTQSPSSLSASVGDRVTITCRASQSISSYLNWYQQKPGKAPKLLIYAASSLQSGVPSRFSGSGSGTDFTLTISSLQPEDFATYYCQQSYSIPLTFGQGTRLEIKRTVAAPSVFIFPPSDEQLKSGTASVVCLLNNFYPREAKVQWKVDNALQSGNSQESVTEQDSKDSTYSLSSTLTLSKADYEKHKVYACEVTHQGLSSPVTKSFNRGEC

SEQ ID NO: 24581 - protein, 130 aa, Artificial Sequence
  source: /note="Description of Artificial Sequence: Synthetic polypeptide"
QLQLQESGPGLVKPSETLSLTCTASGGSINSSNFYWGWIRQPPGKGLEWIGSIFYSGTTYYNPSLKSRVTISVDTSKNQFSLKLSPVTAADTAVYHCARHGFRYCNNGVCSINLDAFDIWGQGTMVTVSS

SEQ ID NO: 24582 - protein, 331 aa, Artificial Sequence; identical to SEQ ID NO: 18456
  source: /note="Description of Artificial Sequence: Synthetic polypeptide"

SEQ ID NO: 24583 - protein, 122 aa, Artificial Sequence
  source: /note="Description of Artificial Sequence: Synthetic polypeptide"
QVQLQESGPGLVKPSETLSLTCTVSNGAIGDYDWSWIRQSPGKGLEWIGNINYRGNTNYNPSLKSRVTMSLRTSTMQFSLKLSSATAADTAVYYCARDVGYGGGQYFAMDVWSPGTTVTVSS

SEQ ID NO: 24584 - protein, 129 aa, Artificial Sequence
  source: /note="Description of Artificial Sequence: Synthetic polypeptide"
QVQLVESGGGVVQPGGSLRLSCTASGFTFSTYGMHWVRQAPGKGLEWVAFIRYDGSTQDYVDSVKGRFTISRDNSKNMVYVQMNSLRVEDTAVYYCAKDMDYYGSRSYSVTYYYGMDVWGQGTTVTVSS

SEQ ID NO: 24585 - protein, 125 aa, Artificial Sequence
  source: /note="Description of Artificial Sequence: Synthetic polypeptide"
QVQLVQSGAEVKKPGASVKVSCKASGYTFSGYYMHWVRQAPGQGLEWMGWINTSSGGTNYAQKFQGRVTMTRDTSISTAHMELRRLRSDDTAVYYCAREDGTMGTNSWYGWFDPWGQGTLVTVSS

SEQ ID NO: 24586 - protein, 127 aa, Artificial Sequence
  source: /note="Description of Artificial Sequence: Synthetic polypeptide"
QVQLVESGGGLVKPGGSLRLSCAASGFPFGDYYMSWIRQAPGKGLEWVAYINRGGTTIYYADSVKGRFTISRDNAKNSLFLQMNSLRAGDTALYYCARGLILALPTATVELGAFDIWGQGTMVTVSS

SEQ ID NO: 24587 - protein, 126 aa, Artificial Sequence
  source: /note="Description of Artificial Sequence: Synthetic polypeptide"
QVQLQESGPGLVKPSQTLSLTCTVSGASISSGDYYWSWIRQSPRKGLEWIGYIFHSGTTYYNPSLKSRAVISLDTSKNQFSLRLTSVTAADTAVYYCARDVDDFPVWGMNRYLALWGRGTLVTVSS

SEQ ID NO: 24588 - protein, 124 aa, Artificial Sequence
  source: /note="Description of Artificial Sequence: Synthetic polypeptide"
QVQLVESGGGVVQPGRSLRLSCAASGFSFSHFGMHWVRQVPGKGLEWVAIISYDGNNVHYADSVKGRFTISRDNSKNTLFLQMNSLRDDDTGVYYCAKDDVATDLAAYYYFDVWGRGTLVTVSS

SEQ ID NO: 24589 - protein, 123 aa, Artificial Sequence
  source: /note="Description of Artificial Sequence: Synthetic polypeptide"
QVQLVESGGGVVQPGRSLKLSCEASGFNFNNYGMHWVRQAPGKGLEWVAVISYDGRNKYFADSVKGRFIISRDDSRNTVFLQMNSLRVEDTAVYYCARGSVQVWLHLGLFDNWGQGTLVTVSS

SEQ ID NO: 24590 - protein, 122 aa, Artificial Sequence
  source: /note="Description of Artificial Sequence: Synthetic polypeptide"
QVQLVESGGAVVQPGRSLRLSCEVSGFSFSDYGMNWVRQGPGKGLEWVAVIWHDGSNKNYLDSVKGRFTVSRDNSKNTLFLQMNSLRAEDTAVYYCARTPYEFWSGYYFDFWGQGTLVTVSS

SEQ ID NO: 24591 - protein, 116 aa, Artificial Sequence
  source: /note="Description of Artificial Sequence: Synthetic polypeptide"
QVQLVESGGGVVQPGRSLRLSCAASGFPFNSYAMHWVRQAPGKGLEWVAVIYYEGSNEYYADSVKGRFTISRDNSKNTLYLQMDSLRAEDTAVYYCARKWLGMDFWGQGTLVTVSS

SEQ ID NO: 24592 - protein, 120 aa, Artificial Sequence
  source: /note="Description of Artificial Sequence: Synthetic polypeptide"
EVQLVESGGGLVRPGGSLRLSCSASGFTFSNYAMHWVRQAPGKRLEYVSATSTDGGSTYYADSLKGTFTISRDNSKNTLYLQMSSLSTEDTAIYYCARRFWGFGNFFDYWGRGTLVTVSS

SEQ ID NO: 24593 - protein, 122 aa, Artificial Sequence
  source: /note="Description of Artificial Sequence: Synthetic polypeptide"
QVQLVQSGAEVKKSGSSVKVSCRASGGTFGNYAINWVRQAPGQGLEWVGRIIPVFDTTNYAQKFQGRVTITADRSTNTAIMQLSSLRPQDTAMYYCLRGSTRGWDTDGFDIWGQGTMVTVSS

SEQ ID NO: 24594 - protein, 129 aa, Artificial Sequence
  source: /note="Description of Artificial Sequence: Synthetic polypeptide"
QVQLVQSGAVVETPGASVKVSCKASGYIFGNYYIHWVRQAPGQGLEWMAVINPNGGSTTSAQKFQDRITVTRDTSTTTVYLEVDNLRSEDTATYYCARQRSVTGGFDAWLLIPDASNTWGQGTMVTVSS

SEQ ID NO: 24595 - protein, 126 aa, Artificial Sequence
  source: /note="Description of Artificial Sequence: Synthetic polypeptide"
QVQLVQSGAEMKKPGSSVKVSCKASGGSFSSYSISWVRQAPGRGLEWVGMILPISGTTNYAQTFQGRVIISADTSTSTAYMELTSLTSEDTAVYFCARVFREFSTSTLDPYYFDYWGQGTLVTVSS

SEQ ID NO: 24596 - protein, 125 aa, Artificial Sequence
  source: /note="Description of Artificial Sequence: Synthetic polypeptide"
QVQLVESGGGVVQPGKSVRLSCVGSGFRLMDYAMHWVRQAPGKGLDWVAVISYDGANEYYAESVKGRFTVSRDNSDNTLYLQMKSLRAEDTAVYFCARAGRSSMNEEVIMYFDNWGLGTLVTVSS

SEQ ID NO: 24597 - protein, 127 aa, Artificial Sequence
  source: /note="Description of Artificial Sequence: Synthetic polypeptide"
EVQLLESGGGLVQPGGSLRLSCVASGFTFSTYAMTWVRQAPGKGLEWVSVIRASGDSEIYADSVRGRFTISRDNSKNTVFLQMDSLRVEDTAVYFCANIGQRRYCSGDHCYGHFDYWGQGTLVTVSS

SEQ ID NO: 24598 - protein, 127 aa, Artificial Sequence
  source: /note="Description of Artificial Sequence: Synthetic polypeptide"
QVQLVESGGGVVQPGRSLRLSCAASGFGFNTHGMHWVRQAPGKGLEWLSIISLDGIKTHYADSVKGRFTISRDNSKNTVFLQLSGLRPEDTAVYYCAKDHIGGTNAYFEWTVPFDGWGQGTLVTVSS

SEQ ID NO: 24599 - protein, 126 aa, Artificial Sequence
  source: /note="Description of Artificial Sequence: Synthetic polypeptide"
QVTLRESGPAVVKPTETLTLTCAFSGFSLNAGRVGVSWIRQPPGQAPEWLARIDWDDDKAFRTSLKTRLSISKDSSKNQVVLTLSNMDPADTATYYCARTQVFASGGYYLYYLDHWGQGTLVTVSS

SEQ ID NO: 24600 - protein, 129 aa, Artificial Sequence
  source: /note="Description of Artificial Sequence: Synthetic polypeptide"
QVQLQESGPGLVKPSQTLSLTCTVSSGAISGADYYWSWIRQPPGKGLEWVGFIYDSGSTYYNPSLRSRVTISIDTSKKQFSLKLTSVTAADTAVYYCARDLGYGGNSYSHSYYYGLDVWGRGTTVTVSS

SEQ ID NO: 24601 - protein, 119 aa, Artificial Sequence
  source: /note="Description of Artificial Sequence: Synthetic polypeptide"
QVQLQESGPGLVKPSETLSLTCTVSGGSIGNYYWGWIRQPPGKGLEWIGHIYFGGNTNYNPSLQSRVTISVDTSRNQFSLKLNSVTAADTAVYYCARDSSNWPAGYEDWGQGTLVTVSS

SEQ ID NO: 24602 - protein, 123 aa, Artificial Sequence
  source: /note="Description of Artificial Sequence: Synthetic polypeptide"
QVQLVQSGAEVKKPGASVKVSCKVSGYTFTSNGLSWVRQAPGQGFEWLGWISASSGNKKYAPKFQGRVTLTTDISTSTAYMELRSLRSDDTAVYYCAKDGGTYVPYSDAFDFWGQGTMVTVSS

SEQ ID NO: 24603 - protein, 118 aa, Artificial Sequence
  source: /note="Description of Artificial Sequence: Synthetic polypeptide"
QVQLVQSGAEVKKPGASVKVSCRVSGHTFTALSKHWMRQGPGGGLEWMGFFDPEDGDTGYAQKFQGRVTMTEDTATGTAYMELSSLTSDDTAVYYCATVAAAGNFDNWGQGTLVTVSS

SEQ ID NO: 24604 - protein, 126 aa, Artificial Sequence
  source: /note="Description of Artificial Sequence: Synthetic polypeptide"
QVTLKESGPALVKATQTLTLTCTFSGFSLSRNRMSVSWIRQPPGKALEWLARIDWDDDKFYNTSLQTRLTISKDTSKNQVVLTMTNMDPVDTATYYCARTGIYDSSGYYLYYFDYWGQGTLVTVSS

SEQ ID NO: 24605 - protein, 130 aa, Artificial Sequence
  source: /note="Description of Artificial Sequence: Synthetic polypeptide"
QVQLVQSGAEVKVPGASVKVSCKASGYTFTTYGVSWVRQAPGQGLEWMGWISAYNGNTYYLQKLQGRVTMTTDTSTSTAYMELRGLRSDDTAMYYCARDRVGGSSSEVLSRAKNYGLDVWGQGTTVTVSS

SEQ ID NO: 24606 - protein, 123 aa, Artificial Sequence
  source: /note="Description of Artificial Sequence: Synthetic polypeptide"
QVQLVQSGAEVKKPGASVKVSCKASANIFTYAMHWVRQAPGQRLEWMGWINVGNGQTKYSQRFQGRVTITRDTSATTAYMELSTLRSEDTAVYYCARRASQYGEVYGNYFDYWGQGTLVTVSS

SEQ ID NO: 24607 - protein, 126 aa, Artificial Sequence
  source: /note="Description of Artificial Sequence: Synthetic polypeptide"
QVQLVQSGAEVKRPGASVKVSCKASGYTFISYGFSWVRQAPGQGLEWMGWSSVYNGDTNYAQKFHGRVNMTTDTSTNTAYMELRGLRSDDTAVYFCARDRNVVLLPAAPFGGMDVWGQGTMVTVSS

SEQ ID NO: 24608 - protein, 123 aa, Artificial Sequence
  source: /note="Description of Artificial Sequence: Synthetic polypeptide"
QVQLVESGGGVVQPGTSLRLSCAASGFTFSTFGMHWVRQAPGKGLEWVAVISYDGNKKYYADSVKGRFTISRDNSKNTLYLQVNSLRVEDTAVYYCAAQTPYFNESSGLVPDWGQGTLVTVSS

SEQ ID NO: 24609 - protein, 126 aa, Artificial Sequence
  source: /note="Description of Artificial Sequence: Synthetic polypeptide"
QVQLVQSGAEVKKPGASVKVSCKASGYTFISFGISWVRQAPGQGLEWMGWISAYNGNTDYAQRLQDRVTMTRDTATSTAYLELRSLKSDDTAVYYCTRDESMLRGVTEGFGPIDYWGQGTLVTVSS

SEQ ID NO: 24610 - protein, 128 aa, Artificial Sequence
  source: /note="Description of Artificial Sequence: Synthetic polypeptide"
EVQLVQSGAEVKKPGQSLKISCKTSGYIFTNYWIGWVRQRPGKGLEWMGVIFPADSDARYSPSFQGQVTISADKSIGTAYLQWSSLKASDTAIYYCARPKYYFDSSGQFSEMYYFDFWGQGTLVTVSS

SEQ ID NO: 24611 - protein, 119 aa, Artificial Sequence
  source: /note="Description of Artificial Sequence: Synthetic polypeptide"
QVQLVQSGPEVKKPGASVKVSCKASGYVLTNYAFSWVRQAPGQGLEWLGWISGSNGNTYYAEKFQGRVTMTTDTSTSTAYMELRSLRSDDTAVYFCARDLLRSTYFDYWGQGTLVTVSS

SEQ ID NO: 24612 - protein, 126 aa, Artificial Sequence
  source: /note="Description of Artificial Sequence: Synthetic polypeptide"
QVQLVQSGAEVKKPGASVKVSCKASGYTFSNYGFSWVRQAPGRGLEWMGWISAYNGNTYYAQNLQGRVTMTTDTSTTTAYMVLRSLRSDDTAMYYCARDGNTAGVDMWSRDGFDIWGQGTMVTVSS

SEQ ID NO: 24613 - protein, 131 aa, Artificial Sequence
  source: /note="Description of Artificial Sequence: Synthetic polypeptide"
EVQLLESGGGLVQPGGPLRLSCVASGFSFSSYAMNWIRLAPGKGLEWVSGISGSGGSTYYGDSVKGRFTISRDNSKNTLYLQMNSLRAEDTAVYYCAKEPWIDIVVASVISPYYYDGMDVWGQGTTVTVSS

SEQ ID NO: 24614 - protein, 123 aa, Artificial Sequence
  source: /note="Description of Artificial Sequence: Synthetic polypeptide"
QVQLVQSGAEVKKPGSSVKVSCKASGGSFDGYTISWLRQAPGQGLEWMGRVVPTLGFPNYAQKFQGRVTVTADRSTNTAYLELSRLTSEDTAVYYCARMNLGSHSGRPGFDMWGQGTLVTVSS

SEQ ID NO: 24615 - protein, 129 aa, Artificial Sequence
  source: /note="Description of Artificial Sequence: Synthetic polypeptide"
QVQLVESGGGVVQPGRSLRLSCAVSGSSFSKYGIHWVRQAPGKGLEWVAVISYDGSKKYFTDSVKGRFTIARDNSQNTVFLQMNSLRAEDTAVYYCATGGGVNVTSWSDVEHSSSLGYWGLGTLVTVSS

SEQ ID NO: 24616 - protein, 125 aa, Artificial Sequence
  source: /note="Description of Artificial Sequence: Synthetic polypeptide"
QVQLVESGGGVVQPGGSLRLSCAASGFTFSSYGMHWVRQAPGKGLEWVAFIWNDGSNKYYADSVKGRFTISRDNSKNTLYLQMNSLRAEDTAVYYCVKDEVYDSSGYYLYYFDSWGQGTLVTVSS

SEQ ID NO: 24617 - protein, 127 aa, Artificial Sequence
  source: /note="Description of Artificial Sequence: Synthetic polypeptide"
EVQLLESGGGLVQPGGSLRLSCAASGFTFSSYTMSWVRQAPGKGLEWVSSISASTVLTYYADSVKGRFTISRDNSKNTLYLQMSSLRAEDTAVYYCAKDYDFWSGYPGGQYWFFDLWGRGTLVTVSS

SEQ ID NO: 24618 - protein, 123 aa, Artificial Sequence
  source: /note="Description of Artificial Sequence: Synthetic polypeptide"
QVQLQESGPGLVTPSETLSVTCTVSNYSIDNAYYWGWIRQPPGKGLEWIGSIHHSGSAYYNSSLKSRATISIDTSKNQFSLNLRSVTAADTAVYYCARDTILTFGEPHWFDPWGQGTLVTVSS

SEQ ID NO: 24619 - protein, 124 aa, Artificial Sequence
  source: /note="Description of Artificial Sequence: Synthetic polypeptide"
QVQLQESGPGLVKPSETLSLTCTVSGDSISNYYWSWIRQPPGKGLEWIGEISNTWSTNYNPSLKSRVTISLDMPKNQLSLKLSSVTAADTAVYYCARGLFYDSGGYYLFYFQHWGQGTLVTVSS

SEQ ID NO: 24620 - protein, 125 aa, Artificial Sequence
  source: /note="Description of Artificial Sequence: Synthetic polypeptide"
QVQLVESGGGVVQPGRSLRVSCAASGFTFSNYGMHWVRQAPGKGLEWVAVIWYDDSNKQYGDSVKGRFTISRDNSKSTLYLQMDRLRVEDTAVYYCARASEYSISWRHRGVLDYWGQGTLVTVSS

SEQ ID NO: 24621 - protein, 126 aa, Artificial Sequence
  source: /note="Description of Artificial Sequence: Synthetic polypeptide"
QITLKESGPTLVRPTQTLTLTCTFSGFSLSTSKLGVGWIRQPPGKALEWLALVDWDDDRRYRPSLKSRLTVTKDTSKNQVVLTMTNMDPVDTATYYCAHSAYYTSSGYYLQYFHHWGPGTLVTVSS

SEQ ID NO: 24622 - protein, 125 aa, Artificial Sequence
  source: /note="Description of Artificial Sequence: Synthetic polypeptide"
EVQLVESGGGVVQPGGSLRLSCEVSGFTFNSYEMTWVRQAPGKGLEWVSHIGNSGSMIYYADSVKGRFTISRDNAKNSLYLQMNSLRVEDTAVYYCARSDYYDSSGYYLLYLDSWGHGTLVTVSS

SEQ ID NO: 24623 - protein, 120 aa, Artificial Sequence
  source: /note="Description of Artificial Sequence: Synthetic polypeptide"
QVQLVQSGAEVRKPGASVKVSCKASGHTFINFAMHWVRQAPGQGLEWMGYINAVNGNTQYSQKFQGRVTFTRDTSANTAYMELSSLRSEDTAVYYCARNNGGSAIIFYYWGQGTLVTVSS

SEQ ID NO: 24624 - protein, 122 aa, Artificial Sequence
  source: /note="Description of Artificial Sequence: Synthetic polypeptide"
QVQLVESGGGVVQPGRSLRLSCAASGFSFSSYGMHWVRQAPGKGLEWVAVISNDGSNKYYADSVKGRFTISRDNSKKTMYLQMNSLRAEDTAVYFCAKTTDQRLLVDWFDPWGQGTLVTVSS

SEQ ID NO: 24625 - protein, 122 aa, Artificial Sequence
  source: /note="Description of Artificial Sequence: Synthetic polypeptide"
QVQLVESGGGVVQPGKSLRLSCAASGFRFSDYGMHWVRQAPSKGLEWVAVIWHDGSNIRYADSVRGRFSISRDNSKNTLYLQMNSMRADDTAFYYCARVPFQIWSGLYFDHWGQGTLVTVSS

SEQ ID NO: 24626 - protein, 124 aa, Artificial Sequence
  source: /note="Description of Artificial Sequence: Synthetic polypeptide"
EEQLLESGGGLVKPGGSLRLSCAASGFTFSSYSMNWVRQAPGKGLEWVSSISASSSYSDYADSAKGRFTISRDNAKTSLFLQMNSLRAEDTAIYFCARARATGYSSITPYFDIWGQGTLVTVSS

SEQ ID NO: 24627 - protein, 124 aa, Artificial Sequence
  source: /note="Description of Artificial Sequence: Synthetic polypeptide"
EVQLVESGGGLVKPGGSLRLSCAASGFTFSSYSMNWVRQAPGKGLEWVSSISASSSYSDYADSAKGRFTISRDNAKTSLFLQMNSLRAEDTAIYFCARARATGYSSITPYFDIWGQGTLVTVSS

SEQ ID NO: 24628 - protein, 122 aa, Artificial Sequence
  source: /note="Description of Artificial Sequence: Synthetic polypeptide"
EVHLVESGGGLVKPGGSLRLSCAASGFAFTGYGLNWVRQVPGKGLEWVSSITAGSSYIDYAESVKGRFTISRDNGKNTLFLQMSDLRADDTAVYYCARVASPLVRGLHLDYWGQGALVTVSS

SEQ ID NO: 24629 - protein, 122 aa, Artificial Sequence
  source: /note="Description of Artificial Sequence: Synthetic polypeptide"
EVQLVESGGGLVKPGGSLRLSCAASGFAFTGYGLNWVRQVPGKGLEWVSSITAGSSYIDYAESVKGRFTISRDNGKNTLFLQMSDLRADDTAVYYCARVASPLVRGLHLDYWGQGALVTVSS

SEQ ID NO: 24630 - protein, 124 aa, Artificial Sequence
  source: /note="Description of Artificial Sequence: Synthetic polypeptide"
EVQLVESGGGLVKPGGSLRLSCAASGFTFSSYSMNWVRQAPGKGLEWVSSISSSSSYIYYADSVKGRFTISRDNAKNSLYLQMNSLRAEDTAVYYCARARATGYNSITPYFDIWGQGTLVTVSS

SEQ ID NO: 24631 - protein, 122 aa, Artificial Sequence
  source: /note="Description of Artificial Sequence: Synthetic polypeptide"
EVQLVESGGGLVKPGGSLRLSCAASGFTFSSYSMNWVRQAPGKGLEWVSSISSSSSYIYYADSVKGRFTISRDNAKNSLYLQMNSLRAEDTAVYYCARVASPMVRGLHFDYWGQGTLVTVSS

SEQ ID NO: 24632 - protein, 120 aa, Artificial Sequence
  source: /note="Description of Artificial Sequence: Synthetic polypeptide"
QVTLRESGPALVKPTQTLTLTCTFSGFSLSTSGMSVGWIRQPPGKALEWLADIWWDDKKDYNPSLKSRLTISKDTSKNQVVLKVTNMDPADTATYYCARSMITNWYFDVWGAGTTVTVSS

SEQ ID NO: 24633 - protein, 124 aa, Artificial Sequence
  source: /note="Description of Artificial Sequence: Synthetic polypeptide"
QVQLVQSGAEVKKPGATVKVSCKISGHTLIKLSIHWVRQAPGKGLEWMGGYEGEVDEIFYAQKFQHRLTVIADTATDTVYMELGRLTSDDTAVYFCGTLGVTVTEAGLGIDDYWGQGTLVTVSS

SEQ ID NO: 24634 - protein, 123 aa, Artificial Sequence
  source: /note="Description of Artificial Sequence: Synthetic polypeptide"
LEESGGDLVQPGRSLRLSCSTSGFSFGDYPVNWFRQAPGKGLEWLGIVRSRLYGGTLQYAASVEGRFTISRDDSKSIAYLHMNSLKSEDTAVYYCGVPVANIDYWGQGTLVTVSSASTKGPSS

SEQ ID NO: 24635 - protein, 120 aa, Artificial Sequence
  source: /note="Description of Artificial Sequence: Synthetic polypeptide"
QVTLRESGPALVKPTQTLTLTCTFSGFSLSTSGMSVGWIRQPPGKALEWLADIWWDDKKDYNPSLKSRLTISKDTSKNQVVLKVTNMDPADTATYYCARSMITNWYFDVWGQGTTVTVSS

SEQ ID NO: 24636 - protein, 120 aa, Artificial Sequence; identical to SEQ ID NO: 24632
  source: /note="Description of Artificial Sequence: Synthetic polypeptide"

SEQ ID NO: 24637 - protein, 120 aa, Artificial Sequence
  source: /note="Description of Artificial Sequence: Synthetic polypeptide"
QVTLRESGPALVKPTQTLTLTCTFSGFSLSTAGMSVGWIRQPPGKALEWLADIWWDGKKSYNPSLKDRLTISKDTSKNQVVLKVTNMDPADTATYYCARDMIFNFYFDVWGQGTTVTVSS

SEQ ID NO: 24638 - protein, 450 aa, Artificial Sequence
  source: /note="Description of Artificial Sequence: Synthetic polypeptide"
QVTLRESGPALVKPTQTLTLTCTFSGFSLSTAGMSVGWIRQPPGKALEWLADIWWDGKKDYNPSLKDRLTISKDTSKNQVVLKVTNMDPADTATYYCARDMIFNFYFDVWGQGTTVTVSSASTKGPSVFPLAPSSKSTSGGTAALGCLVKDYFPEPVTVSWNSGALTSGVHTFPAVLQSSGLYSLSSVVTVPSSSLGTQTYICNVNHKPSNTKVDKRVEPKSCDKTHTCPPCPAPELLGGPSVFLFPPKPKDTLMISRTPEVTCVVVDVSHEDPEVKFNWYVDGVEVHNAKTKPREEQYNSTYRVVSVLTVLHQDWLNGKEYKCKVSNKALPAPIEKTISKAKGQPREPQVYTLPPSREEMTKNQVSLTCLVKGFYPSDIAVEWESNGQPENNYKTTPPVLDSDGSFFLYSKLTVDKSRWQQGNVFSCSVMHEALHNHYTQKSLSLSPGK

SEQ ID NO: 24639 - protein, 450 aa, Artificial Sequence
  source: /note="Description of Artificial Sequence: Synthetic polypeptide"
QVTLRESGPALVKPTQTLTLTCTFSGFSLSTAGMSVGWIRQPPGKALEWLADIWWDGKKSYNPSLKDRLTISKDTSKNQVVLKVTNMDPADTATYYCARDMIFNFYFDVWGQGTTVTVSSASTKGPSVFPLAPSSKSTSGGTAALGCLVKDYFPEPVTVSWNSGALTSGVHTFPAVLQSSGLYSLSSVVTVPSSSLGTQTYICNVNHKPSNTKVDKRVEPKSCDKTHTCPPCPAPELLGGPSVFLFPPKPKDTLMISRTPEVTCVVVDVSHEDPEVKFNWYVDGVEVHNAKTKPREEQYNSTYRVVSVLTVLHQDWLNGKEYKCKVSNKALPAPIEKTISKAKGQPREPQVYTLPPSREEMTKNQVSLTCLVKGFYPSDIAVEWESNGQPENNYKTTPPVLDSDGSFFLYSKLTVDKSRWQQGNVFSCSVMHEALHNHYTQKSLSLSPGK

SEQ ID NO: 24640 - protein, 450 aa, Artificial Sequence
  source: /note="Description of Artificial Sequence: Synthetic polypeptide"
QVTLRESGPALVKPTQTLTLTCTFSGFSLSTAGMSVGWIRQPPGKALEWLADIWWDDKKSYNPSLKDRLTISKDTSKNQVVLKVTNMDPADTATYYCARDMIFNFYFDVWGQGTTVTVSSASTKGPSVFPLAPSSKSTSGGTAALGCLVKDYFPEPVTVSWNSGALTSGVHTFPAVLQSSGLYSLSSVVTVPSSSLGTQTYICNVNHKPSNTKVDKRVEPKSCDKTHTCPPCPAPELLGGPSVFLFPPKPKDTLMISRTPEVTCVVVDVSHEDPEVKFNWYVDGVEVHNAKTKPREEQYNSTYRVVSVLTVLHQDWLNGKEYKCKVSNKALPAPIEKTISKAKGQPREPQVYTLPPSREEMTKNQVSLTCLVKGFYPSDIAVEWESNGQPENNYKTTPPVLDSDGSFFLYSKLTVDKSRWQQGNVFSCSVMHEALHNHYTQKSLSLSPGK

SEQ ID NO: 24641 - protein, 450 aa, Artificial Sequence
  source: /note="Description of Artificial Sequence: Synthetic polypeptide"
QVTLRESGPALVKPTQTLTLTCTFSGFSLSTAGMSVGWIRQPPGKALEWLADIWWDGKKHYNPSLKDRLTISKDTSKNQVVLKVTNMDPADTATYYCARDMIFNWYFDVWGQGTTVTVSSASTKGPSVFPLAPSSKSTSGGTAALGCLVKDYFPEPVTVSWNSGALTSGVHTFPAVLQSSGLYSLSSVVTVPSSSLGTQTYICNVNHKPSNTKVDKRVEPKSCDKTHTCPPCPAPELLGGPSVFLFPPKPKDTLMISRTPEVTCVVVDVSHEDPEVKFNWYVDGVEVHNAKTKPREEQYNSTYRVVSVLTVLHQDWLNGKEYKCKVSNKALPAPIEKTISKAKGQPREPQVYTLPPSREEMTKNQVSLTCLVKGFYPSDIAVEWESNGQPENNYKTTPPVLDSDGSFFLYSKLTVDKSRWQQGNVFSCSVMHEALHNHYTQKSLSLSPGK

SEQ ID NO: 24642 - protein, 450 aa, Artificial Sequence
  source: /note="Description of Artificial Sequence: Synthetic polypeptide"
QVTLRESGPALVKPTQTLTLTCTFSGFSLSTAGMSVGWIRQPPGKALEWLADIWWDDKKHYNPSLKDRLTISKDTSKNQVVLKVTNMDPADTATYYCARDMIFNFYFDVWGQGTTVTVSSASTKGPSVFPLAPSSKSTSGGTAALGCLVKDYFPEPVTVSWNSGALTSGVHTFPAVLQSSGLYSLSSVVTVPSSSLGTQTYICNVNHKPSNTKVDKRVEPKSCDKTHTCPPCPAPELLGGPSVFLFPPKPKDTLMISRTPEVTCVVVDVSHEDPEVKFNWYVDGVEVHNAKTKPREEQYNSTYRVVSVLTVLHQDWLNGKEYKCKVSNKALPAPIEKTISKAKGQPREPQVYTLPPSREEMTKNQVSLTCLVKGFYPSDIAVEWESNGQPENNYKTTPPVLDSDGSFFLYSKLTVDKSRWQQGNVFSCSVMHEALHNHYTQKSLSLSPGK

SEQ ID NO: 24643 - protein, 450 aa, Artificial Sequence
  source: /note="Description of Artificial Sequence: Synthetic polypeptide"
QVTLRESGPALVKPTQTLTLTCTFSGFSLSTAGMSVGWIRQPPGKALEWLADIWWDDKKSYNPSLKDRLTISKDTSKNQVVLKVTNMDPADTATYYCARDMIFNWYFDVWGQGTTVTVSSASTKGPSVFPLAPSSKSTSGGTAALGCLVKDYFPEPVTVSWNSGALTSGVHTFPAVLQSSGLYSLSSVVTVPSSSLGTQTYICNVNHKPSNTKVDKRVEPKSCDKTHTCPPCPAPELLGGPSVFLFPPKPKDTLMISRTPEVTCVVVDVSHEDPEVKFNWYVDGVEVHNAKTKPREEQYNSTYRVVSVLTVLHQDWLNGKEYKCKVSNKALPAPIEKTISKAKGQPREPQVYTLPPSREEMTKNQVSLTCLVKGFYPSDIAVEWESNGQPENNYKTTPPVLDSDGSFFLYSKLTVDKSRWQQGNVFSCSVMHEALHNHYTQKSLSLSPGK

SEQ ID NO: 24644 - protein, 450 aa, Artificial Sequence
  source: /note="Description of Artificial Sequence: Synthetic polypeptide"
QVTLRESGPALVKPTQTLTLTCTFSGFSLSTPGMSVGWIRQPPGKALEWLADIWWDGKKHYNPSLKDRLTISKDTSKNQVVLKVTNMDPADTATYYCARDMIFNWYFDVWGQGTTVTVSSASTKGPSVFPLAPSSKSTSGGTAALGCLVKDYFPEPVTVSWNSGALTSGVHTFPAVLQSSGLYSLSSVVTVPSSSLGTQTYICNVNHKPSNTKVDKRVEPKSCDKTHTCPPCPAPELLGGPSVFLFPPKPKDTLMISRTPEVTCVVVDVSHEDPEVKFNWYVDGVEVHNAKTKPREEQYNSTYRVVSVLTVLHQDWLNGKEYKCKVSNKALPAPIEKTISKAKGQPREPQVYTLPPSREEMTKNQVSLTCLVKGFYPSDIAVEWESNGQPENNYKTTPPVLDSDGSFFLYSKLTVDKSRWQQGNVFSCSVMHEALHNHYTQKSLSLSPGK

SEQ ID NO: 24645 - protein, 450 aa, Artificial Sequence
  source: /note="Description of Artificial Sequence: Synthetic polypeptide"
QVTLRESGPALVKPTQTLTLTCTFSGFSLSTPGMSVGWIRQPPGKALEWLADIWWDDKKHYNPSLKDRLTISKDTSKNQVVLKVTNMDPADTATYYCARDMIFNFYFDVWGQGTTVTVSSASTKGPSVFPLAPSSKSTSGGTAALGCLVKDYFPEPVTVSWNSGALTSGVHTFPAVLQSSGLYSLSSVVTVPSSSLGTQTYICNVNHKPSNTKVDKRVEPKSCDKTHTCPPCPAPELLGGPSVFLFPPKPKDTLMISRTPEVTCVVVDVSHEDPEVKFNWYVDGVEVHNAKTKPREEQYNSTYRVVSVLTVLHQDWLNGKEYKCKVSNKALPAPIEKTISKAKGQPREPQVYTLPPSREEMTKNQVSLTCLVKGFYPSDIAVEWESNGQPENNYKTTPPVLDSDGSFFLYSKLTVDKSRWQQGNVFSCSVMHEALHNHYTQKSLSLSPGK

SEQ ID NO: 24646 - protein, 450 aa, Artificial Sequence
  source: /note="Description of Artificial Sequence: Synthetic polypeptide"
QVTLRESGPALVKPTQTLTLTCTFSGFSLSTPGMSVGWIRQPPGKALEWLADIWWDGKKHYNPSLKDRLTISKDTSKNQVVLKVTNMDPADTATYYCARDMIFNFYFDVWGQGTTVTVSSASTKGPSVFPLAPSSKSTSGGTAALGCLVKDYFPEPVTVSWNSGALTSGVHTFPAVLQSSGLYSLSSVVTVPSSSLGTQTYICNVNHKPSNTKVDKRVEPKSCDKTHTCPPCPAPELLGGPSVFLFPPKPKDTLMISRTPEVTCVVVDVSHEDPEVKFNWYVDGVEVHNAKTKPREEQYNSTYRVVSVLTVLHQDWLNGKEYKCKVSNKALPAPIEKTISKAKGQPREPQVYTLPPSREEMTKNQVSLTCLVKGFYPSDIAVEWESNGQPENNYKTTPPVLDSDGSFFLYSKLTVDKSRWQQGNVFSCSVMHEALHNHYTQKSLSLSPGK

SEQ ID NO: 24647 - protein, 117 aa, Artificial Sequence
  source: /note="Description of Artificial Sequence: Synthetic polypeptide"
QVQLVQSGAEVKKPGASVKVSCKASGFNIKDYYIYWVRQAPGQGLEWIGWIDPENGNTVFDPKFNGRVTMTRDTSTSTVYMELSSLRSEDTAVYYCAYYGTSSFDFWGQGTTLTVSS

SEQ ID NO: 24648 - protein, 117 aa, Artificial Sequence
  source: /note="Description of Artificial Sequence: Synthetic polypeptide"
EVQKQQSGAELVRPGALVKLSCKASGFNIKDYYIYWVKQRPEQGLEWIGWIDPENGNTVFDPLFQGKASITSDTSSNTAYLQLSSLTSEDTAVYYCAYYGTSSFDFWGQGTTLTVSS

SEQ ID NO: 24649 - protein, 123 aa, Artificial Sequence
  source: /note="Description of Artificial Sequence: Synthetic polypeptide"
QVTLRESGPALVKPTQTLTLTCTFSGFSLSSSGMCVGWIRQPPGKALEWLADIEWDDDKDYNTSLDTRLTISKDTSKNQVVLTVTNMDPADTATYYCARKTVIPAPAGYMDVWGRGRPVTVSS

SEQ ID NO: 24650 - protein, 120 aa, Artificial Sequence
  source: /note="Description of Artificial Sequence: Synthetic polypeptide"
QVELQESGPGILQPSQTLSLTCSFSGFSLSTSGMSVGWIRQPSGEGLEWLADIWWDDKKDYNPSLKSRKTISKDTSSNQVFLKITGVDTADTATYYCARSMITNWYFDVWGAGTTVTVSS

SEQ ID NO: 24651 - protein, 126 aa, Artificial Sequence
  source: /note="Description of Artificial Sequence: Synthetic polypeptide"
EVQLVESGGGLAQPGGSLTLACAASGFTFTSYNMHWVRQAPGKGLEWVSYITSNSLNIYYADSVKGRFTISRDNAKNSLYLRMHSLSDEDTSVYYCARDSSGSIGWSDPLDYWGQGTLVTVSSAGT

SEQ ID NO: 24652 - protein, 120 aa, Artificial Sequence
  source: /note="Description of Artificial Sequence: Synthetic polypeptide"
QVTLRESGPALVKPTQTLTLTCTFSGFSLSTAGMSVGWIRQPPGKALEWLADIWWDDKKDYNPSLKSRLTISKDTSKNQVVLKVTNMDPADTATYYCARSMITNFYFDVWGQGTTVTVSS

SEQ ID NO: 24653 - protein, 120 aa, Artificial Sequence; identical to SEQ ID NO: 24652
  source: /note="Description of Artificial Sequence: Synthetic polypeptide"

SEQ ID NO: 24654 - protein, 120 aa, Artificial Sequence
  source: /note="Description of Artificial Sequence: Synthetic polypeptide"
QVTLRESGPALVKPTQTLTLTCTFSGFSLSTPGMSVGWIRQPPGKALEWLADIWWDDKKDYNPSLKSRLTISKDTSKNQVVLKVTNMDPADTATYYCARSMITNFYFDVWGQGTTVTVSS

SEQ ID NO: 24655 - protein, 120 aa, Artificial Sequence; identical to SEQ ID NO: 24652
  source: /note="Description of Artificial Sequence: Synthetic polypeptide"

SEQ ID NO: 24656 - protein, 120 aa, Artificial Sequence; identical to SEQ ID NO: 24652
  source: /note="Description of Artificial Sequence: Synthetic polypeptide"

SEQ ID NO: 24657 - protein, 126 aa, Artificial Sequence
  source: /note="Description of Artificial Sequence: Synthetic polypeptide"
QVTLKESGPVLVKPTETLTLTCTVSGFSLSNARMGVSWIRQPPGKALEWLARIDWDDDKYYSTSLKTRLTISKDTPKNQVVLTMTNMDPVDTATYYCARNSYYDSSGYYLLYFDYWGQGTLVTVSS

SEQ ID NO: 24658 - protein, 97 aa, Artificial Sequence
  source: /note="Description of Artificial Sequence: Synthetic polypeptide"
QVQLVQSGAEVKKPGASVKVSCKASGYTFNSYYMHWVRQAPGQGLEWMGIINPSGGSTSYAQKFQGRVTMTRDTSTSTVYMELSSLRSEDTAVYYCA

SEQ ID NO: 24659 - protein, 109 aa, Artificial Sequence
  source: /note="Description of Artificial Sequence: Synthetic polypeptide"
DIQLTQSPSSLSASVGDRVTITCSGSSSNIGRWGVNWYQQKPGKAPKLLIYYESSRPSGVPSRFSGSGSGTDFTFTISSLQPEDIATYYCATGDYNIAVFGQGTKLEIK

SEQ ID NO: 24660 - protein, 111 aa, Artificial Sequence
  source: /note="Description of Artificial Sequence: Synthetic polypeptide"
DIQLTQSPSSLSASVGDRVTITCSGSSDNIGIFAVGWYQQKPGKAPKLLIYGNTKRPSGVPSRFSGSGSGTDFTFTISSLQPEDIATYYCVCGESKSATPVFGQGTKLEIK

SEQ ID NO: 24661 - protein, 228 aa, Artificial Sequence
  source: /note="Description of Artificial Sequence: Synthetic polypeptide"
QVQLVQSGPGLVKPSQTLALTCNVSGASINSDNYYWTWIRQRPGGGLEWIGHISYTGNTYYTPSLKSRLSMSLETSQSQFSLRLTSVTAADSAVYFCAACGAYVLISNCGWFDSWGQGTQVTVSSASTKGPSVFPLAPSSKSTSGGTAALGCLVKDYFPEPVTVSWNSGALTSGVHTFPAVLQSSGLYSLSSVVTVPSSSLGTQTYICNVNHKPSNTKVDKKVEPKSC

SEQ ID NO: 24662 - protein, 228 aa, Artificial Sequence
  source: /note="Description of Artificial Sequence: Synthetic polypeptide"
QVQLQESGPGLVKPSGTLSLTCTVSGDSISGSNWWNWVRQPPGKGLEWIGEIYYRGTTNYKSSLKGRVTMSVDTSKNQFSLKLTSVTAADTAVYYCARGGRSTFGPDYYYYMDVWGRGTTVTVSSASTKGPSVFPLAPSSKSTSGGTAALGCLVKDYFPEPVTVSWNSGALTSGVHTFPAVLQSSGLYSLSSVVTVPSSSLGTQTYICNVNHKPSNTKVDKKVEPKSC

SEQ ID NO: 24663 - protein, 120 aa, Artificial Sequence
  source: /note="Description of Artificial Sequence: Synthetic polypeptide"
QITLKESGPTLVKPTQTLTLTCTFSGFSLSTSGMGVSWIRQPPGKALEWLAHLYWDDDKRYNPSLKSRLTITKDTSKNQVVLTMTNMDPVDTATYYCARLYGFTYGFAYWGQGTLVTVSS

SEQ ID NO: 24664 - protein, 120 aa, Artificial Sequence
  source: /note="Description of Artificial Sequence: Synthetic polypeptide"
QITLKESGPTLVKPTQTLTLTCTFSGFSLSTSGMGVSWIRQPPGKALEWLAHIYWDDDKRYNPSLKSRLTITKDTSKNQVVLTMTNMDPVDTATYYCARLWGFRYGFAYWGQGTLVTVSS

SEQ ID NO: 24665 - protein, 120 aa, Artificial Sequence
  source: /note="Description of Artificial Sequence: Synthetic polypeptide"
QITLKESGPTLVKPTQTLTLTCTFSGFSLSTSGMGVSWIRQPPGKALEWLAHIYWDDDKRYNPSLKSRLTITKDTSKNQVVLTMTNMDPVDTATYYCARLWGFKYGFAYWGQGTLVTVSS

SEQ ID NO: 24666 - protein, 120 aa, Artificial Sequence
  source: /note="Description of Artificial Sequence: Synthetic polypeptide"
QITLKESGPTLVKPTQTLTLTCTFSGFSLSTSGMGVSWIRQPPGKALEWLAHIYWDDDKRYNPSLKSRLTITKDTSKNQVVLTMTNMDPVDTATYYCARLWGFAYGFAYWGQGTLVTVSS

SEQ ID NO: 24667 - protein, 120 aa, Artificial Sequence
  source: /note="Description of Artificial Sequence: Synthetic polypeptide"
QITLKESGPTLVKPTQTLTLTCTFSGFSLSTSGMGVSWIRQPPGKALEWLAHIYWDDDKRYNPSLKSRLTITKDTSKNQVVLTMTNMDPVDTATYYCARLYGFRYGFAYWGQGTLVTVSS

SEQ ID NO: 24668 - protein, 120 aa, Artificial Sequence
  source: /note="Description of Artificial Sequence: Synthetic polypeptide"
QITLKESGPTLVKPTQTLTLTCTFSGFSLSTSGMGVSWIRQPPGKALEWLAHIYWDDDKRYNPSLKSRLTITKDTSKNQVVLTMTNMDPVDTATYYCARLYGFKYGFAYWGQGTLVTVSS

SEQ ID NO: 24669 - protein, 120 aa, Artificial Sequence
  source: /note="Description of Artificial Sequence: Synthetic polypeptide"
QITLKESGPTLVKPTQTLTLTCTFSGFSLSTSGMGVSWIRQPPGKALEWLAHIYWDDDKRYNPSLKSRLTITKDTSKNQVVLTMTNMDPVDTATYYCARLYGFAYGFAYWGQGTLVTVSS

SEQ ID NO: 24670 - protein, 119 aa, Artificial Sequence
  source: /note="Description of Artificial Sequence: Synthetic polypeptide"
EVQLVESGGGLVQPGGSLRLSCAASGVSLSGYKMNWVRQAPGKGLEWVSSITGMSNYIHYSDSVKGRFTISRDNAMNSLYLQMNSLTAEDTGVYYCATQPGELAPFDHWGQGTLVTVSS

SEQ ID NO: 24671 - protein, 138 aa, Artificial Sequence
  source: /note="Description of Artificial Sequence: Synthetic polypeptide"
MGWSCIILFLVATATGVHSEVQLLESGGGLVQPGGSLRLSCAASGVSLSGYKMNWVRQAPGKGLEWVSSITGMSNYIHYSDSVKGRFTISRDNAMNSLYLQMNSLTAEDTGVYYCATQPGELAPFDHWGQGTLVTVSS

SEQ ID NO: 24672 - protein, 138 aa, Artificial Sequence
  source: /note="Description of Artificial Sequence: Synthetic polypeptide"
MGWSCIILFLVATATGVHSEVQLVESGGGLVQPGGSLRLSCAASGVSLSGYKMNWVRQAPGKGLEWVSSITGMSNYIHYSDSVKGRFTISRDNAMNSLYLQMNSLTAEDTGVYYCATQPGELAPFDHWGQGTLVTVSS

SEQ ID NO: 24673 - protein, 139 aa, Artificial Sequence
  source: /note="Description of Artificial Sequence: Synthetic polypeptide"
MGWSCIILFLVATATGVHSEVQLLEVESGGGLRPGGSLRLSCAASGTTLSGYTMHWVRQAPGKGLEWVSSITGGSNFINYSDSVKGRFTISRDNAKNSLYLQMNSLTAEDTAVYYCATAPIAPPYFDHWGQGTLVTVSS

SEQ ID NO: 24674 - protein, 138 aa, Artificial Sequence
  source: /note="Description of Artificial Sequence: Synthetic polypeptide"
MEFGLSWVFLVALLRGVQCQVQLVVESGGGLRPGGSLRLSCAASGTTLSGYTMHWVRQAPGKGLEWVSSITGGSNFINYSDSVKGRFTISRDNAKNSLYLQMNSLTAEDTAVYYCATAPIAPPYFDHWGQGTLVTVSS

SEQ ID NO: 24675 - protein, 138 aa, Artificial Sequence
  source: /note="Description of Artificial Sequence: Synthetic polypeptide"
MEFGLSWVFLVALLRGVQCQVQLVVESGGGLRPGGSLRLSCAASGTTLSGYTMHWVRQAPGKGLEWVSSITGGSNFINYADSVKGRFTISRDNAKNSLYLQMNSLTAEDTAVYYCATAPIAPPYFDHWGQGTLVTVSS

SEQ ID NO: 24676 - protein, 138 aa, Artificial Sequence
  source: /note="Description of Artificial Sequence: Synthetic polypeptide"
MEFGLSWVFLVALLRGVQCQVQLVVESGGGLRPGGSLRLSCAASGTTLSGYTMHWVRQAPGKGLEWVSSITGGSNFIQYSDSVKGRFTISRDNAKNSLYLQMNSLTAEDTAVYYCATAPIAPPYFDHWGQGTLVTVSS

SEQ ID NO: 24677 - protein, 129 aa, Artificial Sequence
  source: /note="Description of Artificial Sequence: Synthetic polypeptide"
QVQLQESGPGLVRPSQTLSLTCTVSGFSLSSYSVSWVRQPPGRGLEWLGDASNGGIIYYNPALKSRVTMLRDTSKNQFSLRLSSVTAADTAVYYCAKCSVGDSGSYACTGRKGEYVDAWGQGTTVTVSS

SEQ ID NO: 24678 - protein, 133 aa, Artificial Sequence
  source: /note="Description of Artificial Sequence: Synthetic polypeptide"
  MOD_RES (120)..(120): Any amino acid
QVQLQESGPGLVRPSQTLSLTCTVSGLSLSDHNVGWVRQPPGRGLEWLGVIYKEGDKDYNPALKSRVTMLKDTSKNQFSLRLSSVTAADTAVYYCATLGCYFVEGVGYDCTYGLQHTTFXDAWGQGTTVTVSS

SEQ ID NO: 24679 - protein, 116 aa, Artificial Sequence
  source: /note="Description of Artificial Sequence: Synthetic polypeptide"
  MOD_RES (6)..(6): Any amino acid
QVQLQXSGTELERSGASVKLSCTASGFNIKDYYMHWMKQRPDQGLEWIGWIDPENDDVQYAPKFQGKATMTADTSSNTAYLQLTSLTFEDTAVYFCNSWGSDFDHWGQGTTVTVSS

SEQ ID NO: 24680 - protein, 115 aa, Artificial Sequence
  source: /note="Description of Artificial Sequence: Synthetic polypeptide"
QVQLQESGPGLVRPSQTLSLTCTVSGFTESDYYMHWVRQPPGRGLEWIGWIDPENDDVQYAPKFQGRVTMLVDTSKNQFSLRLSSVTAADTAVYCARWGSDFDHWGQGTTVTVSS

SEQ ID NO: 24681 - protein, 116 aa, Artificial Sequence
  source: /note="Description of Artificial Sequence: Synthetic polypeptide"
QVQLQESGPGLVRPSQTLSLTCTVSGFTMEDYYMHWVRQPPGRGLEWIGWIDPENDDVQYAPKFQGRVTMLVDTSKNQFSLRLSSVTAADTAVYFCNSWGSDFDHWGQGTTVTVSS

SEQ ID NO: 24682 - protein, 450 aa, Artificial Sequence; identical to SEQ ID NO: 24645
  source: /note="Description of Artificial Sequence: Synthetic polypeptide"

SEQ ID NO: 24683 - protein, 450 aa, Artificial Sequence; identical to SEQ ID NO: 24645
  source: /note="Description of Artificial Sequence: Synthetic polypeptide"

SEQ ID NO: 24684 - protein, 450 aa, Artificial Sequence; identical to SEQ ID NO: 24644
  source: /note="Description of Artificial Sequence: Synthetic polypeptide"

SEQ ID NO: 24685 - protein, 450 aa, Artificial Sequence; identical to SEQ ID NO: 24641
  source: /note="Description of Artificial Sequence: Synthetic polypeptide"

SEQ ID NO: 24686 - protein, 450 aa, Artificial Sequence; identical to SEQ ID NO: 24638
  source: /note="Description of Artificial Sequence: Synthetic polypeptide"

SEQ ID NO: 24687 - protein, 450 aa, Artificial Sequence; identical to SEQ ID NO: 24639
  source: /note="Description of Artificial Sequence: Synthetic polypeptide"

SEQ ID NO: 24688 - protein, 450 aa, Artificial Sequence; identical to SEQ ID NO: 24639
  source: /note="Description of Artificial Sequence: Synthetic polypeptide"

SEQ ID NO: 24689 - protein, 450 aa, Artificial Sequence; identical to SEQ ID NO: 24642
  source: /note="Description of Artificial Sequence: Synthetic polypeptide"

SEQ ID NO: 24690 - protein, 450 aa, Artificial Sequence; identical to SEQ ID NO: 24643
  source: /note="Description of Artificial Sequence: Synthetic polypeptide"

SEQ ID NO: 24691 - protein, 451 aa, Artificial Sequence
  source: /note="Description of Artificial Sequence: Synthetic polypeptide"
QVTLRESGPALVKPTQTLTLTCTFSGFSLSTSGMSVGYWIRQPPGKALEWLADIWWDDKKDYNPSLKSRLTISKDTSKNQVVLKVTNMDPADTATYYCARSMITNWYFDVWGQGTTVTVSSASTKGPSVFPLAPSSKSTSGGTAALGCLVKDYFPEPVTVSWNSGALTSGVHTFPAVLQSSGLYSLSSVVTVPSSSLGTQTYICNVNHKPSNTKVDKRVEPKSCDKTHTCPPCPAPELLGGPSVFLFPPKPKDTLMISRTPEVTCVVVDVSHEDPEVKFNWYVDGVEVHNAKTKPREEQYNSTYRVVSVLTVLHQDWLNGKEYKCKVSNKALPAPIEKTISKAKGQPREPQVYTLPPSREEMTKNQVSLTCLVKGFYPSDIAVEWESNGQPENNYKTTPPVLDSDGSFFLYSKLTVDKSRWQQGNVFSCSVMHEALHNHYTQKSLSLSPGK

SEQ ID NO: 24692 - protein, 106 aa, Artificial Sequence
  source: /note="Description of Artificial Sequence: Synthetic polypeptide"
DIQMTQSPSTLSASVGDRVTITCSASSSVGYMHWYQQKPGKAPKLLIYDTYKQTSGVPSRFSGSGSGTEFTLTISSLQPDDFATYYCFQGSGYPFTFGGGTKLEIK

SEQ ID NO: 24693 - protein, 120 aa, Artificial Sequence
  source: /note="Description of Artificial Sequence: Synthetic polypeptide"
QITLKESGPTLVKPTQTLTLTCTFSGFSLSTSGMGVSWIRQPPGKALEWLAHIYWDDDKRYNPSLKSRLTITKDTSKNQVVLTMTNMDPVDTATYYCARLYGFTYGFAYWGQGTLVTVSS

SEQ ID NO: 24694 - protein, 120 aa, Artificial Sequence
  source: /note="Description of Artificial Sequence: Synthetic polypeptide"
QVTLKESGPGILQPSQTLSLTCSFSGFSLSTSGMGVSWIRQPSGKGLEWLAHIYWDDDKRYNPSLKSRLTISKDTSRNQVFLKITSVDTADTATYYCARLYGFTYGFAYWGQGTLVTVSA

SEQ ID NO: 24695 - protein, 118 aa, Artificial Sequence
  source: /note="Description of Artificial Sequence: Synthetic polypeptide"
EVQLQQSGAELVRPGALVKLSCKASGFNIKDYYMYWVKQRPEQGLEWIGWIDPENGNTVYDPKFQGKASITADTSSNTAYLQLSSLASEDTAVYYCAYYGTSYWFPYWGQGTLVTVSA

SEQ ID NO: 24696 - protein, 120 aa, Artificial Sequence
  source: /note="Description of Artificial Sequence: Synthetic polypeptide"
QVTLRESGPALVKPTQTLTLTCTFSGFSLSTPGMSVGWIRQPPGKALEWLADIWWDDKKHYNPSLKDRLTISKDTSKNQVVLKVTNMDPADTATYYCARDMIFNFYFDVWGAGTTVTVSS

SEQ ID NO: 24697 - protein, 120 aa, Artificial Sequence
  source: /note="Description of Artificial Sequence: Synthetic polypeptide"
QVTLRESGPALVKPTQTLTLTCTFSGFSLSTPGMSVGWIRQPPGKALEWLADIWWDGKKHYNPSLKDRLTISKDTSKNQVVLKVTNMDPADTATYYCARDMIFNFYFDVWGQGTTVTVSS

SEQ ID NO: 24698 - protein, 120 aa, Artificial Sequence
  source: /note="Description of Artificial Sequence: Synthetic polypeptide"
QVTLRESGPALVKPTQTLTLTCTFSGFSLSTPGMSVGWIRQPPGKALEWLADIWWDGKKHYNPSLKDRLTISKDTSKNQVVLKVTNMDPADTATYYCARDMIFNWYFDVWGQGTTVTVSS

SEQ ID NO: 24699 - protein, 120 aa, Artificial Sequence; identical to SEQ ID NO: 24698
  source: /note="Description of Artificial Sequence: Synthetic polypeptide"

SEQ ID NO: 24700 - protein, 120 aa, Artificial Sequence
  source: /note="Description of Artificial Sequence: Synthetic polypeptide"
QVTLRESGPALVKPTQTLTLTCTFSGFSLSTAGMSVGWIRQPPGKALEWLADIWWDGKKDYNPSLKDRLTISKDTSKNQVVLKVTNMDPADTATYYCARDMIFNFYFDVWGQGTTVTVSS

SEQ ID NO: 24701 - protein, 120 aa, Artificial Sequence; identical to SEQ ID NO: 24637
  source: /note="Description of Artificial Sequence: Synthetic polypeptide"

SEQ ID NO: 24702 - protein, 120 aa, Artificial Sequence; identical to SEQ ID NO: 24637
  source: /note="Description of Artificial Sequence: Synthetic polypeptide"

SEQ ID NO: 24703 - protein, 120 aa, Artificial Sequence [sequence omitted]

SEQ ID NO: 24704 - protein, 120 aa, Artificial Sequence
  source: /note="Description of Artificial Sequence: Synthetic polypeptide"
QVTLRESGPALVKPTQTLTLTCTFSGFSLSTAGMSVGWIRQPPGKALEWLADIWWDDKKSYNPSLKDRLTISKDTSKNQVVLKVTNMDPADTATYYCARDMIFNWYFDVWGQGTTVTVSS

SEQ ID NO: 24705 - protein, 213 aa, Artificial Sequence
  source: /note="Description of Artificial Sequence: Synthetic polypeptide"
DIQMTQSPSTLSASVGDRVTITCSASSSVGYMHWYQQKPGKAPKLLIYDTSKLASGVPSRFSGSGSGTEFTLTISSLQPDDFATYYCFQGSGYPFTFGGGTKVEIKRTVAAPSVFIFPPSDEQLKSGTASVVCLLNNFYPREAKVQWKVDNALQSGNSQESVTEQDSKDSTYSLSSTLTLSKADYEKHKVYACEVTHQGLSSPVTKSFNRGEC

SEQ ID NO: 24706 - protein, 122 aa, Artificial Sequence
  source: /note="Description of Artificial Sequence: Synthetic polypeptide"
QVQLVQSGAEVKKPGSSVKVSCKASGGTLSNNAFSWVRQAPGQGLEWLGGFNPIFDTANYAQKFQGRITITLDASTGTVYMELSSLRSEDTGVYYCAGTGAHFEFWGQGTLVTVSSASTKGP

SEQ ID NO: 24707 - protein, 122 aa, Artificial Sequence
  source: /note="Description of Artificial Sequence: Synthetic polypeptide"
QVQLVESGGGVVQPGRSLRLSCAASGFTFNSYGMHWVRQAPGKGLEWVTFIWSDGSNKYYLDSVKGRFTISRDNSKNTLYLQMNSLRAEDTAVYYCARSGLASYYYYGMDVWGQGTTVTVSS

SEQ ID NO: 24708 - protein, 122 aa, Artificial Sequence
  source: /note="Description of Artificial Sequence: Synthetic polypeptide"
QVQLVESGGGVVQPGRSLRLSCAASGFTFSSYGMHWVRQAPGKGLEWVVFLWYDGSNKHYADSVKGRFTISRDNSKNTLYLQMNSLRAEDTAVYYCARSGLASYYYYSMDVWGQGTTVTVSS

SEQ ID NO: 24709 - protein, 118 aa, Artificial Sequence
  source: /note="Description of Artificial Sequence: Synthetic polypeptide"
QVQLVQSGAEVKKPGASVKVSCKASGYTLTGYYLHWVRQAPGQGLEWMGWINPTSGGTNYAQKFQGRVTMTRDTSISAAFMELSRLRSDDTAVYHCAREFWPHGMDVWGQGTTVTVSS

SEQ ID NO: 24710 - protein, 126 aa, Artificial Sequence
  source: /note="Description of Artificial Sequence: Synthetic polypeptide"
EVQLVESGGGLVHPGGSLRLSCEASGFTLSSHVMSWVRQVPGKGLEWVSRISGPGGSTKYADSVQGRFTTSRDNSKNTLYLQMNSLIAEDSAAYYCAKGGGYSGYDWDFYYGMDVWGQGTTVTVSS

SEQ ID NO: 24711 - protein, 122 aa, Artificial Sequence
  source: /note="Description of Artificial Sequence: Synthetic polypeptide"
QVQLVQSGAEVKKSGSSVKVSCKASGGTFSSYAISWVRQAPGQGLEWMGGIIPIFGTGNYAQKFQGRVTITTDESTSTAYMELSSLRSEDTAVYYCARDSSSSPRYYGMDVWGHGTTVTVSS

SEQ ID NO: 24712 - protein, 125 aa, Artificial Sequence
  source: /note="Description of Artificial Sequence: Synthetic polypeptide"
EVQLVESGGGLVQPGGSLRLSCEASGFTFSTYWMSWVRQAPGKGLEWVANIKQDGSVKYFVDSVKGRFTVSRDNAKNSLYLQMNSLRAEDTALYHCARERHRGSYYGYYDGMDVWGQGTTVTVSS

SEQ ID NO: 24713 - protein, 123 aa, Artificial Sequence
  source: /note="Description of Artificial Sequence: Synthetic polypeptide"
EVQLVESGGGLVQPGRSLRLSCAASGFTFDDYAMHWVRQTPGKGLEWISGISWSSGTIVYADSVKGRFTISRDNAKNSLYLQMNSLRGEDTALYHCAKDGYRWKSYSYGLDVWGQGTTVTVSS

SEQ ID NO: 24714 - protein, 123 aa, Artificial Sequence
  source: /note="Description of Artificial Sequence: Synthetic polypeptide"
EVQLVESGGDLVQPGRSLRLSCVASGFTFDDYAMHWVRQAPGKGLEWVSGVSWSGSTVGYADSVKGRFTVSRDNAQKSLYLQMNSLRAEDTALYYCVKDAYKWNYYYYGLDVWGQGTTVTVSS

SEQ ID NO: 24715 - protein, 123 aa, Artificial Sequence
  source: /note="Description of Artificial Sequence: Synthetic polypeptide"
EVQLVESGGGLVQPGGSLRLSCGASGFTFRDFDMNWVRQAPGRGLEWVSGIGGSGGNTYYADSVKGRFTISRDNSKNTLFLQMSSLRAEDTAVYYCVKDPYGDYRNYYGMDVWGQGTTVTVSS

SEQ ID NO: 24716 - protein, 123 aa, Artificial Sequence
  source: /note="Description of Artificial Sequence: Synthetic polypeptide"
EVQLVESGGGLGQPGGSLRLSCGASGFMFRNYAMSWVRQAPGKGLEWVSTILDSGDNTYYADSVKGRFTISRDNSKNTLYLQMNSLRAEDTAVYYCAKDPYGDYRDYYGMDVWGQGTTVTVSS

SEQ ID NO: 24717 - protein, 128 aa, Artificial Sequence
  source: /note="Description of Artificial Sequence: Synthetic polypeptide"
QVQLQESGPGLVKPSETLSLTCTVSGGSISGYYWTWIRQPPGKGLEWIGYIYYSGATNYNPSLKSRVTISLDTSKNQFSLKLSSVTAADTAVYYCARDGNYDILTGYYNYHYYGMDVWGQGTTVTVSS

SEQ ID NO: 24718 - protein, 122 aa, Artificial Sequence
  source: /note="Description of Artificial Sequence: Synthetic polypeptide"
QVQLVESGGGLVKPGGSLRLSCAASGFTFSDYYMTWIRQAPGRGLEWVSYISDTGSHLYYADSVRGRFTISRDNAKNSLYLQMNNLRAEDTAVYYCARDQDGEMELRFFDYWGQGTLVTVSS

SEQ ID NO: 24719 - protein, 127 aa, Artificial Sequence
  source: /note="Description of Artificial Sequence: Synthetic polypeptide"
QVQLQESGPGLVKPSETLSLTCTVSGGFISNYYWSWIRQPPGKGLEWIGYIYYSGSTKYNPSLKSRVTISVDTSKNQFSLKLSSVSAADTAVYYCARDGVVAAAGPPYHYHYGLDVWGQGTTVTVSS

SEQ ID NO: 24720 - protein, 124 aa, Artificial Sequence
  source: /note="Description of Artificial Sequence: Synthetic polypeptide"
QVQLVESGGGLVKPGGSLRLSCAASGFTFSDYYMTWIRQVPGKGLEWVSYISSTGNNRYYGDSVKGRFAISRDNAKNLLFLQMNSLKAEDTAVYYCARENNWNPYFFYYGMDVWGQGTTVTVSS

SEQ ID NO: 24721 - protein, 117 aa, Artificial Sequence
  source: /note="Description of Artificial Sequence: Synthetic polypeptide"
QVQLVESGGGVVQPGRSLRLSCAASGFTFSSYGMHWVRQAPGKGLEWVAVIYYEGSNDYYVDSVKGRFTISRDNSKNTLYLQMNSLRAEDTAVYYCARRDWNSFDYWGQGTLVTVSS

SEQ ID NO: 24722 - protein, 123 aa, Artificial Sequence
  source: /note="Description of Artificial Sequence: Synthetic polypeptide"
EVQLVESGGDLVQPGRSLRLSCVASGFTFDDYAMHWVRQAPGKGLEWVSGVSWSGSTVGYADSVKGRFTVSRDNAQKSLYLQMNSLRAEDTALYYCVKDAYKYNYYYYGLDVWGQGTTVTVSS

SEQ ID NO: 24723 - protein, 123 aa, Artificial Sequence
  source: /note="Description of Artificial Sequence: Synthetic polypeptide"
EVQLVESGGDLVQPGRSLRLSCVASGFTFDDYAMHWVRQAPGKGLEWVSGVSWSGSTVGYADSVKGRFTVSRDNAQKSLYLQMNSLRAEDTALYYCVKDAYKFNYYYYGLDVWGQGTTVTVSS

SEQ ID NO: 24724 - protein, 123 aa, Artificial Sequence
  source: /note="Description of Artificial Sequence: Synthetic polypeptide"
QVQLEQSGAEVKKPGASVRISCKASGDTFTGYYINWVRQAPGQGLEWMGWINTNSGGTYFSQKFQVRVILTRDTSINTAYMELSRLRSDDTAVYYCARMFYDILTNSDIFDIWGQGTMVTVSS

SEQ ID NO: 24725 - protein, 115 aa, Artificial Sequence
  source: /note="Description of Artificial Sequence: Synthetic polypeptide"
QVQLQQWGAGLLKPSETLSLTCAVYGGSLSDYYWSWIRQPPGKGLEWIGEINHSGDTNYDPSLKSRLTISVDTSKNQFSLKLNSVTAADTAVYYCASLYFNFWMWGRGALVTVSS

SEQ ID NO: 24726 - protein, 123 aa, Artificial Sequence
  source: /note="Description of Artificial Sequence: Synthetic polypeptide"
QVQLEQSGAEVKKPGTSVRISCKASGDIFTGYYMNWVRQAPGQGLEWMGWINTNSGGTYFSQRFQGRVTLTRDTSIRTAYMELSRLRSDDTAVYYCARMFYDILTGSDVFDIWGQGTMVTVSS

SEQ ID NO: 24727 - protein, 128 aa, Artificial Sequence
  source: /note="Description of Artificial Sequence: Synthetic polypeptide"
EVQLVESGGGLVQPGGSLRLSCAASGFTISNYEMNWVRQAPGKGLEWVSYISTSGITIYYADSVQGRFTISRDNAKNSLYLQLNSLRAEDTAVYYCARGYCTNGVCYPHYYYSDMDVWGQGTTVTVSS

SEQ ID NO: 24728 - protein, 122 aa, Artificial Sequence; identical to SEQ ID NO: 24583
  source: /note="Description of Artificial Sequence: Synthetic polypeptide"

SEQ ID NO: 24729 - protein, 129 aa, Artificial Sequence; identical to SEQ ID NO: 24584
  source: /note="Description of Artificial Sequence: Synthetic polypeptide"

SEQ ID NO: 24730 - protein, 125 aa, Artificial Sequence; identical to SEQ ID NO: 24585
  source: /note="Description of Artificial Sequence: Synthetic polypeptide"

SEQ ID NO: 24731 - protein, 127 aa, Artificial Sequence; identical to SEQ ID NO: 24586
  source: /note="Description of Artificial Sequence: Synthetic polypeptide"

SEQ ID NO: 24732 - protein, 126 aa, Artificial Sequence; identical to SEQ ID NO: 24587
  source: /note="Description of Artificial Sequence: Synthetic polypeptide"

SEQ ID NO: 24733 - protein, 124 aa, Artificial Sequence; identical to SEQ ID NO: 24588
  source: /note="Description of Artificial Sequence: Synthetic polypeptide"

SEQ ID NO: 24734 - protein, 123 aa, Artificial Sequence; identical to SEQ ID NO: 24589
  source: /note="Description of Artificial Sequence: Synthetic polypeptide"

SEQ ID NO: 24735 - protein, 122 aa, Artificial Sequence; identical to SEQ ID NO: 24590
  source: /note="Description of Artificial Sequence: Synthetic polypeptide"

SEQ ID NO: 24736 - protein, 116 aa, Artificial Sequence; identical to SEQ ID NO: 24591
  source: /note="Description of Artificial Sequence: Synthetic polypeptide"

SEQ ID NO: 24737 - protein, 120 aa, Artificial Sequence; identical to SEQ ID NO: 24592
  source: /note="Description of Artificial Sequence: Synthetic polypeptide"

SEQ ID NO: 24738 - protein, 122 aa, Artificial Sequence; identical to SEQ ID NO: 24593
  source: /note="Description of Artificial Sequence: Synthetic polypeptide"

SEQ ID NO: 24739 - protein, 129 aa, Artificial Sequence; identical to SEQ ID NO: 24594
  source: /note="Description of Artificial Sequence: Synthetic polypeptide"

SEQ ID NO: 24740 - protein, 126 aa, Artificial Sequence; identical to SEQ ID NO: 24595
  source: /note="Description of Artificial Sequence: Synthetic polypeptide"

SEQ ID NO: 24741 - protein, 125 aa, Artificial Sequence; identical to SEQ ID NO: 24596
  source: /note="Description of Artificial Sequence: Synthetic polypeptide"

SEQ ID NO: 24742 - protein, 127 aa, Artificial Sequence; identical to SEQ ID NO: 24597
  source: /note="Description of Artificial Sequence: Synthetic polypeptide"

SEQ ID NO: 24743 - protein, 127 aa, Artificial Sequence; identical to SEQ ID NO: 24598
  source: /note="Description of Artificial Sequence: Synthetic polypeptide"

SEQ ID NO: 24744 - protein, 126 aa, Artificial Sequence; identical to SEQ ID NO: 24599
  source: /note="Description of Artificial Sequence: Synthetic polypeptide"

SEQ ID NO: 24745 - protein, 129 aa, Artificial Sequence; identical to SEQ ID NO: 24600
  source: /note="Description of Artificial Sequence: Synthetic polypeptide"

SEQ ID NO: 24746 - protein, 119 aa, Artificial Sequence; identical to SEQ ID NO: 24601
  source: /note="Description of Artificial Sequence: Synthetic polypeptide"

SEQ ID NO: 24747 - protein, 123 aa, Artificial Sequence; identical to SEQ ID NO: 24602
  source: /note="Description of Artificial Sequence: Synthetic polypeptide"

SEQ ID NO: 24748 - protein, 118 aa, Artificial Sequence; identical to SEQ ID NO: 24603
  source: /note="Description of Artificial Sequence: Synthetic polypeptide"

SEQ ID NO: 24749 - protein, 126 aa, Artificial Sequence; identical to SEQ ID NO: 24604
  source: /note="Description of Artificial Sequence: Synthetic polypeptide"

SEQ ID NO: 24750 - protein, 130 aa, Artificial Sequence; identical to SEQ ID NO: 24605
  source: /note="Description of Artificial Sequence: Synthetic polypeptide"

SEQ ID NO: 24751 - protein, 123 aa, Artificial Sequence; identical to SEQ ID NO: 24606
  source: /note="Description of Artificial Sequence: Synthetic polypeptide"

SEQ ID NO: 24752 - protein, 126 aa, Artificial Sequence; identical to SEQ ID NO: 24607
  source: /note="Description of Artificial Sequence: Synthetic polypeptide"

SEQ ID NO: 24753 - protein, 123 aa, Artificial Sequence; identical to SEQ ID NO: 24608
  source: /note="Description of Artificial Sequence: Synthetic polypeptide"

SEQ ID NO: 24754 - protein, 126 aa, Artificial Sequence; identical to SEQ ID NO: 24609
  source: /note="Description of Artificial Sequence: Synthetic polypeptide"

SEQ ID NO: 24755 - protein, 128 aa, Artificial Sequence; identical to SEQ ID NO: 24610
  source: /note="Description of Artificial Sequence: Synthetic polypeptide"

SEQ ID NO: 24756 - protein, 119 aa, Artificial Sequence; identical to SEQ ID NO: 24611
  source: /note="Description of Artificial Sequence: Synthetic polypeptide"

SEQ ID NO: 24757 - protein, 126 aa, Artificial Sequence; identical to SEQ ID NO: 24612
  source: /note="Description of Artificial Sequence: Synthetic polypeptide"

SEQ ID NO: 24758 - protein, 131 aa, Artificial Sequence; identical to SEQ ID NO: 24613
  source: /note="Description of Artificial Sequence: Synthetic polypeptide"

SEQ ID NO: 24759 - protein, 123 aa, Artificial Sequence; identical to SEQ ID NO: 24614
  source: /note="Description of Artificial Sequence: Synthetic polypeptide"

SEQ ID NO: 24760 - protein, 129 aa, Artificial Sequence; identical to SEQ ID NO: 24615
  source: /note="Description of Artificial Sequence: Synthetic polypeptide"

SEQ ID NO: 24761 - protein, 125 aa, Artificial Sequence; identical to SEQ ID NO: 24616
  source: /note="Description of Artificial Sequence: Synthetic polypeptide"

SEQ ID NO: 24762 - protein, 127 aa, Artificial Sequence; identical to SEQ ID NO: 24617
  source: /note="Description of Artificial Sequence: Synthetic polypeptide"

SEQ ID NO: 24763 - protein, 123 aa, Artificial Sequence; identical to SEQ ID NO: 24618
  source: /note="Description of Artificial Sequence: Synthetic polypeptide"

SEQ ID NO: 24764 - protein, 124 aa, Artificial Sequence; identical to SEQ ID NO: 24619
  source: /note="Description of Artificial Sequence: Synthetic polypeptide"

SEQ ID NO: 24765 - protein, 125 aa, Artificial Sequence; identical to SEQ ID NO: 24620
  source: /note="Description of Artificial Sequence: Synthetic polypeptide"

SEQ ID NO: 24766 - protein, 126 aa, Artificial Sequence; identical to SEQ ID NO: 24621
  source: /note="Description of Artificial Sequence: Synthetic polypeptide"

SEQ ID NO: 24767 - protein, 125 aa, Artificial Sequence; identical to SEQ ID NO: 24622
  source: /note="Description of Artificial Sequence: Synthetic polypeptide"

SEQ ID NO: 24768 - protein, 120 aa, Artificial Sequence; identical to SEQ ID NO: 24623
  source: /note="Description of Artificial Sequence: Synthetic polypeptide"

SEQ ID NO: 24769 - protein, 122 aa, Artificial Sequence; identical to SEQ ID NO: 24624
  source: /note="Description of Artificial Sequence: Synthetic polypeptide"

SEQ ID NO: 24770 - protein, 130 aa, Artificial Sequence; identical to SEQ ID NO: 24581
  source: /note="Description of Artificial Sequence: Synthetic polypeptide"

SEQ ID NO: 24771 - protein, 122 aa, Artificial Sequence; identical to SEQ ID NO: 24625
  source: /note="Description of Artificial Sequence: Synthetic polypeptide"

SEQ ID NO: 24772 - protein, 119 aa, Artificial Sequence; identical to SEQ ID NO: 24670
  source: /note="Description of Artificial Sequence: Synthetic polypeptide"

SEQ ID NO: 24773 - protein, 118 aa, Artificial Sequence
  source: /note="Description of Artificial Sequence: Synthetic polypeptide"
QVQLVQSGGEVKKPGASVKVSCKVSGYTLTDYYMYWVRQAPGKGLEWMGWIDPENGNTVYDPKFQGRVTMTEDTSTDTAYMELRSLRSEDTAVYYCATYGTSYWFPYWGRGTLVTVSS

SEQ ID NO: 24774 - protein, 118 aa, Artificial Sequence
  source: /note="Description of Artificial Sequence: Synthetic polypeptide"
QVQLVQSGGEVKKPGASVKVSCKVSGYTLTDYYMYWVRQAPGKGLEWMGWIDPENGNTVYDPKFQGRVTMTEDTSTDTAYMELSSLRSEDTAVYYCATYGTSYWFPYWGQGTMVTVSS

SEQ ID NO: 24775 - protein, 118 aa, Artificial Sequence
  source: /note="Description of Artificial Sequence: Synthetic polypeptide"
QVQLVQSGGEVKKPGASVKVSCKVSGYTLTDYYMYWVRQAPGKGLEWMGWIDPENGNTVYDPKFQGRVTMTTDTSTDTAYMELSSLRSEDTAVYYCATYGTSYWFPYWGQGTTVTVSS

SEQ ID NO: 24776 - protein, 118 aa, Artificial Sequence
  source: /note="Description of Artificial Sequence: Synthetic polypeptide"
QVQLVQSGSELKKPGASVKVSCKASGYTFTDYYMYWVRQAPGQGLEWMGWIDPENGNTVYDPKFQGRFVFSLDTSVSTAYLQICSLKAEDTAVYYCARYGTSYWFPYWGRGTLVTVSS

SEQ ID NO: 24777 - protein, 118 aa, Artificial Sequence
  source: /note="Description of Artificial Sequence: Synthetic polypeptide"
QVQLVQSGSELKKPGASVKVSCKASGYTFTDYYMYWVRQAPGSGLEWMGWIDPENGNTVYDPKFQGRFVFSLDTSVSTAYLQIASLKAEDTAVYYCARYGTSYWFPYWGQGTTVTVSS

SEQ ID NO: 24778 - protein, 118 aa, Artificial Sequence
  source: /note="Description of Artificial Sequence: Synthetic polypeptide"
QVQLVQSGAEVKKPGASVKVSCKASGYTFTDYYMYWVRQAPGQGLEWMGWIDPENGNTVYDPKFQGRVTMTTDTSTSTAYMELRSLRSDDTAVYYCARYGTSYWFPYWGRGTLVTVSS

SEQ ID NO: 24779 - protein, 118 aa, Artificial Sequence
  source: /note="Description of Artificial Sequence: Synthetic polypeptide"
QVQLVQSGAEVKKPGASVKVSCKASGYTFTDYYMYWVRQAPGQGLEWMGWIDPENGNTVYDPKFQGRVTMTTDTSTSTAYMELRSLRSDDTAVYYCARYGTSYWFPYWGQGTTVTVAS

SEQ ID NO: 24780 - protein, 137 aa, Artificial Sequence
  source: /note="Description of Artificial Sequence: Synthetic polypeptide"
  MOD_RES (3)..(3): Any amino acid
QVXLQESGPSLVKPSQTLSLTCTVSGFSLSSYSVSWVRQAPGKTLEWLGDASNGGIIYYNPALKSRLGITRDNSKSQVSLSLNTITPEDTATYYCAKCSVGDSGSYACTGRKGEYVDAWGQGLLVTVSSASTTAPKV

SEQ ID NO: 24781 - protein, 141 aa, Artificial Sequence
  source: /note="Description of Artificial Sequence: Synthetic polypeptide"
  MOD_RES (3)..(3): Any amino acid
  MOD_RES (120)..(120): Any amino acid
QVXLQQSGPSLVKPSQTLSLTCTVSGLSLSDHNVGWIRQAPGKALEWLGVIYKEGDKDYNPALKSRLSITKDNSKSQVSLSLSSVTTEDTATYYCATLGCYFVEGVGYDCTYGLQHTTFXDAWGQGLLVTVSSASTTAPKV

SEQ ID NO: 24782 - protein, 126 aa, Artificial Sequence
  source: /note="Description of Artificial Sequence: Synthetic polypeptide"
QVQLQESGPALVKPTQTLTLTCTFSGFSLSTRGMSVNWIRQPPGKALEWLARIDWDDDTFYSASLKTRLSISKDTSKNQVVLRMTNVDPVDTATYFCARASLYDSDSFYLFYHAYWGQGTVVTVSS

SEQ ID NO: 24783 - protein, 126 aa, Artificial Sequence
  source: /note="Description of Artificial Sequence: Synthetic polypeptide"
QVQLQESGPVVVKPTETLTLTCTVSGFSLSNPRMGVTWIRQPPGKALEWLGNIFSSDEKSFSPSLKSRLTTSQDTSRSQVVLSLTNVDPVDTATYYCARVGLYDINAYYLYYLDYWGQGTLVTVSS

SEQ ID NO: 24784 - protein, 127 aa, Artificial Sequence
  source: /note="Description of Artificial Sequence: Synthetic polypeptide"
QVQLVQSESEVKKPGASVTVSCKPSGYTFNTYYIHWVRQAPGQGLEWMGVINPSGGSTTYTQRFQDRVTMTTDTSTNTIYMDLTSLRSDDTAMYYCVRGSNLLPHLWEWKPSHFDSWGQGTLVTVSS

SEQ ID NO: 24785 - protein, 126 aa, Artificial Sequence
  source: /note="Description of Artificial Sequence: Synthetic polypeptide"
QLQLQESGPGLVKPSETLSLTCTVSGGSISSSNYYWGWIRQPPGKGLEWIASIHDSGSIYYNPSLRSRVTISVDTSKNQFSLKLSSVTAADTAVYYCARHLVWFGELRNNWFDPWGQGTLVTVASA

SEQ ID NO: 24786 - protein, 124 aa, Artificial Sequence
  source: /note="Description of Artificial Sequence: Synthetic polypeptide"
QLQLQESGPGLVKPSETLSLTCTVSGDSITSGQYYWAWIRQAPGKGLEWIGSIHYSGSTYQNPSLKSRLTISVDTSRDQISMKLSSVTVAESAVYYCARQQLSLSPVENWFDPWGQGTLVTVSS

SEQ ID NO: 24787 - protein, 124 aa, Artificial Sequence
  source: /note="Description of Artificial Sequence: Synthetic polypeptide"
EEQLVESGGGLVQPGRSLRLSCVGSGLRFEEHAMHWVRQAPGRGLEWVSGISWNSGSVGYADSVKGRFTTSRDNAKDILFLEMNTLRSEDTALYFCAIMVATTKNDFHYYKDVWGKGTTVTVSS

SEQ ID NO: 24788 - protein, 124 aa, Artificial Sequence
  source: /note="Description of Artificial Sequence: Synthetic polypeptide"
QVHLVQSGVEVKKPGASVRVSCKASGYTFATYGITWVRQAPGRGLEWVGWITPYNDRTSYAQIFHGRVTMTTDTSTNTAYMELRSLRSDDTAMYYCARNHCNFYHDFWSGLDYWGQGTLVSVSS

SEQ ID NO: 24789 - protein, 121 aa, Artificial Sequence
  source: /note="Description of Artificial Sequence: Synthetic polypeptide"
QVQLVQSGAEVKKPGSSVKVPCKASGGTFSTYPISWVRQAPGQGLEWMGRIIPDPPMANIAQKFQGRVSFSADKSTTIVYMELSSLRSEDTAVYFCAREILQSPPFAVDVWGQGTMVAVSS

SEQ ID NO: 24790 - protein, 127 aa, Artificial Sequence
  source: /note="Description of Artificial Sequence: Synthetic polypeptide"
QAQLVESGGGVVQPGRSLRLSCAASGFTFSYSGMHWVRQAPGRGLEWLAVISYDGNKMYYADSVKGRFTISRDNSKMTLYLQMNSLRREDTAVYYCAKDGLDYGGDLVYYGMDVWGNGTTVTVSSAS

SEQ ID NO: 24791 - protein, 126 aa, Artificial Sequence
  source: /note="Description of Artificial Sequence: Synthetic polypeptide"
QVQLVQSGPEVKKPGASVRLSCKASGYVFTNYGVSWVRQAPGQGLEWMGWSSPYNGNTYYAQKLKARVTMTTDTSTNTAYMELRSLRSDDTAVYYCGRDMLGVVQAVAGPFDSWGQGTLVTVSSAS

SEQ ID NO: 24792 - protein, 126 aa, Artificial Sequence
  source: /note="Description of Artificial Sequence: Synthetic polypeptide"
QVQLVQSGGEVKRPGASVRVSCKASGYTFINYAISWVRQAPGQGLEWLGWISAYNGNTHYAQKVQDRVTMTTDASTTTAYMELRGLKSDDTAVYSCARLPLLGYSSGWYAFDMWRQGTMVPVSSAS

SEQ ID NO: 24793 - protein, 127 aa, Artificial Sequence
  source: /note="Description of Artificial Sequence: Synthetic polypeptide"
QVQLLQSGAELKKPGASVKVSCQASIDTFSTYYIHWVRQAPGQGLEWLGVINPSGGSTTYAQKFQDRITLTTDTSTRTVYMDLSSLRSEDTAVYYCARVHKGRAEQWQLLHGHFDLWGRGSLVTVSS

SEQ ID NO: 24794 - protein, 126 aa, Artificial Sequence
  source: /note="Description of Artificial Sequence: Synthetic polypeptide"
QLQLQESGPGLVKPSETLSLTCTVSGDSITSGQYYWAWIRQAPGKGLEWIGSIHYSGSTYQNPSLKSRLTISVDTSRDQISMKLSSVTVAESAVYYCAKQQLSLSPVENWFDPWGQGTLVTVSSAS

SEQ ID NO: 24795 - protein, 120 aa, Artificial Sequence
  source: /note="Description of Artificial Sequence: Synthetic polypeptide"
EVQVVESGGGLVQPGGSLRLSCVASGFTFSSYWMHWVRQAPGKGLVWVSRIYSDGSSTTYADSVKGRFTISRDNAKNTLYLQMNSLRAEDTAVYYCVRVLGAAMFDIWGQGTVVTVSSAS

SEQ ID NO: 24796 - protein, 128 aa, Artificial Sequence
  source: /note="Description of Artificial Sequence: Synthetic polypeptide"
QVQLVESGGGVVQPGRSLRLSCEASGFTFSGYAMHWVRQAPAKGLEWVAVISFDGSNNYYADSVKGRFTISRDNSKNMLFLQMNSLRAEDTAVYYCVRPDVIAVAGTALSNPFDLWGLGTMVTVSSAS

SEQ ID NO: 24797 - protein, 122 aa, Artificial Sequence
  source: /note="Description of Artificial Sequence: Synthetic polypeptide"
QVQLVQSGAEVKKPGASVKVSCKASGYSFTGFTMNWVRQATGQGLEWMGLINPFNGNTGYNQKFKGRVTMTRNTSISTAYMELSSLRSEDTAVYYCARSGKSYDYEAWFTYWGQGTLVTVSA

SEQ ID NO: 24798 - protein, 119 aa, Artificial Sequence
  source: /note="Description of Artificial Sequence: Synthetic polypeptide"
EVQLVESGGGLVQPGGSLRLSCAASGFTFSRYVMSWVRQAPGRGLEWVSSITGSGATTYYADSVKGRFTISRDNSKNTVYLQMNRLRAEDTAIYYCANCGRAGQIFDDWGQGTLVTVSS

SEQ ID NO: 24799 - protein, 125 aa, Artificial Sequence
  source: /note="Description of Artificial Sequence: Synthetic polypeptide"
QVQLVQSGAEMKKPGASVKVSCQVAGYTLTELSIHWVRQTPGNGLEWMGGFEPEDGEYIYPQKSQGRVTMTEDTSTGTAYMELRSLRSDDTAVYYCAAEARYCDNSRCSPNFDHWGQGTLVAVSS

SEQ ID NO: 24800 - protein, 123 aa, Artificial Sequence
  source: /note="Description of Artificial Sequence: Synthetic polypeptide"
QVQLVQSGAEVKKPGSSVKVSCKASGDSFNSLAISWVRQAPGQGLEWMGGIIPKFNRRDYAQKFQGRVTITADDSASTAYIELSSLTSDDTALYYCARDAEWAAGSDYFFDYWGQGTLVIVSS

SEQ ID NO: 24801 - protein, 126 aa, Artificial Sequence
  source: /note="Description of Artificial Sequence: Synthetic polypeptide"
QVQLMESGGGVVQPGKSLRLSCAASGFTFSHYGMHWVRQAPGKGLEWVAVISYDGDKKYYADSVKGRFTISRDNSKNTLHLHMNSLRHEDTAVYFCASQGAKGGHELSFYCALDVWGQGTTVAVSS

SEQ ID NO: 24802 - protein, 123 aa, Artificial Sequence
  source: /note="Description of Artificial Sequence: Synthetic polypeptide"
EVQLVESGGGLVQPGGSLRLSCAASGFTFSTYWVSWVRQTPGKGLEWVARFTISNINQDGSEKSYVDSVEGRDNAKNSLYLQMNSLRADDTAVYYCAREVFVTQVEPAQWGFWGQGTPVIVSS

SEQ ID NO: 24803 - protein, 123 aa, Artificial Sequence
  source: /note="Description of Artificial Sequence: Synthetic polypeptide"
QVQVVQSGAEVKKPGASVKVSCKTSGYNFIDHSVSWVRQAPGQGLEWMGWISPYNHRTVYAEKFQGRVTMTTDTSTRTVSMELRRLTSDDTAVYFCARDRVQQGEGNFFDHWGQGTPVTVTSA

SEQ ID NO: 24804 - protein, 126 aa, Artificial Sequence
  source: /note="Description of Artificial Sequence: Synthetic polypeptide"
QLQLQESGSRLVKPSQTLSLTCGVSGGSISSGGYSWNWIRQPPGKGLEWVGYIYQNDITYYNPSLMSRVTISADTSKNQFSLKLSSVTAADTAVYYCARGAYGSGTYYSADALDIWGQGTMVTVSS

SEQ ID NO: 24805 - protein, 115 aa, Artificial Sequence
  source: /note="Description of Artificial Sequence: Synthetic polypeptide"
QVQLVQSGPEVKKPGASVRLSCTASGNTFRTYAVHWVRQASGQRLEWMGWINPDNGDTKYSQRFQGRVVITRDTSARIIYLDLSSLTSEDTAVFYCFSGRIFDIWGQGTTITVSS

SEQ ID NO: 24806 - protein, 126 aa, Artificial Sequence
  source: /note="Description of Artificial Sequence: Synthetic polypeptide"
QVQLVESGGGVVQPGMSHRLSCAASTLIFDRHALHWVRQAPGAGLEWVAILSYDGTTDYYADSVKGRFTVSRDTSKNTVFLQMNGLRPQDTAVYYCARGRALDDFADYGGYYFDYWGQGILVTVSS

SEQ ID NO: 24807 - protein, 119 aa, Artificial Sequence
  source: /note="Description of Artificial Sequence: Synthetic polypeptide"
QVQLQESGPGLVQPSETLSLTCTVSGDSITSNVYYWGWIRQPPGKGLEWIGSIFHSGITHYTPSLNSRVTISVDTSKNQFSLRLSSATAADTAVYYCARHWAGLYFDSWGQGALVAVSS

SEQ ID NO: 24808 - protein, 124 aa, Artificial Sequence
  source: /note="Description of Artificial Sequence: Synthetic polypeptide"
QVQVVQSGPEVKKPGASVRVSCKASGYTFTNYGVSWVRQAPGQGLEWMGWISTYNGNTWYSQKFQARVTMTTDTSTSTAYMEVRSLRSDDTAIYYCACHGSGNYYGEANYFDHWGQGTLVTVSS

SEQ ID NO: 24809 - protein, 123 aa, Artificial Sequence
  source: /note="Description of Artificial Sequence: Synthetic polypeptide"
QVQLQASGPGLVKPSETLSLTCNVSGYSVSSGHYWAWVRQSPGKGLEWIGGIHHSGSTYTNPPLKSRVSISIDTSKNQFSLRLTSVTAADTAVYFCARDLYDLSTGPFWFDPWGQGTLVTVSS

SEQ ID NO: 24810 - protein, 121 aa, Artificial Sequence
  source: /note="Description of Artificial Sequence: Synthetic polypeptide"
QVHLVQSGAEVKKPGSSVKVSCKASGGTFNGHAISWIRQAPGQGLEWKGGIIPGLGTTRYARKFQDRVTITADESTRTAYMELSSLRSEDTAVYYCARVAGGYFDSATRGWGQGTLVTVSS

SEQ ID NO: 24811 - protein, 123 aa, Artificial Sequence
  source: /note="Description of Artificial Sequence: Synthetic polypeptide"
QVQLVQSGGEVKKPGASVKVSCKASGYTFTNYGICWVRQAPGQGLEWMGWISGYNGNTYYAQNFQGRVTMTTDTSTSTAYMELRSLRSDDTAVYYCARGFHYHSADQRIFDPWGQGTLVTVSS

SEQ ID NO: 24812 - protein, 124 aa, Artificial Sequence
  source: /note="Description of Artificial Sequence: Synthetic polypeptide"
QVLLVQSGAEIKKPGSSVKISCKASGGTFSSLALNWVRQAPGQGLQWMGGIIPLFGTQNYAQKFQGRVTITADESTSTAYMELSGLRPEDTAVYYCALFLWFGDQTSDDGFDVWGQGTVVTVSS

SEQ ID NO: 24813 - protein, 127 aa, Artificial Sequence
  source: /note="Description of Artificial Sequence: Synthetic polypeptide"
QVQLVQSGTEVKKPGASVKVSCKASGYTFSNYGISWVRQAPGQGLEWMGWISAYNGNTYYRQELQGRVTMTTDTSTSTAYMELRSLRSDDTAVYYCARGGAQEMVRIHYYYYGMDVWGQGTTVTVSS

SEQ ID NO: 24814 - protein, 127 aa, Artificial Sequence
  source: /note="Description of Artificial Sequence: Synthetic polypeptide"
QVQLVQSGAEVKKPGASMTVSCKASGYTFSKYGINWVRQAPGQGLEWLGWISAYNGNTYYAQKFQGRVTMTTDTATSTAYMDVRNLRSDDTAMYYCARPATSYDDLRSGYLNYCDYWGQGTLVTVSS

SEQ ID NO: 24815 - protein, 126 aa, Artificial Sequence
  source: /note="Description of Artificial Sequence: Synthetic polypeptide"
EVQLVESGGGLVQPGGSLRLSCVASGFTFSSYAMSWVRQAPGKGLEWVSAIRGSVDNTYYADSVKGRFTISRDNSKNTLYLQMNSLRVEDTAVYYCAKDPALYCSGETCFSDLTDWGQGTLVTVSS

SEQ ID NO: 24816 - protein, 125 aa, Artificial Sequence
  source: /note="Description of Artificial Sequence: Synthetic polypeptide"
QVQLVESGGGVVQPGRSLRLSCAASGFTFSNHGMHWVRQAPGKGLEWVAVISYDGNKKYYADSVKGRFTVSRDNSKNTLSLQMDSLRAEDTAIYYCAKTTFYFDDSNYYEYLDYWGQGTLVTVSS

SEQ ID NO: 24817 - protein, 133 aa, Artificial Sequence
  source: /note="Description of Artificial Sequence: Synthetic polypeptide"
QVQLVESGGGVVQPGRSLRLSCAASGFTFNTHGMHWVRQAPGKGLEWVAVMSYDGTKKYHADSVKGRFTISRDNSKNTLYLQMNSLRVEDTAIYYCAKVGELRSFDWLLADGTAYYYYGMDVWGQGTTVTVSS

SEQ ID NO: 24818 - protein, 120 aa, Artificial Sequence
  source: /note="Description of Artificial Sequence: Synthetic polypeptide"
QVQLVQSGPELRKPGASVTVSCKASGYTFTTYYIHWVRQAPGGGLDWMGMINTGSGVTSYAQKFQGRVAMTRDTSTSTVFMELSSLRFEDTALYYCARMYSGSWYPFDYWGQGALVTVSS

SEQ ID NO: 24819 - protein, 132 aa, Artificial Sequence
  source: /note="Description of Artificial Sequence: Synthetic polypeptide"
QVQLVQSGAEVKKPGASVKVSCKASGYTFTTYGITWVRQAPGQGLEWMGWISGDSDNTNYAQNLQGRVTLTTDISTRTAYMELRSLKPDDTAMYYCARALAKWYCSSSSCFCGGGSCYSDYWGQGTLVTVSS

SEQ ID NO: 24820 - protein, 126 aa, Artificial Sequence
  source: /note="Description of Artificial Sequence: Synthetic polypeptide"
QVQLQESGPRLVKPSETLSLTCTVSGGSTSSYFWNWIRQPPGKGLEWIGYIYGSGSADYNPSLKSRVTISIDTSKTQFSLKLTSVTAADTAVYYCARSGFCTNDACYRRGSWFDPWGQGTLVTVSS

SEQ ID NO: 24821 - protein, 121 aa, Artificial Sequence
  source: /note="Description of Artificial Sequence: Synthetic polypeptide"
QVQLVESGGGWQPGGSLRLSCEASGFMFSVYAIHWVRQAPGKGLEWVAVIWHDGSNKYYADSVKGRFTISRDNSKDTMYLQMKTLRVDDTAVYYCARDPIVGSKTDGMDVWGQGTTVTVSS

SEQ ID NO: 24822 - protein, 121 aa, Artificial Sequence
  source: /note="Description of Artificial Sequence: Synthetic polypeptide"
QVQLVESGGGWQPGRSLRLSCSASGFTFSVYAMHWVRQAPGQGLEWVAIIWYDGSNKYYADSVKGRFTISRDNSKETLYLQMNSLRVEDTAVYYCARDPIVGHTRDGLDVWGQGTTVTVSS

SEQ ID NO: 24823 - protein, 132 aa, Artificial Sequence
  source: /note="Description of Artificial Sequence: Synthetic polypeptide"
QVQLVQSGAEVKKPGASVQVSCKTSGYTFSSYGISWVRQAPGQGPEWMGWISTHIGTTNYAQKLQGRVTMTTDTSTTTAYMELRSLRSDDTAVYYCARDLAKWYCSGDTCFCSGGRCYSDHWGQGTLVTVSS

SEQ ID NO: 24824 - protein, 122 aa, Artificial Sequence
  source: /note="Description of Artificial Sequence: Synthetic polypeptide"
QVQLVQSGAEMKRPGSSVKVSCKASGGTFSTFAINWVRQAPGQGFEWMGGVIPGFDSANYAQKFQGRLTMSADESTSTVYMELSSLRSDDTAVYYCAGNSGYCSGDSCAPNWGPGTLVTVSS

SEQ ID NO: 24825 - protein, 130 aa, Artificial Sequence
  source: /note="Description of Artificial Sequence: Synthetic polypeptide"
EVQLVESGGGLVQPGGSLRLSCAASGFSFSNYAMSWVRQAPGKGLEWVSDISGSGNSTNFADSVKGRFTISRDNSKNTLYLQMSSLRAEDTAVYYCAKFRVPTYCVNGICYQGLPGFDIWGQGTMVTVSS

SEQ ID NO: 24826 - protein, 130 aa, Artificial Sequence
  source: /note="Description of Artificial Sequence: Synthetic polypeptide"
EVQLVESGGGLVQPGGSLRLSCAASGFNFSNYAMSWVRQAPGKGLEWVSDISSSGKTTNSADSVKGRFTISRDNSKNTLFLQMSSLRADDTAVYYCAKFRVPTYCVNGICYQGLPGFDIWGQGTMVTVSS

SEQ ID NO: 24827 - protein, 123 aa, Artificial Sequence
  source: /note="Description of Artificial Sequence: Synthetic polypeptide"
QVQLVESGGGVVQPGRSLRLSCAASGFTFSNYGMHWVRQAPGKGLEWVTIISYDESTTLYADSVKGRFTISRDNSKNTVYLQMNSLRPEDTAVYYCARDHFDPSGYFWYFDLWGRGTLVTVSS

SEQ ID NO: 24828 - protein, 128 aa, Artificial Sequence
  source: /note="Description of Artificial Sequence: Synthetic polypeptide"
QVQLVQSGAEVKKPGSSVRVSCKASGGTFSRYVITWVRQAPGQGLEWMGGSIPIIDTSTYAQKFQDRVTITADKSTSTVYLELSSLRPEDTAIYYCAKVFFFSNSSGPPTEGPAFDVWGQGTMVTVSS

SEQ ID NO: 24829 - protein, 121 aa, Artificial Sequence
  source: /note="Description of Artificial Sequence: Synthetic polypeptide"
QLQLQESGPGLVKPSETLSLTCTVSGGSISSNIHYWAWIRQTPGKGLEWIGYMFYGGVAFYNPSLKSRVAISVDTSKNQFSLRLTSASAADTAVYYCARVLVASTNWFDPWGQGTLVTVSS

SEQ ID NO: 24830 - protein, 125 aa, Artificial Sequence
  source: /note="Description of Artificial Sequence: Synthetic polypeptide"
QVQLVESGGGWQPGRSLRLSCAASGFTFYNYAVHWVRQAPGKGLEWVAVISHDGVNKDYADSVKGRITLSRDNSKNTVYLQLNSLRPEDTAVYYCARDRSYYFGGSVFHLYFDYWGQGTLVTVSS

SEQ ID NO: 24831 - protein, 129 aa, Artificial Sequence
  source: /note="Description of Artificial Sequence: Synthetic polypeptide"
QVQLVQSGAEVKKPGSSVKVSCKTSGDTFSNYWSWVRQAPGQGLEWMGGIIPMFGTTNYAQRFQGRVTISADESTSTAYMEMSSLKSEDTAVYYCARDRYYEVRAGGKVLNTYYYMDVWGKGTTVTVSS

SEQ ID NO: 24832 - protein, 121 aa, Artificial Sequence
  source: /note="Description of Artificial Sequence: Synthetic polypeptide"
EVQLVESGGDLVQPGGSLRLSCSASGFVFTSYSFHWVRQAPGKGLEYVSSVSADGGSTYYADSVRGRFLISRDNSKNTLSLQMSSLRPDDTALYYCVPQPSLLWFGDLRSWGQGTLVTVSS

SEQ ID NO: 24833 - protein, 123 aa, Artificial Sequence
  source: /note="Description of Artificial Sequence: Synthetic polypeptide"
EVQLVESGGGVVQPGRSLRLSCAASGFSFSHYAMHWVRQAPGKGLEWVAVISYDGENTYYADSVKGRFSISRDNSKNTVSLQMNSLRPEDTALYYCARDRIVDDYYYYGMDVWGQGATVTVSS

SEQ ID NO: 24834 - protein, 125 aa, Artificial Sequence
  source: /note="Description of Artificial Sequence: Synthetic polypeptide"
EVQLVETGGGLAQPGGSLRLSCAASGFTFSSYNMNWVRQAPGKGLEWVSHISAGSSYIYYSDSVKGRFTVSRDNVRNSVYLQMNSLRAADTAVYYCAREDYGPGNYYSPNWFDPWGQGTLVTVSS

SEQ ID NO: 24835 - protein, 120 aa, Artificial Sequence
  source: /note="Description of Artificial Sequence: Synthetic polypeptide"
EVQLVESGGNVVKPGTSLRLSCAATGFNFHNYGMNWVRQAPGKGLEWVAVVWYDGSKKYYADSVTGRFAISRDNSKNTLYLQMNSLRVEDTAVYYCVRDKVGPTPYFDSWGQGTLVTVSS

SEQ ID NO: 24836 - protein, 126 aa, Artificial Sequence [sequence omitted]

SEQ ID NO: 24837 - protein, 450 aa, Artificial Sequence
  source: /note="Description of Artificial Sequence: Synthetic polypeptide"
QVTLRESGPALVKPTQTLTLTCTFSGFSLSTAGMSVGWIRQPPGKALEWLADIWWDDKKDYNPSLKSRLTISKDTSKNQVVLKVTNMDPADTATYYCARSMITNFYFDVWGQGTTVTVSSASTKGPSVFPLAPSSKSTSGGTAALGCLVKDYFPEPVTVSWNSGALTSGVHTFPAVLQSSGLYSLSSVVTVPSSSLGTQTYICNVNHKPSNTKVDKRVEPKSCDKTHTCPPCPAPELLGGPSVFLFPPKPKDTLMISRTPEVTCVVVDVSHEDPEVKFNWYVDGVEVHNAKTKPREEQYNSTYRVVSVLTVLHQDWLNGKEYKCKVSNKALPAPIEKTISKAKGQPREPQVYTLPPSREEMTKNQVSLTCLVKGFYPSDIAVEWESNGQPENNYKTTPPVLDSDGSFFLYSKLTVDKSRWQQGNVFSCSVMHEALHNHYTQKSLSLSPGK

SEQ ID NO: 24838 - protein, 450 aa, Artificial Sequence; identical to SEQ ID NO: 24645
  source: /note="Description of Artificial Sequence: Synthetic polypeptide"

SEQ ID NO: 24839 - protein, 450 aa, Artificial Sequence; identical to SEQ ID NO: 24645
  source: /note="Description of Artificial Sequence: Synthetic polypeptide"

SEQ ID NO: 24840 - protein, 450 aa, Artificial Sequence; identical to SEQ ID NO: 24644
  source: /note="Description of Artificial Sequence: Synthetic polypeptide"

SEQ ID NO: 24841 - protein, 450 aa, Artificial Sequence; identical to SEQ ID NO: 24641
  source: /note="Description of Artificial Sequence: Synthetic polypeptide"

SEQ ID NO: 24842 - protein, 450 aa, Artificial Sequence; identical to SEQ ID NO: 24638
  source: /note="Description of Artificial Sequence: Synthetic polypeptide"

SEQ ID NO: 24843 - protein, 450 aa, Artificial Sequence; identical to SEQ ID NO: 24639
  source: /note="Description of Artificial Sequence: Synthetic polypeptide"

SEQ ID NO: 24844 - protein, 450 aa, Artificial Sequence; identical to SEQ ID NO: 24639
  source: /note="Description of Artificial Sequence: Synthetic polypeptide"

SEQ ID NO: 24845 - protein, 450 aa, Artificial Sequence; identical to SEQ ID NO: 24642
  source: /note="Description of Artificial Sequence: Synthetic polypeptide"

SEQ ID NO: 24846 - protein, 450 aa, Artificial Sequence; identical to SEQ ID NO: 24643
  source: /note="Description of Artificial Sequence: Synthetic polypeptide"

SEQ ID NO: 24847 - protein, 451 aa, Artificial Sequence; identical to SEQ ID NO: 24691
  source: /note="Description of Artificial Sequence: Synthetic polypeptide"

SEQ ID NO: 24848 - protein, 450 aa, Artificial Sequence
  source: /note="Description of Artificial Sequence: Synthetic polypeptide"
QVTLRESGPALVKPTQTLTLTCTFSGFSLSTAGMSVGWIRQPPGKALEWLADIWWDDKKDYNPSLKSRLTISKDTSKNQVVLKVTNMDPADTATYYCARDMIFNWYFDVWGQGTTVTVSSASTKGPSVFPLAPSSKSTSGGTAALGCLVKDYFPEPVTVSWNSGALTSGVHTFPAVLQSSGLYSLSSVVTVPSSSLGTQTYICNVNHKPSNTKVDKRVEPKSCDKTHTCPPCPAPELLGGPSVFLFPPKPKDTLMISRTPEVTCVVVDVSHEDPEVKFNWYVDGVEVHNAKTKPREEQYNSTYRVVSVLTVLHQDWLNGKEYKCKVSNKALPAPIEKTISKAKGQPREPQVYTLPPSREEMTKNQVSLTCLVKGFYPSDIAVEWESNGQPENNYKTTPPVLDSDGSFFLYSKLTVDKSRWQQGNVFSCSVMHEALHNHYTQKSLSLSPGK

SEQ ID NO: 24849 - protein, 450 aa, Artificial Sequence; identical to SEQ ID NO: 24848
  source: /note="Description of Artificial Sequence: Synthetic polypeptide"

SEQ ID NO: 24850 - protein, 450 aa, Artificial Sequence; identical to SEQ ID NO: 24848
  source: /note="Description of Artificial Sequence: Synthetic polypeptide"

SEQ ID NO: 24851 - protein, 450 aa, Artificial Sequence
  source: /note="Description of Artificial Sequence: Synthetic polypeptide"
QVTLRESGPALVKPTQTLTLTCTFSGFSLSTAGMSVGWIRQPPGKALEWLADIWWDDKKDYNPSLKSRLTISKDTSKNQVVLKVTNMDPADTATYYCARDMITNFYFDVWGQGTTVTVSSASTKGPSVFPLAPSSKSTSGGTAALGCLVKDYFPEPVTVSWNSGALTSGVHTFPAVLQSSGLYSLSSVVTVPSSSLGTQTYICNVNHKPSNTKVDKRVEPKSCDKTHTCPPCPAPELLGGPSVFLFPPKPKDTLMISRTPEVTCVVVDVSHEDPEVKFNWYVDGVEVHNAKTKPREEQYNSTYRVVSVLTVLHQDWLNGKEYKCKVSNKALPAPIEKTISKAKGQPREPQVYTLPPSREEMTKNQVSLTCLVKGFYPSDIAVEWESNGQPENNYKTTPPVLDSDGSFFLYSKLTVDKSRWQQGNVFSCSVMHEALHNHYTQKSLSLSPGK

SEQ ID NO: 24852 - protein, 450 aa, Artificial Sequence; identical to SEQ ID NO: 24837
  source: /note="Description of Artificial Sequence: Synthetic polypeptide"

SEQ ID NO: 24853 - protein, 450 aa, Artificial Sequence; identical to SEQ ID NO: 24851
  source: /note="Description of Artificial Sequence: Synthetic polypeptide"

SEQ ID NO: 24854 - protein, 450 aa, Artificial Sequence; identical to SEQ ID NO: 24851
  source: /note="Description of Artificial Sequence: Synthetic polypeptide"

SEQ ID NO: 24855 - protein, 450 aa, Artificial Sequence; identical to SEQ ID NO: 24851
  source: /note="Description of Artificial Sequence: Synthetic polypeptide"

SEQ ID NO: 24856 - protein, 450 aa, Artificial Sequence
  source: /note="Description of Artificial Sequence: Synthetic polypeptide"
QVTLRESGPALVKPTQTLTLTCTFSGFSLSTAGMSVGWIRQPPGKALEWLADIWWDDKKHYNPSLKDRLTISKDTSKNQVVLKVTNMDPADTATYYCARSMITNWYFDVWGQGTTVTVSSASTKGPSVFPLAPSSKSTSGGTAALGCLVKDYFPEPVTVSWNSGALTSGVHTFPAVLQSSGLYSLSSVVTVPSSSLGTQTYICNVNHKPSNTKVDKRVEPKSCDKTHTCPPCPAPELLGGPSVFLFPPKPKDTLMISRTPEVTCVVVDVSHEDPEVKFNWYVDGVEVHNAKTKPREEQYNSTYRVVSVLTVLHQDWLNGKEYKCKVSNKALPAPIEKTISKAKGQPREPQVYTLPPSREEMTKNQVSLTCLVKGFYPSDIAVEWESNGQPENNYKTTPPVLDSDGSFFLYSKLTVDKSRWQQGNVFSCSVMHEALHNHYTQKSLSLSPGK

SEQ ID NO: 24857 - protein, 450 aa, Artificial Sequence; identical to SEQ ID NO: 24641
  source: /note="Description of Artificial Sequence: Synthetic polypeptide"

SEQ ID NO: 24858 - protein, 450 aa, Artificial Sequence; identical to SEQ ID NO: 24642
  source: /note="Description of Artificial Sequence: Synthetic polypeptide"

SEQ ID NO: 24859 - protein, 450 aa, Artificial Sequence; identical to SEQ ID NO: 24642
  source: /note="Description of Artificial Sequence: Synthetic polypeptide"

SEQ ID NO: 24860 - protein, 450 aa, Artificial Sequence; identical to SEQ ID NO: 24642
  source: /note="Description of Artificial Sequence: Synthetic polypeptide"

SEQ ID NO: 24861 - protein, 10 aa, Artificial Sequence
  source: /note="Description of Artificial Sequence: Synthetic peptide"
APIAPPYFDH

SEQ ID NO: 24862 - protein, 16 aa, Artificial Sequence
  source: /note="Description of Artificial Sequence: Synthetic peptide"
HLPDYWNLDYTRFFYY

SEQ ID NO: 24863 - protein, 126 aa, Artificial Sequence
  source: /note="Description of Artificial Sequence: Synthetic polypeptide"
QVQLVQSGAEVKKPGSSVMVSCQASGGPLRNYIINWVRQAPGQGPEWMGGIIPVLGTVHYAPKFQGRVTITADESTDTAYMELSSLRSEDTAMYYCATETALVVSTTYLPHYFDNWGQGTLVTVSS

SEQ ID NO: 24864 - protein, 126 aa, Artificial Sequence
  source: /note="Description of Artificial Sequence: Synthetic polypeptide"
QVQLVQSGAEVKKPGSSVMVSCQASGGPLRNYIINWVRQAPGQGLEWMGGIIPVLGTVHYAPKFQGRVTITADESTDTAYMELSSLRSEDTAMYYCATETALVVSTTYLPHYFDNWGQGTLVTVSS

SEQ ID NO: 24865 - protein, 126 aa, Artificial Sequence
  source: /note="Description of Artificial Sequence: Synthetic polypeptide"
QVQLVQSGAEVKKPGSSVKVSCKASGGTFSNYIINWVRQAPGQGLEWMGGIIPVLGTVHYAPKFQGRVTITADESTDTAYMELSSLRSEDTAMYYCATETALVVSTTYLPHYFDNWGQGTLVTVSS

SEQ ID NO: 24866 - protein, 126 aa, Artificial Sequence
  source: /note="Description of Artificial Sequence: Synthetic polypeptide"
QVQLVQSGAEVKKPGSSVMVSCQASGGLLEDYIINWVRQAPGQGPEWMGGIIPVLGTVHYGPKFQGRVTITADESTDTAYMELSSLRSEDTAMYYCATETALVVSTTYLPHYFDNWGQGTLVTVSS

SEQ ID NO: 24867 - protein, 126 aa, Artificial Sequence
  source: /note="Description of Artificial Sequence: Synthetic polypeptide"
QVQLVQSGAEVKKPGSSVMVSCQASGGPLEDYIINWVRQAPGQGPEWMGGIIPVLGTVHYGPKFQGRVTITADESTDTAYMELSSLRSEDTAMYYCATETALVVSTTYLPHYFDNWGQGTLVTVSS

SEQ ID NO: 24868 - protein, 126 aa, Artificial Sequence
  source: /note="Description of Artificial Sequence: Synthetic polypeptide"
QVQLVQSGAEVKKPGSSVMVSCQASGGPLEDYIINWVRQAPGQGPEWMGGIIPVLGTVHYGPKFQGRVTITADESTDTAYMELSSLRSEDTAMYYCATETALVVSTTYRPHYFDNWGQGTLVTVSS

SEQ ID NO: 24869 - protein, 126 aa, Artificial Sequence
  source: /note="Description of Artificial Sequence: Synthetic polypeptide"
QVQLVQSGAEVKKPGSSVKVSCKASGGLLEDYIINWVRQAPGQGPEWMGGIIPVLGTVHYGPKFQGRVTITADESTSTAYMHLSSLRSEDTAMYYCARETALVVSTTYLPHYFDNWGQGTLVTVSS

SEQ ID NO: 24870 - protein, 126 aa, Artificial Sequence
  source: /note="Description of Artificial Sequence: Synthetic polypeptide"
QVQLVQSGAEVKKPGSSVKVSCKASGGLLEDYIINWVRQAPGQGPEWMGGIIPVLGTVHYGPKFQGRVTITADESTDTAYMHLSSLRSEDTAMYYCATETALVVSTTYLPHYFDNWGQGTLVTVSS

SEQ ID NO: 24871 - protein, 126 aa, Artificial Sequence
  source: /note="Description of Artificial Sequence: Synthetic polypeptide"
QVQLVQSGAEVKKPGSSVKVSCKASGGLLEDYIINWVRQAPGQGPEWMGGIIPVLGTVHYGPKFQGRVTITADESTSTAYMELSSLRSEDTAMYYCATETALVVSTTYLPHYFDNWGQGTLVTVSS

SEQ ID NO: 24872 - protein, 126 aa, Artificial Sequence
  source: /note="Description of Artificial Sequence: Synthetic polypeptide"
QVQLVQSGAEVKKPGSSVKVSCKASGGLLEDYIINWVRQAPGQGPEWMGGIIPVLGTVHYGPKFQGRVTITADESTSTAYMHLSSLRSEDTAMYYCATETALVVSTTYLPHYFDNWGQGTLVTVSS

SEQ ID NO: 24873 - protein, 120 aa, Artificial Sequence; identical to SEQ ID NO: 24632
  source: /note="Description of Artificial Sequence: Synthetic polypeptide"

SEQ ID NO: 24874 - protein, 120 aa, Artificial Sequence
  source: /note="Description of Artificial Sequence: Synthetic polypeptide"
QVTLRESGPALVKPTQTLTLTCTFSGFSLSTAGMSVGWIRQPPGKALEWLADIWWDDKKDYNPSLKSRLTISKDTSKNQVVLKVTNMDPADTATYYCARSMITNFYFDVWGAGTTVTVSS

SEQ ID NO: 24875 - protein, 120 aa, Artificial Sequence; identical to SEQ ID NO: 24696
  source: /note="Description of Artificial Sequence: Synthetic polypeptide"

SEQ ID NO: 24876 - protein, 120 aa, Artificial Sequence; identical to SEQ ID NO: 24697
  source: /note="Description of Artificial Sequence: Synthetic polypeptide"

SEQ ID NO: 24877 - protein, 120 aa, Artificial Sequence; identical to SEQ ID NO: 24698
  source: /note="Description of Artificial Sequence: Synthetic polypeptide"

SEQ ID NO: 24878 - protein, 120 aa, Artificial Sequence; identical to SEQ ID NO: 24698
  source: /note="Description of Artificial Sequence: Synthetic polypeptide"

SEQ ID NO: 24879 - protein, 120 aa, Artificial Sequence; identical to SEQ ID NO: 24700
  source: /note="Description of Artificial Sequence: Synthetic polypeptide"

SEQ ID NO: 24880 - protein, 120 aa, Artificial Sequence; identical to SEQ ID NO: 24637
  source: /note="Description of Artificial Sequence: Synthetic polypeptide"

SEQ ID NO: 24881 - protein, 120 aa, Artificial Sequence; identical to SEQ ID NO: 24637
  source: /note="Description of Artificial Sequence: Synthetic polypeptide"

SEQ ID NO: 24882 - protein, 120 aa, Artificial Sequence [sequence omitted]

SEQ ID NO: 24883 - protein, 120 aa, Artificial Sequence; identical to SEQ ID NO: 24704
  source: /note="Description of Artificial Sequence: Synthetic polypeptide"

SEQ ID NO: 24884 - protein, 120 aa, Artificial Sequence
  source: /note="Description of Artificial Sequence: Synthetic polypeptide"
QVTLRESGPALVKPTQTLTLTCTFSGFSLSTAGMSVGWIRQPPGKALEWLADIWWDDKKDYNPSLKSRLTISKDTSKNQVVLKVTNMDPADTATYYCARDMIFNWYFDVWGAGTTVTVSS

SEQ ID NO: 24885 - protein, 120 aa, Artificial Sequence
  source: /note="Description of Artificial Sequence: Synthetic polypeptide"
QVTLRESGPALVKPTQTLTLTCTFSGFSLSTAGMSVGWIRQPPGKALEWLADIWWDDKKDYNPSLKSRLTISKDTSKNQVVLKVTNMDPADTATYYCARDMITNFYFDVWGAGTTVTVSS

SEQ ID NO: 24886 - protein, 120 aa, Artificial Sequence
  source: /note="Description of Artificial Sequence: Synthetic polypeptide"
QVTLRESGPALVKPTQTLTLTCTFSGFSLSTAGMSVGWIRQPPGKALEWLADIWWDDKKHYNPSLKDRLTISKDTSKNQVVLKVTNMDPADTATYYCARDMIFNWYFDVWGAGTTVTVSS

SEQ ID NO: 24887 - protein, 120 aa, Artificial Sequence
  source: /note="Description of Artificial Sequence: Synthetic polypeptide"
EVQLLEESGGGLVRPGGSLRLSCAASGTTLSGYTMHWVRQAPGKGLEWVSSITGGSNFINYSDSVKGRFTISRDNAKNSLYLQMNSLTAEDTAVYYCATAPIAPPYFDHWGQGTLVTVSS

SEQ ID NO: 24888 - protein, 119 aa, Artificial Sequence
  source: /note="Description of Artificial Sequence: Synthetic polypeptide"
EVQLLESGGGLVRPGGSLRLSCAASGTTLSGYTMHWVRQAPGKGLEWVSSITGGSNFINYSDSVKGRFTISRDNAKNSLYLQMNSLTAEDTAVYYCATAPIAPPYFDHWGQGTLVTVSS

SEQ ID NO: 24889 - protein, 121 aa, Artificial Sequence [sequence omitted]

SEQ ID NO: 24890 - protein, 121 aa, Artificial Sequence; identical to SEQ ID NO: 6250
  source: /note="Description of Artificial Sequence: Synthetic polypeptide"

SEQ ID NO: 24891 - protein, 220 aa, Artificial Sequence
  source: /note="Description of Artificial Sequence: Synthetic polypeptide"
EVQLLESGGGLVQPGGSRRLSCAASGFTVSSSYMSWVRQTPGKGLEWISVFYSGGTTYYADAVKGRFSISMDTSKNTLHLQMNSLRVEDTAIYYCARVLSRASGMPDAFDIWGPGTMVTVSSASTKGPSVFPLAPSSAATSGGTAALGCLVKDYFPEPVTVSWNSGALTSGVHTFPAVLQSSGLYSLSSVVTVPSSSLGTQTYICNVNHKPSNTKVDKKV

SEQ ID NO: 24892 - protein, 140 aa, Artificial Sequence
  source: /note="Description of Artificial Sequence: Synthetic polypeptide"
MKLGFSWIFLVLVLKGVQCEIILVESGGGLVRPGGSLKLSCAASGFTFSHYAMSWARQTPEKRLEWVATINSGGSYTYYPDSVKGRFTISRDNAKNSLYLQMSSLRSEDTAMYYCARKGAMDYWGQGTSVTVSSAKTTAP

SEQ ID NO: 24893 - protein, 127 aa, Artificial Sequence
  source: /note="Description of Artificial Sequence: Synthetic polypeptide"
QVQLVESGGGVVQPGRPLRLSCAASGFAFNNFALHWVRQAPGKGPEWLAAVSYDGTSPYYAESVRARFSISRDNSKKTFYLQLDSLRPEDTAVYYCARGLGSGSYSWIGYFYAMDVWGRGITVTVSS

SEQ ID NO: 24894 - protein, 128 aa, Artificial Sequence
  source: /note="Description of Artificial Sequence: Synthetic polypeptide"
QVTLKESGPVLVKPSETLTLTCTVSGFSLTDARMGVSWIRQPPGKALEWLAHIFSNDEKFYSTSLKTRLTISKDTSTSQVVLRMTNMDPVDTATYYCARVDQGWVNTYSAFYYGMDFWGQGTTVTVSS

SEQ ID NO: 24895 - protein, 123 aa, Artificial Sequence
  source: /note="Description of Artificial Sequence: Synthetic polypeptide"
  VARIANT (50)..(50): /replace="Ile"
  SITE (1)..(123): /note="Variant residues given in the sequence have no preference with respect to those in the annotations for variant positions"
QVQLQESGPGLVKPSQTLSLTCTVSGGSISSGDYYWSWIRQPPGKGLEWLGYIYFSGSTYYNPSLKSRVTMSGDTSKNQFSLRLSSVTAADTAVYYCAREDTTMAIPYYFDPWGRGILVTVSS

SEQ ID NO: 24896 - protein, 128 aa, Artificial Sequence
  source: /note="Description of Artificial Sequence: Synthetic polypeptide"
QVTLKESGPVLVKPTETLTLTCTVSGFSLTDARMGVSWIRQPPGKALEWLAHIFSNDEKSYSTSLKSRLTISKDTSKSQVVLTMTNMDPVDTATYYCARVDQGWVNTYSAFYYGMDFWGQGTTVTVSS

SEQ ID NO: 24897 - protein, 224 aa, Artificial Sequence
  source: /note="Description of Artificial Sequence: Synthetic polypeptide"
QVQLVQSGPGLVKPSQTLALTCNVSGASINSDYYWTWIRQRPGGGLEWIGHISYTGNTYYTPSLSRLSMSLETSQSQFSLRLTSVTAADSAVYFCAACGAYVLISNCGWFDSWGQGTQVTVSSASTKGPSVFPLAPSSKSTSGGTAALGCLVKDYFPEPVTVSWSGALTSGVHTFPAVLQSSGLYSLSSWTVPSSSLGTQTYICNVNHKPSNTKVDKKVEPKSC

SEQ ID NO: 24898 - protein, 220 aa, Artificial Sequence
  source: /note="Description of Artificial Sequence: Synthetic polypeptide"
EVQLLQSGAELKPGASVKISCKTSGFTFSGHTIAWVRQAPGQGLEWMGWVSTNGNTEYAQKIQGRVTMTMDTSTSTVYMELRSLTSDDTAVYFCAREWLVMGGFAFDHWGQGTLLTVSSASTKGPSVFPLAPSSKSTSGGTAALGCLVKDYFPEPVTVSWNSGALTSGVHTFPAVLQSSGLYSLSSWTVPSSSLGTQTYICNVHKPSNTKVDKRVEPKSC

SEQ ID NO: 24899 - protein, 128 aa, Artificial Sequence
  source: /note="Description of Artificial Sequence: Synthetic polypeptide"
EVQLVQSGAEVKKPGTSLKISCKGSGFSFSNYWIGWVRQMPGKGLEWMGIVYPADSDTRYSPSFQGQVTISGDNSINTAYLQWSRLKASDTATYYCVRQIGGVVTIATDDYFYGMDIWGPGTIVIVSS

SEQ ID NO: 24900 - protein, 128 aa, Artificial Sequence
  source: /note="Description of Artificial Sequence: Synthetic polypeptide"
  MOD_RES (90)..(90): Pyrrolysine
EVQLVQSGAEVKKPGTSLKISCKGSGFSFSNYWIGWVRQMPGKGLEWMGIVYPADSDTRYSPSFQGQVTISGDNSINTAYLQWSRLKASXTATYYCVRQIGGVVTIATDDYFYGMDIWGPGTTVTVSS

SEQ ID NO: 24901 - protein, 127 aa, Artificial Sequence
  source: /note="Description of Artificial Sequence: Synthetic polypeptide"
QVQLVESGGGVVQPGRSLRLSCAASGFAFNNFAMHWVRQAPGKGLEWVAVVSYDGTSPYYADSVKGRFTISRDNSKNTLYLQMNSLRAEDTAVYYCARGLGSGSYSWIGYFYAMDVWGQGTTVTVSS

SEQ ID NO: 24902 - protein, 216 aa, Artificial Sequence
  source: /note="Description of Artificial Sequence: Synthetic polypeptide"
EIVLTQSPATLSLSPGERATLSCRASQSVNSHLAWYQQKPGQAPRLLIYNTFNRVTGIPARFSGSGSGTDFTLTISSLATEDFGVYYCQQRSNWPPALTFGGGTKVEIKRTVAAPSVFIFPPSDEQLKSGTASVVCLLNNFYPREAKVQWKVDNALQSGNSQESVTEQDSKDSTYSLSSTLTLSKADYEKHKVYACEVTHQGLSSPVTKSFNRGEC

SEQ ID NO: 24903 - protein, 215 aa, Artificial Sequence
  source: /note="Description of Artificial Sequence: Synthetic polypeptide"
DIQMTQSPSSLSASVGDRVTFTCRASQRISNHLNWYQQKPGKAPKLLIFGASTLQSGAPSRFSGSGSGTDFTLTITNVQPDDFATYYCQQSYRTPPINFGQGTRLDIKRTVAAPSVFIFPPSDEQLKSGTASVVCLLNNFYPREAKVQWKVDNALQSGNSQESVTEQDSKDSTYSLSSTLTLSKADYEKHKVYACEVTHQGLSSPVTKSFNRGEC

SEQ ID NO: 24904 - protein, 217 aa, Artificial Sequence
  source: /note="Description of Artificial Sequence: Synthetic polypeptide"
EIVLTQSPGTLSLSPGERATLSCRASQSVSSSYLAWYQQKPGQAPRLLIYGASSRATGIPDRFSGSGSGTDFTLTISRLEPEDFAVYYCQQYDSSLSTWTFGQGTKVEIKRTVAAPSVFIFPPSDEQLKSGTASVVCLLNNFYPREAKVQWKVDNALQSGNSQESVTEQDSKDSTYSLSSTLTLSKADYEKHKVYACEVTHQGLSSPVTKSFNRGEC

SEQ ID NO: 24905 - protein, 213 aa, Artificial Sequence
  source: /note="Description of Artificial Sequence: Synthetic polypeptide"
DIQMTQSPSSLSASVGDRVTITCRASQSITGYLNWYQQKPGKAPKLLIYATSTLQSEVPSRFSGSGSGTDFTLTISSLQPEDFATYYCQQSYNTLTFGGGTKVEIKRTVAAPSVFIFPPSDEQLKSGTASVVCLLNNFYPREAKVQWKVDNALQSGNSQESVTEQDSKDSTYSLSSTLTLSKADYEKHKVYACEVTHQGLSSPVTKSFNRGEC

SEQ ID NO: 24906 - protein, 215 aa, Artificial Sequence
  source: /note="Description of Artificial Sequence: Synthetic polypeptide"
EIVLTQSPGTLSLSPGERATLSCRASQSVSSSYLAWYQQKPGQAPRLLIHGASTGATGTPDRFSGSGSGTDFTLTISTLEPEDFAVYYCQQYGRTPYTFGQGTKLENKRTVAAPSVFIFPPSDEQLKSGTASVVCLLNNFYPREAKVQWKVDNALQSGNSQESVTEQDSKDSTYSLSSTLTLSKADYEKHKVYACEVTHQGLSSPVTKSFNRGEC

SEQ ID NO: 24907 - protein, 219 aa, Artificial Sequence
  source: /note="Description of Artificial Sequence: Synthetic polypeptide"
DIVMTQTPLSLSVTPGQPASISCRSSQSLLRSDGKTFLYWYLQKPGQSPQPLMYEVSSRFSGVPDRFSGSGSGADFTLNISRVETEDVGIYYCMQGLKIRRTFGPGTKVEIKRTVAAPSVFIFPPSDEQLKSGTASVVCLLNNFYPREAKVQWKVDNALQSGNSQESVTEQDSKDSTYSLSSTLTLSKADYEKHKVYACEVTHQGLSSPVTKSFNRGEC

SEQ ID NO: 24908 - protein, 215 aa, Artificial Sequence
  source: /note="Description of Artificial Sequence: Synthetic polypeptide"
DIQMTQSPSTLSASVGDRVTFSCRASQSVSSWVAWYQQKPGKAPKLLISEASNLESGVPSRFSGSGSGTEFTLTISSLQPEDFATYYCQQYHSYSGYTFGQGTKLEIKRTVAAPSVFIFPPSDEQLKSGTASVVCLLNNFYPREAKVQWKVDNALQSGNSQESVTEQDSKDSTYSLSSTLTLSKADYEKHKVYACEVTHQGLSSPVTKSFNRGEC

SEQ ID NO: 24909 - protein, 214 aa, Artificial Sequence
  source: /note="Description of Artificial Sequence: Synthetic polypeptide"
AIQLTQSPSSLSASVGDRVTLTCRASQGITDSLAWYQQKPGKAPKVLLYAASRLESGVPSRFSGRGSGTDFTLTISSLQPEDFATYYCQQYSKSPATFGPGTKVEIRRTVAAPSVFIFPPSDEQLKSGTASVVCLLNNFYPREAKVQWKVDNALQSGNSQESVTEQDSKDSTYSLSSTLTLSKADYEKHKVYACEVTHQGLSSPVTKSFNRGEC

SEQ ID NO: 24910 - protein, 219 aa, Artificial Sequence
  source: /note="Description of Artificial Sequence: Synthetic polypeptide"
DIVMTQSPLSLPVTPGEPASISCRSSQSLLNSNGFNYVDWYLQKPGQSPQLLIYLGSNRASGVPDRFSGSGSGTDFTLKISRVEAEDVGVYYCMQALETPLTFGGGTKVEIKRTVAAPSVFIFPPSDEQLKSGTASVVCLLNNFYPREAKVQWKVDNALQSGNSQESVTEQDSKDSTYSLSSTLTLSKADYEKHKVYACEVTHQGLSSPVTKSFNRGEC

SEQ ID NO: 24911 - protein, 215 aa, Artificial Sequence
  source: /note="Description of Artificial Sequence: Synthetic polypeptide"
EIVLTQSPGTLSLSPGGRATLSCRASQSVSSGYLAWYQQKPGQAPRLLIYGASGRATGIPDRFSGSGSGTDFTLTISRLEPEDFAVYYCQQYFGSPYTFGQGTKLELKRTVAAPSVFIFPPSDEQLKSGTASVVCLLNNFYPREAKVQWKVDNALQSGNSQESVTEQDSKDSTYSLSSTLTLSKADYEKHKVYACEVTHQGLSSPVTKSFNRGEC

SEQ ID NO: 24912 - protein, 214 aa, Artificial Sequence
  source: /note="Description of Artificial Sequence: Synthetic polypeptide"
NIQMTQSPSAMSASVGDRVTITCRASQGISNYLVWFQQKPGKVPKRLIYAASSLQSGVPSRFSGSGSGTEFTLTISSLQPEDFATYYCLQHNISPYTFGQGTKLETKRTVAAPSVFIFPPSDEQLKSGTASVVCLLNNFYPREAKVQWKVDNALQSGNSQESVTEQDSKDSTYSLSSTLTLSKADYEKHKVYACEVTHQGLSSPVTKSFNRGEC

SEQ ID NO: 24913 - protein, 220 aa, Artificial Sequence
  source: /note="Description of Artificial Sequence: Synthetic polypeptide"
DIVMTQSPDSLAVSLGERATINCRSSETVLYTSKNQSYLAWYQQKARQPPKLLLYWASTRESGVPARFSGSGSGTDFTLAISSLQAEDVAVYYCQQFFRSPFTFGPGTRLEIKRTVAAPSVFIFPPSDEQLKSGTASVVCLLNNFYPREAKVQWKVDNALQSGNSQESVTEQDSKDSTYSLSSTLTLSKADYEKHKVYACEVTHQGLSSPVTKSFNRGEC

SEQ ID NO: 24914 - protein, 215 aa, Artificial Sequence
  source: /note="Description of Artificial Sequence: Synthetic polypeptide"
EIVLTQSPGTLSLSPGERVTLSCRASQSVSSSYIAWYQQKPGQAPRLVIYAASRRATGVPDRFSGSGSATDFTLTISRLEPEDLAVYYCQHYGNSLFTFGPGTKVDVKRTVAAPSVFIFPPSDEQLKSGTASVVCLLNNFYPREAKVQWKVDNALQSGNSQESVTEQDSKDSTYSLSSTLTLSKADYEKHKVYACEVTHQGLSSPVTKSFNRGEC

SEQ ID NO: 24915 - protein, 215 aa, Artificial Sequence
  source: /note="Description of Artificial Sequence: Synthetic polypeptide"
DIQMTQSPSTLSASVGDRVTITCRASQSIGSRLAWYQQQPGKAPKFLIYDASSLESGVPSRFSGSGSGTEFTLTISSLQPEDLATYYCQQYNRDSPWTFGQGTKVEIKRTVAAPSVFIFPPSDEQLKSGTASVVCLLNNFYPREAKVQWKVDNALQSGNSQESVTEQDSKDSTYSLSSTLTLSKADYEKHKVYACEVTHQGLSSPVTKSFNRGEC

SEQ ID NO: 24916 - protein, 219 aa, Artificial Sequence
  source: /note="Description of Artificial Sequence: Synthetic polypeptide"
DIVMTQSPLSLPVTPGEPASISCRSSQSLLHSDGRYYVDWYLQKPGQSPHLLIYLASNRASGVPDRFTGSGSGTDFTLKISRVEAEDVGVYYCMQGLHTPWTFGQGTKVDIKRTVAAPSVFIFPPSDEQLKSGTASVVCLLNNFYPREAKVQWKVDNALQSGNSQESVTEQDSKDSTYSLSSTLTLSKADYEKHKVYACEVTHQGLSSPVTKSFNRGEC

SEQ ID NO: 24917 - protein, 213 aa, Artificial Sequence
  source: /note="Description of Artificial Sequence: Synthetic polypeptide"
EIVMTQSPATLSASPGERATLSCWASQTIGGNLAWYQQKPGQAPRLLIYGASTRATGVPARFSGSGSGTEFTLAISSLQSEDFAVYYCQQYKNWYTFGQGTKLELKRTVAAPSVFIFPPSDEQLKSGTASVVCLLNNFYPREAKVQWKVDNALQSGNSQESVTEQDSKDSTYSLSSTLTLSKADYEKHKVYACEVTHQGLSSPVTKSFNRGEC

SEQ ID NO: 24918 - protein, 215 aa, Artificial Sequence
  source: /note="Description of Artificial Sequence: Synthetic polypeptide"
DIQMTQSPSSLSASVGDRVTITCRASQTIASYVNWYQQKPGRAPSLLIYAASNLQSGVPPRFSGSGSGTDFTLTISGLQPDDFATYYCQQSYSYRALTFGGGTKVEIKRTVAAPSVFIFPPSDEQLKSGTASVVCLLNNFYPREAKVQWKVDNALQSGNSQESVTEQDSKDSTYSLSSTLTLSKADYEKHKVYACEVTHQGLSSPVTKSFNRGEC

SEQ ID NO: 24919 - protein, 216 aa, Artificial Sequence
  source: /note="Description of Artificial Sequence: Synthetic polypeptide"
EIVLTQSPATLSLSPGERATLSCRASQSVSSSLAWYQQTPGQAPRLLIYDASYRVTGIPARFSGSGSGIDFTLTISSLEPEDFAVYYCQQRSNWPPGLTFGGGTKVEIKRTVAAPSVFIFPPSDEQLKSGTASVVCLLNNFYPREAKVQWKVDNALQSGNSQESVTEQDSKDSTYSLSSTLTLSKADYEKHKVYACEVTHQGLSSPVTKSFNRGEC

SEQ ID NO: 24920 - protein, 214 aa, Artificial Sequence
  source: /note="Description of Artificial Sequence: Synthetic polypeptide"
AIQLTQSPSSLSASVGDTVTVTCRPSQDISSALAWYQQKPGKPPKLLIYGASTLDYGVPLRFSGTASGTHFTLTISSLQPEDFATYYCQQFNTYPFTFGPGTKVDIKRTVAAPSVFIFPPSDEQLKSGTASVVCLLNNFYPREAKVQWKVDNALQSGNSQESVTEQDSKDSTYSLSSTLTLSKADYEKHKVYACEVTHQGLSSPVTKSFNRGEC

SEQ ID NO: 24921 - protein, 220 aa, Artificial Sequence
  source: /note="Description of Artificial Sequence: Synthetic polypeptide"
DIVMTQSPDSLAVSLGERATINCKSSQSVLYNSNNKNYLAWYQQKPGQPPKLLIHLASTREYGVPDRFSGSGSGTDFALIISSLQAEDVAVYYCQQYYQTPLTFGQGTKVEIKRTVAAPSVFIFPPSDEQLKSGTASVVCLLNNFYPREAKVQWKVDNALQSGNSQESVTEQDSKDSTYSLSSTLTLSKADYEKHKVYACEVTHQGLSSPVTKSFNRGEC

SEQ ID NO: 24922 - protein, 214 aa, Artificial Sequence
  source: /note="Description of Artificial Sequence: Synthetic polypeptide"
DIQMTQSPSSLAASVGDRVTITCRASQFISSYLHWYQQRPGKAPKLLMYAASTLQSGVPSRFSGSGSGTDFTLTISSLQPEDFATYYCQQSYTNPYTFGQGTKLEIKRTVAAPSVFIFPPSDEQLKSGTASVVCLLNNFYPREAKVQWKVDNALQSGNSQESVTEQDSKDSTYSLSSTLTLSKADYEKHKVYACEVTHQGLSSPVTKSFNRGEC

SEQ ID NO: 24923 - protein, 214 aa, Artificial Sequence
  source: /note="Description of Artificial Sequence: Synthetic polypeptide"
DIQMTQSPSSLSASVGDRVTITCRASQSIASYLNWYQQKPGKAPKLLIYAASSLHSGVPSRFSGSGSGTDFTLTISSLQPEDFATYYCQHSYSTRFTFGPGTKVDVKRTVAAPSVFIFPPSDEQLKSGTASVVCLLNNFYPREAKVQWKVDNALQSGNSQESVTEQDSKDSTYSLSSTLTLSKADYEKHKVYACEVTHQGLSSPVTKSFNRGEC

SEQ ID NO: 24924 - protein, 214 aa, Artificial Sequence
  source: /note="Description of Artificial Sequence: Synthetic polypeptide"
DIQMTQSPSTLSASVGDRVTITCRASQSVTSELAWYQQKPGKAPNFLIYKASSLESGVPSRFSGSGSGTEFTLTISSLQPDDFATYYCQQYNSFPYTFGQGTKLEIKRTVAAPSVFIFPPSDEQLKSGTASVVCLLNNFYPREAKVQWKVDNALQSGNSQESVTEQDSKDSTYSLSSTLTLSKADYEKHKVYACEVTHQGLSSPVTKSFNRGEC

SEQ ID NO: 24925 - protein, 214 aa, Artificial Sequence
  source: /note="Description of Artificial Sequence: Synthetic polypeptide"
DIQMTQSPSTLSASVGDRLTITCRASQNIYNWLAWYQQKPGKAPKLLIYDASTLESGVPSRFSGSGSGTEFTLTISSLQPDDFATYYCQQYNSLSPTFGQGTKVEIKRTVAAPSVFIFPPSDEQLKSGTASVVCLLNNFYPREAKVQWKVDNALQSGNSQESVTEQDSKDSTYSLSSTLTLSKADYEKHKVYACEVTHQGLSSPVTKSFNRGEC

SEQ ID NO: 24926 - protein, 214 aa, Artificial Sequence
  source: /note="Description of Artificial Sequence: Synthetic polypeptide"
DIQLTQSPSFLSASLEDRVTITCRASQGISSYLAWYQQKPGKAPKLLLDAASTLQSGVPSRFSGSGSGTEFTLTISSLQPEDFATYYCQQLNSYPRTFGQGTKVDIKRTVAAPSVFIFPPSDEQLKSGTASVVCLLNNFYPREAKVQWKVDNALQSGNSQESVTEQDSKDSTYSLSSTLTLSKADYEKHKVYACEVTHQGLSSPVTKSFNRGEC

SEQ ID NO: 24927 - protein, 214 aa, Artificial Sequence
  source: /note="Description of Artificial Sequence: Synthetic polypeptide"
DIQMTQSPSSLSASVGDRVSITCRASQGISNYLAWYQQKPGKVPKLLIYAASTLQSGVPSRFSGSGSGTDFTLTISSLQPEDVATYYCQKYNSAPQTFGQGTKVEIKRTVAAPSVFIFPPSDEQLKSGTASVVCLLNNFYPREAKVQWKVDNALQSGNSQESVTEQDSKDSTYSLSSTLTLSKADYEKHKVYACEVTHQGLSSPVTKSFNRGEC

SEQ ID NO: 24928 - protein, 220 aa, Artificial Sequence
  source: /note="Description of Artificial Sequence: Synthetic polypeptide"
DIVMTQSPDSLAVSLGERATINCRSSQSVLYSSNNKNYLAWYQQKPGQPPKLLVYWASTRASGVPDRFSGSGSGTDFTLTLSSLQAEDVAVYYCQQFHSTPRTFGQGTKVEIKRTVAAPSVFIFPPSDEQLKSGTASVVCLLNNFYPREAKVQWKVDNALQSGNSQESVTEQDSKDSTYSLSSTLTLSKADYEKHKVYACEVTHQGLSSPVTKSFNRGEC

SEQ ID NO: 24929 - protein, 215 aa, Artificial Sequence
  source: /note="Description of Artificial Sequence: Synthetic polypeptide"
EIVLTQSPGTLSLSPGERATLSCRASQSVSSNYLAWYQQKPGQAPRLLIYGASSRAAGMPDRFSGSGSGTDFTLTISRLEPEDFAVYYCQQYGNSPLTFGGGTEVEIKRTVAAPSVFIFPPSDEQLKSGTASVVCLLNNFYPREAKVQWKVDNALQSGNSQESVTEQDSKDSTYSLSSTLTLSKADYEKHKVYACEVTHQGLSSPVTKSFNRGEC

SEQ ID NO: 24930 - protein, 214 aa, Artificial Sequence
  source: /note="Description of Artificial Sequence: Synthetic polypeptide"
DIQMTQSPSSVSASVGDRVTITCRASQAISNWLAWYQQKPGKAPKLLIYAASSLQSGVPSRFSGSGSGTDFTLTISGLQPEDFATYYCQQADTFPFTFGPGTKVDIKRTVAAPSVFIFPPSDEQLKSGTASVVCLLNNFYPREAKVQWKVDNALQSGNSQESVTEQDSKDSTYSLSSTLTLSKADYEKHKVYACEVTHQGLSSPVTKSFNRGEC

SEQ ID NO: 24931 - protein, 220 aa, Artificial Sequence
  source: /note="Description of Artificial Sequence: Synthetic polypeptide"
DIVMTQTPLSLPVTPGEPASISCRSSQSLLDSNDGNTYLDWYLQKPGQSPQLLIYTFSYRASGVPDRFSGSGSGTDFTLKISRVEAEDVGVYYCMQRIEFPYTFGQGTKLEIKRTVAAPSVFIFPPSDEQLKSGTASVVCLLNNFYPREAKVQWKVDNALQSGNSQESVTEQDSKDSTYSLSSTLTLSKADYEKHKVYACEVTHQGLSSPVTKSFNRGEC

SEQ ID NO: 24932 - protein, 219 aa, Artificial Sequence
  source: /note="Description of Artificial Sequence: Synthetic polypeptide"
DIVMTQSPLSLPVTPGEPASISCRSSQSLLHRNEYNYLDWYLQKPGQSPQLLIYWGSNRASGVPDRFSGSGSGTDFTLKISRVEAEDVGVYYCMQTLQTPRTFGQGTKVEIKRTVAAPSVFIFPPSDEQLKSGTASVVCLLNNFYPREAKVQWKVDNALQSGNSQESVTEQDSKDSTYSLSSTLTLSKADYEKHKVYACEVTHQGLSSPVTKSFNRGEC

SEQ ID NO: 24933 - protein, 214 aa, Artificial Sequence
  source: /note="Description of Artificial Sequence: Synthetic polypeptide"
DIQMTQSPSSVSASVGDRVTITCQASQDISNYLNWYQQKPGKAPKLLIFDATKLETGVPTRFIGSGSGTDFTVTITSLQPEDVATYYCQHFANLPYTFGQGTKLEIKRTVAAPSVFIFPPSDEQLKSGTASVVCLLNNFYPREAKVQWKVDNALQSGNSQESVTEQDSKDSTYSLSSTLTLSKADYEKHKVYACEVTHQGLSSPVTKSFNRGEC

SEQ ID NO: 24934 - protein, 214 aa, Artificial Sequence
  source: /note="Description of Artificial Sequence: Synthetic polypeptide"
DIQMTQSPSSLSASVGDRVTITCRASQGIRNYLAWYQQKPGKVPKLLVFAASTLQSGVPSRFSGSGSGTDFTLTISSLQPEDVATYYCQRYNSAPLTFGGGTKVEIKRTVAAPSVFIFPPSDEQLKSGTASVVCLLNNFYPREAKVQWKVDNALQSGNSQESVTEQDSKDSTYSLSSTLTLSKADYEKHKVYACEVTHQGLSSPVTKSFNRGEC

SEQ ID NO: 24935 - protein, 215 aa, Artificial Sequence
  source: /note="Description of Artificial Sequence: Synthetic polypeptide"
DIQMTQSPSSLSASVGDRVTITCRASQIIASYLNWYQQKPGRAPKLLIYAASSLQSGVPSRFSGSGSGTDFTLTISSLQPEDFATYYCQQSYSTPIFTFGPGTKVNIKRTVAAPSVFIFPPSDEQLKSGTASVVCLLNNFYPREAKVQWKVDNALQSGNSQESVTEQDSKDSTYSLSSTLTLSKADYEKHKVYACEVTHQGLSSPVTKSFNRGEC

SEQ ID NO: 24936 - protein, 213 aa, Artificial Sequence
  source: /note="Description of Artificial Sequence: Synthetic polypeptide"
EIVLTQSPATLSLSPGERATLSCRTSQSVSSYLAWYQQKPGQAPRLLIYDASNRATGIPARFSGSGSGTDFTLTISSLEPEDFAVYYCQQRSDWLTFGGGTKVEIKRTVAAPSVFIFPPSDEQLKSGTASVVCLLNNFYPREAKVQWKVDNALQSGNSQESVTEQDSKDSTYSLSSTLTLSKADYEKHKVYACEVTHQGLSSPVTKSFNRGEC

SEQ ID NO: 24937 - protein, 215 aa, Artificial Sequence
  source: /note="Description of Artificial Sequence: Synthetic polypeptide"
EIVMTQSPATLSVSPGERATLSCRASQSIKNNLAWYQVKPGQAPRLLTSGASARATGIPGRFSGSGSGTDFTLTISSLQSEDIAVYYCQEYNNWPLLTFGGGTKVEIQRTVAAPSVFIFPPSDEQLKSGTASVVCLLNNFYPREAKVQWKVDNALQSGNSQESVTEQDSKDSTYSLSSTLTLSKADYEKHKVYACEVTHQGLSSPVTKSFNRGEC

SEQ ID NO: 24938 - protein, 215 aa, Artificial Sequence
  source: /note="Description of Artificial Sequence: Synthetic polypeptide"
DIQMTQSPPSLSASVGDRVTITCRASQRIASYLNWYQQKPGRAPKLLIFAASSLQSGVPSRFSGSGSGTDFTLTISSLQPEDYATYYCQQSYSTPIYTFGQGTKLEIKRTVAAPSVFIFPPSDEQLKSGTASVVCLLNNFYPREAKVQWKVDNALQSGNSQESVTEQDSKDSTYSLSSTLTLSKADYEKHKVYACEVTHQGLSSPVTKSFNRGEC

SEQ ID NO: 24939 - protein, 214 aa, Artificial Sequence
  source: /note="Description of Artificial Sequence: Synthetic polypeptide"
DIQMTQSPSSLSASVGDRVTITCQASQGISNYLNWYQQKPGKAPKLLIFDASNLESEVPSRFSGRGSGTDFTFSISSLQPEDIATYFCQQYDNFPYTFGQGTKLEIKRTVAAPSVFIFPPSDEQLKSGTASVVCLLNNFYPREAKVQWKVDNALQSGNSQESVTEQDSKDSTYSLSSTLTLSKADYEKHKVYACEVTHQGLSSPVTKSFNRGEC

SEQ ID NO: 24940 - protein, 214 aa, Artificial Sequence
  source: /note="Description of Artificial Sequence: Synthetic polypeptide"
DIQMTQSPSSLAASVGDRVTITCRASQTIASYVNWYQQKPGKAPNLLIYAASSLQSGVPSRFSGSGSGTDFTLTISSLQPEDFASYFCQQSYSFPYTFGQGTKLDIKRTVAAPSVFIFPPSDEQLKSGTASVVCLLNNFYPREAKVQWKVDNALQSGNSQESVTEQDSKDSTYSLSSTLTLSKADYEKHKVYACEVTHQGLSSPVTKSFNRGEC

SEQ ID NO: 24941 - protein, 215 aa, Artificial Sequence
  source: /note="Description of Artificial Sequence: Synthetic polypeptide"
DIQMTQSPSSLSASVGDRVTITCRASQTIASYVNWYQQKPGKAPKLLIYAASNLQSGVPSRFSGSGSGTDFTLTISSLQPEDFATYYCQQSYSVPRLTFGGGTKVDITRTVAAPSVFIFPPSDEQLKSGTASVVCLLNNFYPREAKVQWKVDNALQSGNSQESVTEQDSKDSTYSLSSTLTLSKADYEKHKVYACEVTHQGLSSPVTKSFNRGEC

SEQ ID NO: 24942 - protein, 213 aa, Artificial Sequence
  source: /note="Description of Artificial Sequence: Synthetic polypeptide"
DIQMTQSPSSLSASVGDRVTITCRSSQTISVFLNWYQQKPGKAPKLLIYAASSLHSAVPSRFSGSGSGTDFTLTISSLQPEDSATYYCQESFSSSTFGGGTKVEIKRTVAAPSVFIFPPSDEQLKSGTASVVCLLNNFYPREAKVQWKVDNALQSGNSQESVTEQDSKDSTYSLSSTLTLSKADYEKHKVYACEVTHQGLSSPVTKSFNRGEC

SEQ ID NO: 24943 - protein, 215 aa, Artificial Sequence
  source: /note="Description of Artificial Sequence: Synthetic polypeptide"
EIVMTQSPATLSVSPGETATLSCRASQSVSSNLAWYQHKPGQAPRLLIHSASTRATGIPARFSGSGSGTEFTLTISSLQSEDFAVYYCQQYNMWPPWTFGQGTKVEIKRTVAAPSVFIFPPSDEQLKSGTASVVCLLNNFYPREAKVQWKVDNALQSGNSQESVTEQDSKDSTYSLSSTLTLSKADYEKHKVYACEVTHQGLSSPVTKSFNRGEC

SEQ ID NO: 24944 - protein, 219 aa, Artificial Sequence
  source: /note="Description of Artificial Sequence: Synthetic polypeptide"
DIVMTQSPLSLPVTPGAPASISCRSSQSLLRTNGYNYLDWYLQKPGQSPQLLIYLGSIRASGVPDRFSGSGSGTDFTLKISRVEAEDVGVYYCMQSLQTSITFGQGTRLEIKRTVAAPSVFIFPPSDEQLKSGTASVVCLLNNFYPREAKVQWKVDNALQSGNSQESVTEQDSKDSTYSLSSTLTLSKADYEKHKVYACEVTHQGLSSPVTKSFNRGEC

SEQ ID NO: 24945 - protein, 214 aa, Artificial Sequence
  source: /note="Description of Artificial Sequence: Synthetic polypeptide"
EIVMTQSPATLSVSPGERATLSCRASQSVGNNLAWYQQRPGQAPRLLIYGASTRATGIPARFSGSGSGTEFTLTISSLQSEDFAVYYCQQYDKWPETFGQGTKVDIKRTVAAPSVFIFPPSDEQLKSGTASVVCLLNNFYPREAKVQWKVDNALQSGNSQESVTEQDSKDSTYSLSSTLTLSKADYEKHKVYACEVTHQGLSSPVTKSFNRGEC

SEQ ID NO: 24946 - protein, 110 aa, Artificial Sequence
  source: /note="Description of Artificial Sequence: Synthetic polypeptide"
QSVVTQTPSVSGAPGQRVTISCTGSSSNIGAGYDVHWYQQLPGTAPKLLIYDNNNRPSGVPDRFSASKSGTSASLAITGLQAEDEADYYCQSYDRNLSGVFGTGTKVTVL

SEQ ID NO: 24947 - protein, 110 aa, Artificial Sequence
  source: /note="Description of Artificial Sequence: Synthetic polypeptide"
QSVLTQPPSMSGAPGQRVTISCTGGSSNIGAGYDVQWYQQLPGAAPKLLIYANDNRPSGVPDRFSGSKSGTSGSLVIAGLRAEDEADYYCQSYDRTLSVVFGGGTKLTVL

SEQ ID NO: 24948 - protein, 110 aa, Artificial Sequence
  source: /note="Description of Artificial Sequence: Synthetic polypeptide"
QSVVTQPPSVSGAPGQRVTISCTGSSSNIGAGYDVHWYQQLPGTAPKLLIYDNNNRPSGVPDRFSASKSGTSASLAITGLQAEDEADYYCQSYDRSLSGVFGTGTKVTVL

SEQ ID NO: 24949 - protein, 110 aa, Artificial Sequence
  source: /note="Description of Artificial Sequence: Synthetic polypeptide"
QSVVTQPPSVSGAPGQRVTISCTGSSSNIGAGYDVHWYQQLPGTAPKLLIYGNSNRPSGVPDRFSGSKSGTSASLAITGLQAEDEADYYCQSYDSSLSGVFGTGTKVTVL

SEQ ID NO: 24950 - protein, 110 aa, Artificial Sequence
  source: /note="Description of Artificial Sequence: Synthetic polypeptide"
QSVLTQPPSVSGAPGQRVTISCTGSSSNIGAGYDVHWYQQLPGTAPKLLIYGNSNRPSGVPDRFSGSKSGTSASLAITGLQAEDEADYYCQSYDSSLSVVFGGGTKLTVL

SEQ ID NO: 24951 - protein, 213 aa, Artificial Sequence
  source: /note="Description of Artificial Sequence: Synthetic polypeptide"
DIQMTQSPSTLSASVGDRVTITCSLSSRVGYMHWYQQKPGKAPKLLIYDTMYQSSGVPSRFSGSGSGTEFTLTISSLQPDDFATYYCFQGSGYPFTFGGGTKVEIKRTVAAPSVFIFPPSDEQLKSGTASVVCLLNNFYPREAKVQWKVDNALQSGNSQESVTEQDSKDSTYSLSSTLTLSKADYEKHKVYACEVTHQGLSSPVTKSFNRGEC

SEQ ID NO: 24952 - protein, 107 aa, Artificial Sequence
  source: /note="Description of Artificial Sequence: Synthetic polypeptide"
DIQMTQSPSTLSASVGDRVTITCKASQDINRYLNWYQQKPGKAPKLLIYRANRLVDGVPSRFSGSGSGTEFTLTISSLQPDDFATYYCLQFHEFPYTFGGGTKLEIL

SEQ ID NO: 24953 - protein, 106 aa, Artificial Sequence
  source: /note="Description of Artificial Sequence: Synthetic polypeptide"
DIQMTQSPSTLSASVGDRVTITCKCQLSVGYMHWYQQKPGKAPKLWIYDTSKLASGVPSRFSGSGSGTEFTLTISSLQPDDFATYYCFQGSGYPFTFGGGTKLEIK

SEQ ID NO: 24954 - protein, 108 aa, Artificial Sequence
  source: /note="Description of Artificial Sequence: Synthetic polypeptide"
EIVLTQSPGTLSLSPGERATLSCRASQIVSRNHLAWYQQKPGQAPRLLIFGASSRATGIPVRFSGSGSGTDFTLTINGLAPEDFAVYYCLSSDSSIFTFGPGTKVDFK

SEQ ID NO: 24955 - protein, 109 aa, Artificial Sequence
  source: /note="Description of Artificial Sequence: Synthetic polypeptide"
LTQPHSVSESLGKTVTISCTRAGGRIASNYVQWYQQRPGSSPTTVIYEDNQRPFGVPDRFSGSIDTSSNSASLTISGLKTEDEADYYCQSYDSENPWVFGGGTKLTVLG

SEQ ID NO: 24956 - protein, 106 aa, Artificial Sequence
  source: /note="Description of Artificial Sequence: Synthetic polypeptide"
DIQMTQSPSTLSASVGDRVTITCSASSSVGYMHWYQQKPGKAPKLLIYDTSKLASGVPSRFSGSGSGTEFTLTISSLQPDDFATYYCFQGSGYPFTFGGGTKVEIK

SEQ ID NO: 24957 - protein, 106 aa, Artificial Sequence
  source: /note="Description of Artificial Sequence: Synthetic polypeptide"
DIQMTQSPSTLSASVGDRVTITCKCQLSVGYMHWYQQKPGKAPKLLIYDTSKLASGVPSRFSGSGSGTEFTLTISSLQPDDFATYYCFQGSGYPFTFGGGTKLEIK

SEQ ID NO: 24958 - protein, 106 aa, Artificial Sequence
  source: /note="Description of Artificial Sequence: Synthetic polypeptide"
DIQMTQSPSTLSASVGDRVTITCSLSSRVGYMHWYQQKPGKAPKLLIYDTMYQSSGVPSRFSGSGSGTEFTLTISSLQPDDFATYYCFQGSGYPFTFGGGTKVEIK

SEQ ID NO: 24959 - protein, 213 aa, Artificial Sequence
  source: /note="Description of Artificial Sequence: Synthetic polypeptide"
DIQMTQSPSTLSASVGDRVTITCSASSRVGYMHWYQQKPGKAPKLLIYDTFKLSSGVPSRFSGSGSGTEFTLTISSLQPDDFATYYCFQGSGYPFTFGGGTKVEIKRTVAAPSVFIFPPSDEQLKSGTASVVCLLNNFYPREAKVQWKVDNALQSGNSQESVTEQDSKDSTYSLSSTLTLSKADYEKHKVYACEVTHQGLSSPVTKSFNRGEC

SEQ ID NO: 24960 - protein, 213 aa, Artificial Sequence
  source: /note="Description of Artificial Sequence: Synthetic polypeptide"
DIQMTQSPSTLSASVGDRVTITCLPSSRVGYMHWYQQKPGKAPKLLIYDTMYQSSGVPSRFSGSGSGTEFTLTISSLQPDDFATYYCFQGSGYPFTFGGGTKVEIKRTVAAPSVFIFPPSDEQLKSGTASVVCLLNNFYPREAKVQWKVDNALQSGNSQESVTEQDSKDSTYSLSSTLTLSKADYEKHKVYACEVTHQGLSSPVTKSFNRGEC

SEQ ID NO: 24961 - protein, 213 aa, Artificial Sequence
  source: /note="Description of Artificial Sequence: Synthetic polypeptide"
DIQMTQSPSTLSASVGDRVTITCSLSSRVGYMHWYQQKPGKAPKLLIYDTFKLSSGVPSRFSGSGSGTEFTLTISSLQPDDFATYYCFQGSGYPFTFGGGTKVEIKRTVAAPSVFIFPPSDEQLKSGTASVVCLLNNFYPREAKVQWKVDNALQSGNSQESVTEQDSKDSTYSLSSTLTLSKADYEKHKVYACEVTHQGLSSPVTKSFNRGEC

SEQ ID NO: 24962 - protein, 213 aa, Artificial Sequence
  source: /note="Description of Artificial Sequence: Synthetic polypeptide"
DIQMTQSPSTLSASVGDRVTITCSASSRVGYMHWYQQKPGKAPKLLIYDTFFLDSGVPSRFSGSGSGTEFTLTISSLQPDDFATYYCFQGSGYPFTFGGGTKVEIKRTVAAPSVFIFPPSDEQLKSGTASVVCLLNNFYPREAKVQWKVDNALQSGNSQESVTEQDSKDSTYSLSSTLTLSKADYEKHKVYACEVTHQGLSSPVTKSFNRGEC

SEQ ID NO: 24963 - protein, 213 aa, Artificial Sequence
  source: /note="Description of Artificial Sequence: Synthetic polypeptide"
DIQMTQSPSTLSASVGDRVTITCSPSSRVGYMHWYQQKPGKAPKLLIYDTRYQSSGVPSRFSGSGSGTEFTLTISSLQPDDFATYYCFQGSGYPFTFGGGTKVEIKRTVAAPSVFIFPPSDEQLKSGTASVVCLLNNFYPREAKVQWKVDNALQSGNSQESVTEQDSKDSTYSLSSTLTLSKADYEKHKVYACEVTHQGLSSPVTKSFNRGEC

SEQ ID NO: 24964 - protein, 213 aa, Artificial Sequence
  source: /note="Description of Artificial Sequence: Synthetic polypeptide"
DIQMTQSPSTLSASVGDRVTITCSPSSRVGYMHWYQQKPGKAPKLLIYDTMRLASGVPSRFSGSGSGTEFTLTISSLQPDDFATYYCFQGSGYPFTFGGGTKVEIKRTVAAPSVFIFPPSDEQLKSGTASVVCLLNNFYPREAKVQWKVDNALQSGNSQESVTEQDSKDSTYSLSSTLTLSKADYEKHKVYACEVTHQGLSSPVTKSFNRGEC

SEQ ID NO: 24965 - protein, 213 aa, Artificial Sequence
  source: /note="Description of Artificial Sequence: Synthetic polypeptide"
DIQMTQSPSTLSASVGDRVTITCSLSSRVGYMHWYQQKPGKAPKLLIYDTFYLSSGVPSRFSGSGSGTEFTLTISSLQPDDFATYYCFQGSGYPFTFGGGTKVEIKRTVAAPSVFIFPPSDEQLKSGTASVVCLLNNFYPREAKVQWKVDNALQSGNSQESVTEQDSKDSTYSLSSTLTLSKADYEKHKVYACEVTHQGLSSPVTKSFNRGEC

SEQ ID NO: 24966 - protein, 213 aa, Artificial Sequence
  source: /note="Description of Artificial Sequence: Synthetic polypeptide"
DIQMTQSPSTLSASVGDRVTITCSLSSRVGYMHWYQQKPGKAPKLLIYDTRGLPSGVPSRFSGSGSGTEFTLTISSLQPDDFATYYCFQGSGYPFTFGGGTKVEIKRTVAAPSVFIFPPSDEQLKSGTASVVCLLNNFYPREAKVQWKVDNALQSGNSQESVTEQDSKDSTYSLSSTLTLSKADYEKHKVYACEVTHQGLSSPVTKSFNRGEC

SEQ ID NO: 24967 - protein, 95 aa, Artificial Sequence; identical to SEQ ID NO: 23654
  source: /note="Description of Artificial Sequence: Synthetic polypeptide"

SEQ ID NO: 24968 - protein, 95 aa, Artificial Sequence; identical to SEQ ID NO: 23654
  source: /note="Description of Artificial Sequence: Synthetic polypeptide"

SEQ ID NO: 24969 - protein, 111 aa, Artificial Sequence
  source: /note="Description of Artificial Sequence: Synthetic polypeptide"
DIVLTQTPGTLSVSPGERATLSCRASQSVSSNLAWYQQKPGQAPRLLISGASTRATGIPARFSGSGSGTEFTLTISSLQSEDFAVYYCQQYNYWPPWTFGQGTKLEIKRTV

SEQ ID NO: 24970 - protein, 106 aa, Artificial Sequence
  source: /note="Description of Artificial Sequence: Synthetic polypeptide"
DIQMTQSPSTLSASVGDRVTITCSASSSVGYMHWYQQKPGKAPKLLIYDTSKLASGVPSRFSGSGSGTEFTLTISSLQPDDFATYYCFQGSFYPFTFGGGTKVEIK

SEQ ID NO: 24971 - protein, 106 aa, Artificial Sequence
  source: /note="Description of Artificial Sequence: Synthetic polypeptide"
DIQMTQSPSTLSASVGDRVTITCSASSSVGYMHWYQQKPGKAPKLLIYDTFKLASGVPSRFSGSGSGTEFTLTISSLQPDDFATYYCFQGSGYPFTFGGGTKVEIK

SEQ ID NO: 24972 - protein, 106 aa, Artificial Sequence
  source: /note="Description of Artificial Sequence: Synthetic polypeptide"
DIQMTQSPSTLSASVGDRVTITCSASSSVGYMHWYQQKPGKAPKLLIYDTFKLASGVPSRFSGSGSGTEFTLTISSLQPDDFATYYCFQGSFYPFTFGGGTKVEIK

SEQ ID NO: 24973 - protein, 106 aa, Artificial Sequence; identical to SEQ ID NO: 24972
  source: /note="Description of Artificial Sequence: Synthetic polypeptide"

SEQ ID NO: 24974 - protein, 106 aa, Artificial Sequence
  source: /note="Description of Artificial Sequence: Synthetic polypeptide"
DIQMTQSPSTLSASVGDRVTITCSASSSVGYMHWYQQKPGKAPKLLIYDTFKLASGVPSRFSGSGSGTEFTLTISSLQPDDFATYYCFQGSYYPFTFGGGTKVEIK

SEQ ID NO: 24975 - protein, 107 aa, Artificial Sequence
  source: /note="Description of Artificial Sequence: Synthetic polypeptide"
DILMTQSPSSLSASVGDRVTITCRASQSISSYLNWYQQKPGKAPKLLIYAASSLQSGVPSRFSGSGSGTDFTLTISSLQPEDFATYYCQQSYSTPLTFGGGTKVEIK

SEQ ID NO: 24976 - protein, 107 aa, Artificial Sequence
  source: /note="Description of Artificial Sequence: Synthetic polypeptide"
DIKMTQSPSSMYVSLGERVTITCKASQDINRYLNWFQQKPGKSPKTLIHRANRLVDGVPSRFSGSGSGQEYSLTISSLEFEDMGIYYCLQFHEFPYTFGGGTKLEIL

SEQ ID NO: 24977 - protein, 214 aa, Artificial Sequence
  source: /note="Description of Artificial Sequence: Synthetic polypeptide"
EIVMTQSPSSLSASIGDRVTITCQASQDISTYLNWYQQKPGQAPRLLIYGASNLETGVPSRFTGSGYGTDFSVTISSLQPEDIATYYCQQYQYLPYTFAPGTKVEIKRTVAAPSVFIFPPSDEQLKSGTASVVCLLNNFYPREAKVQWKVDNALQSGNSQESVTEQDSKDSTYSLSSTLTLSKADYEKHKVYACEVTHQGLSSPVTKSFNRGEC

SEQ ID NO: 24978 - protein, 214 aa, Artificial Sequence
  source: /note="Description of Artificial Sequence: Synthetic polypeptide"
DIQMTQSPSSLSASVGDRVTITCRASQNIKNYLNWYQQKPGKVPKLLIYAASTLQSGVPSRFSGSGSGTDFTLTISSLQPEDFATYSCQQSYNNQLTFGGGTKVEIKRTVAAPSVFIFPPSDEQLKSGTASVVCLLNNFYPREAKVQWKVDNALQSGNSQESVTEQDSKDSTYSLSSTLTLSKADYEKHKVYACEVTHQGLSSPVTKSFNRGEC

SEQ ID NO: 24979 - protein, 216 aa, Artificial Sequence; identical to SEQ ID NO: 24902
  source: /note="Description of Artificial Sequence: Synthetic polypeptide"

SEQ ID NO: 24980 - protein, 215 aa, Artificial Sequence; identical to SEQ ID NO: 24903
  source: /note="Description of Artificial Sequence: Synthetic polypeptide"

SEQ ID NO: 24981 - protein, 217 aa, Artificial Sequence; identical to SEQ ID NO: 24904
  source: /note="Description of Artificial Sequence: Synthetic polypeptide"

SEQ ID NO: 24982 - protein, 213 aa, Artificial Sequence; identical to SEQ ID NO: 24905
  source: /note="Description of Artificial Sequence: Synthetic polypeptide"

SEQ ID NO: 24983 - protein, 215 aa, Artificial Sequence; identical to SEQ ID NO: 24906
  source: /note="Description of Artificial Sequence: Synthetic polypeptide"

SEQ ID NO: 24984 - protein, 219 aa, Artificial Sequence; identical to SEQ ID NO: 24907
  source: /note="Description of Artificial Sequence: Synthetic polypeptide"

SEQ ID NO: 24985 - protein, 215 aa, Artificial Sequence; identical to SEQ ID NO: 24908
  source: /note="Description of Artificial Sequence: Synthetic polypeptide"

SEQ ID NO: 24986 - protein, 214 aa, Artificial Sequence; identical to SEQ ID NO: 24909
  source: /note="Description of Artificial Sequence: Synthetic polypeptide"

SEQ ID NO: 24987 - protein, 219 aa, Artificial Sequence; identical to SEQ ID NO: 24910
  source: /note="Description of Artificial Sequence: Synthetic polypeptide"

SEQ ID NO: 24988 - protein, 215 aa, Artificial Sequence; identical to SEQ ID NO: 24911
  source: /note="Description of Artificial Sequence: Synthetic polypeptide"

SEQ ID NO: 24989 - protein, 214 aa, Artificial Sequence; identical to SEQ ID NO: 24912
  source: /note="Description of Artificial Sequence: Synthetic polypeptide"

SEQ ID NO: 24990 - protein, 220 aa, Artificial Sequence; identical to SEQ ID NO: 24913
  source: /note="Description of Artificial Sequence: Synthetic polypeptide"

SEQ ID NO: 24991 - protein, 215 aa, Artificial Sequence; identical to SEQ ID NO: 24914
  source: /note="Description of Artificial Sequence: Synthetic polypeptide"

SEQ ID NO: 24992 - protein, 215 aa, Artificial Sequence; identical to SEQ ID NO: 24915
  source: /note="Description of Artificial Sequence: Synthetic polypeptide"

SEQ ID NO: 24993 - protein, 219 aa, Artificial Sequence; identical to SEQ ID NO: 24916
  source: /note="Description of Artificial Sequence: Synthetic polypeptide"

SEQ ID NO: 24994 - protein, 213 aa, Artificial Sequence; identical to SEQ ID NO: 24917
  source: /note="Description of Artificial Sequence: Synthetic polypeptide"

SEQ ID NO: 24995 - protein, 215 aa, Artificial Sequence; identical to SEQ ID NO: 24918
  source: /note="Description of Artificial Sequence: Synthetic polypeptide"

SEQ ID NO: 24996 - protein, 216 aa, Artificial Sequence; identical to SEQ ID NO: 24919
  source: /note="Description of Artificial Sequence: Synthetic polypeptide"

SEQ ID NO: 24997 - protein, 214 aa, Artificial Sequence; identical to SEQ ID NO: 24920
  source: /note="Description of Artificial Sequence: Synthetic polypeptide"

SEQ ID NO: 24998 - protein, 220 aa, Artificial Sequence; identical to SEQ ID NO: 24921
  source: /note="Description of Artificial Sequence: Synthetic polypeptide"

SEQ ID NO: 24999 - protein, 214 aa, Artificial Sequence; identical to SEQ ID NO: 24922
  source: /note="Description of Artificial Sequence: Synthetic polypeptide"

SEQ ID NO: 25000 - protein, 214 aa, Artificial Sequence; identical to SEQ ID NO: 24923
  source: /note="Description of Artificial Sequence: Synthetic polypeptide"

SEQ ID NO: 25001 - protein, 214 aa, Artificial Sequence; identical to SEQ ID NO: 24924
  source: /note="Description of Artificial Sequence: Synthetic polypeptide"

SEQ ID NO: 25002 - protein, 214 aa, Artificial Sequence; identical to SEQ ID NO: 24925
  source: /note="Description of Artificial Sequence: Synthetic polypeptide"

SEQ ID NO: 25003 - protein, 214 aa, Artificial Sequence; identical to SEQ ID NO: 24926
  source: /note="Description of Artificial Sequence: Synthetic polypeptide"

SEQ ID NO: 25004 - protein, 214 aa, Artificial Sequence; identical to SEQ ID NO: 24927
  source: /note="Description of Artificial Sequence: Synthetic polypeptide"

SEQ ID NO: 25005 - protein, 220 aa, Artificial Sequence; identical to SEQ ID NO: 24928
  source: /note="Description of Artificial Sequence: Synthetic polypeptide"

SEQ ID NO: 25006 - protein, 215 aa, Artificial Sequence; identical to SEQ ID NO: 24929
  source: /note="Description of Artificial Sequence: Synthetic polypeptide"

SEQ ID NO: 25007 - protein, 214 aa, Artificial Sequence; identical to SEQ ID NO: 24930
  source: /note="Description of Artificial Sequence: Synthetic polypeptide"

SEQ ID NO: 25008 - protein, 220 aa, Artificial Sequence; identical to SEQ ID NO: 24931
  source: /note="Description of Artificial Sequence: Synthetic polypeptide"

SEQ ID NO: 25009 - protein, 219 aa, Artificial Sequence; identical to SEQ ID NO: 24932
  source: /note="Description of Artificial Sequence: Synthetic polypeptide"

SEQ ID NO: 25010 - protein, 214 aa, Artificial Sequence; identical to SEQ ID NO: 24933
  source: /note="Description of Artificial Sequence: Synthetic polypeptide"

SEQ ID NO: 25011 - protein, 214 aa, Artificial Sequence; identical to SEQ ID NO: 24934
  source: /note="Description of Artificial Sequence: Synthetic polypeptide"

SEQ ID NO: 25012 - protein, 215 aa, Artificial Sequence; identical to SEQ ID NO: 24935
  source: /note="Description of Artificial Sequence: Synthetic polypeptide"

SEQ ID NO: 25013 - protein, 213 aa, Artificial Sequence; identical to SEQ ID NO: 24936
  source: /note="Description of Artificial Sequence: Synthetic polypeptide"

SEQ ID NO: 25014 - protein, 215 aa, Artificial Sequence; identical to SEQ ID NO: 24937
  source: /note="Description of Artificial Sequence: Synthetic polypeptide"

SEQ ID NO: 25015 - protein, 214 aa, Artificial Sequence
  source: /note="Description of Artificial Sequence: Synthetic polypeptide"
DIQMTQSPPSLSASVGDRVTTCRASQRIASYLNWYQQKPGRAPKLLIFAASSLQSGVPSRFSGSGSGTDFTLTISSLQPEDYATYYCQQSYSTPIYTFGQGTKLEIKRTVAAPSVFIFPPSDEQLKSGTASVVCLLNNFYPREAKVQWKVDNALQSGNSQESVTEQDSKDSTYSLSSTLTLSKADYEKHKVYACEVTHQGLSSPVTKSFNRGEC

SEQ ID NO: 25016 - protein, 214 aa, Artificial Sequence; identical to SEQ ID NO: 24939
  source: /note="Description of Artificial Sequence: Synthetic polypeptide"

SEQ ID NO: 25017 - protein, 214 aa, Artificial Sequence; identical to SEQ ID NO: 24940
  source: /note="Description of Artificial Sequence: Synthetic polypeptide"

SEQ ID NO: 25018 - protein, 215 aa, Artificial Sequence; identical to SEQ ID NO: 24941
  source: /note="Description of Artificial Sequence: Synthetic polypeptide"

SEQ ID NO: 25019 - protein, 213 aa, Artificial Sequence; identical to SEQ ID NO: 24942
  source: /note="Description of Artificial Sequence: Synthetic polypeptide"

SEQ ID NO: 25020 - protein, 215 aa, Artificial Sequence; identical to SEQ ID NO: 24943
  source: /note="Description of Artificial Sequence: Synthetic polypeptide"

SEQ ID NO: 25021 - protein, 219 aa, Artificial Sequence; identical to SEQ ID NO: 24944
  source: /note="Description of Artificial Sequence: Synthetic polypeptide"

SEQ ID NO: 25022 - protein, 214 aa, Artificial Sequence; identical to SEQ ID NO: 24945
  source: /note="Description of Artificial Sequence: Synthetic polypeptide"

SEQ ID NO: 25023 - protein, 111 aa, Artificial Sequence
  source: /note="Description of Artificial Sequence: Synthetic polypeptide"
DIVLTQSPASLAVSLGQRATIFCRASQSVDLFGRSYMHWFQQKPGQPPKLLIYAASNPESGIPARFTGSGSGTDFTLNIHPVEEEDAATYYCQQIIEDPWTFGGGTKLEIK

SEQ ID NO: 25024 - protein, 111 aa, Artificial Sequence
  source: /note="Description of Artificial Sequence: Synthetic polypeptide"
DIVLTQSPASLAVSLGQRATIFCRASQSVDLFGKSYMHWFQQKPGQPPKLLIYAASNPESGIPARFTGSGSGTDFTLNIHPVEEEDAATYYCQQIIEDPWTFGGGTKLEIK

SEQ ID NO: 25025 - protein, 111 aa, Artificial Sequence
  source: /note="Description of Artificial Sequence: Synthetic polypeptide"
DIVLTQSPASLAVSLGQRATIFCRASQSVDLFGQSYMHWFQQKPGQPPKLLIYAASNPESGIPARFTGSGSGTDFTLNIHPVEEEDAATYYCQQIIEDPWTFGGGTKLEIK

SEQ ID NO: 25026 - protein, 111 aa, Artificial Sequence
  source: /note="Description of Artificial Sequence: Synthetic polypeptide"
DIVLTQSPASLAVSLGQRATIFCRASQSVDLFGVSYMHWFQQKPGQPPKLLIYAASNPESGIPARFTGSGSGTDFTLNIHPVEEEDAATYYCQQIIEDPWTFGGGTKLEIK

SEQ ID NO: 25027 - protein, 111 aa, Artificial Sequence
  source: /note="Description of Artificial Sequence: Synthetic polypeptide"
DIVLTQSPASLAVSLGQRATIFCRASQSVDHFGKSYVHWFQQKPGQPPKLLIYAASNPESGIPARFTGSGSGTDFTLNIHPVEEEDAATYYCQQIIEDPWTFGGGTKLEIK

SEQ ID NO: 25028 - protein, 111 aa, Artificial Sequence
  source: /note="Description of Artificial Sequence: Synthetic polypeptide"
DIVLTQSPASLAVSLGQRATIFCRASQSVDVFGRSYMHWFQQKPGQPPKLLIYAASNPESGIPARFTGSGSGTDFTLNIHPVEEEDAATYYCQQIIEDPWTFGGGTKLEIK

SEQ ID NO: 25029 - protein, 111 aa, Artificial Sequence
  source: /note="Description of Artificial Sequence: Synthetic polypeptide"
DIVLTQSPASLAVSLGQRATIFCRASQSVDLFGTSYMHWFQQKPGQPPKLLIYAASNPESGIPARFTGSGSGTDFTLNIHPVEEEDAATYYCQQIIEDPWTFGGGTKLEIK

SEQ ID NO: 25030 - protein, 111 aa, Artificial Sequence
  source: /note="Description of Artificial Sequence: Synthetic polypeptide"
DIVLTQSPASLAVSLGQRATIFCRASQSVDYLGRSYMHWFQQKPGQPPKLLIYAASNPESGIPARFTGSGSGTDFTLNIHPVEEEDAATYYCQQIIEDPWTFGGGTKLEIK

SEQ ID NO: 25031 - protein, 111 aa, Artificial Sequence
  source: /note="Description of Artificial Sequence: Synthetic polypeptide"
DIVLTQSPASLAVSLGQRATIFCRASQSVDLFGSSYMHWFQQKPGQPPKLLIYAASNPESGIPARFTGSGSGTDFTLNIHPVEEEDAATYYCQQIIEDPWTFGGGTKLEIK

SEQ ID NO: 25032 - protein, 111 aa, Artificial Sequence
  source: /note="Description of Artificial Sequence: Synthetic polypeptide"
DIVLTQSPASLAVSLGQRATIFCRASQSVDYSGRSYMHWFQQKPGQPPKLLIYAASNPESGIPARFTGSGSGTDFTLNIHPVEEEDAATYYCQQIIEDPWTFGGGTKLEIK

SEQ ID NO: 25033 - protein, 111 aa, Artificial Sequence
  source: /note="Description of Artificial Sequence: Synthetic polypeptide"
DIVLTQSPASLAVSLGQRATIFCRASQSVDFFGKSYMHWFQQKPGQPPKLLIYAASNPESGIPARFTGSGSGTDFTLNIHPVEEEDAATYYCQQIIEDPWTFGGGTKLEIK

SEQ ID NO: 25034 - protein, 111 aa, Artificial Sequence
  source: /note="Description of Artificial Sequence: Synthetic polypeptide"
DIVMTQSPDSLAVSLGERATINCRASDSVDLFGKSYMHWYQQKPGQPPKLLIYAASNPESGVPDRFSGSGSGTDFTLTISSLQAEDVAVYYCQQIIDDPWTFGQGTKVEIK

SEQ ID NO: 25035 - protein, 111 aa, Artificial Sequence
  source: /note="Description of Artificial Sequence: Synthetic polypeptide"
DIVMTQSPDSLAVSLGERATINCRASDSVDLFGRSYMHWYQQKPGQPPKLLIYAASNPESGVPDRFSGSGSGTDFTLTISSLQAEDVAVYYCQQIIDDPWTFGQGTKVEIK

SEQ ID NO: 25036 - protein, 120 aa, Artificial Sequence
  source: /note="Description of Artificial Sequence: Synthetic polypeptide"
QITLKESGPTLVKPTQTLTLTCTFSGFSLSTSGMGVSWIRQPPGKALEWLAHLYWDDDYRYNPSLKSRLTITKDTSKNQVVLTMTNMDPVDTATYYCARLYGFTYGFAYWGQGTLVTVSS

SEQ ID NO: 25037 - protein, 111 aa, Artificial Sequence
  source: /note="Description of Artificial Sequence: Synthetic polypeptide"
DIVMTQSPDSLAVSLGERATINCRASDSVDLFGQSYMHWYQQKPGQPPKLLIYAASNPESGVPDRFSGSGSGTDFTLTISSLQAEDVAVYYCQQIIDDPWTFGQGTKVEIK

SEQ ID NO: 25038 - protein, 120 aa, Artificial Sequence; identical to SEQ ID NO: 24663
  source: /note="Description of Artificial Sequence: Synthetic polypeptide"

SEQ ID NO: 25039 - protein, 111 aa, Artificial Sequence
  source: /note="Description of Artificial Sequence: Synthetic polypeptide"
DIVMTQSPDSLAVSLGERATINCRASDSVDLFGVSYMHWYQQKPGQPPKLLIYAASNPESGVPDRFSGSGSGTDFTLTISSLQAEDVAVYYCQQIIDDPWTFGQGTKVEIK

SEQ ID NO: 25040 - protein, 120 aa, Artificial Sequence
  source: /note="Description of Artificial Sequence: Synthetic polypeptide"
QITLKESGPTLVKPTQTLTLTCTFSGFSLSTSGMGVSWIRQPPGKALEWLAHIYWDDDKRYSPSLKSRLTITKDTSKNQVVLTMTNMDPVDTATYYCARLYGFTYGFAYWGQGTLVTVSS

SEQ ID NO: 25041 - protein, 111 aa, Artificial Sequence
  source: /note="Description of Artificial Sequence: Synthetic polypeptide"
DIVMTQSPDSLAVSLGERATINCRASQSVDFFGTSYMHWYQQKPGQPPKLLIYAASNPESGVPDRFSGSGSGTDFTLTISSLQAEDVAVYYCQQIIDDPWTFGQGTKVEIK

SEQ ID NO: 25042 - protein, 111 aa, Artificial Sequence
  source: /note="Description of Artificial Sequence: Synthetic polypeptide"
DIVMTQSPDSLAVSLGERATINCRASDSVDLFGISYQHWYQQKPGQPPKLLIYAASNPESGVPDRFSGSGSGTDFTLTISSLQAEDVAVYYCQQIIEDPWTFGQGTKVEIK

SEQ ID NO: 25043 - protein, 111 aa, Artificial Sequence
  source: /note="Description of Artificial Sequence: Synthetic polypeptide"
DIVMTQSPDSLAVSLGERATINCRASQSVDLFGQSYMHWYQQKPGQPPKLLIYAASNPESGVPDRFSGSGSGTDFTLTISSLQAEDVAVYYCQQIIDDPWTFGQGTKVEIK

SEQ ID NO: 25044 - protein, 111 aa, Artificial Sequence
  source: /note="Description of Artificial Sequence: Synthetic polypeptide"
DIVMTQSPDSLAVSLGERATINCRASHSVDLFGTSYMHWYQQKPGQPPKLLIYAASNPESGVPDRFSGSGSGTDFTLTISSLQAEDVAVYYCQQIIDDPWTFGQGTKVEIK

SEQ ID NO: 25045 - protein, 120 aa, Artificial Sequence
  source: /note="Description of Artificial Sequence: Synthetic polypeptide"
QITLKESGPTLVKPTQTLTLTCTFSGFSLSTSGMGVSWIRQPPGKALEWLAHLYWDDDKRYSPSLKSRLTITKDTSKNQVVLTMTNMDPVDTATYYCARLYGFTYGFAYWGQGTLVTVSS

SEQ ID NO: 25046 - protein, 111 aa, Artificial Sequence
  source: /note="Description of Artificial Sequence: Synthetic polypeptide"
DIVMTQSPDSLAVSLGERATINCRASDSVDLFGTSYMHWYQQKPGQPPKLLIYAASNPESGVPDRFSGSGSGTDFTLTISSLQAEDVAVYYCQQIIDDPWTFGQGTKVEIK

SEQ ID NO: 25047 - protein, 111 aa, Artificial Sequence
  source: /note="Description of Artificial Sequence: Synthetic polypeptide"
DIVMTQSPDSLAVSLGERATINCRASQSVDLFGTSYMHWYQQKPGQPPKLLIYAASNPESGVPDRFSGSGSGTDFTLTISSLQAEDVAVYYCQQIIDDPWTFGQGTKVEIK

SEQ ID NO: 25048 - protein, 111 aa, Artificial Sequence
  source: /note="Description of Artificial Sequence: Synthetic polypeptide"
DIVMTQSPDSLAVSLGERATINCRASQSVDFFGKSYMHWYQQKPGQPPKLLIYAASNPESGVPDRFSGSGSGTDFTLTISSLQAEDVAVYYCQQIIDDPWTFGQGTKVEIK

SEQ ID NO: 25049 - protein, 111 aa, Artificial Sequence
  source: /note="Description of Artificial Sequence: Synthetic polypeptide"
DIVMTQSPDSLAVSLGERATINCRASDSVDFFGKSYMHWYQQKPGQPPKLLIYAASNPESGVPDRFSGSGSGTDFTLTISSLQAEDVAVYYCQQIIDDPWTFGQGTKVEIK

SEQ ID NO: 25050 - protein, 111 aa, Artificial Sequence
  source: /note="Description of Artificial Sequence: Synthetic polypeptide"
DIVMTQSPDSLAVSLGERATINCRASDSVDLFGRSYMHWYQQKPGQPPKLLIYAASNPESGVPDRFSGSGSGTDFTLTISSLQAEDVAVYYCQQIIEDPWTFGQGTKVEIK

SEQ ID NO: 25051 - protein, 111 aa, Artificial Sequence
  source: /note="Description of Artificial Sequence: Synthetic polypeptide"
DIVMTQSPDSLAVSLGERATINCRASQSVDYFGVSYMHWYQQKPGQPPKLLIYAASNPESGVPDRFSGSGSGTDFTLTISSLQAEDVAVYYCQQIIDDPWTFGQGTKVEIK

SEQ ID NO: 25052 - protein, 111 aa, Artificial Sequence
  source: /note="Description of Artificial Sequence: Synthetic polypeptide"
DIVMTQSPDSLAVSLGERATINCRASDSVDYFGVSYMHWYQQKPGQPPKLLIYAASNPESGVPDRFSGSGSGTDFTLTISSLQAEDVAVYYCQQIIDDPWTFGQGTKVEIK

SEQ ID NO: 25053 - protein, 111 aa, Artificial Sequence
  source: /note="Description of Artificial Sequence: Synthetic polypeptide"
DIVMTQSPDSLAVSLGERATINCRASQSVDYLGKSYMHWYQQKPGQPPKLLIYAASNPESGVPDRFSGSGSGTDFTLTISSLQAEDVAVYYCQQIIDDPWTFGQGTKVEIK

SEQ ID NO: 25054 - protein, 111 aa, Artificial Sequence; identical to SEQ ID NO: 25053
  source: /note="Description of Artificial Sequence: Synthetic polypeptide"

SEQ ID NO: 25055 - protein, 110 aa, Artificial Sequence
  source: /note="Description of Artificial Sequence: Synthetic polypeptide"
DIVMTQSPDSLAVSLGERATINCRASQSVDYFGRSYMHWYQQKPGQPPKLLIYAASNPESGVPDRFSGSGSGTDFTLTISSLQAEDVAVYYCQQIIDDPWTFGQGTKVEI

SEQ ID NO: 25056 - protein, 111 aa, Artificial Sequence
  source: /note="Description of Artificial Sequence: Synthetic polypeptide"
DIVMTQSPDSLAVSLGERATINCRASQSVDYFGTSYMHWYQQKPGQPPKLLIYAASNPESGVPDRFSGSGSGTDFTLTISSLQAEDVAVYYCQQIIDDPWTFGQGTKVEIK

SEQ ID NO: 25057 - protein, 111 aa, Artificial Sequence
  source: /note="Description of Artificial Sequence: Synthetic polypeptide"
DIVMTQSPDSLAVSLGERATINCRASQSVDLLGGSYMHWYQQKPGQPPKLLIYAASNPESGVPDRFSGSGSGTDFTLTISSLQAEDVAVYYCQQIIEDPWTFGQGTKVEIK

SEQ ID NO: 25058 - protein, 15 aa, Artificial Sequence
  source: /note="Description of Artificial Sequence: Synthetic peptide"
RASQSVDLLGGSYMH

SEQ ID NO: 25059 - protein, 111 aa, Artificial Sequence
  source: /note="Description of Artificial Sequence: Synthetic polypeptide"
DIVMTQSPDSLAVSLGERATINCRASQSVDYNGISYMHWYQQKPGQPPKLLIYAASNPESGVPDRFSGSGSGTDFTLTISSLQAEDVAVYYCQQIIDDPWTFGQGTKVEIK

SEQ ID NO: 25060 - protein, 9 aa, Artificial Sequence
  source: /note="Description of Artificial Sequence: Synthetic peptide"
QQIIDDPWT

SEQ ID NO: 25061 - protein, 111 aa, Artificial Sequence
  source: /note="Description of Artificial Sequence: Synthetic polypeptide"
DIVMTQSPDSLAVSLGERATINCRASDSVDYFGQSYMHWYQQKPGQPPKLLIYAASNPESGVPDRFSGSGSGTDFTLTISSLQAEDVAVYYCQQIIDDPWTFGQGTKVEIK

SEQ ID NO: 25062 - protein, 111 aa, Artificial Sequence
  source: /note="Description of Artificial Sequence: Synthetic polypeptide"
DIVMTQSPDSLAVSLGERATINCRASDSVDLFGQSYMHWYQQKPGQPPKLLIYAASNPESGVPDRFSGSGSGTDFTLTISSLQAEDVAVYYCQQIIADPWTFGQGTKVEIK

SEQ ID NO: 25063 - protein, 9 aa, Artificial Sequence
  source: /note="Description of Artificial Sequence: Synthetic peptide"
QQIIADPWT

SEQ ID NO: 25064 - protein, 111 aa, Artificial Sequence
  source: /note="Description of Artificial Sequence: Synthetic polypeptide"
DIVMTQSPDSLAVSLGERATINCRASDSVDLFGVSYMHWYQQKPGQPPKLLIYAASNPESGVPDRFSGSGSGTDFTLTISSLQAEDVAVYYCQQIIEDPWTFGQGTKVEIK

SEQ ID NO: 25065 - protein, 111 aa, Artificial Sequence
  source: /note="Description of Artificial Sequence: Synthetic polypeptide"
DIVMTQSPDSLAVSLGERATINCRASDSVDYFGRSYMHWYQQKPGQPPKLLIYAASNPESGVPDRFSGSGSGTDFTLTISSLQAEDVAVYYCQQIIDDPWTFGQGTKVEIK

SEQ ID NO: 25066 - protein, 111 aa, Artificial Sequence
  source: /note="Description of Artificial Sequence: Synthetic polypeptide"
QSVLTQPPSVSAAPGQKVTISCTGSSSNLGAGYDVHWYRQLPGTAPKLLIYDNNNRPSGVPDRFSGSKSGPSASLAISGLQAEDEADYYCQSYDSSLNGYVFGTGTQLTVL

SEQ ID NO: 25067 - protein, 128 aa, Artificial Sequence
  source: /note="Description of Artificial Sequence: Synthetic polypeptide"
MGWSCIILFLVATATGVHSELTQPPSVSGAPGQRVTISCTGSSSNIGAGYDVHWYQQLPGTAPKLLIYGNSNRPSGVPDRFSGSKSGTSASLAITGLQAEDEADYYCQSYDSSLNGYVFGTGTQLTVL

SEQ ID NO: 25068 - protein, 130 aa, Artificial Sequence
  source: /note="Description of Artificial Sequence: Synthetic polypeptide"
MGWSCIILFLVATATGVHSQSVLTQPPSVSGAPGQRVTISCTGSSSNIGAGYDVHWYQQLPGTAPKLLIYGNSNRPSGVPDRFSGSKSGTSASLAITGLQAEDEADYYCQSYDSSLNGYVFGTGTQLTVL

SEQ ID NO: 25069 - protein, 124 aa, Artificial Sequence
  source: /note="Description of Artificial Sequence: Synthetic polypeptide"
MGWSCIILFLVATATGVHSELTQSPSSLSASVGDRVTITCRATQSVSNFLNWYQQKPGEAPTLLIYDASTSQSGVPSRFSGSGSGMDFSLTISSLQPEDLAMYYCQASINTPLFGGGTRIDMRR

SEQ ID NO: 25070 - protein, 101 aa, Artificial Sequence
  source: /note="Description of Artificial Sequence: Synthetic polypeptide"
MRVPAQLLGLLLLWLRGARCDIQMNFLNWYQQKPGEAPTLLIYDASTSQSGVPSRFSGSGSGMDFSLTISSLQPEDLAMYYCQASINTPLFGGGTRIDMRR

SEQ ID NO: 25071 - protein, 106 aa, Artificial Sequence; identical to SEQ ID NO: 4042
  source: /note="Description of Artificial Sequence: Synthetic polypeptide"

SEQ ID NO: 25072 - protein, 106 aa, Artificial Sequence
  source: /note="Description of Artificial Sequence: Synthetic polypeptide"
TVAAPSVFIFPPSDEQLKSGTASVVCLLNNFYPREAKVQWKVDNALQSGNSQESVTEQDSKDSTYSLSSTLTLSKADYEKHKVYACEVTHQGLSLPVTKSFNRGEC

SEQ ID NO: 25073 - protein, 111 aa, Artificial Sequence
  source: /note="Description of Artificial Sequence: Synthetic polypeptide"
DIQLTQSPLSLPVTLGDQASISCRSSQTLVHTDGNTYLEWFLQKPGQSPKLLIYRVSNRFSGVPDRFSGSGSGTDFTLKISRVEAEDLGVYFCFQGSHLPRTFGGGTKLEI

SEQ ID NO: 25074 - protein, 111 aa, Artificial Sequence
  source: /note="Description of Artificial Sequence: Synthetic polypeptide"
DIQLTQSPSSLSASVGDRVTITCRSSQTLVHTDGNTYLEWYQQKPGAPKLLIYRVSNRFSGVPSRFSGSGSGTDFTFTISSLQPEDIATYYCQSHLPRTFGQGTKVEIKDE

SEQ ID NO: 25075 - protein, 213 aa, Artificial Sequence; identical to SEQ ID NO: 24965
  source: /note="Description of Artificial Sequence: Synthetic polypeptide"

SEQ ID NO: 25076 - protein, 208 aa, Artificial Sequence
  source: /note="Description of Artificial Sequence: Synthetic polypeptide"
DIQMTQSPSTLSASVGDRVTITCSLSSRVGYMHWYQQKPGKAPKLLIYDTRGLPSGVPSRFSGSGSGTEFTLTISSLQPDDFATYYCFQGSGYPFTFGGGTKVEIKRTVAAPSVFIFPPSDEQLKSGTASVVCLLNNFYPREAKVQWKVDNALQSGNSQESVTEQDSKDSTYSLSSTLTLSKADYEKHKVYACEVTHQGLSSPVTKSF

SEQ ID NO: 25077 - protein, 213 aa, Artificial Sequence; identical to SEQ ID NO: 24964
  source: /note="Description of Artificial Sequence: Synthetic polypeptide"

SEQ ID NO: 25078 - protein, 213 aa, Artificial Sequence; identical to SEQ ID NO: 24961
  source: /note="Description of Artificial Sequence: Synthetic polypeptide"

SEQ ID NO: 25079 - protein, 213 aa, Artificial Sequence; identical to SEQ ID NO: 24959
  source: /note="Description of Artificial Sequence: Synthetic polypeptide"

SEQ ID NO: 25080 - protein, 213 aa, Artificial Sequence; identical to SEQ ID NO: 24951
  source: /note="Description of Artificial Sequence: Synthetic polypeptide"

SEQ ID NO: 25081 - protein, 213 aa, Artificial Sequence; identical to SEQ ID NO: 24960
  source: /note="Description of Artificial Sequence: Synthetic polypeptide"

SEQ ID NO: 25082 - protein, 213 aa, Artificial Sequence; identical to SEQ ID NO: 24962
  source: /note="Description of Artificial Sequence: Synthetic polypeptide"

SEQ ID NO: 25083 - protein, 213 aa, Artificial Sequence; identical to SEQ ID NO: 24963
  source: /note="Description of Artificial Sequence: Synthetic polypeptide"

SEQ ID NO: 25084 - protein, 106 aa, Artificial Sequence
  source: /note="Description of Artificial Sequence: Synthetic polypeptide"
DIQMTQSPSTLSASVGDRVTITCSASSSVGYMHWYQQKPGKAPKLLIYDTSKLASGVPSRFSGSGSGTEFTLTISSLQPDDFATYYCFQGSGYPFTFGGGTKLEIK

SEQ ID NO: 25085 - protein, 213 aa, Artificial Sequence
  source: /note="Description of Artificial Sequence: Synthetic polypeptide"
DIQMTQSPSTLSASVGDRVTITCSASSSVGYMHWYQQKPGKAPKLLIYDTYKQTSGVPSRFSGSGSGTEFTLTISSLQPDDFATYYCFQGSGYPFTFGGGTKVEIKRTVAAPSVFIFPPSDEQLKSGTASVVCLLNNFYPREAKVQWKVDNALQSGNSQESVTEQDSKDSTYSLSSTLTLSKADYEKHKVYACEVTHQGLSSPVTKSFNRGEC

SEQ ID NO: 25086 - protein, 101 aa, Artificial Sequence
  source: /note="Description of Artificial Sequence: Synthetic polypeptide"
DIVMTQSPDSLAVSLGERATINCKSSQSVLYSSNNKNYLAWYQQKPGQPPKLLIYWASTRESGVPDRFSGSGSGTDFTLTISSLQAEDVAVYYCQQYYSTP

SEQ ID NO: 25087 - protein, 111 aa, Artificial Sequence
  source: /note="Description of Artificial Sequence: Synthetic polypeptide"
DIVLTQSPASLAVSLGQRATIFCRASQSVDYNGISYMHWFQQKPGQPPKLLIYAASNPESGIPARFTGSGSGTDFTLNIHPVEEEDAATYYCQQIIEDPWTFGGGTKLEIK

SEQ ID NO: 25088 - protein, 108 aa, Artificial Sequence
  source: /note="Description of Artificial Sequence: Synthetic polypeptide"
DIKVTQSPSSMYASLGERVTITCKASQDINNYLNWFQQKPGKSPKTLIYRANRLLDGVPSRFSGSGSGQDYSLTISSLEYEDMGIYYCLQFDEFPYTFGGGTKLEIKR

SEQ ID NO: 25089 - protein, 106 aa, Artificial Sequence
  source: /note="Description of Artificial Sequence: Synthetic polypeptide"
DIQMTQSPSTLSASVGDRVTITCSLSSRVGYMHWYQQKPGKAPKLLIYDTFYLSSGVPSRFSGSGSGTEFTLTISSLQPDDFATYYCFQGSGYPFTFGGGTKVEIK

SEQ ID NO: 25090 - protein, 106 aa, Artificial Sequence
  source: /note="Description of Artificial Sequence: Synthetic polypeptide"
DIQMTQSPSTLSASVGDRVTITCSLSSRVGYMHWYQQKPGKAPKLLIYDTRGLPSGVPSRFSGSGSGTEFTLTISSLQPDDFATYYCFQGSGYPFTFGGGTKVEIK

SEQ ID NO: 25091 - protein, 106 aa, Artificial Sequence
  source: /note="Description of Artificial Sequence: Synthetic polypeptide"
DIQMTQSPSTLSASVGDRVTITCSPSSRVGYMHWYQQKPGKAPKLLIYDTMRLASGVPSRFSGSGSGTEFTLTISSLQPDDFATYYCFQGSGYPFTFGGGTKVEIK

SEQ ID NO: 25092 - protein, 106 aa, Artificial Sequence
  source: /note="Description of Artificial Sequence: Synthetic polypeptide"
DIQMTQSPSTLSASVGDRVTITCSLSSRVGYMHWYQQKPGKAPKLLIYDTFKLSSGVPSRFSGSGSGTEFTLTISSLQPDDFATYYCFQGSGYPFTFGGGTKVEIK

SEQ ID NO: 25093 - protein, 106 aa, Artificial Sequence
  source: /note="Description of Artificial Sequence: Synthetic polypeptide"
DIQMTQSPSTLSASVGDRVTITCSASSRVGYMHWYQQKPGKAPKLLIYDTFKLSSGVPSRFSGSGSGTEFTLTISSLQPDDFATYYCFQGSGYPFTFGGGTKVEIK

SEQ ID NO: 25094 - protein, 106 aa, Artificial Sequence; identical to SEQ ID NO: 24958
  source: /note="Description of Artificial Sequence: Synthetic polypeptide"

SEQ ID NO: 25095 - protein, 106 aa, Artificial Sequence
  source: /note="Description of Artificial Sequence: Synthetic polypeptide"
DIQMTQSPSTLSASVGDRVTITCLPSSRVGYMHWYQQKPGKAPKLLIYDTMYQASGVPSRFSGSGSGTEFTLTISSLQPDDFATYYCFQFSGYPFTFGGGTKLEIK

SEQ ID NO: 25096 - protein, 106 aa, Artificial Sequence
  source: /note="Description of Artificial Sequence: Synthetic polypeptide"
DIQMTQSPSTLSASVGDRVTITCSASSRVGYMHWYQQKPGKAPKLLIYDTFFLDSGVPSRFSGSGSGTEFTLTISSLQPDDFATYYCFQGSGYPFTFGGGTKLEIK

SEQ ID NO: 25097 - protein, 106 aa, Artificial Sequence
  source: /note="Description of Artificial Sequence: Synthetic polypeptide"
DIQMTQSPSTLSASVGDRVTITCSASSRVGYMHWYQQKPGKAPKLLIYDTRYQSSGVPSRFSGSGSGTEFTLTISSLQPDDFATYYCFQGSGYPFTFGGGTKLEIK

SEQ ID NO: 25098 - protein, 450 aa, Artificial Sequence; identical to SEQ ID NO: 24848
  source: /note="Description of Artificial Sequence: Synthetic polypeptide"

SEQ ID NO: 25099 - protein, 107 aa, Artificial Sequence
  source: /note="Description of Artificial Sequence: Synthetic polypeptide"
DIQMTQSPSSLSASVGDRVTITCRTSQSISTYLNWYQQKPGKAPKFLIYAASTLQSGVPSRFSGSGSRTDFTLTISSLQPEDFATYYCQQSVSVPYTFGQGTKLEIK

SEQ ID NO: 25100 - protein, 107 aa, Artificial Sequence
  source: /note="Description of Artificial Sequence: Synthetic polypeptide"
DIQMTQSPSSLSASVGDRVTITCRASQGIRNDLGWYQQKPGKAPKRLIYGASSLQSGVPSRFSGSGSGTEFTLTISSLQPEDFATYSCLQHNSYPWTFGQGTKVEIK

SEQ ID NO: 25101 - protein, 107 aa, Artificial Sequence
  source: /note="Description of Artificial Sequence: Synthetic polypeptide"
AIQMTQSPSSLSASVGDRVTITCRASQAIRNDLGWYQQKPGKAPKLLIYASSSLQSGVPSRFSGSGSGTDFTLTISSLQPEDFATYYCLADYKYTWTFGQGTKVEIK

SEQ ID NO: 25102 - protein, 116 aa, Artificial Sequence
  source: /note="Description of Artificial Sequence: Synthetic polypeptide"
AIQMTQSPSSLSASVGDRVTITCRASQAIRNDLGWYQQKPGKAPKLLIYASSSLQSGVPSRFSGSGSGTDFTLTISSLQPEDFATYYCLADYKYTWTFGQGTKVEIKSYNTHETIC

SEQ ID NO: 25103 - protein, 107 aa, Artificial Sequence
  source: /note="Description of Artificial Sequence: Synthetic polypeptide"
DIQMTQSPSSVSASVGDRVTITCRASQGISSWLAWYQQKPGKAPKLLIYAASSLQSGVPSRFSGSGSGTDFTLTISSLQPEDFATYYCQQTNSFPLTFGGGTKVDIK

SEQ ID NO: 25104 - protein, 107 aa, Artificial Sequence
  source: /note="Description of Artificial Sequence: Synthetic polypeptide"
EIVLTQSPATLSLSPGERATLSCRASQSVTSYLAWYQQKPGQAPRLLIYDVSKRATGIPARFSGSGSGTDFTLTISSLEPEDFATYYCQQRSNWPPTFGQGTRLEIK

SEQ ID NO: 25105 - protein, 107 aa, Artificial Sequence
  source: /note="Description of Artificial Sequence: Synthetic polypeptide"
DIQMTQSPSSLSASVGDRVTITCRASQNIDIYLNWYQERPGKAPNLLIYAASSLQSGVPSRFSGSGSGTDFTLTISSLQPEDFATYYCQQSYNTPFTFGGGTKVEIK

SEQ ID NO: 25106 - protein, 107 aa, Artificial Sequence
  source: /note="Description of Artificial Sequence: Synthetic polypeptide"
EIVMTQSPATLSLSPGERATLSCRPSQSVINNLAWYQQKPGQAPRLLIFGASSRATGIPARFSGSGSGTEFTLTISSLQSEDFALYYCQQYNNWPLTFGGGTKVEIK

SEQ ID NO: 25107 - protein, 107 aa, Artificial Sequence
  source: /note="Description of Artificial Sequence: Synthetic polypeptide"
EIVMTQSPATLSVSPGERATLSCRASQTILSNLAWYLQKPGQAPRLLIYGASTRATGLPARFSGSGSGTEFTLTISSLQSEDFAVYYCQQYNNWPLTFGGGTKVEIK

SEQ ID NO: 25108 - protein, 111 aa, Artificial Sequence
  source: /note="Description of Artificial Sequence: Synthetic polypeptide"
DIVMTQSPLSLPVTPGEPASISCRSSQSLLHSNGYNYLDWYLQKPGQSPQLLIYLGSNRASGVPDRFRGSGSDKDFTLKISRVGAEDVGVYYCMQALQTITFGQGTRLEIK

SEQ ID NO: 25109 - protein, 111 aa, Artificial Sequence
  source: /note="Description of Artificial Sequence: Synthetic polypeptide"
DIVMTQSPLSLPVTPGEPASISCRSSQSLLHSNGYNYLDWYLQKPGQSPQLLIYLGSNRASGVPDRFRGSGSGKDFTLKISRVEAEDVGLYYCMQALQTITFGQGTRLEIK

SEQ ID NO: 25110 - protein, 107 aa, Artificial Sequence
  source: /note="Description of Artificial Sequence: Synthetic polypeptide"
DIQMTQSPSSLSASVGDRVTITCRASQDIGNYLAWFQQKPGKAPESLIYAASILQSGVPSKFSGSGSGTDFTLTISSLQPEDFATYYCQQYNTFPWTFGQGTKVEIK

SEQ ID NO: 25111 - protein, 107 aa, Artificial Sequence
  source: /note="Description of Artificial Sequence: Synthetic polypeptide"
EIVLTQSPATLSLSPGERGTLSCRASQSINNYLAWYQQKPGQAPRLLIFDASNRATGIPARFSGSGSGTDFTLTISRIEPEDFAVYYCQQRTNWPLTFGGGTKVEIK

SEQ ID NO: 25112 - protein, 113 aa, Artificial Sequence
  source: /note="Description of Artificial Sequence: Synthetic polypeptide"
DIVMTQSPDSLAVSLGERATINCKSSQNLLYTSSNKNSLAWYQQKPGQPPELLIYWASTRESGVPDRFSGSGSGTDFILTISSLQAEDVAVYYCQQYYSSPWTFGQGTKVEIK

SEQ ID NO: 25113 - protein, 107 aa, Artificial Sequence
  source: /note="Description of Artificial Sequence: Synthetic polypeptide"
DIQMTQSPSSVSASVGDRVTITCRASQGISIWLAWYQQKPGKAPKLLISAASTLQSGVPSRFSGSGSGTDFTLTISSLQPEDFATYYCQQANSFPLTFGQGTKVEIK

SEQ ID NO: 25114 - protein, 112 aa, Artificial Sequence
  source: /note="Description of Artificial Sequence: Synthetic polypeptide"
DIVMTQSPLSLSVTPGEPASISCRSSQNLLNRNGFNYLDWYLQKPGQSPQLLIYLGSNRASGVPDRFSGSGSGTDFTLKISRVEVEDVGVYYCMQAIQTPYTFGQGTKLEIK

SEQ ID NO: 25115 - protein, 107 aa, Artificial Sequence; identical to SEQ ID NO: 25107
  source: /note="Description of Artificial Sequence: Synthetic polypeptide"

SEQ ID NO: 25116 - protein, 107 aa, Artificial Sequence; identical to SEQ ID NO: 25107
  source: /note="Description of Artificial Sequence: Synthetic polypeptide"

SEQ ID NO: 25117 - protein, 107 aa, Artificial Sequence
  source: /note="Description of Artificial Sequence: Synthetic polypeptide"
DIQMTQSPSSLSASVGDRVTITCRASQDIRNDLGWYQQKPGKAPKCLIYGASSLQSGVPSRFSGSGSGTEFTLTISSLQPEDFATYYCLQHKNYMYTFGQGTKLEIK

SEQ ID NO: 25118 - protein, 112 aa, Artificial Sequence
  source: /note="Description of Artificial Sequence: Synthetic polypeptide"
DIVMTQTPLSSPVILGQPASISCRSSQSLVYSDGNTYLSWLQQRPGQPPRLLIYKISNRFSGVPDRFSGSGTGTDFTLKISRVEAEDVGIYYCMQTTQFPLTFGGGTKVEIK

SEQ ID NO: 25119 - protein, 107 aa, Artificial Sequence
  source: /note="Description of Artificial Sequence: Synthetic polypeptide"
DIQMTQSPSSLSASVGDRVTITCRASQDIRNDLGWYHQKPGKAPKCLIYGASSLQSGVPSRFSGSGSGTEFTLTISSLQPEDFATYYCLQHKNYMYTFGQGTKLEIK

SEQ ID NO: 25120 - protein, 107 aa, Artificial Sequence
  source: /note="Description of Artificial Sequence: Synthetic polypeptide"
DIQMTQSPSSLSASVGDRLTITCRASQTISTYLNWFQQKVGNAPKLLIYSTSSLQSGVPARFSGSGSGTDFTLTISSLQPEDFATYYCQQSYSSPPTFGQGTKVEIK

SEQ ID NO: 25121 - protein, 112 aa, Artificial Sequence
  source: /note="Description of Artificial Sequence: Synthetic polypeptide"
QSVLTQPPSVSAAPGQKVTISCTGSSSNLGAGYDVHWYRQLPGTAPKLLIYDNNNRPSGVPDRFSGSKSGPSASLAISGLQAEDEADYYCQSYDSSLNGYVFGTGTQLTVLG

SEQ ID NO: 25122 - protein, 106 aa, Artificial Sequence
  source: /note="Description of Artificial Sequence: Synthetic polypeptide"
DIQLTQSPAIMSASPGEKVTMTCSASSSVGYMHWYQQKSSTSPKLWIYDTSKLASGVPGRFSGSGSGNSYSLTISSIQAEDVATYYCFQGSGYPFTFGGGTKLEIK

SEQ ID NO: 25123 - protein, 108 aa, Artificial Sequence
  source: /note="Description of Artificial Sequence: Synthetic polypeptide"
DIQMTQSPSSLSASVGDRVTITCKASQDINNYLNWYQQKPGKAPKLLTYRANRLLDGVPSRFSGSGSGTDFTFTISSLQPEDIATYYCLQFDEFPYTFGQGTKLEIKR

SEQ ID NO: 25124 - protein, 108 aa, Artificial Sequence
  source: /note="Description of Artificial Sequence: Synthetic polypeptide"
ETTLTQSPAFMSATPGDKVNISCKASQDINNYLNWYQQKPGEAAIFIIQRANRLLDGIPPRFSGSGYGTDFTLTINNIESEDAAYYFCLQFDEFPYTFGQGTKLEIKR

SEQ ID NO: 25125 - protein, 108 aa, Artificial Sequence
  source: /note="Description of Artificial Sequence: Synthetic polypeptide"
DIQMTQSPSSLSASVGDRVTITCKASQDINNYLNWFQQKPGKAPKSLRYRANRLLDGVPSRFSGSGSGTDFTLTISSLQPEDFATYYCLQFDEFPYTFGQGTKLEIKR

SEQ ID NO: 25126 - protein, 108 aa, Artificial Sequence
  source: /note="Description of Artificial Sequence: Synthetic polypeptide"
VIWMTQSPSLLSASTGDRVTISCKASQDINNYLNWYQQKPGKAPELLIYRANRLLDGVPSRFSGSGSGTDFTLTISYLQSEDFATYYCLQFDEFPYTFGQGTKLEIKR

SEQ ID NO: 25127 - protein, 108 aa, Artificial Sequence
  source: /note="Description of Artificial Sequence: Synthetic polypeptide"
NIQMTQSPSAMSASVGDRVTITCKASQDINNYLNWFQQKPGKVPKHLIYRANRLLDGVPSRFSGSGSGTEFTLTISSLQPEDFATYYCLQFDEFPYTFGQGTKLEIKR

SEQ ID NO: 25128 - protein, 108 aa, Artificial Sequence
  source: /note="Description of Artificial Sequence: Synthetic polypeptide"
DIQLTQSPSFLSASVGDRVTITCKASQDINNYLNWYQQKPGKAPKLLIYRANRLLDGVPSRFSGSGSGTEFTLTISSLQPEDFATYYCLQFDEFPYTFGQGTKLEIKR

SEQ ID NO: 25129 - protein, 112 aa, Artificial Sequence
  source: /note="Description of Artificial Sequence: Synthetic polypeptide"
SVVTQEPSVSGSLGQRVSITCSGSSSNIGRWGVNWYQQVPGSGLRTIIYYESSRPSGVPDRFSGSKSGNTATLTISSLQAEDEADYFCATGDYNIAVFGSGTTLIVMGQPKS

SEQ ID NO: 25130 - protein, 116 aa, Artificial Sequence
  source: /note="Description of Artificial Sequence: Synthetic polypeptide"
SVVTQQPSVSGSLGQRVSITCSGSSDNIGIFAVGWYQQVPGSGLRTIIYGNTKRPSGVPDRFSGSKSGNTATLTINSLQAEDEADYFCVCGESKSATPVFGGGTTLTVLSQPKSPP

SEQ ID NO: 25131 - protein, 107 aa, Artificial Sequence
  source: /note="Description of Artificial Sequence: Synthetic polypeptide"
DIQMTQSPSSLSASVGDRVTITCRAGQRIASYLNWYQHKPGKAPKLLIYAGSNLHRGVPSRFSGGGSGTDFTLTINSLQPEDFATYYCQQAYSTPWTFGPGTKVEIK

SEQ ID NO: 25132 - protein, 106 aa, Artificial Sequence
  source: /note="Description of Artificial Sequence: Synthetic polypeptide"
DIQMTQSPSSLSASVGDRVTITCRASQSIASYVNWYQQKPGKAPKVLIFASANLVSGVPSRFSGSGSGTVFTLTISNLQPEDFATYFCQQSYTNFSFGQGTKLEIK

SEQ ID NO: 25133 - protein, 107 aa, Artificial Sequence
  source: /note="Description of Artificial Sequence: Synthetic polypeptide"
DIQMTQSPSSLSASVGDRVTITCRASQGINNYLAWFQQKPGKAPKSLIYAASTLPSGVPSRFSGSGSGTDFTLTISSLQPEDSATYFCQHYIRYPHTFGQGTKLEIK

SEQ ID NO: 25134 - protein, 108 aa, Artificial Sequence
  source: /note="Description of Artificial Sequence: Synthetic polypeptide"
DIQLTQSPSFLSASVGDRVTITCRASQGIRSYLAWYQQKPGKAPKLLIYAASTLQSGVPSRFSGGGSGTEFTLTISSLQPEDSATYYCQQLNTSPPYTFGQGTKLEIK

SEQ ID NO: 25135 - protein, 113 aa, Artificial Sequence
  source: /note="Description of Artificial Sequence: Synthetic polypeptide"
DIVMTQSPDSLAVSLGERATINCKSSQSVLYSSNNKNYLAWFQQKPGQPPRLLINWASTREFGVPDRFSGSGSGTDFTLTISSLQAEDVAIYYCHQYYSIPLTFGGGTKVEIK

SEQ ID NO: 25136 - protein, 109 aa, Artificial Sequence
  source: /note="Description of Artificial Sequence: Synthetic polypeptide"
EIVLTQSPGTLSLSPGERATLSCRASQNINGNYLAWYQQKPGLAPRLLIYEASSRATGIPDRFSGSGSGTDFTLTISSLEPEDFGVYYCQQYGTSPFFTFGPGTKVDIK

SEQ ID NO: 25137 - protein, 107 aa, Artificial Sequence
  source: /note="Description of Artificial Sequence: Synthetic polypeptide"
DIQMTQSPSSLSASVGDRVTITCRASQGMSNYLNWYQQKPGKAPELLIYAASTLQSGVPSRFSGSGSGTDFTLTINSLQPEDFATYFCQQSFSTPLTFGGGTKVEIK

SEQ ID NO: 25138 - protein, 108 aa, Artificial Sequence
  source: /note="Description of Artificial Sequence: Synthetic polypeptide"
DIQMTQSPSSLSASVGDRVTITCRASQSIDNYLNWYQQKPGKAPKLLIYAASSLQSGVPSRFSGSGSGTDFTLTVSSLHPEDFATYYCQQSYSTLTWTFGQGTKVEIK

SEQ ID NO: 25139 - protein, 109 aa, Artificial Sequence
  source: /note="Description of Artificial Sequence: Synthetic polypeptide"
EIVLTQSPGTLSLSPGERATLSCRASQSITNNYLAWYQQKPGQAPRLLIYDSFSRATGIPERFSGSGSGTDFTLTISRLEPEDFAVYYCQHYVRSPLTFGPGTKVEIKR

SEQ ID NO: 25140 - protein, 107 aa, Artificial Sequence
  source: /note="Description of Artificial Sequence: Synthetic polypeptide"
EIVMTQSPATLSVSPGERATLSCRASQSVNSNLAWYQHKPGQAPRLLIYGASTRATGIPARFSGSGSGTDFTLTISSLQSEDFAVYYCQQYNNWPLFGPGTKVDLKR

SEQ ID NO: 25141 - protein, 109 aa, Artificial Sequence
  source: /note="Description of Artificial Sequence: Synthetic polypeptide"
EIVVTQSPVTLSVSPGESATLSCRSARSVGSRLAWYQQKPGQPPRLLIFAASTRATGIPARFSGSGSGTDFTLIISGLQSEDYAVYYCQQYKEWPLFTFGPGTTVDSKR

SEQ ID NO: 25142 - protein, 106 aa, Artificial Sequence
  source: /note="Description of Artificial Sequence: Synthetic polypeptide"
QIVLTQSPATLSLSPGERATLSCKASQSVSNHLAWYQQKPGQAPRLLIYETSNRATGIPPRFSGSGSGTDFTLTISSLEPEDFAVYYCQQRNNWYTFGQGTKLEIK

SEQ ID NO: 25143 - protein, 108 aa, Artificial Sequence
  source: /note="Description of Artificial Sequence: Synthetic polypeptide"
SFELTQPPSVSVSPGQTARITCSGDALPKQYVYWYQQKPGQAPVLVIYKTTERPSGIPERFSDSSSGTTVTLTISAAQAEDEADYYCQSVDSSGTYVFGIGTKVTVLG

SEQ ID NO: 25144 - protein, 113 aa, Artificial Sequence
  source: /note="Description of Artificial Sequence: Synthetic polypeptide"
QSALTQPASVSGSPGQSITISCTGSSSDVGGYSHVSWYQQHPGKVPKLIISEVSNRPSGISNRFSGSKSANTASLTISGLQPEDEADYYCGSYASTNILHYVFGTGTKVTVLS

SEQ ID NO: 25145 - protein, 114 aa, Artificial Sequence
  source: /note="Description of Artificial Sequence: Synthetic polypeptide"
SYELTQPPSVSVSPGQTGRITCTGSEASGDALASRYAYWYQHKSGQAPVVLIYKDTERPSGISERFSGSSSGTTVTLIISGVLAEDEADYYCKTSVRNGTSWVFGTGTMLTVLR

SEQ ID NO: 25146 - protein, 108 aa, Artificial Sequence
  source: /note="Description of Artificial Sequence: Synthetic polypeptide"
DTPMTQSPSSVSASVGDRVTISCRASQGISNSLAWYQQKLGKAPQLLIYAASSLQSGVPSRFSGSGSGTDFTLTISSLQPEDFATYYCQQTNTFPFTFGPGTKVEVRR

SEQ ID NO: 25147 - protein, 111 aa, Artificial Sequence
  source: /note="Description of Artificial Sequence: Synthetic polypeptide"
QSALTQPPSASGSPGQSVTISCTGTSSDVGGYNYVSWYQQHPGKAPKLMIYEVNKRPSGVPDRFSGSKSGNTASLTVSGLQAEDEAEYYCSSYAGSMNWVFGGGTKLTVLG

SEQ ID NO: 25148 - protein, 114 aa, Artificial Sequence
  source: /note="Description of Artificial Sequence: Synthetic polypeptide"
DIVMTQSPDSLAVSLGERATINCKSSQSVLYSSNNKTYLAWYQQKPRQPPELLIYWASTRESGVPDRFSGSGSGTNFTLTISSLQAEDVAVYYCQQYYTTPYTFGQGTKLEIKR

SEQ ID NO: 25149 - protein, 109 aa, Artificial Sequence
  source: /note="Description of Artificial Sequence: Synthetic polypeptide"
EIVVTQSPVTLSVSPGESAALSCRASRSVGSRLAWYQQKPGQPPRLLIFAASTRATGIPARFSGSGSGTDFTLIISGLQSEDYAVYYCQQYKEWPLFTFGPGTTVDSKR

SEQ ID NO: 25150 - protein, 110 aa, Artificial Sequence
  source: /note="Description of Artificial Sequence: Synthetic polypeptide"
EIVLTQSPATLSLSPGERATLSCRASQSVSSYLAWYQQKPGQAPRLLISDASNRATGIPPRFSGSGSGTDFTLTISSLEPEDFAVYYCQQRSNWPPRFTFGPGTIVDIRR

SEQ ID NO: 25151 - protein, 107 aa, Artificial Sequence
  source: /note="Description of Artificial Sequence: Synthetic polypeptide"
EIVMTQSPATLSVSPGERALSCRASQSVRSNLVWYQQKPGQAPRLLIFGASTRATGIPARFSGSGSGTEFTLTISSLQSEDFALYFCQQNNNWPPTFGQGTRLEIKR

SEQ ID NO: 25152 - protein, 113 aa, Artificial Sequence
  source: /note="Description of Artificial Sequence: Synthetic polypeptide"
DIVMTQTPLSLSVTPGQPASISCRSSQTIVHTNGNTYLEWYLQKPGQSPQLLIYKVSNRFSGVPDRFSGSGSGTDFTLKISRVEAEDVGVYYCFQGSHVPFTFGSGTKLEIKR

SEQ ID NO: 25153 - protein, 115 aa, Artificial Sequence
  source: /note="Description of Artificial Sequence: Synthetic polypeptide"
QPVLTQSPSASASLGASVKLTCTLSSGHRNYAIAWHQQRPEKGPRYLMKIYTNGSHYPGDGTPDRFSGSSSGAERYLTISSLQSEDEADYYCQTWGAGIWVFGGGTKLTVLGQPK

SEQ ID NO: 25154 - protein, 116 aa, Artificial Sequence
  source: /note="Description of Artificial Sequence: Synthetic polypeptide"
DIVMTQSPDSLAVSLGERATFSCKSSQSVLYDSNNKNYLAWYQQRPGQPPKLLIYWASTRESGVPDRFSGSGSGTDFTLTISSLQPEDVAVYYCQQYYDPLITFGQGTRLEIKRTV

SEQ ID NO: 25155 - protein, 110 aa, Artificial Sequence
  source: /note="Description of Artificial Sequence: Synthetic polypeptide"
SYELTQPPSVSVSPGQTARITCSADAFSDQYAYWYQQKPGQAPVLVIYKDTERPSGIPERISGSSSGTTATLSISGVQAEDEADYYCQSTDTSGPLFGGGTKLTLLGQPK

SEQ ID NO: 25156 - protein, 110 aa, Artificial Sequence
  source: /note="Description of Artificial Sequence: Synthetic polypeptide"
DIQMTQSPSTLSASVGDRVTITCRASQGIGSWLAWYQQKPGKAPKLLIYNASGLESGVPSGFSGSGSGTEFTLTISSLQPDDSATYYCQQYNSHTWTFGQGTKVEFKRTV

SEQ ID NO: 25157 - protein, 110 aa, Artificial Sequence
  source: /note="Description of Artificial Sequence: Synthetic polypeptide"
AIQMTQSPSSLSASVGDRVTISCRASQSIDNYLNWYQQKPGKAPKLLLFLASTLQSGVPSRFTGSGSGTDFTLTISSLQPEDFATYYCQQSHSSPYSFGQGTKLEIKRTV

SEQ ID NO: 25158 - protein, 116 aa, Artificial Sequence
  source: /note="Description of Artificial Sequence: Synthetic polypeptide"
DIVMTQSPDSLAVSLGERATINCKSSQSLLHSSNNKIYLAWYQQKPGQPPKLLLYWASTRESGVPDRFTGSGSGTDFTLTINSLQAEDVAVYYCQQYYTTHPTFGQGTRLEIKRTV

SEQ ID NO: 25159 - protein, 111 aa, Artificial Sequence
  source: /note="Description of Artificial Sequence: Synthetic polypeptide"
KIVLTQSPGTLSLSPGERATLSCRASQSVSASNLAWYQQKPGQAPRLLIYGIPDRFSGSGSGTDFTLSISRLEPEDFAVYYCGASRTATQQYGSSPLTFGGGTKVEIKRTV

SEQ ID NO: 25160 - protein, 110 aa, Artificial Sequence
  source: /note="Description of Artificial Sequence: Synthetic polypeptide"
DIQMTQSPSSLSASVGDRVTITCQASQDISNFLNWYQQKPGQAPKLLIYDASKLQTGVPSRFSGSGSETDFTFTISSLQPEDVATYYCQKFDNLLLTFGGGTKVELKRTV

SEQ ID NO: 25161 - protein, 110 aa, Artificial Sequence
  source: /note="Description of Artificial Sequence: Synthetic polypeptide"
DIQMTQSPSSVSASVGDKVTITCRASQGISTWLAWYQQKPGKAPALLIYSASRLQSGVPSRFSGSGSGTDFTLTISSLQPEDYATYYCQQANTFPFTFGPGTKVDIKRTV

SEQ ID NO: 25162 - protein, 111 aa, Artificial Sequence
  source: /note="Description of Artificial Sequence: Synthetic polypeptide"
EIVLTQSPGTLSLSPGERATLSCRASQTVSSSHLAWYQQKPGQAPRLLIHGSSSRATGIPERFSGSGSGPDFTLTISRLKPEDFAVYYCQYYGDSPGSFGEGTKVEIKRTV

SEQ ID NO: 25163 - protein, 111 aa, Artificial Sequence
  source: /note="Description of Artificial Sequence: Synthetic polypeptide"
DIVLTQSPGTLSLSPGEGATLSCRASESVSRNYLAWYQQKPGQAPRLLIYGASSRAIGIPDRFSGSGSGTDFTLTISRLEPEDFAVYCCQQYTIFPLTFGGGTKVEIKRTV

SEQ ID NO: 25164 - protein, 111 aa, Artificial Sequence
  source: /note="Description of Artificial Sequence: Synthetic polypeptide"
EIVMTQSPATLSVSPGERVTLSCRASQSVSTKVVWYQQKFGQAPRLLIYGASTRATGIPVRFSGSGSGTEFTLTISSLQSEDLAVYFCQQYNKWPMYTFGQGTKLEIKRTV

SEQ ID NO: 25165 - protein, 114 aa, Artificial Sequence
  source: /note="Description of Artificial Sequence: Synthetic polypeptide"
DIVMTQSPLSLPVTPGESASISCRSSQSLLHSNGYNYLDWYLQKPGQSPQLLIYLGSNRAPGVPDRFSGSGSGTDFTLKISRVEAEDVGVYYCMQALQTPTFGQGTKVEIKRTV

SEQ ID NO: 25166 - protein, 110 aa, Artificial Sequence
  source: /note="Description of Artificial Sequence: Synthetic polypeptide"
DIQMTQSPSTLSASVGDRVTITCRASESISTWLAWYQQKPGKAPNLLIYKASSLESGVPSRFSGSGSGTEFTLAISSLQPDDFATYYCQQYKSYPYTFGQGTKLELKRTV

SEQ ID NO: 25167 - protein, 114 aa, Artificial Sequence
  source: /note="Description of Artificial Sequence: Synthetic polypeptide"
DIVMTQSPLSLTVTPGEPASISCRSSQSLLHGNGYKYLHWYLQKPGQSPQLLIYLGSNRASGVPARFSGSGSDTDFTLKISTVETEDVGVYYCMQALQSPTFGQGTKVEIKRTV

SEQ ID NO: 25168 - protein, 110 aa, Artificial Sequence
  source: /note="Description of Artificial Sequence: Synthetic polypeptide"
DIQLTQSPSFLSASVGDRVTITCRASQVISSYLAWYQQTPGRAPKLLIYGASTLQTGVPSRFSGSGSGTEFTLTISSLQPEDFATYFCQQLNTYPLTFGPGTKVEIKRTV

SEQ ID NO: 25169 - protein, 110 aa, Artificial Sequence
  source: /note="Description of Artificial Sequence: Synthetic polypeptide"
DIQLTQSPSFLSASVGDRVTITCRASQGITSYLAWYQQKPGRAPKLLIYAASTLQSGVASRFSGSGSGTEFTLTISSLQPEDFATYYCQQFHTYPLTFGGGTKVEIKRTV

SEQ ID NO: 25170 - protein, 108 aa, Artificial Sequence
  source: /note="Description of Artificial Sequence: Synthetic polypeptide"
SYELTQPPSVSVSPGQTARITCSGDALADQYAYWYQQKPGQAPVMVIFKDNERPSGIPERFSGSSSGTTVTLTVSGVQSEDEADYYCQSVDSSGTYWMFGGGTKLTVL

SEQ ID NO: 25171 - protein, 108 aa, Artificial Sequence
  source: /note="Description of Artificial Sequence: Synthetic polypeptide"
SYELTQPPSVSVSPGQTARVTCSGDAMAEQYTYWYQQKPGQAPVLIIFKDTERPSGIPERFSGSSSGTTVTLTISGVQTEDEADYYCQSTDSSGTSWVFGGGTKLTVL

SEQ ID NO: 25172 - protein, 107 aa, Artificial Sequence
  source: /note="Description of Artificial Sequence: Synthetic polypeptide"
DIQMTQSPSSLSASVGDRVTITCRASQSINDCLNWYQQKPGQAPKLLISAASNLQSGVPSRFSGSGSETDFTLTISSLQPEDFAAYYCQQSFSTPLTFGGGTKVEIK

SEQ ID NO: 25173 - protein, 111 aa, Artificial Sequence
  source: /note="Description of Artificial Sequence: Synthetic polypeptide"
DIVMTQSPLSLPVTPGEPASISCRSSQSLVHSNGYSYLDWYLQKPGQSPQLLIYLGSNRPSGVPDRFSGSGSGTDFTLKISRVEAEDVGVYFCMQNLQTPTFGGGTKVEIK

SEQ ID NO: 25174 - protein, 107 aa, Artificial Sequence
  source: /note="Description of Artificial Sequence: Synthetic polypeptide"
DIQMTQSPSSLSASVGDRVTITCQASQDISDYLNWYQQKPGKAPKLLIYDASNLETGVPSRFSASGSGTDFTFTISSLQPEDIATYYCQHYHNLPPLFGGGTKVEIK

SEQ ID NO: 25175 - protein, 107 aa, Artificial Sequence
  source: /note="Description of Artificial Sequence: Synthetic polypeptide"
DIQMTQSPSSLSASVGDRVTITCQASQDISDYLNWYQQKPGKAPKLLIYDASNLETGVPSRFSASGSGTDFTFTISSLQPEDFATYYCQHYHNLPPLFGGGTKVEIK

SEQ ID NO: 25176 - protein, 112 aa, Artificial Sequence
  source: /note="Description of Artificial Sequence: Synthetic polypeptide"
DIVMTQSPLSLSVTPGQPASISCKSSQSLLQRDGKTYLYWYLQKPGQSPQLLIYEVSSRFSGVPDRFSGSGSGTDFTLKISRVEAEDVGVYYCMQGIRLPRTFGQGTKVEIK

SEQ ID NO: 25177 - protein, 105 aa, Artificial Sequence
  source: /note="Description of Artificial Sequence: Synthetic polypeptide"
SYELTQPPSVSVSPGQTASITCSGHELGDKYVSWYQQKPGQSPVLLIYQDTNRPAGIPERFSGSNSGSTAFLTISATQAMDEADYYCQAWDNSHWFGGGTKLTVL

SEQ ID NO: 25178 - protein, 110 aa, Artificial Sequence
  source: /note="Description of Artificial Sequence: Synthetic polypeptide"
SYVLTQPPSVSVAPGGTARITCGGDNIGTKGVHWYQQKPGQAPVLVMYYNSDRPTGVPERFSGSNSGNTATLTISRLEAGDEADYYCHVWDSSGSDHVEVFGGGTKLTVL

SEQ ID NO: 25179 - protein, 111 aa, Artificial Sequence
  source: /note="Description of Artificial Sequence: Synthetic polypeptide"
QSVLTQPPSVSGAPGQRVIISCTGSSSNIGAGHDVHWYQQLPGTAPRLLIYANTNRPSGVPDRFSASKSGNSASLVITGLQAEDEADYFCQSHDSSLSGVLFGGGTKLTVL

SEQ ID NO: 25180 - protein, 108 aa, Artificial Sequence
  source: /note="Description of Artificial Sequence: Synthetic polypeptide"
SSELTQDPAVSVALGHTVRITCQGDSLRSYYTNWYQQKPGQAPVLVIFGEDNRPSGIPDRFSGSSSGDTASLTITGTQAEDEADYYCNSRDSSGNLWVFGGGTKLTVL

SEQ ID NO: 25181 - protein, 111 aa, Artificial Sequence
  source: /note="Description of Artificial Sequence: Synthetic polypeptide"
DIVMTQSPLSLPVTPGEPASISCRSSQSLLHSNGYNYLDWYLQKPGQSPQLLIYLSSNRASGVPDRFSGSGSGTDFTLKISRVEAEDIGIYYCMQSLQTLTFGQGTRLEIK

SEQ ID NO: 25182 - protein, 213 aa, Artificial Sequence
  source: /note="Description of Artificial Sequence: Synthetic polypeptide"
ELALIQPASVSVSPGQTASITCSGDKLGDKYASWYQQKPGQSPVLVIYQDSERPSGIPERFSGSNSGNTATLTISGTQAMDEADYYCQAWDSSTAVFGGGTTLTVLGQPKAAPSVTLFPPSSEELQANKATLVCLISDFYPGAVTVAWKADSSPVKAGVETTTPSKQSNNKYAASSYLSLTPEQWKSHRSYSCQVTHEGSTVEKTVAPTECSM

SEQ ID NO: 25183 - protein, 111 aa, Artificial Sequence
  source: /note="Description of Artificial Sequence: Synthetic polypeptide"
DIQMTQSPSSLSASVGDRVTITCQASQDIKKYLNWYHQKPGKVPELLMHDASNLETGVPSRFSGRGSGTDFTLTISSLQPEDIGTYYCQQYDNLPPLTFGGGTKVEIKRTV

SEQ ID NO: 25184 - protein, 110 aa, Artificial Sequence
  source: /note="Description of Artificial Sequence: Synthetic polypeptide"
QSVVTQPPSVSGAPGQRVTISCTGSSSNIGAGYDVHWYQQLPGTAPKLLIYGNTNRPSGVSDRFSGSKSGTSASLAITGLQAEDEADYYCHSYDRSLSGSVFGGGTKLTV

SEQ ID NO: 25185 - protein, 107 aa, Artificial Sequence
  source: /note="Description of Artificial Sequence: Synthetic polypeptide"
SYVLTQPPSVSLAPGGTAAITCGRNNIGSETVHWYQQKPGQAPVLVVYDDDDRPSGIPERFSGSNSGNTATLTISRVEAGDEADYYCQVWDRSNYHQVFGGGTKLTV

SEQ ID NO: 25186 - protein, 110 aa, Artificial Sequence
  source: /note="Description of Artificial Sequence: Synthetic polypeptide"
DIQMTQSPSSLSAAVGDRVTITCQASQDIVNYLNWYQQKPGKAPKLLIYVASNLETGVPSRFSGSGSGTDFSLTISSLQPEDVATYYCQQYDNLPLTFGGGTKVEIKRTV

SEQ ID NO: 25187 - protein, 213 aa, Artificial Sequence
  source: /note="Description of Artificial Sequence: Synthetic polypeptide"
DIQMTQSPSTLSASVGDRVTITCSASSSVGYMHWYQQKPGKAPKLLIYDTFKLASGVPSRFSGSGSGTEFTLTISSLQPDDFATYYCFQFSGYPFTFGGGTKVEIKRTVAAPSVFIFPPSDEQLKSGTASVVCLLNNFYPREAKVQWKVDNALQSGNSQESVTEQDSKDSTYSLSSTLTLSKADYEKHKVYACEVTHQGLSSPVTKSFNRGEC

SEQ ID NO: 25188 - protein, 213 aa, Artificial Sequence; identical to SEQ ID NO: 24965
  source: /note="Description of Artificial Sequence: Synthetic polypeptide"

SEQ ID NO: 25189 - protein, 213 aa, Artificial Sequence; identical to SEQ ID NO: 24966
  source: /note="Description of Artificial Sequence: Synthetic polypeptide"

SEQ ID NO: 25190 - protein, 213 aa, Artificial Sequence; identical to SEQ ID NO: 24964
  source: /note="Description of Artificial Sequence: Synthetic polypeptide"

SEQ ID NO: 25191 - protein, 213 aa, Artificial Sequence; identical to SEQ ID NO: 24961
  source: /note="Description of Artificial Sequence: Synthetic polypeptide"

SEQ ID NO: 25192 - protein, 213 aa, Artificial Sequence; identical to SEQ ID NO: 24959
  source: /note="Description of Artificial Sequence: Synthetic polypeptide"

SEQ ID NO: 25193 - protein, 213 aa, Artificial Sequence; identical to SEQ ID NO: 24951
  source: /note="Description of Artificial Sequence: Synthetic polypeptide"

SEQ ID NO: 25194 - protein, 213 aa, Artificial Sequence; identical to SEQ ID NO: 24960
  source: /note="Description of Artificial Sequence: Synthetic polypeptide"

SEQ ID NO: 25195 - protein, 213 aa, Artificial Sequence; identical to SEQ ID NO: 24962
  source: /note="Description of Artificial Sequence: Synthetic polypeptide"

SEQ ID NO: 25196 - protein, 213 aa, Artificial Sequence; identical to SEQ ID NO: 24963
  source: /note="Description of Artificial Sequence: Synthetic polypeptide"

SEQ ID NO: 25197 - protein, 213 aa, Artificial Sequence; identical to SEQ ID NO: 24705
  source: /note="Description of Artificial Sequence: Synthetic polypeptide"

SEQ ID NO: 25198 - protein, 213 aa, Artificial Sequence
  source: /note="Description of Artificial Sequence: Synthetic polypeptide"
DIQMTQSPSTLSASVGDRVTITCSASSSVGYMHWYQQKPGKAPKLLIYDTFKLASGVPSRFSGSGSGTEFTLTISSLQPDDFATYYCFQGSGYPFTFGGGTKVEIKRTVAAPSVFIFPPSDEQLKSGTASVVCLLNNFYPREAKVQWKVDNALQSGNSQESVTEQDSKDSTYSLSSTLTLSKADYEKHKVYACEVTHQGLSSPVTKSFNRGEC

SEQ ID NO: 25199 - protein, 213 aa, Artificial Sequence; identical to SEQ ID NO: 25085
  source: /note="Description of Artificial Sequence: Synthetic polypeptide"

SEQ ID NO: 25200 - protein, 213 aa, Artificial Sequence
  source: /note="Description of Artificial Sequence: Synthetic polypeptide"
DIQMTQSPSTLSASVGDRVTITCSASSSVGYMHWYQQKPGKAPKLLIYDTRYLSSGVPSRFSGSGSGTEFTLTISSLQPDDFATYYCFQGSGYPFTFGGGTKVEIKRTVAAPSVFIFPPSDEQLKSGTASVVCLLNNFYPREAKVQWKVDNALQSGNSQESVTEQDSKDSTYSLSSTLTLSKADYEKHKVYACEVTHQGLSSPVTKSFNRGEC

SEQ ID NO: 25201 - protein, 450 aa, Artificial Sequence; identical to SEQ ID NO: 24851
  source: /note="Description of Artificial Sequence: Synthetic polypeptide"

SEQ ID NO: 25202 - protein, 213 aa, Artificial Sequence
  source: /note="Description of Artificial Sequence: Synthetic polypeptide"
DIQMTQSPSTLSASVGDRVTITCSASSSVGYMHWYQQKPGKAPKLLIYDTFKLASGVPSRFSGSGSGTEFTLTISSLQPDDFATYYCFQGSFYPFTFGGGTKVEIKRTVAAPSVFIFPPSDEQLKSGTASVVCLLNNFYPREAKVQWKVDNALQSGNSQESVTEQDSKDSTYSLSSTLTLSKADYEKHKVYACEVTHQGLSSPVTKSFNRGEC

SEQ ID NO: 25203 - protein, 213 aa, Artificial Sequence
  source: /note="Description of Artificial Sequence: Synthetic polypeptide"
DIQMTQSPSTLSASVGDRVTITCSASSSVGYMHWYQQKPGKAPKLLIYDTFKLTSGVPSRFSGSGSGTEFTLTISSLQPDDFATYYCFQGSGYPFTFGGGTKVEIKRTVAAPSVFIFPPSDEQLKSGTASVVCLLNNFYPREAKVQWKVDNALQSGNSQESVTEQDSKDSTYSLSSTLTLSKADYEKHKVYACEVTHQGLSSPVTKSFNRGEC

SEQ ID NO: 25204 - protein, 213 aa, Artificial Sequence
  source: /note="Description of Artificial Sequence: Synthetic polypeptide"
DIQMTQSPSTLSASVGDRVTITCSASSRVGYMHWYQQKPGKAPKLLIYDTFKLASGVPSRFSGSGSGTEFTLTISSLQPDDFATYYCFQGSGYPFTFGGGTKVEIKRTVAAPSVFIFPPSDEQLKSGTASVVCLLNNFYPREAKVQWKVDNALQSGNSQESVTEQDSKDSTYSLSSTLTLSKADYEKHKVYACEVTHQGLSSPVTKSFNRGEC

SEQ ID NO: 25205 - protein, 213 aa, Artificial Sequence
  source: /note="Description of Artificial Sequence: Synthetic polypeptide"
DIQMTQSPSTLSASVGDRVTITCSASSSVGYMHWYQQKPGKAPKLLIYDTFRLASGVPSRFSGSGSGTEFTLTISSLQPDDFATYYCFQGSGYPFTFGGGTKVEIKRTVAAPSVFIFPPSDEQLKSGTASVVCLLNNFYPREAKVQWKVDNALQSGNSQESVTEQDSKDSTYSLSSTLTLSKADYEKHKVYACEVTHQGLSSPVTKSFNRGEC

SEQ ID NO: 25206 - protein, 214 aa, Artificial Sequence
  source: /note="Description of Artificial Sequence: Synthetic polypeptide"
DIQMTQSPSTLSASVGDRVTITCSPSSRVGYMHWYQQKPGKAPKLLIYDTYRHLASGVPSRFSGSGSGTEFTLTISSLQPDDFATYYCFQGSGYPFTFGGGTKVEIKRTVAAPSVFIFPPSDEQLKSGTASVVCLLNNFYPREAKVQWKVDNALQSGNSQESVTEQDSKDSTYSLSSTLTLSKADYEKHKVYACEVTHQGLSSPVTKSFNRGEC

SEQ ID NO: 25207 - protein, 213 aa, Artificial Sequence
  source: /note="Description of Artificial Sequence: Synthetic polypeptide"
DIQMTQSPSTLSASVGDRVTITCSLSSSVGYMHWYQQKPGKAPKLLIYDTFFHRSGVPSRFSGSGSGTEFTLTISSLQPDDFATYYCFQGSGYPFTFGGGTKVEIKRTVAAPSVFIFPPSDEQLKSGTASVVCLLNNFYPREAKVQWKVDNALQSGNSQESVTEQDSKDSTYSLSSTLTLSKADYEKHKVYACEVTHQGLSSPVTKSFNRGEC

SEQ ID NO: 25208 - protein, 213 aa, Artificial Sequence
  source: /note="Description of Artificial Sequence: Synthetic polypeptide"
DIQMTQSPSTLSASVGDRVTITCSASSRVGYMHWYQQKPGKAPKLLIYDTLLLDSGVPSRFSGSGSGTEFTLTISSLQPDDFATYYCFQGSGYPFTFGGGTKVEIKRTVAAPSVFIFPPSDEQLKSGTASVVCLLNNFYPREAKVQWKVDNALQSGNSQESVTEQDSKDSTYSLSSTLTLSKADYEKHKVYACEVTHQGLSSPVTKSFNRGEC

SEQ ID NO: 25209 - protein, 213 aa, Artificial Sequence
  source: /note="Description of Artificial Sequence: Synthetic polypeptide"
DIQMTQSPSTLSASVGDRVTITCSASSRVGYMHWYQQKPGKAPKLLIYDTSKLASGVPSRFSGSGSGTEFTLTISSLQPDDFATYYCFQGSGYPFTFGGGTKVEIKRTVAAPSVFIFPPSDEQLKSGTASVVCLLNNFYPREAKVQWKVDNALQSGNSQESVTEQDSKDSTYSLSSTLTLSKADYEKHKVYACEVTHQGLSSPVTKSFNRGEC

SEQ ID NO: 25210 - protein, 213 aa, Artificial Sequence
  source: /note="Description of Artificial Sequence: Synthetic polypeptide"
DIQMTQSPSTLSASVGDRVTITCSASSRVGYMHWYQQKPGKAPKLLIYDTSFLDSGVPSRFSGSGSGTEFTLTISSLQPDDFATYYCFQGSGYPFTFGGGTKVEIKRTVAAPSVFIFPPSDEQLKSGTASVVCLLNNFYPREAKVQWKVDNALQSGNSQESVTEQDSKDSTYSLSSTLTLSKADYEKHKVYACEVTHQGLSSPVTKSFNRGEC

SEQ ID NO: 25211 - protein, 106 aa, Artificial Sequence
  source: /note="Description of Artificial Sequence: Synthetic polypeptide"
DIQMTQSPSTLSASVGDRVTITCSASSSVGYMHWYQQKPGKAPKLLIYDTFKLASGVPSRFSGSGSGTEFTLTISSLQPDDFATYYCFQFSGYPFTFGGGTKLEIK

SEQ ID NO: 25212 - protein, 106 aa, Artificial Sequence; identical to SEQ ID NO: 25089
  source: /note="Description of Artificial Sequence: Synthetic polypeptide"

SEQ ID NO: 25213 - protein, 106 aa, Artificial Sequence; identical to SEQ ID NO: 25090
  source: /note="Description of Artificial Sequence: Synthetic polypeptide"

SEQ ID NO: 25214 - protein, 106 aa, Artificial Sequence; identical to SEQ ID NO: 25091
  source: /note="Description of Artificial Sequence: Synthetic polypeptide"

SEQ ID NO: 25215 - protein, 106 aa, Artificial Sequence; identical to SEQ ID NO: 25092
  source: /note="Description of Artificial Sequence: Synthetic polypeptide"

SEQ ID NO: 25216 - protein, 106 aa, Artificial Sequence; identical to SEQ ID NO: 25093
  source: /note="Description of Artificial Sequence: Synthetic polypeptide"

SEQ ID NO: 25217 - protein, 106 aa, Artificial Sequence; identical to SEQ ID NO: 24958
  source: /note="Description of Artificial Sequence: Synthetic polypeptide"

SEQ ID NO: 25218 - protein, 106 aa, Artificial Sequence; identical to SEQ ID NO: 25095
  source: /note="Description of Artificial Sequence: Synthetic polypeptide"

SEQ ID NO: 25219 - protein, 106 aa, Artificial Sequence
  source: /note="Description of Artificial Sequence: Synthetic polypeptide"
DIQMTQSPSTLSASVGDRVTITCSASSRVGYMHWYQQKPGKAPKLLIYDTFFLDSGVPSRFSGSGSGTEFTLTISSLQPDDFATYYCFQGSGYPFTFGGGTKVEIK

SEQ ID NO: 25220 - protein, 120 aa, Artificial Sequence; identical to SEQ ID NO: 24704
  source: /note="Description of Artificial Sequence: Synthetic polypeptide"

SEQ ID NO: 25221 - protein, 106 aa, Artificial Sequence; identical to SEQ ID NO: 25084
  source: /note="Description of Artificial Sequence: Synthetic polypeptide"

SEQ ID NO: 25222 - protein, 106 aa, Artificial Sequence
  source: /note="Description of Artificial Sequence: Synthetic polypeptide"
DIQMTQSPSTLSASVGDRVTITCSASSSVGYMHWYQQKPGKAPKLLIYDTFKLASGVPSRFSGSGSGTEFTLTISSLQPDDFATYYCFQGSGYPFTFGGGTKLEIK

SEQ ID NO: 25223 - protein, 106 aa, Artificial Sequence; identical to SEQ ID NO: 24692
  source: /note="Description of Artificial Sequence: Synthetic polypeptide"

SEQ ID NO: 25224 - protein, 7 aa, Artificial Sequence
  source: /note="Description of Artificial Sequence: Synthetic peptide"
DTYKQTS

SEQ ID NO: 25225 - protein, 106 aa, Artificial Sequence
  source: /note="Description of Artificial Sequence: Synthetic polypeptide"
DIQMTQSPSTLSASVGDRVTITCSASSSVGYMHWYQQKPGKAPKLLIYDTFKLASGVPSRFSGSGSGTEFTLTISSLQPDDFATYYCFQGSFYPFTFGGGTKLEIK

SEQ ID NO: 25226 - protein, 106 aa, Artificial Sequence
  source: /note="Description of Artificial Sequence: Synthetic polypeptide"
DIQMTQSPSTLSASVGDRVTITCSASSSVGYMHWYQQKPGKAPKLLIYDTFKLTSGVPSRFSGSGSGTEFTLTISSLQPDDFATYYCFQGSGYPFTFGGGTKLEIK

SEQ ID NO: 25227 - protein, 106 aa, Artificial Sequence
  source: /note="Description of Artificial Sequence: Synthetic polypeptide"
DIQMTQSPSTLSASVGDRVTITCSASSSVGYMHWYQQKPGKAPKLLIYDTFRLASGVPSRFSGSGSGTEFTLTISSLQPDDFATYYCFQGSGYPFTFGGGTKLEIK

SEQ ID NO: 25228 - protein, 106 aa, Artificial Sequence; identical to SEQ ID NO: 25227
  source: /note="Description of Artificial Sequence: Synthetic polypeptide"

SEQ ID NO: 25229 - protein, 106 aa, Artificial Sequence
  source: /note="Description of Artificial Sequence: Synthetic polypeptide"
DIQMTQSPSTLSASVGDRVTITCSASSSVGYMHWYQQKPGKAPKLLIYDTYRHASGVPSRFSGSGSGTEFTLTISSLQPDDFATYYCFQGSGYPFTFGGGTKLEIK

SEQ ID NO: 25230 - protein, 106 aa, Artificial Sequence
  source: /note="Description of Artificial Sequence: Synthetic polypeptide"
DIQMTQSPSTLSASVGDRVTITCSLSSSVGYMHWYQQKPGKAPKLLIYDTFFHRSGVPSRFSGSGSGTEFTLTISSLQPDDFATYYCFQGSGYPFTFGGGTKLEIK

SEQ ID NO: 25231 - protein, 106 aa, Artificial Sequence
  source: /note="Description of Artificial Sequence: Synthetic polypeptide"
DIQMTQSPSTLSASVGDRVTITCSASSRVGYMHWYQQKPGKAPKLLIYDTLLLDSGVPSRFSGSGSGTEFTLTISSLQPDDFATYYCFQGSGYPFTFGGGTKVEIK

SEQ ID NO: 25232 - protein, 106 aa, Artificial Sequence [sequence omitted]

SEQ ID NO: 25233 - protein, 106 aa, Artificial Sequence
  source: /note="Description of Artificial Sequence: Synthetic polypeptide"
DIQMTQSPSTLSASVGDRVTITCSASSRVGYMHWYQQKPGKAPKLLIYDTSFLDSGVPSRFSGSGSGTEFTLTISSLQPDDFATYYCFQGSGYPFTFGGGTKVEIK

SEQ ID NO: 25234 - protein, 129 aa, Artificial Sequence
  source: /note="Description of Artificial Sequence: Synthetic polypeptide"
QVKLLEQSGGGLVQPGGSLRLSCAVSGVTFSAYAMSWVRQAPGKGLEWVSGISGSGDSTDYADSVKGRLTISRDNSKNTLYLQMNSLRAEDTAIYYCASHLPDYWNLDYTRFFYYMDVWGKGTTVTVSS

SEQ ID NO: 25235 - protein, 120 aa, Artificial Sequence
  source: /note="Description of Artificial Sequence: Synthetic polypeptide"
QVKLLEESGGGLVRLAGSLRLSCAASGTTLSGYTMHWVRQAPGKGLEWVSSITGGSNFINYSDSVKGRFTISRDNAKNSLYLQMNSLTAEDTAVYYCATAPIAPPYFDHWGQGTLVTVSS

SEQ ID NO: 25236 - protein, 109 aa, Artificial Sequence
  source: /note="Description of Artificial Sequence: Synthetic polypeptide"
MAELTQSPGTLSLSPGERATLSCRATQSISSNYLAWYQQRPGQAPRLLIYGASNRATDIPDRFSGSGSGTDFTLTISRLEPEDFAMYYCQQYDISPYTFGQGTKLEIKR

SEQ ID NO: 25237 - protein, 109 aa, Artificial Sequence
  source: /note="Description of Artificial Sequence: Synthetic polypeptide"
MAELTQSPVTLSVSPGERVALSCKASQNINDNLAWYQQKPGQAPRLLIYGASSRATGIPDRFSGSGSGTDFTLTITRLEPEDFAVYYCQQYGGSPYTFGQGTKLEIKRT

SEQ ID NO: 25238 - protein, 108 aa, Artificial Sequence
  source: /note="Description of Artificial Sequence: Synthetic polypeptide"
MAELTQSPSSLSASVGDRVTITCRATQSVSNFLNWYQQKPGEAPTLLIYDASTSQSGVPSRFSGSGSGMDFSLTISSLQPEDLAMYYCQASINTPLFGGGTRIDMRRT

SEQ ID NO: 25239 - protein, 106 aa, Artificial Sequence
  source: /note="Description of Artificial Sequence: Synthetic polypeptide"
DIQMTQSPSSLSASVGDRVTITCRATQSVSNFLNWYQQKPGEAPTLLIYDASTSQSGVPSRFSGSGSGMDFSLTISSLQPEDLAMYYCQASINTPLFGGGTRIDMR

SEQ ID NO: 25240 - protein, 106 aa, Artificial Sequence
  source: /note="Description of Artificial Sequence: Synthetic polypeptide"
DIQMTQSPSSLSASVGDRVTITCRATQSVSNFLNWYQQKPGEAPTLLIYDASTSQSGVPSRFSGSGSGMDFSLTISSLQPEDLAMYYCQASINTPLFGGGTRVDIK

SEQ ID NO: 25241 - protein, 106 aa, Artificial Sequence
  source: /note="Description of Artificial Sequence: Synthetic polypeptide"
DAELTQSPSSLSASVGDRVTITCRATQSVSNFLNWYQQKPGEAPTLLIYDASTSQSGVPSRFSGSGSGMDFSLTISSLQPEDLAMYYCQASINTPLFGGGTRIDMR

SEQ ID NO: 25242 - protein, 105 aa, Artificial Sequence
  source: /note="Description of Artificial Sequence: Synthetic polypeptide"
AELTQSPSSLSASVGDRVTITCRATQSVSNFLNWYQQKPGEAPTLLIYDASTSQSGVPSRFSGSGSGMDFSLTISSLQPEDLAMYYCQASINTPLFGGGTRIDMR

SEQ ID NO: 25243 - protein, 106 aa, Artificial Sequence
  source: /note="Description of Artificial Sequence: Synthetic polypeptide"
DIQMTQSPSSLSASVGDRVTITCRASQGIRNYLAWYQQKPGKAPKLLIYAASTLQSGVPSRFSGSGSGTDFTLTISSLQPEDVATYYCQRYNRAPYTFGQGTKVEI

SEQ ID NO: 25244 - protein, 107 aa, Artificial Sequence; identical to SEQ ID NO: 6318
  source: /note="Description of Artificial Sequence: Synthetic polypeptide"

SEQ ID NO: 25245 - protein, 128 aa, Artificial Sequence
  source: /note="Description of Artificial Sequence: Synthetic polypeptide"
METDTLLLWVLLLWVPGSTGDIVLTQSPASLAVSLGQRATISYRASKSVSTSGYSYMHWNQQKPGQPPRLLIYLVSNLESGVPARFSGSGSGTDFTLNIHPVEEEDAATYYCQHIRELTRSEGGPSWK

SEQ ID NO: 25246 - protein, 110 aa, Artificial Sequence
  source: /note="Description of Artificial Sequence: Synthetic polypeptide"
QSALTQPASVSGSPGQSITISCTGTSSDVGGYVYVAWYQQHPGTAPKLIIYDVSDRPSGVSNRFSGSKSGNTASLTISGLQAEDDADYYCISYTDRNTVVFGGGTKLTVL

SEQ ID NO: 25247 - protein, 107 aa, Artificial Sequence
  source: /note="Description of Artificial Sequence: Synthetic polypeptide"
DIQMTQSPSSLSASVGERVTITCRASQYISTHLNWYQHKPGKAPRLLIYGASHLEGGDPSRFSGSGSGTDFSLTITSLQPEDFATYYCQQTYKTPITFAQGTRLEIK

SEQ ID NO: 25248 - protein, 108 aa, Artificial Sequence
  source: /note="Description of Artificial Sequence: Synthetic polypeptide"
SYVLTQPPSVSVAPGRTARITCGRHNIGNENVHWYQQRPGQAPVLVIYSDSDRPSGIPERFSGSNSGNTATLSISRVEAGDEADYYCQVWDSSTDQVVFGGGTKLTVL

SEQ ID NO: 25249 - protein, 107 aa, Artificial Sequence
  source: /note="Description of Artificial Sequence: Synthetic polypeptide"
DIQMTQSPSSLSASVGDRVTITCRASQYISTHLNWYQQKPGKAPKLLIYGASSLQSGVPSRFSGSGSGTDFTLTISSLQPEDFATYYCQQTYKTPITFGQGTRLEIK

SEQ ID NO: 25250 - protein, 210 aa, Artificial Sequence
  source: /note="Description of Artificial Sequence: Synthetic polypeptide"
EIVMTQSPSSLSASIGDRVTITCQASQDISTYLNWYQQKPGQAPRLLIYGASNLETGVPSRFTGSGYGTDFSVTISSLQPEDIATYYCQQYQYLPYTFAPGTKVEIRTVAAPSVFIFPPSDEQLSGTASWCLLNNFYPREAKVQWVDNALQSGNSQESVTEQDSKDSTYSLSSTLTLSKADYEKHKVYACEVTHQGLSSPVTKSFNRGEC

SEQ ID NO: 25251 - protein, 210 aa, Artificial Sequence
  source: /note="Description of Artificial Sequence: Synthetic polypeptide"
QSVLTQASSVSVAPGQTARITCGANIGSQNVHWYQQKPGQAPVLWYDDRDRPSGIPDRFSGSNSGNTATLTISRVEAGDEADYYCQVWDSSRDQAVIFGGGTKLTVLGQPKAAPSVTLFPPSSEELQANATLVCLISDFYPGAVTVAWKADSSPVKAGVETTTPSQSKYAASSYLSLTPEQWKSHRSYSCQVTHEGSTVEKTIAPTECSP

SEQ ID NO: 25252 - protein, 107 aa, Artificial Sequence
  source: /note="Description of Artificial Sequence: Synthetic polypeptide"
ETTLTQSPSSLSASVGDRVTITCRASQTVKSFLNWYQQKPGKAPKLLIYDASDLQSGVPSRFSGSGSGTDFTLTISRLQPEDFATYFCQQSYRTPLTFGQGTRVEIK

SEQ ID NO: 25253 - protein, 107 aa, Artificial Sequence
  source: /note="Description of Artificial Sequence: Synthetic polypeptide"
ETTLTQSPSSLSASVGDRVTITCRASQTVKSFLNWYQQKPGKAPKLLIYDASDLQSGVPSRFSGSGSGTDFTLTISRLQPEDFATYFCQQSYRTPLTFGQGTKVEIK

SEQ ID NO: 25254 - protein, 110 aa, Artificial Sequence
  source: /note="Description of Artificial Sequence: Synthetic polypeptide"
QSALTQPASVSGSPGQSITISCTGTSSDVGGYVYVSWYQQHPGKAPKLMIYDVSNRPSGVSNRFSGSKSGNTASLTISGLQAEDEADYYCISYTDRNTVVFGGGTKLTVL

SEQ ID NO: 25255 - protein, 116 aa, Artificial Sequence
  source: /note="Description of Artificial Sequence: Synthetic polypeptide"
QVQLQESGTELERSGASVKLSCTASGFNIKDYYMHWMKQRPDQGLEWIGWIDPENDDVQYAPKFQGKATMTADTSSNTAYLQLTSLTFEDTAVYFCNSWGSDFDHWGQGTTVTVSS

SEQ ID NO: 25256 - protein, 116 aa, Artificial Sequence
  source: /note="Description of Artificial Sequence: Synthetic polypeptide"
QVQLQESGPGLVRPSQTLSLTCTVSGFTFSDYYMHWVRQPPGRGLEWIGWIDPENDDVQYAPKFQGRVTNLVDTSKNQFSLRLSSVTAADTAVYYCARWGSDFDHWGQGTTVTVSS

SEQ ID NO: 25257 - protein, 116 aa, Artificial Sequence
  source: /note="Description of Artificial Sequence: Synthetic polypeptide"
QVQLQESGPGLVRPSQTLSLTCTVSGFTFSDYYMHWVRQPPGRGLEWIGWIDPENDDVQYAPKFQGRVTMLVDTSKNQFSLRLSSVTAADTAVYFCNSWGSDFDHWGQGTTVTVSS

SEQ ID NO: 25258 - protein, 116 aa, Artificial Sequence
  source: /note="Description of Artificial Sequence: Synthetic polypeptide"
QVQLQESGPGLVRPSQTLSLTCTVSGFNIKDYYMHWVRQPPGRGLEWIGWIDPENDDVQYAPKFQGRVTMLVDTSKNQFSLRLSSVTAADTAVYFCNSWGSDFDHWGQGTTVTVSS

SEQ ID NO: 25259 - protein, 112 aa, Artificial Sequence
  source: /note="Description of Artificial Sequence: Synthetic polypeptide"
DIQLTQSPSSLSASVGDRVTITCRSSQTLVHTDGNTYLEWYQQKPGKAPKLLIYRVSNRFSGVPSRFSGSGSGTDFTFTISSLQPEDIATYYCFQGSHLPRTFGQGTKVEIK

SEQ ID NO: 25260 - protein, 124 aa, Artificial Sequence
  source: /note="Description of Artificial Sequence: Synthetic polypeptide"
EVQLVESGGGLVQAGDSLRLSCIDSGRTFSDYPIGWFRQAPGKEREFVAAIYAIGGDVYYADSVKGRFTISRDNAKNTVYLQMSSLKPEDTAIYSCAVASGGGSIRSARRYDYWGRGTQVTVSS

SEQ ID NO: 25261 - protein, 126 aa, Artificial Sequence
  source: /note="Description of Artificial Sequence: Synthetic polypeptide"
EVQLVESGGGLVQAGGSLRLSCAASGGTFSSYAMGWFRQAPGKERDFVSAITWSGGSTYYADSVKGRFTISRDNAKNTVYLQMNSLKPEDTAVYYCAADDQKYDYIAYAEYEYDYWGQGTQVTVSS

SEQ ID NO: 25262 - protein, 120 aa, Artificial Sequence
  source: /note="Description of Artificial Sequence: Synthetic polypeptide"
EVQLVESGGDLVQPGGSLRLSCAASGFTFRGYWMTWVRQAPGKGLEWVSSINNIGEEAYYVDSVKGRFTISRDNAKNTLYLQMNSLKSEDTAVYYCVKDWASDYAGYSPNSQGTQVTVSS

SEQ ID NO: 25263 - protein, 120 aa, Artificial Sequence
  source: /note="Description of Artificial Sequence: Synthetic polypeptide"
EVQLVESGGGSVQPGGSLRLSCAASGFTFRGYWMSWVRQAPGKGLEWVSAINNVGGDTYYADSVKGRFTISRDNAKNMLYLQMNSLKAEDTAVYYCARDWHNDPNKNEYKGQGTQVTVSS

SEQ ID NO: 25264 - protein, 120 aa, Artificial Sequence
  source: /note="Description of Artificial Sequence: Synthetic polypeptide"
EVQLVESGGGLVQPGGSLRLSCAASGFTFRGYWMSWVRQAPGKGLEWVSAINNVGDEVYYADSVKGRFTISRDNAKNTLYLQMNSLKSEDTAVYYCTRDWYNDPNKNEYKGQGTQVTVSS

SEQ ID NO: 25265 - protein, 120 aa, Artificial Sequence
  source: /note="Description of Artificial Sequence: Synthetic polypeptide"
EVQLVESGGGLVQPGGSLRLSCAASGFTFRGYWMSWVRQAPGKGLEWVSAINNVGDEVYYADSVKGRFTISRDNAKNTLYLQMNSLKSEDTAVYYCTRDWFDDPNKNEYKGQGTQVTVSS

SEQ ID NO: 25266 - protein, 120 aa, Artificial Sequence
  source: /note="Description of Artificial Sequence: Synthetic polypeptide"
EVQLVESGGGLVQPGGSLRLSCAASGFTFSGYWMSWVRQAPGKGLEWVSAISNSGGETYYADSVKGRFTISRDNAKNTLYLQMNSLRSEDTAVYYCTRDWHSDPNKHEYRGQGTQVTVSS

SEQ ID NO: 25267 - protein, 120 aa, Artificial Sequence
  source: /note="Description of Artificial Sequence: Synthetic polypeptide"
EVQLVESGGGSVQPGGSLRLSCAASGFTFRGYWMSWVRQAPGKGLEWVSAINNLGGDTYYADSVKGRFTISRDNAKNMLYLQMNSLKAEDTAVYYCARDWYDDPNKNEYKGQGTQVTVSS

SEQ ID NO: 25268 - protein, 120 aa, Artificial Sequence
  source: /note="Description of Artificial Sequence: Synthetic polypeptide"
KVQLVESGGDLVQPGGSLRLSCAASGFTFRGYWMTWVRQAPGKGLEWVSSINNIGEEAYYVDSVKGRFTISRDNAKNTLYLQMNSLKSEDTAVYYCVKDWASDYAGYSPNSQGTQVTVSS

SEQ ID NO: 25269 - protein, 120 aa, Artificial Sequence; identical to SEQ ID NO: 25263
  source: /note="Description of Artificial Sequence: Synthetic polypeptide"

SEQ ID NO: 25270 - protein, 120 aa, Artificial Sequence; identical to SEQ ID NO: 25262
  source: /note="Description of Artificial Sequence: Synthetic polypeptide"

SEQ ID NO: 25271 - protein, 120 aa, Artificial Sequence
  source: /note="Description of Artificial Sequence: Synthetic polypeptide"
EVQLVESGGGLVQPGGSLRLSCAASGFTFSGYWMSWVRQAPGKGLEWVSAINNVGDETYYANSVKGRFTIARDNTKRTLYLQMNSLKSEDTAVYYCTRDWHSEPNKYEYKGQGTQVTVSS

SEQ ID NO: 25272 - protein, 119 aa, Artificial Sequence
  source: /note="Description of Artificial Sequence: Synthetic polypeptide"
EVQLVESGGGLVQPGGSLRLSCTGSGFTFSSYWMDWVRQTPGKDLEYVSGISPSGSNTDYADSVKGRFTISRDNAKNTLYLQMNSLKPEDTALYYCRRSLTLTDSPDLRSQGTQVTVSS

SEQ ID NO: 25273 - protein, 120 aa, Artificial Sequence
  source: /note="Description of Artificial Sequence: Synthetic polypeptide"
EVQLVESGGGLVQPGGSLRLSCAASGFTFRGYWMSWVRQAPGKGLEWVSAINNVGGETYYADSVKGRFTISRDNAKNALYLQMNSLKSEDTAVYYCARDWYNDPNKNEYKGQGTQVTVSS

SEQ ID NO: 25274 - protein, 115 aa, Artificial Sequence
  source: /note="Description of Artificial Sequence: Synthetic polypeptide"
EVQLVESGGGLVQAGGSLRLSCAASGSTGSSTAMGWSRQAPGKQREWVASISSAGTIRYVDSVKGRFTISRDNAKNTGYLQMNSLKPEDTAVYYCYVVGNFTTYWGRGTQVTVSS

SEQ ID NO: 25275 - protein, 120 aa, Artificial Sequence; identical to SEQ ID NO: 25267
  source: /note="Description of Artificial Sequence: Synthetic polypeptide"

SEQ ID NO: 25276 - protein, 120 aa, Artificial Sequence; identical to SEQ ID NO: 25264
  source: /note="Description of Artificial Sequence: Synthetic polypeptide"

SEQ ID NO: 25277 - protein, 120 aa, Artificial Sequence; identical to SEQ ID NO: 25264
  source: /note="Description of Artificial Sequence: Synthetic polypeptide"

SEQ ID NO: 25278 - protein, 120 aa, Artificial Sequence
  source: /note="Description of Artificial Sequence: Synthetic polypeptide"
EVQLVESGGGLVQPGGSLRLSCAASGFTFGGYWMTWVRQAPGKGLEWVSSIANDGKSTYYVDSVKGRFSISRDNAKNTLYLQMNSLKSEDTAVYYCVRDWASDYAGYSPNSQGTQVTVSS

SEQ ID NO: 25279 - protein, 120 aa, Artificial Sequence
  source: /note="Description of Artificial Sequence: Synthetic polypeptide"
EVQLVESGGDLVQPGGSLRLSCAASGFTFRGYWMTWVRQAPGKGLEWVSSINNIGEETYYVDSVKGRFTISRDNAKNTLYLQMNSLKSEDTAVYYCVKDWASDYAGYSPNSQGTQVTVSS

SEQ ID NO: 25280 - protein, 127 aa, Artificial Sequence
  source: /note="Description of Artificial Sequence: Synthetic polypeptide"
EVQLVESGGGLVQAGGSLRLSCAASGRTFSSYAMGWFRQAPGKEREFVAAISWSGRTTYYADFVKGRFTISRDNAKNTVYLQMNSLKPEDTAVYYCAADLSPGNEYGEMMEYEYDYWGEGTQVTVSS

SEQ ID NO: 25281 - protein, 120 aa, Artificial Sequence
  source: /note="Description of Artificial Sequence: Synthetic polypeptide"
EVQLVESGGGLVQPGGSLRLSCAASGFTFRGYWMSWVRQAPGKGLEWVSAINNVGGETYYADSVKGRFTISRDNAKNTLYLQMNSLKSEDTAAYYCARDWYNDPNKNEYKGQGTQVTVSS

SEQ ID NO: 25282 - protein, 120 aa, Artificial Sequence; identical to SEQ ID NO: 25267
  source: /note="Description of Artificial Sequence: Synthetic polypeptide"

SEQ ID NO: 25283 - protein, 120 aa, Artificial Sequence
  source: /note="Description of Artificial Sequence: Synthetic polypeptide"
EVQLVESGGGLVQPGGSLRLSCAASGFTFSGYWMSWVRQAPGKGLEWVSAINNVGGDTYYADSVKGRFTISRDNAKNTLYLQMNSLKSEDTAVYYCARDWYNDPNKNEYKGQGTQVTVSS

SEQ ID NO: 25284 - protein, 120 aa, Artificial Sequence; identical to SEQ ID NO: 25262
  source: /note="Description of Artificial Sequence: Synthetic polypeptide"

SEQ ID NO: 25285 - protein, 120 aa, Artificial Sequence; identical to SEQ ID NO: 25262
  source: /note="Description of Artificial Sequence: Synthetic polypeptide"

SEQ ID NO: 25286 - protein, 122 aa, Artificial Sequence
  source: /note="Description of Artificial Sequence: Synthetic polypeptide"
EVQLVESGGGLVQPGGSLRLSCAASGLIFSSYDMGWFRQAPGEERAFVGAISRSGDVRYVDPVKGRFTITRDNAKNTVYLQMNSLKPEDTAVYYCAADADGWWHRGQAYHWWGQGTQVTVSS

SEQ ID NO: 25287 - protein, 120 aa, Artificial Sequence; identical to SEQ ID NO: 25281
  source: /note="Description of Artificial Sequence: Synthetic polypeptide"

SEQ ID NO: 25288 - protein, 124 aa, Artificial Sequence
  source: /note="Description of Artificial Sequence: Synthetic polypeptide"
EVQLMESGGGLVQAGGSLRLSCAASGRTFSGYTMGWFRQAPGKGREWVAGISWSGDSTYYADSVKGRFTISREDAKNTVYLQMNSLKPGDTADYYCAAECAMYGSSWPPPCMDWGQGTQVTVSS

SEQ ID NO: 25289 - protein, 120 aa, Artificial Sequence; identical to SEQ ID NO: 25267
  source: /note="Description of Artificial Sequence: Synthetic polypeptide"

SEQ ID NO: 25290 - protein, 120 aa, Artificial Sequence
  source: /note="Description of Artificial Sequence: Synthetic polypeptide"
EVQLVESGGDLVQPGGSLRLSCAASGFTFSGYWMTWVRQAPGKGLEWVSSINNIGEEVYYVDSVKGRFTISRDNAKNTLYLQMNSLKSEDTAVYYCVKDWASDYAGYSPNSQGTQVTVSS

SEQ ID NO: 25291 - protein, 120 aa, Artificial Sequence; identical to SEQ ID NO: 25263
  source: /note="Description of Artificial Sequence: Synthetic polypeptide"

SEQ ID NO: 25292 - protein, 126 aa, Artificial Sequence
  source: /note="Description of Artificial Sequence: Synthetic polypeptide"
EVQLVESGGGLVQAGGSLRLSCAASGRTFSSSFMAWFRQVLGSDREFVGGISPGGRFTYYADSRKGRFTISGDNANNTVYLQMHSVKPEDTATYYCAADTQFSGYVPKETNEYDYWGQGTQVTVSS

SEQ ID NO: 25293 - protein, 128 aa, Artificial Sequence
  source: /note="Description of Artificial Sequence: Synthetic polypeptide"
EVQLVESGGGLVQAGGSLRLSCEASGRTYSRYGMGWFRQAPGKEREFVAAVSRLSGPRTVYADSVKGRFTISRDNAENTVYLQMNSLKPEDTAVYTCAAELTNRNSGAYYYAWAYDYWGQGTQVTVSS

SEQ ID NO: 25294 - protein, 121 aa, Artificial Sequence
  source: /note="Description of Artificial Sequence: Synthetic polypeptide"
EVQLVESGGGLVQAGGSLRLSCAASERTVIAYTMGWFRRAPGKERDFVAAMNWNGGNTIYADSAKGRFTISRDNAKNTVYLQMNSLKAEDTAVYYCAARPRFWGSYEYDYWGQGTQVTVSS

SEQ ID NO: 25295 - protein, 123 aa, Artificial Sequence
  source: /note="Description of Artificial Sequence: Synthetic polypeptide"
EVQLVESGGGLVQPGGSLRLSCAASGLTFRNYAIGWFRQAPGKEREGVSCINSGGSITDYLDSVKGRFAISRDNAKSTVYLQMNSLKPEDTAVYYCATDLTSSCPIYSGTDYWGKGTLVTVSS

SEQ ID NO: 25296 - protein, 125 aa, Artificial Sequence
  source: /note="Description of Artificial Sequence: Synthetic polypeptide"
EVQLVESGGGLVQAGGSLRLSCAASEGYFRNYMVGWFRQAPGGERMFVAAISDTAYYADSVKGRFTISRDNAKNTVYLPMNSLKPEDTAVYYCAAAPKSWGTWPLVADTRSYHFWGQGTQVTVSS

SEQ ID NO: 25297 - protein, 129 aa, Artificial Sequence
  source: /note="Description of Artificial Sequence: Synthetic polypeptide"
EVQLVESGGGLVQAGGSLRLSCEASGRTFSSYAMVGWFRQAPGKEREFVAAVTRWSGARTVYADSVKGRFTISRDNAENTVYLQMNSLKPEDTAVYTCAADSTNRNSGAVYYSWAYDYWGQGTQVTVSS

SEQ ID NO: 25298 - protein, 128 aa, Artificial Sequence
  source: /note="Description of Artificial Sequence: Synthetic polypeptide"
EVQLVESGGGLVQAGGSLRLSCEASGRTERYQAMGWFRQAPGKEREFVAVVTRWSGARTVYADSVKGRFTISRDNAENTVYLQMNSLKPEDTAVYTCAADSTNRNRGAIYYTWAYDYWGQGTQVTVSS

SEQ ID NO: 25299 - protein, 130 aa, Artificial Sequence
  source: /note="Description of Artificial Sequence: Synthetic polypeptide"
EVQLVESGGGLVQAGGSLRLSCATSGRTRSRYTMGWFRQAPGKEREFVAAISWSDDSTYYRDSVKGRFTISRDNAKKTVYLQMNTLKPEDTAVYYCAADSAFGTGYSDNYYSTSEEYDYWGQGTQVTVSS

SEQ ID NO: 25300 - protein, 127 aa, Artificial Sequence
  source: /note="Description of Artificial Sequence: Synthetic polypeptide"
EVQLVESGGGLVQAGGSLRLSCAASGPTFSADTMGWFRQAPGKEREFVATIPWSGGIAYYSDSVKGRFTMSRDNAKNTVDLQMNSLKPEDTALYYCAGSSRIYIYSDSLSERSYDYWGQGTQVTVSS

SEQ ID NO: 25301 - protein, 128 aa, Artificial Sequence
  source: /note="Description of Artificial Sequence: Synthetic polypeptide"
EVQLVESGGGLVQAGGSLRLSCEASGRTFSPIAMGWFRQAPGKEREFVAVVTRWSGARTVYADSVKGRFTISRDNAENTVYLQMNSLKPEDTAVYTCAADSTNRNSGAIYYTWAYDYWGQGTQVTVSS

SEQ ID NO: 25302 - protein, 112 aa, Artificial Sequence
  source: /note="Description of Artificial Sequence: Synthetic polypeptide"
EVQLVESGGGLVQAGGSLRLSCAASGIIFSTNHMGWYRRAPGKQRELVGTINRGDSPYYADSVKGRFTISRDNAKNMVYLQMNSLKPEDTAVYYCNAGYIYWGQGTQVTVSS

SEQ ID NO: 25303 - protein, 128 aa, Artificial Sequence
  source: /note="Description of Artificial Sequence: Synthetic polypeptide"
EVQLVESGGGLVQAGGSLRLSCEASGRTFSNYAMGWFRQAPGKEREFVAVVTRWSGGRTVYADSVKGRFTISRDNAENTVYLQMNSLKPEDTAVYTCAADSTNRNSGAWYYTWAYDHWGQGTQVTVSS

SEQ ID NO: 25304 - protein, 121 aa, Artificial Sequence
  source: /note="Description of Artificial Sequence: Synthetic polypeptide"
EVQLVESGGGLVQAGGSLRLSCTASGRTFSSYAMGWFRQTPGKEREFVASISWIGKFTYYADSVKGRFTISGENAKNTVYLQMNSLKPEDTAVYYCAAKTLVGVTTAFDRWGQGTQVTVSS

SEQ ID NO: 25305 - protein, 126 aa, Artificial Sequence
  source: /note="Description of Artificial Sequence: Synthetic polypeptide"
EVQLVESGGGLVQTGGSLRLSCAASGRTFSSSFMAWFRQALGSDREFVGGISPGGRITYYADSRKGRFTISRDNANNTVYLQMDSLKPEDTATYYCAADTQYSGVVLKESTDYDYWGQGTQVTVSS

SEQ ID NO: 25306 - protein, 126 aa, Artificial Sequence; identical to SEQ ID NO: 25305
  source: /note="Description of Artificial Sequence: Synthetic polypeptide"

SEQ ID NO: 25307 - protein, 121 aa, Artificial Sequence
  source: /note="Description of Artificial Sequence: Synthetic polypeptide"
EVQLVESGGGLVQAGGSLRLSCAASVRTFSNGAMGWFRQAPGKEREFVASISWSGGSTYYADSVKGRFTISGDNAKSTVYLQMNSLKPEDTAVYYCAVRGVAVTTILWNYWGQGTQVTVSS

SEQ ID NO: 25308 - protein, 121 aa, Artificial Sequence; identical to SEQ ID NO: 25294
  source: /note="Description of Artificial Sequence: Synthetic polypeptide"

SEQ ID NO: 25309 - protein, 121 aa, Artificial Sequence; identical to SEQ ID NO: 25294
  source: /note="Description of Artificial Sequence: Synthetic polypeptide"

SEQ ID NO: 25310 - protein, 125 aa, Artificial Sequence; identical to SEQ ID NO: 25296
  source: /note="Description of Artificial Sequence: Synthetic polypeptide"

SEQ ID NO: 25311 - protein, 125 aa, Artificial Sequence; identical to SEQ ID NO: 25296
  source: /note="Description of Artificial Sequence: Synthetic polypeptide"

SEQ ID NO: 25312 - protein, 128 aa, Artificial Sequence; identical to SEQ ID NO: 25303
  source: /note="Description of Artificial Sequence: Synthetic polypeptide"

SEQ ID NO: 25313 - protein, 125 aa, Artificial Sequence
  source: /note="Description of Artificial Sequence: Synthetic polypeptide"
EVQLVESGGELVQAGDSLTVSCAASGRTFSVYTMGWFRQAPMKEREFVAAISGGSIRYADSVKGRFAISSDNAGNTVYLQMNNLQPEDTAVYYCAAQGSIVFYSNWDRASQYDYWGQGTQVTVSS

SEQ ID NO: 25314 - protein, 127 aa, Artificial Sequence
  source: /note="Description of Artificial Sequence: Synthetic polypeptide"
EVQLVESGGGLVQPGGSLRLSCAASGFTFSSYWMYWVRQAPGKGLEWVSAISTGGGDTHYADSVKGRFTISRDNPKNTLYLQMNSLKPEDTALYYCARNRDSGSSYITFSLADFGSWGQGTQVTVSS

SEQ ID NO: 25315 - protein, 128 aa, Artificial Sequence; identical to SEQ ID NO: 25293
  source: /note="Description of Artificial Sequence: Synthetic polypeptide"

SEQ ID NO: 25316 - protein, 128 aa, Artificial Sequence
  source: /note="Description of Artificial Sequence: Synthetic polypeptide"
EVQLVESGGGLVQPGGSLRLSCAASGSSFSINAMGWFRQAPGKEREFVAVVTRWSGARTVYADSVKGRFTISRDNAENTVYLQMNSLKPEDTAVYTCAADSTNRNSGAVYYTWAYDYWGQGTQVTVSS

SEQ ID NO: 25317 - protein, 128 aa, Artificial Sequence; identical to SEQ ID NO: 25316
  source: /note="Description of Artificial Sequence: Synthetic polypeptide"

SEQ ID NO: 25318 - protein, 128 aa, Artificial Sequence
  source: /note="Description of Artificial Sequence: Synthetic polypeptide"
EMQLVESGGGLVQAGGSLRLSCEASGRSFSSYAMGWFRQAPGKEREFVAAVSRWSGPRTVYADSVKGRFTISRDNAENTVYLQMNSLKPEDTAVYTCAADSTNRNSGAVYYTWAWDYWGQGTQVTVSS

SEQ ID NO: 25319 - protein, 129 aa, Artificial Sequence
  source: /note="Description of Artificial Sequence: Synthetic polypeptide"
EVQLVESGGGLVQAGGSLRLSCAASGFTFDDYAIGWFRQAPGKEREGVSCIRCSDGSTYYADSVKGRFTISSDNAKNTVYLQMNSLKPEDTAVYYCAADFSLAQYKTIHRMPPYGMDYWGKGTLVTVSS

SEQ ID NO: 25320 - protein, 128 aa, Artificial Sequence
  source: /note="Description of Artificial Sequence: Synthetic polypeptide"
EVQLVESGGGLVQAGGSLRLSCEASGGSFSSYAMGWFRQAPGKEREFVAAVSGWIGPRPVYADSVKGRFTISRDNAENTVYLQMNSLQPEDTAVYTCAADATNRNSGAYYYTWAYDYWGQGTQVTVSS

SEQ ID NO: 25321 - protein, 128 aa, Artificial Sequence
  source: /note="Description of Artificial Sequence: Synthetic polypeptide"
EVQLVESGGGLVQAGGSLRLSCEASGRSFSSVAMGWFRQAPGKEREFVAALSRWSGARTVYADSVKGRFTISGDNAENTVYLQMNSLKPEDTAVYTCAADSTNRNSGAVYYTWAYDYWGQGTQVTVSS

SEQ ID NO: 25322 - protein, 128 aa, Artificial Sequence
  source: /note="Description of Artificial Sequence: Synthetic polypeptide"
EVQLVESGGGLVQAGGSLRLSCEASGRTFSSYAMGWFRQAPGKEREFVAVVTRWSGGRTVYABSVKGRFTISRDNAENTVYLQMNSLKPEDTAVYTCAADSTNRNSGAWYYTWAYDHWGQGTQVTVSS

SEQ ID NO: 25323 - protein, 128 aa, Artificial Sequence
  source: /note="Description of Artificial Sequence: Synthetic polypeptide"
EVQLVESGGGLVQAGGSLRLSCEASGRTFSRYGMGWFRQAPGKEREFVAAVSRLSGPRTVYADSVKGRFTISRDNAENTVYLQMNSLKPEDTAVYTCAAELTNRNSGAYYYTWAYDYWGQGTQVTVSS

SEQ ID NO: 25324 - protein, 128 aa, Artificial Sequence; identical to SEQ ID NO: 25301
  source: /note="Description of Artificial Sequence: Synthetic polypeptide"

SEQ ID NO: 25325 - protein, 128 aa, Artificial Sequence
  source: /note="Description of Artificial Sequence: Synthetic polypeptide"
EVQLVESGGGLVQAGGSLRLSCEASGRTFSSVAMGWFRQAPGKEREFVAAVSRWSGARTVYADSVKGRFTISGDNAENTVYLQMNSLKPEDTAVYTCAADSTNRNSGAVYYPWAYDYWGQGTQVTVSS

SEQ ID NO: 25326 - protein, 129 aa, Artificial Sequence
  source: /note="Description of Artificial Sequence: Synthetic polypeptide"
EVQLVESGGGLVQAGGSLRLSCEASRRTFSSYAMVGWFRQAPGKEREFVAAVTRWSGARTVYADSVKGRFTISRDNAENTVYLQMNSLKPEDTAVYTCAADSTNRNSGAVYYSWAYDYWGQGTQVTVSS

SEQ ID NO: 25327 - protein, 128 aa, Artificial Sequence
  source: /note="Description of Artificial Sequence: Synthetic polypeptide"
EVQLVESGGGLVQAGGSLRLSCEASGRTERYQAMGWFRQAPGKEREFVAVVTRWSGARTVYADSVKGRFTISRDNAENTVYLQMNSLKPEDTAVYTCAADSTNRNSGAIYYTWAYDYWGQGTQVTVSS

SEQ ID NO: 25328 - protein, 129 aa, Artificial Sequence; identical to SEQ ID NO: 25297
  source: /note="Description of Artificial Sequence: Synthetic polypeptide"

SEQ ID NO: 25329 - protein, 122 aa, Artificial Sequence
  source: /note="Description of Artificial Sequence: Synthetic polypeptide"
EVQLVESGGGLVQPGGSLGLSCAASGNIFSITGMGWYRQAPGNQRELVAQISHYDSTMYADSVKGRFTISRDNAKNTVYLQMNSLKPEDTAVYYCNAQIIPRVMPLRSNDYWGQGTQVTVSS

SEQ ID NO: 25330 - protein, 118 aa, Artificial Sequence
  source: /note="Description of Artificial Sequence: Synthetic polypeptide"
EVQLVESGGGSVQPGGSARLSCAVLGSIGSLNAMGWYRQTPGKERELVARITSLGPIMYAEFVKGRFTISRDNDKNTVYLQMNSLKPEDTAVYYCKTRWYEGIWREYWGQGTRVTVSS

SEQ ID NO: 25331 - protein, 125 aa, Artificial Sequence
  source: /note="Description of Artificial Sequence: Synthetic polypeptide"
EVQLVESGGGLAQPGGSLRLSCAASGFTFNDYAMGWFRQAPGKEREFVAGISWAGHNTVYAGSMKGRFTVSRDNAENTLYLQMNSLESEDTAVYYCAKSLGTIWYQKDYRAYDAWGRGTQVTVSS

SEQ ID NO: 25332 - protein, 121 aa, Artificial Sequence; identical to SEQ ID NO: 25294
  source: /note="Description of Artificial Sequence: Synthetic polypeptide"

SEQ ID NO: 25333 - protein, 125 aa, Artificial Sequence
  source: /note="Description of Artificial Sequence: Synthetic polypeptide"
EVQLVESGGGLVQAGGSLRLSCAASERTFIPYPMGWFRQAPGKEREFVGAISGGGFPTFYADSVKGRFTISRDNAENTVYLQMNSLKPEDTAVYFCARNRQGEVFRTTRLDYDSWGRGTQVTVSS

SEQ ID NO: 25334 - protein, 121 aa, Artificial Sequence
  source: /note="Description of Artificial Sequence: Synthetic polypeptide"
EVQLVESGGGLVQPGGSLRLSCAASGFVFSHYAMSWVRQAPGKGLEWVSDITHGGLSTTYRDSVKGRFTISRDNAKNTLYLQMDSLKPEDTAVYYCSKDRYPFVSREYDYRGQGTQVTVSS

SEQ ID NO: 25335 - protein, 119 aa, Artificial Sequence
  source: /note="Description of Artificial Sequence: Synthetic polypeptide"
EVQLVESGGGLVQPGGSLTLSCAASGSVFSVNAMGWHRQAPGKERELVAQLTVFGSLNYADSVKGRFSISKDSAKNTVLLQMNSLKPEDTAVYSCNLRQYESDRWRDYWGQGTQVTVSS

SEQ ID NO: 25336 - protein, 128 aa, Artificial Sequence
  source: /note="Description of Artificial Sequence: Synthetic polypeptide"
EVQLVESGGGLVQPGGSLRLSCAASGFTFDYYAIGWFRQAPGKEREGVSCISSSDSSTYYADSVKGRFTISRDNAKNTVYLQMNSLKPEDTAVYYCAADFSRSWGTCNEEYYYGMDYWGKGTLVTVSS

SEQ ID NO: 25337 - protein, 121 aa, Artificial Sequence
  source: /note="Description of Artificial Sequence: Synthetic polypeptide"
EVQLVESGGGLVQAGGSLRLSCTASGRTLSSYAMGWFRQTPGKEREFVASISWIGKFTYYADSVKGRFTISGENAKNTVYLQMNSLKPEDTAVYYCAAKTIVGGTTAWBRWGQGTQVTVSS

SEQ ID NO: 25338 - protein, 121 aa, Artificial Sequence
  source: /note="Description of Artificial Sequence: Synthetic polypeptide"
EVQLVESGGGLVQAGGSLRLSCTAGGDTFSSYAMGWFRQTPGKEREFVASISWIGKFTYYADSVKGRFTISGENAKNTVYLQMNSLKPEDTAVYYCAAKTIVGGTTAWDRWGQGTQVTVSS

SEQ ID NO: 25339 - protein, 121 aa, Artificial Sequence
  source: /note="Description of Artificial Sequence: Synthetic polypeptide"
EVQLVESGGGLVQPGGSLRLSCAASGFVFSHYAMSWVRQAPGKGLEWVSDITNGGLSTTYRDSVKGRFTISRDNAKNTLYLQMDSLKPEDTAVYYCSKDLYPFVSREYDYRGQGTQVTVSS

SEQ ID NO: 25340 - protein, 123 aa, Artificial Sequence
  source: /note="Description of Artificial Sequence: Synthetic polypeptide"
EVQLVESGGGLVQAGGSLRLSCAAPGRTFSTWVMGWFRQAPGKEREFVARIDWGGSSTSYADIVKGRFTISRDNAKNTVYLQMNSLKPEDAAVYYCAADLDGNGSIDYGYEYWGQGTQVTVSS

SEQ ID NO: 25341 - protein, 121 aa, Artificial Sequence
  source: /note="Description of Artificial Sequence: Synthetic polypeptide"
EVQLVESGGGLVQPGGSLRLSCAASGFVFSHYAMSWVRQAPGKGLEWVSBITHGGLTTTYRDSVKGRFTISRDNAKNTLYLQMDSLKPEDTAVYYCSKDRYPFISKEYDYRGQGTQVTVSS

SEQ ID NO: 25342 - protein, 119 aa, Artificial Sequence
  source: /note="Description of Artificial Sequence: Synthetic polypeptide"
EVQMVESGGGLVQPGGSLRLSCVASGSIARLNTMGWYRQAPGKQRELVATLSIFGVSDYADSVKGRFTISRDNAKNMVYLQMNSLKPEDTALYFCKQRQHDGGSWYDYWGQGTQVTVSS

SEQ ID NO: 25343 - protein, 123 aa, Artificial Sequence
  source: /note="Description of Artificial Sequence: Synthetic polypeptide"
EVQLVESGGGLVQAGGSLRLSCAASGSLFRIFTMGWYRQAPGKQRELVADITTGGSTNYADSVKGRFTISSENAKNTVYLQMNSLKAEDTAVYYCNALGRMAVAHSVSDFNSWGQGTQVTVSS

SEQ ID NO: 25344 - protein, 127 aa, Artificial Sequence; identical to SEQ ID NO: 25300
  source: /note="Description of Artificial Sequence: Synthetic polypeptide"

SEQ ID NO: 25345 - protein, 128 aa, Artificial Sequence
  source: /note="Description of Artificial Sequence: Synthetic polypeptide"
EVQLVESGGGLVQAGGSLRLSCEASGRTFSSYGMGWFRQAPGKEREFVAAVSRLSGPRTVYADSVKGRFTISRDNAENTVYLQMNSLKPEDTAVYTCAAELTNRNPGAYYYTWAYDYWGQGTQVTVSS

SEQ ID NO: 25346 - protein, 125 aa, Artificial Sequence
  source: /note="Description of Artificial Sequence: Synthetic polypeptide"
EVQLVESGGGLVQAGGSLRLSCAASGPTFSTMGWFRQAPGKEREFVATIPWSGGIPYYSDSVKGRFTMSRDNAKNTADLQMNSLKPEDTALYYCAGSSRIYIYSDSLSEGSYDYWGQGTQVTVSS

SEQ ID NO: 25347 - protein, 127 aa, Artificial Sequence; identical to SEQ ID NO: 25300
  source: /note="Description of Artificial Sequence: Synthetic polypeptide"

SEQ ID NO: 25348 - protein, 119 aa, Artificial Sequence
  source: /note="Description of Artificial Sequence: Synthetic polypeptide"
EVQLVESGGGLVQPGGSLRLSCAASGSIFSINAMGWYRQAPGKQRDLVAHITFGGSSYYADSVKGRFTISRDNAKNTVYLQMNSLKPEDTAVYYCNARGLGSHRVSDYWGQGTQVTVSS

SEQ ID NO: 25349 - protein, 119 aa, Artificial Sequence
  source: /note="Description of Artificial Sequence: Synthetic polypeptide"
EVQLVESGGGLVQPGGSLRLSCAASGSIFSINAMGWYRQAPGKQRDLVAHITFGGNSYYADSVKGRFTISRDNAKNTVYLQMNSLKPEDTAVYYCNARGLGSHRVSDYWGQGTQVTVSS

SEQ ID NO: 25350 - protein, 126 aa, Artificial Sequence
  source: /note="Description of Artificial Sequence: Synthetic polypeptide"
EVQLVESGGGLVQAGGSLRLSCVASGRTFNNLAMGWFRQARGKEREFVATISWSHPNTYYTDSVKGRFTISRDDAKNAVYLQMNSLKPEDTAVYYCAANPSYVYSDYLSLAGYTYWGQGTQVTVSS

SEQ ID NO: 25351 - protein, 118 aa, Artificial Sequence
  source: /note="Description of Artificial Sequence: Synthetic polypeptide"
EVQLVESGGGLVQAGGSLRLSCAASGSSGVINAMAWHRQAPGKERELVAHISSGGSTYYGDFVKGRFTISRDNAKDTVYLQMNSLKPEDTAVYYCHVPWMDYNRRDYWGQGTQVTVSS

SEQ ID NO: 25352 - protein, 123 aa, Artificial Sequence; identical to SEQ ID NO: 25343
  source: /note="Description of Artificial Sequence: Synthetic polypeptide"

SEQ ID NO: 25353 - protein, 119 aa, Artificial Sequence
  source: /note="Description of Artificial Sequence: Synthetic polypeptide"
EVQLVESGGGLVQPGGSLRLSCAASGSIFSINAMGWYRQAPGKQRELVAHISSGGSTYYGDSVKGRFTISRDNAKNTADLQMNSLKPEDTAVYYCNARTLGAHGIDDYWGQGTQVTVSS

SEQ ID NO: 25354 - protein, 127 aa, Artificial Sequence; identical to SEQ ID NO: 25300
  source: /note="Description of Artificial Sequence: Synthetic polypeptide"

SEQ ID NO: 25355 - protein, 128 aa, Artificial Sequence; identical to SEQ ID NO: 25303
  source: /note="Description of Artificial Sequence: Synthetic polypeptide"

SEQ ID NO: 25356 - protein, 119 aa, Artificial Sequence
  source: /note="Description of Artificial Sequence: Synthetic polypeptide"
EVQLVESGGGSVQPGGSLRLSCAASGSIVGINAMGWYRQALGKQRELVATIGNGGNTNYADSAKGRFSISRHNAKNSVYLQMNSLKPEDTAVYFCNLKQPENHAITNYWGQGTQVTVSS

SEQ ID NO: 25357 - protein, 119 aa, Artificial Sequence
  source: /note="Description of Artificial Sequence: Synthetic polypeptide"
EVQLVESGGGLVQPGGSLRLSCAASGSIFSINAMGWYRQAPGKQRELVAHITSGGSTNYADSVKGRFTISRDNAKNTVYLQMNSLKPEDTAVYYCNHRGAGAHRVDDYWGQGTQVTVSS

SEQ ID NO: 25358 - protein, 128 aa, Artificial Sequence; identical to SEQ ID NO: 25293
  source: /note="Description of Artificial Sequence: Synthetic polypeptide"

SEQ ID NO: 25359 - protein, 123 aa, Artificial Sequence
  source: /note="Description of Artificial Sequence: Synthetic polypeptide"
EVQLVESGGGLVQPGGSLKLSCAASGGFFSIDAMGWYRQAPGKQRELVAAITSGGNTNYADSVKGRFTISRDNAKNTVYLQMNSLKPEDTAVYYCNTEGREARNHGLYEYHSWGQGTQVTVSS

SEQ ID NO: 25360 - protein, 121 aa, Artificial Sequence
  source: /note="Description of Artificial Sequence: Synthetic polypeptide"
EVQLVESGGGLVQPGGSLRLSCAASGSIFGLNAMGWYRQVPGKERELVVSISSGGSTTYADSVKGRGRFTISRDDAKNTVYLQMNSLKPEDTGVYYCNARVPGAHYIMDYWGKGTLVTVSS

SEQ ID NO: 25361 - protein, 119 aa, Artificial Sequence
  source: /note="Description of Artificial Sequence: Synthetic polypeptide"
EVQLVESGGGLVQPGGSLRLSCAASGSIVGINAMGWYRQAPGKQRELVATIGNGGNTNYADSAKGRFSISRHNAKNSVYLQMNSLKPEDTAVYFCNLKQPENHAITNYWGQGTQVTVSS

SEQ ID NO: 25362 - protein, 111 aa, Artificial Sequence
  source: /note="Description of Artificial Sequence: Synthetic polypeptide"
EVQLVESGGGLVQAGGSLKLSCAVSARIFSTNSVDWYRQIPGKQRDWVATITPSPYTYYADSVKGRFTISRDDAKNTVYLHMNSLKPEDTAVYYCKTLDNWGQGTQVTVSS

SEQ ID NO: 25363 - protein, 126 aa, Artificial Sequence; identical to SEQ ID NO: 25292
  source: /note="Description of Artificial Sequence: Synthetic polypeptide"

SEQ ID NO: 25364 - protein, 126 aa, Artificial Sequence; identical to SEQ ID NO: 25292
  source: /note="Description of Artificial Sequence: Synthetic polypeptide"

SEQ ID NO: 25365 - protein, 124 aa, Artificial Sequence
  source: /note="Description of Artificial Sequence: Synthetic polypeptide"
EVQLVESGGGLVQAGGSLRLSCAASGRTGGTITMAWFRQAPGKEREFVAVISWGGITTSYADSVKGRFTISRDHAKNEQYLEMNSLKPEDTAVYFCTARAGSGLRTTINDYTYWGQGTQVTVSS

SEQ ID NO: 25366 - protein, 121 aa, Artificial Sequence
  source: /note="Description of Artificial Sequence: Synthetic polypeptide"
EVQLVESGAGLVQAGGSLRLSCTASGRTFSSYAMGWFRQTPGKEREFVASISWIGEFIYYADSVKGRFTISGENAKNTVYLQMNRLKPEDTAVYYCAAKTLVGDTTAFDRWGQGTQVTVSS

SEQ ID NO: 25367 - protein, 126 aa, Artificial Sequence
  source: /note="Description of Artificial Sequence: Synthetic polypeptide"
EVQLVKSGGGLVQAGGSLKLSCAASGRAFSSYTMGWFRQAPGKEREFVASISRDGGTPYYAYSVKGRFTISRDNAKNTVYLQMNSLGPEDTAIYTCAAKENGMFITATQEQSYDYWGQGTQVTVSS

SEQ ID NO: 25368 - protein, 121 aa, Artificial Sequence; identical to SEQ ID NO: 25339
  source: /note="Description of Artificial Sequence: Synthetic polypeptide"

SEQ ID NO: 25369 - protein, 121 aa, Artificial Sequence; identical to SEQ ID NO: 25294
  source: /note="Description of Artificial Sequence: Synthetic polypeptide"

SEQ ID NO: 25370 - protein, 126 aa, Artificial Sequence
  source: /note="Description of Artificial Sequence: Synthetic polypeptide"
EVQLVESGGGLVQAGGSLRLSCAASGRTFSSSFMAWFRQALGSDREFLGGISPGSRFTYYADSGKGRFTISRDNANNTVYLQMHSLKPEDTATYYCAADTEFSGYVQKESNDYDYWGQGIQVTVSS

SEQ ID NO: 25371 - protein, 115 aa, Artificial Sequence
  source: /note="Description of Artificial Sequence: Synthetic polypeptide"
EVQLVESGGGLVQAGGSLRLSCTVSGDTFDNSAAGWYRATSETQRELVARIRSSGSTNYADSVKGRFTVSRDNAKNTVYLQMNSLKPEDTAVYYCNVVSYGEYFWGKGTLVTVSS

SEQ ID NO: 25372 - protein, 119 aa, Artificial Sequence
  source: /note="Description of Artificial Sequence: Synthetic polypeptide"
EVQLVESGGGLVQPGGSLRLSCAASGFTFGDSDMSWVRQAPGEGPEWVAGINSGGGSTVYADSVKGRFTISRDNAKNMLYLQMNSLKPEDTAVYLCAQGLMAEVTAGYWGQGTQVTVSS

SEQ ID NO: 25373 - protein, 115 aa, Artificial Sequence; identical to SEQ ID NO: 25371
  source: /note="Description of Artificial Sequence: Synthetic polypeptide"

SEQ ID NO: 25374 - protein, 122 aa, Artificial Sequence
  source: /note="Description of Artificial Sequence: Synthetic polypeptide"
EVQLVESGGGLVQAGASLRLSCAASGSTLSRYGVGWFRQAPGKERELVASVDWSGSRTYYADSVKGRFTISRDNAKNTGYLQMNSLKPDDTAVYYCAADSSVVPGIEKYDDWGLGTQVTVSS

SEQ ID NO: 25375 - protein, 124 aa, Artificial Sequence
  source: /note="Description of Artificial Sequence: Synthetic polypeptide"
EVQLVESGGGLVQAGGSLRLSCAASGRTLSSYRMGWFRQAPGKEREFISTISWNGRSTYYADSVKGRFIFSEDNAKNTVYLQMNSLKPEDTAVYYCAAALIGGYYSDVDAWSYWGPGTQVTVSS

SEQ ID NO: 25376 - protein, 125 aa, Artificial Sequence
  source: /note="Description of Artificial Sequence: Synthetic polypeptide"
EVQLVKSGGGSVQAGGSLRLSCAASGGTFNPYVMAWFRQAPGNEREFVARIRWSGGDAYYDDSVKGRFAITRDAAKNTVHLQMNSLKPEDTAVYYCAAATYGYGSYTYGGSYDLWGQGTQVTVSS

SEQ ID NO: 25377 - protein, 118 aa, Artificial Sequence
  source: /note="Description of Artificial Sequence: Synthetic polypeptide"
EVQLVESGGGLVQPGGSLRLSCAASGFIFGSYDMSWVRQAPGKGPEWVSGINSGGGSTGYADSVKGRFTISRDNAKNTLYLQMNSLKPEDTAVYYCSTNLYPTTDDVWGQGTQVTVSS

SEQ ID NO: 25378 - protein, 127 aa, Artificial Sequence
  source: /note="Description of Artificial Sequence: Synthetic polypeptide"
EVQLVESGGGLVQAGGSLRLSCAASGGRTFSRVVAGWFRQAPGKEREFVAAISWDGVQTYYTDSVEGRFTVSRDSAKITVFLQMDNLKPEDTAVYYCAADKGVYTTVSRSMADYGAWGQGTQVTVSS

SEQ ID NO: 25379 - protein, 125 aa, Artificial Sequence
  source: /note="Description of Artificial Sequence: Synthetic polypeptide"
EVQLVESGGGSVQAGGSLRLSCAASGGTFNPYVMAWFRQAPGNEREFVARIRWSGGDAYYDDSVKGRFAITRDAAKNTVHLQMNSLKPEDTAVYYCAAATYGYGSYTYGGSYDLWGQGTQVTVSS

SEQ ID NO: 25380 - protein, 117 aa, Artificial Sequence
  source: /note="Description of Artificial Sequence: Synthetic polypeptide"
EVQLVESGGDLVQAGGSLRLSCVASGSTYSINAMGWYRQAPGKLRELVAAFRTGGSTDYADSVKGRFTISRDTAKNTVYLQMNSLKPEDTAVYYCNAEVIYYPYDYWGQGTQVTVSS

SEQ ID NO: 25381 - protein, 125 aa, Artificial Sequence; identical to SEQ ID NO: 25379
  source: /note="Description of Artificial Sequence: Synthetic polypeptide"

SEQ ID NO: 25382 - protein, 125 aa, Artificial Sequence
  source: /note="Description of Artificial Sequence: Synthetic polypeptide"
EVQLVESGGGLAQAGGSLRLSCAASGRTLTSYIMGWFRQAPGKERMFVAAISGTGTIKYYGDLVKGRFTISRDNAKNTVYLQIDSLQPEDTAVYYCAARQDYGLGYRDLHEYDYWGQGTQVTVSS

SEQ ID NO: 25383 - protein, 125 aa, Artificial Sequence
  source: /note="Description of Artificial Sequence: Synthetic polypeptide"
EVQLVESGGGLVQPGGSLRVSCAASGFTFNDYIMGWFRQAPGKERMFIAAISGTGTIKYYGDLVRGRFTISRDNAKNTVYLRIDSLNPEDTAVYYCAARQDYGLGYRESHEYDYWGQGTQVTVSS

SEQ ID NO: 25384 - protein, 125 aa, Artificial Sequence
  source: /note="Description of Artificial Sequence: Synthetic polypeptide"
EVQLVESGGGLVQPGGSLRVSCAASGFTFNSYIMGWFRQAPGKERMFIAAISGTGTIKYYGDLVGGRFTISRDNAKNTVYLRIDSLNPEDTAVYYCAARQDYGLGYRESHEYDYWGQGTQVTVSS

SEQ ID NO: 25385 - protein, 125 aa, Artificial Sequence
  source: /note="Description of Artificial Sequence: Synthetic polypeptide"
EVQLVESGGGLVQPGGSLRLSCAASGFTFNSYIMGWFRQAPGKERMFIAAISGTGTIKYYGDLVGGRFTISRDNAKNTVYLRIDSLNPEDTAVYYCAARQDYGLGYRESHEYDYWGQGTQVTVSS

SEQ ID NO: 25386 - protein, 124 aa, Artificial Sequence
  source: /note="Description of Artificial Sequence: Synthetic polypeptide"
EVQLVESGGGLVQAGGSLRLSCVASGGTFSTYGMGWFRQAAGKEREFAVAISRSGANIYYGTSTQGRFTISRDNAKNTLYLQMNSLEPEDTAVYYCAASKEWDISASGDDYDYWGQGTQVTVSS

SEQ ID NO: 25387 - protein, 114 aa, Artificial Sequence
  source: /note="Description of Artificial Sequence: Synthetic polypeptide"
EVQLVESGGGLVQPGGSLRLSCTAYGFIFDRSRMFWARQAPGKGFEWLSSILTAGDTWYSDSVKGRFTISRDNAKNTLYLQMNDLKSEDTAVYYCSKDGIYSSKGQGTQVTVSS

SEQ ID NO: 25388 - protein, 114 aa, Artificial Sequence; identical to SEQ ID NO: 25387
  source: /note="Description of Artificial Sequence: Synthetic polypeptide"

SEQ ID NO: 25389 - protein, 114 aa, Artificial Sequence
  source: /note="Description of Artificial Sequence: Synthetic polypeptide"
EVQLVESGGGLVQPGGSLRLSCTAYGFIFDRSRMFWARQAPGKGFEWLSSILTAGDTWYSDSVKGRFTISRDNAKNTLYLQMNDLKSEDTAVYYCSKDGIHSSKGQGTQVTVSS

SEQ ID NO: 25390 - protein, 114 aa, Artificial Sequence
  source: /note="Description of Artificial Sequence: Synthetic polypeptide"
EVQLVESGGDLVQPGGSLRLSCTAYGFIFDQARMFWARQAPGKGFEWLSSILTAGDTWYSDSVKGRFTISRDNAKNTLYLQMNDLKSEDTAVYYCSKDGIYSSKGQGTQVTVSS

SEQ ID NO: 25391 - protein, 114 aa, Artificial Sequence
  source: /note="Description of Artificial Sequence: Synthetic polypeptide"
EVQLVESGGGLVQPGGSLRLSCTAYGFIFDQSRMFWARQAPGKGFEWLSSILTAGDTWYSDSVKGRFTISRDNAKNTLYLQMNDLKSEDTAVYYCSKDGIYSSKGQGTQVTVSS

SEQ ID NO: 25392 - protein, 114 aa, Artificial Sequence
  source: /note="Description of Artificial Sequence: Synthetic polypeptide"
EVQLVESGGGLVQPGGSLRLSCTAYGFIFDQSRMFWARQAPGKGFEWLSSILTAGDTWHSDSVKGRFTISRDNAKNTLYLQMNDLKSEDTAVYYCSKDGIYSSKGQGTQVTVSS

SEQ ID NO: 25393 - protein, 114 aa, Artificial Sequence
  source: /note="Description of Artificial Sequence: Synthetic polypeptide"
EVQMVESGGDLVQPGGSLRLSCTAYGFIFDQARMFWARQAPGKGFEWLSSILTAGDTWYSDSVKGRFTISRDNAKNTLYLQMNDLKSEDTAVYYCSKDGIYSSKGQGTQVTVSS

SEQ ID NO: 25394 - protein, 114 aa, Artificial Sequence
  source: /note="Description of Artificial Sequence: Synthetic polypeptide"
EVQLVESGGDLVQPGGSLRLSCTAYGFIFDQARMFWARQAPGKGFEWLSSILTAGDTWYSDSVKGRFIISRDNAKNTLYLQMNDLKSEDTAVYYCSKDGIYSSKGQGTQVTVSS

SEQ ID NO: 25395 - protein, 114 aa, Artificial Sequence
  source: /note="Description of Artificial Sequence: Synthetic polypeptide"
EVQLVESGGGLVQPGGSLRLSCTAYGFVFDQSRMFWARQAPGKGFEWLSSILTAGDTWYSDSVKGRFTISRDNAKNTLYLQMNDLKSEDTAVYYCSKDGIHSSKGRGTQVTVSS

SEQ ID NO: 25396 - protein, 125 aa, Artificial Sequence
  source: /note="Description of Artificial Sequence: Synthetic polypeptide"
EVQLVESGGGLVQPGGSLRLSCEASGFTWDYYVIGWFRQAPGKEREGLSCISSDGSTTYADSVKGRFTISRDNAKNTVYLQMNSLKPEDTAVYYCATDPALGCYSGTYYPRYDYWGQGTQVTVSS

SEQ ID NO: 25397 - protein, 126 aa, Artificial Sequence
  source: /note="Description of Artificial Sequence: Synthetic polypeptide"
EVQLVESGGGLVQPGGSLRLSCAASGLTLDYYALGWFRQAPGKEREGVSCISSVDHSTTYADSVKGRFTISWDNAKNTVYLQMNSLKPEDTAVYYCAADPALGCYSGSYYPRYDYWGQGTQVTVSS

SEQ ID NO: 25398 - protein, 126 aa, Artificial Sequence
  source: /note="Description of Artificial Sequence: Synthetic polypeptide"
EVQPVESGGGLVQPGGSLRLSCEASGFTWDYYVIGWFRQAPGKEREGLSCISSSDGSTTYADSVKGRFTISRDNAKNTVYLQMNSLKPEDTAVYYCAVDPALGCYSGSYYPRYDYWGQGTQVTVSS

SEQ ID NO: 25399 - protein, 126 aa, Artificial Sequence
  source: /note="Description of Artificial Sequence: Synthetic polypeptide"
EVQLVESGGGLVQPGGSLRLSCEASGFTWDYYVIGWFRQAPGKEREGLSCISSSDGSTTYADSVKGRFTISRDNAKNTVYLQMNSLKPEDTAVYYCAVDPALGCYSGSYYPRYDYWGQGTQVTVSS

SEQ ID NO: 25400 - protein, 126 aa, Artificial Sequence
  source: /note="Description of Artificial Sequence: Synthetic polypeptide"
EVQLVESGGGLVQPGGSLRLSCAASGLTLDYYAIGWFRQAPGKEREGVSCISSSDHSTTYADSVKGRFTISWDNAKNTVYLQMNSLKPEDTAVYYCAADPALGCYSGSYYPRYDYYGQGTQVTVSS

SEQ ID NO: 25401 - protein, 126 aa, Artificial Sequence
  source: /note="Description of Artificial Sequence: Synthetic polypeptide"
EVQLVESGGGLVQPGGSLRLSCAASGLTLDYYALGWFRQAPGKEREGVSCISSSDHSTTYTDSVKGRFTISWDNAKNTLYLQMNSLKPEDTAVYYCAADPALGCYSGSYYPRYDYWGQGTQVTVSS

SEQ ID NO: 25402 - protein, 125 aa, Artificial Sequence
  source: /note="Description of Artificial Sequence: Synthetic polypeptide"
EVQLVESGGGLVQPGGSLRLSCEASGFTWDYYVIGWFRQAPGKEREGLSCISSDGSTTYADSVKGRFTISRDNAKNTVYLQMNSLKPEDTAVYYCATDPALGCYSGSYYPRYDYWGQGTQVTVSS

SEQ ID NO: 25403 - protein, 126 aa, Artificial Sequence
  source: /note="Description of Artificial Sequence: Synthetic polypeptide"
EVQLVESGGGLVQPGGSLRLSCAASGLTLDYYAIGWFRQAPGKEREGVSCISSVDHSTTYADSVKGRFTISWDSAKNTVYLQMNDLKPEDTAVYYCAADPALGCYSGSYYPRYDYWGQGTQVTVSS

SEQ ID NO: 25404 - protein, 126 aa, Artificial Sequence
  source: /note="Description of Artificial Sequence: Synthetic polypeptide"
EVQLVESGGGLVQPGGSLRLSCAASGFTSDYYAIGWFRQAPGKEREGVSCISSSDGSTTYADLVKGRFTISRDNAKNTVYLQMNSLQPEDTAVYYCAADPALGCYSGSYYPRYDYWGQGTQVTVSS

SEQ ID NO: 25405 - protein, 125 aa, Artificial Sequence
  source: /note="Description of Artificial Sequence: Synthetic polypeptide"
EVQLVESGGGLVQPGGSLRLSCAASGFTWDYYVIGWFRQAPGKEREGVSCISSDGTTTYPDSVKGRFTISRDNAKNTVYLQMNSLKPEDTAVYYCAADPALGCYSGSYYPRYDYWGQGTQVTVSS

SEQ ID NO: 25406 - protein, 126 aa, Artificial Sequence
  source: /note="Description of Artificial Sequence: Synthetic polypeptide"
EVQLVESGGGLVQPGGSLRLSCAASGFTWDYYAIGWFRQAPGKEREGVSCISSSDGSTTYADSVKGRFTISRDNAKNTVYLQMNSLTPEDTAVYYCAVDPALGCYSGSYYPRYDYWGQGTQVTVSS

SEQ ID NO: 25407 - protein, 125 aa, Artificial Sequence
  source: /note="Description of Artificial Sequence: Synthetic polypeptide"
EVQLEESGGGLVQPGGSLRLSCEASGFTWDYYVIGWFRQAPGKEREGLSCISSDGLTTYADSVKGRFTISRDNAKNTVYLQMNGLKPEDTAVYYCATDPALGCYSGSYYPRYDYWGQGTQVTVSS

SEQ ID NO: 25408 - protein, 126 aa, Artificial Sequence
  source: /note="Description of Artificial Sequence: Synthetic polypeptide"
EVQLVESGGGLVQPGGSLRLSCAASGLTLDYYALGWFRQAPGKEREGVSCISSADHSTTYADSVKGRFTISWDNAKNTVYLQMNSLKPEDTAVYYCAADPALGCYSGNYYPRYDYWGQGTQVTVSS

SEQ ID NO: 25409 - protein, 126 aa, Artificial Sequence
  source: /note="Description of Artificial Sequence: Synthetic polypeptide"
EVQLVESGGGLVQPGGSLRLSCAASGLTLDYYALGWFRQAPGKEREGVSCISSADHSTTYADSVKGRFTISWDNAKNTVYLQMNSLKPEDTAVYYCAADPALGCYSGSYYPRYDYWGQGTQVTVSS

SEQ ID NO: 25410 - protein, 126 aa, Artificial Sequence
  source: /note="Description of Artificial Sequence: Synthetic polypeptide"
EVQLVESGGGLVQPGGSLRLSCAASGFTWDYYVIGWFRQAPGKEREGVSCISSSDGSTTYADFVKGRFTISRDNAKNTVYLQMNSLTPEDTAVYYCAADPALGCYSGNYYPRYDYWGQGTQVTVSS

SEQ ID NO: 25411 - protein, 125 aa, Artificial Sequence
  source: /note="Description of Artificial Sequence: Synthetic polypeptide"
EVQLVESGGGLVQPGGSVRLSCAASGFTWDYYVIGWFRQAPGKEREGLSCISSDGSTTYADSVKGRFTISRDNAKNTVYLQMNSLKPEDTAVYYCATDPALGCYSGSYYPRYDYWGQGTQVTVSS

SEQ ID NO: 25412 - protein, 125 aa, Artificial Sequence
  source: /note="Description of Artificial Sequence: Synthetic polypeptide"
EVQLVESGGGLVQPGGSLRLSCEASGFTWDYYVIGWFRQAPGKEREGLSCISSDGSTTYADSVKGRFTISRDNAKNTVYLQMNSLEPEDTAVYYCATDPALGCYSGSYYPRYDYWGQGTQVTVSS

SEQ ID NO: 25413 - protein, 126 aa, Artificial Sequence
  source: /note="Description of Artificial Sequence: Synthetic polypeptide"
EVQLVESGGGLVQPGGSLRLSCAASGLTLDYYALGWFRQAPGKEREGVSCISSVDHSTTYADSVKGRFTISWDNAKNMVYLQMNSLKPEDTAVYYCAADPALGCYSGNYYPRYDYWGQGTQVTVSS

SEQ ID NO: 25414 - protein, 126 aa, Artificial Sequence
  source: /note="Description of Artificial Sequence: Synthetic polypeptide"
EVQLVESGGGLVQPGGSLRLSCAASGLTLDYYALGWFRQAPGKEREGVSCISSSDHSTTYADSVKGRFTISWDNAKNTVYLQMNSLKPEDTAVYYCAADPALGCYSGSYYPRYDYWGQGTQVTVSS

SEQ ID NO: 25415 - protein, 126 aa, Artificial Sequence
  source: /note="Description of Artificial Sequence: Synthetic polypeptide"
EVQLVESGGGLVQPGGSLRLSCAASGLTLDYYAIGWFRQAPGKEREGVSCISSTDHSTTYADSVKGRFTISWDNAKKMVYLQMNKLKPEDTAVYYCAADPALGCYSGSYYPRYDYWGQGTQVTVSS

SEQ ID NO: 25416 - protein, 126 aa, Artificial Sequence
  source: /note="Description of Artificial Sequence: Synthetic polypeptide"
EVQLVESGGGLVQPGGSLRLSCAASGLTLDYYALGWFRQAPGKEREGVSCISSSDHTTTYADSVKGRFTISWDNAKNTLYLQMNSLKPEDTAVYYCAADPALGCYSGSYYPRYDFWGQGTQVTVSS

SEQ ID NO: 25417 - protein, 126 aa, Artificial Sequence
  source: /note="Description of Artificial Sequence: Synthetic polypeptide"
EVQLVESGGGLVQPGGSLRLSCAASGFTWDYYAIGWFRQAPGKEREGVSCISSSDGSTTYADSVKGRFTISRDNTKNTVYLQMNSLTPEDTAIYYCAVDPALGCYSGNYYPRYDYWGQGTQVTVSS

SEQ ID NO: 25418 - protein, 126 aa, Artificial Sequence
  source: /note="Description of Artificial Sequence: Synthetic polypeptide"
EVQLVESGGGLVQPGGSLRLSCAASGLTLDYYALGWFRQAPGKEREGVACIDSSDHSTTYADSVKGRFTISWDNAKNTVYLQMSSLKPEDTAVYHCAADPALGCYSGSYYPRYDYWGQGTQVTVSS

SEQ ID NO: 25419 - protein, 125 aa, Artificial Sequence
  source: /note="Description of Artificial Sequence: Synthetic polypeptide"
EVQLVESGGGLVQPGGSLRLSCEASGFTWDYYVIGWFRQAPGKEREGLSCISSDGSTTYADSVKGRFTISRDNAKNMVYLQMNSLKPEDTAVYYCATDPALGCYSGSYYPRYDYWGQGTQVTVSS

SEQ ID NO: 25420 - protein, 126 aa, Artificial Sequence
  source: /note="Description of Artificial Sequence: Synthetic polypeptide"
EVQLVESGGGLVQPGGSLRLSCAASGLTLDYYALGWFRQAPGKEREGVSCISSSDHSTTYTDSVKGRFTISWDNAKNTLYLQMNSLKPGDTAVYYCAADPALGCYSGSYYPRYDYWGQGTQVTVSS

SEQ ID NO: 25421 - protein, 126 aa, Artificial Sequence
  source: /note="Description of Artificial Sequence: Synthetic polypeptide"
EVQLVESGGGLVQPGGSLRLSCAASGFTWDYYVIGWFRQAPGKEREGVSCISSSDGSTTYADFVKGRFTISRDNAKNTVYLQMNNLTPEDTAVYYCATDPALGCYSGNYYPRYDYWGQGTQVTVSS

SEQ ID NO: 25422 - protein, 126 aa, Artificial Sequence
  source: /note="Description of Artificial Sequence: Synthetic polypeptide"
EVQLVESGGGLVQPGGSLRLSCAASGFTWDYYVIGWFRQAPGKEREGVSCISSSDGSTTYADFVKGRFTISRDNARNTVYLQMNNLTPEDTAVYYCATDPALGCYSGNYYPRYDYWGQGTQVTVSS

SEQ ID NO: 25423 - protein, 126 aa, Artificial Sequence
  source: /note="Description of Artificial Sequence: Synthetic polypeptide"
EVQLVESGGGLVQPGGSLRLSCAASGLTLDYYALGWFRQAPGKEREGVSCISSVDHSTTYADSVKGRFTISWDNAKNIVYLQMNSLKPEDTAVYYCAADPALGCYSGSYYPRYDYWGQGTQVTVSS

SEQ ID NO: 25424 - protein, 126 aa, Artificial Sequence
  source: /note="Description of Artificial Sequence: Synthetic polypeptide"
EVQLVESGGGLVQPGGSLRLSCAASGLTLDYYAIGWFRQAPGKEREGVSCISSVDHSTTYADPVKGRFTISWDSAKNTVYLQMNDLKPEDTAVYYCAADPALGCYSGSYYPRYDYWGQGTQVTVSS

SEQ ID NO: 25425 - protein, 126 aa, Artificial Sequence
  source: /note="Description of Artificial Sequence: Synthetic polypeptide"
EVQLVESGGGLVQPGGSLRLSCAASGLTLDYYAIGWFRQAPGKEREGVSCISSSDHSTTYADSVKGRFTISWDNAKKVVYLQMNSLKPEDTAVYYCAADPALGCYSGSYYPRYDYWGQGTQVTVSS

SEQ ID NO: 25426 - protein, 126 aa, Artificial Sequence
  source: /note="Description of Artificial Sequence: Synthetic polypeptide"
EVQLVESGGGLVQPGGSLRLSCAASGLTLDYYALGWFRQAPGKEREGVSCISSVDHSTTYADSVKGRFTISWDNAKNMVYLQMNSLKPEDTAVYYCAADPALGCYSGSYYPRYDYWGQGTQVTVSS

SEQ ID NO: 25427 - protein, 125 aa, Artificial Sequence
  source: /note="Description of Artificial Sequence: Synthetic polypeptide"
EVQLVESGGGLVQPGGSLRLSCEASGFTWDYYVIGWFRQAPGKEREGLSCISSDGLTTYADSVKGRFTISRDNAKNTVYLQMNGLKPEDTAVYYCATDPALGCYSGSYYPRYDYWGQGTQVTVSS

SEQ ID NO: 25428 - protein, 126 aa, Artificial Sequence
  source: /note="Description of Artificial Sequence: Synthetic polypeptide"
EVQLVESGGGLVQPGGSLRLSCAASGLTLDYYALGWFRQAPGKEREGVSCISSSDHSTTYADSVKGRFTISWDNAKNTLYLQMNSLKPEDTAVYYCAADPALGCYSGSYYPRYDYWGQGTQVTVSS

SEQ ID NO: 25429 - protein, 126 aa, Artificial Sequence
  source: /note="Description of Artificial Sequence: Synthetic polypeptide"
EVQLVESGGGLVQPGGSLRLSCAASGLTLDYYALGWFRQAPGKEREGVSCISSVDHSTTYADSVKGQFTISWDNAKNMVYLQMNSLKPEDTAVYYCAADPALGCYSGSYYPRYDYWGQGTQVTVSS

SEQ ID NO: 25430 - protein, 126 aa, Artificial Sequence
  source: /note="Description of Artificial Sequence: Synthetic polypeptide"
EVQLVESGGGLVQPGGSLRLSCVASGLTLDYYALGWFRQAPGKEREGVSCISSSDHSTTYADSVKGRFTISWDNAKNTVYLQMNSLKPEDTAVYYCAADPALGCYSGSYYPRYDYWGQGTQVTVSS

SEQ ID NO: 25431 - protein, 126 aa, Artificial Sequence
  source: /note="Description of Artificial Sequence: Synthetic polypeptide"
EVQLVESGGGLVQPGGSLRLSCAASGFTWDYYAIGWFRQAPGKEREGVSCISSSDGSTTYADSVKGRFTISRDNTKNTVYLQMNSLTPEDTAVYYCAVDPALGCYSGNYYPRYDYWGQGTQVTVSS

SEQ ID NO: 25432 - protein, 126 aa, Artificial Sequence; identical to SEQ ID NO: 25416
  source: /note="Description of Artificial Sequence: Synthetic polypeptide"

SEQ ID NO: 25433 - protein, 126 aa, Artificial Sequence
  source: /note="Description of Artificial Sequence: Synthetic polypeptide"
EVQLVESGGGLVQPGGSLRLSCAASGLTLDYYALGWFRQAPGKGREGVSCISSSDHTTTYADSVKGRFTISWDNAKNTLYLQMNSLKPEDTAVYYCAADPALGCYSGNYYPRYDFWGQGTQVTVSS

SEQ ID NO: 25434 - protein, 126 aa, Artificial Sequence
  source: /note="Description of Artificial Sequence: Synthetic polypeptide"
EVQLVESGGGLVQPGGSLRLSCAASGLTLDYYALGWFRQAPGKEREGVSCISSSDHTTTYADSVKGRFTISWDNAKNTLYLQMNSLKPEDTAVYYCAADPALGCYSGNYYPRYDFWGQGTQVTVSS

SEQ ID NO: 25435 - protein, 126 aa, Artificial Sequence
  source: /note="Description of Artificial Sequence: Synthetic polypeptide"
EVQLVESGGGLVQPGGSLRLSCAASGLTLDYYALGWFRQAPGKEREGVSCISSSDHTTTYTDSVKGRFTISWDNAKNTLYLQMNSLKPEDTAVYYCAADPALGCYSGSYYPRYDFWGQGTQVTVSS

SEQ ID NO: 25436 - protein, 126 aa, Artificial Sequence
  source: /note="Description of Artificial Sequence: Synthetic polypeptide"
EVQLVESGGGLVQPGGSLRLSCAASGLTLDYYALGWFRQAPGKEREGVSCISSSDHTTTYADSVKGRFTISWDNAKNTLYLQMTSLKPEDTAVYYCAADPALGCYSGSYYPRYDFWGQGTQVTVSS

SEQ ID NO: 25437 - protein, 126 aa, Artificial Sequence
  source: /note="Description of Artificial Sequence: Synthetic polypeptide"
EVQLMESGGGLVQPGGSLRLSCATSGFTLDYYVIGWFRQAPGKEREGVSCMSSSGDITTYAPSVKGRFTISRDNAKNMVYLQMTSLKPEDTAVYYCAADFALGCYSGSYVPRYDYWGQGTQVTVSS

SEQ ID NO: 25438 - protein, 126 aa, Artificial Sequence
  source: /note="Description of Artificial Sequence: Synthetic polypeptide"
EVQLVESGGGLVQPGGSLRLSCATSGFTLDYYVIGWFRQAPGKEREGVSCMSSSGDSTTYADSVKGRFTISRDNAKNMVYLQMTSLKPEDTAVYYCAADFALGCYSGSYYPRYDYWGQGTQVTVSS

SEQ ID NO: 25439 - protein, 126 aa, Artificial Sequence
  source: /note="Description of Artificial Sequence: Synthetic polypeptide"
EVQLVESRGGLVQPGGSLRLSCATSGFTLDYYVIGWFRQAPGKEREGVSCMSSSGDSTTYADSVKGRFTISRDTAKNMVYLQMTSLKPEDTAVYYCAADFALGCYSGSYYPRYDYWGQGTQVTVSS

SEQ ID NO: 25440 - protein, 126 aa, Artificial Sequence
  source: /note="Description of Artificial Sequence: Synthetic polypeptide"
EVQLVESGGGLVRPGGSLRLSCATSGFTEDYYVIGWFRQAPGKEREGVSCMSSSGDSTTYADSVKGRFTISRDNAKNMVYLQMTSLKPEDTAVYYCAADFALGCYSGSYYPRYDYWGQGTQVTVSS

SEQ ID NO: 25441 - protein, 126 aa, Artificial Sequence; identical to SEQ ID NO: 25440
  source: /note="Description of Artificial Sequence: Synthetic polypeptide"

SEQ ID NO: 25442 - protein, 126 aa, Artificial Sequence
  source: /note="Description of Artificial Sequence: Synthetic polypeptide"
EVQLVESGGGLVQPGGSLRLSCATSGFTEDYYVIGWFRQAPGKEREGVSCMSSSGDSTTYADSVKGRFTISRDNAKNMVYLQMTSLKPEDTAVYYCAADFALGCYSGSYYPRYDYWGQGTQVTVSS

SEQ ID NO: 25443 - protein, 126 aa, Artificial Sequence
  source: /note="Description of Artificial Sequence: Synthetic polypeptide"
EVQLVESGGGLVQPGGSLRLSCATSGFTLDYYVIGWFRQAPGKEREGVSCMSSSGDSTTYADSVKGRFTISRDTAKNMVYLQMTSLKPEDTAVYYCAADFALGCYSGSYYPRYDYWGQGTQVTVSS

SEQ ID NO: 25444 - protein, 126 aa, Artificial Sequence
  source: /note="Description of Artificial Sequence: Synthetic polypeptide"
EVQLVESGGGLVQPGGSLRLSCATSGLTLDYYVIGWFRQVPGKEREGVSCMSSSGDSTTYADSVKGRFTISRDNAKNMVYLQMTSLMPEDTAVYYCAADFALGCYSGSYYPRYDYWGQGTQVTVSS

SEQ ID NO: 25445 - protein, 126 aa, Artificial Sequence
  source: /note="Description of Artificial Sequence: Synthetic polypeptide"
EVQLVESGGGLVQPGGSLRLSCATSGFTMDYYVIGWFRQAPGKEREGVSCMSSSGDSTTYAPSVKGRFTISRDNAKNMVYLQMTSLKPEDTAVYYCAADFALGCYSGSYYPRYDYWGQGTQVTVSS

SEQ ID NO: 25446 - protein, 126 aa, Artificial Sequence
  source: /note="Description of Artificial Sequence: Synthetic polypeptide"
EVQLVESGGGLVQPGGSLTLSCATSGLTLDYYVIGWFRQAPGKEREGVSCMSSSGDSTTYADSVKGRFTISRDNAKNMVYLQMTSLKPEDTAIYYCAADFALGCYSGSYYPRYDYWGQGTQVTVSS

SEQ ID NO: 25447 - protein, 126 aa, Artificial Sequence
  source: /note="Description of Artificial Sequence: Synthetic polypeptide"
EVQLVESGGGLVQPGGSLRLSCATSGFTEDYYVIGWFRQAPGKEREGVSCMSSSGDSTTYADSVQGRFTISRDNAKNMVYLQMTSLKPEDTAVYYCAADFALGCYSGSYYPRYDYWGQGTQVTVSS

SEQ ID NO: 25448 - protein, 126 aa, Artificial Sequence
  source: /note="Description of Artificial Sequence: Synthetic polypeptide"
EVQLVESGGGLVQPGGSLRLSCATSGFTLDYYVIGWFRQAPGKEREGVSCMSSSGDITTYAPSVKGRFTISRDNAKNMVYLQMTSLKPEDTAVYYCAADFALGCYSGSYVPRYDYWGQGTQVTVSS

SEQ ID NO: 25449 - protein, 126 aa, Artificial Sequence
  source: /note="Description of Artificial Sequence: Synthetic polypeptide"
EVQLVESGGGLVQPGGSLRLSCATSGFTLDYYVIGWFRQAPGKEREGVSCMSSSGDITTYAPSVKGRFTISRDNAKNMVYLQMTSLKPEDTAVYYCAADFPLGCYSGSYVPRYDYWGQGTQVTVSS

SEQ ID NO: 25450 - protein, 133 aa, Artificial Sequence
  source: /note="Description of Artificial Sequence: Synthetic polypeptide"
EVQLVESGGGLVQAGGSLRLSCAASGFTFDDYAIGWFRQAPGKEREAVSCISSSDGTTYYADSVKGRFTISSDNAKNTVYLTMNNLKPEDTAVYYCAADRLSTVVGCLYYGGSYYPRTTIDYWGKGTLVTVSS

SEQ ID NO: 25451 - protein, 133 aa, Artificial Sequence
  source: /note="Description of Artificial Sequence: Synthetic polypeptide"
EVQLVESGGGLVQAGGSLRLSCAASGFTFDDYAIGWFRQAPGKEREAVSCISSSDGSTYYTDSVKGRFTISSDNAKNTVYLTMNSLKPEDTAVYYCAADLLSTVVGCLYYRGSYYPRTTADYWGKGTLVTVSS

SEQ ID NO: 25452 - protein, 133 aa, Artificial Sequence
  source: /note="Description of Artificial Sequence: Synthetic polypeptide"
EVQLVESGGGLVQAGGSLRLSCAASGFTFDDYAIGWFRQAPGKEREAVSCISSSDGSTYYADSVKGRFTISSDNAKNMVYLQMNSLKPEDTAVYYCAADLLRTAVGCLDYRGTYYPRTTMDYRGKGTLVTVSS

SEQ ID NO: 25453 - protein, 133 aa, Artificial Sequence
  source: /note="Description of Artificial Sequence: Synthetic polypeptide"
EVQLVESGGGLVQAGGSLRLSCAASGFTFDDYAIGWFRQAPGKEREAVSCISSSDSSTYYTDSVKGRFTISSDNAKNTVYLTMNSLKPEDTAVYYCAADLLSTVVGCLYYRGSYYPRTTADYWGKGTLVTVSS

SEQ ID NO: 25454 - protein, 133 aa, Artificial Sequence
  source: /note="Description of Artificial Sequence: Synthetic polypeptide"
EVQLVESGGGLVQAGGSLRLSCAASGFTFDDYAIGWFRQAPGKEREAVSCISSSDGVTYYSDSVKGRFTISSDNAKNTVYLQMNSLKPEDTAVYYCAADLLRTAVGCLYYRGTYYPRTTMDYRGKGTLVTVSS

SEQ ID NO: 25455 - protein, 133 aa, Artificial Sequence
  source: /note="Description of Artificial Sequence: Synthetic polypeptide"
EVQLVESGGGLVQAGGSLRLSCAASGFTFDDYAIGWFRQAPGKEREAVSCISSSDGSTYYTDSVKGRFTISSDNAKNTVYLTMNSLKPEDTAVYYCAADQLSTVVGCFYYRGSYYPRTTADYWGKGTLVTVSS

SEQ ID NO: 25456 - protein, 133 aa, Artificial Sequence
  source: /note="Description of Artificial Sequence: Synthetic polypeptide"
EVQLVESGGGLVQAGGSLRLSCAASGLTFDDYAIGWFRQAPGKEREAVSCISSSDGSTYYADSVKGRFTISRDNAKNTVYLQMNSLKPEDTAVYYCAADLLATAVGCLYYRGTYYPRTTMDYWGKGTLVTVSS

SEQ ID NO: 25457 - protein, 133 aa, Artificial Sequence
  source: /note="Description of Artificial Sequence: Synthetic polypeptide"
EVQLVESGGGLVQAGGSLRLSCAASGFTFDDYAIGWFRQAPGKEREAVSCISSSDGTTYYADSVKGRFTISSDNAKNTVYLAMNNLKPGDTAVYYCAADLLSTVVGCLYYGGSYYPRTTIDYWGKGTLVTVSS

SEQ ID NO: 25458 - protein, 133 aa, Artificial Sequence
  source: /note="Description of Artificial Sequence: Synthetic polypeptide"
EVQLVESGGGLVQAGGSLRLSCAASGFTFDDYAIGWFRQAPGKEREGVSCIDSSDGSTYYADSVKGRFTISSDNAKNTVYLQMNSLKPEDTAVYYCAADLLRTVVGCLYYGGRYSPRTTTDYWGKGTLVTVSS

SEQ ID NO: 25459 - protein, 133 aa, Artificial Sequence
  source: /note="Description of Artificial Sequence: Synthetic polypeptide"
EVQLVESGGGLVQAGGSLRLSCAASGFTFDDYAIGWFRQAPGKEREAVSCISSSDGTTYYADSVKGRFTISSDNAKNTVYLTMNNLKPEDTAVYYCAADLLSTVVGCLYYGGSYYPRTTIDYWGKGTLVTVSS

SEQ ID NO: 25460 - protein, 132 aa, Artificial Sequence
  source: /note="Description of Artificial Sequence: Synthetic polypeptide"
EVQLVESGGGLVQAGGSLRLSCAASGFTFDDYAIGWFRQAPGKEREAVSCISSSDGTYYADSVKGRFTISSDNAKNTVYLQMNSLKPEDTAVYYCAADLLRTAVGCLHYRGSYYPRTTIDYWGKGTLVTVSS

SEQ ID NO: 25461 - protein, 133 aa, Artificial Sequence
  source: /note="Description of Artificial Sequence: Synthetic polypeptide"
EVQLVESGGGKVQPGGSLRLSCAASGFTFDDYAIGWFRQAPGKEREGVSCIDSSDGSTYYADSVKGRFTISKDNAKNTVYLQMNSLKPEDTAVYYCAADLLRTVVGCLYYGGSYSPRTTMDYWGKGTLVTVSS

SEQ ID NO: 25462 - protein, 122 aa, Artificial Sequence
  source: /note="Description of Artificial Sequence: Synthetic polypeptide"
EVQLVESGGGLVQAGGSLRLSCAASGRTFSSYAMGWFRQAPGKEREFVGAISGSGSNIYYANSMPGRITIFRDNAKNTAYLQMNSLNPEDTAVYYCAAAPTLVEITTTPTYWGQGTQVTVSS

SEQ ID NO: 25463 - protein, 122 aa, Artificial Sequence
  source: /note="Description of Artificial Sequence: Synthetic polypeptide"
EVQLVQSGGGLVQAGGSLRLSCAASGRTFSSYAMGWFRQAPGKEREFVGAISGSGSNIYYANAMPGRITIFRDNAKNTVYLQMNSLNPEDTAVYYCAAAPTLVEITPTPTYWGQGTQVTVSS

SEQ ID NO: 25464 - protein, 122 aa, Artificial Sequence
  source: /note="Description of Artificial Sequence: Synthetic polypeptide"
EVQLVESGGGLVQAGGSLRLSCAASGRTFSSYAMGWFRQAPGKEREFVGAISGSGSNIYYADSMPGRITIFRDNAKNTVYLQMNSLNPEDTAVYYCAAAPTLVEITPTPTYWGQGTQVTVSS

SEQ ID NO: 25465 - protein, 122 aa, Artificial Sequence
  source: /note="Description of Artificial Sequence: Synthetic polypeptide"
EVQLVESGGGLVQAGGSLRLSCAASGRTFSSYAMGWFRQAPGKEREFVGAISESGSNIYYANAMPGRITIFRDNAKNTAYLQMNSLNPEDTAVYYCAAAPTLVEITTTPTYWGQGTQVTVSS

SEQ ID NO: 25466 - protein, 122 aa, Artificial Sequence
  source: /note="Description of Artificial Sequence: Synthetic polypeptide"
EVQLVESGGGLVQAGGSLRLSCAASGRTFSSYAMGWFRQAPGKEREFVGAISGSGSNIYYANSMPGRITIFRDNAKNTVYLQMNSLNPEDTAVYYCAAAPTLVEITPTPTYWGRGTRVTVSS

SEQ ID NO: 25467 - protein, 123 aa, Artificial Sequence
  source: /note="Description of Artificial Sequence: Synthetic polypeptide"
EVQLVESGGGLVQAGGSLRLSCADHGRTLAYYTAGWFRQAPGKEREFVASISRSSGSTRYADSVRGRFTISRDNAKNTVYLQMNSLKPEDTAAYYCATTDDYINTTPALYRNWGQGTQVTVSS

SEQ ID NO: 25468 - protein, 122 aa, Artificial Sequence
  source: /note="Description of Artificial Sequence: Synthetic polypeptide"
EVQLVESGGGLVQAGDSLRLSCTASERTFRNDAGGWFRQAPGKEREFVAAITSGGSTDYANSVKGRFTISRDNAKNTVYLQMNSLRPEDTAVYYCAADSNVNTVKLGWGRYWGQGTQVTVSS

SEQ ID NO: 25469 - protein, 122 aa, Artificial Sequence
  source: /note="Description of Artificial Sequence: Synthetic polypeptide"
EVQLVESGGGLVQAGDSLRLSCTASERTFGNDAGGWFRQAPGKERDFVAAITSGGSTDYANSVKGRFTISRDNAKNTVYLQMNSLRPEDTAVYYCAADSSVNTVKLGWGRYWGQGTQVTVSS

SEQ ID NO: 25470 - protein, 122 aa, Artificial Sequence
  source: /note="Description of Artificial Sequence: Synthetic polypeptide"
EVQLVESGGGLVQAGDSLRLSCTASERTFGNDAGGWFRQAPGKERDFVAAITSGGSTDYANSVKGRFTISRDNAKNTVYLQMNSLRPEDTAVYYCAADSNVNTVKLGWGRYWGQGTQVTVSS

SEQ ID NO: 25471 - protein, 122 aa, Artificial Sequence
  source: /note="Description of Artificial Sequence: Synthetic polypeptide"
EVQLVESGGGLVHPGGSLRLSCAASERTFGNDAGGWFRQAPGKERDFVAAITSGGSTDYANSVKGRFTISRDNAKNTVYLQMNSLRPEDTAVYYCAADSNVNTVKLGWGRYWGQGTQVTVSS

SEQ ID NO: 25472 - protein, 123 aa, Artificial Sequence
  source: /note="Description of Artificial Sequence: Synthetic polypeptide"
EVQLVESGGGLVQPGGSLRLSCAASGSIWSITSMGWYRQAAGKQRELVAKIISGGSTNYADSVKGRFTISRDNAKNTVYLQMNSLKPEDTAVYYCNADVRVAEKHTAYEANYWGQGTQVTVSS

SEQ ID NO: 25473 - protein, 118 aa, Artificial Sequence
  source: /note="Description of Artificial Sequence: Synthetic polypeptide"
EVQLVESGGGLVQPGGSLSVSCAASGTIFAINAMGWYRQVPGKERELVAVMRNPGGTNYADSVKGRFTISRDNAKNTVYLQMNSLKPEDTAVYYCYLKMYGGNWYTYWGQGTQVTVSS

SEQ ID NO: 25474 - protein, 128 aa, Artificial Sequence
  source: /note="Description of Artificial Sequence: Synthetic polypeptide"
EVQLVESGGGLVQAGASLRLSCAASGLAFSRYAMGWFRQAPGKERESVAAISSSGDNIYYADSVKGQFTMSRDNAKSSVYLQMINLKPEDTAVYYCAAATSPLFVASDYFDASRYDYWGQGTQVTVSS

SEQ ID NO: 25475 - protein, 128 aa, Artificial Sequence
  source: /note="Description of Artificial Sequence: Synthetic polypeptide"
EVQLVESGGGLVHAGASLRLSCVASGLAFSRYAMGWFRQAPGKERESVAAISSSGDNIYYSRSVKGILSISRDNAKSAVYLQMNNLKPEDTAVYYCAAAASTLFIASDYFEASRYDYWGQGTQVTVSS

SEQ ID NO: 25476 - protein, 127 aa, Artificial Sequence
  source: /note="Description of Artificial Sequence: Synthetic polypeptide"
EVQLVESGGGLVQAGASLRLSCAASGLAFSRYAMGWFRQAPGKERESVAAISSSGDNIYYADSVKGQFTMSRDNAKSSVYLQMINLKPEDTAVYYCAATSPLFVASDYFEASRYGYWGQGTQVTVSS

SEQ ID NO: 25477 - protein, 127 aa, Artificial Sequence
  source: /note="Description of Artificial Sequence: Synthetic polypeptide"
EVQLVESGGGLVQAGASLRLSCAASGLAFSRYAMGWFRQAPGKERESVAAISSSGDNIYYPDSVKGQFTMSRDNAKSSVYLQMINLKPEDTAVYYCAAASPLFVASDYFEASRYGYWGQGTQVTVSS

SEQ ID NO: 25478 - protein, 128 aa, Artificial Sequence
  source: /note="Description of Artificial Sequence: Synthetic polypeptide"
EVQLVESGGGLVHAGASLRLSCVASGLAFSRYAMGWFRQAPGKERESVAAISSSGDNIYYSRSVKGILSISRDNAKSAVYLQMNNLKPEDTAVYYCAAAASTLFVASDYFEASRYDYWGQGTQVTVSS

SEQ ID NO: 25479 - protein, 127 aa, Artificial Sequence
  source: /note="Description of Artificial Sequence: Synthetic polypeptide"
EVQLVESGGGLVQAGASLRLSCAASGLAFSRYAMGWFRQAPGKERESVAAISSSGDNIYYADSVKGQFTMSRDNAKSSVYLQMINLEPEDTAVYYCAATSPLFVASDYFEASRYGYWGQGTQVTVSS

SEQ ID NO: 25480 - protein, 124 aa, Artificial Sequence
  source: /note="Description of Artificial Sequence: Synthetic polypeptide"
EVQLVESGGGLVQAGGSLRLSCAASVGTFSNYDIGWFRQAPGKGREFVARISSAGSNLYYGSSMPGRITISRDNAKNTVYLQMNSLKPEDTAIYYCAADNTAYGSFKADDYDYWGQGTQVTVSS

SEQ ID NO: 25481 - protein, 124 aa, Artificial Sequence
  source: /note="Description of Artificial Sequence: Synthetic polypeptide"
EVQLVESGGGLVQPGGSLRLSCAASAGTFSNYDIGWFRQAPGKGREFVARISSGGSNIYYGNSMPGRITISRDNAKNTVYLQMNSLTPEDTAIYYCAADSTAYGSFKADDYDYWGQGTQVTVSS

SEQ ID NO: 25482 - protein, 124 aa, Artificial Sequence
  source: /note="Description of Artificial Sequence: Synthetic polypeptide"
EVQLVESGGGLVQPGGSLRLSCAASAGTLSNYDIGWFRQAPGKGREFVARISSAGSNLYYGTSMPGRITISRDNAKNTVYLQMNSLKPEDTAIYYCAADSTAYGSFKADDYDYWGQGTQVTVSS

SEQ ID NO: 25483 - protein, 128 aa, Artificial Sequence
  source: /note="Description of Artificial Sequence: Synthetic polypeptide"
EVQLVESGGGLVQPGGSLRLSCAASGFTLDYYAIGWFRQAPGKEREGVSCISSWDGSTYYADSVKGRFTISRDNAKNTVYLQMNSLKPEDTAVYYCATDLTDSLCSYYDYMRPENDYWGQGTQVTVSS

SEQ ID NO: 25484 - protein, 128 aa, Artificial Sequence
  source: /note="Description of Artificial Sequence: Synthetic polypeptide"
EVQLVESGGGLVQPGESLRLSCAASGFTLAYYAIGWFRQAPGKEREGVSCISSWDGSTYYADSVKGRFTISRDNAKNTVYLQMNSLKPEDTAVYYCATDLTDSLCSYYHYMRPENDYWGQGTQVTVSS

SEQ ID NO: 25485 - protein, 128 aa, Artificial Sequence
  source: /note="Description of Artificial Sequence: Synthetic polypeptide"
EVQLVESGGGLVQAGGSLRLSCAASGRTFSRYIMGWFRQAPGKEREFVGAISRSGDITSFADFVKGRFTMSRDNAKNTLYLQMNSLEPEDTAVYSCAANSDTYYIYSDIVVPERYDYWGQGTQVTVSS

SEQ ID NO: 25486 - protein, 121 aa, Artificial Sequence
  source: /note="Description of Artificial Sequence: Synthetic polypeptide"
EVQLVESGGGLVQAGDSLRLSCAASGRSFSSRAMGWFRQAPGKEREFVAAINWIGNIPYYANSVKGRFTISRDNAKNTVYLQMNSLKPDDTAVYYCATGSEPYYTNTYDYWGQGTQVTVSS

SEQ ID NO: 25487 - protein, 127 aa, Artificial Sequence
  source: /note="Description of Artificial Sequence: Synthetic polypeptide"
EVQLVESGGGLVQAGGSLRLSCGSSGRTFSRYAMGWFRQAPGKEREFVAAISWSGGSTYYADSVKGRFTISRDNAKNTVYLQMNSLKPEDTAVYYCAADISSGNSGSYIYTWAYDYWGQGTQVTVSS

SEQ ID NO: 25488 - protein, 127 aa, Artificial Sequence
  source: /note="Description of Artificial Sequence: Synthetic polypeptide"
EVQLVESGGGLVQAGDSLRLSCAASGRTFSSYAMGWFRQAPGKEREFVAAISWSDGSTYYADSVKGRFTISRDNAKNTVYLQMNSLKPEDTAVYYCAADLTSTNPGSYIYIWAYDYWGQGTQVTVSS

SEQ ID NO: 25489 - protein, 127 aa, Artificial Sequence
  source: /note="Description of Artificial Sequence: Synthetic polypeptide"
EVQLVESGGGLVQAGGSLRLSCGSSGRTFSRYAMGWFRQAPGKEREFVAAISWSGGSTYYADSVKGRFTISRDNAKNTVYLQMSSLKPEDTAVYYCAADISSGNSGSYIYTWAYDYWGQGTQVTVSS

SEQ ID NO: 25490 - protein, 127 aa, Artificial Sequence
  source: /note="Description of Artificial Sequence: Synthetic polypeptide"
EVQLVESRGGLVQAGGSLRLSCGSSGRTFSRYAMGWFRQAPGKEREFVAAISWSGGSTYYADSVKGRFTISRDNAKNTVYLQMNSLKPEDTAVYYCAADISSGNSGSYIYTWAYDYWGQGTQVTVSS

SEQ ID NO: 25491 - protein, 127 aa, Artificial Sequence
  source: /note="Description of Artificial Sequence: Synthetic polypeptide"
EVQLVESGGGLVQAGGSLRLSCGSSGRTFSRYAMGWFRQAPGKEHEFVAAISWSGGSTYYADSVKGRFTISRDNAKNTVYLQMNSLKPEDTAVYYCAADISSGNSGSYIYTWAYDYWGQGTQVTVSS

SEQ ID NO: 25492 - protein, 121 aa, Artificial Sequence
  source: /note="Description of Artificial Sequence: Synthetic polypeptide"
EVQLVESGGGWVQAGGSLRLSCAASGRAFSSYAMGWIRQAPGKEREFVAGIDQSGESTAYGTSASGRFIISRDNAKNTVYLLMNSLQSDDTAVYYCVADGVLATTLNWDYWGQGTQVTVSS

SEQ ID NO: 25493 - protein, 121 aa, Artificial Sequence
  source: /note="Description of Artificial Sequence: Synthetic polypeptide"
EVQLVESGGGWVQAGGSLRLSCAASGRAFSSYAMGWIRQAPGKEREFVAGIDQSGESTAYGASASGRFIISRDNAKNTVHLLMNSLQSDDTAVYYCVADGVLATTLNWDYWGQGTQVTVSS

SEQ ID NO: 25494 - protein, 124 aa, Artificial Sequence
  source: /note="Description of Artificial Sequence: Synthetic polypeptide"
EVQLVESGGGLVQAGGSLRLSCAASGRTFSSYTMGWFRQAPGKEREFVAAIHWSGSNIYYGNSMKGRLTVSRDNAKNTAYLQMNSLKPEDTAVYYCAAALLGENLQWKGAYDYWGQGTQVTVSS

SEQ ID NO: 25495 - protein, 126 aa, Artificial Sequence
  source: /note="Description of Artificial Sequence: Synthetic polypeptide"
EVQLVESGGGLVQAGGSLRLSCVASGLTFEHYYMGWYRQAPKKEREFVADISRAGASRYADSVKGRFTISRDNAKNTVYLQMNSLESEDTAVYYCAADYSHTFVYPSMVPYESDYWGQGTQVTVSS

SEQ ID NO: 25496 - protein, 124 aa, Artificial Sequence
  source: /note="Description of Artificial Sequence: Synthetic polypeptide"
EVQLVESGGGLVQPGGSLRLSCSASGFTFSVYAMNWVRQAPGKGLEWVSGISFSGGATMYADSVKGRFTISRDNAKNTLYLQMNSLKPEDTGVYYCAKGMSPNIEYAQGPVAYRGQGTQVTVSS

SEQ ID NO: 25497 - protein, 128 aa, Artificial Sequence
  source: /note="Description of Artificial Sequence: Synthetic polypeptide"
EVQLVESGGGLVQAGGSLRLSCVASGRSFSNYPMGWFRQAPGKEREFVGAISGSGSNLYYPGSWKGRFTISRDNAKNTGYLQMNSLKPEDTAVYYCALDHKASGSYSSLSRPEEYDYWGQGTQVTVSS

SEQ ID NO: 25498 - protein, 128 aa, Artificial Sequence
  source: /note="Description of Artificial Sequence: Synthetic polypeptide"
EVQLVESGGGLVQAGGSLRLSCAASGLTLDDYAIGWFRQGPGKAREGVSCISSSDGSTYYADSVKGRFTMFSDNAKNTVALQMNSLKPEDTAVYYCTVLFGTSSCTYYSRRKYEYDYWGQGTQVTVSS

SEQ ID NO: 25499 - protein, 123 aa, Artificial Sequence
  source: /note="Description of Artificial Sequence: Synthetic polypeptide"
EVQLMESGGGLVQAGGSLRLSCAASGGTFSSYAMGWFRQAPGEERDFVAAIGWSGNSPYYAQFVKGRFTISRDNAKNTVHLQMNSLKPEDTAVYYCAAAHNTMGSDYEGYDYWGQGTQVTVSS

SEQ ID NO: 25500 - protein, 130 aa, Artificial Sequence
  source: /note="Description of Artificial Sequence: Synthetic polypeptide"
EVQLVESGGGLVQAGGSLRLSCAASGFTFDDYAIGWFRQAPGKEREGVSCISNSDGSTYYADSVKGRFTISSDNAKNTVYLQMNSLKPEDTAVYYCAASRRGGSRWYGLSGSCYYGMDYWGKGTLVTVSS

SEQ ID NO: 25501 - protein, 124 aa, Artificial Sequence
  source: /note="Description of Artificial Sequence: Synthetic polypeptide"
EVQLVESGGGLVQPGGSLRLSCAASGFTFGNYAMYWVRQAPGKGLEWVSAINSGGGSTGYTDSVKGRFTISRDNAKNTLYLQMNSLKPEDTAVYYCAKDPYGSSWYGSPVYDYWGQGTQVTVSS

SEQ ID NO: 25502 - protein, 128 aa, Artificial Sequence
  source: /note="Description of Artificial Sequence: Synthetic polypeptide"
EVQLVESGGGLVQAGGSLRLSCAASGFAVDDYAIGWFRQAPGKEREGVSSISSSDGSPYYADSVKGRFTISSDNAKNTVYLQMNSLKPEDTAVYYCAAGRSLYAKGSWWLISSEYDYWGQGTQVTVSS

SEQ ID NO: 25503 - protein, 118 aa, Artificial Sequence
  source: /note="Description of Artificial Sequence: Synthetic polypeptide"
EVQLVESGGGLVQPGGSLRLSCAASGSDFGISVMGWYRQAPEKRRELVATITTFGITNYADSVKGRFTVSRDNAQNTVYLQMNSLKPDDTAVYYCYVRWYSSMWYEYWGQGTQVTVSS

SEQ ID NO: 25504 - protein, 127 aa, Artificial Sequence
  source: /note="Description of Artificial Sequence: Synthetic polypeptide"
EVQLVESGGGLVQAGGSLRLSCAASGRTVSSSTMGWFRRAPGKEREFVAAISWNGGTHYADYFVKGRFTLSRDNAKNTVYLQMNSLKPEDTAVYYCAAPISSYVGGNYYSAAFYHYWGQGTQVTVSS

SEQ ID NO: 25505 - protein, 126 aa, Artificial Sequence
  source: /note="Description of Artificial Sequence: Synthetic polypeptide"
EVQLVESGGGLVQAGGSLRLSCAASGRSFSNYVLGWFRQAPGKEREFVAAISFRGDSAIGAPSVEGRFTISRDNAKNTGYLQMNSLVPDDTAVYYCGAGTPLNPGAYIYDWSYDYWGRGTQVTVSS

SEQ ID NO: 25506 - protein, 126 aa, Artificial Sequence
  source: /note="Description of Artificial Sequence: Synthetic polypeptide"
EVQLVESGGGLVQAGGSLSISCAASGGSLSNYVLGWFRQAPGKEREFVAAINWRGDITIGPPNVEGRFTISKDNAKNTGYLQMNSLAPDDTAVYYCGADTPLNPGAYIYDWSYDYWGRGTQVTVSS

SEQ ID NO: 25507 - protein, 131 aa, Artificial Sequence
  source: /note="Description of Artificial Sequence: Synthetic polypeptide"
EVQLAESGGGLVQPGGSLRLSCAASGFTFEYYAMGWFRQAPGKEREGVSCISSSDGSTYYADSVKGRFTISRDNAKNTVYLQMNSLKPEDTAVYYCAADHSRVYYRDYRQGRLCEEPYDYWGQGTQVTVSS

SEQ ID NO: 25508 - protein, 128 aa, Artificial Sequence
  source: /note="Description of Artificial Sequence: Synthetic polypeptide"
EVQLVESGGGLVQAGGSLRLSCTASARRFSTSTMGWFRQAPGNEREFVACISWSGDITFYADSVKGRFTISRDNAKNAVYLQMNSLKPEDSAVYYCAFDARPAPYITNYKDPRAYDYWGQGTQVTVSS

SEQ ID NO: 25509 - protein, 128 aa, Artificial Sequence
  source: /note="Description of Artificial Sequence: Synthetic polypeptide"
EVQLVESGGGLVQAGASLRLSCAASGRMFSSYGMGWFRQAPGKEREFVAAITWSGGYTYYLDSVKGRFTVSRDNAKNMVYLQMNSLKPEDTAVYYCAAGFQYYSTITNYARERDYDYWGQGTQVTVSS

SEQ ID NO: 25510 - protein, 123 aa, Artificial Sequence
  source: /note="Description of Artificial Sequence: Synthetic polypeptide"
EVQLVESGGGLVQPGGSLRLSCVASGLTFSRYDMGWFRQAPGEERKFVAGINWSGGRTYYADSVKGRFTISRDNAKETVSLQMSGLKPEDTAVYYCAADQPPSTWLVEYFDYWGQGTRVTVSS

SEQ ID NO: 25511 - protein, 123 aa, Artificial Sequence
  source: /note="Description of Artificial Sequence: Synthetic polypeptide"
EVQLVESGGGLVQAGGSLRLSCAASGLTFSRYDMGWFRQAPGEERQFVAGINWSGGRTYYADSVKGRFTISRDNAKEIVSLQMSGLKPEDTAVYYCAADQPPSTWLAEYFDYWGQGTRVTVSS

SEQ ID NO: 25512 - protein, 123 aa, Artificial Sequence
  source: /note="Description of Artificial Sequence: Synthetic polypeptide"
EVQLVESGGGLVQAGGSLRLSCAASGLTFSRYDMGWFRQAPGEERKFVAGINWSGGRTYYADSVKGRFTISRDNAKETVSLQMSGLKPEDTAVYYCAADQPPSTWLVEYFDYWGQGTRVTVSS

SEQ ID NO: 25513 - protein, 123 aa, Artificial Sequence
  source: /note="Description of Artificial Sequence: Synthetic polypeptide"
EVQLVESGGGLVQPGGSLRLSCAASGLTFSRYDMGWFRQAPGKEREFVAGINWSGGRTYYADSVKGRFTISRDNAKETVSLQMNGLKPEDTAVYYCAADQPPSTWLVEYFDYWGQGTQVTVSS

SEQ ID NO: 25514 - protein, 127 aa, Artificial Sequence
  source: /note="Description of Artificial Sequence: Synthetic polypeptide"
EVQLVESGGGLVQPGGSLRLSCAASGRTFSSIAMGWFRQAPGKEREFVAAISWSRGRTFYADSVKGRFIISRDDAANTAYLQMNSLKPEDTAVYYCAVDTASWNSGSFIYDWAYDHWGQGTQVTVSS

SEQ ID NO: 25515 - protein, 126 aa, Artificial Sequence
  source: /note="Description of Artificial Sequence: Synthetic polypeptide"
EVQLVESGGGLVQAGGSLKLSCAASGRAFSSYTMGWFRQAPGKEREFVACVSRDGGTTYYAYSVKGRFTISRDNAKNTVYLQMNSLGPEDTAIYTCAAKENGMFITATQEQSYDYWGQGTQVTVSS

SEQ ID NO: 25516 - protein, 126 aa, Artificial Sequence
  source: /note="Description of Artificial Sequence: Synthetic polypeptide"
EVQLVESGGGLVQAGGSLRLSCAASGRTFSSSFMAWFRQVLGSDREFVGGISPGGRFTYYADSRKGRFTISEDNANNTVYLQMHSVKPEDTATYYCAADTQFSGYVPKETNEYDYWGQGTQVTVSS

SEQ ID NO: 25517 - protein, 123 aa, Artificial Sequence
  source: /note="Description of Artificial Sequence: Synthetic polypeptide"
EVQLVESGGGLVQPGGSLRLSCAASGFTFRNYAIGWFRQVPGKEREGVSCINSGGGRIDYADSVKGRFAISRDNAKSTVYLQMNSLKPEDTAVYYCAIDYTSSCPIYSGTDYWGKGTLVTVSS

SEQ ID NO: 25518 - protein, 129 aa, Artificial Sequence
  source: /note="Description of Artificial Sequence: Synthetic polypeptide"
EVQLVESGGGLVQAGGSLRLSCAASGFTFDDYAIGWFRQAPGKEREGVSCIRCNDGSTYYADSVKGRFTISSDNAKNTVYLQMNSLKPEDTAVYYCAADFSLAQYKTIHTMPPYAMDYWGKGTLVTVSS

SEQ ID NO: 25519 - protein, 127 aa, Artificial Sequence
  source: /note="Description of Artificial Sequence: Synthetic polypeptide"
EVQLVESGGGLVQAGGSLRLSCAASGPTFSSYTMGWFRQAPGKEREFVATIPWSGGIPYYSDSVKGRFTMSSDNAKNTVDLQMNSLKPEDTALYYCAGSSRIYVYSDSLSEGSYDYWGRGTQVTVSS

SEQ ID NO: 25520 - protein, 126 aa, Artificial Sequence
  source: /note="Description of Artificial Sequence: Synthetic polypeptide"
EVQLVESGGGLVQAGGSLRLSCVASGRTFNNLAMGWFRQARGKEREFVATISWSHPNTYYTDSVKGRFTISRDDAQNAVYLQMNSLKPEDTAVYYCAANPSYVYSDYLSLAGYTYWGQGTQVTVSS

SEQ ID NO: 25521 - protein, 127 aa, Artificial Sequence
  source: /note="Description of Artificial Sequence: Synthetic polypeptide"
EVQLVESGGGLVQPGGSLRLSCEASGFTFSSYWMYWVRQVPGKGLEWVSAISTGGGDTHYQDSVKGRFTISRDNAKNTLYLQMSSLKPEDTALYYCARNRDSGTSYITFSLTDFASWGQGTQVTVSS

SEQ ID NO: 25522 - protein, 125 aa, Artificial Sequence
  source: /note="Description of Artificial Sequence: Synthetic polypeptide"
EVQLVESGGGLVQAGDSLRLSCAASGLTFSTYVMAWFRQAPGKERECVAAINWSGENIYYADSVKGRFTISRDNAKNTVYLQMNSLKPEDTADYLCAARKYYIHSDVVGNDYPYWGQGTQVTVSS

SEQ ID NO: 25523 - protein, 129 aa, Artificial Sequence
  source: /note="Description of Artificial Sequence: Synthetic polypeptide"
EVQLVESGGGLVQAGGSLRLSCAASERTFSYYAMGWFRQAPGKEREFVATISRSGEWIYYKDAMKGRFTISRDNANNAVYLQMNSLQPEDTAIYYCAADSLGGFRSASDYYNTNTYAYWGQGTQVTVSS

SEQ ID NO: 25524 - protein, 126 aa, Artificial Sequence
  source: /note="Description of Artificial Sequence: Synthetic polypeptide"
EVQLVESGGGLVQPGGSLRLSCAASGFTLDYYAIGWFRQAPGKEREGVSCFPSRYSSDGSTYYADSVKGRFTISRDNAKNTVYLQMNSLKPEDAAVYYCAADPSDWTCNVLEYDYWGQGTQVTVSS

SEQ ID NO: 25525 - protein, 114 aa, Artificial Sequence
  source: /note="Description of Artificial Sequence: Synthetic polypeptide"
EVQLVESGGGLVQPGGSLKLSCAGSGSIFRFYDTAGWYRQAPGKQRELVALITDISGGYIKYADSVKGRFTISRDNAKNTVYLQMNSLKPEDTAVYYCNVHNYWGQGTQVTVSS

SEQ ID NO: 25526 - protein, 127 aa, Artificial Sequence
  source: /note="Description of Artificial Sequence: Synthetic polypeptide"
EVQLVESGGGLVQAGGSPRLSCAASGGTFSSYGMGWFRQAPGKEREFVAAISWSDSSTYYADSVKGRFTISRDNAKNTMYLQMNSLKPEDTAVYYCAAGSGILNSGSYYYPWVYEYWGQGTQVTVSS

SEQ ID NO: 25527 - protein, 125 aa, Artificial Sequence
  source: /note="Description of Artificial Sequence: Synthetic polypeptide"
EVQLVESGGGLVQAGGSLRLSCASSGSIYSINFMNWYRQAPGKQRELVASITSGGYTNYADSVKGRFTISRDNAKNTVYLQMNSLKPEDTAVYICNAEGLIIATMDGGVNNDMDYWGKGTLVTVS

SEQ ID NO: 25528 - protein, 115 aa, Artificial Sequence
  source: /note="Description of Artificial Sequence: Synthetic polypeptide"
EVQLVESGGGLVQPGGSLRLSCAASGNIFSIATMAWYRQAPGKQRELVASISSSGYRIYADSVKGRFTSSRDNAKNTAYLQMNSLGPEDTAVYYCNFRDYEGNHWGQGTQVTVSS

SEQ ID NO: 25529 - protein, 123 aa, Artificial Sequence
  source: /note="Description of Artificial Sequence: Synthetic polypeptide"
EVQLVESGGGLVQAGDSLRLSCAASGLTFSGYEMGWFRQAPGRERAFVAAISQSGGTTSYAVSVKGRFTIARDNAKNTVYLQANNMKPEDTAVYYCAAALLLLPTTPSRVDYWGQGTQVTVSS

SEQ ID NO: 25530 - protein, 123 aa, Artificial Sequence
  source: /note="Description of Artificial Sequence: Synthetic polypeptide"
EVQLVESGGGLVQVGDSLRLSCAASGLTFSGYEMGWFRQAPGKERAFVAAISQSGGTTSYAVSVKGRFTIARDNAKNTVYLQANNMKPEDTAVYYCAAALLLLPTTPSRVDYWGQGTQVTVSS

SEQ ID NO: 25531 - protein, 123 aa, Artificial Sequence
  source: /note="Description of Artificial Sequence: Synthetic polypeptide"
EVQLVESGGGLVQAGDSLRLSCAASGLTFSGYEMGWFRQAPGKERAFVAAISQSGGTTSYAVSVKGRFTITRDNAKNTVYLQANNMKPEDTAVYYCAAALLLLPTTPSRVDYWGQGTQVTVSS

SEQ ID NO: 25532 - protein, 123 aa, Artificial Sequence
  source: /note="Description of Artificial Sequence: Synthetic polypeptide"
EVQLVESGGGLVQAGDSLRLSCAASGLTFSGYEMGWFRQAPGKERAFVAAISQSGGTTSYAVSVKGRFTIARDNAKNTVYLQADNMKPEDTAVYYCAAALLLLPTSPSRVDYWGQGTQVTVSS

SEQ ID NO: 25533 - protein, 123 aa, Artificial Sequence
  source: /note="Description of Artificial Sequence: Synthetic polypeptide"
EVQLVESGGGLVQAGDSLRLSCAASGLTFSGYEMGWFRQAPGKERAFVAAISQSGGTTSYAVSVKGRFTIARDNAKNTVYLQANNMKPEDTAVYYCAAALLLLPTTPSRVDYWGQGTQVTVSS

SEQ ID NO: 25534 - protein, 126 aa, Artificial Sequence
  source: /note="Description of Artificial Sequence: Synthetic polypeptide"
EVQLVESGGGLVQPGGSLRLSCAASGFAFSTYAMGWVRQAPGKGLEWVSCISNGGLRTMYADSVKGRFTISRDNAKNTLYLQMNSLKAEDTAVYYCAKYWAPWPMDVSRLDDYDNKGQGTQVTVSS

SEQ ID NO: 25535 - protein, 128 aa, Artificial Sequence
  source: /note="Description of Artificial Sequence: Synthetic polypeptide"
EVQLVESGGGLVQAGGSLRLSCEASGRTFSSNAMGWFRQAPGKEREFVAAVTRWSGARTVYADSVKGRFTISRDNAENTVYLQMNSLKPEDTAVYTCAADSTNRNSGAIYYPWAYDYWGQGTQVTVSS

SEQ ID NO: 25536 - protein, 128 aa, Artificial Sequence
  source: /note="Description of Artificial Sequence: Synthetic polypeptide"
EVQLVESGGGLVQAGGSLRLSCEASGRTFSSYDMGWFRQAPGKEREFVAAVTRWSGARGVYADSVKGRFTISRDNAENTVHLQMNSLKPEDTAVYTCAADSTNRNSGAVYYTWAYDYWGQGTQVTVSS

SEQ ID NO: 25537 - protein, 128 aa, Artificial Sequence
  source: /note="Description of Artificial Sequence: Synthetic polypeptide"
EVQLVESGGGLVQAGGSLRLSCEASGRTFSNYAMGWFRQAPGKEREFVAVVSRWSGGRTLYADSVKGRFTISRDNAENLVYLQMNSLKPEDTAVYTCVADSTNRNSGAYYYTWAYDHWGQGTQVTVSS

SEQ ID NO: 25538 - protein, 127 aa, Artificial Sequence
  source: /note="Description of Artificial Sequence: Synthetic polypeptide"
EVQLVESGGGLVQAGGSLRLSCAASGRTFSSYAMGWFRQAPGKEREFVAAIWWSGGSTYYADSVKGRFTMSRDNAKNTVYLEMNNLKPEDTAVYYCAADTDSSNSGSYLYTWAYDYWGQGTQVTVSS

SEQ ID NO: 25539 - protein, 127 aa, Artificial Sequence
  source: /note="Description of Artificial Sequence: Synthetic polypeptide"
EVQLVESGGGLVQAGGSLRLSCAASGRTFSPYAMGWFRQAPGKEREFVAAISWSGGTTYYADSVKGRFTISRDNAKNTVYLQMNSLKPEDTAVYNCAADVSSTNSGSYIYTWAYDYWGQGTQVTVSS

SEQ ID NO: 25540 - protein, 127 aa, Artificial Sequence
  source: /note="Description of Artificial Sequence: Synthetic polypeptide"
EVQLVESGGGLVQAGGSLRLSCTASGRTFSSYAMGWFRQAPGKERDFVAAISWSGGSTYYADSVKGRFTISRDNAKNTVYLKMNSLKPEDTAVYYCAVDASSTNSGSFIYTWAYDYWGQGTQVTVSS

SEQ ID NO: 25541 - protein, 128 aa, Artificial Sequence
  source: /note="Description of Artificial Sequence: Synthetic polypeptide"
KVQLVESGGGLVQAGGSLRLSCEASGGSFSSYAMGWFRQAPGKEREFVAAISGWIGPRPVYADSVKGRFTISRDNAENTVYLQMNSLQPEDTAVYTCAADATNRNSGAYFYTWAYDYWGQGTQVTVSS

SEQ ID NO: 25542 - protein, 120 aa, Artificial Sequence
  source: /note="Description of Artificial Sequence: Synthetic polypeptide"
EVQLVESGGDLVQPGGSLRLSCAASGFTFRGYWMTWVRQAPGKGLEWVSSINNVGEETYYVDSVKGRFTISRDNAKNTLYLQMNSLKSEDTAVYYCVKDWESSYAGYSPNSQGTQVTVSS

SEQ ID NO: 25543 - protein, 120 aa, Artificial Sequence; identical to SEQ ID NO: 25262
  source: /note="Description of Artificial Sequence: Synthetic polypeptide"

SEQ ID NO: 25544 - protein, 120 aa, Artificial Sequence
  source: /note="Description of Artificial Sequence: Synthetic polypeptide"
EVQLVESGGDLVQPGGSLRLSCAASGFTFSGYWMTWVRQAPGKGLEWVTSINNIGEETYYVDSVKGRFTISRDNAKNTLYLQMNSLKSEDTAVYYCVKDWASTYAGYRPNSQGTQVTVSS

SEQ ID NO: 25545 - protein, 124 aa, Artificial Sequence
  source: /note="Description of Artificial Sequence: Synthetic polypeptide"
EVQLVESGGGVVQAGGSLRLSCAASGLTFDIYSMGWFRQQPGKEREFVASIGRSGNSTNYASSVKDRFTISRDNAKKLVYLEMNSLTVEDAAVYVCAAKDGPLITHYSTTSMYWGQGTQVTVSS

SEQ ID NO: 25546 - protein, 120 aa, Artificial Sequence; identical to SEQ ID NO: 25264
  source: /note="Description of Artificial Sequence: Synthetic polypeptide"

SEQ ID NO: 25547 - protein, 127 aa, Artificial Sequence
  source: /note="Description of Artificial Sequence: Synthetic polypeptide"
EVQLMESGGGLVQAGGSLRLSCVAPGRIFSSYTMGWFRQAPGKERDFVAAISTVGSTYYSDSVKGRCTISRDNANNTVALELNSLKPDDTAVYYCAABSHTYGSTYAATIDYEYDYWGQGTQVTVSS

SEQ ID NO: 25548 - protein, 124 aa, Artificial Sequence
  source: /note="Description of Artificial Sequence: Synthetic polypeptide"
EVQLVESGGGLVQAGDSLTLSCIDSGRTFSDYPIGWFRQAPGKEREFVAAIYAIGGDVYYADSVKGRFTISRDNAKNTVYLQMSSLKPEDTAIYSCAVASGGGSIRSARRYDYWGQGTQVTVSS

SEQ ID NO: 25549 - protein, 129 aa, Artificial Sequence
  source: /note="Description of Artificial Sequence: Synthetic polypeptide"
EVQLVESGGGLVQAGDSLRLSCIDSGRTFSDYPIGWFRQAPGKEREFVAAIYPTDDNPTGPNAYYADSVKGRFTISRDNAKNTVYLQMSSLKPEDTAIYSCAVASGGGSIISARRYDYWGQGTQVTVSS

SEQ ID NO: 25550 - protein, 121 aa, Artificial Sequence; identical to SEQ ID NO: 24460
  source: /note="Description of Artificial Sequence: Synthetic polypeptide"

SEQ ID NO: 25551 - protein, 115 aa, Artificial Sequence; identical to SEQ ID NO: 25274
  source: /note="Description of Artificial Sequence: Synthetic polypeptide"

SEQ ID NO: 25552 - protein, 126 aa, Artificial Sequence
  source: /note="Description of Artificial Sequence: Synthetic polypeptide"
EVQLVESGGGWVQAGDSLRLSCAASGRTLSSYAMAWFRQAPGKERDFVTGITWNGGSTYYADSVKGRFTISRDNAKNTVYLQMNSLKPEDTAVYYCAABQNTYGYMDRSDYEYDYWGQGTQVTVSS

SEQ ID NO: 25553 - protein, 120 aa, Artificial Sequence
  source: /note="Description of Artificial Sequence: Synthetic polypeptide"
EVQLVESGGDLVQPGGSLRLSCAASGFTFRGYWMTWVRQAPGKGLEWVSSINNIGDEPYYVDSVKGRFTISRDNAKNTLYLQMNSLKSEDTAVYYCVKDWASDYAGYSPNSQGTQVTVSS

SEQ ID NO: 25554 - protein, 119 aa, Artificial Sequence
  source: /note="Description of Artificial Sequence: Synthetic polypeptide"
EVQLVESGGGLVQPGGSLRLSCTASGFTFSSYWMDWVRQTPGKGLEYVSGISPSGGNTDYADSVKGRFTISRDNAKNTLYLQMNSLKPEDTALYYCRRSLTFTDTPDLRSQGTQVTVSS

SEQ ID NO: 25555 - protein, 126 aa, Artificial Sequence
  source: /note="Description of Artificial Sequence: Synthetic polypeptide"
EVQLVESGGGWVQAGDSLRLSCAASGRTLSSYAMAWFRQAPGKERDFVTGITWNGGSTYYADSVKGRFTISRDNAKNTVYLQMNSLKPEDTAVYYCAADQNTYGYMDRSDYEYDYWGQGTQVTVSS

SEQ ID NO: 25556 - protein, 119 aa, Artificial Sequence; identical to SEQ ID NO: 24461
  source: /note="Description of Artificial Sequence: Synthetic polypeptide"

SEQ ID NO: 25557 - protein, 124 aa, Artificial Sequence; identical to SEQ ID NO: 25260
  source: /note="Description of Artificial Sequence: Synthetic polypeptide"

SEQ ID NO: 25558 - protein, 113 aa, Artificial Sequence
  source: /note="Description of Artificial Sequence: Synthetic polypeptide"
EVQLVESGGGLVQAGGSLRLSCAASVSAFSEYAMGWYRQAPGKQREFVATINSLGGTSYADSVKGRFTISRDNAKNTVYLQMNSLKPEDTAVYYCTLYRANLWGQGTQVTVSS

SEQ ID NO: 25559 - protein, 119 aa, Artificial Sequence
  source: /note="Description of Artificial Sequence: Synthetic polypeptide"
KVQLVESGGGLVQPGGSLRLSCAASGSIFSINAMGWYRQAPGKQRELVAHIASSGSTIYADSVKGRFTISRDNAKNTVYLQMNSLKPEDTAVYYCNTRGPAAHEVRDYWGQGTQVTVSS

SEQ ID NO: 25560 - protein, 125 aa, Artificial Sequence
  source: /note="Description of Artificial Sequence: Synthetic polypeptide"
EVQLVESGGGLVQAGGSLRLSCAASRSIFSFNTMGWYRQAPGKQRELVADITSGGSTVYADSVKGRFTISRDDKNTVYLQMNSLKPEDTAVYSCNAEGLIIATMNGGVNYGMDYWGKGTLVTVSS

SEQ ID NO: 25561 - protein, 119 aa, Artificial Sequence
  source: /note="Description of Artificial Sequence: Synthetic polypeptide"
EVQLVESGGGLVQPGGSLRLSCAASGSIFSINAMGWHRQALGKQRELVAQSSSGGSTYYADSAKGRFTISRDNAKNMVYLQMNSLKPEDTAVYYCNVRTPEVHTIRDYWGQGTQVTVSS

SEQ ID NO: 25562 - protein, 128 aa, Artificial Sequence; identical to SEQ ID NO: 25536
  source: /note="Description of Artificial Sequence: Synthetic polypeptide"

SEQ ID NO: 25563 - protein, 127 aa, Artificial Sequence
  source: /note="Description of Artificial Sequence: Synthetic polypeptide"
EVQLVESGGGLVQAGGSLRLSCAASGRTFSSFAMGWFRQAPGKEREFVAAISWSGGSTYYADSVKGRFTISGDNAKNTMYLQMNSLKPEDTAVYYCAADSEILNSGAYYYPWAYVYWGQGTQVTVSS

SEQ ID NO: 25564 - protein, 126 aa, Artificial Sequence
  source: /note="Description of Artificial Sequence: Synthetic polypeptide"
EVQLVESGGGSVQAGGSLRLSCAASGGSFNRFGMGWFRRAPGKERDFVAAINLSGDTTYYVDSVQGRFTISRDNANNIMYLQMNLLKPEDTADYYCAADPDPITAWKQSGAGMDYWGKGTQVTVSS

SEQ ID NO: 25565 - protein, 126 aa, Artificial Sequence
  source: /note="Description of Artificial Sequence: Synthetic polypeptide"
EVQLVESGGGLVQAGGSLSISCAASGGSLSNYVLGWFRQAPGKEREFVAAINWRGDITIGPPNVEGRFTISRDNAKNTGYLQMNSLAPDDTAVYYCGAGTPLNPGAYIYDWSYDYWGRGTQVTVSS

SEQ ID NO: 25566 - protein, 128 aa, Artificial Sequence; identical to SEQ ID NO: 25485
  source: /note="Description of Artificial Sequence: Synthetic polypeptide"

SEQ ID NO: 25567 - protein, 128 aa, Artificial Sequence; identical to SEQ ID NO: 25474
  source: /note="Description of Artificial Sequence: Synthetic polypeptide"

SEQ ID NO: 25568 - protein, 115 aa, Artificial Sequence
  source: /note="Description of Artificial Sequence: Synthetic polypeptide"
EVQLVESGGGLVQPGESLRLSCAFSGIVFEFYDMGWYRQAPGMQRELVANIASGGSTNLADAVKGRFTISRDNAQKKIDLQMNSLRREDTAVYYCNARYGSREYWGQGTQVTVSS

SEQ ID NO: 25569 - protein, 115 aa, Artificial Sequence
  source: /note="Description of Artificial Sequence: Synthetic polypeptide"
EVQLVESGGGLVQPGESLRLSCAFSGIVFEFYDMGWYRQAPGKQRELVANIASRGSTDLADSVKGRFTISRDNAQKKIDLQMNGLGREDTAVYYCNAQYGSREYWGQGTQVTVSS

SEQ ID NO: 25570 - protein, 115 aa, Artificial Sequence
  source: /note="Description of Artificial Sequence: Synthetic polypeptide"
EVQLVESGGGLAQAGGSLRLSCAVSGEAVGSSATGWYRAVSATERELVARIRSGGSTDYADSVKGRFTVSRDNAKNTVYLQMNSLKPEDTAVYYCNLVSYGEYFWGKGTLVTVSS

SEQ ID NO: 25571 - protein, 124 aa, Artificial Sequence
  source: /note="Description of Artificial Sequence: Synthetic polypeptide"
EVQLVESGGGLVQAGGSLRLSCAASGRTLSSYRLGWFRQAPGKEREFISTISWNGRSTYYADSVKGRFIFSEDEAKNTVHLQMNSLKPEDTAVYYCAAALIGGYYSDVDAWSYWGPGTQVTVSS

SEQ ID NO: 25572 - protein, 117 aa, Artificial Sequence; identical to SEQ ID NO: 25380
  source: /note="Description of Artificial Sequence: Synthetic polypeptide"

SEQ ID NO: 25573 - protein, 124 aa, Artificial Sequence; identical to SEQ ID NO: 25571
  source: /note="Description of Artificial Sequence: Synthetic polypeptide"

SEQ ID NO: 25574 - protein, 115 aa, Artificial Sequence; identical to SEQ ID NO: 25371
  source: /note="Description of Artificial Sequence: Synthetic polypeptide"

SEQ ID NO: 25575 - protein, 125 aa, Artificial Sequence; identical to SEQ ID NO: 25379
  source: /note="Description of Artificial Sequence: Synthetic polypeptide"

SEQ ID NO: 25576 - protein, 124 aa, Artificial Sequence
  source: /note="Description of Artificial Sequence: Synthetic polypeptide"
EVQLVESGGGLVQAGGSLRLSCAASGRTVSSYYMGWFRQAPGNEREFVAAFSWSSSKPYYADSVKGRFTISRDSAGNTVYLQMNSLKPEDTAVYWCGARQIGTYYSDYENYDYWGQGTQVTVSS

SEQ ID NO: 25577 - protein, 124 aa, Artificial Sequence
  source: /note="Description of Artificial Sequence: Synthetic polypeptide"
EVQLVESGGGLVQAGGSLRLSCAASGRAFSRYYMGWFRQAPGKEREVVAAFSWSGGMTYYADSVKGRFTMSRDSASDTVYLQMNSLKPEDTAVYYCGARQMGVYYSDYENYDYWGQGTQVTVSS

SEQ ID NO: 25578 - protein, 124 aa, Artificial Sequence
  source: /note="Description of Artificial Sequence: Synthetic polypeptide"
EVQLVESGGGLVQAGGSLRLSCAASGRTVSSYYMGWFRQAPGNEREFVAAFSWSGSKPYYADSVKGRFTISRDSAGNTVYLQMNSLKPEDTAVYWCGARQIGTYYSDYENYDYWGQGTQVTVSS

SEQ ID NO: 25579 - protein, 125 aa, Artificial Sequence
  source: /note="Description of Artificial Sequence: Synthetic polypeptide"
EVQLVESGGGLVQAGGSLRLSCAASGRTLSSYRLSWFRQAPGKEREFVATHSWDGRRTYYADSVKGRFTFSRDNAKNTVYLQLNSLKPEDTAVYHCAAATLIGGYYSDLDNYDYWGPGTQVTVSS

SEQ ID NO: 25580 - protein, 124 aa, Artificial Sequence; identical to SEQ ID NO: 25577
  source: /note="Description of Artificial Sequence: Synthetic polypeptide"

SEQ ID NO: 25581 - protein, 124 aa, Artificial Sequence; identical to SEQ ID NO: 25571
  source: /note="Description of Artificial Sequence: Synthetic polypeptide"

SEQ ID NO: 25582 - protein, 115 aa, Artificial Sequence; identical to SEQ ID NO: 25371
  source: /note="Description of Artificial Sequence: Synthetic polypeptide"

SEQ ID NO: 25583 - protein, 115 aa, Artificial Sequence
  source: /note="Description of Artificial Sequence: Synthetic polypeptide"
EVQLVESGGGLVQAGGSLRLSCAVSGDTFDNSAAGWYRATSETQRELVARIRSSGSTNYADSVKGRFTVSRDNAKNTVYLQMNSLKPEDTAVYYCNVVSYGEYFWGKGTLVTVSS

SEQ ID NO: 25584 - protein, 124 aa, Artificial Sequence
  source: /note="Description of Artificial Sequence: Synthetic polypeptide"
EVQLVESGGGLVQAGGSLRLSCAASGRTFDTYFVGWFRQAPGKERDFVAAISWSGDRTFYADSVKGRFTISRDNAKNTEYLQMNSLKPEDTAVYYCAAREYGRLYSDSEAYDYWGQGTQVTVSS

SEQ ID NO: 25585 - protein, 125 aa, Artificial Sequence; identical to SEQ ID NO: 25379
  source: /note="Description of Artificial Sequence: Synthetic polypeptide"

SEQ ID NO: 25586 - protein, 119 aa, Artificial Sequence
  source: /note="Description of Artificial Sequence: Synthetic polypeptide"
EVQLVESGGGLVQPGGSLRLSCAASGFTFGNYDMSWVRQAPGKGPEWVSGINTGGSTLYADSVKGRFTISRDNAKNTLYLQMNSLKSEDTAVYYCAKDLYGSTWYTDYWSQGTQVTVSS

SEQ ID NO: 25587 - protein, 124 aa, Artificial Sequence
  source: /note="Description of Artificial Sequence: Synthetic polypeptide"
EMQLVESGGGLVQAGDSLRLSCAASGDTFSWYVMAWFRQAPGKEREFVTWINRSGASTYYADSVKGRFTIFRDNDKNTVYLQMNSLKPEDTAVYYCAAGGFYGLRTTEERYDTWGQGTQVTVSS

SEQ ID NO: 25588 - protein, 120 aa, Artificial Sequence
  source: /note="Description of Artificial Sequence: Synthetic polypeptide"
EVQLVESGGGLVQPGGSLRLSCAASGFTFGSSDMSWVRQAPGKGPEWVSGINSGGGRTLYADSVKGRFTISRDNAKNTLYLQMNSLKSEDTAVYYCATDLYGSSWYTDYWSQGTQVTVSS

SEQ ID NO: 25589 - protein, 125 aa, Artificial Sequence; identical to SEQ ID NO: 25379
  source: /note="Description of Artificial Sequence: Synthetic polypeptide"

SEQ ID NO: 25590 - protein, 125 aa, Artificial Sequence; identical to SEQ ID NO: 25379
  source: /note="Description of Artificial Sequence: Synthetic polypeptide"

SEQ ID NO: 25591 - protein, 117 aa, Artificial Sequence
  source: /note="Description of Artificial Sequence: Synthetic polypeptide"
EVQLVESGGGLVQPGGSLRLSCAASGFTFGSSDMSWVRQAPGKGPEWVSGINSGGGITDYANSVKGRFTISRDNAKNTLYLQMNSLKPEDTAVYSCATDFWGSTWSGLPGTQVTVSS

SEQ ID NO: 25592 - protein, 117 aa, Artificial Sequence; identical to SEQ ID NO: 25380
  source: /note="Description of Artificial Sequence: Synthetic polypeptide"

SEQ ID NO: 25593 - protein, 125 aa, Artificial Sequence
  source: /note="Description of Artificial Sequence: Synthetic polypeptide"
EVQLVESGGGLVQAGGSLRLSCAASGGTFSPYVMAWFRQAPGNEREFVARIRWSSINTAYDDSVKGRFTISRDNAKSTVYLQMDSLKPEDTAVYYCAAATYGYGSYTYQGSYDHWGQGTQVTVSS

SEQ ID NO: 25594 - protein, 119 aa, Artificial Sequence
  source: /note="Description of Artificial Sequence: Synthetic polypeptide"
EVQLVESGGGLVQPGGSLRLSCEASGFTFGSRDMHWVRQAPGKGGPEWVSGINSGASNTHYADSVKGRFTISRDNAKNTLYLQMNSLKAEDTAVYYCATEFWPGVYDTSTPGTQVTVSS

SEQ ID NO: 25595 - protein, 125 aa, Artificial Sequence; identical to SEQ ID NO: 25379
  source: /note="Description of Artificial Sequence: Synthetic polypeptide"

SEQ ID NO: 25596 - protein, 115 aa, Artificial Sequence; identical to SEQ ID NO: 25570
  source: /note="Description of Artificial Sequence: Synthetic polypeptide"

SEQ ID NO: 25597 - protein, 119 aa, Artificial Sequence
  source: /note="Description of Artificial Sequence: Synthetic polypeptide"
EVQLVESGGGLVQPGGSLRLSCAASGFTFGSYDMSWVRQAPGKGSEWVSHINTGGGSTTYADSVKGRFTISRDNAKNTLYLQMSSLKPEDTAVYYCATGLYGGSTDDYWGQGTQVTVSS

SEQ ID NO: 25598 - protein, 117 aa, Artificial Sequence; identical to SEQ ID NO: 25380
  source: /note="Description of Artificial Sequence: Synthetic polypeptide"

SEQ ID NO: 25599 - protein, 125 aa, Artificial Sequence; identical to SEQ ID NO: 25379
  source: /note="Description of Artificial Sequence: Synthetic polypeptide"

SEQ ID NO: 25600 - protein, 119 aa, Artificial Sequence
  source: /note="Description of Artificial Sequence: Synthetic polypeptide"
EVQLVESGGGLVQPGGSLRLSCAASGFTFGSHDMSWVRQAPGKGSEWVSGIKSGGGSTLYADSVKGRFAISRDNAKNTLYLQMNSLKPEDTAVYYCATDLYGSTWYPGEDRGTQVTVSS

SEQ ID NO: 25601 - protein, 125 aa, Artificial Sequence; identical to SEQ ID NO: 25379
  source: /note="Description of Artificial Sequence: Synthetic polypeptide"

SEQ ID NO: 25602 - protein, 124 aa, Artificial Sequence; identical to SEQ ID NO: 25584
  source: /note="Description of Artificial Sequence: Synthetic polypeptide"

SEQ ID NO: 25603 - protein, 116 aa, Artificial Sequence
  source: /note="Description of Artificial Sequence: Synthetic polypeptide"
EVQLVESGGGLVQAGGSLRLSCTSSGSIFNFIMGWYRQAPGKQRELVADITRGDERNYLDAVKGRFIITRDSAKNTIYLQMNSLQPADSGVYWCHGLGVVSNREYWGQGTQVTVSS

SEQ ID NO: 25604 - protein, 123 aa, Artificial Sequence
  source: /note="Description of Artificial Sequence: Synthetic polypeptide"
QVQLQESGGGLVQPGGSLRLSCTASRTDISFNPMAWYRQAPGQQRELVASITSGGTTNYANSVKGRFTISRDNPKNTMYLQMNSLKPEDTAVYYCNGRGPRYTTTGWITDDYWGQGTQVTVSS

SEQ ID NO: 25605 - protein, 123 aa, Artificial Sequence
  source: /note="Description of Artificial Sequence: Synthetic polypeptide"
QVQLQQSGGGLVQPGGSLRLSCAASRSDFAFNPMGWYRQAPGKQRELVAVLTTGGTTNYADSVKGRFTISRDNARNTVYLQMNSLKPEDTAVYYCYARGPRKAPTGWITDDYWGQGTQVTVSS

SEQ ID NO: 25606 - protein, 123 aa, Artificial Sequence
  source: /note="Description of Artificial Sequence: Synthetic polypeptide"
QVQLQESGGGLVQPGGSLRLSCAASRSGFSFNPMGWYRQAPGKQRELVATITSGGTTNYADSVKGRFTISTDNAKTTVFLQMNSLKPEDTAVYYCNARGPRRGTAGWITDDYWGQGTQVTVSS

SEQ ID NO: 25607 - protein, 123 aa, Artificial Sequence
  source: /note="Description of Artificial Sequence: Synthetic polypeptide"
QVQLQESGGGLVQPGGSLRLSCAASRTDISFNPMGWYRQAPGKQRELVATMTSGGTTGYADSVKGRFTISRDNPKNTLYLQMNSLEPEDTAVYYCHARGPRYATTGWFTDDYWGQGTQVTVSS

SEQ ID NO: 25608 - protein, 123 aa, Artificial Sequence
  source: /note="Description of Artificial Sequence: Synthetic polypeptide"
QVQLQESGGGLVQPGGSLRLSCAASRSGFVFNPMGWYRQAPGKQRELVAVITASLTTNYADSVKGRFTISRDNTGNTAYLQMNSLKPEDTAVYYCYGRGPRKAPTGWITDDYWGQGTQVTVSS

SEQ ID NO: 25609 - protein, 123 aa, Artificial Sequence
  source: /note="Description of Artificial Sequence: Synthetic polypeptide"
QVQLQQSGGGLVQAGGSLRLSCAASGSGFSFNPMGWYRQAPGKQRELVASITSGGTTNYVDSVKGRFTISRGNAKNTVYLQMNSLKPEDTAVYYCAAEGPRRRGSTWYTDNYWGQGTQVTVSS

SEQ ID NO: 25610 - protein, 123 aa, Artificial Sequence
  source: /note="Description of Artificial Sequence: Synthetic polypeptide"
QVQLQESGGGLVQPGGSLRLSCAASVSGFIFNPMGWYRQARGKQREEVAVLTTGGTTKYADSVKDRFTISRDNARNTVDLQMNSLKPEDTAVYYCYARGPRHVPTGWITDDYWGQGTQVTVSS

SEQ ID NO: 25611 - protein, 123 aa, Artificial Sequence
  source: /note="Description of Artificial Sequence: Synthetic polypeptide"
QVQLQQSGGGLVQPGGSLRLSCAASSSGFSFNPMGWYRQAPGKQRELVATMTSGGTTNYADSVKGRFTISRDNAKTTVYLQMNSLKPEDTAVYYCNARGPRRATTGWITDDYWGQGTQVTVSS

SEQ ID NO: 25612 - protein, 123 aa, Artificial Sequence
  source: /note="Description of Artificial Sequence: Synthetic polypeptide"
QVQLQESGGGLVQAGGSLRLSCAASGSGFSFNPMGWYRQAPGKQRELVASITSGGTTNYVDSVKGRFTISRGNAKNTVYLQMNSLKPEDTAVYYCAAEGPRRRGSTWYTDNYWGQGTQVTVSS

SEQ ID NO: 25613 - protein, 123 aa, Artificial Sequence
  source: /note="Description of Artificial Sequence: Synthetic polypeptide"
QVQLQQSGGGLVQPGGSLRLSCAASRGDISFNPMGWYRQAPGKQRELVATITNGGTTNYADSVKGRFTISRDNAETAVYLQMNSLKPEDTAVYYCNARGPRHATTGWYTDDYWGQGTQVTVSS

SEQ ID NO: 25614 - protein, 123 aa, Artificial Sequence
  source: /note="Description of Artificial Sequence: Synthetic polypeptide"
QVQLQESGGGLVQPGGSLRLSCAASRSGFSFNPMGWYRQAPGKQRELVATITSGGTTNYADSVKGRFTISTDNAKTTVYLQMNSLKPEDTAVYYCNGRGPRRATTGWITDDYWGQGTQVTVSS

SEQ ID NO: 25615 - protein, 123 aa, Artificial Sequence
  source: /note="Description of Artificial Sequence: Synthetic polypeptide"
QVQLQESGGGLVQPGGSLRLSCAASRSDFAFNPMGWYRQAPGKQRELVAVLTTGGTTNYADSVKGRFTISRDNARNTVYLQMNSLKPEDTAVYYCYARGPRKAPTGWITDDYWGQGTQVTVSS

SEQ ID NO: 25616 - protein, 123 aa, Artificial Sequence
  source: /note="Description of Artificial Sequence: Synthetic polypeptide"
QVQLQQSGGGLVQAGGSLRLSCAASGNIISFNPMGWHRQAPGKQRELVASITSGGSISYVDSVKGRFTISRDSAKNTIYLQMNSLKPEDTAVYFCAGEGPRRRGSTWYTDTYWGQGTQVTVSS

SEQ ID NO: 25617 - protein, 123 aa, Artificial Sequence
  source: /note="Description of Artificial Sequence: Synthetic polypeptide"
QVQLQQSGGGLVQPGGSLRLSCAASRSGFSFNPMGWYRQAPGKQRELVATITSGGTTNYADSVKGRFTISTDNAKTTVFLQMNSLKPEDTAVYYCNGRGPRRGTAGWFTDDYWGQGTQVTVSS

SEQ ID NO: 25618 - protein, 123 aa, Artificial Sequence
  source: /note="Description of Artificial Sequence: Synthetic polypeptide"
QVQLQQSGGGLVQPGGSLRLSCAASRSDISFNPMGWYRQAPGKQRELVATISNGGTTNYADSVKGRFTISQDNAKTTVYLQMNSLKPEDTAVYYCNGRGPRYATTGWYTDDYWGQGTQVTVSS

SEQ ID NO: 25619 - protein, 123 aa, Artificial Sequence
  source: /note="Description of Artificial Sequence: Synthetic polypeptide"
QVQLQESGGGLVQPGGSLRLSCAASRSDISFNPMGWYRQAPGKQRELVATISNGGTTNYADSVKGRFTISQDNAKTTVYLQMNSLKPEDTAVYYCNGRGPRYATTGWYTDDYWGQGTQVTVSS

SEQ ID NO: 25620 - protein, 121 aa, Artificial Sequence
  source: /note="Description of Artificial Sequence: Synthetic polypeptide"
QVQLQESGGGLVQPGGSLRLSCAASGSIFSINRMGWYRQAPGKQRELVAAITYGGSTNYADSVKGRFTISRDNAKNTVYLQMNSLKPEDTAVYYCNAGSTYSPFGDKYDYWGQGTQVTVSS

SEQ ID NO: 25621 - protein, 123 aa, Artificial Sequence
  source: /note="Description of Artificial Sequence: Synthetic polypeptide"
QVQLQQSGGGLVQAGGSLRLSCAASGSAFSINTMGWYRQAPGKQRELVAVISSGSGGSTNYADSVKGRFTISRDNAKNTVYLHMNSLKPEDTAVYYCNAGSRFNPFGSAYDYWGQGTQVTVSS

SEQ ID NO: 25622 - protein, 121 aa, Artificial Sequence
  source: /note="Description of Artificial Sequence: Synthetic polypeptide"
QVQLQQSGGGLVQPGGSLRLSCAASGSTFSINAMGWYRQAPGKQRELVAAISSGGSTNYADSVKGRFTISRDNAKNTVYLQMNSLKPEDTAVYYCNAGSRFNPEGSAYDYWGQGTQVTVSS

SEQ ID NO: 25623 - protein, 121 aa, Artificial Sequence
  source: /note="Description of Artificial Sequence: Synthetic polypeptide"
QVQLQQSGGGLVQAGGSLRLSCAASGSSFSINAMGWYRQAPGKQRELVAAISSGGSANYADSVKGRFTISRDNAKNTVYLQMNSLKPEDTAVYYCNAGSRFNPEGSAYDYWGQGTQVTVSS

SEQ ID NO: 25624 - protein, 121 aa, Artificial Sequence
  source: /note="Description of Artificial Sequence: Synthetic polypeptide"
QVQLQESGGGLVQAGGSLRLSCAASGSTFSINAMGWYRQAPGKQRELVAAISSGGSTNYADSVKGRFTISRDNAKNTVYLQMNSLKPEDTAVYYCNAGSRFNPEGSAYDYWGQGTQVTVSS

SEQ ID NO: 25625 - protein, 125 aa, Artificial Sequence
  source: /note="Description of Artificial Sequence: Synthetic polypeptide"
QVQLQESGGGLVQAGDSLRLSCAASGRTFNSLTMAWFRQAPGKDRDFVSVVNWDGDRTNYADSVKGRFTIFRDNAKNTVYLQMNGLKPDDTAIYRCAARWDYGLWRPSTYNYAYWGQGTQVIVSS

SEQ ID NO: 25626 - protein, 128 aa, Artificial Sequence
  source: /note="Description of Artificial Sequence: Synthetic polypeptide"
QVQLQESGGGLVQAGGSLRLSCAFSGDTFSFYTLGWFRQAPGKEREFVAATSNIGGYIYYGDSVKGRFTISGDNAKNTVYLQMSSLKPEDTAVYYCAATLRSGSMWYQNVRVNDNPYWGQGTQVTVSS

SEQ ID NO: 25627 - protein, 124 aa, Artificial Sequence
  source: /note="Description of Artificial Sequence: Synthetic polypeptide"
QVQLQESGGGLVQAGGSLRLSCAASGRPFSSAAMGWFRQAPGKEREFVSAISYTGDVTRYADSVKGRFTISRDNTRNTLTLEMNSLKPEDTAVYYCAARTYAGVRAHTYDYDYWGQGTQVTVSS

SEQ ID NO: 25628 - protein, 122 aa, Artificial Sequence
  source: /note="Description of Artificial Sequence: Synthetic polypeptide"
QVQLQESGGGLVQAGGSLRLSCAASGRSLSRYAMGWFRQAPGKEREFVATKTSGGVTYYGASVKGRFTISRDNAKNMVYLQMNSLNPEDTAIYYCAAGTDAIFKPWMLPDYWGQGTQVTVSG

SEQ ID NO: 25629 - protein, 127 aa, Artificial Sequence
  source: /note="Description of Artificial Sequence: Synthetic polypeptide"
QVQLQESGGGLVETGGSLRLSCAASGRTFGGYALAWFRQAPGKGREFVAAVTWTSGTTNYAGSVKDRFTVSRDNAGNTMYLQMNSLRPEDTAVYICGAASGYRSPDRLSEPNWVNYWGQGTQVTVSS

SEQ ID NO: 25630 - protein, 127 aa, Artificial Sequence
  source: /note="Description of Artificial Sequence: Synthetic polypeptide"
QVQLQESGGGLVQTGGSLRLSCAASGRTFGGYAMAWFRQAPRKGREFVASVTWNGGATDYAGSVKDRFTVSRDTANNTMYLQMNSLKPEDTAVYICGAASGYRSTDRLSDPGWTNYWGQGTQVTVSS

SEQ ID NO: 25631 - protein, 127 aa, Artificial Sequence
  source: /note="Description of Artificial Sequence: Synthetic polypeptide"
QVQLQESGGGLVQTGGSLRLSCAASGRTFGGYAMAWFRQVPGKGREFVAAVTWSSGTTNYARSVKDRFIVSRDNANNTMYLQMNSLKPEDTAVYICGAASGYRSTDRLSEPAWINYWGQGTQVTVSS

SEQ ID NO: 25632 - protein, 127 aa, Artificial Sequence
  source: /note="Description of Artificial Sequence: Synthetic polypeptide"
QVQLQESGGGLVQTGGSLRLSCAASGRTFGGYAMAWFRQAPGKGREFVAAVTWSSGTTNYAGSVKDRFTVSRDNANNTMYLQMNSLKPEDTAVYICGAASGYRSTDRLSTPEWINYWGQGTQVTVSS

SEQ ID NO: 25633 - protein, 127 aa, Artificial Sequence
  source: /note="Description of Artificial Sequence: Synthetic polypeptide"
QVQLQESGGGLVQTGGSLRLSCAASGRTFGGYAMAWFRQAPGKGREFVAAVTWSAGTTNYAGSVKDRFTVSRDNANNTMYLQMNSLKPEDTAVYICGAATGYRSTDRLAEPGWVNYWGQGTQVTVSS

SEQ ID NO: 25634 - protein, 127 aa, Artificial Sequence
  source: /note="Description of Artificial Sequence: Synthetic polypeptide"
QVQLQQSGGGLVQTGGSLRLSCAASGRTFGGYAMAWFRQAPGKGREFVAAVTWSAGTTNYAGSVKDRFTVSRDNANNTMYLQMNSLKPEDTAVYICGAASGYRSTDRLSEPAWINYWGQGTQVTVSS

SEQ ID NO: 25635 - protein, 127 aa, Artificial Sequence
  source: /note="Description of Artificial Sequence: Synthetic polypeptide"
QVQLQESGGGLVQTGGSLRLSCAASGRTFGGYAMAWFRQAPGKGREFVAAVTWSAGTTNYAGSVKDRFTVSRDNANNTMYLQMNSLKPEDTAVYICGAATGYRSTDRLTEPAWVNYWGQGTQVTVSS

SEQ ID NO: 25636 - protein, 127 aa, Artificial Sequence
  source: /note="Description of Artificial Sequence: Synthetic polypeptide"
QVQLQESGGGLVQAGGSLRLSCATSGRPFGGYAMAWFRQAPGKGREFVAAVTWSAGTTNYAGSVKDRFTVSRDNANNTMYLQMNSLKPEDTAVYICGAATGYRSTDRLSDPNWVNYWGQGTQVTVSS

SEQ ID NO: 25637 - protein, 127 aa, Artificial Sequence
  source: /note="Description of Artificial Sequence: Synthetic polypeptide"
QVQLQESGGGLVQAGGSLRLSCAASGRTFGGYAMAWFRQAPGKGREFVAAVTWSSGTTNYAGSVKDRFTVSRDNANNTMYLRMNSLKPEDTAVYICGAASGYRSTDRLSDAAWINYWGQGTQVTVSS

SEQ ID NO: 25638 - protein, 127 aa, Artificial Sequence
  source: /note="Description of Artificial Sequence: Synthetic polypeptide"
QVQLQQSGGGLVQTGGSLRLSCAASGRTFGGYAMAWFREAPGKGREFVAAVTWSSGTTNYAGSVKDRFTVSRDNANNTMYLQMNSLKPEDTAVYICGAASGYRSTDRLSTPEWINYWGQGTQVTVSS

SEQ ID NO: 25639 - protein, 127 aa, Artificial Sequence
  source: /note="Description of Artificial Sequence: Synthetic polypeptide"
QVQLQESGGGLVQTGGSLRLSCAASGRTFGGYAMAWFRQAPGKGREFVAAVTWSSGTTNYAGSVKDRFTVSRDNGNNTMYLQMNSLKPEDTAVYICGVASGYRSTDRLSEPGWINYWGQGTQVTVSS

SEQ ID NO: 25640 - protein, 127 aa, Artificial Sequence
  source: /note="Description of Artificial Sequence: Synthetic polypeptide"
QVQLQESGGGLVQTGGSLRLSCAASGRTFGGYAMAWFRQAPGKGREFVAAITWSAGTTNYADSMKDRFTVSRDTANNTMYLEMNRLKPDDTAVYICGAATGYRSTDRLSTPAWINYWGQGTQVTVSS

SEQ ID NO: 25641 - protein, 127 aa, Artificial Sequence
  source: /note="Description of Artificial Sequence: Synthetic polypeptide"
QVQLQESGGGLVRTGDSLRLSCAASGRTFNGYAMAWFRQAPGKGREFVAAVTWSSGTTNYAGSVKDRFTVSRDNANNTMYLQMNSLKPEDTAVYICGAASGYRSTDRLSDPAWTNYWGQGTQVTVSS

SEQ ID NO: 25642 - protein, 127 aa, Artificial Sequence
  source: /note="Description of Artificial Sequence: Synthetic polypeptide"
QVQLQESGGGLVETGGSLRLSCAASGRTFGGYAMAWFRQAPGKGREFVAAVTWTSGTTNYAGSVKDRFTVSRDNANNTMYLQMNSLKPEDTAVYICGAASGYRSPDRLSEPEWINYWGQGTQVTVSS

SEQ ID NO: 25643 - protein, 127 aa, Artificial Sequence
  source: /note="Description of Artificial Sequence: Synthetic polypeptide"
QVQLQESGGGLVQTGGSLRLSCAASGGTFGGYAMAWFRQAPGKGREFVASVIWNGGTTNYLDSVKDRFTVSRDMANNTMYLQMNSLKPEDTAVYICGAASGYRSTDRLSEPGWVNYWGQGTQVTVSS

SEQ ID NO: 25644 - protein, 127 aa, Artificial Sequence
  source: /note="Description of Artificial Sequence: Synthetic polypeptide"
QVQLQESGGGLVQAGGSLRLSCAASGRTLNNYAMGWFRQAPGAEREFVGAISASGDSTQYTESVQGRFTISKDNAKSTVYLDMNSLKPEDTAVYYCAADRKTLAYYTSRLRSRYDYWGQGTQVTVSS

SEQ ID NO: 25645 - protein, 127 aa, Artificial Sequence
  source: /note="Description of Artificial Sequence: Synthetic polypeptide"
QVQLQQSGGGLVQAGGSLRLSCAASGGTLNNYAMGWFRQAPGAEREFVGAISAGGDSTQYTESVQGRFTISKDNAKSTVYLDMNSLKPEDTAVYYCAADRKTLTYYTSRLRSRYDYWGQGTQVTVSS

SEQ ID NO: 25646 - protein, 127 aa, Artificial Sequence
  source: /note="Description of Artificial Sequence: Synthetic polypeptide"
QVQLQESGGGLVQAGGSLRLSCAASGRTLNNYAMGWFRQAPGAEREFVGAISASGDSTQYTESVQGRFTISKDNAKSTVYLDMNSLKPEDTAVYYCAADRKTLTFYTSRLRSRYDYWGQGTQVTVSS

SEQ ID NO: 25647 - protein, 127 aa, Artificial Sequence
  source: /note="Description of Artificial Sequence: Synthetic polypeptide"
QVQLQQSGGGLVQAGGSLRLSCAASGRTLNNYAMGWFRQAPGAEREFVGAISASGDSTQYTESVQGRFTISKDNAKSTVYLDMNSLKPEDTAVYYCAADRKTLTFYTSRLRSRYDYWGQGTQVTVSS

SEQ ID NO: 25648 - protein, 127 aa, Artificial Sequence
  source: /note="Description of Artificial Sequence: Synthetic polypeptide"
QVQLQESGGGLVQAGGSLRLSCVASGRTLDNYAMGWFRQAPGAEREFVGAISANGEDTQYTESVQGRFTISKDNAKSTVYLDMNSLKPEDTAVYYCAADRKTLTYYTSRLRSRYEYWGQGTQVTVSS

SEQ ID NO: 25649 - protein, 127 aa, Artificial Sequence
  source: /note="Description of Artificial Sequence: Synthetic polypeptide"
QVQLQQSGGGLVQAGGSLRLSCAASGRTLNNYAMGWFRQAPGAEREFVGAISASGDSTQYTESVQGRFTISKDNAKSTVVLDMNSLKPEDTAVYYCAADGKTLTFYTSRLRSRYDYWGQGTQVTVSS

SEQ ID NO: 25650 - protein, 127 aa, Artificial Sequence
  source: /note="Description of Artificial Sequence: Synthetic polypeptide"
QVQLQQSGGGLVQAGGSLRLSCAASGRTLNNYAMGWFRQAPGAEREFVGAISASGDSTQYTESVQGRFSISKDLAKSTVYLDMNSLKPEDTAVYYCAADQKTLTFYTSRLRSRYDYWGQGTQVTVSS

SEQ ID NO: 25651 - protein, 127 aa, Artificial Sequence
  source: /note="Description of Artificial Sequence: Synthetic polypeptide"
QVQLQESGGGLVQAGGSLRLSCAASGRTLNNYAMGWFRQAPGAEREFVGAISASGDSTDYTESVQGRFTISKDNAKSTVYLDMNSLKPEDTAVYYCAADRKTLTFYTSRLRSRYDYWGQGTQVTVSS

SEQ ID NO: 25652 - protein, 127 aa, Artificial Sequence
  source: /note="Description of Artificial Sequence: Synthetic polypeptide"
QVQLQESGGGLVQAGGSLRLSCAASGRTLNNYAMGWFRQAPGAEREFVGAISASGDSTQYTESVQGRFTISKDYAKSTVYLDMNSLKPEDTAVYYCAADQKTLTYYTSRLRSRYDYWGQGTQVTVSS

SEQ ID NO: 25653 - protein, 127 aa, Artificial Sequence
  source: /note="Description of Artificial Sequence: Synthetic polypeptide"
QVQLQESGGGLVQAGGSLRLSCAASGHTLNNYAMGWFRQGPGAEREFVGAISASGDSTQYTESVQGRFTISKDNAKRTVYLDMNSLKPEDTAVYYCAADGKTLTYYTSRLRSQYDYWGQGTQVTVSS

SEQ ID NO: 25654 - protein, 127 aa, Artificial Sequence
  source: /note="Description of Artificial Sequence: Synthetic polypeptide"
QVQLQQSGGGLVQAGESLRLSCAASGRTLNNYAMGWFRQAPGAEREFVGAISASGDSTQYTESVQGRFTISKDNAKSTVYLDMNSLKPEDTAVYYCAADRKTLTFYTSRLRSRYDYWGQGTQVTVSS

SEQ ID NO: 25655 - protein, 123 aa, Artificial Sequence
  source: /note="Description of Artificial Sequence: Synthetic polypeptide"
QVQLQESGGGLVQAGGFLRLSCAASGRSFNTYAMGWFRQAPGKEREFVAGITRSGTATDYADSVKGRFTISRDNARNTVYLQMNRLKSEDSAVYYCAAHASYDRMIYSEYKYWGQGTQVTVSS

SEQ ID NO: 25656 - protein, 123 aa, Artificial Sequence
  source: /note="Description of Artificial Sequence: Synthetic polypeptide"
QVQLQQSGGGLVQAGGFLRLSCAASGRSFNTYAMGWFRQAPGKEREFVAGITRSGTATDYIDSVKGRFTISRDNARDTVYLQMNRLNPEDSAVYYCAAHANYDRMINSEYKYWGQGTQVTVSS

SEQ ID NO: 25657 - protein, 123 aa, Artificial Sequence
  source: /note="Description of Artificial Sequence: Synthetic polypeptide"
QVQLQESGGGLVQAGGFLRLSCAASGRSFNTYAMGWFRQAPGKEREFVAGITRSGTATDYIDSVKGRFTISRDNARDTVYLQMNRLNPEDSAVYYCAAHANYDRMINSEYKYWGQGTQVTVSS

SEQ ID NO: 25658 - protein, 123 aa, Artificial Sequence
  source: /note="Description of Artificial Sequence: Synthetic polypeptide"
QVQLQQSGGGLVQAGGFLRLSCAASGRSFNTYAVGWFRQAPGKEREFVAGITRSGTATDYADSVKGRFTISRDNARNTVYLQMNRLKPEDSAVYYCAAHASYDRMINSEYKYWGQGTQVTVSS

SEQ ID NO: 25659 - protein, 123 aa, Artificial Sequence
  source: /note="Description of Artificial Sequence: Synthetic polypeptide"
QVQLQQSGGGLVQAGGFLRLSCAASGRSFNTYAMGWFRQAPGKEREFVAGITRSGTATEYADSVKGRFTISRDNARNTVLLQMNRLKPEDSAVYYCAAHANYDRMINSEYKYWGQGTQVTVSS

SEQ ID NO: 25660 - protein, 123 aa, Artificial Sequence
  source: /note="Description of Artificial Sequence: Synthetic polypeptide"
QVQLQESGGGLVQAGGFLRLTCAASGRSFNTYAMGWFRQAPGKDRKFVAGITRSGTVTDYADSVKGRFTISRDNARNTVYLQMNRLKPEDSAVYYCAGHASYDRMINSEYKYWGQGTQVTVSS

SEQ ID NO: 25661 - protein, 123 aa, Artificial Sequence
  source: /note="Description of Artificial Sequence: Synthetic polypeptide"
QVQLQESGGGLVQAGGFLRLSCAASGRSFNTYAMGWFRQAPGKEREFVAGITRSGTATDYADSVKGRFTISRDNARNTVYLQMNRLKPEDSAVYYCAAHASYDRMIYSEYKYWGQGTQVTVSS

SEQ ID NO: 25662 - protein, 124 aa, Artificial Sequence
  source: /note="Description of Artificial Sequence: Synthetic polypeptide"
QVQLQESGGGLVQAGDSLRLSCAASGPSFNNGAMSWFRQAPGKEREFVAAIRWSGGGIRYADSVKGRFTISRDNAKNTLYLQMNSLKPEDTAVYYCAIDPRADLVATMTSIRYWGQGTQVTVSS

SEQ ID NO: 25663 - protein, 124 aa, Artificial Sequence
  source: /note="Description of Artificial Sequence: Synthetic polypeptide"
QVQLQESGGGLVQAGDSLRLSCAAPGRSFSGGAMSWFRQVPGKEREFVAAIRWSGGGIRYADSVKGRFTISRDNAKNTFYLQMNSLKPEDTAVYYCAIDPRADLVATMTSIRYWGQGTQVTVSS

SEQ ID NO: 25664 - protein, 124 aa, Artificial Sequence
  source: /note="Description of Artificial Sequence: Synthetic polypeptide"
QVQLQESGGGLVQAGGSLRLSCAASGPSFNNGAMSWFRQAPGKEREFVAAIRWSGGGIRYADSVKGRFTISRDNAKNTLYLQMNSLKPEDTAVYYCAIDPRADLVATMTSIRYWGQGTQVTVSS

SEQ ID NO: 25665 - protein, 124 aa, Artificial Sequence
  source: /note="Description of Artificial Sequence: Synthetic polypeptide"
QVQLQQSGGGLVQAGGSLRLSCAASGRTFSTTGMGWFRQAPGKEREFVAAFWWTGGQTFYADSVKGRFTISGDNAGNTVDLQMNSLKPEDTAVYACAAMSKPRNLWRTDSYDYWGQGTQVTVSS

SEQ ID NO: 25666 - protein, 124 aa, Artificial Sequence
  source: /note="Description of Artificial Sequence: Synthetic polypeptide"
QVQLQESGGGLVQAGGSLRLSCAASGSTFSTYAMGWFRQAPGKEREFVAAFWWTDEQTFYADSVKGRFTISRGNAKNTVDLQMNSLKPEDTAVYACAAMSKPYNLWRTDSYDYWGQGTQVTVSS

SEQ ID NO: 25667 - protein, 122 aa, Artificial Sequence
  source: /note="Description of Artificial Sequence: Synthetic polypeptide"
QVQLQQSGGGLVQSGGSLSLSCAASGITLNNRVVGWFRQAPGKEREFVGRIMWSVGDTFYARSVKGRFTISRDNAKNTMYLQMNALKPEDTAVYYCAAARDPDLYTGQYEYWGQGTQVTVSS

SEQ ID NO: 25668 - protein, 122 aa, Artificial Sequence
  source: /note="Description of Artificial Sequence: Synthetic polypeptide"
QVQLQESGGGLVQPGGSLRLSCSASGFAFDDYAMSWVRQAPGKGLEWVSSINWNGGSTYYAESMKGRFTISRDSAKNTLYLQMNSLKSEDTAVYYCAKGEGSANWGLDFGSWGQGTQVTVSS

SEQ ID NO: 25669 - protein, 107 aa, Artificial Sequence
  source: /note="Description of Artificial Sequence: Synthetic polypeptide"
ELQMTQSPSILSASVGDRVTITCRASQSLNSWVAWYQQAPGRPPTLLISKTSSLESGVPSRFRGGGSGAEFTLTITSLQPDDAASYYCQQYETYPYTFGQGTKVDIK

SEQ ID NO: 25670 - protein, 131 aa, Artificial Sequence
  source: /note="Description of Artificial Sequence: Synthetic polypeptide"
VQLVQSGGDLIQPGGSLRLSCEASGFTFNRNWMHWVRQAPGMGLVWVSRVNSDGTSSTYADSVKGQFTISRDNAKNTLFLQMNSLRVDDTAVYYCARETWYRCDYWGQGTVVTVSSASTKGPSVTSGQAGQ

SEQ ID NO: 25671 - protein, 111 aa, Artificial Sequence
  source: /note="Description of Artificial Sequence: Synthetic polypeptide"
ELVLTQPPSASGTPGQRVTISCSGSRSNIGSKTVKWYQQLPGTAPKLLIHSNNQRPSGVPDRFSGSKSGTSASLAISGLQSGDEADYYCATWDDSLKAVVFGGGTQLTVLG

SEQ ID NO: 25672 - protein, 142 aa, Artificial Sequence
  source: /note="Description of Artificial Sequence: Synthetic polypeptide"
QVQLVQSGAEVKKPGESLKISCEVSGYKFSTYWIAWVRQMPGKGLEWMGSIYPGDSDAKYSPSFQGQVTMSVDKSISTAYLHWGNLKASDTAMYYCARGPYYDSWSGRPLSFWFDPWGQGTLVTVYSASTKGPSVTSGQAGQ

SEQ ID NO: 25673 - protein, 228 aa, Artificial Sequence
  source: /note="Description of Artificial Sequence: Synthetic polypeptide"
EVQLVESGGGLVQPGGSLRLSCAASGYTFTNYWINWVRQAPGKGLEWVGDIYPSDSFTNYNQNFKDRFTISRDKSKNTAYLQMNSLRAEDTAVYYCARSSIYYGKDYVLDYWGQGTLVTVSSASTKGPSVFPLAPSSKSTSGGTAALGCLVKDYFPEPVTVSWNSGALTSGVHTFPAVLQSSGLYSLSSVVTVPSSSLGTQTYICNVNHKPSNTKVDKKVEPKSCDKT

SEQ ID NO: 25674 - protein, 231 aa, Artificial Sequence
  source: /note="Description of Artificial Sequence: Synthetic polypeptide"
EVQLLEQSGAEVKRPGASVKVSCKASGYTFTSYAIHWVRQAPGQRLEWMGWINPGNGNAKYSQRFQGRVIISRDTSATTSYMELSSLTSEDTAVYSCARDRGFDLLTGHYLGLDPWGQGTLVTVSSASTKGPSVFPLAPSSKSTSGGTAALGCLVKDYFPEPVTVSWNSGALTSGVHTFPAVLQSSGLYSLSSVVTVPSSSLGTQTYICNVNHKPSNTKVDKKVEPKSCGS

SEQ ID NO: 25675 - protein, 122 aa, Artificial Sequence
  source: /note="Description of Artificial Sequence: Synthetic polypeptide"
EVQLVESGGGVVQPGRSLRLSCAASGFTFSTYGMHWVRQAPGKGLEWVALILYDGSDKYYADAVRGRFTVSRDNSKSTLYLQMHSLKIEDTAVYYCAILLSAGAANLDNNYGMDVWGRGTTV

SEQ ID NO: 25676 - protein, 139 aa, Artificial Sequence
  source: /note="Description of Artificial Sequence: Synthetic polypeptide"
MYLGLNYVFIVFLLNGVQSEVKLEESGGGLVQPGGSMKLSCAASGFTFSDAWMDWVRQSPEKGLEWVGEIRSKANNHATYYAESVKGRFTISRDDSKSSVYLQMNSLRAEDTGIYYCTPITTGAWFAYWGQGTLVTVSA

SEQ ID NO: 25677 - protein, 142 aa, Artificial Sequence
  source: /note="Description of Artificial Sequence: Synthetic polypeptide"
VVQLVESGGGVVRPGRSLKLSCAASGIAFSTFGMHWVRQAPGQGPEWLAFISYDGTNKHYVDSVKGRFFISRDNSRNVVYLHMNSLRADDTAVYYCATDSAPTGNHYDSSGYLGGSWGQGTRFTVSSASTKGPSVFPLAPLK

SEQ ID NO: 25678 - protein, 118 aa, Artificial Sequence
  source: /note="Description of Artificial Sequence: Synthetic polypeptide"
QVQLQQPGAEFVKPGASVRLSCKASGYTFSSYWMHWVKQRPGQGLEWIGEIDPSDSYTNYNQKFKGKATLTVDKSSSTAYMQFSSLTSEDSAVYYCATSGYDVGVDYWGQGTTLTVSS

SEQ ID NO: 25679 - protein, 129 aa, Artificial Sequence
  source: /note="Description of Artificial Sequence: Synthetic polypeptide"
QVKLLESGGGLVKPGGSLRLSCSASGFSLTKYKMTWVRQAPGKGLEWVSSISSTSRDIDYADSVKGRFTISRDNAKNSLFLQMSSLRVDDTAVYYCTRDGWLWGWDVRSNYYYNALDVWGQGTTVTVSS

SEQ ID NO: 25680 - protein, 123 aa, Artificial Sequence
  source: /note="Description of Artificial Sequence: Synthetic polypeptide"
EVQVLESGGGLVQPGGSLRLSCAASGFRFSSYAMSWVRQAPGKGLEWVSGISGTGENTYYADSVKGRFTISRDNSKNTLYVQMNSLRAEDTAVYYCAKDAILGSGHPWYFHVWGRGTLVTVSS

SEQ ID NO: 25681 - protein, 117 aa, Artificial Sequence
  source: /note="Description of Artificial Sequence: Synthetic polypeptide"
QVQLVQSGGEVKKPGALMKVSCKASGYIFTSYGISWVRQAPGQGLEWIGWINTYSGHTNYARKFRGRVTMTWDTSTSTAYMELSSLRSDDTAVYYCARVPTWGIDYWGQGTLVTVSS

SEQ ID NO: 25682 - protein, 114 aa, Artificial Sequence
  source: /note="Description of Artificial Sequence: Synthetic polypeptide"
QVQLKQSGPGLVKPSQTLSLTCTVSGFSLSTYGVQWVRQPPGKGLEWLGVIWSGGNTDYNAAFISRVTISKDTSKNQVSLKLSSVTAADTAVYYCARARYFDVWGAGTTVTVSS

SEQ ID NO: 25683 - protein, 114 aa, Artificial Sequence
  source: /note="Description of Artificial Sequence: Synthetic polypeptide"
QVQLKQSGPGLVQPSQSLSITCTVSGFSLSTYGVQWVRQSPGKGLEWLGVIWSGGNTDYNAAFISRLSISKDNSKNQVFFKVNSLQADDTAIYYCARARYFDVWGAGTTVTVSS

SEQ ID NO: 25684 - protein, 129 aa, Artificial Sequence
  source: /note="Description of Artificial Sequence: Synthetic polypeptide"
QVQLVESGGGVVRPGRSLRLSCAASGFAFSDYSINWVRQAPGKGLEWVAIISYDGRITYYRDSVKGRFTISRDDSKNTLYLQMNSLRTEDTAVYYCARQYYDFWSGSSVGRNYDGMDVWGLGTTVTVSS

SEQ ID NO: 25685 - protein, 121 aa, Artificial Sequence
  source: /note="Description of Artificial Sequence: Synthetic polypeptide"
QVQLVESGGGVVQPGGSLRLSCAPSGFVFRSYGMHWVRQTPGKGLEWVSLIWHDGSNRFYADSVKGRFTISRDNSKNTLYLQMNSLRAEDTAMYFCARERLIAAPAAFDLWGQGTLVTVSS

SEQ ID NO: 25686 - protein, 122 aa, Artificial Sequence
  source: /note="Description of Artificial Sequence: Synthetic polypeptide"
EVQLVESGGGLVQPGGSLRVSCEVSGFTFSNNWMHWVRQAPGKGPVWVSRISTDGMSTSYAEFVKGRFTISRDNARNTLYLQMNSLRDEDTAVYYCVRGSTYYFGSGSLNFWGQGTTVIVSS

SEQ ID NO: 25687 - protein, 124 aa, Artificial Sequence
  source: /note="Description of Artificial Sequence: Synthetic polypeptide"
QVHLVQSGAGVKKPGASVRVSCKASGYTFTTYPIHWLRQAPGQRPQWMGWIKTGNGDTVYSQKFQGRLTFTRDTSASTVHMELSSLRFEDTAVYYCARDLLSNGWSLSYYFDFWGQGALVTVSS

SEQ ID NO: 25688 - protein, 130 aa, Artificial Sequence
  source: /note="Description of Artificial Sequence: Synthetic polypeptide"
QVHLVESGGGVVQPGRSLRLTCAASGFTFSAYAIHWVRQAPGKGLEWVAVVSADGSNNFYTDSVKGRFTVSRDNPQNTVSLQMNTLRGDDTALYFCARAARGGDGYGAYDDYDYVFQDLWGQGTLVTVSS

SEQ ID NO: 25689 - protein, 126 aa, Artificial Sequence
  source: /note="Description of Artificial Sequence: Synthetic polypeptide"
QVQLQQWGAEMLKPSETLSLSCVVSGGSLSGFYWNWIRQSPGKGFEWLGEVSSVGTANTNPSLQSRVTISADLFKNQFSLKLASVTAADAGVYFCARGRRPTVVKYYYFYDGMDVWGQGTSVIVSS

SEQ ID NO: 25690 - protein, 126 aa, Artificial Sequence
  source: /note="Description of Artificial Sequence: Synthetic polypeptide"
QVKLEESGPGLVKPSGTLSLTCAVSGDSIDRRNWWNWVRQSPGKGLEWIGEIYHSGAANYNPSLKSRVTISVDTSKNHFFLRLSYVTAADTAVYYCARDGLRMDGGWIVTHGFDVWGQGKMVTVSS

SEQ ID NO: 25691 - protein, 124 aa, Artificial Sequence
  source: /note="Description of Artificial Sequence: Synthetic polypeptide"
QVQLQESGPGLVKPSGTLVLTCAVSDGSMSGINWWSWVRQPPGQGPQWIGEIYHTGTTNYNPSLKSRVTMSVDLARSQFSLKLTSVTAADTADYYCARQCQGDGCYGSDAFDFWGQGTRVTVSS

SEQ ID NO: 25692 - protein, 126 aa, Artificial Sequence
  source: /note="Description of Artificial Sequence: Synthetic polypeptide"
QVQLQESGPGLVKPSGTLSLTCTVSGDYINRSQWWDWVRQSPGKGLEWIGEIYHSGTANYNPSLKSRVTISVDTSKNQFSLRLNFVTAADTGVYYCARDGLRMDRGLIVTHGFDAWGQGKMVTVSS

SEQ ID NO: 25693 - protein, 121 aa, Artificial Sequence
  source: /note="Description of Artificial Sequence: Synthetic polypeptide"
QVRLVESGGGVVQPGRSLRLSCAASGFSVTDRGVYWVRQAPGKGLEWVAHLWDDETNKYYADSVKGRFTISRDSSKNTVYLQMNSLRAEDTAVYYCAKDTGYSSGWYLPDWGQGTLVTVSS

SEQ ID NO: 25694 - protein, 121 aa, Artificial Sequence
  source: /note="Description of Artificial Sequence: Synthetic polypeptide"
QAQLTESGGGVVQPGKSLRLACGASGLSFSGYGLHWVRQAPGKGLEYVAGIWHDGSRKNYGPSLRGRFTVSRDDSKNMVFLQMNNVRDEDTGVYFCVREDRFAVGPGFDYWGQGALVTVSS

SEQ ID NO: 25695 - protein, 126 aa, Artificial Sequence
  source: /note="Description of Artificial Sequence: Synthetic polypeptide"
QVQLQQWGAGMLKPSETLSLTCVVSGGSLSGYYWSWVRHSPGKGFEWLGEVSSVGTANNNPSLQSRVALSADLFKNQFSLKLTSLTAADTGVYYCARGRRPTLVKYYYFYHGMDVWGQGTAVIVSS

SEQ ID NO: 25696 - protein, 128 aa, Artificial Sequence
  source: /note="Description of Artificial Sequence: Synthetic polypeptide"
QVQLQESGPGLVRPSETLSLICTVSGDSINNINYYWGWVRQSPGKGLEWIGSIYHHGSTYYNPSLKSRVAMSVDKAKNQFSLKLRSVTAADTAVYYCSRQKVELRFLEWFRLHDSDVWGQGTMVTVSS

SEQ ID NO: 25697 - protein, 123 aa, Artificial Sequence
  source: /note="Description of Artificial Sequence: Synthetic polypeptide"
QVHLVQSGAEVKKPGASVKLSCKTSGYSFNNYMIHWVRQAPGQRLEWMGWISGGNGNTQYSKYFQGRVTFSRDTPATTVYMELSSLKSGDTAVYYCARGAKDSWRPEYYFDYWGQGSQVTVSS

SEQ ID NO: 25698 - protein, 122 aa, Artificial Sequence
  source: /note="Description of Artificial Sequence: Synthetic polypeptide"
QVQLVESGGGLVKPGGSLRLSCSASGFSFSDHYMSWIRQAPGKGLEWIAYIGTSRGTIFYTDSVKGRFTISRDNAKRSVFLQMNSLRAEDTAIYYCAGPGCWGGSCYPFTYWGQGALVTVSS

SEQ ID NO: 25699 - protein, 122 aa, Artificial Sequence
  source: /note="Description of Artificial Sequence: Synthetic polypeptide"
QVQLVESGGGVVQPGRSLRLSCAASRVTFSSYAMHWVRQAPGKGLEWVAVISHDGSKIYYADSVRGRFTISRDNSKNVFYLQTSSLRTDDTAIYYCAKSDILFGLSGGLDYWGQGTRVTVTS

SEQ ID NO: 25700 - protein, 120 aa, Artificial Sequence
  source: /note="Description of Artificial Sequence: Synthetic polypeptide"
DMQLLESGGGLVQPGGSLRLSCAASGFPFSNHAMAWVRQAPGQGLEWVSEIRDDHSEHYADSVKGRFTISRDNARNTLYLQMSSLRAEDTAFYYCAKDHGGLWLGEPPDWGQGTLVTVSS

SEQ ID NO: 25701 - protein, 122 aa, Artificial Sequence
  source: /note="Description of Artificial Sequence: Synthetic polypeptide"
QVQLVESGGGLVKPGGSLRLSCAASGFTFSDHYMSWIRQAPGKGLEWIAYIGTSRGTIFYADSVEGRFSISRDNAKNSVYLQMSSLRAEDTATYYCAGPGCWGGSCYPFHYWGQGALVTVSS

SEQ ID NO: 25702 - protein, 127 aa, Artificial Sequence
  source: /note="Description of Artificial Sequence: Synthetic polypeptide"
QLQLQESGPGLVKPSETLSLICSVFGGSVRSSRYYWAWIRQSPGKGLEWIGSMFHSGSTSYNPSLNSRVTISVDVFKNQFSLKLTSVTAADTAVYYCARQSYSDIWSGYGLHWFDPWGQGTLVTVSS

SEQ ID NO: 25703 - protein, 124 aa, Artificial Sequence
  source: /note="Description of Artificial Sequence: Synthetic polypeptide"
QMQVVESGGGVVQPGRSRRLSCEGSGFRFNSYGMHWVRQAPGKGLEWVAGTAADGSKKYYADSVKGRFTISKDNSKNTVYLQMNSLRPEDTAMYYCAKDSILLTSNPGVGIDVWGQGTTVTVSS

SEQ ID NO: 25704 - protein, 122 aa, Artificial Sequence
  source: /note="Description of Artificial Sequence: Synthetic polypeptide"
QVQLVQSGSELKKPGASVKLSCKASGYPFTGFAMHWVRQAPGQGLEWMGWINTHNGNPRYAQGFTGRFVFSLDTSVTTAYLQISSLKAEDTAVYYCAREATNYAYAYGMDVWGQGTAITVSS

SEQ ID NO: 25705 - protein, 121 aa, Artificial Sequence
  source: /note="Description of Artificial Sequence: Synthetic polypeptide"
QVRLVQSGAELRKPGASVKVSCKASGYEFSTHAIHWVRQAPGQRLEWMGWVNIRNGNTQYSQKFQGKVTLTRDTSATTAYMELNSLRSEDTAVYFCAREGYDGSPFSPLDHWGQGALIIVS

SEQ ID NO: 25706 - protein, 126 aa, Artificial Sequence
  source: /note="Description of Artificial Sequence: Synthetic polypeptide"
QVQLQQWGAGMLKPSETLSLSCVVSGGSLSGFYWNWIRQSPGKGFEWLGEVSSVGTANTHPSLQSRVTISADLFKNQFSLKLASVTAADAGVYFCARGRRPTVVKYYYFYDGMDVWGQGTSVIVSS

SEQ ID NO: 25707 - protein, 126 aa, Artificial Sequence
  source: /note="Description of Artificial Sequence: Synthetic polypeptide"
QVQLQQWGAEMLKPSETLSLSCVVSGGSLSGFYWNWIRQSPGKGFEWLGEVSSVGTANTNPSLQSRVTISADLFKNQFSLKLSSVTAADAGVYFCARGRRPTVVKYYYFYDGMDVWGQGTSVIVSS

SEQ ID NO: 25708 - protein, 126 aa, Artificial Sequence
  source: /note="Description of Artificial Sequence: Synthetic polypeptide"
QVQLQQWGAGMLKPSETLSLTCVVSGGSLSGFYWSWIRQSPGKGFEWLGEVSSVGTANTNPSLQSRVTISADLFKNQFSLKLASLTAADAGVYYCARGRRPTLVKYYYFYDGMDVWGQGTTVIVSS

SEQ ID NO: 25709 - protein, 126 aa, Artificial Sequence
  source: /note="Description of Artificial Sequence: Synthetic polypeptide"
QVQLQQWGAGMLKPSETLSLTCVVSGGSLSGYYWSWVRHPPGKGFEWLGEVSSVGTANNNPSLQSRVALSADLFKNQFSLKLTSLTAADTGVYYCARGRRPTLVKYYYFYHGMDVWGQGTAVIVSS

SEQ ID NO: 25710 - protein, 126 aa, Artificial Sequence
  source: /note="Description of Artificial Sequence: Synthetic polypeptide"
QVQLQQWGAGMLKPSETLSLTCVVSGGSLSGYYWSWVRHSPGKGFEWLGEVSSVGTANNNPSLQSRVALSADLFKNQFSLKLTSLTAVDTGVYYCARGRRPTLVKYYYFYHGMDVWGQGTAVIVSS

SEQ ID NO: 25711 - protein, 129 aa, Artificial Sequence; identical to SEQ ID NO: 25679
  source: /note="Description of Artificial Sequence: Synthetic polypeptide"

SEQ ID NO: 25712 - protein, 142 aa, Artificial Sequence
  source: /note="Description of Artificial Sequence: Synthetic polypeptide"
MEFGLSWVFLVALLRGVQCQVQLVESGGGVVQPGRSLRLSCAASGFTFSRYGHHWVRQAPGKGLEWVAVISYDGSNKWYADSVKGRFTDISRDNSKNTLFLQHHSLRAADTGVYYCAKDQLYFGSQSPGHYWVQGTLVTVSS

SEQ ID NO: 25713 - protein, 131 aa, Artificial Sequence
  source: /note="Description of Artificial Sequence: Synthetic polypeptide"
MEFGLSWVFLVAILEGVQCEVQLVESGGGLVQPGGSLRLSCAASGFTFSRYDMYWVRQATGKGLEWVSAIGPTGDTYYADSVKGRFTISRENAKNSLYLTMNGLRAGDTAVYYCARDLELWGQGTLVTVSS

SEQ ID NO: 25714 - protein, 132 aa, Artificial Sequence
  source: /note="Description of Artificial Sequence: Synthetic polypeptide"
MKHLWFFLLLVAVPRWVVSQYQLQESGPGLVKASETLSLTCTVSRGSFSDYFWNWFRQPAGKRLEWLGRVYTSGSVDYHPSLKSRVTVSVDTSKKQFSLRLSSVTVADTAVYYCARGLSGFDYWGQGALVTV

SEQ ID NO: 25715 - protein, 147 aa, Artificial Sequence
  source: /note="Description of Artificial Sequence: Synthetic polypeptide"
MGSTAILGLLLAVLQGVCAEVQLVQSGAEVKKPGESLRISCKGSGYSFTSYWISWVRQHPGKGLEWMGRLDPSASSAIFSPSLQGHVTISVDKSMRTAYVQWRSLKASDTAMYYCARHVREKSMVQGVIIKDAFDIWGQGTMVTVSS

SEQ ID NO: 25716 - protein, 147 aa, Artificial Sequence
  source: /note="Description of Artificial Sequence: Synthetic polypeptide"
MGWSCIILFLVATATGVHSQVQLQESGPRLVKWSQTLSLTCSVAGDSISSAESYWNWVRQSPGKGLQWIGFIFYTGTTYFNPSLNSRLTMSKDFVKNQFSLTLSSVSAADSAVYYCARGRGSTFPSAQFSYFGLDVWGQGTTVTVSS

SEQ ID NO: 25717 - protein, 148 aa, Artificial Sequence
  source: /note="Description of Artificial Sequence: Synthetic polypeptide"
MGWSCIILFLVATATGVHSQLQLQESGPGLVKPSETLSLTCIVSGGSIGTTDHYWGWIRQSPGKGLEWIGTTYYSGKTYYNPSLNSRVTISIDTSKNHFSLRLISVTAADTAVYHCARHRANYDFWGGSNLRGYFDPWGRGTLVTVSS

SEQ ID NO: 25718 - protein, 137 aa, Artificial Sequence
  source: /note="Description of Artificial Sequence: Synthetic polypeptide"
QVDLVESGAEVKKPGASVKLSCKASGYTLTRYYIHWVRQAPGQGLAWMGIINPSGGSTTYAQKFQDRVLMTTDISTSTVYLELSGLRSEDTAMYYCAEGNYHDSSGHQYADWQLAPNWLDSWGQGTLVTVSSASTKG

SEQ ID NO: 25719 - protein, 137 aa, Artificial Sequence
  source: /note="Description of Artificial Sequence: Synthetic polypeptide"
QVDLVESGAEVKKPGASVKLSCKASGYTLTRYYIHWVRQAPGQGLAWMGIINPSGGSTTYAQKFQDRVLMTTDISTSTVYLELSGLRSEDTAMYYCADGNYHDSSGHQYADWQLAPNWLDSWGQGTLVTVSSASTKG

SEQ ID NO: 25720 - protein, 120 aa, Artificial Sequence
  source: /note="Description of Artificial Sequence: Synthetic polypeptide"
QVQLVESGGGVVQPGGSLRLSCAPSGFVFRSYGMHWVRQTPGKGLEWVSLIWHDGSNRFYADSVKGRFTISRDNSKNTLYLQMNSLRAEDTAMYFCARERLIAAPAAFDLWGQGTLVTVS

SEQ ID NO: 25721 - protein, 129 aa, Artificial Sequence; identical to SEQ ID NO: 25684
  source: /note="Description of Artificial Sequence: Synthetic polypeptide"

SEQ ID NO: 25722 - protein, 115 aa, Artificial Sequence
  source: /note="Description of Artificial Sequence: Synthetic polypeptide"
QVQLQQSGPELVKPGASVKISCKASGYAFSSSWMNWVKQRPGQGLEWIGRIYPGDGDTNYNGKFKGKATLTADKSSSTAYMQLSSLTSVDSAVYFCAREYDEAYWGQGTLVTVSA

SEQ ID NO: 25723 - protein, 98 aa, Artificial Sequence
  source: /note="Description of Artificial Sequence: Synthetic polypeptide"
QVQLVQSGAEVKKPGASVKVSCKASGYTFTSYYMHWVRQAPGQGLEWMGIINPSGGSTSYAQKFQGRVTMTRDTSTSTVYMELSSLRSEDTAVYYCAR

SEQ ID NO: 25724 - protein, 115 aa, Artificial Sequence
  source: /note="Description of Artificial Sequence: Synthetic polypeptide"
QVQLVQSGAEVVKPGASVKVSCKASGYAFSSSWMHWVRQAPGQGLEWIGRIYPGDGSTSYAQKFQGKATLTADKSTSTAYMELSSLRSEDTAVYFCAREYDEAYWGQGTLVTVSS

SEQ ID NO: 25725 - protein, 123 aa, Artificial Sequence
  source: /note="Description of Artificial Sequence: Synthetic polypeptide"
QVQLVESGGGVVQPGRSLRLSCTASGFTFNNYGMHWVRQTPGKGLEWLAVIWFDENNKYYADSVRGRFTISRDNSKNTLFLQMNSLKTEDTAMYYCARDISLVRDAFIYFDFWGLGTLVTVSS

SEQ ID NO: 25726 - protein, 124 aa, Artificial Sequence
  source: /note="Description of Artificial Sequence: Synthetic polypeptide"
QVQLVESGGGVVQPGRSLRLSCAASGFTFSSYGMHWVRQAPGKGLEWVAVIWFDGNNQYYADSVKGRFTISRDNSKNTLYLQMNSLRAEDTAVYYCARDIFTVVRGFFIYFDYWGQGTLVTVSS

SEQ ID NO: 25727 - protein, 126 aa, Artificial Sequence
  source: /note="Description of Artificial Sequence: Synthetic polypeptide"
QVQLVESGGGVVQPGRSLRLSCAASGFTFSNYGMHWVRQAPGKGLEWMAVIWYDENNRYSADSVKGRFTISRDNSKNTLYLQMNSLRAEDTAVYYCARDPTNYHGSGSYYIYFDYWGQGTLVTVSS

SEQ ID NO: 25728 - protein, 127 aa, Artificial Sequence
  source: /note="Description of Artificial Sequence: Synthetic polypeptide"
AEVQLLESGGGLVQPGRSLRLSCAASGFTFDDYGMHWVRQAPGKGLEWVSGLSWNSDNIGYADSVKGRFTISRDNAKNSLYLQMNSLKIEDTAFYYCAKAPRTLRFLEWHNVYFDLWGRGTLVTVSS

SEQ ID NO: 25729 - protein, 133 aa, Artificial Sequence
  source: /note="Description of Artificial Sequence: Synthetic polypeptide"
AEVQLLEQSGAEVKKPGESLRISCRGSGYSFPNYWVSWVRQMPGKGLEWMGKIDPSDSETNYSPSFQGHVTISADKSLSIAYLQWNSLKASDTAMYHCARHKRGAPTYKDILTGYYVDGMDVWGQGTTDTVSS

SEQ ID NO: 25730 - protein, 125 aa, Artificial Sequence
  source: /note="Description of Artificial Sequence: Synthetic polypeptide"
AEVQLLESGPGLVKPSETLSLTCTVSNGSMSNYCWSWIRQSPGKGLEWIGYIYYSGSTSYNPSLRSRVALLVDTSKNQFSLKLTSVTTADTAVYYCARDLSARGGTRNRDALDVWGQGTQVTVSA

SEQ ID NO: 25731 - protein, 127 aa, Artificial Sequence
  source: /note="Description of Artificial Sequence: Synthetic polypeptide"
AEVQLLESGGGLVEPGRSLRLSCAASGFNFGDYAIHWVRQGPGKGLEWVAGISWNSGSIGYADSVKGRFIISRDNAKKTLFLQMNTLRTEDTALYYCVKETGAQGVAGSGAYYFHNWGQGTLVTVSS

SEQ ID NO: 25732 - protein, 121 aa, Artificial Sequence
  source: /note="Description of Artificial Sequence: Synthetic polypeptide"
AEVQLLESGPGLVKPSETLSLTCTVSGNSISSGYYWVWFRQSPGKGLEWIASIYHSGSTYYNPSLRSRVSISVDTSKKQFSLKLSSVTAADTAVYYCARDSAKTTRYFVHWGQGTLVTVSS

SEQ ID NO: 25733 - protein, 132 aa, Artificial Sequence
  source: /note="Description of Artificial Sequence: Synthetic polypeptide"
AEVQLLESGAEVKKPGESLRISCRGSGYSFPNYWVSWVRQMPGKGLEWMGKIDPSDSETNYSPSFQGHVTISADKSLSIAYLQWNSLKASDTAMYYCARHKRGAPTYKDILTGYYVDGMDVWGQGTTVTVSS

SEQ ID NO: 25734 - protein, 125 aa, Artificial Sequence
  source: /note="Description of Artificial Sequence: Synthetic polypeptide"
AEVQLLEQSGAEVKKPGASVKVSCKASGYTFTKYYLHWVRQAPGQGLEWMGFINPSGGSTSSAQKFQGRISMTRDTSTTTVYMEVNSVTSEDTAVYYCARVGRLGVGATGAFDLWGQGTMVTVSS

SEQ ID NO: 25735 - protein, 128 aa, Artificial Sequence
  source: /note="Description of Artificial Sequence: Synthetic polypeptide"
AEVQLLESGPGLVKPSQTLSLTCAISGDNVSRKSAAWNWIRQSPSRGLEWLGRTYHMSKWYSVYATSLKSRININVDTSRNQFALQLRSVTPEDTAVYYCAREGPEWAVGGTYGMDVWGQGTTVTVSS

SEQ ID NO: 25736 - protein, 130 aa, Artificial Sequence
  source: /note="Description of Artificial Sequence: Synthetic polypeptide"
AEVQLLEQSGAEVKKPGASVKVSCKASGYTFTGYYMHWVRQAPGQGLEWMGWINPESGATNYAQNFQGRVTMTTDTSMRTAYIEVSRLRSDDTAVYFCARGGAFCTGGTCYFAIYGMDVWGQGTAVIVSS

SEQ ID NO: 25737 - protein, 121 aa, Artificial Sequence
  source: /note="Description of Artificial Sequence: Synthetic polypeptide"
AEVQLLESGGGLVKPGGSLRLSCAASGFTFSNAWMSWVRQAPGKGLEWVGRIKSKTDGGTIDYAAPVKGRFTISRDDSKNTLYLQMNSLKTEDTAVYYCTTWDGDHAVDYWGQGTLVTVSS

SEQ ID NO: 25738 - protein, 120 aa, Artificial Sequence
  source: /note="Description of Artificial Sequence: Synthetic polypeptide"
AEVQLLESGPGLVKPSETLSLTCTVSTGSISGYFWSWIRQPPGKGLEWIAYIHNSGNTNYNPSLRSRVTVSIDTSKNQFSLKLTSVTAADTAVYYCARDGGGWDTYLDSWGQGFLVTVSS

SEQ ID NO: 25739 - protein, 120 aa, Artificial Sequence
  source: /note="Description of Artificial Sequence: Synthetic polypeptide"
AEVQLLESGPGLVKPSETLSLTCTVSGGSISDYYWSWIRQPPGKGLEWIGHTYDNGGTKYNPSLKSRASISVDTSKNQVSLRLTSVTAADTAVYYCATAFLDNSGWYTFDSWGQGSLVTV

SEQ ID NO: 25740 - protein, 121 aa, Artificial Sequence
  source: /note="Description of Artificial Sequence: Synthetic polypeptide"
AEVQLLEQSGGGVVQPGRSLRLSCAASGFTFSTYAMHWVRQAPGKGLEWVAVISHDGSNKFYADSVKGRFTISRDSSKNTLYLQMNSLRPGDTAVYYCSRWDRRAEYFQDWGQGTLVTVSS

SEQ ID NO: 25741 - protein, 118 aa, Artificial Sequence
  source: /note="Description of Artificial Sequence: Synthetic polypeptide"
AEVQLLESGAGVVQPGKSLTLSCVGSGFTFSIYAMHWVRQAPGKGLEWVAVLSSDGSNDYYADSVKGRFSIFRDTSKNSLNLLMNNVRGEDTAVYYCARDGDGSFFYWGQGTLVTVSS

SEQ ID NO: 25742 - protein, 118 aa, Artificial Sequence
  source: /note="Description of Artificial Sequence: Synthetic polypeptide"
AEVQLLEQSGAEVKKPGASVKVSCKASGYMFTCYYMHWVRQAPGQGLEWMGMVNPTGGSSSYAQKFQGRVTMTKGHVTSTVYMELSSLRSEDTAVYYCATGMVRGDEWGQGTLVTVSS

SEQ ID NO: 25743 - protein, 126 aa, Artificial Sequence
  source: /note="Description of Artificial Sequence: Synthetic polypeptide"
AEVQLLEQSGGGLVQPGGSLRLSCTASGFTLTDYSMDWVRQAPGKGPEWVGRSRNKANIYTTEYAASVKGRFVISRDDSENSVYLQMNNVKMDDTAVYYCARGEGIFYGSGSLDLWGQGAVVTVSS

SEQ ID NO: 25744 - protein, 126 aa, Artificial Sequence
  source: /note="Description of Artificial Sequence: Synthetic polypeptide"
AEVQLLEQSGGDLVKPGGSLRLSCAASGFTFTDYYMNWIRQAPGKGLEWIAYISIGSDDTKYAASVKGRFSISRDNAKNSLYLQMNSLRVEDTAVYYCGRGGGYCSGGNCYSSDYWGQGALVTVSS

SEQ ID NO: 25745 - protein, 131 aa, Artificial Sequence
  source: /note="Description of Artificial Sequence: Synthetic polypeptide"
AEVQLLEQSGGGLVQPGRSLRLSCAASGFTFDDYAMHWVRQTPGKGLEWVSGIGWNSGTIEYADSVKGRFTISRDNAKNSLYLQMNSLRPEDTALYYCAKDLHSFGYCSGRSCYFHPFDYWGQGTLVTVSS

SEQ ID NO: 25746 - protein, 118 aa, Artificial Sequence
  source: /note="Description of Artificial Sequence: Synthetic polypeptide"
AEVQLLESGGGLVQPGRSLRLSCAASGFTFSNSDMHWVRQAPGKGLEWVTVSSRDGYDNYYADSVRGRFTISRDNSKNTLYLQMNTLRAEDTAVYYCAKRRGYAFDIWGQGTMVTVSS

SEQ ID NO: 25747 - protein, 128 aa, Artificial Sequence
  source: /note="Description of Artificial Sequence: Synthetic polypeptide"
AEVQLLEQSGGGLVKPGGSLRLSCTASGFTFSGFTFSDHYMSWIRQAPGKGLELVSYIISNGYTNYPDSVKGRFTVSRDNARKSLYLQMNSLRVEDTAIYYCARGLSPSIAGDGFDIWGQGTMVTVSS

SEQ ID NO: 25748 - protein, 116 aa, Artificial Sequence
  source: /note="Description of Artificial Sequence: Synthetic polypeptide"
AEVQLLESGPRLVKPSQTLSLTCTVSGDSLNNASHYWAWIRQPAGKGLEWIGRIHRGGSTNYNPSLQSRVTISMDESKNQFSLRLNSVTAADTAVYYCARDPPKAWGPGILVTVSS

SEQ ID NO: 25749 - protein, 121 aa, Artificial Sequence
  source: /note="Description of Artificial Sequence: Synthetic polypeptide"
AEVQLLESGAEVKKPGASVTVSCKASGYSFSDYYIHWVRQAPGQGLEWMGIINPSAGTTTYKQKFQHRVTLTRDTSTNTAYMKLYNLTPDDTAIFFCARGSGGSRSEYDYWGQGTLVTVSS

SEQ ID NO: 25750 - protein, 121 aa, Artificial Sequence
  source: /note="Description of Artificial Sequence: Synthetic polypeptide"
AEVQLLESGGEVKKPGSSVKVSCKASGGPFSSYAIHWVRQAPGQGLEWMGAIIPFLGRAKYAQKFEGRVTITADGSMSTAYMEVSSLRSDDTAMYYCARDRGELLLRMDVWGQGTAVTVSS

SEQ ID NO: 25751 - protein, 128 aa, Artificial Sequence
  source: /note="Description of Artificial Sequence: Synthetic polypeptide"
AEVQLLESGGGVVQPGRSLRLSCAASGFTLSTYAMHWVRQAPGRGLEWVAVISYDGDHKFYADSMKGRFAISRDTSTNTLYLEVNSLKIEDTAVYYCARDRDRRGGYVFSTTGGLDSWGQGTLVTVSS

SEQ ID NO: 25752 - protein, 123 aa, Artificial Sequence
  source: /note="Description of Artificial Sequence: Synthetic polypeptide"
AEVQLLEQSGAEVKKPGESLKISCRASGYSFSLFWVAWVRQMPGQGLEWMAIIYPGDSDTTYSPSFEGQVNVSVDKPISTAYLQWSSLKASDTAMYYCARRRSSDRRDAFDIWGPGTMVTVSS

SEQ ID NO: 25753 - protein, 128 aa, Artificial Sequence
  source: /note="Description of Artificial Sequence: Synthetic polypeptide"
AEVQLLESGPGLVQPSQTLSLTYAISGDSVSSNSAAWTWIRQSPSRGLEWLGMTYYRSQWYHEYAVSLKSRITINADTSNNQFSLQVNSVTPEDTALYYCARARFVGDTTGYYTFDYWGQGTLVTVSS

SEQ ID NO: 25754 - protein, 127 aa, Artificial Sequence
  source: /note="Description of Artificial Sequence: Synthetic polypeptide"
AEVQLLESGGGVVQPGRSLKLSCTASTFTFTNYAMHWVRQAPGKGLEWVALISNDGSKTYYTDSVRGRFTISRDNSKNTLFLQMNSLRTEDTAVYHCARVKLQGSFNVYYYYGLDVWGQGTTVTVSS

SEQ ID NO: 25755 - protein, 118 aa, Artificial Sequence; identical to SEQ ID NO: 25746
  source: /note="Description of Artificial Sequence: Synthetic polypeptide"

SEQ ID NO: 25756 - protein, 109 aa, Artificial Sequence
  source: /note="Description of Artificial Sequence: Synthetic polypeptide"
AELTQSPSSLSASVGDRVTITCRASQGISRYLAWFQQRPGKAPKSLIYAASHLQSGVPSRFSASGSGTEFTLSISSLQPEDFATYYCQQYDTYPYTFGQGTKLEIKRTV

SEQ ID NO: 25757 - protein, 124 aa, Artificial Sequence
  source: /note="Description of Artificial Sequence: Synthetic polypeptide"
QVQLVESGGGVVQPGRSLRLSCAASGFILSSYGMHWVRQAPGKGLEWVAVIWYDGNNKYYADSVKGRFTISRDNSKNTLYLQMNSLRAEDTAVYYCARDIFTMVRGVFIYFDYWGQGTLVTVSS

SEQ ID NO: 25758 - protein, 124 aa, Artificial Sequence
  source: /note="Description of Artificial Sequence: Synthetic polypeptide"
QVQLVESGGGVVQPGRSLRLSCAASGFTFSSYGMHWVRQAPGKGLEWVAVIWLDGSNTYYADSVKGRFTISRDNSKNTLFLQMNSLRAEDTAVYYCARDIFTVARGVIIYFDYWGQGTLVTVSS

SEQ ID NO: 25759 - protein, 124 aa, Artificial Sequence
  source: /note="Description of Artificial Sequence: Synthetic polypeptide"
QVQLVESGGGVVQPGRSLRLSCAASGFTFSNYGMHWVRQAPGKGLEWVAVIWFDGNNKYYADSVKGRFTISRDNSKNTLYLQMNSLRAEDTAVYYCARDIFTMDRGVFIYFDYWGQGTLVTVSS

SEQ ID NO: 25760 - protein, 124 aa, Artificial Sequence
  source: /note="Description of Artificial Sequence: Synthetic polypeptide"
QVQLVESGGGVVQPGRSLRLSCAASGFTFSSYGMHWVRQAPGKGLEWVAVIWYDESNKYYADSVKGRFTISRDNSKNTLYLQMNSLRAEDTAVYYCARDIFTMVRGVFIYFDYWGQGTLVTVSS

SEQ ID NO: 25761 - protein, 124 aa, Artificial Sequence
  source: /note="Description of Artificial Sequence: Synthetic polypeptide"
QVQLVESGGGVVQPGRSLRLSCAASGFTFSSYGMHWVRQAPGKGLEWVAVIWFDGNNKYYADSMKGRFTISRDNSKNTLYLQMNSLRAEDTAVYYCARDIFTMVRGVFIYFDYWGQGTLVTVSS

SEQ ID NO: 25762 - protein, 124 aa, Artificial Sequence
  source: /note="Description of Artificial Sequence: Synthetic polypeptide"
QVQLVESGGGVVQPGRSLRLSCAASGFTLSSYGMHWVRQAPGKGLEWVAVIWYDGNNKYYADSVKGRFTISRDNSKNTLYLQMDSLRAEDTAVYYCARDIFTMVRGVFIYFDYWGQGTLVTVSS

SEQ ID NO: 25763 - protein, 124 aa, Artificial Sequence
  source: /note="Description of Artificial Sequence: Synthetic polypeptide"
QVQLVESGGGVVQPGRSLRLSCAASGFTFSSYGMHWVRQAPGKGLEWVAVIWFDGNNKYYADSVKGRFTISRDNSKNTLYLQMNSLRAEDTAVYYCARDIFTMVRGVFIYFDYWGQGTLVTVSS

SEQ ID NO: 25764 - protein, 124 aa, Artificial Sequence
  source: /note="Description of Artificial Sequence: Synthetic polypeptide"
QVQLVESGGGVVQPGRSLRLSCAASGFTFSSYGMHWVRQAPGKGLEWVAVIWYDENNKYYADSVKGRFTISRDNSNNTLYLQMNSLRAEDTAVYYCARDIFTMVRGVFIYFDYWGQGTLVTVSS

SEQ ID NO: 25765 - protein, 124 aa, Artificial Sequence
  source: /note="Description of Artificial Sequence: Synthetic polypeptide"
QVQLVESGGGVVQPGRSLRLSCAASGFTLSSYGMHWVRQAPGKGLEWMAVIWYDGNNKYYADSVKGRFTISRDNSKNTLYLQMNSLRAEDTAVYYCARDIFTMVRGVFIYFDYWGQGTLVTVSS

SEQ ID NO: 25766 - protein, 123 aa, Artificial Sequence
  source: /note="Description of Artificial Sequence: Synthetic polypeptide"
QVQLVQSGAEVKKPGSSVKVSCEASGGTLSNYVITWVRQAPGQGLEWMGGFIPTFRTAMYAQGFQGRVTITADESTSIAYMELTNLRSEDTAVYYCARGPLSRGYYDYWGQGTLVTVSSGSTG

SEQ ID NO: 25767 - protein, 127 aa, Artificial Sequence
  source: /note="Description of Artificial Sequence: Synthetic polypeptide"
QVQLVQSGSEVKKPGSSVKVSCKASGGTFNIYTVNWVRQAPGQGLEWMGRIIPMLGSADYAQRFQGRVTISADKSTSTAYMELRNLKSEDTAVYYCARSLPREMFFRDDAFDIWGQGTMVTVSSGST

SEQ ID NO: 25768 - protein, 159 aa, Artificial Sequence
  source: /note="Description of Artificial Sequence: Synthetic polypeptide"
LPREMFFRDDAFDIWGQGTMVTVSSGSTQVQLVQSGAEVKKPGSSVKVSCKASGTSFNRYTFAWVRQAPGQGLEWVGTIIPIVGLTNYAEKFQGRVSITADKSTSTTYMELSSLRSEDTAVYFCARKVEFWLGEIAPNKFDVFDLWGQGTMVTVSSGST

SEQ ID NO: 25769 - protein, 132 aa, Artificial Sequence
  source: /note="Description of Artificial Sequence: Synthetic polypeptide"
EVQLVQSGAEVKKPGSSVKVSCKASGDTFSSYSIHWVRQAPGQGLEWMGRIIPIVGLVDYAQMFQGRVTISADRSTNTVYMDLSNLRSEDTAIYYCARSLGCPNGVCHGPRAADYFDYWGQGTLVTVSSGST

SEQ ID NO: 25770 - protein, 132 aa, Artificial Sequence
  source: /note="Description of Artificial Sequence: Synthetic polypeptide"
QVQLVESGAEVKKPGSSVKVSCKASGDTFSSYSIHWVRQAPGQGLEWMGRIIPIVGLVDYAQMFQGRVTISADRSTNTVYMDLSNLRSEDTAYYCARASLGCPNGVCHGPRAADYFDYWGQGTLVTVSSGST

SEQ ID NO: 25771 - protein, 127 aa, Artificial Sequence
  source: /note="Description of Artificial Sequence: Synthetic polypeptide"
QVQLVQSGAEVKKPGSSVKVSCKASGGTFSLNSLSWVRQAPGQGLEWMGTIIPIVGIANYAQKFQGRVTITADKSTGTAYMDLSSLSDDTAVYFCARELYSGTGFFRLEALDYWGQGTLVTVSSGST

SEQ ID NO: 25772 - protein, 119 aa, Artificial Sequence
  source: /note="Description of Artificial Sequence: Synthetic polypeptide"
QVQLQQSGAEVKKPGSSVKVSCEASGGTLSNYVITWVRQAPGQGLEWMGGFIPTFRTAMYAQGFQGRVTITADESTSIAYMELTNLRSEDTAVYYCARGPLSRGYYDYWGQGTLVTVSS

SEQ ID NO: 25773 - protein, 119 aa, Artificial Sequence
  source: /note="Description of Artificial Sequence: Synthetic polypeptide"
QVQLVQSGAEVKKPGSSVKVSCEASGGTLSNYVITWVRQAPGQGLEWMGGFIPTFRTAMYAQGFQGRVTITADESTSIAYMELTNLRSEDTAVYYCARGPLSRGYYDYWGQGTLVTVSS

SEQ ID NO: 25774 - protein, 119 aa, Artificial Sequence
  source: /note="Description of Artificial Sequence: Synthetic polypeptide"
QVTLKESGAEVKKPGSSVKVSCEASGGTLSNYVITWVRQAPGQGLEWMGGFIPTFRTAMYAQGFQGRVTITADESTSIAYMELTNLRSEDTAVYYCARGPLSRGYYDYWGQGTLVTVSS

SEQ ID NO: 25775 - protein, 112 aa, Artificial Sequence
  source: /note="Description of Artificial Sequence: Synthetic polypeptide"
QIQLVQSGPELKKPGETVKISCKASGYSFTDYSMHWMKQTPGKGLKWMGWINTETGQPTYADDFKGRFAFSLETSASTAYLQINNLKNEDTATYFCALWDYWGQGTTLTVSS

SEQ ID NO: 25776 - protein, 118 aa, Artificial Sequence
  source: /note="Description of Artificial Sequence: Synthetic polypeptide"
QVQLQQPGAELVKPGTSVKLSCKASGYTFTSYWMHWVKLRPGQGFEWIGEINPRYGDTSYNERFKRKATLTVDKSSSTAYMQLSSLTSEDSAVYYCSTDDYDRGFAYWGQGTLVTVSA

SEQ ID NO: 25777 - protein, 115 aa, Artificial Sequence
  source: /note="Description of Artificial Sequence: Synthetic polypeptide"
QLQQFGAELVKPGASVKISCKASGYTFTDYNMDWVKQSLGKSLEWIGDINPNDDSTNYNQKFKGKATLTVDKSSRTAYMELRSLTSEDTAVYYCAREGYWYFDVWGAGTTVTVSS

SEQ ID NO: 25778 - protein, 118 aa, Artificial Sequence
  source: /note="Description of Artificial Sequence: Synthetic polypeptide"
QVTLKESGPGILQPSQTLSLTCSFSGFSLSTYGIGVGWIRQPSGKGLEWLAHIWWNDDNYYNTALKSRLTISKDTSNNQVFLKIASVDTVDTATYYCVRIGGPAMDYWGQGTSVTVSS

SEQ ID NO: 25779 - protein, 120 aa, Artificial Sequence
  source: /note="Description of Artificial Sequence: Synthetic polypeptide"
QVQLQQPGAELVMPGASVKMSCKASGYTFTDYWMHWVKQRPGQGLEWIGAIDTSDSQTDYNQKYRGKATLTVDESASTAYMQLNSLTSEDSAVYYCATIYYDYDGSFDQWGQGTTLTVSS

SEQ ID NO: 25780 - protein, 105 aa, Artificial Sequence
  source: /note="Description of Artificial Sequence: Synthetic polypeptide"
  MOD_RES (50)..(50): Any amino acid
  MOD_RES (60)..(60): Any amino acid
FEVQLEESGGGLVQPGGSRKLSCAASGFTFSSFGMHWVRQAPEKGLEWVXYISSGSSTLXYADTVKGRFTISRDNPKNTLFLQMKLPSLCYGLLGPRDHGHRLLK

SEQ ID NO: 25781 - protein, 115 aa, Artificial Sequence
  source: /note="Description of Artificial Sequence: Synthetic polypeptide"
FEVQLEESGPGLVKPSQSLSLTCTVTGYSITSDYAWSWIRQFPGNKLEWMAYIGYSGNTSYNPSLKSRISVTRDTTKNQFFLRLKSVTTEDTATYYCSAVDGSYWGQGTTVTVSS

SEQ ID NO: 25782 - protein, 154 aa, Artificial Sequence
  source: /note="Description of Artificial Sequence: Synthetic polypeptide"
MELVWTSFPLCLYSVIFFLMAVVTGVNSEVLLQQSGSDLVRPGALVNLSCKASGFNVQDFYIHWVKQRPEQGLEWIGWIDPDIGHTIYDPKFQGKASLAVDTSSNTAYLQLSSLTSGDTAVYYCARGLLTFFDVWGAGTTVTVSSPPSVYPLAP

SEQ ID NO: 25783 - protein, 141 aa, Artificial Sequence [sequence omitted]

SEQ ID NO: 25784 - protein, 121 aa, Artificial Sequence
  source: /note="Description of Artificial Sequence: Synthetic polypeptide"
  MOD_RES (34)..(34): Any amino acid
  MOD_RES (83)..(83): Any amino acid
QVQLVESGGGLVQPGGSLRLSCAASGFTFSSYAXSWFRQAPGKEREIVSAVSGSGGSTYYADSVRGRFTISRDNSKNTLYLQXNSLRAEDTAVYYCAREPRIPRPPSFDYWGQGTLVTVSS

SEQ ID NO: 25785 - protein, 107 aa, Artificial Sequence
  source: /note="Description of Artificial Sequence: Synthetic polypeptide"
VKLQESGPELVKPGASVKISCKASGYSFTNYYINWVKQRPGQGLEWIGWIFPGGGNTKYSEKFKDKATVTADTSSSTAYMQLSGLTSEDSAVYFCSRDIYGDAWFAY

SEQ ID NO: 25786 - protein, 129 aa, Artificial Sequence; identical to SEQ ID NO: 25679
  source: /note="Description of Artificial Sequence: Synthetic polypeptide"

SEQ ID NO: 25787 - protein, 129 aa, Artificial Sequence
  source: /note="Description of Artificial Sequence: Synthetic polypeptide"
EVQLVESGGGLVKPGGSLRLSCSASGFSLTKYKMTWVRQAPGKGLEWVSSISSTSRDIDYADSVKGRFTISRDNAKNSLFLQMSSLRVDDTAVYYCTRDGWLWGWDVRSNYYYNALDVWGQGTTVTVSS

SEQ ID NO: 25788 - protein, 117 aa, Artificial Sequence; identical to SEQ ID NO: 25681
  source: /note="Description of Artificial Sequence: Synthetic polypeptide"

SEQ ID NO: 25789 - protein, 117 aa, Artificial Sequence; identical to SEQ ID NO: 25681
  source: /note="Description of Artificial Sequence: Synthetic polypeptide"

SEQ ID NO: 25790 - protein, 117 aa, Artificial Sequence; identical to SEQ ID NO: 25681
  source: /note="Description of Artificial Sequence: Synthetic polypeptide"

SEQ ID NO: 25791 - protein, 120 aa, Artificial Sequence
  source: /note="Description of Artificial Sequence: Synthetic polypeptide"
QVQLQQSGPELVKPGASVKISCKASGHTFTSYDINWVKQRPGQGLEWIGWIYPGDGSTKYNEKFKGKATLTADKSSSTAYMQLSSLTSENSAVYFCARRDYGYSYAMDYWGQGTSVTVSS

SEQ ID NO: 25792 - protein, 131 aa, Artificial Sequence
  source: /note="Description of Artificial Sequence: Synthetic polypeptide"
EVQLLESGPGLVKPSQTLSLTCAVSGAFMTSDYLYWSWLRQPPGKGPEWIGGIYTTGRSHYNPSLRGRATLSVDTSKNQFSLELNSVTAADTAVYYCARGQYHNWGPSLFDYYNYYYMDVWGKGTTVTVSS

SEQ ID NO: 25793 - protein, 432 aa, Artificial Sequence
  source: /note="Description of Artificial Sequence: Synthetic polypeptide"
EVQLVESGGGLVQPGGSLRVSCEVSGFTFSNNWMHWVRQAPGKGPVWVSRISTDGMSTSYAEFVKGRFTISRDNARNTLYLQMNSLRDEDTAVYYCVRGSTYYFGSGSLNFWGQGTTVIVSSASTKGPSVFPLAPSSKSTSGGTAALGCLVKDYFPEPVTVSWNSGALTSGVHTFPAVLQSSGLYSLSSVVTVPSSSLGTQTYICNVNHKPSNTKVDKRVEPKSCDKTHTCPPCPAPELLGGPSVFLFPPKPKDTLMISRTPEVTCVVVDVSHEDPEVKFNWYVDGVEVHNAKTKPREEQYNSTYRVVSVLTVLHQDWLNGKEYKCKVSNKALPAPIEKTISKAKGQPREPQVYTLPPSREEMTKNQVSLTCLVKGFYPSDIAVEWESNGQPENNYKTTPPVLDSDGSFFLYSKLTVDKSRWQQGNVFSCSV

SEQ ID NO: 25794 - protein, 232 aa, Artificial Sequence
  source: /note="Description of Artificial Sequence: Synthetic polypeptide"
LESGPGLVRPSETLSLTCSVSGGSITGSSYYWGWLRQTPGKGLEWIGSIYSTSGTTYYNPALESRVTMSVDTSQNRISMRLRSVTAADTAMYYCARPTAHRNVRMVPGQDAFEVWGRGTLVTVSAASTKGPSVFPLAPSSKSTSGGTAALGCLVKDYFPEPVTVSWNSGALTSGVHTFPAVLRSSGLYSLSSVVTVPSSSLGTQTYICNVNHKPSNTKVDKKVEPKSCDKTS

SEQ ID NO: 25795 - protein, 132 aa, Artificial Sequence
  source: /note="Description of Artificial Sequence: Synthetic polypeptide"
EVQLLEQSGAEVRKPGSSVKVSCKASGGTFSGHVITWVRQAPGQGLEWMGESIPIFGSANYAQNYAQKFRDRVSIIADESTSTSFIELSNLRSDDTAVYYCARDPPRYCSAGRCYPGFFQQWGQGTLVTVSS

SEQ ID NO: 25796 - protein, 127 aa, Artificial Sequence
  source: /note="Description of Artificial Sequence: Synthetic polypeptide"
EVQLLEQSGAEVKKPGSSVKVSCQVFGDTFSRYTIQWLRQAPGQGPEWMGNIIPVYNTPNYAQKFQGRLSITADDSTSTAYMELSSLRSEDTAVYFCARVVIPNAIRHTMGYYFDYWGQGTLVTVSS

SEQ ID NO: 25797 - protein, 128 aa, Artificial Sequence
  source: /note="Description of Artificial Sequence: Synthetic polypeptide"
EVQLLEQSGSSVKVSCKAHVISWVRQAMGGSISFFGFQGRVSITAYMELSSLRCAKDPPRFGFFQQWGQSCGAEVKKPGSGGTFSGPGQGLEWTSNSAQKDESASTAEDTAIYYSGGNCYPTLVTVSS

SEQ ID NO: 25798 - protein, 106 aa, Artificial Sequence
  source: /note="Description of Artificial Sequence: Synthetic polypeptide"
EVQLLESGGGVVQPGRSLRLSCAASGFTFKTYGMHWVRQAPGKGLEWVAGISFDGSNQYYADKGRFIVSRDNSRDTLQMSSLRLEDTAVYATEGSPFGENWGQGTL

SEQ ID NO: 25799 - protein, 132 aa, Artificial Sequence
  source: /note="Description of Artificial Sequence: Synthetic polypeptide"
EVQLLESGGGVVQPSLRLSCAASGFTFSGMHWVRQAPGKGLEAGIWFDGSNQYYSDSVVFYCYLGRAYWVSVKGRFTVSRDNSRNTLFLQMNSLRPEATEVLFGSNWGQGTLVITDTAVYYCKGRYYLEVSS

SEQ ID NO: 25800 - protein, 104 aa, Artificial Sequence
  source: /note="Description of Artificial Sequence: Synthetic polypeptide"
EVQLLESGPGTLSLTCTVSGHWWSWVRQPPLVKPSGGSIRSSGKGLEWIGEVFFSGSTIYNPSLNDRVFMSVDLRLSSVTAAARSPIKMNFDIWGQGTQLKDGV

SEQ ID NO: 25801 - protein, 126 aa, Artificial Sequence
  source: /note="Description of Artificial Sequence: Synthetic polypeptide"
EVQLLESGSEVKKPGSSVKVSCRASGGSFRSYNFNWVRQAPGQGLEWMGGIIPMFGTANYAQKFQGRVTITADESTATGYMELSSLRSEDTAVYYCAMPYPKHCSRGSCWGWFDPWGQGTLVTVSS

SEQ ID NO: 25802 - protein, 107 aa, Artificial Sequence
  source: /note="Description of Artificial Sequence: Synthetic polypeptide"
DIQMTQSPSTLSASIGDRVTITCRASLNILTWLAWYQQKPGKAPKLLIYEASSLESGVPSRFSGSGSGTQFTLTISSLQPDDFATYYCQQSNTPWTFGQGTKVEIKR

SEQ ID NO: 25803 - protein, 119 aa, Artificial Sequence
  source: /note="Description of Artificial Sequence: Synthetic polypeptide"
LLEQSGAEVKMPGATVKVSCQSSRYTFTSYGIGWVRQAPGQGLEWMGWISGYTHETKYAQSFQGRVTMTAETSTGTAYMELRSLRSDDTATYYCARDGGGRVVVPPTHLRAFDVWGQGT

SEQ ID NO: 25804 - protein, 124 aa, Artificial Sequence
  source: /note="Description of Artificial Sequence: Synthetic polypeptide"
LLESGPGLVKPSQTLSLTCTVSGVSISYGGRGVSYWGWVRQSPGKGLEWIGHIYYFGDTFYNPSLNNRATISIDSSKNQFSLKLKSVTASDTALYFCARSTLQYFDWLLTREAAYSIDFWGQGI

SEQ ID NO: 25805 - protein, 116 aa, Artificial Sequence
  source: /note="Description of Artificial Sequence: Synthetic polypeptide"
LLEQSGAEVKKPGSSVKVSCKASGDHYGINWVRQAPGQGLEWMGGIIPVFGTTTYAQKFQGRATITADDSTGTAFLELTRLTFDDTAVYFCATPHQLHVLRGGKALSPWDYWGQGT

SEQ ID NO: 25806 - protein, 120 aa, Artificial Sequence
  source: /note="Description of Artificial Sequence: Synthetic polypeptide"
LLEQSGSEVKVPGSSLKVSCKTSGGTFSTYTFSWVRQAPGQGLEWMGGITPIIGIANYARNFQDRVTITADESTSTVYMEVRRLRSEDTAVYYCAKTSEVTATRGRTFFYSAMDVWGQGT

SEQ ID NO: 25807 - protein, 118 aa, Artificial Sequence
  source: /note="Description of Artificial Sequence: Synthetic polypeptide"
LLEQSGSEVKKPGSSVRVSCTTSGGTLSDYGFNWLRQAPGQGPEWMGGIIPLFRRTTYGQKFQGRLTITADESTGATYMELSSLRSDDTAVYYCAREKVSVLTGGKSLHYFEYWGKGT

SEQ ID NO: 25808 - protein, 118 aa, Artificial Sequence
  source: /note="Description of Artificial Sequence: Synthetic polypeptide"
LLEESGAEVKKPGSSVKVSCKTSGDTFRYGITWVRQAPGQGLEWMGQIMPTFATATYAQRFQGRVTISADESTSTAYLEVRSLRSEDTAVYYCATPRQVTILRGPKALSPWDYWGQGT

SEQ ID NO: 25809 - protein, 127 aa, Artificial Sequence
  source: /note="Description of Artificial Sequence: Synthetic polypeptide"
QVQLVESGGGVVQPGRSLRLSCVASGFTFSHYAMHWIRQAPGKGLEWVAVVSYDGSNKFYVDSVKGRFTISRDNSKNTVYLQMNSLRAVDTAVYYCARDPGVVTGSWSDSDGPPIHWGQGTLVTVSS

SEQ ID NO: 25810 - protein, 104 aa, Artificial Sequence
  source: /note="Description of Artificial Sequence: Synthetic polypeptide"
AELVRPGGSVKLSCKASGYSFTTYWMNWVKQRPGQGLEWIGMIQPSDSETRLNQKFKDKATLTLDRSSSTVYMQLSSPTSDDSAVYYCARTGRGDAWLTYWGQG

SEQ ID NO: 25811 - protein, 101 aa, Artificial Sequence
  source: /note="Description of Artificial Sequence: Synthetic polypeptide"
AELVKPGASVKLSCTASGFNIKDTYMHWIKQRPEQGLEWIGRIAYADGNIKIDPKFQGKATITTVTSSNTAYLQLSSLTSEDTAVYYCAYYGLLFAYWGQG

SEQ ID NO: 25812 - protein, 240 aa, Artificial Sequence
  source: /note="Description of Artificial Sequence: Synthetic polypeptide"
MELVWTSFPLCLYSVIFFLMAVVTGVNSEVLLQQSGSDLVRPGALVNLSCKASGFNVQDFYIHWVKQRPEQGLEWIGWIDPDIGHTIYDPKFQGKASLAVDTSSNTAYLQLSSLTSEDTAVYYCARGLLTFFDVWGAGTTVTVSSASTKGPSVFPLAPSSKSTSGGTAALGCLVKDYFPEPVTVSWNSGALTSGVHTFPAVLQSSGLYSLSSVVTVPSSSLGTQTYICNVNHKPSNTKVD

SEQ ID NO: 25813 - protein, 227 aa, Artificial Sequence
  source: /note="Description of Artificial Sequence: Synthetic polypeptide"
KRVEPKSCDKTHTCPPCPAPELLGGPSVFLFPPKPKDTLMISRTPEVTCVVVDVSHEDPEVKFNWYVDGVEVHNAKTKPREEQYNSTYRVVSVLTVLHQDWLNGKEYKCKVSNKALPAPIEKTISKAKGQPREPQVYTLPPSREEMTKNQVSLTCLVKGFYPSDIAVEWESNGQNNYKTTPPVLDSDGFLYSKLTVDKSRWQNVFSCSVMHEALHNTQKSLSLSPGK

SEQ ID NO: 25814 - protein, 117 aa, Artificial Sequence
  source: /note="Description of Artificial Sequence: Synthetic polypeptide"
EVQLVQSGAEVKKPGATVKISCKVSGFNVQDFYIHWVKQAPGKGLEWIGWIDPDIGHTIYDPKFQGKATITVDTSTDTAYMELSSLRSEDTAVYYCARGLLTFFDVWGQGTLVTVSS

SEQ ID NO: 25815 - protein, 135 aa, Artificial Sequence
  source: /note="Description of Artificial Sequence: Synthetic polypeptide"
STDTAYTAVYYCWGQGTLQVQLVQSGAEVKKPGASVKVSCKASGFNVQDFYIHWVRQAPGQGLEWIGWIDPDIGHTIYDPKFQGKATLTVDESTSTAYMELSSLRSEDTAVYYCARGLLTFFDVWGQGTLVTVSS

SEQ ID NO: 25816 - protein, 117 aa, Artificial Sequence
  source: /note="Description of Artificial Sequence: Synthetic polypeptide"
EVLLQQSGSDLVRPGALVNLSCKASGFNVQDFYIHWVKQRPEQGLEWIGWIDPDIGHTIYDPKFQGKASLAVDTSSNTAYLQLSSLTSEDTAVYYCARGLLTFFDVWGAGTTVTVSS

SEQ ID NO: 25817 - protein, 224 aa, Artificial Sequence
  source: /note="Description of Artificial Sequence: Synthetic polypeptide"
EVQLLEQSGPSLVKPSQTLSLTCSVTGDSITSGYWNWIRKFPGNKLEYMGYISYSGSTYYNLSLRSRISITRDTSKNQYYLQLNSVTTEDTATYYCALITTTTYAMDYWGQGTTVTVSSASTKGPSVFPLAPSSKSTSGGTAALGCLVKDYFPEPVTVSWNSGALTSGVHTFPAVLQSSGLYSLSSVVTVPSSSLGTQTYICNVNHKPSNTKVDKKVEPKSCGS

SEQ ID NO: 25818 - protein, 149 aa, Artificial Sequence
  source: /note="Description of Artificial Sequence: Synthetic polypeptide"
AMEVQLLEQSGAEVKKPGSSVKVSCQVFGDTFSRYTIQWLRQAPGQGPEWMGNIIPVYNTPNYAQKFQGRLSITADDSTSTAYMELSSLRSEDTAVYFCARVVIPNAIRHTMGYYFDYWGQGTLVTVSSGTGGSGGGGSGGGGSGGGAS

SEQ ID NO: 25819 - protein, 233 aa, Artificial Sequence
  source: /note="Description of Artificial Sequence: Synthetic polypeptide"
EVQLLEQSGAEVKKPGSSVKVSCETSGGTFDNYALNWVRQAPGQGLEWIGGVVPLFGTTRNAQKFQGRVTISDDKSTGTGHMELRSLRSEDTAVYYCVRSVTPRYCGGGFCYGEFDYWGQGTLVTVSSASTKGPSVFPLAPSSKSTSGGTAALGCLVKDYFPEPVTVSWNSGALTSGVHTFPAVLQSSGLYSLSSVVTVPSSSLGTQTYICNVNHKPSNTKVDKKVEPKSCGS

SEQ ID NO: 25820 - protein, 226 aa, Artificial Sequence
  source: /note="Description of Artificial Sequence: Synthetic polypeptide"
EVQLQESGPGLVKPSETLSLTCTVSGDSITSGYWNWIRQPPGRALEWMGYISYSGSTYYSLSLRSRITISRDTSKNQYSLRLSSVTAADTAMYYCALITTSTYAMDYWGQGTTVTVSSASTKGPSVFPLAPSSKSTSGGTAALGCLVKDYFPEPVTVSWNSGALTSGVHTFPAVLQSSGLYSLSSVVTVPSSSLGTQTYICNVNHKPSNTKVDKKVEPKSCDKTHT

SEQ ID NO: 25821 - protein, 226 aa, Artificial Sequence
  source: /note="Description of Artificial Sequence: Synthetic polypeptide"
EVQLLESGGGVVQPGRSLRLSCTASGFTFNNYGMHWVRQTPGKGLEWLAVIWFDENNKYYADSVRGRFTISRDNSKNTLFLQMNSLKTEDTAMYYCARDISLVRDAFIYFDFWGLGTLVTVSSASTKGPSVFPLAPSSKSTSGGTAALGCLVKDYFPEPVTVSWNSGALTSGVHTFPAVLQSSGLYSLSSVVTVPSSSLGTQTYICNVNHKPSNTKVDKKVEPKSC

SEQ ID NO: 25822 - protein, 226 aa, Artificial Sequence; identical to SEQ ID NO: 25821
  source: /note="Description of Artificial Sequence: Synthetic polypeptide"

SEQ ID NO: 25823 - protein, 157 aa, Artificial Sequence
  source: /note="Description of Artificial Sequence: Synthetic polypeptide"
MEWSWVILFLLSLTAGVDAQGQMQQSGPELVKPGASVKLSCKTTDFTFNRNYISWLRQKPGQSLEWIAWIYAGTGGTKYNQKFTGKAQMTVDTSSHTAYMQFSNLTTEDSAVYYCARYLFDGYYIPLFDYWGQGTTLTVSSAKTTPPPVYPLAPGSL

SEQ ID NO: 25824 - protein, 127 aa, Artificial Sequence
  source: /note="Description of Artificial Sequence: Synthetic polypeptide"
EVQLQASGGGLVQPGGSLRLSCTASGFTDDYYAIGWFRQAPGKEREGVSCITNFDGGTYYADSVKSRFTMSRDNAKNTVYLQMNSLKPEDTAVYYCAADKGLCSWLRAGGKVTFGSWGQGTQVTVSS

SEQ ID NO: 25825 - protein, 129 aa, Artificial Sequence
  source: /note="Description of Artificial Sequence: Synthetic polypeptide"
EVQLQAGGGLAQPGGSLRLSCEASGFSLVNLDTIGWFRQAPGKEREGVSCVSESDGKEYYTDSVKGRFTISRDNAKNTMYLQMDSLNAEDTAVYYCVADSFAQCQPPYSGWNEDEYDYWGQGTQVTVSS

SEQ ID NO: 25826 - protein, 126 aa, Artificial Sequence
  source: /note="Description of Artificial Sequence: Synthetic polypeptide"
EEQLQASGGGLVQAGGSLRLSCTASERALSGLSVGWFRQAPGKERELVAALHRDGDMMYYADFEMGRFTISRDNAKNTVNLLMNSLKPEDTAVYYCAASTQKYYEDLRLLRDYDYWGQGTQVTVSS

SEQ ID NO: 25827 - protein, 123 aa, Artificial Sequence
  source: /note="Description of Artificial Sequence: Synthetic polypeptide"
EVQLQASGGGLVQVGGSLRLSCVARSPSTLAIGWFRQAPGKEREFVAAISWSGGTTHYANSAKGRFTISRDNAKNTIYLQMNMLKPEDTAVYYCAADRFGSGAALTRRVADDWGQGIQVTVSS

SEQ ID NO: 25828 - protein, 217 aa, Artificial Sequence
  source: /note="Description of Artificial Sequence: Synthetic polypeptide"
QSALTQPRSVSGSPGQSVTISCTGTNSDIGNYDYVSWYQQHPGKAPRLIIYDVSERPSGVPNRFSGSKSGNTASLTISGLQAEDESDYFCSSYAGTFTYVVFGGGTKLTVLGQPKAAPSVTLFPPSSEELQANKATLVCLISDFYPGAVTVAWKADSSPVKAGVETTTPSKQSNNKYAASSYLSLTPEQWKSHRSYSCQVTHEGSTVEKTVAPTECS

SEQ ID NO: 25829 - protein, 110 aa, Artificial Sequence
  source: /note="Description of Artificial Sequence: Synthetic polypeptide"
DIQMTQSPLSLPVTPGEPASISCRSSQSLLYSNGYNYLDWYVQKPGQSPQLLIYVGSNRASGVPDRFSGRGSGTDFTLKISRVEAEDVGVYYCMQALQPPYTFDQGTKLE

SEQ ID NO: 25830 - protein, 107 aa, Artificial Sequence
  source: /note="Description of Artificial Sequence: Synthetic polypeptide"
DIQMTQSPASLSTSVGETVTITCRASGNIHNYLAWYQQKQGKSPQLLVYNAKTLADGVPSRFSGSGSGTQFSLKINSLQPEDFGSYYCQHFWSTPFTFGSGTKLEIK

SEQ ID NO: 25831 - protein, 109 aa, Artificial Sequence
  source: /note="Description of Artificial Sequence: Synthetic polypeptide"
AAELTQSPSSLSASVGDRVTITCRASQDISNYLAWYQQKPGKAPKLLIYSASRLQSGVPSRFSGSGSGTDYTLTLSSLHPEDSATYYCHQYHSAPWTFGQGTKVEIKRT

SEQ ID NO: 25832 - protein, 134 aa, Artificial Sequence
  source: /note="Description of Artificial Sequence: Synthetic polypeptide"
MDSQAQVLMLLLLWVSGTCGDIVMSQSPSSLAVSVGEKVTMSCKSSQSLLYSSIQKNYLAWYQQKPGQSPKLLIYWASTRESGVPDRFTGSGSETDFTLTISNVKAEDLAVYYCQQQYYNYPSTGGGTYLEIKR

SEQ ID NO: 25833 - protein, 108 aa, Artificial Sequence
  source: /note="Description of Artificial Sequence: Synthetic polypeptide"
DIQMTQSPASLSASVGETVTITCRASENIYSYLAWYHQKQGKSPQLLVYIAKTLAEGVPSRFSGSGSGTQFSLKIDSLQPEDVGSYYCQHHYGTPYTFGGGTKLEIKR

SEQ ID NO: 25834 - protein, 107 aa, Artificial Sequence
  source: /note="Description of Artificial Sequence: Synthetic polypeptide"
QAGLTQPPSVSVAPGKTARITCGGDNIGRKSVHWYQQKTGQAPVLVVYEDNKRPSGIPERFSGSNSGNTATLTISGTQAMDEADYYCQAWDSSTVVFGGGTKLTVLG

SEQ ID NO: 25835 - protein, 108 aa, Artificial Sequence
  source: /note="Description of Artificial Sequence: Synthetic polypeptide"
EIVLTQSPPSLSASVGDRVTITCQASQDINNNVNWFQQEPGKAPRLLIYDASNLQTGVPSRFSGSGSGTEFTLTISSLQPEDFATYYCQQTSVYPLTFGGGTKVDIKR

SEQ ID NO: 25836 - protein, 114 aa, Artificial Sequence
  source: /note="Description of Artificial Sequence: Synthetic polypeptide"
DIVMTQTPLSLPVTPGEPASISCRSSQSLLHSNGYNYLDWYLQKPGQSPQLLIYLGSKRASGVPDRFSGSGSGTDFTLQISRVEAEDVGVYYCMQSTQFPPYTFGQGTKLEIKR

SEQ ID NO: 25837 - protein, 109 aa, Artificial Sequence
  source: /note="Description of Artificial Sequence: Synthetic polypeptide"
QAVVTQEPSLTVSPGGTVTLTCRSSTGAITTNNFANWFQQKPGQAFRGLIGDTNNRVPGVPARFSGSLLGNKAALTITGAQPEDEAEYYCALWYNNWVFGGGTKLTVLG

SEQ ID NO: 25838 - protein, 109 aa, Artificial Sequence
  source: /note="Description of Artificial Sequence: Synthetic polypeptide"
QAVVTQEPSLTVSPGGTVTLTCRSSTGAITTNNFANWFQQKPGQAFRGLIGDTNNRVPGVPARFSGSLIGDKAALTITGAQPEDEAEYYCALWYNNWVFGGGTKLTVLG

SEQ ID NO: 25839 - protein, 105 aa, Artificial Sequence
  source: /note="Description of Artificial Sequence: Synthetic polypeptide"
EMVMTQSPVTLSVSPGERATLSCRASQSVSSNLAWYQQKPGQPPRLIIYGASTRATDVPARFSGSGSGTEFTLSISSLQSEDFAVYYCQQYHTWPFTFGPGTKVD

SEQ ID NO: 25840 - protein, 107 aa, Artificial Sequence
  source: /note="Description of Artificial Sequence: Synthetic polypeptide"
DIQMTQSPFFLSASVGDRVTITCRASQNIDTHLNWYQYKVGRAPTLLIYTTSSLQSGVPSRFSGSGSGTDFTLTISGLQPEDFATYYCQQSAASPRTFGPGTKVDIK

SEQ ID NO: 25841 - protein, 110 aa, Artificial Sequence
  source: /note="Description of Artificial Sequence: Synthetic polypeptide"
DIQMTQSPSTLSASIGDRVTITCRASQSISSWLPWLAWYQQKPGKAPRLLIYKASLLASGVPSRFSGSGSGTEFTLTISRLQPDDFATYYCQQYSAYPITFGPGTRVDIK

SEQ ID NO: 25842 - protein, 107 aa, Artificial Sequence
  source: /note="Description of Artificial Sequence: Synthetic polypeptide"
DIQMTQSPFLLSASVGDRVTITCRASQNIDTHLNWYQYKVGRAPTLLIYTTSTLQSGVPSRFSGSGSGTDFTLTISGLQPEDFATYYCQQSASSPRTFGPGTKVDIK

SEQ ID NO: 25843 - protein, 107 aa, Artificial Sequence
  source: /note="Description of Artificial Sequence: Synthetic polypeptide"
DIQMTQSPSTLSASVGDRVTITCRASQSVTTYLAWYQQKPGKAPKLLIYKASTLENGVPSRFSGGGSGTEFTLTIDSLQPDDFATYYCQQYNSFAFNFGQGTKVDIK

SEQ ID NO: 25844 - protein, 107 aa, Artificial Sequence
  source: /note="Description of Artificial Sequence: Synthetic polypeptide"
DIQMTQSPFFLSASVGDRVTITCRASQNIETHLNWYQHKLGKAPTLLIYSASSLQSGIPSRFSGSGSGTDFTLTISSLQPEDFATYYCQQSGASPRTFGPGTKVDIK

SEQ ID NO: 25845 - protein, 108 aa, Artificial Sequence
  source: /note="Description of Artificial Sequence: Synthetic polypeptide"
EIVLTQSPATLSLSPGERATLSCRASQSLSGYLAWYQQKPGQAPRLLIYSASNRATGIPARFSGSGSGTDFTLTISSLEPEDFAVYYCQQRSNWPMYTFGQGTKLEIK

SEQ ID NO: 25846 - protein, 109 aa, Artificial Sequence
  source: /note="Description of Artificial Sequence: Synthetic polypeptide"
EIVLTQSPPTLSLSPGERATLSCRASQSIGSYLAWYQQKPGQAPRLLIYHASNRATGIPARFSGSGSGTDFTLTINSLESEDSAVYYCQHRSNWPPLFTFGPGTKVDLK

SEQ ID NO: 25847 - protein, 107 aa, Artificial Sequence
  source: /note="Description of Artificial Sequence: Synthetic polypeptide"
DIQMTQSPSSLSASVGDRVTITCRASQTVSSYLSWYQQKPGKAPKLLIYGASTLQNGVPSRFSGSGSGTHFSLTIRGLQPEDFATYYCQQSYSTPPTFGQGTKVDFK

SEQ ID NO: 25848 - protein, 112 aa, Artificial Sequence
  source: /note="Description of Artificial Sequence: Synthetic polypeptide"
DIVVTQSPASLAVSLGQRATINCKSSQSVLYSSSSKNYIAWYQQKPGQPPRLLIYWASTRQSGVPARFSGSGSGTDFALTISSVQAEDVAVYYCQQYYGAPITFGQGTRLEI

SEQ ID NO: 25849 - protein, 108 aa, Artificial Sequence
  source: /note="Description of Artificial Sequence: Synthetic polypeptide"
DIQMTQSPSTLSASVGDRVTITCRASQSISSYLNWYQQKPGKAPKLLIYAASSLQSGVPSRFSGSGSGTDFTLTISSLQPEDFATYYCQQSYSTPFTFGPGTKVDIKR

SEQ ID NO: 25850 - protein, 108 aa, Artificial Sequence
  source: /note="Description of Artificial Sequence: Synthetic polypeptide"
EIVLTQSPGTLSLSPGESATLSCRASQSVGRTYLAWYQQRPGRAPRLLIYGASTRATDIPDRFSGTGSGTDFTLTISRLEPEDFAVYFCHNYGTIPGTFGQGTKVDIK

SEQ ID NO: 25851 - protein, 110 aa, Artificial Sequence
  source: /note="Description of Artificial Sequence: Synthetic polypeptide"
QSVLTQPPSASGTPGQRVTMSCSGGSSNIGSNPVSWYQQLPGTAPRLLIYTNNERPSGVPDRFSASKSGTSASLAISGLQSEDEAHYYCASWDDSLKGVLFGGGTRLTVL

SEQ ID NO: 25852 - protein, 111 aa, Artificial Sequence
  source: /note="Description of Artificial Sequence: Synthetic polypeptide"
SLFLTQPPSVSATPGQRVTVSCSGSRSNIGNSFVSWYQQRLPGAAPKLLIYDNNKRPSGIPDRFSGSKSGTSATLVITGLQAGDEADYYCGTWDTTLSAGVFGGGTKLTVL

SEQ ID NO: 25853 - protein, 108 aa, Artificial Sequence
  source: /note="Description of Artificial Sequence: Synthetic polypeptide"
SYVLTQPPSVSVAPGQTARITCGGNNIGSKSVHWYQQKPGQAPVMVVYDDSDRPSGIPERFSGSNSGITATLTISRVEAGDEADYYCQVWDSSSDHVVFGGGTKLTVL

SEQ ID NO: 25854 - protein, 108 aa, Artificial Sequence
  source: /note="Description of Artificial Sequence: Synthetic polypeptide"
SYVLTQPTSVSVAPGQTARITCGGSDIGSKSVNWYQQKPGQAPVVVVYDDNERPSGVPERFSGSNSGNTATLTISRVEAGDEAEYYCQVWDTTTDHMIFGGGTKLTVL

SEQ ID NO: 25855 - protein, 108 aa, Artificial Sequence
  source: /note="Description of Artificial Sequence: Synthetic polypeptide"
SYVLTQPPSTSVAPGQTAKISCGGNNIGSESVNWYQQKSGQAPVLVVHDDNERPSGIPERFSGSNSGNTATLTISRVEAGDEADYYCQVCHSSNNHVIFGGGTKLTVL

SEQ ID NO: 25856 - protein, 111 aa, Artificial Sequence
  source: /note="Description of Artificial Sequence: Synthetic polypeptide"
SYVLTQPPSASVAPGQTARITCGGNNIGSLSVNWYQQKSGQAPVMVIDDDNDRPSGIPERFSGSNSGNTATLIISRVEAGDEADYYCQVWDGISNRVVFGGGTKLTVLGQP

SEQ ID NO: 25857 - protein, 112 aa, Artificial Sequence
  source: /note="Description of Artificial Sequence: Synthetic polypeptide"
QSVVTQPPSVSGAPGQRVTISCTGSSSNIGAGFDVHWYQQVLGTAPKLLIYGNNNRPSGVPDRFSGSKSGISASLTISGLQAEDEADYYCQSYDNSLSGHNYVFGTGTKVTV

SEQ ID NO: 25858 - protein, 112 aa, Artificial Sequence
  source: /note="Description of Artificial Sequence: Synthetic polypeptide"
QSALTQPASVSGSPGQSISISCTGARTDIGTYIHVSWHQQHPGKAPKLILFDVSNRPSGVSSRFSGSMSGNTASLTISGLQAEDEADYYCASFTPRYTWVFGGGTKLTVLGQ

SEQ ID NO: 25859 - protein, 108 aa, Artificial Sequence
  source: /note="Description of Artificial Sequence: Synthetic polypeptide"
ELVMTQSPSSLSASVGDRVTITCRASQGIYNSIAWYQQKPGKAPKLLLYSTSTLLSGVPSRFSGSGSGTDYTLTITNLQPEDFATYYCQQYFVTPETFGQGTKVEIKR

SEQ ID NO: 25860 - protein, 108 aa, Artificial Sequence
  source: /note="Description of Artificial Sequence: Synthetic polypeptide"
QSQLTQPPSVSVAPGQTARITCGGDNIGSKSVNWFQQKPGQAPVLVVYDDNERPSGISERFSGSNSGNTATLTISRVEAGDEADYYCQVWDSSSDHVVFGGGTKLTVL

SEQ ID NO: 25861 - protein, 135 aa, Artificial Sequence
  source: /note="Description of Artificial Sequence: Synthetic polypeptide"
MDTRVPAQLLGLLNLWVPGSSGDVVVTQSPLSLPVTLGQPASISCRSSLSLVDSDGNTYLNWFLQRPGQSPRRLIYQLSSRDSGVPDRFSGSGSGTDFTLKISRVEAEDVGVYYCMQGTHWPITFGQPTRLEIKR

SEQ ID NO: 25862 - protein, 127 aa, Artificial Sequence
  source: /note="Description of Artificial Sequence: Synthetic polypeptide"
MRPVAQLLGLLLLWFPGSRCDIQMTQSPSSVSASVGDRVTVTCRASQGISSWLAWYQQKPGKAPKLLINAASSLQSGVPSRFIGSGSGTDFTLTITSLQAEDFATYCQQADSLPFTFGGGTKVDFKR

SEQ ID NO: 25863 - protein, 104 aa, Artificial Sequence
  source: /note="Description of Artificial Sequence: Synthetic polypeptide"
QSQLTQPASVSVSPGQTASITCSGDRLGDEFASWYQQKPGQSPILVIFEDNKPSGIPERFSGSNSGNTATLTISGTQAMDEAYYCLAWASSLWVFGGGTKLTVL

SEQ ID NO: 25864 - protein, 127 aa, Artificial Sequence
  source: /note="Description of Artificial Sequence: Synthetic polypeptide"
MGWSCIILFLVATATGVHSEIVLTQSPGSLSLSPGERATLSCRASQSVTSSFLAWYQQRPGQAPRLLIYHTSSRATGIPDRPSGSGSGTDFTLTISRLQPEDFAVYYCHQYAYSPRTFGQGTKVEIK

SEQ ID NO: 25865 - protein, 127 aa, Artificial Sequence
  source: /note="Description of Artificial Sequence: Synthetic polypeptide"
MGWSCIILFLVATATGVHSEIVLTQSPGTLSLSPGERVTLSCRASQSISSTYLAWYQQKPGQAPRLLIYGASSRATGIPDRFSGSGSGTDFTLTISRLEPEDLGVYYCQQYGSSLRFGQGTKLEIKR

SEQ ID NO: 25866 - protein, 104 aa, Artificial Sequence
  source: /note="Description of Artificial Sequence: Synthetic polypeptide"
TQSPSSLSASIGDRVTITCRAGQSIDDYLNWYQQKPGKAPMLLIYWASSLQSGVPSRFSGGGSGTDFTLTISSLQPEDFATYYCQQSYSTPFTFGQGTKVEIKR

SEQ ID NO: 25867 - protein, 104 aa, Artificial Sequence
  source: /note="Description of Artificial Sequence: Synthetic polypeptide"
TQSPSSLSASIGDRVTITCRAGQSIDDYLNWYQQKPGKAPMLLIYHASSLQSGVPSRFSGGGSGTDFTLTISSLQPEDFATYYCQQSYSTPFTFGQGTKVEIKR

SEQ ID NO: 25868 - protein, 109 aa, Artificial Sequence
  source: /note="Description of Artificial Sequence: Synthetic polypeptide"
SYVLTQPPSVSVAPGKTARISCGGNNIGTKNVHWYQQKPGQAPVLVVYADSDRPSGIPERFSGSNSGNTATLTISRVEVGDEADYYCQVWDSVSYHVVFGGGTTLTVLG

SEQ ID NO: 25869 - protein, 112 aa, Artificial Sequence
  source: /note="Description of Artificial Sequence: Synthetic polypeptide"
DIVMTQSPLSLSVTPGEPASISCRSSQSLLHRSGNNYLDWYLQKPGHSPQLLIYVGSNRASGVPDRFSGSGSGTEYTLKISRVEAEDVGVYYCMQALQTPRTFGQGTKLEIK

SEQ ID NO: 25870 - protein, 112 aa, Artificial Sequence
  source: /note="Description of Artificial Sequence: Synthetic polypeptide"
DIVMTQTPLSLSVTPGQPASISCKSSQSLLYSNGKTYLNWLLQKPGQPPQRLIYLVSNRDSGVPDRFSGSGSGTDFTLKISRVEAEDVGVYYCVQGTHFPQTFGGGTKVEIK

SEQ ID NO: 25871 - protein, 115 aa, Artificial Sequence
  source: /note="Description of Artificial Sequence: Synthetic polypeptide"
QVQLVQSGAEVKAPGASVKVSCKASGYTFTSAWMNWVRQAPGQGLEWMGRIYPSGGSTSYAQKFQGRVTMTADKSTSTVYMELSSLRSEDTAVYYCAREYRVARWGQGTLVTVSA

SEQ ID NO: 25872 - protein, 112 aa, Artificial Sequence
  source: /note="Description of Artificial Sequence: Synthetic polypeptide"
DILMTQTPLILSVTIGQPASISCKSSQSLLYSNGKTYLNWLLQRPGQSPKRLIYLVSKLDSGVPDRFTGSGSGTDFTLKIIRVEAEDLGVYYCVQGTHFPQTFGGGTKLEIK

SEQ ID NO: 25873 - protein, 100 aa, Artificial Sequence
  source: /note="Description of Artificial Sequence: Synthetic polypeptide"
DIVMTQTPLSLSVTPGQPASISCKSSQSLLHSDGKTYLYWYLQKPGQPPQLLIYEVSNRFSGVPDRFSGSGSGTDFTLKISRVEAEDVGVYYCMQSIQLP

SEQ ID NO: 25874 - protein, 112 aa, Artificial Sequence
  source: /note="Description of Artificial Sequence: Synthetic polypeptide"
DILMTQTPLSLSVTPGQPASISCKSSQSLLYSNGKTYLYWLLQKPGQSPKRLIYLVSKLDSGVPDRFSGSGSGTDFTLKISRVEAEDVGVYYCVQGTHFPQTFGGGTKVEIK

SEQ ID NO: 25875 - protein, 109 aa, Artificial Sequence
  source: /note="Description of Artificial Sequence: Synthetic polypeptide"
QAVVTQESALTTSPGETVTLTCRSSTGAITTNNFANWVQEKPDHLFTGLIGDTNNRVPGVPARFSGSLIGDKAALTITGAQTEDEAIYFCALWYNNWVFGGGTKLTVLG

SEQ ID NO: 25876 - protein, 112 aa, Artificial Sequence; identical to SEQ ID NO: 25869
  source: /note="Description of Artificial Sequence: Synthetic polypeptide"

SEQ ID NO: 25877 - protein, 109 aa, Artificial Sequence; identical to SEQ ID NO: 25868
  source: /note="Description of Artificial Sequence: Synthetic polypeptide"

SEQ ID NO: 25878 - protein, 111 aa, Artificial Sequence
  source: /note="Description of Artificial Sequence: Synthetic polypeptide"
QSALTQPRSVSGSPGQSVTISCTGTNSDIGNYDYVSWYQQHPGKAPRLIIYDVSERPSGVPNRFSGSKSGNTASLTISGLQAEDESDYFCSSYAGTFTYVVFGGGTKLTVL

SEQ ID NO: 25879 - protein, 108 aa, Artificial Sequence; identical to SEQ ID NO: 25859
  source: /note="Description of Artificial Sequence: Synthetic polypeptide"

SEQ ID NO: 25880 - protein, 108 aa, Artificial Sequence
  source: /note="Description of Artificial Sequence: Synthetic polypeptide"
SYVLTQPPSVSVAPGQTARMTCGGNNIGSESVHWFQQKPGQAPVLVVYDDSDRPSGIPERFSGSNSGNTATLTISRVEAGDEADYYCQVWDSSSDHAVFGGGTQLTVL

SEQ ID NO: 25881 - protein, 106 aa, Artificial Sequence
  source: /note="Description of Artificial Sequence: Synthetic polypeptide"
EIVLTQSPATLSLSPGERATLSCRASQSVSSYLAWYQQKPGQAPRLLIYDASNRATGIPARFSGSGSGTDFTLTISSLEPEDFAVYYCQQRSNWITFGQGTRLEIK

SEQ ID NO: 25882 - protein, 106 aa, Artificial Sequence
  source: /note="Description of Artificial Sequence: Synthetic polypeptide"
EIVLTQSPATLSLSPGERATLSCRASQSVGSYLAWYQQKPGQAPRLLIYDASNRATGIPARFSGSGSGTDFTLTISSLEPEDFAVYYCQQRSNWVTFGQGTRLEIK

SEQ ID NO: 25883 - protein, 106 aa, Artificial Sequence
  source: /note="Description of Artificial Sequence: Synthetic polypeptide"
EIVLTQSPATLSLSPGERATLSCRASQSVSSYLAWYQQKPGQAPRLLIYDASNRATGIPARFSGSGSGTDFTLTISTLEPEDFAVYYCQQRSNWVTFGQGTRLEIK

SEQ ID NO: 25884 - protein, 112 aa, Artificial Sequence
  source: /note="Description of Artificial Sequence: Synthetic polypeptide"
AELTQSPDSLAVSLGERATINCKSSQSVLYSSHNKNYLAWYQQKPGQPPKLLIYWASTRESGVPDRFSGSGSGTDFTLTISSLQAEDVAVYYCQQYFSTPLTFGGGTKVEIK

SEQ ID NO: 25885 - protein, 106 aa, Artificial Sequence
  source: /note="Description of Artificial Sequence: Synthetic polypeptide"
AELTQSPSSLSASVGDRVTITCQASPDISNYLNWYQQKPGKAPNLLIYGASSLQRGVPSRLSGSGSGTDFTLTIDSLQPEDFATYYCQQSYGSPHTFGQGTKVEIK

SEQ ID NO: 25886 - protein, 107 aa, Artificial Sequence
  source: /note="Description of Artificial Sequence: Synthetic polypeptide"
AELTQSPATLSVSPGERATLSCRASQSVNSNLAWYQQKPGQAPSLLIYGASTRATGIPARFSGSGSGTELTLTISSLQSEDFAVYYCQQYKNWPPWTFGQGTKVEIK

SEQ ID NO: 25887 - protein, 106 aa, Artificial Sequence
  source: /note="Description of Artificial Sequence: Synthetic polypeptide"
AELTQSPSSLSASIGDRVTITCRASQGISNYVAWYQQRPGKVPKLLIFGASALHSGVPSRFSGSGSGTDFTLTITSLQPEDVATYYCQKYRSAPLTFGPGTRVDLK

SEQ ID NO: 25888 - protein, 109 aa, Artificial Sequence
  source: /note="Description of Artificial Sequence: Synthetic polypeptide"
AELTQSPGTLSLSPGERATLSCRASQSVSSSYLAWYQQKAGQAPRLLIYGASRRATGIPVRFSGSGSGAEFTLTISSLQSEDSAVYYCQHYHNWPAMYTFGQGTKLEIK

SEQ ID NO: 25889 - protein, 112 aa, Artificial Sequence
  source: /note="Description of Artificial Sequence: Synthetic polypeptide"
AELTQSPDSLAMSLGERASINCKSSRSLLYSSNNKNYLAWYQQKSGHPPKLLIYWASTRESGVPDRFNGSGSGTDFTLTISSLQAEDVAVYFCQQYYSSPLTFGGGTKVEIK

SEQ ID NO: 25890 - protein, 107 aa, Artificial Sequence
  source: /note="Description of Artificial Sequence: Synthetic polypeptide"
AELTQSPSSLSASVGDRVTITCQASQDINYSLNWYQQKPGKPPKLLIYYASHSDTGVPSRFSGGGSGTRFTLTIYSLQPEDIATYYCQHFDHVPRYTFGPGTKVDLK

SEQ ID NO: 25891 - protein, 106 aa, Artificial Sequence
  source: /note="Description of Artificial Sequence: Synthetic polypeptide"
AELTQSPDTLSLSPGERATLSCRASQSVNNNYLAWYQQKPGQAPRLLIYGASSRATGIPDRFSGSGSETDFTLTISRLEPEDFAVYYCQQYDSSRTFGQGTKVEIK

SEQ ID NO: 25892 - protein, 110 aa, Artificial Sequence
  source: /note="Description of Artificial Sequence: Synthetic polypeptide"
AELTQSPLSLPVTPGEPASISCRSSQSLLHTNGYNYLDWYLQKPGQSPQLLIYLGSNRASGVPDRFSGSGSGTDFTLKISRVEAEDVGVYYCMQALQTLTFGGGTKVEIK

SEQ ID NO: 25893 - protein, 106 aa, Artificial Sequence
  source: /note="Description of Artificial Sequence: Synthetic polypeptide"
AELTQSPSSLSASIGDRVAISCQASQDIGNYLNWYQQKPGKAPRLLIYDASNLEAGVPSRFSGSGSGTDFTLTISTLQPEDFATFYCQQTDSTPYTFGQGTKLEIR

SEQ ID NO: 25894 - protein, 105 aa, Artificial Sequence
  source: /note="Description of Artificial Sequence: Synthetic polypeptide"
AELTQSPSSLSASVGDRVTITCRASQTVSSYLNWYQQKPGKAPKVLIYGISTLQSGVPSRFSGSGSETDFTLTISNLQPEDFAIYYCQQSYSSRTFGQGTKVEIK

SEQ ID NO: 25895 - protein, 109 aa, Artificial Sequence
  source: /note="Description of Artificial Sequence: Synthetic polypeptide"
AELTQSPSSVSASVRDRVTITCRASQGISTWLAWYQQKPGKAPKLLIYAASTLQSGVPSRFSGSGSGTDFTLTIGSLQPEDVATYYCQQANSFPPGALTFGGGTKVEVK

SEQ ID NO: 25896 - protein, 106 aa, Artificial Sequence
  source: /note="Description of Artificial Sequence: Synthetic polypeptide"
AELTQSPAFMSATPGDKVNISCKASQDIDDDMNWYQQKPGEAAIFIIQEATTLVPGIPPRFSGSGYGTDFTLTINNIESEDAAYYFCLQHDNFPLTFGQGTKVEIK

SEQ ID NO: 25897 - protein, 106 aa, Artificial Sequence; identical to SEQ ID NO: 25896
  source: /note="Description of Artificial Sequence: Synthetic polypeptide"

SEQ ID NO: 25898 - protein, 106 aa, Artificial Sequence
  source: /note="Description of Artificial Sequence: Synthetic polypeptide"
AELTQSPSFSSASVGDRVTITCRASHGISSHLAWFQHKPGKAPNLLIYAASTLQSGVPSRFSGSQSGTEFTLTITSLHPEDFATYYCQQLYTWPMGFGQGTRLEIT

SEQ ID NO: 25899 - protein, 106 aa, Artificial Sequence
  source: /note="Description of Artificial Sequence: Synthetic polypeptide"
AELTQSPSSLSASVGDRVTITCRSSQSISNSLHWFQQEPGKAPKLLIYAASTLQSGVPSRFSGSGSGTDFTLIITGLQPEDFATYYCQQSPRTPLTFGGGTKVEIR

SEQ ID NO: 25900 - protein, 106 aa, Artificial Sequence
  source: /note="Description of Artificial Sequence: Synthetic polypeptide"
AELTQSPSSLSAFTGDRVSITCRASQGIGNSLAWYQQKPGHVPKVLIYDASTLSSGAPSRFSGSGSGTDFTLTISGLQPEDVATYYCQKYKSAPLTFGGGTKVEIR

SEQ ID NO: 25901 - protein, 112 aa, Artificial Sequence
  source: /note="Description of Artificial Sequence: Synthetic polypeptide"
AELTQSPDSLAVSLGERATINCKSSQSVLSSSNNKNYLAWYQQKPRQPPKLLIYWASTRESGVPDRFSGSGSGTDFTLTISSLQAEDVAVYYCQQFYSTPPTFGGGTKVEIR

SEQ ID NO: 25902 - protein, 106 aa, Artificial Sequence
  source: /note="Description of Artificial Sequence: Synthetic polypeptide"
AELTQSPSSLSASVGDRVTITCRASQSINTYLNWYQQKPGKAPELLIYGASSLQSGVPSRFSGSGSGTDFTLTITSLQAEDFASYFCQQSDSTPRTFGQGTKVEIK

SEQ ID NO: 25903 - protein, 106 aa, Artificial Sequence; identical to SEQ ID NO: 25896
  source: /note="Description of Artificial Sequence: Synthetic polypeptide"

SEQ ID NO: 25904 - protein, 105 aa, Artificial Sequence
  source: /note="Description of Artificial Sequence: Synthetic polypeptide"
AELTQSPSSLSASVGDRVTIACRASQSISNHLNWYQQKPGKAPKVLIYAASSLQSGVPSRFSGSGSGTDFTLTISSLQPEDFAIYYCQQSYSNADFGPGTKVDIK

SEQ ID NO: 25905 - protein, 106 aa, Artificial Sequence
  source: /note="Description of Artificial Sequence: Synthetic polypeptide"
AELTQSPSSLSASVGDGVTITCRASQSISTYLNWYQQKPGKAPKLLMYAASTLQSGVPSRFSGSGSGTDFTLTISSLQPEDFAAYYCQQARSFPYTFGQGTRLEIR

SEQ ID NO: 25906 - protein, 106 aa, Artificial Sequence; identical to SEQ ID NO: 25896
  source: /note="Description of Artificial Sequence: Synthetic polypeptide"

SEQ ID NO: 25907 - protein, 111 aa, Artificial Sequence
  source: /note="Description of Artificial Sequence: Synthetic polypeptide"
AELTQSPLSLAVTPGEPASISCRTSQSLLHSNGYTYLDWYLQKPGQSPQLLIYLASNRASGVPDRFSGSGSGTDFTLEISRVEAEDVGVYYCMQPLQTPVTFGQGTKVEVK

SEQ ID NO: 25908 - protein, 106 aa, Artificial Sequence; identical to SEQ ID NO: 25896
  source: /note="Description of Artificial Sequence: Synthetic polypeptide"

SEQ ID NO: 25909 - protein, 107 aa, Artificial Sequence
  source: /note="Description of Artificial Sequence: Synthetic polypeptide"
AELTQSPGTLSLSPGERGTLSCRASQSVSSSYLAWYQQKAGQAPRLLIYGASSRATGIPDRFSGSGSGTDFTLTISRLEPEDFAVYYCQRYGTSPKTFGQGTKVEFK

SEQ ID NO: 25910 - protein, 110 aa, Artificial Sequence
  source: /note="Description of Artificial Sequence: Synthetic polypeptide"
AELTQSPLSLPVTPGEPASISCRSSQSLLHSDGYNYFDWYLQKPGQSPQLLIYLGSNRASGVPDRFSGSGSDTDFTLKISRVEAEDVGVYYCMQTLQTLTFGGGTKLEIK

SEQ ID NO: 25911 - protein, 106 aa, Artificial Sequence; identical to SEQ ID NO: 25902
  source: /note="Description of Artificial Sequence: Synthetic polypeptide"

SEQ ID NO: 25912 - protein, 112 aa, Artificial Sequence
  source: /note="Description of Artificial Sequence: Synthetic polypeptide"
LEESGGGLVKPGGSLRLSCVASGLTFSRYNMQWVRQAPGKGLEWVASISTSGVYIYYADSVTGRFTISRDNSKNSLYLQMNSLGAEDTAVYYCARDLTFLCGGDCLQPWGQG

SEQ ID NO: 25913 - protein, 108 aa, Artificial Sequence
  source: /note="Description of Artificial Sequence: Synthetic polypeptide"
SYELTQPPSVSVSPGQTARITCSGDALPKQYAYWYQQKPGQAPVLVIYKDNERPSGIPERFSGSRSGTTVTLTISGVQAEDEADYYCQSADSSGSSWVFGGGTKLTVL

SEQ ID NO: 25914 - protein, 117 aa, Artificial Sequence
  source: /note="Description of Artificial Sequence: Synthetic polypeptide"
QVQLQQWGAGLLKPSETLSLTCAVYGGSLSGYFWTWIRQSPGKGLEWIGESNYSGSTRYNPSLKSRVTISVDTSQNQFSLKLSSVTAADTAVYYCARGWAVDGMDVWGQGTTVTVSS

SEQ ID NO: 25915 - protein, 108 aa, Artificial Sequence
  source: /note="Description of Artificial Sequence: Synthetic polypeptide"
SSELTQPPSVSVSPGQTARITCSGDALPKQYAYWYQQKPGQAPVLVIYKDNERPSGIPERFSGSRSGTTVTLTISGVQAEDEADYYCQSADSSGSSWVFGGGTKLTVL

SEQ ID NO: 25916 - protein, 106 aa, Artificial Sequence; identical to SEQ ID NO: 25882
  source: /note="Description of Artificial Sequence: Synthetic polypeptide"

SEQ ID NO: 25917 - protein, 106 aa, Artificial Sequence
  source: /note="Description of Artificial Sequence: Synthetic polypeptide"
EIVLTQSPATLSLSPGERATLSCRASQSVSSYLAWYQQKPGQAPRLLIYDASNRATGIPARFSGSGSGTDFTLTISSLEPEDFAVYYCQQRSNWVTFGQGTRLEIK

SEQ ID NO: 25918 - protein, 124 aa, Artificial Sequence
  source: /note="Description of Artificial Sequence: Synthetic polypeptide"
  MOD_RES (101)..(101): Any amino acid
SSYVLTQPPSVSVAPGKTARITCGGNNIGSKSVHWYQQKPGQAPVLVVYDDSDRPSGIPERFSGSNSGNTATLTISRVEAGDEADYYCQVWDSSSVVFGGXTKLTVLAAAGGPFESKPIPNPLL

SEQ ID NO: 25919 - protein, 124 aa, Artificial Sequence
  source: /note="Description of Artificial Sequence: Synthetic polypeptide"
ETTLTQSPGTLSLSPGERATLSCRASQSVSSNLAWYQQKPGQAPRLLIYGASTRATGIPDRFSGSGSGTDFTLTISRLEPDDFVVYYCQQYGSSPVTFGQGTRLEIKRAAAGGPFEGKPIPNPL

SEQ ID NO: 25920 - protein, 122 aa, Artificial Sequence
  source: /note="Description of Artificial Sequence: Synthetic polypeptide"
EIVLTQSPDSLAVSLGERATIHCKSSQSIFFSSNSKDYLAWYQQKPGQPPKLLIYWASTRDSGVPDRFSGSGSGTDFTLTITGLQADDAAVYYCQQFDTPQITFGGGTKLEIKRAAAGGPFE

SEQ ID NO: 25921 - protein, 124 aa, Artificial Sequence
  source: /note="Description of Artificial Sequence: Synthetic polypeptide"
  MOD_RES (117)..(117): Any amino acid
EMTLTQSPSSLSASVGDRVTITCRASQSISSWLAWYQQKPGKAPKLLIYDASNLETGVPSRFSGSGSGTDFTFTISSLQPEDIATYYCQQYDNLPRTFGQGTKVDIKRAAAGGPFEXKPIPNPL

SEQ ID NO: 25922 - protein, 125 aa, Artificial Sequence
  source: /note="Description of Artificial Sequence: Synthetic polypeptide"
  MOD_RES (117)..(117): Any amino acid
  MOD_RES (119)..(119): Any amino acid
EIVLTQSPGTVSLFPGDRVTLSCRASQRVPSSSLAWYQQKPGQAPRLLLYGASSRATGIPDRFSGRGSGTDFALSISRLEPEDFAVYYCQQYGSSLITFGQGTRLEIKRAAAGGPFXGXPIPNPL

SEQ ID NO: 25923 - protein, 120 aa, Artificial Sequence
  source: /note="Description of Artificial Sequence: Synthetic polypeptide"
DIQMTQSPATLSLSPGERATLSCRASQSVSSYLAWYQQKPGQAPRLLIYDASNRATGIPARFIAGGSGTDFTLTISSLEPEDFAVYYCQQYGSPQTFGQGTKLEIKRAAAGGPFEGKPIP

SEQ ID NO: 25924 - protein, 106 aa, Artificial Sequence
  source: /note="Description of Artificial Sequence: Synthetic polypeptide"
SYELTQPLSVSVALGQTARITCGGNNIGSKNVHWYQQKPGQAPVLVIYRDSNRPSGIPERFSGSNSGNTATLTISRAQAGDEADYYCQVWDSSTAVFGGGTMLTVL

SEQ ID NO: 25925 - protein, 106 aa, Artificial Sequence
  source: /note="Description of Artificial Sequence: Synthetic polypeptide"
SYVLTQPPSVSVAPGKTARITCGGNNIGSKSVHWYQQKPGQAPVLVVYDDSDRPSGIPERFSGSNSGNTATLTISRVEAGDEADYYCQVWDSSSVVFGGGTKLTVL

SEQ ID NO: 25926 - protein, 106 aa, Artificial Sequence
  source: /note="Description of Artificial Sequence: Synthetic polypeptide"
SYVLTQPPSVSVSPGQTARITCSGDKLGDKYASWYQQKPGQSPVLVIYQDNKRPSEIPARFSGSNSGNTATLTISGAQAMDEADYYCQAWDSNTGVFGTGTKLTVL

SEQ ID NO: 25927 - protein, 113 aa, Artificial Sequence
  source: /note="Description of Artificial Sequence: Synthetic polypeptide"
DIVMTQAAFSNPVTLGTSASISCRSSKSLLHSDGITYLYWFLQKPGQSPQLLIYQMPNVASGVPDRFSSSGSGTDFTLRISRVEAEDVGVYYCAQNLELPPTFGGGTKLEIRR

SEQ ID NO: 25928 - protein, 113 aa, Artificial Sequence
  source: /note="Description of Artificial Sequence: Synthetic polypeptide"
DVVMTQTPLTLSVTIGQPASISCKSSQSLLYSNGKNYLNWLFQRPGQSPKRLIYLVSKLDSGVPDRFTGSGSGTDFTLKISRVEAEDLGVYYCVQGTHFPYTFGGGTKLEIKR

SEQ ID NO: 25929 - protein, 113 aa, Artificial Sequence
  source: /note="Description of Artificial Sequence: Synthetic polypeptide"
DVLMTQTPLSLPVSLGDQASISCRSSQSIVYSNGNTYLEWYLQKPGQSPKLLIYKVSKRFSGVPDRFSGSGSGTDFTLKISRVEAEDLGVYYCFQGSHVPYTFGGGTKLEIKR

SEQ ID NO: 25930 - protein, 107 aa, Artificial Sequence
  source: /note="Description of Artificial Sequence: Synthetic polypeptide"
QIVLTPSPAIMSASPGEKVTITCSASSSVSYMHWFQQKPGTSPKLWIYNTSTLASGVPARFSGSGSGTSYSLTISRMEAEDAATYYCQQRSSYPYTFGGGTKLEIKR

SEQ ID NO: 25931 - protein, 108 aa, Artificial Sequence
  source: /note="Description of Artificial Sequence: Synthetic polypeptide"
DTVMTQSQKFMSTSVGDRVSITCKASQNVRTVVAWYQQKPGQSPKALIYLASNRHTGVPDRFTGSGSGTDFTLTISNVQSEDLADYFCLQHWNYPLTFGGGTKLEIKR

SEQ ID NO: 25932 - protein, 106 aa, Artificial Sequence
  source: /note="Description of Artificial Sequence: Synthetic polypeptide"
DILMTQSHKFMSTSIGDRVSVTCKASQDVGTAVAWYQQKPGQSPKLLIYWASTRHTGVPDRFTGSGSGTDFTLTFNNVQSEDLADYFCQQYSNFPLTFGSGTKLEI

SEQ ID NO: 25933 - protein, 107 aa, Artificial Sequence
  source: /note="Description of Artificial Sequence: Synthetic polypeptide"
DILMTQSHKFMSTSLGDRVCITCQASLNLGTPVVWFQQKPGQSPKLLIYRTATRHTGIPDRFTGSGSGTDFTLTITNVQSEDLADYFCEKDGYYPLTFGSGTKLEIK

SEQ ID NO: 25934 - protein, 148 aa, Artificial Sequence
  source: /note="Description of Artificial Sequence: Synthetic polypeptide"
MAWISLILSAISQAGVTQPGETVTTLTLLALSSGESALTTSCRSSTGAVTTSNYANWVQEKPDHLFIGLIGGTNNRVTGVPARFSGSLIGDKAALTITGAQTEDEAIYFCALWYSDHWVFGGGTKLTVLGQPKSSPSVTLFPPSSEEL

SEQ ID NO: 25935 - protein, 115 aa, Artificial Sequence [sequence omitted]

SEQ ID NO: 25936 - protein, 102 aa, Artificial Sequence
  source: /note="Description of Artificial Sequence: Synthetic polypeptide"
DVVMTQTPLSLPVSLGDQASISCRSSQNIVHRNGNTYLEWYLQKPGQSPKLLIYKVSNRFSGVPDRFSGSGSGTDFTLKISRVEAEDLGLYYCFQGSHFPPT

SEQ ID NO: 25937 - protein, 108 aa, Artificial Sequence; identical to SEQ ID NO: 25859
  source: /note="Description of Artificial Sequence: Synthetic polypeptide"

SEQ ID NO: 25938 - protein, 108 aa, Artificial Sequence
  source: /note="Description of Artificial Sequence: Synthetic polypeptide"
DIVVTQSPSSLSASVGDRVTITCRASQGIYNSIAWYQQKPGKAPKLLLYSTSTLLSGVPSRFSGSGSGTDYTLTITNLQPEDFATYYCQQYFVTPETFGQGTKLEIKR

SEQ ID NO: 25939 - protein, 107 aa, Artificial Sequence; identical to SEQ ID NO: 25834
  source: /note="Description of Artificial Sequence: Synthetic polypeptide"

SEQ ID NO: 25940 - protein, 108 aa, Artificial Sequence; identical to SEQ ID NO: 25835
  source: /note="Description of Artificial Sequence: Synthetic polypeptide"

SEQ ID NO: 25941 - protein, 114 aa, Artificial Sequence; identical to SEQ ID NO: 25836
  source: /note="Description of Artificial Sequence: Synthetic polypeptide"

SEQ ID NO: 25942 - protein, 147 aa, Artificial Sequence
  source: /note="Description of Artificial Sequence: Synthetic polypeptide"
DIVMTQSPDSLAVSLGERATINCKSSQSVLYTTKNKNHLAWYQQKPGQPPKLLIYWASTRESGVPDRFSGSGSGTDFSLTITNLQAEDVALYYCHQYYLFPLTFGGGTKVEIKRTVAAPSVFIFPPSDEQLKSGTASVVCLLNNFYP

SEQ ID NO: 25943 - protein, 218 aa, Artificial Sequence
  source: /note="Description of Artificial Sequence: Synthetic polypeptide"
DIQMTQSPSSLSASVGDRVTITCRASESVDNYGISFMNWFQQKPGKAPKLLIYSASNHASGVPSRFSGSGSGTDFTLTISSLQPEDFATYYCHQSKEAPYAFGQGTKVEIKRTVAAPSVFIFPPSDEQLKSGTASVVCLLNNFYPREAKVQWKVDNALQSGNSQESVTEQDSKDSTYSLSSTLTLSKADYEKHKVYACEVTHQGLSSPVTKSFNRGEC

SEQ ID NO: 25944 - protein, 218 aa, Artificial Sequence
  source: /note="Description of Artificial Sequence: Synthetic polypeptide"
ELTLTQSPASLAVSLGQRATISCRASESVDGYGNSFLHWFQQKPGQPPKLLIYLASNLNSGVPARFSGSGSRTDFTLTIDPVEADDAATYYCQQNNVDPWTFGGGTKLEIKRAVAAPSVFIFPPSDEQLKSGTASVVCLLNNFYPREAKVQWKVDNALQSGNSQESVTEQDSKDSTYSLSSTLTLSKADYEKHKVYACEVTHQGLSSPVTKSFNRGEC

SEQ ID NO: 25945 - protein, 176 aa, Artificial Sequence
  source: /note="Description of Artificial Sequence: Synthetic polypeptide"
ELTQSPATLSVSPGERATLSCRASQSVSSNLAWYQQKPGQAPRLLIYGASTRATGIPARFSGSGSGTEFTLTISSLQSQDFAVYYCQQYNNWPQTFGQGTKLEIKRTVAAPSVFIFPPSDEQLKSGTASVVCLLNNFYPREAKVQWKVDNALQSGNSQESVTEQTARTAPTASAAP

SEQ ID NO: 25946 - protein, 100 aa, Artificial Sequence
  source: /note="Description of Artificial Sequence: Synthetic polypeptide"
AELTQSPGTLSLSPRATLSCRASQSVSSLAWYQQRPGQAPRLYGASSRATGIPDRFYCGWGENYLISGSGSGTDFTLTISRLEPEDFAVYYCTFGQGTKV

SEQ ID NO: 25947 - protein, 98 aa, Artificial Sequence
  source: /note="Description of Artificial Sequence: Synthetic polypeptide"
YGNSRWKAELTQSPATLSLSPGERATLSCRASQSVNKYLAWYQQKPGQAPRLLIYDASNRATGIPARFSGSGSGTDFTLTIDFAVYYCQQGGGTKVEI

SEQ ID NO: 25948 - protein, 119 aa, Artificial Sequence
  source: /note="Description of Artificial Sequence: Synthetic polypeptide"
AELTQSPGTLRATLSCGASQSNLEPESDWVTFSLSPGESVRSNYLAWYQQKPGQAPRLLIYGVSSRATGIPDRFSGSGSGTDFTLTISRLEPEDFAVYYCQQYGSSPRTFGQGTKLEIK

SEQ ID NO: 25949 - protein, 97 aa, Artificial Sequence
  source: /note="Description of Artificial Sequence: Synthetic polypeptide"
AELTQSPATLSVSPRASLSCRASQSVGNAWYQQKPGQAPRLLGGNTRATGTPDRFSGENLIYGSGSGTEFTLTISSLQSEDFAVYFCQHFGGGTKVE

SEQ ID NO: 25950 - protein, 113 aa, Artificial Sequence
  source: /note="Description of Artificial Sequence: Synthetic polypeptide"
AELTQSPGTLRATLSCRASQSTWPLTSLSVGENIYSGYLGWYQQKPGQPPRLLIYGASNRATGIPDRFSGSGSGTDFTLTISRLESEDFAVYYCQQYGSPPYTFGQGTKVEIK

SEQ ID NO: 25951 - protein, 86 aa, Artificial Sequence
  source: /note="Description of Artificial Sequence: Synthetic polypeptide"
AELTQSPSSLRVTITCRASQSAFVSISRGNDLNWYQQKPGTAPKVLIYAASSLQSGVPSGSGTDFTLTIDFATYYCQQFGQGTKVE

SEQ ID NO: 25952 - protein, 104 aa, Artificial Sequence
  source: /note="Description of Artificial Sequence: Synthetic polypeptide"
TYRFSGSSLQPETTPRTAELTQSPGTLSLSPGERATLSCRASQSLSSKLAWYQQKPGQAPRLFYDASSRATGIPDRFSSGSGTDFTLSEDFAVYYCFGQGTKVE

SEQ ID NO: 25953 - protein, 125 aa, Artificial Sequence
  source: /note="Description of Artificial Sequence: Synthetic polypeptide"
EVQLLESGPGLVKPSQTLSLTCTVSGASISSDSYYYNWIRQPAGKGLEWIGRIYTSGSTNYNPSLKGRLTISVDTSKNQFSLKLTSVTAADTAVYYCARTGRFLEWFPNYGMDVWGQGSTVIVSS

SEQ ID NO: 25954 - protein, 125 aa, Artificial Sequence
  source: /note="Description of Artificial Sequence: Synthetic polypeptide"
EVQLLEQSGAEVKKPGSAVKVSCKASGGNFNIDTISWLRQVPGQGLEWMGRIIPIVTMTNYAETFQGRVTITADRSTSTVYMELRSLRSEDTAVYYCARSISDTGLFRLDAFDSWGPGTRVIVSS

SEQ ID NO: 25955 - protein, 125 aa, Artificial Sequence
  source: /note="Description of Artificial Sequence: Synthetic polypeptide"
EVQLLEQSGAEVKKPGSSVKVSCTASGGTFTTHTINWVRQAPGNGLEWMGQIIPLVGMTNIAQQFEGRITIIADKATSTAYMELSSLGSEDTALYYCARSLATSGLFRVDAFDLWGQGTMVTVSS

SEQ ID NO: 25956 - protein, 125 aa, Artificial Sequence
  source: /note="Description of Artificial Sequence: Synthetic polypeptide"
EVQLLEQSGAEVKKPGSSVKVFCKASGGIFYISTINWVRQAPGQGLEWMGKIIPGVGMTNFAQKFQGRVTITADKSTNTVYLEVSSLRSEDTAVYYCATSRPDTGLFRKDAFDVWGQGTVVIVSS

SEQ ID NO: 25957 - protein, 117 aa, Artificial Sequence
  source: /note="Description of Artificial Sequence: Synthetic polypeptide"
EVQLLESGPGLVKPSETLSLTCTVSGGSLSGYYWTWIRQPPGKGLEWIGYMYWSGSTNYSPSLKSRLTLSADTSKNHLSLKLTSVTAADTAVYYCGRLSRTVTMIDNWGQGILVTSP

SEQ ID NO: 25958 - protein, 123 aa, Artificial Sequence
  source: /note="Description of Artificial Sequence: Synthetic polypeptide"
QVQLVESGGGVVQPGRSLRLSCATSGFPFSSYGMHWVRQAPGKGLEWVAVISYDGSNEHSIDSVKGRFTISRDNSKNRLYLQMKSLRAEDMAVYFCVRGAHRSSWSGKRFDYWGQGTLVTVSS

SEQ ID NO: 25959 - protein, 104 aa, Artificial Sequence
  source: /note="Description of Artificial Sequence: Synthetic polypeptide"
MAELTQSPGTLSLSPGERATLSCRASHRVNNNFLAWYQQKPGQAPRLLISGASTRATGIPDRFSGSGSGTDFTLTISRLEPDDFAVYYCQQYGDSPLYSFGQGT

SEQ ID NO: 25960 - protein, 102 aa, Artificial Sequence
  source: /note="Description of Artificial Sequence: Synthetic polypeptide"
MAELTQSPSFLSASVGDRVTITCRASQGVTILLAWYQQKPGKPPKALIYAASSLQSGVPSRFSGSGSDTDFTLTISSLQPEDSATYYCQQLNTYPWTFGQGT

SEQ ID NO: 25961 - protein, 102 aa, Artificial Sequence
  source: /note="Description of Artificial Sequence: Synthetic polypeptide"
MAELTQSPATLSVSPGERATLSCRASQSVSSNLAWYQQKRGQAPSLLIYGTSTRATGIPARFSGSGSGTEFTLTISSLQSEDFAVYYCQQYNDWPSTFGQGT

SEQ ID NO: 25962 - protein, 102 aa, Artificial Sequence
  source: /note="Description of Artificial Sequence: Synthetic polypeptide"
MAELTQSPSFLSASVGDRVTITCRASQGISNYLAWYQQKPGKAPKLLIYAASTLQSGVPSRFSGSGSWTEFTLTISRLQPEDFATYYCQHLNTYPWTFGQGT

SEQ ID NO: 25963 - protein, 102 aa, Artificial Sequence
  source: /note="Description of Artificial Sequence: Synthetic polypeptide"
MAELTQSPATLSVSPGERATLSCRASQSVSSRLAWYQQKRGQAPSLLIYDTSSRATGVPARFSASGSGTQFTLTISSLQSEDFALYYCQQYNDWPSTFGQGT

SEQ ID NO: 25964 - protein, 102 aa, Artificial Sequence
  source: /note="Description of Artificial Sequence: Synthetic polypeptide"
MAELTQSPATLSASPGERASLSCRASQSVSSNLAWYQQKPGQAPRLLISGASTRATGVPARFSGSGSGTEFTLTISSLQSEDFAVYYCQQYNNWPPHFGQGT

SEQ ID NO: 25965 - protein, 113 aa, Artificial Sequence
  source: /note="Description of Artificial Sequence: Synthetic polypeptide"
DIVVTQSPDSLAVSLGERATITCKSSQSVFYSSNNKNYLGWYQQKPGQPPKLLIYWASTRASGVPDRFSGSGSGTDFTLTISSLQAEDVAVYYCQQYYTSWAFGQGTKVEIKR

SEQ ID NO: 25966 - protein, 99 aa, Artificial Sequence
  source: /note="Description of Artificial Sequence: Synthetic polypeptide"
QKFMSTSVGDRVSITCKASQNVRTAVAWYQQKPGQSPKALIYLASNRHTGVPDRFTGSGSGTDFTLTISNVQSEDLAAYFCQQYLNYPRTRSEGGPSWN

SEQ ID NO: 25967 - protein, 94 aa, Artificial Sequence
  source: /note="Description of Artificial Sequence: Synthetic polypeptide"
PASLAVSLGQRATISYRASKSVSTSGYSYMHWNQQKPGQPPRLLIYLVSNLESGVPARFSGSGSGTDFTLNIHPVEEEDAATYYCQHIRELTRS

SEQ ID NO: 25968 - protein, 234 aa, Artificial Sequence
  source: /note="Description of Artificial Sequence: Synthetic polypeptide"
MAWISLILSLLALSSGAISQAGVTQESALTTSPGETVTLTCRSSTGAVTTSNYANWVQEKPDHLFIGLIGGTNNRVTGVPARFSGSLIGDKAALTITGAQTEDEAIYFCALWYSDHWVFGGGTKLTVLGQPKAAPSVTLFPPSSEELQANKATLVCLISDFYPGAVTVAWKADSSPVKAGVETTTPSKQSNNKYAASSYLSLTPEQWKSHRSYSCQVTHEGSTVEKTVAPTECS

SEQ ID NO: 25969 - protein, 109 aa, Artificial Sequence
  source: /note="Description of Artificial Sequence: Synthetic polypeptide"
QTVVTQEPSLTVSPGGTVTLTCRSSTGAVTTSNYANWVQQTPGQAPRTLIGGTNNRVTGVPARFSGSILGDKAALTITGAQADDEADYFCALWYSDHWVFGGGTKLTVL

SEQ ID NO: 25970 - protein, 109 aa, Artificial Sequence
  source: /note="Description of Artificial Sequence: Synthetic polypeptide"
QTVVTQEPSLTVSPGGTVTLTCRSSTGAVTTSNYANWVQQTPGQAPRGLIGGTNNRVTGVPARFSGSLLGDKAALTITGAQADDEADYFCALWYSDHWVFGGGTKLTVL

SEQ ID NO: 25971 - protein, 109 aa, Artificial Sequence
  source: /note="Description of Artificial Sequence: Synthetic polypeptide"
QAGVTQESALTTSPGETVTLTCRSSTGAVTTSNYANWVQEKPDHLFIGLIGGTNNRVTGVPARFSGSLIGDKAALTITGAQTEDEAIYFCALWYSDHWVFGGGTKLTVL

SEQ ID NO: 25972 - protein, 143 aa, Artificial Sequence
  source: /note="Description of Artificial Sequence: Synthetic polypeptide"
AELTQSPATLSLSPGERATLSCRASQSVNKYLAWYQQKPGQAPRLLIYDASNRATGIPARFSGSGSGTDFTLTISNLEPEDFAVYYCQQRSDWVTFGGGTKVEIKAAADDDDKAGWSHPQFEKGGGSGGGSGGGSWSHPQFEK

SEQ ID NO: 25973 - protein, 218 aa, Artificial Sequence
  source: /note="Description of Artificial Sequence: Synthetic polypeptide"
EIELTLTQPASASATPGQRVTISCSGSSSNIGGNTVNWYQHLPGAAPKLLIHNNDLRPSGVPDRFSGSKSGTSASLAVSGLQSEDEADYFCAAWDDGLNGWVFGGGTKLTVLGQPKAAPSVTLFPPSSEELQANKATLVCLISDFYPGAVTVAWKADSSPVKAGVETTTPSKQSNNKYAASSYLSLTPEQWKSHKSYSCQVTHEGSTVEKTVAPTECS

SEQ ID NO: 25974 - protein, 214 aa, Artificial Sequence
  source: /note="Description of Artificial Sequence: Synthetic polypeptide"
EIELTQSPATLSVSPGERATLSCRASQSVSSNLAWYQQKPGQAPRLLIYGASTRATGIPARFSGSGSGTEFTLTVSRLEPEDSAVYFCQQYYRSPLTFGGGTKVEIKRTVAAPSVFIFPPSDEQLKSGTASVVCLLNNFYPREAKVQWKVDNALQSGNSQESVTEQDSKDSTYSLSSTLTLSKADYEKHKVYACEVTHQGLSSPVTKSFNRGEC

SEQ ID NO: 25975 - protein, 218 aa, Artificial Sequence
  source: /note="Description of Artificial Sequence: Synthetic polypeptide"
DIVLTQSPSSLSASVGDRVTITCRASESVDGYGYSFLHWFQQKPGKAPKLLIYLASNLNSGVPSRFSGSGSGTDFTLTISSLQPEDFATYYCQQNNVDPWTFGQGTKLEIKRTVAAPSVFIFPPSDEQLKSGTASVVCLLNNFYPREAKVQWKVDNALQSGNSQESVTEQDSKDSTYSLSSTLTLSKADYEKHKVYACEVTHQGLSSPVTKSFNRGEC

SEQ ID NO: 25976 - protein, 213 aa, Artificial Sequence
  source: /note="Description of Artificial Sequence: Synthetic polypeptide"
ELTLTQSPATLSLSPGERATLSCRASQSVSSYLAWYQQKPGQAPRLLIYDASNRATGIPARFSGSGSGTDFTLTISSLEPEDFAVYYCQQRSNWITFGQGTRLEIKRTVAAPSVFIFPPSDEQLKSGTASVVCLLNNFYPREAKVQWKVDNALQSGNSQESVTEQDSKDSTYSLSNTLTLSKADYEKHKVYACEVTHQGLSSPVTKSFNRGEC

SEQ ID NO: 25977 - protein, 213 aa, Artificial Sequence; identical to SEQ ID NO: 25976
  source: /note="Description of Artificial Sequence: Synthetic polypeptide"

SEQ ID NO: 25978 - protein, 159 aa, Artificial Sequence
  source: /note="Description of Artificial Sequence: Synthetic polypeptide"
MRSPAQLLPGHSLDMRFQVQVLGLLLLWISGAQCDVQITQSPSYLAASPGETISINCRANKSIDKYLAWYQEKPGKTNKLLIYSGSTLQSGVPSKFSGSGSGTDFTLTISSLEPEDFAMYYCQQHNEYPLTFGAGTKLDLRRADAAPTVSIFPPSSKLG

SEQ ID NO: 25979 - protein, 125 aa, Artificial Sequence; identical to SEQ ID NO: 25953
  source: /note="Description of Artificial Sequence: Synthetic polypeptide"

SEQ ID NO: 25980 - protein, 237 aa, Artificial Sequence
  source: /note="Description of Artificial Sequence: Synthetic polypeptide"
EVQLLEQSGAEVKKPGSAVKVSCKASGGNFNIDTISWLRQVPGQGLEWMGRIIPIVTMTNYAETFQGRLTITADRSTSTVYMELRSLRSEDTAVYYCARSISDTGLFRLDAFEVQLLEQSGAEVKKPGSSVKVSCTASGGTFTTHTINWVRQAPGNGLEWMGQIIPLVGMTNIAQQFEGRITIIADKATSTAYMELSSLGSEDTALYYCARSLATSGLFRVDAFDLWGQGTMVTVSS

SEQ ID NO: 25981 - protein, 125 aa, Artificial Sequence
  source: /note="Description of Artificial Sequence: Synthetic polypeptide"
EVQLLEQSGAEVKKPGSSVKVFCKASGGIFYISTINWVRQAPQGGLEWMGKIIPGVGMTNFAQKFQGRVTITADKSTNTVYLEVSSLRSEDTAVYYCATSRPDTGLFRKDAFDVWGQGTVVIVSS

SEQ ID NO: 25982 - protein, 118 aa, Artificial Sequence
  source: /note="Description of Artificial Sequence: Synthetic polypeptide"
EVQLLESGPGLVKPSETLSLTCTVSGGSLSGYYWTWIRQPPGKGLEWIGYMYWSGSTNYSPSLKSRLTLSADTSKNHLSLKLTSVTAADTAVYYCGRLSRTVTMIDNWGQGILVTVSP

SEQ ID NO: 25983 - protein, 118 aa, Artificial Sequence; identical to SEQ ID NO: 25982
  source: /note="Description of Artificial Sequence: Synthetic polypeptide"

SEQ ID NO: 25984 - protein, 108 aa, Artificial Sequence
  source: /note="Description of Artificial Sequence: Synthetic polypeptide"
MAQVKLQESGPELEKPGASVKISCKASGYSFTGYNMKWVKQSNGKSLEWIGYIYPYNGGTGYNQKFKSKATLTVDKSSSTAYMQLSSLTSEDSAVYYCARLGLDYWGQ

SEQ ID NO: 25985 - protein, 103 aa, Artificial Sequence
  source: /note="Description of Artificial Sequence: Synthetic polypeptide"
TTMAASPGEKITITCSASSSISSNYLHWYQQKPGFSPKLLIYRTSNLASGIPARFSGSGSGTSYSLTIGTMEAEDVATYYCQQGSSIPRIFTFGAGTKLEIKR

SEQ ID NO: 25986 - protein, 222 aa, Artificial Sequence
  source: /note="Description of Artificial Sequence: Synthetic polypeptide"
QVTLKQSGAEVKKPGSSVKVSCTASGGTLRTYGVSWVRQAPGQGLEWLGRTIPLFGKTDYAQKFQGRVTITADKSMDTSFMELTSLTSEDTAVYYCARDLTTLTSYNWWDLWGQGTLVTVSSASTKGPSVFPLAPSSKSTSGGTAALGCLVKDYFPEPVTVSWNSGALTSGVHTFPAVLQSSGLYSLSSVVTVPSSSLGTQTYICNVNHKPSNTKVDKKVEP

SEQ ID NO: 25987 - protein, 214 aa, Artificial Sequence
  source: /note="Description of Artificial Sequence: Synthetic polypeptide"
EIVLTQSPGTLSLSPGERATLSCRASQSVTSSQLAWYQQKPGQAPRLLISGASNRATGIPDRFSGSGSGTDFTLTISRLEPEDFAVYYCQQYGSSPTFGGGTKVEIKRTVAAPSVFIFPPSDEQLKSGTASVVCLLNNFYPREAKVQWKVDNALQSGNSQESVTEQDSKDSTYSLSSTLTLSKADYEKHKLYACEVTHQGLSSPVTKSFNRGEC

SEQ ID NO: 25988 - protein, 222 aa, Artificial Sequence; identical to SEQ ID NO: 25986
  source: /note="Description of Artificial Sequence: Synthetic polypeptide"

SEQ ID NO: 25989 - protein, 214 aa, Artificial Sequence; identical to SEQ ID NO: 25987
  source: /note="Description of Artificial Sequence: Synthetic polypeptide"

SEQ ID NO: 25990 - protein, 469 aa, Artificial Sequence
  source: /note="Description of Artificial Sequence: Synthetic polypeptide"
MDFGLSLVFLVLILKGVQCDVQLVESGGGLVQPGGSRKLSCAASGFTFSSFGMHWVRQAPEKGLEWVAYISSGSSTLHYADTVKGRFTISRDNPKNTLFLQMTSLRSEDTAMYYCARWGNYPHYAMDYWGQGTMVTVSSASTKGPSVFPLAPSSKSTSGGTAALGCLVKDYFPEPVTVSWNSGALTSGVHTFPAVLQSSGLYSLSSVVTVPSSSLGTQTYICNVNHKPSNTKVDKKVEPKSCDKTHTCPPCPAPELLGGPSVFLFPPKPKDTLMISRTPEVTCVVVDVSHEDPEVKFNWYVDGVEVHNAKTKPREEQYNSTYRVVSVLTVLHQDWLNGKEYKCKVSNKALPAPIEKTISKAKGQPREPQVYTLPPSRDELTKNQVSLTCLVKGFYPSDIAVEWESNGQPENNYKTTPPVLDSDGSFFLYSKLTVDKSRWQQGNVFSCSVMHEALHNHYTQKSLSLSPGK

SEQ ID NO: 25991 - protein, 233 aa, Artificial Sequence
  source: /note="Description of Artificial Sequence: Synthetic polypeptide"
MAVLGLLFCLVTFPSCVLSQLVMTQSPKSMSMSVGERVTLTCKASENVVTYVSWYQQKPEQSPKLLIYGASNRYTGVPDRFTGSGSATDFTLTISSVQAEDLADYHCGQGYSYPYTFGGGTKLEIKRADAAPTVSIFPPSSEQLTSGGASVVCFLNNFYPKDINVKWKIDGSERQNGVLNSWTDQDSKDSTYSMSSTLTLTKDEYERHNSYTCEATHKTSTSPIVKSFNRNEC

SEQ ID NO: 25992 - protein, 256 aa, Artificial Sequence
  source: /note="Description of Artificial Sequence: Synthetic polypeptide"
EVQLLESGGGVVQPGRSLRLSCAASGFIFSEYDMHWVRQAPGKGLQWVAVISVDGSDKHYADSVKGRFTISRDNSQNMLFLQMDSLRGDDTAVYYCARDGKSLNGYSGLIDYWGQGSLVTVSSGGGGSGGGGSGGGGSEIVLTQSPATLSLSPGERATLSCRASQSVSSSYLAWYQQKPGQAPRLLIYDASNRAAGIPSRFSGSGSGSDFTLTISSLAPEDFAVYFCQQRSSWPPLTFGGGTKVEIKRDYKDDDDK

SEQ ID NO: 25993 - protein, 243 aa, Artificial Sequence
  source: /note="Description of Artificial Sequence: Synthetic polypeptide"
MAQVQLVQSGAEVKKPGASVKVSCKASGYTFTGYYMHWVRQAPGQGLEWMGWINPNSGGTNYAQKFQGWVTMTRDTSISTAYMELSRLRSDDTAVYYCARSDGSLWGQGTLVTVSSGGGGSGGGGSGGSALSSELTQDPAVSVALGQTVRITCQGDSLRSYYASWYQQKPGQAPVLVIYGKNNRPSGIPDRFSGSSSGNTASLTITGAQAEDEADYYCNSRDSSGTQVVFGGGTKLTVLGAAA

SEQ ID NO: 25994 - protein, 248 aa, Artificial Sequence
  source: /note="Description of Artificial Sequence: Synthetic polypeptide"
MAQVQLVQSGAEVKKPGASVKVSCKASGYTFTSYYMHWVRQAPGQGLEWMGWINAGNGNTKYSQKFQGRVTITRDTSASTAYMELSSLRSEDTAVYYCARSSPVYGPQWGQGTLVTVSSGGGGSGGGGSGGSALQSALTQPASVSGSPGQSITISCTGTSSDVGGYNYVSWYQQHPGKAPKLMIYEVSNRPSGVSNRFSGSKSGNTASLTISGLQAEDEADYYCSSYTSSRITVFGGGTKLTVLGAAA

SEQ ID NO: 25995 - protein, 246 aa, Artificial Sequence
  source: /note="Description of Artificial Sequence: Synthetic polypeptide"
MAQVQLVQSGAEVKKPGASVKVSCKASGYTFTGYYMHWVRQAPGQGLEWMGWINPNSGGTNYAQKFQGWVTMTRDTSISTAYMELSRLRSEDTAVYYCARPFSEPVWGQGTLVTVSSGGGGSGGGGSGGSALQSVLTQPPSASGTPGQRVTISCSGSSSNIGSNYVYWYQQLPGTAPKLLIYRNNQRPSGVPDRFSGSKSGTSASLAISGLRSEDEADYYCAAWDDSLSALVFGGGTKLTVLGAAA

SEQ ID NO: 25996 - protein, 246 aa, Artificial Sequence
  source: /note="Description of Artificial Sequence: Synthetic polypeptide"
MAEVQLVESGGGSVQPGGSLRLSCAASGFTFSSYAMSWVRQAPGKGLEWVSAISGSGGSTYYADSVKGRFTISRDNSKNTLYLQMNSLRAEDTAVYYCARAKYTPLWGQGTLVTVSSGGGGSGGGGSGGSALQSVLTQPPSASGTPGQRVTISCSGSSSNIGSNYVYWYQQLPGTAPKLLIYRNNQRPSGVPDRFSGSKSGTSASLAISGLRSEDEADYYCAAWDDSLSGLVFGGGTKLTVLGAAA

SEQ ID NO: 25997 - protein, 245 aa, Artificial Sequence
  source: /note="Description of Artificial Sequence: Synthetic polypeptide"
MAQVQLVQSGAEVKKPGASVKVSCKASGYTFTSYYMHWVRQAPGQGLEWMGIINPSGGSTSYAQKFQGRVTMTRDTSTSTVYMELSSLRSEDTAVYYCARVTTRFWGQGTLVTVSSGGGGSGGGGSGGSALQSVLTQPPSASGTPGQRVTISCSGSSSNIGSNYVYWYQQLPGTAPKLLIYRNNQRPSGVPDRFSGSKSGTSASLAISGLRSEDEADYYCAAWDDSLLALVFGGGTKLTVLGAAA

SEQ ID NO: 25998 - protein, 244 aa, Artificial Sequence
  source: /note="Description of Artificial Sequence: Synthetic polypeptide"
MAQVQLQESGPGLVKPSETLSLTCAVSGYSISSGYYWGWIRQPPGKGLEWIGSIYHSGSTNYNPSLKSRVTISVDTSKNQFSLKLSSVTAADTAVYYCARMGIGNNPKWGQGTLVTVSSGGGGSGGGGSGGSALDIQLTQSPSSLPASVGDRVTITCRASQSISSYLNWYQQKPGKAPKLLIYAASSLQSGVPSRFSGSGSGTDFTLTISSLQPEDFATYYCQQSYSTHTFGQGTKLEIKRAAA

SEQ ID NO: 25999 - protein, 275 aa, Artificial Sequence
  source: /note="Description of Artificial Sequence: Synthetic polypeptide"
MKYLLPTAAAGLLLLAAQPAMAQVKLLESGPGLVKPSETLSLTCSVSGGSITTKDFSWAWIRQPPGKGLEWIGSIYYSGTTHYSPSLKSRVIMSVDTSDNKFSLSLTSVTAADTAVYYCARQLGRSPGIYSFWRDHRTSAFDFWGQGTLATVSAASTKGPSVFPLAPSSKSTSGGTAALGCLVKDYFPEPVTVSWNSGALTSGVHTFPAVLQSSGLYSLSSVVTVPSSSLGTQTYICNVNHKPSNTKVDKKVEPKSCDKTSDYKDDDDKHHHHHH

SEQ ID NO: 26000 - protein, 121 aa, Artificial Sequence
  source: /note="Description of Artificial Sequence: Synthetic polypeptide"
LESGAEVKKPGSSVKVSCKTSGGAFSSYAINWVRQAPGQGLEWMGGILPVFGTTNHAQKFQGRVTFTADASTSTAYMELSSLRSEDTAVYYCARVGYCSTNGCSLGGMDVWGQGTTVIVSS

SEQ ID NO: 26001 - protein, 122 aa, Artificial Sequence
  source: /note="Description of Artificial Sequence: Synthetic polypeptide"
LEQSGAEVKKPGSSVKVSCKASGGSFSSYAINWVRQAPGQGLEWMGGLMPIFGTTNYAQKFQDRLTITADVSTSTAYMQLTGLTYEDTAMYYCARVAYMLEPTVTAGGLDVWGQGTTVTVAS

SEQ ID NO: 26002 - protein, 119 aa, Artificial Sequence
  source: /note="Description of Artificial Sequence: Synthetic polypeptide"
LEESGAEMKKPGSSVRVSCKASGFTFHNHAVSWVRQAPGEGLEWMGGLIPIVGLANLQPRFQGRVTISADESTNTAYMEMRSLTSDDTAIYYCVRHGDDSSGFPPFDLWGQGALVIVSS

SEQ ID NO: 26003 - protein, 118 aa, Artificial Sequence
  source: /note="Description of Artificial Sequence: Synthetic polypeptide"
LEESGGGLVKPGGSLRLSCTASGFIFSDFYFSWIRQPPGKGLEWLSYIGGSHVYTNSADSVKGRFTTSRDNAQKSLYLQMNSLRAEDTAVYYCARHSPETDGDTFDYWGQGTLVIVPS

SEQ ID NO: 26004 - protein, 122 aa, Artificial Sequence
  source: /note="Description of Artificial Sequence: Synthetic polypeptide"
LEESGAEVKKPGSSVKVSCRASGGTFNNYAISWVRQAPGQGLEWMGGIFPFRNTAKYAQHFQGRVTITADESTGTAYMELSSLRSEDTAIYYCARGDTIFGVTMGYYAMDVWGQGTTVTVAS

SEQ ID NO: 26005 - protein, 120 aa, Artificial Sequence
  source: /note="Description of Artificial Sequence: Synthetic polypeptide"
LESGGGLVQPGGSLRLSCAASGFTFSGYAMNWVRQAPGKGLEWVSAISGNGFSTYYADSVKGRFTISRDNARNTLYLQMNSLRAEDTAVYYCAKVLLVATHYYYNGMDVWGQGTTVTVSS

SEQ ID NO: 26006 - protein, 125 aa, Artificial Sequence
  source: /note="Description of Artificial Sequence: Synthetic polypeptide"
VQLQESGGGVVQPGRSLRLSCAASGFTFSTYGMHWVRQAPGKGLEWVAVISYDGSSKYSADSVKGRFTISRDNFKNTVYLQMNSLRAEDTAVYYCAKDNYSKYGVVRVGYGMDVWGQGTTVTVSS

SEQ ID NO: 26007 - protein, 127 aa, Artificial Sequence
  source: /note="Description of Artificial Sequence: Synthetic polypeptide"
EVQLLESGGGLVQPGGSLRLSCAASGFSFSSVYDMSWVRQAPGKGLEWIASIVTGSRTTWYASWAKGRFTVSRDNSKNTLYLQMNSLRAEDTAVYFCARGEYGHDGYVDGTMGLGLWGPGTTVTVSS

SEQ ID NO: 26008 - protein, 127 aa, Artificial Sequence
  source: /note="Description of Artificial Sequence: Synthetic polypeptide"
EVQLLESGGGLVQPGGSLRLSCAASGFSFSSVYDMSWVRQAPGKGLEWIASIVTGSRTTWYASWAKGRFTVSRDTSKNTLYLQMNSLRAEDTAVYFCARGEYGHDGYVDGTMGLGLWGPGTTVTVSS

SEQ ID NO: 26009 - protein, 124 aa, Artificial Sequence
  source: /note="Description of Artificial Sequence: Synthetic polypeptide"
EVQLLESGGGLVQPGGSLRLSCAASGFSLSAYSVSWVRQAPGKGLEWIGIIGHSGNTYYASWAKGRFTISRDNSKNTVYLQMNSLRAEDTAVYFCAREDYRYGDYGYYWDFNFWGPGTLVTVSS

SEQ ID NO: 26010 - protein, 124 aa, Artificial Sequence
  source: /note="Description of Artificial Sequence: Synthetic polypeptide"
EVQLLESGGGLVQPGGSLRLSCAASGFSLSAYSVSWVRQAPGKGLEWIGIIGHSGNTYYASWAKGRFTISRDTSKNTVYLQMNSLRAEDTAVYFCAREDYRYGDYGYYWDFNFWGPGTLVTVSS

SEQ ID NO: 26011 - protein, 119 aa, Artificial Sequence
  source: /note="Description of Artificial Sequence: Synthetic polypeptide"
EVQLVESGGGLVQPGGSLRLSCAASGFDVSSYWMSWVRQAPGKGLEWIGYIDPVFGTTYYASWVNGRFTISSHNSKNTLYLQMNSLRAEDTAVYFCATNTHGTGGYYLWGPGTLVTVSS

SEQ ID NO: 26012 - protein, 126 aa, Artificial Sequence
  source: /note="Description of Artificial Sequence: Synthetic polypeptide"
EVQLLESGGGLVQPGGSLRLSCAASGFSFSGSYYMCWVRQAPGKGLEWIACIDGDLSGSAYYANWAKGRFTISRDNSKNTVYLQMNSLRAEDTAVYYCAREGPVGVGSIYLGFDLWGPGTLVTVSS

SEQ ID NO: 26013 - protein, 126 aa, Artificial Sequence
  source: /note="Description of Artificial Sequence: Synthetic polypeptide"
EVQLLESGGGLVQPGGSLRLSCAASGFSFSGSYYMCWVRQAPGKGLEWIACIDGDLSGSAYYANWAKGRFTISRDTSKNTVYLQMNSLRAEDTAVYYCAREGPVGVGSIYLGFDLWGPGTLVTVSS

SEQ ID NO: 26014 - protein, 138 aa, Artificial Sequence
  source: /note="Description of Artificial Sequence: Synthetic polypeptide"
MEWSWIFLFLLSGTAGVHSEVQLQQSGPELVKPGASVKMSCKASGYTFTSYVMHWVKQKPGQGLDWIGYIVPYNDGTKYNEKFKGKATLTSDKSSSTAYMELSRLTSEDSAVYYCVYGSRYDWYLDVWGAGTTVTVSS

SEQ ID NO: 26015 - protein, 163 aa, Artificial Sequence
  source: /note="Description of Artificial Sequence: Synthetic polypeptide"
MECSWVFLFLLSITAGVHCQVQLQQSGPELVKPGASVKISCTASGYTFSGSWMNWVKQRPGQGLEWIGRIYPGDGDTNYSGKFKGKATLTADKSSSTAYLQLSSLTSVDSAVYFCARDDGYYVAFDYYAMDYWGQGTSVTVSSAKTTPPSVYPLVPVCGGKLG

SEQ ID NO: 26016 - protein, 161 aa, Artificial Sequence
  source: /note="Description of Artificial Sequence: Synthetic polypeptide"
MEWTWVILFLLSVTEGVHSQVQLQQSGAELVRPGSSVKISCKASGYAFSGYWINWVKQRPGQGLEWIGQIYPGDGDTDYNGKFKGKATLTADKSSSTAYMQLSSLTSEDSAVYFCARGYDEVDYYFAMDYWGQGTSVTVSSAKTTPPSVYPLAPVCGDKLG

SEQ ID NO: 26017 - protein, 158 aa, Artificial Sequence
  source: /note="Description of Artificial Sequence: Synthetic polypeptide"
MKWSWVILFLVATATGVHSQVQLQQPGAELVRPGVSVKLSCKASGYTFTSYWMHWIKQRPEQGLERIGEINPSNGGTYYNEKFNRKATLTVDKSSSTAYMQLSSLTSEDSAVYYCARSDGYLWFFDVWGAGTKVTVSSATTTAPSVYPLVPVCGDKLG

SEQ ID NO: 26018 - protein, 130 aa, Artificial Sequence
  source: /note="Description of Artificial Sequence: Synthetic polypeptide"
QVQLVQSGAEVRKPGASVKVSCKASGYSLKDHYMVWVRQAPGQGLEWMGWINPQSGGTGYGQKFQGRVTMTRDTSTNTAYMILSSLRSDDTAVYFCARDGAKTVSNSGLSLLYYHNRLDAWGQGTMVTVS

SEQ ID NO: 26019 - protein, 126 aa, Artificial Sequence
  source: /note="Description of Artificial Sequence: Synthetic polypeptide"
QVQLVESGGGVVQPGRSVRLSCVASGFTFSSYAMHWVRQAPGKGLEWVSLISFDGDNKYYADSVRGRFTISRDSSQKTLFLQMNSLRVEDTAIYYCAREELVGLMPPYYNYGLDVWGQGTTVTVSS

SEQ ID NO: 26020 - protein, 124 aa, Artificial Sequence
  source: /note="Description of Artificial Sequence: Synthetic polypeptide"
QVQLVESGGGVVQPGRSLRLSCAASGFSFNTYGMHWVRQAPGKGLEWVAVIWDDGSKMYHADSVKGRFTISRDNSKNTLYLQMNSLRAEDTAVYYCARDEGAIMLHAMTDYGLDVWGQGTTVTV

SEQ ID NO: 26021 - protein, 127 aa, Artificial Sequence
  source: /note="Description of Artificial Sequence: Synthetic polypeptide"
QVQLVQSGAEVRKPGSSVKVSCKASGGTFSSYVIHWVRQAPGQGLEWMGGIIPIFNTANYAQKVQGRVTITADESTSTAYMELSSLRSEDTAIYYCARDFLSGPMEMPGGYYGLDVWGQGTTVTVSS

SEQ ID NO: 26022 - protein, 124 aa, Artificial Sequence
  source: /note="Description of Artificial Sequence: Synthetic polypeptide"
QVQLQQWGAGLLKPSETLSLTCAVYGGSFSGYYWGWIRQPPGKGLEWIGEINHSGSANSNPSLKSRVTMSVDTSKNQFSLKVSSVTAADTAVYFCARVTRDLEWIPGDYYMDVWGKGTTVTVSS

SEQ ID NO: 26023 - protein, 119 aa, Artificial Sequence
  source: /note="Description of Artificial Sequence: Synthetic polypeptide"
EVQLQQSGPELVKPGTSMKISCKASGSSFTDYTMNWMKQSHGKNLEWIGLINPYNGGTRYNQKFKGKATLTLDKSSSTAYMEVLSLTSEDSAVYYCAGGLRRVNWFAYWGQGTLVSVSA

SEQ ID NO: 26024 - protein, 120 aa, Artificial Sequence
  source: /note="Description of Artificial Sequence: Synthetic polypeptide"
DVQLVESGGGLVQPGGSRKLSCAASGFTFSSFGMHWVRQAPEKGLEWVAYISSGSSTLHYADTVKGRFTISRDNPKNTLFLQMTSLRSEDTAMYYCARWGNYPHYAMDYWGQGTSVTVSS

SEQ ID NO: 26025 - protein, 117 aa, Artificial Sequence
  source: /note="Description of Artificial Sequence: Synthetic polypeptide"
QVQLQQSQPELKKPGQTVRISCKASGYTFTTAGMQWVQKMPGKGLKWIGWINTHSGVPKYAEDFKGRFAFMLETSASTAYLQINNLKNEDTATYFCARNYGWYFDVWGQGTTVTVSS

SEQ ID NO: 26026 - protein, 121 aa, Artificial Sequence
  source: /note="Description of Artificial Sequence: Synthetic polypeptide"
RGAAGESGAEVKKTGSSVKVSCKASGYTFTYRYLHWVRQAPGQALEWMGWITPFNGNTNYAQKFQDRVTITRDRSMSTAYMELSSLRSEDTAMYYCARGADTAMAGAFDIWGQGTMVTVSS

SEQ ID NO: 26027 - protein, 124 aa, Artificial Sequence
  source: /note="Description of Artificial Sequence: Synthetic polypeptide"
MAQVTLKQSGAEVKKPGSSVKVSCTASGGTLRTYGVSWVRQAPGQGLEWLGRTIPLFGKTDYAQKFQGRVTITADKSMDTSFMELTSLTSEDTAVYYCARDLTTLTSYNWWDLWGQGTLVTVSS

SEQ ID NO: 26028 - protein, 124 aa, Artificial Sequence
  source: /note="Description of Artificial Sequence: Synthetic polypeptide"
MAQVQLQQSGAGVKKPGSSVRVSCSASGGTLRTYALSWVRQVPGQGFEWMGRIIPMFGKTDYAQKFQGRLSITADKSMDTGFMELTSLTSEDTAVYYCARDLTTLTSYNWLDIWGQGTLVTVSS

SEQ ID NO: 26029 - protein, 122 aa, Artificial Sequence
  source: /note="Description of Artificial Sequence: Synthetic polypeptide"
QVQLQQSGAEVKKPGSSVKVSCKASGGTLRTYGVSWVRQAPGQGLEWLGGTIPLFGKTDYAQKFQGRVTITADKSMDTSFMELTSLTSEDTAVYYCARDLTTLTSYNWWDLWGQGTLVTVSS

SEQ ID NO: 26030 - protein, 147 aa, Artificial Sequence
  source: /note="Description of Artificial Sequence: Synthetic polypeptide"
MDWTWRFLFVVAAATGVLSQVQLVQSGAEVKKPGSSVKVSCKASGGTFSNFAISWVRQAPGQGLEWMGRIMPLFVTSTYAQKFQGRVTISADASTSTAYMELSSLRSDDTAMYYCARDITAPGAAPTPLNFYGMDVWGQGTTVTVSS

SEQ ID NO: 26031 - protein, 240 aa, Artificial Sequence
  source: /note="Description of Artificial Sequence: Synthetic polypeptide"
MKYLLPTAAAGLLLLAAQPAMAELTQSPDSLAVSLGERATINCKSSQSVLYYSNKKNYLAWYQQKPGQPPKLLIYWASTRESGVPDRFSGSGSGTDFTLTISSLQAEDVAVYYCQQYYSTPLTFGGGTKVEIKRTVAAPSVFIFPPSDEQLKSGTASVVCLLNNFYPREAKVQWKVDNALQSGNSQESVTEQDSKDSTYSLSSTLTLSKADYEKHKVYACEVTHQGLSSPVTKSFNRGEC

SEQ ID NO: 26032 - protein, 454 aa, Artificial Sequence
  source: /note="Description of Artificial Sequence: Synthetic polypeptide"
QVQLQQWGAGLLKPSETLSLTCAVYGGSFSGYYWGWIRQPPGKGLEWIGEINHSGSANSNPSLKSRVTMSVDTSKNQFSLKVSSVTAADTAVYFCARVTRDLEWIPGDYYMDVWGKGTTVTVSSASTKGPSVFPLAPSSKSTSGGTAALGCLVKDYFPEPVTVSWNSGALTSGVHTFPAVLQSSGLYSLSSVVTVPSSSLGTQTYICNVNHKPSNTKVDKKVEPKSCDKTHTCPPCPAPELLGGPSVFLFPPKPKDTLMISRTPEVTCVVVDVSHEDPEVKFNWYVDGVEVHNAKTKPREEQYNSTYRVVSVLTVLHQDWLNGKEYKCKVSNKALPAPIEKTISKAKGQPREPQVYTLPPSRDELTKNQVSLTCLVKGFYPSDIAVEWESNGQPENNYKTTPPVLDSDGSFFLYSKLTVDKSRWQQGNVFSCSVMHEGLHNHYTQKSLSLSPGK

SEQ ID NO: 26033 - protein, 125 aa, Artificial Sequence
  source: /note="Description of Artificial Sequence: Synthetic polypeptide"
QVRLVESGGGVVQPGGSLRLSCEGSGFKFGDHGIHWVRQAPGEGLQWLTVISSDGTDERYTDSVKGRFTISRDNSKNTMSLQMNNLRPEDMGLYYCARDGKCGGGRCYSGLLDYWGQGTMVTVSS

SEQ ID NO: 26034 - protein, 119 aa, Artificial Sequence
  source: /note="Description of Artificial Sequence: Synthetic polypeptide"
QIQLVQSGTELKKPGETVKISCKASGYTFTTYGVNWVKQAPGKGLKWMGWIINTYTGEPTYVDDFKGRFAFSLETSANTAYLQINNLKNADMATYFCARAQGFGYFDYWGQGTTLTVSS

SEQ ID NO: 26035 - protein, 117 aa, Artificial Sequence
  source: /note="Description of Artificial Sequence: Synthetic polypeptide"
QVQLQQPGAELVRPGASVKLSCKASGYTFTSYWMNWVKQRPGQGLEWIGMIIDPSDSETHYNQIFKDKATLTVDKSSSTAYMHLSSLTSEDSAVFYCARGRNDFAYWGQGTLVTVSA

SEQ ID NO: 26036 - protein, 120 aa, Artificial Sequence
  source: /note="Description of Artificial Sequence: Synthetic polypeptide"
EVQLQQSGPELVKPGASMKISCKASGYSFTGYTMNWVKQRHGKSIEWIGLIINPNNGGTSYNQRFRGKTTLTLDKSSSTVYMELLSLTSEDSAVYYCARRGFRDYALDSWGQGTSVTVSS

SEQ ID NO: 26037 - protein, 120 aa, Artificial Sequence
  source: /note="Description of Artificial Sequence: Synthetic polypeptide"
EVQLQQSGPELVKPGASMKISCKASVYSFTGYTMNWVKQSHGQNLEWIGLIINPYNGGTSYNQKFKGKATLTVDKSSNTAYMELLSLTSADSAVYYCTRRGFRDYSMDYWGQGTSVTVSS

SEQ ID NO: 26038 - protein, 93 aa, Artificial Sequence
  source: /note="Description of Artificial Sequence: Synthetic polypeptide"
VVSGAVKKGKSRSCKASGYRTSYYAWVRHMGKGWMGYGDSDTYSSGVTSADKSATTAYWSSRASDTAMYYCARSTSGDYVGADWGGTMVTVSS

SEQ ID NO: 26039 - protein, 205 aa, Artificial Sequence
  source: /note="Description of Artificial Sequence: Synthetic polypeptide"
NTTHYRASSGINAEYMGINICPMSSPQSLKTLTITMGWTWIFILILSVTTGVHSEVQLQQSGPELEKPGASVKISCKASGYSFTGYNMNWVKQSNGKRLEWIGNIDPYYGGASYNQKFKGKATLTVDKSSTTAYMQLQSLTSEDSAVYYCARGGYGRYFDVWGAGTAVTVSSAKTTPPSVYPLAPGCGDTTGSSVTLGCLVKGYF

SEQ ID NO: 26040 - protein, 122 aa, Artificial Sequence [sequence omitted]

SEQ ID NO: 26041 - protein, 131 aa, Artificial Sequence
  source: /note="Description of Artificial Sequence: Synthetic polypeptide"
MAWSPLLLTLLAHCTGSWAQSVLTQPPSVSGAPGEGVTLSCTGSRSNIGAGYDVHWYQHLPGTAPKLLIYGDNNRPSGVPDRFSGSKSGTSASLAITGLQAEDEADYYCQSYDSGLSGSIFGGGTKLTVLG

SEQ ID NO: 26042 - protein, 127 aa, Artificial Sequence
  source: /note="Description of Artificial Sequence: Synthetic polypeptide"
EVQLVESGGGVVQPGRSQRLSCAASGFTFRRYAIHWVRQAPGKGLEWVAVISNDGSNKFYAESVEGRFTVSRDNSMNTVYLQMNGLRAEDTAVYYCARAPEYCSGGSCYSQYYFDYWGRGTLVTVSS

SEQ ID NO: 26043 - protein, 120 aa, Artificial Sequence
  source: /note="Description of Artificial Sequence: Synthetic polypeptide"
EVQLVESGGGLVQPGGSLRLSCAASGFTFSDYWMSWVRQAPGKGLEWVANIKYDGSEKYYVDSVKGRFTTSRDNAKNSLYLQMNSLRAEDTAVYYCAGLLWFGEKAFDIWGQGTMVTVSS

SEQ ID NO: 26044 - protein, 127 aa, Artificial Sequence
  source: /note="Description of Artificial Sequence: Synthetic polypeptide"
EVQLVESGGGVVQPGRSLRLSCAASGFTFSRNGMHWVRQAPGKGLEWVAVIANDGGNNYYADSVKGRFTISRDNSKNTLYLQMNSLRAEDTAVYYCAKAGYYYDSGTYYSQYYFDYWGQGTLVTVSS

SEQ ID NO: 26045 - protein, 125 aa, Artificial Sequence
  source: /note="Description of Artificial Sequence: Synthetic polypeptide"
QVQLQESGSGLVKPSQTLSLTCAVSGGSISSGDYSWSWIRQPPGKGLEWIAYIYHNGSAYYNPSLKSPVTISIDGSKNQFSLKLSSVTAADTAVYYCARMSNYDTSGYYDAFDIWGQGTMVTVSS

SEQ ID NO: 26046 - protein, 120 aa, Artificial Sequence; identical to SEQ ID NO: 26043
  source: /note="Description of Artificial Sequence: Synthetic polypeptide"

SEQ ID NO: 26047 - protein, 127 aa, Artificial Sequence
  source: /note="Description of Artificial Sequence: Synthetic polypeptide"
EVQLVESGGGVVQPGRSLRLSCAASGFTFTSYGMHWVRQAPGKGLEWVAVISNDGSNIYYADSVEGRFTISRDNFKNTVYLQMNSLGAEDTAVYYCAKAGNYYDGSGYYSQYYFDNWGRGTLVTVSS

SEQ ID NO: 26048 - protein, 120 aa, Artificial Sequence; identical to SEQ ID NO: 26043
  source: /note="Description of Artificial Sequence: Synthetic polypeptide"

SEQ ID NO: 26049 - protein, 110 aa, Artificial Sequence
  source: /note="Description of Artificial Sequence: Synthetic polypeptide"
DIQLTQSPASLAVSLGQRATISCRTSESVDSYGKSFMHWYQQKPGQPPKLLIYLASNLESGVPARFAQSGSRTDFTLTIDPVEADDAATYYEQQNNEDPVTFGGGTKLEI

SEQ ID NO: 26050 - protein, 234 aa, Artificial Sequence
  source: /note="Description of Artificial Sequence: Synthetic polypeptide"
MKYLLPTAAAGLLLLAAQPAMAELTQSPSSLSASVGDRVTITCRATQSISSYLSWYQQKPGQAPKLLIYGASNLQSGVPSRFSGSGSGTDFTLTINSLQPEDFATYYCQQTLSTPFTFGPGTRVDFKRTVAAPSVFIFPPSDEQLKSGTASVVCLLNNFYPREAKVQWKVDNALQSGNSQESVTEQDSKDSTYSLSSTLTLSKADYEKHKVYACEVTHQGLSSPVTKSFNRGEC

SEQ ID NO: 26051 - protein, 105 aa, Artificial Sequence
  source: /note="Description of Artificial Sequence: Synthetic polypeptide"
MTQSPSSLSASVGDRVNITCRASQSITNYLNWYQQKPGKAPRLLIYAASSLQSGVPSRFSGSGSGTDFTLTISSLQPEDFATYFCQQSYSNRWTFGQGTKLEIKR

SEQ ID NO: 26052 - protein, 113 aa, Artificial Sequence
  source: /note="Description of Artificial Sequence: Synthetic polypeptide"
DIQMTQTPSSVSASVGDRVTIKCQASQSIRRHLSWYQQKPGKRPKLLIYGASNLASGVPSRFSGSGSGTDFTLTISSLQPEDFATYYCQCTYGVGFSSTYGDAFGGGTKVEIK

SEQ ID NO: 26053 - protein, 113 aa, Artificial Sequence
  source: /note="Description of Artificial Sequence: Synthetic polypeptide"
ELQMTQTPSSVSASVGDRVTIKCQASQSIRRHLSWYQQKPGKRPKLLIYGASNLASGVPSRFSGSGSGTDFTLTISSLQPEDFATYYCQCTYGVGFSSTYGDAFGGGTKVEIK

SEQ ID NO: 26054 - protein, 110 aa, Artificial Sequence
  source: /note="Description of Artificial Sequence: Synthetic polypeptide"
DIQLTQTPSFLSASVGDRVTINCQASQNIYSNLAWYQQKPGKPPKLLIYGASTLASGVPSRFSGSGSGTEFTLTISSLQPEDFATYYCQSYVYSSSTADTFGGGTKVEIK

SEQ ID NO: 26055 - protein, 110 aa, Artificial Sequence
  source: /note="Description of Artificial Sequence: Synthetic polypeptide"
ELQLTQTPSFLSASVGDRVTINCQASQNIYSNLAWYQQKPGKPPKLLIYGASTLASGVPSRFSGSGSGTEFTLTISSLQPEDFATYYCQSYVYSSSTADTFGGGTKVEIK

SEQ ID NO: 26056 - protein, 106 aa, Artificial Sequence
  source: /note="Description of Artificial Sequence: Synthetic polypeptide"
DIQMTQTPSSVSASVGDRVTIKCQASQSIGSNLAWYQQKPGKPPKLLIYAASNLASGVPSRFSGSGSGTDFTLTISSLQPEDFATYYCQCNYYLNAFGGGTKVEIK

SEQ ID NO: 26057 - protein, 106 aa, Artificial Sequence
  source: /note="Description of Artificial Sequence: Synthetic polypeptide"
ELQMTQTPSSVSASVGDRVTIKCQASQSIGSNLAWYQQKPGKPPKLLIYAASNLASGVPSRFSGSGSGTDFTLTISSLQPEDFATYYCQCNYYLNAFGGGTKVEIK

SEQ ID NO: 26058 - protein, 110 aa, Artificial Sequence
  source: /note="Description of Artificial Sequence: Synthetic polypeptide"
DIQMTQTPSSLSASVGDRVTIKCQASHNINTYLSWYQQKPGKPPKLLIYRASDLASGVPSRFSGSGSGTDFTFTISSLQPEDIATYYCQQGFNSLNVENVFGGGTKVEIK

SEQ ID NO: 26059 - protein, 110 aa, Artificial Sequence
  source: /note="Description of Artificial Sequence: Synthetic polypeptide"
ELQMTQTPSSLSASVGDRVTIKCQASHNINTYLSWYQQKPGKPPKLLIYRASDLASGVPSRFSGSGSGTDFTFTISSLQPEDIATYYCQQGFNSLNVENVFGGGTKVEIK

SEQ ID NO: 26060 - protein, 133 aa, Artificial Sequence
  source: /note="Description of Artificial Sequence: Synthetic polypeptide"
MESQTQVFLSLLLWVSGTCGNIMMTQSPSSLAVSAGEKVTMSCKSSQSVLYSSNQKNYLAWYQQKPGQSPKLLIYWASTRESGVPDRFTGSGSGTDFTLTISSVQAEDLAVYYCHQYFSSYTFGGGTKLEIKR

SEQ ID NO: 26061 - protein, 146 aa, Artificial Sequence
  source: /note="Description of Artificial Sequence: Synthetic polypeptide"
METDTLLLWVLLLWVPGSTGDIVLTQSPASLAVSLGQRATISCRASQSVSRSSYTYMHWYQQKPGQPPKLLIKYASNLESGVPARFSGSGSGTDFTLNIHPVEEEDTATYYCQHSWEIPYTFGGGTKLEIKRADAAPTVSIFPPSS

SEQ ID NO: 26062 - protein, 141 aa, Artificial Sequence
  source: /note="Description of Artificial Sequence: Synthetic polypeptide"
METDTLLLWVSGTCGDIVMSRSPSSLAVSVGEKVTMTCKSSQSLLYSSNQKNYLAWYQQKQSPKLLIYWASTRESGVPDAFTGSGSGTDFTLTISSVKAEDLAVYYCQQYYRYPYTFGGGTKLEIKRADAAPTVSIFPPSS

SEQ ID NO: 26063 - protein, 152 aa, Artificial Sequence
  source: /note="Description of Artificial Sequence: Synthetic polypeptide"
MKLPVRLLVLMFWIPASSSDVVMTQTPLSLPVSLGGQASISCRSSQSFVHSSGNTYLEWYLQKPGQSPKLLIYRVSNRFSGVPDRFSGSGSGTDFTLKISRVEAEDLGVYYCFQGSHVPYTFGSGTKLEIKRADAAPTVSIFPPSSKLIDDK

SEQ ID NO: 26064 - protein, 109 aa, Artificial Sequence
  source: /note="Description of Artificial Sequence: Synthetic polypeptide"
QSVLTQPPSVSAAPGQMVTISCSGSSSNIGKNYVSWYQQLPGAAPKLLIFDNNKRPSGTPDRFSGSKSGTSATLVITGLQTGDEADYYCGTPDRSLSVIFGGGTKVTVL

SEQ ID NO: 26065 - protein, 111 aa, Artificial Sequence
  source: /note="Description of Artificial Sequence: Synthetic polypeptide"
QSVLTQPPSVSAAPGQKVTISCSGSSSNIGNNFVSWYQQLPGTAPKLLIYDNDRRPSGIPDRFSGSKSDTSATLVITGLQTGDEADYYCETWDGSLNPAVVFGGGTRLTVL

SEQ ID NO: 26066 - protein, 108 aa, Artificial Sequence
  source: /note="Description of Artificial Sequence: Synthetic polypeptide"
SYELTQPPSVSVSPGQTATITCSGDNLGDEFACWYQQKPGQSPVLVIYQDSKRPSGIPERFSGSSSGNTATLTIRGTQAMDEADYYCQAWDSSTAHYVFGTGTKVTVL

SEQ ID NO: 26067 - protein, 112 aa, Artificial Sequence
  source: /note="Description of Artificial Sequence: Synthetic polypeptide"
DIVMTQSPDSLAVSLGERATINCKSSQSVLYSSNNKNYLAWYQQKPGQPPKLLIYWASTRESGVPDRFSGSGSGTDFTLTISSLQAEDVAVYYCQQYYSTPITFGQGTRLEI

SEQ ID NO: 26068 - protein, 110 aa, Artificial Sequence
  source: /note="Description of Artificial Sequence: Synthetic polypeptide"
QSVLTQPPSASGTPGQRVSISCSGSLSNIGTNYVYWYQQLPGTAPKLLIFKNNQRPSGVPDRFSGSKSGTSASLAISGLRSEDEADYYCAAWDDSLNGYVFGTGTKVTVL

SEQ ID NO: 26069 - protein, 106 aa, Artificial Sequence
  source: /note="Description of Artificial Sequence: Synthetic polypeptide"
NIVMTQSPKSMSMSVGERVTLTCKASENVVTYVSWYQQKPEQSPKLLIYGASNRYTGVPDRFTGSGSATDFTLTISSVQAEDLADYHCGQGYSYPYTFGGGTKLEI

SEQ ID NO: 26070 - protein, 109 aa, Artificial Sequence
  source: /note="Description of Artificial Sequence: Synthetic polypeptide"
QAVLTQESALTTSPGETVTLTCRSSTGAVTTSNYANWVQEKPDHLFTGLIGGTNNRVPGVPARFSGSLIGDKAALTITGAQTEDEAIYFCVLWHSNHWVFGGGTKLTVL

SEQ ID NO: 26071 - protein, 98 aa, Artificial Sequence
  source: /note="Description of Artificial Sequence: Synthetic polypeptide"
QSVLTQPASVSGSPGQSITISCSGSSSNIGNNYVSWYQQLPGTAPKLLIYDNNKRPSGIPDRFSGSKSGTSATLGITGLQTGDEADYYCGTWDSSLSA

SEQ ID NO: 26072 - protein, 110 aa, Artificial Sequence
  source: /note="Description of Artificial Sequence: Synthetic polypeptide"
EIVLTQSPGTLSLSPGERATLSCRASQSVTSSQLAWYQQKPGQAPRLLISGASNRATGIPDRFSGSGSGTDFTLTISRLEPEDFAVYYCQQYGSSPTFGGGTKVEIKRAA

SEQ ID NO: 26073 - protein, 110 aa, Artificial Sequence
  source: /note="Description of Artificial Sequence: Synthetic polypeptide"
ETTLTQSPGTLSLSPGERATLSCRASQSVSSNYLAWYQKKPGQAPRLLIYGASSRATGIPDRFSGSGSGTDFTLTINRLEPEDFAVYYCQQYGRSPTFGQGTKVEIKRAA

SEQ ID NO: 26074 - protein, 109 aa, Artificial Sequence
  source: /note="Description of Artificial Sequence: Synthetic polypeptide"
ETTLTQSPGILSLSPGDRATLSCRASQSVGSVNLAWYQQRPGQAPRLLIHGASNRATGIPDRFSGVGSGTDFTLTINRLEPDDFAVYYCQQYGTSPITFGQGTRLEIKR

SEQ ID NO: 26075 - protein, 129 aa, Artificial Sequence
  source: /note="Description of Artificial Sequence: Synthetic polypeptide"
MDMRVPAQLLGLLLLWLPGAKCDIQMTQSPSTLSASVGDRVTITCRASQTISTWLAWYQQTPRKAPKLMIYKASILENGVPSRFSGSGSGTEFTLTISSLQPEDFATYYCQQYKSYPWTFGQGTKVEIK

SEQ ID NO: 26076 - protein, 272 aa, Artificial Sequence
  source: /note="Description of Artificial Sequence: Synthetic polypeptide"
MKYLLPTAAAGLLLLAAQPAMAQVKLLESGGGLVQPGGSLRLSCEASGFTFSSYTMNWVRQAPGKGLEWVSWISSSGSDIYYAESVKGRFTISRDNAKNSLYLQMNSLRDEDTALYYCARDGIDSSSSWGGEPYFYTMDFWGQGTTVIVSSASTKGPSVFPLAPSSKSTSGGTAALGCLVKDYFPEPVTVSWNSGALTSGVHTFPAVLQSSGLYSLSSVVTVPSSSLGTQTYICNVNHKPSNTKVDKKVEPKSCDKTSDYKDDDDKHHHHHH

SEQ ID NO: 26077 - protein, 216 aa, Artificial Sequence
  source: /note="Description of Artificial Sequence: Synthetic polypeptide"
QSVLTQPPSASGTPGQRVSISCSGSLSNIGTNYVYWYQQLPGTAPKLLIFKNNQRPSGVPDRFSGSKSGTSASLAISGLRSEDEADYYCAAWDDSLNGYVFGTGTKVTVLGQPKANPTVTLFPPSSEELQANKATLVCLISDFYPGAVTVAWKADGSPVKAGVETTKPSKQSNNKYAASSYLSLTPEQWKSHRSYSCQVTHEGSTVEKTVAPTECS

SEQ ID NO: 26078 - protein, 108 aa, Artificial Sequence
  source: /note="Description of Artificial Sequence: Synthetic polypeptide"
EIVLTQSPATLSLSPGERATLSCRASQSVGGYLTWYQHKPGQAPRLLIFDASIRATGIPARFSGSGSGTDFTLTITRLEPEDFAVYYCQQRSMWPPVTFGQGTKLEIK

SEQ ID NO: 26079 - protein, 111 aa, Artificial Sequence
  source: /note="Description of Artificial Sequence: Synthetic polypeptide"
NIVLTQSPASLAVSRGQRATISCRASESVDSYGKSFMHWYQQKPGQPPKLLIYLASNLESGVPTRFSGSGSRTDFTLTIDPVEADDAATYYCQQNNEDPRTFGGGTKLEIK

SEQ ID NO: 26080 - protein, 107 aa, Artificial Sequence
  source: /note="Description of Artificial Sequence: Synthetic polypeptide"
VVVLTQSPASLSVTPGDSVSLSCRASQSVSNNLHWYQQKSHGSPRLLIKYASQSISGIPSRFSGSGSGTDFTLNINSVETEDLGMYFCQQSHNWPLTFGAGTKLELK

SEQ ID NO: 26081 - protein, 107 aa, Artificial Sequence
  source: /note="Description of Artificial Sequence: Synthetic polypeptide"
DIVLTQSPATLSVTPGDSVSLSCRASQSISNNLHWYQQKSHESPRLLIKYASQSISGIPSRFSGSGSGTDFTLTINSVETEDFGMYFCQQTNSWPHTFGGGTKLEIK

SEQ ID NO: 26082 - protein, 107 aa, Artificial Sequence
  source: /note="Description of Artificial Sequence: Synthetic polypeptide"
DIVLTQSPATLSVTPGDSVSLSCRASQSISNNLHWYQQKSHESPRLLIKYASQSISGIPSRFSGSGSGTDFTLSVNGVETEDFGMYFCQQSNSWPHTFGGGTKLEIK

SEQ ID NO: 26083 - protein, 75 aa, Artificial Sequence
  source: /note="Description of Artificial Sequence: Synthetic polypeptide"
DVTSSAVTGASSCRSNSVYSDDNNWGGRRYKVSNRDSGVDRSGSGSGTDTKSRVADVGVYYCMGRHWTGGTKVDK

SEQ ID NO: 26084 - protein, 207 aa, Artificial Sequence
  source: /note="Description of Artificial Sequence: Synthetic polypeptide"
  MOD_RES (27)..(27): Any amino acid
LIRLTIGQAVVSTQSTWGLMRIAVISXGPKFKDKMDFQVQIFSFLLISASVILSRGQIVLTQSPAIMSASPGEKVTMTCSASSSISYMHWYQQKPGTSPKRWIYDTSKLASGVPARFSGSGSGTSYSLTISNMESEDAATYYCHQRSRYHTFGGGTRLEIKRADAAPTVSIFPPSSEQLTSGGASVVCFLNNFYPKDINVKWKIDGS

SEQ ID NO: 26085 - protein, 142 aa, Artificial Sequence
  source: /note="Description of Artificial Sequence: Synthetic polypeptide"
MEFGLSWVFLVALLRGVQCQVQLVESGGGVVQPGRSLRLSCAASGFTFSSHVMHWVRQAPGKGLQWLAVTWYDGSNKAYGESVKGRFIISRDNSKNILYLQMNSLRAEDTAVYYCAREGYGRGHYFYGLDVWGRGTTVTVFS

SEQ ID NO: 26086 - protein, 112 aa, Artificial Sequence
  source: /note="Description of Artificial Sequence: Synthetic polypeptide"
DIVMTQSPDSLAVSLGERATINCKSSQSILYSSNNKNYLAWYQQKPGQPPKLLIYWASTRESGVPDRFSGSESGTDFTLTISSLQAEDVAVYYCQQYYSTPTFGPGTKVDIK

SEQ ID NO: 26087 - protein, 107 aa, Artificial Sequence
  source: /note="Description of Artificial Sequence: Synthetic polypeptide"
EIVLTQSPATLSLSPGERATLSCRASQNVSRYLAWYQQKPGQAPRLLIYDASNRATGIPARFSGSGSGTDFTLTISSLEPEDFAVYYCQQRRSWPPTFGGGTKVEIK

SEQ ID NO: 26088 - protein, 112 aa, Artificial Sequence
  source: /note="Description of Artificial Sequence: Synthetic polypeptide"
DIVMTQSPDSLAVSLGERATINCKSSQSVLYSSNNKSFLAWYQQKPGQPPSLLIHWASTRESGVPDRFSGSGSGTDFTLTISSLQAEDVAVYYCQQYYSTPTFGGGTKVEIK

SEQ ID NO: 26089 - protein, 107 aa, Artificial Sequence; identical to SEQ ID NO: 26087
  source: /note="Description of Artificial Sequence: Synthetic polypeptide"

SEQ ID NO: 26090 - protein, 107 aa, Artificial Sequence; identical to SEQ ID NO: 26087
  source: /note="Description of Artificial Sequence: Synthetic polypeptide"

SEQ ID NO: 26091 - protein, 112 aa, Artificial Sequence
  source: /note="Description of Artificial Sequence: Synthetic polypeptide"
DIVMTQSPDSLAVSLGERATINCKSSHSVLYDSNSKNYLAWYQQKPGQPPKLLIYWASTRDSGVPDRFSGSGSGTEFTLTISSLQAEDVALYYCQQYYSTPTFGGGTKVEIK

SEQ ID NO: 26092 - protein, 107 aa, Artificial Sequence; identical to SEQ ID NO: 26087
  source: /note="Description of Artificial Sequence: Synthetic polypeptide"

SEQ ID NO: 26093 - protein, 108 aa, Artificial Sequence
  source: /note="Description of Artificial Sequence: Synthetic polypeptide"
SYELTQPPSVSVSPGQTARITCSGDALPKQYAYWYQQKPGQAPVLVIYKDTERPSGIPERFSGSSSGTTVTLTISGVQAEDEADYYCQSADSSDPYVVFGGGTKLTVL

SEQ ID NO: 26094 - protein, 255 aa, Artificial Sequence
  source: /note="Description of Artificial Sequence: Synthetic polypeptide"
EVQLLESGGGVVQSGRSLRLSCAASGFIFSEYAMHWVRQAPGKGLQWVAVISVDGSDKHYADSVKGRFTISRDNSQNMLFLQMDSLRGDDTAVYYCARDGKSLNGYSGLIDYWGQGSLVTVSSGGGGSGGGGSGGGGSEIVLTQSPATLSLSPGERATLSCRASQSVGGYLAWYQQKPGQAPRLLIYDASNRAAGIPSRFSGSGSGTDFTLTISSLAPEDFAVYFCQQRSSWPPLTFGGGTKVEIKRDYKDDDDK

SEQ ID NO: 26095 - protein, 228 aa, Artificial Sequence
  source: /note="Description of Artificial Sequence: Synthetic polypeptide"
QVQLVQSGAEVKKPGESLKISCKGSGYSFANHWIAWVRQMPGKGLEWMGIFNPDNSDTTYSPSFQGQVTFSADKSISIAYLHWSSLKASDTAIYYCARLALSDGWLHDFWGQGTLVTVSSASTKGPSVFPLAPSSKSTSGGTAALGCLVKDYFPEPVTVSWNSGALTSGVHTFPAVLQSSGLYSLSSVVTVPSSSLGTQTYICNVNHKPSNTKVDKRVEPKSCDKTHT

SEQ ID NO: 26096 - protein, 127 aa, Artificial Sequence
  source: /note="Description of Artificial Sequence: Synthetic polypeptide"
EVQLVQSGAEVKKPGSSVKVSCKASGGTFSSHAVNWVRQVPGQGLEWMGRVIPILGTVKNAQKFQGRVTITADEATSTAYMELNSLRSEDTAVYYCARGGWCTGDCDARTFVWFEPWGQGTTVTVSS

SEQ ID NO: 26097 - protein, 113 aa, Artificial Sequence
  source: /note="Description of Artificial Sequence: Synthetic polypeptide"
DIQLTQSPDSLAVSLGERATINCKSSQSVLYSSINKNYLAWYQQKPGQPPKLLIYWASTRESGVPDRFSGSGSGTDFTLTISSLQAEDVAVYYCQQYYSTPYTFGQGTKVEIK

SEQ ID NO: 26098 - protein, 212 aa, Artificial Sequence
  source: /note="Description of Artificial Sequence: Synthetic polypeptide"
SYELTQPPSVSVAPGKTARITCGGNNIGSKSVHWYQQKPGQAPVLVVYDDSDRPSGIPERFSGSNSGNTATLTISRVEAGDEADYYCQVWDSSSDYVFGTGTKVTVLGQPKANPTVTLFPPSSEEFQANKATLVCLISDYPGAVTVAWKADGSPVKAGVETTKPSKQSNNKYAASSYLSLTPEQWKSHRSYSCQVTHEGSTVEKTVAPTECS

SEQ ID NO: 26099 - protein, 212 aa, Artificial Sequence
  source: /note="Description of Artificial Sequence: Synthetic polypeptide"
SYELTQPPSVSVAPGKTARITCGGNNIGSKSVHWYQQKPGQAPVLVVYDDSDRPSGIPERFSGSNSGNTATLTISRVEAGDEADYYCQVWDSSSDYVFGTGTKVTVLGQPKANPTVTLFPPSSEEFQANKATLVCLISDFYPGAVTVAWKADGSVKAGVETTKPSKQSNNKYAASSYLSLTPEQWKSHRSYSCQVTHEGSTVEKTVAPTECS

SEQ ID NO: 26100 - protein, 457 aa, Artificial Sequence
  source: /note="Description of Artificial Sequence: Synthetic polypeptide"
MNFGLRLIFLVLTLKGVQCDVKLVESGGGLVKPGGSLKLSCAASGFTFSSYTMSWVRQTPEKRLEWVATISSGGSYTYYPDSVKGRFTISRDNAKNTLYLQMSSLKSEDTAMYYCTRDGNDYDYWGQGTTLTVSSAKTTPPSVYPLAPGSAAQTNSVTLGCLVKGYFPEPVTVTWNSGSLSSGVHTFPAVLQSDLYTLSSSVTVPSSTWPSETVTCNVAHPASSTKVDKKIVPRDCGCKPCICTVPEVSSVFIFPPKPKDVLTITLTPKVTCVVVDISKDDPEVQFSWFVDDVEVHTAQTQPREEQFNSTFRSSELPIMHQDWLNGKEFKCRVNSAAFPAPIEKTISKTKGRPKAPQVYTIPPPKEQMAKDKVSLTCMITDFFPEDITVEWQWNGQPAENYKNTQPIMDTDGSYFVYSKLNVQKSNWEAGNTFTCSVLHEGLHNHHTEKSLSHSPGK

SEQ ID NO: 26101 - protein, 233 aa, Artificial Sequence
  source: /note="Description of Artificial Sequence: Synthetic polypeptide"
MAVLALLFCLVTFPSCILSQVQLKESGPGLVAPSQSLSITCTVSGFSLTGYGVNWVRQPPGKGLEWLGMIWGDGSTDYNSALKSRLSISKDNSKSQVFLKMNSLQTDDTARYYCARVGDYGDYFDYWGQGTTLTVSSAKTTPPSVYPLAPGSAAQNSMVTLGCLVKGYFPEPVTVTWNSGSLSSGVHTFPAVLQSDLYTLSSSVTVPSSTWPSETVTCNVAHPASSTKVDKKI

SEQ ID NO: 26102 - protein, 117 aa, Artificial Sequence
  source: /note="Description of Artificial Sequence: Synthetic polypeptide"
EVQLVQSGGGVVQPGKSLRLSCAASGFAFSSYAMHWVRQAPGKGLEWVAVISYDGSNKYYADSVKGRFTISRDNSKNTLYLQMNSLRAEDTAVYYCARDRSYYLDYWGQGTLVTVSS

SEQ ID NO: 26103 - protein, 125 aa, Artificial Sequence
  source: /note="Description of Artificial Sequence: Synthetic polypeptide"
QVQLVESGGGVVQPGRSLRLSCAASGFTFSNYGMHWVRQAPGKGLEWLAVISSDGRIKFYADSVKGRFTMSRDSSKNTLYLQMNSLRAEDTAVYYCAKDRFQFARSWYGDYFDYWGQGTQVTVSS

SEQ ID NO: 26104 - protein, 125 aa, Artificial Sequence
  source: /note="Description of Artificial Sequence: Synthetic polypeptide"
QVTLKESGPVLVKPTETLTLTCTVSVFSLSNARMGVSWIRQPPGKALEWLAHIFSSDQKSYSTSLKSRLTISKDTSKSQVVLTMTNMDPEDTGTYYCARINTAAYDYDSTTFDIWGQGTMVTVSS

SEQ ID NO: 26105 - protein, 123 aa, Artificial Sequence
  source: /note="Description of Artificial Sequence: Synthetic polypeptide"
QVQLVESGGGVVQPGRSLRLSCEASGFTLRTSSLHWVRQAPGKGLEWVAVISNDGATKFYADAVKGRFTISRDNSNNKIYLQLNGLKPEDTAVYYCARETRHYSHGLNWFDPWGQGTLVNVSS

SEQ ID NO: 26106 - protein, 123 aa, Artificial Sequence
  source: /note="Description of Artificial Sequence: Synthetic polypeptide"
QVQLVESGGGVVQPGRSLRLSCAGSGFTFSSFGLHWVRQAPGKGLEWLALISDEGRIKYYANSVKGRFFISRDNSKNTLYLQMNSLRGEDTAVYYCARDVKGHIVVMTSLDYWGQGALVTVSS

SEQ ID NO: 26107 - protein, 126 aa, Artificial Sequence
  source: /note="Description of Artificial Sequence: Synthetic polypeptide"
QVLLVESGGGVVQPGMSLRLSCAASGFTFSSYAMHWVRQAPGKGLEWVAVISYDGSTKFYADSVRGRFPISRDNSKNTVYLQMNSLRPEDTAVYYCATVSVEGYTSGWYLGTLDFWGQGTPVTVSS

SEQ ID NO: 26108 - protein, 127 aa, Artificial Sequence
  source: /note="Description of Artificial Sequence: Synthetic polypeptide"
EVLLVESGGGLVQPGRSLRLSCVVSGFTFDYYAMHWVRQAPGKGLEWVSGISWNSDNTDYADSVKGRFTISRDNAKNSLYLQMNSLKTEDTALYYCAKDISLVFWSVNPPRNGMDVWGQGTTVTVSS

SEQ ID NO: 26109 - protein, 124 aa, Artificial Sequence
  source: /note="Description of Artificial Sequence: Synthetic polypeptide"
LVQLVESGGGVVQPGRSLRLSCAGSGFTFSSYGMHWVRQTPGKGLEWVAVISFDGRNKFYADPVKGRFTISRDNSKNTVFLELDSLTTEDTAFYYCARDDNLDRHWPLRLGGYWGQGTLVTVSS

SEQ ID NO: 26110 - protein, 127 aa, Artificial Sequence
  source: /note="Description of Artificial Sequence: Synthetic polypeptide"
QAQLVESGGALVQPGRSLRLSCAASGFTFRNYAMHWVRQAPATGLQWLAVITSDGRNKFYADSVKGRFTISREDSKNTLYLQMDSLRGEDTAVYYCVTQRDNSRDYFPHYFHDMDVWGQGTTVAVSS

SEQ ID NO: 26111 - protein, 119 aa, Artificial Sequence
  source: /note="Description of Artificial Sequence: Synthetic polypeptide"
DVQLLESGGGLVQPGGSLRLSCAASGFSFSSYAMTWVRQAPGKGLEWVATMSASGDSTNDADSVKGRFTISRDNSKNTLFLQMNSLRPEDTAVYYCASPLRNYGDLLYWGQGTLVTVSS

SEQ ID NO: 26112 - protein, 126 aa, Artificial Sequence
  source: /note="Description of Artificial Sequence: Synthetic polypeptide"
EVQLLESGGGLVQPGGSLRLSCTASGFTFASYAMTWVRQAPGKGLEWVSTISGGGGDTYSADSVKGRFTISRDNSKSTLYLQMNSLRAADTALYYCARLESATQPLGYYFYGMDVWGQGTTVTVSS

SEQ ID NO: 26113 - protein, 117 aa, Artificial Sequence
  source: /note="Description of Artificial Sequence: Synthetic polypeptide"
LESGGGVVQPGRSLRLSCAASGFTFSSYAMHWVRQAPGKGLEWVAVISYDGSTKFYADSVKGRFTISRDNSKNMLYLQMNSLRAEDTAVYYCARHPGYSSGWVYGMDVYWGQGTLVT

SEQ ID NO: 26114 - protein, 117 aa, Artificial Sequence
  source: /note="Description of Artificial Sequence: Synthetic polypeptide"
LESGGGVVQPGRSLRLSCAASGFTFSSYAMHWVRQAPGKGLEWVAVISYDGSNKFYADSVKGRFTISRDNSKNTLYLQMNSLRAEDTAVYYCARHPGYSSGWPPGYFDYWGQGTLVT

SEQ ID NO: 26115 - protein, 107 aa, Artificial Sequence
  source: /note="Description of Artificial Sequence: Synthetic polypeptide"
DIQMTQSPSSVSASVGDRVTITCRASQGISNWLAWYQQKPGKAPKLLIYAASSLQSGVPSRFSGSGSGTDFTLTIRSLQPEDFATYYCQQANNFPLTFGGGTKVEIK

SEQ ID NO: 26116 - protein, 131 aa, Artificial Sequence
  source: /note="Description of Artificial Sequence: Synthetic polypeptide"
LVQLEESGTVLPRPGASVKMSCKASGYTFTSYWMHWVKQRPGQGLEWIGAIYPGNSDTNYNQKFKGRATLTAVTSTSTASMELSSLTNEDSAVYYCTRDGYGSLYYYAMDFWGQGTSVTVSSAKTTAPSVK

SEQ ID NO: 26117 - protein, 107 aa, Artificial Sequence
  source: /note="Description of Artificial Sequence: Synthetic polypeptide"
QVELVESGGGLVKPGGSLRLSCAASGFTFSAYAMSWVRQAPGKGLEWVKGRFTISRDNSKNTLYLQMNSLRAEDTAVYYCAKGGYCTGGVCSSLDYRGQGTLVTVSS

SEQ ID NO: 26118 - protein, 464 aa, Artificial Sequence
  source: /note="Description of Artificial Sequence: Synthetic polypeptide"
MEFGLSWVFLVAIIKGVQCQVQLQESGGGLVKPGGSLKLSCAASGFTFSSYTMSWVRQTPDKRLEWVATISSGGSYTYYPDSVKGRFTISRDNAKNTLYLQMSSLKSEDTAMYYCARDGNDYDYWGQGTMVTVSSASTKGPSVFPLAPSSKSTSGTAALGCLVKDYFPEPVTVSWNSGALTSGVHTFPAALQSSGLYSLSSVVTVPSSSLGTQTYICNVNHKPSNTKVDKRVEPKSCDKTHTCPPCPAPELLGGPSVFLFPPKPKDTLMISRTPEVTCVVVDVSHEDPEVKFNWYVDGVEVHNAKTKPREEQYNSTYRVVSVLTVLHQDWLNGKEYKCKVSNKALPAPIEKTISKAKGQPREPQVYTLPPSRDELTKNQVSLTCLVKGFYPSDIAVEWESNGQPENNYKTTPPVLDSDGSFFLYSKLTVDKSRWQQGNVFSCSVMHEALHNHYTQKSLSLSPGK

SEQ ID NO: 26119 - protein, 452 aa, Artificial Sequence
  source: /note="Description of Artificial Sequence: Synthetic polypeptide"
QVQLVQSGAEVKKPGSSVKVSCKASGGTFSSYAISWVRQAPGQGLEWMGGIIPIFGTASYAQKFQGRVTITADKSTSTAYMELSSLRSEDTAVYYCARVGYCSSTSCNRGAFDIWGQGTMVTVSSASTKGPSVFPLAPSSKSTSGGTAALGCLVKYPEPVTVSWNSGALTSGVHTFPAVLQSSGLYSLSSVVTVPSSSLGTQTYICNVNHKPSNTKVDKKVEPKSCDKTHTCPPCPAPELLGGPSVFLFPPKPKDTLMISRTPEVTCVVVDVSHEDPEVKFNWYVDGVEVHNAKTKPREEQYNSTYRVVVLTVLHQDWLNGKEYKCKVSNKALPAPIEKTISKAKGQPREPQVYTLPPSRDELTKNQVSLTCLVKGFYPSDIAVEWESNGQPENNYKTTPPVLDSDGSFFLYSKLTVDKSRWQQGNVFSCSVMHEALHNHYTQKSLSLSPGK

SEQ ID NO: 26120 - protein, 457 aa, Artificial Sequence
  source: /note="Description of Artificial Sequence: Synthetic polypeptide"
QVQLQQSGAEVKKPGSSVKVSCKASGGTFSSYTISWVRQAPGQGLEWMGRIIPIFGTANYAQKFQGRVTITADKSTSTAYMELSSLRSEDTAVYYCARDLGPGGDSSGYYYGPGAFDIWGQGTMVTVSSASTKGPSVFPLAPSSKSTSGGTAALCLVKDYFPEPVTVSWNSGALTSGVHTFPAVLQSSGLYSLSSVVTVPSSSLGTQTYICNVNHKPSNTKVDKKVEPKSCDKTHTCPPCPAPELLGGPSVFLFPPKPKDTLMISRTPEVTCVVVDVSHEDPEVKFNWYVDGVEVHNAKTKPREEQYNSYRVVSVLTVLHQDWLNGKEYKCKVSNKALPAPIEKTISKAKGQPREPQVYTLPPSRDELTKNQVSLTCLVKGFYPSDIAVEWESNGQPENNYKTTPPVLDSDGSFFLYSKLTVDKSRWQQGNVFSCSVMHEALHNHYTQKSLSLSPGK

SEQ ID NO: 26121 - protein, 455 aa, Artificial Sequence
  source: /note="Description of Artificial Sequence: Synthetic polypeptide"
QVQLQQSGAEVKKRGSSVKVSCKASGGTFSSYTISWVRQAPGQGLEWMGRIIPILGIANYAQKFQGRVTITADKSTSTAYMELSSLRSEDTAVYYCARDLYDSSGYYRNTDAFDIWGQGTMVTVSSASTKGPSVFPLAPSSKSTSGGTAALGCLVDYFPEPVTVSWNSGALTSGVHTFPAVLQSSGLYSLSSVVTVPSSSLGTQTYICNVNHKPSNTKVDKKVEPKSCDKTHTCPPCPAPELLGGPSVFLFPPKPKDTLMISRTPEVTCVVVDVSHEDPEVKFNWYVDGVEVHNAKTKPREEQYNSTYRVVSVLTVLHQDWLNGKEYKCKVSNKALPAPIEKTISKAKGQPREPQVYTLPPSRDELTKNQVSLTCLVKGFYPSDIAVEWESNGQPENNYKTTPPVLDSDGSFFLYSKLTVDKSRWQQGNVFSCSVMHEALHNHYTQKSLSLSPGK

SEQ ID NO: 26122 - protein, 458 aa, Artificial Sequence
  source: /note="Description of Artificial Sequence: Synthetic polypeptide"
MAVLALLFCLVTFPSCILSQVQLKESGPGLVAPSQSLSITCTVSGFSLTGYGVNWVRQPPGKGLEWLGMIWGDGSTDYNSALKSRLSISKDNSKSQVFLKMNSLQTDDTARYYCARVGDYGDYFDYWGQGTTLTVSSAKTTPPSVYPLAPGSAAQSMVTLGCLVKGYFPEPVTVTWNSGSLSSGVHTFPAVLQSDLYTLSSSVTVPSSTWPSETVTCNVAHPASSTKVDKKIVPRDCGCKPCICTVPEVSSVFIFPPKPKDVLTITLTPKVTCVVVDISKDDPEVQFSWFVDDVEVHTAQTQPREEQFNSTRSVSELPIMHQDWLNGKEFKCRVNSAAFPAPIEKTISKTKGRPKAPQVYTIPPPKEQMAKDKVSLTCMITDFFPEDITVEWQWNGQPAENYKNTQPIMDTDGSYFVYSKLNVQKSNWEAGNTFTCSVLHEGLHNHHTEKSLSHSPGK

SEQ ID NO: 26123 - protein, 251 aa, Artificial Sequence
  source: /note="Description of Artificial Sequence: Synthetic polypeptide"
QVQLVQSGAEVKKPGSSVKVSCKASGGTFSSYAISWVRQAPGQGLEWMGGIIPIFGTASYAQKFQGRVTITADKSTSTAYMELSSLRSEDTAVYYCARVGYCSSTSCNRGAFDIWGQGTMVTVSSASTKGPSVFPLAPSSKSTSGGTAALGCLVKYFPEPVTVSWNSGALTSGVHTFPAVLQSSGLYSLSSVVTVPSSSLGTQTYICNVNHKPSNTKVDKKVEPKSCDKTSGQAGHHHHHHGDYKDDDDKG

SEQ ID NO: 26124 - protein, 117 aa, Artificial Sequence
  source: /note="Description of Artificial Sequence: Synthetic polypeptide"
QMQLVQSGTEVKKPGESLKISCKGSGYGFITYWIGWVRQMPGKGLEWMGIIYPGDSETRYSPSFQGQVTISADKSINTAYLQWSSLKASDTAIYYCAGGSGISTPMDVWGQGTTVTV

SEQ ID NO: 26125 - protein, 468 aa, Artificial Sequence
  source: /note="Description of Artificial Sequence: Synthetic polypeptide"
MGWSCIILFLVATATGVHSEVQLLETGGGLVKPGGSLRLSCAASGFSLSDYYMNWIRQAPGKGLEWVAYISSSSGYTNYGDSVKGRFTISRDHAKNSLYLQMNSLRVEDTAVYYCVRDRDDFWSGYYKHWGLGTLVTVSSASTKGPSVFPLAPSSSTSGGTAALGCLVKDYFPEPVTVSWNSGALTSGVHTFPAVLQSSGLYSLSSVVTVPSSSLGTQTYICNVNHKPSNTKVDKRVEPKSCDKTHTCPPCPAPELLGGPSVFLFPPKPKDTLMISRTPEVTCVVVDVSHEDPEVKFNWYVDGVEVHNAKTKPREEQYNSTYRVVSVLTVLHQDWLNGKEYKCKVSNKALPAPIEKTISKAKGQPREPQVYTLPPSREEMTKNQVSLTCLVKGFYPSDIAVEWESNGQPENNYKTTPPVLDSDGSFFLYSKLTVDKSRWQQGNVFSCSVMHEALHNHYQKSLSLSPGK

SEQ ID NO: 26126 - protein, 231 aa, Artificial Sequence
  source: /note="Description of Artificial Sequence: Synthetic polypeptide"
MGWSCIILFLVATATGVHCAIRMTQSPSFLSASVGDRVTITCRASQDINSFLAWYQQRPGKAPKLLIYGASNLETGVPSRFSGGGSGTDFTLTISSLQPEDIATYYCQQYDKLPTFGQGTRLEIKRTVAAPSVFIFPPSDEQLKSGTASVVCLLNNFYPEAKVQWKVDNALQSGNSQESVTEQDSKDSTYSLSSTLTLSKADYEKHKVYACEVTHQGLSSPVTKSFNRGEC

SEQ ID NO: 26127 - protein, 459 aa, Artificial Sequence
  source: /note="Description of Artificial Sequence: Synthetic polypeptide"
MGWSCIILFLVATATGVHSEVQLVESGGGLVQPGRSLRLSCAASGFTFSNYAMYWVRQAPGKGLEWVALISYDISTDYYADSVKGRFTISRDNSKNTIYLQMNNLRTEDTALYYCAGNDYWGQGTLVTVSSASTKGPSVFPLAPSSKSTSGGTAAGCLVKDYFPEPVTVSWNSGALTSGVHTFPAVLQSSGLYSLSSVVTVPSSSLGTQTYICNVNHKPSNTKVDKRVEPKSCDKTHTCPPCPAPELLGEPSVFLFPPKPKDTLMISRTPEVTCVVVDVSHEDPEVKFNWYVDGVEVHNAKTKPREEQYNSTYRVVSVLTVLHQDWLNGKEYKCKVSNKALPAPIEKTISKAKGQPREPQVYTLPPSREEMTKNQVSLTCLVKGFYPSDIAVEWESGQPENNYKTTPPVLDSDGSFFLYSKLTVDGSRWQQGNVFSCSVMHEALHNHYTQKSLSLSPGK

SEQ ID NO: 26128 - protein, 234 aa, Artificial Sequence
  source: /note="Description of Artificial Sequence: Synthetic polypeptide"
MGWSCIILFLVATATGSWAQSVLTQSPSASGTPGQRVTISCSGSSSNIGNNYVYWYQQLPGTAPKLLIYWNDQRPSGVPDRFSGSKSGTSASLAISGLRSEDEADYYCAAWDDSLSGAVFGGGTQLTVLGQPKAAPSVTLFPPSSEELQANKATLCLISDFYPGAVTVAWKADSSPVKAGVETTTPSKQSNNKYAASSYLSLTPEQWKSHRSYSCQVTHEGSTVEKTVAPTECS

SEQ ID NO: 26129 - protein, 108 aa, Artificial Sequence
  source: /note="Description of Artificial Sequence: Synthetic polypeptide"
DIRVTQSPPSLSASIGDRVTITCRASQNIRNSLNWYQQKPGKAPKLLIYAAYSLQSGVPSRFSGSGSGTDFTLTISSLQPEDFATYYCQQSYSTPITFGQGTKLEIKR

SEQ ID NO: 26130 - protein, 219 aa, Artificial Sequence
  source: /note="Description of Artificial Sequence: Synthetic polypeptide"
EIVMTQSPLSLPVTLGQPASISCKSSQSLVDTNGNTYLIWFHQRPGQSPRRLIYQVSKRDSGVPDRFSGSGSGTDFTLKISRVEAEDVGVYFCMQGTYRPPTLGQGTKVEIKRTVAAPSVFIFPPSDEQLKSGTASVVCLLNNFYPREAKVQWKVDNALQSGNSQESVTEQDSKDSTYSLSSTLTLSKADYEKHKVYACEVTHQGLSSPVTKSFNRGEC

SEQ ID NO: 26131 - protein, 233 aa, Artificial Sequence
  source: /note="Description of Artificial Sequence: Synthetic polypeptide"
MSVPTQVLGLLLLWLTGARCDIQMTQSPASLSASVGETVTITCRASENIYSYLAWYQQKQGKSPQLLVYNAKTLAEGVPSRFSGSGSGTQFSLKINSLQPEDFGSYYCQHHYGTPWTFGGGTKLEIKRADAAPTVSIFPPSSEQLTSGGASVVCFLNFYPKDINVKWKIDGSERQNGVLNSWTDQDSKDSTYSMSSTLTLTKDEYERHNSYTCEATHKTSTSPIVKSFNRNEC

SEQ ID NO: 26132 - protein, 247 aa, Artificial Sequence
  source: /note="Description of Artificial Sequence: Synthetic polypeptide"
MAEVQLVQSGGGVVQPGKSLRLSCAASGFAFSSYAMHWVRQAPGKGLEWVAVISYDGSNKYYADSVKGRFTISRDNSKNTLYLQMNSLRAEDTAVYYCARDRSYYLDYWGQGTLVTVSSGGGGSGGGGSGGGGSETTLTQSPATLSLSPGERATLSCRASQSVRSNLAWYQQKPGQAPRPLIYDASTRATGIPDRFSGSGSGTDFTLTISRLEPEDFAVYYCQQRSNWPPTFGQGTKVEVKSGLVPR

SEQ ID NO: 26133 - protein, 109 aa, Artificial Sequence
  source: /note="Description of Artificial Sequence: Synthetic polypeptide"
QSVLTQPPSVSGSPGQSITISCTGTSSDVGAYNFVSWYQQHPGKAPKLMIYDVSNRPSGVSNRFSGSKSGNAASLTISGLQAEDEADYYCSSYTTRSTRVFGGGTKLTV

SEQ ID NO: 26134 - protein, 244 aa, Artificial Sequence
  source: /note="Description of Artificial Sequence: Synthetic polypeptide"
QVQLQQSGAEVKKPGSSVKVSCKASGGTFSSYTISWVRQAPGQGLEWMGGITPILGIANYAQKFQGRVTITTDESTSTAYMELSSLRSEDTAVYYCARDTVMGGMDVWGQGTTVTVSSASTKGPSVFPLAPSSKSTSGGTSALGCLVKDYFPEPTVSWNSGALTSGVHTFPAVLQSSGLYSLSSVVTVPSSSLGTQTYICNVNHKPSNTKVDKKVEPKSCDKTSPLFVHHHHHHGDYKDDDDKG

SEQ ID NO: 26135 - protein, 245 aa, Artificial Sequence
  source: /note="Description of Artificial Sequence: Synthetic polypeptide"
QVQLQQSGAEVKKPGSSVKVSCKASGGTFSSYTISWVRQAPGQGLEWMGGITPILGIANYAQKFQGRVTITTDESTSTAYMELSSLRSEDTAVYYCARDTVMGGMDVWGQGTTVTVSSASTKGPSVFPLAPSSKSTSGGTSALGCLVKDYFPEPVTVSWNSGALTSGVHTFPAVLQSSGLYSLSSVVTVPSSSLGTQTYICNVNHKPSNTKVDKKVEPKSCDKTSPLFVHHHHHHGDYKDDDDKG

SEQ ID NO: 26136 - protein, 234 aa, Artificial Sequence
  source: /note="Description of Artificial Sequence: Synthetic polypeptide"
MIASAQFLGLLLLCFQGTRCDIQMTQTTSSLSASLGDRVTISCRASQDISNYLNWYQQKPDGTVKLLIYYTSRLHSGVPSRFSGSGSGTDYSLTISNLEQEDIATYFCQQGNTLPRTFGGGTKLEIKRADAAPTVSIFPPSSEQLTSGGASVVCFLNNFYPKDINVKWKIDGSERQNGVLNSWTDQDSKDSTYSMSSTLTLTKDEYERHNSYTCEATHKTSTSPIVKSFNSNEC

SEQ ID NO: 26137 - protein, 106 aa, Artificial Sequence
  source: /note="Description of Artificial Sequence: Synthetic polypeptide"
TTLTQSPATLSLSPGERATLSCRASQSVRSNLAWYQQKPGQAPRPLIYDASTRATGIPDRFSGSGSGTDFTLTISRLEPEDFAVYYCQQRSNWPPTFGQGTKVEVK

SEQ ID NO: 26138 - protein, 112 aa, Artificial Sequence
  source: /note="Description of Artificial Sequence: Synthetic polypeptide"
AVAMTQSPLSLPVTLGQPASISCRSNQSLVYSDGNIYLNWFQQRPGQSPMRLIYRVSNRDSGVPDRFSGSGSGTDFTLKISRVEAEDVGIYYCMQGTHWPPTFGGGTKVEIK

SEQ ID NO: 26139 - protein, 107 aa, Artificial Sequence
  source: /note="Description of Artificial Sequence: Synthetic polypeptide"
DIQMTQSPSSLSASVGDRVTITCRASQTISNYLNWYQQKPGKAPKLLLYAASSLQSGVPSRFSGSGSGTDFTLTISSLQLEDFATYYCQQSYSTPPTFGGGTKVEIK

SEQ ID NO: 26140 - protein, 107 aa, Artificial Sequence
  source: /note="Description of Artificial Sequence: Synthetic polypeptide"
ERVMTQSPVTLSVSPGERATLSCRASQSVSSDLAWYQQKPGQAPRLLIYGASTRATGIPARFSGSGSGTEFTLTISSLQSEDFAVYYCQQYNNWPTTFGQGTRLDIK

SEQ ID NO: 26141 - protein, 112 aa, Artificial Sequence
  source: /note="Description of Artificial Sequence: Synthetic polypeptide"
DVVMTQSPLSLPVTLGQPASISCRSSQSLVSSDGDTSLSWFQQRPGQSPRRLIYEVSNRDSGVPDRFSGSGSGTDFTLKISRVEAEDVGVYYCMQGTHWPPTFGQGTKVEIK

SEQ ID NO: 26142 - protein, 107 aa, Artificial Sequence
  source: /note="Description of Artificial Sequence: Synthetic polypeptide"
ERVMTQFPATLSVSPGERATLSCRASQSVSSNLAWYQQKPGQAPRLLIYGASTRAIGVPARFSGSGSGTEFTLTISSLQSEDFAVYYCQQYNNWPGTFGQGTKLEIK

SEQ ID NO: 26143 - protein, 107 aa, Artificial Sequence
  source: /note="Description of Artificial Sequence: Synthetic polypeptide"
DIQMTQSPSSLSASVGDRVTITCRASQSIRSYLNWYQQKPGKAPNLLIYTASSLQSGVPSRFSGSGSGTDFTLTISSLQPEDFATYYCQQSYSSPLTFGGGTKVEIK

SEQ ID NO: 26144 - protein, 112 aa, Artificial Sequence
  source: /note="Description of Artificial Sequence: Synthetic polypeptide"
EIVMTQSPLSLPVTLGQPASISCRSSQDLLYNDGGTDLNWFQQRPGQSPRRLIYRVSNRDSGVPDRFSGSGSGSDFTLKISRVEAEDVGIYYCMQGAHWPPTFGPGTKVEIK

SEQ ID NO: 26145 - protein, 112 aa, Artificial Sequence
  source: /note="Description of Artificial Sequence: Synthetic polypeptide"
DVVLTQSPLSLPVTLGQPASISCRSSQSLVYSDGDTYLNWFQQRPGQSPRRLIYQVSNRDSGVPDRFSGSGSGTDFTLKISRVEAEDVGVYYCMQGSHWPPTFGQGTKVEIK

SEQ ID NO: 26146 - protein, 107 aa, Artificial Sequence
  source: /note="Description of Artificial Sequence: Synthetic polypeptide"
DIQMTQSPSTLSASVGDRVTITCRASQNIHRFLAWYQQKPGKAPKLLIYTASSLESGVPSRFSGSGFGTEFTLTISSLQPDDFATYYCQQYNSYSWTFGQGTKVEIK

SEQ ID NO: 26147 - protein, 109 aa, Artificial Sequence
  source: /note="Description of Artificial Sequence: Synthetic polypeptide"
SYELTQPPSVSVSPGQTARITCSGDALPKQYAFWYQQRPGQAPVLVISKDSERPSGIPERFSGSSSGTTVTLTISGVQAEDEADYYCHSADISATSWVFGGGTKLTVVS

SEQ ID NO: 26148 - protein, 104 aa, Artificial Sequence
  source: /note="Description of Artificial Sequence: Synthetic polypeptide"
ELTQSPATLSVSPGERATLSCRASQSVSSDLPWYQQKPGQAPRLLIYGASTRATGIPARFSGGSGTEFTLTISSLQSEDFAVYYCQQYNNWPPVFGGGTKVEIK

SEQ ID NO: 26149 - protein, 104 aa, Artificial Sequence
  source: /note="Description of Artificial Sequence: Synthetic polypeptide"
ELTQSPATLSVSPGERATLSCRASQSVSSNLAWYQQKPGQAPRLLIYGASTRATGIPARFSGGSGTEFTLTISSLQSENFAVYYCQQYNNWPQTFGQGTKVEIK

SEQ ID NO: 26150 - protein, 125 aa, Artificial Sequence
  source: /note="Description of Artificial Sequence: Synthetic polypeptide"
QVQLVESGGGVVQPGTSLRLSCAASGFTFSSYGIHWVRQAPGKGLEWVAVIWYDGSNKFYADSVKGRFTISRDNSKNTLYLQMNSLRAEDTAVYYCARDPLGYCSSTSCSYFDYWGQGTLVTVSS

SEQ ID NO: 26151 - protein, 127 aa, Artificial Sequence
  source: /note="Description of Artificial Sequence: Synthetic polypeptide"
ELVMTQSPSSLSASLGDRVTISCRASQDISNYLNWYQQKPDGTVKLLIYYTSRLHAGVPSRFSGSGSGTDYSLTISNLEQEDIATYFCQQGYTLPYTFGGGTKLEIKRADAAPTVSKGEFQHTGGRY

SEQ ID NO: 26152 - protein, 216 aa, Artificial Sequence
  source: /note="Description of Artificial Sequence: Synthetic polypeptide"
RCDIQLTQSPSSLSASIGDRVTITCQASQDISNYLNWYQQRPGQAPKLLIYYTSRLHSGVPSRFSGRGSGTSFTIAINSFQAEDIGTYFCQQGNTLPRTFGGGTRVEIKRTVAAPSVFIFPPSDEQLKSGTASVVCLLNNFYPREAKVQWKVDNALQSNSQESVTEQDSKDSTYSLSSTLTLSKADYEKHKVYACEVTHQGLSSPVTKSFNRGECS

SEQ ID NO: 26153 - protein, 212 aa, Artificial Sequence
  source: /note="Description of Artificial Sequence: Synthetic polypeptide"
DIQLTQSPSSLSASVGDRVTITCRASQGIRNDLGWYQQKPGKAPKLLIYAASSLQSGVPSRFSGSGSGTDFTLTISSLQPEDFATYYCQQLNSYPLTFGGGTKVEIKRTVAAPSVFIFPPSDEQLKSGTASVVCLLNNFYPREAKVQWKVDNALQSGSESVTEQDSKDSTYSLSSTLTLSKADYEKHKVYACEVTHQGLSSPVTKSFNRGEC

SEQ ID NO: 26154 - protein, 217 aa, Artificial Sequence
  source: /note="Description of Artificial Sequence: Synthetic polypeptide"
EIVLTQSPLSLPVTPGEPASISCRSSQSLLHSNGYNYLDWYLQKPGKSPQLLIYLGSNRASGVPDRFSGSGSGTDFTLKISRVEAEDVGVYYCMQALQTPLTFGGGTKVEIKRTVAAPSVFIFPPSDEQLKSGTASVVCLLNNFYPREAKVQWKVDNLSGNSQESVTEQDSKDSTYSLSSTLTLSKADYEKHKVYACEVTHQGLSSPVTKSFNRGEC

SEQ ID NO: 26155 - protein, 213 aa, Artificial Sequence
  source: /note="Description of Artificial Sequence: Synthetic polypeptide"
EIVMTQSPVTLSLSPGERATLSCRASQSVSSYLAWYQQKPGQAPRLLIYDASNRATGIPARFSGSGSGTDFTLTISSLEPEDFAVYYCQQYGSSPWTFGQGTKVEIKRTVAAPSVFIFPPSDEQLKSGTASVVCLLNNFYPREAKVQWKVDNALQSNSQESVTEQDSKDSTYSLSSTLTLSKADYEKHKVYACEVTHQGLSSPVTKSFNRGEC

SEQ ID NO: 26156 - protein, 233 aa, Artificial Sequence; identical to SEQ ID NO: 26131
  source: /note="Description of Artificial Sequence: Synthetic polypeptide"

SEQ ID NO: 26157 - protein, 212 aa, Artificial Sequence; identical to SEQ ID NO: 26153
  source: /note="Description of Artificial Sequence: Synthetic polypeptide"

SEQ ID NO: 26158 - protein, 213 aa, Artificial Sequence
  source: /note="Description of Artificial Sequence: Synthetic polypeptide"
DVKLVESGGGLVKPGGSLKLSCAASGFTFSSYTMSWVRQTPEKRLEWVATISSGGSYTYYPDSVKGRFTISRDNAKNTLYLQMSSLKSEDTAMYYCTRDGNDYDYWGQGTTLTVSSAKTTPPSVYPLAPGSAAQTNSMVTLGCLVKGYFPEPVTVTWNSGSLSSGVHTFPAVLQSDLYTLSSSVTVPSSTWPSETVTCNVAHPASSTKVDKKI

SEQ ID NO: 26159 - protein, 214 aa, Artificial Sequence
  source: /note="Description of Artificial Sequence: Synthetic polypeptide"
DIQMTQTTSSLSASLGDRVTISCRASQDISNYLNWYQQKPDGTVKLLIYYTSRLHSGVPSRFSGSGSGTDYSLTISNLEQEDIATYFCQQGNTLPRTFGGGTKLEIKRADAAPTVSIFPPSSEQLTSGGASVVCFLNNFYPKDINVKWKIDGSERQNGVLNSWTDQDSKDSTYSMSSTLTLTKDEYERHNSYTCEATHKTSTSPIVKSFNSNEC

SEQ ID NO: 26160 - protein, 146 aa, Artificial Sequence
  source: /note="Description of Artificial Sequence: Synthetic polypeptide"
MVDIPMGCSWVILFLLSGTAGVHSEVQLQQSGPELVKPGASMKISCKASGYSFTGYTMNWVKESHGKNLDWIGLINPYNGGTRYDQKFKGKATLTVDKSSTTAYMELLSLTSEDSAVYYCARSHHYASGDEYFDYWGQGTTLTVSS

SEQ ID NO: 26161 - protein, 141 aa, Artificial Sequence
  source: /note="Description of Artificial Sequence: Synthetic polypeptide"
MECSWVMLFLLSGTAGVHSEVHLQQSGPELVKPGASMKISCRTSGYSFTGYTMNWVKQTHGKILEWIGLINPYNGGVTYNQKFKGKATLTVDKSSSTTYLELLSLTSEDSAVYYCARSHNYGTGDEYFDYWGQGTTLTVYS

SEQ ID NO: 26162 - protein, 142 aa, Artificial Sequence
  source: /note="Description of Artificial Sequence: Synthetic polypeptide"
MLEWSWVILFLLSGTAGVHSEVQLQQSGPELVKPGASMKISCKASGYSFTGYTLTWVKQSHGKNLDWIGLINPYNGGTRYNQKFKGKATLTVDKSSSTAYMELLSLTSEDSAVYYCARLGYYATGDEYFDYWGQGTTLTVSS

SEQ ID NO: 26163 - protein, 119 aa, Artificial Sequence
  source: /note="Description of Artificial Sequence: Synthetic polypeptide"
EVQLQQSGTVLARPGASVKMSCKASAYTFTRYWMHWVKQRPGQGLEWIGAIYPGNSDTTYNQKFKGKAKLTAVTSTSTAYMELSSLTNEDSAVYYCTKKGVRYYALDYWGQGTSVTVSS

SEQ ID NO: 26164 - protein, 141 aa, Artificial Sequence
  source: /note="Description of Artificial Sequence: Synthetic polypeptide"
MDFGLSLVFLVLILKGVQCEVQLQQSGPELVKPGASMKISCKASGYSFTGYTLTWVKQSHGKNLDWIGLINPYSGGTRYNQKFKGKATLTVDKSSSTAYMELLSLTSEDSAVYYCARLGYYATGDEYFDYWGQGTTLTVSS

SEQ ID NO: 26165 - protein, 141 aa, Artificial Sequence
  source: /note="Description of Artificial Sequence: Synthetic polypeptide"
MDFGLSLVFLVLILKGVQCEVQLQQSGPELVKPGASMKISCKASGYSFTGYTLTWVKQSHGKNLDWIGLINPYQGGTRYNQKFKGKATLTVDKSSSTAYMELLSLTSEDSAVYYCARLGYYATGDEYFDYWGQGTTLTVSS

SEQ ID NO: 26166 - protein, 141 aa, Artificial Sequence
  source: /note="Description of Artificial Sequence: Synthetic polypeptide"
MDFGLSLVFLVLILKGVQCEVQLQQSGPELVKPGASMKISCKASGYSFTGYTLTWVKQSHGKNLDWIGLINPYDGGTRYNQKFKGKATLTVDKSSSTAYMELLSLTSEDSAVYYCARLGYYATGDEYFDYWGQGTTLTVSS

SEQ ID NO: 26167 - protein, 141 aa, Artificial Sequence
  source: /note="Description of Artificial Sequence: Synthetic polypeptide"
MDFGLSLVFLVLILKGVQCEVQLQQSGPELVKPGASMKISCKASGYSFTGYTLTWVKQSHGKNLDWIGLINPYHGGTRYNQKFKGKATLTVDKSSSTAYMELLSLTSEDSAVYYCARLGYYATGDEYFDYWGQGTTLTVSS

SEQ ID NO: 26168 - protein, 141 aa, Artificial Sequence
  source: /note="Description of Artificial Sequence: Synthetic polypeptide"
MDFGLSLVFLVLILKGVQCEVQLQQSGPELVKPGASMKISCKASGYSFTGYTLTWVKQSHGKNLDWIGLINPYTGGTRYNQKFKGKATLTVDKSSSTAYMELLSLTSEDSAVYYCARLGYYATGDEYFDYWGQGTTLTVSS

SEQ ID NO: 26169 - protein, 141 aa, Artificial Sequence
  source: /note="Description of Artificial Sequence: Synthetic polypeptide"
MDFGLSLVFLVLILKGVQCEVQLQQSGPELVKPGASMKISCKASGYSFTGYTLTWVKQSHGKNLDWIGLINPYAGGTRYNQKFKGKATLTVDKSSSTAYMELLSLTSEDSAVYYCARLGYYATGDEYFDYWGQGTTLTVSS

SEQ ID NO: 26170 - protein, 141 aa, Artificial Sequence
  source: /note="Description of Artificial Sequence: Synthetic polypeptide"
MDFGLSLVFLVLILKGVQCEVQLQQSGPELVKPGASMKISCKASGYSFTGYTLTWVKQSHGKNLDWIGLINPYLGGTRYNQKFKGKATLTVDKSSSTAYMELLSLTSEDSAVYYCARLGYYATGDEYFDYWGQGTTLTVSS

SEQ ID NO: 26171 - protein, 141 aa, Artificial Sequence
  source: /note="Description of Artificial Sequence: Synthetic polypeptide"
  MOD_RES (74)..(74): Any amino acid
MDFGLSLVFLVLILKGVQCEVQLQQSGPELVKPGASMKISCKASGYSFTGYTLTWVKQSHGKNLDWIGLINPYXGGTRYNQKFKGKATLTVDKSSSTAYMELLSLTSEDSAVYYCARLGYYATGDEYFDYWGQGTTLTVSS

SEQ ID NO: 26172 - protein, 141 aa, Artificial Sequence
  source: /note="Description of Artificial Sequence: Synthetic polypeptide"
MDFGLSLVFLVLILKGVQCEVQLQQSGPELVKPGASMKISCKASGYSFTGYTLTWVKQSHGKNLDWIGLINPYNAGTRYNQKFKGKATLTVDKSSSTAYMELLSLTSEDSAVYYCARLGYYATGDEYFDYWGQGTTLTVSS

SEQ ID NO: 26173 - protein, 141 aa, Artificial Sequence
  source: /note="Description of Artificial Sequence: Synthetic polypeptide"
MDFGLSLVFLVLILKGVQCEVQLQQSGPELVKPGASMKISCKASGYSFTGYTLTWVKQSHGKNLDWIGLINPYNVGTRYNQKFKGKATLTVDKSSSTAYMELLSLTSEDSAVYYCARLGYYATGDEYFDYWGQGTTLTVSS

SEQ ID NO: 26174 - protein, 141 aa, Artificial Sequence
  source: /note="Description of Artificial Sequence: Synthetic polypeptide"
MDFGLSLVFLVLILKGVQCEVQLQQSGPELVKPGASMKISCKASGYSFTGYTLTWVKQSHGKNLDWIGLINPYNPGTRYNQKFKGKATLTVDKSSSTAYMELLSLTSEDSAVYYCARLGYYATGDEYFDYWGQGTTLTVSS

SEQ ID NO: 26175 - protein, 141 aa, Artificial Sequence
  source: /note="Description of Artificial Sequence: Synthetic polypeptide"
  MOD_RES (75)..(75): Any amino acid
MDFGLSLVFLVLILKGVQCEVQLQQSGPELVKPGASMKISCKASGYSFTGYTLTWVKQSHGKNLDWIGLINPYNXGTRYNQKFKGKATLTVDKSSSTAYMELLSLTSEDSAVYYCARLGYYATGDEYFDYWGQGTTLTVSS

SEQ ID NO: 26176 - protein, 125 aa, Artificial Sequence
  source: /note="Description of Artificial Sequence: Synthetic polypeptide"
QVQLVESGGGVVQPGRSLRLSCAASGFSFDRNYWIAWVRQAPGKGLEWVAVISAGGSGNTYYATWAKGRFTISRDNSKNTLYLQMNSLRAEDTAVYYCARFYSGGGYYAGYFTLWGQGTLVTVSS

SEQ ID NO: 26177 - protein, 454 aa, Artificial Sequence
  source: /note="Description of Artificial Sequence: Synthetic polypeptide"
QVQLVESGGGVVQPGRSLRLSCAASGFSFDRNYWIAWVRQAPGKGLEWVAAISAGGSGNTYYATWAKGRFTISRDNSKNTLYLQMNSLRAEDTAVYYCARFYSGGGYYAGYFTLWGQGTLVTVSSASTKGPSVFPLAPSSKSTSGGTAALGCLVKDYFPEPVTVSWNSGALTSGVHTFPAVLQSSGLYSLSSVVTVPSSSLGTQTYICNVNHKPSNTKVDKKVEPKSCDKTHTCPPCPAPELLGGPSVFLFPPKPKDTLMISRTPEVTCVVVDVSHEDPEVKFNWYVDGVEVHNAKTKPREEQYNSTYRVVSVLTVLHQDWLNGKEYKCKVSNKALPAPIEKTISKAKGQPREPQVYTLPPSRDELTKNQVSLTCLVKGFYPSDIAVEWESNGQPENNYKTTPPVLDSDGSFFLYSKLTVDKSRWQQGNVFSCSVMHEALHNHYTQKSLSLSPG

SEQ ID NO: 26178 - protein, 125 aa, Artificial Sequence
  source: /note="Description of Artificial Sequence: Synthetic polypeptide"
QVQLVESGGGVVQPGRSLRLSCAASGFSFDRNYWMAWVRQAPGKGLEWVAVIAAGGSGNTYYATWAKGRFTISRDNSKNTLYLQMNSLRAEDTAVYYCARFYSGGGYYAGYFTLWGQGTLVTVSS

SEQ ID NO: 26179 - protein, 125 aa, Artificial Sequence
  source: /note="Description of Artificial Sequence: Synthetic polypeptide"
QVQLVQSGGGVVQPGRSLRLSCAASGFSFDRNYWMAWVRQAPGKGLEWVAVIAAGGSGNTYYATWAKGRFTISKDNSKNTLYLQMNSLRAEDTAVYYCARFYSGGGYYAGYFTLWGQGTLVTVSS

SEQ ID NO: 26180 - protein, 125 aa, Artificial Sequence
  source: /note="Description of Artificial Sequence: Synthetic polypeptide"
QVQLVQSGGGVVQPGESLRLSCAASGFSFDRNYWMSWVRQAPGKGLEWAAVIAAGGSGNTYYATWAKGRFTISKDNSKNTVYLQMNSLRAEDTAVYFCARFYSGGGYYAGYFTLWGQGTLVTVSS

SEQ ID NO: 26181 - protein, 125 aa, Artificial Sequence
  source: /note="Description of Artificial Sequence: Synthetic polypeptide"
QVQLVQSGGGVVQPGESLRLSCAASGFSFDRNYWMCWVRQAPGKGLEWAACIAAGGSGNTYYATWAKGRFTISKDNSKNTVYLQMNSLRAEDTAVYFCARFYSGGGYYAGYFTLWGQGTLVTVSS

SEQ ID NO: 26182 - protein, 125 aa, Artificial Sequence
  source: /note="Description of Artificial Sequence: Synthetic polypeptide"
  MOD_RES (2)..(2): Any amino acid
QXQLVQSGGGVVQPGESLRLSCAASGFSFDRNYWMAWVRQAPGKGLEWAAVIAAGGSGNTYYATWAKGRFTISKDNSKNTVYLQMNSLRAEDTAVYFCARFYSGGGYYAGYFTLWGQGTLVTVSS

SEQ ID NO: 26183 - protein, 125 aa, Artificial Sequence
  source: /note="Description of Artificial Sequence: Synthetic polypeptide"
  MOD_RES (78)..(78): Any amino acid
QVQLVQSGGGVVQPGESLRLSCAASGFSFDRNYWMAWVRQAPGKGLEWAAVIAAGGSGNTYYATWAKGRFTISKTSSXTTVYLQMNSLRAEDTAVYFCARFYSGGGYYAGYFTLWGQGTLVTVSS

SEQ ID NO: 26184 - protein, 125 aa, Artificial Sequence
  source: /note="Description of Artificial Sequence: Synthetic polypeptide"
  MOD_RES (2)..(2): Any amino acid
  MOD_RES (78)..(78): Any amino acid
QXQLVQSGGGVVQPGESLRLSCAASGFSFDRNYWMAWVRQAPGKGLEWAAVIAAGGSGNTYYATWAKGRFTISKTSSXTTVYLQMNSLRAEDTAVYFCARFYSGGGYYAGYFTLWGQGTLVTVSS

SEQ ID NO: 26185 - protein, 125 aa, Artificial Sequence
  source: /note="Description of Artificial Sequence: Synthetic polypeptide"
  MOD_RES (2)..(2): Any amino acid
  MOD_RES (78)..(78): Any amino acid
QXQLVQSGGGVVQPGESLRLSCAASGFSFDRNYWMSWVRQAPGKGLEWAAVIAAGGSGNTYYATWAKGRFTISKTSSXTTVYLQMNSLRAEDTAVYFCARFYSGGGYYAGYFTLWGQGTLVTVSS

SEQ ID NO: 26186 - protein, 125 aa, Artificial Sequence
  source: /note="Description of Artificial Sequence: Synthetic polypeptide"
  MOD_RES (2)..(2): Any amino acid
  MOD_RES (78)..(78): Any amino acid
QXQLVQSGGGVVQPGESLRLSCAASGFSFDRNYWMCWVRQAPGKGLEWAACIAAGGSGNTYYATWAKGRFTISKTSSXTTVYLQMNSLRAEDTAVYFCARFYSGGGYYAGYFTLWGQGTLVTVSS

SEQ ID NO: 26187 - protein, 109 aa, Artificial Sequence
  source: /note="Description of Artificial Sequence: Synthetic polypeptide"
AIQLTQSPSSLSASVGDRVTITCQASQSIGNNLAWYQQKPGKAPKLLIYLASYLASGVPSRFSGSGSGTDFTLTISSLQPEDFATYYCQSAYYSPNDNAFGQGTKVEIK

SEQ ID NO: 26188 - protein, 125 aa, Artificial Sequence
  source: /note="Description of Artificial Sequence: Synthetic polypeptide"
  MOD_RES (2)..(2): Any amino acid
  MOD_RES (79)..(79): Any amino acid
QXSLEESGGDLVKPGASLTLTCTASGFSFDRNYWMCWVRQAPGMGLEWAACIAAGGNGNTYYATWAKGRFTISKTSSTXTVTLQMASLTAADTATYFCARFYNGGGYYAGYFTLWGPGTLVTVSS

SEQ ID NO: 26189 - protein, 125 aa, Artificial Sequence
  source: /note="Description of Artificial Sequence: Synthetic polypeptide"
  MOD_RES (32)..(32): Any amino acid
  MOD_RES (56)..(56): Any amino acid
  MOD_RES (101)..(114): Any amino acid
QVQLVESGGGVVQPGRSLRLSCAASGFTFSSXYAMHWVRQAPGKGLEWVAVISYDXGSNKYYADSVKGRFTISRDNSKNTLYLQMNSLRAEDTAVYYCARXXXXXXXXXXXXXXWGQGTLVTVSS

SEQ ID NO: 26190 - protein, 125 aa, Artificial Sequence; identical to SEQ ID NO: 26176
  source: /note="Description of Artificial Sequence: Synthetic polypeptide"

SEQ ID NO: 26191 - protein, 125 aa, Artificial Sequence
  source: /note="Description of Artificial Sequence: Synthetic polypeptide"
QVQLVESGGGVVQPGRSLRLSCAASGFSFDRNYWIAWVRQAPGKGLEWVAGISAGGSGNTYYATWAKGRFTISRDNSKNTLYLQMNSLRAEDTAVYYCARFYSGGGYYAGYFTLWGQGTLVTVSS

SEQ ID NO: 26192 - protein, 125 aa, Artificial Sequence
  source: /note="Description of Artificial Sequence: Synthetic polypeptide"
QVQLVQSGGGVVQPGRSLRLSCAVSGFSFDRNYWIAWVRQAPGKGLEWVAVISAGGSGNTYYATWAKGRFTISKDNSKNTLYLQMNSLRAEDTAVYYCARFYSGGGYYAGYFTLWGQGTLVTVSS

SEQ ID NO: 26193 - protein, 125 aa, Artificial Sequence
  source: /note="Description of Artificial Sequence: Synthetic polypeptide"
QVQLVQSGGGVVQPGESLRLSCAVSGFSFDRNYWIAWIRQAPGKGLEWAAVISAGGSGNTYYATWAKGRFTISKDNSKNTVYLQMNSLRAEDTAVYFCARFYSGGGYYAGYFTLWGQGTLVTVSS

SEQ ID NO: 26194 - protein, 125 aa, Artificial Sequence
  source: /note="Description of Artificial Sequence: Synthetic polypeptide"
QVQLVQSGGGVVQPGESLRLSCAVSGFSFDRNYWISWIRQAPGKGLEWAAVISAGGSGNTYYATWAKGRFTISKDNSKNTVYLQMNSLRAEDTAVYFCARFYSGGGYYAGYFTLWGQGTLVTVSS

SEQ ID NO: 26195 - protein, 125 aa, Artificial Sequence
  source: /note="Description of Artificial Sequence: Synthetic polypeptide"
QVQLVQSGGGVVQPGESLRLSCAVSGFSFDRNYWICWIRQAPGKGLEWAACISAGGSGNTYYATWAKGRFTISKDNSKNTVYLQMNSLRAEDTAVYFCARFYSGGGYYAGYFTLWGQGTLVTVSS

SEQ ID NO: 26196 - protein, 125 aa, Artificial Sequence
  source: /note="Description of Artificial Sequence: Synthetic polypeptide"
  MOD_RES (2)..(2): Any amino acid
QXQLVQSGGGVVQPGESLRLSCAVSGFSFDRNYWIAWIRQAPGKGLEWAAVISAGGSGNTYYATWAKGRFTISKDNSKNTVYLQMNSLRAEDTAVYFCARFYSGGGYYAGYFTLWGQGTLVTVSS

SEQ ID NO: 26197 - protein, 125 aa, Artificial Sequence
  source: /note="Description of Artificial Sequence: Synthetic polypeptide"
  MOD_RES (78)..(78): Any amino acid
QVQLVQSGGGVVQPGESLRLSCAVSGFSFDRNYWIAWIRQAPGKGLEWAAVISAGGSGNTYYATWAKGRFTISKTSSXTTVYLQMNSLRAEDTAVYFCARFYSGGGYYAGYFTLWGQGTLVTVSS

SEQ ID NO: 26198 - protein, 125 aa, Artificial Sequence
  source: /note="Description of Artificial Sequence: Synthetic polypeptide"
  MOD_RES (2)..(2): Any amino acid
  MOD_RES (78)..(78): Any amino acid
QXQLVQSGGGVVQPGESLRLSCAVSGFSFDRNYWIAWIRQAPGKGLEWAAVISAGGSGNTYYATWAKGRFTISKTSSXTTVYLQMNSLRAEDTAVYFCARFYSGGGYYAGYFTLWGQGTLVTVSS

SEQ ID NO: 26199 - protein, 125 aa, Artificial Sequence
  source: /note="Description of Artificial Sequence: Synthetic polypeptide"
  MOD_RES (2)..(2): Any amino acid
  MOD_RES (78)..(78): Any amino acid
QXQLVQSGGGVVQPGESLRLSCAVSGFSFDRNYWISWIRQAPGKGLEWAAVISAGGSGNTYYATWAKGRFTISKTSSXTTVYLQMNSLRAEDTAVYFCARFYSGGGYYAGYFTLWGQGTLVTVSS

SEQ ID NO: 26200 - protein, 125 aa, Artificial Sequence
  source: /note="Description of Artificial Sequence: Synthetic polypeptide"
  MOD_RES (2)..(2): Any amino acid
  MOD_RES (78)..(78): Any amino acid
QXQLVQSGGGVVQPGESLRLSCAVSGFSFDRNYWICWIRQAPGKGLEWAACISAGGSGNTYYATWAKGRFTISKTSSXTTVYLQMNSLRAEDTAVYFCARFYSGGGYYAGYFTLWGQGTLVTVSS

SEQ ID NO: 26201 - protein, 121 aa, Artificial Sequence
  source: /note="Description of Artificial Sequence: Synthetic polypeptide"
WGPGLVKPSQSLSLTCAVSGASVSSGINYWSWIRLYPGKGLEWIGYVYSSGTTYYNPSLKSRVSISLDTSKNQFSLNLRSVTAADTAVYYCARDRGDSSGSSYYKYYMDVWGKGTTVTVSS

SEQ ID NO: 26202 - protein, 125 aa, Artificial Sequence
  source: /note="Description of Artificial Sequence: Synthetic polypeptide"
  MOD_RES (1)..(1): Any amino acid
  MOD_RES (78)..(78): Any amino acid
XQSLEESGGDLVKPGASLTLTCTVSGFSFDRNYWICWIRQAPGMGLEWAACISAGGSGNTYYATWAKGRFTISKTSSXTTVTLQMASLTAADTATYFCARFYSGGGYYAGYFTLWGPGTLVTVSS

SEQ ID NO: 26203 - protein, 127 aa, Artificial Sequence
  source: /note="Description of Artificial Sequence: Synthetic polypeptide"
MESHTQVFVYMLLWLSGVEGDIVMTQSHKFMSTSVGDRVSITCKASQNVGTAVAWYQQKPGQSPKVLIYWASTRHTGVPDRFTGSGSGTDFTLTISNVQSEDLADYFCQQYSSYPLTFGAGTKLELK

SEQ ID NO: 26204 - protein, 127 aa, Artificial Sequence
  source: /note="Description of Artificial Sequence: Synthetic polypeptide"
MESQTQVFIYMLLWLSGVEGDIVMTQSHKFMSTSLGDRVNITCKASLAVGTAVAWYQQKPGQSPKLLIYWASTRPTGVPSRFTGSGSGTDFTLTISNVQSEDLTDFFCQQYSSYPLTFGAGTKLELK

SEQ ID NO: 26205 - protein, 127 aa, Artificial Sequence
  source: /note="Description of Artificial Sequence: Synthetic polypeptide"
MKSHTQVFIYMLLWLSGVEGDIVMTQSHKFMSTSVGDRVSITCKASQDVGTAVAWYQQKPGQSPKLLIYWASTRHTGVPDRFTGSRSGTDFTLTISNVQSEDLADYFCQQYSSYPCTFGGGAKLEIR

SEQ ID NO: 26206 - protein, 132 aa, Artificial Sequence
  source: /note="Description of Artificial Sequence: Synthetic polypeptide"
METDTLLLWVLLLWVPGSTGDIVLTQSPASLAVSLGQRATISCRASESVDSYGNSFVHWYQQKPGQPPKLLIYRASNLESGIPARFSGSGSRTDFTLTINPVEADDVATYYCLQSNEDPMYTFGGGTKLEIK

SEQ ID NO: 26207 - protein, 127 aa, Artificial Sequence
  source: /note="Description of Artificial Sequence: Synthetic polypeptide"
MRVPAQLLGLLLLWLPGARCDIVMTQSHKFMSTSVGDRVSITCKASQDVGTAVAWYQQKPGQSPKLLIYWASTRHTGVPDRFTGSRSGTDFTLTISNVQSEDLADYFCQQYSSYPLTFGGGAKLEIR

SEQ ID NO: 26208 - protein, 127 aa, Artificial Sequence
  source: /note="Description of Artificial Sequence: Synthetic polypeptide"
MRVPAQLLGLLLLWLPGARCDIVMTQSHKFMSTSVGDRVSITCKASQDVGTAVAWYQQKPGQSPKLLIYWASTRHTGVPDRFTGSRSGTDFTLTISNVQSEDLADYFCQQYSSYPSTFGGGAKLEIR

SEQ ID NO: 26209 - protein, 127 aa, Artificial Sequence
  source: /note="Description of Artificial Sequence: Synthetic polypeptide"
MRVPAQLLGLLLLWLPGARCDIVMTQSHKFMSTSVGDRVSITCKASQDVGTAVAWYQQKPGQSPKLLIYWASTRHTGVPDRFTGSRSGTDFTLTISNVQSEDLADYFCQQYSSYPATFGGGAKLEIR

SEQ ID NO: 26210 - protein, 127 aa, Artificial Sequence
  source: /note="Description of Artificial Sequence: Synthetic polypeptide"
  MOD_RES (116)..(116): Any amino acid
MRVPAQLLGLLLLWLPGARCDIVMTQSHKFMSTSVGDRVSITCKASQDVGTAVAWYQQKPGQSPKLLIYWASTRHTGVPDRFTGSRSGTDFTLTISNVQSEDLADYFCQQYSSYPXTFGGGAKLEIR

SEQ ID NO: 26211 - protein, 109 aa, Artificial Sequence
  source: /note="Description of Artificial Sequence: Synthetic polypeptide"
AFQLTQSPSSLSASVGDRVTINCQASQSIGGNLAWYQQKPGKAPKLLIYLASYLASGVPSRFSGSGSGTQFTLTVSSLQPEDFATYYCQSSYYSPNDNAFGQGTKVEIK

SEQ ID NO: 26212 - protein, 216 aa, Artificial Sequence
  source: /note="Description of Artificial Sequence: Synthetic polypeptide"
AFQLTQSPSSLSASVGDRVTINCQASQSIGGNLAWYQQKPGKAPKLLIYLASYLASGVPSRFSGSGSGTQFTLTVSSLQPEDFATYYCQSSYYSPNDNAFGQGTKVEIKRTVAAPSVFIFPPSDEQLKSGTASVVCLLNNFYPREAKVQWKVDNALQSGNSQESVTEQDSKDSTYSLSSTLTLSKADYEKHKVYACEVTHQGLSSPVTKSFNRGEC

SEQ ID NO: 26213 - protein, 125 aa, Artificial Sequence
  source: /note="Description of Artificial Sequence: Synthetic polypeptide"
QVQLVQSGGGVVQPGESLRLSCAASGFSFDRNYWMAWVRQAPGKGLEWAAVIAAGGSGNTYYATWAKGRFTISKDNSKNTVYLQMNSLRAEDTAVYFCARFYSGGGYYAGYFTLWGQGTLVTVSS

SEQ ID NO: 26214 - protein, 109 aa, Artificial Sequence
  source: /note="Description of Artificial Sequence: Synthetic polypeptide"
AFQLTQSPSSLSASVGDRVTITCQASQSIGNNLAWYQQKPGKAPKLLIYLASYLASGVPSRFSGSGSGTDFTLTISSLQPEDFATYYCQSAYYSPNDNAFGQGTKVEIK

SEQ ID NO: 26215 - protein, 109 aa, Artificial Sequence
  source: /note="Description of Artificial Sequence: Synthetic polypeptide"
AFQLTQSPSSLSASVGDRVTIFCQASQSIGNNLAWYQQKPGKAPKLLIYLASYLASGVPSRFSGSGSGTQFTLTVSSLQPEDFATYYCQSAYYSPNDNAFGQGTKVEIK

SEQ ID NO: 26216 - protein, 109 aa, Artificial Sequence
  source: /note="Description of Artificial Sequence: Synthetic polypeptide"
AFELTQTTSPVSAAVGGTVTIFCQASQSIGNNLAWYQQKPGQPPKLLIYLASYLASGVPSRFKGSGSGTQFTLTVSALECADAAAYYCQSAYYSPNDNAFGGGTEVVVR

SEQ ID NO: 26217 - protein, 109 aa, Artificial Sequence
  source: /note="Description of Artificial Sequence: Synthetic polypeptide"
AIQLTQSPSSLSASVGDRVTITCQASQSIGNNLAWYQQKPGKAPKLLIYLASYLASGVPSRFSGSGSGTDFTLTISSLQPEDFATYYCQSSYYSPNDNAFGQGTKVEIK

SEQ ID NO: 26218 - protein, 109 aa, Artificial Sequence
  source: /note="Description of Artificial Sequence: Synthetic polypeptide"
AFQLTQSPSSLSASVGDRVTITCQASQSIGNNLAWYQQKPGKAPKLLIYLASYLASGVPSRFSGSGSGTDFTLTISSLQPEDFATYYCQSSYYSPNDNAFGQGTKVEIK

SEQ ID NO: 26219 - protein, 109 aa, Artificial Sequence
  source: /note="Description of Artificial Sequence: Synthetic polypeptide"
AFQLTQSPSSLSASVGDRVTINCQASQSIGNNLAWYQQKPGKAPKLLIYLASYLASGVPSRFSGSGSGTQFTLTVSSLQPEDFATYYCQSSYYSPNDNAFGQGTKVEIK

SEQ ID NO: 26220 - protein, 109 aa, Artificial Sequence
  source: /note="Description of Artificial Sequence: Synthetic polypeptide"
AFQLTQSPSSLSASVGDRVTINCQASQSIGANLAWYQQKPGKAPKLLIYLASYLASGVPSRFSGSGSGTQFTLTVSSLQPEDFATYYCQSSYYSPNDNAFGQGTKVEIK

SEQ ID NO: 26221 - protein, 105 aa, Artificial Sequence
  source: /note="Description of Artificial Sequence: Synthetic polypeptide"
VMTQSPSSLSASVGDRVTITCRASQSISSYLNWYQQKPGKAPKLLIYAASSLQSGVPSRFSGSGSGTDFTLTISSLQPEDFATYYCQQSYSTPRTFGQGTKVEIK

SEQ ID NO: 26222 - protein, 109 aa, Artificial Sequence
  source: /note="Description of Artificial Sequence: Synthetic polypeptide"
AFELTQTPASVEAAVGGTVTINCQASQSIGNNLAWYQQKPGQPPKLLIYLASYLASGVSSRFKGSGSGTQFTLTVSALECADAATYYCQSSYYSPNDNAFGGGTEVVVR

SEQ ID NO: 26223 - protein, 109 aa, Artificial Sequence; identical to SEQ ID NO: 26216
  source: /note="Description of Artificial Sequence: Synthetic polypeptide"

SEQ ID NO: 26224 - protein, 140 aa, Artificial Sequence
  source: /note="Description of Artificial Sequence: Synthetic polypeptide"
MEFGLSWLFLVAILKGVQCEVQLLEAGGGLVQPGGSLRLSCAASGFTFSSSAMSWVRQAPGKGLEWVSVISISGGSTYYADSVKGRFTISRDNSKNTLNLQMNSLRAEDTAVYYCAKETRYYYSYGMDVWGQGTTVTVSS

SEQ ID NO: 26225 - protein, 140 aa, Artificial Sequence
  source: /note="Description of Artificial Sequence: Synthetic polypeptide"
MELGLRWVFLVAILEGVQCEVQLVESGGGLVKPGGSLRLSCAASGFTFSSYSMNWVRQAPGKGLEWVSSISSSRSFIYYADSVKGRFTISRDIAKNSLSLQMSSLRVEDTAVYYCARERRYYYSYGLDVWGQGTTVTVSS

SEQ ID NO: 26226 - protein, 129 aa, Artificial Sequence
  source: /note="Description of Artificial Sequence: Synthetic polypeptide"
MDMRVPAQLLGLLLLWLPGARCAIQLTQSPSSLSASVGDRVTITCRASQRIGFALAWYQQKPGKAPKLLIHDASSLETGVPSRFSGSGSGTDFTLAISSLQPEDFATYYCQQFNTYPFTFGPGTKVDIK

SEQ ID NO: 26227 - protein, 140 aa, Artificial Sequence
  source: /note="Description of Artificial Sequence: Synthetic polypeptide"
MELGLSWIFLLAILKGVQCEVQLVESGGGLVQPGRSLRLSCAASGFTFDDYAIHWVRQAPGKGLEWVSGISWNGRSIGYADSVKGRFTISRDNAKNSLYLQMNSLRAEDTALYYCAKDIGFYGSGSLDYWGQGTLVTVSS

SEQ ID NO: 26228 - protein, 140 aa, Artificial Sequence; identical to SEQ ID NO: 26227
  source: /note="Description of Artificial Sequence: Synthetic polypeptide"

SEQ ID NO: 26229 - protein, 129 aa, Artificial Sequence; identical to SEQ ID NO: 26226
  source: /note="Description of Artificial Sequence: Synthetic polypeptide"

SEQ ID NO: 26230 - protein, 129 aa, Artificial Sequence
  source: /note="Description of Artificial Sequence: Synthetic polypeptide"
MDMRVPAQLLGLLLLWLPGARCAIQLTQSPSSLSASVGDRVTITCRASQGISSALAWYQQKPGKAPKLLIYDASSLESGVPSRFSGSGSGTDFTLTISSLQPEDFATYYCQQFNSYPYTFGQGTKLEIK

SEQ ID NO: 26231 - protein, 140 aa, Artificial Sequence
  source: /note="Description of Artificial Sequence: Synthetic polypeptide"
MELGLRWVFLVAILEGVQCEVQLVESGGGLVKSGGSLRLSCAASGFTLSSYSMNWVRQAPGKGLEWVSSISSSSSYIYYADSVKGRFTISRDIAKNSLSLQMSSLRAEDTAVYYCARERRYYYSYGMDVWGQGTTVTVSS

SEQ ID NO: 26232 - protein, 128 aa, Artificial Sequence
  source: /note="Description of Artificial Sequence: Synthetic polypeptide"
MEAPAQLLFLLLLWLPDTTGEIVLTQSPATLSLSPGERATLSCRASQSVSSYLAWYQQKPGQAPRLLIYDASNRATGIPARFSGSGSGTDFTLTISSLEPEDFAVYYCQQRSNWPALTFGGGTKVEIK

SEQ ID NO: 26233 - protein, 128 aa, Artificial Sequence; identical to SEQ ID NO: 26232
  source: /note="Description of Artificial Sequence: Synthetic polypeptide"

SEQ ID NO: 26234 - protein, 114 aa, Artificial Sequence
  source: /note="Description of Artificial Sequence: Synthetic polypeptide"
LESGPGLVKPSETLSLTCTVSGYSISSGYYWGWIRQPPGKGLGWIGSIYHSGSTYYNPSLKSRVTISVDTSKNQFSLKLSSVTAADTAVYYCARDSSYNGFDPWGQGTLVTVSS

SEQ ID NO: 26235 - protein, 108 aa, Artificial Sequence
  source: /note="Description of Artificial Sequence: Synthetic polypeptide"
DIKMTQSPSSMYASLGERVTITCKASQDIKSYLSWYQQKPWKSPKTLIYYAKNLADGVPSRFSGSGFGQDYSLTISSLESDDTATYYCLQHGESPYTFGSGTKLEIKR

SEQ ID NO: 26236 - protein, 112 aa, Artificial Sequence
  source: /note="Description of Artificial Sequence: Synthetic polypeptide"
NIMMTQSPSSLAVSAGGKVTMSCKSSQSVLYSSNQKNYLAWYQQKPGQSPKLLIYWASTRESGVPDRFTGSGSGTDFTLTISSVQAEDLAVYYCHQYLSSWTFGGGTKLEIK

SEQ ID NO: 26237 - protein, 119 aa, Artificial Sequence
  source: /note="Description of Artificial Sequence: Synthetic polypeptide"
SDVQLQESGPGLVKPSQSLSLTCSVTGYSITSGFYLNWIRQFPGNKLEWMGYINYGGSINYNPSLKSRISITRDTSKNQFFLRLNSVTAEDTATYYCATMPNSWYFDVWGTGTTVTVSS

SEQ ID NO: 26238 - protein, 118 aa, Artificial Sequence
  source: /note="Description of Artificial Sequence: Synthetic polypeptide"
DVQLQESGPGLVKPSQTLSLTCTVSGYSITSGFYLNWIRQHPCKGLEWIGYINYGGSINYNPSLKSRVTISRDTSKNQFSLKLSSVTAADTAVYYCATMPNSWYFDVWGRGTLVTVSS

SEQ ID NO: 26239 - protein, 118 aa, Artificial Sequence
  source: /note="Description of Artificial Sequence: Synthetic polypeptide"
DVQLQESGPGLVKPSQTLSLTCTVSGYSITSGFYLNWIRQHPGKKLEWIGYINYGGSINYNPSLKSRVTISRDTSKNQFSLKLSSVTAADTAVYYCATMPNSWYFDVWGTGTLVTVSS

SEQ ID NO: 26240 - protein, 118 aa, Artificial Sequence
  source: /note="Description of Artificial Sequence: Synthetic polypeptide"
EVQLVESGPGLVKPSQTLSLTCTVSGYSITSGFYLNWVRQHPGKKLEWIGYINYGGSINYNPSLKSRVSISRDTSKNQFSLKLTSVTAADTAVYYCATMPNSWYFDVWGTGTLVTVSS

SEQ ID NO: 26241 - protein, 119 aa, Artificial Sequence
  source: /note="Description of Artificial Sequence: Synthetic polypeptide"
DVQLQESGPGLVKPSQTLSLTCTVSGYSITSGFYLNWIRQHPGKKLEWIGYINYGGSINYNPSLKSRVTISRDTSKNQFSLKLSSVTAADTAVYYCARTMPNSWYFDVWGTGTLVTVSS

SEQ ID NO: 26242 - protein, 106 aa, Artificial Sequence
  source: /note="Description of Artificial Sequence: Synthetic polypeptide"
ELTQSPGTLSLSPGERATLSCRASQSISSSFLAWYQQKPGQAPRLLIYSASSRATGTPDRFSGSGSGTDFTLTISRLEPEDFAVYYCQQYATSLRTFGQGTKVEIK

SEQ ID NO: 26243 - protein, 120 aa, Artificial Sequence
  source: /note="Description of Artificial Sequence: Synthetic polypeptide"
QIQLVQSGPELKKPGETVKISCKASGYTFTRYGMSWVKQAPGKGLKWMGWINTYSGVPTYADDFKGRFAFSLETSASTAYLQINNLKNEDTATYFCARRGYSNYYPMDFWGQGTSVTVSS

SEQ ID NO: 26244 - protein, 122 aa, Artificial Sequence
  source: /note="Description of Artificial Sequence: Synthetic polypeptide"
EVMLVESGGGLVKPGGSLQLSCAASGFTFSDYAMSWVRQTAETRLEWVATISDGGSHTYYPDSVRGRFTISRDNAKKALYLEMSSLKSEDTAMYYCGRRAGRYDERDAMDYWGQGTTVTVSS

SEQ ID NO: 26245 - protein, 107 aa, Artificial Sequence
  source: /note="Description of Artificial Sequence: Synthetic polypeptide"
SIVMTQTPKFLPVSAGDRVTMTCKASQSVGNNVAWYQQKSGQSPKLLIYYASNRYTGVPDRFTGSGSGTDFTFTISSVQVEDLAVYFCQQHYSSPPTFGAGTKLELK

SEQ ID NO: 26246 - protein, 107 aa, Artificial Sequence
  source: /note="Description of Artificial Sequence: Synthetic polypeptide"
DIKMTQSPSSMYASLGERVTITCKASQDIKSYLSWYQQKPWKSPKTLIYYAKNLADGVPSRFSGSGFGQDYSLTISSLESDDTATYYCLQHGESPYTFGSGTKLEIK

SEQ ID NO: 26247 - protein, 112 aa, Artificial Sequence
  source: /note="Description of Artificial Sequence: Synthetic polypeptide"
NIMMTQSPDSLAVSLGERATINCKSSQSVLYSSNQKNYLAWYQQKPGQPPKLLIYWASTRESGVPDRFSGSGSGTDFTLTISSLQAEDVAVYYCHQYLSSWTFGQGTKVEIK

SEQ ID NO: 26248 - protein, 112 aa, Artificial Sequence
  source: /note="Description of Artificial Sequence: Synthetic polypeptide"
NIMMTQSPDSLAVSLGERATINCKSSQSVLYSSNQKNYLAWYQQKPGQSPKLLIYWASTRESGVPDRFSGSGSGTDFTLTISSLQAEDVAVYYCHQYLSSWTFGGGTKVEIK

SEQ ID NO: 26249 - protein, 112 aa, Artificial Sequence
  source: /note="Description of Artificial Sequence: Synthetic polypeptide"
NIMMTQSPDSLALSLGERATINCKSSQSVLYSSNQKNYLAWYQQKPGQSPKLLIYWASSRESGVPDRFSGSGSGTDFTLTISSLQAEDVALYYCHQYLSSWTFGGGTKVEIK

SEQ ID NO: 26250 - protein, 120 aa, Artificial Sequence
  source: /note="Description of Artificial Sequence: Synthetic polypeptide"
LEQSGAEVKKPGENLKISCEASGYNFVNHWIGWVRQMPGRGLEWMGRIYPGDSETRFSPSFQGQVTISVDKTLSTASLQWNSLKTSDSATYYCVTLGRWSSWQGGALSWGQGTRVIVSSA

SEQ ID NO: 26251 - protein, 119 aa, Artificial Sequence
  source: /note="Description of Artificial Sequence: Synthetic polypeptide"
LESGGGVVQPGRSLRLSCAASGFTFSTYGMHWVRQAPGKGLEWVAVVSYDGTKEYYSDSVKGRFTISRDNSKKMVYLQMNSLRAEDTAVYYCAKEPPRRGFYWYFDYWGQGTLVTVSSA

SEQ ID NO: 26252 - protein, 112 aa, Artificial Sequence
  source: /note="Description of Artificial Sequence: Synthetic polypeptide"
ELTQSPDSLAVSLGERATINCKSSQSILSTSKNKNYLAWYQQKPGQPPKLLIYWASTREDGVPDRFSGSGAGTDFSLTISSLQAEDVAVYYCQQRRSWPPTFGQGTKLEIKR

SEQ ID NO: 26253 - protein, 106 aa, Artificial Sequence
  source: /note="Description of Artificial Sequence: Synthetic polypeptide"
ELTQSPSSLSASVGDRVTITCRASQDISNYLAWFQQRPGKVPNLLIYAASTLQSGVPSRFSGSGSGTEFTLTISSLQPEDGASYYCQKYDGAPWTFGQGTKVEIKR

SEQ ID NO: 26254 - protein, 125 aa, Artificial Sequence
  source: /note="Description of Artificial Sequence: Synthetic polypeptide"
QVQLQESGPGLVKPSQTLSLTCTVSGGSIRSGDYFWSWIRQSPGKGLECIGYISYSGTTYCNPSLQRRVTISVDTSKNQFNLKLKSVTAADTAVYYCARTVDSGYDFIPDWFHPWGQGTLVTVSS

SEQ ID NO: 26255 - protein, 110 aa, Artificial Sequence
  source: /note="Description of Artificial Sequence: Synthetic polypeptide"
QPGLTQPPSASGTPGQRITISCSGSNSNIGNSYVHWYQQLPGTAPKLLIQRNNQRPSGVPDRFFGSKSGTSASLAISGLRSEDEADYYCAAWADSLGTYVFGTGTKLTVL

SEQ ID NO: 26256 - protein, 152 aa, Artificial Sequence
  source: /note="Description of Artificial Sequence: Synthetic polypeptide"
MGWTWIFILILSVTTGVHSEVQLQQSGPELEKPGASVKLSCKASGYSFTGYNMNWVKQSHGKSLEWIGHIDPYYGDTSYNQKFRGKATLTVDKSSSTAYMQLKSLTSEDSAVYYCVKGGYYGHWYFDVWGAGTTVTVSSATTTAPSVYPLVP

SEQ ID NO: 26257 - protein, 144 aa, Artificial Sequence
  source: /note="Description of Artificial Sequence: Synthetic polypeptide"
MDMRAPAQILGFLLLLFPGTRCDIQMTQSPSSLSASLGERVSLTCRASQDIGSSLNWLQQGPDGTIKRLIYATSSLDSGVPKRFSGSRSGSDYSLTISSLESEDFVDYYCLQYVSSPPTFGAGTKLELKRADAAPTVFIFGRIP

SEQ ID NO: 26258 - protein, 118 aa, Artificial Sequence
  source: /note="Description of Artificial Sequence: Synthetic polypeptide"
VQLQESGGDLVKPGGSLKLSCAASGFTFSIYTMSWLRQTPEKRLEWVATLSGDGDDIYYPDSVKGRFTISRDNAKNNLYLQMNSLRSADTALYYCARVRLGDWDFDVWGPGTTVSVSS

SEQ ID NO: 26259 - protein, 111 aa, Artificial Sequence
  source: /note="Description of Artificial Sequence: Synthetic polypeptide"
VQLQESGPELVKPGASVKMSCRASGYTFTEYVITWVKQRTGQGLEWIGEIYPGSGSTSYNEKFKGKATLTADKSSNTAYMHLSSLTSEDSAVYFCTREDLGGQGTLVTVSS

SEQ ID NO: 26260 - protein, 111 aa, Artificial Sequence
  source: /note="Description of Artificial Sequence: Synthetic polypeptide"
VQLQQSGAEVKKPGSSVKVSCKASGYTFTEYVITWVKQRPGQGLEWIGEIYPGSGSTSYNEKFKGKATITADKSTNTAYMELSSLRSEDTAFYFCTREDLGGQGSLVTVSS

SEQ ID NO: 26261 - protein, 224 aa, Artificial Sequence
  source: /note="Description of Artificial Sequence: Synthetic polypeptide"
KVQLVESGAEVKKPGASVKVSCKASGYTFTSYDINWVRQATGQGLEWMGWMNPNSGNTGYAQKFQGRVTMTRNTSISTAYMELSSLRSEDTAVYYCARGKGSGYYNYWGQGTLVTVSSASTKGPSVFLAPSSKSTSGGTAALGCLVKDYFPEPVTVSWNSGALTSGVHTFPAVLQSSGLYSLSSVVTVPSSSLGTQTYICNVNHKPSNTKVDKKVEPKSCDKTS

SEQ ID NO: 26262 - protein, 226 aa, Artificial Sequence
  source: /note="Description of Artificial Sequence: Synthetic polypeptide"
EVQLVESGAEVKKPGASVKVSCKASGYTFTSYDINWVRQATGQGLEWMGWMNPNSGNTGYAQKFQGRVTMTRNTSISTAYMELSSLRSEDTAVYYCARGRGFDWLKNFDYWGQGTLVTVSPASTKGPVFPLAPSSKSTSGGTAALGCLVKDYFPEPVTVSWNSGALTSGVHTFPAVLQSSGLYSLSSVVTVPSSSLGTQTYICNVNHKPSNTKVDKKVEPKSCDKT

SEQ ID NO: 26263 - protein, 112 aa, Artificial Sequence
  source: /note="Description of Artificial Sequence: Synthetic polypeptide"
AVLMTQTPLSLPVSLGDQASISCRSSQSIVHSNGNTYLEWYLQKPGQSPKLLIYKVSNRFSGVPDRFSGTGSGTDFTVRISRVEAEDLGLYYCFQGSRVPYTFGGGTKLEIK

SEQ ID NO: 26264 - protein, 111 aa, Artificial Sequence
  source: /note="Description of Artificial Sequence: Synthetic polypeptide"
DIQLTQSPGTLSLSPGERATLSCRSSQSIVHSNGNTYLEWYLQKPGQAPRLLIYKVSNRFSGVPDRFSGSGSGTDFTLTISRLEPEDFAVYYCFQGSRVPYTFGGGTKVEI

SEQ ID NO: 26265 - protein, 113 aa, Artificial Sequence
  source: /note="Description of Artificial Sequence: Synthetic polypeptide"
DIVMSQSPSSLAVSPGEKVTMTCKSSQSLFNSRTRKNYLGWYQQKPGQSPKLLIYWASTRESGVPDRFTGSGSGTDFTLTINSVQSEDLAVYYCTQVYYLCTFGAGTKLELKR

SEQ ID NO: 26266 - protein, 214 aa, Artificial Sequence
  source: /note="Description of Artificial Sequence: Synthetic polypeptide"
QLALTQPPSVSGSPGQSITISCTGTSSDVGGYNYVSWYQQHPGKAPKLMIYDVSNRPSGVSNRFSGSKSGNTASLTISGLQAEDEADYYCCSYAGSSTLVFGGGTKLTVLGQPKAAPSVTLFPPSSELQANKATLVCLISDFYPGAVTVAWKADGSPVKAGVETTTPSKQSNNKYAASSYLSLTPEQWKSHRSYSCQVTHEGSTVEKTVAPTEC

SEQ ID NO: 26267 - protein, 215 aa, Artificial Sequence
  source: /note="Description of Artificial Sequence: Synthetic polypeptide"
ELVLTQSPATLSLSPGERATLSCGASQSVSSSYLAWYQQKPGQAPRLLIYGASSRATGIPDRFSGSGSGTDFTLTISRLEPEDFAVYYCQQYGSSPPVTFGQGTRLEIKRTVAAPSVFIFPPSDEQLSGTASVVCLLNNFYPREAKVQWKVDNALQSGNSQESVTEQDSKDSTYSLSSTLTLSKADYEKHKVYACEVTHQGLSLPVTKSFNRGEC

SEQ ID NO: 26268 - protein, 261 aa, Artificial Sequence
  source: /note="Description of Artificial Sequence: Synthetic polypeptide"
AQPAMAEVQLVESGGGVVQPGRSLRLSCAASGFTFSSYGMHWVRQAPGKGLEWVAVISYDGSNKYYADSVKGRFTISRDNSKNTLYLQMNSLRAEDTAVYYCARLHAQTWGQGTLVTVSSGGGGSGGGGSGGSALQSVLTQPPSVSAAPGQKVTISCSGSSSDMGNYAVSWYQQLPGTAPKLLIYENNKRPSGIPDRFSGSKSGTSATLGITGLWPEDEADYYCLAWDTSPRNVFGGGTKLTVLGAAAHHHHHHGAAEQKL

SEQ ID NO: 26269 - protein, 247 aa, Artificial Sequence
  source: /note="Description of Artificial Sequence: Synthetic polypeptide"
DIVMSQSPSSLAVSPGEKVTMTCKSSQSLFNSRTRKNYLGWYQQKPGQSPKLLIYWASTRESGVPDRFTGSGSGTDFTLTINSVQSEDLAGGSGGGGSEVQLQESGGDLVKPGGSLKLSCAASGFTFSIYTMSWLRQTPEKRLEWVATLSVYYCTQVYYLCTFGAGTKLELKRGGGGSGGGDGDDIYYPDSVKGRFTISRDNAKNNLYLQMNSLRSADTALYYCARVRLGDWDFDVWGQGTTVTVSS

SEQ ID NO: 26270 - protein, 272 aa, Artificial Sequence
  source: /note="Description of Artificial Sequence: Synthetic polypeptide"
EVQLVESGGGLVQPGGSLRLSCAASGSTRSVNPMAWFRQAPGRQREWVATISRSGYATYADSVKGRFTISGDNAKSSVYLQMNSLKPEDTAVYYCVTGTYWGQGTLVTVSSGGGGSGGGGSGGGGSGGGGSGGGGSGGGGSGGGGSGGGGSEVQLVESGGGLVQPGGSLRLSCAASGSIFSINNMGWYRQAPGKQRELVTVVTSNLITTYADSVKGRFTISRDNAKNTVYLQMNSLKPEDTAVYYCNAWARSVGSVPYSQFWGQGTLVTVSS

SEQ ID NO: 26271 - protein, 283 aa, Artificial Sequence
  source: /note="Description of Artificial Sequence: Synthetic polypeptide"
EVQLVESGGGLVQAGGSLRLSCAASRLTFNHYNMGWFRQAPGKERERVAEVTWSGDKIYYVDSVKGRFTISRDNTPNPVYLYLQMNSLKPEDTAVYYCATAPRGLPYANGYWGQGTLVTVSSGGGGSGGGGSGGGGSGGGGSGGGGSGGGGSGGGGSGGGGSEVQLVESGGGLVQPGGSLRLSCAASGSIFSINTMGWYRQAPGKQRDLVASITMNQVPNYADSVQGRFTISRDNVRNTVHLQMNAVKPEDTADYFCNAWVRSSGASPYTNYWGQGTLVTVSS

SEQ ID NO: 26272 - protein, 272 aa, Artificial Sequence
  source: /note="Description of Artificial Sequence: Synthetic polypeptide"
EVQLVESGGGLVQPGGSLRLSCAASGSIFSINTMGWYRQAPGKQRELVSTITSNLVPHYADSVQGRFTISRDNARNTVYLQMNSLKPQDTAHYYCNAWARSSGATPYTNYWGQGTLVTVSSGGGGSGGGGSGGGGSGGGGSGGGGSGGGGSGGGGSGGGGSEVQLVESGGGLVQPGGSLRLSCAASGSTRSVNPMAWFRQAPGRQREWVATISRSGYATYADSVKGRFTISGDNAKSSVYLQMNSLKPEDTAVYYCVTGTYWGQGTLVTVSS

SEQ ID NO: 26273 - protein, 272 aa, Artificial Sequence
  source: /note="Description of Artificial Sequence: Synthetic polypeptide"
EVQLVESGGGLVQPGGSLRLSCAASGSTRSVNPMAWFRQAPGRQREWVATISRSGYATYADSVKGRFTISGDNAKSSVYLQMNSLKPEDTAVYYCVTGTYWGQGTLVTVSSGGGGSGGGGSGGGGSGGGGSGGGGSGGGGSGGGGSGGGGSEVQLVESGGGLVQPGDSLRLSCAASGRILSINNMVWYRQAPGKQRELVAHITSSGSTGYADSVKGRFTISRDNAKNTFYLQMTNLNPEDTAVYYCNCWVSSDSNAPLKNYWGQGTLVTVSS

SEQ ID NO: 26274 - protein, 286 aa, Artificial Sequence
  source: /note="Description of Artificial Sequence: Synthetic polypeptide"
EVQLVESGGGLVQPGGSLRLSCAASGSTLDYYAIGWFRQAPGKEREGVSCTSNSGSTYYGGSVKGRFTASRDNAKNTVYLQMNSLRPEDTAVYYCVATIGCATLGGTLDVQRYYYRGQGTLVTVSSGGGGSGGGGSGGGGSGGGGSGGGGSGGGGSGGGGSGGGGSEVQLVESGGGLVQAGGSLRLSCTASGRTLSSYTMGWFRQAPGTEREFVAAMTRSGFNTYYADSVKGRFTISRDSTENTMALQMSSLKPEDTAVYYCTAGRGLTSYRADYWGQGTLVTVSS

SEQ ID NO: 26275 - protein, 286 aa, Artificial Sequence
  source: /note="Description of Artificial Sequence: Synthetic polypeptide"
EVQLVESGGGLVQAGGSLRLSCTASGRTLSSYTMGWFRQAPGREREFVAAMTRSGFNTYYADSVKGRFTISRDSTENTMALQMSSLKPEDTAVYYCTAGRGLTSYRADYWGQGTLVTVSSGGGGSGGGGSGGGGSGGGGSGGGGSGGGGSGGGGSGGGGSEVQVLESGGGLVQPGGSLRLSCAASGSTLDYYAIGWFRQAPGKEREGVSCTSNSGSTYYGGSVKGRFTASRDNAKNTVYLQMNSLPREDTAVYYCVATIGCATLGGTLDVQRYYYRGQGTLVTVSS

SEQ ID NO: 26276 - protein, 277 aa, Artificial Sequence
  source: /note="Description of Artificial Sequence: Synthetic polypeptide"
EVQLVESGGGLVQAGGSLRLSCAASGNTFSTNPMYWYRQAEGKQRELVASISSRGITNYADSVRGRFSISRDNTKDTVYLQMNSLKPEDTAVYYCRLASLSSGTVYWGKGTLVTVSSGGGGSGGGGSGGGGSGGGGSGGGGSGGGGSGGGGSGGGGSEVQLVESGGGLVQAGGSLRLSCTASGRTLSSYTMGWFRQAPGTEREFVAAMTRSGFNTYYADSVKGRFTISRDSTENTMALQMSSLKPEDTAVYYCTAGRGLTSYRADYWGQGTLVTVSS

SEQ ID NO: 26277 - protein, 280 aa, Artificial Sequence
  source: /note="Description of Artificial Sequence: Synthetic polypeptide"
EVQLVESGGGLVQPGGSLRLSCAASGSFGDNYELYAMTWFRQAPGERRDFVASVTGDGSTSYADSVKFRFTISRDNAKKLMYLQMNSLKPEDTAVYYCRLLNYWGQGTLVTVSSGGGGSGGGGSGGGGSGGGGSGGGGSGGGGSGGGGSGGGGSEVQLVESGGGLVQPGGSLRLSCAASGSTLDYYAIGWFRQAPGKEREGVSCTSNSGSTYYGGSVKGRFTASRDNAKNTVYLQMNSLRPEDTAVYYCVATIGCATLGGTLDVQRYYYRGQGTLVTVSS

SEQ ID NO: 26278 - protein, 282 aa, Artificial Sequence
  source: /note="Description of Artificial Sequence: Synthetic polypeptide"
EVQLVESGGGLVQAGGSLRLSCTASGRTLSSYTMGWFRQAPGTEREFVAAMTRSGFNTYYADSVKGRFTISRDSTENTMALQMSSLKPEDTAVYYCTAGRGLTSYRADYWGQGTLVTVSSGGGGSGGGGSGGGGSGGGGSGGGGSGGGGSGGGGSGGGGSEVQLVESGGGLVQAGGSLRLSCAASRLTFNHYNMGWFRQAPGKERERVAEVTWSGDKIYYVDSVKGRFTISRDNTPNPVYLYLQMNSLKPEDTAVYYCATAPRGLPYANGYWGQGTLVTVSS

SEQ ID NO: 26279 - protein, 271 aa, Artificial Sequence
  source: /note="Description of Artificial Sequence: Synthetic polypeptide"
EVQLVESGGGLVQPGGSLRLSCAASGSTRSVNPMAWFRQAPGRQREWVATISRSGYATYADSVKGRFTISGDNAKSSVYLQMNSLKPEDTAVYYCVTGTYWGQGTLVTVSSGGGGSGGGGSGGGGSGGGGSGGGGSGGGGSGGGGSGGGGSEVQLVESGGGLVQAGGSLRLSCTASGRTLSSYTMGWFRQAPGTEREFVAAMTRSGFNTYYADSVKGRFTISRDSTENTMALQMSSLKPEDTAVYYCTAGRGLTSYRADYWGQGTLVTVSS

SEQ ID NO: 26280 - protein, 278 aa, Artificial Sequence
  source: /note="Description of Artificial Sequence: Synthetic polypeptide"
EVQLVESGGGLVQPGGSLRLSCAASGSIFSINTMGWYRQAPGKQRELVSTITSNLVPHYADSVQGRFTISRDNARNTVYLQMNSLKPQDTAHYYCNAWARSSGATPYTNYWGQGTLVTVSSGGGGSGGGGSGGGGSGGGGSGGGGSGGGGSGGGGSGGGGSEVQLVESGGGLVQAGGSLRLSCAASGNTFSTNPMYWYRQAEGKQRELVASISSRGITNYADSVRGRFSISRDNTKDTVYLQMNSLKPEDTAVYYCRLASLSSGTVYWGKGTLVTVSS

SEQ ID NO: 26281 - protein, 283 aa, Artificial Sequence
  source: /note="Description of Artificial Sequence: Synthetic polypeptide"
EVQLVESGGGLVQAGGSLRLSCAASGNTFSTNPMYWYRQAEKGQRELVASISSRGITNYADSVRGRFSISRDNTKDTVYLQMNSLKPEDTAVYYCRLASLSSGTVYWGKGTLVTVSSGGGGSGGGGSGGGGSGGGGSGGGGSGGGGSGGGGSGGGGSEVQLVESGGGLVQPGGSLRLSCAASGSTLDYYAIGWFRQAPGKEREGVSCTSNSGSTYYGGSVKGRFTASRDNAKNTVYLQMNSLRPEDTAVYYCVATIGCATLGGTLDVQRYYYRGQGTLVTVSS

SEQ ID NO: 26282 - protein, 288 aa, Artificial Sequence
  source: /note="Description of Artificial Sequence: Synthetic polypeptide"
EVQLVESGGGLVQPGGSLRLSCAASGSTLDYYAIGWFRQAPGKEREGVSCTSNSGSTYYGGSVKGRFTASRDNAKNTVYLQMNSLRPEDTAVYYCVATIGCATLGGTLDVQRYYYRGQGTLVTVSSGGGGSGGGGSGGGGSGGGGSGGGGSGGGGSGGGGSGGGGSEVQLVESGGGLVQAGGSLRLSCAASRLTFNHYNMGWFRQAPGKERERVAEVTWSGDKIYYVDSVKGRFTISRDNTPNPVYLYLQMNSLKPEDTAVYYCATAPRGLPYANGYWGQGTLVTVSS

SEQ ID NO: 26283 - protein, 278 aa, Artificial Sequence
  source: /note="Description of Artificial Sequence: Synthetic polypeptide"
EVQVLESGGGLVQAGGSLRLSCAASGNTFSTNPMYWYRQAEGKQRELVASISSRGITNYADSVRGRFSISRDNTKDTVYLQMNSLKPEDTAVYYCRLASLSSGTVYWGKGTLVTVSSGGGGSGGGGSGGGGSGGGGSGGGGSGGGGSGGGGSGGGGSEVQLVESGGGLVQPGGSLRLSCAASGSIFSINNMGWYRQAPGKQRELVTVVTSNLITTYADSVKGRFTISRDNAKNTVYLQMNSLKPEDTAVYYCNAWARSVGSVPYSQFWGQGTLVTVSS

SEQ ID NO: 26284 - protein, 278 aa, Artificial Sequence
  source: /note="Description of Artificial Sequence: Synthetic polypeptide"
EVQVLESGGGLVQAGGSLRLSCAASGNTFSTNPMYWYRQAEGKQRELVASISSRGITNYADSVRGRFSISRDNTKDTVYLQMNSLKPEDTAVYYCRLASLSSGTVYWGKGTLVTVSSGGGGSGGGGSGGGGSGGGGSGGGGSGGGGSGGGGSGGGGSEVQLVESGGGLVQPGDSLRLSCAASGRILSINNMVWYRQAPGKQRELVAHITSSGSTGYADSVKGRFTISRDNAKNTFYLQMTNLNPEDTAVYYCNCWVSSDSNAPLKNYWGQGTLVTVSS

SEQ ID NO: 26285 - protein, 279 aa, Artificial Sequence
  source: /note="Description of Artificial Sequence: Synthetic polypeptide"
EVQLVESGGGLVQAGGSLRLSCAASRLTFNHYNMGWFRQAPGKERERVAEVTWSGDKIYYVDSVKGRFTISRDNTPNPVYLYLQMNSLKPEDTAVYYCATAPRGLPYANGYWGQGTLVTVSSGGGGSGGGGSGGGGSGGGGSGGGGSGGGGSGGGGSGGGGSEVQLVESGGGLVQAGGSLRLSCAASGNTFSTNPMYWYRQAEGKQRELVASISSRGITNYADSVRGRFSISRDNTKNTVYLQMNSLKPEDTAVYYCRLASLSSGTVYWGKGTLVTVSS

SEQ ID NO: 26286 - protein, 278 aa, Artificial Sequence
  source: /note="Description of Artificial Sequence: Synthetic polypeptide"
EVQVLESGGGLVQAGGSLRLSCAASGNTFSTNPMYWYRQAEGKQRELVASISSRGITNYADSVRGRFSISRDNTKDTVYLQMNSLKPEDTAVYYCRLASLSSGTVYWGKGTLVTVSSGGGGSGGGGSGGGGSGGGGSGGGGSGGGGSGGGGSGGGGSEVQLVESGGGLVQPGGSLRSLCAASGRIFSINTMGWYRQAPGKQRELVAGVTINAITNYADSVKGRFTISRDNAKNTVWLQMNSLKPEDTAVYYCHAWARSSGSAPYSQNWGQGTLVTVSS

SEQ ID NO: 26287 - protein, 281 aa, Artificial Sequence
  source: /note="Description of Artificial Sequence: Synthetic polypeptide"
EVQLVESGGGLVQAGGSLRLSCAASGRTFSSYIMGWFRQAPGKAREVFADITWGQRPYYADSVKGRFTISRDNAKNTVYLEMNSLKPEDTAVYYCAADLGVVIREEHAYWGQGTLVTVSSGGGGSGGGGSGGGGSGGGGSGGGGSGGGGSGGGGSGGGGSEVQLVESGGGLVQPGGSLRLSCAASGSIFSINTMGWYRQAPGKQRELVSTITSNLVPHYADSVQGRFTISRDNARNTVYLQMNSLKPQDTAHYYCNAWARSSGATPYTNYWGQGTLVTVSS

SEQ ID NO: 26288 - protein, 281 aa, Artificial Sequence
  source: /note="Description of Artificial Sequence: Synthetic polypeptide"
EVQLVESGGGLVQAGGSLRLSCTASGRTLSSYTMGWFRQAPGTEREFVAAMTRSGFNTYYADSVKGRFTISRDSTENTMALQMSSLKPEDTAVYYCTAGRGLTSYRADYWGQGTLVTVSSGGGGSGGGGSGGGGSGGGGSGGGGSGGGGSGGGGSGGGGSEVQLVESGGGLVQPGGSLRLSCAASGRIFSINTMGWYRQAPGKQRELVAGVTINAITNYADSVKGRFTISRDNAKNTVWLQMNSLKPEDTAVYYCHAWARSSGSAPYSQNWGQGTLVTVSS

SEQ ID NO: 26289 - protein, 277 aa, Artificial Sequence
  source: /note="Description of Artificial Sequence: Synthetic polypeptide"
EVQLVESGGGLVQPGGSLRLSCAASGSTRSVNPMAWFRQAPGRQREWVATISRSGYATYADSVKGRFTISGDNAKSSVYLQMNSLKPEDTAVYYCVTGTYWGQGTLVTVSSGGGGSGGGGSGGGGSGGGGSGGGGSGGGGSGGGGSGGGGSEVQLVESGGGLVQPGGSLRLSCAASGSTLDYYAIGWFRQAPGKEREGVSCTSNSGSTYYGGSVKGRFTASRDNAKNTVYLQMNSLRPEDTAVYYCVATIGCATLGGTLDVQRYYYRGQGTLVTVSS

SEQ ID NO: 26290 - protein, 278 aa, Artificial Sequence
  source: /note="Description of Artificial Sequence: Synthetic polypeptide"
EVQLVESGGGLVQAGGSLRLSCAASGNTFSTNPMYWYRQAEGKQRELVASISSRGITNYADSVRGRFSISRDNTKDTVYLQMNSLKPEDTAVYYCRLASLSSGTVYWGKGTLVTVSSGGGGSGGGGSGGGGSGGGGSGGGGSGGGGSGGGGSGGGGSEVQLVESGGGLVQPGGSLRLSCAASGSIFSINTMGWYRQAPGKQRELVSTITSNLVPHYADSVQGRFTISRDNARNTVYLQMNSLKPQDTAHYYCNAWARSSGATPYTNYWGQGTLVTVSS

SEQ ID NO: 26291 - protein, 277 aa, Artificial Sequence
  source: /note="Description of Artificial Sequence: Synthetic polypeptide"
EVQLVESGGGLVQPGGSLRLSCAASGSTLDYYAIGWFRQAPGKEREGVSCTSNSGSTYYGGSVKGRFTASRDNAKNTVYLQMNSLRPEDTAVYYCVATIGCATLGGTLDVQRYYYRGQGTLTVTSSGGGGSGGGGSGGGGSGGGGSGGGGSGGGGSGGGGSGGGGSEVQLVESGGGLVQPGGSLRLSCAASGSTRSVNPMAWFRQAPGRQREWVATISRSGYATYADSVKGRFTISGDNAKSSVYLQMNSLKPEDTAVYYCVTGTYWGQGTLVTVSS

SEQ ID NO: 26292 - protein, 287 aa, Artificial Sequence
  source: /note="Description of Artificial Sequence: Synthetic polypeptide"
EVQLVESGGGLVQPGGSLRLSCAASGSTLDYYAIGWFRQAPGKEREGVSCTSNSGSTYYGGSVKGRFTASRDNAKNTVYLQMNSLRPEDTAVYYCVATIGCATLGGTLDVQRYYYRGQGTLVTVSSGGGGSGGGGSGGGGSGGGGSGGGGSGGGGSGGGGSGGGGSEVQLVESGGGLVQPGGSLRLSCAASGSIFSINNMGWYRQAPGKQRELVTVVTSNLITTYADSVKGRFTISRDNAKNTVYLQMNSLKPEDTAVYYCNAWARSVGSVPYSQFWGQGTLVTVSS

SEQ ID NO: 26293 - protein, 280 aa, Artificial Sequence
  source: /note="Description of Artificial Sequence: Synthetic polypeptide"
EVQLVESGGGLVQAGGSLRLSCAASGRTFSSYIMGWFRQAPGKAREFVADITWGQRPYYADSVKGRFTISRDNAKNTVYLEMNSLKPEDTAVYYCAADLGVVIREEHAYWGQGTLVTVSSGGGGSGGGGSGGGGSGGGGSGGGGSGGGGSGGGGSGGGGSEVQLVESGGGLVQAGGSLRLSCTASGRTLSSYTMGWFRQAPGTEREFVAAMTRSGFNTYYADSVKGRFTISRDSTENTMALQMSSLKPEDTAVYYCTAGRGLTSYRADYWGQGTLVTVSS

SEQ ID NO: 26294 - protein, 103 aa, Artificial Sequence; identical to SEQ ID NO: 7182
  source: /note="Description of Artificial Sequence: Synthetic polypeptide"

SEQ ID NO: 26295 - protein, 107 aa, Artificial Sequence [sequence omitted]

SEQ ID NO: 26296 - protein, 569 aa, Artificial Sequence
  source: /note="Description of Artificial Sequence: Synthetic polypeptide"
EEQVVESGGGFVQPGGSLRLSCAASGFTFSPYWMHWVRQAPGKGLVWVSRINSDGSTYYADSVKGRFTISRDNARNTLYLQMNSLRAEDTAVYYCARDRYYGPEMWGQGTMVTVSSGSASAPTLFPLVSCENSPSDTSSVAVGCLAQDFLPDSITFSWKYKNNSDISSTRGFPSVLRGGKYAATSQVLLPSKDVMQGTDEHVVCKVQHPNGNKEKNVPLPVIAELPPKVSVFVPPRDGFFGNPRKSKLICQATGFSPRQIQVSWLREGKQVGSGVTTDQVQAEAKESGPTTYKVTSTLTIKESDWLSQSMFTCRVDHRGLTFQQNASSMCVPDQDTAIRVFAIPPSFASIFLTKSTKLTCLVTDLTTYDSVTISWTRQNGEAVKTHTNISESHPNATFSAVGEASICEDDWNSGERFTCTVTHTDLPSPLKQTISRPKGVALHRPDVYLLPPAREQLNLRESATITCLVTGFSPADVFVQWMQRGQPLSPEKYVTSAPMPEPQAPGRYFAHSILTVSEEEWNTGETYTCVVAHEALPNRVTERTVDKSTGKPTLYNVSLVMSDTAGTCY

SEQ ID NO: 26297 - protein, 154 aa, Artificial Sequence
  source: /note="Description of Artificial Sequence: Synthetic polypeptide"
QVQLVESGGGVVQPGRSLRLSCAASGFTFSSYGMHWVRQAPGKGLEWVAAIWYSGSNKYYADSVKGRFTISRDNSKNTLYLQMNSLRAEDTAVYYCARDPHYTRGFDYWGKGTLVTVSSASTKGPIGLPLAPCSRSTSESTAALGCLVKDYFAE

SEQ ID NO: 26298 - protein, 119 aa, Artificial Sequence; identical to SEQ ID NO: 22458
  source: /note="Description of Artificial Sequence: Synthetic polypeptide"

SEQ ID NO: 26299 - protein, 124 aa, Artificial Sequence
  source: /note="Description of Artificial Sequence: Synthetic polypeptide"
QVQLVESGGGVVQPGGSLRLSCAASGFTFSTAGMHWVRQAPGKGLEWVAVIWYNGKEISYADSVKGRFTVSRDNPKNTLYLQMSSLRTEDTAVYYCARNRGDIYYDFTYAMDIWGQGTMVTVSS

SEQ ID NO: 26300 - protein, 124 aa, Artificial Sequence
  source: /note="Description of Artificial Sequence: Synthetic polypeptide"
QVQLVESGGGVVQPGRSLRLSCTASGFSFSSYGMHWVRQAPGKGLEWVAVIWYNGKEISYADSVKGRFTVSRDNPKNTLYLQMSSLRTEDTAVYYCARNRGDIYYDFTYAMDIWGQGTMVTVSS

SEQ ID NO: 26301 - protein, 124 aa, Artificial Sequence
  source: /note="Description of Artificial Sequence: Synthetic polypeptide"
QVQLVESGGGLVQPGRSLRLSCVGSGFTFSSYGIHWVRQAPGKGLEWVAVIWYNGKEISYADSVKGRFTVSRDNLKNTLYLQMSSLRTEDTAVYYCARNRGDIYYDFTYAMDIWGQGTMVTVSS

SEQ ID NO: 26302 - protein, 124 aa, Artificial Sequence
  source: /note="Description of Artificial Sequence: Synthetic polypeptide"
QVQLVESGGGLVQPGRSLRLSCVGSGFTFSSYGIHWVRQAPGKGLEWVAVIWYNGKEISYADSVKGRFTVSRDNPKNTLYLQMSSLRTEDTAVYYCARNRGDIYYDFTYAMDIWGQGTMVTVSS

SEQ ID NO: 26303 - protein, 50 aa, Artificial Sequence
  source: /note="Description of Artificial Sequence: Synthetic polypeptide"
EVQLVESGGGVVQPGGSLRLSCAASGFTFSTAGMHWVRQAPGKGLEWVAV

SEQ ID NO: 26304 - protein, 121 aa, Artificial Sequence
  source: /note="Description of Artificial Sequence: Synthetic polypeptide"
QVQLQQPGAELVKPGASVKLSCKASGYSFTSYWMHWVKQRPGQGLEWIGEINPSNGRTNYNEKFNTKATLTVDTSSSTAYMQLSSLTSEDSAVYYCVLYGNYVVYYTMDYWGQGTSVTVSS

SEQ ID NO: 26305 - protein, 120 aa, Artificial Sequence
  source: /note="Description of Artificial Sequence: Synthetic polypeptide"
DVQLQESGPGLVKPSQSLSLTCTVTGYSITSDYAWNWIRQFPGNKLEWMGYITYNGDTSYNPSLKSRISIARDTSKNQFFLQLNSVTTEDTATYSCAGSRNYYGAWFAYWGQGTLVTVSA

SEQ ID NO: 26306 - protein, 115 aa, Artificial Sequence
  source: /note="Description of Artificial Sequence: Synthetic polypeptide"
QVQLVQSGAEVKKPGASVKVSCKASGYSFTSYWMHWVRQAPGQGLEWMGEINPSNGRTNYNEKFNTRVTMTRDTSTSTVYMELSSLRSEDTAVYYCVLYGNYVVYYTMDYWGQGT

SEQ ID NO: 26307 - protein, 135 aa, Artificial Sequence
  source: /note="Description of Artificial Sequence: Synthetic polypeptide"
MMVLSLLYLLTAIPGILSDVQLQESGPGLVKPSQSLSLPCSVTGYSITSGYYWNWIRQFPGNKLEWMGYIRYDGNNNYNPSLKNRISITHDTSKNQFFLKLNYVTTEDTATYYCARGLQFYFDSWGQGTTLTVSS

SEQ ID NO: 26308 - protein, 137 aa, Artificial Sequence
  source: /note="Description of Artificial Sequence: Synthetic polypeptide"
MNFGLSLVFLVLILKGVQCEVMLVESGGGLVKPGGSLKLSCAASGFTFSTFTMSWVRQTPEKRLECVATINGGGGNTYYPDSVKGRFTISRDNAKNNLYLQMSSLRSEDTAFYFCSRLYGIYAMDYWGQGTSVTVSS

SEQ ID NO: 26309 - protein, 117 aa, Artificial Sequence
  source: /note="Description of Artificial Sequence: Synthetic polypeptide"
DVQLQESGPGLVKPSETLSLTCSVTGYSITSGYYWNWIRQPPGKGLEWMGYIRYDGNNNYNPSLKNRITISHDTSKNQFSLKLSSVTAADTATYYCARGLQFYFDSWGQGTTVTVSS

SEQ ID NO: 26310 - protein, 118 aa, Artificial Sequence
  source: /note="Description of Artificial Sequence: Synthetic polypeptide"
EVMLVESGGGLVQPGGSLRLSCAASGFTFSTFTMSWVRQAPGKGLECVATINGGGGNTYYPDSVKGRFTISRDNSKNTLYLQMNSLRAEDTAFYFCSRLYGIYAMDYWGQGTTVTVSS

SEQ ID NO: 26311 - protein, 137 aa, Artificial Sequence
  source: /note="Description of Artificial Sequence: Synthetic polypeptide"
MDWTWRVFFLLAVAPGAHSQVRLVQSGTEVKKPGASVRVSCKASGYTFSNYYMYWVRQAPGQGLEWMAMINPSGGSTRYAQKFQGRVTMTRDTSTSTVYMELSSLRSEDTAVYYCARADSGSYFGYWGQGTLVTVSS

SEQ ID NO: 26312 - protein, 467 aa, Artificial Sequence
  source: /note="Description of Artificial Sequence: Synthetic polypeptide"
MDWTWRVFCLLAVAPGAHSQVRLVQSGTEVKKPGASVRVSCKASGYTFSNYYMYWVRQAPGQGLEWMAMINPSGGSTRYAQKFQGRVTMTRDTSTSTVYMELSSLRSEDTAVYYCARADSGSYFGYWGQGTLVTVSSASTKGPSVFPLAPSSKSTSGGTAALGCLVKDYFPEPVTVSWNSGALTSGVHTFPAVLQSSGLYSLSSVVTVPSSSLGTQTYICNVNHKPSNTKVDKKVEPKSCDKTHTCPPCPAPELLGGPSVFLFPPKPKDTLMISRTPEVTCVVVDVSHEDPEVKFNWYVDGVEVHNAKTKPREEQYNSTYRVVSVLTVLHQDWLNGKEYKCKVSNKALPAPIEKTISKAKGQPREPQVYTLPPSRDELTKNQVSLTCLVKGFYPSDIAVEWESNGQPENNYKTTPPVLDSDGSFFLYSKLTVDKSRWQQGNVFSCSVMHEALHNHYTQKSLSLSPGK

SEQ ID NO: 26313 - protein, 107 aa, Artificial Sequence
  source: /note="Description of Artificial Sequence: Synthetic polypeptide"
DIQMTQSPSTLSASVGDRVTITCRASQSISSWLAWYQQKPGKAPKLLIYKASSLESGVPSRFSGSGSGTEFTLTISSLQPDDFATYYCQQYKSYPVFGQGTKVEIKG

SEQ ID NO: 26314 - protein, 118 aa, Artificial Sequence
  source: /note="Description of Artificial Sequence: Synthetic polypeptide"
QVRLQQSGPGLVKPSETLSLTCTVSGGSTSPYFWSWLRQPPGKGLEWIGYIHSNGGTNYNPSLKSRLTISGDTSKNQFSLNLSFVTAADTALYYCARTDYDVYGPAFDIWGQGTMVTV

SEQ ID NO: 26315 - protein, 118 aa, Artificial Sequence
  source: /note="Description of Artificial Sequence: Synthetic polypeptide"
QVQLQQSGPGRVKPSETLSLTCTVSGYSVSSGYYWGWIRQSPGTGLEWIGSISHSGSTYYNPSLKSRVTISGDASKNQFFLRLTSVTAADTAVYYCARSEATANFDSWGRGTLVTVSS

SEQ ID NO: 26316 - protein, 119 aa, Artificial Sequence
  source: /note="Description of Artificial Sequence: Synthetic polypeptide"
QVQLQQSGPGLVKPSETLSLTCTVSGGSVSSSGYYWTWIRQPPGKGLEWIGSIYSSGSTYYSPSLKSRVTISGDTSKNQFSLKLSSVTAADTAVYYCARLNWGTVSAFDIWGRGTLVTV

SEQ ID NO: 26317 - protein, 119 aa, Artificial Sequence
  source: /note="Description of Artificial Sequence: Synthetic polypeptide"
EVQLLESGGGLVQPGGSLRLSCSASGFTFSRYPMHWVRQAPGKGLEYVSDIGTNGGSTNYADSVKGRFTISRDNSKNTVYLQMSSLRAEDTAVYHCVAGIAAAYGFDVWGQGTMVTVSS

SEQ ID NO: 26318 - protein, 118 aa, Artificial Sequence
  source: /note="Description of Artificial Sequence: Synthetic polypeptide"
QVQLVQSGGGLVQPGGSLRLSCSASGFTFSSYPMHWVRQAPGKGLDYVSDISPNGGSTNYADSVKGRFTISRDNSKNTLFLQMSSLRAEDTAVYYCVMGLVPYGFDIWGQGTLVTVSS

SEQ ID NO: 26319 - protein, 118 aa, Artificial Sequence
  source: /note="Description of Artificial Sequence: Synthetic polypeptide"
QMQLVQSGGGLVQPGGSLRLSCSASGFTFSSYPMHWVRQAPGKGLDYVSDISPNGGATNYADSVKGRFTISRDNSKNTVYLQMSSLRAEDTAVYYCVMGLVPYGFDNWGQGTMVTVSS

SEQ ID NO: 26320 - protein, 119 aa, Artificial Sequence
  source: /note="Description of Artificial Sequence: Synthetic polypeptide"
EVQLLESGPGLVKPSETLSLTCNVAGGSISPYYWTWIRQPPGKGLELIGYIHSSGYTDYNPSLKSRVTISGDTSKKQFSLHVSSVTAADTAVYFCARGDWDLLHALDIWGQGTLVTVSS

SEQ ID NO: 26321 - protein, 116 aa, Artificial Sequence
  source: /note="Description of Artificial Sequence: Synthetic polypeptide"
EVQLVQSGADVKKPGASVRVTCKASGYTFTGHNIHWVRQAPGQGLEWMGWINPDSGATSYAQKFQGRVTMTRDTSITTAYMDLSRLRSDDTAVYYCATDTLLSNHWGQGTLVTVSS

SEQ ID NO: 26322 - protein, 123 aa, Artificial Sequence
  source: /note="Description of Artificial Sequence: Synthetic polypeptide"
EVQLVESGGGLVQPGGSLRLSCAASGYTFSSYATSWVRQAPGKGLEWVAGISGSGDTTDYVDSVKGRFTVSRDNSKNTLYLQMNSLRADDTAVYYCASRGGLGGYYRGGFDFWGQGTMVTVSS

SEQ ID NO: 26323 - protein, 120 aa, Artificial Sequence
  source: /note="Description of Artificial Sequence: Synthetic polypeptide"
QVQLVESGGGVVEPGRSLRLSCAASGFTFSNYGMHWVRQAPGKGLDWVAVISSHGRDKYYADSVKGRFTISRDYSRNMVYLQMNSLRPEDTAVYYCAKDKGVKYSYGDSWGRGTLVTVSS

SEQ ID NO: 26324 - protein, 120 aa, Artificial Sequence
  source: /note="Description of Artificial Sequence: Synthetic polypeptide"
QVQLVESGGGVVQPGRSLRLSCAASGFTFSSHGMHWVRQAPGKGLEWVAAVSNDGSDKYYADSVKGRLTISRDNSENTLYLQMSSLRGEDTAVYYCAKGSIAARQYFDYWGQGTLVTVSS

SEQ ID NO: 26325 - protein, 120 aa, Artificial Sequence
  source: /note="Description of Artificial Sequence: Synthetic polypeptide"
QVQLVESGGGVVQPGRSQRLSCVASGFIFNNYAMHWVRQAPGKGLEWVAAISFDGRDKFYADSVQGRFSISRDNSRDTLYLQMNGLRPDDTAVYFCATGSKEAHQFVLYWAQGTLVTVSS

SEQ ID NO: 26326 - protein, 120 aa, Artificial Sequence
  source: /note="Description of Artificial Sequence: Synthetic polypeptide"
QVQLVESGGGVVRPGRSLRLSCAASGFTFSSHGMHWVRQAPGKGLEWVAAVSNDGSDKYYADSVKGRLTISRDNSENTLYLQMSSLRGEDTAVYYCAKGSIAARQYFDCWGQGTLVTVSS

SEQ ID NO: 26327 - protein, 114 aa, Artificial Sequence
  source: /note="Description of Artificial Sequence: Synthetic polypeptide"
QVQLQESGPGLVKPSETLSLTCTVSGDSINTEGYYWSWIRQPAGRGLEWIGRIYKGGNIIYNPSLKSRVTIALDTSKSQFSLRLTSVTAADTAVYYCARIPGPWGQGTLVTVSS

SEQ ID NO: 26328 - protein, 120 aa, Artificial Sequence
  source: /note="Description of Artificial Sequence: Synthetic polypeptide"
QVQLQESGPGLVKPSQTLSLTCTVSGASISSSGYCWGWVRQPPGKGLEWIGYICYSANAYYNPSLKSRVTISVGTSGQHFSLKLSSVTAADTAVYYCARSRSMSFPGDDWGQGTLVTVSS

SEQ ID NO: 26329 - protein, 124 aa, Artificial Sequence
  source: /note="Description of Artificial Sequence: Synthetic polypeptide"
QVQLVESGGGLVQPGGSLRLSCSTSGFSFSTSGMHWVRQAPGKGLEYVAAITGDGANTYYAKSVTGRFTVSRDNSKTTLYLQMSSLRTEDTAVYYCARAPAQHNTIWYGPDDYWGQGTLVTVSS

SEQ ID NO: 26330 - protein, 116 aa, Artificial Sequence
  source: /note="Description of Artificial Sequence: Synthetic polypeptide"
EVQLVESGGGLVQPGGSLRLSCAASGFPFSRYWMHWVRQAPGKGLEWVSRSNPDAITTYYADSVKGRFTISRDNAKNTLYLQMDTVRAEDTAVYYCVTFTDDRGYWGQGTLVTVSS

SEQ ID NO: 26331 - protein, 120 aa, Artificial Sequence
  source: /note="Description of Artificial Sequence: Synthetic polypeptide"
QVQLVESGGGVVQPGRSLRLSCAASGFTFSDYGMHWVRQTPGRGLEWVAIISNDGHNALYADSVRGRFTISRDNARDTLYVEMSSLRPEDTAIYYCAKSVDIMGYYLDYWGQGTLVTVSS

SEQ ID NO: 26332 - protein, 117 aa, Artificial Sequence
  source: /note="Description of Artificial Sequence: Synthetic polypeptide"
EVQLVETGGGLIQPGGSLRLSCAVSGFNVNNNHMNWVRQAPGKGLEWLSLIYSGDKTYTADSVKGRFTISRDTSKNTLYLQMNSLGVEDTAVYYCATALLFFNGGHWGQGTLVTVSS

SEQ ID NO: 26333 - protein, 120 aa, Artificial Sequence
  source: /note="Description of Artificial Sequence: Synthetic polypeptide"
QVQLQQSGPRLVKPSQTLSLTCAISGDTLFTKSVAWNWLRQSPSGGLEWLGRTDYTSKWNTDYAPSVRSRITINADTSKNLFSLQLDFVTPQDTAIYYCARGIHSTFDFWGQGTLVTVSS

SEQ ID NO: 26334 - protein, 121 aa, Artificial Sequence
  source: /note="Description of Artificial Sequence: Synthetic polypeptide"
QVQLQQSGPGLVKPSQTLSLTCAISGDSVSRSSSVAWNWIRLSPSRGLEWLGRTYYRSQWYNDYAVSVNGRVSVNPDTSKNQFSLHLNSVTPEDTAVYYCVRGQHSAFDIWGQGTMVTVSS

SEQ ID NO: 26335 - protein, 121 aa, Artificial Sequence
  source: /note="Description of Artificial Sequence: Synthetic polypeptide"
QVQLVESGGGVVQPGRSLRLSCSASGFTFRSHGMHWVRQAPGKGLEWVAMISYDVTTTKYADSVKGRVTLSRDNSRNTVYLQMDSLRPEDSAVYYCARGLNDYDDYRLAYWGQGTLVTVSS

SEQ ID NO: 26336 - protein, 116 aa, Artificial Sequence
  source: /note="Description of Artificial Sequence: Synthetic polypeptide"
QVQLQESGPGLVKTSETLSLTCIVSGGSMTNYYLSWLRKPPGKGLEWIGYIYYNGDTTIYNPSLRSRVTMSVETFKSQFSLRLNSVTAADTAVYYCARHRGAFDTWGQGTMVTVSS

SEQ ID NO: 26337 - protein, 118 aa, Artificial Sequence
  source: /note="Description of Artificial Sequence: Synthetic polypeptide"
EVQLVESGGGLVQPGRSLTLSCVVSGFYSDDYAMHWVRQAPGKGLEWVSGIMWKSGNTGYVDSVKGRFTISRDSAKNSLYLQMNSLRPEDTALYYCAKDTSAGSPIMGGQGTLVTVSS

SEQ ID NO: 26338 - protein, 118 aa, Artificial Sequence
  source: /note="Description of Artificial Sequence: Synthetic polypeptide"
EVQLVQSEAEMKKPGESLRISCKASGYKFTSSWIGWARQMPDKGLEWMAIINPRDSDTRYSPSLQGQVTISVDKSISTVYLQWSSLKASDTAIYYCARQPGEGWFDPWGQGTLVTVSS

SEQ ID NO: 26339 - protein, 131 aa, Artificial Sequence
  source: /note="Description of Artificial Sequence: Synthetic polypeptide"
EVQLVESGGGLVQPGGSLRLSCSASGFTDSRFTFRNYWMHWVRQAPGKGLVWVSRINGDGGGTVYSDSVKGRFTISRDNARNIVYLQMDSLRAEDTAVYYCVREFGLFDSGTWYSGGFDYWGQGTLVTVSS

SEQ ID NO: 26340 - protein, 128 aa, Artificial Sequence
  source: /note="Description of Artificial Sequence: Synthetic polypeptide"
EVQLVESGGGLVQPGGSLRLSCAASGFTIPFRKYWLHWVRQAPGKGLVWVSLIIGDGSSTNYADSVKGRFTISRDNDKNTLYLQMNSLRVEDTAVYYCARDLGERTGDNWHSLGPDYWGQGTLVTVSS

SEQ ID NO: 26341 - protein, 124 aa, Artificial Sequence; identical to SEQ ID NO: 26329
  source: /note="Description of Artificial Sequence: Synthetic polypeptide"

SEQ ID NO: 26342 - protein, 115 aa, Artificial Sequence
  source: /note="Description of Artificial Sequence: Synthetic polypeptide"
EVQLVESGGGLVQPGGSLRLSCAASGFTFSGFWMSWVRQAPGRGLEWVANIKEDGSLKNYVDSVKGRFTISRDNAENSLFLQMNSLRAEDTAVYYCCSSAWCTYWGQGTLVTVSS

SEQ ID NO: 26343 - protein, 120 aa, Artificial Sequence
  source: /note="Description of Artificial Sequence: Synthetic polypeptide"
QVQLQESGPGLVKPSETLSLTCTVSGGSISSYYWSWIRQPAGKGLEWIGRIYTSGNTNYKPSLKSRVTMSVDTSKNQFSLKLSSVTAADTAVYYCAREVMVRGVTFDYWGQGTLVTVSSA

SEQ ID NO: 26344 - protein, 118 aa, Artificial Sequence
  source: /note="Description of Artificial Sequence: Synthetic polypeptide"
QVQLQESGPGLVKPSETLSLTCTVSGGSVSDYYWSWIRQPPGKGLEWIGYIYYSGSTNYNPSLKSRVTISVDTSKNQFSLKLSSVTAADTAVYYCARDGSVPPGIYWGQGTLVTVSSA

SEQ ID NO: 26345 - protein, 123 aa, Artificial Sequence
  source: /note="Description of Artificial Sequence: Synthetic polypeptide"
QVQLVESGGGVVQPGRSLRLSCAASGFTFRYGMHWVRQAPGKGLEWVAVIWYDGNKKYHAESVKGRFTISRDNSKNTLYLQMNSLRAEDTAVYYCARGGFGELPHLYGMDVWGQGTTVTVSSA

SEQ ID NO: 26346 - protein, 122 aa, Artificial Sequence
  source: /note="Description of Artificial Sequence: Synthetic polypeptide"
EVQLVESGGGLVKPGGSLRLSCAVSGFTFSNAWMSWVRQTPGKGLEWVGRIKSKTDGGTIDYAAPVKGRFTISRDDSKNTLYLQMNSLKTEDTAVYYCTKFYYGSGSYGYWGQGTINTVSSA

SEQ ID NO: 26347 - protein, 121 aa, Artificial Sequence
  source: /note="Description of Artificial Sequence: Synthetic polypeptide"
QVQLQQSGPGLVKPSQTLSLTCAISGDSVSSNSAAWNWIRQSPSRGLEWLGRTYYRSKWYNDYAVSVKSRITINPDTSKNQFSLQLNSVTPEDTAVYYCARGYYYGMDVWGQGTTVTVSSA

SEQ ID NO: 26348 - protein, 123 aa, Artificial Sequence
  source: /note="Description of Artificial Sequence: Synthetic polypeptide"
EVQLVESGGGLVKPGGSLRLSCAASGFTFSNAWMSWVRQAPGKGLEWVGRIKSKTDGGTTDYAAPVKGRFTISRDDSKNTLYLQMNSLKTEDTAVYYCTTYYYDSSGYYYYWGQGTLVTVSSA

SEQ ID NO: 26349 - protein, 122 aa, Artificial Sequence
  source: /note="Description of Artificial Sequence: Synthetic polypeptide"
EVQLVQSGAEVKKPGESLKISCKGFGYSFASYWIGWVRQMPGKGLEWMGNIYPGDSYTIYSPSFQGQVAISADKSISTAYLQWNSLKASDTAMYYCARRGFSGRSYDAFEIWGQGTMVTVLA

SEQ ID NO: 26350 - protein, 125 aa, Artificial Sequence
  source: /note="Description of Artificial Sequence: Synthetic polypeptide"
QVHLQESGPGLVKPSETLSLTCTVSGGSITNFYWSWIRQSAGKGLEWIGRIYISGTTNYNPSLKSRVTMSLDTSKNQFSLKLSSVTAADTAVYYCARGGYSIGWYRDLGSFDIWGQGTMVTVSSA

SEQ ID NO: 26351 - protein, 117 aa, Artificial Sequence
  source: /note="Description of Artificial Sequence: Synthetic polypeptide"
QVQLQESGPGLVKPSESLSLTCTVSGGSVSSYYWSWIRQPAGKGLEWIGLIYTSGSTNYNPSLKSRVTMSVDTSKNQFSLKLSSVTAADSAVYYCARIAAAGTDYWGQGTLVTVSSA

SEQ ID NO: 26352 - protein, 124 aa, Artificial Sequence
  source: /note="Description of Artificial Sequence: Synthetic polypeptide"
EIQLVQSGAEVKKPGASVKVSCKASGYTFTDHAISWVRQAPGQGLEWMGWISPYSGNPNYAQSLQGRVSLTTDRSTRTAYMELRSLKSDDTAVYYCARNRGDIYYDFTYAFDIWGQGTMVTVSS

SEQ ID NO: 26353 - protein, 124 aa, Artificial Sequence
  source: /note="Description of Artificial Sequence: Synthetic polypeptide"
EVQLVESGGGVVQPGGSLRLSCAASGFTFSTAGMHWVRQAPGKGLEWVAVIWYNGKEISYADSVKGRFTVFRDNPKNTLYLQMSSLRTEDTAVYYCARNRGDIYYDFTYAMDIWGQGTMVTVSS

SEQ ID NO: 26354 - protein, 124 aa, Artificial Sequence; identical to SEQ ID NO: 26299
  source: /note="Description of Artificial Sequence: Synthetic polypeptide"

SEQ ID NO: 26355 - protein, 124 aa, Artificial Sequence; identical to SEQ ID NO: 26301
  source: /note="Description of Artificial Sequence: Synthetic polypeptide"

SEQ ID NO: 26356 - protein, 124 aa, Artificial Sequence; identical to SEQ ID NO: 26302
  source: /note="Description of Artificial Sequence: Synthetic polypeptide"

SEQ ID NO: 26357 - protein, 124 aa, Artificial Sequence; identical to SEQ ID NO: 26300
  source: /note="Description of Artificial Sequence: Synthetic polypeptide"

SEQ ID NO: 26358 - protein, 124 aa, Artificial Sequence
  source: /note="Description of Artificial Sequence: Synthetic polypeptide"
QVQLVESGGGVVQPGRSLRLSCAASGFTFSSYPLHWVRQAPGKGLEWVSFISYDGSEKYYASSVKGRFTISRDNSENTLYLQMNSLRPEDTAVYYCARNRGDIYYDFTYAMDIWGQGTMVTVSS

SEQ ID NO: 26359 - protein, 124 aa, Artificial Sequence
  source: /note="Description of Artificial Sequence: Synthetic polypeptide"
EVQLVESGGGLVQPGRSLRLSCVGSGFTFSSYGIHWVRQAPGKGLEWVANIWYDGSSESYIDSVKGRFTVSRDDSRNTVYLQMNSLRPEDTAVYYCARNRGDIYYDFTYAMDIWGQGTMVTVSS

SEQ ID NO: 26360 - protein, 124 aa, Artificial Sequence
  source: /note="Description of Artificial Sequence: Synthetic polypeptide"
EVQLVESGGGVVQPGRSLRLSCAASGFTFSSYGMHWVRQAPGKGLEWVAVIWYDGYNKDYADSVKGRFTISRDNSKNTLYLQINSLRAEDTAVYYCARNRGDIYYDFTYAMDIWGQGTMVTVSS

SEQ ID NO: 26361 - protein, 124 aa, Artificial Sequence
  source: /note="Description of Artificial Sequence: Synthetic polypeptide"
EVQLVESGGGVVQPGRSLRLSCAASGFTFSNYPMHWVRQAPGKGLEWVAVISYDGSEKWYADSVKGRFTISRDNSKNTLYLEMNSLRPEDTAVYYCARNRGDIYYDFTYAMDIWGQGTTVTVSS

SEQ ID NO: 26362 - protein, 107 aa, Artificial Sequence
  source: /note="Description of Artificial Sequence: Synthetic polypeptide"
DIQLTQSPSTLSASVGDSVTITCRASEGVDRWLAWYQQKPGRAPKLLIYDASTLQSGVPSRFSGSGSGTEFSLTISSLQPDDVATYYCQHFWGTPYTFGQGTKLEIK

SEQ ID NO: 26363 - protein, 124 aa, Artificial Sequence
  source: /note="Description of Artificial Sequence: Synthetic polypeptide"
EVQLVESGGGVVQPGRSLRLSCAASGFTFSNYPMHWVRQAPGKGLEWVAVISYDGSEKWYADSVKGRFTISRDNSKNTLYLEMNSLRPEDTAVYYCARNRGDIYYDFTYAMDQWGQGTTVTVSS

SEQ ID NO: 26364 - protein, 124 aa, Artificial Sequence
  source: /note="Description of Artificial Sequence: Synthetic polypeptide"
EVQLVESGGGVVQPGRSLRLSCAASGFTFSSYPLHWVRQAPGKGLEWVSFISYDGSEKYYASSVKGRFTISRDNSENTLYLQMNSLRPEDTAVYYCARNRGDIYYDFTYAMDIWGQGTMVTVSS

SEQ ID NO: 26365 - protein, 124 aa, Artificial Sequence
  source: /note="Description of Artificial Sequence: Synthetic polypeptide"
EVQLVESGGGVVQPGRSLRLSCAASGFTFSNYPMHWVRQAPGKGLEWVAVISYDGSEKWYADSVKGRFTISRDNSKNTLYLEMNSLRPEDTAVYYCARNRGDIYYDFTYAMDYWGQGTTVTVSS

SEQ ID NO: 26366 - protein, 124 aa, Artificial Sequence
  source: /note="Description of Artificial Sequence: Synthetic polypeptide"
EMQLLESGGGLVQPGGSLRLSCAASGFTFSSYAMNWVRQAPGEGLEWVSAITISGITAYYTDSVKGRFTISRDNSKNTLYLQMNSLRAGDTAVYYCAKEEFLPGTHYYYGMDVWGQGTTVTVSS

SEQ ID NO: 26367 - protein, 124 aa, Artificial Sequence; identical to SEQ ID NO: 26366
  source: /note="Description of Artificial Sequence: Synthetic polypeptide"

SEQ ID NO: 26368 - protein, 107 aa, Artificial Sequence
  source: /note="Description of Artificial Sequence: Synthetic polypeptide"
AIQMTQSPSSLSASVGDRVTITCRASQGIRNDLGWYQQKPGKAPKLVIYSASTLQSGVPSRFSGSGSGTDFTLSISSLQPDDFATYYCLQDYNYPWTFGQGTKVEIK

SEQ ID NO: 26369 - protein, 124 aa, Artificial Sequence
  source: /note="Description of Artificial Sequence: Synthetic polypeptide"
EVQLLESGGGLVQPGGSLRLSCAASGFTFSSYAMNWVRQAPGKGLEWVSAITISGITAYYTDSVKGRFTISRDNSKNTLYLQMNSLRAEDTAVYYCAKEEFLPGTHYYYGMDVWGQGTTVTVSS

SEQ ID NO: 26370 - protein, 124 aa, Artificial Sequence
  source: /note="Description of Artificial Sequence: Synthetic polypeptide"
EVQLVESGGGLVQPGGSLRLSCSASGFIFSTHAMHWVRQTPGMGLEYVAAITNNGGGTYYAASVKGRFTVSRDNSKNTLFLQMNSLRPEDTAMYYCLKAPPPESGDLYGPDDYWGQGTLVTVSS

SEQ ID NO: 26371 - protein, 122 aa, Artificial Sequence
  source: /note="Description of Artificial Sequence: Synthetic polypeptide"
QVQLVESGGGVVPPGESLRVSCVGSGFTFNTAVLHWVRQPPGKGLEWVAAISHDGLGRFYADSVKGRFTISRDNSKNTLYLQMNNLSGDDTALYYCAKEEFTSGYCGAVGYWGEGTLVTVSS

SEQ ID NO: 26372 - protein, 154 aa, Artificial Sequence; identical to SEQ ID NO: 26297
  source: /note="Description of Artificial Sequence: Synthetic polypeptide"

SEQ ID NO: 26373 - protein, 124 aa, Artificial Sequence; identical to SEQ ID NO: 26358
  source: /note="Description of Artificial Sequence: Synthetic polypeptide"

SEQ ID NO: 26374 - protein, 124 aa, Artificial Sequence; identical to SEQ ID NO: 26361
  source: /note="Description of Artificial Sequence: Synthetic polypeptide"

SEQ ID NO: 26375 - protein, 124 aa, Artificial Sequence; identical to SEQ ID NO: 26365
  source: /note="Description of Artificial Sequence: Synthetic polypeptide"

SEQ ID NO: 26376 - protein, 124 aa, Artificial Sequence; identical to SEQ ID NO: 26352
  source: /note="Description of Artificial Sequence: Synthetic polypeptide"

SEQ ID NO: 26377 - protein, 116 aa, Artificial Sequence
  source: /note="Description of Artificial Sequence: Synthetic polypeptide"
EEQVVESGGGFVQPGGSLRLSCAASGFTFSPYWMHWVRQAPGKGLVWVSRINSDGSTYYADSVKGRFTISRDNARNTLYLQMNSLRAEDTAVYYCARDRYYGPEMWGQGTMVTVSS

SEQ ID NO: 26378 - protein, 138 aa, Artificial Sequence
  source: /note="Description of Artificial Sequence: Synthetic polypeptide"
GDDEATILADNKCMCTRVTSRIIPSTEDPNEDIVERNIRIVVPLNNRENISDPTSPLRRNFVYHLSDVCKKCDPVEVELEDQVVTATQSNICNEDDGVPETCYMYDRNKCYTTMVPLRYHGETKMVQAALTPDSCYPD

SEQ ID NO: 26379 - protein, 219 aa, Artificial Sequence
  source: /note="Description of Artificial Sequence: Synthetic polypeptide"
DVVMTQSPLSLPVTLGQPASISCRSSQSLVYSDGNTYLNWFQQRPGQSPRRLIYKVSNRDSGVPDRFSGSGSGTDFTLKISRVEAEDVGVYYCMQGTHWPLTFGGGTKVEIKRTVAAPSVFIFPPSDEQLKSGTASVVCLLNNFYPREAKVQWKVDNALQSGNSQESVTEQDSKDSTYSLSSTLTLSKADYEKHKVYACEVTHQGLSSPVTKSFNRGEC

SEQ ID NO: 26380 - protein, 127 aa, Artificial Sequence
  source: /note="Description of Artificial Sequence: Synthetic polypeptide"
DVVMTQTPLSLSVTPGQPASISCRSSQSLLHSDGMTYFSWYLQKPGQPPQLLIYEVSNRFSGVPDRFSGSGSGTDFTLKISRVEAEDVGVYYCMQNIQLPWTFGQGTKVEIKRTVAAPSVFIFPPSD

SEQ ID NO: 26381 - protein, 108 aa, Artificial Sequence; identical to SEQ ID NO: 22493
  source: /note="Description of Artificial Sequence: Synthetic polypeptide"

SEQ ID NO: 26382 - protein, 109 aa, Artificial Sequence
  source: /note="Description of Artificial Sequence: Synthetic polypeptide"
QIVLTQSPTIMSASLGEEITLTCSASTSVSYMEWYQQKSGTSPKILIYTTSKLASGVPSRFSGSGSGTFYSLTISSVEAEDAADYYCHQWRNYPFTFGSGTKLEIKRAD

SEQ ID NO: 26383 - protein, 110 aa, Artificial Sequence
  source: /note="Description of Artificial Sequence: Synthetic polypeptide"
DIVMTQSHKFMSTSIGDRVSINYKASQYVGTTVAWYQQKSGHSPKLLIYRASTRHTGVPDRFTGSGSGTDFTLNISNVQSEDLADYFCQQYCSSPLTFGAGTYLEVKRAD

SEQ ID NO: 26384 - protein, 106 aa, Artificial Sequence
  source: /note="Description of Artificial Sequence: Synthetic polypeptide"
DIQLTQSPSFLSASVGDRVTITCSASTSVSYMEWYQQKPGKAPKLLIYTTSKLASGVPSRFSGSGSGTEFTLTISSLQPEDFATYYCHQWRNYPFTFGQGTKLEIK

SEQ ID NO: 26385 - protein, 114 aa, Artificial Sequence
  source: /note="Description of Artificial Sequence: Synthetic polypeptide"
DIVMSQSPSSLAVSGGEKVTMSCKSSQSLLNGSYQKHTLAWYQQKPGQSPKLLIYWASTRESGVPDRFTGSGSGTDFTLTISSVKAEDLAVYYCQQYYSYPWTFGGGTKLEIKR

SEQ ID NO: 26386 - protein, 114 aa, Artificial Sequence
  source: /note="Description of Artificial Sequence: Synthetic polypeptide"
DIVMTQSPDSLAVSLGERATINCKSSQSLLNGSYQKHTLAWYQQKPGQPPKLLIYWASTRESGVPDRFTGSGSGTDFTLTISSLQAEDVAVYYCQQYYSYPWTFGQGTKLEIKR

SEQ ID NO: 26387 - protein, 128 aa, Artificial Sequence
  source: /note="Description of Artificial Sequence: Synthetic polypeptide"
MRVPAQLLGLLLLWLPGARCDIQLTQSPSFLSASVGDRVPITCRASQGISTHLAWYQQKPGKAPKLLIYAASTLQSGVPSRFSGSGSGTEFTLTISSLQPEDSATYYCQQLKSYPLTFGGGTKVEIKR

SEQ ID NO: 26388 - protein, 234 aa, Artificial Sequence
  source: /note="Description of Artificial Sequence: Synthetic polypeptide"
MRVPAQLLGLLLLWLPGARCDIQLTQSPSFLSASVGDRVPITCRASQGISTHLAWYQQKPGKAPKLLIYAASTLQSGVPSRFSGSGSGTEFTLTISSLQPEDSATYYCQQLKSYPLTFGGGTKVEIKRTVAAPSVFIFPPSDEQLKSGTASVVCLLNNFYPREAKVQWKVDNALQSGNSQESVTEQDSKDSTYSLSSTLTLSKADYEKHKVYACEVTHQGLSSPVTKSFNRGEC

SEQ ID NO: 26389 - protein, 124 aa, Artificial Sequence
  source: /note="Description of Artificial Sequence: Synthetic polypeptide"
QAQLVQSGAEVKKPGASVKVSCKASGYTFIGYWMHWVRQAPGQGPEWMGRINPNSGGTKYVQKFQGRVTVTRDTSISTAYMELNWLTSDDTAVYYCARARPGCGGDCYEVLDYWGQGTLVTVSS

SEQ ID NO: 26390 - protein, 108 aa, Artificial Sequence; identical to SEQ ID NO: 19100
  source: /note="Description of Artificial Sequence: Synthetic polypeptide"

SEQ ID NO: 26391 - protein, 110 aa, Artificial Sequence
  source: /note="Description of Artificial Sequence: Synthetic polypeptide"
QAGLTQPASVSGSPGQSITISCTGTSSDIATYNYVSWYQQHPGKAPKLMIYEGTKRPSGVSNRFSGSKSGNTASLTISGLQAEDEADYYCSSYARSYTYVFGTGTELTVL

SEQ ID NO: 26392 - protein, 110 aa, Artificial Sequence
  source: /note="Description of Artificial Sequence: Synthetic polypeptide"
QTVVTQPASVSGSPGQSITISCTGTSSDVGGYNYVSWYQQHPGKAPKLMIYEVSNRPSGVSNHFSGSKSGNTASLTISGLQAEDEADYYCSSYTTSSTYVFGTGTKVTVL

SEQ ID NO: 26393 - protein, 110 aa, Artificial Sequence
  source: /note="Description of Artificial Sequence: Synthetic polypeptide"
QTVVTQPASVSASPGQSITISCAGTSGDVGNYNFVSWYQQHPGKAPKLLIYEGSQRPSGVSNRFSGSRSGNTASLTISGLQAEDEADYYCSSYARSYTYVFGTGTKLTVL

SEQ ID NO: 26394 - protein, 107 aa, Artificial Sequence
  source: /note="Description of Artificial Sequence: Synthetic polypeptide"
EIVLTQSPSSLSTSVGDRVTITCRASQSIRSHLNWYQQKPGKAPKLLIYGASNLQSGVPSRFSGSGSGTDFTLTISSLQPEDFATYYCQQSYSFPLTFGGGTKLEIK

SEQ ID NO: 26395 - protein, 108 aa, Artificial Sequence
  source: /note="Description of Artificial Sequence: Synthetic polypeptide"
SSELTQDPAVSVALGQTVRITCQGDSLRSYYTNWFQQKPGQAPLLVVYAKNKRPPGIPDRFSGSSSGNTASLTITGAQAEDEADYYCHSRDSSGNHVVFGGGTKLTVL

SEQ ID NO: 26396 - protein, 108 aa, Artificial Sequence
  source: /note="Description of Artificial Sequence: Synthetic polypeptide"
QSVLTQPASVSGSPGQSITISCTGTSSDVGGYNYVSWYQQHPGKAPKLMIYEVSNRPSGVSNRFSGSKSGNTASLTISGLQAEDEADYCSSYSSGTVVFGGGTELTVL

SEQ ID NO: 26397 - protein, 106 aa, Artificial Sequence
  source: /note="Description of Artificial Sequence: Synthetic polypeptide"
DIQLTQSPSFLSASVGDRVTITCRASQDIDIYLAWYQQKPGKAPNLLIYAASTLQSGVPLRFSGSGSGTEFTLTISSLQPEDFATYYCQQLTTYPLTFGGGTTVDI

SEQ ID NO: 26398 - protein, 107 aa, Artificial Sequence
  source: /note="Description of Artificial Sequence: Synthetic polypeptide"
DIQMTQSPSTLSASVGDRVTITCRASQSISTWLAWYQQKPGKAPELLIYKASNLESGVPSRFSSSGSGTEFTLTISSLQPDDFATYYCQQYDRYSLTFGGGTKVEIK

SEQ ID NO: 26399 - protein, 107 aa, Artificial Sequence
  source: /note="Description of Artificial Sequence: Synthetic polypeptide"
DIQMTQSPSTLSASVGDRVTITCRASQDVGIWLAWYQQKPGKAPNSLIYKTSSLHNGVPSRFSGSGYGTEFTLTISSLQPDDFATYYCQQHGAFPITFGQGTRLEIR

SEQ ID NO: 26400 - protein, 107 aa, Artificial Sequence
  source: /note="Description of Artificial Sequence: Synthetic polypeptide"
DIQMTQSPSTLSASVGDRVTITCRASQSISTWLAWYQQKPGKAPELLIYKASNLESGVPSRFSGSGSGTEFTLTISSLQPDDFATYYCQQYDRYSLTFGGGTKVEIK

SEQ ID NO: 26401 - protein, 106 aa, Artificial Sequence
  source: /note="Description of Artificial Sequence: Synthetic polypeptide"
DIQLTQSPSFLSASVGDRVTVTCRASQGITTYLAWYHQKPGEAPKLLIYGASSLQGGVPSRFSGSGSGTEFTLTISSLQPEDFATYYCQQLYSYPWTFGQGTKVEV

SEQ ID NO: 26402 - protein, 115 aa, Artificial Sequence
  source: /note="Description of Artificial Sequence: Synthetic polypeptide"
DIVMTQSPDSLAVSLGERATINCKSSQSVFVGPNNKNYLAWYQKKPGQPPKLLIYWSSAREAGVPDRFSGSGSGTDFTLTISSVQAEDVAVYYCQQCYGSPPMHTFGQGTRLEIR

SEQ ID NO: 26403 - protein, 107 aa, Artificial Sequence
  source: /note="Description of Artificial Sequence: Synthetic polypeptide"
EIVLTQSPGTLSLSPGERATLSCGASQSVGFNYLAWYQQKPGQAPRLLIYGASNRATDIPDRFSGSGSGTDFTLTISRLEPEDFAVYYCQQYGNIPRTFGQGTKVEI

SEQ ID NO: 26404 - protein, 112 aa, Artificial Sequence
  source: /note="Description of Artificial Sequence: Synthetic polypeptide"
DIVMTQSPDSLAVSLGERATISCKSSQSILSSSNNKNYLTWYQQKPGQPPKLLIYWASIRESGVPGRFSGSGSETDFTLTISSLQAEDVAVYYCQQYFTTPLTFGGGTKVEI

SEQ ID NO: 26405 - protein, 113 aa, Artificial Sequence
  source: /note="Description of Artificial Sequence: Synthetic polypeptide"
DIVMTQSPDSLAVSLGERATINCKSSQSVFSNSKNKNFLVWYQQKPGQPPKLLISWASTREPGVPERFSGSGFGTDFTLTIDSLQAEDVAVYFCQQCHSHPLTFGGGTKVEIK

SEQ ID NO: 26406 - protein, 112 aa, Artificial Sequence
  source: /note="Description of Artificial Sequence: Synthetic polypeptide"
DVVMTQSPLSLPVTLGQPASISCRSGQSLVNTDGNTYLSWFQQRPGQSPRRLIYKVSNRDSGVPDRFSGSGSGTDFTLRISRVEAEDVGVYYCVQGSHWPVTFGQGTKVEIK

SEQ ID NO: 26407 - protein, 114 aa, Artificial Sequence
  source: /note="Description of Artificial Sequence: Synthetic polypeptide"
DIVMTQSPDSLAVPLGERATINCKSSQSVLFGSDNRNYLAWFQQKPGRPPRLLIYWASTRYSGVPDRFSGSGSGTDFTLTISNLQAEDVAVYYCQHYYYPLVFTFGQGTKLEIK

SEQ ID NO: 26408 - protein, 112 aa, Artificial Sequence
  source: /note="Description of Artificial Sequence: Synthetic polypeptide"
DIVMTQSPDSLAVSLGERATINCKSSQSVINRNNNKDQIAWYQLKPGQPPKLLIYWASTRESGVPDRFSGSGSGTDFTLTISSLQAEDVAVYYCQQFSNTFTFGPGTKVDIK

SEQ ID NO: 26409 - protein, 113 aa, Artificial Sequence
  source: /note="Description of Artificial Sequence: Synthetic polypeptide"
DIVMTQSPDSLAVSLGERATINCKSSQSVLYSSNNMNFLAWFQKKPGQPPKLLIYWASTRASGVPDRFSGSGSGTDFTLTINSLQADDVAVYFCQQYYTAPITFGQGTRLEIK

SEQ ID NO: 26410 - protein, 107 aa, Artificial Sequence
  source: /note="Description of Artificial Sequence: Synthetic polypeptide"
EIVLTQSPGTLSLSPGERATLSCRASQNINKNYVAWYQHKPGQGPRLLIHAASSRATGIPDRFSGSGSGTDFTLTISRLEPEDFAVYFCQHYTTSPWTFGQGTKVEI

SEQ ID NO: 26411 - protein, 112 aa, Artificial Sequence
  source: /note="Description of Artificial Sequence: Synthetic polypeptide"
DVVMTQSPVSLSVTLGQPASISCRSSQSLVYSGGNTLLNWFQQRPGQSPRRLIYEVSNRDSGVPDRFSGSASGTEFTLKISRVEAEDIGVYYCMQGRHWPYTFGQGTKLEMI

SEQ ID NO: 26412 - protein, 113 aa, Artificial Sequence
  source: /note="Description of Artificial Sequence: Synthetic polypeptide"
DIVMTQSPDSLTVSLGERATIKCTSSQSVLYTPTNRLYLAWYQQKPGQPPKLLFLWASARQSGVPDRFSASGSETDFTLTISGLQAEDGAVYYCQQYYSLPRTFGQGTKVEIR

SEQ ID NO: 26413 - protein, 106 aa, Artificial Sequence
  source: /note="Description of Artificial Sequence: Synthetic polypeptide"
DIQLTQSPSFLSTSVGDRVTITCRASQGISNYLAWYQQKPGTAPKLLIYSASTLQSGVPSRFSGSGSGTEFTLTISSLQPEDFATYYCQHLKTSLVTFGQGTRLEM

SEQ ID NO: 26414 - protein, 109 aa, Artificial Sequence
  source: /note="Description of Artificial Sequence: Synthetic polypeptide"
DIQMTQSPSSLSASVGDRVTITCRASQSIGKYLNWYQQKPGKAPKLLIYAASNLQSGVPSRFGGSGSGTDFTLTISSLQPEDCATYYCQQSFTAPQKYTFGQGTKLEIK

SEQ ID NO: 26415 - protein, 107 aa, Artificial Sequence; identical to SEQ ID NO: 26403
  source: /note="Description of Artificial Sequence: Synthetic polypeptide"

SEQ ID NO: 26416 - protein, 111 aa, Artificial Sequence
  source: /note="Description of Artificial Sequence: Synthetic polypeptide"
DVVMTQSPLSLPVTLGQPASISCRSSQSLVYSDGNTYLNWFQQRPGQSPRRLIYKVSNRDSGVPDRFSGSGSGTDFTLKISRVEAEDVGVYYCMQGTLPFTFGPGTKVDIK

SEQ ID NO: 26417 - protein, 113 aa, Artificial Sequence
  source: /note="Description of Artificial Sequence: Synthetic polypeptide"
DIVMTQSPLSLPVTPGEPASISCRSSQSLLFSNEYNFLDWFLQKPGQSPQLLIYLGSNRASGVPDRFSGSGSGTDFTLKISRVEAEDVGVYYCMQALQIPRTFGQGTKVEIKR

SEQ ID NO: 26418 - protein, 108 aa, Artificial Sequence
  source: /note="Description of Artificial Sequence: Synthetic polypeptide"
DIQMTQSPSSLSASVGDRVTITCRASQGIRNVLVWYQQKPGKAPKRLIYAASSLQSGVPSRFSGSGSGTEFTLTISSLQPEDFATYYCLQHNSYPWTFGQGTKVEIKR

SEQ ID NO: 26419 - protein, 114 aa, Artificial Sequence
  source: /note="Description of Artificial Sequence: Synthetic polypeptide"
DIVMTQSPDSLAVSLGERATINCKSSQNILYNSNNNNYLAWFQQKPRQPPKLLIYWASTRESGVPDRFSGSGSGTDFTLTINSLQAEDVAVYYCQQYYSAPLTFGGGTKVEIKR

SEQ ID NO: 26420 - protein, 109 aa, Artificial Sequence
  source: /note="Description of Artificial Sequence: Synthetic polypeptide"
EIVLTQSPGTLSLSPGERATLSCRTSQSVSSIYLAWYQQKPGQAPRLLIYGASNRATGIPDRFSGSGFGTDFTLTISRLEPEDFAVYYCQQYGRSPLTFGGGTKVEIKR

SEQ ID NO: 26421 - protein, 107 aa, Artificial Sequence
  source: /note="Description of Artificial Sequence: Synthetic polypeptide"
ERVMTQSPATLSVSPGERATLSCRASQSVSSNLAWYQQKPGQAPRLIIYGASTRATGIPARFSGSGSGTEFTLTISSLQSEDFAVYYCQQYYHWLTFGGGTKVEIKR

SEQ ID NO: 26422 - protein, 108 aa, Artificial Sequence
  source: /note="Description of Artificial Sequence: Synthetic polypeptide"
DIQMTQSPSSLSASVGDRVTITCRASQGIRNDLGWYQQKPGKAPKRLIYAASSLQSGVPSRFSGSGSGTEFTLTISSLQPEDFATYYCLQYNSYPPTFGQGTKVEIKR

SEQ ID NO: 26423 - protein, 108 aa, Artificial Sequence
  source: /note="Description of Artificial Sequence: Synthetic polypeptide"
EIVMMQSPGPLSVSPGERAILSCRASQNVNINLAWYQQKPGQAPRLLIYGASTRATGIPARFSGSGSGTEFTFTISSLQSEDFAVYYCQQYKNWPLTFGGGTKVEIKR

SEQ ID NO: 26424 - protein, 113 aa, Artificial Sequence
  source: /note="Description of Artificial Sequence: Synthetic polypeptide"
DIVMTQSPDSLAVSLGERATINCKSSQNILYSSNNKNYLAWYQQKPGQPPKLLIYWASTRESGVPDRFSGSGSGTDFTLTISSLQAEDVAVYFCQQYYNIRTFGQGTKVEIKR

SEQ ID NO: 26425 - protein, 108 aa, Artificial Sequence
  source: /note="Description of Artificial Sequence: Synthetic polypeptide"
DIQMTQSPSSLSASVGDRVTITCRASQDIRNDLGWYQQKPGKAPKRLIYAASSLQSGVPSRFSGSGSGTEFTLTISSLQPEDFATYYCLQYKSYPWTFGQGTKVEIKR

SEQ ID NO: 26426 - protein, 107 aa, Artificial Sequence
  source: /note="Description of Artificial Sequence: Synthetic polypeptide"
DIQMTQSPSSVSASVGDRVTITCRASQGISSWLAWYQQKPGRAPKLLIYAASSLQSGVPSRFSGSGSGTGFTLTISSLQPEDVATYYCQQFWSTPYTFGQGTKLEIK

SEQ ID NO: 26427 - protein, 107 aa, Artificial Sequence
  source: /note="Description of Artificial Sequence: Synthetic polypeptide"
DIQMTQSPSSLSASVGDRVTITCRASQSISRWVAWYQQRPGKAPNLLIYDASSLKSGVPSRFSGSGSGTEFTLTISSLQPEDIATYYCQQFWSTPYTFGQGTKLEIK

SEQ ID NO: 26428 - protein, 107 aa, Artificial Sequence
  source: /note="Description of Artificial Sequence: Synthetic polypeptide"
DIQMTQSPSFLSASVGDRVTITCRASQGISTYLAWYQQKRGKAPKLLISAASSLQSGVPSRFSGSVSGTDFTLTISSLQSEDFAVYYCQQFWSTPYTFGQGTKLEIK

SEQ ID NO: 26429 - protein, 107 aa, Artificial Sequence
  source: /note="Description of Artificial Sequence: Synthetic polypeptide"
DIQLTQSPSFLSASVGDRVTITCRASQGISTYLAWYQQKPGKAPKLLIYDASALQSGVPSRFSGSGSGTEFTLTISSLQPEDVATYYCQQFWSTPYTFGQGTKLEIK

SEQ ID NO: 26430 - protein, 107 aa, Artificial Sequence
  source: /note="Description of Artificial Sequence: Synthetic polypeptide"
AIQLTQSPSFLSASVGDRVTITCRASQGISTYLAWYQQKPGKAPKLLIYAASSLQSGVPSRFSGSGSGTDFTLTISSLQPEDVATYYCQQFWSTPYTFGQGTKLEIK

SEQ ID NO: 26431 - protein, 107 aa, Artificial Sequence
  source: /note="Description of Artificial Sequence: Synthetic polypeptide"
DIQMTQSPSSLSASVGDRVTITCRASQSISRWVAWYQQRPGKAPNLLIYDASSLKSGVPSRFSGSGSGTEFTLTISSLQPEDIATYYCQQFWGTPYTFGQGTKLEIK

SEQ ID NO: 26432 - protein, 107 aa, Artificial Sequence
  source: /note="Description of Artificial Sequence: Synthetic polypeptide"
EIVMTQSPATLSVSPGERATLSCRASQSVSSNLAWYQQKPGQAPRLLIYGASTRATGIPARFSGSGSGTEFTLTISSLQSEDFAVYYCQQFWSTPYTFGQGTKLEIK

SEQ ID NO: 26433 - protein, 124 aa, Artificial Sequence; identical to SEQ ID NO: 26363
  source: /note="Description of Artificial Sequence: Synthetic polypeptide"

SEQ ID NO: 26434 - protein, 107 aa, Artificial Sequence
  source: /note="Description of Artificial Sequence: Synthetic polypeptide"
EIVMTQSPATLSVSPGERATLSCRASQSVSSNLAWYQQKPGQAPRLLFYAASTRATGIPARFSGSGSGTEFTLTISSLQSEDFAVYYCQQFWSTPYTFGQGTKLEIK

SEQ ID NO: 26435 - protein, 107 aa, Artificial Sequence
  source: /note="Description of Artificial Sequence: Synthetic polypeptide"
DIQLTQSPSTLSASVGDSVTITCRASEGVDRWLAWYQQKPGRAPKLLIYDASTLQSGVPSRFSGSGSGTEFSLTISSLQPDDVATYYCQHFWSTPYTFGQGTKLEIK

SEQ ID NO: 26436 - protein, 104 aa, Artificial Sequence
  source: /note="Description of Artificial Sequence: Synthetic polypeptide"
QSALTQPASVSGSPGQSITISCTGTSSDYVSWYQQHPGKAPKLIIYDVTNRPSGVPDRFSGSKSGNTASLTISGLQAEDEADYYCQHFWSTPYTFGGGTKLTVL

SEQ ID NO: 26437 - protein, 106 aa, Artificial Sequence
  source: /note="Description of Artificial Sequence: Synthetic polypeptide"
SSELTQDPAVSVALGQTVRITCQGDSLRSYYASWYQQKPGQAPVLVIYGKNNRPSGIPDRFSGSSSGNTASLTITGAQAEDEADYYCQHFWSTPYTFGGGTKLTVL

SEQ ID NO: 26438 - protein, 109 aa, Artificial Sequence
  source: /note="Description of Artificial Sequence: Synthetic polypeptide"
QSVLTQPPSASGSPGQSVTISCTGTSSDVGAYNYVSWYQQYPGKVPKLIIYEVTKRPSGVPDRFSGSKSGNTASLTVSGLRAEDEADYYCQHFWSTPYTFGGGTKLTVL

SEQ ID NO: 26439 - protein, 106 aa, Artificial Sequence
  source: /note="Description of Artificial Sequence: Synthetic polypeptide"
SSELTQDPAVSVALGQTVTITCQGDSLRSLYASWYQQKPGQAPVLVLYSKNSRPSGIPDRFSGSSSGNTASLTITGARAEDEADYYCQHFWSTPYTFGGGTKLTVL

SEQ ID NO: 26440 - protein, 107 aa, Artificial Sequence; identical to SEQ ID NO: 26368
  source: /note="Description of Artificial Sequence: Synthetic polypeptide"

SEQ ID NO: 26441 - protein, 108 aa, Artificial Sequence
  source: /note="Description of Artificial Sequence: Synthetic polypeptide"
EIVLTQSPGTLSLSPGERATLSCRASQTINRNYLAWYQQRPGQPPRLLIYAASTRATAIPDRFSGSGSGTAFTLTISRLEPEDSAVYYCQQYGSPPRTFGQGTKVEIK

SEQ ID NO: 26442 - protein, 107 aa, Artificial Sequence
  source: /note="Description of Artificial Sequence: Synthetic polypeptide"
DIQMTQSPSTVSASIGDRVTITCRASQNINIWLAWYHQKPGKAPKIVISEASVLEGGVPSRFSGSGYGTEFTLTISGLQPDDVGTYFCQQYDRYSPVFGGGTKVEVK

SEQ ID NO: 26443 - protein, 127 aa, Artificial Sequence; identical to SEQ ID NO: 26380
  source: /note="Description of Artificial Sequence: Synthetic polypeptide"

SEQ ID NO: 26444 - protein, 107 aa, Artificial Sequence; identical to SEQ ID NO: 26431
  source: /note="Description of Artificial Sequence: Synthetic polypeptide"

SEQ ID NO: 26445 - protein, 107 aa, Artificial Sequence; identical to SEQ ID NO: 26362
  source: /note="Description of Artificial Sequence: Synthetic polypeptide"

SEQ ID NO: 26446 - protein, 107 aa, Artificial Sequence; identical to SEQ ID NO: 26435
  source: /note="Description of Artificial Sequence: Synthetic polypeptide"

SEQ ID NO: 26447 - protein, 108 aa, Artificial Sequence
  source: /note="Description of Artificial Sequence: Synthetic polypeptide"
DIVMTQSHIFMSTSVGDRVSITCKASQDVGSAVAWYQQKPGQSPKVLIYWTSTRHTGVPDRFAGSGSGTEFTLTISNVQSEDLADYFCQQYSSYPLTFGAGTKLELKR

SEQ ID NO: 26448 - protein, 108 aa, Artificial Sequence
  source: /note="Description of Artificial Sequence: Synthetic polypeptide"
DIVMTQSPSFLSASVGDRVTITCKASQDVGSAVAWYQQKPGKAPKVLIYWTSTRHTGVPDRFAGSGSGTEFTLTISSLQPEDFADYFCQQYSSYPLTFGQGTKLELKR

SEQ ID NO: 26449 - protein, 128 aa, Artificial Sequence
  source: /note="Description of Artificial Sequence: Synthetic polypeptide"
MKSHTQVFVSILLWLYGADGNIVMTQSPKSMSMSVGERVTLTCKASENVVTYVSWYQQKPEQSPKLLIYGASNRYTGVPDRFTGSGSATDFTLTISSVQAEDLADYHCGQGYSYPYTFGGGTKLEIKR

SEQ ID NO: 26450 - protein, 108 aa, Artificial Sequence
  source: /note="Description of Artificial Sequence: Synthetic polypeptide"
NIVMTQSPSSLSASVGDRVTITCKASENVVTYVSWYQQKPGKAPKLLIYGASNRYTGVPDRFTGSGSATDFTLTISSLQPEDFADYHCGQGYSYPYTFGQGTKLEIKR

SEQ ID NO: 26451 - protein, 112 aa, Artificial Sequence
  source: /note="Description of Artificial Sequence: Synthetic polypeptide"
DVVMTQSPLSLPVTLGQPASISCRSSQSLVYSDGNTYLNWFQQRPGQSPRRLIYKVSNRDSGVPDRFSGSGSGTDFTLKISRVEAEDVGVYYCMQGTHWPLTFGGGTKVEIK

SEQ ID NO: 26452 - protein, 107 aa, Artificial Sequence; identical to SEQ ID NO: 26429
  source: /note="Description of Artificial Sequence: Synthetic polypeptide"

SEQ ID NO: 26453 - protein, 107 aa, Artificial Sequence; identical to SEQ ID NO: 26426
  source: /note="Description of Artificial Sequence: Synthetic polypeptide"

SEQ ID NO: 26454 - protein, 107 aa, Artificial Sequence; identical to SEQ ID NO: 26427
  source: /note="Description of Artificial Sequence: Synthetic polypeptide"

SEQ ID NO: 26455 - protein, 106 aa, Artificial Sequence
  source: /note="Description of Artificial Sequence: Synthetic polypeptide"
AIQLTQSPSFLSASVGDRVTITCRASQGISTYLAWYQQKPGKPKLLIYAASSLQSGVPSRFSGSGSGTDFTLTISSLQPEDVATYYCQQFWSTPYTFGQGTKLEIK

SEQ ID NO: 26456 - protein, 107 aa, Artificial Sequence; identical to SEQ ID NO: 26428
  source: /note="Description of Artificial Sequence: Synthetic polypeptide"

SEQ ID NO: 26457 - protein, 126 aa, Artificial Sequence
  source: /note="Description of Artificial Sequence: Synthetic polypeptide"
EVQLVESGGGLVQPGGSLRLSCAASGSTLDYYAIGWFRQAPGKEREGVSCTSNSGSTYYGGSVKGRFTASRDNAKNTVYLQMNSLRPEDTAVYYCVATIGCATLGGTLDVQRYYYRGQGTQVTVSS

SEQ ID NO: 26458 - protein, 120 aa, Artificial Sequence
  source: /note="Description of Artificial Sequence: Synthetic polypeptide"
EVQLVESGGGLVQAGGSLRLSCTASGRTLSSYTMGWFRQAPGTEREFVAAMTRSGFNTYYADSVKGRFTISRDSTENTMALQMSSLKPEDTAVYYCTAGRGLTSYRADYWGQGTLVTVSS

SEQ ID NO: 26459 - protein, 111 aa, Artificial Sequence
  source: /note="Description of Artificial Sequence: Synthetic polypeptide"
EVQLVESGGGLVQPGGSLRLSCAASGSTRSVNPMAWFRQAPGRQREWVATISRSGYATYADSVKGRFTISGDNAKSSVYLQMNSLKPEDTAVYYCVTGTYWGQGTLVTVSS

SEQ ID NO: 26460 - protein, 121 aa, Artificial Sequence
  source: /note="Description of Artificial Sequence: Synthetic polypeptide"
EVQLVESGGGLVQPGDSLRLSCAASGRILSINNMVWYRQAPGKQRELVAHITSSGSTGYADSVKGRFTISRDNAKNTFYLQMTNLNPEDTAVYYCNCWVSSDSNAPLKNYWGQGTQVTVSS

SEQ ID NO: 26461 - protein, 121 aa, Artificial Sequence
  source: /note="Description of Artificial Sequence: Synthetic polypeptide"
EVQLVESGGGLVQPGGSLRLSCAASGSIFSINNMGWYRQAPGKQRELVTVVTSNLITTYADSVKGRFTISRDNAKNTVYLQMNSLKPEDTAVYYCNAWARSVGSVPYSQFWGQGTLVTVSS

SEQ ID NO: 26462 - protein, 114 aa, Artificial Sequence
  source: /note="Description of Artificial Sequence: Synthetic polypeptide"
EVQLVESGGGLVQPGGSLRLSCAASGSFGDNYELYAMTWFRQAPGERRDFVASVTGDGSTSYADSVKDRFTISRDNAKKLMYLQMNSLKPEDTAVYYCRLLNYWGQGTLVTVSS

SEQ ID NO: 26463 - protein, 121 aa, Artificial Sequence
  source: /note="Description of Artificial Sequence: Synthetic polypeptide"
EVQLVESGGGLVQPGGSLRLSCAASGSIFSINTMGWYRQAPGKQRELVSTITSNLVPHYADSVQGRFTISRDNARNTVYLQMNSLKPQDTAHYYCNAWARSSGATPYTNYWGQGTLVTVSS

SEQ ID NO: 26464 - protein, 121 aa, Artificial Sequence
  source: /note="Description of Artificial Sequence: Synthetic polypeptide"
EVQLVESGGGLVQPGGSLRLSCAASGSIFSINTMGWYRQAPGKQRDLVASITMNQVPNYADSVQGRFTISRDNVRNTVHLQMNAVKPEDTADYFCNAWVRSSGASPYTNYWGQGTQVTVSS

SEQ ID NO: 26465 - protein, 122 aa, Artificial Sequence
  source: /note="Description of Artificial Sequence: Synthetic polypeptide"
EVQLVESGGGLVQAGGSLRLSCAAASRLTFNHYNMGWFRQAPGKEREVAEVTWSGDKIYYVDSVKGRFTISRDNTPNPVYLYLQMNSLKPEDTAVYYCATAPRGLPYANGYWGQGTQVTVSS

SEQ ID NO: 26466 - protein, 121 aa, Artificial Sequence
  source: /note="Description of Artificial Sequence: Synthetic polypeptide"
EVQLVESGGGLVQPGGSLRLSCAASGRIFSINTMGWYRQAPGKQRELVAGVTINAITNYADSVKGRFTISRDNAKNTVWLQMNSLKPEDTAVYYCHAWARSSGSAPYWQNWGQGTQVTVSS

SEQ ID NO: 26467 - protein, 120 aa, Artificial Sequence
  source: /note="Description of Artificial Sequence: Synthetic polypeptide"
EVQLVESGGGLVQAGGSLRLSCAASGRTFSSYIMGWFRQAPGKAREFVADITWGQRPYYADSVKGRFTISRDNAKNTVYLEMNSLKPEDTAVYYCAADLGVVIREEHAYWGQGTLVTVSS

SEQ ID NO: 26468 - protein, 117 aa, Artificial Sequence
  source: /note="Description of Artificial Sequence: Synthetic polypeptide"
EVQLVESGGGLVQAGGSLRLSCAASGNTFSTNPMYWYRQAEGKQRELVASISSRGITNYADSVRGRFSISRDNTKDTVYLQMNSLKPEDTAVYYCRLASLSSGTVYWGKGTLVTVSS

SEQ ID NO: 26469 - protein, 127 aa, Artificial Sequence
  source: /note="Description of Artificial Sequence: Synthetic polypeptide"
EVQLVESGGGLVQAGGLSRLSCAASGFTFDDYVIGWFRQAPGKEREGVSCISRLDGRTYYTDSVKGRFTISSDNAKNTVYLQMNSLKPEDTAVYYCALEPRYTGDYYPVHPELYDYWGQGTQVTVSS

SEQ ID NO: 26470 - protein, 126 aa, Artificial Sequence
  source: /note="Description of Artificial Sequence: Synthetic polypeptide"
EVQLVESGGGLVQAGGSLRLSCVISASTVRNYDMGWFRQAPGKEREFVAAIDWSGGSTRYADSVKGRFTVSRDNAKNTVYLQMNSLKPEDTAVYYCVAAGFYNNYLRTAPNDWNYWGQGTLVTVSS

SEQ ID NO: 26471 - protein, 126 aa, Artificial Sequence
  source: /note="Description of Artificial Sequence: Synthetic polypeptide"
EVQLVESGGGLVQAGGSLRLSCVISEDGVRNYDMGWFRQAPGKEREFVATINWSGGSTNYADSVKGRFTVSRDNAKNTMYLQMDSLKPEDTAVYYCVAAGFYNNYLRTAPNDWNDWGQGTQVTVSS

SEQ ID NO: 26472 - protein, 123 aa, Artificial Sequence
  source: /note="Description of Artificial Sequence: Synthetic polypeptide"
EVQLVESGGGLVQPGGSLRLSCAASGFSLGVFAIGWFRQAPGKEREGVSCIDSSDGRTTYADSVKGRFTISRDNAKNTVYLQMNSLKPEDTAVYYCATDIETDVCSGAGWGFWGQGTQVTVSS

SEQ ID NO: 26473 - protein, 121 aa, Artificial Sequence
  source: /note="Description of Artificial Sequence: Synthetic polypeptide"
EVQLVESGGGLVQPGGSLRLSCAASGRIFSINNMGWYHQAPGKQRELVATITMNGITTYADSVKGRFTISRDNAKNTVYLQMNSLKPEDTAVYYCSCWVRSSGGDPYRDYWGQGTQVTVSS

SEQ ID NO: 26474 - protein, 125 aa, Artificial Sequence
  source: /note="Description of Artificial Sequence: Synthetic polypeptide"
EVQLVESGGGLVQAGGSLRLSCTASGHTFSSYTMGWFRQAPGKEREFVAAMTRSGFNTHYSDSVKGRFTISRDNTSRDNTKITMALQMNSLKPEDTAVYYCTTGRGLTSYVANFWGQGTQVTVSS

SEQ ID NO: 26475 - protein, 126 aa, Artificial Sequence
  source: /note="Description of Artificial Sequence: Synthetic polypeptide"
EVQLVESGGGLVQPGGSLRLSCAASGITLDSIAICWFRQAPGKEREGVSCSRGSDGSTYYADSVKGRFTISRVNAKNTVYLQMNSLKPEDTAVYYCAAAPSIFYSGGYFPSGMDYWGKGTQVTVSS

SEQ ID NO: 26476 - protein, 243 aa, Artificial Sequence
  source: /note="Description of Artificial Sequence: Synthetic polypeptide"
EVQLLESGPGLVKPSETLSLTCNVAGGSISPYYWTWIRQPPGKGLELIGYIHSSGYTDYNPSLKSRVTISGDTSKKQFSLHVSSVTAADTAVYFCARGDWDLLHALDIWGQGTLVTVSSGGGGSGGGGSGGGGSALEIVLTQSPSSLSASVGDRVTITCRASQSIRSHLNWYQQKPGKAPKLLIYGASNLQSGVPSRFSGSGSGTDFTLTISSLQPEDFATYYCQQSYSTPQTFGQGTKLEIK

SEQ ID NO: 26477 - protein, 245 aa, Artificial Sequence
  source: /note="Description of Artificial Sequence: Synthetic polypeptide"
EVQLLESGPGLVKPSETLSLTCNVAGGSISPYYWTWIRQPPGKGLELIGYIHSSGYTDYNPSLKSRVTISGDTSKKQFSLHVSSVTAADTAVYFCARGDWDLLHALDIWGQGTLVTVSSGGGGSGGGGSGGSGSAQSVVTQPASVSGSLGQSITISCTGTSSDAGSYNFVSWYQQHPGKAPKLIIYDVNNRPSGVSNRFSGSKSGNTASLTISGLQAEDEADYYCNSYGGSSTWLFGGGTKLTVL

SEQ ID NO: 26478 - protein, 245 aa, Artificial Sequence
  source: /note="Description of Artificial Sequence: Synthetic polypeptide"
EVQLLESGPGLVKPSETLSLTCNVAGGSISPYYWTWIRQPPGKGLELIGYIHSSGYTDYNPSLKSRVTISGDTSKKQFSLHVSSVTAADTAVYFCARGDWDLLHALDIWGQGTLVTVSSGGGGSGGGGSGGGGSALSYELMQPPSVSGTPGQRVTISCSGSSSNIGSNTVNWYQQLPGTAPKLLIYSNNQRPSGVPDRFSGSKSGTSASLAISGLQSEDEADYYCAAWDDSLNVVFGGGTKVTVL

SEQ ID NO: 26479 - protein, 245 aa, Artificial Sequence
  source: /note="Description of Artificial Sequence: Synthetic polypeptide"
EVQLLESGPGLVKPSETLSLTCNVAGGSISPYYWTWIRQPPGKGLELIGYIHSSGYTDYNPSLKSRVTISGDTSKKQFSLHVSSVTAADTAVYFCARGDWDLLHALDIWGQGTLVTVSSGGGGSGGGGSGGSGSAQTVVTQPASVSGSPGQSITISCTGTSSDIGGYNYVSWYRQHPGKAPKLMIYDVSNRPSGVSNRFSGSKSGNTASLTISGLQAEDEADYYCTSYTSDSTLVFGGGTKVTVL

SEQ ID NO: 26480 - protein, 245 aa, Artificial Sequence
  source: /note="Description of Artificial Sequence: Synthetic polypeptide"
EVQLLESGPGLVKPSETLSLTCNVAGGSISPYYWTWIRQPPGKGLELIGYIHSSGYTDYNPSLKSRVTISGDTSKKQFSLHVSSVTAADTAVYFCARGDWDLLHALDIWGQGTLVTVSSGGGGSGGGGSGGGGSAQSVVTQPPSVSAAPGQKVTISCTGTSSDVGSYNFVSWYQQHPGKAPKLMIYEGTKRPSGVSNRFSGSKSGNTASLTISGLQAEDEADYYCTSYTSDSTLVFGGGTKVTVL

SEQ ID NO: 26481 - protein, 245 aa, Artificial Sequence
  source: /note="Description of Artificial Sequence: Synthetic polypeptide"
EVQLLESGPGLVKPSETLSLTCNVAGGSISPYYWTWIRQPPGKGLELIGYIHSSGYTDYNPSLKSRVTISGDTSKKQFSLHVSSVTAADTAVYFCARGDWDLLHALDIWGQGTLVTVSSGGGGSGGGGSGGSGSAQSVLTQPASVSGSPGQSITISCTGTTSDVGAFGFVSWYQQKPGEVPKLMIYDVSDRPSGVSDRFSGSKSGSTASLTISGLQAEDEADYYCGSYTSTSTWVFGGGTKLTVL

SEQ ID NO: 26482 - protein, 246 aa, Artificial Sequence
  source: /note="Description of Artificial Sequence: Synthetic polypeptide"
EVQLLESGPGLVKPSETLSLTCNVAGGSISPYYWTWIRQPPGKGLELIGYIHSSGYTDYNPSLKSRVTISGDTSKKQFSLHVSSVTAADTAVYFCARGDWDLLHALDIWGQGTLVTVSSGGGGSGGGGSGGGGSALSYELMQPASVSGSLGQSITISCTGTSSDVGSYNFVSWYQQHPGKAPKLMIYEGTKRPSGVPDRFSGSKSGNTASLTISGLQAEDEADYYCSSYARSYTYVFGTGTKVTVL

SEQ ID NO: 26483 - protein, 245 aa, Artificial Sequence
  source: /note="Description of Artificial Sequence: Synthetic polypeptide"
EVQLLESGPGLVKPSETLSLTCNVAGGSISPYYWTWIRQPPGKGLELIGYIHSSGYTDYNPSLKSRVTISGDTSKKQFSLHVSSVTAADTAVYFCARGDWDLLHALDIWGQGTLVTVSSGGGGSGGGGSGGGGSAQTVVTQPASVSGSPGQSITISCTGTSGDIGAYNFVSWYQQHPGKAPKLIIYDVNNRPSGVSNRFSGSKSGNTASLTISGLQAEDEADYYCSSYTSSNTYLFGTGTKVTVL

SEQ ID NO: 26484 - protein, 245 aa, Artificial Sequence
  source: /note="Description of Artificial Sequence: Synthetic polypeptide"
EVQLLESGPGLVKPSETLSLTCNVAGGSISPYYWTWIRQPPGKGLELIGYIHSSGYTDYNPSLKSRVTISGDTSKKQFSLHVSSVTAADTAVYFCARGDWDLLHALDIWGQGTLVTVSSGGGGSGGGGSGGSGSAQSVLTQPPSAFGTPGQSLTISCSGSNSNIGRNTVTWYQHLPGTAPKLLIYSSNQRPSGVPDRFSGSKSGTSASLAISGLQSEDEAHYYCAAWDDSLHGMIFGGGTKVTVL

SEQ ID NO: 26485 - protein, 245 aa, Artificial Sequence
  source: /note="Description of Artificial Sequence: Synthetic polypeptide"
EVQLLESGPGLVKPSETLSLTCNVAGGSISPYYWTWIRQPPGKGLELIGYIHSSGYTDYNPSLKSRVTISGDTSKKQFSLHVSSVTAADTAVYFCARGDWDLLHALDIWGQGTLVTVSSGGGGSGGGGSGGGGSAQSVLTQPPSAFGTPGQSLTISCSGSNSNIGRNTVTWYQHLPGTAPKLLIYSSNQRPSGVPDRFSGSKSGTSASLAISGLQSEDEAHYYCAAWDDSLHGMIFGGGTKVTVL

SEQ ID NO: 26486 - protein, 245 aa, Artificial Sequence
  source: /note="Description of Artificial Sequence: Synthetic polypeptide"
EVQLLESGPGLVKPSETLSLTCNVAGGSISPYYWTWIRQPPGKGLELIGYIHSSGYTDYNPSLKSRVTISGDTSKKQFSLHVSSVTAADTAVYFCARGDWDLLHALDIWGQGTLVTVSSGGGGSGGSGSGGGGSAQSVLTQPPSAFGTPGQSLTISCSGSNSNIGRNTVTWYQHLPGTAPKLLIYSSNQRPSGVPDRFSGSKSGTSASLAISGLQSEDEAHYYCAAWDDSLHGMIFGGGTKVTVL

SEQ ID NO: 26487 - protein, 245 aa, Artificial Sequence
  source: /note="Description of Artificial Sequence: Synthetic polypeptide"
EVQLLESGPGLVKPSETLSLTCNVAGGSISPYYWTWIRQPPGKGLELIGYIHSSGYTDYNPSLKSRVTISGDTSKKQFSLHVSSVTAADTAVYFCARGDWDLLHALDIWGQGTLVTVSSGGGGSGGGGSGGSGSAQTVVTQPPSAFGTPGQSLTISCSGSSSNIGGNTVNWYQQLPGTAPRLLIYSNSQRPSGVPDRFSGSKSGTSASLAISGLQSEDEADYYCAAWDDSLNGVVFGGGTKLTVL

SEQ ID NO: 26488 - protein, 245 aa, Artificial Sequence
  source: /note="Description of Artificial Sequence: Synthetic polypeptide"
EVQLLESGPGLVKPSETLSLTCNVAGGSISPYYWTWIRQPPGKGLELIGYIHSSGYTDYNPSLKSRVTISGDTSKKQFSLHVSSVTAADTAVYFCARGDWDLLHALDIWGQGTLVTVSSGGGGSGGGGSGGGGSAQSVLTQPASVSGSPGQSITISCTGTSSDVGAYNYVSWFQQHPGKVPKLIIWEVINRPSGVSNRFSGSKSGNTASLTISGLQAEDEADYYCSSYTSSNTYVFGTGTKLTVL

SEQ ID NO: 26489 - protein, 245 aa, Artificial Sequence
  source: /note="Description of Artificial Sequence: Synthetic polypeptide"
EVQLLESGPGLVKPSETLSLTCNVAGGSISPYYWTWIRQPPGKGLELIGYIHSSGYTDYNPSLKSRVTISGDTSKKQFSLHVSSVTAADTAVYFCARGDWDLLHALDIWGQGTLVTVSSGGGGSGGGGSGGSGSAQSALTQPPSVSAAPGQKVTISCSGSSSNIGNNYVSWYLQLPGTAPKLLIYDNNGRPSGIPDRFSGSKSGTSATLGITGLQTGDEADYYCATWDSSLSAGVFGGGTKVTVL

SEQ ID NO: 26490 - protein, 244 aa, Artificial Sequence
  source: /note="Description of Artificial Sequence: Synthetic polypeptide"
EVQLLESGPGLVKPSETLSLTCNVAGGSISPYYWTWIRQPPGKGLELIGYIHSSGYTDYNPSLKSRVTISGDTSKKQFSLHVSSVTAADTAVYFCARGDWDLLHALDIWGQGTLVTVSSGGGGSGGGGSGGSGSALSYELMQDPAVSVALGQTVRITCRGDSLSSFYTSWYQQKPGQAPLLVIYGKNNRPSGIPDRFSGSSSGNTASLTITGAQAEDEADYYCNSRDSSDNYVLFGGGTKLTVL

SEQ ID NO: 26491 - protein, 245 aa, Artificial Sequence
  source: /note="Description of Artificial Sequence: Synthetic polypeptide"
EVQLLESGPGLVKPSETLSLTCNVAGGSISPYYWTWIRQPPGKGLELIGYIHSSGYTDYNPSLKSRVTISGDTSKKQFSLHVSSVTAADTAVYFCARGDWDLLHALDIWGQGTLVTVSSGGGGSGGGGSGGGGSAQSVVTQPASVSGSPGQSVTISCTGTSSDVGSYKGVSWYQQPPGTAPKLLIYNDNQRPSGIPGRFSGSNSGNTAILTISGTQAMDEADYYCQAWDSSNHVVFGGGTKLTVL

SEQ ID NO: 26492 - protein, 243 aa, Artificial Sequence
  source: /note="Description of Artificial Sequence: Synthetic polypeptide"
EVQLLESGPGLVKPSETLSLTCNVAGGSISPYYWTWIRQPPGKGLELIGYIHSSGYTDYNPSLKSRVTISGDTSKKQFSLHVSSVTAADTAVYFCARADWDLLHALDIWGQGTMVTVSSGGGGSGGGGSGGGGSALEIVLTQSPSSLSTSVGDRVTITCRASQSIRSHLNWYQQKPGKAPKLLIYGASNLQSGVPSRFSGSGSGTDFTLTISSLQPEDFATYYCQQSYSFPLTFGGGTKLEIK

SEQ ID NO: 26493 - protein, 245 aa, Artificial Sequence
  source: /note="Description of Artificial Sequence: Synthetic polypeptide"
EVQLLESGPGLVKPSETLSLTCNVAGGSISPYYWTWIRQPPGKGLELIGYIHSSGYTDYNPSLKSRVTISGDTSKKQFSLHVSSVTAADTAVYFCARADWDLLHALDIWGQGTMVTVSSGGGGSGGGGSGGSGSAQTVVTQPASVSGSPGQSITISCTGTSSDIGGYNYVSWYRQHPGKAPKLMIYDVSNRPSGVSNRFSGSKSGNTASLTISGLQAEDEADYYCTSYTSDSTLVFGGGTKVTVL

SEQ ID NO: 26494 - protein, 245 aa, Artificial Sequence
  source: /note="Description of Artificial Sequence: Synthetic polypeptide"
EVQLLESGPGLVKPSETLSLTCNVAGGSISPYYWTWIRQPPGKGLELIGYIHSSGYTDYNPSLKSRVTISGDTSKKQFSLHVSSVTAADTAVYFCARADWDLLHALDIWGQGTTVTVSSGGGGSGGGGSGGSGSAQTVVTQPASVSGSPGQSITISCTGTSSDIGGYNYVSWYRQHPGKAPKLMIYDVSNRPSGVSNRFSGSKSGNTASLTISGLQAEDEADYYCTSYTSDSTLVFGGGTKVTVL

SEQ ID NO: 26495 - protein, 243 aa, Artificial Sequence
  source: /note="Description of Artificial Sequence: Synthetic polypeptide"
EVQLLESGPGLVKPSETLSLTCNVAGGSISPYYWTWIRQPPGKGLELIGYIHSSGYTDYNPSLKSRVTISGDTSKKQFSLHVSSVTAADTAVYFCARADWDLLHAFDIWGQGTMVTVSSGGGGSGGGGSGGGGSALEIVLTQSPSSLSTSVGDRVTITCRASQSIRSHLNWYQQKPGKAPKLLIYGASNLQSGVPSRFSGSGSGTDFTLTISSLQPEDFATYYCQQSYSFPLTFGGGTKLEIK

SEQ ID NO: 26496 - protein, 243 aa, Artificial Sequence
  source: /note="Description of Artificial Sequence: Synthetic polypeptide"
EVQLLESGPGLVKPSETLSLTCNVAGGSISPYYWTWIRQPPGKGLELIGYIHSSGYTDYNPSLKSRVTISGDTSKKQFSLHVSSVTAADTAVYFCARADWDLLHALGIWGQGTLVTVSSGGGGSGGGGSGGGGSALEIVLTQSPSSLSTSVGDRVTITCRASQSIRSHLNWYQQKPGKAPKLLIYGASNLQSGVPSRFSGSGSGTDFTLTISSLQPEDFATYYCQQSYSFPLTFGGGTKLEIK

SEQ ID NO: 26497 - protein, 243 aa, Artificial Sequence
  source: /note="Description of Artificial Sequence: Synthetic polypeptide"
EVQLLESGPGLVKPSETLSLTCNVAGGSISPYYWTWIRQPPGKGLELIGYIHSSGYTDYNPSLKSRVTISGDTSKKQFSLHVSSVTAADTAVYFCARADWDLLHAPDIWGQGTLVTVSSGGGGSGGGGSGGGGSALEIVLTQSPSSLSTSVGDRVTITCRASQSIRSHLNWYQQKPGKAPKLLIYGASNLQSGVPSRFSGSGSGTDFTLTISSLQPEDFATYYCQQSYSFPLTFGGGTKLEIK

SEQ ID NO: 26498 - protein, 245 aa, Artificial Sequence
  source: /note="Description of Artificial Sequence: Synthetic polypeptide"
EVQLLESGPGLVKPSETLSLTCNVAGGSISPYYWTWIRQPPGKGLELIGYIHSSGYTDYNPSLKSRVTISGDTSKKQFSLHVSSVTAADTAVYFCARADWDLLHAPDIWGQGTLVTVSSGGGGSGGGGSGGSGSAQTVVTQPASVSGSPGQSITISCTGTSSDIGGYNYVSWYRQHPGKAPKLMIYDVSNRPSGVSNRFSGSKSGNTASLTISGLQAEDEADYYCTSYTSDSTLVFGGGTKVTVL

SEQ ID NO: 26499 - protein, 243 aa, Artificial Sequence
  source: /note="Description of Artificial Sequence: Synthetic polypeptide"
EVQLLESGPGLVKPSETLSLTCNVAGGSISPYYWTWIRQPPGKGLELIGYIHSSGYTDYNPSLKSRVTISGDTSKKQFSLHVSSVTAADTAVYFCARADWDLLHALDVWGQGTLVTVSSGGGGSGGGGSGGGGSALEIVLTQSPSSLSTSVGDRVTITCRASQSIRSHLNWYQQKPGKAPKLLIYGASNLQSGVPSRFSGSGSGTDFTLTISSLQPEDFATYYCQQSYSFPLTFGGGTKLEIK

SEQ ID NO: 26500 - protein, 245 aa, Artificial Sequence
  source: /note="Description of Artificial Sequence: Synthetic polypeptide"
EVQLLESGPGLVKPSETLSLTCNVAGGSISPYYWTWIRQPPGKGLELIGYIHSSGYTDYNPSLKSRVTISGDTSKKQFSLHVSSVTAADTAVYFCARADWDLLHALDIWGQGTMVTVSSGGGGSGGGGSGGGGSAQSVVTQPPSVSAAPGQKVTISCTGTSSDVGSYNFVSWYQQHPGKAPKLMIYEGTKRPSGVSNRFSGSKSGNTASLTISGLQAEDEADYYCTSYTSDSTLVFGGGTKVTVL

SEQ ID NO: 26501 - protein, 243 aa, Artificial Sequence
  source: /note="Description of Artificial Sequence: Synthetic polypeptide"
EVQLLESGPGLVKPSETLSLTCNVAGGSISPYYWTWIRQPPGKGLELIGYIHSSGYTDYNPSLKSRVTISGDTSKKQFSLHVSSVTAADTAVYFCARADWDLLHALDIWGQGTTVTVSSGGGGSGGGGSGGGGSALEIVLTQSPSSLSTSVGDRVTITCRASQSIRSHLNWYQQKPGKAPKLLIYGASNLQSGVPSRFSGSGSGTDFTLTISSLQPEDFATYYCQQSYSFPLTFGGGTKLEIK

SEQ ID NO: 26502 - protein, 245 aa, Artificial Sequence
  source: /note="Description of Artificial Sequence: Synthetic polypeptide"
EVQLLESGPGLVKPSETLSLTCNVAGGSISPYYWTWIRQPPGKGLELIGYIHSSGYTDYNPSLKSRVTISGDTSKKQFSLHVSSVTAADTAVYFCARADWDLLHALDIWGQGTTVTVSSGGGGSGGGGSGGGGSAQSVVTQPPSVSAAPGQKVTISCTGTSSDVGSYNFVSWYQQHPGKAPKLMIYEGTKRPSGVSNRFSGSKSGNTASLTISGLQAEDEADYYCTSYTSDSTLVFGGGTKVTVL

SEQ ID NO: 26503 - protein, 245 aa, Artificial Sequence
  source: /note="Description of Artificial Sequence: Synthetic polypeptide"
EVQLLESGPGLVKPSETLSLTCNVAGGSISPYYWTWIRQPPGKGLELIGYIHSSGYTDYNPSLKSRVTISGDTSKKQFSLHVSSVTAADTAVYFCARADWDLLHAFDIWGQGTMVTVSSGGGGSGGGGSGGSGSAQTVVTQPASVSGSPGQSITISCTGTSSDIGGYNYVSWYRQHPGKAPKLMIYDVSNRPSGVSNRFSGSKSGNTASLTISGLQAEDEADYYCTSYTSDSTLVFGGGTKVTVL

SEQ ID NO: 26504 - protein, 245 aa, Artificial Sequence
  source: /note="Description of Artificial Sequence: Synthetic polypeptide"
EVQLLESGPGLVKPSETLSLTCNVAGGSISPYYWTWIRQPPGKGLELIGYIHSSGYTDYNPSLKSRVTISGDTSKKQFSLHVSSVTAADTAVYFCARADWDLLHAFDIWGQGTMVTVSSGGGGSGGGGSGGGGSAQSVVTQPPSVSAAPGQKVTISCTGTSSDVGSYNFVSWYQQHPGKAPKLMIYEGTKRPSGVSNRFSGSKSGNTASLTISGLQAEDEADYYCTSYTSDSTLVFGGGTKVTVL

SEQ ID NO: 26505 - protein, 245 aa, Artificial Sequence
  source: /note="Description of Artificial Sequence: Synthetic polypeptide"
EVQLLESGPGLVKPSETLSLTCNVAGGSISPYYWTWIRQPPGKGLELIGYIHSSGYTDYNPSLKSRVTISGDTSKKQFSLHVSSVTAADTAVYFCARADWDLLHAPDIWGQGTLVTVSSGGGGSGGGGSGGGGSAQSVVTQPPSVSAAPGQKVTISCTGTSSDVGSYNFVSWYQQHPGKAPKLMIYEGTKRPSGVSNRFSGSKSGNTASLTISGLQAEDEADYYCTSYTSDSTLVFGGGTKVTVL

SEQ ID NO: 26506 - protein, 245 aa, Artificial Sequence
  source: /note="Description of Artificial Sequence: Synthetic polypeptide"
EVQLLESGPGLVKPSETLSLTCNVAGGSISPYYWTWIRQPPGKGLELIGYIHSSGYTDYNPSLKSRVTISGDTSKKQFSLHVSSVTAADTAVYFCARADWDLLHALDMWGQGTLVTVSSGGGGSGGGGSGGSGSAQTVVTQPASVSGSPGQSITISCTGTSSDIGGYNYVSWYRQHPGKAPKLMIYDVSNRPSGVSNRFSGSKSGNTASLTISGLQAEDEADYYCTSYTSDSTLVFGGGTKVTVL

SEQ ID NO: 26507 - protein, 245 aa, Artificial Sequence
  source: /note="Description of Artificial Sequence: Synthetic polypeptide"
EVQLLESGPGLVKPSETLSLTCNVAGGSISPYYWTWIRQPPGKGLELIGYIHSSGYTDYNPSLKSRVTISGDTSKKQFSLHVSSVTAADTAVYFCARADWDLLHALDMWGQGTLVTVSSGGGGSGGGGSGGGGSAQSVVTQPPSVSAAPGQKVTISCTGTSSDVGSYNFVSWYQQHPGKAPKLMIYEGTKRPSGVSNRFSGSKSGNTASLTISGLQAEDEADYYCTSYTSDSTLVFGGGTKVTVL

SEQ ID NO: 26508 - protein, 243 aa, Artificial Sequence
  source: /note="Description of Artificial Sequence: Synthetic polypeptide"
EVQLLESGPGLVKPSETLSLTCNVAGGSISPYYWTWIRQPPGKGLELIGYIHSSGYTDYNPSLKSRVTISGDTSKKQFSLHVSSVTAADTAVYFCARADWDLLHALDMWGQGTLVTVSSGGGGSGGGGSGGGGSALEIVLTQSPSSLSTSVGDRVTITCRASQSIRSHLNWYQQKPGKAPKLLIYGASNLQSGVPSRFSGSGSGTDFTLTISSLQPEDFATYYCQQSYSFPLTFGGGTKLEIK

SEQ ID NO: 26509 - protein, 243 aa, Artificial Sequence; identical to SEQ ID NO: 26499
  source: /note="Description of Artificial Sequence: Synthetic polypeptide"

SEQ ID NO: 26510 - protein, 245 aa, Artificial Sequence
  source: /note="Description of Artificial Sequence: Synthetic polypeptide"
EVQLLESGPGLVKPSETLSLTCNVAGGSISPYYWTWIRQPPGKGLELIGYIHSSGYTDYNPSLKSRVTISGDTSKKQFSLHVSSVTAADTAVYFCARADWDLLHALDVWGQGTLVTVSSGGGGSGGGGSGGSGSAQTVVTQPASVSGSPGQSITISCTGTSSDIGGYNYVSWYRQHPGKAPKLMIYDVSNRPSGVSNRFSGSKSGNTASLTISGLQAEDEADYYCTSYTSDSTLVFGGGTKVTVL

SEQ ID NO: 26511 - protein, 245 aa, Artificial Sequence
  source: /note="Description of Artificial Sequence: Synthetic polypeptide"
EVQLLESGPGLVKPSETLSLTCNVAGGSISPYYWTWIRQPPGKGLELIGYIHSSGYTDYNPSLKSRVTISGDTSKKQFSLHVSSVTAADTAVYFCARADWDLLHALDVWGQGTLVTVSSGGGGSGGGGSGGGGSAQSVVTQPPSVSAAPGQKVTISCTGTSSDVGSYNFVSWYQQHPGKAPKLMIYEGTKRPSGVSNRFSGSKSGNTASLTISGLQAEDEADYYCTSYTSDSTLVFGGGTKVTVL

SEQ ID NO: 26512 - protein, 243 aa, Artificial Sequence
  source: /note="Description of Artificial Sequence: Synthetic polypeptide"
EVQLLESGPGLVKPSETLSLTCNVAGGSISPYYWTWIRQPPGKGLELIGYIHSSGYTDYNPSLKSRVTISGDTSKKQFSLHVSSVTAADTAVYFCARADWDLLHVLDIWGQGTLVTVSSGGGGSGGGGSGGGGSALEIVLTQSPSSLSTSVGDRVTITCRASQSIRSHLNWYQQKPGKAPKLLIYGASNLQSGVPSRFSGSGSGTDFTLTISSLQPEDFATYYCQQSYSFPLTFGGGTKLEIK

SEQ ID NO: 26513 - protein, 243 aa, Artificial Sequence
  source: /note="Description of Artificial Sequence: Synthetic polypeptide"
EVQLLESGPGLVKPSETLSLTCNVAGGSISPYYWTWIRQPPGKGLELIGYIHSSGYTDYNPSLKSRVTISGDTSKKQFSLHVSSVTAADTAVYFCARADWDLFHALDIWGQGTLVTVSSGGGGSGGGGSGGGGSALEIVLTQSPSSLSTSVGDRVTITCRASQSIRSHLNWYQQKPGKAPKLLIYGASNLQSGVPSRFSGSGSGTDFTLTISSLQPEDFATYYCQQSYSFPLTFGGGTKLEIK

SEQ ID NO: 26514 - protein, 243 aa, Artificial Sequence
  source: /note="Description of Artificial Sequence: Synthetic polypeptide"
EVQLLESGPGLVKPSETLSLTCNVAGGSISPYYWTWIRQPPGKGLELIGYIHSSGYTDYNPSLKSRVTISGDTSKKQFSLHVSSVTAADTAVYFCARADWDLPHALDIWGQGTLVTVSSGGGGSGGGGSGGGGSALEIVLTQSPSSLSTSVGDRVTITCRASQSIRSHLNWYQQKPGKAPKLLIYGASNLQSGVPSRFSGSGSGTDFTLTISSLQPEDFATYYCQQSYSFPLTFGGGTKLEIK

SEQ ID NO: 26515 - protein, 243 aa, Artificial Sequence
  source: /note="Description of Artificial Sequence: Synthetic polypeptide"
EVQLLESGPGLVKPSETLSLTCNVAGGSISPYYWTWIRQPPGKGLELIGYIHSSGYTDYNPSLKSRVTISGDTSKKQFSLHVSSVTAADTAVYFCARADWDLLRALDIWGQGTLVTVSSGGGGSGGGGSGGGGSALEIVLTQSPSSLSTSVGDRVTITCRASQSIRSHLNWYQQKPGKAPKLLIYGASNLQSGVPSRFSGSGSGTDFTLTISSLQPEDFATYYCQQSYSFPLTFGGGTKLEIK

SEQ ID NO: 26516 - protein, 243 aa, Artificial Sequence
  source: /note="Description of Artificial Sequence: Synthetic polypeptide"
EVQLLESGPGLVKPSETLSLTCNVAGGSISPYYWTWIRQPPGKGLELIGYIHSSGYTDYNPSLKSRVTISGDTSKKQFSLHVSSVTAADTAVYFCARGNWDLLHALDIWGQGTLVTVSSGGGGSGGGGSGGGGSALEIVLTQSPSSLSTSVGDRVTITCRASQSIRSHLNWYQQKPGKAPKLLIYGASNLQSGVPSRFSGSGSGTDFTLTISSLQPEDFATYYCQQSYSFPLTFGGGTKLEIK

SEQ ID NO: 26517 - protein, 243 aa, Artificial Sequence
  source: /note="Description of Artificial Sequence: Synthetic polypeptide"
EVQLLESGPGLVKPSETLSLTCNVAGGSISPYYWTWIRQPPGKGLELIGYIHSSGYTDYNPSLKSRVTISGDTSKKQFSLHVSSVTAADTAVYFCARADWNLLHALDIWGQGTLVTVSSGGGGSGGGGSGGGGSALEIVLTQSPSSLSTSVGDRVTITCRASQSIRSHLNWYQQKPGKAPKLLIYGASNLQSGVPSRFSGSGSGTDFTLTISSLQPEDFATYYCQQSYSFPLTFGGGTKLEIK

SEQ ID NO: 26518 - protein, 243 aa, Artificial Sequence
  source: /note="Description of Artificial Sequence: Synthetic polypeptide"
EVQLLESGPGLVKPSETLSLTCNVAGGSISPYYWTWIRQPPGKGLELIGYIHSSGYTDYNPSLKSRVTISGDTSKKQFSLHVSSVTAADTAVYFCARADWDLLHTLDIWGQGTLVTVSSGGGGSGGGGSGGGGSALEIVLTQSPSSLSTSVGDRVTITCRASQSIRSHLNWYQQKPGKAPKLLIYGASNLQSGVPSRFSGSGSGTDFTLTISSLQPEDFATYYCQQSYSFPLTFGGGTKLEIK

SEQ ID NO: 26519 - protein, 243 aa, Artificial Sequence
  source: /note="Description of Artificial Sequence: Synthetic polypeptide"
EVQLLESGPGLVKPSETLSLTCNVAGGSISPYYWTWIRQPPGKGLELIGYIHSSGYTDYNPSLKSRVTISGDTSKKQFSLHVSSVTAADTAVYFCARADWELLHALDIWGQGTLVTVSSGGGGSGGGGSGGGGSALEIVLTQSPSSLSTSVGDRVTITCRASQSIRSHLNWYQQKPGKAPKLLIYGASNLQSGVPSRFSGSGSGTDFTLTISSLQPEDFATYYCQQSYSFPLTFGGGTKLEIK

SEQ ID NO: 26520 - protein, 243 aa, Artificial Sequence
  source: /note="Description of Artificial Sequence: Synthetic polypeptide"
EVQLLESGPGLVKPSETLSLTCNVAGGSISPYYWTWIRQPPGKGLELIGYIHSSGYTDYNPSLKSRVTISGDTSKKQFSLHVSSVTAADTAVYFCARADWDLLHAFDMWGQGTMVTVSSGGGGSGGGGSGGGGSALEIVLTQSPSSLSTSVGDRVTITCRASQSIRSHLNWYQQKPGKAPKLLIYGASNLQSGVPSRFSGSGSGTDFTLTISSLQPEDFATYYCQQSYSFPLTFGGGTKLEIK

SEQ ID NO: 26521 - protein, 243 aa, Artificial Sequence
  source: /note="Description of Artificial Sequence: Synthetic polypeptide"
EVQLLESGPGLVKPSETLSLTCNVAGGSISPYYWTWIRQPPGKGLELIGYIHSSGYTDYNPSLKSRVTISGDTSKKQFSLHVSSVTAADTAVYFCARADWALLHALDIWGQGTLVTVSSGGGGSGGGGSGGGGSALEIVLTQSPSSLSTSVGDRVTITCRASQSIRSHLNWYQQKPGKAPKLLIYGASNLQSGVPSRFSGSGSGTDFTLTISSLQPEDFATYYCQQSYSFPLTFGGGTKLEIK

SEQ ID NO: 26522 - protein, 243 aa, Artificial Sequence
  source: /note="Description of Artificial Sequence: Synthetic polypeptide"
EVQLLESGPGLVKPSETLSLTCNVAGGSISPYYWTWIRQPPGKGLELIGYIHSSGYTDYNPSLKSRVTISGDTSKKQFSLHVSSVTAADTAVYFCARADRDLLHALDIWGQGTMVTVSSGGGGSGGGGSGGGGSALEIVLTQSPSSLSTSVGDRVTITCRASQSIRSHLNWYQQKPGKAPKLLIYGASNLQSGVPSRFSGSGSGTDFTLTISSLQPEDFATYYCQQSYSFPLTFGGGTKLEIK

SEQ ID NO: 26523 - protein, 243 aa, Artificial Sequence
  source: /note="Description of Artificial Sequence: Synthetic polypeptide"
EVQLLESGPGLVKPSETLSLTCNVAGGSISPYYWTWIRQPPGKGLELIGYIHSSGYTDYNPSLKSRVTISGDTSKKQFSLHVSSVTAADTAVYFCTRADWDLLHALDIWGQGTLVTVSSGGGGSGGGGSGGGGSALEIVLTQSPSSLSTSVGDRVTITCRASQSIRSHLNWYQQKPGKAPKLLIYGASNLQSGVPSRFSGSGSGTDFTLTISSLQPEDFATYYCQQSYSFPLTFGGGTKLEIK

SEQ ID NO: 26524 - protein, 243 aa, Artificial Sequence
  source: /note="Description of Artificial Sequence: Synthetic polypeptide"
EVQLLESGPGLVKPSETLSLTCNVAGGSISPYYWTWIRQPPGKGLELIGYIHSSGYTDYNPSLKSRVTISGDTSKKQFSLHVSSVTAADTAVYFCVRADWDLLHALDIWGQGTLVTVSSGGGGSGGGGSGGGGSALEIVLTQSPSSLSTSVGDRVTITCRASQSIRSHLNWYQQKPGKAPKLLIYGASNLQSGVPSRFSGSGSGTDFTLTISSLQPEDFATYYCQQSYSFPLTFGGGTKLEIK

SEQ ID NO: 26525 - protein, 243 aa, Artificial Sequence
  source: /note="Description of Artificial Sequence: Synthetic polypeptide"
EVQLLESGPGLVKPSETLSLTCNVAGGSISPYYWTWIRQPPGKGLELIGYIHSSGYTDYNPSLKGRVTISGDTSKKQFSLHVSSVTAADTAVYFCARADWDLLHALDIWGQGTLVTVSSGGGGSGGGGSGGGGSALEIVLTQSPSSLSTSVGDRVTITCRASQSIRSHLNWYQQKPGKAPKLLIYGASNLQSGVPSRFSGSGSGTDFTLTISSLQPEDFATYYCQQSYSFPLTFGGGTKLEIK

SEQ ID NO: 26526 - protein, 243 aa, Artificial Sequence
  source: /note="Description of Artificial Sequence: Synthetic polypeptide"
EVQLLESGPGLVKPSETLSLTCNVAGGSISPYYWTWIRQPPGKGLELIGYIHPSGYTDYNPSLKSRVTISGDTSKKQFSLHVSSVTAADTAVYFCARADWDLLHALDIWGQGTLVTVSSGGGGSGGGGSGGGGSALEIVLTQSPSSLSTSVGDRVTITCRASQSIRSHLNWYQQKPGKAPKLLIYGASNLQSGVPSRFSGSGSGTDFTLTISSLQPEDFATYYCQQSYSFPLTFGGGTKLEIK

SEQ ID NO: 26527 - protein, 243 aa, Artificial Sequence
  source: /note="Description of Artificial Sequence: Synthetic polypeptide"
EVQLLESGPGLVKPSETLSLTCNVAGGSISPYYWTWIRQPPGKGLELIGYIHSNGYTDYNPSLKSRVTISGDTSKKQFSLHVSSVTAADTAVYFCARADWDLLHALDIWGQGTLVTVSSGGGGSGGGGSGGGGSALEIVLTQSPSSLSTSVGDRVTITCRASQSIRSHLNWYQQKPGKAPKLLIYGASNLQSGVPSRFSGSGSGTDFTLTISSLQPEDFATYYCQQSYSFPLTFGGGTKLEIK

SEQ ID NO: 26528 - protein, 243 aa, Artificial Sequence
  source: /note="Description of Artificial Sequence: Synthetic polypeptide"
EVQLLESGPGLVKPSETLSLTCNVAGGSISPYYWTWIRQPPGKGLELIGYTHSSGYTDYNPSLKSRVTISGDTSKKQFSLHVSSVTAADTAVYFCARADWDLLHALDIWGQGTLVTVSSGGGGSGGGGSGGGGSALEIVLTQSPSSLSTSVGDRVTITCRASQSIRSHLNWYQQKPGKAPKLLIYGASNLQSGVPSRFSGSGSGTDFTLTISSLQPEDFATYYCQQSYSFPLTFGGGTKLEIK

SEQ ID NO: 26529 - protein, 243 aa, Artificial Sequence
  source: /note="Description of Artificial Sequence: Synthetic polypeptide"
EVQLLESGPGLVKPSETLSLTCNVAGGSISPYYWTWIRQPPGKGLELIGYIHSSGYADYNPSLKSRVTISGDTSKKQFSLHVSSVTAADTAVYFCARADWDLLHALDIWGQGTLVTVSSGGGGSGGGGSGGGGSALEIVLTQSPSSLSTSVGDRVTITCRASQSIRSHLNWYQQKPGKAPKLLIYGASNLQSGVPSRFSGSGSGTDFTLTISSLQPEDFATYYCQQSYSFPLTFGGGTKLEIK

SEQ ID NO: 26530 - protein, 243 aa, Artificial Sequence
  source: /note="Description of Artificial Sequence: Synthetic polypeptide"
EVQLLESGPGLVKPSETLSLTCNVAGGSISPYYWTWIRQPPGKGLELIGYIHSGGYTDYNPSLKSRVTISGDTSKKQFSLHVSSVTAADTAVYFCARADWDLLHALDIWGQGTLVTVSSGGGGSGGGGSGGGGSALEIVLTQSPSSLSTSVGDRVTITCRASQSIRSHLNWYQQKPGKAPKLLIYGASNLQSGVPSRFSGSGSGTDFTLTISSLQPEDFATYYCQQSYSFPLTFGGGTKLEIK

SEQ ID NO: 26531 - protein, 243 aa, Artificial Sequence
  source: /note="Description of Artificial Sequence: Synthetic polypeptide"
EVQLLESGPGLVKPSETLSLTCNVAGGSISPYYWTWIRQPPGKGLELIGYIHSSGYTDYNPSLKRRVTISGDTSKKQFSLHVSSVTAADTAVYFCARADWDLLHALDIWGQGTLVTVSSGGGGSGGGGSGGGGSALEIVLTQSPSSLSTSVGDRVTITCRASQSIRSHLNWYQQKPGKAPKLLIYGASNLQSGVPSRFSGSGSGTDFTLTISSLQPEDFATYYCQQSYSFPLTFGGGTKLEIK

SEQ ID NO: 26532 - protein, 243 aa, Artificial Sequence
  source: /note="Description of Artificial Sequence: Synthetic polypeptide"
EVQLLESGPGLVKPSETLSLTCNVAGGSISPYYWTWIRQPPGKGLELIGYIHSSGYTDYSPSLKSRVTISGDTSKKQFSLHVSSVTAADTAVYFCARADWDLLHALDIWGQGTLVTVSSGGGGSGGGGSGGGGSALEIVLTQSPSSLSTSVGDRVTITCRASQSIRSHLNWYQQKPGKAPKLLIYGASNLQSGVPSRFSGSGSGTDFTLTISSLQPEDFATYYCQQSYSFPLTFGGGTKLEIK

SEQ ID NO: 26533 - protein, 243 aa, Artificial Sequence
  source: /note="Description of Artificial Sequence: Synthetic polypeptide"
EVQLLESGPGLVKPSETLSLTCNVAGGSISPYYWTWIRQPPGKGLELIGYIHSSGYTDYNPFLKSRVTISGDTSKKQFSLHVSSVTAADTAVYFCARADWDLLHALDIWGQGTLVTVSSGGGGSGGGGSGGGGSALEIVLTQSPSSLSTSVGDRVTITCRASQSIRSHLNWYQQKPGKAPKLLIYGASNLQSGVPSRFSGSGSGTDFTLTISSLQPEDFATYYCQQSYSFPLTFGGGTKLEIK

SEQ ID NO: 26534 - protein, 243 aa, Artificial Sequence
  source: /note="Description of Artificial Sequence: Synthetic polypeptide"
EVQLLESGPGLVKPSETLSLTCNVAGGSISPYYWTWIRQPPGKGLELIGYIHSSRYTDYNPSLKSRVTISGDTSKKQFSLHVSSVTAADTAVYFCARADWDLLHALDIWGQGTLVTVSSGGGGSGGGGSGGGGSALEIVLTQSPSSLSTSVGDRVTITCRASQSIRSHLNWYQQKPGKAPKLLIYGASNLQSGVPSRFSGSGSGTDFTLTISSLQPEDFATYYCQQSYSFPLTFGGGTKLEIK

SEQ ID NO: 26535 - protein, 243 aa, Artificial Sequence
  source: /note="Description of Artificial Sequence: Synthetic polypeptide"
EVQLLESGPGLVKPSETLSLTCNVAGGSISPYYWTWIRQPPGKGLELIGYIHSSGYTGYNPSLKSRVTISGDTSKKQFSLHVSSVTAADTAVYFCARADWDLLHALDIWGQGTLVTVSSGGGGSGGGGSGGGGSALEIVLTQSPSSLSTSVGDRVTITCRASQSIRSHLNWYQQKPGKAPKLLIYGASNLQSGVPSRFSGSGSGTDFTLTISSLQPEDFATYYCQQSYSFPLTFGGGTKLEIK

SEQ ID NO: 26536 - protein, 243 aa, Artificial Sequence
  source: /note="Description of Artificial Sequence: Synthetic polypeptide"
EVQLLESGPGLVKPSETLSLTCNVAGGSISPYYWTWIRQPPGKGLELIGYIRSSGYTDYNPSLKSRVTISGDTSKKQFSLHVSSVTAADTAVYFCARADWDLLHALDIWGQGTLVTVSSGGGGSGGGGSGGGGSALEIVLTQSPSSLSTSVGDRVTITCRASQSIRSHLNWYQQKPGKAPKLLIYGASNLQSGVPSRFSGSGSGTDFTLTISSLQPEDFATYYCQQSYSFPLTFGGGTKLEIK

SEQ ID NO: 26537 - protein, 243 aa, Artificial Sequence
  source: /note="Description of Artificial Sequence: Synthetic polypeptide"
EVQLLESGPGLVKPSETLSLTCNVAGGSISPYYWTWIRQPPGKGLELIGYIHSSGYTDYNPSLKNRVTISGDTSKKQFSLHVSSVTAADTAVYFCARADWDLLHALDIWGQGTLVTVSSGGGGSGGGGSGGGGSALEIVLTQSPSSLSTSVGDRVTITCRASQSIRSHLNWYQQKPGKAPKLLIYGASNLQSGVPSRFSGSGSGTDFTLTISSLQPEDFATYYCQQSYSFPLTFGGGTKLEIK

SEQ ID NO: 26538 - protein, 243 aa, Artificial Sequence
  source: /note="Description of Artificial Sequence: Synthetic polypeptide"
EVQLLESGPGLVKPSETLSLTCNVAGGSISPYYWTWIRQPPGKGLELIGYIHSSGYTDHNPSLKSRVTISGDTSKKQFSLHVSSVTAADTAVYFCARADWDLLHALDIWGQGTLVTVSSGGGGSGGGGSGGGGSALEIVLTQSPSSLSTSVGDRVTITCRASQSIRSHLNWYQQKPGKAPKLLIYGASNLQSGVPSRFSGSGSGTDFTLTISSLQPEDFATYYCQQSYSFPLTFGGGTKLEIK

SEQ ID NO: 26539 - protein, 243 aa, Artificial Sequence
  source: /note="Description of Artificial Sequence: Synthetic polypeptide"
EVQLLESGPGLVKPSETLSLTCNVAGGSISPYYWTWIRQPPGKGLELIGYIHFSGYTDYNPSLKSRVTISGDTSKKQFSLHVSSVTAADTAVYFCARADWDLLHALDIWGQGTLVTVSSGGGGSGGGGSGGGGSALEIVLTQSPSSLSTSVGDRVTITCRASQSIRSHLNWYQQKPGKAPKLLIYGASNLQSGVPSRFSGSGSGTDFTLTISSLQPEDFATYYCQQSYSFPLTFGGGTKLEIK

SEQ ID NO: 26540 - protein, 243 aa, Artificial Sequence
  source: /note="Description of Artificial Sequence: Synthetic polypeptide"
EVQLLESGPGLVKPSETLSLTCNVAGGSISPYYWTWIRQPPGKGLELIGYIHSSGYTDYNSSLKSRVTISGDTSKKQFSLHVSSVTAADTAVYFCARADWDLLHALDIWGQGTLVTVSSGGGGSGGGGSGGGGSALEIVLTQSPSSLSTSVGDRVTITCRASQSIRSHLNWYQQKPGKAPKLLIYGASNLQSGVPSRFSGSGSGTDFTLTISSLQPEDFATYYCQQSYSFPLTFGGGTKLEIK

SEQ ID NO: 26541 - protein, 243 aa, Artificial Sequence
  source: /note="Description of Artificial Sequence: Synthetic polypeptide"
EVQLLESGPGLVKPSETLSLTCNVAGGSISPYYWTWIRQPPGKGLELIGYIHSSGYTDYNPSLRSRVTISGDTSKKQFSLHVSSVTAADTAVYFCARADWDLLHALDIWGQGTLVTVSSGGGGSGGGGSGGGGSALEIVLTQSPSSLSTSVGDRVTITCRASQSIRSHLNWYQQKPGKAPKLLIYGASNLQSGVPSRFSGSGSGTDFTLTISSLQPEDFATYYCQQSYSFPLTFGGGTKLEIK

SEQ ID NO: 26542 - protein, 243 aa, Artificial Sequence
  source: /note="Description of Artificial Sequence: Synthetic polypeptide"
EVQLLESGPGLVKPSETLSLTCNVAGGSISPYYWTWIRQPPGKGLELIGYIHSSGHTDYNPSLKSRVTISGDTSKKQFSLHVSSVTAADTAVYFCARADWDLLHALDIWGQGTLVTVSSGGGGSGGGGSGGGGSALEIVLTQSPSSLSTSVGDRVTITCRASQSIRSHLNWYQQKPGKAPKLLIYGASNLQSGVPSRFSGSGSGTDFTLTISSLQPEDFATYYCQQSYSFPLTFGGGTKLEIK

SEQ ID NO: 26543 - protein, 243 aa, Artificial Sequence
  source: /note="Description of Artificial Sequence: Synthetic polypeptide"
EVQLLESGPGLVKPSETLSLTCNVAGGSISPYYWTWIRQPPGKGLELIGYYHPSGYTDYNPSLKSRVTISGDTSKKQFSLHVSSVTAADTAVYFCARADWDLLHALDIWGQGTLVTVSSGGGGSGGGGSGGGGSALEIVLTQSPSSLSTSVGDRVTITCRASQSIRSHLNWYQQKPGKAPKLLIYGASNLQSGVPSRFSGSGSGTDFTLTISSLQPEDFATYYCQQSYSFPLTFGGGTKLEIK

SEQ ID NO: 26544 - protein, 243 aa, Artificial Sequence
  source: /note="Description of Artificial Sequence: Synthetic polypeptide"
EVQLLESGPGLVKPSETLSLTCNVAGGSISPYYWTWIRQPPGKGLELIGYIHSSGFTSYNPSLKSRVTISGDTSKKQFSLHVSSVTAADTAVYFCARADWDLLHALDIWGQGTLVTVSSGGGGSGGGGSGGGGSALEIVLTQSPSSLSTSVGDRVTITCRASQSIRSHLNWYQQKPGKAPKLLIYGASNLQSGVPSRFSGSGSGTDFTLTISSLQPEDFATYYCQQSYSFPLTFGGGTKLEIK

SEQ ID NO: 26545 - DNA, 735 bp, Artificial Sequence
  source: /note="Description of Artificial Sequence: Synthetic polynucleotide"
gaggtgcagctgttggagtcgggcccaggactggtgaagccttcggagaccctgtccctcacctgcaatgtcgctggtggctccatcagtccttactactggacctggatccggcagcccccagggaagggcctggagttgattggttatatccactccagtgggtacaccgactacaacccctccctcaagagtcgagtcaccatatcaggagacacgtccaagaagcagttctccctgcacgtgagctctgtgaccgctgcggacacggccgtgtacttctgtgcgagaggcgattgggacctgcttcatgctcttgatatctggggccaagggaccctggtcaccgtctcgagtggaggcggcggttcaggcggaggtggctctggcggtagcggaagtgcacagtctgtgctgactcagcctgcctccgtgtccgggtcacctggacagtcgatcaccatatcctgcactggcaccaccagcgacgttggtgcttttggctttgtctcctggtaccaacagaagccaggcgaagtccccaaactcatgatttatgatgtcagtgatcggccctcaggggtttctgatcgcttctctggctccaagtctggcagcacggcctccctgaccatctctgggctccaggctgaggacgaggctgattattactgcggctcatatacaagcaccagcacttgggtgttcggcggagggaccaagctgaccgtccta

SEQ ID NO: 26546 - protein, 243 aa, Artificial Sequence
  source: /note="Description of Artificial Sequence: Synthetic polypeptide"
EVQLLESGPGLVKPSETLSLTCNVAGGSISPYYWTWIRQPPGKGLELIGYIHSSGYTDYNPSLKSRVTISGDTSKKQFSLHVSSVTAADTAVYFCARATDEADHALDIWGQGTLVTVSSGGGGSGGGGSGGGGSALEIVLTQSPSSLSTSVGDRVTITCRASQSIRSHLNWYQQKPGKAPKLLIYGASNLQSGVPSRFSGSGSGTDFTLTISSLQPEDFATYYCSQSDTFPLTFGGGTKLEIK

SEQ ID NO: 26547 - protein, 243 aa, Artificial Sequence
  source: /note="Description of Artificial Sequence: Synthetic polypeptide"
EVQLLESGPGLVKPSETLSLTCNVAGGSISPYYWTWIRQPPGKGLELIGYIHSSGYTDYNPSLKSRVTISGDTSKKQFSLHVSSVTAADTAVYFCARADWSGTRALDIWGQGTLVTVSSGGGGSGGGGSGGGGSALEIVLTQSPSSLSTSVGDRVTITCWASQSIRSHLNWYQQKPGKAPKLLIYGASNLQSGVPSRFSGSGSGTDFTLTISSLQPEDFATYYCGQSDAFPLTFGGGTKLEIK

SEQ ID NO: 26548 - protein, 243 aa, Artificial Sequence
  source: /note="Description of Artificial Sequence: Synthetic polypeptide"
EVQLLESGPGLVKPSETLSLTCNVAGGSISPYYWTWIRQPPGKGLELIGYIHSSGYTDYNPSLKSRVTISGDTSKKQFSLHVSSVTAADTAVYFCARGLPEKPHALDIWGQGTLVTVSSGGGGSGGGGSGGGGSALEIVLTQSPSSLSTSVGDRVTITCRASQSIRSHLNWYQQKPGKAPKLLIYGASNLQSGVPSRFSGSGSGTDFTLTISSLQPEDFATYYCLQGDLWPLTFGGGTKLEIK

SEQ ID NO: 26549 - protein, 243 aa, Artificial Sequence
  source: /note="Description of Artificial Sequence: Synthetic polypeptide"
EVQLLESGPGLVKPSETLSLTCNVAGGSISPYYWTWIRQPPGKGLELIGYIHSSGYTDYNPSLKSRVTISGDTSKKQFSLHVSSVTAADTAVYFCARSLFTDDHALDIWGQGTLVTVSSGGGGSGGGGSGGGGSALEIVLTQSPSSLSTSVGDRVTITCRASQSIRSHLNWYQQKPGKAPKLLIYGASNLQSGVPSRFSGSGSGTDFTLTISSLQPEDFATYYCQQSYSFPLTFGGGTKLEIK

SEQ ID NO: 26550 - protein, 243 aa, Artificial Sequence
  source: /note="Description of Artificial Sequence: Synthetic polypeptide"
EVQLLESGPGLVKPSETLSLTCNVAGGSISPYYWTWIRQPPGKGLELIGYIHSSGYTDYNPSLKSRVTISGDTSKKQFSLHVSSVTAADTAVYFCARASPGVVHALDIWGQGTLVTVSSGGGGSGGGGSGGGGSALEIVLTQSPSSLSTSVGDRVTITCRASQSIRSHLNWYQQKPGKAPKLLIYGASNLQSGVPSRFSGSGSGTDFTLTISSLQPEDFATYYCQQSYSFPLTFGGGTKLEIK

SEQ ID NO: 26551 - protein, 243 aa, Artificial Sequence
  source: /note="Description of Artificial Sequence: Synthetic polypeptide"
EVQLLESGPGLVKPSETLSLTCNVAGGSISPYYWTWIRQPPGKGLELIGYIHSSGYTDYNPSLKSRVTISGDTSKKQFSLHVSSVTAADTAVYFCARAHIESHHALDIWGQGTLVTVSSGGGGSGGGGSGGGGSALEIVLTQSPSSLSTSVGDRVTITCRASQSIRSHLNWYQQKPGKAPKLLIYGASNLQSGVPSRFSGSGSGTDFTLTISSLQPEDFATYYCQQSYSFPLTFGGGTKLEIK

SEQ ID NO: 26552 - protein, 243 aa, Artificial Sequence
  source: /note="Description of Artificial Sequence: Synthetic polypeptide"
EVQLLESGPGLVKPSETLSLTCNVAGGSISPYYWTWIRQPPGKGLELIGYIHSSGYTDYNPSLKSRVTISGDTSKKQFSLHVSSVTAADTAVYFCARATQAPAHALDIWGQGTLVTVSSGGGGSGGGGSGGGGSALEIVLTQSPSSLSTSVGDRVTITCRASQSIRSHLNWYQQKPGKAPKLLIYGASNLQSGVPSRFSGSGSGTDFTLTISSLQPEDFATYYCQQSYSFPLTFGGGTKLEIK

SEQ ID NO: 26553 - protein, 243 aa, Artificial Sequence
  source: /note="Description of Artificial Sequence: Synthetic polypeptide"
EVQLLESGPGLVKPSETLSLTCNVAGGSISPYYWTWIRQPPGKGLELIGYIHSSGYTDYNPSLKSRVTISGDTSKKQFSLHVSSVTAADTAVYFCARSQHDLEHALDIWGQGTLVTVSSGGGGSGGGGSGGGGSALEIVLTQSPSSLSTSVGDRVTITCRASQSIRSHLNWYQQKPGKAPKLLIYGASNLQSGVPSRFSGSGSGTDFTLTISSLQPEDFATYYCQQSYSFPLTFGGGTKLEIK

SEQ ID NO: 26554 - protein, 243 aa, Artificial Sequence
  source: /note="Description of Artificial Sequence: Synthetic polypeptide"
EVQLLESGPGLVKPSETLSLTCNVAGGSISPYYWTWIRQPPGKGLELIGYIHSSGYTDYNPSLKSRVTISGDTSKKQFSLHVSSVTAADTAVYFCARAMPDMPHALDIWGQGTLVTVSSGGGGSGGGGSGGGGSALEIVLTQSPSSLSTSVGDRVTITCRASQSIRSHLNWYQQKPGKAPKLLIYGASNLQSGVPSRFSGSGSGTDFTLTISSLQPEDFATYYCQQSLEFPLTFGGGTKLEIK

SEQ ID NO: 26555 - protein, 125 aa, Artificial Sequence
  source: /note="Description of Artificial Sequence: Synthetic polypeptide"
QVQLQESGAEVKKPGESLKISCKGSGYSFTSYWIGWVRQMPGKGLEWMGIIYPGDSDTRYSPSFQGQVTISADKSISTAYLQWSSLKASDTAMYYCARLGLQDDYVWGSPNWFDPWGQGTLVTVS

SEQ ID NO: 26556 - protein, 126 aa, Artificial Sequence
  source: /note="Description of Artificial Sequence: Synthetic polypeptide"
QVQLQESGAEVKKPGSSVKVSCKASGGTFSRYALSWVRQAPGQGLEWMGGIIPIFGTTNYAQKFQGRVTIAADESTSTAYLELSSLRSEDTALYYCAKSYDYVWGSYRPNEYGLDIWGQGTMVTVS

SEQ ID NO: 26557 - protein, 122 aa, Artificial Sequence
  source: /note="Description of Artificial Sequence: Synthetic polypeptide"
QVQLQESGGGVVQPGRSLRLSCAASGFTFSSYAMHWVRQAPGKGLEWVSYISSSGSTIYYADSVKGRFTISRDNAKNSLYLQMNRLRAEDTAVYYCARDMAGTSYYYYYMDVWGKGTLVTVS

SEQ ID NO: 26558 - protein, 143 aa, Artificial Sequence
  source: /note="Description of Artificial Sequence: Synthetic polypeptide"
GGKLVQPGGSLRLSCAASGISFSASWMSWVRQAPGKGLEWVANIRGDGSDINYADFVKGRFIISRDNAKSSLYLQMDSLRVEDTAVYYCARDVRHGDFDYWGQGTLVTVSSASPTSPKVFPLSLDSTPQDGNVVVACLVQGFF

SEQ ID NO: 26559 - protein, 122 aa, Artificial Sequence
  source: /note="Description of Artificial Sequence: Synthetic polypeptide"
GGDLVKPGGSLRLSCAASGFTFSDYSMSWIRQAPGKGLEWLSSIDTTGSTIYYADSVKGRFTISRDNAKNSLNLQMNSLRAEDTAVYYCARGSAMWGSWGQGTLVTVSSASTKGPSVFPLAP

SEQ ID NO: 26560 - protein, 125 aa, Artificial Sequence
  source: /note="Description of Artificial Sequence: Synthetic polypeptide"
GGGLVQPGGSLRLSCAASGFTFSSHSMSWVRQAPGKGLEWVSAITGSGGDTDYPDSVKGRFTISRDNSNNTLYLQMSSLGAEETAVYYCARRSGSSYGPFDYWGQGTLVTVSSASTKGPSVFPLA

SEQ ID NO: 26561 - protein, 114 aa, Artificial Sequence
  source: /note="Description of Artificial Sequence: Synthetic polypeptide"
EIELTQSPATLSVSPGERATLSCRASQNIGNSLAWYQLKPGQAPRLVMYDPSTRATGIPARFSGSGSGTEFTLTINSLQSEDFAVYYCHQYADWPLGFGGGTKVEVERTVAAPS

SEQ ID NO: 26562 - protein, 136 aa, Artificial Sequence
  source: /note="Description of Artificial Sequence: Synthetic polypeptide"
AAELTQPPSVSAAPGQKVTISCSGNSSNIGNEYVSWYQQLPGTAPKLLIYDNNWRPSGIPDRFSGSKSGTSATLGITGLQTGDEADYYCGTWDSSLSAAVFGGGTKLTVLGQPKAAPSVTLFPPSSEELQANKATL

SEQ ID NO: 26563 - protein, 113 aa, Artificial Sequence
  source: /note="Description of Artificial Sequence: Synthetic polypeptide"
ELTQPPSVSAAPGQKVTISCSGNSSNIGNEYVSWYQQLPGTAPKLLIYDNNWRPSGIPDRFSGSKSGTSATLGITGLQTGDEADYYCGTWDSSLSAAVFGGGTRLTVLRQPKA

SEQ ID NO: 26564 - protein, 125 aa, Artificial Sequence
  source: /note="Description of Artificial Sequence: Synthetic polypeptide"
GGGLVQPGGSLRLSCAASGFTFSSHSMSWVRQAPGKGLEWVSAITGSGGDTDYPDSVKGRFTISRDNSRNTLYLQMSSLRAEETAVYYCARRSGSSYGPFDYWGQGTLVTVSSASTKGPSVFPLA

SEQ ID NO: 26565 - protein, 111 aa, Artificial Sequence; identical to SEQ ID NO: 26260
  source: /note="Description of Artificial Sequence: Synthetic polypeptide"

SEQ ID NO: 26566 - protein, 115 aa, Artificial Sequence
  source: /note="Description of Artificial Sequence: Synthetic polypeptide"
QVRLQQWGAGLLKPSETLSLTCAVFGGSFSGFSWSWIRQTPGKGLEWIGEIDYRGSTNYNPSLKSRVTILRDTSRSQFSLKLSSVTAADSAVFYCARGGPRFDYWGQGTLVTVSS

SEQ ID NO: 26567 - protein, 128 aa, Artificial Sequence
  source: /note="Description of Artificial Sequence: Synthetic polypeptide"
EVQLVESGGGLVQPGGSLRLSCAASGFTFNIFGMSWVRQAPGKGLEWVANIKQDGSEKYYVDSVKGRFTISRDNAKNSLYLQMNSLRAEDTAVYYCARDRFYYGSGSYYYYYNGMDVWGQGTTVTVSS

SEQ ID NO: 26568 - protein, 127 aa, Artificial Sequence
  source: /note="Description of Artificial Sequence: Synthetic polypeptide"
EVQLVESGGGLVQPGGSLRLSCAASGFTFSSFWMSWVRQAPGKGLEWVANIKQDGSEKFYVDSVKGRFTISRDNAKNSLYLQMNSLRAEDTAVYYCARDRITMVRPYYYFYNGLDVWGQGTTVTVSS

SEQ ID NO: 26569 - protein, 231 aa, Artificial Sequence
  source: /note="Description of Artificial Sequence: Synthetic polypeptide"
LINLVESGGGVVQPGRSLRLSCAASGFTFSRYGMHWVRQAPGKGLEWVAVVSSDGRTTYYADSVKGRFTISRDNSKNTLYLQMNSLRAEDTAVFYCAKEGGDNKFSFDYWGQGTLVTVSSASTKGPSVFPLAPCSRSTSESTAALGCLVKDYFPEPVTVSWNSGALTSGVHTFPAVLQSSGLYSLSSVVTVPSSNFGTQTYTCNVDHKPSNTKVDKTVERKCWARHHHHHH

SEQ ID NO: 26570 - protein, 130 aa, Artificial Sequence; identical to SEQ ID NO: 14316
  source: /note="Description of Artificial Sequence: Synthetic polypeptide"

SEQ ID NO: 26571 - protein, 135 aa, Artificial Sequence
  source: /note="Description of Artificial Sequence: Synthetic polypeptide"
  MOD_RES (114)..(114): Any amino acid
EIQLQQSGPELMKPGASVKISCKASGYSFSSHYMHWVKQSHGKSLEWIGYIDPSNGETTYNQKFKGKATLTVDTSSSTANVHLSSLTSDDSAVYFCARGDYRYNGDWFFDVWGXGTTVTVSSAKTDSPIGLSGPI

SEQ ID NO: 26572 - protein, 253 aa, Artificial Sequence; identical to SEQ ID NO: 12806
  source: /note="Description of Artificial Sequence: Synthetic polypeptide"

SEQ ID NO: 26573 - protein, 118 aa, Artificial Sequence; identical to SEQ ID NO: 26258
  source: /note="Description of Artificial Sequence: Synthetic polypeptide"

SEQ ID NO: 26574 - protein, 125 aa, Artificial Sequence
  source: /note="Description of Artificial Sequence: Synthetic polypeptide"
DIQMTQSPSTLSASIGDRVTITCRASEGIYHWLAWYQQKPGKAPKLLIYEASRLQSGVPSRFSGSGSGTEFTLTISSLQPDDFATYYCLQDFTYPRTFGQGTKLEIKRAAAEQKLISEEDLNGAA

SEQ ID NO: 26575 - protein, 125 aa, Artificial Sequence
  source: /note="Description of Artificial Sequence: Synthetic polypeptide"
DIVMTQSPSSLSASVGDRVTITCRASQGISNYLAWFQQKPGKAPKSLIYAASSLQSGVPSKFSGSGSGTEFTLTISSLQPEDFATYYCQELISYPLTFGGGTKLEIKRAAAEQKLISEEDLNGAA

SEQ ID NO: 26576 - protein, 125 aa, Artificial Sequence
  source: /note="Description of Artificial Sequence: Synthetic polypeptide"
DIQMTQSPSSLSASVGDRVTITCRASQGISNYLAWFQQKPGKAPKSLIYAASSLQSGVPSKFSGSGSGTEFTLTISSLQPEDFATYYCQELISYPLTFGGGTKLEIKRAAAEQKLISEEDLNGAA

SEQ ID NO: 26577 - protein, 117 aa, Artificial Sequence
  source: /note="Description of Artificial Sequence: Synthetic polypeptide"
ELTQSPLSLSVTPGQPASISCKSGQSLLHSDGRTYLHWYLQKPGQPPQLLIYEVSNRFSGVPDRFSGSGSGTDFTLKISRVEAEDVGVYYCMQSLRLRTFGQGTKVEIKRTVAAPSV

SEQ ID NO: 26578 - protein, 114 aa, Artificial Sequence
  source: /note="Description of Artificial Sequence: Synthetic polypeptide"
ELTQSPDSLAVSLGERATINCKSSQNALVTSSNKNCLAWYQQKPGQPPKLLIFWASSRVSGVPDRFSGSGSGTDFTLTISSLQAEDVAVYYCQQCYGTKTFGQGTKLELKRTVA

SEQ ID NO: 26579 - protein, 114 aa, Artificial Sequence
  source: /note="Description of Artificial Sequence: Synthetic polypeptide"
ELTQSPLSSPVTLGQPASISCRSSQSLVHSNGNTYLSWLQQRPGQPPRVLIYEISKRLSGVPDRFSGSGAGTDFTLKISRVEAEDVGVYYCVQATQFPYTFGQGTKLEIKRTVA

SEQ ID NO: 26580 - protein, 129 aa, Artificial Sequence
  source: /note="Description of Artificial Sequence: Synthetic polypeptide"
ESGGGLVKPGGSLRLSCAASGFTFSKAWMNWVRQAPGKGLEWVGRIRGKAEGGTTDYPAPVKGRFTISRDDSESTLYLQMNGLKTEDTGVYYCTTGTGTTFHLDYWGRGALVTVSSASTKGPSVFPLAP

SEQ ID NO: 26581 - protein, 126 aa, Artificial Sequence
  source: /note="Description of Artificial Sequence: Synthetic polypeptide"
GGLVKPGESLRLSCAASGFTFNKAWMNWVRQAPGKGLEWVGRIRGVSEGGTTDYTTPVKGRFTISRDDSQDTVYLEMNSLKTEDTAVYYCATGTGTTFHLDYWGQGTLVTVSSASTKGPSVFPLAP

SEQ ID NO: 26582 - protein, 115 aa, Artificial Sequence
  source: /note="Description of Artificial Sequence: Synthetic polypeptide"
EIELTQSPATLSVSPGEGVTLSCRASQNVGNNLAWYQQKLGQPPRLLIYDASTRATGVPARFSGSGSGTEFTLTVSSLQSEDFTVYYCQQYSVWPLTFGGGAKVEIKGTVAAPSV

SEQ ID NO: 26583 - protein, 115 aa, Artificial Sequence; identical to SEQ ID NO: 26582
  source: /note="Description of Artificial Sequence: Synthetic polypeptide"

SEQ ID NO: 26584 - protein, 107 aa, Artificial Sequence
  source: /note="Description of Artificial Sequence: Synthetic polypeptide"
DIQMTQSPSSLSASVGDRVTITCRASQGISSWLAWYQQKPEKAPESLIYVASSLQSGVPSRFSGSGSGTDFTLTISSLQPEDFATYYCQQYNSYPPTFGQGTKVEIK

SEQ ID NO: 26585 - protein, 106 aa, Artificial Sequence
  source: /note="Description of Artificial Sequence: Synthetic polypeptide"
EIVLTQSPATLSLSPGERATLSCRASQSVSSYLAWYQQKPGQAPRLLIYDASNRATGIPARFSGSGSGTDFTLTISSLEPEDFAVYYCQQRSNWPLTFGGGTKVEI

SEQ ID NO: 26586 - protein, 108 aa, Artificial Sequence
  source: /note="Description of Artificial Sequence: Synthetic polypeptide"
EIVLTQSPATLSLSPGERATLSCRASQSVSSYLAWYQQKPGQAPRLLIYDASNRATGIPARFSGSGSGTDFTLTISSLEPEDFAVYYCQQRSNWPPFTFGPGTKVDIK

SEQ ID NO: 26587 - protein, 123 aa, Artificial Sequence; identical to SEQ ID NO: 16172
  source: /note="Description of Artificial Sequence: Synthetic polypeptide"

SEQ ID NO: 26588 - protein, 131 aa, Artificial Sequence; identical to SEQ ID NO: 16173
  source: /note="Description of Artificial Sequence: Synthetic polypeptide"

SEQ ID NO: 26589 - protein, 242 aa, Artificial Sequence; identical to SEQ ID NO: 16174
  source: /note="Description of Artificial Sequence: Synthetic polypeptide"

SEQ ID NO: 26590 - protein, 113 aa, Artificial Sequence; identical to SEQ ID NO: 26265
  source: /note="Description of Artificial Sequence: Synthetic polypeptide"

SEQ ID NO: 26591 - protein, 247 aa, Artificial Sequence; identical to SEQ ID NO: 26269
  source: /note="Description of Artificial Sequence: Synthetic polypeptide"

SEQ ID NO: 26592 - protein, 112 aa, Artificial Sequence; identical to SEQ ID NO: 26263
  source: /note="Description of Artificial Sequence: Synthetic polypeptide"

SEQ ID NO: 26593 - protein, 111 aa, Artificial Sequence; identical to SEQ ID NO: 26259
  source: /note="Description of Artificial Sequence: Synthetic polypeptide"

SEQ ID NO: 26594 - protein, 111 aa, Artificial Sequence; identical to SEQ ID NO: 26264
  source: /note="Description of Artificial Sequence: Synthetic polypeptide"

SEQ ID NO: 26595 - protein, 120 aa, Artificial Sequence
  source: /note="Description of Artificial Sequence: Synthetic polypeptide"
MADVKLVESGGGLVKLGGSLKLSCSASGFTFSNYYMSWVRQTPEKRLELVADINGNGGSTYYPDTVKGRFTISRDNAKNTLYLQMSSLKSEDTALYYCVRRGGYYALDYWGQGTTVTVSS

SEQ ID NO: 26596 - protein, 118 aa, Artificial Sequence
  source: /note="Description of Artificial Sequence: Synthetic polypeptide"
  MOD_RES (58)..(60): Any amino acid
  MOD_RES (66)..(67): Any amino acid
EVQLQQSGTVLARPGASVKMSCKASGYTFTTYWMHWVKQRPGQGLEWIGAIYPGNSDXXXNQKFKXXAKLIAVTSTSTAYMELSSLTNEDSAVYYCTRGTGTEIWFAYWGQGTTVTVS

SEQ ID NO: 26597 - protein, 124 aa, Artificial Sequence
  source: /note="Description of Artificial Sequence: Synthetic polypeptide"
QVQLQESGPGLVKPSETLSLTCTVSGGSISGYYWSWIRQPPGKGLEWIGYIHYSRSTNSNPALKSRVTISSDTSKNQLSLRLSSVTAADTAVYYCARDTYYYDSGDYEDAFDIWGQGTMVTVSS

SEQ ID NO: 26598 - protein, 112 aa, Artificial Sequence
  source: /note="Description of Artificial Sequence: Synthetic polypeptide"
QLVLTQSPSASASLGASVKLTCTLSSGHSNYAIAWHQQQPGKGPRYLMKVNRDGSHIRGDGIPDRFSGSTSGAERYLTISSLQSEDEADYYCQTWGAGIRVFGGGTKLTVLG

SEQ ID NO: 26599 - protein, 117 aa, Artificial Sequence
  source: /note="Description of Artificial Sequence: Synthetic polypeptide"
EVQLQQSGAELVKPGASVKLSCTASGFNIKDTYIHWVKQRPEQGLEWIGRIDPANGNTHYDSQFQGKATITADTSSNTAYLQLSSLTSDDTAVYYCTRRVGYAMDYWGQGTSVTVSS

SEQ ID NO: 26600 - protein, 123 aa, Artificial Sequence
  source: /note="Description of Artificial Sequence: Synthetic polypeptide"
QVTLRESGPGILQPSQTLSLTCSFSGFSLNTSGMGVTWIRQPSGKGLEWLANIYWDDDKRYNPSLKSRLTISKANSRNQVFLKITSVDTADTATYYCTRPNYLGTVYWYFDVWGAGTMVTVSS

SEQ ID NO: 26601 - protein, 118 aa, Artificial Sequence
  source: /note="Description of Artificial Sequence: Synthetic polypeptide"
EVQLVESGGGLVKPGGSLKLSCAASGFAFSSYDMSWVRQTPEKRLEWVAYISSGGGITYYPDTVKGRFTISRDNAKNTLYVQMSSLKSEDTAIYYCTRHDRDSWFAYWGQGTLVTVSA

SEQ ID NO: 26602 - protein, 117 aa, Artificial Sequence
  source: /note="Description of Artificial Sequence: Synthetic polypeptide"
QVQLVQSGAEVVKPGASVKLSCKASGFNIKDTYIHWVKQRPGQGLEWIGRIDPANGNTHYDSQFQGKATITADTSTSTAYLQLSSLRSEDTAVYYCTRRVGYAMDYWGQGTTVTVSS

SEQ ID NO: 26603 - protein, 123 aa, Artificial Sequence
  source: /note="Description of Artificial Sequence: Synthetic polypeptide"
QVTLRESGPGILKPSQTLSLTCTFSGFSLNTSGMGVTWIRQPSGKGLEWLANIYWDDDKRYNPSLKSRLTISKANSRNQVFLKITSVDPVDTATYYCTRPNYLGTVYWYFDVWGQGTMVTVSS

SEQ ID NO: 26604 - protein, 118 aa, Artificial Sequence
  source: /note="Description of Artificial Sequence: Synthetic polypeptide"
EVQLVESGGGLVQPGGSLKLSCAASGFAFSSYDMSWVRQTPEKRLEWVAYISSGGGITYYPDTVKGRFTISRDNSKNTLYVQMSSLRAEDTAVYYCTRHDRDSWFAYWGQGTLVTVSS

SEQ ID NO: 26605 - protein, 123 aa, Artificial Sequence
  source: /note="Description of Artificial Sequence: Synthetic polypeptide"
EVMLVESGGGLVQPKGSLKLSCAASGFTFNNYAMNWVRQAPGKGLEWVARIRSKSNNYATFYADSVKDRFTISRDDSQSMLYLQMNNLKTEDTAMYYCVRRGASGIDYAMDYWGQGTSLTVSS

SEQ ID NO: 26606 - protein, 123 aa, Artificial Sequence
  source: /note="Description of Artificial Sequence: Synthetic polypeptide"
EVMLVESGEGLVQPKGSLKLSCAASGFTFNTYAMNWVRQAPGKGLEWVARIRSKSNNYATYYADSVKDRFTISRDDSQSMLYLQMNNLKTEDTAMYYCVRRGGKETDYAMDYWGQGTSVTVSS

SEQ ID NO: 26607 - protein, 118 aa, Artificial Sequence
  source: /note="Description of Artificial Sequence: Synthetic polypeptide"
EVMLVESGGGLVQPKGSLKLSCAASGFTFNNYAMNWVRQAPGKGLEWVARIRSKSNNYATFYADSVKDRFTISRDDSQSLYLQMNNLKTEDTAYCVRRGASGIDYAMWGQGTSLTVSS

SEQ ID NO: 26608 - protein, 124 aa, Artificial Sequence
  source: /note="Description of Artificial Sequence: Synthetic polypeptide"
QVQLQESGPGLVKPSETLSLTCTVSGGSISNYYWSWIRQSPGRGLEWIGYIHYSGSTNSNPSLKSRVTISVDTSKNQVSLKLGSVTAADTAIYYCARDTYYESSGHWFDGLDVWGQGTSVTVSS

SEQ ID NO: 26609 - protein, 124 aa, Artificial Sequence
  source: /note="Description of Artificial Sequence: Synthetic polypeptide"
QVQLVQSGAEMKRPGASVKVSCKASGYTFTNFGISWVRQAPGQGLEWIGWVSTYNGRTNYAQKFRGRVTMTTDTSTNTAYMELRSLGSDDTAVFYCARDYYETSGYAYDDFAIWGQGTLVTVSS

SEQ ID NO: 26610 - protein, 126 aa, Artificial Sequence
  source: /note="Description of Artificial Sequence: Synthetic polypeptide"
QVQLQESGPGLVKPSETLSLTCTVSGGSISGYYWSWIRQPPGKGLEWIGYIHYSRSTNSNPALKSRVTISSDTSKNQLSLRLSSVTAADTAVYYCARDTYYYDSGDYEDAFDIWGQGTMVTVSSAS

SEQ ID NO: 26611 - protein, 130 aa, Artificial Sequence
  source: /note="Description of Artificial Sequence: Synthetic polypeptide"
QVQLQESGPGLVKPSETLSLTCTVSGGSISNYYWSWIRQSPGRGLEWIGYIHYSGSTNSNPSLKSRVTISVDTSKNQVSLKLGSVTAADTAIYYCARDTYYESSGHWFDGLDVWGQGTSVTVSSASTKGP

SEQ ID NO: 26612 - protein, 124 aa, Artificial Sequence; identical to SEQ ID NO: 26597
  source: /note="Description of Artificial Sequence: Synthetic polypeptide"

SEQ ID NO: 26613 - protein, 123 aa, Artificial Sequence
  source: /note="Description of Artificial Sequence: Synthetic polypeptide"
QVTLRESGPGILKPSQTLSLTCTFSGFSLSTSGMGVTWIRQPSGKGLEWLANIYWDDDKRYNPSLKSRLTISKANSRNQVFLKITSVDPVDTATYYCTRPNYLGTVYWYFDVWGQGTMVTVSS

SEQ ID NO: 26614 - protein, 120 aa, Artificial Sequence
  source: /note="Description of Artificial Sequence: Synthetic polypeptide"
EVQLQQSGAEFVKRPGASVKLSCRVSGFNIKDYYINWVKQRTEQGLEWIGRIDPEDGETKYAPKFQGKATITADTSSNTANLHLSSLTSADTAVYYCASSGYAFAWFLYWGQGTLVTVSA

SEQ ID NO: 26615 - protein, 117 aa, Artificial Sequence
  source: /note="Description of Artificial Sequence: Synthetic polypeptide"
EVQLQQSGAELVKPGASVKLSCTASGFNIKDYFIHWVNQRTKQGLEWIGRIDPEDGETKYAPKFQGKATLTADTTSNTADLQLSSLTSEDTAVYYCVLYYSRSFDYWGQGTTLTVSS

SEQ ID NO: 26616 - protein, 119 aa, Artificial Sequence
  source: /note="Description of Artificial Sequence: Synthetic polypeptide"
EVQLQQSGAEFVKPGASVKLSCRVSGFNIKDYYINWVKQRTEQGLEWIGRIDPEDGETKYAPKFQGKATITADTSSNTANLHLSSLTSADTAVYYCASSGYAFAWFLYWGQGTLVTVSA

SEQ ID NO: 26617 - protein, 125 aa, Artificial Sequence
  source: /note="Description of Artificial Sequence: Synthetic polypeptide"
QVQLVQSGAEVKKPGSSVKVSCKTSGGTFNNVAINWVRQAPGQGLEWMGGIIPGLDTPNYAQKFQGRVTITADKSTTSTYLELSSLRSDDTAVYYCAREMEVSGRWRPTEAFEIWGQGTMVTVSS

SEQ ID NO: 26618 - protein, 125 aa, Artificial Sequence
  source: /note="Description of Artificial Sequence: Synthetic polypeptide"
QVQLVQSGAEVKKPGSSVKVSCKASGGTFNNVAINWVRQAPGQGLEWMGGIIPGLDTPNYAQKFQGRVTITADESTSTAYMELSSLRSEDTAVYYCAREMEVSGRWRPTEAFEIWGQGTLVTVSS

SEQ ID NO: 26619 - protein, 125 aa, Artificial Sequence
  source: /note="Description of Artificial Sequence: Synthetic polypeptide"
QVQLVQSGAEVKKPGSSVKVSCKASGGTFNNVAINWVRQAPGQGLEWMGGIIPGLDTPNYAQKFQGRVTITADESTSTAYMELSSLRSEDTAVYYCAREVEVSGRWRPTEAFEIWGQGTLVTVSS

SEQ ID NO: 26620 - protein, 125 aa, Artificial Sequence
  source: /note="Description of Artificial Sequence: Synthetic polypeptide"
QVQLVQSGAEVKKPGSSVKVSCKASGGTFNNVAINWVRQAPGQGLEWMGGIIPGLDTPNYAQKFQGRVTITADESTSTAYMELSSLRSEDTAVYYCARELEVSGRWRPTEAFEIWGQGTLVTVSS

SEQ ID NO: 26621 - protein, 125 aa, Artificial Sequence
  source: /note="Description of Artificial Sequence: Synthetic polypeptide"
QVQLVQSGAEVKKPGSSVKVSCKASGGTFNNVAINWVRQAPGQGLEWMGGIIPGLDTPNYAQKFQGRVTITADESTSTAYMELSSLRSEDTAVYYCAREREVSGRWRPTEAFEIWGQGTLVTVSS

SEQ ID NO: 26622 - protein, 125 aa, Artificial Sequence
  source: /note="Description of Artificial Sequence: Synthetic polypeptide"
QVQLVQSGAEVKKPGSSVKVSCKASGGTFNNVAINWVRQAPGQGLEWMGGIIPGLDTPNYAQKFQGRVTITADESTSTAYMELSSLRSEDTAVYYCAREHEVSGRWRPTEAFEIWGQGTLVTVSS

SEQ ID NO: 26623 - protein, 125 aa, Artificial Sequence
  source: /note="Description of Artificial Sequence: Synthetic polypeptide"
QVQLVQSGAEVKKPGSSVKVSCKASGGTFNNVAINWVRQAPGQGLEWMGGIIPGLDTPNYAQKFQGRVTITADESTSTAYMELSSLRSEDTAVYYCAREYEVSGRWRPTEAFEIWGQGTLVTVSS

SEQ ID NO: 26624 - protein, 125 aa, Artificial Sequence
  source: /note="Description of Artificial Sequence: Synthetic polypeptide"
QVQLVQSGAEVKKPGSSVKVSCKASGGTFNNVAINWVRQAPGQGLEWMGGIIPGLDTPNYAQKFQGRVTITADESTSTAYMELSSLRSEDTAVYYCAREAEVSGRWRPTEAFEIWGQGTLVTVSS

SEQ ID NO: 26625 - protein, 125 aa, Artificial Sequence
  source: /note="Description of Artificial Sequence: Synthetic polypeptide"
QVQLVQSGAEVKKPGSSVKVSCKASGGTFNNVAINWVRQAPGQGLEWMGGIIPGLDTPNYAQKFQGRVTITADESTSTAYMELSSLRSEDTAVYYCARECEVSGRWRPTEAFEIWGQGTLVTVSS

SEQ ID NO: 26626 - protein, 125 aa, Artificial Sequence
  source: /note="Description of Artificial Sequence: Synthetic polypeptide"
QVQLVQSGAEVKKPGSSVKVSCKASGGTFNNVAINWVRQAPGQGLEWMGGIIPGLDTPNYAQKFQGRVTITADESTSTAYMELSSLRSEDTAVYYCAREDEVSGRWRPTEAFEIWGQGTLVTVSS

SEQ ID NO: 26627 - protein, 125 aa, Artificial Sequence
  source: /note="Description of Artificial Sequence: Synthetic polypeptide"
QVQLVQSGAEVKKPGSSVKVSCKASGGTFNNVAINWVRQAPGQGLEWMGGIIPGLDTPNYAQKFQGRVTITADESTSTAYMELSSLRSEDTAVYYCAREEEVSGRWRPTEAFEIWGQGTLVTVSS

SEQ ID NO: 26628 - protein, 125 aa, Artificial Sequence
  source: /note="Description of Artificial Sequence: Synthetic polypeptide"
QVQLVQSGAEVKKPGSSVKVSCKASGGTFNNVAINWVRQAPGQGLEWMGGIIPGLDTPNYAQKFQGRVTITADESTSTAYMELSSLRSEDTAVYYCAREFEVSGRWRPTEAFEIWGQGTLVTVSS

SEQ ID NO: 26629 - protein, 125 aa, Artificial Sequence
  source: /note="Description of Artificial Sequence: Synthetic polypeptide"
QVQLVQSGAEVKKPGSSVKVSCKASGGTFNNVAINWVRQAPGQGLEWMGGIIPGLDTPNYAQKFQGRVTITADESTSTAYMELSSLRSEDTAVYYCAREGEVSGRWRPTEAFEIWGQGTLVTVSS

SEQ ID NO: 26630 - protein, 125 aa, Artificial Sequence
  source: /note="Description of Artificial Sequence: Synthetic polypeptide"
QVQLVQSGAEVKKPGSSVKVSCKASGGTFNNVAINWVRQAPGQGLEWMGGIIPGLDTPNYAQKFQGRVTITADESTSTAYMELSSLRSEDTAVYYCAREIEVSGRWRPTEAFEIWGQGTLVTVSS

SEQ ID NO: 26631 - protein, 125 aa, Artificial Sequence
  source: /note="Description of Artificial Sequence: Synthetic polypeptide"
QVQLVQSGAEVKKPGSSVKVSCKASGGTFNNVAINWVRQAPGQGLEWMGGIIPGLDTPNYAQKFQGRVTITADESTSTAYMELSSLRSEDTAVYYCAREKEVSGRWRPTEAFEIWGQGTLVTVSS

SEQ ID NO: 26632 - protein, 125 aa, Artificial Sequence
  source: /note="Description of Artificial Sequence: Synthetic polypeptide"
QVQLVQSGAEVKKPGSSVKVSCKASGGTFNNVAINWVRQAPGQGLEWMGGIIPGLDTPNYAQKFQGRVTITADESTSTAYMELSSLRSEDTAVYYCARENEVSGRWRPTEAFEIWGQGTLVTVSS

SEQ ID NO: 26633 - protein, 125 aa, Artificial Sequence
  source: /note="Description of Artificial Sequence: Synthetic polypeptide"
QVQLVQSGAEVKKPGSSVKVSCKASGGTFNNVAINWVRQAPGQGLEWMGGIIPGLDTPNYAQKFQGRVTITADESTSTAYMELSSLRSEDTAVYYCAREPEVSGRWRPTEAFEIWGQGTLVTVSS

SEQ ID NO: 26634 - protein, 125 aa, Artificial Sequence
  source: /note="Description of Artificial Sequence: Synthetic polypeptide"
QVQLVQSGAEVKKPGSSVKVSCKASGGTFNNVAINWVRQAPGQGLEWMGGIIPGLDTPNYAQKFQGRVTITADESTSTAYMELSSLRSEDTAVYYCAREQEVSGRWRPTEAFEIWGQGTLVTVSS

SEQ ID NO: 26635 - protein, 125 aa, Artificial Sequence
  source: /note="Description of Artificial Sequence: Synthetic polypeptide"
QVQLVQSGAEVKKPGSSVKVSCKASGGTFNNVAINWVRQAPGQGLEWMGGIIPGLDTPNYAQKFQGRVTITADESTSTAYMELSSLRSEDTAVYYCARESEVSGRWRPTEAFEIWGQGTLVTVSS

SEQ ID NO: 26636 - protein, 125 aa, Artificial Sequence
  source: /note="Description of Artificial Sequence: Synthetic polypeptide"
QVQLVQSGAEVKKPGSSVKVSCKASGGTFNNVAINWVRQAPGQGLEWMGGIIPGLDTPNYAQKFQGRVTITADESTSTAYMELSSLRSEDTAVYYCARETEVSGRWRPTEAFEIWGQGTLVTVSS

SEQ ID NO: 26637 - protein, 125 aa, Artificial Sequence
  source: /note="Description of Artificial Sequence: Synthetic polypeptide"
QVQLVQSGAEVKKPGSSVKVSCKASGGTFNNVAINWVRQAPGQGLEWMGGIIPGLDTPNYAQKFQGRVTITADESTSTAYMELSSLRSEDTAVYYCAREWEVSGRWRPTEAFEIWGQGTLVTVSS

SEQ ID NO: 26638 - protein, 448 aa, Artificial Sequence
  source: /note="Description of Artificial Sequence: Synthetic polypeptide"
QVQLQESGPGLVKPSQTLSLTCTVSGGSISSGGYYWSWIRQPPGKGLEWIGYIYYSGSTYYNSSLKSRVTISVDTSKNQFSLKLSSVTAADTAVYYCAKTVMNSFFDWGQGTLVTVSSASTKGPSVFPLAPSSKSTSGGTAALGCLVKDYFPEPVTVSWNSGALTSGVHTFPAVLQSSGLYSLSSVVTVPSSSLGTQTYICNVNHKPSNTKVDKRVEPKSCDKTHTCPPCPAPELLGGPSVFLFPPKPKDTLMISRTPEVTCVVVDVSHEDPEVKFNWYVDGVEVHNAKTKPREEQYNSTYRVVSVLTVLHQDWLNGKEYKCKVSNKALPAPIEKTISKAKGQPREPQVYTLPPSREEMTKNQVSLTCLVKGFYPSDIAVEWESNGQPENNYKTTPPVLDSDGSFFLYSKLTVDKSRWQQGNVFSCSVMHEALHNHYTQKSLSLSPGK

SEQ ID NO: 26639 - protein, 448 aa, Artificial Sequence
  source: /note="Description of Artificial Sequence: Synthetic polypeptide"
EVLESGGGLVQPGGSLRLSCSDSGFSFNNYWMTWVRQAPGKGLEWVANINRDGSDKYHVDSVEGRFTISRDNSKNSLYLQMNNLRADDAAVYFCARGGRTTSWYWRNWGQGTLVTVSSASTKGPSVFPLAPSSKSTSGGTAALGCLVKDYFPEPVTVSWNSGALTSGVHTFPAVLQSSGLYSLSSVVTVPSSSLGTQTYICNVNHKPSNTKVDKRVEPKSCDKTHTCPPCPAPELLGGPSVFLFPPKPKDTLMISRTPEVTCVVVDVSHEDPEVKFNWYVDGVEVHNAKTKPREEQYNSTYRVVSVLTVLHQDWLNGKEYKCKVSNKALPAPIEKTISKAKGQPREPQVYTLPPSREEMTKNQVSLTCLVKGFYPSDIAVEWESNGQPENNYKTTPPVLDSDGSFFLYSKLTVDKSRWQQGNVFSCSVMHEALHNHYTQKSLSLSPGK

SEQ ID NO: 26640 - protein, 450 aa, Artificial Sequence
  source: /note="Description of Artificial Sequence: Synthetic polypeptide"
EVQLVETGGGLVKPGGSLRLSCSASRFSFRDYYMTWIRQAPGKGPEWVSHISGSGSTIYYADSVRGRFTISRDNAKSSLYLQMDSLQADDTAVYYCARGGRATSYYWVHWGPGTLVTVSSASTKGPSVFPLAPSSKSTSGGTAALGCLVKDYFPEPVTVSWNSGALTSGVHTFPAVLQSSGLYSLSSVVTVPSSSLGTQTYICNVNHKPSNTKVDKRVEPKSCDKTHTCPPCPAPELLGGPSVFLFPPKPKDTLMISRTPEVTCVVVDVSHEDPEVKFNWYVDGVEVHNAKTKPREEQYNSTYRVVSVLTVLHQDWLNGKEYKCKVSNKALPAPIEKTISKAKGQPREPQVYTLPPSREEMTKNQVSLTCLVKGFYPSDIAVEWESNGQPENNYKTTPPVLDSDGSFFLYSKLTVDKSRWQQGNVFSCSVMHEALHNHYTQKSLSLSPGK

SEQ ID NO: 26641 - protein, 451 aa, Artificial Sequence
  source: /note="Description of Artificial Sequence: Synthetic polypeptide"
QVQLVQSGAEVKKPGESLKISCKGSGYSFTSYWIGWVRQMPGKGLEWMGIIYPGDSDTRYSPSFQGQVTISADKSISTAYLQWSSLKASDTAMYYCARRASIVGATHFDYWGQGTLVTVSSASTKGPSVFPLAPSSKSTSGGTAALGCLVKDYFPEPVTVSWNSGALTSGVHTFPAVLQSSGLYSLSSVVTVPSSSLGTQTYICNVNHKPSNTKVDKRVEPKSCDKTHTCPPCPAPELLGGPSVFLFPPKPKDTLMISRTPEVTCVVVDVSHEDPEVKFNWYVDGVEVHNAKTKPREEQYNSTYRVVSVLTVLHQDWLNGKEYKCKVSNKALPAPIEKTISKAKGQPREPQVYTLPPSREEMTKNQVSLTCLVKGFYPSDIAVEWESNGQPENNYKTTPPVLDSDGSFFLYSKLTVDKSRWQQGNVFSCSVMHEALHNHYTQKSLSLSPGK

SEQ ID NO: 26642 - protein, 451 aa, Artificial Sequence
  source: /note="Description of Artificial Sequence: Synthetic polypeptide"
EVQLVETGGVAVQPGRSLRLSCAASGFSFRDYGMHWVRQAAGKGLEWVAFIWPHGVNRFYADSMEGRFTISRDDSKNMLYLEMNNLRTEDTALYYCTRDQDYVPRKYFDLWGRGTLVTVSSASTKGPSVFPLAPSSKSTSGGTAALGCLVKDYFPEPVTVSWNSGALTSGVHTFPAVLQSSGLYSLSSVVTVPSSSLGTQTYICNVNHKPSNTKVDKRVEPKSCDKTHTCPPCPAPELLGGPSVFLFPPKPKDTLMISRTPEVTCVVVDVSHEDPEVKFNWYVDGVEVHNAKTKPREEQYNSTYRVVSVLTVLHQDWLNGKEYKCKVSNKALPAPIEKTISKAKGQPREPQVYTLPPSREEMTKNQVSLTCLVKGFYPSDIAVEWESNGQPENNYKTTPPVLDSDGSFFLYSKLTVDKSRWQQGNVFSCSVMHEALHNHYTQKSLSLSPGK

SEQ ID NO: 26643 - protein, 459 aa, Artificial Sequence
  source: /note="Description of Artificial Sequence: Synthetic polypeptide"
QVQLQESGPRLVKPSETLSLTCNVSDDSITSYGYYWGWIRQPPGEALEWIGNVFYSGMAYYNPSLKSRVTILIDTSKKQFSLRLNSVTAADTAIYYCARVPFLMFRVKIVQGTGAFDIWGQGTMVTVSSASTKGPSVFPLAPSSKSTSGGTAALGCLVKDYFPEPVTVSWNSGALTSGVHTFPAVLQSSGLYSLSSVVTVPSSSLGTQTYICNVNHKPSNTKVDKRVEPKSCDKTHTCPPCPAPELLGGPSVFLFPPKPKDTLMISRTPEVTCVVVDVSHEDPEVKFNWYVDGVEVHNAKTKPREEQYNSTYRVVSVLTVLHQDWLNGKEYKCKVSNKALPAPIEKTISKAKGQPREPQVYTLPPSREEMTKNQVSLTCLVKGFYPSDIAVEWESNGQPENNYKTTPPVLDSDGSFFLYSKLTVDKSRWQQGNVFSCSVMHEALHNHYTQKSLSLSPGK

SEQ ID NO: 26644 - protein, 450 aa, Artificial Sequence
  source: /note="Description of Artificial Sequence: Synthetic polypeptide"
EVQLVESGGDLVQPGGSLRLSCVGSGFTFGRYAMSWVRQAPGKGLEWVASINNNGNPYYADSVKGRFTISADNSKSTVYLQMNSLRAEDTAMYYCAKDHYSSGWPAFDHWGQGTLVTVSSASTKGPSVFPLAPSSKSTSGGTAALGCLVKDYFPEPVTVSWNSGALTSGVHTFPAVLQSSGLYSLSSVVTVPSSSLGTQTYICNVNHKPSNTKVDKRVEPKSCDKTHTCPPCPAPELLGGPSVFLFPPKPKDTLMISRTPEVTCVVVDVSHEDPEVKFNWYVDGVEVHNAKTKPREEQYNSTYRVVSVLTVLHQDWLNGKEYKCKVSNKALPAPIEKTISKAKGQPREPQVYTLPPSREEMTKNQVSLTCLVKGFYPSDIAVEWESNGQPENNYKTTPPVLDSDGSFFLYSKLTVDKSRWQQGNVFSCSVMHEALHNHYTQKSLSLSPGK

SEQ ID NO: 26645 - protein, 448 aa, Artificial Sequence
  source: /note="Description of Artificial Sequence: Synthetic polypeptide"
EVQLVESGAEVKKPGESLKISCKGSGYSFTSYWIGWVRQMPGKGLEWMGIIYPGDSDTRYSPSFQGQVTISADKSISTAYLQWSSLKASDTAMYYCARYSNSQGMDVWGQGTTVTVSSASTKGPSVFPLAPSSKSTSGGTAALGCLVKDYFPEPVTVSWNSGALTSGVHTFPAVLQSSGLYSLSSVVTVPSSSLGTQTYICNVNHKPSNTKVDKRVEPKSCDKTHTCPPCPAPELLGGPSVFLFPPKPKDTLMISRTPEVTCVVVDVSHEDPEVKFNWYVDGVEVHNAKTKPREEQYNSTYRVVSVLTVLHQDWLNGKEYKCKVSNKALPAPIEKTISKAKGQPREPQVYTLPPSREEMTKNQVSLTCLVKGFYPSDIAVEWESNGQPENNYKTTPPVLDSDGSFFLYSKLTVDKSRWQQGNVFSCSVMHEALHNHYTQKSLSLSPGK

SEQ ID NO: 26646 - protein, 452 aa, Artificial Sequence
  source: /note="Description of Artificial Sequence: Synthetic polypeptide"
QVQLVQSGAEVKKPGESLKISCKGSRYSSTSYWIGWVRQMPGEGLEWMGIIYPGDSDTRYSPSFQGQVTISADKSISTAYLQWSSLKASDSALYYCARGAVAGTVGNGFDVWGQGTMVTVSSASTKGPSVFPLAPSSKSTSGGTAALGCLVKDYFPEPVTVSWNSGALTSGVHTFPAVLQSSGLYSLSSVVTVPSSSLGTQTYICNVNHKPSNTKVDKRVEPKSCDKTHTCPPCPAPELLGGPSVFLFPPKPKDTLMISRTPEVTCVVVDVSHEDPEVKFNWYVDGVEVHNAKTKPREEQYNSTYRVVSVLTVLHQDWLNGKEYKCKVSNKALPAPIEKTISKAKGQPREPQVYTLPPSREEMTKNQVSLTCLVKGFYPSDIAVEWESNGQPENNYKTTPPVLDSDGSFFLYSKLTVDKSRWQQGNVFSCSVMHEALHNHYTQKSLSLSPGK

SEQ ID NO: 26647 - protein, 451 aa, Artificial Sequence
  source: /note="Description of Artificial Sequence: Synthetic polypeptide"
EVQLVETGAEVKKPGESLKISCKGSGYSFTSYWIGWVRQMPGKGLEWVGIIYPGDSDTRYSPSFQGQVTISADKSISTAYLQWSSLKASDTAMYYCARRRGSTSSTDFDYWGQGTLVTVSSASTKGPSVFPLAPSSKSTSGGTAALGCLVKDYFPEPVTVSWNSGALTSGVHTFPAVLQSSGLYSLSSVVTVPSSSLGTQTYICNVNHKPSNTKVDKRVEPKSCDKTHTCPPCPAPELLGGPSVFLFPPKPKDTLMISRTPEVTCVVVDVSHEDPEVKFNWYVDGVEVHNAKTKPREEQYNSTYRVVSVLTVLHQDWLNGKEYKCKVSNKALPAPIEKTISKAKGQPREPQVYTLPPSREEMTKNQVSLTCLVKGFYPSDIAVEWESNGQPENNYKTTPPVLDSDGSFFLYSKLTVDKSRWQQGNVFSCSVMHEALHNHYTQKSLSLSPGK

SEQ ID NO: 26648 - protein, 451 aa, Artificial Sequence
  source: /note="Description of Artificial Sequence: Synthetic polypeptide"
QVQLVQSGAEVKKPGESLKISCKGSGYSFSTYWIGWVRQMPGKGLEWMGIIYPGDSDTRYSPSFQGQVTISADKSISTAHLQWSSLKASDTAMYYCARPGPRGYNHGFDYWGQGTLVTVSSASTKGPSVFPLAPSSKSTSGGTAALGCLVKDYFPEPVTVSWNSGALTSGVHTFPAVLQSSGLYSLSSVVTVPSSSLGTQTYICNVNHKPSNTKVDKRVEPKSCDKTHTCPPCPAPELLGGPSVFLFPPKPKDTLMISRTPEVTCVVVDVSHEDPEVKFNWYVDGVEVHNAKTKPREEQYNSTYRVVSVLTVLHQDWLNGKEYKCKVSNKALPAPIEKTISKAKGQPREPQVYTLPPSREEMTKNQVSLTCLVKGFYPSDIAVEWESNGQPENNYKTTPPVLDSDGSFFLYSKLTVDKSRWQQGNVFSCSVMHEALHNHYTQKSLSLSPGK

SEQ ID NO: 26649 - protein, 449 aa, Artificial Sequence
  source: /note="Description of Artificial Sequence: Synthetic polypeptide"
EVQLVESGAEVKEPGESLKISCKGSGYTFASYWVAWVRQMPGKGLEWMGIIYPGDSDTRYSPSFQGQVTVSADKSISTAYLQWSSLKASDTAMYYCARWWGSLHAFDIWGQGTMVTVSSASTKGPSVFPLAPSSKSTSGGTAALGCLVKDYFPEPVTVSWNSGALTSGVHTFPAVLQSSGLYSLSSVVTVPSSSLGTQTYICNVNHKPSNTKVDKRVEPKSCDKTHTCPPCPAPELLGGPSVFLFPPKPKDTLMISRTPEVTCVVVDVSHEDPEVKFNWYVDGVEVHNAKTKPREEQYNSTYRVVSVLTVLHQDWLNGKEYKCKVSNKALPAPIEKTISKAKGQPREPQVYTLPPSREEMTKNQVSLTCLVKGFYPSDIAVEWESNGQPENNYKTTPPVLDSDGSFFLYSKLTVDKSRWQQGNVFSCSVMHEALHNHYTQKSLSLSPGK

SEQ ID NO: 26650 - protein, 453 aa, Artificial Sequence
  source: /note="Description of Artificial Sequence: Synthetic polypeptide"
EVQLVETGAEVQKPGESLKISCKGSGYTFTNYWIAWVRQKPGKGLEWMGIIYPGDSDTRYSPSFQGQVTISADKSISTAYLQWSSLKASDTAMYYCARRYCTTTSCSAGFDPWGQGTLVTVSSASTKGPSVFPLAPSSKSTSGGTAALGCLVKDYFPEPVTVSWNSGALTSGVHTFPAVLQSSGLYSLSSVVTVPSSSLGTQTYICNVNHKPSNTKVDKRVEPKSCDKTHTCPPCPAPELLGGPSVFLFPPKPKDTLMISRTPEVTCVVVDVSHEDPEVKFNWYVDGVEVHNAKTKPREEQYNSTYRVVSVLTVLHQDWLNGKEYKCKVSNKALPAPIEKTISKAKGQPREPQVYTLPPSREEMTKNQVSLTCLVKGFYPSDIAVEWESNGQPENNYKTTPPVLDSDGSFFLYSKLTVDKSRWQQGNVFSCSVMHEALHNHYTQKSLSLSPGK

SEQ ID NO: 26651 - protein, 450 aa, Artificial Sequence
  source: /note="Description of Artificial Sequence: Synthetic polypeptide"
EVQLVESGAEVKKPGESLKISCKGSGYSFTKYWIGWVRQKPGKGLEWMGIIYPGDSDTRYSPSFQGQVTISTDKSISTAYLQWSSLKASDTAMYYCARLGGGIAAAFDYWGQGTLVTVSSASTKGPSVFPLAPSSKSTSGGTAALGCLVKDYFPEPVTVSWNSGALTSGVHTFPAVLQSSGLYSLSSVVTVPSSSLGTQTYICNVNHKPSNTKVDKRVEPKSCDKTHTCPPCPAPELLGGPSVFLFPPKPKDTLMISRTPEVTCVVVDVSHEDPEVKFNWYVDGVEVHNAKTKPREEQYNSTYRVVSVLTVLHQDWLNGKEYKCKVSNKALPAPIEKTISKAKGQPREPQVYTLPPSREEMTKNQVSLTCLVKGFYPSDIAVEWESNGQPENNYKTTPPVLDSDGSFFLYSKLTVDKSRWQQGNVFSCSVMHEALHNHYTQKSLSLSPGK

SEQ ID NO: 26652 - protein, 450 aa, Artificial Sequence
  source: /note="Description of Artificial Sequence: Synthetic polypeptide"
EVQLVESGAEVKKPGESLKISCKGSGYTFTRYWIGWVRQMPGKGLEWMGIIYPGDSDTRYSPSFRGQVTISADKSISTAYLQWSSLKASDTAMYYCARRMGAASAYFDNWGQGTLVTVSSASTKGPSVFPLAPSSKSTSGGTAALGCLVKDYFPEPVTVSWNSGALTSGVHTFPAVLQSSGLYSLSSVVTVPSSSLGTQTYICNVNHKPSNTKVDKRVEPKSCDKTHTCPPCPAPELLGGPSVFLFPPKPKDTLMISRTPEVTCVVVDVSHEDPEVKFNWYVDGVEVHNAKTKPREEQYNSTYRVVSVLTVLHQDWLNGKEYKCKVSNKALPAPIEKTISKAKGQPREPQVYTLPPSREEMTKNQVSLTCLVKGFYPSDIAVEWESNGQPENNYKTTPPVLDSDGSFFLYSKLTVDKSRWQQGNVFSCSVMHEALHNHYTQKSLSLSPGK

SEQ ID NO: 26653 - protein, 453 aa, Artificial Sequence
  source: /note="Description of Artificial Sequence: Synthetic polypeptide"
EVQLVESGAEVKKPGESLKISCKGSGYSFTSYWIGWVRQMPGKGLEWMGIIYPGDSDTRYSPSFQGQVTISADKSISTAYLQWTSLKASDTAVYFCARLGEFRRTGNSYFDYWGQGTLVTVSSASTKGPSVFPLAPSSKSTSGGTAALGCLVKDYFPEPVTVSWNSGALTSGVHTFPAVLQSSGLYSLSSVVTVPSSSLGTQTYICNVNHKPSNTKVDKRVEPKSCDKTHTCPPCPAPELLGGPSVFLFPPKPKDTLMISRTPEVTCVVVDVSHEDPEVKFNWYVDGVEVHNAKTKPREEQYNSTYRVVSVLTVLHQDWLNGKEYKCKVSNKALPAPIEKTISKAKGQPREPQVYTLPPSREEMTKNQVSLTCLVKGFYPSDIAVEWESNGQPENNYKTTPPVLDSDGSFFLYSKLTVDKSRWQQGNVFSCSVMHEALHNHYTQKSLSLSPGK

SEQ ID NO: 26654 - protein, 445 aa, Artificial Sequence
  source: /note="Description of Artificial Sequence: Synthetic polypeptide"
EVQLVETGGDLVQPGGSLRLSCAASGFTFSSYAMGWVRQAPGKGLEWLSYIRNDGSVIYYADSVKGRFTISRDNAKNSLYLQMNSLRAEDTAVYYCARRGYLDLWGRGTLVTVSSASTKGPSVFPLAPSSKSTSGGTAALGCLVKDYFPEPVTVSWNSGALTSGVHTFPAVLQSSGLYSLSSVVTVPSSSLGTQTYICNVNHKPSNTKVDKRVEPKSCDKTHTCPPCPAPELLGGPSVFLFPPKPKDTLMISRTPEVTCVVVDVSHEDPEVKFNWYVDGVEVHNAKTKPREEQYNSTYRVVSVLTVLHQDWLNGKEYKCKVSNKALPAPIEKTISKAKGQPREPQVYTLPPSREEMTKNQVSLTCLVKGFYPSDIAVEWESNGQPENNYKTTPPVLDSDGSFFLYSKLTVDKSRWQQGNVFSCSVMHEALHNHYTQKSLSLSPGK

SEQ ID NO: 26655 - protein, 450 aa, Artificial Sequence
  source: /note="Description of Artificial Sequence: Synthetic polypeptide"
EVQLVESGGGLVQPGGSLRVSCAASGFTFSSYWMTWVRQAPGKGLEWVANIKKDGSEKYYVDSVKGRFSISRDNAKDSLYLQMSSLRAEDTAVYYCARGGSSSSFYWWLWGKGTTVTVSSASTKGPSVFPLAPSSKSTSGGTAALGCLVKDYFPEPVTVSWNSGALTSGVHTFPAVLQSSGLYSLSSVVTVPSSSLGTQTYICNVNHKPSNTKVDKRVEPKSCDKTHTCPPCPAPELLGGPSVFLFPPKPKDTLMISRTPEVTCVVVDVSHEDPEVKFNWYVDGVEVHNAKTKPREEQYNSTYRVVSVLTVLHQDWLNGKEYKCKVSNKALPAPIEKTISKAKGQPREPQVYTLPPSREEMTKNQVSLTCLVKGFYPSDIAVEWESNGQPENNYKTTPPVLDSDGSFFLYSKLTVDKSRWQQGNVFSCSVMHEALHNHYTQKSLSLSPGK

SEQ ID NO: 26656 - protein, 451 aa, Artificial Sequence; identical to SEQ ID NO: 26641
  source: /note="Description of Artificial Sequence: Synthetic polypeptide"

SEQ ID NO: 26657 - protein, 451 aa, Artificial Sequence
  source: /note="Description of Artificial Sequence: Synthetic polypeptide"
EVQLVETGGGLVQPGGSLRLSCSASGFTFSNYAMSWVRQAPGKGLEWVSGISGSGGRTYYADSVKGRFTISRDNSKNTLYLQMNSLGADDTAVYYCAKGVRAGVPYYFDSWGQGTLVTVSSASTKGPSVFPLAPSSKSTSGGTAALGCLVKDYFPEPVTVSWNSGALTSGVHTFPAVLQSSGLYSLSSVVTVPSSSLGTQTYICNVNHKPSNTKVDKRVEPKSCDKTHTCPPCPAPELLGGPSVFLFPPKPKDTLMISRTPEVTCVVVDVSHEDPEVKFNWYVDGVEVHNAKTKPREEQYNSTYRVVSVLTVLHQDWLNGKEYKCKVSNKALPAPIEKTISKAKGQPREPQVYTLPPSREEMTKNQVSLTCLVKGFYPSDIAVEWESNGQPENNYKTTPPVLDSDGSFFLYSKLTVDKSRWQQGNVFSCSVMHEALHNHYTQKSLSLSPGK

SEQ ID NO: 26658 - protein, 456 aa, Artificial Sequence
  source: /note="Description of Artificial Sequence: Synthetic polypeptide"
EVQLVQSGAEVKKPGESLKISCKASGYSFTSYWIGWVRQMPGKGLEWMGIIYPGDSDTRYSPSFQGQVIISADKSISTAYLQWSSLKASDTAMYYCARFKKSSAARGYYYYYMDVWGKGTTVTVSSASTKGPSVFPLAPSSKSTSGGTAALGCLVKDYFPEPVTVSWNSGALTSGVHTFPAVLQSSGLYSLSSVVTVPSSSLGTQTYICNVNHKPSNTKVDKRVEPKSCDKTHTCPPCPAPELLGGPSVFLFPPKPKDTLMISRTPEVTCVVVDVSHEDPEVKFNWYVDGVEVHNAKTKPREEQYNSTYRVVSVLTVLHQDWLNGKEYKCKVSNKALPAPIEKTISKAKGQPREPQVYTLPPSREEMTKNQVSLTCLVKGFYPSDIAVEWESNGQPENNYKTTPPVLDSDGSFFLYSKLTVDKSRWQQGNVFSCSVMHEALHNHYTQKSLSLSPGK

SEQ ID NO: 26659 - protein, 449 aa, Artificial Sequence
  source: /note="Description of Artificial Sequence: Synthetic polypeptide"
EVQLVQSGAEVKKPGESLKISCKGSGYTFSSYWIGWVRQMPGKGPEWMGIIYPGDSDTRYSPSFQGQVTISADRSISTAYLQWSSLKASDTAMYYCARLNTVMVGLDYWGQGTLVTVSSASTKGPSVFPLAPSSKSTSGGTAALGCLVKDYFPEPVTVSWNSGALTSGVHTFPAVLQSSGLYSLSSVVTVPSSSLGTQTYICNVNHKPSNTKVDKRVEPKSCDKTHTCPPCPAPELLGGPSVFLFPPKPKDTLMISRTPEVTCVVVDVSHEDPEVKFNWYVDGVEVHNAKTKPREEQYNSTYRVVSVLTVLHQDWLNGKEYKCKVSNKALPAPIEKTISKAKGQPREPQVYTLPPSREEMTKNQVSLTCLVKGFYPSDIAVEWESNGQPENNYKTTPPVLDSDGSFFLYSKLTVDKSRWQQGNVFSCSVMHEALHNHYTQKSLSLSPGK

SEQ ID NO: 26660 - protein, 447 aa, Artificial Sequence
  source: /note="Description of Artificial Sequence: Synthetic polypeptide"
QVQLQESGGGVVQPGRSLRLSCAASGFTFSSYGMHWVRQAPGKGLEWVAVISYDGSNKYYADSVKGRFTISRDNSKNTLYLQMNSLRAEDTAVYYCAKNGANAFDIWGQGTMVTVSSASTKGPSVFPLAPSSKSTSGGTAALGCLVKDYFPEPVTVSWNSGALTSGVHTFPAVLQSSGLYSLSSVVTVPSSSLGTQTYICNVNHKPSNTKVDKRVEPKSCDKTHTCPPCPAPELLGGPSVFLFPPKPKDTLMISRTPEVTCVVVDVSHEDPEVKFNWYVDGVEVHNAKTKPREEQYNSTYRVVSVLTVLHQDWLNGKEYKCKVSNKALPAPIEKTISKAKGQPREPQVYTLPPSREEMTKNQVSLTCLVKGFYPSDIAVEWESNGQPENNYKTTPPVLDSDGSFFLYSKLTVDKSRWQQGNVFSCSVMHEALHNHYTQKSLSLSPGK

SEQ ID NO: 26661 - protein, 451 aa, Artificial Sequence
  source: /note="Description of Artificial Sequence: Synthetic polypeptide"
EVQLVESGAEVKKPGESLKISCKGSGYSFTSYWIGWVRQLPGKGLEWMGIIYPGDSDTRYSPSFQGQVTISADKSTSTAYLQWSSLKASDTAMYYCARRRGSTSSTDFDYWGQGTLVTVSSASTKGPSVFPLAPSSKSTSGGTAALGCLVKDYFPEPVTVSWNSGALTSGVHTFPAVLQSSGLYSLSSVVTVPSSSLGTQTYICNVNHKPSNTKVDKRVEPKSCDKTHTCPPCPAPELLGGPSVFLFPPKPKDTLMISRTPEVTCVVVDVSHEDPEVKFNWYVDGVEVHNAKTKPREEQYNSTYRVVSVLTVLHQDWLNGKEYKCKVSNKALPAPIEKTISKAKGQPREPQVYTLPPSREEMTKNQVSLTCLVKGFYPSDIAVEWESNGQPENNYKTTPPVLDSDGSFFLYSKLTVDKSRWQQGNVFSCSVMHEALHNHYTQKSLSLSPGK

SEQ ID NO: 26662 - protein, 451 aa, Artificial Sequence
  source: /note="Description of Artificial Sequence: Synthetic polypeptide"
QVQLVQSGAEVKKSGESLKISCKGFGYSFTSQWIVWVRQMPGKGLEWMGIIYPGDSDTRYSPSFQGQVTISADRSISTAYLQWSSLKASDNAMYYCARALRGYSSSSFGYWGQGTLVTVSSASTKGPSVFPLAPSSKSTSGGTAALGCLVKDYFPEPVTVSWNSGALTSGVHTFPAVLQSSGLYSLSSVVTVPSSSLGTQTYICNVNHKPSNTKVDKRVEPKSCDKTHTCPPCPAPELLGGPSVFLFPPKPKDTLMISRTPEVTCVVVDVSHEDPEVKFNWYVDGVEVHNAKTKPREEQYNSTYRVVSVLTVLHQDWLNGKEYKCKVSNKALPAPIEKTISKAKGQPREPQVYTLPPSREEMTKNQVSLTCLVKGFYPSDIAVEWESNGQPENNYKTTPPVLDSDGSFFLYSKLTVDKSRWQQGNVFSCSVMHEALHNHYTQKSLSLSPGK

SEQ ID NO: 26663 - protein, 448 aa, Artificial Sequence
  source: /note="Description of Artificial Sequence: Synthetic polypeptide"
EVQLVQSGAEVKKPGASVKVSCKASGYTFSNYYMHWVRQAPGQGLEWMGIINPSGGSTSYAQKFQGRFTVTRDTSTSTVYMELSSLRSEDTAVYYCATRRGQRYFQHWGQGTLVTVSSASTKGPSVFPLAPSSKSTSGGTAALGCLVKDYFPEPVTVSWNSGALTSGVHTFPAVLQSSGLYSLSSVVTVPSSSLGTQTYICNVNHKPSNTKVDKRVEPKSCDKTHTCPPCPAPELLGGPSVFLFPPKPKDTLMISRTPEVTCVVVDVSHEDPEVKFNWYVDGVEVHNAKTKPREEQYNSTYRVVSVLTVLHQDWLNGKEYKCKVSNKALPAPIEKTISKAKGQPREPQVYTLPPSREEMTKNQVSLTCLVKGFYPSDIAVEWESNGQPENNYKTTPPVLDSDGSFFLYSKLTVDKSRWQQGNVFSCSVMHEALHNHYTQKSLSLSPGK

SEQ ID NO: 26664 - protein, 451 aa, Artificial Sequence
  source: /note="Description of Artificial Sequence: Synthetic polypeptide"
QVQLQQSGPGLVKPSQTLSLTCAISGDSVSSNRAAWNWIRQSPSRGLEWLGRTYYRSKWYNDYAVSVKSRISINPDALKNQFSLQLNSVTPEDTAVYYCARDTGWYRFDSWGQGTLVTVSSASTKGPSVFPLAPSSKSTSGGTAALGCLVKDYFPEPVTVSWNSGALTSGVHTFPAVLQSSGLYSLSSVVTVPSSSLGTQTYICNVNHKPSNTKVDKRVEPKSCDKTHTCPPCPAPELLGGPSVFLFPPKPKDTLMISRTPEVTCVVVDVSHEDPEVKFNWYVDGVEVHNAKTKPREEQYNSTYRVVSVLTVLHQDWLNGKEYKCKVSNKALPAPIEKTISKAKGQPREPQVYTLPPSREEMTKNQVSLTCLVKGFYPSDIAVEWESNGQPENNYKTTPPVLDSDGSFFLYSKLTVDKSRWQQGNVFSCSVMHEALHNHYTQKSLSLSPGK

SEQ ID NO: 26665 - protein, 451 aa, Artificial Sequence
  source: /note="Description of Artificial Sequence: Synthetic polypeptide"
EVQLVQSGAEVKKPGESLKISCKGSGYSFTTYWIGWVRQMPGKGLEWMGMIYPGDSDTRYSPSFQGQVTISADKSISTAYLQWSSLKASDTAMYYCVRPLRSGSSYGMDVWGQGTTVTVSSASTKGPSVFPLAPSSKSTSGGTAALGCLVKDYFPEPVTVSWNSGALTSGVHTFPAVLQSSGLYSLSSVVTVPSSSLGTQTYICNVNHKPSNTKVDKRVEPKSCDKTHTCPPCPAPELLGGPSVFLFPPKPKDTLMISRTPEVTCVVVDVSHEDPEVKFNWYVDGVEVHNAKTKPREEQYNSTYRVVSVLTVLHQDWLNGKEYKCKVSNKALPAPIEKTISKAKGQPREPQVYTLPPSREEMTKNQVSLTCLVKGFYPSDIAVEWESNGQPENNYKTTPPVLDSDGSFFLYSKLTVDKSRWQQGNVFSCSVMHEALHNHYTQKSLSLSPGK

SEQ ID NO: 26666 - protein, 453 aa, Artificial Sequence; identical to SEQ ID NO: 26650
  source: /note="Description of Artificial Sequence: Synthetic polypeptide"

SEQ ID NO: 26667 - protein, 451 aa, Artificial Sequence
  source: /note="Description of Artificial Sequence: Synthetic polypeptide"
QVQLVQSGAEVKKPGESLKISCKGSGYSFTNYWIAWVRQMPGKGLEWMGIIYPGDSDTRYSPSFQGQVTISADRSINTAYLQWSSLKASDTAMFYCARRLYGSGRPYFDYWGQGTLVTVSSASTKGPSVFPLAPSSKSTSGGTAALGCLVKDYFPEPVTVSWNSGALTSGVHTFPAVLQSSGLYSLSSVVTVPSSSLGTQTYICNVNHKPSNTKVDKRVEPKSCDKTHTCPPCPAPELLGGPSVFLFPPKPKDTLMISRTPEVTCVVVDVSHEDPEVKFNWYVDGVEVHNAKTKPREEQYNSTYRVVSVLTVLHQDWLNGKEYKCKVSNKALPAPIEKTISKAKGQPREPQVYTLPPSREEMTKNQVSLTCLVKGFYPSDIAVEWESNGQPENNYKTTPPVLDSDGSFFLYSKLTVDKSRWQQGNVFSCSVMHEALHNHYTQKSLSLSPGK

SEQ ID NO: 26668 - protein, 452 aa, Artificial Sequence
  source: /note="Description of Artificial Sequence: Synthetic polypeptide"
EVQLVQSGAEVKKPGESLKISCKGSGYSFTNYWIGWVRQMPGKGLEWMGIIYPGDSDTRYSPSFQGQVTISADKSISTAYLQWSSLKASDTAMYYCARHTQNKNGMNTFDIWGQGTMVTVSSASTKGPSVFPLAPSSKSTSGGTAALGCLVKDYFPEPVTVSWNSGALTSGVHTFPAVLQSSGLYSLSSVVTVPSSSLGTQTYICNVNHKPSNTKVDKRVEPKSCDKTHTCPPCPAPELLGGPSVFLFPPKPKDTLMISRTPEVTCVVVDVSHEDPEVKFNWYVDGVEVHNAKTKPREEQYNSTYRVVSVLTVLHQDWLNGKEYKCKVSNKALPAPIEKTISKAKGQPREPQVYTLPPSREEMTKNQVSLTCLVKGFYPSDIAVEWESNGQPENNYKTTPPVLDSDGSFFLYSKLTVDKSRWQQGNVFSCSVMHEALHNHYTQKSLSLSPGK

SEQ ID NO: 26669 - protein, 446 aa, Artificial Sequence
  source: /note="Description of Artificial Sequence: Synthetic polypeptide"
QVQLQQWGAGLLKPSETLSLTCAVYGASFRGYYWSWIRQPPGKGLEWIGEINHSGSTNYNPSLKSRVTISVDTSKNQFSLKLSSVTAADTAVYYCARGRPDSFDIWGQGTMVTVSSASTKGPSVFPLAPSSKSTSGGTAALGCLVKDYFPEPVTVSWNSGALTSGVHTFPAVLQSSGLYSLSSVVTVPSSSLGTQTYICNVNHKPSNTKVDKRVEPKSCDKTHTCPPCPAPELLGGPSVFLFPPKPKDTLMISRTPEVTCVVVDVSHEDPEVKFNWYVDGVEVHNAKTKPREEQYNSTYRVVSVLTVLHQDWLNGKEYKCKVSNKALPAPIEKTISKAKGQPREPQVYTLPPSREEMTKNQVSLTCLVKGFYPSDIAVEWESNGQPENNYKTTPPVLDSDGSFFLYSKLTVDKSRWQQGNVFSCSVMHEALHNHYTQKSLSLSPGK

SEQ ID NO: 26670 - protein, 453 aa, Artificial Sequence
  source: /note="Description of Artificial Sequence: Synthetic polypeptide"
QVQLVQSGAEVKKPGESLKISCKGSGYSFTNYWIGWVRQMPGKGLEWMGIIYPGDSDTRYSPSFRGQVTISADKSISTAYLQWSSLKASDTAMYYCARLGYSYGYRGPHFDYWGQGTLVTVSSASTKGPSVFPLAPSSKSTSGGTAALGCLVKDYFPEPVTVSWNSGALTSGVHTFPAVLQSSGLYSLSSVVTVPSSSLGTQTYICNVNHKPSNTKVDKRVEPKSCDKTHTCPPCPAPELLGGPSVFLFPPKPKDTLMISRTPEVTCVVVDVSHEDPEVKFNWYVDGVEVHNAKTKPREEQYNSTYRVVSVLTVLHQDWLNGKEYKCKVSNKALPAPIEKTISKAKGQPREPQVYTLPPSREEMTKNQVSLTCLVKGFYPSDIAVEWESNGQPENNYKTTPPVLDSDGSFFLYSKLTVDKSRWQQGNVFSCSVMHEALHNHYTQKSLSLSPGK

SEQ ID NO: 26671 - protein, 451 aa, Artificial Sequence
  source: /note="Description of Artificial Sequence: Synthetic polypeptide"
EVQLVESGGVAVQPGRSLRLSCAASGFSFRDYGMHWVRQAAGKGLEWVAFIWPHGVNRFYADSMEGRFTISRDDSKNMLYLEMNNLRTEDTALYYCTRDQDYVPRKYFDLWGRGTLVTVSSASTKGPSVFPLAPSSKSTSGGTAALGCLVKDYFPEPVTVSWNSGALTSGVHTFPAVLQSSGLYSLSSVVTVPSSSLGTQTYICNVNHKPSNTKVDKRVEPKSCDKTHTCPPCPAPELLGGPSVFLFPPKPKDTLMISRTPEVTCVVVDVSHEDPEVKFNWYVDGVEVHNAKTKPREEQYNSTYRVVSVLTVLHQDWLNGKEYKCKVSNKALPAPIEKTISKAKGQPREPQVYTLPPSREEMTKNQVSLTCLVKGFYPSDIAVEWESNGQPENNYKTTPPVLDSDGSFFLYSKLTVDKSRWQQGNVFSCSVMHEALHNHYTQKSLSLSPGK

SEQ ID NO: 26672 - protein, 453 aa, Artificial Sequence
  source: /note="Description of Artificial Sequence: Synthetic polypeptide"
QVQLVQSGAEVKKPGATVKISCKVSGYTFTDYYMHWVQQAPGKGLEWMGLVDPEDGETIYAEKFQGRVTITADTSTDTAYMELSSLRSDDTAVYYCARAEVMTTINNWYFDLWGRGTLVTVSSASTKGPSVFPLAPSSKSTSGGTAALGCLVKDYFPEPVTVSWNSGALTSGVHTFPAVLQSSGLYSLSSVVTVPSSSLGTQTYICNVNHKPSNTKVDKRVEPKSCDKTHTCPPCPAPELLGGPSVFLFPPKPKDTLMISRTPEVTCVVVDVSHEDPEVKFNWYVDGVEVHNAKTKPREEQYNSTYRVVSVLTVLHQDWLNGKEYKCKVSNKALPAPIEKTISKAKGQPREPQVYTLPPSREEMTKNQVSLTCLVKGFYPSDIAVEWESNGQPENNYKTTPPVLDSDGSFFLYSKLTVDKSRWQQGNVFSCSVMHEALHNHYTQKSLSLSPGK

SEQ ID NO: 26673 - protein, 447 aa, Artificial Sequence
  source: /note="Description of Artificial Sequence: Synthetic polypeptide"
EVQLVESGGGLVKPGGSLGLSCAASGFFFSDYSMSWIRQAPGKGLEWLSNISGSGHSTKYAESMRGRITISRDNAKKSLSLQLNSLRAEDTAVYFCVRGGGYRMDVWGQGTTVTVSSASTKGPSVFPLAPSSKSTSGGTAALGCLVKDYFPEPVTVSWNSGALTSGVHTFPAVLQSSGLYSLSSVVTVPSSSLGTQTYICNVNHKPSNTKVDKRVEPKSCDKTHTCPPCPAPELLGGPSVFLFPPKPKDTLMISRTPEVTCVVVDVSHEDPEVKFNWYVDGVEVHNAKTKPREEQYNSTYRVVSVLTVLHQDWLNGKEYKCKVSNKALPAPIEKTISKAKGQPREPQVYTLPPSREEMTKNQVSLTCLVKGFYPSDIAVEWESNGQPENNYKTTPPVLDSDGSFFLYSKLTVDKSRWQQGNVFSCSVMHEALHNHYTQKSLSLSPGK

SEQ ID NO: 26674 - protein, 448 aa, Artificial Sequence
  source: /note="Description of Artificial Sequence: Synthetic polypeptide"
QVQLVQSGPEVKKPGASVTVSCKASGYSFSSYGISWVRQAPGQGLEWMGRIIPVGGNTLYSQMFQGRVTMTSDTSTSTVYLELSSLRSEDTAVYFCARDGGRWQFDYWGQGTLVTVSSASTKGPSVFPLAPSSKSTSGGTAALGCLVKDYFPEPVTVSWNSGALTSGVHTFPAVLQSSGLYSLSSVVTVPSSSLGTQTYICNVNHKPSNTKVDKRVEPKSCDKTHTCPPCPAPELLGGPSVFLFPPKPKDTLMISRTPEVTCVVVDVSHEDPEVKFNWYVDGVEVHNAKTKPREEQYNSTYRVVSVLTVLHQDWLNGKEYKCKVSNKALPAPIEKTISKAKGQPREPQVYTLPPSREEMTKNQVSLTCLVKGFYPSDIAVEWESNGQPENNYKTTPPVLDSDGSFFLYSKLTVDKSRWQQGNVFSCSVMHEALHNHYTQKSLSLSPGK

SEQ ID NO: 26675 - protein, 450 aa, Artificial Sequence
  source: /note="Description of Artificial Sequence: Synthetic polypeptide"
QVQLVQSGAEVKKPGESLKISCKGSGYSFTSYWIGWVRQMPGKGLEWMGIIYPGDSDTRYSPSFQGQVTISADKSIGTAYLQWSSLKASDTAMYYCARLFRVRGGHFDSWGQGTLVTVSSASTKGPSVFPLAPSSKSTSGGTAALGCLVKDYFPEPVTVSWNSGALTSGVHTFPAVLQSSGLYSLSSVVTVPSSSLGTQTYICNVNHKPSNTKVDKRVEPKSCDKTHTCPPCPAPELLGGPSVFLFPPKPKDTLMISRTPEVTCVVVDVSHEDPEVKFNWYVDGVEVHNAKTKPREEQYNSTYRVVSVLTVLHQDWLNGKEYKCKVSNKALPAPIEKTISKAKGQPREPQVYTLPPSREEMTKNQVSLTCLVKGFYPSDIAVEWESNGQPENNYKTTPPVLDSDGSFFLYSKLTVDKSRWQQGNVFSCSVMHEALHNHYTQKSLSLSPGK

SEQ ID NO: 26676 - protein, 452 aa, Artificial Sequence
  source: /note="Description of Artificial Sequence: Synthetic polypeptide"
EVQLVESGGGVVQPGRSLRLSCAASGFTFSSYGMHWVRQAPGKGLEWVAMIWSDGSNKYYADSVKGRFTISRDNSKNTLYLQMNSLRVEDTAVYYCASNYGSGSYWGGFDYWGQGTLVTVSSASTKGPSVFPLAPSSKSTSGGTAALGCLVKDYFPEPVTVSWNSGALTSGVHTFPAVLQSSGLYSLSSVVTVPSSSLGTQTYICNVNHKPSNTKVDKRVEPKSCDKTHTCPPCPAPELLGGPSVFLFPPKPKDTLMISRTPEVTCVVVDVSHEDPEVKFNWYVDGVEVHNAKTKPREEQYNSTYRVVSVLTVLHQDWLNGKEYKCKVSNKALPAPIEKTISKAKGQPREPQVYTLPPSREEMTKNQVSLTCLVKGFYPSDIAVEWESNGQPENNYKTTPPVLDSDGSFFLYSKLTVDKSRWQQGNVFSCSVMHEALHNHYTQKSLSLSPGK

SEQ ID NO: 26677 - protein, 449 aa, Artificial Sequence
  source: /note="Description of Artificial Sequence: Synthetic polypeptide"
EVQLVESGAEVKKPGSSVKVSCKASGGTFSSYAISWVRQAPGQGLEWMGGIIPIFGTANYAQKFQGKVTITADESTSTAYMELSSLRSEDTAVYYCARLSPRYYGMDVWGQGTTVTVSSASTKGPSVFPLAPSSKSTSGGTAALGCLVKDYFPEPVTVSWNSGALTSGVHTFPAVLQSSGLYSLSSVVTVPSSSLGTQTYICNVNHKPSNTKVDKRVEPKSCDKTHTCPPCPAPELLGGPSVFLFPPKPKDTLMISRTPEVTCVVVDVSHEDPEVKFNWYVDGVEVHNAKTKPREEQYNSTYRVVSVLTVLHQDWLNGKEYKCKVSNKALPAPIEKTISKAKGQPREPQVYTLPPSREEMTKNQVSLTCLVKGFYPSDIAVEWESNGQPENNYKTTPPVLDSDGSFFLYSKLTVDKSRWQQGNVFSCSVMHEALHNHYTQKSLSLSPGK

SEQ ID NO: 26678 - protein, 450 aa, Artificial Sequence
  source: /note="Description of Artificial Sequence: Synthetic polypeptide"
EVQLVESGAEVKKPGSSVKVSCKASGGTFSSYAISWVRQAPGQGLEWMGGIIPIFGTANYAQKFQGRVTITADESTSTAYMELSSLRSEDTAVYYCARGYAATDYGMDVWGQGTTVTVSSASTKGPSVFPLAPSSKSTSGGTAALGCLVKDYFPEPVTVSWNSGALTSGVHTFPAVLQSSGLYSLSSVVTVPSSSLGTQTYICNVNHKPSNTKVDKRVEPKSCDKTHTCPPCPAPELLGGPSVFLFPPKPKDTLMISRTPEVTCVVVDVSHEDPEVKFNWYVDGVEVHNAKTKPREEQYNSTYRVVSVLTVLHQDWLNGKEYKCKVSNKALPAPIEKTISKAKGQPREPQVYTLPPSREEMTKNQVSLTCLVKGFYPSDIAVEWESNGQPENNYKTTPPVLDSDGSFFLYSKLTVDKSRWQQGNVFSCSVMHEALHNHYTQKSLSLSPGK

SEQ ID NO: 26679 - protein, 453 aa, Artificial Sequence
  source: /note="Description of Artificial Sequence: Synthetic polypeptide"
EVQLVETGGGLVQPGGSLRLSCAASGFTFSSYSMNWVRQAPGKGLEWVSFISSSSSTIYYADSVKGRFTIARDNAKNSLYLQMNSLRDEDTAVYYCARPVGTGISLFHAFDIWGQGTMVTVSSASTKGPSVFPLAPSSKSTSGGTAALGCLVKDYFPEPVTVSWNSGALTSGVHTFPAVLQSSGLYSLSSVVTVPSSSLGTQTYICNVNHKPSNTKVDKRVEPKSCDKTHTCPPCPAPELLGGPSVFLFPPKPKDTLMISRTPEVTCVVVDVSHEDPEVKFNWYVDGVEVHNAKTKPREEQYNSTYRVVSVLTVLHQDWLNGKEYKCKVSNKALPAPIEKTISKAKGQPREPQVYTLPPSREEMTKNQVSLTCLVKGFYPSDIAVEWESNGQPENNYKTTPPVLDSDGSFFLYSKLTVDKSRWQQGNVFSCSVMHEALHNHYTQKSLSLSPGK

SEQ ID NO: 26680 - protein, 450 aa, Artificial Sequence
  source: /note="Description of Artificial Sequence: Synthetic polypeptide"
EVQLVESGGGVVQPGRSLRLSCVASEFTFSNYGMHWVRQAPGKGLEWVAVIWYDGSNEDYADSVKGRFTISRDNSKNTVYLHMNSLRAEDTAVYFCTRGQYSSTWFLDYWGQGTLVTVSSASTKGPSVFPLAPSSKSTSGGTAALGCLVKDYFPEPVTVSWNSGALTSGVHTFPAVLQSSGLYSLSSVVTVPSSSLGTQTYICNVNHKPSNTKVDKRVEPKSCDKTHTCPPCPAPELLGGPSVFLFPPKPKDTLMISRTPEVTCVVVDVSHEDPEVKFNWYVDGVEVHNAKTKPREEQYNSTYRVVSVLTVLHQDWLNGKEYKCKVSNKALPAPIEKTISKAKGQPREPQVYTLPPSREEMTKNQVSLTCLVKGFYPSDIAVEWESNGQPENNYKTTPPVLDSDGSFFLYSKLTVDKSRWQQGNVFSCSVMHEALHNHYTQKSLSLSPGK

SEQ ID NO: 26681 - protein, 446 aa, Artificial Sequence
  source: /note="Description of Artificial Sequence: Synthetic polypeptide"
QLQLQESGPGLVKPSETLSLTCAVSGYSITSGYYWGWVRQPPGKGLEWIGSIYHTGSTYYNPSLKSRVTISVDTSKNQFSLKLNSLTAADTAVYFCASQSPAFDFWGQGTMVTVSSASTKGPSVFPLAPSSKSTSGGTAALGCLVKDYFPEPVTVSWNSGALTSGVHTFPAVLQSSGLYSLSSVVTVPSSSLGTQTYICNVNHKPSNTKVDKRVEPKSCDKTHTCPPCPAPELLGGPSVFLFPPKPKDTLMISRTPEVTCVVVDVSHEDPEVKFNWYVDGVEVHNAKTKPREEQYNSTYRVVSVLTVLHQDWLNGKEYKCKVSNKALPAPIEKTISKAKGQPREPQVYTLPPSREEMTKNQVSLTCLVKGFYPSDIAVEWESNGQPENNYKTTPPVLDSDGSFFLYSKLTVDKSRWQQGNVFSCSVMHEALHNHYTQKSLSLSPGK

SEQ ID NO: 26682 - protein, 445 aa, Artificial Sequence
  source: /note="Description of Artificial Sequence: Synthetic polypeptide"
EVQLVESGPGLVKPSETLSLTCTVSGGSISSYYWSWIRQPPGKGLEWIGYIYYTGTTNYNPSLNSRVTISADTSKNQFSLKLSSVTAADTAVYYCARGGQTAGVWGKGTTVTVSSASTKGPSVFPLAPSSKSTSGGTAALGCLVKDYFPEPVTVSWNSGALTSGVHTFPAVLQSSGLYSLSSVVTVPSSSLGTQTYICNVNHKPSNTKVDKRVEPKSCDKTHTCPPCPAPELLGGPSVFLFPPKPKDTLMISRTPEVTCVVVDVSHEDPEVKFNWYVDGVEVHNAKTKPREEQYNSTYRVVSVLTVLHQDWLNGKEYKCKVSNKALPAPIEKTISKAKGQPREPQVYTLPPSREEMTKNQVSLTCLVKGFYPSDIAVEWESNGQPENNYKTTPPVLDSDGSFFLYSKLTVDKSRWQQGNVFSCSVMHEALHNHYTQKSLSLSPGK

SEQ ID NO: 26683 - protein, 445 aa, Artificial Sequence
  source: /note="Description of Artificial Sequence: Synthetic polypeptide"
EVQLVETGGGLVQPGGSLRLSCAASGLTFSSYAMSWVRQAPGKGLEWVSALSGSTTFYADSVKGRFTISRDNAKNTLYLQMNSLRAEDTAVYYCARGNYYGMDVWGQGTTVTVSSASTKGPSVFPLAPSSKSTSGGTAALGCLVKDYFPEPVTVSWNSGALTSGVHTFPAVLQSSGLYSLSSVVTVPSSSLGTQTYICNVNHKPSNTKVDKRVEPKSCDKTHTCPPCPAPELLGGPSVFLFPPKPKDTLMISRTPEVTCVVVDVSHEDPEVKFNWYVDGVEVHNAKTKPREEQYNSTYRVVSVLTVLHQDWLNGKEYKCKVSNKALPAPIEKTISKAKGQPREPQVYTLPPSREEMTKNQVSLTCLVKGFYPSDIAVEWESNGQPENNYKTTPPVLDSDGSFFLYSKLTVDKSRWQQGNVFSCSVMHEALHNHYTQKSLSLSPGK

SEQ ID NO: 26684 - protein, 451 aa, Artificial Sequence; identical to SEQ ID NO: 26648
  source: /note="Description of Artificial Sequence: Synthetic polypeptide"

SEQ ID NO: 26685 - protein, 457 aa, Artificial Sequence
  source: /note="Description of Artificial Sequence: Synthetic polypeptide"
QVQLVQSGAEVKKPGESLKISCKGSGYSFTSYWIGWVRQMPGKGLEWMGIIYPGDSDTRYSPSFQGQVTISADKSISTAYLQWSSLKASDTAMYYCARWGGVCSSTSCPNRDAFDIWGQGTMVTVSSASTKGPSVFPLAPSSKSTSGGTAALGCLVKDYFPEPVTVSWNSGALTSGVHTFPAVLQSSGLYSLSSVVTVPSSSLGTQTYICNVNHKPSNTKVDKRVEPKSCDKTHTCPPCPAPELLGGPSVFLFPPKPKDTLMISRTPEVTCVVVDVSHEDPEVKFNWYVDGVEVHNAKTKPREEQYNSTYRVVSVLTVLHQDWLNGKEYKCKVSNKALPAPIEKTISKAKGQPREPQVYTLPPSREEMTKNQVSLTCLVKGFYPSDIAVEWESNGQPENNYKTTPPVLDSDGSFFLYSKLTVDKSRWQQGNVFSCSVMHEALHNHYTQKSLSLSPGK

SEQ ID NO: 26686 - protein, 446 aa, Artificial Sequence
  source: /note="Description of Artificial Sequence: Synthetic polypeptide"
EVQLVESGGGLVQPGRSLRLSCAASGFTFDDYAMHWVRQAPGKGLEWVSGISWNSGSIGYADSVKGRFTISRDNAKNSLYLQMNSLRAEDSAVYYCARGGQRFDFWGQGTLVTVSSASTKGPSVFPLAPSSKSTSGGTAALGCLVKDYFPEPVTVSWNSGALTSGVHTFPAVLQSSGLYSLSSVVTVPSSSLGTQTYICNVNHKPSNTKVDKRVEPKSCDKTHTCPPCPAPELLGGPSVFLFPPKPKDTLMISRTPEVTCVVVDVSHEDPEVKFNWYVDGVEVHNAKTKPREEQYNSTYRVVSVLTVLHQDWLNGKEYKCKVSNKALPAPIEKTISKAKGQPREPQVYTLPPSREEMTKNQVSLTCLVKGFYPSDIAVEWESNGQPENNYKTTPPVLDSDGSFFLYSKLTVDKSRWQQGNVFSCSVMHEALHNHYTQKSLSLSPGK

SEQ ID NO: 26687 - protein, 451 aa, Artificial Sequence
  source: /note="Description of Artificial Sequence: Synthetic polypeptide"
QVQLVQSGAEVKNPGESLKISCKGSGYTFTSYWIGWVRQMPGKGLEWMGSIYPGDSDTRYSPSFQGQVTISVDKSISTAYLQWSSLKASDTAMYYCARQYRAGSTTRFDPWGQGTLVTVSSASTKGPSVFPLAPSSKSTSGGTAALGCLVKDYFPEPVTVSWNSGALTSGVHTFPAVLQSSGLYSLSSVVTVPSSSLGTQTYICNVNHKPSNTKVDKRVEPKSCDKTHTCPPCPAPELLGGPSVFLFPPKPKDTLMISRTPEVTCVVVDVSHEDPEVKFNWYVDGVEVHNAKTKPREEQYNSTYRVVSVLTVLHQDWLNGKEYKCKVSNKALPAPIEKTISKAKGQPREPQVYTLPPSREEMTKNQVSLTCLVKGFYPSDIAVEWESNGQPENNYKTTPPVLDSDGSFFLYSKLTVDKSRWQQGNVFSCSVMHEALHNHYTQKSLSLSPGK

SEQ ID NO: 26688 - protein, 216 aa, Artificial Sequence
  source: /note="Description of Artificial Sequence: Synthetic polypeptide"
SYVLTQPPSVSVAPGQTARITCGGNNIGSKSVHWYQQKPGQSPVLVMYQDRRRPSGIPERFSGSNSGHTATLTISGTQAMDEADYYCQAWDSSTGVFGTGTQLTVLSAAAGQPKAAPSVTLFPPSSEELQANKATLVCLISDFYPGAVTVAWKADSSPVKAGVETTTPSKQSNNKYAASSYLSLTPEQWKSHRSYSCQVTHEGSTVEKTVAPTECS

SEQ ID NO: 26689 - protein, 220 aa, Artificial Sequence
  source: /note="Description of Artificial Sequence: Synthetic polypeptide"
SYVLTQPPSASGTPGQRVTISCSGSSSNIGSNNVSWYQQLPGTAPKLLIYSNNQRPSGVPDRFSGSKSGTSASLAISGLQSEDEADYYCAAWDDSLNGWVFGGGTKLTVLGAAAGQPKAAPSVTLFPPSSEELQANKATLVCLISDFYPGAVTVAWKADSSPVKAGVETTTPSKQSNNKYAASSYLSLTPEQWKSHRSYSCQVTHEGSTVEKTVAPTECS

SEQ ID NO: 26690 - protein, 221 aa, Artificial Sequence
  source: /note="Description of Artificial Sequence: Synthetic polypeptide"
QSALTQPRSVPGSPGQSVTISCTGTSSDVGGYNYVSWYQQHPGKAPKLMIYDVSKRPSGVPDRFSGSKSGNTASLTVSGLQAEDEADYYCSSYAGSNNFVVFGGGTKLTVLGAAAGQPKAAPSVTLFPPSSEELQANKATLVCLISDFYPGAVTVAWKADSSPVKAGVETTTPSKQSNNKYAASSYLSLTPEQWKSHRSYSCQVTHEGSTVEKTVAPTECS

SEQ ID NO: 26691 - protein, 213 aa, Artificial Sequence
  source: /note="Description of Artificial Sequence: Synthetic polypeptide"
DIQLTQSPSSVSASVGDRVTITCRASQGISNWLAWYQQKPGKAPELLIYAASSLQSGVPPRFSGSASGTDFTLTISSLQPEDFATYYCQQSKNFPYTFGQGTKVEIKRAAAPSVFIFPPSDEQLKSGTASVVCLLNNFYPREAKVQWKVDNALQSGNSQESVTEQDSKDSTYSLSSTLTLSKADYEKHKVYACEVTHQGLSSPVTKSFNRGEC

SEQ ID NO: 26692 - protein, 220 aa, Artificial Sequence
  source: /note="Description of Artificial Sequence: Synthetic polypeptide"
QSALTQPASVSGSPGQSITISCTGTNSDVGGYNYVSWYQQHPGKAPKLLIYDVTNRPSGVSNRFSASKSGNTASLTISGLQAEDEADYYCSSFTSSSTRVFGGGTKLTVLGAAAGQPKAAPSVTLFPPSSEELQANKATLVCLISDFYPGAVTVAWKADSSPVKAGVETTTPSKQSNNKYAASSYLSLTPEQWKSHRSYSCQVTHEGSTVEKTVAPTECS

SEQ ID NO: 26693 - protein, 220 aa, Artificial Sequence
  source: /note="Description of Artificial Sequence: Synthetic polypeptide"
QSALTQPASVSGSPGQSITISCTGTSSDVGGYNLVSWYQQHPGKAPKLMIYEGSKRPSGVSNRFFGSKSGDTASLTISGLQAEDEADYYCSSYTTSSTHVFGTGTKVTVLGAAAGQPKAAPSVTLFPPSSEELQANKATLVCLISDFYPGAVTVAWKADSSPVKAGVETTTPSKQSNNKYAASSYLSLTPEQWKSHRSYSCQVTHEGSTVEKTVAPTECS

SEQ ID NO: 26694 - protein, 220 aa, Artificial Sequence
  source: /note="Description of Artificial Sequence: Synthetic polypeptide"
QSALTQPRSVSGSPGQSVTISCTGTSSDVGGYNYVSWYQQHPGKAPKLMIYGGSERPSGVSNRFSGSKSGNTASLTISGVQAEDEADYYCSSYTSSGTLLFGGGTQLTVLGAAAGQPKAAPSVTLFPPSSEELQANKATLVCLISDFYPGAVTVAWKADSSPVKAGVETTTPSKQSNNKYAASSYLSLTPEQWKSHRSYSCQVTHEGSTVEKTVAPTECS

SEQ ID NO: 26695 - protein, 213 aa, Artificial Sequence
  source: /note="Description of Artificial Sequence: Synthetic polypeptide"
DIQLTQSPSTLSASVGDRVTITCRASQSISSYLNWYQQKPGKAPKLLIYAASSLQSGVPSRFSGSGSGTDFTLTISSLQPEDFATYYCQQSYSTPFTFGPGTKVDIKRAAAPSVFIFPPSDEQLKSGTASVVCLLNNFYPREAKVQWKVDNALQSGNSQESVTEQDSKDSTYSLSSTLTLSKADYEKHKVYACEVTHQGLSSPVTKSFNRGEC

SEQ ID NO: 26696 - protein, 218 aa, Artificial Sequence
  source: /note="Description of Artificial Sequence: Synthetic polypeptide"
QSVLTQPPSVSVAPGQTARITCGGNNIGSKYVHWYQQKPGQAPVLVVYDDSDRPSGIPERFSGSNSGNTATLTISRVEAGDEADFYCQVWDGSSDPVVFGGGTKLTVLGAAAGQPKAAPSVTLFPPSSEELQANKATLVCLISDFYPGAVTVAWKADSSPVKAGVETTTPSKQSNNKYAASSYLSLTPEQWKSHRSYSCQVTHEGSTVEKTVAPTECS

SEQ ID NO: 26697 - protein, 213 aa, Artificial Sequence
  source: /note="Description of Artificial Sequence: Synthetic polypeptide"
DIQLTQSPSTLSASVGDRVTITCRASQSISSWLAWYQQKPGKAPKLLIYKASSLETGVPSRFSGSGSGTDFTLTISSLQPEDFATYYCQQANSFPLTFGGGTKVDIKRAAAPSVFIFPPSDEQLKSGTASVVCLLNNFYPREAKVQWKVDNALQSGNSQESVTEQDSKDSTYSLSSTLTLSKADYEKHKVYACEVTHQGLSSPVTKSFNRGEC

SEQ ID NO: 26698 - protein, 221 aa, Artificial Sequence
  source: /note="Description of Artificial Sequence: Synthetic polypeptide"
QSVLTQPPSVSGAPGQRVTISCTGSSSNIGTGYDVHWYQQLPGTAPKLLIYGNNNRPSGVPDRFSGSKSGTSASLAITGLQAEDEADYYCATWDDSLNGWVFGGGTKLTVPGAAAGQPKAAPSVTLFPPSSEELQANKATLVCLISDFYPGAVTVAWKADSSPVKAGVETTTPSKQSNNKYAASSYLSLTPEQWKSHRSYSCQVTHEGSTVEKTVAPTECS

SEQ ID NO: 26699 - protein, 216 aa, Artificial Sequence
  source: /note="Description of Artificial Sequence: Synthetic polypeptide"
QSVLTQPPSVSVAPGQTARITCGGYNIGRKSVHWYQQKPGLAPVLVVYDNSDRPSGIPARFSGSNSGNTATLTISGTQAMDEADYYCQAWDRGTAVFGTGTKVTVLGAAAGQPKAAPSVTLFPPSSEELQANKATLVCLISDFYPGAVTVAWKADSSPVKAGVETTTPSKQSNNKYAASSYLSLTPEQWKSHRSYSCQVTHEGSTVEKTVAPTECS

SEQ ID NO: 26700 - protein, 220 aa, Artificial Sequence
  source: /note="Description of Artificial Sequence: Synthetic polypeptide"
SYVLTQPPSASGTPGQRVTISCSGSSSNIGKFYVYWYQQFPGAAPKLLIYSNNQRPSGVPDRFSGSKSGTSASLAISGLQSEDEADYYCAAWDGSLNGYVFGTGTKVTVLGAAAGQPKAAPSVTLFPPSSEELQANKATLVCLISDFYPGAVTVAWKADSSPVKAGVETTTPSKQSNNKYAASSYLSLTPEQWKSHRSYSCQVTHEGSTVEKTVAPTECS

SEQ ID NO: 26701 - protein, 218 aa, Artificial Sequence
  source: /note="Description of Artificial Sequence: Synthetic polypeptide"
SSELTQDPAESVALGQTVKITCQGDSLRRYYASWYQQKPGQAPVLVIYGKNNRPSGIPDRFSGSRSGNTASLTITGAQAEDEAVYYCNSRDSSGNSVVFGGGTKLTVLGAAAGQPKAAPSVTLFPPSSEELQANKATLVCLISDFYPGAVTVAWKADSSPVKAGVETTTPSKQSNNKYAASSYLSLTPEQWKSHRSYSCQVTHEGSTVEKTVAPTECS

SEQ ID NO: 26702 - protein, 222 aa, Artificial Sequence
  source: /note="Description of Artificial Sequence: Synthetic polypeptide"
QSALTQPRSVSGSPGQSVTISCTGTSSDVGGYNYVSWYQQHPGKAPKLMIYDVSNRPSGVSNRFSGSKSGNTASLTISGLQAEDEAEFHCSSYRSSGASPVVFGGGTKLTVLGAAAGQPKAAPSVTLFPPSSEELQANKATLVCLISDFYPGAVTVAWKADSSPVKAGVETTTPSKQSNNKYAASSYLSLTPEQWKSHRSYSCQVTHEGSTVEKTVAPTECS

SEQ ID NO: 26703 - protein, 220 aa, Artificial Sequence
  source: /note="Description of Artificial Sequence: Synthetic polypeptide"
QSALTQPPSASGSPGQSVTISCTGTSSDVGGYNYVSWYQQLPGKAPKLLIYDVNNRPSGVSNRFSGSKSGNTASLTISGLQAEDEAEYYCGSSVGSRLRIFGGGTKLTVLGAAAGQPKAAPSVTLFPPSSEELQANKATLVCLISDFYPGAVTVAWKADSSPVKAGVETTTPSKQSNNKYAASSYLSLTPEQWKSHRSYSCQVTHEGSTVEKTVAPTECS

SEQ ID NO: 26704 - protein, 218 aa, Artificial Sequence
  source: /note="Description of Artificial Sequence: Synthetic polypeptide"
DVVMTQSPLSLPVTPGEPASISCRSSQSLRHRNGNNYLDWYLQKPGQSPQLLIYLGSNRASGVPDRFSGSGSGTDFTLKISRVEAEDVGIYYCMQALQTPLTFGGGTKVEIKRAAAPSVFIFPPSDEQLKSGTASVVCLLNNFYPREAKVQWKVDNALQSGNSQESVTEQDSKDSTYSLSSTLTLSKADYEKHKVYACEVTHQGLSSPVTKSFNRGEC

SEQ ID NO: 26705 - protein, 120 aa, Artificial Sequence
  source: /note="Description of Artificial Sequence: Synthetic polypeptide"
EVQLLESGGGLVQPGGSLRLSCAASGFTLSRFAMSWVRQAPGRGLEWVASINNGNNPYYARSVQYRFTVSRDVSQNTVSLQMNNLRAEDSATYFCAKDHPSSGWPTFDSWGPGTLVTVSS

SEQ ID NO: 26706 - protein, 120 aa, Artificial Sequence
  source: /note="Description of Artificial Sequence: Synthetic polypeptide"
EVQLVESGGGLVQPGGSLRLSCAASGFTLSRFAMSWVRQAPGRGLEWVASINNGNNPYYARSVQYRFTVSRDVSQNTVSLQMNNLRAEDSATYFCAKDHPSSGWPTFDSWGPGTLVTVSS

SEQ ID NO: 26707 - protein, 230 aa, Artificial Sequence
  source: /note="Description of Artificial Sequence: Synthetic polypeptide"
EVQLVESGGGLVQPGGSLRLSCAASGFTLSRFAMSWVRQAPGRGLEWVASINNGNNPYYARSVQYRFTVSRDVSQNTVSLQMNNLRAEDSATYFCAKDHPSSGWPTFDSWGPGTLVTVSSASTKGPSVFPLAPSSKSTSGGTAALGCLVKDYFPEPVTVSWNSGALTSGVHTFPAVLQSSGLYSLSSVVTVPSSSLGTQTYICNVNHKPSNTKVDKRVEPKSCDKTHTCP

SEQ ID NO: 26708 - protein, 230 aa, Artificial Sequence
  source: /note="Description of Artificial Sequence: Synthetic polypeptide"
EVQLVESGGGLVQPGGSLRLSCAASGFTLSRFAMSWVRQAPGRGLEWVASINSGNNPYYARSVQYRFTVSRDVSQNTVSLQMNNLRAEDSATYFCAKDHPSSGWPTFDSWGPGTLVTVSSCSTKGPSVFPLAPSSKSTSGGTAALGCLVKDYFPEPVTVSWNSGALTSGVHTFPAVLQSSGLYSLSSVVTVPSSSLGTQTYICNVNHKPSNTKVDKKVEPKSCDKTHTCP

SEQ ID NO: 26709 - protein, 110 aa, Artificial Sequence
  source: /note="Description of Artificial Sequence: Synthetic polypeptide"
ASTKGPSVFPLAPSSKSTSGGTAALGCLVKDYFPEPVTVSWNSGALTSGVHTFPAVLQSSGLYSLSSVVTVPSSSLGTQTYICNVNHKPSNTKVDKKVEPKSCDKTHTCP

SEQ ID NO: 26710 - protein, 120 aa, Artificial Sequence
  source: /note="Description of Artificial Sequence: Synthetic polypeptide"
EVQLVESGGGLVQPGGSLRLSCAASGFTLSRFAMSWVRQAPGRGLEWVASINSGNNPYYARSVQYRFTVSRDVSQNTVSLQMNNLRAEDSATYFCAKDHPSSGWPTFDSWGPGTLVTVSS

SEQ ID NO: 26711 - protein, 113 aa, Artificial Sequence
  source: /note="Description of Artificial Sequence: Synthetic polypeptide"
DVVMTQTPLSLPVSLGDQASISCRSSQSLVHINGNTYLHWYLQKPGQSPKLLIYRVSNRFSGVPDRFSGSGSGTDFTLKISRVEAEDLGVYFCSQSTHVPWTFGGGTKLELKR

SEQ ID NO: 26712 - protein, 112 aa, Artificial Sequence
  source: /note="Description of Artificial Sequence: Synthetic polypeptide"
  MOD_RES (5)..(6): Any amino acid
  MOD_RES (33)..(33): Any amino acid
  MOD_RES (40)..(40): Any amino acid
  MOD_RES (91)..(91): Any amino acid
  MOD_RES (94)..(94): Any amino acid
  MOD_RES (108)..(108): Any amino acid
SAQIXXTQSPSSLSASLGERVSLTCRASQDIGXSLNWLQXEPDGTIKRLIYATSSLDSGVPKRFSGSRSGSDYSLTISSLESEDFVDYYCXQYXSSPFTFGSGTKLEXKRAA

SEQ ID NO: 26713 - protein, 112 aa, Artificial Sequence; identical to SEQ ID NO: 26598
  source: /note="Description of Artificial Sequence: Synthetic polypeptide"

SEQ ID NO: 26714 - protein, 112 aa, Artificial Sequence; identical to SEQ ID NO: 26598
  source: /note="Description of Artificial Sequence: Synthetic polypeptide"

SEQ ID NO: 26715 - protein, 108 aa, Artificial Sequence
  source: /note="Description of Artificial Sequence: Synthetic polypeptide"
DIVMTQSHKFMSTSVGDRVIITCKASQDVNTALAWYQQKPGQSPKLLIYSASYRYTGVPDRFTGSGSGTDFTFTISSVQAEDLAVYYCQQHYSTPPYTFGGGTKLEIK

SEQ ID NO: 26716 - protein, 106 aa, Artificial Sequence
  source: /note="Description of Artificial Sequence: Synthetic polypeptide"
QIVLTQSPAIMSASPGEKVTMTCSASSSVSYMYWYQQKPGSSPRVLIYDTSNLASGVPVRFSGSGSGTSYSLTISRMEAEDAATYYCQQWNGYPPTFGAGTKLEVK

SEQ ID NO: 26717 - protein, 106 aa, Artificial Sequence
  source: /note="Description of Artificial Sequence: Synthetic polypeptide"
QIVLTQSPAIMSASPGEEGTMTCSASSSVRYMYWYRQKPGSSPRLLIYDTSNLASGVPVRFSGSGSGTSYSLTISRMEAEDAATYYCQQWSSYPPTFGGGTKLEMK

SEQ ID NO: 26718 - protein, 108 aa, Artificial Sequence
  source: /note="Description of Artificial Sequence: Synthetic polypeptide"
DIVMTQSQKFMSTSVGDRVTITCKASQDVNTALAWYQQKPGQSPKLLIYSASYRYTGVPSRFSGSGSGTDFTFTISSVQAEDLAVYYCQQHYSTPPYTFGGGTKLEIK

SEQ ID NO: 26719 - protein, 106 aa, Artificial Sequence
  source: /note="Description of Artificial Sequence: Synthetic polypeptide"
EIVLTQSPATMSASPGERVTMSCSASSSVSYMYWYQQKPGQSPRVLIYDTSNLASGVPSRFSGSGSGTSYSLTISSMEPEDAATYYCQQWNGYPPTFGGGTKLEVK

SEQ ID NO: 26720 - protein, 106 aa, Artificial Sequence
  source: /note="Description of Artificial Sequence: Synthetic polypeptide"
EIVLTQSPGTMSASPGERGTMSCSASSSVRYMYWYRQKPGQSPRLLIYDTSNLASGVPARFSGSGSGTSYSLTISRMEAEDAATYYCQQWSSYPPTFGGGTKLEMK

SEQ ID NO: 26721 - protein, 106 aa, Artificial Sequence
  source: /note="Description of Artificial Sequence: Synthetic polypeptide"
QIVLSQSPAILSASPGEKVTMTCRASSSVNYMHWYQQKPGSSPKPWISATSNLASGVPARFSGSGSGTSYSLTISRVEAEDAATYYCQQWSSNPPTFGGGTMLEIR

SEQ ID NO: 26722 - protein, 106 aa, Artificial Sequence
  source: /note="Description of Artificial Sequence: Synthetic polypeptide"
DIVLSQSPAILSASPGEKVTMTCRASSSVSYMHWYQQKPGSSPKPWIYATSNLASGVPARFSGSGSGTSYSLTISRVEAEDAATYYCQQWSSNPPTFGGGTKLEIK

SEQ ID NO: 26723 - protein, 106 aa, Artificial Sequence
  source: /note="Description of Artificial Sequence: Synthetic polypeptide"
DIVLSQSPAILSASPGEKVTMTCRASSSVNYMHWYQQKPGSSPKPWISATSNLASGVPARFSGSGSGTSYSLTISRVEAEDAATYYCQQWSSNPPTFGGGTMLEIK

SEQ ID NO: 26724 - protein, 112 aa, Artificial Sequence; identical to SEQ ID NO: 26598
  source: /note="Description of Artificial Sequence: Synthetic polypeptide"

SEQ ID NO: 26725 - protein, 111 aa, Artificial Sequence
  source: /note="Description of Artificial Sequence: Synthetic polypeptide"
QPVLTQSPSASASLGASVKLTCTLDSEHSRYTIAWHQQQPEKGPRYLMKVKSDGSHSKGDGITDRFSGSSSGAERYLTISSLQSEDEADYYCQTWGPGIRVFGGGTKLTVL

SEQ ID NO: 26726 - protein, 112 aa, Artificial Sequence
  source: /note="Description of Artificial Sequence: Synthetic polypeptide"
QLVLTQSPSASASLGASVKLTCTLSSGHSTYAIAWHQQQPLRGPRFLMKVNSDGSHTKGDGIPDRFSGSSSGAERYLSISSLQSEDESDYYCQTWGPGIRVFGGGTKLTVLG

SEQ ID NO: 26727 - protein, 120 aa, Artificial Sequence
  source: /note="Description of Artificial Sequence: Synthetic polypeptide"
QLVLTQSPSASASLGASVKLTCTLSSGHSNYAIAWHQQQPGKGPRYLMKVNRDGSHIRGDGIPDRFSGSTSGAERYLTISSLQSEDEADYYCQTWGAGIRVFGGGTKLTVLGQPKAAPSV

SEQ ID NO: 26728 - protein, 120 aa, Artificial Sequence
  source: /note="Description of Artificial Sequence: Synthetic polypeptide"
QLVLTQSPSASASLGASVKLTCTLSSGHSTYAIAWHQQQPLRGPRFLMKVNSDGSHTKGDGIPDRFSGSSSGAERYLSISSLQSEDESDYYCQTWGPGIRVFGGGTKLTVLGQPKAAPSV

SEQ ID NO: 26729 - protein, 108 aa, Artificial Sequence
  source: /note="Description of Artificial Sequence: Synthetic polypeptide"
DILLTQSPAILSVSPGERVSFSCRASQSIGTSIHWYQQRTNGSPRLLIKYASESISGIPSRFSGSGSGTDFTLSINSVESEDIADYYCQQSNRWPFTFGSGTKLEIKR

SEQ ID NO: 26730 - protein, 107 aa, Artificial Sequence
  source: /note="Description of Artificial Sequence: Synthetic polypeptide"
QNVLTQSPAIMSASPGEKVTMTCSASSSVSYMHWYQQKSGTSPKRWIYDTSKLASGVPARFSGSGSGTSYSLTISSMEAEDAATYYCQQWSSNPLTFGAGTKLELKR

SEQ ID NO: 26731 - protein, 108 aa, Artificial Sequence; identical to SEQ ID NO: 26729
  source: /note="Description of Artificial Sequence: Synthetic polypeptide"

SEQ ID NO: 26732 - protein, 108 aa, Artificial Sequence
  source: /note="Description of Artificial Sequence: Synthetic polypeptide"
ETTLTQSPGTLSLSPGERATLSCRASQTISNNFVAWYQQKPGQAPRLLIYGASTRATGIPDRFSGSGSGTDFTLTISSLEPEDFAVYYCQQYGSSPYTFGQGTKVDIK

SEQ ID NO: 26733 - protein, 108 aa, Artificial Sequence
  source: /note="Description of Artificial Sequence: Synthetic polypeptide"
EIVLTQSPGTLSLSPGERATLSCRASQTISNNFVAWYQQKPGQAPRLLIYGASTRATGIPDRFSGSGSGTDFTLTISRLEPEDFAVYYCQQYGSSPYTFGQGTKLEIK

SEQ ID NO: 26734 - protein, 220 aa, Artificial Sequence
  source: /note="Description of Artificial Sequence: Synthetic polypeptide"
QSALTQPRSVSGSPGQSITISCTGTSSDVGSYNLVSWYQQHPGKAPKLMIYEVSKRPSGVSNRFSGSKSGNTASLTISGLQAEDEADYYCCSYAGSSWVFGTGTKVTVLKLTVLGQPKAAPSVTLFPPSSEELQANKATLVCLISDFYPGAVTVAWKADSSPVKAGVETTTPSKQSNNKYAASSYLSLTPEQWKSHRSYSCQVTHEGSTVEKTVAPTECS

SEQ ID NO: 26735 - protein, 215 aa, Artificial Sequence
  source: /note="Description of Artificial Sequence: Synthetic polypeptide"
STDIQMTQSPSTLSASVGDRVTITCRASQSISSWLAWYQQKPGKAPKLLIYKASSLESGVPSRFSGSGSGTEFTLTISSLQPDDFATYYCQQYNSYPLTFGGGTKLEIKRAAAPSVFIFPPSDEQLKSGTASVVCLLNNFYPREAKVQWKVDNALQSGNSQESVTEQDSKDSTYSLSSTLTLSKADYEKHKVYACEVTHQGLSSPVTKSFNRGEC

SEQ ID NO: 26736 - protein, 215 aa, Artificial Sequence
  source: /note="Description of Artificial Sequence: Synthetic polypeptide"
STEIVLTQSPATLSLSPGERATLSCRASQSVSGYLGWYQQKPGQAPRLLIYGASSRATGIPDRFSGSGSGTDFTLTISRLEPEDFAVYYCQQYGSSPLTFGGGTKLEIKRAAAPSVFIFPPSDEQLKSGTASVVCLLNNFYPREAKVQWKVDNALQSGNSQESVTEQDSKDSTYSLSSTLTLSKADYEKHKVYACEVTHQGLSSPVTKSFNRGEC

SEQ ID NO: 26737 - protein, 220 aa, Artificial Sequence
  source: /note="Description of Artificial Sequence: Synthetic polypeptide"
QSALTQPPSASGSPGQSVTISCTGTSSDVGGYNYVSWYQQHPGKAPKLMIYEVSKRPSGVPDRFSGSKSGNTASLTVSGLQAEDEADYYCSSYAGSNNLVFGGGTKLTVLGAAAGQPKAAPSVTLFPPSSEELQANKATLVCLISDFYPGAVTVAWKADSSPVKAGVETTTPSKQSNNKYAASSYLSLTPEQWKSHRSYSCQVTHEGSTVEKTVAPTECS

SEQ ID NO: 26738 - protein, 216 aa, Artificial Sequence
  source: /note="Description of Artificial Sequence: Synthetic polypeptide"
QSVLTQPPSLSVSPGQTASISCSGDKLGDKYVSWYQQRPGQSPVLVIYHDTKRPSGIPERFSGTNSGNTATLTISGTQILDEADYYCQVWDRSTVVFGGGTQLTVLSAAAGQPKAAPSVTLFPPSSEELQANKATLVCLISDFYPGAVTVAWKADSSPVKAGVETTTPSKQSNNKYAASSYLSLTPEQWKSHRSYSCQVTHEGSTVEKTVAPTECS

SEQ ID NO: 26739 - protein, 214 aa, Artificial Sequence
  source: /note="Description of Artificial Sequence: Synthetic polypeptide"
EIVLTQSPGTLSLSPGERATLSCRASQSVSSSYLAWYQQKPGQAPRLLIYGASSRATGIPDRFSGSGSGTDFTLTISSLEPEDFAVYYCQQYGSSSITFGQGTRLEIKRAAAPSVFIFPPSDEQLKSGTASVVCLLNNFYPREAKVQWKVDNALQSGNSQESVTEQDSKDSTYSLSSTLTLSKADYEKHKVYACEVTHQGLSSPVTKSFNRGEC

SEQ ID NO: 26740 - protein, 219 aa, Artificial Sequence
  source: /note="Description of Artificial Sequence: Synthetic polypeptide"
DIQLTQSPDSLAVSLGERATINCKSSQSLLYTSNNKNFLAWYQQKPGQPPKLLIYWVSTRDSGVPDRFSGSGSGTDFTLTISSLQAEDVAVYYCQQYYTTPYTFGQGTKVEIKRAAAPSVFIFPPSDEQLKSGTASVVCLLNNFYPREAKVQWKVDNALQSGNSQESVTEQDSKDSTYSLSSTLTLSKADYEKHKVYACEVTHQGLSSPVTKSFNRGEC

SEQ ID NO: 26741 - protein, 221 aa, Artificial Sequence
  source: /note="Description of Artificial Sequence: Synthetic polypeptide"
QSVLTQPPSVSGAPGQRVTISCTGSSSNIGAGYDVHWYQQLPGTAPKLLIYGNSNRPSGVPDRFSGSKSGTSASLAISGLRSGDEADYYCQSYDSSLSDVVFGGGTKLTVLGAAAGQPKAAPSVTLFPPSSEELQANKATLVCLISDFYPGAVTVAWKADSSPVKAGVETTTPSKQSNNKYAASSYLSLTPEQWKSHRSYSCQVTHEGSTVEKTVAPTECS

SEQ ID NO: 26742 - protein, 220 aa, Artificial Sequence
  source: /note="Description of Artificial Sequence: Synthetic polypeptide"
QSALTQPASVSGSPGQTITISCSGTSSDVGGYNYVSWYQQHPGKAPKLMIYDVSKRPSGVSNRFSGSKSGNTASLTISGLQAEDEADYYCSSSTRSSTLVFGGGTKLTVLGAAAGQPKAAPSVTLFPPSSEELQANKATLVCLISDFYPGAVTVAWKADSSPVKAGVETTTPSKQSNNKYAASSYLSLTPEQWKSHRSYSCQVTHEGSTVEKTVAPTECS

SEQ ID NO: 26743 - protein, 220 aa, Artificial Sequence
  source: /note="Description of Artificial Sequence: Synthetic polypeptide"
QSALTQPPSASGSPGQSVTISCTGTSSDVGGYDYVSWYQQHPGKAPKLMIYDVSKRPSGVPDRFSGSKSGNTASLTISGLQAEDEADYYCSSYASNRDVLFGGGTKLTVLGAAAGQPKAAPSVTLFPPSSEELQANKATLVCLISDFYPGAVTVAWKADSSPVKAGVETTTPSKQSNNKYAASSYLSLTPEQWKSHRSYSCQVTHEGSTVEKTVAPTECS

SEQ ID NO: 26744 - protein, 218 aa, Artificial Sequence; identical to SEQ ID NO: 26701
  source: /note="Description of Artificial Sequence: Synthetic polypeptide"

SEQ ID NO: 26745 - protein, 220 aa, Artificial Sequence
  source: /note="Description of Artificial Sequence: Synthetic polypeptide"
QSALTQPASVSGSPGQSITISCTGTSSDVGGYNYVSWYQQHPGKAPKLMIYDVIKRPSGVPDRFSGSKSGNTASLTISGLQAEDEADYYCSSYAGSNNVVFGGGTKLTVLGAAAGQPKAAPSVTLFPPSSEELQANKATLVCLISDFYPGAVTVAWKADSSPVKAGVETTTPSKQSNNKYAASSYLSLTPEQWKSHRSYSCQVTHEGSTVEKTVAPTECS

SEQ ID NO: 26746 - protein, 220 aa, Artificial Sequence
  source: /note="Description of Artificial Sequence: Synthetic polypeptide"
QSALTQPPSASGSPGQSVTISCTGTSSDVGGYNYVSWYQQHPGKAPKLMIYDVSKRPSGVPDRFSGSKSGNTASLTVSGLQSEDEADYYCSSYAGSTGYVFGTGTKVTVLGAAAGQPKAAPSVTLFPPSSEELQANKATLVCLISDFYPGAVTVAWKADSSPVKAGVETTTPSKQSNNKYAASSYLSLTPEQWKSHRSYSCQVTHEGSTVEKTVAPTECS

SEQ ID NO: 26747 - protein, 220 aa, Artificial Sequence
  source: /note="Description of Artificial Sequence: Synthetic polypeptide"
QSVLTQPPSASGSPGQSVTISCTGTSSDVGGYNYVSWYQQHPGKAPKLMIYEVTRRPSGVSYRFSGSKSGNTASLTVSGLQAEDEADYYCSSYAGSNNLVFGGGTKLTVLGAAAGQPKAAPSVTLFPPSSEELQANKATLVCLISDFYPGAVTVAWKADSSPVKAGVETTTPSKQSNNKYAASSYLSLTPEQWKSHRSYSCQVTHEGSTVEKTVAPTECS

SEQ ID NO: 26748 - protein, 220 aa, Artificial Sequence
  source: /note="Description of Artificial Sequence: Synthetic polypeptide"
QSVVTQPPSVSAAPGQKVTISCSGSSSNIGNNYVSWYQQLPGTAPKLLIYDNNKRPSGIPDRFSGSKSGTSATLGITGLQTGDEADYYCGTWESSLSAVVFGGGTKLTVLGAAAGQPKAAPSVTLFPPSSEELQANKATLVCLISDFYPGAVTVAWKADSSPVKAGVETTTPSKQSNNKYAASSYLSLTPEQWKSHRSYSCQVTHEGSTVEKTVAPTECS

SEQ ID NO: 26749 - protein, 220 aa, Artificial Sequence
  source: /note="Description of Artificial Sequence: Synthetic polypeptide"
QSALTQPASVSGSPGQSITISCTGTSSDVGGYNYVSWYQHHPGKAPKLMIYDVSDRPSGVSNRFSGSKSGNAASLTISGLQAEDEADYYCSSYAGSNNLVFGTGTKVTVLGAAAGQPKAAPSVTLFPPSSEELQANKATLVCLISDFYPGAVTVAWKADSSPVKAGVETTTPSKQSNNKYAASSYLSLTPEQWKSHRSYSCQVTHEGSTVEKTVAPTECS

SEQ ID NO: 26750 - protein, 213 aa, Artificial Sequence
  source: /note="Description of Artificial Sequence: Synthetic polypeptide"
DIQMTQSPSSVSASVGDRVTITCRASQGISSRLAWYQQKPGKAPKLLIYAASSLQSGVPSRFSGSGSGTDFTLTISSLQPEDFGTYYCQQAKNFPRTFGQGTRLEIKRAAAPSVFIFPPSDEQLKSGTASVVCLLNNFYPREAKVQWKVDNALQSGNSQESVTEQDSKDSTYSLSSTLTLSKADYEKHKVYACEVTHQGLSSPVTKSFNRGEC

SEQ ID NO: 26751 - protein, 214 aa, Artificial Sequence
  source: /note="Description of Artificial Sequence: Synthetic polypeptide"
EIVLTQSPGTLSLSPGERATLSCRASQSVSSNYLAWYQQKPGQAPRLLVYGASSRATGIPDRFSGSGSGTDFTLTISRLEPEDFAVYHCQQYAGSPWTFGQGTKVEIKRAAAPSVFIFPPSDEQLKSGTASVVCLLNNFYPREAKVQWKVDNALQSGNSQESVTEQDSKDSTYSLSSTLTLSKADYEKHKVYACEVTHQGLSSPVTKSFNRGEC

SEQ ID NO: 26752 - protein, 220 aa, Artificial Sequence; identical to SEQ ID NO: 26737
  source: /note="Description of Artificial Sequence: Synthetic polypeptide"

SEQ ID NO: 26753 - protein, 220 aa, Artificial Sequence
  source: /note="Description of Artificial Sequence: Synthetic polypeptide"
QSALTQPRSVSGSPGQSVTISCTGTSSDIGGYNFVSWYQQHPGKAPKLMIYDVSNRPSGVSNRFSGSKSGKMASLTISGLQAEDEADYYCASYTSRSTLVFGTGTKVTVLGAAAGQPKAAPSVTLFPPSSEELQANKATLVCLISDFYPGAVTVAWKADSSPVKAGVETTTPSKQSNNKYAASSYLSLTPEQWKSHRSYSCQVTHEGSTVEKTVAPTECS

SEQ ID NO: 26754 - protein, 213 aa, Artificial Sequence
  source: /note="Description of Artificial Sequence: Synthetic polypeptide"
DIQMTQSPSSLSASVGDRVTITCRASQSISSYLNWYQQKPGKAPKLLIYAASSLQSGVPSRFSGSGSGTDFTLTISSLQPEDFATYYCQQANSFPLTFGGGTKVEIKRAAAPSVFIFPPSDEQLKSGTASVVCLLNNFYPREAKVQWKVDNALQSGNSQESVTEQDSKDSTYSLSSTLTLSKADYEKHKVYACEVTHQGLSSPVTKSFNRGEC

SEQ ID NO: 26755 - protein, 220 aa, Artificial Sequence
  source: /note="Description of Artificial Sequence: Synthetic polypeptide"
QSALTQPPSASGSPGQSVTISCTGTSSDVGGYNYVSWYQHHPGKAPKLMIYDVSNRPSGVSNRFSGSKSGNTASLTISGLQAEDEADYYCSSYTSSSTLVFGTGTKVTVLGAAAGQPKAAPSVTLFPPSSEELQANKATLVCLISDFYPGAVTVAWKADSSPVKAGVETTTPSKQSNNKYAASSYLSLTPEQWKSHRSYSCQVTHEGSTVEKTVAPTECS

SEQ ID NO: 26756 - protein, 221 aa, Artificial Sequence
  source: /note="Description of Artificial Sequence: Synthetic polypeptide"
QSALTQPPSASGSPGQSVTISCTGTSSDVGGYNYVSWYQQRPGKAPKLMIYDVSNRPSGVSDRFSGSKSGNTASLTISGLQAEDEADYYCSSYTTGSTLVVFGGGTKLTVLGAAAGQPKAAPSVTLFPPSSEELQANKATLVCLISDFYPGAVTVAWKADSSPVKAGVETTTPSKQSNNKYAASSYLSLTPEQWKSHRSYSCQVTHEGSTVEKTVAPTECS

SEQ ID NO: 26757 - protein, 220 aa, Artificial Sequence
  source: /note="Description of Artificial Sequence: Synthetic polypeptide"
QSALTQPPSASGSPGQSVTISCTGTSSDVGGYNYVSWYQQHPGKAPKLMIYEVSKRPSGVPDRFSGSKSGNTASLTVSGLQAEDEADYYCSSYGGSNNVVFGGGTKLTVLGAAAGQPKAAPSVTLFPPSSEELQANKATLVCLISDFYPGAVTVAWKADSSPVKAGVETTTPSKQSNNKYAASSYLSLTPEQWKSHRSYSCQVTHEGSTVEKTVAPTECS

SEQ ID NO: 26758 - protein, 220 aa, Artificial Sequence
  source: /note="Description of Artificial Sequence: Synthetic polypeptide"
QSALTQPASVSGSPGQSITISCTGTSSDVGAYNYVSWYQQHPGKAPKLMIYDVSNRPSGVSNRFSGSKSGNTASLTISGLQAEDEADYYCSSYAGSNSVVFGGGTKLTVLGAAAGQPKAAPSVTLFPPSSEELQANKATLVCLISDFYPGAVTVAWKADSSPVKAGVETTTPSKQSNNKYAASSYLSLTPEQWKSHRSYSCQVTHEGSTVEKTVAPTECS

SEQ ID NO: 26759 - protein, 213 aa, Artificial Sequence
  source: /note="Description of Artificial Sequence: Synthetic polypeptide"
DIQLTQSPSSVSASVGGRVTITCRASQGISSWLAWYQQRPGKAPNLLIYGASNLQSGVPSRFSGSGSGTDFSLTISSLQPEDFATYYCQQAKSFPLTFGGGTKVEIKRAAAPSVFIFPPSDEQLKSGTASVVCLLNNFYPREAKVQWKVDNALQSGNSQESVTEQDSKDSTYSLSSTLTLSKADYEKHKVYACEVTHQGLSSPVTKSFNRGEC

SEQ ID NO: 26760 - protein, 219 aa, Artificial Sequence
  source: /note="Description of Artificial Sequence: Synthetic polypeptide"
DVVMTQSPDSLAVSLGERATINCKSSQSVFYSSNNKNYLAWYQHKPGQPPKLLIYWASTRQSGVPDRFSGSGSGTDFTLTINSLQAEDVAVYYCQQYYSTPPTFGGGTKVEIKRAAAPSVFIFPPSDEQLKSGTASVVCLLNNFYPREAKVQWKVDNALQSGNSQESVTEQDSKDSTYSLSSTLTLSKADYEKHKVYACEVTHQGLSSPVTKSFNRGEC

SEQ ID NO: 26761 - protein, 220 aa, Artificial Sequence
  source: /note="Description of Artificial Sequence: Synthetic polypeptide"
QSALTQPRSVSGSPGQAVTLSCNGTSRDVGGYNYVSWYQQHPGKAPKLMIYDVTKRPSGVPDRFSGSKSGNTASLTISGLQAEDEADYYCNSYAGSNTWVFGGGTKLTVLGAAAGQPKAAPSVTLFPPSSEELQANKATLVCLISDFYPGAVTVAWKADSSPVKAGVETTTPSKQSNNKYAASSYLSLTPEQWKSHRSYSCQVTHEGSTVEKTVAPTECS

SEQ ID NO: 26762 - protein, 220 aa, Artificial Sequence; identical to SEQ ID NO: 26746
  source: /note="Description of Artificial Sequence: Synthetic polypeptide"

SEQ ID NO: 26763 - protein, 220 aa, Artificial Sequence
  source: /note="Description of Artificial Sequence: Synthetic polypeptide"
QSALTQPPSASGSPGQSVTISCTGTSSDVGGYNYVSWYQQYPGKAPKLMIYDVSNRPSGVSNRFSGSKSGNTASLTISGLQAEDEADYYCSSYTSSSTLVFGTGTKVTVLGAAAGQPKAAPSVTLFPPSSEELQANKATLVCLISDFYPGAVTVAWKADSSPVKAGVETTTPSKQSNNKYAASSYLSLTPEQWKSHRSYSCQVTHEGSTVEKTVAPTECS

SEQ ID NO: 26764 - protein, 221 aa, Artificial Sequence
  source: /note="Description of Artificial Sequence: Synthetic polypeptide"
QSALTQPPSASGSPGQSVTISCTGTSSDIGGYNYVSWYQQHPGKAPKLMIYEVSNRPPGVSNRFSGSKSGNTASLTISGLQAEDEADYYCSSYSTTTTRVIFGGGTKLTVLGAAAGQPKAAPSVTLFPPSSEELQANKATLVCLISDFYPGAVTVAWKADSSPVKAGVETTTPSKQSNNKYAASSYLSLTPEQWKSHRSYSCQVTHEGSTVEKTVAPTECS

SEQ ID NO: 26765 - protein, 220 aa, Artificial Sequence
  source: /note="Description of Artificial Sequence: Synthetic polypeptide"
QSVVTQPPSVSAAPGQKVTISCSGSTSNIGNYYVSWYQQLPGTAPKLLIYENNKRPSGIPDRFSGSKSGTSATLDITGLQTGDEADYYCGAWDGSLSAVVLGGGTQLTVLGAAAGQPKAAPSVTLFPPSSEELQANKATLVCLISDFYPGAVTVAWKADSSPVKAGVETTTPSKQSNNKYAASSYLSLTPEQWKSHRSYSCQVTHEGSTVEKTVAPTECS

SEQ ID NO: 26766 - protein, 220 aa, Artificial Sequence
  source: /note="Description of Artificial Sequence: Synthetic polypeptide"
QSALTQPRSVSGSPGQSVTISCTGTSSDVGGYNYVSWYQQHPGKAPKLMIYDVSNRPSGVSNRFSGSKSGNTASLTISGLQAEDEADYYCSSYTSSSTLVFGGGTKLTVLGAAAGQPKAAPSVTLFPPSSEELQANKATLVCLISDFYPGAVTVAWKADSSPVKAGVETTTPSKQSNNKYAASSYLSLTPEQWKSHRSYSCQVTHEGSTVEKTVAPTECS

SEQ ID NO: 26767 - protein, 451 aa, Artificial Sequence
  source: /note="Description of Artificial Sequence: Synthetic polypeptide"
EVQLVESGAEVKKPGESLKISCKGSGYSFTNYWIGWVRQMPGKGLEWMGIVYPGDSDTRYSPSFQGQVTISADKSISTAYLQWSSLKASDTAVYYCARRMAVAGSDAFDIWGQGTMVTVSSASTKGPSVFPLAPSSKSTSGGTAALGCLVKDYFPEPVTVSWNSGALTSGVHTFPAVLQSSGLYSLSSVVTVPSSSLGTQTYICNVNHKPSNTKVDKRVEPKSCDKTHTCPPCPAPELLGGPSVFLFPPKPKDTLMISRTPEVTCVVVDVSHEDPEVKFNWYVDGVEVHNAKTKPREEQYNSTYRVVSVLTVLHQDWLNGKEYKCKVSNKALPAPIEKTISKAKGQPREPQVYTLPPSREEMTKNQVSLTCLVKGFYPSDIAVEWESNGQPENNYKTTPPVLDSDGSFFLYSKLTVDKSRWQQGNVFSCSVMHEALHNHYTQKSLSLSPGK

SEQ ID NO: 26768 - protein, 463 aa, Artificial Sequence
  source: /note="Description of Artificial Sequence: Synthetic polypeptide"
QVQLVQSGAEVKKPGASVKVSCKASGYTFTSYAISWVRQAPGQGLEWMGWISAYNGNTNYARKLQGRVTMTTDTSTSTAYMELRSLRSDDTAVYYCARAGLMFTAWFGELWDHGTKDNWFDPWGQGTLVTVSSASTKGPSVFPLAPSSKSTSGGTAALGCLVKDYFPEPVTVSWNSGALTSGVHTFPAVLQSSGLYSLSSVVTVPSSSLGTQTYICNVNHKPSNTKVDKRVEPKSCDKTHTCPPCPAPELLGGPSVFLFPPKPKDTLMISRTPEVTCVVVDVSHEDPEVKFNWYVDGVEVHNAKTKPREEQYNSTYRVVSVLTVLHQDWLNGKEYKCKVSNKALPAPIEKTISKAKGQPREPQVYTLPPSREEMTKNQVSLTCLVKGFYPSDIAVEWESNGQPENNYKTTPPVLDSDGSFFLYSKLTVDKSRWQQGNVFSCSVMHEALHNHYTQKSLSLSPGK

SEQ ID NO: 26769 - protein, 451 aa, Artificial Sequence
  source: /note="Description of Artificial Sequence: Synthetic polypeptide"
EVQLVQSGAEVKKPGESLKISCKGSGYSFTKYWIGWVRQMPGKGLEWMGIIYPGDSDTRYSPSFQGQVTISADKSISTAYLQWSSLKASDTAMYYCARGSGIATGNSFDSWGQGTLVTVSSASTKGPSVFPLAPSSKSTSGGTAALGCLVKDYFPEPVTVSWNSGALTSGVHTFPAVLQSSGLYSLSSVVTVPSSSLGTQTYICNVNHKPSNTKVDKRVEPKSCDKTHTCPPCPAPELLGGPSVFLFPPKPKDTLMISRTPEVTCVVVDVSHEDPEVKFNWYVDGVEVHNAKTKPREEQYNSTYRVVSVLTVLHQDWLNGKEYKCKVSNKALPAPIEKTISKAKGQPREPQVYTLPPSREEMTKNQVSLTCLVKGFYPSDIAVEWESNGQPENNYKTTPPVLDSDGSFFLYSKLTVDKSRWQQGNVFSCSVMHEALHNHYTQKSLSLSPGK

SEQ ID NO: 26770 - protein, 453 aa, Artificial Sequence
  source: /note="Description of Artificial Sequence: Synthetic polypeptide"
EVQLVESGAEVKKPGESLKISCKGSGYSFTSYWIGWVRQMPGKGLEWMGIIYPGDSDTRYSPSFQGQVTISADKSISTAYLQWSSLKASDTAMYYCARRYCSGGTCSDGFDIWGQGTMVTVSSASTKGPSVFPLAPSSKSTSGGTAALGCLVKDYFPEPVTVSWNSGALTSGVHTFPAVLQSSGLYSLSSVVTVPSSSLGTQTYICNVNHKPSNTKVDKRVEPKSCDKTHTCPPCPAPELLGGPSVFLFPPKPKDTLMISRTPEVTCVVVDVSHEDPEVKFNWYVDGVEVHNAKTKPREEQYNSTYRVVSVLTVLHQDWLNGKEYKCKVSNKALPAPIEKTISKAKGQPREPQVYTLPPSREEMTKNQVSLTCLVKGFYPSDIAVEWESNGQPENNYKTTPPVLDSDGSFFLYSKLTVDKSRWQQGNVFSCSVMHEALHNHYTQKSLSLSPGK

SEQ ID NO: 26771 - protein, 456 aa, Artificial Sequence
  source: /note="Description of Artificial Sequence: Synthetic polypeptide"
EVQLVESGPEVKKPGASVKVSCEASGYNLDNYGITWVRQAPGQGLEWLGWISAYNAKTEYGQRLQGRVTMTTDTATSTAYLELRSLRSDDTAVYYCARVLGYRGGWYDEGDAFDVWGQGTMVTVSSASTKGPSVFPLAPSSKSTSGGTAALGCLVKDYFPEPVTVSWNSGALTSGVHTFPAVLQSSGLYSLSSVVTVPSSSLGTQTYICNVNHKPSNTKVDKRVEPKSCDKTHTCPPCPAPELLGGPSVFLFPPKPKDTLMISRTPEVTCVVVDVSHEDPEVKFNWYVDGVEVHNAKTKPREEQYNSTYRVVSVLTVLHQDWLNGKEYKCKVSNKALPAPIEKTISKAKGQPREPQVYTLPPSREEMTKNQVSLTCLVKGFYPSDIAVEWESNGQPENNYKTTPPVLDSDGSFFLYSKLTVDKSRWQQGNVFSCSVMHEALHNHYTQKSLSLSPGK

SEQ ID NO: 26772 - protein, 449 aa, Artificial Sequence
  source: /note="Description of Artificial Sequence: Synthetic polypeptide"
QVQLVQSGAEVKKPGSSVKVSCKASGGTFSSYAISWVRQAPGQGLEWMGGIIPIFGTANYAQKFQGRVTITADESTSTAYMELSSLRSEDTAVYYCAREGGVGPAFDIWGQGTMVTVSSASTKGPSVFPLAPSSKSTSGGTAALGCLVKDYFPEPVTVSWNSGALTSGVHTFPAVLQSSGLYSLSSVVTVPSSSLGTQTYICNVNHKPSNTKVDKRVEPKSCDKTHTCPPCPAPELLGGPSVFLFPPKPKDTLMISRTPEVTCVVVDVSHEDPEVKFNWYVDGVEVHNAKTKPREEQYNSTYRVVSVLTVLHQDWLNGKEYKCKVSNKALPAPIEKTISKAKGQPREPQVYTLPPSREEMTKNQVSLTCLVKGFYPSDIAVEWESNGQPENNYKTTPPVLDSDGSFFLYSKLTVDKSRWQQGNVFSCSVMHEALHNHYTQKSLSLSPGK

SEQ ID NO: 26773 - protein, 446 aa, Artificial Sequence
  source: /note="Description of Artificial Sequence: Synthetic polypeptide"
EVQLVESGGGLVQPGGSLRLSCAASGFTFSSYAMSWVRQAPGKGLEWVSAISGTGGSAYYADSVKGRFTISRDNSKNTVYLQMNSLRAEDTAVYYCAKGHSSGTNWGQGTLVTVSSASTKGPSVFPLAPSSKSTSGGTAALGCLVKDYFPEPVTVSWNSGALTSGVHTFPAVLQSSGLYSLSSVVTVPSSSLGTQTYICNVNHKPSNTKVDKRVEPKSCDKTHTCPPCPAPELLGGPSVFLFPPKPKDTLMISRTPEVTCVVVDVSHEDPEVKFNWYVDGVEVHNAKTKPREEQYNSTYRVVSVLTVLHQDWLNGKEYKCKVSNKALPAPIEKTISKAKGQPREPQVYTLPPSREEMTKNQVSLTCLVKGFYPSDIAVEWESNGQPENNYKTTPPVLDSDGSFFLYSKLTVDKSRWQQGNVFSCSVMHEALHNHYTQKSLSLSPGK

SEQ ID NO: 26774 - protein, 452 aa, Artificial Sequence
  source: /note="Description of Artificial Sequence: Synthetic polypeptide"
EVQLVESGGGLVKPGGSLRLSCAASGFTFSSNSMNWVRQAPGKGLEWVSFISSSSTYIYYADSVKGRFTISRDNAKNSLYLQMNSLRAEDTAVYYCARESAAGISYDAFDIWGQGTMVTVSSASTKGPSVFPLAPSSKSTSGGTAALGCLVKDYFPEPVTVSWNSGALTSGVHTFPAVLQSSGLYSLSSVVTVPSSSLGTQTYICNVNHKPSNTKVDKRVEPKSCDKTHTCPPCPAPELLGGPSVFLFPPKPKDTLMISRTPEVTCVVVDVSHEDPEVKFNWYVDGVEVHNAKTKPREEQYNSTYRVVSVLTVLHQDWLNGKEYKCKVSNKALPAPIEKTISKAKGQPREPQVYTLPPSREEMTKNQVSLTCLVKGFYPSDIAVEWESNGQPENNYKTTPPVLDSDGSFFLYSKLTVDKSRWQQGNVFSCSVMHEALHNHYTQKSLSLSPGK

SEQ ID NO: 26775 - protein, 451 aa, Artificial Sequence
  source: /note="Description of Artificial Sequence: Synthetic polypeptide"
EVQLVESGGGLVQPGRSLRLSCTGSGFTFGDYAMSWFRQAPGKGLEWVGFIRNKAYGGTAEYAASVKDRFIISRDDSKSIAYLQMNSLKTEDTAVYYCVRREYDTGWLDYWGQGTLVTVSSASTKGPSVFPLAPSSKSTSGGTAALGCLVKDYFPEPVTVSWNSGALTSGVHTFPAVLQSSGLYSLSSVVTVPSSSLGTQTYICNVNHKPSNTKVDKRVEPKSCDKTHTCPPCPAPELLGGPSVFLFPPKPKDTLMISRTPEVTCVVVDVSHEDPEVKFNWYVDGVEVHNAKTKPREEQYNSTYRVVSVLTVLHQDWLNGKEYKCKVSNKALPAPIEKTISKAKGQPREPQVYTLPPSREEMTKNQVSLTCLVKGFYPSDIAVEWESNGQPENNYKTTPPVLDSDGSFFLYSKLTVDKSRWQQGNVFSCSVMHEALHNHYTQKSLSLSPGK

SEQ ID NO: 26776 - protein, 445 aa, Artificial Sequence
  source: /note="Description of Artificial Sequence: Synthetic polypeptide"
EVQLVESGGGVVQPGRSLRLSCAASGFTFSSYGMHWVRQAPGKGLEWVAVIWYDGSNKYYADSVKGRFTISRDNSQNTLYLQMNSLRAEDTAVYYCTSYAIAATPGQGTLVTVSSASTKGPSVFPLAPSSKSTSGGTAALGCLVKDYFPEPVTVSWNSGALTSGVHTFPAVLQSSGLYSLSSVVTVPSSSLGTQTYICNVNHKPSNTKVDKRVEPKSCDKTHTCPPCPAPELLGGPSVFLFPPKPKDTLMISRTPEVTCVVVDVSHEDPEVKFNWYVDGVEVHNAKTKPREEQYNSTYRVVSVLTVLHQDWLNGKEYKCKVSNKALPAPIEKTISKAKGQPREPQVYTLPPSREEMTKNQVSLTCLVKGFYPSDIAVEWESNGQPENNYKTTPPVLDSDGSFFLYSKLTVDKSRWQQGNVFSCSVMHEALHNHYTQKSLSLSPGK

SEQ ID NO: 26777 - protein, 448 aa, Artificial Sequence
  source: /note="Description of Artificial Sequence: Synthetic polypeptide"
EVQLVESGGGLVQPGRSLRLSCAASGFTFRSYAMYWVRQAPGKGLEWLALISHDASKMFYADSVKGRFTISRDNSKNTLSLQMNSLTIEDTAVYYCVRERTGYYGAYWGQGTLVTVSSASTKGPSVFPLAPSSKSTSGGTAALGCLVKDYFPEPVTVSWNSGALTSGVHTFPAVLQSSGLYSLSSVVTVPSSSLGTQTYICNVNHKPSNTKVDKRVEPKSCDKTHTCPPCPAPELLGGPSVFLFPPKPKDTLMISRTPEVTCVVVDVSHEDPEVKFNWYVDGVEVHNAKTKPREEQYNSTYRVVSVLTVLHQDWLNGKEYKCKVSNKALPAPIEKTISKAKGQPREPQVYTLPPSREEMTKNQVSLTCLVKGFYPSDIAVEWESNGQPENNYKTTPPVLDSDGSFFLYSKLTVDKSRWQQGNVFSCSVMHEALHNHYTQKSLSLSPGK

SEQ ID NO: 26778 - protein, 451 aa, Artificial Sequence
  source: /note="Description of Artificial Sequence: Synthetic polypeptide"
EVQLVESGGGLIQPGGSLRLSCAASGFTVSSDFMTWVRQAPGRGLEWVSLIYSGGKTNYADSVKGRFTISRDNSRNTLYLQMNSLRAEDTAVYYCARSVCSTISCSKLDDWGQGTLVTVSSASTKGPSVFPLAPSSKSTSGGTAALGCLVKDYFPEPVTVSWNSGALTSGVHTFPAVLQSSGLYSLSSVVTVPSSSLGTQTYICNVNHKPSNTKVDKRVEPKSCDKTHTCPPCPAPELLGGPSVFLFPPKPKDTLMISRTPEVTCVVVDVSHEDPEVKFNWYVDGVEVHNAKTKPREEQYNSTYRVVSVLTVLHQDWLNGKEYKCKVSNKALPAPIEKTISKAKGQPREPQVYTLPPSREEMTKNQVSLTCLVKGFYPSDIAVEWESNGQPENNYKTTPPVLDSDGSFFLYSKLTVDKSRWQQGNVFSCSVMHEALHNHYTQKSLSLSPGK

SEQ ID NO: 26779 - protein, 449 aa, Artificial Sequence
  source: /note="Description of Artificial Sequence: Synthetic polypeptide"
EVQLVETGAEVKKPGESLRISCKGSGYSFTSYWIAWVRQMPGKGLEWMGVIYPGDSDARYSPSFQGQVTMSVDKSISTAYLQWSSLKASDTAMYYCAKLRSKNTGLDYWGQGTLVTVSSASTKGPSVFPLAPSSKSTSGGTAALGCLVKDYFPEPVTVSWNSGALTSGVHTFPAVLQSSGLYSLSSVVTVPSSSLGTQTYICNVNHKPSNTKVDKRVEPKSCDKTHTCPPCPAPELLGGPSVFLFPPKPKDTLMISRTPEVTCVVVDVSHEDPEVKFNWYVDGVEVHNAKTKPREEQYNSTYRVVSVLTVLHQDWLNGKEYKCKVSNKALPAPIEKTISKAKGQPREPQVYTLPPSREEMTKNQVSLTCLVKGFYPSDIAVEWESNGQPENNYKTTPPVLDSDGSFFLYSKLTVDKSRWQQGNVFSCSVMHEALHNHYTQKSLSLSPGK

SEQ ID NO: 26780 - protein, 451 aa, Artificial Sequence
  source: /note="Description of Artificial Sequence: Synthetic polypeptide"
QMQLVQSGAEVKKSGESLKISCKGSGYSFSTYWIGWVRQMPGKGLEWMGIIYPGDSDTRYNPSFQGQVTISADKSISTAYLQWSSLKASDTAMYYCARRSARGGNWYFDLWGRGTLVTVSSASTKGPSVFPLAPSSKSTSGGTAALGCLVKDYFPEPVTVSWNSGALTSGVHTFPAVLQSSGLYSLSSVVTVPSSSLGTQTYICNVNHKPSNTKVDKRVEPKSCDKTHTCPPCPAPELLGGPSVFLFPPKPKDTLMISRTPEVTCVVVDVSHEDPEVKFNWYVDGVEVHNAKTKPREEQYNSTYRVVSVLTVLHQDWLNGKEYKCKVSNKALPAPIEKTISKAKGQPREPQVYTLPPSREEMTKNQVSLTCLVKGFYPSDIAVEWESNGQPENNYKTTPPVLDSDGSFFLYSKLTVDKSRWQQGNVFSCSVMHEALHNHYTQKSLSLSPGK

SEQ ID NO: 26781 - protein, 452 aa, Artificial Sequence; identical to SEQ ID NO: 26668
  source: /note="Description of Artificial Sequence: Synthetic polypeptide"

SEQ ID NO: 26782 - protein, 450 aa, Artificial Sequence
  source: /note="Description of Artificial Sequence: Synthetic polypeptide"
EVQLVESGAEVKKPGESLKISCKGSGYSFTSHWIGWVRQMPGKGLEWMGIIYPGDSDTRYSPSFQGQVTISVDKSISTAYLQWSSLKASDTAMYYCARLGSSRWSHFDYWGQGTLVTVSSASTKGPSVFPLAPSSKSTSGGTAALGCLVKDYFPEPVTVSWNSGALTSGVHTFPAVLQSSGLYSLSSVVTVPSSSLGTQTYICNVNHKPSNTKVDKRVEPKSCDKTHTCPPCPAPELLGGPSVFLFPPKPKDTLMISRTPEVTCVVVDVSHEDPEVKFNWYVDGVEVHNAKTKPREEQYNSTYRVVSVLTVLHQDWLNGKEYKCKVSNKALPAPIEKTISKAKGQPREPQVYTLPPSREEMTKNQVSLTCLVKGFYPSDIAVEWESNGQPENNYKTTPPVLDSDGSFFLYSKLTVDKSRWQQGNVFSCSVMHEALHNHYTQKSLSLSPGK

SEQ ID NO: 26783 - protein, 450 aa, Artificial Sequence
  source: /note="Description of Artificial Sequence: Synthetic polypeptide"
QLQLQESGPGLVKPSQTLSLTCTVSGGSISSGGYYWSWIRQHPGKGLEWIGYIYYSGSTYYNPSLKSRVTISVDTSKNQFSLKLSSVTAADTAVYYCARERILDRMNDYWGQGTLVTVSSASTKGPSVFPLAPSSKSTSGGTAALGCLVKDYFPEPVTVSWNSGALTSGVHTFPAVLQSSGLYSLSSVVTVPSSSLGTQTYICNVNHKPSNTKVDKRVEPKSCDKTHTCPPCPAPELLGGPSVFLFPPKPKDTLMISRTPEVTCVVVDVSHEDPEVKFNWYVDGVEVHNAKTKPREEQYNSTYRVVSVLTVLHQDWLNGKEYKCKVSNKALPAPIEKTISKAKGQPREPQVYTLPPSREEMTKNQVSLTCLVKGFYPSDIAVEWESNGQPENNYKTTPPVLDSDGSFFLYSKLTVDKSRWQQGNVFSCSVMHEALHNHYTQKSLSLSPGK

SEQ ID NO: 26784 - protein, 220 aa, Artificial Sequence
  source: /note="Description of Artificial Sequence: Synthetic polypeptide"
QAVLTQPSSASGTPGQTVTISCSGSTSNIGSHNVNWYQHLPGTAPKLLIYINNKRPSGVPDRFSGSKSGSSASLAISGLQSEDEADYYCAAWDDSLRRPVFGGGTQLTVLSAAAGQPKAAPSVTLFPPSSEELQANKATLVCLISDFYPGAVTVAWKADSSPVKAGVETTTPSKQSNNKYAASSYLSLTPEQWKSHRSYSCQVTHEGSTVEKTVAPTECS

SEQ ID NO: 26785 - protein, 220 aa, Artificial Sequence
  source: /note="Description of Artificial Sequence: Synthetic polypeptide"
NFMLTQPHSVSESPGKTVTISCTRSSGSIASYYVQWYQQRPGSSPTTVIYEDNQRPSGVPDRFSGSIDSSSNSASLTISGLKTEDEADYYCQSYDSSNQVFGGGTKLTVLGAAAGQPKAAPSVTLFPPSSEELQANKATLVCLISDFYPGAVTVAWKADSSPVKAGVETTTPSKQSNNKYAASSYLSLTPEQWKSHRSYSCQVTHEGSTVEKTVAPTECS

SEQ ID NO: 26786 - protein, 219 aa, Artificial Sequence
  source: /note="Description of Artificial Sequence: Synthetic polypeptide"
QTVVTQEPSLTVSPGGTVTLTCASSTGAVTSGYYPNWFQQKPGQAPRALIYSTSKKHSWTPARFSGSLLGGRAALTLSGAQPEDEADYYCLLSYGGARVFGGGTKLTVLGAAAGQPKAAPSVTLFPPSSEELQANKATLVCLISDFYPGAVTVAWKADSSPVKAGVETTTPSKQSNNKYAASSYLSLTPEQWKSHRSYSCQVTHEGSTVEKTVAPTECS

SEQ ID NO: 26787 - protein, 220 aa, Artificial Sequence; identical to SEQ ID NO: 26737
  source: /note="Description of Artificial Sequence: Synthetic polypeptide"

SEQ ID NO: 26788 - protein, 213 aa, Artificial Sequence
  source: /note="Description of Artificial Sequence: Synthetic polypeptide"
DIQLTQSPSFLSASVGDRVTITCRASQGIRSHLAWYQQKAGKAPKLLIYAASTLQSGVPSRFSGSGSGTEFTLTISSLQPDDFAAYYCQQLNTYPITFGQGTRLEIKRAAAPSVFIFPPSDEQLKSGTASVVCLLNNFYPREAKVQWKVDNALQSGNSQESVTEQDSKDSTYSLSSTLTLSKADYEKHKVYACEVTHQGLSSPVTKSFNRGEC

SEQ ID NO: 26789 - protein, 219 aa, Artificial Sequence
  source: /note="Description of Artificial Sequence: Synthetic polypeptide"
DIQMTQSPDSLAVSLGERATINCKSSQSVLHNSNNKNYLAWYQQKPGQPPKLLIYWASTRESGVPDRFSGSGSGTDFTLTISSLQAEDVAVYYCQQYYGSPYTFGQGTKLEIKRAAAPSVFIFPPSDEQLKSGTASVVCLLNNFYPREAKVQWKVDNALQSGNSQESVTEQDSKDSTYSLSSTLTLSKADYEKHKVYACEVTHQGLSSPVTKSFNRGEC

SEQ ID NO: 26790 - protein, 220 aa, Artificial Sequence
  source: /note="Description of Artificial Sequence: Synthetic polypeptide"
SYVLTQPPSASGTPGQRVTISCSGSSSNIGSNFVYWYQQLPGTAPKLLIYRNNQRPSGVPDRFSGSKSGTSASLAISGLRSEDEADYYCAAWDDSLSGVLFGGGTQLTVLGAAAGQPKAAPSVTLFPPSSEELQANKATLVCLISDFYPGAVTVAWKADSSPVKAGVETTTPSKQSNNKYAASSYLSLTPEQWKSHRSYSCQVTHEGSTVEKTVAPTECS

SEQ ID NO: 26791 - protein, 221 aa, Artificial Sequence
  source: /note="Description of Artificial Sequence: Synthetic polypeptide"
QSALTQPASVSGSPGQSITISCTGTSSDVGGYKYVSWYQQHPGKAPKLMIYEVSNRPSGVSNRFSGSKSGSTASLTISGLQAEDEADYYCSSYTSSSTLGVFGTGTKVTVLGAAAGQPKAAPSVTLFPPSSEELQANKATLVCLISDFYPGAVTVAWKADSSPVKAGVETTTPSKQSNNKYAASSYLSLTPEQWKSHRSYSCQVTHEGSTVEKTVAPTECS

SEQ ID NO: 26792 - protein, 221 aa, Artificial Sequence
  source: /note="Description of Artificial Sequence: Synthetic polypeptide"
QSALTQPPSASGSPGQSVTISCTGTSSDVGGYNYVSWYQRHPGKAPKLMIYDVTDRPSGVSNRFSGSKSGNTASLTISGLQAEDEADYYCSSYTSSSTSAVFGGGTKLTVLGAAAGQPKAAPSVTLFPPSSEELQANKATLVCLISDFYPGAVTVAWKADSSPVKAGVETTTPSKQSNNKYAASSYLSLTPEQWKSHRSYSCQVTHEGSTVEKTVAPTECS

SEQ ID NO: 26793 - protein, 220 aa, Artificial Sequence
  source: /note="Description of Artificial Sequence: Synthetic polypeptide"
QSVVTQPPSASGTPGQRVTISCSGSSSNIGSNYVYWYQQLPGTAPKLLIYRNNQRPSGVPDRFSGSKSGTSASLAISGLRSEDEADYYCAAWDDSLSGWVFGGGTQLTVLGAAAGQPKAAPSVTLFPPSSEELQANKATLVCLISDFYPGAVTVAWKADSSPVKAGVETTTPSKQSNNKYAASSYLSLTPEQWKSHRSYSCQVTHEGSTVEKTVAPTECS

SEQ ID NO: 26794 - protein, 213 aa, Artificial Sequence
  source: /note="Description of Artificial Sequence: Synthetic polypeptide"
DIQMTQSPSSLSASVGDRVTLTCRASQGIGTWLAWYQQKPGKAPKLLIYSASSLQSGVPSRFSGSGSGTDFTLSISNLQPEDFATYYCQQANSFPITFGQGTRLEIKRAAAPSVFIFPPSDEQLKSGTASVVCLLNNFYPREAKVQWKVDNALQSGNSQESVTEQDSKDSTYSLSSTLTLSKADYEKHKVYACEVTHQGLSSPVTKSFNRGEC

SEQ ID NO: 26795 - protein, 218 aa, Artificial Sequence
  source: /note="Description of Artificial Sequence: Synthetic polypeptide"
QAVLTQPSSVSVAPGQTARITCGGNNIGRKSVHWYQQKPGLAPVLVVNDNSDRPSGIPARFSGSNSGNTATLTISRVEAGDEADYYCHVWGSSRDHYVFGTGTKVTVLGAAAGQPKAAPSVTLFPPSSEELQANKATLVCLISDFYPGAVTVAWKADSSPVKAGVETTTPSKQSNNKYAASSYLSLTPEQWKSHRSYSCQVTHEGSTVEKTVAPTECS

SEQ ID NO: 26796 - protein, 220 aa, Artificial Sequence
  source: /note="Description of Artificial Sequence: Synthetic polypeptide"
QSALTQPPSASGSPGQSVTISCTGTSSDVGGYNFVSWYQQHPGKAPKLMIYEVSNRPSGVPDRFSGSKSGNTASLTVSGLQAEDEADYYCSSYAGNNNLAFGGGTQLTVLGAAAGQPKAAPSVTLFPPSSEELQANKATLVCLISDFYPGAVTVAWKADSSPVKAGVETTTPSKQSNNKYAASSYLSLTPEQWKSHRSYSCQVTHEGSTVEKTVAPTECS

SEQ ID NO: 26797 - protein, 214 aa, Artificial Sequence
  source: /note="Description of Artificial Sequence: Synthetic polypeptide"
EIVLTQSPGTLSLSPGERATLSCRASQSVSSSYLAWYQQKPGQAPRLLIYGASSRATGIPDRFSGSGSGTDFTLTISRLEPEDFAVYYCQQYGRSPLTFGGGTKVEIKRAAAPSVFIFPPSDEQLKSGTASVVCLLNNFYPREAKVQWKVDNALQSGNSQESVTEQDSKDSTYSLSSTLTLSKADYEKHKVYACEVTHQGLSSPVTKSFNRGEC

SEQ ID NO: 26798 - protein, 221 aa, Artificial Sequence; identical to SEQ ID NO: 26764
  source: /note="Description of Artificial Sequence: Synthetic polypeptide"

SEQ ID NO: 26799 - protein, 220 aa, Artificial Sequence
  source: /note="Description of Artificial Sequence: Synthetic polypeptide"
QSALTQPPSASGSPGQSVTISCTGTSTDVGGYNYVSWYQHHPGKAPKLVIYGVSKRPSRVPDRFSGSKSGNTASLTVSGLQAEDEADYYCSSYAGSNNLVFGGGTKLTVLGAAAGQPKAAPSVTLFPPSSEELQANKATLVCLISDFYPGAVTVAWKADSSPVKAGVETTTPSKQSNNKYAASSYLSLTPEQWKSHRSYSCQVTHEGSTVEKTVAPTECS

SEQ ID NO: 26800 - protein, 220 aa, Artificial Sequence
  source: /note="Description of Artificial Sequence: Synthetic polypeptide"
QSVVTQPPSVSGAPGQRVTISCTGSSSNIGAGYDVHWYQQLPGTAPKLLIYGNSNRPSGVPDRFSGSKSGTSASLAITGLQAEDEADYYCQSSDSSLNILFGGGTKLTVLGAAAGQPKAAPSVTLFPPSSEELQANKATLVCLISDFYPGAVTVAWKADSSPVKAGVETTTPSKQSNNKYAASSYLSLTPEQWKSHRSYSCQVTHEGSTVEKTVAPTECS

SEQ ID NO: 26801 - protein, 110 aa, Artificial Sequence
  source: /note="Description of Artificial Sequence: Synthetic polypeptide"
  MOD_RES (92)..(92): Any amino acid
DIQLTQSPSALPASVGDRVSITCRASENVGDWLAWYRQKPGKAPNLLIYKTSILESGVPSRFSGSGSGTEFTLTISSLQPDDFATYYCQHYXRFPYTFGQGTKLEIKRTV

SEQ ID NO: 26802 - protein, 109 aa, Artificial Sequence
  source: /note="Description of Artificial Sequence: Synthetic polypeptide"
  MOD_RES (92)..(92): Any amino acid
DIQLTQSPSALPASVGDRVSITCRASENVGDWLAWYRQKPGKAPNLLIYKTSILESGVPSRFSGSGSGTEFTLTISSLQPDDFATYYCQHYXRFPYTFGQGTKLEIKRA

SEQ ID NO: 26803 - protein, 110 aa, Artificial Sequence
  source: /note="Description of Artificial Sequence: Synthetic polypeptide"
  MOD_RES (92)..(92): Any amino acid
DIQLTQSPSALPASVGDRVSITCRASENVGDWLAWYRQKPGKAPNLLIYKTSILESGVPSRFSGSGSGTEFTLTISSLQPDDFATYYCQHYXRFPYTFGQGTKVEIKRTV

SEQ ID NO: 26804 - protein, 213 aa, Artificial Sequence
  source: /note="Description of Artificial Sequence: Synthetic polypeptide"
DIQLTQSPSALPASVGDRVSITCRASENVGDWLAWYRQKPGKAPNLLIYKTSILESGVPSRFSGSGSGTEFTLTISSLQPDDFATYYCQHYMRFPYTFGQGTKLEIKRAAAPSVFIFPPSDEQLKSGTASVVCLLNNFYPREAKVQWKVDNALQSGNSQESVTEQDSKDSTYSLSSTLTLSKADYEKHKVYACEVTHQGLSSPVTKSFNRGEC

SEQ ID NO: 26805 - protein, 214 aa, Artificial Sequence
  source: /note="Description of Artificial Sequence: Synthetic polypeptide"
DIQLTQSPSALPASVGDRVSITCRASENVGDWLAWYRQKPGKAPNLLIYKTSILESGVPSRFSGSGSGTEFTLTISSLQPDDFATYYCQHYMRFPYTFGQGTKVEIKRTVAAPSVFIFPPSDEQLKSGTASVVCLLNNFYPREAKVQWKVDNALQSGNSQESVTEQDSKDSTYSLSSTLTLSKADYEKHKVYACEVTHQGLSSPCTKSFNRGEC

SEQ ID NO: 26806 - protein, 104 aa, Artificial Sequence
  source: /note="Description of Artificial Sequence: Synthetic polypeptide"
AAPSVFIFPPSDEQLKSGTASVVCLLNNFYPREAKVQWKVDNALQSGNSQESVTEQDSKDSTYSLSSTLTLSKADYEKHKVYACEVTHQGLSSPVTKSFNRGEC

SEQ ID NO: 26807 - protein, 242 aa, Artificial Sequence
  source: /note="Description of Artificial Sequence: Synthetic polypeptide"
QVQLQESGPGLVKPSQTLSLTCTVSGGSISSGGYYWSWIRQPPGKGLEWIGYIYYSGSTYYNSSLKSRVTISVDTSKNQFSLKLSSVTAADTAVYYCAKTVMNSFFDWGQGTLVTVSSGGGGSGGGGSGGGGSEIELTQPPSVSGSPGQSITISCTGTSSDVGSYNLVSWYQQHPGKAPKLMIYEVSKRPSGVSNRFSGSKSGNTASLTISGLQAEDEADYYCCSYAGSSWVFGGGTKLTVL

SEQ ID NO: 26808 - protein, 242 aa, Artificial Sequence
  source: /note="Description of Artificial Sequence: Synthetic polypeptide"
EVLESGGGLVQPGGSLRLSCSDSGFSFNNYWMTWVRQAPGKGLEWVANINRDGSDKYHVDSVEGRFTISRDNSKNSLYLQMNNLRADDAAVYFCARGGRTTSWYWRNWGQGTLVTVSSGTGGSGGTGSGTGGSTDIQMTQSPSTLSASVGDRVTITCRASQSISSWLAWYQQKPGKAPKLLIYKASSLESGVPSRFSGSGSGTEFTLTISSLQPDDFATYYCQQYNSYPLTFGGGTKLEIKR

SEQ ID NO: 26809 - protein, 244 aa, Artificial Sequence
  source: /note="Description of Artificial Sequence: Synthetic polypeptide"
EVQLVETGGGLVKPGGSLRLSCSASRFSFRDYYMTWIRQAPGKGPEWVSHISGSGSTIYYADSVRGRFTISRDNAKSSLYLQMDSLQADDTAVYYCARGGRATSYYWVHWGPGTLVTVSSGTGGSGGTGSGTGGSTEIVLTQSPATLSLSPGERATLSCRASQSVSGYLGWYQQKPGQAPRLLIYGASSRATGIPDRFSGSGSGTDFTLTISRLEPEDFAVYYCQQYGSSPLTFGGGTKLEIKR

SEQ ID NO: 26810 - protein, 243 aa, Artificial Sequence
  source: /note="Description of Artificial Sequence: Synthetic polypeptide"
EVQLVESGGVAVQPGRSLRLSCAASGFSFRDYGMHWVRQAAGKGLEWVAFIWPHGVNRFYADSMEGRFTISRDDSKNMLYLEMNNLRTEDTALYYCTRDQDYVPRKYFDLWGRGTLVTVSSGTGGSGGTGSGTGGSTSYVLTQPPSVSVAPGQTARITCGGNNIGSKSVHWYQQKPGQSPVLVMYQDRRRPSGIPERFSGSNSGHTATLTISGTQAMDEADYYCQAWDSSTGVFGTGTQLTVL

SEQ ID NO: 26811 - protein, 247 aa, Artificial Sequence
  source: /note="Description of Artificial Sequence: Synthetic polypeptide"
EVQLVESGAEVKKPGESLKISCKGSGYSFTNYWIGWVRQMPGKGLEWMGIVYPGDSDTRYSPSFQGQVTISADKSISTAYLQWSSLKASDTAVYYCARRMAVAGSDAFDIWGQGTMVTVSSGTGGSGGTGSGTGGSTQAVLTQPSSASGTPGQTVTISCSGSTSNIGSHNVNWYQHLPGTAPKLLIYINNKRPSGVPDRFSGSKSGSSASLAISGLQSEDEADYYCAAWDDSLRRPVFGGGTQLTVL

SEQ ID NO: 26812 - protein, 249 aa, Artificial Sequence
  source: /note="Description of Artificial Sequence: Synthetic polypeptide"
QVQLVQSGAEVKKPGATVKISCKVSGYTFTDYYMHWVQQAPGKGLEWMGLVDPEDGETIYAEKFQGRVTITADTSTDTAYMELSSLRSDDTAVYYCARAEVMTTINNWYFDLWGRGTLVTVSSGTGGSGGTGSGTGGSTSYVLTQPPSASGTPGQRVTISCSGSSSNIGSNNVSWYQQLPGTAPKLLIYSNNQRPSGVPDRFSGSKSGTSASLAISGLQSEDEADYYCAAWDDSLNGWVFGGGTKLTVL

SEQ ID NO: 26813 - protein, 259 aa, Artificial Sequence
  source: /note="Description of Artificial Sequence: Synthetic polypeptide"
QVQLVQSGAEVKKPGASVKVSCKASGYTFTSYAISWVRQAPGQGLEWMGWISAYNGNTNYARKLQGRVTMTTDTSTSTAYMELRSLRSDDTAVYYCARAGLMFTAWFGELWDHGTKDNWFDPWGQGTLVTVSSGTGGSGGTGSGTGGSTNFMLTQPHSVSESPGKTVTISCTRSSGSIASYYVQWYQQRPGSSPTTVIYEDNQRPSGVPDRFSGSIDSSSNSASLTISGLKTEDEADYYCQSYDSSNQVFGGGTKLTVL

SEQ ID NO: 26814 - protein, 244 aa, Artificial Sequence
  source: /note="Description of Artificial Sequence: Synthetic polypeptide"
EVQLVESGGGLVKPGGSLGLSCAASGFFFSDYSMSWIRQAPGKGLEWLSNISGSGHSTKYAESMRGRITISRDNAKKSLSLQLNSLRAEDTAVYFCVRGGGYRMDVWGQGTTVTVSSGTGGSGGTGSGTGGSTQSALTQPRSVPGSPGQSVTISCTGTSSDVGGYNYVSWYQQHPGKAPKLMIYDVSKRPSGVPDRFSGSKSGNTASLTVSGLQAEDEADYYCSSYAGSNNFVVFGGGTKLTVL

SEQ ID NO: 26815 - protein, 246 aa, Artificial Sequence
  source: /note="Description of Artificial Sequence: Synthetic polypeptide"
EVQLVQSGAEVKKPGESLKISCKGSGYSFTKYWIGWVRQMPGKGLEWMGIIYPGDSDTRYSPSFQGQVTISADKSISTAYLQWSSLKASDTAMYYCARGSGIATGNSFDSWGQGTLVTVSSGTGGSGGTGSGTGGSTQTVVTQEPSLTVSPGGTVTLTCASSTGAVTSGYYPNWFQQKPGQAPRALIYSTSKKHSWTPARFSGSLLGGRAALTLSGAQPEDEADYYCLLSYGGARVFGGGTKLTVL

SEQ ID NO: 26816 - protein, 241 aa, Artificial Sequence
  source: /note="Description of Artificial Sequence: Synthetic polypeptide"
QVQLVQSGPEVKKPGASVTVSCKASGYSFSSYGISWVRQAPGQGLEWMGRIIPVGGNTLYSQMFQGRVTMTSDTSTSTVYLELSSLRSEDTAVYFCARDGGRWQFDYWGQGTLVTVSSGTGGSGGTGSGTGGSTDIQLTQSPSSVSASVGDRVTITCRASQGISNWLAWYQQKPGKAPELLIYAASSLQSGVPPRFSGSASGTDFTLTISSLQPEDFATYYCQQSKNFPYTFGQGTKVEIK

SEQ ID NO: 26817 - protein, 249 aa, Artificial Sequence
  source: /note="Description of Artificial Sequence: Synthetic polypeptide"
EVQLVESGAEVKKPGESLKISCKGSGYSFTSYWIGWVRQMPGKGLEWMGIIYPGDSDTRYSPSFQGQVTISADKSISTAYLQWSSLKASDTAMYYCARRYCSGGTCSDGFDIWGQGTMVTVSSGTGGSGGTGSGTGGSTQSALTQPPSASGSPGQSVTISCTGTSSDVGGYNYVSWYQQHPGKAPKLMIYEVSKRPSGVPDRFSGSKSGNTASLTVSGLQAEDEADYYCSSYAGSNNLVFGGGTKLTVL

SEQ ID NO: 26818 - protein, 246 aa, Artificial Sequence
  source: /note="Description of Artificial Sequence: Synthetic polypeptide"
QVQLVQSGAEVKKPGESLKISCKGSGYSFTSYWIGWVRQMPGKGLEWMGIIYPGDSDTRYSPSFQGQVTISADKSIGTAYLQWSSLKASDTAMYYCARLFRVRGGHFDSWGQGTLVTVSSGTGGSGGTGSGTGGSTQSALTQPASVSGSPGQSITISCTGTNSDVGGYNYVSWYQQHPGKAPKLLIYDVTNRPSGVSNRFSASKSGNTASLTISGLQAEDEADYYCSSFTSSSTRVFGGGTKLTVL

SEQ ID NO: 26819 - protein, 249 aa, Artificial Sequence
  source: /note="Description of Artificial Sequence: Synthetic polypeptide"
EVQLVESGPEVKKPGASVKVSCEASGYNLDNYGITWVRQAPGQGLEWLGWISAYNAKTEYGQRLQGRVTMTTDTATSTAYLELRSLRSDDTAVYYCARVLGYRGGWYDEGDAFDVWGQGTMVTVSSGTGGSGGTGSGTGGSTDIQLTQSPSFLSASVGDRVTITCRASQGIRSHLAWYQQKAGKAPKLLIYAASTLQSGVPSRFSGSGSGTEFTLTISSLQPDDFAAYYCQQLNTYPITFGQGTRLEIK

SEQ ID NO: 26820 - protein, 248 aa, Artificial Sequence
  source: /note="Description of Artificial Sequence: Synthetic polypeptide"
EVQLVESGGGVVQPGRSLRLSCAASGFTFSSYGMHWVRQAPGKGLEWVAMIWSDGSNKYYADSVKGRFTISRDNSKNTLYLQMNSLRVEDTAVYYCASNYGSGSYWGGFDYWGQGTLVTVSSGTGGSGGTGSGTGGSTQSALTQPASVSGSPGQSITISCTGTSSDVGGYNLVSWYQQHPGKAPKLMIYEGSKRPSGVSNRFFGSKSGDTASLTISGLQAEDEADYYCSSYTTSSTHVFGTGTKVTVL

SEQ ID NO: 26821 - protein, 248 aa, Artificial Sequence
  source: /note="Description of Artificial Sequence: Synthetic polypeptide"
QVQLVQSGAEVKKPGSSVKVSCKASGGTFSSYAISWVRQAPGQGLEWMGGIIPIFGTANYAQKFQGRVTITADESTSTAYMELSSLRSEDTAVYYCAREGGVGPAFDIWGQGTMVTVSSGTGGSGGTGSGTGGSTDIQMTQSPDSLAVSLGERATINCKSSQSVLHNSNNKNYLAWYQQKPGQPPKLLIYWASTRESGVPDRFSGSGSGTDFTLTISSLQAEDVAVYYCQQYYGSPYTFGQGTKLEIK

SEQ ID NO: 26822 - protein, 245 aa, Artificial Sequence
  source: /note="Description of Artificial Sequence: Synthetic polypeptide"
EVQLVESGAEVKKPGSSVKVSCKASGGTFSSYAISWVRQAPGQGLEWMGGIIPIFGTANYAQKFQGKVTITADESTSTAYMELSSLRSEDTAVYYCARLSPRYYGMDVWGQGTTVTVSSGTGGSGGTGSGTGGSTQSALTQPRSVSGSPGQSVTISCTGTSSDVGGYNYVSWYQQHPGKAPKLMIYGGSERPSGVSNRFSGSKSGNTASLTISGVQAEDEADYYCSSYTSSGTLLFGGGTQLTVL

SEQ ID NO: 26823 - protein, 242 aa, Artificial Sequence
  source: /note="Description of Artificial Sequence: Synthetic polypeptide"
EVQLVESGGGLVQPGGSLRLSCAASGFTFSSYAMSWVRQAPGKGLEWVSAISGTGGSAYYADSVKGRFTISRDNSKNTVYLQMNSLRAEDTAVYYCAKGHSSGTNWGQGTLVTVSSGTGGSGGTGSGTGGSTSYVLTQPPSASGTPGQRVTISCSGSSSNIGSNFVYWYQQLPGTAPKLLIYRNNQRPSGVPDRFSGSKSGTSASLAISGLRSEDEADYYCAAWDDSLSGVLFGGGTQLTVL

SEQ ID NO: 26824 - protein, 243 aa, Artificial Sequence
  source: /note="Description of Artificial Sequence: Synthetic polypeptide"
EVQLVESGAEVKKPGSSVKVSCKASGGTFSSYAISWVRQAPGQGLEWMGGIIPIFGTANYAQKFQGRVTITADESTSTAYMELSSLRSEDTAVYYCARGYAATDYGMDVWGQGTTVTVSSGTGGSGGTGSGTGGSTDIQLTQSPSTLSASVGDRVTITCRASQSISSYLNWYQQKPGKAPKLLIYAASSLQSGVPSRFSGSGSGTDFTLTISSLQPEDFATYYCQQSYSTPFTFGPGTKVDIK

SEQ ID NO: 26825 - protein, 249 aa, Artificial Sequence
  source: /note="Description of Artificial Sequence: Synthetic polypeptide"
EVQLVESGGGLVKPGGSLRLSCAASGFTFSSNSMNWVRQAPGKGLEWVSFISSSSTYIYYADSVKGRFTISRDNAKNSLYLQMNSLRAEDTAVYYCARESAAGISYDAFDIWGQGTMVTVSSGTGGSGGTGSGTGGSTQSALTQPASVSGSPGQSITISCTGTSSDVGGYKYVSWYQQHPGKAPKLMIYEVSNRPSGVSNRFSGSKSGSTASLTISGLQAEDEADYYCSSYTSSSTLGVFGTGTKVTVL

SEQ ID NO: 26826 - protein, 247 aa, Artificial Sequence
  source: /note="Description of Artificial Sequence: Synthetic polypeptide"
EVQLVETGGGLVQPGGSLRLSCAASGFTFSSYSMNWVRQAPGKGLEWVSFISSSSSTIYYADSVKGRFTIARDNAKNSLYLQMNSLRDEDTAVYYCARPVGTGISLFHAFDIWGQGTMVTVSSGTGGSGGTGSGTGGSTQSVLTQPPSVSVAPGQTARITCGGNNIGSKYVHWYQQKPGQAPVLVVYDDSDRPSGIPERFSGSNSGNTATLTISRVEAGDEADFYCQVWDGSSDPVVFGGGTKLTVL

SEQ ID NO: 26827 - protein, 248 aa, Artificial Sequence
  source: /note="Description of Artificial Sequence: Synthetic polypeptide"
EVQLVESGGGLVQPGRSLRLSCTGSGFTFGDYAMSWFRQAPGKGLEWVGFIRNKAYGGTAEYAASVKDRFIISRDDSKSIAYLQMNSLKTEDTAVYYCVRREYDTGWLDYWGQGTLVTVSSGTGGSGGTGSGTGGSTQSALTQPPSASGSPGQSVTISCTGTSSDVGGYNYVSWYQRHPGKAPKLMIYDVTDRPSGVSNRFSGSKSGNTASLTISGLQAEDEADYYCSSYTSSSTSAVFGGGTKLTVL

SEQ ID NO: 26828 - protein, 243 aa, Artificial Sequence
  source: /note="Description of Artificial Sequence: Synthetic polypeptide"
EVQLVESGGGVVQPGRSLRLSCVASEFTFSNYGMHWVRQAPGKGLEWVAVIWYDGSNEDYADSVKGRFTISRDNSKNTVYLHMNSLRAEDTAVYFCTRGQYSSTWFLDYWGQGTLVTVSSGTGGSGGTGSGTGGSTDIQLTQSPSTLSASVGDRVTITCRASQSISSWLAWYQQKPGKAPKLLIYKASSLETGVPSRFSGSGSGTDFTLTISSLQPEDFATYYCQQANSFPLTFGGGTKVDIK

SEQ ID NO: 26829 - protein, 241 aa, Artificial Sequence
  source: /note="Description of Artificial Sequence: Synthetic polypeptide"
EVQLVESGGGVVQPGRSLRLSCAASGFTFSSYGMHWVRQAPGKGLEWVAVIWYDGSNKYYADSVKGRFTISRDNSQNTLYLQMNSLRAEDTAVYYCTSYAIAATPGQGTLVTVSSGTGGSGGTGSGTGGSTQSVVTQPPSASGTPGQRVTISCSGSSSNIGSNYVYWYQQLPGTAPKLLIYRNNQRPSGVPDRFSGSKSGTSASLAISGLRSEDEADYYCAAWDDSLSGWVFGGGTQLTVL

SEQ ID NO: 26830 - protein, 243 aa, Artificial Sequence
  source: /note="Description of Artificial Sequence: Synthetic polypeptide"
QLQLQESGPGLVKPSETLSLTCAVSGYSITSGYYWGWVRQPPGKGLEWIGSIYHTGSTYYNPSLKSRVTISVDTSKNQFSLKLNSLTAADTAVYFCASQSPAFDFWGQGTMVTVSSGTGGSGGTGSGTGGSTQSVLTQPPSVSGAPGQRVTISCTGSSSNIGTGYDVHWYQQLPGTAPKLLIYGNNNRPSGVPDRFSGSKSGTSASLAITGLQAEDEADYYCATWDDSLNGWVFGGGTKLTVP

SEQ ID NO: 26831 - protein, 241 aa, Artificial Sequence
  source: /note="Description of Artificial Sequence: Synthetic polypeptide"
EVQLVESGGGLVQPGRSLRLSCAASGFTFRSYAMYWVRQAPGKGLEWLALISHDASKMFYADSVKGRFTISRDNSKNTLSLQMNSLTIEDTAVYYCVRERTGYYGAYWGQGTLVTVSSGTGGSGGTGSGTGGSTDIQMTQSPSSLSASVGDRVTLTCRASQGIGTWLAWYQQKPGKAPKLLIYSASSLQSGVPSRFSGSGSGTDFTLSISNLQPEDFATYYCQQANSFPITFGQGTRLEIK

SEQ ID NO: 26832 - protein, 237 aa, Artificial Sequence
  source: /note="Description of Artificial Sequence: Synthetic polypeptide"
EVQLVESGPGLVKPSETLSLTCTVSGGSISSYYWSWIRQPPGKGLEWIGYIYYTGTTNYNPSLNSRVTISADTSKNQFSLKLSSVTAADTAVYYCARGGQTAGVWGKGTTVTVSSGTGGSGGTGSGTGGSTQSVLTQPPSVSVAPGQTARITCGGYNIGRKSVHWYQQKPGLAPVLVVYDNSDRPSGIPARFSGSNSGNTATLTISGTQAMDEADYYCQAWDRGTAVFGTGTKVTVL

SEQ ID NO: 26833 - protein, 245 aa, Artificial Sequence
  source: /note="Description of Artificial Sequence: Synthetic polypeptide"
EVQLVESGGGLIQPGGSLRLSCAASGFTVSSDFMTWVRQAPGRGLEWVSLIYSGGKTNYADSVKGRFTISRDNSRNTLYLQMNSLRAEDTAVYYCARSVCSTISCSKLDDWGQGTLVTVSSGTGGSGGTGSGTGGSTQAVLTQPSSVSVAPGQTARITCGGNNIGRKSVHWYQQKPGLAPVLVVNDNSDRPSGIPARFSGSNSGNTATLTISRVEAGDEADYYCHVWGSSRDHYVFGTGTKVTVL

SEQ ID NO: 26834 - protein, 241 aa, Artificial Sequence
  source: /note="Description of Artificial Sequence: Synthetic polypeptide"
EVQLVETGGGLVQPGGSLRLSCAASGLTFSSYAMSWVRQAPGKGLEWVSALSGSTTFYADSVKGRFTISRDNAKNTLYLQMNSLRAEDTAVYYCARGNYYGMDVWGQGTTVTVSSGTGGSGGTGSGTGGSTSYVLTQPPSASGTPGQRVTISCSGSSSNIGKFYVYWYQQFPGAAPKLLIYSNNQRPSGVPDRFSGSKSGTSASLAISGLQSEDEADYYCAAWDGSLNGYVFGTGTKVTVL

SEQ ID NO: 26835 - protein, 245 aa, Artificial Sequence
  source: /note="Description of Artificial Sequence: Synthetic polypeptide"
EVQLVETGAEVKKPGESLRISCKGSGYSFTSYWIAWVRQMPGKGLEWMGVIYPGDSDARYSPSFQGQVTMSVDKSISTAYLQWSSLKASDTAMYYCAKLRSKNTGLDYWGQGTLVTVSSGTGGSGGTGSGTGGSTQSALTQPPSASGSPGQSVTISCTGTSSDVGGYNFVSWYQQHPGKAPKLMIYEVSNRPSGVPDRFSGSKSGNTASLTVSGLQAEDEADYYCSSYAGNNNLAFGGGTQLTVL

SEQ ID NO: 26836 - protein, 245 aa, Artificial Sequence
  source: /note="Description of Artificial Sequence: Synthetic polypeptide"
QVQLVQSGAEVKKPGESLKISCKGSGYSFSTYWIGWVRQMPGKGLEWMGIIYPGDSDTRYSPSFQGQVTISADKSISTAHLQWSSLKASDTAMYYCARPGPRGYNHGFDYWGQGTLVTVSSGTGGSGGTGSGTGGSTSSELTQDPAESVALGQTVKITCQGDSLRRYYASWYQQKPGQAPVLVIYGKNNRPSGIPDRFSGSRSGNTASLTITGAQAEDEAVYYCNSRDSSGNSVVFGGGTKLTVL

SEQ ID NO: 26837 - protein, 245 aa, Artificial Sequence
  source: /note="Description of Artificial Sequence: Synthetic polypeptide"
QMQLVQSGAEVKKSGESLKISCKGSGYSFSTYWIGWVRQMPGKGLEWMGIIYPGDSDTRYNPSFQGQVTISADKSISTAYLQWSSLKASDTAMYYCARRSARGGNWYFDLWGRGTLVTVSSGTGGSGGTGSGTGGSTEIVLTQSPGTLSLSPGERATLSCRASQSVSSSYLAWYQQKPGQAPRLLIYGASSRATGIPDRFSGSGSGTDFTLTISRLEPEDFAVYYCQQYGRSPLTFGGGTKVEIK

SEQ ID NO: 26838 - protein, 255 aa, Artificial Sequence
  source: /note="Description of Artificial Sequence: Synthetic polypeptide"
QVQLVQSGAEVKKPGESLKISCKGSGYSFTSYWIGWVRQMPGKGLEWMGIIYPGDSDTRYSPSFQGQVTISADKSISTAYLQWSSLKASDTAMYYCARWGGVCSSTSCPNRDAFDIWGQGTMVTVSSGTGGSGGTGSGTGGSTQSALTQPRSVSGSPGQSVTISCTGTSSDVGGYNYVSWYQQHPGKAPKLMIYDVSNRPSGVSNRFSGSKSGNTASLTISGLQAEDEAEFHCSSYRSSGASPVVFGGGTKLTVL

SEQ ID NO: 26839 - protein, 249 aa, Artificial Sequence
  source: /note="Description of Artificial Sequence: Synthetic polypeptide"
EVQLVQSGAEVKKPGESLKISCKGSGYSFTNYWIGWVRQMPGKGLEWMGIIYPGDSDTRYSPSFQGQVTISADKSISTAYLQWSSLKASDTAMYYCARHTQNKNGMNTFDIWGQGTMVTVSSGTGGSGGTGSGTGGSTQSALTQPPSASGSPGQSVTISCTGTSSDIGGYNYVSWYQQHPGKAPKLMIYEVSNRPPGVSNRFSGSKSGNTASLTISGLQAEDEADYYCSSYSTTTTRVIFGGGTKLTVL

SEQ ID NO: 26840 - protein, 242 aa, Artificial Sequence
  source: /note="Description of Artificial Sequence: Synthetic polypeptide"
EVQLVESGGGLVQPGRSLRLSCAASGFTFDDYAMHWVRQAPGKGLEWVSGISWNSGSIGYADSVKGRFTISRDNAKNSLYLQMNSLRAEDSAVYYCARGGQRFDFWGQGTLVTVSSGTGGSGGTGSGTGGSTQSALTQPPSASGSPGQSVTISCTGTSSDVGGYNYVSWYQQLPGKAPKLLIYDVNNRPSGVSNRFSGSKSGNTASLTISGLQAEDEAEYYCGSSVGSRLRIFGGGTKLTVL

SEQ ID NO: 26841 - protein, 246 aa, Artificial Sequence
  source: /note="Description of Artificial Sequence: Synthetic polypeptide"
EVQLVESGAEVKKPGESLKISCKGSGYSFTSHWIGWVRQMPGKGLEWMGIIYPGDSDTRYSPSFQGQVTISVDKSISTAYLQWSSLKASDTAMYYCARLGSSRWSHFDYWGQGTLVTVSSGTGGSGGTGSGTGGSTQSALTQPPSASGSPGQSVTISCTGTSTDVGGYNYVSWYQHHPGKAPKLVIYGVSKRPSRVPDRFSGSKSGNTASLTVSGLQAEDEADYYCSSYAGSNNLVFGGGTKLTVL

SEQ ID NO: 26842 - protein, 249 aa, Artificial Sequence
  source: /note="Description of Artificial Sequence: Synthetic polypeptide"
QVQLVQSGAEVKNPGESLKISCKGSGYTFTSYWIGWVRQMPGKGLEWMGSIYPGDSDTRYSPSFQGQVTISVDKSISTAYLQWSSLKASDTAMYYCARQYRAGSTTRFDPWGQGTLVTVSSGTGGSGGTGSGTGGSTDVVMTQSPLSLPVTPGEPASISCRSSQSLRHRNGNNYLDWYLQKPGQSPQLLIYLGSNRASGVPDRFSGSGSGTDFTLKISRVEAEDVGIYYCMQALQTPLTFGGGTKVEIK

SEQ ID NO: 26843 - protein, 246 aa, Artificial Sequence
  source: /note="Description of Artificial Sequence: Synthetic polypeptide"
QLQLQESGPGLVKPSQTLSLTCTVSGGSISSGGYYWSWIRQHPGKGLEWIGYIYYSGSTYYNPSLKSRVTISVDTSKNQFSLKLSSVTAADTAVYYCARERILDRMNDYWGQGTLVTVSSGTGGSGGTGSGTGGSTQSVVTQPPSVSGAPGQRVTISCTGSSSNIGAGYDVHWYQQLPGTAPKLLIYGNSNRPSGVPDRFSGSKSGTSASLAITGLQAEDEADYYCQSSDSSLNILFGGGTKLTVL

SEQ ID NO: 26844 - protein, 123 aa, Artificial Sequence
  source: /note="Description of Artificial Sequence: Synthetic polypeptide"
QVQLQESGPGLVKPSQTLSLTCTVSGGSISSGSYYWNWIRQPAGKGLEWIGRIYTSGRTNYNPSLKSRVTVSVDTSKNQFSLRLSSVTAADTAVYYCAREDAGEDIVNWFDPWGQGTLVTVSS

SEQ ID NO: 26845 - protein, 123 aa, Artificial Sequence
  source: /note="Description of Artificial Sequence: Synthetic polypeptide"
QVKLLEQSGGGVVQPGRSLRLSCAASGIFTLTYGIHWVRQAPGKGLEWVAGLWYGTNKNYAESVKGRFTISRDNSKDTLYLMNSLRADDTAVYYCARALQGLIHEMDDWGKGTAVTVSSASTK

SEQ ID NO: 26846 - protein, 147 aa, Artificial Sequence
  source: /note="Description of Artificial Sequence: Synthetic polypeptide"
EFMEFGLTWLSLVAILKGVQCEVQLLESGGDLVQPGRSLRLSCTASGFTFGNYALSWVRQSPGKGLEWVSVISGSAGSRYYADSVKGRFTISRDNSKNTLSLHMNSLRAEDTAVYYCARLYSGSPTSSASTKGPSVFPLAPSSKSKL

SEQ ID NO: 26847 - protein, 119 aa, Artificial Sequence
  source: /note="Description of Artificial Sequence: Synthetic polypeptide"
QVQLQESGPGLVKPSETLSLTCTISGGSISNHYWNWIRQSPGKGLEWIGYVYYSGSFNYNPSLKSRLSISMDTSKIQFSLHLSSVTAADTAVYYCARARRGKSGYVSSFDIWGQGTAVT

SEQ ID NO: 26848 - protein, 123 aa, Artificial Sequence
  source: /note="Description of Artificial Sequence: Synthetic polypeptide"
EVQLVETGPGLVKPSGTLSLTCAVSGASISSSNWWSWVRQSPGKGLEWIGEISHSGNINYNPSLQSRVSISVDKTKNILSLRLTSVTAADTAVYYCARRTYYYGSENYRRGWFDPWGQGTQVT

SEQ ID NO: 26849 - protein, 118 aa, Artificial Sequence
  source: /note="Description of Artificial Sequence: Synthetic polypeptide"
EVQLVESGGGLVKPGGSLRLFCSASGFTFRDYYMSWIRQAPGQALEWVSSISYGSNIIYYADSVKGRFTISRDDAKNSLFLQMNNLRAEDTAVYYCARIYDIFTGYPLDYWGQGTLVT

SEQ ID NO: 26850 - protein, 118 aa, Artificial Sequence
  source: /note="Description of Artificial Sequence: Synthetic polypeptide"
EVQLVESGGGLVQPGESLRLSCAASGFTFSGHAMSWVRQAPGKGLEWVSTISGSGGSTYYADSVRGRFTISRDNSKNTLYLQMNSLRAEDTAMFYCARTPGQWELSYWGYWGQGTLVT

SEQ ID NO: 26851 - protein, 112 aa, Artificial Sequence
  source: /note="Description of Artificial Sequence: Synthetic polypeptide"
EVQLVESGGGLVKPGGSLRLSCAVSGFTFSNYKMNWVRQAPGKGLEWVSSISSRNSYIDYADSVKGRFTISRDNAKSSLYLQMNSLRTEDTAVYYCASGATLDYWGQGTLVT

SEQ ID NO: 26852 - protein, 119 aa, Artificial Sequence
  source: /note="Description of Artificial Sequence: Synthetic polypeptide"
EVQLVESGAEVRKPGASVKVSCKASGYTFIGYYVHWLRQAPGQGLEWMGWINPSGGGALYAPKFQGLITLTSDPFTNTAYMEMRSLKSDDTAVYFCARDGRGSASHSRFDSWGQGTLVT

SEQ ID NO: 26853 - protein, 119 aa, Artificial Sequence
  source: /note="Description of Artificial Sequence: Synthetic polypeptide"
QVQLVQSGTEVKKLGASVKVSCKTSGYTFTNYGLTWVRQAPGGRPEWMGWISPNNGNTNYAQKFQGRVTVSTDKSTTTVYMELRSLTSDDTAVYYCARDYFGSGSTYFLDFWGQGTLVT

SEQ ID NO: 26854 - protein, 118 aa, Artificial Sequence
  source: /note="Description of Artificial Sequence: Synthetic polypeptide"
QVQLVQSGGEVKKPGASVKVSCKASGYTFTRYGLTWLRQAPGQGPEWMGWISGLNGNTNYAQKFQGRVTMTTDTSTSTAYMELRSLRPDDTAVYYCARDYYSSGNYYFEHWGHGTLVT

SEQ ID NO: 26855 - protein, 124 aa, Artificial Sequence
  source: /note="Description of Artificial Sequence: Synthetic polypeptide"
EVQLVESGGGLVKPGGSLRLSCAGSGFTFRSYRMNWVRQAPGKGLEWVSSISSSSDYIHYADSVKGRFSISRDNGKISVYLEMNSLRPEDTAVYYCARDFESRYGQQYHYFYGLDVWGQGTTVT

SEQ ID NO: 26856 - protein, 121 aa, Artificial Sequence
  source: /note="Description of Artificial Sequence: Synthetic polypeptide"
QVQLVQSGGGVVQPGASLRLSCAASGFSFSTYGMHWVRQAPGKGLEWVASISYDDGAAKHYADSMKGRLTISRDNSKDTLFLQMNSLRTEDTAVYYCAKLGIGSRYYHYGTDVWGQGTTVT

SEQ ID NO: 26857 - protein, 116 aa, Artificial Sequence
  source: /note="Description of Artificial Sequence: Synthetic polypeptide"
QLQLQESGPGLVKPSETLSLTCTVSGASISDTTYYWGWIRQTPGKGLEWIGSIYYSGSTYYTPSLRGRVTISRDTSKNQFSLRMPSVTAADTAVYYCATLTWTAMVHYWGQGTRVT

SEQ ID NO: 26858 - protein, 114 aa, Artificial Sequence
  source: /note="Description of Artificial Sequence: Synthetic polypeptide"
QVQLQQWGPGLVKPSQTLSLTCTVSVGSIKNGDPYWSWIRQLPGKGLEWIGYVNSRGSTYYSPSLKSRLTLSLDTSKSQFFLQLRSMSAADTAMYYCGRGFSGFDIWGQGTMVT

SEQ ID NO: 26859 - protein, 116 aa, Artificial Sequence
  source: /note="Description of Artificial Sequence: Synthetic polypeptide"
QITLKESGGGVVQPGRSLRLSCAASGFGFKTYPMHWVRQAPGKGLEWVALISFDGNYEKYADSVKGRFTISRDNSKNTLYLQMNTLRAEDTAVYYCTRGPQWEHSFDLWGQGTMVT

SEQ ID NO: 26860 - protein, 125 aa, Artificial Sequence
  source: /note="Description of Artificial Sequence: Synthetic polypeptide"
QVQLQESGPGLVKPSETLSLTCTVSGGFISDYYWNWIRQSPGKGLEWIGNIYNRGSANSSPSLKSRVTMSVDTSKNQFSLNLSSATAADTAVYYCARTRLYDSGGFSFRQFRQGFDVWGLGTVVT

SEQ ID NO: 26861 - protein, 116 aa, Artificial Sequence
  source: /note="Description of Artificial Sequence: Synthetic polypeptide"
EVQLVESGGGVVQPGRSLRLSCAASGFTFSSYGMHWVRQAPGKGLEWVAVISFDGSDIYYADSVRGRFTVSRDNSKNTLSLEMNSLRGDDTAVYFCAREINWGKYLDLWGRGTLVT

SEQ ID NO: 26862 - protein, 115 aa, Artificial Sequence
  source: /note="Description of Artificial Sequence: Synthetic polypeptide"
QVQLQESGSELVKPSQTLFLTCAVSGGSIKSGGYSWSWIRQPPGKGLEFIGYIYENGATYYNPSLDSRLTLSVDRSKNQFSLELTSVTAADTAVYYCARGRYYYFDVWGRGTRVT

SEQ ID NO: 26863 - protein, 119 aa, Artificial Sequence
  source: /note="Description of Artificial Sequence: Synthetic polypeptide"
EVQLVETGGGVVQPGRSLRLSCAASGFTFSQYAMHWVRQAPGKGLEWVAIISHDERNKYYVDSGMGRFTISRDNSKNTLFLQMNSLRSEDTAVYYCARDMRKGGYYYGFDVWGQGTTVT

SEQ ID NO: 26864 - protein, 117 aa, Artificial Sequence
  source: /note="Description of Artificial Sequence: Synthetic polypeptide"
QVQLQESGPGLVKPSGTLSLTCTVSGANIRGSNWWGWVRQPPGKGLEWIGEVYHSGTTNINPSLKSRVTMSADTSKNQLSLKVTSVTAADTAVYYCARREVFFYYGMDVWGQGTTVT

SEQ ID NO: 26865 - protein, 123 aa, Artificial Sequence
  source: /note="Description of Artificial Sequence: Synthetic polypeptide"
EVQLVQSGDEVKRPGASVKVSCKASGYKFTNIGISWVRQAPGQGLEWLGWISAYNGNTNYAQRLQDRVTMTTDKSTGTAYLELRSLRSDDTAVYFCARDFPSVRFWGNDYYGMDVWGQGTTVT

SEQ ID NO: 26866 - protein, 121 aa, Artificial Sequence
  source: /note="Description of Artificial Sequence: Synthetic polypeptide"
EVQLVETGGGLVKPGGSLRLSCVASGFTFSDYSVNWVRQAPGKGLEWVSSISTRSHYIYYAGSVKGRFTISRDNTKNSVYLQMNSLRAEDTAVYYCARGLPRLTAAAKYGMDVWGQGTTVT

SEQ ID NO: 26867 - protein, 110 aa, Artificial Sequence
  source: /note="Description of Artificial Sequence: Synthetic polypeptide"
EVQLVESGGTLVKPGGSLRLSCEGSGFAFGNYHMNWVRQAPGKGLEWISFISSTSRYIYYRDSVKGRFTISRDNAKNSLYLHMNNLRVDDTAVYYCASLPGVWGQGTLVT

SEQ ID NO: 26868 - protein, 119 aa, Artificial Sequence
  source: /note="Description of Artificial Sequence: Synthetic polypeptide"
EVQLVETGGGLVQPGGSLRLSCAASGFSFDKYGMSWVRQAPGKGLEWVAAISGSGGVTYYGDSVKGRFTISRDNSKNTLYLQMNSLRAEDTAIYYCAKNGKQWLVANAFDIWGQGTMVT

SEQ ID NO: 26869 - protein, 117 aa, Artificial Sequence
  source: /note="Description of Artificial Sequence: Synthetic polypeptide"
EVQLVESGGGVVQTGKSLRLSCAASGFMFSSYGFHWVRQAPGKGLEWVAVISFDGNNQRYADSVKGRFILSKDNSKNTVFLQINSLRHEDTAVYHCARERNLGVVAFDNWGPGTLVT

SEQ ID NO: 26870 - protein, 127 aa, Artificial Sequence
  source: /note="Description of Artificial Sequence: Synthetic polypeptide"
QVQLQQWGAGLLKPSETLSLTCSVSGGAFSGYYWTWIRQTPGKGLEWIGEIIHSGNTDYNPSLESRVTISVDTSKNQFSLRLTSVTAADTAVYYCARGKGVFYGSGTYYKSFYYQGMDVWGQGTTVT

SEQ ID NO: 26871 - protein, 119 aa, Artificial Sequence
  source: /note="Description of Artificial Sequence: Synthetic polypeptide"
QITLKESGGGVVQPGRSLRLSCTGSGFRFRDYVMNWVRQAPGQGLEWVATIWHDGSRKYYTDSVKGRFFISRDNSRNALFLELNTLRGEDTAVYFCARAEDCVGGSCYLDNWGQGTLVT

SEQ ID NO: 26872 - protein, 117 aa, Artificial Sequence
  source: /note="Description of Artificial Sequence: Synthetic polypeptide"
EVQLVQSGAEVKKPGYSVKVSCKASGDTFTAFDFSWVRQAPGQGLEWLGKITPMTAMTDYAPRLQGRVTMTADKATRTVYMQLSNLRGEDTAVYYCARAVRGGIWGLDSWGQGTLVT

SEQ ID NO: 26873 - protein, 117 aa, Artificial Sequence
  source: /note="Description of Artificial Sequence: Synthetic polypeptide"
QVQLQESGPGLVKPSETLSLTCTVSGGSITSNSFYWGWIRQAPGKGLEWIGSLYYSGSTYYNPSLRSRLTISLDRSKNEFSLNLKSVTAADTAVYYCARGILFVTYFDLWGQGTQVT

SEQ ID NO: 26874 - protein, 119 aa, Artificial Sequence
  source: /note="Description of Artificial Sequence: Synthetic polypeptide"
EVQLVESGGGVVQPGRSLRLSCAASGFTFKDYGMHWVRQAPGKGLEWVGVISYDGTKVNYADSVKGRFTISRDNPKKTVYLQTTSLKTDDTAVYFCAKGIWDAYLYYAMDVWGQGTTVT

SEQ ID NO: 26875 - protein, 128 aa, Artificial Sequence
  source: /note="Description of Artificial Sequence: Synthetic polypeptide"
QVQLQESGPGLVKTSQTLSLTCTVSGGSMSGVGYYWSWVRQHPGKGLEWIGYTHSSGKTYYNTSLKSRVIISLDTSKKQFSLTLSSVTAADTAVYFCARDRRITMSRGPTYHENHDAFDIWGQGTMVT

SEQ ID NO: 26876 - protein, 119 aa, Artificial Sequence
  source: /note="Description of Artificial Sequence: Synthetic polypeptide"
QVQLVQSGAEVKKPGASVKVSCKASGYTFTGYYLHWVRQAPGQGLEWMGWINPGGGGTLFAEKFQGRVTVTRDASISTAYMELSGLTSDDTAVYYCARDGRGSGSHSRFDPWGQGTLVT

SEQ ID NO: 26877 - protein, 123 aa, Artificial Sequence
  source: /note="Description of Artificial Sequence: Synthetic polypeptide"
QVQLVQSGGTLVQPGGSLTLSCEASGFSFGIIFSKYGMDWVRQAPGKGLEWVSAISGSGSTTSYADSVKGRFTISRDNSKNTLYLQINSLRADDTAVYFCAKRRRQWLSTDSFDIWGQGTMVT

SEQ ID NO: 26878 - protein, 121 aa, Artificial Sequence
  source: /note="Description of Artificial Sequence: Synthetic polypeptide"
QVQLQQWGPGLVKPSETLSLTCTVSGASFFSYHWGWIRQPPGKGLEWIGHISSSGATNYNPSLKSRLTISVDTSKNQFSLKLSSVTAADTAVYYCARVRVSVYGLLVHRVFDFWGQGALVT

SEQ ID NO: 26879 - protein, 126 aa, Artificial Sequence
  source: /note="Description of Artificial Sequence: Synthetic polypeptide"
QVQLQESGSGLVKPSQTLSLTCAVSGGSIMTGGYSWSWIRQTPGKGLEWIGYIYHSGSTSYNPSLESRVTISVDRFKNQLSLQLTSVTAADTGVYYCARDHGGFRCSGGACFSNYFDPWGQGALVT

SEQ ID NO: 26880 - protein, 119 aa, Artificial Sequence
  source: /note="Description of Artificial Sequence: Synthetic polypeptide"
QVQLVQSGGGLIQPGGSLRLSCAASGFTFDKYAMSWVRQAPGKGLEWIASTSGRGTSTFYADSVKGRFTISRDNSEKMLHLQMHGLRAEDTAVYYCAKNAKQWLVTNAFDVWGQGTMVT

SEQ ID NO: 26881 - protein, 112 aa, Artificial Sequence
  source: /note="Description of Artificial Sequence: Synthetic polypeptide"
QVQLQESGGGLVKPGGSLRLSCAASGFTFSNFAINWVRQAPGKGPEWLSSISSTSRYIYYADSVKGRFTISRDNAKNSLFLQMNSLRAEDTAVYYCATGRTLDYWGQGTLVT

SEQ ID NO: 26882 - protein, 112 aa, Artificial Sequence
  source: /note="Description of Artificial Sequence: Synthetic polypeptide"
EVQLVETGGGLVQPGGSLRLSCAASGFAFSNYNMNWVRQAPGKGLEWVSSISSRNSYIYYADSVKGRFTISRDNAKNSLFLQMNSLRAEDTAVYYCATGRTLDYWGQGTLVT

SEQ ID NO: 26883 - protein, 112 aa, Artificial Sequence
  source: /note="Description of Artificial Sequence: Synthetic polypeptide"
EVQLVESGGGLVKPGGSLRLSCAASGFAFSNYNMNWVRQAPGKGLEWVSSISSRNSYIYYADSVKGRFTISRDNARDSLYLQLNNLRAEDTAVYYCATGVTLDYWGQGTLVT

SEQ ID NO: 26884 - protein, 119 aa, Artificial Sequence
  source: /note="Description of Artificial Sequence: Synthetic polypeptide"
EVQLVESGGGLVQPGGSLRLSCAASGFTFSKYGMNWVRQAPGKGLEWVSGLSGSGGNTYYADSVKGRFTVSRDNSKDTLYLQINGLRAEDTARYFCAKRKRQYVVNDAFDFWGPGTMVT

SEQ ID NO: 26885 - protein, 119 aa, Artificial Sequence
  source: /note="Description of Artificial Sequence: Synthetic polypeptide"
QMQLVQSGGGFVQPGGSLRLSCVASVNTLDKNGMSWVRQAPGKGLEWVSGISGSGGTTYYADSVKGRFTISRDNSENTLYLQMNSLRVEDTAVYYCAKRRRQYLASDAFDVWGQGTLVT

SEQ ID NO: 26886 - protein, 115 aa, Artificial Sequence
  source: /note="Description of Artificial Sequence: Synthetic polypeptide"
QVQLQQWGAGLLKPSETLSLTCAVYGGSFSGYYWSWIRQPPGKGLEWIGDINHRGSASYNSSLKSRLTISVDTSKRQFSLKLSSVTAADTAVYYCARGGWRGGILHYWGQGTLVT

SEQ ID NO: 26887 - protein, 119 aa, Artificial Sequence
  source: /note="Description of Artificial Sequence: Synthetic polypeptide"
QVQLVQSKAEMKRPGASVKVSCTTSGYTFTNYGLGWVRQAPGQGLEYVGWITPYNGYTNSAQNLQGRVTLTTDTSTRTAYMELRSLRSDDTAVYFCARGLRYYFTTSSFDYWGQGTLVT

SEQ ID NO: 26888 - protein, 118 aa, Artificial Sequence
  source: /note="Description of Artificial Sequence: Synthetic polypeptide"
QVQLVQSGAEVKKPGASVKVSCKASGYTFSRYGMTWLRQAPGQGPEWMGWISGYNGNTNYAQKVEGRVTITTDTSTSTAYMELRSLKSDDTAVYYCARDYYHSGSYYFDYWGQGTLVT

SEQ ID NO: 26889 - protein, 124 aa, Artificial Sequence
  source: /note="Description of Artificial Sequence: Synthetic polypeptide"
EVQLVETGAEVKKPGASVKVSCKASDYIFTKYDINWVRQAPGQGLEWMGWMSANTGNTGYAQKFQGRVTMTRDTSINTAYMELSSLTSGDTAVYFCARSSLFKTETAPYYHFALDVWGQGTTVT

SEQ ID NO: 26890 - protein, 118 aa, Artificial Sequence
  source: /note="Description of Artificial Sequence: Synthetic polypeptide"
QVQLVQSGAEVRKPGASVKVSCKASGFSLSDSYMHWVRQAPGQGLEWMGYINPYSGGTNFAQKFQGWVTVTRDTSINTLYMDLSRLKSDDTAVYYCAREDFSGNWRAFDIWGQGTMVT

SEQ ID NO: 26891 - protein, 129 aa, Artificial Sequence
  source: /note="Description of Artificial Sequence: Synthetic polypeptide"
QVQLQESGPGLVKTSGTLSLTCVVSGDSIRTNNWWSWVRQTPGRGLEWIGEIYYSGKTRYNPSLESRVTISLDTSNSQFSLKLTSVSAADTAVYYCSRVPRLVVARIRPSSPPSRDTWFDTWGQGILVT

SEQ ID NO: 26892 - protein, 119 aa, Artificial Sequence
  source: /note="Description of Artificial Sequence: Synthetic polypeptide"
QVQLQQWGAGLLKPSETLSLTCAVYGGSFSGYYWSWIRQPPGKGLEWIGEINHSGSTNYNPSLKSRVTISVDTSKNQFSLKLSSVTAADTAVYYCARKPRGYSGYRAGMDVWGQGTTVT

SEQ ID NO: 26893 - protein, 120 aa, Artificial Sequence
  source: /note="Description of Artificial Sequence: Synthetic polypeptide"
QVQLQQWGAGLLKPSETLSLTCAVYGGSFSGYYWSWIRQPPGKGLEWIGEINHSGSTNYNPSLKSRVTISVDTSKNQFSLKLSSVTAADTAVYYCARGPRFRCSSTSCSFDYWGQGTLVT

SEQ ID NO: 26894 - protein, 122 aa, Artificial Sequence
  source: /note="Description of Artificial Sequence: Synthetic polypeptide"
QVQLQQSGAEVKKPGASVKVSCKTSGGPLSNYGISWVRQARGQGLEWMGGIVPNSGTANSAQKFQGRVTITADPSAATAYLEVRSLRDEDTAVYYCVRGNWNYRLGWPSLDYWGQETLVTVS

SEQ ID NO: 26895 - protein, 116 aa, Artificial Sequence
  source: /note="Description of Artificial Sequence: Synthetic polypeptide"
EVQLVESGGGVVQPGRSLRLSCSASGFTFNNYAMHWVRQAPGKGLEWVALISFDGTNRNYADSVKGRFTVSRDNSQNTLSLQMNSLRVEDTAVYYCARHFNWGKTLDYWGQGSLVT

SEQ ID NO: 26896 - protein, 126 aa, Artificial Sequence
  source: /note="Description of Artificial Sequence: Synthetic polypeptide"
EVQLVETGGGVVQPGRPLRLSCAASGFDFSRYAINWVRQAPGKGLEWVALISYDGLNKYYADSVKGRFAISRDNSKNTVFLQVSSLRPEDTATYYCAKASAAASLIHRVDYYYFGVDVWGQGTTVT

SEQ ID NO: 26897 - protein, 112 aa, Artificial Sequence
  source: /note="Description of Artificial Sequence: Synthetic polypeptide"
EVQLVETGGGLVKPGGSLRVSCTVSGFTFSNYNMNWVRQAPGKGLEWVSSISSTSAYIYYADSVRGRFTISRDNAKNSLYLQMNSLRADDTAVYYCASGRTFDYWGQGTLVT

SEQ ID NO: 26898 - protein, 119 aa, Artificial Sequence
  source: /note="Description of Artificial Sequence: Synthetic polypeptide"
EVQLVESGGGLVQPGGSLRLSCAASGFTFHSYGMRWVRQAPGKGLEWVSAISGRGTTTDYADSVKGRFTISRDNSKNTLYLQMNSLRAEDTAVYYCAKAHKQWLVSNALDYWGQGTLVT

SEQ ID NO: 26899 - protein, 112 aa, Artificial Sequence
  source: /note="Description of Artificial Sequence: Synthetic polypeptide"
EVQLVESGGGLVKPGGSLSLSCAVSGFSISNYWMNWVRQAPGKGLEWVSSISSTSTTIYYAASVKGRFTVSRDNGRNVVSLQMSSLRVEDTAVYFCTSGRSFDYWGQGTLVT

SEQ ID NO: 26900 - protein, 150 aa, Artificial Sequence
  source: /note="Description of Artificial Sequence: Synthetic polypeptide"
EFMDMEVLVQLLFLLLLWLPDITGEFVLTQSPGTLSLSPGDRATLSCRASQSVDNYYLGWYQQKPGQAPRLLIFGASSRATGIPDRFSGSGSGTDFTLTISRLEPEDFAIYYCQHYGSSPPWTFGQGTKVEMKRTVAAPSVFIFPPSDEA

SEQ ID NO: 26901 - protein, 123 aa, Artificial Sequence
  source: /note="Description of Artificial Sequence: Synthetic polypeptide"
QVQLVESGGGVVQPGRSLRLSCAGSGFIFSSYAMNWVRQTPVKGLEWVAVISYDGSNKYYADSVKGRFTISRDNSKNTLYLQMNSLGGEDTAVYFCARGRVHSSSWPTPSDLWGQGTLVTVSS

SEQ ID NO: 26902 - protein, 127 aa, Artificial Sequence
  source: /note="Description of Artificial Sequence: Synthetic polypeptide"
QVQLVESGGGVVQPGRSLRVSCEASGLNFSNHGMHWVRQAPGKGLEWLAIISYDGTNKFYADSVKGRFTISRDNSRNTVFLEMNSLRAEDTAVYYCAKDVWWPRPSRDSYYSAMDVWGQGTTVTVSS

SEQ ID NO: 26903 - protein, 127 aa, Artificial Sequence
  source: /note="Description of Artificial Sequence: Synthetic polypeptide"
QVQLLESGGGLVKPGGSLRLSCAASGFTFTDYYMTWIRQAPGKGLEWVSCVGSSGTYTNYADSVKGRFTISRDNAKNSLYLQMNSLRTEDTAVYYCARVTGSGNFYGSYHYYYMDVWGKGTTVTVSS

SEQ ID NO: 26904 - protein, 125 aa, Artificial Sequence
  source: /note="Description of Artificial Sequence: Synthetic polypeptide"
QVQLQESGPGLVKPSETLSLTCTVSGDSIGSYYWSWIRQTPAKGLEWIGNIFYTGTINYNPSLKSRVTISVDTFKNQFSLTLTSVTAADTAVYYCAREGEFFDILTGDYRGLDYWGQGTLVTVSS

SEQ ID NO: 26905 - protein, 125 aa, Artificial Sequence
  source: /note="Description of Artificial Sequence: Synthetic polypeptide"
EVQLVESGGDLVQPGGSLRLSCEASGFTFSNYAMSWVRQAPGKGLEWVSGTSGSGGSTYYADSVKGRFTLSRDNSKNTLYLQMNSLRAEDTAVYYCAKDREVLRFFLLPYYFDSWGQGTLVTVSS

SEQ ID NO: 26906 - protein, 122 aa, Artificial Sequence
  source: /note="Description of Artificial Sequence: Synthetic polypeptide"
QVQLVESGAEVKKPGASVKVSCKTSGYTFSSYGITWVRQAPGQGLEWMGWISAYNGDTNYAQNVQGRVTMTTDTSTSTAYMELRSLRFDDTAVYYCARDTSFAPSGYGFDISGQGTTVTVSS

SEQ ID NO: 26907 - protein, 123 aa, Artificial Sequence
  source: /note="Description of Artificial Sequence: Synthetic polypeptide"
QVQLVESGPGLVKPSETLSLTCTVSGASVSSGTYYWSWIRQPPGKGLEWIGYSYYTGSSDSNASLKSRVTLSIDSRNLLSLKLSVTAADTAVYYCARDRRKVRGVWAGYSGMDVWGPGVTVSS

SEQ ID NO: 26908 - protein, 120 aa, Artificial Sequence
  source: /note="Description of Artificial Sequence: Synthetic polypeptide"
QITLRESGAEVTKPGSSVKVSCKASGGTFGSYGIRWVRQAPGQGLEWMGGIIPMFGTANYAQRFQGRVTITADKSTSTAYMELSSLKSEDTAVYYCARENSIVGAWFDPWGQGTLVTVSS

SEQ ID NO: 26909 - protein, 117 aa, Artificial Sequence
  source: /note="Description of Artificial Sequence: Synthetic polypeptide"
EVQLVESGGGVVQPGGSLRLSCAASGFTFSSFDMHWVRQAPGKGLQWVAFIRHHGTNHSYVDSVKGRFTISRDNSRNTLYLQMNSLRPEDTALYYCAKDLGFGELYWGQGTLVTVSS

SEQ ID NO: 26910 - protein, 102 aa, Artificial Sequence
  source: /note="Description of Artificial Sequence: Synthetic polypeptide"
DIQLTQSPSFLSASVGDRVTITCWASQDISSYLAWYQQRPGEAPELLIYAASTLQSGVPSRFSGGGSGDFLISSLQPEDFAYYCQQLKSYPPTFGGGKVEIK

SEQ ID NO: 26911 - protein, 105 aa, Artificial Sequence
  source: /note="Description of Artificial Sequence: Synthetic polypeptide"
EIVLTQSPGTLSLFPGERATLSCRASQSVSSNYLAWYQQKPGQAPRLLIYGASSRATGIPDRFSGSGSGTDFTLTISRLEPEDFAVYYCQLFGSPFGQGTKVEIK

SEQ ID NO: 26912 - protein, 103 aa, Artificial Sequence
  source: /note="Description of Artificial Sequence: Synthetic polypeptide"
EIVLTQSPATLSLSPGKKATLSCRASQSVSNYLAWYQQKPGQSPRLLIFDASKRAAGIPARFSGSGSGDFTLISSLEPEDFAVYYCQQRTWLTFGGGTKVEIK

SEQ ID NO: 26913 - protein, 108 aa, Artificial Sequence
  source: /note="Description of Artificial Sequence: Synthetic polypeptide"
EIVLTQSPGTLSLSPGERATLSCRASQSVSSTYLAWFQQRPGQAPRLLIYGTSSRATGIPDRFSGGGSGTDFTLTISRLEPEDFAVYFCQQYGTSPWTFGQGTKVEIK

SEQ ID NO: 26914 - protein, 105 aa, Artificial Sequence
  source: /note="Description of Artificial Sequence: Synthetic polypeptide"
EIVLTQSPGSLSLSPGERATLSCRASQSVSSDYVAWYQQKPGQAPRLLIFDASTRATGIPDRFSGSGSGDFTLIGRLEPEDFAVYYCQQYGSPLTFGGGAKVEIK

SEQ ID NO: 26915 - protein, 106 aa, Artificial Sequence
  source: /note="Description of Artificial Sequence: Synthetic polypeptide"
DIQLTQSPSSLSASVGDRVTITCRASQGIRHELAWYQQKPGKAPQRLIYAASSLQSGVPSRFSGSGSGTDFTLTINSLQPEDSATYYCLQVSYPRTFGQGTRVDIK

SEQ ID NO: 26916 - protein, 110 aa, Artificial Sequence
  source: /note="Description of Artificial Sequence: Synthetic polypeptide"
EIVMTQSPSSLSASVGDRVTITCQASQEITNYLNWYQQKPGKAPKLLIYDASHLETGVPSRFSGSGSGTDFSFTISSLQPEDIATYYCQQYDDFPWGGVTFGGGTKVEIK

SEQ ID NO: 26917 - protein, 101 aa, Artificial Sequence
  source: /note="Description of Artificial Sequence: Synthetic polypeptide"
EIVMTQSPSSLSASVGDRVTFTCRASQSISTYLNWYQQKPGKAPTLLIYAASTLRSGVPSRFSGSGSGDFLISSLQPVDFAYFCQQSYSSPYTFGQGLEIK

SEQ ID NO: 26918 - protein, 108 aa, Artificial Sequence
  source: /note="Description of Artificial Sequence: Synthetic polypeptide"
DIVMTQSPATLSVSPGDRATLSCRASQSVRTNLAWYQQKPGQAPRLLIHDGFTRSAGIPARFSGSGSGTEFTLTISSLQSEDFAVYYCQQYRTWPRVTFGPGTKVDIK

SEQ ID NO: 26919 - protein, 283 aa, Artificial Sequence
  source: /note="Description of Artificial Sequence: Synthetic polypeptide"
MTQSPASLAVSLGQRATISCRASKSVSTSGYSYMHWYQQKPGQPPKLLIYLASNLESGVPARFSGSGSGTDFTLNIHPVEEEDAATYYCQHSRELPLTFGAGTKLEIKSSGGGGSGGGGGGSSRSSFEVQLQQSGPELVKPGTSVKISCKTSGYTFTEYTIHWVKQSQGKSLEWIGGINPKNGGTRYNQKFKDKATLTVDKSSSTAYMELRSLTSEDSEVYYCARRVYDEYPYYYALDYWGQGTSVTVSSAKTTPPSVTSGQAGQHHHHHHGAYPYDVPDYAS

SEQ ID NO: 26920 - protein, 213 aa, Artificial Sequence
  source: /note="Description of Artificial Sequence: Synthetic polypeptide"
DFTLNIHPVEEEDAATYYCQHSRELPLTFGAGTKLEIKSSGGGGSGGGGGGSSRSSLEVQLQQSGPELVKPGASVKISCKTSGYTFTEYTIHWVKQSHGKSLEWIGGINPKNGGTRYNQKFKDKATLTVDKSSSTAYMELRSLTSEDSEVYYCARRVYDEYPYYYALDYWGQGTSVTVSSAKTTAPSVTSGQAGQHHHHHHGAYPYDVPDYAS

SEQ ID NO: 26921 - protein, 283 aa, Artificial Sequence
  source: /note="Description of Artificial Sequence: Synthetic polypeptide"
MTQSPASLAVSLGQRATISCRASKSVSTSGYSYMHWYQQKPGQPPKLLIYLASNLESGVPARFSGSGSGTDFTLNIHPVEEEDAATYYCQHSRELPLTFGAGTKLEIKSSGGGGSGGGGGGSSRSSLEVQLQQSGPELVKPGASVKISCKTSGYTFTEYTMHWVKQSHGKSLEWVGGINPKNGGITYNQKFQGKATLTVDKSSSTASMELRSLTSDDSAVYYCARRVYDDYPYYYAMDYWGQGTSVTVSSAKTTAPSVTSGQAGQHHHHHHGAYPYDVPDYAS

SEQ ID NO: 26922 - protein, 258 aa, Artificial Sequence
  source: /note="Description of Artificial Sequence: Synthetic polypeptide"
LLNSGNQKNYLTWYQQKPGQPPKLLIYWASTRESGVPDRFTGRGSGTDFTLTISSVQAEDLAVYFCQNDFIYPFTFGGGTKLEIKSSGGGGSGGGGGGSSRSSLEVQLQQSGAELVRPGTSVKISCKASGYTFTNFWLGWVKQRPGHGLEWIGNIYPGRDYTNFNEKFKGKATLTADTSSSTAYMQLSGLTSEDSAVYFCAREGLRVPYYAMDYWGQGTSVTVSSAKTTAPSVTSGQAGQHHHHHHGAYPYDVPDYAS

SEQ ID NO: 26923 - protein, 283 aa, Artificial Sequence
  source: /note="Description of Artificial Sequence: Synthetic polypeptide"
MTQAPASLAVSLGQRATISCRASKSVSSSGYNYLHWYQQKPGQPPKLLIYLASNLESGVPARFSGSGSGTDFTLNIHPVEEEDAATYYCQHSREFPLTFGAGTKLEIKSSGGGGSGGGGGGSSRSSLEVQLQQSGPELVKPGASVKISCKTSGYTFTGYTMHWVRQSHGKSLEWIGGINPKNGGIIYNQKFQGKATLTVDKSSSTASMELRSLTSDDSAVYYCARRVYDDYPYYYAMDYWGQGTSVTVSSAKTTPPSVTSGQAGQHHHHHHGAYPYDVPDYAS

SEQ ID NO: 26924 - protein, 348 aa, Artificial Sequence
  source: /note="Description of Artificial Sequence: Synthetic polypeptide"
MTQTHKFMSTSVGDRVSITCKASQDVGTAVAWYQQKPGQSPKLLIYWASTRHTGVPDRFTGSGSGTDFTFTISNVQSEDLADYFCQQYSAILYTFGGGTKLEIKSSGGGGSGGGGGGSSRSSFEVQLQQSGAELMKPGASVKISCKATGHTFSSFWIEWVKQRPGQGLEWIGEILPGRSTSNYNEKFKGKATITADTSSDTAYMQLSSLTSEDSAVYYCARKDLYYGYDPHFDYWGQGTTLTVSSAKTTAPSVTSGQAGQHHHHHHGAYPYDVPDYASMTQSPASLAVSLGQRATISCRASKSVSTSGYSYMHWYQQKPGQPPKLLIYLASNLESGVPARFSGSGSGT

SEQ ID NO: 26925 - protein, 278 aa, Artificial Sequence
  source: /note="Description of Artificial Sequence: Synthetic polypeptide"
MTQELHSPHHLVEQSYSCRSSTGAVTTSNYANWVQEKPDHLFTGLIGGTSNRAPGVPVRFSGSLIGDKAALTITGAQTEDDAMYFCALWYSTHWVLGGGTKLLSSSSGGGGSGGGGGGSSRSSLEVKLMESGAELIRPGTSVKISCKTSGYTFTDFWLGWAKQRPGHGLEWIGNIYPGRDYTNFNEKFKGRAILTADTSFTTAYMQLSGLTSEDSAVYFCAREGLRVPYFAMDYWGQGTSVTVSSAKTTAPSVTSGQAGQHHHHHHGAYPYDVPDYAS

SEQ ID NO: 26926 - protein, 303 aa, Artificial Sequence
  source: /note="Description of Artificial Sequence: Synthetic polypeptide"
MKYLLPTAAAGLLLLAAQPAMADYKDQSALTQPASVSGNPGQTVTISCAGTSSDIGGYNHVAWYQQFPGSAPKTLIYSVDKRPSGIPARFSGSKSGNTATLTISGLQAEDEADYYCGSYKRGGTALFGSGTRLTVLGQPKSAPSGGGGSGGGGSGGGGSGGGGSQVRLQESGPSLVKPSQTLSLTCTVSGFSATSYAVGWVRQAPGKALEWVGSIWAGGSKHYNPALKSRLSITRDTSKSQVSLLLSSVTTEDTAVYYCARGGSDIDAWGPGLLVSVSSASTTAPKVASGAEFEQKLISEEDL

SEQ ID NO: 26927 - protein, 283 aa, Artificial Sequence
  source: /note="Description of Artificial Sequence: Synthetic polypeptide"
MKYLLPTAAAGLLLLAAQPAMADYKDVVLTQTPLSLSVIPGETASISCKSSQSLVHSNGKTYLYWIQHKPGQSPKGLIYRISNRYAGVSDRFTGSGSGTDFTLQISSVQAEDAGVYYCVQGTEVPHTFGQGTKLEIKGGGGSGGGGSQVRLQESGPSLVKPSQTLSLTCTVSGFSLSNYDITWVRQAPGKALEWVGNVYRGGNTHYNPALKSRLSITRDTSKSQVSLSLSSVTTEDTAVYYCVRRFDVWGRGLLVTVSSASTTAPKVASGAEFEQKLISEEDL

SEQ ID NO: 26928 - protein, 330 aa, Artificial Sequence; identical to SEQ ID NO: 7167
  source: /note="Description of Artificial Sequence: Synthetic polypeptide"

SEQ ID NO: 26929 - protein, 330 aa, Artificial Sequence
  source: /note="Description of Artificial Sequence: Synthetic polypeptide"
ASTKGPSVFPLAPSSKSTSGGTAALGCLVKDYFPEPVTVSWNSGALTSGVHTFPAVLQSSGLYSLSSVVTVPSSSLGTQTYICNVNHKPSNTKVDKKVEPKSCDKTHTCPPCPAPNLLGGPSVFIFPPKIKDVLMISLSPIVTCVVVDVSEDDPDVQISWFVNNVEVHTAQTQTHREDYNSTLRVVSALPIQHQDWMSGKEFKCKVNNKDLPAPIERTISKPKGSVRAPQVYVLPPPEEEMTKKQVTLTCMVTDFMPEDIYVEWTNNGKTELNYKNTEPVLDSDGSYFMYSKLRVEKKNWVERNSYSCSVVHEGLHNHHTTKSFSRTPGK

SEQ ID NO: 26930 - protein, 377 aa, Artificial Sequence
  source: /note="Description of Artificial Sequence: Synthetic polypeptide"
ASTKGPSVFPLAPCSRSTSGGTAALGCLVKDYFPEPVTVSWNSGALTSGVHTFPAVLQSSGLYSLSSVVTVPSSSLGTQTYTCNVNHKPSNTKVDKRVELKTPLGDTTHTCPRCPEPKSCDTPPPYPRCPEPKSCDTPPPCPRCPEPKSCDTPPPCPRCPAPNLLGGPSVFIFPPKIKDVLMISLSPIVTCVVVDVSEDDPDVQISWFVNNVEVHTAQTQTHREDYNSTLRVVSALPIQHQDWMSGKEFKCKVNNKDLPAPIERTISKPKGSVRAPQVYVLPPPEEEMTKKQVTLTCMVTDFMPEDIYVEWTNNGKTELNYKNTEPVLDSDGSYFMYSKLRVEKKNWVERNSYSCSVVHEGLHNHHTTKSFSRTPGK

SEQ ID NO: 26931 - protein, 330 aa, Artificial Sequence [sequence omitted]

SEQ ID NO: 26932 - protein, 377 aa, Artificial Sequence
  source: /note="Description of Artificial Sequence: Synthetic polypeptide"
ASTKGPSVFPLAPCSRSTSGGTAALGCLVKDYFPEPVTVSWNSGALTSGVHTFPAVLQSSGLYSLSSVVTVPSSSLGTQTYTCNVNHKPSNTKVDKRVELKTPLGDTTHTCPRCPEPKSCDTPPPYPRCPEPKSCDTPPPCPRCPEPKSCDTPPPCPRCPAPELLGGPSVFLFPPKPKDTLMISRTPEVTCVVVDVSHEDPEVQFKWYVDGVEVHNAKTKPREEQFNSTFRVVSVLTVLHQDWLNGKEYKCKVSNKALPAPIEKTISKTKGQPREPQVYTLPPSREEMTKNQVSLTCLVKGFYPSDIAVEWESSGQPENNYNTTPPMLDSDGSFFLYSKLTVDKSRWQQGNIFSCSVMHEALHNRFTQKSLSLSPGK

SEQ ID NO: 26933 - protein, 117 aa, Artificial Sequence
  source: /note="Description of Artificial Sequence: Synthetic polypeptide"
QVQLVESGGGLVQPGGSLRLSCAASGFTFSNYAMSWVRQAPRRGLEWVSTIGTTDGDIHYADSVKGRFTISRDNAKNTLYLQMSSLRAEDTAVYFCALRFGEHFDYWGQGTLVTVSS

SEQ ID NO: 26934 - protein, 113 aa, Artificial Sequence
  source: /note="Description of Artificial Sequence: Synthetic polypeptide"
DIVMTHTPLSSPVTLGQPASISCRSSQSLVHSDGNTYLSWLQQRPGQPPRLLIYKISNRFSGVPDRFSGSGAGTDFTLKISRVEAEDVGVYYCMQATQFPWTFGQGTKVEIKR

SEQ ID NO: 26935 - protein, 105 aa, Artificial Sequence
  source: /note="Description of Artificial Sequence: Synthetic polypeptide"
EESGGGLVQPGGSRKLSCAASGFTFSSFGMHWVRQAPEKGLEWVAYISSGSSTLHYADTVKGRFTISRDNPKNTLFLQMKLPSLCYGLLGSRNLSHRLLSQNNSP

SEQ ID NO: 26936 - protein, 106 aa, Artificial Sequence; identical to SEQ ID NO: 4042
  source: /note="Description of Artificial Sequence: Synthetic polypeptide"

SEQ ID NO: 26937 - protein, 106 aa, Artificial Sequence
  source: /note="Description of Artificial Sequence: Synthetic polypeptide"
ADAAPTVSIFPPSSEQLTSGGASVVCFLNNFYPKDINVKWKIDGSERQNGVLNSWTDQDSKDSTYSMSSTLTLTKDEYERHNSYTCEATHKTSTSPIVKSFNRNEC

SEQ ID NO: 26938 - protein, 108 aa, Artificial Sequence
  source: /note="Description of Artificial Sequence: Synthetic polypeptide"
TQSPAIMSASLGEKVTMTCRASSSVNYMYWYQQKSDASPKLWIYYTSNLAPGVPVRFSGSGSGNSYSLTISSMEGEDAATYYCQQFTSSPYTFGGGTKLEIKRADAAP

SEQ ID NO: 26939 - protein, 16 aa, Artificial Sequence
  source: /note="Description of Artificial Sequence: Synthetic peptide"
KASGYSFTVYYIYWVK

SEQ ID NO: 26940 - protein, 14 aa, Artificial Sequence
  source: /note="Description of Artificial Sequence: Synthetic peptide"
TRWGLRRGFAYWGQ

SEQ ID NO: 26941 - protein, 260 aa, Artificial Sequence
  source: /note="Description of Artificial Sequence: Synthetic polypeptide"
AQVKLQQSGAELVRPGASVKLSCKASGYSFTVYYIYWVKQRPGQALEWIGEINPSNGGTNFNEKFKTKATLTVDKSTSTVYMQLSSLTSEDSAVYYCTRWGLRRGFAYWGQGTTVTVSSSGGGSGGGGSGGGGSDIELTQSPKSMSMSVGERVTLSCKASENVGTHVSWYQQRPEESPKLLIYGASNRYTGVPDRFTGSGSATDFTLTISNVQAEDLADYHCGQTYSYPFTFGLGTKLEIKRAAAGAPVPYPDPLEPRAA

SEQ ID NO: 26942 - protein, 213 aa, Artificial Sequence
  source: /note="Description of Artificial Sequence: Synthetic polypeptide"
QVQLQQPGSVLVRPGASVKLSCKASGYTFTSSWMHWAKQRPGQGLEWIGEIHPNSGNTNYNEKFKGKATLTVDTSSSTAYVDLSSLTSEDSAVYYCVRGFAYWGQGTLVTVSAAKTTAPSVYPLAPVCGDTTGSSVTLGCLVKGYFPEPVTLTWNSGSLSSGVHTFPAVLQSDLYTLSSSVTVTSSTWPSQSITCNVAHPASSTKVDKKIEPR

SEQ ID NO: 26943 - protein, 212 aa, Artificial Sequence
  source: /note="Description of Artificial Sequence: Synthetic polypeptide"
  MOD_RES (79)..(79): Any amino acid
EVQLQESGPSLVKPSQTLSLTCSVTGDSITSGYWNWIRKFPGNRLEYMGYINYSGNTFYNPSLKSRISITRDTSKNQYXLQLNSVTTEDTATYYCATYRFNYWGQGTLVTVSAAKTTPPSVYPLAPGCGDTTGSSVTLGCLVKGYFPEPVTVTWNSGSLSSGVHTFPALLQSGLYTMSSSVTVPSSTWPSQTVTCSVAHPASSTTVDKKLEP

SEQ ID NO: 26944 - protein, 222 aa, Artificial Sequence
  source: /note="Description of Artificial Sequence: Synthetic polypeptide"
EVQLLESGPELVRLGASVKVSCKASGYSFTDYNMYWVKQSHGKSLEWIGYIDPYNGDASYNQKFKGKATLTVDKSSSTAFMHLNSLTSEDSAVYYCARTGYYYGRSYAMDYWGQGTSVTVSSAKTAAPSVYPLAPVCGDTTGSSVTLGCLVKGYFPEPVTLTWNSGSLSSGVHTFPAVLQSDLYTLSSSVTVTSSTWPSQSITCNVAHPASSTKVDKKIEPR

SEQ ID NO: 26945 - protein, 220 aa, Artificial Sequence
  source: /note="Description of Artificial Sequence: Synthetic polypeptide"
EVKLLESGGGLVQPGGSMKLSCVASGFTFSIFWMNWVRQSPEKGLEWVAEVRLKSNNYATHYAESVKGRFTISRDDSKSGVYLQMNNLRAEDTGIYYCTRGYYGSNYGEYWGQGTTLTVSSAKTTAPSVYPLAPVCGDTTGSSVTLGCLVKGYFPEPVTLTWNSGSLSSGVHTFPAVLQSDLYTLSSSVTVTSSTWPSQSITCNVAHPASSTKVDKKIEP

SEQ ID NO: 26946 - protein, 213 aa, Artificial Sequence
  source: /note="Description of Artificial Sequence: Synthetic polypeptide"
  MOD_RES (1)..(1): Any amino acid
XVQLQQSGAELARPGASVKLSCKASGYTFTSYWMQWVKQRPGQGLEWIGAIYPGDGDTRYTQKFKGKATLTADKSSSTAYMQLSSLASEDSAVYYCARRWDYWGQGTTLTVSSAKTTAPSVYPLAPVCGDTTGSSVTLGCLVKGYFPEPVTLTWNSGSLSSGVHTFPAVLQSDLYTLSSSVTVTSSTWPSQSITCNVAHPASSTKVDKKIEPR

SEQ ID NO: 26947 - protein, 213 aa, Artificial Sequence; identical to SEQ ID NO: 26942
  source: /note="Description of Artificial Sequence: Synthetic polypeptide"

SEQ ID NO: 26948 - protein, 212 aa, Artificial Sequence; identical to SEQ ID NO: 26943
  source: /note="Description of Artificial Sequence: Synthetic polypeptide"
  MOD_RES (79)..(79): Any amino acid

SEQ ID NO: 26949 - protein, 213 aa, Artificial Sequence; identical to SEQ ID NO: 26946
  source: /note="Description of Artificial Sequence: Synthetic polypeptide"
  MOD_RES (1)..(1): Any amino acid

SEQ ID NO: 26950 - protein, 217 aa, Artificial Sequence
  source: /note="Description of Artificial Sequence: Synthetic polypeptide"
DIVMTQSPSSLAMSVGQKVTMSCKSSQSLLNSSNQKNYLAWYQQKPGQSPKLLVYFASTRESGVPDRFIGSGSGTDFTLTISSVQAEDLADYFCQQHYSTPFTFGSGTKLEIKRADAAPTVSIFPPSSEQLTSGGASVVCFLNNFYPKDINVKWKIDGSERQNGVLNSWTDQDSKDSTYSMSSTLTLTKDEYERHNSYTCEATHKTSTSPIVKSFNR

SEQ ID NO: 26951 - protein, 210 aa, Artificial Sequence
  source: /note="Description of Artificial Sequence: Synthetic polypeptide"
  MOD_RES (1)..(1): Any amino acid
XIVLTQSPAIMSASLGEEITLTCSASSSVNYMHWYQQKSGTSPKLLIYTTSNLASGVPSRFSGSGSGTFYSLTISSVEAEDAADYYCHQWSSYPTFGGGTKLEIKRADAAPTVSIFPPSSEQLTSGGASVVCFLNNFYPKDINVKWKIDGSERQNGVLNSWTDQDSKDSTYSMSSTLTLTKDEYERHNSYTCEATHKTSTSPIVKSFNRN

SEQ ID NO: 26952 - protein, 219 aa, Artificial Sequence
  source: /note="Description of Artificial Sequence: Synthetic polypeptide"
DIVMTQAAPSVPVTPGESVSISCRSSKSLLHSNGNTYLYWFLQRPGQSPQLLIYRMSNLASGVPDRFSGSGSGTAFTLRISKVEAEDVGVYYCMQHLEYPYTFGGGTKLDVKRADAAPTVSIFPPSSEQLTSGGASVVCFLNNFYPKDINVKWKIDGSERQNGVLNSWTDQDSKDSTYSMSSTLTLTKDEYERHNSYTCEATHKTSTSPIVKSFNRNEC

SEQ ID NO: 26953 - protein, 216 aa, Artificial Sequence
  source: /note="Description of Artificial Sequence: Synthetic polypeptide"
DVVMTQSPSSLSVTIGQPASISCKSSQSLLDSDGGTYLNWLLQRPGQSPKRLIYLVSKLDSGVPDRFTGSGSGTDFTLKISRVEAEDLGIYYCWQGAHFPYTFGGGTKLEIKRADAAPTVSIFPPSSEQLTSGGASVVCFLNNFYPKDINVKWKIDGSERQNGVLNSWTDQDSKDSTYSMSSTLTLTKDEYERHNSYTCEATHKTSTSPIVKSFNR

SEQ ID NO: 26954 - protein, 219 aa, Artificial Sequence
  source: /note="Description of Artificial Sequence: Synthetic polypeptide"
QIVMTQSPSSLTVTAGEKVTMSCKSSQSLLNSGNQKNYLTWYQQKPGQPPKLLIYWASTRESGVPDRFTGSGSGTDFTLTISSVQAEDLAVYYCQNDYSYPLTFGAGTKLELKRADAAPTVSIFPPSSEQLTSGGASVVCFLNNFYPKDINVKWKIDGSERQNGVLNSWTDQDSKDSTYSMSSTLTLTKDEYERHNSYTCEATHKTSTSPIVKSFNRNE

SEQ ID NO: 26955 - protein, 217 aa, Artificial Sequence; identical to SEQ ID NO: 26950
  source: /note="Description of Artificial Sequence: Synthetic polypeptide"

SEQ ID NO: 26956 - protein, 210 aa, Artificial Sequence; identical to SEQ ID NO: 26951
  source: /note="Description of Artificial Sequence: Synthetic polypeptide"
  MOD_RES (1)..(1): Any amino acid

SEQ ID NO: 26957 - protein, 219 aa, Artificial Sequence; identical to SEQ ID NO: 26954
  source: /note="Description of Artificial Sequence: Synthetic polypeptide"

SEQ ID NO: 26958 - protein, 126 aa, Artificial Sequence
  source: /note="Description of Artificial Sequence: Synthetic polypeptide"
EVQLVESGPGLVKPSETLSLTCTVSGGSVSSGSYSWSWIRQRPGQGLEWIGFIYYTGYTSYKSSLKSRVSLSVDTSNDQFSLSLSSVTAADTAVYYCAREIRAPDHHDFSGYLGRWGQGTLVTVSS

SEQ ID NO: 26959 - protein, 116 aa, Artificial Sequence
  source: /note="Description of Artificial Sequence: Synthetic polypeptide"
EVKLVESGGGLVQPGGSLKLSCATSGFLFTDYYMFWVRQTPEKRLEWVAYISNGGGDTYYPDTVKGRFTISRDNAKNALYLQMSRLKSEDTAMYYCARHKGYYGYYYALDYWGQGT

SEQ ID NO: 26960 - protein, 138 aa, Artificial Sequence
  source: /note="Description of Artificial Sequence: Synthetic polypeptide"
QVHLVQSGAEVKKPGASVKVSCRVSGNSLTESSLHWVDRPLGKGLEWMGGFDPEEGEIIYAQKFQGRVTMTEDTPTDTASLELSRVRSEDTAVYYCVTGPPRLSELAIFGVVKRIRGPFDIWGQGTRVTVSSASTKGP

SEQ ID NO: 26961 - protein, 136 aa, Artificial Sequence
  source: /note="Description of Artificial Sequence: Synthetic polypeptide"
RVQLMQSGAEVRKHGASVKVSCKASGYSFGNYFMHWLRQAPGQGPEWMGMINPRDNKANYAQKFRGRVTMTKDTSTSIFYMELSRLRSDDTAVYFCARDMGSHDFWAVGLNLPGSLFDNWGQGTLVTVSSASTKGP

SEQ ID NO: 26962 - protein, 247 aa, Artificial Sequence
  source: /note="Description of Artificial Sequence: Synthetic polypeptide"
EVQLVETGGGLVQPGESLRLSCAASGFTFSDYEMNWVRQAPGKGLEWVSYISSSGSTIYYADSVKGRFTIYRDNAKNSLYLQMNSLRAEDTALYYCARAWGVGPPDYWGQGTLVTVSSASTKGPSVFPLAPSSKSTSGGTAALGCLVKDYFPEPVTVSWNSGALTSGVHTFPAVLQSSGLYSLSSVVTVPSSSLGTQTYICNVNHKPSNTKVDKKVEPKSCAAAHHHHHHGAAEQKLISEEDLNGAA

SEQ ID NO: 26963 - protein, 108 aa, Artificial Sequence
  source: /note="Description of Artificial Sequence: Synthetic polypeptide"
DIQMTQSPSSLSASVGDRVTITCRASQGIRNDLTWYQQKPGTAPKRLIYGATSLQSGVPSRFSGSGSGTEFTLTINSLQPEDFATYYCLQYSSFPWTFGQGTKVEVKR

SEQ ID NO: 26964 - protein, 114 aa, Artificial Sequence
  source: /note="Description of Artificial Sequence: Synthetic polypeptide"
QVQLVDSGGGLVEPGGSLRLSCSASGFTFSANDMNWVRQAPGKGLEWLSFIGGSGSTIYYADSVKGRFTISRNBSKNSLYLQMSSLRAEDTAVYYCARGWLLNWGQGTLVTVSS

SEQ ID NO: 26965 - protein, 108 aa, Artificial Sequence
  source: /note="Description of Artificial Sequence: Synthetic polypeptide"
SSELTQDPAVSVALGQTVRITCQGDSLRSYYASWYQQKPGQAPVLVIYGKNNRPSGIPDRFSGSSSGNTASLTITGAQAEDEADYYCNSRDSTGNQLFGGGTKVTVLG

SEQ ID NO: 26966 - protein, 103 aa, Artificial Sequence
  source: /note="Description of Artificial Sequence: Synthetic polypeptide"
DIQLTQSPATLSVTPGDSVSLSCRASQSISNNLHWYQQKSHESPRLLIKYASQSISGIPSRFSGSGSGTDFTLSINSVETEDFGMYFCQQSNNWPLTFGAGTK

SEQ ID NO: 26967 - protein, 212 aa, Artificial Sequence
  source: /note="Description of Artificial Sequence: Synthetic polypeptide"
QSVLTQPPSVSVAPGKTARIPCEGNYIGSSNVHWYQQKPGQAPVLVIHFDSDRPSGIPDRFSGSNSGNMATLTISRVEAGDEADYYCQVWENHGWVFGGGTKLTVLSQPKAAPSVTLFPPSSEELQANKATLVCLISDFYPGAVTVAWKADSSPVKAGVETTTPSKQSNNKYAASSYLSLTPEQWKSHKSYSCQVTHEGSTVEKTVAPTECS

SEQ ID NO: 26968 - protein, 250 aa, Artificial Sequence
  source: /note="Description of Artificial Sequence: Synthetic polypeptide"
MAQVQLLESGGGLIQPGGSLRLSCADSGFPVSSNFMSWVRQAPAEGLEWVSIIYPDGRTFYTESVRGRFTISRDSSKNTVYLQMNSLRAEDTAVYYCATAFSPPTQTSGWGRSSDSWGQGTLVTVSSGGGGSGGGGSGGGGSDVVMTQSPGTLSLSPGERATLSCRASQSVSSNLAWYQQRLGQAPRLLIYGASNRATGVPDRFSGSGSGTDFTLTISSLEPEDFAVYYCQQRSNWPWTFGQGTKLEIKR

SEQ ID NO: 26969 - protein, 227 aa, Artificial Sequence
  source: /note="Description of Artificial Sequence: Synthetic polypeptide"
MAQVQLQESGQITGAVQQGAGIDDFVMLGGQIQALFQGDGLDTFRMEGGTIVDAFEDGDVAYQSGGTIGRVNMKLDKNLYDMSGGAILGTLVTVSSGGGGSGGGGSSGGGSDVVMTQSPATLSVSPGEGVTLSCRASHSVSLGVSANLAWYQQKPGQAPRLLIYGVSNRATGVPARFSGSGSGTDFTLTISRLEPEDIAVYYCQQRSHWPWTFGQGTKVEIKRGLGG

SEQ ID NO: 26970 - protein, 251 aa, Artificial Sequence
  source: /note="Description of Artificial Sequence: Synthetic polypeptide"
MAQVQLVQSGAEVKKPGSSVKVSCKASGGTFSSYAISWVRQAPGQGLEWMGGIIPIFGTANYAQKFQGRVTITADESASTAYMELSSLRSEDTAVYYCVSDGSRKSLIIETFYALDVWGQGTLVTVSSGGGGSGGGGSGGGGSDVVMTQSPSSLSASVGDRVTITCRASQSISSYLNWYQQKPGKAPKLLIYAASSLQSGVPSRFSGSGSGTDFTLTISSLQPEDFATYYCQQSYSTPLTFGGGTKVEIKR

SEQ ID NO: 26971 - protein, 222 aa, Artificial Sequence
  source: /note="Description of Artificial Sequence: Synthetic polypeptide"
MAQVQLQESGQITGAVQQGAGIDDFVMLGGQIQALFQGDGLDTFRMEGGTIVNAFEDGDVAYQSGGTIGRVNMKLDKNLYDMSGGAILGTMVTVSLGGGGSGGGGSSGGGSEIVLTQSPGTLSLSPGERVTLSCRASQSVSSKLAWYQQKPGQAPRLLIYDASNRATGIPARFSGSGSGTDFTLTISSLEPEDFAVYYCQQRSNWPWTFGQGTKLEIKRGLG

SEQ ID NO: 26972 - protein, 254 aa, Artificial Sequence
  source: /note="Description of Artificial Sequence: Synthetic polypeptide"
MAQVQLVQSGAEVKKPGSSVKVSCKASGGTFSSYAISWVRQAPGQGLEWMGGIIPIFGTASYAQKFQGRVTITADESTSTAYMELSSLRSDDTAVYYCAGELTFGGVIVIPESAFDIWGQGTMVTVSSGGGGSGGGGSGGGGSQSALTQPASVSGSPGQSITISCTGIRSDIGGYYYVSWYQQHPGKAPKLIIYPVNSRPSGVSNRFSGSVSGDTASLTISGLQAEDEADYYCSSYTSGTTLLFGGGTQLTVLG

SEQ ID NO: 26973 - protein, 243 aa, Artificial Sequence
  source: /note="Description of Artificial Sequence: Synthetic polypeptide"
MDVKLQESGPGLVAPSQSLSITCTVSGFSLTGYSVNWVRQPPGKGLEWLGIIWGDGTTEYNSSLKSRLSISKDNSKSQVFLKMTSLQTDDTANYYCARDRGITRFLYWGQGTLVTVSAGGGGSGGGGSGGGGSQAVVTQESALTTSPGETVTLTCRSSTGAVTTTNYANWVQEKPDHFFTGLIGGTNNRPPGVPPRFSGSLIGDKAALTITGAQTEDEAIYFCALWYSHRWVFGGGTKLTVLG

SEQ ID NO: 26974 - protein, 243 aa, Artificial Sequence
  source: /note="Description of Artificial Sequence: Synthetic polypeptide"
MEVQLQQSGAELVRPGTSVKVSCKASGYAFTNYLIEWVKQRPGQGLEWIGVISPGGGSTNYNEKFKGKATLTADKSSSTAYMQLSSLTSDDSAVYFCARLWFYEVDYWGQGTSVTVSAGGGGSGGGGSGGGGSQAVVTQESALTTSPGETVTLTCRSSTGAVTTSNYANWVQEKPDHLFTGLIDGTNNRAPGVPARFSGSLIGDKAALTITGAQTEDEAIYFCALLYSNHWVFGGGTKLTVLG

SEQ ID NO: 26975 - protein, 246 aa, Artificial Sequence
  source: /note="Description of Artificial Sequence: Synthetic polypeptide"
MAQVKLQESGGGSVQPGGSMKLSCAASGFTFSDAWMGWVRQSPEKGLEWVAEIRSKANNHATYYAESVKGRFTISRDDSKSSVYLQMNSLRAEDTGIYYCTRAGGAMDYWGQGTTVTVSSGGGGSGGGGSGGGGSDIELTQSPASLAVSLGQRATISYRASKSVSTSGYSYMHWNQQKPGQPPRLLIYLVSNLESGVPARFSGSGSGTDFTLNIHPVEEEDAATYYCQHIREAYTFGGGTKLEIKR

SEQ ID NO: 26976 - protein, 246 aa, Artificial Sequence
  source: /note="Description of Artificial Sequence: Synthetic polypeptide"
MAQVKLQQSGGGLVQPGGSMKLSCAASGFTFSDAWMDWVRQSPEKGLEWVAEIRDKANNHATYYAESVKGRFTISRDDSKSSVYLQMNSLRAEDTGIYYCTRAGGAMDYWGQGTTVTVSSGGGGSGGGGSGGGGSDIELTQSPASLAVSLGQRATISYRASKSVSTSGYSYMHWNQQKPGQPPRLLIYLVSNLESGVPARFSGSGSGTDFTLNIHPVEEEDAATYYCQHIREAYTFGGGTKLEIKR

SEQ ID NO: 26977 - protein, 236 aa, Artificial Sequence
  source: /note="Description of Artificial Sequence: Synthetic polypeptide"
MAQVQLQESGAELVKPGASVKMSCKASGYTFTSYWLHWVKQRPGQGLEWIGTIDPSDSSTTYNQKFKGKATLTVDTSSRIAYMQLGSLTSEDSAVYYCTRTDYWGQGTTVTVSSGGGGSGGGGSGGGGSDIVLTQSPAIMSASPGEKVTMTCSASSSVSYMHWFQQRSSTPPKVWIYDTSKLASGVPGRFSGSGSGNSYSLTISSMEAEDVATYYCFQGSGFPLTFGSGTKLEIKR

SEQ ID NO: 26978 - protein, 246 aa, Artificial Sequence
  source: /note="Description of Artificial Sequence: Synthetic polypeptide"
MAQVQLQESGGGLVQPGGSMKLSCAASGFTFSDAWMDWVRQSPEKGLEWVAEIRNKAYNHATYYAESVKGRFTISRDDSKSGVYLQMNSLRAEDTGIYYCTGRLGAMDYWGQGTTVTVSSGGGGSGGGGSGGGGSDIELTQSPASLAVSLGQRATISYRASKSVSTSGYSYMHWNQQKPGQPPRLLIYLVSNLESGVPARFSGSGSGTDFTLNIHPVEEEDAATYYCQHIREAYTFGGGTKLEIKR

SEQ ID NO: 26979 - protein, 244 aa, Artificial Sequence
  source: /note="Description of Artificial Sequence: Synthetic polypeptide"
MAQVQLQESGAEVKKPGASVKVSCKASGYTFTDYYMHWVRQAPGQGLEWMGGIIPIFGTANYAQKFQGRVTITADESTSTAYMELSSLRSEDTAVYYCARDSGSYQGAFDYWGQGTLVTVSSGGGGSGGGGSGGGGSSYVLTQPPSVSVSPGQTASITCSEDTLGNKYASWYQQKPGQSPVVVIYNDNMRPSGIPERFSGSNSGNTATLTIRGTQAMDEADYYCQAWDSSGVVFGGGTKLTVLG

SEQ ID NO: 26980 - protein, 250 aa, Artificial Sequence
  source: /note="Description of Artificial Sequence: Synthetic polypeptide"
MAQVQLLESGGGLVRPGGSLRLSCADSGFPVSNYFMSWVRQAPAGGLEWVSIIYPDGRTFYAESVRGRFTISRDSSKNTVYLQMNRLRGEDTAVYYCARSLMPNNADDWGQGTLVTVSSGGGGSGGGGSGGGGSDVVMTQSPLSLPVTLGQTASISCRSTQSLVKSYGDTYLSWFQQRPGQSPRRLIYEVSNRDSGVPDRFTGSGSGTDFTLKISSVEAEDIGVYYCMQGTYWPTFGQGTRLEIKRGLGG

SEQ ID NO: 26981 - protein, 270 aa, Artificial Sequence
  source: /note="Description of Artificial Sequence: Synthetic polypeptide"
MKYLLPTAAAGLLLLAAQPAGAQVQLQQSGPELVKPGASVKMSCKASGYTFTDYVISWVKQRTGQGLEWIGEIYPGSGSTYYNEKFKGKATLTADKSSNTAYMQLSSLTSEDSAVYFCARSVWWGFAYWGQGTLVTVSAGGGGSGGGGSGGGGSDIVMTQSQKFMSTSVGDRVSITCKASQNVGTAVAWYQQKPGQSPKLLIYSASNRYTGVPDRFTGSGSGTDFTLTISNMQSEDLADYFCQQYSSYLYTFGGGTKLEIKRLEHHHHHH

SEQ ID NO: 26982 - protein, 218 aa, Artificial Sequence
  source: /note="Description of Artificial Sequence: Synthetic polypeptide"
QVQLQQSGAELVRPGVSVKISCKGSGYTFTDYGMHWVKQSHAKSLEWIGIISTYSGDASYNQKFKGKATMTVDKSSSTAYMELARLTSEDSAIYYCARSSTWYYFDYWGQGTTLTVSSAKTTAPSVYPLAPVCGDTTGSSVTLGCLVKGYFPEPVTLTWNSGSLSSGVHTFPAVLQSDLYTLSSSVTVTSSTWPSQSITCNVAHPASSTKVDKKIEPR

SEQ ID NO: 26983 - protein, 213 aa, Artificial Sequence
  source: /note="Description of Artificial Sequence: Synthetic polypeptide"
DIQVTQTTSSLSASLGDRVTISCRASQDISNYLNWYQQKPDGTVKLLIYYTSRLHSGVPSRFSGSGSGTDYSLTISNLEQEDIATYFCQQGNTLPYTFGGGTKLEIKRADAAPTVSIFPPSSEQLTSGGASVVCFLNNFYPKDINVKWKIDGSERQNGVLNSWTDQDSKDSTYSMSSTLTLTKDEYERHNSYTCEATHKTSTSPIVKSFNRNE

SEQ ID NO: 26984 - protein, 224 aa, Artificial Sequence
  source: /note="Description of Artificial Sequence: Synthetic polypeptide"
MAEVQLVESGAEVKKPGESLRISCKGSGCIISSYWISWVRQMPGKGLEWMGKIDPGDSYINYSPSFQGHVTISADKSINTAYLQWNSLKASDTAMYYCARGGRDFGDSFDYWGQGTLVTVSSGGGGSGGGGSGGGGSDVVMTQSPSFLSAFVGDRITITCRASSGISRYLAWYQQAPGKAPKLLIYAASTLQTGVPSRFSGSGSGTEFTLTINSLQPEDFATYY

SEQ ID NO: 26985 - protein, 127 aa, Artificial Sequence
  source: /note="Description of Artificial Sequence: Synthetic polypeptide"
QVQLVQSGAEVKKPGSSVKVSCKASGGTFSSYAISWVRQAPGQGLEWMGGIIPIFGTANYAQKFQGRVTITADKSTSTAYMELSSLRSEDTAVYYCAREGTTGWGWLGKPIGAFQHWGQGTLVTVSS

SEQ ID NO: 26986 - protein, 114 aa, Artificial Sequence
  source: /note="Description of Artificial Sequence: Synthetic polypeptide"
MEIVLTQSPGTLSLSPGERATLSCRASQSVSSSYLAWYQQKPGQAPRLLIYGASSRATGIPDRFSGSGSGTDFTLTISRLEPEDFAVYYCQQYGSSPSTFGQGTKVEIKRLVPR

SEQ ID NO: 26987 - protein, 226 aa, Artificial Sequence
  source: /note="Description of Artificial Sequence: Synthetic polypeptide"
QVQLQESGPGVVKSSETLSLTCTVSGGSMGGTYWSWLRLSPGKGLEWIGYIFHTGETNYSPSLKGRVSISVDTSEDQFSLRLRSVTAADTAVYFCASLPRGQLVNAYFRNWGRGSLVSVTAASTKGPSVFPLAPSSKSTSGGTAALGCLVKDYFPEPVTVSWNSGALTSGVHTFPAVLQSSGLYSLSSVVTVPSSSLGTQTYICNVNHKPSNTKVDKKVEPKSCDK

SEQ ID NO: 26988 - protein, 209 aa, Artificial Sequence
  source: /note="Description of Artificial Sequence: Synthetic polypeptide"
YELTQPPSVSVSPGQTATITCSGASTNVCWYQVKPGQSPEVVIFENYKRPSGIPDRFSGSKSGSTATLTIRGTQAIDEADYYCQVWDSFSTFVFGSGTQVTVLRQPKANPTVTLFPPSSEELQANKATLVCLISDFYPGAVTVAWKADSSPVKAGVETTTPSKQSNNKYAASSYLSLTPEQWKSHRSYSCQVTHEGSTVEKTVAPTECS

SEQ ID NO: 26989 - protein, 232 aa, Artificial Sequence
  source: /note="Description of Artificial Sequence: Synthetic polypeptide"
QVQLVQSGAEVRKPGASVTVSCKTSGYTFVNFYIVWVRQAPGQGLEWMGVINPFRGDTYFAQKFKGRVTLTRDTSTSTVFMELSSLRSDDTAIYYCARDLEMRDGNNHGSHLEFWGQGTLVTVSSASTKGPSVFPLAPSSKSTSGGTAALGCLVKDYFPEPVTVSWNSGALTSGVHTFPAVLQSSGLYSLSSVVTVPSSSLGTQTYICNVNHKPSNTKVDKRVEPKSCDKTH

SEQ ID NO: 26990 - protein, 218 aa, Artificial Sequence
  source: /note="Description of Artificial Sequence: Synthetic polypeptide"
DIVMTQSPLSLPVTPGEAASISCRSSQSLLHTNGFQYLDWYLQKPGQSPQLLIYLGSNRATGVPHRFSGSGSGTEFTLKISRVEAEDVGVYYCMQAKESPTFGQGTKVEIKRTVAAPSVFIFPPSDEQLKSGTASVVCLLNNFYPREAKVQWKVDNALQSGNSQESVTEQDSKDSTYSLSSTLTLSKADYEKHKVYACEVTHQGLSSPVTKSFNRGEC

SEQ ID NO: 26991 - protein, 243 aa, Artificial Sequence
  source: /note="Description of Artificial Sequence: Synthetic polypeptide"
  MOD_RES (1)..(1): Any amino acid
XGQLVQSGAELKKPGASVKISCKTSGYRFNFYHINWIRQTAGRGPEWMGWISPYSGDKNLAPAFQDRVIMTTDTEVPVTSFTSTGAAYMEIRNLKFDDTGTYFCAKGLLRDGSSTWLPYLWGQGTLLTVSSASTKGPSVFPLAPSSKSTSGGTAALGCLVKDYFPEPVTVSWNSGALTSGVHTFPAVLQSSGLYSLSSVVTVPSSSLGTQTYICNVNHKPSNTKVDKRVEPKSCDKGLEVLFQ

SEQ ID NO: 26992 - protein, 244 aa, Artificial Sequence
  source: /note="Description of Artificial Sequence: Synthetic polypeptide"
QIHLVQSGTEVKKPGSSVTVSCKAYGVNTFGLYAVNWVRQAPGQSLEYIGQIWRWKSSASHHFRGRVLISAVDLTGSSPPISSLEIKNLTSDDTAVYFCTTTSTYDKWSGLHHDGVMAFSSWGQGTLISVSAASTKGPSVFPLAPSSKSTSGGTAALGCLVKDYFPEPVTVSWNSGALTSGVHTFPAVLQSSGLYSLSSVVTVPSSSLGTQTYICNVNHKPSNTKVDKRVEPKSCDKTHHHHHH

SEQ ID NO: 26993 - protein, 231 aa, Artificial Sequence
  source: /note="Description of Artificial Sequence: Synthetic polypeptide"
QVQLVESGGGVVQPGRSLRLSCAASGFTFRNYAMHWVRQAPGKGLEWVALIKYDGRNKYYADSVKGRFSISRDNSKNTLYLEMNSLRAEDTAVYYCARDIGLKGEHYDILTAYGPDYWGQGALVTVSSASTKGPSVFPLAPSSKSTSGGTAALGCLVKDYFPEPVTVSWNSGALTSGVHTFPAVLQSSGLYSLSSVVTVPSSSLGTQTYICNVNHKPSNTKVDKKAEPKSC

SEQ ID NO: 26994 - protein, 231 aa, Artificial Sequence
  source: /note="Description of Artificial Sequence: Synthetic polypeptide"
EVQLVQSGAEVKKPGESLKISCKGSGYRFTSYWIVWVRQMPGKGLEWMGIIYPGDFDTKYSPSFQGQVTISADKSISTAYLQWSSLKASDTAMYYCARLGGRYYHDSSGYYYLDYWGQGTLVTVSSASTKGPSVFPLAPSSKSTSGGTAALGCLVKDYFPEPVTVSWNSGALTSGVHTFPAVLQSSGLYSLSSVVTVPSSSLGTQTYICNVNHKPSNTKVDKRVEPKSCDK

SEQ ID NO: 26995 - protein, 225 aa, Artificial Sequence
  source: /note="Description of Artificial Sequence: Synthetic polypeptide"
EVQLVESGGGLVQPGRSLRLSCAASGFTFDDGAMHWVRQAPGKGLEWVSGISWNSNIIAYADSVKGRFTISRDNAKNSLYLEMNSLRVEDTALYYCAKDSPRGELPLNYWGQGTLVTVSSASTKGPSVFPLAPSSKSTSGGTAALGCLVKDYFPEPVTVSWNSGALTSGVHTFPAVLQSSGLYSLSSVVTVPSSSLGTQTYICNVNHKPSNTKVDKRVEPKSCDK

SEQ ID NO: 26996 - protein, 235 aa, Artificial Sequence
  source: /note="Description of Artificial Sequence: Synthetic polypeptide"
EVQLVQSGAEVNKPGSSVKVSCQASGATLNSHAFSWVRQAPGQGLEWMAGIIPIFGSSHYAQKFRGRVTISADESTRTVYLHLRGLRSDDTAVYYCASNSIAGVAAAGDYADYDGGYYYDMDVWGQGTTVTVSSASTKGPSVFPLAPSSKSTSGGTAALGCLVKDYFPEPVTVSWNSGALTSGVHTFPAVLQSSGLYSLSSVVTVPSSSLGTQTYICNVNHKPSNTKVDKRVEPK

SEQ ID NO: 26997 - protein, 232 aa, Artificial Sequence
  source: /note="Description of Artificial Sequence: Synthetic polypeptide"
QVQLVQSGAEVKKPGSSAKVSCKASRGTLSSYFISWVRQAPGQGLEWLGGITPLLGTANYAQKFQGRVTITADKSTNTAFMQLSSLTSDDTAVYYCAGTVYYDILTGLYTNFHYWGQGTLVTVSSASTKGPSVFPLAPSSKSTSGGTAALGCLVKDYFPEPVTVSWNSGALTSGVHTFPAVLQSSGLYSLSSVVTVPSSSLGTQTYICNVNHKPSNTKVDKRVEPKSCDKTH

SEQ ID NO: 26998 - protein, 267 aa, Artificial Sequence
  source: /note="Description of Artificial Sequence: Synthetic polypeptide"
  MOD_RES (133)..(133): Any amino acid
  MOD_RES (136)..(136): Any amino acid
QASTMDWIWRILFLVAAATSAHSQVQLVQSGAEVKKPGSSVKVSCKASGNSFSNHDVHWVRQATGQGLEWMGWMSHEGDKTGLAQKFQGRVTITRDSGASTVYMELRGLTADDTAIYYCLTGSKHRLRDYFLXNEXGPNYEEWGDYLATLDVWGHGTAVTVSSASTKGPSVFPLAPSSKSTSGGTAALGCLVKDYFPEPVTVSWNSGALTSGVHTFPAVLQSSGLYSLSSVVTVPSSSLGTQTYICNVNHKPSNTKVDKKVEPKSCD

SEQ ID NO: 26999 - protein, 231 aa, Artificial Sequence
  source: /note="Description of Artificial Sequence: Synthetic polypeptide"
QVQLQESGPGLVKPSQTLSLSCTVSGGSSSSGAHYWSWIRQYPGKGLEWIGYIHYSGNTYYNPSLKSRITISQHTSENQFSLKLNSVTVADTAVYYCARGTRLRTLRNAFDIWGQGTMVTVSSASTKGPSVFPLAPSSKSTSGGTAALGCLVKDYFPEPVTVSWNSGALTSGVHTFPAVLQSSGLYSLSSVVTVPSSSLGTQTYICNVNHKPSNTKVDKRVEPKSCDKTHT

SEQ ID NO: 27000 - protein, 237 aa, Artificial Sequence
  source: /note="Description of Artificial Sequence: Synthetic polypeptide"
EVQLVESGGGLVKPGGSLRLSCAASGFTFSSYSMNWVRQAPGRGLEWVSSISNTSTYIYYADSVEGRFTLSRDNAKNSLYLQMNSLRAEDTAVYYCARANQHFDWLLSLLGGYHYYGMDVWGQGTTVTVSSASTKGPSVFPLAPSSKSTSGGTAALGCLVKDYFPEPVTVSWNSGALTSGVHTFPAVLQSSGLYSLSSVVTVPSSSLGTQTYICNVNHKPSNTKVDKRVEPKSCDKT

SEQ ID NO: 27001 - protein, 216 aa, Artificial Sequence
  source: /note="Description of Artificial Sequence: Synthetic polypeptide"
QSVLTQSASVSGSLGQSVTISCTGPNSVCCSHKSISWYQWPPGRAPTLIIYEDNERAPGISPRFSGYKSYWSAYLTISDLRPEDETTYYCCSYTHNSGCVFGTGTKVSVLGQSKANPSVTLFPPSSEELQANKATLVCLISDFYPGAVTVAWKADSSPVKAGVETTTPSKQSNNKYAASSYLSLTPEQWKSHRSYSCQVTHEGSTVEKTVAPTECS

SEQ ID NO: 27002 - protein, 215 aa, Artificial Sequence
  source: /note="Description of Artificial Sequence: Synthetic polypeptide"
DIQMTQSPSTLSASIGDTVRISCRASQSITGNWVAWYQQRPGKAPRLLIYRGAALLGGVPSRFSGSAAGTDFTLTIGNLQAEDFGTFYCQQYDTYPGTFGQGTKVEVKRTVAAPSVFIFPPSDEQLKSGTASVVCLLNNFYPREAKVQWKVDNALQSGNSQESVTEQDSKDSTYSLSSTLTLSKADYEKHKVYACEVTHQGLSSPVTKSFNRGEC

SEQ ID NO: 27003 - protein, 215 aa, Artificial Sequence
  source: /note="Description of Artificial Sequence: Synthetic polypeptide"
DIQMTQSPSSLSASVGDRVTITCQASQDIRNYLNWYQQKPGKAPKLLIYDASNSETGVPSRFSGSGSGRDFTFTISSLQPEDVATYYCQQHQNVPLTTFGGGTKVEIKRTVAAPSVFIFPPSDEQLKSGTASVVCLLNNFYPREAKVQWKVDNALQSGNSQESVTEQDSKDSTYSLSSTLTLSKADYEKHKVYACEVTHQGLRSPVTKSFNRGEC

SEQ ID NO: 27004 - protein, 216 aa, Artificial Sequence
  source: /note="Description of Artificial Sequence: Synthetic polypeptide"
NFMLTQPHSVSESPGKTVTISCTRSSGSVASDYVQWYQQRPGSAPTTVVYEDNQRPSGVPDRFSGSIDSSSNSASLTISGLKTEDEADYYCQSYDNSSWVFGGGTKLTVLGQPKAAPSVTLFPPSSEELQANKATLVCLISDFYPGAVTVAWKADSSPVKAGVETTTPSKQSNNKYAASSYLSLTPEQWKSHRSYSCQVTHEGSTVEKTVAPTECS

SEQ ID NO: 27005 - protein, 215 aa, Artificial Sequence
  source: /note="Description of Artificial Sequence: Synthetic polypeptide"
DSYELTQPPSVSVSPGQTARITCSGDALPKNYAYWYQQKSGQAPVLVIYEDSKRPSGIPERFSGSSSGTMATLTISGAQVEDEADYYCYSTDSSGNHRVFGGGTKLTVLGQPKAAPSVTLFPPSSEELQANKATLVCLISDFYPGAVTVAWKADSSPVKAGVETTTPSKQSNNKYAASSYLSLTPEQWKSHRSYSCQVTHEGSTVEKTVAPTECS

SEQ ID NO: 27006 - protein, 213 aa, Artificial Sequence
  source: /note="Description of Artificial Sequence: Synthetic polypeptide"
QSILTQPPSVSAAPGQKVTISCSGSSSNIGNNDVSWYQQFPGTVPKLVIYENNERPSGIPDRFSGSKSGTSATLGITGLQTGDEADYYCGTWDSSLSAVVFGGGSKVTVLGQPKAAPSVTLFPPSSEELQANKATLVCLISDFYPGAVTVAWKADSSPVKAGVETTTPSKQSNNKYAASSYLSLTPEQWKSHRSYSCQVTHEGSTVEKTVAPT

SEQ ID NO: 27007 - protein, 209 aa, Artificial Sequence
  source: /note="Description of Artificial Sequence: Synthetic polypeptide"
  MOD_RES (1)..(1): Any amino acid
XIVLTQSPGILSLSPGETATLFCKASQGGNAMTWYQKRRGQVPRLLIYDTSRRASGVPDRFVGSGSGTDFFLTINKLDREDFAVYYCQQFEFFGLGSELEVHRTVAAPSVFIFPPSDEQLKSGTASVVCLLNNFYPREAKVQWKVDNALQSGNSQESVTEQDSKDSTYSLSSTLTLSKADYEKHKVYACEVTHQGLSSPVTKSFNRGEC

SEQ ID NO: 27008 - protein, 212 aa, Artificial Sequence
  source: /note="Description of Artificial Sequence: Synthetic polypeptide"
QSVLTQPPSVSVSPGQTASITCSGDNLRDGYASWYQQKPGQSPVLVIYRDDKRPSGIPERFSGSSSGNTAILTLSGAQAMDEADYYCQAWASTTVIFGGGTRLTVLGQPKAAPSVTLFPPSSEELQANKATLVCLISDFYPGAVTVAWKADSSPVKAGVETTTPSKQSNNKYAASSYLSLTPEQWKSHRSYSCQVTHEGSTVEKTVAPTECS

SEQ ID NO: 27009 - protein, 239 aa, Artificial Sequence
  source: /note="Description of Artificial Sequence: Synthetic polypeptide"
MRLPAQLLGLLMLWVSGSGAEVVITQSPLFLPVTPGEAASLSCKCSHSLQHSTGANYLAWYLQRPGQTPRLLIHLATHRASGVPDRFSGSGSGTDFTLKISRVESDDVGTYYCMQGLHSPWTFGQGTKVEIKRTVAAPSVFIFPPSDEQLKSGTASVVCLLNNFYPREAKVQWKVDNALQSGNSQESVTEQDSKDSTYSLSSTLTLSKADYEKHKVYACEVTHQGLSSPVTKSFNRGEC

SEQ ID NO: 27010 - protein, 216 aa, Artificial Sequence
  source: /note="Description of Artificial Sequence: Synthetic polypeptide"
QSVLTQPPSASGSPGQSVTISCTGTSSDVGGYNYVSWYQHHPGKAPKLIISEVNNRPSGVPDRFSGSKSGNTASLTVSGLQAEDEAEYYCSSYTDIHNFVFGGGTKLTVLGQPKAAPSVTLFPPSSEELQANKATLVCLISDFYPGAVTVAWKADSSPVKAGVETTTPSKQSNNKYAASSYLSLTPEQWKSHRSYSCQVTHEGSTVEKTVAPTECS

SEQ ID NO: 27011 - protein, 218 aa, Artificial Sequence
  source: /note="Description of Artificial Sequence: Synthetic polypeptide"
DIVMTQSPLSLPVTPGEPASISCRSSQSLLHSNGYNYLDWYLQKPGQSPQLLIYLGSNRASGVPDRFIGSGSGTDFTLKISRVEAEDVGVFYCMQALQAVGFGPGTKVEIKRTVAAPSVFIFPPSDEQLKSGTASVVCLLNNFYPREAKVQWKVDNALQSGNSQESVTEQDSKDSTYSLSSTLTLSKADYEKHKVYACEVTHQGLSSPVTKSFNRGEC

SEQ ID NO: 27012 - protein, 223 aa, Artificial Sequence
  source: /note="Description of Artificial Sequence: Synthetic polypeptide"
QVQLVQSAAEVKKPGEALKISCKGSGYSFSNYWIAWVRQMPGKGLEWMGIVYPDDSDSSYNSSFQGQITFSADKSISTAYLHWTSLQASDTAMYYCARLGFEGDYSGSFFDYWGQGTLLIVSSASTKGPSVFPLAPSSKSTSGGTAALGCLVKDYFPEPVTVSWNSGALTSGVHTFPAVLQSSGLYSLSSVVTVPSSSLGTQTYICNVNHKPSNTKVDKKVEP

SEQ ID NO: 27013 - protein, 230 aa, Artificial Sequence
  source: /note="Description of Artificial Sequence: Synthetic polypeptide"
EVQLVQSGAEVKKPGESLKISCKASGYSFSSYWIAWVRQMPGKGLEWMGFIYPADSDTRYSPSFQGQGTISADKSISTAYLQWSSLKASDTAMYYCAILGFWGANRGGGGMDVWGQGTTVIVSSASTKGPSVFPLAPSSKSTSGGTAALGCLVKDYFPEPVTVSWNSGALTSGVHTFPAVLQSSGLYSLSSVVTVPSSSLGTQTYICNVNHKPSNTKVDKKVEPKSCDKT

SEQ ID NO: 27014 - protein, 229 aa, Artificial Sequence
  source: /note="Description of Artificial Sequence: Synthetic polypeptide"
QVHLSQSGAAVTKPGASVRVSCEASGYKISDHFIHWWRQAPGQGLQWVGWINPKTGQPNNPRQFQGRVSLTRQASWDFDTYSFYMDLKAVRSDDTAIYFCARQRSDFWDFDVWGSGTQVTVSSASTKGPSVFPLAPSSKSTSGGTAALGCLVKDYFPEPVTVSWNSGALTSGVHTFPAVLQSSGLYSLSSVVTVPSSSLGTQTYICNVNHKPSNTKVDKRVEPKSCDKT

SEQ ID NO: 27015 - protein, 219 aa, Artificial Sequence
  source: /note="Description of Artificial Sequence: Synthetic polypeptide"
EVQLVQSGAEVKKPGATVKISCKASGYTFSDFYMYWVRQAPGKGLEWMGLIDPEDADTMYAEKFRGRVTITADTSTDTGYLELSSLRSEDTAVYYCAADPWELNAFNVWGQGTLVSVSSASTKGPSVFPLAPSSKSTSGGTAALGCLVKDYFPEPVTVSWNSGALTSGVHTFPAVLQSSGLYSLSSVVTVPSSSLGTQTYICNVNHKPSNTKVDKKVEP

SEQ ID NO: 27016 - protein, 228 aa, Artificial Sequence
  source: /note="Description of Artificial Sequence: Synthetic polypeptide"
QVQLVQSGAEVKRPGSSVTVSCKASGGSFSTYALSWVRQAPGRGLEWMGGVIPLLTITNYAPRFQGRITITADRSTSTAYLELNSLRPEDTAVYYCAREGTTGWGWLGKPIGAFAHWGQGTLVTVSSASTKGPSVFPLAPSSKSTSGGTAALGCLVKDYFPEPVTVSWNSGALTSGVHTFPAVLQSSGLYSLSSVVTVPSSSLGTQTYICNVNHKPSNTKVDKKVEPK

SEQ ID NO: 27017 - protein, 231 aa, Artificial Sequence
  source: /note="Description of Artificial Sequence: Synthetic polypeptide"
EVQLVQSGAEVKKPGESLKISCKGSGYSFTSYWIGWVRQMPGKGLEWMGIIYPGDSDTRYSPSFQGQVTISADKSISTAYLQWSSLKASDTAMYYCARLGGRYYYDSSGYYYFDYWGQGTLVTVSSASTKGPSVFPLAPSSKSTSGGTAALGCLVKDYFPEPVTVSWNSGALTSGVHTFPAVLQSSGLYSLSSVVTVPSSSLGTQTYICNVNHKPSNTKVDKRVEPKSCDK

SEQ ID NO: 27018 - protein, 233 aa, Artificial Sequence
  source: /note="Description of Artificial Sequence: Synthetic polypeptide"
  MOD_RES (105)..(105): Any amino acid
  MOD_RES (107)..(107): Any amino acid
EVQLVESGGNVVQPGGSLRLSCTASGFSFDDSTMHWVRQAPGKGLQWVSLISWNGGRTYYADSVKGRFTISRDNSKNSLYLQMNSLKTEDTAFYFCAKDKGDSDXDXNLGYSYFYYMDGWGKGTTVTVSSASTKGPSVFPLAPSSKSTSGGTAALGCLVKDYFPEPVTVSWNSGALTSGVHTFPAVLQSSGLYSLSSVVTVPSSSLGTQTYICNVNHKPSNTKVDKKVEPKSC

SEQ ID NO: 27019 - protein, 233 aa, Artificial Sequence [sequence omitted]

SEQ ID NO: 27020 - protein, 206 aa, Artificial Sequence
  source: /note="Description of Artificial Sequence: Synthetic polypeptide"
DIQMTQSPSSLSARVGDTVTITCQANGYLNWYQQRRGKAPKLLIYDGSKLERGVPARFSGRRWGQEYNLTINNLQPEDVATYFCQVYEFIVPGTRLDLKRTVAAPSVFIFPPSDEQLKSGTASVVCLLNNFYPREAKVQWKVDNALQSGNSQESVTEQDSKDSTYSLSSTLTLSKADYEKHKVYACEVTHQGLSSPVTKSFNRGEC

SEQ ID NO: 27021 - protein, 212 aa, Artificial Sequence
  source: /note="Description of Artificial Sequence: Synthetic polypeptide"
DIQMTQSPSSVSASVGDRVTITCRASQDISTWLAWYQQKPGKAPKLLIYAASTLQSGVPSRFSGSGSGTDFSLTINSLQPEDFATYYCQQANSFFTFGGGTKVEIKRTVAAPSVFIFPPSDEQLKSGTASVVCLLNNFYPREAKVQWKVDNALQSGNSQESVTEQDSKDSTYSLSSTLTLSKADYEKHKLYACEVTHQGLSSPVTKSFNRGE

SEQ ID NO: 27022 - protein, 215 aa, Artificial Sequence
  source: /note="Description of Artificial Sequence: Synthetic polypeptide"
EIVLTQSPGTQSLSPGERATLSCRASQSVGNNKLAWYQQRPGQAPRLLIYGASSRPSGVADRFSGSGSGTDFTLTISRLEPEDFAVYYCQQYGQSLSTFGQGTKVEVKRTVAAPSVFIFPPSDEQLKSGTASVVCLLNNFYPREAKVQWKVDNALQSGNSQESVTEQDSKDSTYSLSSTLTLSKADYEKHKVYACEVTHQGLSSPVTKSFNRGEC

SEQ ID NO: 27023 - protein, 216 aa, Artificial Sequence
  source: /note="Description of Artificial Sequence: Synthetic polypeptide"
NFMLTQPHSVSESPGKTVTISCTRSSGSIASNYVQWYQQRPGSSPTTVIYEDNQRPSGVPDRFSGSIDSSSNSASLTISGLKTEDEADYYCQSYDSSSWVFGGGTKLTVLGQPKAAPSVTLFPPSSEELQANKATLVCLISDFYPGAVTVAWKADSSPVKAGVETTTPSKQSNNKYAASSYLSLTPEQWKSHRSYSCQVTHEGSTVEKTVAPTECS

SEQ ID NO: 27024 - protein, 213 aa, Artificial Sequence
  source: /note="Description of Artificial Sequence: Synthetic polypeptide"
SYVLTQPPSVSVAPGKTARITCGGNNIANKNVHWYQQKPGQAPVLVIYYDDDRPSGIPDRFSGSNSGNTATLTISRVEAGDEADYYCQVWDSNSDHVVFGGGTQLTVLGQPKAAPSVTLFPPSSEELQANKATLVCLISDFYPGAVTVAWKADGSPVKAGVETTKPSKQSNNKYAASSYLSLTPEQWKSHRSYSCQVTHEGSTVEKTVAPTEC

SEQ ID NO: 27025 - protein, 467 aa, Artificial Sequence
  source: /note="Description of Artificial Sequence: Synthetic polypeptide"
QEQLVESGGGVVQPGGSLRLSCLASGFTFHKYGMHWVRQAPGKGLEWVALISDDGMRKYHSDSMWGRVTISRDNSKNTLYLQFSSLKVEDTAMFFCAREAGGPIWHDDVKYYDFNDGYYNYHYMDVWGKGTTVTVSSASTKGPSVFPLAPSSKSTSGGTAALGCLVKDYFPEPVTVSWNSGALTSGVHTFPAVLQSSGLYSLSSVVTVPSSSLGTQTYICNVNHKPSNTKVDKRVEPKSCDKTHTCPPCPAPELLGGPSVFLFPPKPKDTLMISRTPEVTCVVVDVSHEDPEVKFNWYVDGVEVHNAKTKPREEQYNSTYRVVSVLTVLHQDWLNGKEYKCKVSNKALPAPIEKTISKAKGQPREPQVYTLPPSREEMTKNQVSLTCLVKGFYPSDIAVEWESNGQPENNYKTTPPVLDSDGSFFLYSKLTVDKSRWQQGNVFSCSVMHEALHNHYTQKSLSLSPGK

SEQ ID NO: 27026 - protein, 467 aa, Artificial Sequence
  source: /note="Description of Artificial Sequence: Synthetic polypeptide"
QEKLVESGGGVVQPGGSLRLSCLASGFTFHKYGMHWVRQAPGKGLEWVALISDDGMRKYHSDSMWGRVTISRDNSKNTLYLQFSSLKVEDTAMFFCAREAGGPIWHDDVKYYDFNDGYYNYHYMDVWGKGTTVTVSSASTKGPSVFPLAPSSKSTSGGTAALGCLVKDYFPEPVTVSWNSGALTSGVHTFPAVLQSSGLYSLSSVVTVPSSSLGTQTYICNVNHKPSNTKVDKRVEPKSCDKTHTCPPCPAPELLGGPSVFLFPPKPKDTLMISRTPEVTCVVVDVSHEDPEVKFNWYVDGVEVHNAKTKPREEQYNSTYRVVSVLTVLHQDWLNGKEYKCKVSNKALPAPIEKTISKAKGQPREPQVYTLPPSREEMTKNQVSLTCLVKGFYPSDIAVEWESNGQPENNYKTTPPVLDSDGSFFLYSKLTVDKSRWQQGNVFSCSVMHEALHNHYTQKSLSLSPGK

SEQ ID NO: 27027 - protein, 467 aa, Artificial Sequence
  source: /note="Description of Artificial Sequence: Synthetic polypeptide"
QEQLLESGGGVVQPGGSLRLSCLASGFTFHKYGMHWVRQAPGKGLEWVALISDDGMRKYHSNSMWGRVTISRDNSKNTLYLQFSSLKVEDTAMFFCAREAGGPIWHDDVKYYDFNDGYYNYHYMDVWGKGTTVTVSSASTKGPSVFPLAPSSKSTSGGTAALGCLVKDYFPEPVTVSWNSGALTSGVHTFPAVLQSSGLYSLSSVVTVPSSSLGTQTYICNVNHKPSNTKVDKRVEPKSCDKTHTCPPCPAPELLGGPSVFLFPPKPKDTLMISRTPEVTCVVVDVSHEDPEVKFNWYVDGVEVHNAKTKPREEQYNSTYRVVSVLTVLHQDWLNGKEYKCKVSNKALPAPIEKTISKAKGQPREPQVYTLPPSREEMTKNQVSLTCLVKGFYPSDIAVEWESNGQPENNYKTTPPVLDSDGSFFLYSKLTVDKSRWQQGNVFSCSVMHEALHNHYTQKSLSLSPGK

SEQ ID NO: 27028 - protein, 467 aa, Artificial Sequence
  source: /note="Description of Artificial Sequence: Synthetic polypeptide"
QEKLVESGGGVVQPGGSLRLSCLASGFTFHKYGMHWVRQAPGKGLEWVALISDDGMRKYHSDSMWGRVTISRDNSKNTLYLQFSSLKVEDTAMFFCAREAGGPIWHDDVKYYDFNDGYYNYHYMDVWGKGTIVTVSSASTKGPSVFPLAPSSKSTSGGTAALGCLVKDYFPEPVTVSWNSGALTSGVHTFPAVLQSSGLYSLSSVVTVPSSSLGTQTYICNVNHKPSNTKVDKRVEPKSCDKTHTCPPCPAPELLGGPSVFLFPPKPKDTLMISRTPEVTCVVVDVSHEDPEVKFNWYVDGVEVHNAKTKPREEQYNSTYRVVSVLTVLHQDWLNGKEYKCKVSNKALPAPIEKTISKAKGQPREPQVYTLPPSREEMTKNQVSLTCLVKGFYPSDIAVEWESNGQPENNYKTTPPVLDSDGSFFLYSKLTVDKSRWQQGNVFSCSVMHEALHNHYTQKSLSLSPGK

SEQ ID NO: 27029 - protein, 137 aa, Artificial Sequence
  source: /note="Description of Artificial Sequence: Synthetic polypeptide"
HEQLVEAGGGVVQPGGSLRLSCLASGFTFHKYGMHWVRQAPGKGLEWVALISDDGMRKYHSDSMWGRVTISRDNSKNTLYLQFSSLRVEDTAMFFCAREAGGPIWHDDVKYYDFNDGYYNYHYMDVWGKGTKVTVSS

SEQ ID NO: 27030 - protein, 124 aa, Artificial Sequence
  source: /note="Description of Artificial Sequence: Synthetic polypeptide"
QVRLVQSGPEVKKPGSSVTVSCQASGGTFSSYAFTWVRQAPGQGLEWLGMVTPIFGEAKYSQRFEGRVTITADESTSTTSIELRGLTSEDTAIYYCARDRRAVPIATDNWLDPWGQGTLVTVSS

SEQ ID NO: 27031 - protein, 124 aa, Artificial Sequence
  source: /note="Description of Artificial Sequence: Synthetic polypeptide"
QVLLVQSGTEVKKPGSSVKVSCQASGGAFSSYAFSWVRQAPGQGLEWMGMITPVFGETKYAPRFQGRLTLTAEESLSTTYMELRSLTSDDTAFYYCTRDRRVVPMATDNWLDPWGQGTLVTVSS

SEQ ID NO: 27032 - protein, 137 aa, Artificial Sequence
  source: /note="Description of Artificial Sequence: Synthetic polypeptide"
QEKLVESGGGVVQPGGSLRLSCLASGFTFHKYGMHWVRQAPGKGLEWVALISDDGMRKYHSDSMWGRVTISRDNSKNTLYLQFSSLKVEDTAMFFCAREAGGPIWHDDVKYYDFNDGYYNYHYMDVWGKGTTVTVSS

SEQ ID NO: 27033 - protein, 137 aa, Artificial Sequence
  source: /note="Description of Artificial Sequence: Synthetic polypeptide"
QEQLVESGGGVVQPGGSLRLSCLASGFTFHKYGMHWVRQAPGKGLEWVALISDDGMRKYHSDSMWGRVTISRDNSKNTLYLQFSSLKVEDTAMFFCAREAGGPIWHDDVKYYDFNDGYYNYHYMDVWGKGTTVTVSS

SEQ ID NO: 27034 - protein, 464 aa, Artificial Sequence
  source: /note="Description of Artificial Sequence: Synthetic polypeptide"
QEQLVESGGGVVQPGGSLRLSCLASGFTFHKYGMHWVRQAPGKGLEWVALISDDGMRKYHSDSMWGRVTISRDNSKNTLYLQFSSLKVEDTAMFFCAREAGGPIWHDDVKYYDFNDGYYNYHYMDVWGKGTTVTVSSASTKGPSVFPLAPSSKSTSGGTAALGCLVKDYFPEPVTVSWNSGALTSGVHTFPAVLQSSGLYSLSSVVTVPSSSLGTQTYICNVNHKPSNTKVDKRVEPKSCDKTHTCPPCPAPELLGGPSVFLFPPKPKDTLMISRTPEVTCVVVDVSHEDPEVKFNWYVDGVEVHNAKTKPREEQYNSTYRVVSVLTVLHQDWLNGKEYKCKVSNKALPAPIEKTISKAKGQPREPQVYTLPPSREEMTKNQVSLTCLVKGFYPSDIAVEWESNGQPENNYKTTPPVLDSDGSFFLYSKLTVDKSRWQQGNVFSCSVMHEALHNHYTQKSLSLS

SEQ ID NO: 27035 - protein, 137 aa, Artificial Sequence
  source: /note="Description of Artificial Sequence: Synthetic polypeptide"
QEQLLESGGGVVQPGGSLRLSCLASGFTFHKYGMHWVRQAPGKGLEWVALISDDGMRKYHSNSMWGRVTISRDNSKNTLYLQFSSLKVEDTAMFFCAREAGGPIWHDDVKYYDFNDGYYNYHYMDVWGKGTTVTVSS

SEQ ID NO: 27036 - protein, 122 aa, Artificial Sequence
  source: /note="Description of Artificial Sequence: Synthetic polypeptide"
DGHLVQSGVEVKKTGATVKISCKVSGYSFIDYYLHWVQRAPGKGLEWVGLIDPENGEARYAEKFQGRVTIIADTSIDTGYMEMRSLKSEDTAVYFCAAGAVGADSGSWFDPWGQGTLVTVSS

SEQ ID NO: 27037 - protein, 216 aa, Artificial Sequence
  source: /note="Description of Artificial Sequence: Synthetic polypeptide"
QSALTQPASVSGSPGQTITISCNGTRSDVGGFDSVSWYQQSPGKAPKVMVFDVSHRPSGISNRFSGSKSGNTASLTISGLHIEDEGDYFCSSLTDRSHRIFGGGTKVTVLGQPKAAPSVTLFPPSSEELQANKATLVCLISDFYPGAVTVAWKADSSPVKAGVETTTPSKQSNNKYAASSYLSLTPEQWKSHKSYSCQVTHEGSTVEKTVAPTECS

SEQ ID NO: 27038 - protein, 136 aa, Artificial Sequence
  source: /note="Description of Artificial Sequence: Synthetic polypeptide"
QRLVESGGGVVQPGSSLRLSCAASGFDFSRQGMHWVRQAPGQGLEWVAFIKYDGSEKYHADSVWGRLSISRDNSKDTLYLQMNSLRVEDTATYFCVREAGGPDYRNGYNYYDFYDGYYNYHYMDVWGKGTTVTVSS

SEQ ID NO: 27039 - protein, 467 aa, Artificial Sequence
  source: /note="Description of Artificial Sequence: Synthetic polypeptide"
HEQLVEAGGGVVQPGGSLRLSCLASGFTFHKYGMHWVRQAPGKGLEWVALISDDGMRKYHSDSMWGRVTISRDNSKNTLYLQFSSLRVEDTAMFFCAREAGGPIWHDDVKYYDFNDGYYNYHYMDVWGKGTKVTVSSASTKGPSVFPLAPSSKSTSGGTAALGCLVKDYFPEPVTVSWNSGALTSGVHTFPAVLQSSGLYSLSSVVTVPSSSLGTQTYICNVNHKPSNTKVDKRVEPKSCDKTHTCPPCPAPELLGGPSVFLFPPKPKDTLMISRTPEVTCVVVDVSHEDPEVKFNWYVDGVEVHNAKTKPREEQYNSTYRVVSVLTVLHQDWLNGKEYKCKVSNKALPAPIEKTISKAKGQPREPQVYTLPPSREEMTKNQVSLTCLVKGFYPSDIAVEWESNGQPENNYKTTPPVLDSDGSFFLYSKLTVDKSRWQQGNVFSCSVMHEALHNHYTQKSLSLSPGK

SEQ ID NO: 27040 - protein, 453 aa, Artificial Sequence
  source: /note="Description of Artificial Sequence: Synthetic polypeptide"
QVLLVQSGTEVKKPGSSVKVSCQASGGAFSSYAFSWVRQAPGQGLEWMGMITPVFGETKYAPRFQGRLTLTAEESLSTTYMELRSLTSDDTAFYYCTRDRRVVPMATDNWLDPWGQGTLVTVSSASTKGPSVFPLAPSSKSTSGGTAALGCLVKDYFPEPVTVSWNSGALTSGVHTFPAVLQSSGLYSLSSVVTVPSSSLGTQTYICNVNHKPSNTKVDKRVEPKSCDKTHTCPPCPAPELLGGPSVFLFPPKPKDTLMISRTPEVTCVVVDVSHEDPEVKFNWYVDGVEVHNAKTKPREEQYNSTYRVVSVLTVLHQDWLNGKEYKCKVSNKALPAPIEKTISKAKGQPREPQVYTLPPSREEMTKNQVSLTCLVKGFYPSDIAVEWESNGQPENNYKTTPPVLDSDGSFFLYSKLTVDKSRWQQGNVFSCSVMHEALHNHYTQKSLSLSPG

SEQ ID NO: 27041 - protein, 452 aa, Artificial Sequence
  source: /note="Description of Artificial Sequence: Synthetic polypeptide"
DGHLVQSGVEVKKTGATVKISCKVSGYSFIDYYLHWVQRAPGKGLEWVGLIDPENGEARYAEKFQGRVTIIADTSIDTGYMEMRSLKSEDTAVYFCAAGAVGADSGSWFDPWGQGTLVTVSSASTKGPSVFPLAPSSKSTSGGTAALGCLVKDYFPEPVTVSWNSGALTSGVHTFPAVLQSSGLYSLSSVVTVPSSSLGTQTYICNVNHKPSNTKVDKRVEPKSCDKTHTCPPCPAPELLGGPSVFLFPPKPKDTLMISRTPEVTCVVVDVSHEDPEVKFNWYVDGVEVHNAKTKPREEQYNSTYRVVSVLTVLHQDWLNGKEYKCKVSNKALPAPIEKTISKAKGQPREPQVYTLPPSREEMTKNQVSLTCLVKGFYPSDIAVEWESNGQPENNYKTTPPVLDSDGSFFLYSKLTVDKSRWQQGNVFSCSVMHEALHNHYTQKSLSLSPGK

SEQ ID NO: 27042 - protein, 466 aa, Artificial Sequence
  source: /note="Description of Artificial Sequence: Synthetic polypeptide"
QRLVESGGGVVQPGSSLRLSCAASGFDFSRQGMHWVRQAPGQGLEWVAFIKYDGSEKYHADSVWGRLSISRDNSKDTLYLQMNSLRVEDTATYFCVREAGGPDYRNGYNYYDFYDGYYNYHYMDVWGKGTTVTVSSASTKGPSVFPLAPSSKSTSGGTAALGCLVKDYFPEPVTVSWNSGALTSGVHTFPAVLQSSGLYSLSSVVTVPSSSLGTQTYICNVNHKPSNTKVDKRVEPKSCDKTHTCPPCPAPELLGGPSVFLFPPKPKDTLMISRTPEVTCVVVDVSHEDPEVKFNWYVDGVEVHNAKTKPREEQYNSTYRVVSVLTVLHQDWLNGKEYKCKVSNKALPAPIEKTISKAKGQPREPQVYTLPPSREEMTKNQVSLTCLVKGFYPSDIAVEWESNGQPENNYKTTPPVLDSDGSFFLYSKLTVDKSRWQQGNVFSCSVMHEALHNHYTQKSLSLSPGK

SEQ ID NO: 27043 - protein, 454 aa, Artificial Sequence
  source: /note="Description of Artificial Sequence: Synthetic polypeptide"
QVRLVQSGPEVKKPGSSVTVSCQASGGTFSSYAFTWVRQAPGQGLEWLGMVTPIFGEAKYSQRFEGRVTITADESTSTTSIELRGLTSEDTAIYYCARDRRAVPIATDNWLDPWGQGTLVTVSSASTKGPSVFPLAPSSKSTSGGTAALGCLVKDYFPEPVTVSWNSGALTSGVHTFPAVLQSSGLYSLSSVVTVPSSSLGTQTYICNVNHKPSNTKVDKRVEPKSCDKTHTCPPCPAPELLGGPSVFLFPPKPKDTLMISRTPEVTCVVVDVSHEDPEVKFNWYVDGVEVHNAKTKPREEQYNSTYRVVSVLTVLHQDWLNGKEYKCKVSNKALPAPIEKTISKAKGQPREPQVYTLPPSREEMTKNQVSLTCLVKGFYPSDIAVEWESNGQPENNYKTTPPVLDSDGSFFLYSKLTVDKSRWQQGNVFSCSVMHEALHNHYTQKSLSLSPGK

SEQ ID NO: 27044 - protein, 131 aa, Artificial Sequence
  source: /note="Description of Artificial Sequence: Synthetic polypeptide"
  MOD_RES (3)..(3): Any amino acid
  MOD_RES (5)..(5): Any amino acid
  MOD_RES (77)..(77): Any amino acid
  MOD_RES (128)..(128): Any amino acid
EVXLXESGGGLVKPGGSLRLSCSASGFDFDNAWMTWVRQPPGKGLEWVGRITGPGEGWSVDYAAPVEGRFTISRLNXINFLYLEMNNLRMEDSGLYFCARTGKYYDFWSGYPPGEEYFQDWGRGTLVXVSS

SEQ ID NO: 27045 - protein, 131 aa, Artificial Sequence
  source: /note="Description of Artificial Sequence: Synthetic polypeptide"
  MOD_RES (3)..(3): Any amino acid
  MOD_RES (5)..(5): Any amino acid
  MOD_RES (28)..(28): Any amino acid
  MOD_RES (30)..(31): Any amino acid
  MOD_RES (57)..(57): Any amino acid
  MOD_RES (128)..(128): Any amino acid
EVXLXESGGGLVKPGGSLRLSCSASGFXFXXAWMTWVRQPPGKGLEWVGRITGPGEXWSVDYAAPVEGRFTISRLNSINFLYLEMNNLRMEDSGLYFCARTGKYYDFWSGYPPGEEYFQDWGRGTLVXVSS

SEQ ID NO: 27046 - protein, 131 aa, Artificial Sequence
  source: /note="Description of Artificial Sequence: Synthetic polypeptide"
  MOD_RES (2)..(3): Any amino acid
  MOD_RES (5)..(5): Any amino acid
  MOD_RES (10)..(10): Any amino acid
  MOD_RES (13)..(13): Any amino acid
  MOD_RES (23)..(23): Any amino acid
  MOD_RES (28)..(28): Any amino acid
  MOD_RES (30)..(32): Any amino acid
  MOD_RES (40)..(40): Any amino acid
  MOD_RES (52)..(52): Any amino acid
  MOD_RES (54)..(54): Any amino acid
  MOD_RES (56)..(57): Any amino acid
  MOD_RES (59)..(61): Any amino acid
  MOD_RES (64)..(65): Any amino acid
  MOD_RES (67)..(67): Any amino acid
  MOD_RES (71)..(71): Any amino acid
  MOD_RES (75)..(81): Any amino acid
  MOD_RES (84)..(84): Any amino acid
  MOD_RES (87)..(91): Any amino acid
  MOD_RES (93)..(95): Any amino acid
  MOD_RES (97)..(97): Any amino acid
  MOD_RES (99)..(100): Any amino acid
  MOD_RES (102)..(102): Any amino acid
  MOD_RES (104)..(104): Any amino acid
  MOD_RES (106)..(106): Any amino acid
  MOD_RES (109)..(109): Any amino acid
  MOD_RES (111)..(111): Any amino acid
  MOD_RES (118)..(120): Any amino acid
  MOD_RES (123)..(123): Any amino acid
  MOD_RES (126)..(126): Any amino acid
  MOD_RES (128)..(128): Any amino acid
  MOD_RES (130)..(130): Any amino acid
EXXLXESGGXLVXPGGSLRLSCXASGFXFXXXWMTWVRQXPGKGLEWVGRIXGXGXXWXXXYAXXVXGRFXISRXXXXXXXYLXMNXXXXXDXXXYXCXXTXKXYXFWXGXPPGEEYXXXWGXGTXVXVXS

SEQ ID NO: 27047 - protein, 109 aa, Artificial Sequence
  source: /note="Description of Artificial Sequence: Synthetic polypeptide"
  MOD_RES (1)..(3): Any amino acid
  MOD_RES (7)..(9): Any amino acid
  MOD_RES (14)..(16): Any amino acid
  MOD_RES (19)..(19): Any amino acid
  MOD_RES (23)..(23): Any amino acid
  MOD_RES (29)..(30): Any amino acid
  MOD_RES (32)..(33): Any amino acid
  MOD_RES (37)..(40): Any amino acid
  MOD_RES (44)..(44): Any amino acid
  MOD_RES (46)..(47): Any amino acid
  MOD_RES (49)..(52): Any amino acid
  MOD_RES (56)..(58): Any amino acid
  MOD_RES (63)..(65): Any amino acid
  MOD_RES (69)..(69): Any amino acid
  MOD_RES (75)..(75): Any amino acid
  MOD_RES (78)..(80): Any amino acid
  MOD_RES (82)..(82): Any amino acid
  MOD_RES (84)..(84): Any amino acid
  MOD_RES (98)..(99): Any amino acid
  MOD_RES (102)..(102): Any amino acid
  MOD_RES (105)..(109): Any amino acid
XXXLTQXXXVSVAXXXTVXITCXGDSLRXXYXXWYQXXXXQAPXLXXYXXXXRPSXXXDRFSXXXSGNXASLTIXGAXXXDXAXYYCSSRDKSGSRLXXFGXGTXXXXX

SEQ ID NO: 27048 - protein, 131 aa, Artificial Sequence
  source: /note="Description of Artificial Sequence: Synthetic polypeptide"
EVRLVESGGGLVKPGGSLRLSCSASGFDFDNAWMTWVRQPPGKGLEWVGRITGPGEGWSVDYAAPVEGRFTISRLNSINFLYLEMNNLRMEDSGLYFCARTGKYYDFWSGYPPGEEYFQDWGRGTLVIVSS

SEQ ID NO: 27049 - protein, 131 aa, Artificial Sequence
  source: /note="Description of Artificial Sequence: Synthetic polypeptide"
EVRLAESGGGLVKPGGSLRLSCSASGFDFDNAWMTWVRQPPGKGLEWVGRITGPGEGWSVDYAAPVEGRFTISRLNSINFLYLEMNNLRMEDSGLYFCARTGKYYDFWSGYPPGEEYFQDWGRGTLVIVSS

SEQ ID NO: 27050 - protein, 131 aa, Artificial Sequence
  source: /note="Description of Artificial Sequence: Synthetic polypeptide"
EVRLVESGGGLVKPGGSLRLSCSASGFDFDNAWMTWVRQPPGKGLEWVGRITGPGEGWSVDYAAPVEGRFTISRLNSINFLYLEMNNLRMEDSGLYFCARTGKYYDFWSGYPPGEEYFQDWGQGTLVIVSS

SEQ ID NO: 27051 - protein, 131 aa, Artificial Sequence
  source: /note="Description of Artificial Sequence: Synthetic polypeptide"
EVRLVESGGGLVKPGGSLRLSCSASGFDFDNAWMTWVRQPPGKGLEWVGRITGPGEGWSVDYAAPVEGRFTISRLNSINFLYLEMNNLRMEDSGLYFCARTGKYYDFWSGYPPGEEYFQDWGQGTLVIVPS

SEQ ID NO: 27052 - protein, 131 aa, Artificial Sequence
  source: /note="Description of Artificial Sequence: Synthetic polypeptide"
EVRLAESGGGLVKPGGSLRLSCSASGFDFDNAWMTWVRQPPGKGLEWVGRITGPGEGWSVDYAAPVEGRFTISRLNSINFLYLEMNNLRMEDSGLYFCARTGKYYDFWSGYPPGEEYFQDWGQGTLVIVPS

SEQ ID NO: 27053 - protein, 131 aa, Artificial Sequence
  source: /note="Description of Artificial Sequence: Synthetic polypeptide"
EVRLVESGGGLVKPGGSLRLSCSASGFNFDDAWMTWVRQPPGKGLEWVGRISGPGEGWSVDYAESVKGRFTISRLNSINFLYLEMNNVRTEDTGYYFCARTGKHYDFWSGYPPGEEYFQDWGQGTLVIVSS

SEQ ID NO: 27054 - protein, 131 aa, Artificial Sequence
  source: /note="Description of Artificial Sequence: Synthetic polypeptide"
EVRLVESGGRLVRPGGSLRLSCSASGFNFDNAWMTWVRQPPGKGLEWVGRITGPGEGWSVDYAASVKGRFTISRMNSINFFYLEMNNLKIEDTGLYFCARTGKHYAFWGGYPPGEEYLEDWGQGTLVIVSS

SEQ ID NO: 27055 - protein, 131 aa, Artificial Sequence; identical to SEQ ID NO: 27054
  source: /note="Description of Artificial Sequence: Synthetic polypeptide"

SEQ ID NO: 27056 - protein, 131 aa, Artificial Sequence
  source: /note="Description of Artificial Sequence: Synthetic polypeptide"
EIRLVESGGGLVKPGGSLRLSCSASGFNFDSAWMTWVRQPPGKGLEWVGRITGPGEGWSVDYAESVKGRFIISRINSINFLYLEMNNLRPEDTGSYFCAHTGKHYDFWRGYPPGEEYFQDWGQGTQVIVSS

SEQ ID NO: 27057 - protein, 131 aa, Artificial Sequence
  source: /note="Description of Artificial Sequence: Synthetic polypeptide"
EIRLVESGGGLVKPGGSLRLSCSASGFNFDSAWMTWVRQPPGKGLEWVGRITGPGEGWSVGYAESVKGRFIISRINSINFLYLEMNNLRPEDTGSYFCAHTGKHYDFWRGYPPGEEYFQDWGQGTQVIVSS

SEQ ID NO: 27058 - protein, 131 aa, Artificial Sequence
  source: /note="Description of Artificial Sequence: Synthetic polypeptide"
EVQLVESGGDLVKPGGSLRLSCSASGFSFKNTWMTWVRQAPGKGLEWVGRITGPGEGWTSDYAATVQGRFTISRNNMIDMLYLEMNRLRTDDTGLYYCVHTEKYYNFWGGYPPGEEYFQHWGRGTLVIVSS

SEQ ID NO: 27059 - protein, 131 aa, Artificial Sequence
  source: /note="Description of Artificial Sequence: Synthetic polypeptide"
EVRLAESGGGLVKPGGSLRLSCSASGFDFDNAWMTWVRQPPGKGLEWVGRITGPGEGWSVDYAAPVEGRFTISRLNAINFLYLEMNNLRMEDSGLYFCARTGKYYDFWSGYPPGEEYFQDWGRGTLVIVSS

SEQ ID NO: 27060 - protein, 131 aa, Artificial Sequence
  source: /note="Description of Artificial Sequence: Synthetic polypeptide"
EVRLAESGGGLVKPGGSLRLSCSASGFDFDNAWMTWVRQPPGKGLEWVGRITGPGEGWSVDYAAPVEGRFTISRLNRINFLYLEMNNLRMEDSGLYFCARTGKYYDFWSGYPPGEEYFQDWGRGTLVIVSS

SEQ ID NO: 27061 - protein, 131 aa, Artificial Sequence
  source: /note="Description of Artificial Sequence: Synthetic polypeptide"
EVRLAESGGGLVKPGGSLRLSCSASGFDFDNAWMTWVRQPPGKGLEWVGRITGPGEGWSVDYAAPVEGRFTISRLNVINFLYLEMNNLRMEDSGLYFCARTGKYYDFWSGYPPGEEYFQDWGRGTLVIVSS

SEQ ID NO: 27062 - protein, 131 aa, Artificial Sequence
  source: /note="Description of Artificial Sequence: Synthetic polypeptide"
EVRLAESGGGLVKPGGSLRLSCSASGFDFDNAWMTWVRQPPGKGLEWVGRITGPGEGWSVDYAAPVEGRFTISRLNYINFLYLEMNNLRMEDSGLYFCARTGKYYDFWSGYPPGEEYFQDWGRGTLVIVSS

SEQ ID NO: 27063 - protein, 131 aa, Artificial Sequence
  source: /note="Description of Artificial Sequence: Synthetic polypeptide"
EVRLAESGGGLVKPGGSQRLSCSASGFDFDNAWMTWVRQPPGKGLEWVGRITGPGEGWSVDYAAPVEGRFTISRLNYINFLYLEMNNLRTEDSGLYFCARTGKYYDFWSGYPPGEEYFQDWGRGTLVIVSS

SEQ ID NO: 27064 - protein, 131 aa, Artificial Sequence
  source: /note="Description of Artificial Sequence: Synthetic polypeptide"
EVRLAESGGGLVKPGGSLRLSCSASGFDFDNAWMTWVRQPPGKGLEWVGRITGPGEGWSVDYAAPVEGRFTISRDNYKNTLYLEMNNLRTEDSGLYFCARTGKYYDFWSGYPPGEEYFQDWGRGTLVIVSS

SEQ ID NO: 27065 - protein, 131 aa, Artificial Sequence
  source: /note="Description of Artificial Sequence: Synthetic polypeptide"
EVRLAESGGGLVKPGGSQRLSCSASGFDFDNAWMTWVRQPPGKGLEWVGRITGPGEGKSVDYAAPVEGRFTISRLNYINFLYLEMNNLRTEDSGLYFCARTGKYYDFWSGYPPGEEYFQDWGRGTLVIVSS

SEQ ID NO: 27066 - protein, 131 aa, Artificial Sequence
  source: /note="Description of Artificial Sequence: Synthetic polypeptide"
EVRLAESGGGLVKPGGSQRLSCSASGFDFDNAWMTWVRQPPGKGLEWVGRITGPGEGKSVDYAAPVEGRFTISRDNYKNTLYLEMNNLRTEDSGLYFCARTGKYYDFWSGYPPGEEYFQDWGRGTLVIVSS

SEQ ID NO: 27067 - protein, 131 aa, Artificial Sequence
  source: /note="Description of Artificial Sequence: Synthetic polypeptide"
EVRLAESGGGLVKPGGSLRLSCAASGFDFDNAWMTWVRQPPGKGLEWVGRITGPGEGWSVDYAAPVEGRFTISRLDYINFLYLQMNSLKMEDTGVYYCARTGKYYDFWSGYPPGEEYFQDWGQGTLVIVSS

SEQ ID NO: 27068 - protein, 109 aa, Artificial Sequence
  source: /note="Description of Artificial Sequence: Synthetic polypeptide"
SYELTQETGVSVALGRTVTITCQGDSLRSHYASWYQKKPGQAPILLFYGKNNRPSGVPDRFSGSASGNRASLTISGAQAEDDAEYYCSSRDKSGSRLSVFGGGTKLTVL

SEQ ID NO: 27069 - protein, 109 aa, Artificial Sequence
  source: /note="Description of Artificial Sequence: Synthetic polypeptide"
SYELTQDTGVSVALGRTVTITCQGDSLRSHYASWYQKKPGQAPVLLFYGKNNRPSGIPDRFSGSASGNRASLTITGAQAEDEADYYCSSRDKSGSRLSVFGGGTKLTVL

SEQ ID NO: 27070 - protein, 109 aa, Artificial Sequence
  source: /note="Description of Artificial Sequence: Synthetic polypeptide"
SSELTQDTGVSVALGRTVTITCQGDSLRSHYASWYQKKPGQAPKLLFYGKNNRPSGIPDRFSGSASGNRASLTITGAQAEDEADYYCSSRDKSGSRLSVFGGGTKLTVL

SEQ ID NO: 27071 - protein, 109 aa, Artificial Sequence
  source: /note="Description of Artificial Sequence: Synthetic polypeptide"
SYELTQDTGTSVAAGRTVTITCQGDSLRSHYASWYQKKPGQAPVLLFYGKNNRPSGIPDRFSGSASGNRASLTITGAQAEDEADYYCSSRDKSGSRLSVFGGGTKLTVP

SEQ ID NO: 27072 - protein, 109 aa, Artificial Sequence
  source: /note="Description of Artificial Sequence: Synthetic polypeptide"
SSELTQDTGTSVAAGRTVTITCQGDSLRSHYASWYQKKPGQAPKLLFYGKNNRPSGIPDRFSGSASGNRASLTITGAQAEDEADYYCSSRDKSGSRLSVFGGGTKLTVP

SEQ ID NO: 27073 - protein, 109 aa, Artificial Sequence
  source: /note="Description of Artificial Sequence: Synthetic polypeptide"
  MOD_RES (31)..(31): Any amino acid
  MOD_RES (44)..(44): Any amino acid
  MOD_RES (57)..(57): Any amino acid
  MOD_RES (107)..(107): Any amino acid
SYELTQETGVSVALGRTVTITCRGDSLRSHXASWYQKKPGQAPXLLFYGKNNRPSGXPDRFSGSASGNRASLTISGAQAEDDAEYYCSSRDKSGSRLSVFGGGTKLXVL

SEQ ID NO: 27074 - protein, 109 aa, Artificial Sequence
  source: /note="Description of Artificial Sequence: Synthetic polypeptide"
SSELTQETGVSVALGRTVTITCRGDSLRSHYASWYQKKPGQAPILLFYGKNNRPSGIHDRFSGSASGNRASLTISGAQAEDDAEYYCSSRDKSGSRLSVFGGGTKLTVL

SEQ ID NO: 27075 - protein, 109 aa, Artificial Sequence
  source: /note="Description of Artificial Sequence: Synthetic polypeptide"
SSELTQETGVSVALGRTVTITCRGDSLRSHYASWYQKKPGQAPKLLFYGKNNRPSGIPDRFSGSASGNRASLTISGAQAEDDAEYYCSSRDKSGSRLSVFGGGTKLTVL

SEQ ID NO: 27076 - protein, 109 aa, Artificial Sequence
  source: /note="Description of Artificial Sequence: Synthetic polypeptide"
SSELTQETGVSVALGRTVTITCRGDSLRSHYASWYQKKPGQAPKLLFYGKNNRPSGIPDRFSGSASGNRASLTISGAQAEDDAEYICSSRDKSGSRLSVFGGGTKLTVL

SEQ ID NO: 27077 - protein, 109 aa, Artificial Sequence
  source: /note="Description of Artificial Sequence: Synthetic polypeptide"
SSELTQETGVSVALGRTVTITCRGDSLRSHYASWYQKKPGQAPKLLFYGKNNRPSGIPDRFSGFASGNRASLTISGAQAEDDAEYYCSSRDKSGSRLSVFGGGTKLTVL

SEQ ID NO: 27078 - protein, 109 aa, Artificial Sequence
  source: /note="Description of Artificial Sequence: Synthetic polypeptide"
SSELTQETGVSVALGRTVTITCRGDSLRSHYASWYQEKPGQAPKLLFYGKNNRPSGIPDRFSGSASGNRASLTISGAQAEDDAEYYCSSRDKSGSRLSVFGGGTKLAVL

SEQ ID NO: 27079 - protein, 109 aa, Artificial Sequence
  source: /note="Description of Artificial Sequence: Synthetic polypeptide"
SSELTQDPGVSVALKQTVTITCRGDSLRSHYVSWYQKKPGQAPVLVFYGKNNRPSGIPDRFSGSTSGNTASLTIAGAQAEDDADYYCSSRDKSGSRLSVFGGGTKLTVL

SEQ ID NO: 27080 - protein, 109 aa, Artificial Sequence
  source: /note="Description of Artificial Sequence: Synthetic polypeptide"
ASELTQDPGVSVALKQTVTITCRGDSLRSHYVSWYQKKPGQAPVLVFYGKNNRPSGIPDRFSGSTSGNTASLTIAGAQAEDDADYYCSSRDKSGSRLSVFGGGTKLTVL

SEQ ID NO: 27081 - protein, 109 aa, Artificial Sequence
  source: /note="Description of Artificial Sequence: Synthetic polypeptide"
ASELTQDPGVSVALEQTVTITCRGDSLRSHYVSWYQKKPGQAPVLVFYGKNNRPSGIPDRFSGSTSGNTASLTIAGAQAEDDADYYCSSRDKSGSRLSVFGGGTKLTVL

SEQ ID NO: 27082 - protein, 109 aa, Artificial Sequence
  source: /note="Description of Artificial Sequence: Synthetic polypeptide"
ASELTQDPGVSVALKQTVTITCRGDSLRSHYVSWYQKRPGQAPVLVFYGKNNRPSGIPDRFSGSTSGNTASLTIAGAQAEDDADYYCSSRDKSGSRLSVFGGGTKLTVL

SEQ ID NO: 27083 - protein, 109 aa, Artificial Sequence
  source: /note="Description of Artificial Sequence: Synthetic polypeptide"
ASELTQDPAVSVALKQTVTITCRGDSLRSHYVSWYQKKPGQAPVLVFYGKNNRPSGIPDRFSGSSSGNTASLTIAGAQAEDDADYYCSSRDKSGSRLSVFGGGTKLTVL

SEQ ID NO: 27084 - protein, 109 aa, Artificial Sequence
  source: /note="Description of Artificial Sequence: Synthetic polypeptide"
SSELTQDPGVSVALKQTVTITCRGDSLRSHYVSWYQKKPGQAPVLVFYGKNIGPSGIPDRFSGSTSGNTASLTIAGAQAEDDADYYCSSRDKSGSRLSVFGGGTKLTVL

SEQ ID NO: 27085 - protein, 109 aa, Artificial Sequence
  source: /note="Description of Artificial Sequence: Synthetic polypeptide"
ASELTQDPAVSVALKQTVTITCRGDSLRSHYVSWYQQKPGQAPVLVFYGKNNRPSGIPDRFSGSSSGNTASLTIAGAQAEDDADYYCSSRDKSGSRLSVFGGGTKLTVL

SEQ ID NO: 27086 - protein, 109 aa, Artificial Sequence
  source: /note="Description of Artificial Sequence: Synthetic polypeptide"
ASELTQDPAVSVAFEKTVTITCQGDSLRSHYVSWYQKRPGQAPVLVFYGKNNRPSGIPDRFSGSTSGNTASLTIAGAQAEDDADYYCSSRDKSGSRLSVFGGGTKLTVP

SEQ ID NO: 27087 - protein, 109 aa, Artificial Sequence
  source: /note="Description of Artificial Sequence: Synthetic polypeptide"
SSDLTQDPAVSVALGQTVRITCQGDSLRRYYAGWYQQKPGQAPVLVVYGRDNRPSGIPDRFSGSTSGNTASLTIAGAQAEDDADYYCSSRDKSGSRLSVFGGGTKLTVL

SEQ ID NO: 27088 - protein, 109 aa, Artificial Sequence
  source: /note="Description of Artificial Sequence: Synthetic polypeptide"
ASELTQDPTVSVALGQTVTITCRGDSLRNHYTSWYQQKTGQAPILLIYPKHNRPPGISDRFSASSSGNTASLTITGAQTEDEGDYYCSSRDKSGSRLVTFGGGTKLTVL

SEQ ID NO: 27089 - protein, 109 aa, Artificial Sequence
  source: /note="Description of Artificial Sequence: Synthetic polypeptide"
ASELTQDPTVSVALGQTVTITCRGDSLRNYYTSWYQQKPGQAPVLLIYPKHNRPPGISDRFSASSSGNTASLTITGAQTEDEGDYYCSSRDKSGSRLVTFGGGTKLTVL

SEQ ID NO: 27090 - protein, 109 aa, Artificial Sequence
  source: /note="Description of Artificial Sequence: Synthetic polypeptide"
ASELTQDPTVSVALGQTVTITCRGDSLRNYYTSWYQQKPRQAPVLLIYPKHNRPPGISDRFSASSSGNTASLTITGAQTEDEGDYYCSSRDKSGSRLVTFGGGTKLTVL

SEQ ID NO: 27091 - protein, 109 aa, Artificial Sequence
  source: /note="Description of Artificial Sequence: Synthetic polypeptide"
ASELTQDPTVSVALGQTVTITCRGDSLRNHYTSWYQQKTGQAPVLLIYPKHNRSPGISDRFSASSSGNTASLTITGAQTEDEGDYYCSSRDKSGSRLVTFGGGTKVTVL

SEQ ID NO: 27092 - protein, 109 aa, Artificial Sequence
  source: /note="Description of Artificial Sequence: Synthetic polypeptide"
ASELTQDPTVSVALGQTVTITCRGDSLRNYYTSWYQQKPGQAPVLLIYPKHNRPPGISDRFSASSSGNTASLTITGAQTEDEGDYYCSSRDKSGSRLVTFGRGTKLTVV

SEQ ID NO: 27093 - protein, 109 aa, Artificial Sequence
  source: /note="Description of Artificial Sequence: Synthetic polypeptide"
ASELTQDPTVSVALGQTVTITCRGDSLRNYYTSWYQQKPGQAPVLLIYPKHNRPPGISDRFSASSSGNTASLTITGAQTEDEGDYYCSSRDKSGSRLVTFGGGTKVTGL

SEQ ID NO: 27094 - protein, 109 aa, Artificial Sequence
  source: /note="Description of Artificial Sequence: Synthetic polypeptide"
ASELTQDPTVSVALGQTVTITCRGDSLRNHYTSWYQQKTGQAPVLLIYPKHNRSPGISDRFSASSSGNTASLTITGAQTEDEGDYYCSSRDKSGSRLVTFGGGTKVTVV

SEQ ID NO: 27095 - protein, 109 aa, Artificial Sequence
  source: /note="Description of Artificial Sequence: Synthetic polypeptide"
ASELTQDPTVSVALGQTVTITCRGDSLRNHYTSWYQQKTGQAPVLLIYPKHNRSPGISDRFSASSSGNTASLTITGAQTEDEGDYYCSSRDKSGSRLVTFGGGTEVTGL

SEQ ID NO: 27096 - protein, 109 aa, Artificial Sequence
  source: /note="Description of Artificial Sequence: Synthetic polypeptide"
ASELTQDPTVSVALGQTVTITCRGDSLRNHYTSWYQQKTGQAPVLLIYPKHNRSPGISDRFSRSSSGNTASLTITGAQTEDEGDYYCSSRDKSGSRLVTFGGGTERSTV

SEQ ID NO: 27097 - protein, 109 aa, Artificial Sequence
  source: /note="Description of Artificial Sequence: Synthetic polypeptide"
SSELTQDTGVSVALGRTVTITCRGDSLRSHYASWYQKKPGQAPKLLFYGKNNRPSGIPDRFSGSASGNRASLTITGAQAEDEADYYCSSRDKSGSRLSVFGGGTKLTVL

SEQ ID NO: 27098 - protein, 109 aa, Artificial Sequence
  source: /note="Description of Artificial Sequence: Synthetic polypeptide"
SYELTQDTGTSVAAGRTVTITCRGDSLRSHYASWYQKKPGQAPVLLFYGKNNRPSGIPDRFSGSASGNRASLTITGAQAEDEADYYCSSRDKSGSRLSVFGGGTKLTVP

SEQ ID NO: 27099 - protein, 109 aa, Artificial Sequence
  source: /note="Description of Artificial Sequence: Synthetic polypeptide"
SSELTQDTGTSVAAGRTVTITCRGDSLRSHYASWYQKKPGQAPKLLFYGKNNRPSGIPDRFSGSASGNRASLTITGAQAEDEADYYCSSRDKSGSRLSVFGGGTKLTVP

SEQ ID NO: 27100 - protein, 234 aa, Artificial Sequence
  source: /note="Description of Artificial Sequence: Synthetic polypeptide"
QVQLVESGSAMRKPGSSVKISCRASGFNFREYSIHWVRLIPGRGLEWMGWIKGMWGAVNYARQLQGRVSMTRQLSQDPDDPDWGVAYLDFSGLTSGDTGEYFCVRKGPSCPHCGDFHWQHWGQGTLVVVSTASTKGPSVFPLAPSSKSTSGGTAALGCLVKDYFPEPVTVSWNSGALTSGVHTFPAVLQSSGLYSLSSVVTVPSSSLGTQTYICNVNHKPSNTKVDKKVEPKSC

SEQ ID NO: 27101 - protein, 223 aa, Artificial Sequence
  source: /note="Description of Artificial Sequence: Synthetic polypeptide"
EVQLVGSGGGLIQPGGSLRLSCAASDFSVSEYYMTWVRQAPGKGLEWVAVLYKDGSQFYAPSVKGRFIVSRDNSKNSLYLQMNNLRGEDTAVYFCARENADYGSDYYFGMDVWGQGTAVAVSSASTKGPSVFPLAPSSKSTSGGTAALGCLVKDYFPEPVTVSWNSGALTSSVHTFPAVLQSSGLYSLSSVVTVPSSSLGTQTYICNVNHKPSNTKVDKKAEP

SEQ ID NO: 27102 - protein, 131 aa, Artificial Sequence
  source: /note="Description of Artificial Sequence: Synthetic polypeptide"
QVQLVAGLGREVRKVWGSVKVSCSFSGFTITSYGIHWVQQSPGQGLEWMGWINPGNGSPSYAKKFQGRFTMTRDMSTTTAYTDLSLTSEDMAVYYYAYPGFPSYYYDSSGYYYEPLLWYWGQGTLVTVSSG

SEQ ID NO: 27103 - protein, 121 aa, Artificial Sequence
  source: /note="Description of Artificial Sequence: Synthetic polypeptide"
QVQLVQSGAEMKKPGASVKVSCKSSGYTFTYYSIHWVRQAPGQGLEWMGRSNTASDNTKYSQEFQVRVAITRDTSANTTYVELSSLRSDAVDVYYCGRVSWHRFCRGIGYWGQGLTVTVSS

SEQ ID NO: 27104 - protein, 245 aa, Artificial Sequence
  source: /note="Description of Artificial Sequence: Synthetic polypeptide"
QVQLVQSGAEVKKPGSSVKVSCKASGGTFNSYAFSWVRQAPGQGLEWMGSIIPLFGFVVYAQKFQGRVTITADESTSTAYMELSSLRSEDTAVYYCARYFDTYNNYGFANWGQGTLVTVSSASTKGPSVFPLAPSSKSTSGGTAALGCLVKDYFPEPVTVSWNSGALTSGVHTFPAVLQSSGLYSLSSVVTVPSSSLGTQTYICNVNHKPSNTKVDKKVEPKSEFEQKLISEEDLNGAPHHHHHH

SEQ ID NO: 27105 - protein, 120 aa, Artificial Sequence
  source: /note="Description of Artificial Sequence: Synthetic polypeptide"
QVQLVESGREVKKPGPSVKVSCQASGYRFTDQHLNWIRQAPGQGFEWLGRFNPANGGTDLAQKFQVRVSMTRNMSITTAYLELSRLTSDDTATYYCLNSGWTNEYHYDHWGQGTPVTVSS

SEQ ID NO: 27106 - protein, 124 aa, Artificial Sequence
  source: /note="Description of Artificial Sequence: Synthetic polypeptide"
QVQLVQSGAEVKKPGASLKLSCKTSGKTFNTYYWQWVRQAPGQRLEWLGVFSPRDAVTKYARAFQGRLTVTRDTSTGTTYMELSSLRVDDTAMYYCATSLFVAAPDRILLTIWGQGTMVIVSSA

SEQ ID NO: 27107 - protein, 120 aa, Artificial Sequence
  source: /note="Description of Artificial Sequence: Synthetic polypeptide"
QVQLVQSGAEVKKPGASVKVSCQASGYRFTDQHLNWIRQAPGQGFEWLGRFNPANGGTDLAQKFQGRVSMTRNMSITTAYLELSRLTSDDTATYYCLNSGWTNEYHYDHWGQGTPVTVSS

SEQ ID NO: 27108 - protein, 126 aa, Artificial Sequence
  source: /note="Description of Artificial Sequence: Synthetic polypeptide"
QVQLVQPGAEVKKPASSVKVSCQASRYTFTKHFTQWVRRGPGQGHEWLACFKPYNNHTHYAQNFWGRLTTSTDRSVHTAYMDLSSVRSEDMVRVFLCAIPEVERVTLILVVIIRWGQGTLVTVASG

SEQ ID NO: 27109 - protein, 123 aa, Artificial Sequence
  source: /note="Description of Artificial Sequence: Synthetic polypeptide"
QVQLVQSGAEVKKPGASVKVSCQASGYTFTDYYIHWVRQAPGQGLEWMGWINPNSGGTNYAQKFQGTVTVTRDTSIGTAYMELSRLRSDDTAVYYCARGDYYDTNSGSRFDPWGQGLWSPSPQ

SEQ ID NO: 27110 - protein, 119 aa, Artificial Sequence
  source: /note="Description of Artificial Sequence: Synthetic polypeptide"
QVQLVQSGVEVKKPGASVKVSCKVSGYFLSKISIHWVRQAPEKGLEWMGGFDAEQGETVYAQKFQGRVTVTEDTSTDTAYMDVSSLRSEDTAVYYCATGIRGRPLISWGQGTVVTVSSA

SEQ ID NO: 27111 - protein, 122 aa, Artificial Sequence
  source: /note="Description of Artificial Sequence: Synthetic polypeptide"
QVQLVQSGAEVKKPGASVKVSCKASGYTFTGYYMHWVRQAPGQGLEWMGWINPNSGGTNYAQKFQGRVTMTRDTSISTAYMELSRLRSDDTAVYYCARLRRDSSGFYYFDYWGQGTLVTVSS

SEQ ID NO: 27112 - protein, 123 aa, Artificial Sequence
  source: /note="Description of Artificial Sequence: Synthetic polypeptide"
QVQLVQSGPVIKKPGTSVQVSCKASGFTFSSYVIQWVRQTRGQRLEWIGWIVVGSGITNCAQNFQERVTLIRDMSTDTAYMELNSLGSEDTALYYCAAEPLRFPRVGWSIPWGQGTLVIVSSA

SEQ ID NO: 27113 - protein, 124 aa, Artificial Sequence
  source: /note="Description of Artificial Sequence: Synthetic polypeptide"
QVQLVQSGAEVRKPGASVKVSCKASGYTFTDYYIHWVRQVPGQGLEWIGWIHPNSGRATHTQKFQGRVTMTSGTSISTVYMELTGLTPDDTAVYYCARDNYRNNVWVLYTFDYWGQGTLVTVSS

SEQ ID NO: 27114 - protein, 121 aa, Artificial Sequence
  source: /note="Description of Artificial Sequence: Synthetic polypeptide"
QVQLVQSGAEVKKPGASMRVSCQTSGYTFNSYYIHWMRQVPGQGLEWMGWINPNSGYTNYTQKFQGRVTMTRDTSINTAYLELSALRSDETAVYYCARDFSDGWPYSFDFWGQGTLVTVSS

SEQ ID NO: 27115 - protein, 121 aa, Artificial Sequence
  source: /note="Description of Artificial Sequence: Synthetic polypeptide"
QVQLVPSGAEVKKPGASMRVSCQTSGYTFNSYYIHWMRQVPGQGLEWMGWINPNSGYTNYTQKFQDRVTMTRDTSINTAYLELSALRSDETAVYYCARDFSDGWPYSFDFWGQGTLVTVSS

SEQ ID NO: 27116 - protein, 123 aa, Artificial Sequence
  source: /note="Description of Artificial Sequence: Synthetic polypeptide"
QVQLVQSGPEAGRPGASVKVSCKASGYIFTSYPIGWVRQAPGQRLEWMGWMNPFNGYVKSAQEFQDRLTLSTNNSAHTAYMELRSLTSDDTAIYFCARVQFDSKYYTFFDLWGQGTLVTVSSA

SEQ ID NO: 27117 - protein, 124 aa, Artificial Sequence
  source: /note="Description of Artificial Sequence: Synthetic polypeptide"
QVQLVQSGPEVKKPGASVKVSCKASGYTYNTYYMHWVRQAPGQGLEWMGWINPNSGGTNYAQRFQTRVDMTRDTSINTVYMELSGLTSDDTAVYYCVTDFNGGSSFPFTTLTTWGQGTLVTVSS

SEQ ID NO: 27118 - protein, 118 aa, Artificial Sequence
  source: /note="Description of Artificial Sequence: Synthetic polypeptide"
QVQLVQSGAELKRPGASVRVSCQTSGNTFNNHDVNWIRQAPGGGLEWMGWMNVKFGGSGHIHKFDHRHTFNRDTTINAAYLDLKNLKVDDTAFYYCVVATGSAYDIWGHGTLVSVSSA

SEQ ID NO: 27119 - protein, 125 aa, Artificial Sequence
  source: /note="Description of Artificial Sequence: Synthetic polypeptide"
QVQLVQSGAEVKKVGSSVTLSCKISGGTFYDFAVNWVRQAPGQGLEWVGAVIPMFGTPIYPPKFRHRVTVSSYGSMTTVYMELRNLTFEDTAIYYCARDGREGVNPACQWLDPWGQGTLVTVSST

SEQ ID NO: 27120 - protein, 131 aa, Artificial Sequence
  source: /note="Description of Artificial Sequence: Synthetic polypeptide"
EVQLVESGGGLVKPGGSLRLSCSASGFDFDNAWMTWVRQPPGKGLEWVGRITGPGEGWSVDYAAPVEGRFTISRLNSINFLYLEMNNLRMEDSGLYFCARTGKYYDFWSGYPPGEEYFQDWGRGTLVTVSS

SEQ ID NO: 27121 - protein, 119 aa, Artificial Sequence
  source: /note="Description of Artificial Sequence: Synthetic polypeptide"
QSGAEVRKPGASVKVSCKASGYNFIAYYVHWVRQAPGQGLTWMGWINPDSGDTVYAQNFLDRVTMTRNTSITTVYLELKDLTLADTAIYYCATPDKKDDLGWFDTWGQGSQVTVSSAST

SEQ ID NO: 27122 - protein, 122 aa, Artificial Sequence
  source: /note="Description of Artificial Sequence: Synthetic polypeptide"
QSGAEVKKPGASVKVSCKASGYTFTVYYMHWVRQAPGRGLEWIGWVKAVSGAVNYGSLDFRHRVSLTRDRDLFTAHMDIRGLTQDDTATYFCARQKFARGDQGWFFDLWGRGTLIVVSSAST

SEQ ID NO: 27123 - protein, 130 aa, Artificial Sequence
  source: /note="Description of Artificial Sequence: Synthetic polypeptide"
QSGSGVKKPGASVRVSCRASEDLFGDEIIYDDEVIHWLRQVPGQRPEWMGWIRPKTGARNQARQFQPRISLTRDRALSTAYLDLNKTSADSGTYFCARQTFKPDFYFADQGWSFNLWGRGAHFIVSSAST

SEQ ID NO: 27124 - protein, 236 aa, Artificial Sequence
  source: /note="Description of Artificial Sequence: Synthetic polypeptide"
EVQLVESGGGLVKPGGSLRLSCSASGFDFDNAWMTWVRQPPGKGLEWVGRITGPGEGWSVDYAAPVEGRFTISRLNSINFLYLEMNNLRMEDSGLYFCARTGKYYDFWSGYPPGEEYFQDWGRGTLVTVSSASTKGPSVFPLAPSSKSTSGGTAALGCLVKDYFPEPVTVSWNSGALTSGVHTFPAVLQSSGLYSLSSVVTVPSSSLGTQTYICNVNHKPSNTKVDKRVEPKSCDK

SEQ ID NO: 27125 - protein, 122 aa, Artificial Sequence
  source: /note="Description of Artificial Sequence: Synthetic polypeptide"
QSGAEVKKPGSSVKVSCKVSGGVFTSYAVTWVRQAPGQGLEWIGWVKAVSGAVNYGSLDFRHRVSLTRDRDLFTAHMDIRGLTQDDTAIYFCARQKFARGDQGWFFDLWGRGTLIVVSSAST

SEQ ID NO: 27126 - protein, 129 aa, Artificial Sequence
  source: /note="Description of Artificial Sequence: Synthetic polypeptide"
AGRGGVKKPGASVTLSCKTADEDVFDAAYMHWVRQAPGQTFEWLGWMKPVTGAVNYARKFQGRVSFYRTRELGIAYMDLRNLRFDDTAVYYCARAGVWFGELLPHWSGVGGGMDVWGQGTTVTVSSAST

SEQ ID NO: 27127 - protein, 125 aa, Artificial Sequence
  source: /note="Description of Artificial Sequence: Synthetic polypeptide"
QSGAEVKKPGASVKVSCKASGYTFTSYGISWVRQAPGRGLEWIGWNKTVSGAVNFGSVDFRDRVSLTRDRDLFTAHMDIRGLTQGDTATYFCARQKFEKLYSDDQGLYFDLWGRGTLIIVSSAST

SEQ ID NO: 27128 - protein, 117 aa, Artificial Sequence
  source: /note="Description of Artificial Sequence: Synthetic polypeptide"
QSGPEVRKPGASVTVSCKTSGYTFTDNYFHWLRQAPGMGLEWMGWINPHNGGIKSAKKFQGRITMTRDTTIDTAYMELSGLTSDDTAFYFCAREGGHSSGFDYWGQGALVTVTSAST

SEQ ID NO: 27129 - protein, 121 aa, Artificial Sequence
  source: /note="Description of Artificial Sequence: Synthetic polypeptide"
QSGAEVKKPGASVKVSCKASGYTFTTYGISWVRQAPGQGLFWIGWMKTVTGAVNFGHQISDRVSLTRDRDLFTAHMDIRGLTQGDTATYFCARQKFYAGGQGWYFDLWGRGTLIVVSSAST

SEQ ID NO: 27130 - protein, 127 aa, Artificial Sequence
  source: /note="Description of Artificial Sequence: Synthetic polypeptide"
SQHLVQSGTQVKKPGASVRVSCQASGYTFTNYILHWWRQAPGQGLEWMGLIKPVFGAVNYARQFQGRIQLTRDIYREIAFLDLSGLRSDDTAVYYCARDESGDDLKWHLHPWGQGTQVIVSPASTKG

SEQ ID NO: 27131 - protein, 127 aa, Artificial Sequence
  source: /note="Description of Artificial Sequence: Synthetic polypeptide"
SQQLVQSGTQVKKPGASVRISCQASGYSFTDYVLHWWRQAPGQGLEWMGWIKPVYGARNYARRFQGRINFDRDIYREIAFMDLSGLRSDDTALYFCARDGSGDDTSWHLDPWGQGTLVIVSAASTKG

SEQ ID NO: 27132 - protein, 127 aa, Artificial Sequence
  source: /note="Description of Artificial Sequence: Synthetic polypeptide"
SQQLVQSGTQVKKPGASVRISCQASGYSFTDYVLHWYRQAPGQGLEWMGWIKPVYGARNYARRFQGRINFDRDIYREIAFMDLSGLRSDDTALYFCARDGSGDDTSWYLDPWGQGTLVIVSAASTKG

SEQ ID NO: 27133 - protein, 127 aa, Artificial Sequence
  source: /note="Description of Artificial Sequence: Synthetic polypeptide"
SQQLVQSGTQVKKPGASVRISCQASGYTFTDYVLHWWRQAPGQGLEWMGWIKPVYGARNYARRFQGRINFDRDIYREIAYMDLSGLRSDDTARYFCARDGSGDDTSWHLHPWGQGTLVIVSAASTKG

SEQ ID NO: 27134 - protein, 127 aa, Artificial Sequence
  source: /note="Description of Artificial Sequence: Synthetic polypeptide"
SQQLVQSGTQVKKPGASVRVSCQASGYTFMNYIIHWWRQAPGQRLEWMGWINPVFGARNYAHRFQGRINFDRDINRETFQMELTGLRSDDTAVYYCARDGSGDARDWHLDPWGQGTLVIVSSASTKG

SEQ ID NO: 27135 - protein, 127 aa, Artificial Sequence
  source: /note="Description of Artificial Sequence: Synthetic polypeptide"
SQHLVQSGTQVKKPGASVRVSCQASGYTFTNYILHWWRQAPGQGLEWMGLIKPVFGAVNYARQFQGRIQLTRDINREIAFLDLSGLRSDDTAVYYCARDESGDDLKWHLHPWGQGTQVIVSPASTKG

SEQ ID NO: 27136 - protein, 127 aa, Artificial Sequence
  source: /note="Description of Artificial Sequence: Synthetic polypeptide"
SQQLVQSGTQVKKPGASVRVSCQASGYTFMNYIIHWWRQAPGQRLEWMGWINPVFGARNYAHRFQGRINFDRDINRETFQMDLTGLRSDDTAVYYCARDGSGDARDWHLHPWGQGTLVIVSSASTKG

SEQ ID NO: 27137 - protein, 225 aa, Artificial Sequence
  source: /note="Description of Artificial Sequence: Synthetic polypeptide"
SQHLVQSGTQVKKPGASVRVSCQASGYTFTNYILHWWRQAPGQGLEWMGLIKPVFGAVNYARQFQGRIQLTRDIYREIAFLDLSGLRSDDTAVYYCARDESGDDLKWHLHPWGQGTQVIVSPASTKGPSVFPLAPSSKSTSGGTAALGCLVKDYFPEPVTVSWNSGALTSGVHTFPAVLQSSGLYSLSSVVTVPSSSLGTQTYICNVNHKPSNTKVDKKVEPKSC

SEQ ID NO: 27138 - protein, 127 aa, Artificial Sequence; identical to SEQ ID NO: 27130
  source: /note="Description of Artificial Sequence: Synthetic polypeptide"

SEQ ID NO: 27139 - protein, 127 aa, Artificial Sequence
  source: /note="Description of Artificial Sequence: Synthetic polypeptide"
SQQLVQSGTQVKKTGASVRVSCQASGYDFTKYLIHWWRQAPGQGLEWMGWMKPVYGATNYAHRFQGRISFTRDIYREIAFMDLNGLRSDDTAVYFCARDGGGDDRTWLLDAWGQGTLVIVSSASTKG

SEQ ID NO: 27140 - protein, 127 aa, Artificial Sequence; identical to SEQ ID NO: 27135
  source: /note="Description of Artificial Sequence: Synthetic polypeptide"

SEQ ID NO: 27141 - protein, 127 aa, Artificial Sequence
  source: /note="Description of Artificial Sequence: Synthetic polypeptide"
SQQLVQSGTQVKKPGASVRISCQASGYTFTDYVLHWWRQAPGQGLEWMGWIKPVYGARNYARRFQGRINFDRDIYREIAFLDLSGLRSDDTARYFCARDGSGDDTSWHLHPWGQGTLVIVSAASTKG

SEQ ID NO: 27142 - protein, 127 aa, Artificial Sequence; identical to SEQ ID NO: 27133
  source: /note="Description of Artificial Sequence: Synthetic polypeptide"

SEQ ID NO: 27143 - protein, 127 aa, Artificial Sequence; identical to SEQ ID NO: 27133
  source: /note="Description of Artificial Sequence: Synthetic polypeptide"

SEQ ID NO: 27144 - protein, 127 aa, Artificial Sequence; identical to SEQ ID NO: 27139
  source: /note="Description of Artificial Sequence: Synthetic polypeptide"

SEQ ID NO: 27145 - protein, 126 aa, Artificial Sequence
  source: /note="Description of Artificial Sequence: Synthetic polypeptide"
SQQLVQSGAQVKKPGASVRVSCQASGYTFTNHFLHWWRQAPRQGLEWMGWINPVHGGRNYARRFQGRINFGRDVYQETAYMELSGLRNDDTATYFCARGGGDGRNWHLHPWGQGTLVIVSAASTKG

SEQ ID NO: 27146 - protein, 127 aa, Artificial Sequence; identical to SEQ ID NO: 27130
  source: /note="Description of Artificial Sequence: Synthetic polypeptide"

SEQ ID NO: 27147 - protein, 127 aa, Artificial Sequence
  source: /note="Description of Artificial Sequence: Synthetic polypeptide"
SQQLVQSGAQVKKPGASLRVSCQASGYTFMNYLLHWWRQAPGQGLEWMGWINPVYGAVNYAHRFQGRLTFSRDVYREIAYMDLNGLRSDDTAVYFCARDGSGDDRNWHLDPWGQGTLVIVSSASTKG

SEQ ID NO: 27148 - protein, 127 aa, Artificial Sequence
  source: /note="Description of Artificial Sequence: Synthetic polypeptide"
SQQLVQSGTQVKKPGASVRVSCQASGYTFTNYILHWWRQAPGRGLEWMGLIKPVYGAVNYARQFQGRIQLTRDIYREIAFLDLSGLRPDDTAVYYCARDESGYDLNWHLDSWGQGTQVIVSPASTKG

SEQ ID NO: 27149 - protein, 127 aa, Artificial Sequence
  source: /note="Description of Artificial Sequence: Synthetic polypeptide"
SQQLVQSGTQVKKPGASVRVSCQASGYTFTDYVLHWWRQAPGQGLEWMGWIKPVYGARNYAHRFQGRINFDRDVYREIAYMDLSGLRSDDTAVYFCARDGSGDATSWHLHPWGQGTLVIVSSASTKG

SEQ ID NO: 27150 - protein, 127 aa, Artificial Sequence; identical to SEQ ID NO: 27134
  source: /note="Description of Artificial Sequence: Synthetic polypeptide"

SEQ ID NO: 27151 - protein, 137 aa, Artificial Sequence
  source: /note="Description of Artificial Sequence: Synthetic polypeptide"
QVTLVQSGAEVKKPGASVRISCRASGFTFDDYSDYSFIPTTYLIHWFRQAPGQGLEWMAWINSVNGGRNIARQFQGRVTVARDRSNSIAFLEFSGLRHDDTAVYFCARDRRDDDRAWLLDPWGQGTRVTVSSASTKG

SEQ ID NO: 27152 - protein, 125 aa, Artificial Sequence
  source: /note="Description of Artificial Sequence: Synthetic polypeptide"
SRGAEVKKPGASVKVSCKASGYTFTGYYIHWVRQAPGQGLEWIGWVKIVSGTVNFASLDFRNRISLSRDRDLSTAYMDIRGLTQDDTATYFCARQKFASRYSGDQGSYFDLWGRGTLIVVSSAST

SEQ ID NO: 27153 - protein, 125 aa, Artificial Sequence
  source: /note="Description of Artificial Sequence: Synthetic polypeptide"
QSGSGVKKLGASVRVSCWTSEDIFERTELIHWVRQAPGQGLEWIGWVKAVTFTVNFGSLNFRQRVSLTRDRDLFTAHMDIRGLTQGDTATYFCARQKFEKYTGGQGWYFDLWGRGTLIVVSSAST

SEQ ID NO: 27154 - protein, 125 aa, Artificial Sequence
  source: /note="Description of Artificial Sequence: Synthetic polypeptide"
QSEAEVKKPGASMTVSCETADEDIFDAAYMHWVRQAPGQTFEWLGWMKPVTGAVNYARKFQGRISFYRTRELAIAYMDLRDLRFDDTAVYFCARKTAGDVSGDNRGYFFDLWGRGSRVIVSSAST

SEQ ID NO: 27155 - protein, 126 aa, Artificial Sequence
  source: /note="Description of Artificial Sequence: Synthetic polypeptide"
QIAGGGVKKPGASVTLSCKTADEDVFDAAYMHWVRQAPGQTFEWLGWMKPVTGAVSYARKFQGRVSFYMTRELGMAYMDLRNLRFDDTAVYYCARVGGAADDSGVTEPPSDYWGQGTLVTVSSAST

SEQ ID NO: 27156 - protein, 123 aa, Artificial Sequence
  source: /note="Description of Artificial Sequence: Synthetic polypeptide"
QSGSGVKKVGASVRVSCWTSEDIFERTELIHWVRQAPGQGLEWIGWVKAVSGAVNYGSLDFRHRVSLTRDRDLFTAHMDIRGLTQDDTAIYFCARQKFYAGGQGWYFDLWGRGTLIVVSSAST

SEQ ID NO: 27157 - protein, 121 aa, Artificial Sequence
  source: /note="Description of Artificial Sequence: Synthetic polypeptide"
QSGAEMKKPGSSVKVSKASGGTFRHSPISWVRQAPGQGLEWIGWVKAVSGAVNYGSLDFRHRVSLTRDRDLSTAHMDIRGLTQDDTATYFCARQKFARGDQGWFFDLWGRGTLIVVSSAST

SEQ ID NO: 27158 - protein, 126 aa, Artificial Sequence
  source: /note="Description of Artificial Sequence: Synthetic polypeptide"
PSGSGVKKPGASVRVSCWTSEDIFERTELIHWVRQAPGQGLEWIGWVKTVTGAVNFGSLDFRHRISLTRDRDLFTAHMDIRGLTQGDTATYFCARQKFESRYTGGQGWYFDLWGRGTHIVVSSAST

SEQ ID NO: 27159 - protein, 127 aa, Artificial Sequence
  source: /note="Description of Artificial Sequence: Synthetic polypeptide"
QSGSAMKKPGASVRVSCWTSEDIFDTTELIYWVRQAPGQGLEWIGWVKIVSGTVNFASLDFRNRISLSRDRDLSTAYMDIRGLTQDDTALYYCAREWRVCTGGSPCPSEYLQHWGQGTLVKVSLAST

SEQ ID NO: 27160 - protein, 126 aa, Artificial Sequence
  source: /note="Description of Artificial Sequence: Synthetic polypeptide"
QSASGVRRPGASVRVSCWTSEDIFERSELIYWVRQAPGRGLEWIGWIKLVSGAVNFGSVDFRDRVSLTRDRDLFTAHMDIRGLTQDDTATYFCARQKFASRYSGDQGSYFDLWGRGTLIIVSSAST

SEQ ID NO: 27161 - protein, 124 aa, Artificial Sequence
  source: /note="Description of Artificial Sequence: Synthetic polypeptide"
QSGAAVKKPGSSVKVSCKASGYIFTGYYIHWIRQAPGQGLEWMGWINPSTGDTKFARQFQGRVSFYRTRELGIAYMDLRDLKFDDTAVYFCARKTKGDVSGDDRGFFFDLWGRGTRVIVSSAST

SEQ ID NO: 27162 - protein, 123 aa, Artificial Sequence
  source: /note="Description of Artificial Sequence: Synthetic polypeptide"
QSGSGVKKPGASVRVSCWTSEDIFEGSELIHWVRQAPGQGLEWIGWVKTVTGAVNFGSAYFRHRVSLTRDRDLFTAHMDIRGLTQGDTATYFCARQKFMSGGQGWYFDLWGRGTVIVVSSAST

SEQ ID NO: 27163 - protein, 124 aa, Artificial Sequence
  source: /note="Description of Artificial Sequence: Synthetic polypeptide"
QSGAEVKKPGASVKVSCKASGYTFTGYYMHWVRQAPGQTFEWLGWMKPVTGAVNYARQFQGRVSFYRTRELGIAYMDLRDLKFDDTAVYFCARKTKADVSGDDRGFFFDLWGRGTRVIVSSAST

SEQ ID NO: 27164 - protein, 125 aa, Artificial Sequence
  source: /note="Description of Artificial Sequence: Synthetic polypeptide"
QAGGGVKKPGASVTLSCKTADEDVFDAAYMHWVRQAPGQTFEWLGWMKPVTGAVNYARKFQGRVSFYRTRELGIAYMDLRNLRFDDTAVYFCARKTAGDVSGDKRGFFFDLWGRGSRVIVSSAST

SEQ ID NO: 27165 - protein, 122 aa, Artificial Sequence
  source: /note="Description of Artificial Sequence: Synthetic polypeptide"
QSGSGVKKPGTSVRVSCWTSEDIFERTELIHWVRQAPGQGLEWIGWVKTVTGAVNFGSPNFRHRVSLTRDRDLFTAHMDIRGLTQGDTATYYCARDWGATVVVYLLDSWGQGTPVTVSSAST

SEQ ID NO: 27166 - protein, 126 aa, Artificial Sequence
  source: /note="Description of Artificial Sequence: Synthetic polypeptide"
QSGSTQMKKPGASVRVPCWTSEDIFDTTELIYWVRQAPGQGLEWIGRVKIVSGTVNFASLDFRNRISLSRDRDLSTAHMDIRGLTQDDTATYFCARQKFESRYGDQGSYFDLWGRGTLIIVSSAST

SEQ ID NO: 27167 - protein, 126 aa, Artificial Sequence
  source: /note="Description of Artificial Sequence: Synthetic polypeptide"
QSGAEVKKPGASVRVSCWTSEDIFDTTELIYWVRQAPGQGLEWIGWVKIVSGTVNFASLDFRNRISLSRDRDLSTAHMDIRGLTQDDTATYFCARQKFESRYTGGQGWYFDLWGRGTHIVVSSAST

SEQ ID NO: 27168 - protein, 125 aa, Artificial Sequence
  source: /note="Description of Artificial Sequence: Synthetic polypeptide"
QSGSATEKPGASVRVSCWTSEDIFDTTELNWVRQAPGQGLEWIGWVKIVSGTVNFGSSDFRNRISLSRDRDLSTAHMDIRGLTQDDTATYFCARQKFESRYRGDQGSYFDLWGRGTLIIVSSAST

SEQ ID NO: 27169 - protein, 125 aa, Artificial Sequence
  source: /note="Description of Artificial Sequence: Synthetic polypeptide"
QSGAEVKKPGASVTLSCKTADEDVFDAAYMHWVRQAPGQTFEWLGWMKPVTGAVSYARKFQGRVSFYMTRELGMAYMDLRNLRFDDTAVYFCARKTAGDVSGDNRGYFFDLWGRGSRVIVSSAST

SEQ ID NO: 27170 - protein, 125 aa, Artificial Sequence
  source: /note="Description of Artificial Sequence: Synthetic polypeptide"
QSGSAMKKPGASVRCSCWTSEDIFDTTELIYWVRQAPGQGLEWIGWVKIVSGTVNFARQFQGRVSFYRTRELGIAYMDLRDLKFDDTAVYFCARKTKGDVSGDDRGFFFDLWGRGTRVIVSSAST

SEQ ID NO: 27171 - protein, 117 aa, Artificial Sequence
  source: /note="Description of Artificial Sequence: Synthetic polypeptide"
ESGPEVRKPGASVKISCKTSGYIFTDNYFHWLRQAPAVGLEWMGWINPHNGYTKSAKKFQGRITMTRDTAVDTAYMELIDLTSDDTAIYFCAREGGHSSGFDYWGQGALVTVTSAST

SEQ ID NO: 27172 - protein, 229 aa, Artificial Sequence
  source: /note="Description of Artificial Sequence: Synthetic polypeptide"
QVQLLESGAEVKKPGSSVKVSCKASGDTFIRYSFTWVRQAPGQGLEWMGRIITILDVAHYAPHLQGRVTITADKSTSTVYLELRNLRSDDTAVYFCAGVYEGEADEGEYRNNGFLKHWGQGTLVTVTSASTKGPSVFPLAPSSKSTSGGTAALGCLVKDYFPQPVTVSWNSGALTSGVHTFPAVLQSSGLYSLSSVVTVPSSSLGTQTYICNVNHKPSNTKVDKKVEPK

SEQ ID NO: 27173 - protein, 126 aa, Artificial Sequence
  source: /note="Description of Artificial Sequence: Synthetic polypeptide"
QSGSAMKKPGASVRVSCWTSEDIFERTELIYWVRQAPGRGLEWIGWVKTVSGTVNFGSSDFRNRISLTRDRDLSTAHMDIRGLTQDDTATYFCARQKFESLYSDDQGSYFDLWGRGTLIIVSSAST

SEQ ID NO: 27174 - protein, 127 aa, Artificial Sequence
  source: /note="Description of Artificial Sequence: Synthetic polypeptide"
QSGSAMKKPGRSVKYSCWTSEDIFTFTHRVDLWVRQAPGQGLEWIGWVKIVSGTVNFASLDFRNRISLSRDRDLSTAYMDIRGLTQDDTATVFCARQKFASRYSGDQGSYFDLWGRGTLIVVSSAST

SEQ ID NO: 27175 - protein, 125 aa, Artificial Sequence
  source: /note="Description of Artificial Sequence: Synthetic polypeptide"
QSGSGVKKPGASVRVSCWTSEDIFEKSELIHWVRQAPGQGLEWMGWINPRTGVANNAQKFQDRVTMTRDTSITTAYMELTNLRSDDSATYYCALGDLICKTRTCSYNSFEPWGQGTLITVSSAST

SEQ ID NO: 27176 - protein, 125 aa, Artificial Sequence
  source: /note="Description of Artificial Sequence: Synthetic polypeptide"
QAGGGMKKPGASMTVSCKTADEDIFDAAYMHWVRQAPGQTFEWLGWMKPVTGAVNYARRFQGRVSFYRTRELGIAYMDLRDLKFDDTAVYFCARKTKGDVSGDDRGFVSDLWGRGTRVIVSSAST

SEQ ID NO: 27177 - protein, 122 aa, Artificial Sequence
  source: /note="Description of Artificial Sequence: Synthetic polypeptide"
QSGAEVKKPGASVKVSCKASGYTFTGYYMHWVRQAPGQGLEWIGWVKTVSGAVNFGSLNFRHRVSLTRDRDLFTAHMDIRGLTQGDTATYFCARQKFARGDQGWFFDLWGRGTLIVVSSAST

SEQ ID NO: 27178 - protein, 126 aa, Artificial Sequence
  source: /note="Description of Artificial Sequence: Synthetic polypeptide"
QSGAEVKKPGSSVRVSCWTSEDIFERTELIHWVRQAPGQGLEWIGWVKTVTGAVNFGSPNFRHRVSLTRDRDLFTAHMDIRGLTQGDTATYFCARQKFESRYSGDQGSYFDLWGRGTLIIVSSAST

SEQ ID NO: 27179 - protein, 126 aa, Artificial Sequence
  source: /note="Description of Artificial Sequence: Synthetic polypeptide"
NTGSAMKKPGASVRVSCWTSEDIFDTTELIYWVRQAPGQGLEWIGWVKIVSGTVNFASLDFRNRISLSRDRDLSTAYMDIRGLTQDDTATYFCARQKFASRYSGDQGSYFDLWGRGTLIVVSSAST

SEQ ID NO: 27180 - protein, 124 aa, Artificial Sequence
  source: /note="Description of Artificial Sequence: Synthetic polypeptide"
QAGGMKKPGASMTVSCETADEDIFDAAYMHWVRQVPGQTFEWLGWMKPVTGAVNYARKFQGRISFYRTRFLAIAYMDLRDLRFDDTAVYFCARKTVGDVSGDGRGFFFDLWGRGTRVIISSAST

SEQ ID NO: 27181 - protein, 127 aa, Artificial Sequence
  source: /note="Description of Artificial Sequence: Synthetic polypeptide"
QSGSAMKKPGASVRVSCWTSEDIFDTTELIYWVRQAPGQGLEWIGWVKIVSGTVNFASSDFRNRISLSRDRDLSTAHMDIRGLTQDDTATYFCARQKFERVRYRGDQGSYFDLWGRGTVIISSSAST

SEQ ID NO: 27182 - protein, 122 aa, Artificial Sequence
  source: /note="Description of Artificial Sequence: Synthetic polypeptide"
QVRDEVKKPGSSMKVSCTASRGTFSSYAISWVRQAPGQGLEWIGWVKTVTGAVNFQSAYFRHRVSLTRDRDLFTAHMDIRGLTQGDTATYFCARQKFYKGGQGWYFDLWGRGTLIVVSSAST

SEQ ID NO: 27183 - protein, 122 aa, Artificial Sequence
  source: /note="Description of Artificial Sequence: Synthetic polypeptide"
QSGAEVKKPGASVKVSCKASGYTFTSYYMHWVRQAPGQGLEWIGWVKPVTGAVNFGSPNFRHRVSLTRDRDLFTAHMDIRGLTQGDTATYFCARQKYYAGGQGWYFDLWGRGTLIVVSSAST

SEQ ID NO: 27184 - protein, 123 aa, Artificial Sequence
  source: /note="Description of Artificial Sequence: Synthetic polypeptide"
QSGSGVKKLGASVRVSCWTSEDIFERTELIHWVRQAPGQGLEWIGWVKSCQCAVNYGSLDFRQSLSLTRDRDLSTAHMDIRGLTQDDTATYFCARQKFCEGHQGWFFDLWGRGTLIVVSSAST

SEQ ID NO: 27185 - protein, 227 aa, Artificial Sequence
  source: /note="Description of Artificial Sequence: Synthetic polypeptide"
QVQLEQSGTAVRKPGASVTLSCQASGYNFVKYIIHWVRQKPGLGFEWVGMIDPYRGRPWSAHKFQGRLSLSRDTSMEILYMTLTSLKSDDTATYFCARAEAASDSHSRPIMFDHWGQGSLVTVSSASTKGPSVFPLAPSSKSTSGGTAALGCLVKDYFPEPVTVSWNSGALTSGVHTFPAVLQSSGLYSLSSVVTVPSSSLGTQTYICNVNHKPSNTKVDKKVEPKS

SEQ ID NO: 27186 - protein, 121 aa, Artificial Sequence
  source: /note="Description of Artificial Sequence: Synthetic polypeptide"
QVTLKESGPGILQPSQTLSLTCSFSGFSLSTSFMGVSWIRQPSGKGLEWLAHIYWDDDKRYNPSLKSRLTISKDTSSNQDFLKITSVDTRDTATYYCARRVSLTAYAMDYWGQGTSVTVSS

SEQ ID NO: 27187 - protein, 128 aa, Artificial Sequence
  source: /note="Description of Artificial Sequence: Synthetic polypeptide"
QVRLVQSGAQLKKPGASVTVSCEASGYNFVNYIINWVRQTPGRSFEWVGMIDPRRGRPWSAQKFQGRLTLTRDIDSEKLYMHLSGLRGDDTAVYYCARQDSDFHDGHGHTLRGMFDSWGQGSLITVSS

SEQ ID NO: 27188 - protein, 220 aa, Artificial Sequence
  source: /note="Description of Artificial Sequence: Synthetic polypeptide"
  MOD_RES (30)..(30): Any amino acid
QVQLQQWGAGLLKPSETLSLTCGVYGESLXGHYWSWVRQPPGKRLEWIGEIKHNGSPNYHPSLKSRVTISLDMSKNQFSLNLTSVTAADTAVYFCARRSNWPYLPFDPWGQGTLVTVSSASTKGPSVFPLAPSSKSTSGGTAALGCLVKDYFPEPVTVSWNSGALTSGVHTFPAVLQSSGLYSLSSVVTVPSSSLGTQTYICNVNHKPSNTKVDKKVEPK

SEQ ID NO: 27189 - protein, 125 aa, Artificial Sequence
  source: /note="Description of Artificial Sequence: Synthetic polypeptide"
QSGGGVKKPGTSASFSCRTSDDIYDNEFFDSAFMHWVRLIPGQRPEWMGWMNPRSGAVNYARQLQPRVSMYRDRDLSTAYMEFKSLTSADTGTYFCARKKRGDGFNLYFDLWGRGSQVIVSSAST

SEQ ID NO: 27190 - protein, 125 aa, Artificial Sequence
  source: /note="Description of Artificial Sequence: Synthetic polypeptide"
QSGAEVKKPGSSIKVSCKASGDTISRYAINWVRQAPGQGLEWIGWVKTVTGAVNFGSLDFRHRISLTRDRDLFTAHMGIRGLTQGDTATYFCARQKFESRYTGGQGWYFDLWGRGTHIVVSSAST

SEQ ID NO: 27191 - protein, 462 aa, Artificial Sequence
  source: /note="Description of Artificial Sequence: Synthetic polypeptide"
RITLKESGPPLVKPTQTLTLTCSFSGFSLSDFGVGVGWIRQPPGKALEWLAIIYSDDDKRYSPSLNTRLTITKDTSKNQVVLVMTRVSPVDTATYFCAHRRGPTTLFGVPIARGPVNAMDVWGQGITVTISSTSTKGPSVFPLAPSSKSTSGGTAALGCLVKDYFPEPVTVSWNSGALTSGVHTFPAVLQSSGLYSLSSVVTVPSSSLGTQTYICNVNHKPSNTKVDKKVEPKSCDKTHTCPPCPAPELLGGPSVFLFPPKPKDTLMISRTPEVTCVVVDVSHEDPEVKFNWYVDGVEVHNAKTKPREEQYNSTYRVVSVLTVLHQDWLNGKEYKCKVSNKALPAPIEKTISKAKGQPREPQVYTLPPSRDELTKNQVSLTCLVKGFYPSDIAVEWESNGQPENNYKTTPPVLDSDGSFFLYSKLTVDKSRWQQGNVFSCSVMHEALHNHYTQKSLSLSPGK

SEQ ID NO: 27192 - protein, 462 aa, Artificial Sequence
  source: /note="Description of Artificial Sequence: Synthetic polypeptide"
RITLKESGPPLVKPTQTLTLTCSFSGFSLSDFGVGVGWIRQPPGKALEWLAIIYSDDDKRYSPSLNTRLTITKDTSKNQVVLVMTRVSPVDTATYFCAHRRGPTTLWGVPIARGPVNAMDVWGQGITVTISSTSTKGPSVFPLAPSSKSTSGGTAALGCLVKDYFPEPVTVSWNSGALTSGVHTFPAVLQSSGLYSLSSVVTVPSSSLGTQTYICNVNHKPSNTKVDKKVEPKSCDKTHTCPPCPAPELLGGPSVFLFPPKPKDTLMISRTPEVTCVVVDVSHEDPEVKFNWYVDGVEVHNAKTKPREEQYNSTYRVVSVLTVLHQDWLNGKEYKCKVSNKALPAPIEKTISKAKGQPREPQVYTLPPSRDELTKNQVSLTCLVKGFYPSDIAVEWESNGQPENNYKTTPPVLDSDGSFFLYSKLTVDKSRWQQGNVFSCSVMHEALHNHYTQKSLSLSPGK

SEQ ID NO: 27193 - protein, 462 aa, Artificial Sequence
  source: /note="Description of Artificial Sequence: Synthetic polypeptide"
RITLKESGPPLVKPTQTLTLTCSFSGFSLSDFGVGVGWIRQPPGKALEWLAIIYSDDDKRYSPSLNTRLTITKDTSKNQVVLVMTRVSPVDTATYFCAHRRGPTTWFGVPIARGPVNAMDVWGQGITVTISSTSTKGPSVFPLAPSSKSTSGGTAALGCLVKDYFPEPVTVSWNSGALTSGVHTFPAVLQSSGLYSLSSVVTVPSSSLGTQTYICNVNHKPSNTKVDKKVEPKSCDKTHTCPPCPAPELLGGPSVFLFPPKPKDTLMISRTPEVTCVVVDVSHEDPEVKFNWYVDGVEVHNAKTKPREEQYNSTYRVVSVLTVLHQDWLNGKEYKCKVSNKALPAPIEKTISKAKGQPREPQVYTLPPSRDELTKNQVSLTCLVKGFYPSDIAVEWESNGQPENNYKTTPPVLDSDGSFFLYSKLTVDKSRWQQGNVFSCSVMHEALHNHYTQKSLSLSPGK

SEQ ID NO: 27194 - protein, 462 aa, Artificial Sequence
  source: /note="Description of Artificial Sequence: Synthetic polypeptide"
RITLKESGPPLVKPTQTLTLTCSFSGFSLSDFGVGVGWIRQPPGKALEWLAIIYSDDDKRYSPSLNTRLTITKDTSKNQVVLVMTRVSPVDTATYFCAHRRGPTTWFGWPIARGPVNAMDVWGQGITVTISSTSTKGPSVFPLAPSSKSTSGGTAALGCLVKDYFPEPVTVSWNSGALTSGVHTFPAVLQSSGLYSLSSVVTVPSSSLGTQTYICNVNHKPSNTKVDKKVEPKSCDKTHTCPPCPAPELLGGPSVFLFPPKPKDTLMISRTPEVTCVVVDVSHEDPEVKFNWYVDGVEVHNAKTKPREEQYNSTYRVVSVLTVLHQDWLNGKEYKCKVSNKALPAPIEKTISKAKGQPREPQVYTLPPSRDELTKNQVSLTCLVKGFYPSDIAVEWESNGQPENNYKTTPPVLDSDGSFFLYSKLTVDKSRWQQGNVFSCSVMHEALHNHYTQKSLSLSPGK

SEQ ID NO: 27195 - protein, 462 aa, Artificial Sequence
  source: /note="Description of Artificial Sequence: Synthetic polypeptide"
RITLKESGPPLVKPTQTLTLTCSFSGFSLSDFGVGVGWIRQPPGKALEWLAIIYSDDDKRYSPSLNTRLTITKDTSKNQVVLVMTRVSPVDTATYFCAHRRGPTTLFGWPIARGPVNAMDVWGQGITVTISSTSTKGPSVFPLAPSSKSTSGGTAALGCLVKDYFPEPVTVSWNSGALTSGVHTFPAVLQSSGLYSLSSVVTVPSSSLGTQTYICNVNHKPSNTKVDKKVEPKSCDKTHTCPPCPAPELLGGPSVFLFPPKPKDTLMISRTPEVTCVVVDVSHEDPEVKFNWYVDGVEVHNAKTKPREEQYNSTYRVVSVLTVLHQDWLNGKEYKCKVSNKALPAPIEKTISKAKGQPREPQVYTLPPSRDELTKNQVSLTCLVKGFYPSDIAVEWESNGQPENNYKTTPPVLDSDGSFFLYSKLTVDKSRWQQGNVFSCSVMHEALHNHYTQKSLSLSPGK

SEQ ID NO: 27196 - protein, 120 aa, Artificial Sequence
  source: /note="Description of Artificial Sequence: Synthetic polypeptide"
QSGAEVKKPGASAKVSCKASGYTFSGYHIHWVRQAPGQGLEWVGWINPNSGATQCAKKFQERVAMTRDTTNNTVYVELNRLTSDDTATYYCARDWGATVVVYLLDSWGQGTPVTVSSAST

SEQ ID NO: 27197 - protein, 137 aa, Artificial Sequence
  source: /note="Description of Artificial Sequence: Synthetic polypeptide"
QIHLVQSGTEVKKPGSSVTVSCKAYGVNTFGLYAVNWVRQAPGQSLEYIGQIWRWKSSASHHFRGRVLISAVDLTGSSPPISSLEIKNLTSDDTAVYFCTTTSTYDQWSGLHHDGVMAFSSWGQGTLISVSAASTKG

SEQ ID NO: 27198 - protein, 137 aa, Artificial Sequence
  source: /note="Description of Artificial Sequence: Synthetic polypeptide"
QIHLVQSGTEVRKPGSSVTVSCKAYGVNTFGLYAVNWVRQAPGQSLEYIGQIWRWKSSASHHFRGRVLISAVDLTGSSPPISSLEIKNLTSDDTAVYFCTTTSTYDKWSGLHHDGVMAFSSWGQGTLISVSAASTKG

SEQ ID NO: 27199 - protein, 122 aa, Artificial Sequence
  source: /note="Description of Artificial Sequence: Synthetic polypeptide"
QSGAEVKKPGASVKVSCKASGYTFTTYGISWVRQAPGQGLEWIGWVKTVTGAVNFGSSDFRQRVSLTRDRDLFTAHMDIRGLTQGDTATYFCARQKFYAGGQGWYFDLWGRGTLIVVSSAST

SEQ ID NO: 27200 - protein, 137 aa, Artificial Sequence
  source: /note="Description of Artificial Sequence: Synthetic polypeptide"
QIHLVQSGTEVKKPGSSVTVSCKAYGVNTFGLYAVNWVRQAPGQSLEYIGQIWRWKSSASHHFRGRVIISAVDLTGSSPPISSLEIKNLTSDDTAVYFCTTTSTSDYWSGLHHDGVMAFSSWGQGTLISVSAASTKG

SEQ ID NO: 27201 - protein, 87 aa, Artificial Sequence
  source: /note="Description of Artificial Sequence: Synthetic polypeptide"
QIWRWKSSASHHFRGRVLISAVDLTGSSPPISSLEIKNLTSDDTAVYFCTTTSTYDRWSGLHHDGVMAFSSWGQGTLISVSAASTKG

SEQ ID NO: 27202 - protein, 137 aa, Artificial Sequence
  source: /note="Description of Artificial Sequence: Synthetic polypeptide"
QIHLVQSGTEVKKPGSSVTVSCKAYGVNTFGLYAVNWVRQAPGQSLEYIGQIWRWKSSASHHFRGRVLISAVDLTGSSPPISSLEIKNLTSDDTAVYFCTTTSTYDRWSGLHHDGVMAFSSWGQGTLISVSAASTKG

SEQ ID NO: 27203 - protein, 129 aa, Artificial Sequence
  source: /note="Description of Artificial Sequence: Synthetic polypeptide"
  MOD_RES (19)..(19): Any amino acid
  MOD_RES (90)..(90): Any amino acid
EVQLLESGGGLVRPGGSLXLSCSASGFTFNSYAMSWVRQAPGKGLEWVSSVSASGEMTYYADSVRGRFTISRDNANNALHLQMNSLRAEXTAVYYCAKVGGTVWSGYSNYLDYWGPGTLVTVSSASTKG

SEQ ID NO: 27204 - protein, 125 aa, Artificial Sequence
  source: /note="Description of Artificial Sequence: Synthetic polypeptide"
QVQLVQSGAEVKKPGASVKVSCKPSSNTFTSHYIHWVRQAPGQGLEWMGMINPGGSTRYAPKFQGRVTLTRDTSTRTVYMELSSLRSEDTAVYYCARPQYNLGRDPLDVWGLGTMVTVSSASTKG

SEQ ID NO: 27205 - protein, 124 aa, Artificial Sequence
  source: /note="Description of Artificial Sequence: Synthetic polypeptide"
EVQLVESGGGLVKPGGSLRLSCADSGFTFRSYSMHWVRQAPGKGLAWVSSISSTSNYIYYADSVKGRFTISRDNAKNSLYLQMNSLRAEDTAVYYCARTFITASWFDSWGQGTLVTVSSASTKG

SEQ ID NO: 27206 - protein, 104 aa, Artificial Sequence
  source: /note="Description of Artificial Sequence: Synthetic polypeptide"
VSGGRFSNYGLSWVRQAPGQGLEWMGRIVPAINRAKYAQKFQGRVILTADKITDTAYMELRSLRSEDTAIFYCARDPQIEIRGNAFDIWGQGTVVTVSSASTKG

SEQ ID NO: 27207 - protein, 128 aa, Artificial Sequence
  source: /note="Description of Artificial Sequence: Synthetic polypeptide"
QVQLQESGPGLVKPSGTLSLTCNVYGGSMISYYWSWIRQPPGKGLEWIGHVYNSGNTKYSPSLKNRVTISMDTSRNLFSLKVTSVTPADTAVYYCARADYDNIWDSRGGFDLWGQGTLVTVSSASTKG

SEQ ID NO: 27208 - protein, 130 aa, Artificial Sequence
  source: /note="Description of Artificial Sequence: Synthetic polypeptide"
QVQLVQLLQSGAEVKKPGSSVKVSCQISGYGFSNYAISWVRQAPGQGLEWLGRIVPAVGMTEYAQKFQGRVTFTADRSTITAYMDLRGLRSDDTAVYYCVRDPQVEVRGNAFDIWGQGTMVTVSSASTKG

SEQ ID NO: 27209 - protein, 126 aa, Artificial Sequence
  source: /note="Description of Artificial Sequence: Synthetic polypeptide"
QVQLVQSGAEMKKPGASVKVSCKASGHTFTNYYMHWVRQAPGQGLEWMGMINPTGDSTRYAQRFQGRVTMTRDTSTRTVYMELSSLRSDDTAVYYCARAHHDFWRAPVDVWGKGTTVTVSSASTKG

SEQ ID NO: 27210 - protein, 130 aa, Artificial Sequence
  source: /note="Description of Artificial Sequence: Synthetic polypeptide"
EVQLVQSGAEVKKPGESLRISCKTSGYNFNDDWIAWVRQRPDKGPEWMGIFYPGDSQATYSPSFQGHVTFSADTSISTAYLQWTSLKASDTAIYYCARTRCFGANCFNFMDVWGKGTALTVTVSSASTKG

SEQ ID NO: 27211 - protein, 125 aa, Artificial Sequence
  source: /note="Description of Artificial Sequence: Synthetic polypeptide"
QVQLQESGPGPVKPSETLSLTCTVSGGSMISYYWSWIRQPPGKGLEWIGYIFTNGRTTYSPSLRSRVTISLDTSTNHFSLRLKSVTAADTAIYYCARLDGEAFRYYLDLWGQGNLVTVSSASTKG

SEQ ID NO: 27212 - protein, 99 aa, Artificial Sequence
  source: /note="Description of Artificial Sequence: Synthetic polypeptide"
IRSFYWHWIRQSPGKGLEWLGSVFDNGLTTHNPSLKSRLTISEDPSRNQISLKLRSMTAADTAVYYCARGDYDILTSSYQFDYWGQGTLVAVSSASTKG

SEQ ID NO: 27213 - protein, 127 aa, Artificial Sequence
  source: /note="Description of Artificial Sequence: Synthetic polypeptide"
QVQLQESGPGLVKPSETLSLTCTVFGASIRSFYWHWIRQSPGKGLEWLGSVFDNGLTTYNPSLKNRLSISEDPSRNQISLNLRSMTAADTAVYYCARADYDLLTSSYHFDSWGQGTLVTVSSASTKG

SEQ ID NO: 27214 - protein, 125 aa, Artificial Sequence
  source: /note="Description of Artificial Sequence: Synthetic polypeptide"
QVQLQESGPGLVKPSETLSLTCTVSGGSISYYYWSWIRQPPGKGLEWIGDIYYSGTTDYNPSLKSRVTISVDTSKNQFSLKLSSVTAADTAVYYCARRRGQRLLAYFDYWGQGSLVTVSSASTKG

SEQ ID NO: 27215 - protein, 127 aa, Artificial Sequence
  source: /note="Description of Artificial Sequence: Synthetic polypeptide"
QVQLVQSGAEVKKPGASVKVSCKAPGYTFIGHYMHWIRQAPGQGLEWMGWINPNSGDTNYAQTFQGRVTMTRDTSISTAYMELTRLRSDDTAVYYCARDLRPMRGNWAMHVWGEGTTVTVSSASTKG

SEQ ID NO: 27216 - protein, 106 aa, Artificial Sequence
  source: /note="Description of Artificial Sequence: Synthetic polypeptide"
CTVSGGSISSAGYYWTWIRQHPGKGLEFIGYIYYIGTTYYNPSLKSRLTISIDTSKNQFSLKLSSVTAADTAIYYCARDYTARGRHFFDYWGQGALVTVSSASTKG

SEQ ID NO: 27217 - protein, 98 aa, Artificial Sequence
  source: /note="Description of Artificial Sequence: Synthetic polypeptide"
SSFAISWVRQAPGQGLEWMGGIIPIFEATSYAQKFQDRLTITTDESTTTAYMDLSSLRSEDTAVYYCARAQGDILTEGYFDYWGQGTLVTVSSASTKG

SEQ ID NO: 27218 - protein, 125 aa, Artificial Sequence
  source: /note="Description of Artificial Sequence: Synthetic polypeptide"
QVQLVQSGAEVKKPGSSVKVSCKVSFFSNYGISWVRQRPGQGLEWMGRIIPAIDDMTYAQTFRGRVTFSADKFTTTAYMELTGLTFEDTATYFCARDPQVNRRGNCFDHWGQGTLVTVSSASTKG

SEQ ID NO: 27219 - protein, 83 aa, Artificial Sequence
  source: /note="Description of Artificial Sequence: Synthetic polypeptide"
LEWMGRIIPAIDDVTYAQTFRGRVTFSADKFTTTAYMDLTGLRSEDTATYFCARDPQVNRRGNCFDHWGQGTLVTVSSASTKG

SEQ ID NO: 27220 - protein, 125 aa, Artificial Sequence
  source: /note="Description of Artificial Sequence: Synthetic polypeptide"
  MOD_RES (18)..(18): Any amino acid
QVQLQESGPGLVKPSETXSLTCSVSNGSISSGGYYWSWLRQFPGKGLEWIGSIHYTGRTMYNPSLMGRPALSMDTSNNQFSLKLSSVTAADTALYFCARDLQWIFVVDPWGQGTLVTVSSASTKG

SEQ ID NO: 27221 - protein, 126 aa, Artificial Sequence
  source: /note="Description of Artificial Sequence: Synthetic polypeptide"
QVQLVQSGAEVKKPGAAVKISCKASRFTFSSYYIHWVRQAPGQGLEWMGIINPSGGSTSNAQKFQDRVTLTRDMSTGTVYMELSRLTSEDTAVYYCATPEPSSIVAPLYYWGQGTLVTVSSASTKG

SEQ ID NO: 27222 - protein, 125 aa, Artificial Sequence
  source: /note="Description of Artificial Sequence: Synthetic polypeptide"
EVQLLESGGGLVQPGGSLRLSCAVSGFTFGGHAVSWVRQAPGKGLEWLSQISGTGSRTDYADAVKGRFTVSRDNSKKTVYLQMNSLRVEDTALFYCATRSPGGGYAFDIWGQGAMVTVSSASTKG

SEQ ID NO: 27223 - protein, 132 aa, Artificial Sequence
  source: /note="Description of Artificial Sequence: Synthetic polypeptide"
QVQLVQSGAEVKKPGSSVKVSCKASGGTFTTYDISWVRQAPGQGLEWMGGILPDFGAPSYAQKFQDRVTITTDESSSTAYMELNSLRSEDTAIYYCARGRGDDFWSGESPSWYFDYWGQGTLVTVSSASTKG

SEQ ID NO: 27224 - protein, 127 aa, Artificial Sequence
  source: /note="Description of Artificial Sequence: Synthetic polypeptide"
QVQLQESGPGLVKPSETLSLTCTVSGGSISSAGYYWSWIRQHPEKGLEFIGYIYYLGTTYYNPSLKSRVSISIDTSNNQFSLELSSVSAADTAIYYCARDYTASGRHFFDYWGQGTLVTVSSASTKG

SEQ ID NO: 27225 - protein, 124 aa, Artificial Sequence
  source: /note="Description of Artificial Sequence: Synthetic polypeptide"
EVQLLESGGALVQPGGSLRLSCAASGFTFSTSSMSWVRQAPGKGLEWVSAIGSGRGSTFYADSVKGRFTISRDNSKNTLSLQMNSLTAEDTATYYCTKTGGLLRFPEVWGKGTTVTVSSASTKG

SEQ ID NO: 27226 - protein, 127 aa, Artificial Sequence
  source: /note="Description of Artificial Sequence: Synthetic polypeptide"
QVQLVQSGAEVKKPGSSVKVSCKASGGTFSNYAISWVRQAPGQGLEWMGGIIPIFEAASYAQKFQDRLTITTDESTTTAYMDLSSLRSEDTAIYYCARAQGDILTEGYFDYWGQGTLVTVSSASTKG

SEQ ID NO: 27227 - protein, 126 aa, Artificial Sequence
  source: /note="Description of Artificial Sequence: Synthetic polypeptide"
QVQLQESGPGLVKPSETLSLTCTVSGGSISTYYWSWIRQPPGKGLEWIGYISYSGSTNYNPSLKSRVTISVDTSKNQFSLKLSSVTAADTAVYYCARHKSVLLWFRELDYWGQGTLVTVSSASTKG

SEQ ID NO: 27228 - protein, 126 aa, Artificial Sequence
  source: /note="Description of Artificial Sequence: Synthetic polypeptide"
QVQLVQSGAEVKKPGSSVKVSCKTSGVRFSSNAISWVRQAPGQGLEWMGRTTPMLGGANHAPSFKGRVTISADESTRTVYMEMSSLRYEDTAVYYCASGRREGLNFLLDYWGQGTLVTVSSASTKG

SEQ ID NO: 27229 - protein, 128 aa, Artificial Sequence
  source: /note="Description of Artificial Sequence: Synthetic polypeptide"
QVQLVQSGAEVRKPGASVKVSCKTSGYTFTNSYIHWVRQAPGQGLEWMGIINPPGGNTYYAQKFHGRVTLTRDTSTSTVYMELNSLRSEDTAVYFCARPHSPTNIPSRPLDYWGQGTLVTVSSASTKG

SEQ ID NO: 27230 - protein, 130 aa, Artificial Sequence
  source: /note="Description of Artificial Sequence: Synthetic polypeptide"
QVQLVQSGAEVKKPGASVKVSCKVSGYPLAELSVHWVRQVPGKGLEWVGGFDPEEGKTVYAQKFQGRVTMTEDRSTDTVYMELISLRYEDTAVYYCATDNPVLQLGELSSSLDYWGQGTLVTVSSASTKG

SEQ ID NO: 27231 - protein, 115 aa, Artificial Sequence
  source: /note="Description of Artificial Sequence: Synthetic polypeptide"
PSETLSLTCRVSGASISNFYWTWIRQPAGKGLEWIGRLYSSDKTNYNPSLNGRVTMSLDTSKNQFSLRLTSMTDADTAIYYCAREKGQWVTLPPYYFDSWGQGILVTVSSASTKG

SEQ ID NO: 27232 - protein, 99 aa, Artificial Sequence
  source: /note="Description of Artificial Sequence: Synthetic polypeptide"
NTFTSHYVHWVRQAPGQGLEWMGMINPGGTTRYAPKFQDRVTLTRDTSTRTVYMELRSLRSEDTAVYYCARPQYNLGREPLNVWGQGTMVTVSSASTKG

SEQ ID NO: 27233 - protein, 128 aa, Artificial Sequence
  source: /note="Description of Artificial Sequence: Synthetic polypeptide"
QVQLQESGPGLVKPSETLSLTCSVSGASISNFYWTWIRQPAGKGLEWVGRLYSSDRTNYNPSLNGRVTMSLDTSKNQFSLRLTSMTDADTAIYFCAREKGQWLTVPPYYFDSWGQGILVTVSSASTKG

SEQ ID NO: 27234 - protein, 104 aa, Artificial Sequence
  source: /note="Description of Artificial Sequence: Synthetic polypeptide"
CTVSGGSIISYYWNWIRQSPGKGLEWLGYIFDGGRANYNPSLRSRLTMSVDTSKNQISLKVKSVTAADSAIYYCARLDGEAFRYYFDSWGQGTLVTVSSASTKG

SEQ ID NO: 27235 - protein, 112 aa, Artificial Sequence
  source: /note="Description of Artificial Sequence: Synthetic polypeptide"
QTLSLTCSVSGGSISSAGYYWGWIRQHPGKGLEWIGHIYYSGNTNYNPSLKSRLSMSVETSKNQFSLNLASVTAADTAVYFCARDYSAAGRHLFDSWGQGILVTVSSASTKG

SEQ ID NO: 27236 - protein, 115 aa, Artificial Sequence
  source: /note="Description of Artificial Sequence: Synthetic polypeptide"
KPSQTLSLTCTVSGGSISSAGYYWTWIRHHPGKGLEFIGYIYHIGTPYYNPSLKSRLTISIDTSKNQFSLKLSSVTAADTAIYYCARDYTARGRHFFDYWGQGALVTVSSASTKG

SEQ ID NO: 27237 - protein, 128 aa, Artificial Sequence
  source: /note="Description of Artificial Sequence: Synthetic polypeptide"
QVQLVQSGADVKKPGATVTVSCKTDEDEDDFRAHLMQWMRQAPGQRLEWVGWIKPQTGQPSYGQKFQGRVTLTREVSTSTVFLQLRNLRSDDTAVYYCARPRGGRDNWSFHVWGRGTLVTVSSASTKG

SEQ ID NO: 27238 - protein, 128 aa, Artificial Sequence
  source: /note="Description of Artificial Sequence: Synthetic polypeptide"
QVQLVQSGADVKKPGASVTVSCKTDEDEDDFRAHLVQWMRQAPGQRLEWVGWIKPQTGQPSYAQKFQGRVTLTREVSTSTVFLQLRNLRSDDTAVYYCARPRGGRDNWSFHVWGRGTLVTVSSASTKG

SEQ ID NO: 27239 - protein, 128 aa, Artificial Sequence; identical to SEQ ID NO: 27238
  source: /note="Description of Artificial Sequence: Synthetic polypeptide"

SEQ ID NO: 27240 - protein, 126 aa, Artificial Sequence
  source: /note="Description of Artificial Sequence: Synthetic polypeptide"
QVQLVQSGAAVKKPGASVKVSCETYGYTFTDHFMHWWRQAPGQGLEWMGWINPYSSAVSYSPRYQGRVTMTRDTFLETVYMELRGLKFDDTAIYYCATPKSGRDYWSFDLWGQGTLVTVSSASTKG

SEQ ID NO: 27241 - protein, 126 aa, Artificial Sequence; identical to SEQ ID NO: 27240
  source: /note="Description of Artificial Sequence: Synthetic polypeptide"

SEQ ID NO: 27242 - protein, 126 aa, Artificial Sequence; identical to SEQ ID NO: 27240
  source: /note="Description of Artificial Sequence: Synthetic polypeptide"

SEQ ID NO: 27243 - protein, 126 aa, Artificial Sequence
  source: /note="Description of Artificial Sequence: Synthetic polypeptide"
QVQLVQSGAAVKKPGASVKVSCETYGYKFTDHFMHWWRQAPGQGLEWMGWINPYSSAVSYSPRYQGRVTMTRDTFLETVYMELRGLRFDDTAIYYCATPKSGRDYWSFDLWGQGTLVTVSSASTKG

SEQ ID NO: 27244 - protein, 126 aa, Artificial Sequence; identical to SEQ ID NO: 27243
  source: /note="Description of Artificial Sequence: Synthetic polypeptide"

SEQ ID NO: 27245 - protein, 126 aa, Artificial Sequence; identical to SEQ ID NO: 27243
  source: /note="Description of Artificial Sequence: Synthetic polypeptide"

SEQ ID NO: 27246 - protein, 126 aa, Artificial Sequence; identical to SEQ ID NO: 27240
  source: /note="Description of Artificial Sequence: Synthetic polypeptide"

SEQ ID NO: 27247 - protein, 126 aa, Artificial Sequence
  source: /note="Description of Artificial Sequence: Synthetic polypeptide"
QVQLVQSGAAVKKPGASVKVSCEAYGYKFTDHFMHWWRQAPGQGLEWMGWINPYTSAVNYSPKYQGRVTMTRDTFLETVYMELRGLRVDDTAIYYCATPKSGRDYWSFDLWGQGTLVTVSSASTKG

SEQ ID NO: 27248 - protein, 126 aa, Artificial Sequence; identical to SEQ ID NO: 27247
  source: /note="Description of Artificial Sequence: Synthetic polypeptide"

SEQ ID NO: 27249 - protein, 126 aa, Artificial Sequence
  source: /note="Description of Artificial Sequence: Synthetic polypeptide"
QVQLVQSGGAVKKPGASVKVSCETYGYTFTDHFMHWWRQAPGQGLEWMGWINPYSSAVSYSPRYQGRVTMTRDTFLETVYMELRGLKFDDTAIYYCATPKSGRDYWSFDLWGQGTLVTVSSASTKG

SEQ ID NO: 27250 - protein, 128 aa, Artificial Sequence; identical to SEQ ID NO: 27238
  source: /note="Description of Artificial Sequence: Synthetic polypeptide"

SEQ ID NO: 27251 - protein, 128 aa, Artificial Sequence; identical to SEQ ID NO: 27238
  source: /note="Description of Artificial Sequence: Synthetic polypeptide"

SEQ ID NO: 27252 - protein, 128 aa, Artificial Sequence
  source: /note="Description of Artificial Sequence: Synthetic polypeptide"
QVQLLQSGAAVTKPGASVRVSCEASGYNIRDYFIHWWRQAPGQGLQWVGWINPKTGQPNNPRQFQGRVSLTRHASWDFDTFSFYMDLKALRSDDTAVYFCARQRSDYWDFDVWGSGTQVIVSSASTKG

SEQ ID NO: 27253 - protein, 125 aa, Artificial Sequence
  source: /note="Description of Artificial Sequence: Synthetic polypeptide"
QVQLQESGPGLVKPSETLSLTCSVSNGSISSGGYYWSWLRQFPGKGLEWIGSIHYTGRTMYNPSLMGRPALSMDTSNNQFSLKLRSVTAADTALYFCARDLQWIFVVDPWGQGTLVTVSSASTKG

SEQ ID NO: 27254 - protein, 144 aa, Artificial Sequence
  source: /note="Description of Artificial Sequence: Synthetic polypeptide"
LQQLQVPRLSMWRVFKVAAATGAQTLTVEEPGSSVKVSCKASGGSSTAYGYSWVRQAPGQGFEWMGRIIPFYGIITYAPKFQGRVTITADRSTSTVYMELTSLTFADTALFFCARDFGDPRNGYYFDSWDQGLWLTVSSASTKG

SEQ ID NO: 27255 - protein, 132 aa, Artificial Sequence
  source: /note="Description of Artificial Sequence: Synthetic polypeptide"
QVHLVQSGAEVKKPGSSVRVSCKASGWTFGDSVNSAITWVRQAPGQGLEWMGRFIPILGLSNYAQKFQDRVTINVDRSTNTAYMELSGLRSEDTAVYYCARLITGMNAPWFYYMDVWGKGTTITVSSASTKG

SEQ ID NO: 27256 - protein, 138 aa, Artificial Sequence
  source: /note="Description of Artificial Sequence: Synthetic polypeptide"
FICFSVVVRLLEFGGRLVQPGGSLRLSCSASGFTFSNSAMSWVRQAPGKGLEWVSSILSSGVGTFYADSVKGRFTVSRDNSRNTLYLQMKSLRAEDTALYYCAKVQIQQLNFGVITDAGLDVWGKGTTLIVSSASTKG

SEQ ID NO: 27257 - protein, 127 aa, Artificial Sequence
  source: /note="Description of Artificial Sequence: Synthetic polypeptide"
QVQLGQSGTEVKKPGFSVKVSCKASGGSSTAYGYSWVRQAPGQGFEWMGRIIPFYGIITYAPKFQGRVTITADRSTSTVYMELTSLTFADTALFFCARDFGDPRNGYYFDSWDQGLWLTVSSASTKG

SEQ ID NO: 27258 - protein, 127 aa, Artificial Sequence
  source: /note="Description of Artificial Sequence: Synthetic polypeptide"
QVQLVQSGGEVRKPGSSVKVPCKISGNAFSNYGVNWVRQAPGQGLEWVGRIIPVIGVAQHAPKFQGRVTITADKSTTTAYLELSSLRSDDTAVYFCAKDHGDPRTGYYFDYWGQGALVTVSSASTKG

SEQ ID NO: 27259 - protein, 132 aa, Artificial Sequence
  source: /note="Description of Artificial Sequence: Synthetic polypeptide"
QVQLLQSGTEVKKPGSSVKVSCRASGWTLGNSPNSAIGWVRQAPGQGLEWIGRIIPILDVTNYAQKFQGRVTISADKSTNIAYMEISSLGSEDTAFYYCARVITGMTSPWYFYMDVWGEGTTVIVSSASTKG

SEQ ID NO: 27260 - protein, 127 aa, Artificial Sequence
  source: /note="Description of Artificial Sequence: Synthetic polypeptide"
QVQLLQSGAAVTKPGASVRVSCEASGYNIRDYFIHWWRQAPGQGLQWVGWINPKTGQPNNPCQFQGRVSLTRHASWDFDTFSFYMDLKALRSDDTAVYFCARQRSDYWDFDVWGSGTQVTVSSASTK

SEQ ID NO: 27261 - protein, 134 aa, Artificial Sequence
  source: /note="Description of Artificial Sequence: Synthetic polypeptide"
VQSQVYLVQSGGEVKKPGSSVKVSCKASGDSFSSSVITWVRQAPGQGPEWMGRIIPVLGVAAYAQNFYGRVTISADTSSNTAYMELSSLRFEDTAVFYCARETGRGGNLALRQYFFDSWGQGTLVTVSSPSTKG

SEQ ID NO: 27262 - protein, 123 aa, Artificial Sequence
  source: /note="Description of Artificial Sequence: Synthetic polypeptide"
EVQLVESGGGLVQPGGSLRISCSATGFTFSTHAMHWVRQAPGKGLEYVSAINSNGRSAFYADSVKGRVTISRDNSKNTLFLQMTSLRAEDTAVYYCVKGPLLRYLDSWGQGTLVTVSSASTKG

SEQ ID NO: 27263 - protein, 128 aa, Artificial Sequence
  source: /note="Description of Artificial Sequence: Synthetic polypeptide"
QVQLLQSGAAVTKPGASVRVSCEASGYNIRDYFIHWWRQAPGQGLQWVGWINPKTGQPNNPCQFQGRVSLTRQASWDFDTISFYMDLKALRLDDTAVYFCARQRSDYWDFDVWGSGTQVTVSSASTKG

SEQ ID NO: 27264 - protein, 128 aa, Artificial Sequence
  source: /note="Description of Artificial Sequence: Synthetic polypeptide"
QVRLLQSGAAVTKPGASVRVSCEASGYEIRDYFIHWWRQAPGQGLQWVGWINPKTGQPNNPRQFQGRVSLTRQASWDFDSYSFYMDLKALRSDDTAVYFCARQRSDYWDFDVWGSGSQVTVSSASTKG

SEQ ID NO: 27265 - protein, 130 aa, Artificial Sequence
  source: /note="Description of Artificial Sequence: Synthetic polypeptide"
QVQLVESGGGLVKPGGSLRLSCAASGFSFNEYYMSWIRQAPGQGLEWVANIGSSDAYTIYADSVKGRFTISRDNAENTVYLQMNSLRGEDTAVYYCARIEGYCSNSRCSNYFDPWGQGALVTVSSASTKG

SEQ ID NO: 27266 - protein, 128 aa, Artificial Sequence
  source: /note="Description of Artificial Sequence: Synthetic polypeptide"
QVRLLQSGAAVTKPGASVRVSCEASGYEIRDYFIHWWRQAPGQGLQWVGWINPKTGQPNNPRQFQGRVSLTRQASWDFDSYSFYMDLKALRSDDTGVYFCARQRSDYWDFDVWGSGTQVTVSSASTKG

SEQ ID NO: 27267 - protein, 145 aa, Artificial Sequence
  source: /note="Description of Artificial Sequence: Synthetic polypeptide"
MFLFLVAGATGVQSQVYLVPFGPEVKKPGSSVKVSCKASGDSFTSSVITWVRQAPGQGPEWMGRVIPVLGVAAYAQKFYGRVTITADTSSNTAYMEVNSLRFEDTAVYYCARETGRGGNLALRQYFFDSWGQGTLVTVSSPSTKG

SEQ ID NO: 27268 - protein, 128 aa, Artificial Sequence
  source: /note="Description of Artificial Sequence: Synthetic polypeptide"
QVRLLQSGAAVTKPGASVRVSCEASGYEIRDYFIHWWRQAPGQGLQWVGWINPKTGQPNNPRQFQGRVSLTRQASWDFDSYSFYMDLKALRSDDTAVYFCARQRSDYWDFDVWGSGTQVTVSSASTKG

SEQ ID NO: 27269 - protein, 133 aa, Artificial Sequence
  source: /note="Description of Artificial Sequence: Synthetic polypeptide"
CQVQLVESGGGVVQPGRSLRLSCVGSGFTFSSSGMHWVRQAPGKGLEWVAVISSDGSDEYYGDSVEGRFTISRDNSKNTLFLQLDSLEAEDSAVYYCAKTPPHYDALTGYPSSVLEFWGLGTLVTVSSASTKG

SEQ ID NO: 27270 - protein, 123 aa, Artificial Sequence; identical to SEQ ID NO: 27262
  source: /note="Description of Artificial Sequence: Synthetic polypeptide"

SEQ ID NO: 27271 - protein, 132 aa, Artificial Sequence; identical to SEQ ID NO: 27255
  source: /note="Description of Artificial Sequence: Synthetic polypeptide"

SEQ ID NO: 27272 - protein, 126 aa, Artificial Sequence
  source: /note="Description of Artificial Sequence: Synthetic polypeptide"
SGGRLVQPGGSLRLSCSASGFTLSNSAMSWVRQAPGKGLEWVSSILSSGVGTFYADSVKGRFTVSRDNSRNTLYLQMKSLRAEDTALYYCAKVQIQQLNFGVITDAGLDVWGKGTTLIVSSASTKG

SEQ ID NO: 27273 - protein, 132 aa, Artificial Sequence
  source: /note="Description of Artificial Sequence: Synthetic polypeptide"
EVQLVQSGAEVKKPGSSVKVSCKASGGTFTTYDISWVRQAPGQGLEWIGGILPDFGAPSYAQKFQDRVTITTDESSRTAYMELNSLRSEDTAIYYCARGRGDDFWSGESPSWYFDYWGQGTQVTVSSASTKG

SEQ ID NO: 27274 - protein, 135 aa, Artificial Sequence
  source: /note="Description of Artificial Sequence: Synthetic polypeptide"
PLVQLEPSGVEVKKRGASVKVSCKVSGYSLTELSMHWVRQAPGKGLEWMGSFDPLDGDTIYAQKFQGRVTMTVDTSTDTAYMDLSSLRFEDTAVYYCATPSKAYYYDSPNYEGDFYMDVWGKGTTVIVSSASTKG

SEQ ID NO: 27275 - protein, 132 aa, Artificial Sequence
  source: /note="Description of Artificial Sequence: Synthetic polypeptide"
QVQLVESGGGVVQPGRSLRLSCVGSGFTFSSSGMHWVRQAPGKGLEWVAVISSDGSDEYYGDSVEGRFTISRDNSKNTLFLQLDSLEAEDSAVYYCAKTPPHYDALTGYPSSVLEFWGLGTLVTVSSASTKG

SEQ ID NO: 27276 - protein, 136 aa, Artificial Sequence
  source: /note="Description of Artificial Sequence: Synthetic polypeptide"
EVQLVQSGAEVKKPGASVKVSCKVSGYTLTELSMHWVRQAPGKGLEWMGVFDPLEGDGVYAEKFRGRVIMTEDTSTDTGYMELTSLRSEDTAIYYCATKAKDYYYESSDYSPYYYYYMDVWGKGTTVTVSSASTKG

SEQ ID NO: 27277 - protein, 132 aa, Artificial Sequence
  source: /note="Description of Artificial Sequence: Synthetic polypeptide"
EVRLLESGGGLVQPGGSLRLSCSASGFTFSNSALSWVRQAPGKGLEWVSSVVSSGGDTFYADSVKGRFTISRDNSRNTLYLQMKSLRAEDTALYYCAKVQIQQLNFGVITDAGMDVWGKGTTVIVSSASTKG

SEQ ID NO: 27278 - protein, 117 aa, Artificial Sequence
  source: /note="Description of Artificial Sequence: Synthetic polypeptide"
VEEPGSSVKVSCKASGGSSTAYGYSWVRQAPGQGFEWMGRIIPFYGIITYAPKFQGRVTITADRSTSTVYMELTRLTFADTALFFCARDYGDPRNGYYFDSWDQGLWLTVSSASTKG

SEQ ID NO: 27279 - protein, 133 aa, Artificial Sequence
  source: /note="Description of Artificial Sequence: Synthetic polypeptide"
GYSEVQLVQSGPGLVKPSQTLSLTCTVSGGSISNGGHYWNWIRQHPGKGLEWIGHIYNIATTYYNPSLKSRVSISVDTSKNQFSLKLSSVTAADTAVYYCARGSGRWTIGARIYFDNWGQGALVAVSSASTKG

SEQ ID NO: 27280 - protein, 123 aa, Artificial Sequence
  source: /note="Description of Artificial Sequence: Synthetic polypeptide"
QVQLVESGGGLVQPGGSLRISCSATGFTFSTHAMHWVRQAPGKGLEYVSAINSNGRSAFYADSVKGRVTISRDNSKNTLFLQMTSLRAEDTAVYYCVKGPLLRYLDSWGQGTLVTVSSASTKG

SEQ ID NO: 27281 - protein, 125 aa, Artificial Sequence
  source: /note="Description of Artificial Sequence: Synthetic polypeptide"
QVQLVQSGPGLVKPSETLSLTCSVSNGSISSGGYYWSWLRQFPGKGLEWIGSIHYTGRTFYNPSLMGRTALSMDTSNNQFSLKVSSVTAADTALYYCARELQWMFVVDPWGQGTLVTVSSASTKG

SEQ ID NO: 27282 - protein, 132 aa, Artificial Sequence; identical to SEQ ID NO: 27259
  source: /note="Description of Artificial Sequence: Synthetic polypeptide"

SEQ ID NO: 27283 - protein, 136 aa, Artificial Sequence
  source: /note="Description of Artificial Sequence: Synthetic polypeptide"
QVQLVQSGGEVKKPGASVKVSCKVSGYSLTELSMHWVRQAPGKGLEWMGVFDPLEGDGVYVQKFRGRVIMTEDTSTDTAYMELTSLRSEDTAIYYCATKAKDYYYESSDYSPYYYYYMDVWGKGTTVTVSSASTKG

SEQ ID NO: 27284 - protein, 136 aa, Artificial Sequence
  source: /note="Description of Artificial Sequence: Synthetic polypeptide"
GSEVQLVESGAEVKKRGASVKVSCKVSGYSLTELSMHWVRQAPGKGLEWMGSFDPLDGDTIYAQKFQGRVTMTVDTSTDTAYMDLSSLRFEDTAVYYCATPSKAYYYDSPNYEGDFYMDVWGKGTTVIVSSASTKG

SEQ ID NO: 27285 - protein, 126 aa, Artificial Sequence
  source: /note="Description of Artificial Sequence: Synthetic polypeptide"
SVVQLVESGPGLVKPSETLSLTCSVSNGSISSGGYYWSWLRQFPGKGLEWIGSIHYTGRTMYNPSLMGRPALSMDTSNNQFSLKLRSVTAADTALYFCARDLQWIFVVDPWGQGTLVTVSSASTKG

SEQ ID NO: 27286 - protein, 134 aa, Artificial Sequence
  source: /note="Description of Artificial Sequence: Synthetic polypeptide"
SVDERLLEFGGRLVQPGGSLRLSCSASGFTFSNSAMSWVRQAPGKGLEWVSSILSSGVGTFYADSVKGRFTVSRDNSRNTLYLQMKSLRAEDTALYYCAKVQIQQLNFGVITDAGLDVWGKGTTLIVSSASTKG

SEQ ID NO: 27287 - protein, 133 aa, Artificial Sequence
  source: /note="Description of Artificial Sequence: Synthetic polypeptide"
QLQLKESGPGMVKPSETLSLTCSVSGASVVSANDYWGWIRQAPGKGLECIGIILYTGSTFYNPSLQSRVTISRDPSKNHVSLTLTSVTAADSAVYYCARIPYHSESYYNVVIGGFDVWGQGTRVTVSSASTKG

SEQ ID NO: 27288 - protein, 132 aa, Artificial Sequence; identical to SEQ ID NO: 27255
  source: /note="Description of Artificial Sequence: Synthetic polypeptide"

SEQ ID NO: 27289 - protein, 127 aa, Artificial Sequence; identical to SEQ ID NO: 27257
  source: /note="Description of Artificial Sequence: Synthetic polypeptide"

SEQ ID NO: 27290 - protein, 126 aa, Artificial Sequence
  source: /note="Description of Artificial Sequence: Synthetic polypeptide"
SQVQLVESGPGLVKPSETLSLTCSVSNGSISSGGYYWSWLRQFPGKGLEWIGSIHYTGRTMYNPSLMGRPALSMDTSNNQFSLKLSSVTAADTALYFCARDLQWIFVVDPWGQGTLVTVSSASTKG

SEQ ID NO: 27291 - protein, 134 aa, Artificial Sequence
  source: /note="Description of Artificial Sequence: Synthetic polypeptide"
RVHSQVQLVESGPGLVKPSQTLSLTCTVSGGSISNGGHYWNWIRQHPGKGLEWIGHIYNIATTYYNPSLKSRVSISVDTSKNQFSLKLSSVTAADTAVYYCARGSGRWTIGARIYFDNWGQGALVAVSSASTKG

SEQ ID NO: 27292 - protein, 127 aa, Artificial Sequence; identical to SEQ ID NO: 27258
  source: /note="Description of Artificial Sequence: Synthetic polypeptide"

SEQ ID NO: 27293 - protein, 131 aa, Artificial Sequence
  source: /note="Description of Artificial Sequence: Synthetic polypeptide"
QVHLVQSGAEVKKPGSSVRVSCEASGWTFGSVNSAITWVRQAPGQGLEWMGRTIPFLGISNYAQKFQGRVTITADKSTNIAYVDVTSLTSQDTAVYYCARLITGMTAPWFYYMDVWGKGTTVTVSSASTKG

SEQ ID NO: 27294 - protein, 128 aa, Artificial Sequence
  source: /note="Description of Artificial Sequence: Synthetic polypeptide"
QVHLSQSGAVVTKPGASVRVSCEASGYKISDHFIHWWRQAPGQGPQWVGWINPKTGQPNNPRQFQGRISLTRQASWDFDTFSFYMDLKALRSDDTAVYFCARHRSDYWDFDVWGSGTQVTVSSASTKG

SEQ ID NO: 27295 - protein, 128 aa, Artificial Sequence
  source: /note="Description of Artificial Sequence: Synthetic polypeptide"
QVHLSQSGAAVTKPGASVRVSCEASGYKISDHFIHWWRQAPGQGLQWVGWINPKTGQPNNPRQFQGRISLTRQASWDFDTFSFYMDLKALRSDDTAVYFCARQRSDYRDFDVWGSGTQVTVSSASTKG

SEQ ID NO: 27296 - protein, 128 aa, Artificial Sequence
  source: /note="Description of Artificial Sequence: Synthetic polypeptide"
QVHLSQSGAAVTKPGASVRVSCEASGYKIRDYSIHWWRQAPGQGLQWVGWINPQTGQPNIPRPFQGRISLTRQASWDFDTFSFYMDLEALRSDDTAVYFCARQRSDYWDFDVWGSGTQVTVSSASTKG

SEQ ID NO: 27297 - protein, 128 aa, Artificial Sequence
  source: /note="Description of Artificial Sequence: Synthetic polypeptide"
QVHLSQSGAVVTKPGASVRVSCEASGYKISDHFIHWWRQAPGQGLQWVGWINPKTGQPNNPRQFQGRISLTRQASWDFDTFSFYMDLEALRSDDTAVYFCARQRSDYWDFDVWGSGTQVTVSSASTKG

SEQ ID NO: 27298 - protein, 128 aa, Artificial Sequence
  source: /note="Description of Artificial Sequence: Synthetic polypeptide"
QVHLSQSGAVVTKPGASVRVSCEASGYKISDHFIHWWRQAPGQGLQWVGWINPKTGQPNNPRQFQGRISLTRQASWDFDTFSFYMDLKALRSDDTAVYFCARHRSDYWDFDVWGSGTQVTVSSASTKG

SEQ ID NO: 27299 - protein, 128 aa, Artificial Sequence
  source: /note="Description of Artificial Sequence: Synthetic polypeptide"
QVHLSQSGAAVTKPGASVRVSCEASGYKISDHFIHWWRQAPGQGLQWVGWINPKTGQPNNPRQFQGRVSLTRQASWDFDTYSFYMGLKAVRSDDTAIYFCARQRSDFWDFDVWGSGTQVTVSSASTKG

SEQ ID NO: 27300 - protein, 128 aa, Artificial Sequence
  source: /note="Description of Artificial Sequence: Synthetic polypeptide"
QVHLSQSGAAVTKPGASVRVSCEASGYKISDHFIHWWRQAPGQGLQWVGWINPKTGQPNNPRQFQGRISLTRQASWDFDTFSFYMDLKALRSDDTAVYFCARHRSDYWDFDVWGSGTQVTVSSASTKG

SEQ ID NO: 27301 - protein, 128 aa, Artificial Sequence
  source: /note="Description of Artificial Sequence: Synthetic polypeptide"
QVHLSQSGAVVTKPGASVRVSCEASGYKISGHFIHWWRQAPGQGLQWVGWINPKTGQPNNPRQFQGRISLTRQASWDFDTFSFYMDLKALRSDDTAVYFCARHRSDYWDFDVWGSGTQVTVSSASTKG

SEQ ID NO: 27302 - protein, 128 aa, Artificial Sequence
  source: /note="Description of Artificial Sequence: Synthetic polypeptide"
QVHLSQSGAVVTKPGASVRVSCEASGYKISDHFIHWWRQAPGQGLQWVGWINPKTGQPNIPRQFQGRISLTRQASGDFDTFSFYMDLKALRSDDTAVYFCARQRSDYWDFGVWGSGTQVTVSSASTKG

SEQ ID NO: 27303 - protein, 128 aa, Artificial Sequence
  source: /note="Description of Artificial Sequence: Synthetic polypeptide"
QVHLSQSGAVVTKPGASVRVSCEASGYKISDHFIHWWRQAPGQGLQWVGWINPKTGQPNNPRQFQGRISLTRQASWDIDTFSFYMDLKALRSDDTAVYFCARHRSDYWDFDVWGSGTQVTVSSASTKG

SEQ ID NO: 27304 - protein, 128 aa, Artificial Sequence
  source: /note="Description of Artificial Sequence: Synthetic polypeptide"
QVHLSQSGAVVTKPGASVRVSCEASGYKISDHFIHWWRQAPGQGLQWVGWINPKTGQPNNPRQFQGRISLTRQASWDFDTFSFYMDLKALRSDDTAVYFCARQRSDYWDFDVWGSGTQVTVSSASTKG

SEQ ID NO: 27305 - protein, 128 aa, Artificial Sequence
  source: /note="Description of Artificial Sequence: Synthetic polypeptide"
QVHLSHSGAAVTKPGASVRVSCEASGYKISDHFIHWWRQAPGQGLQWVGWINPKTGQPNNPRQFQGRISLTRQASWDFDTFSFYMDLKALRSDDTAVYFCARQRSDYWDFDVWGSGTQVTVSSASTKG

SEQ ID NO: 27306 - protein, 128 aa, Artificial Sequence; identical to SEQ ID NO: 27298
  source: /note="Description of Artificial Sequence: Synthetic polypeptide"

SEQ ID NO: 27307 - protein, 128 aa, Artificial Sequence; identical to SEQ ID NO: 27298
  source: /note="Description of Artificial Sequence: Synthetic polypeptide"

SEQ ID NO: 27308 - protein, 128 aa, Artificial Sequence; identical to SEQ ID NO: 27300
  source: /note="Description of Artificial Sequence: Synthetic polypeptide"

SEQ ID NO: 27309 - protein, 130 aa, Artificial Sequence
  source: /note="Description of Artificial Sequence: Synthetic polypeptide"
EVQLVQSGSDVKKPGTTVTISCKADEDEDDFTAYNYFMHWVRQAPGQGLEWIGWINPRTGQPNHAKQLQGRVTLTRERSTSTVFMKLTNLRLDDTAVYFCARPLRGGDTWHYHSWGRGTSLIVSSASTKG

SEQ ID NO: 27310 - protein, 130 aa, Artificial Sequence; identical to SEQ ID NO: 27309
  source: /note="Description of Artificial Sequence: Synthetic polypeptide"

SEQ ID NO: 27311 - protein, 132 aa, Artificial Sequence
  source: /note="Description of Artificial Sequence: Synthetic polypeptide"
QPQLVQSGSGAEVKKPGASVRISCEASEYNVFDHFMQWVRQAPGQGLEWMGWINPRGGYPSYSPRFQGRLTFTRQPSWDDSSVTFHMELRGLRHDDTAVYYCARPHSPDDAWSLDVWGRGTLVTVSSASTKG

SEQ ID NO: 27312 - protein, 130 aa, Artificial Sequence
  source: /note="Description of Artificial Sequence: Synthetic polypeptide"
EVQLVQSGSDVRKPGATVTVSCKADEDEDDFTAYNYFMHWVRQAPGHGLEWIGWINPRTGQPNHAKQFQGRVTLTRERSTSTVFMKLTNLRLDDTAVYFCARPLRGGDTWHYHSWGRGTSLTVSSASTKG

SEQ ID NO: 27313 - protein, 128 aa, Artificial Sequence
  source: /note="Description of Artificial Sequence: Synthetic polypeptide"
HVQLLQSGAAVTKPGASVRVSCEASGYNIRDYFIHWWRQAPGQGLQWVGWINPKTGQPNNPRQFQGRVSLTRQASWDFDTFSFYMDLKALRLDDTAIYFCARQRSDYWDFDVWGSGTQVTVSSASTKG

SEQ ID NO: 27314 - protein, 130 aa, Artificial Sequence
  source: /note="Description of Artificial Sequence: Synthetic polypeptide"
VVQLVQSGSDVRKPGATVTVSCKADEDEDDFTAYNYFMHWVRQAPGHGLEWIGWINPRTGQPNHAKQFQGRVTLTRERSTSTVFMKLTNLRLDDTAVYFCARPLRGGDTWHYHSWGRGTSLTVSSASTKG

SEQ ID NO: 27315 - protein, 124 aa, Artificial Sequence
  source: /note="Description of Artificial Sequence: Synthetic polypeptide"
QVQLVQSGAALKKPGASLRISCQAYGYKFTDYLIHWWRQAPGQGLEWIGWIKPETGQPSYSYKFQGRVSLTRDTFEEILFMDLRGLRSDDTAIYFCARRHSDYCDFDVWGGGSQVLVSSASTKG

SEQ ID NO: 27316 - protein, 124 aa, Artificial Sequence
  source: /note="Description of Artificial Sequence: Synthetic polypeptide"
QVQLVQSGTAVKKPGASVRVSCQASGYTFTDYFIYWWRQAPGQGLEWLGWINPRTSQPSYPYRFQGRVTLTRDIFEEMLYMDLRGLRSDDTGIYFCARRHSDYCDFDIWGSGTQIIVSSASTKG

SEQ ID NO: 27317 - protein, 130 aa, Artificial Sequence; identical to SEQ ID NO: 27312
  source: /note="Description of Artificial Sequence: Synthetic polypeptide"

SEQ ID NO: 27318 - protein, 130 aa, Artificial Sequence; identical to SEQ ID NO: 27312
  source: /note="Description of Artificial Sequence: Synthetic polypeptide"

SEQ ID NO: 27319 - protein, 226 aa, Artificial Sequence
  source: /note="Description of Artificial Sequence: Synthetic polypeptide"
QVQLLQSGAAVTKPGASVRVSCEASGYNIRDYFIHWWRQAPGQGLQWVGWINPKTGQPNNPRQFQGRVSLTRHASWDFDTYSFYMDLKALRSDDTAVYFCARQRSDYWDFDVWGSGTQVTVSSASTKGPSVFPLAPSSKSTSGGTAALGCLVKDYFPEPVTVSWNSGALTSGVHTFPAVLQSSGLYSLSSVVTVPSSSLGTQTYICNVNHKPSNTKVDKKVEPKSC

SEQ ID NO: 27320 - protein, 128 aa, Artificial Sequence
  source: /note="Description of Artificial Sequence: Synthetic polypeptide"
QVQLLQSGAAVTKPGASVRVSCEASGYNIRDYFIHWWRQAPGQGLQWVGWINPKTGQPNNPRQFQGRVSLTRHASWDFDTFSFYMDLKALRSDDTAVYFCARQRSDYWDFDVWGSGTQVTVSSASTKG

SEQ ID NO: 27321 - protein, 136 aa, Artificial Sequence
  source: /note="Description of Artificial Sequence: Synthetic polypeptide"
QSQVHLVQSGAEVKKPGSSVKVSCQASGGTFNTFAINWVRQAPGQGLEWVGGIIPVFGTASYAQKFQGRVTVTTDESRGTAYMELNSLRSEDTAVYYCARGQTDLNDDLWSDYSTPGFDYWGQGTLVTVSSASTKG

SEQ ID NO: 27322 - protein, 132 aa, Artificial Sequence
  source: /note="Description of Artificial Sequence: Synthetic polypeptide"
QPQLVQSGSGAEVKKPGASVRISCEASEYNVFDHFMQWVRQAPGQGLEWMGWINPRGGYPSYSPTFQGRLTFTRQPSWDDSTITFHMELRGLGHDDTAVYYCARPHSPDDAWSLDVWGRGTLVTVSSASTKG

SEQ ID NO: 27323 - protein, 130 aa, Artificial Sequence
  source: /note="Description of Artificial Sequence: Synthetic polypeptide"
EVQLVESGSDVRKPGATVTVSCKADEDEDDFTAYNYFMHWVRQAPGQGLEWIGWINPRTGQPNHAKQFQGRVTLTRERSTSTVFMKLTNLRLDDTAVYFCARPLRGGDTWHYHSWGRGTSLTVSSASTKG

SEQ ID NO: 27324 - protein, 128 aa, Artificial Sequence
  source: /note="Description of Artificial Sequence: Synthetic polypeptide"
RVQLGQSGAEVKKPGASVKVSCKVSGNSLTEFSIHWVRQAPGKGLEWMGGFDPEEGETVPAQKFKGRVTMTEDTSTNTAYMELSSLRSEDTAVYYCSTEPREMGTLTAGFEYWGQGTLVIVSSASTKG

SEQ ID NO: 27325 - protein, 124 aa, Artificial Sequence
  source: /note="Description of Artificial Sequence: Synthetic polypeptide"
QVQLVQSGAALKKPGASLRISCQAYGYKFTDHLIYWWRQAPGQGLEWIGWIKPETGQPSYSYKFQGRVSLTRDTFQEILFMNLRGLRSDDTAIYFCARRHSDYCDFDVWGSGSQILVSSASTKG

SEQ ID NO: 27326 - protein, 130 aa, Artificial Sequence; identical to SEQ ID NO: 27312
  source: /note="Description of Artificial Sequence: Synthetic polypeptide"

SEQ ID NO: 27327 - protein, 130 aa, Artificial Sequence; identical to SEQ ID NO: 27314
  source: /note="Description of Artificial Sequence: Synthetic polypeptide"

SEQ ID NO: 27328 - protein, 124 aa, Artificial Sequence
  source: /note="Description of Artificial Sequence: Synthetic polypeptide"
QVQLVQSGAALKKPGASVRISCQAYGYKFTDHLIYWWRQAPGQGLEWIGWIKPETGQPSYSYKFQGRVTLTRDTFEEIHFMDLRGLRYDDTATYFCARRHSDYCDFDVWGSGSQVSVSSASTKG

SEQ ID NO: 27329 - protein, 130 aa, Artificial Sequence
  source: /note="Description of Artificial Sequence: Synthetic polypeptide"
QVQLVQSGSDVRKPGATVTVSCKADEDEDDFTAYNYFMHWVRQAPGHGLEWIGWINPRTGQPNHAKQFQGRVTLTRERSTSTVFMKLTNLRLDDTAVYFCARPLRGGDTWHYHSRGRGTSLTVSSASTKG

SEQ ID NO: 27330 - protein, 132 aa, Artificial Sequence
  source: /note="Description of Artificial Sequence: Synthetic polypeptide"
QPQLVQSGSGAEVKKPGASVRISCEASEYNVFDHFMQWVRQAPMEGLEWMGWINPRGGYPSYSPTFQGRLTFTRQPSWDDSTITFHMELRGLRHDDTAVYYCARPHSPDDAWSLDVWGRGTLVTVSSASTKG

SEQ ID NO: 27331 - protein, 132 aa, Artificial Sequence; identical to SEQ ID NO: 27330
  source: /note="Description of Artificial Sequence: Synthetic polypeptide"

SEQ ID NO: 27332 - protein, 124 aa, Artificial Sequence
  source: /note="Description of Artificial Sequence: Synthetic polypeptide"
QVQLVQSGATLKKPGASVRISCQAYGYKFTDHLIHWWRQAPGQGLEWIGWIKPETGQPSYAYKFQGRVSLTRDTFEEILFMDLRGLRSDDTAIYFCARRHSDYCDLDVWGGGTQLLVSSASTKG

SEQ ID NO: 27333 - protein, 124 aa, Artificial Sequence
  source: /note="Description of Artificial Sequence: Synthetic polypeptide"
QVQLVQSGAALKKPGASLRISCLTYGYKFTDHLIYWWRQAPGQGLEWIGWIKPETGQPSYSYRFQGRVSLTRDTFEEIVFMDLRGLRSDDTAIYFCARRHSDYCDFDVWGSGSQVIVSSASTKG

SEQ ID NO: 27334 - protein, 124 aa, Artificial Sequence
  source: /note="Description of Artificial Sequence: Synthetic polypeptide"
QVQLVQSGAALKKPGASLRISCQTYGYKFTDHLIYWWRQAPGQGLEWIGWIKPETGQPSYSYRFQGRVSLTRDTFEEIVFMDLRGLRSDDTAIYFCARRHSDYCDFDVWGGGSQVIVSSASTKG

SEQ ID NO: 27335 - protein, 124 aa, Artificial Sequence
  source: /note="Description of Artificial Sequence: Synthetic polypeptide"
QVQLVQSGAALKKPGASLRISCQTYGYKFTDHLIYWWRQAPGQGLEWIGWIKPETGQPSYSYRFQGRVSLTRDTFEEIVFMDLRGLRSDDTAIYFCARRHSDYCDFDVWGSGSQVIVSSASTKG

SEQ ID NO: 27336 - protein, 124 aa, Artificial Sequence
  source: /note="Description of Artificial Sequence: Synthetic polypeptide"
QVQLVQSGAALKKPGASVRISCQTYGYKFTDHLIHWWRQAPGQGLEWIGWIKPDTGQPSYSSRFQGRVSLTRDTFEEIVFMDLRGLRSDDTAIYFCARRHSDYCDFDVWGSGSQVLVSSASTKG

SEQ ID NO: 27337 - protein, 124 aa, Artificial Sequence
  source: /note="Description of Artificial Sequence: Synthetic polypeptide"
QVQLVQSGAALKKPGASLRISCQTYGYKFTDHLIYWWRQAPGQGLEWIGWIKPETGQPSYSYRFQGRVSLTRDTFEEIVFMDLRGLRSDDTAIYFCARRHSDYCDFDVWGSGSQVLVSSASTKG

SEQ ID NO: 27338 - protein, 130 aa, Artificial Sequence
  source: /note="Description of Artificial Sequence: Synthetic polypeptide"
QVQLVQSGSDVRKPGATVTVSCKADEDEDDFTAYNYFMHWVRQAPGHGLEWIGWINPRTGQPNHAKQFQGRVTLTRERSTSTVFMKLTNLRLDDTAVYFCARPLRGGDTWHYHSWGRGTSLTVSSASTKG

SEQ ID NO: 27339 - protein, 130 aa, Artificial Sequence; identical to SEQ ID NO: 27312
  source: /note="Description of Artificial Sequence: Synthetic polypeptide"

SEQ ID NO: 27340 - protein, 128 aa, Artificial Sequence
  source: /note="Description of Artificial Sequence: Synthetic polypeptide"
QVQLLQSGAAVTKPGASVRVSCEASGYNIRDYFIHWWRQAPGQGLQWVGWINPKTGQPNNPRQFQGRVSLTRHASWDFDTFSFYMDLKGLRSDDTAIYFCARQRSDYWDFDVWGSGTQVTVSSASTKG

SEQ ID NO: 27341 - protein, 136 aa, Artificial Sequence
  source: /note="Description of Artificial Sequence: Synthetic polypeptide"
LQPRVHSEVQLVESGAEVKKPGASVKVSCKVSGYTLSDLSMHWVRQAPGKGLEWMGGFDEEDGEITYAQKFQGRVSMTEDTSRDTAYMELSSLRSEDTAVYYCATAPRLELGELSSGFHYWGLGTLVTVSSASTKG

SEQ ID NO: 27342 - protein, 128 aa, Artificial Sequence; identical to SEQ ID NO: 27324
  source: /note="Description of Artificial Sequence: Synthetic polypeptide"

SEQ ID NO: 27343 - protein, 130 aa, Artificial Sequence
  source: /note="Description of Artificial Sequence: Synthetic polypeptide"
EVQLVQSGSDVRKPGATVTVSCKADEDEDDFTAYDYFMHWVRQAPGHGLEWIGWINPRTGQPNHAKQFQGRVTLTRERSTSTVFMKLTNLRLDDTAVYFCARPLRGGDTWHYHSWGRGTSLTVSSASTKG

SEQ ID NO: 27344 - protein, 130 aa, Artificial Sequence; identical to SEQ ID NO: 27312
  source: /note="Description of Artificial Sequence: Synthetic polypeptide"

SEQ ID NO: 27345 - protein, 130 aa, Artificial Sequence; identical to SEQ ID NO: 27312
  source: /note="Description of Artificial Sequence: Synthetic polypeptide"

SEQ ID NO: 27346 - protein, 124 aa, Artificial Sequence; identical to SEQ ID NO: 27316
  source: /note="Description of Artificial Sequence: Synthetic polypeptide"

SEQ ID NO: 27347 - protein, 128 aa, Artificial Sequence
  source: /note="Description of Artificial Sequence: Synthetic polypeptide"
QVQLLQSGAAVTKPGASVRVSCEASGYKISDHFIHWWRQAPGQGLQWVGWINPKTGQPNNPRQFQGRISLTRQASWDFDTFSFYMDLKALRSDDTAVYFCARQRSDYWDFDVWGSGTQVTVSSASTKG

SEQ ID NO: 27348 - protein, 130 aa, Artificial Sequence; identical to SEQ ID NO: 27338
  source: /note="Description of Artificial Sequence: Synthetic polypeptide"

SEQ ID NO: 27349 - protein, 129 aa, Artificial Sequence
  source: /note="Description of Artificial Sequence: Synthetic polypeptide"
WQLVQSGSDVRKPGATVTVSCKADEDEDDFTAYNYFMHWVRQAPGHGLEWIGWINPRTGQPNHAKQFQGRVTLTRERSTSTVFMKLTNLRLDDTAVYFCARPLRGGDTWHYHSWGRGTSLTVSSASTKG

SEQ ID NO: 27350 - protein, 124 aa, Artificial Sequence
  source: /note="Description of Artificial Sequence: Synthetic polypeptide"
QVQLVQSGAALKKPGASVRISCQTYGYKFTDHLIYWWRQAPGQGLEWIGWIKPETGQPSYSYRFQGRVSLTRDTFEEIVFMDLRGLRSDDTAIYFCARRHSDYCDFDVWGSGSQVLVSSASTKG

SEQ ID NO: 27351 - protein, 129 aa, Artificial Sequence; identical to SEQ ID NO: 27349
  source: /note="Description of Artificial Sequence: Synthetic polypeptide"

SEQ ID NO: 27352 - protein, 125 aa, Artificial Sequence
  source: /note="Description of Artificial Sequence: Synthetic polypeptide"
QVQLVQSGAALKKPGASVRISCQAYGYKFTDYLIHWWRQAPGQGLEWIGWIKPETGQPSYSYKFQGRVTLTRDTFEEILFMDLRGLRSDDTAIYFCARRHSDYCDFDVWGSGSQVIVSSASTKGA

SEQ ID NO: 27353 - protein, 130 aa, Artificial Sequence
  source: /note="Description of Artificial Sequence: Synthetic polypeptide"
EVQLVESGSDVRKPGATVTVSCKADEDEDDFTAYNYFMHWVRQAPGHGLEWIGWINPRTGQPNHAKQFQGRVTLTRERSTSTVFMKLTNLRLDDTAVYFCARPLRGGDTWHYHSWGRGTSLTVSSASTKG

SEQ ID NO: 27354 - protein, 130 aa, Artificial Sequence; identical to SEQ ID NO: 27314
  source: /note="Description of Artificial Sequence: Synthetic polypeptide"

SEQ ID NO: 27355 - protein, 136 aa, Artificial Sequence
  source: /note="Description of Artificial Sequence: Synthetic polypeptide"
IWAPLIAVTFLVLHCESLGTCCCCQASGGTFNTFAINWVRQAPGQGLEWVGGIIPVFGTASYAQKFQGRVTVTTDESRGTAYMELNSLRSEDTAVYYCARGQTDLNDDLWSDYSTPGFDYWGQGTLVTVSSASTKG

SEQ ID NO: 27356 - protein, 124 aa, Artificial Sequence
  source: /note="Description of Artificial Sequence: Synthetic polypeptide"
QVQLVQSGAALKKPGASVRISCQAYGYKFTDHLIYWWRQAPGQGLEWIGWIKPETGQPSYAYKFQGRVTLTRDTFEEIHFMDLRGVRNDDTATYFCARRHSDYCDFDVWGSGSQVIVSSASTKG

SEQ ID NO: 27357 - protein, 130 aa, Artificial Sequence; identical to SEQ ID NO: 27353
  source: /note="Description of Artificial Sequence: Synthetic polypeptide"

SEQ ID NO: 27358 - protein, 124 aa, Artificial Sequence
  source: /note="Description of Artificial Sequence: Synthetic polypeptide"
QVQLVQSGTAVKRPGASVRVSCQASGYTFTDYFIYWWRQAPGQGLEWLGWINPLTSQPSYPSRFQGRLTLTRDTFDEMLYMDLRGLRSDDTGIYFCARRHSDYCDFDIWGSGTQIIVSSASTKG

SEQ ID NO: 27359 - protein, 129 aa, Artificial Sequence
  source: /note="Description of Artificial Sequence: Synthetic polypeptide"
EVQLVESGAEVKKPGASVKVSCKVSGYTLSDLSMHWVRQAPGKGLEWMGGFDEEDGEITYAQKFQGRVSMTEDTSRDTAYMELSSLRSEDTAVYYCATAPRLELGELSSGFHYWGLGTLVTVSSASTKG

SEQ ID NO: 27360 - protein, 130 aa, Artificial Sequence; identical to SEQ ID NO: 27312
  source: /note="Description of Artificial Sequence: Synthetic polypeptide"

SEQ ID NO: 27361 - protein, 128 aa, Artificial Sequence
  source: /note="Description of Artificial Sequence: Synthetic polypeptide"
QVHLSQSGAAVTKPGASVRVSCEASGYKISDHFIHWWRQAPGQGLQWVGWINPKTGQPNNPRQFQGRVSLTRQASWDFDTYSFYMDLKAVRSDDTAIYFCARQRSDFWDFDVWGSGTQVTVSSASTKG

SEQ ID NO: 27362 - protein, 128 aa, Artificial Sequence; identical to SEQ ID NO: 27266
  source: /note="Description of Artificial Sequence: Synthetic polypeptide"

SEQ ID NO: 27363 - protein, 128 aa, Artificial Sequence
  source: /note="Description of Artificial Sequence: Synthetic polypeptide"
QVHLSQSGAAVTKPGASVRVSCEASGYKISDHFIHWWRQAPGQGLQWVGWINPKTGQPNNPRQFQGRVSLTRQASWDFDTYSFYMDLKALRSDDTAIYFCARQRSDFWDFDVWGSGTQVTVSSASTKG

SEQ ID NO: 27364 - protein, 128 aa, Artificial Sequence
  source: /note="Description of Artificial Sequence: Synthetic polypeptide"
QVQLLPFGGAVTKPGASVRVSCEASGYNIRDYFIHWWRQAPGQGLQWVGWINPKTGQPNNPCQFQGRVSLTRPASWDFDTISFYMDLKALRLDDTAVYFCARQRSDYWDFDVWGSGTQVTVSSASTKG

SEQ ID NO: 27365 - protein, 124 aa, Artificial Sequence
  source: /note="Description of Artificial Sequence: Synthetic polypeptide"
QVQLVQSGAALKKPGASLRISCQTYGYKFTDHLIYWWRQAPGQGLEWIGWIKPETGQPSYSYRFQGRVSLTRDTFEEIAFMDLRGLRSDDTAIYFCARRHTDYCVFDVWGSGSQIIVSSASTKG

SEQ ID NO: 27366 - protein, 130 aa, Artificial Sequence
  source: /note="Description of Artificial Sequence: Synthetic polypeptide"
QVQLVESGSDVRKPGATVTVSCKADEDEDDFTAYNYFMHWVRQAPGHGLEWIGWINPRTGQPNHAKQFQGRVTLTRERSTSTVFMKLTNLRLDDTAVYFCARPLRGGDTWHYHSWGRGTSLTVSSASTKG

SEQ ID NO: 27367 - protein, 124 aa, Artificial Sequence
  source: /note="Description of Artificial Sequence: Synthetic polypeptide"
QVQLVQSGAALKKPGASLRISCQTYGYKFTDHLIYWWRQAPGQGLEWMGWIKPETGQPSYSYRFQGRVSLTRDTFEEIVFMDLRGLRSDDTAIYFCARRHSDYCDFDVWGSGSQVIVSSASTKG

SEQ ID NO: 27368 - protein, 128 aa, Artificial Sequence
  source: /note="Description of Artificial Sequence: Synthetic polypeptide"
QVQLLQSGAAVTKPGASVRVSCEASGYNIRDYFIHWWRQAPGQGLQWVGWINPKTGQPNNPRQFQGRVSLTRHASWDFDTFSFYMDLKALRSDDTAVYFCARQRSDYWDFDVWGSGTQVTVYSASTKG

SEQ ID NO: 27369 - protein, 129 aa, Artificial Sequence
  source: /note="Description of Artificial Sequence: Synthetic polypeptide"
EVQLVESGAEVKKPGASVKVACKVSGKKLSDLSIHWVRQAPGKGLEWMGGFDEEDGKISYERKFQGRVTMTEDTARDTAFMEMSSLRSDDTAVYFCAAAPRLDLGELSSGFHFWGLGTLVSVSSASTKG

SEQ ID NO: 27370 - protein, 128 aa, Artificial Sequence
  source: /note="Description of Artificial Sequence: Synthetic polypeptide"
QVQLLQSGAAVTKPGASVRVSCEASGYNIRDYFIHWWRQAPGQGLQWVGWINPKTGQPNNPRQFQGRVSLTRQASWDFDTISFYMDLKALRLDDTAVYFCARQRSDYWDFDVWGSGTQVTVSSASTKG

SEQ ID NO: 27371 - protein, 125 aa, Artificial Sequence
  source: /note="Description of Artificial Sequence: Synthetic polypeptide"
RQVQLVQSGAALKKPGASLRISCQAYGYKFTDHLIYWWRQAPGQGLEWIGWIKPETGQPSYSYKFQGRVSLTRDTFQEILFMDLRGLRSDDTAIYFCARRHSDYCDFDVWGSGSQILVSSASTKG

SEQ ID NO: 27372 - protein, 136 aa, Artificial Sequence
  source: /note="Description of Artificial Sequence: Synthetic polypeptide"
CNPRVHSEVQLVESGAEVKKPGASVKVACKVSGKKLSDLSIHWVRQAPGKGLEWMGGFDEEDGKISYERKFQGRVSMTEDTARDTAFMEMSSLRSDDTAVYFCAAAPRLDLGELSSGFHFWGLGTLVTVSSASTKG

SEQ ID NO: 27373 - protein, 124 aa, Artificial Sequence
  source: /note="Description of Artificial Sequence: Synthetic polypeptide"
QVQLVQSGAALKKPGASLRISCQAYGYKFTDHLIYWWRQAPGQGLEWIGWIKPETGQPSYSYKFQGRVSLTRDTFQEILFMDLRGLRSDDTAIYFCARRHSDYCDFDVWGSGSQVIVSSASTKG

SEQ ID NO: 27374 - protein, 130 aa, Artificial Sequence; identical to SEQ ID NO: 27338
  source: /note="Description of Artificial Sequence: Synthetic polypeptide"

SEQ ID NO: 27375 - protein, 128 aa, Artificial Sequence; identical to SEQ ID NO: 27320
  source: /note="Description of Artificial Sequence: Synthetic polypeptide"

SEQ ID NO: 27376 - protein, 124 aa, Artificial Sequence
  source: /note="Description of Artificial Sequence: Synthetic polypeptide"
QVQLVQSGTAVKRPGASVRVSCQASGYTFIDHFIYWWRQAPGQGLEWLGWINPLTSQPSYPSRFQGRLTLTRDTFDEMLYMDLRGLRSDDTGIYFCARRHSDYCDFDIWGSGTQIIVSSASTKG

SEQ ID NO: 27377 - protein, 128 aa, Artificial Sequence
  source: /note="Description of Artificial Sequence: Synthetic polypeptide"
EVQLVESGAEVKKPGASVKVSCKVSGNSLTEFSIHWVRQAPGKGLEWMGGFDPEEGETVPAQKFKGRLTMTEDTSTNTAYMELSSLRSEDTAVYYCSTEPREMGTLTAGFEYWGQGTLVTVSSASTKG

SEQ ID NO: 27378 - protein, 128 aa, Artificial Sequence
  source: /note="Description of Artificial Sequence: Synthetic polypeptide"
QVQLLQSGAVVTKPGASVRVSCEASGYKIRDYFIHWWRQAPGQGLQWVGWINPQTGQPNIPRPFQGRVTLTRHASWDFDTFSFYMDLKALRSDDTAIYFCARRRSDYCDFDVWGSGTHVTVSSASTKG

SEQ ID NO: 27379 - protein, 130 aa, Artificial Sequence; identical to SEQ ID NO: 27312
  source: /note="Description of Artificial Sequence: Synthetic polypeptide"

SEQ ID NO: 27380 - protein, 130 aa, Artificial Sequence; identical to SEQ ID NO: 27338
  source: /note="Description of Artificial Sequence: Synthetic polypeptide"

SEQ ID NO: 27381 - protein, 128 aa, Artificial Sequence
  source: /note="Description of Artificial Sequence: Synthetic polypeptide"
QVQLLQSGAAVTKPGASVRVSCEASGYNIRDYFIHWWRQAPGQGLQWVGWINPKTGQPNNPRLFQGRVSLTRHASWDFDTFSFYMDLKAVRSDDTAVYFCARQRSDYWDFDVWGSGTQVTVSSASTKG

SEQ ID NO: 27382 - protein, 231 aa, Artificial Sequence
  source: /note="Description of Artificial Sequence: Synthetic polypeptide"
  MOD_RES (104)..(104): Any amino acid
  MOD_RES (107)..(107): Any amino acid
EVQLVQSGAEVKKPGSSVKVSCKASGGTFSNYAINWVRQAPGQGLEWMGGIIPIFNIAHYAQRFQGRVSITADESTSTAYMELSSLRSEDTAVFYCASPYPNDXNDXAPEEGMSWYFDLWGRGTLVTVSPASTKGPSVFPLAPSSKSTSGGTAALGCLVKDYFPEPVTVSWNSGALTSGVHTFPAVLQSSGLYSLSSVVTVPSSSLGTQTYICNVNHKPSNTKVDKKVEPK

SEQ ID NO: 27383 - protein, 125 aa, Artificial Sequence
  source: /note="Description of Artificial Sequence: Synthetic polypeptide"
QSGAEVKKPGASVKVSCKASGYTYTTYGVSWLRQVPGQRPEWMGWIRPKTGARNQARQFQPRISLTRDRALSTAYLDLNSLTSADSGTYFCARQTFKPDFYFADQGWSFNLWGRGAHFIVSSAST

SEQ ID NO: 27384 - protein, 119 aa, Artificial Sequence
  source: /note="Description of Artificial Sequence: Synthetic polypeptide"
QSGAEVKRPGASVRVSCRASGYTFNNFYMYWVRQAPGQGLEYVGWINPNTGTTKYAQKFQGWVTLTLDTSITTAYLEMGRLTPDDTALFYCATVAGPAADEAFDVWGQGTMVTVSSAST

SEQ ID NO: 27385 - protein, 130 aa, Artificial Sequence
  source: /note="Description of Artificial Sequence: Synthetic polypeptide"
QSGSAMKKPGASVRVSCWTSEDIFDTTELIYWMRQAPGQGLEWIGWVKIVSGTVNFASLDFRNRISLSRDRDLSTAHMDIRGLTQDDTAVYYCTSDRRGSGNSYVPDHYHYYGMDVWGQGTTVTVSSAST

SEQ ID NO: 27386 - protein, 121 aa, Artificial Sequence
  source: /note="Description of Artificial Sequence: Synthetic polypeptide"
QSGAEVKKPGASVKVSCKASGYTFTSYDINWVRQATGQGLEWIGWVKTVTGAVNFGSSDFRQRVSLTRDRDLFTAHMDIRGLTQGDTATYFCARQKFYAGGQGWYFDLWGRGTLIVVSSAS

SEQ ID NO: 27387 - protein, 238 aa, Artificial Sequence
  source: /note="Description of Artificial Sequence: Synthetic polypeptide"
QVQLVQPGTAMKSLGSSLTITCRVSGDDLGSFHFGTYFMIWVRQAPGQGLEYMGGILPSTKTPTYAHKFRGRVSISAPGVPPVLSLALTNLTYDDTATYFCARERGRHFEPKNRDNLEGKFFDLWGRGTFVRVSPASTKGPSVFPLAPSSKSTSGGTAALGCLVKDYFPEPVTVSWNSGALTSGVHTFPAVLQSSGLYSLSSVVTVPSSSLGTQTYICNVNHKPSNTKVDKKVEPKSC

SEQ ID NO: 27388 - protein, 229 aa, Artificial Sequence
  source: /note="Description of Artificial Sequence: Synthetic polypeptide"
  MOD_RES (1)..(1): Any amino acid
XVRLSQSGGQMKKPGESMRLSCRASGYEFLNCPINWIRLAPGRRPEWMGWLKPRWGAVNYARKFQGRVTMTRDVYSDTAFLELRSLTSDDTAVYFCTRGKYCTARDYYNWDFEHWGRGAPVTVSSASTKGPSVFPLAPSSKSTSGGTAALGCLVKDYFPEPVTVSWNSGALTSGVHTFPAVLQSSGLYSLSSVVTVPSSSLGTQTYICNVNHKPSNTKVDKRVEPKSCD

SEQ ID NO: 27389 - protein, 125 aa, Artificial Sequence
  source: /note="Description of Artificial Sequence: Synthetic polypeptide"
QSGSGVKKPGASVRVSCWTSEDIFERTELIHWVRQAPGQGLEWIGWVKTVTGTVNYARKFQGRVSFYRTRELGIAYMDLRNLRFDDTAVYFCARKTAGDVSGDKRGFFFDLWGRGSRVIVSSAST

SEQ ID NO: 27390 - protein, 117 aa, Artificial Sequence
  source: /note="Description of Artificial Sequence: Synthetic polypeptide"
QSGSAMKKPGASVRVSCWTSEDIFDTTELIYWVRQAPGQGLEWIGWVKIVSGTVNFASLDFRNRISLSRDRDLSTAHMDIRGLTDDTGIYYCARGPMGGSHVYWGQGSLVTVSSAST

SEQ ID NO: 27391 - protein, 129 aa, Artificial Sequence
  source: /note="Description of Artificial Sequence: Synthetic polypeptide"
GSQVQLVQSGAEVKRPGSSVTVSCKASGGSFSTYALSWVRQAPGRGLEWMGGVIPLLTITNYAPRFQGRITITADRSTSTAYLELNSLRPEDTAVYYCAREGTTGWGWLGKPIGAFAHWGQGTLVTVSS

SEQ ID NO: 27392 - protein, 122 aa, Artificial Sequence
  source: /note="Description of Artificial Sequence: Synthetic polypeptide"
QSGSAMKKPGASVRVSCWTSEDIFDTTELIHWVRQAPGQGLEWIGWVKAVSGAVNYGSLDFRHRVSLTRDRDLSTAHMDIRGLTQDDTATYFCARQKFARGDQWFFDLWGRGTLIVVSSAST

SEQ ID NO: 27393 - protein, 125 aa, Artificial Sequence
  source: /note="Description of Artificial Sequence: Synthetic polypeptide"
QSGAELKKPGSSVRVSCKTSGGSFNNYAINWVRQAPGQGLEWIGWVKTVSGTVNFASLDFRNRISLSRDRDPSTAYMDIRGLTQDDTATYFCARQKFASRYSGDQGSYFDLWGRGTLIVVSSAST

SEQ ID NO: 27394 - protein, 123 aa, Artificial Sequence
  source: /note="Description of Artificial Sequence: Synthetic polypeptide"
QSGAEVKKPGASVRVSCWTSEDIFEKSELIHWVRQAPGQGLEWIGWVKTVTGAVNFGSSDFRQRVSLTRDRDLFTAHMDIRGLTQGDTATYFCARQKFERGGQGWYFDLWGRGTLIVVSSAST

SEQ ID NO: 27395 - protein, 122 aa, Artificial Sequence
  source: /note="Description of Artificial Sequence: Synthetic polypeptide"
QSGSGVKKPGASVRVSCWTSEGIFEKSELIHWVRQAPGQGLEWIGWVKTVTGAVNFGHQISDRVSLTRDRDLFTAHMDIRGLTQGDTATYFCARQKFERGGQGWIFDLWGRGTLIAVSSAST

SEQ ID NO: 27396 - protein, 116 aa, Artificial Sequence
  source: /note="Description of Artificial Sequence: Synthetic polypeptide"
QSGAEVKRPGASLNVSCHASGYLFNNYYIHWVRQAPGQGLEWMGWINPTTKITNLPLKFRGRVTLTREPSKSILYGLNGLTPDDTAIYFCARSGEQIAHLDFWGQGSLITVSAAST

SEQ ID NO: 27397 - protein, 123 aa, Artificial Sequence
  source: /note="Description of Artificial Sequence: Synthetic polypeptide"
QSGAEVKRPGASVKVSCWTSEDIFERTELIHWVRQAPGQGLEWIGWVKTVSGAVNFGSPNFRHRVSLTRDRDLFTAHMDIRGLTQGDTATYFCARQKFERGGQGWYFDLWGRGTLIVVSSAST

SEQ ID NO: 27398 - protein, 119 aa, Artificial Sequence
  source: /note="Description of Artificial Sequence: Synthetic polypeptide"
QSGAEVRRPGASVKVSCKASGYNFIAYHVHWVRQAPGQGLTWMGWINPDSGDTVYAQNFVDRVMMTRNTSIQTVYLELNVLTLEDTAIYFCATPDKKSDLGWFDTWGQGSQVTVSSAST

SEQ ID NO: 27399 - protein, 125 aa, Artificial Sequence
  source: /note="Description of Artificial Sequence: Synthetic polypeptide"
QSGSGVKKPGASVRVSCWTSEDIFERTELIHWVRQAPGQGLEWLGWMKPVTGAVNYARKFQGRVSFYRTRELGIAYMDLRDLKFDDTAVYFCARKTKGDVSGDGRGFFFDLWGRGTRVIISSAST

SEQ ID NO: 27400 - protein, 126 aa, Artificial Sequence
  source: /note="Description of Artificial Sequence: Synthetic polypeptide"
QSGSGVKKLGASVRVSCWTSEDIFERTELIHWVRQAPGQGLEWMGWINPNSGGTYYAQKFQGRVTMTTDTSTNTAYMELRSLRSDDTAVYYCARDVLRYFDWFLGVEYYFEYWGQGTLVTVSSAST

SEQ ID NO: 27401 - protein, 252 aa, Artificial Sequence
  source: /note="Description of Artificial Sequence: Synthetic polypeptide"
METDTLLLWVLLLWVPGSTGDQVQLVQSGGGVFKPGGSLRLSCEASGFTFTEYYMTWVRQAPGKGLEWLAYISKNGEYSKYSPSSNGRFTISRDNAKNSVFLQLDRLSADDTAVYYCARADGLTYFSELLQYIFDLWGQGARVTVSSASTKGPSVFPLAPSSKSTSGGTAALGCLVKDYFPEPVTVSWNSGALTSGVHTFPAVLQSSGLYSLSSVVTVPSSSLGTQTYICNVNHKPSNTKVDKRVEPKSCDK

SEQ ID NO: 27402 - protein, 131 aa, Artificial Sequence; identical to SEQ ID NO: 27120
  source: /note="Description of Artificial Sequence: Synthetic polypeptide"

SEQ ID NO: 27403 - protein, 131 aa, Artificial Sequence; identical to SEQ ID NO: 27049
  source: /note="Description of Artificial Sequence: Synthetic polypeptide"

SEQ ID NO: 27404 - protein, 125 aa, Artificial Sequence
  source: /note="Description of Artificial Sequence: Synthetic polypeptide"
QFGAEVKKPGSSVKVSCKASGGTFSNNAFSWVRQAPGQGLEWIGWVKTVTGAVNFGSLDFRHRISLTRDRDLFTAHMDIRGLTQGDTATYFCARQKFESRYTGGQGWYFDLWGRGTHIVVSSAST

SEQ ID NO: 27405 - protein, 123 aa, Artificial Sequence
  source: /note="Description of Artificial Sequence: Synthetic polypeptide"
QSGSGVKKLGASVRVSCWTSEDIFERTELIHWVRQAPGQGLEWIGWVKAVSGAVNYGSLDFRHRVSLTRDRDLSTAHMDIRGLTQDDTATYFCARQKFARGDQGWFFDLWGRGTLIVVSSAST

SEQ ID NO: 27406 - protein, 125 aa, Artificial Sequence
  source: /note="Description of Artificial Sequence: Synthetic polypeptide"
QSGAEVKRPGASVMVSCKASGYTFLNYAFSWVRQAPGQGLEWIGWVKTVSGAVNFGSTDFRERVSLTRDRDLFTAHMDIRGLTQGDTATYTCARQKFEKLYTGDQGLYFDLWGRGTLIIVSSAST

SEQ ID NO: 27407 - protein, 122 aa, Artificial Sequence
  source: /note="Description of Artificial Sequence: Synthetic polypeptide"
QSGAEVKKPGASVQVSCKASGYPFTKYYMHWVRQAPGQGLEWIGWVKAVSGAVNYGSLDFRHRVSLTRDRDLSTAHMDIRGLTQDDTATYFCARQKFARGDQGWFFDLWGRGTLIVVSSAST

SEQ ID NO: 27408 - protein, 125 aa, Artificial Sequence
  source: /note="Description of Artificial Sequence: Synthetic polypeptide"
QSGAEVKKPGASVKVSCRASGYTFGNHAISWVRQAPGQGLEWMGWIRPKTGARNQARQFQPRISLTRDRALSTAYLDLNSLTSADSGTYFCARQTFKPDFYFADQGWSFNLWGRGAHFIVSSAST

SEQ ID NO: 27409 - protein, 129 aa, Artificial Sequence
  source: /note="Description of Artificial Sequence: Synthetic polypeptide"
QGQLVQSGGGLKKPGTSVTISCLASEYTFNEFVIHWIRQAPGQGPLWLGLIKRSGRLMTAYNFQDRLSLRRDRSTGTVFMELRGLRPDDTAVYYCARDGLGEVAPDYRYGIDVWGQGSTVIVTAASTKG

SEQ ID NO: 27410 - protein, 129 aa, Artificial Sequence
  source: /note="Description of Artificial Sequence: Synthetic polypeptide"
QGLLVQSGGGVKKLGTSVTISCLASEYTFNEFVIHWIRQAPGQGPLWLGLIKRSGRLMTSYQFQDRLSLRRDRSTGTVFMELRGLRVDDTAVYYCARDGLGEVAPAYLYGIDAWGQGTTVIVTSASTKG

SEQ ID NO: 27411 - protein, 129 aa, Artificial Sequence
  source: /note="Description of Artificial Sequence: Synthetic polypeptide"
FQGHLVQSGGGVKKPGTSVTLSCLASEYTFTEFTIHWIRQAPGQGPLWLGLIKRSGRLMTSYRFQDRLSLRRDRSTGTVFMELRSLRTDDTAVYYCARDGLGELAPAYHYGIDAWGQGTTVIVTSASTS

SEQ ID NO: 27412 - protein, 127 aa, Artificial Sequence
  source: /note="Description of Artificial Sequence: Synthetic polypeptide"
QGHLVQSGGGVKKLGTSVTISCLASEYTFNEFVIHWIRQAPGQGPLWLGLIKRSGRLMTSYQFQDRLSLRRDRSTGTVFMELRGLRVDDTAVYYCARDGLGEVAPAYLYGIDAWGQGTTVIVTSAST

SEQ ID NO: 27413 - protein, 128 aa, Artificial Sequence
  source: /note="Description of Artificial Sequence: Synthetic polypeptide"
QGHLVQSGGGVKKLGTSVTISCLASEDTFNEFVIHWIRQAPGQGPLWLGLIKRSGRLMTSYQFQDRLSLRRDRSTGTVFMELRGLRVDDTAVYYCARDGLGEVAPAYLYGIDAWGQGTTVIVTSASTS

SEQ ID NO: 27414 - protein, 127 aa, Artificial Sequence
  source: /note="Description of Artificial Sequence: Synthetic polypeptide"
  MOD_RES (10)..(10): Any amino acid
GHLVQSGGGXKKPGTSVTISCLASEYTFTEFTIHRIRQAPGQGPLWLGLIKGSGRLMTSYGFQDRLSLRRDRSTGTVFMELRSLRTDDTAVYYCARDGLGELAPAYHYGIDVWGQGTTVIVTSASTS

SEQ ID NO: 27415 - protein, 132 aa, Artificial Sequence
  source: /note="Description of Artificial Sequence: Synthetic polypeptide"
GVHFQGHLVQSGGGVKKPGSSVTISCLASEYTFTEFTIHWIRQAPGQGPLWLGLIKRSGRLMTSYRFQDRLSLRRDRSTGTVFMELRGLRIDDTAVYYCARDGLGEVAPAYLYGIDVWGQGTTVIVTSASTS

SEQ ID NO: 27416 - protein, 129 aa, Artificial Sequence
  source: /note="Description of Artificial Sequence: Synthetic polypeptide"
FQGQLVQSGGGVKKPGSSVTISCLASEYTFTEFTIHWIRQAPGQGPLWLGLIKRSGRLMTSYGFQDRLSVRRDRSTGTVFMELRSLRTDDTAVYYCARDGLGELAPAYHYGIDVWGQGTTVIVTSASTS

SEQ ID NO: 27417 - protein, 128 aa, Artificial Sequence
  source: /note="Description of Artificial Sequence: Synthetic polypeptide"
QGQLVQSGGGVKKLGTSVTISCLASEYTFNEFVIHWIRQAPGQGPLWLGLIKRSGRLMTSYQFQDRLSLRRDRSTGTVFMELRGLRVDDTAVYYCARDGLGEVAPAYLYGIDAWGQGTTVIVTSASTS

SEQ ID NO: 27418 - protein, 130 aa, Artificial Sequence
  source: /note="Description of Artificial Sequence: Synthetic polypeptide"
  MOD_RES (9)..(9): Any amino acid
  MOD_RES (31)..(31): Any amino acid
QGHLVQSGXEVKKPGSSVKVSCKASGGTFSXYAIGWVRQAPGQGLEWMGGIIPILGTTNYAQRFQGGVTITADESTNTAYMDVSSLRSDDTAVYYCAKAPYRPRGSGNYYYAMDVWGQGTTVIVSSASTS

SEQ ID NO: 27419 - protein, 131 aa, Artificial Sequence
  source: /note="Description of Artificial Sequence: Synthetic polypeptide"
QVQLQQWGSGLLKPSETLSLTCAVYGGSFRSYYWNWIRQSPGKGLEWIGEVSHSGSTNYNPALKSRVTISVDTSKNQFSLKVKSVTAADTALYYCSRGRGKRCSGAYCFAGYFDSWGQGGLVVVSSASTKG

SEQ ID NO: 27420 - protein, 129 aa, Artificial Sequence
  source: /note="Description of Artificial Sequence: Synthetic polypeptide"
QGHLVQSGGGVKKLGTSVTISCLASEYTFNEFVIHWIRQAPGQGPLWLGLIKRSGRLMTSYQFQDRLSLRRDRSTGTVFMELRGLRVDDTAVYYCARDGLGEVAPAYLYGIDAWGQGTTVIVTSASTKG

SEQ ID NO: 27421 - protein, 132 aa, Artificial Sequence
  source: /note="Description of Artificial Sequence: Synthetic polypeptide"
EVQLVESGGGVVEPGESLRLSCAASGFTFRSYDMFWVRQATGKSLEWVSAIGIAGDTYYSGSVKGRFTISRENARTSLYLQLSGLRVEDSAVYFCVRGSPPRIAATEYNYYYGLDVWGQGTTVSVFSASTKG

SEQ ID NO: 27422 - protein, 138 aa, Artificial Sequence
  source: /note="Description of Artificial Sequence: Synthetic polypeptide"
VVQLVQSGAEVRKPGSSLKVSCKSSGGTFSRYVVNWVRQAPGQGLEWMGGMIPIFGIAKYAQKFQDRVTMTADESKNTVYLDFSSLRSDDTAVYYCARDRGDTRLLDYGDYEDERYYYGMDVWGQGTTVIVSSASTKG

SEQ ID NO: 27423 - protein, 138 aa, Artificial Sequence
  source: /note="Description of Artificial Sequence: Synthetic polypeptide"
QVQLVQSGAEVRKPGSSLKVSCKSSGGTFSRYVVNWVRQAPGQGLEWMGGIIPIFGIAKYAQKFQDRVTMTADEPKNTVYLDFNSLRSDDTAVYYCARDRGDTRLLDYGDYEDERYYYGMDVWGQGTTVIVSSASTKG

SEQ ID NO: 27424 - protein, 125 aa, Artificial Sequence
  source: /note="Description of Artificial Sequence: Synthetic polypeptide"
EVQLVESGGGLVKPGGSLRLSCAASGFSFSEHYMSWIRLAPGKGLEWLSYISSSTRTTYSADSVRGRFTISRDTAKQLLFLHMSSLRAEDTAVYYCVRLYGGINGWFDQWGQGTLVSVSSASTKG

SEQ ID NO: 27425 - protein, 123 aa, Artificial Sequence
  source: /note="Description of Artificial Sequence: Synthetic polypeptide"
QVQLVQSGAEVKKPGSSVKVSCKTSGGSFSNYAFSWVRQAPGEGLEWMGRIIPIFGTAKYTQKLQGRVTITADKFTSTVYMELSSLRSEDTAIYYCASLHQGPIGYTPWHPPPRAPLGQSVCG

SEQ ID NO: 27426 - protein, 139 aa, Artificial Sequence
  source: /note="Description of Artificial Sequence: Synthetic polypeptide"
QVQLVESGAEVKKPGASVKVSCKASGYTFTSHDINWVRQATGQGLEWMGWMNPNSGDTGYAHKFQGRVTMTRNTPISTAYMELSSLRSEDTAVYYCARGRATSRNTPWAHYYDSSGYYGAGDYWGQGTLVTVSSASTKG

SEQ ID NO: 27427 - protein, 133 aa, Artificial Sequence
  source: /note="Description of Artificial Sequence: Synthetic polypeptide"
QVQLVESGGGVVQPGRSLRLFCAASGFAFNTYGMHWVRQAPGKGLEWVAVTWHDGSQKYYADSVKGRFTISRDNSKNTLYLQMNSLRAEDTAIYYCASDQGGFDDSSGYFAPGGMDVWGRGTTVIVSSAPTKG

SEQ ID NO: 27428 - protein, 121 aa, Artificial Sequence
  source: /note="Description of Artificial Sequence: Synthetic polypeptide"
QVQLVESGAELRKPGESLEISCKASGYSFSSHWIGWARQMPGKGLEWMGIIYPGDSNTIYSPSFQGQVTISADKSINTAYLQWSSLKASDTAMYFCASNYHDYFYWGQGTLVTVSSASTKG

SEQ ID NO: 27429 - protein, 135 aa, Artificial Sequence
  source: /note="Description of Artificial Sequence: Synthetic polypeptide"
EVQLVESGAEVKKPGSSVKVSCKASGGTFSTYAFSWVRQAPGQGLEWMGGIIPIFGTENYAQKFQGRVTITADKSTSTAYMELSSLRSEDTAVYYCARDRSSAIGYCSSISCYKGSFDIWGQGTMVTVSSASTKG

SEQ ID NO: 27430 - protein, 138 aa, Artificial Sequence; identical to SEQ ID NO: 27423
  source: /note="Description of Artificial Sequence: Synthetic polypeptide"

SEQ ID NO: 27431 - protein, 129 aa, Artificial Sequence
  source: /note="Description of Artificial Sequence: Synthetic polypeptide"
QGQLVQSGGGVKKLGTSVTISCLASEYTFNEFVIHWIRQAPGQGPLWLGLIKRSGRLMTSYQFQDRLSLRRDRSTGTVFMELRGLRVDDTAVYYCARDGLGEVAPAYLYGIDAWGQGTTVIVSSASTKG

SEQ ID NO: 27432 - protein, 135 aa, Artificial Sequence
  source: /note="Description of Artificial Sequence: Synthetic polypeptide"
EVQLVQSGAEVKKPGSSVKVSCKASGGTFSTYAFSWVRQAPGQGLEWMGGIIPIFGTENYAQKFQGRVTITADKSTSTAYMELSSLRSEDTAVYYCARDRSSAIGYCSSISCYKGSFDIWGQGTMVTVSSASTKG

SEQ ID NO: 27433 - protein, 143 aa, Artificial Sequence
  source: /note="Description of Artificial Sequence: Synthetic polypeptide"
QVFVQLVQSGGGLVQPGGSVRLSCTASGFLFSTYSMNWVRQAPGKGLEWVSSISTTSNYIYYADSVKGRFTISRSNGQGSLYLQLNSLRVEDTAVYYCARDTKVGAPRQDCYAMDLWGQRDHGHRLLSFHQGPIGLPPGALLQ

SEQ ID NO: 27434 - protein, 129 aa, Artificial Sequence
  source: /note="Description of Artificial Sequence: Synthetic polypeptide"
QVQLLESGPGLVTPSGTLSLACAVSGASISSSHWWTWVRQSPGKGLEWIGEIDRRGTTNYNPSLRSRVTILLDNSKNQFSLSLRSVTAADTAVYYCTKVYAGLFNERTYGMDVWGHGTTVLVSSASTKG

SEQ ID NO: 27435 - protein, 138 aa, Artificial Sequence
  source: /note="Description of Artificial Sequence: Synthetic polypeptide"
QVQLVESGAEVRKPGSSLKVSCKSSGGTFSRYVVNWVRQAPGQGLEWMGGIIPIFGIAKYAQKFQDRVTMTADESKNTVYLDFSSLRSDDTAVYYCARDRGDTRLLDYGDYEDERYYYGMDVWGQGTTVIVSSASTKG

SEQ ID NO: 27436 - protein, 129 aa, Artificial Sequence
  source: /note="Description of Artificial Sequence: Synthetic polypeptide"
QGHLVQSGGGVKKLGTSVTISCLVSEYTFNEFVIHWIRQAPGQGPLWLGLIKRSGRLMTSYQFQDRLSLRRDRSTGTVFMELRGLRVDDTAVYYCARDGLGEVAPAYLYGIDAWGQGTTVIVTSASTKG

SEQ ID NO: 27437 - protein, 132 aa, Artificial Sequence
  source: /note="Description of Artificial Sequence: Synthetic polypeptide"
QVQLLQSGAEVKKPGASVKVSCKVSGYTLTELSINWVRQAPGKGLEWMGGFDPEDDEAIYEPKFQGRLTMTEDTSTDTAYMELSSLRSEDTAVYYCATADPFKVAQDEGLYVIFDYWGQGTLVTVSSASTKG

SEQ ID NO: 27438 - protein, 227 aa, Artificial Sequence
  source: /note="Description of Artificial Sequence: Synthetic polypeptide"
QGQLVQSGGGLKKPGTSVTISCLASEYTFNEFVIHWIRQAPGQGPLWLGLIKRSGRLMTAYNFQDRLSLRRDRSTGTVFMELRGLRPDDTAVYYCARDGLGEVAPDYRYGIDVWGQGSTVIVTSASTKGPSVFPLAPSSKSTSGGTAALGCLVKDYFPEPVTVSWNSGALTSGVHTFPAVLQSSGLYSLSSVVTVPSSSLGTQTYICNVNHKPSNTKVDKKAEPKSC

SEQ ID NO: 27439 - protein, 129 aa, Artificial Sequence
  source: /note="Description of Artificial Sequence: Synthetic polypeptide"
QGQLVQSGGGLKKPGTSVTISCLASEYTFNEFVIHWIRQAPGQGPLWLGLIKRSGRLMTAYNFQDRLRLRRDRSTGTVFMELRGLRPDDTAVYYCARDGLGEVAPDYRYGIDVWGQGSTVIVTAASTKG

SEQ ID NO: 27440 - protein, 131 aa, Artificial Sequence
  source: /note="Description of Artificial Sequence: Synthetic polypeptide"
QVQLVQSGTEVQKPGASVKVSCKTSGYTFSKYYIHWVRQAPGQGLEWVGRINTDSGGTDYAEKFQGRVTMTRDTSITTVYLEMRGLTSDDTAAFYCARGPPHAGGWTIYYYGLDVWGQGTSVIVSSASTKG

SEQ ID NO: 27441 - protein, 132 aa, Artificial Sequence
  source: /note="Description of Artificial Sequence: Synthetic polypeptide"
QVQLVQSGAEVKKPGASVKVSCKVSGHTLSELSINWVRHVPGKGLEWMGGLDPEDGEAIHEPKFQGRLTMTEDTSTDTAYVELSSLRSEDTAMYYCATADPFKVAQDEGLYVIFDYWGQGTLVTVSSASTKG

SEQ ID NO: 27442 - protein, 229 aa, Artificial Sequence
  source: /note="Description of Artificial Sequence: Synthetic polypeptide"
QGQLVQSGGGVKKPGTSVTISCLASEYTFNEFVIHWIRQAPGQGPVWLGLIKRSGRLMTSYKFQDRLSLRRDRSTGTVFMELRGLRLDDTAVYYCARDGLGEVAPAYLYGIDAWGQGSTVIVTSASTKGPSVFPLAPSSKSTSGGTAALGCLVKDYFPEPVTVSWNSGALTSGVHTFPAVLQSSGLYSLSSVVTVPSSSLGTQTYICNVNHKPSNTKVDKKAEPKSCDK

SEQ ID NO: 27443 - protein, 129 aa, Artificial Sequence
  source: /note="Description of Artificial Sequence: Synthetic polypeptide"
QGQLVQSGGGVKKPGTSVTISCLASEYTFNEFVIHWIRQAPGQGPVWLGLIKRSGRLMTSYKFQDRLSLRRDRSTGTVFMELRGLRLDDTAVYYCARDGLGEVAPAYLYGIDAWGQGSTVIVTSASTKG

SEQ ID NO: 27444 - protein, 126 aa, Artificial Sequence
  source: /note="Description of Artificial Sequence: Synthetic polypeptide"
EVQLVESGGGVVQPGRSLRLSCAASGFTFSHHGIHWVRQAPGEGLEWVAVISEDGTNIHYEDSVRGRFTISRDNSKNTVDLQMNSLRAEDTAVYYCASLISMRDGDAFDLWGQGTRVTVSSASTKG

SEQ ID NO: 27445 - protein, 138 aa, Artificial Sequence
  source: /note="Description of Artificial Sequence: Synthetic polypeptide"
QVQLVQSGAEVRKPGSSLKVSCKSSGGTFSRYVVNWVRQAPGQGLEWMGGIIPIFGIAKYAQKFQDRVTMTADESKNTVYLDFSSLRSDDTAVYYCARDRGDTRLLDYGDYEDERYYYGMDVWGQGTTVIVSSASTKG

SEQ ID NO: 27446 - protein, 124 aa, Artificial Sequence
  source: /note="Description of Artificial Sequence: Synthetic polypeptide"
QVQLVQSGGGLVKPGGSLRLSCAASGFTFSSYSMNWVRQAPGKGLEWVSSISSSSSYIYYADSVKGRFTISRDNAKNSLYLQMNSLRAEDTAVYYCAREGSYYYGMDVWGQGTTVTVSSASTKG

SEQ ID NO: 27447 - protein, 129 aa, Artificial Sequence
  source: /note="Description of Artificial Sequence: Synthetic polypeptide"
QGQLVQSGGGVKKPGASVTISCLASEYTFNEFVIHWIRQAPGQGPLWLGLIKRSGRLMTAYKFQDRLSLRRDRSTGTVFMELRGLRPEDTAVYYCARDGLGEVAPDYRYGIDVWGQGSTVIVSAASTKG

SEQ ID NO: 27448 - protein, 130 aa, Artificial Sequence
  source: /note="Description of Artificial Sequence: Synthetic polypeptide"
EVQLVQSGGGLVQPGRSLRLSCAASGFTFDDYAMHWVRQAPGKGLEWVSGISWNSGTIGYADSVRGRFTISRDDAKSSLYLQMNSLRTEDTALYYCAKDGWVGSGSSTLRGSDYWGQGTLVTVSSASTKG

SEQ ID NO: 27449 - protein, 157 aa, Artificial Sequence
  source: /note="Description of Artificial Sequence: Synthetic polypeptide"
QIHLVQSGTDVKKPGSSVTVSCKAYGVNTFGLYAVNWVRQAPGQSLEYIGQIWRWKSSASHHFRGRVLISAVDLTGSSPPISSLEIKNLTSDDTAVYFCTTTSTYDQWSGLHHDGVMAFSSRGQGTLISVSAASTKGPSVFPLAPSSKSTYGLAHVL

SEQ ID NO: 27450 - protein, 138 aa, Artificial Sequence; identical to SEQ ID NO: 27423
  source: /note="Description of Artificial Sequence: Synthetic polypeptide"

SEQ ID NO: 27451 - protein, 125 aa, Artificial Sequence
  source: /note="Description of Artificial Sequence: Synthetic polypeptide"
QLQLQESGPGLVKPWETLVLTCSVSGGSISSGDYYWGWIRQSPGKGPEWIGNIFYSSGNTYYNTSLKSRVTISVDVSKNRFSLKLTSMTAADTAVYYCGRLSNKGWFDPWGQGTLVSVSSASTKG

SEQ ID NO: 27452 - protein, 127 aa, Artificial Sequence
  source: /note="Description of Artificial Sequence: Synthetic polypeptide"
QVQLLESGGGLVQRGGSLRLSCTASGFVFNNYWMTWVRQAPGNGLEWVANIDQDGSEKHYLDSVKGRFTISRDNAKNSLYLQMNSLRAEDTAIYYCARVRFKVTAWHRFDSWGQGDLVTVSSTSTKG

SEQ ID NO: 27453 - protein, 132 aa, Artificial Sequence
  source: /note="Description of Artificial Sequence: Synthetic polypeptide"
LVQLLQSGAEVKKPGASVKVSCKVSGYTLTELSIHWVRQAPGKGLEWMGGFDPEDDEAIYEPKFQGRLTMTEDTSTDTAYMELSSLRSEDTAVYYCATADPFKVAQDEGLYVIFDYWGQGTLVTVSSASTKG

SEQ ID NO: 27454 - protein, 126 aa, Artificial Sequence
  source: /note="Description of Artificial Sequence: Synthetic polypeptide"
QVQLVESGGGLGQPGGSLRLSCAASGFTFRNYAMSWVRQAAGKGLEWVSGVSGGGDTTYYGDSVKGRFTISRDNSKNTLYLQMNNLRAEDTAVYYCAKDKGVWGSSDFDYWGQGTLVTVSSASTKG

SEQ ID NO: 27455 - protein, 132 aa, Artificial Sequence
  source: /note="Description of Artificial Sequence: Synthetic polypeptide"
QVHLVQSGAEVKKPGASVRVSCKASGYTFTTYGISWVRQAPGQGLEWMGWISAHSGDTNYAQKLQARVTMTTDTSTNTAYMELRSLTSDDTAVYYCARDRPRHYYDRGGYYSPFDYWGQGTLVTVSSASTKG

SEQ ID NO: 27456 - protein, 139 aa, Artificial Sequence
  source: /note="Description of Artificial Sequence: Synthetic polypeptide"
QVQLVESGAEVKKPGSSVKVSCKASGGTFNIFAFSWVRQAPGQGLEWMGGIIPIFASPNYAQRFQGRVTITADESTSTVHMELSSLRSEDTAIYYCAKDAHMHIEEPRDYDYIWGTSPYYFDYWGQGTLVTVSSASTKG

SEQ ID NO: 27457 - protein, 132 aa, Artificial Sequence
  source: /note="Description of Artificial Sequence: Synthetic polypeptide"
QVQLVQSGAEVKKPGASVKVSCKVSGYTLTELSIHWVRQAPGKGLEWMGGFDSEDGEAFYKQNFQGRVTMTEDTSTDTAYMELRRLRSEDTAVYYCATADRFKVAQDEGLFVIFDYWGQGTLVTVSSASTKG

SEQ ID NO: 27458 - protein, 132 aa, Artificial Sequence
  source: /note="Description of Artificial Sequence: Synthetic polypeptide"
QVQLLQSGGEVKKPGASVKVSCKVSGYTLTELSIHWVRQAPGKGLEWMGGFDPEDDEAIYEPKFQGRLTMTEDTSTDTAYMELSSLRSEDTAVYYCATADPFKVAQDEGLYVIFDYWGQGTLVTVSSASTKG

SEQ ID NO: 27459 - protein, 135 aa, Artificial Sequence
  source: /note="Description of Artificial Sequence: Synthetic polypeptide"
EVQLVESGGGLVQPGGSLRLSCAASGFTFSSYSMNWVRQAPGKGLEWVSYISGSSYTIYYADSVRGRFTISRDNAKNSLYLQMNSLRDEDTAVYFCARATPPNPLNLYNYDSSGSSFDYWGQGTLVTVSSASTKG

SEQ ID NO: 27460 - protein, 138 aa, Artificial Sequence
  source: /note="Description of Artificial Sequence: Synthetic polypeptide"
QVQLVQSGAEVRKPGSSLKVSCKSSGGTFSRYVVNWVRQAPGQGLEWMGGMIPIFGIAKYAQKFQDRVTMTADESKNTVYLDFSSLRSDDTAVYYCARDRGDTRLLDYGDYEDERYYYGMDVWGQGTTVIVSSASTKG

SEQ ID NO: 27461 - protein, 138 aa, Artificial Sequence
  source: /note="Description of Artificial Sequence: Synthetic polypeptide"
QVQLVESGAEVRKPGSSLKVSCKSSGGTFSRYVVNWVRQAPGQGLEWMGGIIPIFGIAKYAQKFQDRVTMTADEPKNTVYLDFNSLRSDDTAVYYCARDRGDTRLLDYGDYEDERYYYGMDVWGQGTTVIVSSASTKG

SEQ ID NO: 27462 - protein, 124 aa, Artificial Sequence
  source: /note="Description of Artificial Sequence: Synthetic polypeptide"
QVQLVQSGAEIKKPGESLKISCKASGYTFNDYWIGWVRQMPGKGLEWMGIFYPDDSDSNYSPSFQGRVTISADKSITTAYLQWSTLKASDSAMYFCARLLGDSGAFDIWGQGTMVIVSSASTKG

SEQ ID NO: 27463 - protein, 138 aa, Artificial Sequence
  source: /note="Description of Artificial Sequence: Synthetic polypeptide"
EVQLVESGAEVRKPGSSLKVSCKSSGGTFSRFVVNWVRQAPGQGLEWMGGMIPIFGIAKYAQKFQDRVTMTADESKNTVYLDFSSLRSDDTAVYYCARDRGDTRLLDYGDYEDERYYYGMDVWGQGTTVIVSSASTKG

SEQ ID NO: 27464 - protein, 135 aa, Artificial Sequence
  source: /note="Description of Artificial Sequence: Synthetic polypeptide"
QVQLVQSGAEVKKPGSSVKVSCKASGGTFSTYAFSWVRQAPGQGLEWMGGIIPIFGTENYAQKFQGRVTITADKSTSTAYMELSSLRSEDTAVYYCARDRSSAIGYCSSISCYKGSFDIWGQGTMVTVSSASTKG

SEQ ID NO: 27465 - protein, 138 aa, Artificial Sequence
  source: /note="Description of Artificial Sequence: Synthetic polypeptide"
QVQLVQSGAEVRKPGSSLKVSCKSSGGTFSRFVVNWVRQAPGQGLEWMGGMIPIFGIAKYAQKFQDRVTMTADESKNTVYLDFSSLRSDDTAVYYCARDRGDTRLLDYGDYEDERYYYGMDVWGQGTTVIVSSASTKG

SEQ ID NO: 27466 - protein, 126 aa, Artificial Sequence
  source: /note="Description of Artificial Sequence: Synthetic polypeptide"
QVQLVQSGGGVVQPGRSLRLSCAASGFTFSHHGIHWVRQAPGEGLEWVAVISEDGTNIHYEDSVRGRFTISRDNSKNTVDLQMNSLRAEDTAVYYCASLISMRDGDAFDLWGQGTRVTVSSASTKG

SEQ ID NO: 27467 - protein, 133 aa, Artificial Sequence
  source: /note="Description of Artificial Sequence: Synthetic polypeptide"
EVQLVQSGGGLVKPGGSLRLSCAASGFTFKNAWMSWVRQAPGKGLEWVGHIKSKTDGGTIDYAAPVKGRFTISRDDSKNTLYLQMNSLKIEDTAVYYCTTDIGSGRGWDFHYYDSNDWGQGTLVTVSSASTKG

SEQ ID NO: 27468 - protein, 131 aa, Artificial Sequence
  source: /note="Description of Artificial Sequence: Synthetic polypeptide"
EVQLVQSGGGVVQPGRSLRLSCVVSGFTFSSFTFHWVRQAPGKGLEWVAGMSFHATYIYYADSVKGRFTISRDDSQDTLYLEMDSLRSEDTAIYYCARDPGIHDYGDYAPGAFDYWGQGSPVTVSSASTKG

SEQ ID NO: 27469 - protein, 132 aa, Artificial Sequence
  source: /note="Description of Artificial Sequence: Synthetic polypeptide"
LVQLVQSGAEVKKPGASVKVSCKVSGHTLSELSINWVRHVPGKGLEWMGGLDPEDGEAIHEPKFQGRLTMTEDTSTDTAYSTLSVWAPVAAAMYYCATADPFKVAQDEGLYVIFDYWGQGTLVTVSSASTKG

SEQ ID NO: 27470 - protein, 125 aa, Artificial Sequence
  source: /note="Description of Artificial Sequence: Synthetic polypeptide"
EVQLVESGAEVKKPGSSVKVSCKASGGTFSSYSISWVRQAPGQGLEWMGGIIPIFATTHYGQKFQGRIKITADKSTSTAYMELSRLRSEDTAVYYCARDREFYFYGMDVWGQGTTVTVSSASTKG

SEQ ID NO: 27471 - protein, 131 aa, Artificial Sequence
  source: /note="Description of Artificial Sequence: Synthetic polypeptide"
QVQLQQWGAGLLKPSETLSLTCAVYAGSFSGYYWTWIRQPPGKGLEWIGEVNHGGSTNYNPSLKSRVTLSVDTSKNQFSLKLTSVTAADTAVYYCARVSRYDFWSGNYGSYGLDVWGQGTTVTVSSASTKG

SEQ ID NO: 27472 - protein, 137 aa, Artificial Sequence
  source: /note="Description of Artificial Sequence: Synthetic polypeptide"
WQLVQSGAEVRKPGSSLKVSCKSSGGTFSRFVVNWVRQAPGQGLEWMGGMIPIFGIAKYAQKFQDRVTMTADESKNTVYLDFSSLRSDDTAVYYCARDRGDTRLLDYGDYEDERYYYGMDVWGQGTTVIVSSASTKG

SEQ ID NO: 27473 - protein, 154 aa, Artificial Sequence
  source: /note="Description of Artificial Sequence: Synthetic polypeptide"
LVQLVQSGAEVKKPGASVKVSCKVSGYSLTELSIHWVRQAPGKGLEWMGGFDSEDGEAIYKQNFQGRVTMTEDTSTDTAYMELSRLRSEDTAVYYCATADPFKVAQDEGLFVIFDYWGQGTTGHRLLSLHQGPHRLYSLGTLLSRAPIVQTHMA

SEQ ID NO: 27474 - protein, 135 aa, Artificial Sequence; identical to SEQ ID NO: 27464
  source: /note="Description of Artificial Sequence: Synthetic polypeptide"

SEQ ID NO: 27475 - protein, 135 aa, Artificial Sequence
  source: /note="Description of Artificial Sequence: Synthetic polypeptide"
QVQLVQSGAEVKKPGSSVKVSCKASGGTFSTYAFSWVRQAPIEGLEWMGGIIPIFGTENYAQKFQGRVTITADKSTSTAYMELSSLRSEDTAVYYCARDRSSAIGYCSSISCYKGSFDIWGQGTMVTVSSASTKG

SEQ ID NO: 27476 - protein, 129 aa, Artificial Sequence; identical to SEQ ID NO: 27420
  source: /note="Description of Artificial Sequence: Synthetic polypeptide"

SEQ ID NO: 27477 - protein, 132 aa, Artificial Sequence
  source: /note="Description of Artificial Sequence: Synthetic polypeptide"
QVQLVQWGAGLLKPLETLSLTCAVYGGSFNGYFWSWIRQTPGKGLEWIGEINHGGSANFNPSLKSRVTMSVDTSKNQFSLKLASVTAADTAIYYCARGRITMVRGDPQRGGVRMDVWGQGTSVTVSSASTKG

SEQ ID NO: 27478 - protein, 132 aa, Artificial Sequence
  source: /note="Description of Artificial Sequence: Synthetic polypeptide"
QVQLMQSGAEVKRPGASVKVSCKAFRHSLNNLGISWIRRAPGRGLEWLGWINVYEGNTKYGRRFQGRVTMTTDRSTNTVSMELRSLTSDDTAVYYCARDNHFWSGSSRYYYFGMDVWGQGTTVIVSSASTKG

SEQ ID NO: 27479 - protein, 125 aa, Artificial Sequence
  source: /note="Description of Artificial Sequence: Synthetic polypeptide"
QVQLVQSGGGLVQPGESLRLSCTASGFTFSSYNMNWVRQAPGKGLEWISYISDKSKNKYYADSVRGRFTISRDNAQNSLFLQMSSLRDEDTAVYYCTREGPQRSFYFDYWGQGIQVTVSSASTKG

SEQ ID NO: 27480 - protein, 126 aa, Artificial Sequence
  source: /note="Description of Artificial Sequence: Synthetic polypeptide"
QVQLQESGPGLVKPSETLSLTCTVSGGSISNHYWSWIRQPPGKGLEWIGYIYHSGNINYKSSLKSRATISIDTSNNQFSLKLSSVIAADTAVYYCARNFGPGSPNYGMDVWGQGTTVTVSSASTKG

SEQ ID NO: 27481 - protein, 130 aa, Artificial Sequence
  source: /note="Description of Artificial Sequence: Synthetic polypeptide"
VVQLVQSGPGLVKPSQTLSLTCTVSGGSISSGDFYWSWIRQPPGKGLEWIGYIYYSGSTYYNPSLKSRLTISVDTSKNQFSLRLSSVTAADTAVYYCARDLNSRIVGALDAFDIWGQGTMVTVSSASTKG

SEQ ID NO: 27482 - protein, 129 aa, Artificial Sequence
  source: /note="Description of Artificial Sequence: Synthetic polypeptide"
QVQLVESGGALVQPGGSLRLSCAASGFSFSSYAMSWVRQAPGKGLEWVSAISRSGGSTYYADSVKGRFTISIDNSNNTLYLQMNSLRVEDTAVYYCAKREAFYYGAGGYGMDVWGQGTTVTVSSASTKG

SEQ ID NO: 27483 - protein, 130 aa, Artificial Sequence
  source: /note="Description of Artificial Sequence: Synthetic polypeptide"
EVQLVESGGGLVKPGGSLRLSCEASGFTFTNAWMNWVRQAPGKGLEWVGRIKSQTHGGTTRYAAPVKGRFTISRDDSKHTLYLQMDRLTTEDTAVYYCTGTITGSTFYYYGMDVWGQGTTVTVSPASTKG

SEQ ID NO: 27484 - protein, 132 aa, Artificial Sequence
  source: /note="Description of Artificial Sequence: Synthetic polypeptide"
EVQLVESGGGLLQPGGSLRLSCAASGFSFNDFEMNWVRQAPGKGLEWVSYISNDGTMIHYADSVKGRFTISRDNAKKSLFLQMNSLRAEDTAVYYCARLAEVPPAIRGSYYYGMDVWGQGTTVTVASASTKG

SEQ ID NO: 27485 - protein, 132 aa, Artificial Sequence
  source: /note="Description of Artificial Sequence: Synthetic polypeptide"
GVHFQGHLVQSGGGVKKPGSSVTISCLASEYTFTEFTIHWIRQAPGQGPLWLGLIKRSGRLMTSYRFQDRLSLRRDRSTGTVFMELRGLRIDDTAVYYCARDGLGEVAPAYLYGIDVWGQGSTVIVTSASTS

SEQ ID NO: 27486 - protein, 123 aa, Artificial Sequence
  source: /note="Description of Artificial Sequence: Synthetic polypeptide"
QVQLQESGPGLLRPLETLSLTCSVSGGSIRGYFWSWVRQPAGRGLEWIGRIYSSGTTRFNPSLKSRVRLSIDTAKSEVSLNITSVTAADSASYFCAGTSPVHGGLDLWGLGLRVTVSSASTKG

SEQ ID NO: 27487 - protein, 135 aa, Artificial Sequence
  source: /note="Description of Artificial Sequence: Synthetic polypeptide"
HLVQSGTEVKKPGSSVTVSCKAYGVNTFGLYAVNWVRQAPGQSLEYIGQIWRWKSSASHHFRGRVLISAVDLTGSSPPISSLEIKNLTSDDTAVYFCTTTSTYDQWSGLHHDGVMAFSSWGQGTLISVSAASTKG

SEQ ID NO: 27488 - protein, 129 aa, Artificial Sequence
  source: /note="Description of Artificial Sequence: Synthetic polypeptide"
QGQLVQSGGGVKKPGTSVTISCLASEYTFTEFTIHWIRQAPGQGPLWLGLIKRSGRLMTAYRFQDRLSLRRDRSTGTVFMELRNLRMDDTAVYYCARDGLGELAPAYQYGIDVWGQGTTVIVSSASTKG

SEQ ID NO: 27489 - protein, 132 aa, Artificial Sequence
  source: /note="Description of Artificial Sequence: Synthetic polypeptide"
EVQLVQSGAEVKKPGASVKVSCKVSGYTLTELSIHWVRQAPGKGLEWMGGFDPEDDEAIYEPKFQGRLTMTEDTSTDTAYMELSSLRSEDTAVYYCATADPFKVAQDEGLYVIFDYWGQGTLVTVSSASTKG

SEQ ID NO: 27490 - protein, 129 aa, Artificial Sequence
  source: /note="Description of Artificial Sequence: Synthetic polypeptide"
QVQLVESGGGLVQPGGSLRLSCAASGFTFSTHWMHWVRQAPGKGLVWVSRIHSDGRSTSYADSVKGRFTISRDNAKNTLYLQMNSLRAEDTAVYYCARGAAVFGVVIIGGMDLWGQGTTVTVSSASTKG

SEQ ID NO: 27491 - protein, 127 aa, Artificial Sequence
  source: /note="Description of Artificial Sequence: Synthetic polypeptide"
EVQLVESGGGVVQPGGSLRLSCAASGFMFKNYAMHWVRQPPGKGLEWVAVIWYGGRDQNYADSVKGRFTISRDDSDNTLYLQMNSLRAGDTAVYFCARNSQVGRLMPAAGVWGQGTLVTVSSASTKG

SEQ ID NO: 27492 - protein, 123 aa, Artificial Sequence
  source: /note="Description of Artificial Sequence: Synthetic polypeptide"
EVQLVESGGGLIQRGGSLRLSCVASGFPVSDNHMSWVRQAPGKGLEWVSIIYSDGGTYYADSVKGRFTISRDNSKNTVYLQMNSLRATDTAVYYCARDPGFHYGLDVWGQGTTVTVSSASTKG

SEQ ID NO: 27493 - protein, 124 aa, Artificial Sequence
  source: /note="Description of Artificial Sequence: Synthetic polypeptide"
VVQLVESGGGLVQPGGSLRLSCAASGFAFRSYWMSWVRQAPGRGLEWVANIKQDGSEKYYADSVKGRFTISRDNTKNSLYLQMNSLRAEDTAVFYCASRGDRYGPIDYWGQGTLVTVSSASTKG

SEQ ID NO: 27494 - protein, 125 aa, Artificial Sequence
  source: /note="Description of Artificial Sequence: Synthetic polypeptide"
VVQLVESGTEVKKPGSSVKVSCKASGGTFSGSDISWVRQAPGQGLEWMGGIIPMFDIENHAEKFRGRLTITAVKSTGAAYMELSSLRSEDAAVYYCARSSGNYDFAYDIWGQGTRVIVSSASTKG

SEQ ID NO: 27495 - protein, 129 aa, Artificial Sequence; identical to SEQ ID NO: 27420
  source: /note="Description of Artificial Sequence: Synthetic polypeptide"

SEQ ID NO: 27496 - protein, 135 aa, Artificial Sequence; identical to SEQ ID NO: 27432
  source: /note="Description of Artificial Sequence: Synthetic polypeptide"

SEQ ID NO: 27497 - protein, 130 aa, Artificial Sequence
  source: /note="Description of Artificial Sequence: Synthetic polypeptide"
EVQLVQSGGGLVQPGGSLRLSCAASGLTFRNFAMSWVRQAPGKGLEWVSSISGSGGSTYYADSVKGRFTISRDNSKNTLYLQMNSLRGEDTAVYFCAKGVGYDILTGLGDAFDIWGQGTVVAVSSASTKG

SEQ ID NO: 27498 - protein, 137 aa, Artificial Sequence
  source: /note="Description of Artificial Sequence: Synthetic polypeptide"
QIHLVQSGTEVKKPGSSVTVSCKAYGVNTFGLYAVNWVRQAPGQSLEYIGQIWRWKSSASHHFRGRVLISAVDLTGSSPPISSLEIKNLTSDDTAVYFCTTTSTYDKWSGLHHDGVMAFSSWGQGTLISVSAASTKG

SEQ ID NO: 27499 - protein, 125 aa, Artificial Sequence
  source: /note="Description of Artificial Sequence: Synthetic polypeptide"
VVQLVQSGTEVKKPGSSVKVSCKASGGTFSGSDISWVRQAPGQGLEWMGGIIPMFDIEDHAQKFRGRLTITADKSTGAAYMELSSLRSEDAAVYYCARSSGNYDFAFDIWGQGTRLIVSSASTKG

SEQ ID NO: 27500 - protein, 132 aa, Artificial Sequence
  source: /note="Description of Artificial Sequence: Synthetic polypeptide"
QVQLGESGGGLVEPGGSLRLSCAASGFLFSDYQMSWIRLAPGKGLEWISFISGFGSVYYADSVEGRFTISRDNARNSLYLQMNNLRAEDTAVYYCARAYGTGNWRGLYYYYYGMDVWGHGTTVTVSSASTKG

SEQ ID NO: 27501 - protein, 122 aa, Artificial Sequence
  source: /note="Description of Artificial Sequence: Synthetic polypeptide"
QLQLVESGGGVVQPGRSLRLSCAASGFTFSTYTMHWVRQAPGKGLEWVAVISYDGTNKYYADSVKGRFTISRDNSKNTLYLQMNSLRGEDTAVYYCARSPSYYFDYWGQGTLVTVSAASTKG

SEQ ID NO: 27502 - protein, 129 aa, Artificial Sequence
  source: /note="Description of Artificial Sequence: Synthetic polypeptide"
QGHLVQSGGGVKKLGTSVTISCLASEDTFNEFVIHWIRQAPGQGPLWLGLIKRSGRLMTSYQFQDRLSLRRDRSTGTVFMELRGLRVDDTAVYYCARDGLGEVAPAYLYGIDAWGQGTTVIVTSASTKG

SEQ ID NO: 27503 - protein, 128 aa, Artificial Sequence
  source: /note="Description of Artificial Sequence: Synthetic polypeptide"
QVQLVQSGAEVKMPGASVKVSCKVSGYSLTELSIHWVRQAPGKRLEWMGGFDPEDDERIYAQKFQDRVTMTEDTSTDTAYMDLNSLRSEDTAVYYCTTGGLYCSSISCIMDVWGQGTTVIVSSASTKG

SEQ ID NO: 27504 - protein, 128 aa, Artificial Sequence
  source: /note="Description of Artificial Sequence: Synthetic polypeptide"
QVQLVQSGAEVKKPGASVKVSCKVSGYTLTELSIHWVRQAPGKRLEWMGGFDPEDGERIYAQKFQGRVTMTEDTSTDTAYMELNSLRSDDTAVYYCATGGLYCSSISCIMDVWGQGTTVTVSSASTKG

SEQ ID NO: 27505 - protein, 128 aa, Artificial Sequence
  source: /note="Description of Artificial Sequence: Synthetic polypeptide"
QVQLVQSGGGVKKPGTSASFSCRTSDDIYDNEFFDSAFMHWVRLIPGQRPEWMGWMNPRSGAVNYARQLQPRVSMYRDRDLSTAYMEFKSLTSADTGTYFCARKKRGDGFNLYFDLWGRGSQVIVSSA

SEQ ID NO: 27506 - protein, 126 aa, Artificial Sequence
  source: /note="Description of Artificial Sequence: Synthetic polypeptide"
QVQLVQSGSAMKKPGASVRVSCWTSEDIFDTTELIHWVRQAPGQGLEWIGWVKAVSGAVNYGSLDFRHRVSLTRDRDLSTAHMDIRGLTQDDTATYFCARQKFARGDQGWFFDLWGRGTLIVVSSA

SEQ ID NO: 27507 - protein, 129 aa, Artificial Sequence
  source: /note="Description of Artificial Sequence: Synthetic polypeptide"
QGQLVQSGGGVKKLGTSVTIPCLASEYTFNEFVIHWIRQAPGQGPLWLGLIKRSGRLMTSYQFQDRLSLRRDRSTGTVFMELRGLRVDDTAVYYCARDGLGEVAPAYLYGIDAWGQGTTVIVTSASTKG

SEQ ID NO: 27508 - protein, 129 aa, Artificial Sequence
  source: /note="Description of Artificial Sequence: Synthetic polypeptide"
QGQLVQSGGGVKKLGTSVTISCLASEYTFNEFVIHWIRQAPGQGPLWLGLIKRSGRLMTSYQFQDRLSLRRDRSTGTVFMELRGLRVDDTAVYYCARDGLGEVAPAYLYGIDAWGQGTTVIVTSASTKG

SEQ ID NO: 27509 - protein, 129 aa, Artificial Sequence
  source: /note="Description of Artificial Sequence: Synthetic polypeptide"
QVQLVESGGGVVQPGRSLRLSCAASGFTFSSYAMHWVRQAPGKGLEWVAVISYDGSNKYYADSVKGRFTISRDDSKSTVYLQINSLRAADTAVYFCAREGGLRFLEWLFWGQGTLVTVSSGESSASTKG

SEQ ID NO: 27510 - protein, 126 aa, Artificial Sequence
  source: /note="Description of Artificial Sequence: Synthetic polypeptide"
EFQLVQSGGGLVKPGGSLRLSCTGSTFSFSSDDMNWVRQAPGKGLEWVSSMSDSGSHIYYADFVKGRFTISRDNAKKSLYLQMNSLRAEDTAVYYCAQSRPPQRLYGMDVWGQGTTVTVSSASTKG

SEQ ID NO: 27511 - protein, 132 aa, Artificial Sequence
  source: /note="Description of Artificial Sequence: Synthetic polypeptide"
QVQLVQSGAEVKKPGASVKVSCKVSGYTLTELSIHWVRQAPGKGLEWMGGFDPEDGEASFEPKFQGRLTMTEDTSTDTAYMELSSLRSEDTAVYYCATADPFKVAQDEGLYVIFDYWGQGTLVTVSSASTKG

SEQ ID NO: 27512 - protein, 124 aa, Artificial Sequence
  source: /note="Description of Artificial Sequence: Synthetic polypeptide"
QVQLVESGGGVVQPGKSLRLSCAASGFTFSTHAMHWVRQAPGKGLDWVAVISHDGDNQYYADAVKGRFTISRDDSRDTVFLQMNSLRTEDTGVYYCAADSSGSNWFDYWGQGILVTVSSASTKG

SEQ ID NO: 27513 - protein, 129 aa, Artificial Sequence; identical to SEQ ID NO: 27420
  source: /note="Description of Artificial Sequence: Synthetic polypeptide"

SEQ ID NO: 27514 - protein, 121 aa, Artificial Sequence
  source: /note="Description of Artificial Sequence: Synthetic polypeptide"
EPMFQPGQSGGVVVQSGESLHLSCEASGFKFASQMMHWVRHVPGRGLEWVALISWDGSGKLFADSVRGRFTIHRWNDRNSLYLDVKNVRPEDAAIYYCTRNGFDVWGQGILVTVSSASTKG

SEQ ID NO: 27515 - protein, 132 aa, Artificial Sequence
  source: /note="Description of Artificial Sequence: Synthetic polypeptide"
QVQLLQSGAEVKKPGASVKVSCKVSGYTLTELSIHWVRQAPGKGLEWMGGFDPEDDEAIYEPKFQGRLTMTEDTSTDTAYMELSSLRSEDTAVYYCATADPFKVAQDEGLYVIFDYWGQGTLVTVSSASTKG

SEQ ID NO: 27516 - protein, 131 aa, Artificial Sequence
  source: /note="Description of Artificial Sequence: Synthetic polypeptide"
QVHLQESGPRLVRSSETLSLTCSVPGGSIVNPITNYYWSWIRQSPRKGLQWIGDIYYTGTSSRNPSLDSRVSISMDVSRKQISLTLYSVTAADTAVHYCASQSLSWYRPSGYFESWGQGILVTVSSASTKG

SEQ ID NO: 27517 - protein, 129 aa, Artificial Sequence; identical to SEQ ID NO: 27420
  source: /note="Description of Artificial Sequence: Synthetic polypeptide"

SEQ ID NO: 27518 - protein, 129 aa, Artificial Sequence
  source: /note="Description of Artificial Sequence: Synthetic polypeptide"
QGQLVQSGGGVKKTGTSVTISCLASEYTFTEFTIHWIRQAPGQGPLWLGLIKRSGRLMTANRFQDRLSLRRDRSTGTVFMELRSLRIDDTAVYYCARDGLGELAPAYHYGIDVWGQGTTIIVTSASTKG

SEQ ID NO: 27519 - protein, 128 aa, Artificial Sequence
  source: /note="Description of Artificial Sequence: Synthetic polypeptide"
QVQLVQSGAEVKKPGSSMKVSCKSSGGTFSNHAISWVRQAPGKGLEWMGGIIPMSGTTNYLQKFQGRVTITADEFATTAYMELSSLTSEDTAVYYCARARADSHTPIDAFDIWGPGTRVIVSSASTKG

SEQ ID NO: 27520 - protein, 129 aa, Artificial Sequence; identical to SEQ ID NO: 27518
  source: /note="Description of Artificial Sequence: Synthetic polypeptide"

SEQ ID NO: 27521 - protein, 125 aa, Artificial Sequence
  source: /note="Description of Artificial Sequence: Synthetic polypeptide"
QVQLVQSGTEVKKPGSSVKVSCKASGGTFSDSDIAWVRQAPGQGLEWMGGITPMFDMAKSAQKFRGRLIITADKSTGTAYMELSSLRYEDAAVYFCARSSGNFEFAFEIWGQGTKIIVSLASTKG

SEQ ID NO: 27522 - protein, 128 aa, Artificial Sequence
  source: /note="Description of Artificial Sequence: Synthetic polypeptide"
QVQLVQSGAEVKKPGASVKVSCKASGYTFTSYDINWVRQATGQGLEWMGWMNPNSGNTGYAQTFQGRVTMTRNTSISTAYMELSSLRSEDTAVYYCARDRWLPQYYYYGMDVWGQGTTVTVSSASTKG

SEQ ID NO: 27523 - protein, 134 aa, Artificial Sequence
  source: /note="Description of Artificial Sequence: Synthetic polypeptide"
FVQLVESGGGLVQPGGSLRLSCAASGFNFNTYWMNWVRQAPGKGLEWVANMKEDGSEKYYVDSVKGRFTISRDNAKNSLYLQMNSLRAEDTAVYYCARNPESRCIVGRNRGWCRYFDLWGRGSLVTVSPASTKG

SEQ ID NO: 27524 - protein, 129 aa, Artificial Sequence; identical to SEQ ID NO: 27488
  source: /note="Description of Artificial Sequence: Synthetic polypeptide"

SEQ ID NO: 27525 - protein, 141 aa, Artificial Sequence
  source: /note="Description of Artificial Sequence: Synthetic polypeptide"
LVQLVESGGGVVQPGRSLRLSCAASGFTFSTYAMHWVRQAPGKGLEWVAVISYDGSNKFYADSVKGRFTISRDNSKNTLYLQMNSLRAEDTAVYYCARPKFLPGADIVVVVAATPFDYWGQGNPGHRLLSFHQGPIGLPPG

SEQ ID NO: 27526 - protein, 129 aa, Artificial Sequence
  source: /note="Description of Artificial Sequence: Synthetic polypeptide"
QGQLVQSGGGGKKLGTSVTISCLASEYTFNEFVIHWIRQAPGQGPLWLGLIKRSGRLMTSYQFQDRLSLRRDRSTGTVFMELRGLRVDDTAVYYCARDGLGEVAPAYLYGIDAWGQGTTVIVSSASTKG

SEQ ID NO: 27527 - protein, 120 aa, Artificial Sequence
  source: /note="Description of Artificial Sequence: Synthetic polypeptide"
PMFQPGQSGGVVVQSGESLHLSCEASGFKFASQMMHWVRHVPGRGLEWVALISWDGSGKLFADSVRGRFTIHRWNDRNSLYLDVKNVRPEDAAIYYCTRNGFDVWGQGILVTVSSASTKG

SEQ ID NO: 27528 - protein, 132 aa, Artificial Sequence; identical to SEQ ID NO: 27441
  source: /note="Description of Artificial Sequence: Synthetic polypeptide"

SEQ ID NO: 27529 - protein, 137 aa, Artificial Sequence
  source: /note="Description of Artificial Sequence: Synthetic polypeptide"
QVQLVQSGAEVRKPGSSLKVSCKSSGGTFSRFWNWVRQAPGQGLEWMGGMIPIFGIAKYAQKFQDRVTMTADESKNTVYLDFSSLRSDDTAVYYCARDRGDTRLLDYGDYEDERYYYGMDVWGQGTTVIVSSASTKG

SEQ ID NO: 27530 - protein, 126 aa, Artificial Sequence
  source: /note="Description of Artificial Sequence: Synthetic polypeptide"
LVQLVESGGGVVQPGKSLRLSCATSGFTFSTYGMHWVRQAPGKGLEWVAVIWYDGSYKYYADSVKGRFTISRDNSKNTLFLQMNSLRAEDTAMYYCGREMAVGGTKALDHWGQGTLVTVSSASTKG

SEQ ID NO: 27531 - protein, 118 aa, Artificial Sequence
  source: /note="Description of Artificial Sequence: Synthetic polypeptide"
QVQLVQSGAEAKRPGDSVKVSCKASGYTFTEYYIHWVRQTPGQGFEWMGIITPGAGNTTYAQKFQGRITVTRDTSAATVYMELSNLTSEDTAVYFCSRGVSFWGQGTLVTVSSASTKG

SEQ ID NO: 27532 - protein, 122 aa, Artificial Sequence
  source: /note="Description of Artificial Sequence: Synthetic polypeptide"
QVQMVASGGGLVKPGGSLRLSCEASGFTFSDYYMSWVRQAPGKGLEWISYITSGGNALYYADSVKGRFTISRDNAKNSLYLQMNSLRAEDTAVYYCARDLLHAHDFGRQGTLVTVSSASTKG

SEQ ID NO: 27533 - protein, 127 aa, Artificial Sequence
  source: /note="Description of Artificial Sequence: Synthetic polypeptide"
QVQLVESGGGVVQPGRSLRLSCATSGFTSKNYGVHWVRQAPGKGLEWVAVIWYDGSNKFYADSVKGRFTISRDRSKNMVYLQMNSLRVEDTAIYYCARDSVAFVLEGPIDYWGQGTLVTVSSASTKG

SEQ ID NO: 27534 - protein, 129 aa, Artificial Sequence
  source: /note="Description of Artificial Sequence: Synthetic polypeptide"
QVQLVQSGAEVKKPGASVKVSCKASGYTFTDYYIHWVRQAPGQGLEWMGWINPSTGGTNFVQKFLGRVTMTSDTSINTAYMELRRLKNDDAAIYYCATYSTRQFFHYYYVTDVWGQGTTVTVSSASTKG

SEQ ID NO: 27535 - protein, 134 aa, Artificial Sequence
  source: /note="Description of Artificial Sequence: Synthetic polypeptide"
QVQLVQSGAEVKKPGSSVKVSCRASGGSFGNYAINWVRQAPMQGLEWMGGIIPIFGTTNYAQNFRGRVTINADTFTNTVNMDLSSLRSEDTAVYYCGRSINAAVPGLEGVYYYYGMAVWGQGTTVTVSSASTKG

SEQ ID NO: 27536 - protein, 134 aa, Artificial Sequence
  source: /note="Description of Artificial Sequence: Synthetic polypeptide"
QVQLHQWGAGLLKPSDTLSLTCGILGVSPPGSLTGYYWTWIRQPPGKGLEWIGEVYHSGSTNYNPSLASRVTISMGTTKTQFSLRLTSVTAADSAVYYCASGKVWGITARPRDAGLDVWGQGTTVTVTSASTKG

SEQ ID NO: 27537 - protein, 126 aa, Artificial Sequence
  source: /note="Description of Artificial Sequence: Synthetic polypeptide"
EVQVVESGGGLVQPGGSLRLSCVASGFTFSEYWMSWVRQAPGKGLEWVATIKRDGSEESYVDSVKGRFTISRDNAKNSLYLQMNSLRAEDTAVYYCARVRDPNYNLHFDSWGQGTLVTVSSASTKG

SEQ ID NO: 27538 - protein, 122 aa, Artificial Sequence
  source: /note="Description of Artificial Sequence: Synthetic polypeptide"
QVQLVESGGGLIQPGGSLRLSCEASGFAVGDINYMSWVRQAPGKGLEWVSVLYSGGSSQYADSVKGRFTISRDNSRNTLYLQMDNLRAEDTAVYYCARGLRVYFDLWGQGILVTVSSASTKG

SEQ ID NO: 27539 - protein, 135 aa, Artificial Sequence; identical to SEQ ID NO: 27464
  source: /note="Description of Artificial Sequence: Synthetic polypeptide"

SEQ ID NO: 27540 - protein, 125 aa, Artificial Sequence
  source: /note="Description of Artificial Sequence: Synthetic polypeptide"
QVQLQESGPGLVKPSETLSLTCTVSGGSISSRSYYWGWIRQPPGKGLEWVGSIYYTGSTYYSPSLKSRVTISVDTSQNQFSLKLNSVTAADTAVYYCARQKGSGTSLLYWGQGTLVTVSSASTKG

SEQ ID NO: 27541 - protein, 129 aa, Artificial Sequence
  source: /note="Description of Artificial Sequence: Synthetic polypeptide"
QVQLVQSGSELKKPGASVKVSCKASGYTFTSYAINWVRQAPGQGLEWMGWINTNTGNPTYAQGFTGRFVFSLETSVSTAYLQINSLKAEDTAVYYCARDLLESRTYYNDIRDCWGQGTLVTVSSASTKG

SEQ ID NO: 27542 - protein, 123 aa, Artificial Sequence
  source: /note="Description of Artificial Sequence: Synthetic polypeptide"
QVQLQESGSGLVKPSGTLSLTCAVSNGPISSGNWWSWVRQTPEKGLEWIGEVYHSGSTNHNPSLKSRATILVDKSKNQFSLNLRSVTAADTAVYYCARVRGSWNFDYWGQGILVTVSSASTKG

SEQ ID NO: 27543 - protein, 159 aa, Artificial Sequence [sequence omitted]

SEQ ID NO: 27544 - protein, 138 aa, Artificial Sequence; identical to SEQ ID NO: 27445
  source: /note="Description of Artificial Sequence: Synthetic polypeptide"

SEQ ID NO: 27545 - protein, 135 aa, Artificial Sequence; identical to SEQ ID NO: 27464
  source: /note="Description of Artificial Sequence: Synthetic polypeptide"

SEQ ID NO: 27546 - protein, 127 aa, Artificial Sequence
  source: /note="Description of Artificial Sequence: Synthetic polypeptide"
QVHLEESGPGLVKTSQTLSLTCSVSSYSISRSGYFWTWIRQRPGKGLEWIGYIYFNGRTTYNPSLKSRITISRDTSHSQFSLTLNSLSAADTAVYYCGRCQDGLASRPIDFWGQGTLVTVSSASTKG

SEQ ID NO: 27547 - protein, 127 aa, Artificial Sequence
  source: /note="Description of Artificial Sequence: Synthetic polypeptide"
QVQLVESGGGVVQPGKSLRLSCAISGFLFNNYGGQWVRQAPGKGLEWVAAISYDGNNRYYADSAKGRFLISRDTPKNILYLQIYSLRLDDTAVYYCARDSVSKSYSAPPEFWGQGTVVTVSSASTKG

SEQ ID NO: 27548 - protein, 129 aa, Artificial Sequence
  source: /note="Description of Artificial Sequence: Synthetic polypeptide"
QGQLVQSGGGVKKPGTSVTISCLASEYTFNEFVIHWIRQAPGQGPLWLGLIKRSGRLMTSYKFQDRLNLRRDRSTGTVFMELRGLRPDDTAVYYCARDGLGEVAPDYRYGIDVWGQGSTVIVTAASTKG

SEQ ID NO: 27549 - protein, 134 aa, Artificial Sequence
  source: /note="Description of Artificial Sequence: Synthetic polypeptide"
QLQLQESGPGLVKPSETLSLTCSVSDGSINSNSYYWAWIRQSPGKGLEWIGSVYYFGGTYYSPSLKSRVTMSVDRSKNQFSLNVSSVTAADTAIYYCARHVRPYDRSGYPERPNWFDPWGRGTLVTVSSASTKG

SEQ ID NO: 27550 - protein, 125 aa, Artificial Sequence
  source: /note="Description of Artificial Sequence: Synthetic polypeptide"
RVQLVQSGAEVKKPGSSVTVSCKASGGSFSSYAISWVRQAPGQGLEWVGGVKVMFGTVHYSQKVQGRVTITADDSTGTSYLELSGLRSADTAVYYCARNAGAYFYPFDIWGQGTLIIVSSASTKG

SEQ ID NO: 27551 - protein, 136 aa, Artificial Sequence
  source: /note="Description of Artificial Sequence: Synthetic polypeptide"
QVQLVQSGAEVKKPGASVKVSCKASGYTFTRYHIHWVRHAPGQGLEWMGKINPSRASTKYAKKFQDRVTMTRDTSTSTVYMELSSLRGDDTAVYYCGREMGTFTLLGVVIDHYDFYPMDVWGQGTPVTVSSASTKG

SEQ ID NO: 27552 - protein, 138 aa, Artificial Sequence
  source: /note="Description of Artificial Sequence: Synthetic polypeptide"
QVQLVQSGAEVRKPGSSLKVSCKSSGGTFSRYVVNWVRQAPGQGLEWMGGIIPIFGIAKYAQKFQDRVTMTADESKNTVYLDFSSLRSGDTAVYYCARDRGDTRLLDYGDYEDERYYYGMDVWGQGTTVTVSSASTKG

SEQ ID NO: 27553 - protein, 124 aa, Artificial Sequence
  source: /note="Description of Artificial Sequence: Synthetic polypeptide"
QAGGGMKKPGASMTVSCKTADEDIFDAAYMHWVRQAPGQTFEWLGWMKPVTGAVNYARQFQGRVSFYRTRELGIAYMDLRDLKFDDTAVYYCARRLPSYYYDSSVMSGDYWGQGTLVTVSSAST

SEQ ID NO: 27554 - protein, 124 aa, Artificial Sequence
  source: /note="Description of Artificial Sequence: Synthetic polypeptide"
QSGGGVKKPGASASFSCRTSEDPFDNEFFDSEFMHWVRLTPGQRPEWMGWMNPRSGGVNYAGQFRPRMSMWRDRELSTAYMELRDLTFADTGLYFCARRKEDDYDWYYDLWGRGAHIIVSAAST

SEQ ID NO: 27555 - protein, 126 aa, Artificial Sequence
  source: /note="Description of Artificial Sequence: Synthetic polypeptide"
QSGLEVKKPGASVRVSCWTSEDIFDTTELIYWVRQAPGQGLEWIGWVKIVSGTVNFASLDFRNRISLSRDRDLSTAHMDIRGLTQDDTATYFCARQKFASRYSGDQGSYFDLWGRGTLIIVSSAST

SEQ ID NO: 27556 - protein, 123 aa, Artificial Sequence
  source: /note="Description of Artificial Sequence: Synthetic polypeptide"
QSGSAMKKPGASVRVSCWTSEDIFDTTELIYWVRQAPGQGLEWIGWVKIVSGTVNFASLDFRNRISLSRDRDLFTAHMDIRGLTQGDTATYFCARQKFYAGGQGWYFDLWGRGTLIVVSSAST

SEQ ID NO: 27557 - protein, 120 aa, Artificial Sequence
  source: /note="Description of Artificial Sequence: Synthetic polypeptide"
QSGSGVKKLGASVRVSCWTSEDIFERTELIHWVRQAPGQGLEWIGWVKAVSGAVNYAQDFKGRVAMTRDTSINTAYMQLAGLRSDDTAVYFCARDGGTGPPRYFLYWGQGTLLTVSSAST

SEQ ID NO: 27558 - protein, 125 aa, Artificial Sequence
  source: /note="Description of Artificial Sequence: Synthetic polypeptide"
QAGGGMKKPGASMTVSCKTADEDVFDAAYMHWVRQAPGQTFEWLGWMKPVTGAVNYARKFQGRVSFYRTRELGIAYMDLRDPKFDDTAVYFCARKTKGDVSGDGRGFFFDLWGRGTRVIISSAST

SEQ ID NO: 27559 - protein, 123 aa, Artificial Sequence
  source: /note="Description of Artificial Sequence: Synthetic polypeptide"
EIVLTQSPATLSLSPGERATLSCRASQGLNFVVWYQQKRGQAPRLLIHAPSGRAPGVPDRFSARGSGTEFSLVISSVEPDDFAIYYCQEYSSTPYNFGPGTRVDRKRTVAAPSVFIFPPSDEQ

SEQ ID NO: 27560 - protein, 222 aa, Artificial Sequence
  source: /note="Description of Artificial Sequence: Synthetic polypeptide"
EVNLEESGGGLVQPGGSMKLSCVASGFTFSNYWMNWVRQSPEKGLEWVADIRLKSNNYATLYAESVKGRFTISRDDSKSSVYLQMNNLRAEDTGIYYCTRGAYYRYDYAMDYWGQGTSVTVSSAKTTPPSVYPLAPGSAAQTNSMVTLGCLVKGYFPEPVTVTWNSGSLSSGVHTFPAVLQSDLYTLSSSVTVPSSPRPSETVTCNVAHPASSTKVDKKIVP

SEQ ID NO: 27561 - protein, 230 aa, Artificial Sequence
  source: /note="Description of Artificial Sequence: Synthetic polypeptide"
QVQLVQSGAEVKKPGASVKVSCQASGYRFSNFVIHWVRQAPGQRFEWMGWINPYNGNKEFSAKFQDRVTFTADTSANTAYMELRSLRSADTAVYYCARVGPYSWDDSPQDNYYMDVWGKGTTVIVSSASTKGPSVFPLAPSSKSTSGGTAALGCLVKDYFPEPVTVSWNSGALTSGVHTFPAVLQSSGLYSLSSVVTVPSSSLGTQTYICNVNHKPSNTKVDKKAEPKSC

SEQ ID NO: 27562 - protein, 234 aa, Artificial Sequence
  source: /note="Description of Artificial Sequence: Synthetic polypeptide"
EVQLSESGGGFVKPGGSLRLSCEASGFTFNNYAMGWVRQAPGKGLEWVSVTSAHGGSAYFGEFVKGRFTMSRDHFIDTVYLEMNRLTVEDTAVYYCVRVTFYHEGSGYYYRAGNYFDSWGQGTLVIVSAASTKGPSVFPLAPSSKSTSGGTAALGCLVKDYFPEPVTVSWNSGALTSGVHTFPAVLQSSGLYSLSSVVTVPSSSLGTQTYICNVNHKPSNTKVDKKVEPKSCDK

SEQ ID NO: 27563 - protein, 226 aa, Artificial Sequence
  source: /note="Description of Artificial Sequence: Synthetic polypeptide"
  MOD_RES (1)..(1): Any amino acid
XVRLVQSGNQVRKPGASVRISCEASGYKFIDHFIHWVRQVPGHGLEWLGWINPRGGGVNYSRSFQGKLSMTMTRDNFEETAYLDLSKLNPGDTAVYFCARGFAGYEWSFIWGQGTLVIVSSASTKGPSVFPLAPSSKSTSGGTAALGCLVKDYFPEPVTVSWNSGALTSGVHTFPAVLQSSGLYSLSSVVTVPSSSLGTQTYICNVNHKPSNTKVDKKVEPKSCDK

SEQ ID NO: 27564 - protein, 474 aa, Artificial Sequence
  source: /note="Description of Artificial Sequence: Synthetic polypeptide"
EVQVVESGGGVVQPGRSLRLSCTASGFTFSNFAMGWVRQAPGKGLEWVAFISSDGSNKNYGDSVKGRFTISRDNSKNTVFLQMNSLRVEDTALYYCAKDVGDYKSDEWGTEYYDISISYPIQDPRAMVGAFDLWGQGTMVTVSPASTKGPSVFPLAPSSKSTSGGTAALGCLVKDYFPEPVTVSWNSGALTSGVHTFPAVLQSSGLYSLSSVVTVPSSSLGTQTYICNVNHKPSNTKVDKKVEPKSCDKTHTCPPCPAPELLGGPSVFLFPPKPKDTLMISRTPEVTCVVVDVSHEDPEVKFNWYVDGVEVHNAKTKPREEQYNSTYRVVSVLTVLHQDWLNGKEYKCKVSNKALPAPIEKTISKAKGQPREPQVYTLPPSRDELTKNQVSLTCLVKGFYPSDIAVEWESNGQPENNYKTTPPVLDSDGSFFLYSKLTVDKSRWQQGNVFSCSVMHEALHNHYTQKSLSLSPGK

SEQ ID NO: 27565 - protein, 474 aa, Artificial Sequence
  source: /note="Description of Artificial Sequence: Synthetic polypeptide"
EVQLVESGGGVVQPGRSLRLSCAASQFSFGNYGMHWVRQAPGKGLEWVAAISFAGTKTNYADSVKGRFTISRDNSKNTVYLQMNSLRAEDTALYFCAKDIREYECEYWTSDYYDFGRPQPCIDSRGVVGTFDVWGQGTMVTVSSASTKGPSVFPLAPSSKSTSGGTAALGCLVKDYFPEPVTVSWNSGALTSGVHTFPAVLQSSGLYSLSSVVTVPSSSLGTQTYICNVNHKPSNTKVDKKVEPKSCDKTHTCPPCPAPELLGGPSVFLFPPKPKDTLMISRTPEVTCVVVDVSHEDPEVKFNWYVDGVEVHNAKTKPREEQYNSTYRVVSVLTVLHQDWLNGKEYKCKVSNKALPAPIEKTISKAKGQPREPQVYTLPPSRDELTKNQVSLTCLVKGFYPSDIAVEWESNGQPENNYKTTPPVLDSDGSFFLYSKLTVDKSRWQQGNVFSCSVMHEALHNHYTQKSLSLSPGK

SEQ ID NO: 27566 - protein, 474 aa, Artificial Sequence
  source: /note="Description of Artificial Sequence: Synthetic polypeptide"
EVQLVESGGGVVQPGKSLRLSCAASRFSFNRYGMHWVRQAPGKGLEWVAAISYDGTDKYHADKVWGRFTISRDNSKNTLYLQMNSLRAEDTALYYCAKDLREDECEEWWSDYYDFGKQLPCRKSRGVAGIFDGWGQGTMVTVSSASTKGPSVFPLAPSSKSTSGGTAALGCLVKDYFPEPVTVSWNSGALTSGVHTFPAVLQSSGLYSLSSVVTVPSSSLGTQTYICNVNHKPSNTKVDKKVEPKSCDKTHTCPPCPAPELLGGPSVFLFPPKPKDTLMISRTPEVTCVVVDVSHEDPEVKFNWYVDGVEVHNAKTKPREEQYNSTYRVVSVLTVLHQDWLNGKEYKCKVSNKALPAPIEKTISKAKGQPREPQVYTLPPSRDELTKNQVSLTCLVKGFYPSDIAVEWESNGQPENNYKTTPPVLDSDGSFFLYSKLTVDKSRWQQGNVFSCSVMHEALHNHYTQKSLSLSPGK

SEQ ID NO: 27567 - protein, 474 aa, Artificial Sequence
  source: /note="Description of Artificial Sequence: Synthetic polypeptide"
EVQLVESGGGVVQPGKSLRLSCAASQFSFNRYGMHWVRQAPGKGLEWVAAISYDGTDKYHADKVWGRFTISRDNSKNTLYLQMNSLRAEDTALYYCAKDLREDECEEWWSDYYDFGKQLPCRKSRGVAGIFDKWGQGTMVIVSSASTKGPSVFPLAPSSKSTSGGTAALGCLVKDYFPEPVTVSWNSGALTSGVHTFPAVLQSSGLYSLSSVVTVPSSSLGTQTYICNVNHKPSNTKVDKKVEPKSCDKTHTCPPCPAPELLGGPSVFLFPPKPKDTLMISRTPEVTCVVVDVSHEDPEVKFNWYVDGVEVHNAKTKPREEQYNSTYRVVSVLTVLHQDWLNGKEYKCKVSNKALPAPIEKTISKAKGQPREPQVYTLPPSRDELTKNQVSLTCLVKGFYPSDIAVEWESNGQPENNYKTTPPVLDSDGSFFLYSKLTVDKSRWQQGNVFSCSVMHEALHNHYTQKSLSLSPGK

SEQ ID NO: 27568 - protein, 474 aa, Artificial Sequence
  source: /note="Description of Artificial Sequence: Synthetic polypeptide"
EVQLVESGGGVVQPGRSLRLSCAASHFSLSSYGMHWVRQAPGKGLEWVTGISFAGTKTYYGDSVRGRFTVSRDISKNTLFLQMNSLRPDDTAMYYCARDQRYYECEEWASDYYDFGREQPCLDPRGVVGIFDLWGQGTMVTVSSASTKGPSVFPLAPSSKSTSGGTAALGCLVKDYFPEPVTVSWNSGALTSGVHTFPAVLQSSGLYSLSSVVTVPSSSLGTQTYICNVNHKPSNTKVDKKVEPKSCDKTHTCPPCPAPELLGGPSVFLFPPKPKDTLMISRTPEVTCVVVDVSHEDPEVKFNWYVDGVEVHNAKTKPREEQYNSTYRVVSVLTVLHQDWLNGKEYKCKVSNKALPAPIEKTISKAKGQPREPQVYTLPPSRDELTKNQVSLTCLVKGFYPSDIAVEWESNGQPENNYKTTPPVLDSDGSFFLYSKLTVDKSRWQQGNVFSCSVMHEALHNHYTQKSLSLSPGK

SEQ ID NO: 27569 - protein, 475 aa, Artificial Sequence
  source: /note="Description of Artificial Sequence: Synthetic polypeptide"
EVQLIESGGGVVQPGRSLRLSCGASGFSFNNYGMHWVRQAPGKGLEWVAGISFAGIKKYYGTSVKGRFTISRDNSKNNFYLQMNSLRVEDTALYYCARDLRELECEEWTLYNYYDFGSRGPCVDPRGVAGSFDVWGQGTMVTVSSASTKGPSVFPLAPSSKSTSGGTAALGCLVKDYFPEPVTVSWNSGALTSGVHTFPAVLQSSGLYSLSSVVTVPSSSLGTQTYICNVNHKPSNTKVDKKVEPKSCDKTHTCPPCPAPELLGGPSVFLFPPKPKDTLMISRTPEVTCVVVDVSHEDPEVKFNWYVDGVEVHNAKTKPREEQYNSTYRVVSVLTVLHQDWLNGKEYKCKVSNKALPAPIEKTISKAKGQPREPQVYTLPPSRDELTKNQVSLTCLVKGFYPSDIAVEWESNGQPENNYKTTPPVLDSDGSFFLYSKLTVDKSRWQQGNVFSCSVMHEALHNHYTQKSLSLSPGK

SEQ ID NO: 27570 - protein, 474 aa, Artificial Sequence
  source: /note="Description of Artificial Sequence: Synthetic polypeptide"
EVQLVESGGGVVQPGRSLRLSCVGSQFSFNRYGMHWVRQAPGKGLEWVAGISFDGTDRYHADNVWGRFTISRDNSKNTLYLQMSSLRAEDTALYYCAKDLREDECEEWWSDYYDFGKKLPCRKSRGVAGVFDKWGQGTMVTVSSASTKGPSVFPLAPSSKSTSGGTAALGCLVKDYFPEPVTVSWNSGALTSGVHTFPAVLQSSGLYSLSSVVTVPSSSLGTQTYICNVNHKPSNTKVDKKVEPKSCDKTHTCPPCPAPELLGGPSVFLFPPKPKDTLMISRTPEVTCVVVDVSHEDPEVKFNWYVDGVEVHNAKTKPREEQYNSTYRVVSVLTVLHQDWLNGKEYKCKVSNKALPAPIEKTISKAKGQPREPQVYTLPPSRDELTKNQVSLTCLVKGFYPSDIAVEWESNGQPENNYKTTPPVLDSDGSFFLYSKLTVDKSRWQQGNVFSCSVMHEALHNHYTQKSLSLSPGK

SEQ ID NO: 27571 - protein, 476 aa, Artificial Sequence
  source: /note="Description of Artificial Sequence: Synthetic polypeptide"
EVQLVESGGGVVQPGRSLTLSCAASQFTFSNYGMHWVRQAPGKGLEWVASVSNDGTKKYHGDSVWGRFTISRDNSKNTLFLQMSSLRAEDTAVYFCVRDQREDECEEWWSDYYDFGRELPCRKFRGLGLAGIFDIWGHGTMVTVSSASTKGPSVFPLAPSSKSTSGGTAALGCLVKDYFPEPVTVSWNSGALTSGVHTFPAVLQSSGLYSLSSVVTVPSSSLGTQTYICNVNHKPSNTKVDKKVEPKSCDKTHTCPPCPAPELLGGPSVFLFPPKPKDTLMISRTPEVTCVVVDVSHEDPEVKFNWYVDGVEVHNAKTKPREEQYNSTYRVVSVLTVLHQDWLNGKEYKCKVSNKALPAPIEKTISKAKGQPREPQVYTLPPSRDELTKNQVSLTCLVKGFYPSDIAVEWESNGQPENNYKTTPPVLDSDGSFFLYSKLTVDKSRWQQGNVFSCSVMHEALHNHYTQKSLSLSPGK

SEQ ID NO: 27572 - protein, 476 aa, Artificial Sequence
  source: /note="Description of Artificial Sequence: Synthetic polypeptide"
EVQLVESGGGVVQPGRSLTLSCAASQFNFANYGMHWVRQAPGKGLEWVASISNDGTKKYHEESVWGRFTISKDNSKSTLFLQMNSLRIEDTALYFCVKDQREDECEEWWSDYYDFGRELPCRKSRGLGLAGIFDMWGHGTMVTVSSASTKGPSVFPLAPSSKSTSGGTAALGCLVKDYFPEPVTVSWNSGALTSGVHTFPAVLQSSGLYSLSSVVTVPSSSLGTQTYICNVNHKPSNTKVDKKVEPKSCDKTHTCPPCPAPELLGGPSVFLFPPKPKDTLMISRTPEVTCVVVDVSHEDPEVKFNWYVDGVEVHNAKTKPREEQYNSTYRVVSVLTVLHQDWLNGKEYKCKVSNKALPAPIEKTISKAKGQPREPQVYTLPPSRDELTKNQVSLTCLVKGFYPSDIAVEWESNGQPENNYKTTPPVLDSDGSFFLYSKLTVDKSRWQQGNVFSCSVMHEALHNHYTQKSLSLSPGK

SEQ ID NO: 27573 - protein, 474 aa, Artificial Sequence
  source: /note="Description of Artificial Sequence: Synthetic polypeptide"
QAILVESGGGVVQPGRSLRLSCAASQFTFSGHGLHWVRQAPGKGLEWVASISFAGTKMDYADSVKGRFAISRDNSKNTLYLQMNSLRVEDTALYYCAKDMREYECEYWTSDYYDFGRPQPCIDRRGVVGIFDMWGQGTMVTVSTASTKGPSVFPLAPSSKSTSGGTAALGCLVKDYFPEPVTVSWNSGALTSGVHTFPAVLQSSGLYSLSSVVTVPSSSLGTQTYICNVNHKPSNTKVDKKVEPKSCDKTHTCPPCPAPELLGGPSVFLFPPKPKDTLMISRTPEVTCVVVDVSHEDPEVKFNWYVDGVEVHNAKTKPREEQYNSTYRVVSVLTVLHQDWLNGKEYKCKVSNKALPAPIEKTISKAKGQPREPQVYTLPPSRDELTKNQVSLTCLVKGFYPSDIAVEWESNGQPENNYKTTPPVLDSDGSFFLYSKLTVDKSRWQQGNVFSCSVMHEALHNHYTQKSLSLSPGK

SEQ ID NO: 27574 - protein, 473 aa, Artificial Sequence
  source: /note="Description of Artificial Sequence: Synthetic polypeptide"
EVQLVESGGGVVPPGKSLTLSCVASRFTFSAFGMHWVRQAPGKGLEWVASISFAGIKKYYADSVKGRFSISRDNSNTLFLQMNGLRGEDTGLYHCVKDMRELECEEWASDYYDFGKPQPCLDRRGVSGISAWWGPGTMVTVSSASTKGPSVFPLAPSSKSTSGGTAALGCLVKDYFPEPVTVSWNSGALTSGVHTFPAVLQSSGLYSLSSVVTVPSSSLGTQTYICNVNHKPSNTKVDKKVEPKSCDKTHTCPPCPAPELLGGPSVFLFPPKPKDTLMISRTPEVTCVVVDVSHEDPEVKFNWYVDGVEVHNAKTKPREEQYNSTYRVVSVLTVLHQDWLNGKEYKCKVSNKALPAPIEKTISKAKGQPREPQVYTLPPSRDELTKNQVSLTCLVKGFYPSDIAVEWESNGQPENNYKTTPPVLDSDGSFFLYSKLTVDKSRWQQGNVFSCSVMHEALHNHYTQKSLSLSPGK

SEQ ID NO: 27575 - protein, 474 aa, Artificial Sequence
  source: /note="Description of Artificial Sequence: Synthetic polypeptide"
EVQLVQSGGGVVQPGRSLRLSCAAPYFEFGRYGFHWVRQAPGKGLEWVASISFAGRDYYHSPSVWGRFTISRDNSKNTLYLQMNSLRIEDTALYFCARDLRESECEEWESDYYDFGKKGPCVKPRGVAGGLDLWGQGTMVIVSSASTKGPSVFPLAPSSKSTSGGTAALGCLVKDYFPEPVTVSWNSGALTSGVHTFPAVLQSSGLYSLSSVVTVPSSSLGTQTYICNVNHKPSNTKVDKKVEPKSCDKTHTCPPCPAPELLGGPSVFLFPPKPKDTLMISRTPEVTCVVVDVSHEDPEVKFNWYVDGVEVHNAKTKPREEQYNSTYRVVSVLTVLHQDWLNGKEYKCKVSNKALPAPIEKTISKAKGQPREPQVYTLPPSRDELTKNQVSLTCLVKGFYPSDIAVEWESNGQPENNYKTTPPVLDSDGSFFLYSKLTVDKSRWQQGNVFSCSVMHEALHNHYTQKSLSLSPGK

SEQ ID NO: 27576 - protein, 494 aa, Artificial Sequence
  source: /note="Description of Artificial Sequence: Synthetic polypeptide"
MGWSCIILFLVATATGVHSQVQLVESGGGVVQPGTSLRLSCAASQFRFDGYGMHWVRQAPGKGLEWVASISHDGIKKYHAEKVWGRFTISRDNSKNTLYLQMNSLRPEDTALYYCAKDLREDECEEWWSDYYDFGKQLPCAKSRGGLVGIADNWGQGTMVTVSSASTKGPSVFPLAPSSKSTSGGTAALGCLVKDYFPEPVTVSWNSGALTSGVHTFPAVLQSSGLYSLSSVVTVPSSSLGTQTYICNVNHKPSNTKVDKKVEPKSCDKTHTCPPCPAPELLGGPSVFLFPPKPKDTLMISRTPEVTCVVVDVSHEDPEVKFNWYVDGVEVHNAKTKPREEQYNSTYRVVSVLTVLHQDWLNGKEYKCKVSNKALPAPIEKTISKAKGQPREPQVYTLPPSRDELTKNQVSLTCLVKGFYPSDIAVEWESNGQPENNYKTTPPVLDSDGSFFLYSKLTVDKSRWQQGNVFSCSVMHEALHNHYTQKSLSLSPGK

SEQ ID NO: 27577 - protein, 476 aa, Artificial Sequence
  source: /note="Description of Artificial Sequence: Synthetic polypeptide"
EVQLVESGGGIVQPGRSLTLSCVASQFAFSHYGMHWVRQAPGKGLEWVASISRDETKKYHGDSVWDRFSISRDNSKNTLFLQMNSLRAEDTALYFCVRDQREDECEEWWSDYYDFGKELPCRKFRGLGLAGIFDVWGHGTMVIVSSASTKGPSVFPLAPSSKSTSGGTAALGCLVKDYFPEPVTVSWNSGALTSGVHTFPAVLQSSGLYSLSSVVTVPSSSLGTQTYICNVNHKPSNTKVDKKVEPKSCDKTHTCPPCPAPELLGGPSVFLFPPKPKDTLMISRTPEVTCVVVDVSHEDPEVKFNWYVDGVEVHNAKTKPREEQYNSTYRVVSVLTVLHQDWLNGKEYKCKVSNKALPAPIEKTISKAKGQPREPQVYTLPPSRDELTKNQVSLTCLVKGFYPSDIAVEWESNGQPENNYKTTPPVLDSDGSFFLYSKLTVDKSRWQQGNVFSCSVMHEALHNHYTQKSLSLSPGK

SEQ ID NO: 27578 - protein, 476 aa, Artificial Sequence
  source: /note="Description of Artificial Sequence: Synthetic polypeptide"
QKQLVESGGGVVQPGRSLTLSCAASQFPFSHYGMHWVRQAPGKGLEWVASITNDGTKKYHGESVWDRFRISRDNSKNTLFLQMNSLRAEDTALYFCVRDQREDECEEWWSDYYDFGKELPCRKFRGLGLAGIFDIWGHGTMVIVSSASTKGPSVFPLAPSSKSTSGGTAALGCLVKDYFPEPVTVSWNSGALTSGVHTFPAVLQSSGLYSLSSVVTVPSSSLGTQTYICNVNHKPSNTKVDKKVEPKSCDKTHTCPPCPAPELLGGPSVFLFPPKPKDTLMISRTPEVTCVVVDVSHEDPEVKFNWYVDGVEVHNAKTKPREEQYNSTYRVVSVLTVLHQDWLNGKEYKCKVSNKALPAPIEKTISKAKGQPREPQVYTLPPSRDELTKNQVSLTCLVKGFYPSDIAVEWESNGQPENNYKTTPPVLDSDGSFFLYSKLTVDKSRWQQGNVFSCSVMHEALHNHYTQKSLSLSPGK

SEQ ID NO: 27579 - protein, 474 aa, Artificial Sequence
  source: /note="Description of Artificial Sequence: Synthetic polypeptide"
QVQLVESGGGVVQPGRSLRLSCAASGFTFSNYAMDWVRQAPGKGLEWVAVISSDGSNKNYADSVKGRFTISRDNSKNTLYLQMNSLRAEDTAVYYCAKDLGENKNDEWATDYYDLSIAYPVQDPRAVVGAFDIWGQGTMVTVSSASTKGPSVFPLAPSSKSTSGGTAALGCLVKDYFPEPVTVSWNSGALTSGVHTFPAVLQSSGLYSLSSVVTVPSSSLGTQTYICNVNHKPSNTKVDKKVEPKSCDKTHTCPPCPAPELLGGPSVFLFPPKPKDTLMISRTPEVTCVVVDVSHEDPEVKFNWYVDGVEVHNAKTKPREEQYNSTYRVVSVLTVLHQDWLNGKEYKCKVSNKALPAPIEKTISKAKGQPREPQVYTLPPSRDELTKNQVSLTCLVKGFYPSDIAVEWESNGQPENNYKTTPPVLDSDGSFFLYSKLTVDKSRWQQGNVFSCSVMHEALHNHYTQKSLSLSPGK

SEQ ID NO: 27580 - protein, 474 aa, Artificial Sequence
  source: /note="Description of Artificial Sequence: Synthetic polypeptide"
QVQLVESGGGVVQPGRSLRLSCAASGFTFSNFAMGWVRQAPGKGLEWVAFISSDGSNKNYGDSVKGRFTISRDNSKNTLFLQMNSLRAEDTALYYCAKDVGEYKSDEWATDYYDLSIAYPIQDPRAMVGAFDIWGQGTMVTVSSASTKGPSVFPLAPSSKSTSGGTAALGCLVKDYFPEPVTVSWNSGALTSGVHTFPAVLQSSGLYSLSSVVTVPSSSLGTQTYICNVNHKPSNTKVDKKVEPKSCDKTHTCPPCPAPELLGGPSVFLFPPKPKDTLMISRTPEVTCVVVDVSHEDPEVKFNWYVDGVEVHNAKTKPREEQYNSTYRVVSVLTVLHQDWLNGKEYKCKVSNKALPAPIEKTISKAKGQPREPQVYTLPPSRDELTKNQVSLTCLVKGFYPSDIAVEWESNGQPENNYKTTPPVLDSDGSFFLYSKLTVDKSRWQQGNVFSCSVMHEALHNHYTQKSLSLSPGK

SEQ ID NO: 27581 - protein, 474 aa, Artificial Sequence
  source: /note="Description of Artificial Sequence: Synthetic polypeptide"
QVQLVESGGGVVQPGRSLRLSCAASGFTFSSYGMHWVRQAPGKGLEWVAVISYDGSNKYYADSVKGRFTISRDNSKNTLYLQMNSLRAEDTAVYYCAKDLGESENEEWATDYYDFSIGYPGQDPRGVVGAFDIWGQGTMVTVSSASTKGPSVFPLAPSSKSTSGGTAALGCLVKDYFPEPVTVSWNSGALTSGVHTFPAVLQSSGLYSLSSVVTVPSSSLGTQTYICNVNHKPSNTKVDKKVEPKSCDKTHTCPPCPAPELLGGPSVFLFPPKPKDTLMISRTPEVTCVVVDVSHEDPEVKFNWYVDGVEVHNAKTKPREEQYNSTYRVVSVLTVLHQDWLNGKEYKCKVSNKALPAPIEKTISKAKGQPREPQVYTLPPSRDELTKNQVSLTCLVKGFYPSDIAVEWESNGQPENNYKTTPPVLDSDGSFFLYSKLTVDKSRWQQGNVFSCSVMHEALHNHYTQKSLSLSPGK

SEQ ID NO: 27582 - protein, 698 aa, Artificial Sequence
  source: /note="Description of Artificial Sequence: Synthetic polypeptide"
MNRGVPFRHLLLVLQLALLPAATQGKKVVLGKKGDTVELTCTASQKKSIQFHWKNSNQIKILGNQGSFLTKGPSKLNDRADSRRSLWDQGNFPLIIKNLKIEDSDTYICEVEDQKEEVQLLVFGLTANSDTHLLQGQSLTLTLESPPGSSPSVQCRSPRGKNIQGGKTLSVSQLELQDSGTWTCTVLQNQKKVEFKIDIVVLAFQKASGGGGSGGGGSLEAEAAAKEAAAKEAAAKEAAAKALEGGGGSGGGGSQVQLVQSGGGVFKPGGSLRLSCEASGFTFTEYYMTWVRQAPGKGLEWLAYISKNGEYSKYSPSSNGRFTISRDNAKNSVFLQLDRLSADDTAVYYCARADGLTYFSELLQYIFDLWGQGARVTVSSASTKGPSVFPLAPSSKSTSGGTAALGCLVKDYFPEPVTVSWNSGALTSGVHTFPAVLQSSGLYSLSSVVTVPSSSLGTQTYICNVNHKPSNTKVDKKVEPKSCDKTHTCPPCPAPELLGGPSVFLFPPKPKDTLMISRTPEVTCVWDVSHEDPEVKFNWYVDGVEVHNAKTKPREEQYNSTYRWSVLTVLHQDWLNGKEYKCKVSNKALPAPIEKTISKAKGQPREPQVYTLPPSRDELTKNQVSLTCLVKGFYPSDIAVEWESNGQPENNYKTTPPVLDSDGSFFLYSKLTVDKSRWQQGNVFSCSVMHEALHNHYT

SEQ ID NO: 27583 - protein, 641 aa, Artificial Sequence
  source: /note="Description of Artificial Sequence: Synthetic polypeptide"
NRGVPFRHLLLVLQLALLPAATQGKKWLGKKGDTVELTCTASQKKSIQFHWKNSNQIKILGNQGSFLTKGPSKLNDRADSRRSLWDQGNFPLIIKNLKIEDSDYICEVEDQKEEVQLLVFGLANSDHLLQGQSLLLESPPGSSPSVQCRSPRGKNIQGGKLSVSQLELQDSGWCVLQNQKKVEFKIDIVVLAFQKASLEAEAAAKEAAAKEAAAKEAAAKALEQVQLVQSGGGVFKPGGSLRLSCEASGFFEYYWVRQAPGKGLEWLAYISKNGEYSKYSPSSNGRFISRDNAKNSVFLQLDRLSADDAVYYCARADGLYFSELLQYIFDLWGQGARVVSSASKGPSVFPLAPSSKSSGGAALGCLVKDYFPEPVVSWNSGALSGVHFPAVLQSSGLYSLSSWVPSSSLGQYICNVNHKPSNKVDKKVEPKSCDKHCPPCPAPELLGGPSVFLFPPKPKDLISRPEVICVWDVSHEDPEVKFNWYVDGVEVHNAKKPREEQYNSYRWSVLVLHQDWLNGKEYKCKVSNKALPAPIEKISKAKGQPREPQVYLPPSRDELKNQVSLCLVKGFYPSDIAVEWESNGQPENNYKPPVLDSDGSFFLYSKLVDKSRWQQGNVFSCSVHEALHNHYQKSLSLSPGK

SEQ ID NO: 27584 - protein, 473 aa, Artificial Sequence
  source: /note="Description of Artificial Sequence: Synthetic polypeptide"
MDWTWRVLFLVAAATGAHSQVQLVQSGGGVFKPGGSLRLSCEASGFTFTEYYMTWVRQAPGKGLEWLAYISKNGEYSKYSPSSNGRFTISRDNAKNSVFLQLDRLSADDTAVYYCARADGLTYFSELLQYIFDLWGQGARVTVSSASTKGPSVFPLAPSSKSTSGGTAALGCLVKDYFPEPVTVSWNSGALTSGVHTFPAVLQSSGLYSLSSWTVPSSSLGTQTYICNVNHKPSNTKVDKRVEPKSCDKTHTCPPCPAPELLGGPSVFLFPPKPKDTLMISRTPEVTCVWDVSHEDPEVKFNWYVDGVEVHNAKTKPREEQYNSTYRVVSVLTVLHQDWLNGKEYKCKVSNKALPAPIEKTISKAKGQPREPQVYTLPPSREEMTKNQVSLTCLVKGFYPSDIAVEWESNGQPENNYKTTPPVLDSDGSFFLYSKLTVDKSRWQQGNVFSCSVMHEALHNHYTQKSLSLSPGK

SEQ ID NO: 27585 - protein, 226 aa, Artificial Sequence
  source: /note="Description of Artificial Sequence: Synthetic polypeptide"
EIQLEQSGAEVKKSGESLKISCQTSGYSFSDYWIGWVRQMPGKGLEWMGIFYPGDSDSRYSPSFEGQVTMSADRSTNTAHLQWSSLKPSDTALYYCARLGGDYEDSGADAFDFWGQGTLVTVSSASTKGPSVFPLAPSSKSTSGGTAALGCLVKDYFPEPVTVSWNSGALTSGVHTFPAVLQSSGLYSLSSVVTVPSSSLGTQTYICNVNHKPSNTKVDKKVEPKS

SEQ ID NO: 27586 - protein, 225 aa, Artificial Sequence
  source: /note="Description of Artificial Sequence: Synthetic polypeptide"
EVQLVESGGGLVKAGGSLRLSCGVSNFRISAHTMNWVRRVPGGGLEWVASISTSSTYRDYADAVKGRFTVSRDDLEDFVYLQMHKMRVEDTAIYYCARKGSDRLSDNDPFDAWGPGTVVTVSPASTKGPSVFPLAPSSKSTSGGTAALGCLVKDYFPEPVTVSWNSGALTSGVHTFPAVLQSSGLYSLSSVVTVPSSSLGTQTYICNVNHKPSNTKVDKKVEPKS

SEQ ID NO: 27587 - protein, 224 aa, Artificial Sequence
  source: /note="Description of Artificial Sequence: Synthetic polypeptide"
EVQLVESGGGLVKAGGSLILSCGVSNFRISAHTMNWVRRVPGGGLEWVASISTSSTYRDYADAVKGRFTVSRDDLEDFVYLQMHKMRVEDTAIYYCARKGSDRLSDNDPFDAWGPGTVVTVSPASTKGPSVFPLAPSSKSTSGGTAALGCLVKDYFPEPVTVSWNSGALTSGVHTFPAVLQSSGLYSLSSVVTVPSSSLGTQTYICNVNHKPSNTKVDKKVEPK

SEQ ID NO: 27588 - protein, 222 aa, Artificial Sequence
  source: /note="Description of Artificial Sequence: Synthetic polypeptide"
QVQLVQSGGGLVQPGGSLRLSCAAFGFNFSSYVMHWVRQAPGQGLEYLSAISSDGETTYHANSVKGRFTSSRDNSKNTLFLQMGSLRTEDVAVYYCARDRYYETSGSNAFDVWGQGTMVVVSSASTKGPSVFPLAPCSRSTSESTAALGCLVKDYFPEPVTVSWNSGALTSGVHTFPAVLQSSGLYSLSSVVTVPSSNFGTQTYTCNVDHKPSNTKVDKTVE

SEQ ID NO: 27589 - protein, 584 aa, Artificial Sequence
  source: /note="Description of Artificial Sequence: Synthetic polypeptide"
MKYLLPTAAAGLLLLAAQPAMAQVQLQQWGPGLVKPSQTLSLSCTVSGGSSSSGAHYWSWIRQYPGKGLEWIGYIHYSGNTYYNPSLKSRITISQHTSENQFSLKLNSVTVADTAVYYCARGTRLRTLRNAFDIWGQGTTVTVSSGGGGSGGGGSGGGGSQSALTQPPSASGSPGQSVTISCTGTSSDVGGYNYVSWYQHHPGKAPKLIISEVNNRPSGVPDRFSGSKSGNTASLTVSGLQAEDEAEYYCSSYTDIHNFVFGGGTKVTVLGQPKANTSGGSGGGSGGGSGGGSGGGSGGGSGELVLTQSPGTLSLSAGERATLSCRASQSVSSGSLAWYQQKPGQAPRLLIYGASTRATGIPDRFSGSGSGTDFTLTIGRLEPEDLAVYYCQQYGTSPYTFGQGTKLEIKRTGGGGSGGGGSGGGGSVQLLEQSGAEVKKPGSSVQVSCKASGGTFSMYGFNWVRQAPGHGLEWMGGIIPIFGTTNYAQKFRGRVTFTADQATSTAYMELTNLRSDDTAVYYCARDFGPDWEGGDSYDGSGRGFFDFWGQGTLVNVSSAAAHHHHHHGAAEQKLISEEDLNGAA

SEQ ID NO: 27590 - protein, 137 aa, Artificial Sequence
  source: /note="Description of Artificial Sequence: Synthetic polypeptide"
QIHLVQSGTEVKKPGSSVAVSCKAYGVNTFGLYAVNWVRQAPGQSLEYIGQIWRWKSSASHDFRGRVIISAVDLTGSSPPISSLEIKNLTSDDTAVYFCTATSTPDYWSGLHHDGVMAFSSWGQGTLISVSAASTKG

SEQ ID NO: 27591 - protein, 137 aa, Artificial Sequence
  source: /note="Description of Artificial Sequence: Synthetic polypeptide"
QIHLVQSGTEVKKPGSSVTVSCKAYGVNTFGLYAVNWVRQAPGQSLEYIGQIWRWKSSASHHFRGRVLISAVDLTGPSPPISSLEIKNLTSDDTAVYFCTTTSTYDKWSGLHHDGVMAFSSWGQGTLISVSAASTKG

SEQ ID NO: 27592 - protein, 137 aa, Artificial Sequence; identical to SEQ ID NO: 27200
  source: /note="Description of Artificial Sequence: Synthetic polypeptide"

SEQ ID NO: 27593 - protein, 137 aa, Artificial Sequence
  source: /note="Description of Artificial Sequence: Synthetic polypeptide"
QIHLVQSGTEVKKPGSSVTVSCKAYGVNTFGLYAVSWVRQAPGQRLEYIGQIRRWKSSASHHFRGRVTVSAVDPTGSSPPISSLEIRDLTTDDTAVYFCTTTSTSDYWSGLHNERGTAFSSWGQGTLISVSAASTKG

SEQ ID NO: 27594 - protein, 137 aa, Artificial Sequence
  source: /note="Description of Artificial Sequence: Synthetic polypeptide"
QIHLVQSGTEVKKPGSSVTVSCKAYGVNTFGLYAVNWVRQAPGQSLEYIGQIWRWKSSASHHFRGRVIISAVDLTGSSPPISPLEIKNLTSDDTAVYFCTTTSTSDRWSGLHHDGVMAFSSWGQGTLISVSAASTKG

SEQ ID NO: 27595 - protein, 137 aa, Artificial Sequence
  source: /note="Description of Artificial Sequence: Synthetic polypeptide"
QIHLVQSGTEVKKPGSSVTVSCKAYEVNTFGLYAVNWVRQAPGQSLEYIGQIWRWKSSASHHFRGRVLISAVDLTGSSPPISSLEIKNVTSDDTAVYFCTTTSTHDKWSGLHHDGVMAFSSWGQGTLISVSAASTKG

SEQ ID NO: 27596 - protein, 137 aa, Artificial Sequence
  source: /note="Description of Artificial Sequence: Synthetic polypeptide"
QIHLVQSGTEVKKPGSSVTVSCKAYGVNTFGLYAVNWVRQAPGQGLEYIGQIWRWKSSASHHFRGRVLISAVDLTGSSPPISSLEIKNVTSDDTAVYFCTTTSTYDKWSGLHHDGVVAFSSWGQGTLISVSAASTKG

SEQ ID NO: 27597 - protein, 448 aa, Artificial Sequence
  source: /note="Description of Artificial Sequence: Synthetic polypeptide"
QVQLQQSGPEVVKPGASVKMSCKASGYTFTSYVIHWVRQKPGQGLDWIGYINPYNDGTDYDEKFKGKATLTSDTSTSTAYMELSSLRSEDTAVYYCAREKDNYATGAWFAYWGQGTLVTVSSASTKGPSVFPLAPCSRSTSESTAALGCLVKDYFPEPVTVSWNSGALTSGVHTFPAVLQSSGLYSLSSVVTVPSSSLGTKTYTCNVDHKPSNTKVDKRVESKYGPPCPPCPAPEFEGGPSVFLFPPKPKDTLMISRTPEVTCVVVDVSQEDPEVQFNWYVDGVEVHNAKTKPREEQFNSTYRVVSVLTVLHQDWLNGKEYKCKVSNKGLPSSIEKTISKAKGQPREPQVYTLPPSQEEMTKNQVSLTCLVKGFYPSDIAVEWESNGQPENNYKTTPPVLDSDGSFFLYSRLTVDKSRWQEGNVFSCSVMHEALHNHYTQKSLSLSLG

SEQ ID NO: 27598 - protein, 448 aa, Artificial Sequence
  source: /note="Description of Artificial Sequence: Synthetic polypeptide"
QVQLQQSGPEVVKPGASVKMSCKASGYTFTSYVIHWVRQKPGQGLDWIGYINPYNDGTDYDEKFKGKATLTSDTSTSTAYMELSSLRSEDTAVYYCAREKDNYATGAWFAYWGQGTLVTVSSASTKGPSVFPLAPCSRSTSESTAALGCLVKDYFPEPVTVSWNSGALTSGVHTFPAVLQSSGLYSLSSVVTVPSSSLGTKTYTCNVDHKPSNTKVDKRVESKYGPPCPPCPAPEFLGGPSVFLFPPKPKDTLMISRTPEVTCVVVDVSQEDPEVQFNWYVDGVEVHNAKTKPREEQFNSTYRVVSVLTVLHQDWLNGKEYKCKVSNKGLPSSIEKTISKAKGQPREPQVYTLPPSQEEMTKNQVSLTCLVKGFYPSDIAVEWESNGQPENNYKTTPPVLDSDGSFFLYSRLTVDKSRWQEGNVFSCSVMHEALHNHYTQKSLSLSLG

SEQ ID NO: 27599 - protein, 137 aa, Artificial Sequence
  source: /note="Description of Artificial Sequence: Synthetic polypeptide"
QIHLVQSGTEVKKPGSSVTVSCKAYGVNTFGLYAVNWVRQAPGQGLEYIGQIWRWKSSASHHFRGRVLISAIDLTGSSPPISSLEIKNVTSDDTAVYFCTTMSTYDKWSGLHHDGVMAFSSWGQGTLISVSAASTKG

SEQ ID NO: 27600 - protein, 136 aa, Artificial Sequence
  source: /note="Description of Artificial Sequence: Synthetic polypeptide"
QIHLVQSGTEVKKPGSSVTVSCKAYGVNTFGLYAVNWVRQAPGQSLEYIGQIWRWKSSASHHFRGRVLISAVDLTGSSPPISSLEIKLTSDDTAVYFCTTTSTYDRWSGLHHDGVMAFSSWGQGTLISVSAASTKG

SEQ ID NO: 27601 - protein, 136 aa, Artificial Sequence
  source: /note="Description of Artificial Sequence: Synthetic polypeptide"
QIHLVQSGTEVKKPGSSVTVSCKAYGVNTFGLYAVNWVRQAPGQGLEYIGQIWRWKSSASHHFRGRVLISAVDLTGSSPPISSLEIKVTSDDTAVYFCTTTSTYDEWSDLHHDGVMAFSSWGQGTLISVSAASTKG

SEQ ID NO: 27602 - protein, 136 aa, Artificial Sequence
  source: /note="Description of Artificial Sequence: Synthetic polypeptide"
QIHLVQSGTEVKKPGSSVTVSCKAYGVNTFGLYAVNWVRQAPGQSLEYIGQIWRWKSSASHHFRGRVLISAVDLTGSSPPISSLEIKLTSDDTAVYFCTTTSTYDKWSGLHHDGVMAFSSRGQGTLISVSAASTKG

SEQ ID NO: 27603 - protein, 137 aa, Artificial Sequence
  source: /note="Description of Artificial Sequence: Synthetic polypeptide"
QIHLVQSGTGVKKPGSSVTVSCKAYGVNTFGLYAVNWVRQAPGQGLEYIGQIWRWKSSASHHFRGRVLISAVDLTGSSPPITSLEIKNVTSDDTAVYFCTTTSTYDKWSGLYHDGVMAFSSWGQGTLISVSAASTKG

SEQ ID NO: 27604 - protein, 137 aa, Artificial Sequence
  source: /note="Description of Artificial Sequence: Synthetic polypeptide"
QIHLVQSGTEVKKPGSSVTVSCKAYGVNTFGLYAVNWVRQAPGQSLEYIGQIWRWKSSASHHFRGRVIISAVDLTGSSPPISSLEIKNLTSDDTAVYFCTTASTYDKWSGLHHDGVMAFSSWGQGTLISVSAASTKG

SEQ ID NO: 27605 - protein, 128 aa, Artificial Sequence; identical to SEQ ID NO: 27505
  source: /note="Description of Artificial Sequence: Synthetic polypeptide"

SEQ ID NO: 27606 - protein, 126 aa, Artificial Sequence; identical to SEQ ID NO: 27506
  source: /note="Description of Artificial Sequence: Synthetic polypeptide"

SEQ ID NO: 27607 - protein, 232 aa, Artificial Sequence
  source: /note="Description of Artificial Sequence: Synthetic polypeptide"
QVQLQESGPGVVKSSETLSLTCTVSGGSMGGTYWSWLRLSPGKGLEWIGYIFHTGHTNYNPSLEGRVSISVDTSEDQFSLRLRSVTAADTAVYFCASLPRGQLVNAYFRNWGRGTLVSVTAASTKGPSVFPLAPSSKSTSGGTAALGCLVKDYFPEPVTVSWNSGALTSGVHTFPAVLQSSGLYSLSSVVTVPSSSLGTQTYICNVNHKPSNTKVDKRVEPKSCDKHHHHHH

SEQ ID NO: 27608 - protein, 100 aa, Artificial Sequence
  source: /note="Description of Artificial Sequence: Synthetic polypeptide"
EVQLAESGGGLVKPGGSLRLSCAASGFTFSNAWMTWVRQAPGKGLEWVGRIKSKTDGGTTDYAAPVKGRFTISRDDSKNTLYLQMNSLKTEDTAVYYCTT

SEQ ID NO: 27609 - protein, 132 aa, Artificial Sequence
  source: /note="Description of Artificial Sequence: Synthetic polypeptide"
QVQLVQSGPELMKPGSSVKVSCRASGDNFLTSTFNWLRQAPGQRLEWMGRFIPSLGLITSAPKFSDRLTITADQATLTAYMELTGLTSEDTALYYCARGLCRGGNCRLGPSGWLDPWGRGTQVTVSSASTKG

SEQ ID NO: 27610 - protein, 126 aa, Artificial Sequence
  source: /note="Description of Artificial Sequence: Synthetic polypeptide"
QVVLIQSGAEVKRPGSSVKVSCKASGGSFPITWVRQAPGHGLEWMGGINPFFGTTNYAQKFQGRVSITADESTSTTYLHLSDLRSEDTAVYFCARENREKWLVLRSWFAPWGQGTLVTVSSASTKG

SEQ ID NO: 27611 - protein, 123 aa, Artificial Sequence
  source: /note="Description of Artificial Sequence: Synthetic polypeptide"
EESGPGLVKPSQTLSLTCSVSGDSVSSGGYFWSWIRQHPTKGLECLGYVYYTGNTYYNPSLKSPPTIEVAMANNQVSLKLGSVTAADTAVYYCARIKRFRGGNYFDTWGHGLLVTVSSASTKG

SEQ ID NO: 27612 - protein, 150 aa, Artificial Sequence
  source: /note="Description of Artificial Sequence: Synthetic polypeptide"
LAQLEQSGGGVVKPGGSLRLPCAASGFTFIDYYMAWIRLAPGKGLEWLSYISKNGDYTKYSESLKGRFTISRDNAKNLVILQLNRLRADDTAIYFCARADGLTYFGELLQYIFDLWGQGARVIVSSASTKGPSVFPLAPSSKSTSGHASV

SEQ ID NO: 27613 - protein, 128 aa, Artificial Sequence
  source: /note="Description of Artificial Sequence: Synthetic polypeptide"
QVQLVQSGAEVKKPGASVKISCKASGYSFRNYAVHWVRQAPGQGLEWMGEINGGNGNTEYSQKSQGRLTITRDISATTAYMELSSLRSDDTAVYYCARVAYVHVVTTRSLDNWGQGTLVTVSSASTKG

SEQ ID NO: 27614 - protein, 139 aa, Artificial Sequence
  source: /note="Description of Artificial Sequence: Synthetic polypeptide"
QVQIRQSGPGLVKPLETLSLSCIVFGGSFIAYHWTWIRQAPLKGLEWIGDIDQGGDITYSPSLKSRVTMSVDRSKSQFSLKLSSVTAADAAVYYCVRGPPNRYAVTSFTSGTHRERSSYYFDYWGPGTLVTVSSASTKG

SEQ ID NO: 27615 - protein, 118 aa, Artificial Sequence
  source: /note="Description of Artificial Sequence: Synthetic polypeptide"
KAPATLSLSPGERATLSCRASQSVGSDLAWYQQKPGQAPRLLIYDASNRATAIPARFSGSGSGTDFTLSISSLEPEDFAVYFCQQRYDKITFGQGTRLEIQRTVAAPSVFIFPPSDEQ

SEQ ID NO: 27616 - protein, 121 aa, Artificial Sequence
  source: /note="Description of Artificial Sequence: Synthetic polypeptide"
FVQLVESGGGVVQPGTSLRLSCTTSGFIFSDYGMHWVRQAAGKGLEWVAVIWHDGSNRFYADSVKGRFTISRDNSKNAVYLEMNNLRVEDTALYYCARTSMDIDYWGQGTPVTVSSASTKG

SEQ ID NO: 27617 - protein, 132 aa, Artificial Sequence
  source: /note="Description of Artificial Sequence: Synthetic polypeptide"
QVYLVQSGPELKKPGASVKISCKASGYNFPKYAIHWVRQAPGQGLQWMGWINGDNGDARYSQKLQGRVTPSTDTSASVVYMELKRLRSEDTAVYYCARALYPWEIGGVPSTMGDDYWGQGTLITVSSASTKG

SEQ ID NO: 27618 - protein, 130 aa, Artificial Sequence
  source: /note="Description of Artificial Sequence: Synthetic polypeptide"
QVRLEQSGAAMRKPGASVTLSCQASGYNFVKYIVHWVRQKPGLGFEWVGMIDPYRGRPWSAHKFQGRLSLSRDTSMEILYMTLTSLTSDDTATYFCARAEAASDSHSRPIMFDHWGQGSRVTVSSASTKG

SEQ ID NO: 27619 - protein, 130 aa, Artificial Sequence
  source: /note="Description of Artificial Sequence: Synthetic polypeptide"
QVRLEQSGTAVRKPGASVTISCQASGYNFVKFFIHWVRQRPGQGFEWVGMIEPFRGRPWSAGNFQGRLSLSRDVSTETLYMTLNNLRSDDTAVYFCARLEAESDSHSRPIMFDHWGHGSLVTVSSASTKG

SEQ ID NO: 27620 - protein, 133 aa, Artificial Sequence
  source: /note="Description of Artificial Sequence: Synthetic polypeptide"
QVRLFQSGAAMRKPGASVTISCEASGYNFMNYFVHWVRQRPGRGFEWLGMINPRGGRPWSAQSVQGRLTLTRDTSTEMFYMRLDGLRSDDTATYFCARNEADYHDGNGHSLRGMFDYWGQGSLITVSSASTKG

SEQ ID NO: 27621 - protein, 130 aa, Artificial Sequence
  source: /note="Description of Artificial Sequence: Synthetic polypeptide"
QVRLEQSGAAVRKPGASVTLSCQASGYNFVNYIIHWVRQRPGLDFEWVGMIDPYRGRPWSAHKFQGRLSLSRDVSTEILYMTLSSLRSDDTATYFCARAEAESQSHSRPIMFDFWGQGSRVTVSSASTKG

SEQ ID NO: 27622 - protein, 133 aa, Artificial Sequence
  source: /note="Description of Artificial Sequence: Synthetic polypeptide"
QVRLSQSGAAIKKPGASVTISCETEGYTFINYIIHWVRQPPGRGFEWLGMIDPRNGRPWFGQSVQGRLSLRRDTYTEVVYMTLSGLTSDDAGHYFCARNEPQYHDGNGHSLPGMFDYWGQGTLVAVSSASTKG

SEQ ID NO: 27623 - protein, 133 aa, Artificial Sequence
  source: /note="Description of Artificial Sequence: Synthetic polypeptide"
QVRLSQSGAAVKKPGASVTIVCETEGYNFIDYIIHWVRQPPGRGFEWLGMIDPRNGRPWSGQKVHGRLSLWRDTSTEKVYMTLTGLTSDDTGLYFCGRNEPQYHDDNGHSLPGMIDYWGQGTMVTVSSASTKG

SEQ ID NO: 27624 - protein, 133 aa, Artificial Sequence; identical to SEQ ID NO: 27620
  source: /note="Description of Artificial Sequence: Synthetic polypeptide"

SEQ ID NO: 27625 - protein, 133 aa, Artificial Sequence; identical to SEQ ID NO: 27620
  source: /note="Description of Artificial Sequence: Synthetic polypeptide"

SEQ ID NO: 27626 - protein, 133 aa, Artificial Sequence; identical to SEQ ID NO: 27620
  source: /note="Description of Artificial Sequence: Synthetic polypeptide"

SEQ ID NO: 27627 - protein, 130 aa, Artificial Sequence
  source: /note="Description of Artificial Sequence: Synthetic polypeptide"
QVRLEQSGAAVRKPGASVTLSCQASGYNFVRYIIHWVRQRPGLDFEWVGMIDPYRGRPWSAHKFGGRLSLTRDVSTEILYMTLTSLRSDDTATYFCARAEAESQSHSRPIMFDSWGQGSRVTVSSASTKG

SEQ ID NO: 27628 - protein, 130 aa, Artificial Sequence
  source: /note="Description of Artificial Sequence: Synthetic polypeptide"
QVRLEQSGNAVRKPGASVTISCQASGYNFVKFFIHWVRQRPGQGFEWVGMIEPFRGRPWSAGNFQGRLSLSRDVSTETLYMTLNNLRSDDTAVYFCARLEAESDSHSRPIMFDHWGHGSLVTVSSASTKG

SEQ ID NO: 27629 - protein, 130 aa, Artificial Sequence
  source: /note="Description of Artificial Sequence: Synthetic polypeptide"
QVRLEQSGAAMRKPGASVTLSCQASGYNFVKYIIHWVRQKPGLGFEWVGMIDPYRGRPWSAHKFQGRLSLSRDTSMEILYMTLTSLKSDDTATYFCARAEAASDSHSRPIMFDHWGQGSRVTVSSASTKG

SEQ ID NO: 27630 - protein, 133 aa, Artificial Sequence
  source: /note="Description of Artificial Sequence: Synthetic polypeptide"
QVRLFQSGAAMRKPGASVTISCEASGYNFLNYFVHWVRQRPGRGFEWLGMINPRGGRPWSAQSVQGRLTLTRDTSTEMFYMRLDGLRSDDTATYFCARNEADYHDGNGHSLRGMFDYWGQGSLITVSSASTKG

SEQ ID NO: 27631 - protein, 130 aa, Artificial Sequence; identical to SEQ ID NO: 27629
  source: /note="Description of Artificial Sequence: Synthetic polypeptide"

SEQ ID NO: 27632 - protein, 133 aa, Artificial Sequence
  source: /note="Description of Artificial Sequence: Synthetic polypeptide"
QVRLSQSGAAIKKPGASVTISCETEGYTFINYIIHWVRQPPGRGFEWLGMIDPRNGRPWFGQSVQGRLSLRRDTYTEVVYMTLSGLTSDDTGLYFCARNEPQYHDGNGHSLPGMFDSWGQGTLVAVSSASTKG

SEQ ID NO: 27633 - protein, 133 aa, Artificial Sequence
  source: /note="Description of Artificial Sequence: Synthetic polypeptide"
QVQLFQSGAAMRKPGASVTISCEASGYNFMNYFVHWVRQRPGRGFEWLGMINPRGGRPWSAQSVQGRLTLTRDTSTEMFYMRLDGLRSDDTATYFCARNEADYHDGNGHSLRGMFDYWGQGSLITVSSASTKG

SEQ ID NO: 27634 - protein, 130 aa, Artificial Sequence
  source: /note="Description of Artificial Sequence: Synthetic polypeptide"
QVRLEQSGAAMRKPGASVTLSCQASGYNFVKYIVHWVRQKPGLGFEWVGMIDPYRGRPWSAHKFQGRLSLSRDTSMEILYMTLTSLKSDDTATYFCARAEAASDSHSRPIMFDHWGQGSRVTVSSASTKG

SEQ ID NO: 27635 - protein, 133 aa, Artificial Sequence
  source: /note="Description of Artificial Sequence: Synthetic polypeptide"
QVRLFQSGAAMKKPGASVTISCEASGYNFMNYFVHWVRQRPGRGFEWLGMINPRGGRPWSAQSVQGRLTLTRDISTEMFYMRLDGLRSDDTATYFCARNEADYHDGNGHSLRGMFDYWGQGSLITVSSASTKG

SEQ ID NO: 27636 - protein, 130 aa, Artificial Sequence
  source: /note="Description of Artificial Sequence: Synthetic polypeptide"
QVRLEQSGTAMRKPGASVTLSCQASGYNFVKYIVHWVRQKPGLGFEWVGMIDPYRGRPWSAHKFQGRLSLSRDTSMEILYMTLTSLKSDDTATYFCARAEAASDSHSRPIMFDHWGQGSRVTVSSASTKG

SEQ ID NO: 27637 - protein, 133 aa, Artificial Sequence; identical to SEQ ID NO: 27620
  source: /note="Description of Artificial Sequence: Synthetic polypeptide"

SEQ ID NO: 27638 - protein, 133 aa, Artificial Sequence; identical to SEQ ID NO: 27620
  source: /note="Description of Artificial Sequence: Synthetic polypeptide"

SEQ ID NO: 27639 - protein, 133 aa, Artificial Sequence; identical to SEQ ID NO: 27632
  source: /note="Description of Artificial Sequence: Synthetic polypeptide"

SEQ ID NO: 27640 - protein, 133 aa, Artificial Sequence; identical to SEQ ID NO: 27620
  source: /note="Description of Artificial Sequence: Synthetic polypeptide"

SEQ ID NO: 27641 - protein, 130 aa, Artificial Sequence; identical to SEQ ID NO: 27629
  source: /note="Description of Artificial Sequence: Synthetic polypeptide"

SEQ ID NO: 27642 - protein, 130 aa, Artificial Sequence; identical to SEQ ID NO: 27629
  source: /note="Description of Artificial Sequence: Synthetic polypeptide"

SEQ ID NO: 27643 - protein, 144 aa, Artificial Sequence
  source: /note="Description of Artificial Sequence: Synthetic polypeptide"
QVRLEQSGVAMRKPGASVTLSCQASGYNFVKYIIHWVRQKPGLGFEWVGMIDPYRGRPWSAHKFQGRLSLSRDTSMEILYMTLTSLKSDDTATYFCARAEAASDIHSRPIILTGPGEYGLDLEHMDWTWRILCLLAVAPGCHSQ

SEQ ID NO: 27644 - protein, 130 aa, Artificial Sequence; identical to SEQ ID NO: 27634
  source: /note="Description of Artificial Sequence: Synthetic polypeptide"

SEQ ID NO: 27645 - protein, 130 aa, Artificial Sequence
  source: /note="Description of Artificial Sequence: Synthetic polypeptide"
QVHLQQWGAGLLKPSETLSLTCAVSGGSFSGFFWTWIRQSPGKGLEWIGEVNHSGFTHSNPSLESRATISVAASNTQFSLRLASVTAADTAIYFCALRYFDWSPFRRDTYGTDVWGQGTTVIVSSASTKG

SEQ ID NO: 27646 - protein, 130 aa, Artificial Sequence
  source: /note="Description of Artificial Sequence: Synthetic polypeptide"
QVRLEQSGTAVRKPGASVTISCQASGYNFVKFFIHGVRQRPGQGFEWVGMIEPFRGRPWSAGNFQGRLSLSRDVSTETLYMTLNNLRSDDTAVYFCARLEAESDSHSRPIMFDHWGHGSLVTVSSASTKG

SEQ ID NO: 27647 - protein, 126 aa, Artificial Sequence
  source: /note="Description of Artificial Sequence: Synthetic polypeptide"
QVQLVQSGAELKKPGSSVKVSCKASGGTFNNHTFNWVRQAPGQGLEWMGRTIPILGSRDYAKTFQDRVTIIADKSTSTVYLELRTGVYYCATSMYYFDSGGYYRNTDLDKWGQGSLVTVSSASTKG

SEQ ID NO: 27648 - protein, 133 aa, Artificial Sequence
  source: /note="Description of Artificial Sequence: Synthetic polypeptide"
GLDLEHDGHHKEEPRASVTVSCEASGYNFVNYIIHWVRLTPGRGFEWMGMIDPRRGRPWSAQKFQGRLTLTRDIDSERLYMQLSGLRGDDTAVYFCARQEPDFHDGHGHTLRGMFDSWGQGSPVSVSSASTKG

SEQ ID NO: 27649 - protein, 129 aa, Artificial Sequence
  source: /note="Description of Artificial Sequence: Synthetic polypeptide"
QVRLVQSGPQVKTAGASMRVSCEASGYRFLDYIIVWIRQTHGQHFEYVGMINPRGGTPWPSSKFRDRLTLTRDIYTDTFYLGLNNLGSGDTAIYFCARLEADGDDYSPKMFDYWGQGTRIIVSAASTKG

SEQ ID NO: 27650 - protein, 133 aa, Artificial Sequence
  source: /note="Description of Artificial Sequence: Synthetic polypeptide"
QVHTFQSGSSMKKSGASVTISCEATGYNIKNYILHWVRQKPGRGFEWVGMIDPINGRPWFGQPFRGRLTLTRDLSTETFYMSLSGLTSDDTATYFCARREADYHDGNGHTLPGMFDFWGPGTLITVSSASTKG

SEQ ID NO: 27651 - protein, 129 aa, Artificial Sequence
  source: /note="Description of Artificial Sequence: Synthetic polypeptide"
QVSLVQSGPQVKTPGASMRVSCETSGYRFLDYIIVWIRQTHGQHFEYVGMINPRGGTPWPSSKFRDRLTMTRDIHTDTFYLGLNNLRSDDTAIYFCARLEADGDDYSPKMFDYWGQGTRIIVSAASTKG

SEQ ID NO: 27652 - protein, 129 aa, Artificial Sequence
  source: /note="Description of Artificial Sequence: Synthetic polypeptide"
QVRLVQSGPQMKTPGASLRLSCEVSGYRFLDYFIVWVRQTGGQGFEYVGMINPRGGRPWSSWKFRDRLSLTRDIETDTFYLGLNNLRSDDTAIYFCARLEADGDNYSPKMVDYWGQGTKIIVSPASTKG

SEQ ID NO: 27653 - protein, 124 aa, Artificial Sequence
  source: /note="Description of Artificial Sequence: Synthetic polypeptide"
QVQLVQSGAELKKPGSSVKVSCKASGGTFSNYAINWVRQAPGQGFEWMGGIIPLFATPTYAQKFQGRVRITADDSTSTAYMELSSLRSDDTAVYFCARPNVVRSALDYWGQGTLVTVSSASTKG

SEQ ID NO: 27654 - protein, 129 aa, Artificial Sequence
  source: /note="Description of Artificial Sequence: Synthetic polypeptide"
QARLDQWGTGLLKPSETLSLKCAVFGVLFTDYNWTWVRQSPGKGLEWIGHLDHRGGGNYNPSLESRVTISLDYSKAQFSLHLKSVTVADTALYYCAGAVKGFWFDEVYNWFGPWSQGTLVTVASASTKG

SEQ ID NO: 27655 - protein, 128 aa, Artificial Sequence
  source: /note="Description of Artificial Sequence: Synthetic polypeptide"
QVRLSQSGAAVVKTGASVTISCETEGYNFVNYIIHWVRRPPGRGFEWLGMIDPRNGHPWFAQTVRGRLSLRRDTFKETVYMTLSGLTSDDTGVYFCARNEPQYHSLPGMFDYWGHGTPVTVSSASTKG

SEQ ID NO: 27656 - protein, 133 aa, Artificial Sequence
  source: /note="Description of Artificial Sequence: Synthetic polypeptide"
QVRLVQSGAQLKKPGASVTVSCEASGYNFVNYIINWVRQTPGRGFEWVGMIDPRRGRPWSAQKFQGRLTLTRDIDSEKLYMHLSGLRGDDTAVYYCARQDSDFHDGHGHTLRGMFDSWGQGSPVTVSSASTKG

SEQ ID NO: 27657 - protein, 129 aa, Artificial Sequence
  source: /note="Description of Artificial Sequence: Synthetic polypeptide"
QVRLVQSGPQVKTPGASMRISCEASGYRFQDYIIVWIRQTHGQGFEYVGMINPRGGTPWSSSKFRDRLSLTRDIYTDTFYLGLNNLGSDDTAIYFCARLEADGGDYSPKMFDYWGQGTRIIVSAASTKG

SEQ ID NO: 27658 - protein, 133 aa, Artificial Sequence; identical to SEQ ID NO: 27620
  source: /note="Description of Artificial Sequence: Synthetic polypeptide"

SEQ ID NO: 27659 - protein, 128 aa, Artificial Sequence
  source: /note="Description of Artificial Sequence: Synthetic polypeptide"
QVRLVQSGPQVKRPGASIRLSCETSGYRFQDYIVAWIRQTRGQRFEFVGMVNPRGGRPWPSSKFRDRVTLTRDIESETFHLGLNDLTSDDTATYFCARLEADGADYSPKMFDFWGQGTKIWSPASTKG

SEQ ID NO: 27660 - protein, 130 aa, Artificial Sequence
  source: /note="Description of Artificial Sequence: Synthetic polypeptide"
QVRLEQSGAAVRKPGASVTLSCQASGYNFVNYIIHWVRQRPGLDFEWVGMIDPYRGRPWSAHKFEGRLSLSRDVSTEVLYMTLSSLRSDDTATYFCARAEAESQSHSRPIMFDYWGQGSRVTVSSASTKG

SEQ ID NO: 27661 - protein, 146 aa, Artificial Sequence
  source: /note="Description of Artificial Sequence: Synthetic polypeptide"
QVQLQESGPGLVKPSGTLSLTCAVSGASISSRNWWTWVRQPPGKGLEWIGEIYESGATNYNPSLKSRVTISVDKSKNQFSLRLTSVTAADTAVYFCARLMTFGGLIGTLDYWGQGTLVTVLQPPPRAHRYHPRNLLQEHLCARVMP

SEQ ID NO: 27662 - protein, 141 aa, Artificial Sequence
  source: /note="Description of Artificial Sequence: Synthetic polypeptide"
QVQLVQSGAEVKKPGSSVKVSCKASGGTFSTYAISWVRQAPGQGLEWMGGIIPSFSMSNYAQDFQGRLTITADESTSSVYMELNSLRSEDTAVYYCARDFPRFHRLVGNYDFWRGTLDRFSYMDLWGRGTAVTVSSASTKG

SEQ ID NO: 27663 - protein, 132 aa, Artificial Sequence
  source: /note="Description of Artificial Sequence: Synthetic polypeptide"
QVHLVQSGAEAKRPGSSVRVSCRASGGDFSSYTLSWVRQAPGQGIEWMGGVVPMLDTVHYAQKFQGRLTLSVDEGTSTAYMELSSLRSEDTAMYYCTRGRQTFRAIWSGPPAVFDIWGQGTLVIVSSASTKG

SEQ ID NO: 27664 - protein, 130 aa, Artificial Sequence; identical to SEQ ID NO: 27629
  source: /note="Description of Artificial Sequence: Synthetic polypeptide"

SEQ ID NO: 27665 - protein, 141 aa, Artificial Sequence
  source: /note="Description of Artificial Sequence: Synthetic polypeptide"
NGGSLRLSCRVSGFGFHLYEMNWVRQAPGKGLEWISSISGSGESTHYSDSITGRFSMSRDEAKDSLYLQMNNLRVEDTAVYYCTRGFSMGDGTGFSFDTWGRGTMVTVSSGLDTVSLASTKGPSVFPLAPCSRSTSDARLS

SEQ ID NO: 27666 - protein, 149 aa, Artificial Sequence
  source: /note="Description of Artificial Sequence: Synthetic polypeptide"
AARLDQWGTGLVKPSETLSLKCAVFGVDFPDYTWTWARQAPGKGLEWIGHRDHRGGSSYNPSLSGRATISLDTSKAQFSLHIKSVTVADTATYYCAGAVAGLWFEDAYNWFGPWSQGTLVTVAAASTKGPSVFPLAPSSKSTSGHASVL

SEQ ID NO: 27667 - protein, 128 aa, Artificial Sequence
  source: /note="Description of Artificial Sequence: Synthetic polypeptide"
QVRLSQSGAAVMKTGASVTISCETEGFNFVNYIIHWVRRPPGRGFEWLGMIDPRNGHPWFAQTVRGRLSLRRDTFNEIVYMTLSGLTTDDTGLYFCARNEPQYHSLPGMFDYWGQGTPVTVSSASTKG

SEQ ID NO: 27668 - protein, 149 aa, Artificial Sequence
  source: /note="Description of Artificial Sequence: Synthetic polypeptide"
QARLDQWGTGLLKPSETLSLKCAVFGVLFTDYNWTWVRQSPGKGLEWIGHLDHRGGGNYNPSLESRVTISLDYSKAQFSLHLKSVTVADTALYYCAGAVKGLWFDETYTWFGPWSQGTRVTVASASTKGPSVFPLAPSSKSTSGTRDLS

SEQ ID NO: 27669 - protein, 133 aa, Artificial Sequence
  source: /note="Description of Artificial Sequence: Synthetic polypeptide"
QVRLSQSGAAMKKPGASVTISCETEGYTFINYIIHWVRQPPGRGFEWLGMIDPRNGRPWFGQSVQGRLSLRRDTYTEVVYMTLSGLTSDDAGLYFCARNEPQYHDGNGHSLPGMFDYWGQGTLVAVSSASTKG

SEQ ID NO: 27670 - protein, 133 aa, Artificial Sequence
  source: /note="Description of Artificial Sequence: Synthetic polypeptide"
QVRLSQSGAAVVKTGASVTISCETEGYTFVNYIIHWVRQSPGRGFEWLGMIDPRNGHPWFGQRLRGRLSLRRDRSTETVFMTLSGLTSDDTAIYFCARNEPQYYDGSGHSLPGMFDYWGQGTRVVVSSASTKG

SEQ ID NO: 27671 - protein, 133 aa, Artificial Sequence; identical to SEQ ID NO: 27620
  source: /note="Description of Artificial Sequence: Synthetic polypeptide"

SEQ ID NO: 27672 - protein, 129 aa, Artificial Sequence
  source: /note="Description of Artificial Sequence: Synthetic polypeptide"
QVQLVQSEAEVKKPGSSVKVSCKASGGTFRGYTISWVRQAPGQGLEWMGRIIPILGKAIYAPSFQGRVTLTADKSTGTAYMELSRLRSDDTAVYYCAKVKMRGSSGYYYLFDDWGQGTLVTVSSASTKG

SEQ ID NO: 27673 - protein, 129 aa, Artificial Sequence
  source: /note="Description of Artificial Sequence: Synthetic polypeptide"
QVRLVQSGPQVKTPGASIRLSCEASGYRFLDYFIVWVRQTPGQGFEYVGMINPRGGRPWSSWKFRDRLSLTREIDTDTFYLGLSNLRSDDTAIYFCARLEADGDDYSPKMVDYWGQGTKIIVSAASTKG

SEQ ID NO: 27674 - protein, 133 aa, Artificial Sequence; identical to SEQ ID NO: 27620
  source: /note="Description of Artificial Sequence: Synthetic polypeptide"

SEQ ID NO: 27675 - protein, 117 aa, Artificial Sequence
  source: /note="Description of Artificial Sequence: Synthetic polypeptide"
QVRLEQSGAAVRTPGASVTLSCQASGYKFVNYIIHWVRQRPGLAFEWVGMIDPYRGRPWSAHSFEGRLSLSRDVSMEILYMTLTSLRSDDTATYFCARAEAESQSHSRPIISTSGAR

SEQ ID NO: 27676 - protein, 133 aa, Artificial Sequence
  source: /note="Description of Artificial Sequence: Synthetic polypeptide"
QVQFFQSGSSMKKSGASVTISCEATGYNIKNHILHWVRQKPGRGFEWVGMIDPINGRPWFGQAFRGRLTLTRDLSTETFYMSLSGLTSDDTATYFCARREADYHDGNGHTLPGMFDFWGPGTLVTVSSASTKG

SEQ ID NO: 27677 - protein, 132 aa, Artificial Sequence
  source: /note="Description of Artificial Sequence: Synthetic polypeptide"
QVRLSQSGAAVVKTGASVTISCETEGYTFVNHIIHWVRQPPGRGFEWLGMIDPRNGHPWFGQRLRGRLSLRRDRSTETVFMTLSGLTSDDIGIYFCARNEPQYFDGSGHSLPGMFDYWGQGTRVWSSASTKG

SEQ ID NO: 27678 - protein, 122 aa, Artificial Sequence
  source: /note="Description of Artificial Sequence: Synthetic polypeptide"
QVHLVQSGAEVKKPGASVKVSCKVSGYTLSELSIHWVRQGPGRGLEWMANFDPEDGETIYAPQFQGRVTLTEDTSTDTAYMQLTSLRSEDTAVYYCATDRYTDTGRWGPGTLVTVSSASTKG

SEQ ID NO: 27679 - protein, 133 aa, Artificial Sequence
  source: /note="Description of Artificial Sequence: Synthetic polypeptide"
QVRLSQSGAAVVKTGASVTISCETEGYTFVNYIIHWVRQPPGRGFEWLGMIDPRNGHPWFGQRLQGRLSLRRDRSTETVFMTLSGLTSDDTGIYFCARNEPQYYDGSGHSLPGMFDYWGQGTRVVVSSASTKG

SEQ ID NO: 27680 - protein, 129 aa, Artificial Sequence
  source: /note="Description of Artificial Sequence: Synthetic polypeptide"
QARLDQWGTGLLKPSETLSLKCAVFGVLFTDYNWTWVRQSPGKGLEWIGHLDHRGGGSYNPSLESRVSISLDYSKAQFSLHLKSVTVADTALYYCAGAVKGFWFDEPSTWFGPWSQGTMVTVASASTKG

SEQ ID NO: 27681 - protein, 149 aa, Artificial Sequence
  source: /note="Description of Artificial Sequence: Synthetic polypeptide"
QARLDQWGTGLLKPSETLSLKCAVFGVLFTDYNWTWVRQSPGKGLEWIGHLDHRGGGNYNPSLESRVTISLDYSKAQFSLHLKSVTVADTALYYCAGAVKGFWFDEVYNWFGPGVREPWLPSPQPPPRAHRSSPWHPPPRAPLVTATVP

SEQ ID NO: 27682 - protein, 129 aa, Artificial Sequence
  source: /note="Description of Artificial Sequence: Synthetic polypeptide"
QVRLVQSGPQVKTPGASMRVSCEASGYRFLDYIIVWIRQTHGQHFEYVGMINPRGGTPWPSSKFRDRLSLTRDIHTDTFYLGLNNLGSDDTAIYFCARLEADGDDYSPKMFDHWGQGTRIIVSAASTKG

SEQ ID NO: 27683 - protein, 129 aa, Artificial Sequence
  source: /note="Description of Artificial Sequence: Synthetic polypeptide"
QARLDQWGTGLLKPSETLSLKCAVFGVLFTDYNWTWVRQSPGKELEWIGHLDHRGGGNYNPSLESRVTISLDYSKAQFSLHLKSVTVADTARYYCAGAVKGFWFDDPYTWFGPWSQGTLVTVASASTKG

SEQ ID NO: 27684 - protein, 132 aa, Artificial Sequence
  source: /note="Description of Artificial Sequence: Synthetic polypeptide"
QVHLVQSGAEAKRPGSSVRVSCRASGGDFSSYTLSWVRQAPGQGLERMGGVVPMLDTVHYAQKFQGRLTLSVDEGTSTAYMELSSLRSEDTAMYYCTRGRQTFRAIWSGPPVVFDIWGQGTLVSVSSASTKG

SEQ ID NO: 27685 - protein, 130 aa, Artificial Sequence
  source: /note="Description of Artificial Sequence: Synthetic polypeptide"
QVRLEQSGAAVKKPGASVTISCQASGYNFVKFFIHWVRQRPGQGFEWVGMIEPYRGRPWSAGNFQGRLSLSRDVSTETLYMTLNNLRSDDTAVYFCARLEAESDSHSRPIMFDHWGHGSLVTVSSASTKG

SEQ ID NO: 27686 - protein, 133 aa, Artificial Sequence
  source: /note="Description of Artificial Sequence: Synthetic polypeptide"
QVRLSQSGAAVMKTGASVTISCETEGYNFVNYIIHWVRRPPGRGFEWLGMIDPKNGHPWFAQAVRGRLSLRRDTFNEVVYMTLSGLTSDDTGLYFCARNEPQYHDGNGHSLPGMFDFWGQGTLVTVSSASTKG

SEQ ID NO: 27687 - protein, 125 aa, Artificial Sequence
  source: /note="Description of Artificial Sequence: Synthetic polypeptide"
QFRLVQSGPEVKNPGSSVTVSCKASGGTFSGLGINWVRQAPGQGLEWLGDIKTMYGTTNYAPKFQGRVTITADESTSTSYMELSGLRSEDTAVFYCVRELFGHHPAFGVWGQGTSVIVSSASTKG

SEQ ID NO: 27688 - protein, 133 aa, Artificial Sequence
  source: /note="Description of Artificial Sequence: Synthetic polypeptide"
QVRLSQSGAAVVKTGASVTISCETEGYTFVNYIIHWVRQPPGRGFEWLGMIDPRNGHPWFGQRFRGRLSLRRDRSTETVFMTLSGLTSDDNGIYFCARNEPQYYDGSGHSLPGMFDYWGQGTRVVVSSASTKG

SEQ ID NO: 27689 - protein, 130 aa, Artificial Sequence; identical to SEQ ID NO: 27621
  source: /note="Description of Artificial Sequence: Synthetic polypeptide"

SEQ ID NO: 27690 - protein, 124 aa, Artificial Sequence
  source: /note="Description of Artificial Sequence: Synthetic polypeptide"
QVQLVQSGAEVKKPGASVKVSCKASGYTFTNYGVSWVRQAPGQGLEWMGWISPYSGNTNYAQRLQDRVTMTTDTSTNTAYMELRSLRSDDTAVYYCAARSYYYYSMDVWGQGTTVTVSSASTKG

SEQ ID NO: 27691 - protein, 133 aa, Artificial Sequence
  source: /note="Description of Artificial Sequence: Synthetic polypeptide"
QVQLVQSGADVKKPGASVKVSCKVSGYTVSELSIHWVRQAPGKGLEWMGGFDPEDGKTVSAQNFQGRVTMTEDKSTGTANMELRSLRSEDTAVYYCATTVQLIVDFCNGGPCYNFDDWGQGTLVTVSSASTKG

SEQ ID NO: 27692 - protein, 130 aa, Artificial Sequence
  source: /note="Description of Artificial Sequence: Synthetic polypeptide"
QVRLEQSGAAVRKPGASVTLSCQASGYNFVNYIIHWVRQRPGLDFEWVGMIDPYRGRPWSAHKFQGRLSLSRDVSTEILYMTLNSLRSDDTATYFCARAEAESQSHSRPIMFDSWGQGSRVTVSSASTKG

SEQ ID NO: 27693 - protein, 133 aa, Artificial Sequence; identical to SEQ ID NO: 27620
  source: /note="Description of Artificial Sequence: Synthetic polypeptide"

SEQ ID NO: 27694 - protein, 128 aa, Artificial Sequence
  source: /note="Description of Artificial Sequence: Synthetic polypeptide"
QVQLVQSGAEVKKPGSSVKVSCKASGGTLSSYTISWVRQAPGQGLEWMGRLIPLVDITTYAQKFQGRVTITADTSTNTAYMELSNLRSEDTAIYHCATSTMIAAVINDAFDLWGQGTTVTVSSASTKG

SEQ ID NO: 27695 - protein, 130 aa, Artificial Sequence
  source: /note="Description of Artificial Sequence: Synthetic polypeptide"
QVRLEQSGGALRKPGASVTLSCQASGYNFVKYIIHWVRQRPGLGFEWVGMIDPYRGRPWYAHSFAGRLSLSRDTSTETLYMTLSSLKSDDTATYFCARAEAASDSHSRPIMDWTWRILCLLAVVPASTKG

SEQ ID NO: 27696 - protein, 133 aa, Artificial Sequence; identical to SEQ ID NO: 27620
  source: /note="Description of Artificial Sequence: Synthetic polypeptide"

SEQ ID NO: 27697 - protein, 125 aa, Artificial Sequence
  source: /note="Description of Artificial Sequence: Synthetic polypeptide"
QVQLVQSGAEVKKPGASVKVSCKASGNTFTSYGITWVRQAPGQGLEWMGWISAYNGNTNYAQKLQDRLTMTTDTSTSTAYMELRSLRSDDTAVYYCAFSRHYGSGNYDYWGQGTLVTVSSASTKG

SEQ ID NO: 27698 - protein, 125 aa, Artificial Sequence
  source: /note="Description of Artificial Sequence: Synthetic polypeptide"
QVQLQQWGAGLLKPSETLSLTCAVYGGSFSGYYWSWIRQPPGKGLEWIGEINHSGSTNYNPSLKSRVTISVDTSKNQFSLKLSSVTAADTAVYYCARLPIGSGWYGRDYWGQGTLVTVSSASTKG

SEQ ID NO: 27699 - protein, 130 aa, Artificial Sequence; identical to SEQ ID NO: 27634
  source: /note="Description of Artificial Sequence: Synthetic polypeptide"

SEQ ID NO: 27700 - protein, 129 aa, Artificial Sequence
  source: /note="Description of Artificial Sequence: Synthetic polypeptide"
QVRLVQSGPQVKRPGASIRLSCESSGYRFQDYIVAWIRQTRGQGFEFVGMVNPRGGRPWPSSRFRDRVTLTRDIESETFYLGLNDLTSDDTATYFCARLEADGSDYSPKMFDFWGQGTKIVVSPASTKG

SEQ ID NO: 27701 - protein, 133 aa, Artificial Sequence
  source: /note="Description of Artificial Sequence: Synthetic polypeptide"
QVRLVQSGAQLKKPGASVTVSCEASGYNFVNYIINWVRQTPGRSFEWVGMIDPRRGRPWSAQKFQGRLTLTRDIDSEKLYMHLSGLRGDDTAVYYCARQDSDFHDGHGHTLRGMFDSWGQGSPVTVSSASTKG

SEQ ID NO: 27702 - protein, 231 aa, Artificial Sequence
  source: /note="Description of Artificial Sequence: Synthetic polypeptide"
VQLLESGPGLVKPSQSLSLTCAISGDSLSSDSTAWNWIRQSPSRGLEWLGRTYYRSTWFYDYAESVKSRININPDTSKSQFSLQLRSVTPEDTAVYYCARDFNKGAGYNWFDPWGPGTVVTVSSASTKGPSVFPLAPSSKSTSGGTAALDCLVKDYFPEPVMVSWNSGALTSGVHTLAAVLQSSGLYSLSSVVTVPSSSLGTQTYICNVNRKPSNTKVVKKDEPKSCDKTS

SEQ ID NO: 27703 - protein, 233 aa, Artificial Sequence
  source: /note="Description of Artificial Sequence: Synthetic polypeptide"
VQLLESGPGLVKPSQTLSLTCTVSGGSISTGDYYWSWIRQSPGKGLEWIGYISSSGNTYYNPSLTSRVVISFDTSMNQFSLKVDSVTAADTAVYYCARERRVLLWLGFPRGGLDYWGQGTLVTVSSASTKGPSVFPLAPSSKSTSGGTASLDCLVKDYFPEPVMVSWNSGALTSGVHTLAAVIQSSGLYSLSSVVTVPSSSLGTQTYICNVNRKPSNTKVDNKVEPKSCDKTS

SEQ ID NO: 27704 - protein, 237 aa, Artificial Sequence
  source: /note="Description of Artificial Sequence: Synthetic polypeptide"
VQLLESGAEVKRPGSSVRVSCQVSGGSFSNYAVSWVRQTPGHGLEWMGGIIPMFNAPNYAQKFHGRVTFIADESTRTVHMELRSLRSEDTAVYFCATASEATENDYYQSPTHYYAMDVWGQGTAVTVFSSASTKGPLVFPLAPSSKSAFGGTASLDSLVKDSLPEPVMVSWNSGALTTGVRTLAAVIQSAGLYSLISVVTVPSSSLGTQTYICNVNRKPSNIKVVNRDEPKSCVKNS

SEQ ID NO: 27705 - protein, 228 aa, Artificial Sequence
  source: /note="Description of Artificial Sequence: Synthetic polypeptide"
VQLLESGPGVVKPSETLSLTCTVSGASVNNYYWTWVRQPPGKGLEWIGNVYDSGDTNYNPSLSSRLSLSMDTSKNQFSLRLSSVTAADTATYYCARYHRHFIRGPLSFDYWGRGTLVTVSSASTKGPSVFPLAPSYKSTSGGTSSLDSLVKDSFPEPVMVSWNSGALTRGVHTFPAVIQSAGLYSLISVVTVPSSSMGTQTYICNVNRKPSNTKVVNKDEPKSCDKTS

SEQ ID NO: 27706 - protein, 220 aa, Artificial Sequence
  source: /note="Description of Artificial Sequence: Synthetic polypeptide"
DIQLTQSPSSLSASVGDRVTITCRASQSIGSYLNWYQQKPGKAPKLLIYAASTLQSGVPSRFSGSGSGTDFTLTISSLQPEDSATYYCQQSYSTPFTFGPGTKVDIRRTVAAPSVFIFPPSDEQLKSGTASVVCLLNNFYPREAKVQWKVDNALQSGNSQESVTEQDSKDSTYSLSSTLTLSKADYEKHKVYACEVTHQGLSSPVTKSFNRGECHVGSGT

SEQ ID NO: 27707 - protein, 234 aa, Artificial Sequence
  source: /note="Description of Artificial Sequence: Synthetic polypeptide"
QVQLVQSGAEVKKPGESLKISCKVSGYNFASEWIGWVRQMPGKGLEWMGIIYPGDSDTKYSPSFQGQVIISADKSINTAYLQWSSLKASDTAIYYCARQNHYGSGSYFYRTAYYYAMDVWGQGTTVTVSSASTKGPSVFPLAPSSKSTSGGTAALGCLVKDYFPEPVTVSWNSGALTSGVHTFPAVLQSSGLYSLSSVVTVPSSSLGTQTYICNVNHKPSNTKVDKKVEPKSCD

SEQ ID NO: 27708 - protein, 236 aa, Artificial Sequence
  source: /note="Description of Artificial Sequence: Synthetic polypeptide"
QVQLVQSGAEVKKPGSSVKVSCEASGVTSSSYTISWVRLAPGQGLEWMGRITPIFDITNYAQKFQGRVTLTADKSTGTTYMELSSLRSDDTAVYYCARDKSDVVVVTSIRPAYYYGMDVWGQGTTVTVSSASTKGPSVFPLAPSSKSTSGGTAALGCLVKDYFPEPVTVSWNSGALTSGVHTFPAVLQSSGLYSLSSVVTVPSSSLGTQTYICNVNHKPSNTKVDKKVEPKSCDKT

SEQ ID NO: 27709 - protein, 451 aa, Artificial Sequence
  source: /note="Description of Artificial Sequence: Synthetic polypeptide"
QVQLQQSGPEVVKPGASVKMSCKASGYTFTSYVIHWVRQKPGQGLDWIGYINPYNDGTDYDEKFKGKATLTSDTSTSTAYMELSSLRSEDTAVYYCAREKDNYATGAWFAYWGQGTLVTVSSASTKGPSVFPLAPSSKSTSGGTAALGCLVKDYFPEPVTVSWNSGALTSGVHTFPAVLQSSGLYSLSSVVTVPSSSLGTQTYICNVNHKPSNTKVDKKVEPKSCDKTHTCPPCPAPEFEGGPSVFLFPPKPKDTLMISRTPEVTCVVVDVSHEDPEVKFNWYVDGVEVHNAKTKPREEQYNSTYRVVSVLTVLHQDWLNGKEYKCKVSNKALPASIEKTISKAKGQPREPQVYTLPPSRDELTKNQVSLTCLVKGFYPSDIAVEWESNGQPENNYKTTPPVLDSDGSFFLYSKLTVDKSRWQQGNVFSCSVMHEALHNHYTQKSLSLSPG

SEQ ID NO: 27710 - protein, 246 aa, Artificial Sequence
  source: /note="Description of Artificial Sequence: Synthetic polypeptide"
  MOD_RES (1)..(1): Any amino acid
  MOD_RES (112)..(112): Any amino acid
XEQLVESGGGVVQPGGSLRLSCLASGFTFHKYGMHWVRQAPGKGLEWVALISDDGMRKYHSDSMWGRVTISRDNSKNTLYLQFSSLKVEDTAMFFCAREAGGPIWHDDVKYXDFNDGYYNYHYMDVWGKGTTVTVSSASTKGPSVFPLAPSSKSTSGGTAALGCLVKDYFPEPVTVSWNSGALTSGVHTFPAVLQSSGLYSLSSVVTVPSSSLGTQTYICNVNHKPSNTKVDKRVEPKSCGLEVLF

SEQ ID NO: 27711 - protein, 248 aa, Artificial Sequence
  source: /note="Description of Artificial Sequence: Synthetic polypeptide"
  MOD_RES (1)..(1): Any amino acid
  MOD_RES (110)..(111): Any amino acid
XRLVESGGGVVQPGSSLRLSCAASGFDFSRQGMHWVRQAPGQGLEWVAFIKYDGSEKYHADSVWGRLSISRDNSKDTLYLQMNSLRVEDTATYFCVREAGGPDYRNGYYXXDFYDGYYNYHYMDVWGKGTTVTVSSASTKGPSVFPLAPSSKSTSGGTAALGCLVKDYFPEPVTVSWNSGALTSGVHTFPAVLQSSGLYSLSSVVTVPSSSLGTQTYICNVNHKPSNTKVDKKVEPKSCDKGLEVLFQ

SEQ ID NO: 27712 - protein, 244 aa, Artificial Sequence
  source: /note="Description of Artificial Sequence: Synthetic polypeptide"
QVQLQESGPGLVKPSETLSLTCTVSGGSISSYYWSWIRQPPGKGLEWIGYIYYSGSTNYNPSLKSRVTISVDTSKNQFSLKLSSVTAADTAVYYCARTQQGKRIYGVVSFGDYYYYYYMDVWGKGTTVTVSSASTKGPSVFPLAPSSKSTSGGTAALGCLVKDYFPEPVTVSWNSGALTSGVHTFPAVLQSSGLYSLSSVVTVPSSSLGTQTYICNVNHKPSNTKVDKRVEPKSCDKTHHHHHH

SEQ ID NO: 27713 - protein, 235 aa, Artificial Sequence
  source: /note="Description of Artificial Sequence: Synthetic polypeptide"
QVHLQESGPGLVKPSETLSLTCNVSGTLVRDNYWSWIRQPLGKQPEWIGYVHDSGDTNYNPSLKSRVHLSLDKSKNLVSLRLTGVTAADSAIYYCATTKHGRRIYGVVAFKEWFTYFYMDVWGKGTSVTVSSASTKGPSVFPLAPSSKSTSGGTAALGCLVKDYFPEPVTVSWNSGALTSGVHTFPAVLQSSGLYSLSSVVTVPSSSLGTQTYICNVNHKPSNTKVDKRVEPKSC

SEQ ID NO: 27714 - protein, 235 aa, Artificial Sequence
  source: /note="Description of Artificial Sequence: Synthetic polypeptide"
QLHLQESGPGLVKPPETLSLTCSVSGASINDAYWSWIRQSPGKRPEWVGYVHHSGDTNYNPSLKRRVTFSLDTAKNEVSLKLVDLTAADSATYFCARALHGKRIYGIVALGELFTYFYMDVWGKGTAVTVSSASTKGPSVFPLAPSSKSTSGGTAALGCLVKDYFPEPVTVSWNSGALTSGVHTFPAVLQSSGLYSLSSVVTVPSSSLGTQTYICNVNHKPSNTKVDKRVEPKSC

SEQ ID NO: 27715 - protein, 236 aa, Artificial Sequence
  source: /note="Description of Artificial Sequence: Synthetic polypeptide"
QVQLQESGPGLVRPSETLSVTCIVSGGSISNYYWTWIRQSPGKGLEWIGYISDRETTTYNPSLNSRAVISRDTSKNQLSLQLRSVTTADTAIYFCATARRGQRIYGVVSFGEFFYYYYMDVWGKGTAVTVSSASTKGPSVFPLAPSSKSTSGGTAALGCLVKDYFPEPVTVSWNSGALTSGVHTFPAVLQSSGLYSLSSVVTVPSSSLGTQTYICNVNHKPSNTKVDKKVEPKSCD

SEQ ID NO: 27716 - protein, 233 aa, Artificial Sequence
  source: /note="Description of Artificial Sequence: Synthetic polypeptide"
QVQLQESGPGLVKPAETLSLTCSVSGESINTGHYYWGWVRQVPGKGLEWIGHIHYTTAVLHNPSLKSRLTIKIYTLRNQITLRLSNVTAADTAVYHCVRSGGDILYYYEWQKPHWFSPWGPGIHVTVSSASTKGPSVFPLAPSSKSTSGGTAALGCLVKDYFPEPVTVSWNSGALTSGVHTFPAVLQSSGLYSLSSVVTVPSSSLGTQTYICNVNHKPSNTKVDKRVEPKSCD

SEQ ID NO: 27717 - protein, 234 aa, Artificial Sequence
  source: /note="Description of Artificial Sequence: Synthetic polypeptide"
QLQMQESGPGLVKPSETLSLSCTVSGDSIRGGEWGDKDYHWGWVRHSAGKGLEWIGSIHWRGTTHYKESLRRRVSMSIDTSRNWFSLRLASVTAADTAVYFCARHRHHDVFMLVPIAGWFDVWGPGVQVTVSSASTKGPSVFPLAPSSKSTSGGTAALGCLVKDYFPEPVTVSWNSGALTSGVHTFPAVLQSSGLYSLSSVVTVPSSSLGTQTYICNVNHKPSNTKVDKRVEPK

SEQ ID NO: 27718 - protein, 225 aa, Artificial Sequence
  source: /note="Description of Artificial Sequence: Synthetic polypeptide"
LESGGGVVQPGRSLRLSCAASGFSFSSHGMHWVRQAPGKGLEWVAFIWFDGSNERYADSVKGRFTITRDNPKNTLYLQMNSLRVEDTAVYYCVRRGGSILTGFHLDYWGQGTLVTVSSASTKGPSVFPLAPSSKSTSGGTAALGCLVKDYFPEPVTVSWNSGALTSGVHTFPAVLQSSGLYSLSSVVTVPSSSLGTQTYICNVNHKPSNTKVDKRVEPKSCDKTS

SEQ ID NO: 27719 - protein, 225 aa, Artificial Sequence
  source: /note="Description of Artificial Sequence: Synthetic polypeptide"
LESGGGVVQPGRSLRLSCSASGFSFRDYAMHWVRQAPGKGLEWVAFIWFDGSNERYADSVKGRFTITRDNPKNTLYLQMNSLRVEDTAVYYCVRRGGSILTGFHLDYWGQGTLVTVSSASTKGPSVFPLAPSSKSTSGGTAALGCLVKDYFPEPVTVSWNSGALTSGVHTFPAVLQSSGLYSLSSVVTVPSSSLGTQTYICNVNHKPSNTKVDKRVEPKSCDKTS

SEQ ID NO: 27720 - protein, 225 aa, Artificial Sequence
  source: /note="Description of Artificial Sequence: Synthetic polypeptide"
LESGGGLVKPGGSLRLSCAASGFTFSSYAMHWVRQAPGKGLEWVAFIWFDGSNERYADSVKGRFTITRDNPKNTLYLQMNSLRVEDTAVYYCVRRGGSILTGFHLDYWGQGTLVTVSSASTKGPSVFPLAPSSKSTSGGTAALGCLVKDYFPEPVTVSWNSGALTSGVHTFPAVLQSSGLYSLSSVVTVPSSSLGTQTYICNVNHKPSNTKVDKRVEPKSCDKTS

SEQ ID NO: 27721 - protein, 228 aa, Artificial Sequence [sequence omitted]

SEQ ID NO: 27722 - protein, 121 aa, Artificial Sequence
  source: /note="Description of Artificial Sequence: Synthetic polypeptide"
QVQLVQSGGQMKKPGESMRISCRASGYEFIDCTLNWIRLAPGKRPEWMGWLKPRGGAVNYARPLQGRVTMTRDVYSDTAFLELRSLTVDDTAVYFCTRGKNCDYNWDFEHWGRGTPVIVSS

SEQ ID NO: 27723 - protein, 10 aa, Artificial Sequence
  source: /note="Description of Artificial Sequence: Synthetic peptide"
QVQSMRTLNG

SEQ ID NO: 27724 - protein, 121 aa, Artificial Sequence
  source: /note="Description of Artificial Sequence: Synthetic polypeptide"
QVQLVQSGGQMKKPGESMRISCQASGYEFIDCTLNWVRLAPGRRPEWMGWLKPRGGAVNYARPLQGRVTMTRDVYSDTAFLELRSLTADDTAVYYCTRGKNCDYNWDFEHWGRGTPVTVSS

SEQ ID NO: 27725 - protein, 130 aa, Artificial Sequence
  source: /note="Description of Artificial Sequence: Synthetic polypeptide"
QVQLVQSGAVIKTPGSSVKISCRASGYNFRDYSIHWVRLIPDKGFEWIGWIKPLWGAVSYARQLQGRVSMTRQLSQDPDDPDWGVAYMEFSGLTPADTAEYFCVRRGSCDYCGDFPWQYWGQGTVVVVSS

SEQ ID NO: 27726 - protein, 130 aa, Artificial Sequence; identical to SEQ ID NO: 27725
  source: /note="Description of Artificial Sequence: Synthetic polypeptide"

SEQ ID NO: 27727 - protein, 125 aa, Artificial Sequence
  source: /note="Description of Artificial Sequence: Synthetic polypeptide"
QVRLSQSGGQMKKPGDSMRISCRASGYEFINCPINWIRLAPGKRPEWMGWMKPRHGAVNYARQLQGRVTMTRDMYSETAFLELRSLTSDDTAVYFCTRGKYCTARDYYNWDFEHWGQGTPVTVSS

SEQ ID NO: 27728 - protein, 125 aa, Artificial Sequence
  source: /note="Description of Artificial Sequence: Synthetic polypeptide"
QVRLSQSGGQMKKPGDSMRISCRASGYEFINCPINWVRLAPGKRPEWMGWMKPRHGAVNYARQLQGRVTMTRDMYSETAFLELRSLTSDDTAVYFCARGKYCTARDYYNWDFEHWGQGTPVTVSS

SEQ ID NO: 27729 - protein, 125 aa, Artificial Sequence
  source: /note="Description of Artificial Sequence: Synthetic polypeptide"
QVRLSQSGGQMKKPGDSMRISCRASGYEFINCPINWVRLAPGKRPEWMGWMKPRHGAVSYARQLQGRVTMTRDMYSETAFLELRSLTSDDTAVYFCARGKYCTARDYYNWDFEHWGQGTPVTVSS

SEQ ID NO: 27730 - protein, 235 aa, Artificial Sequence
  source: /note="Description of Artificial Sequence: Synthetic polypeptide"
QHSQVQSGTQIKTPGASVTLSCGTSGYDFMESLINWVRQEIGKRPEWLGWMNPRGGGVNYAQRFQGKVTMTRDVSSGTAYLTLRGLTSDDTAKYYCVRGKSCCNGRRYCNGADCFNWDFEYWGQGTLVIVSPASTKGPSVFPLAPSSKSTSGGTAALGCLVKDYFPEPVTVSWNSGALTSGVHTFPAVLQSSGLYSLSSVVTVPSSSLGTQTYICNVNHKPSNTKVDKKVEPKSC

SEQ ID NO: 27731 - protein, 224 aa, Artificial Sequence
  source: /note="Description of Artificial Sequence: Synthetic polypeptide"
  MOD_RES (1)..(1): Any amino acid
XVQFVQSGAEVKKPGASVRVSCEASGYSFTDYVLQWIRQAPGQRPEWMGWIKPERGAVSYAPQFQGRLTLTRDLYTETAYMHFKNLRSDDTAIYYCARGVRRDASWWLQFWGQGTLVTVSSASTKGPSVFPLAPSSKSTSGGTAALGCLVKDYFPEPVTVSWNSGALTSGVHTFPAVLQSSGLYSLSSVVTVPSSSLGTQTYICNVNHKPSNTKVDKKVEPKSC

SEQ ID NO: 27732 - protein, 131 aa, Artificial Sequence
  source: /note="Description of Artificial Sequence: Synthetic polypeptide"
QVQLVQSGAAVRKPGASVTVSCKFAEDDDYSPHWVNPAPEHYIHFLRQAPGQQLEWLAWMNPTNGAVNYAWQLHGRLTATRDGSMTTAFLEVRSLRSDDTAVYYCARAQKRGRSEWAYAHWGQGTPVLVSS

SEQ ID NO: 27733 - protein, 236 aa, Artificial Sequence
  source: /note="Description of Artificial Sequence: Synthetic polypeptide"
QVQLVQSGAAVRKPGASVTVSCKFAEDDDYSPYWVNPAPEHFIHFLRQAPGQQLEWLAWMNPTNGAVNYAWYLNGRVTATRDRSMTTAFLEVKSLRSDDTAVYYCARAQKRGRSEWAYAHWGQGTPVVVSSASTKGPSVFPLAPSSKSTSGGTAALGCLVKDYFPEPVTVSWNSGALTSGVHTFPAVLQSSGLYSLSSVVTVPSSSLGTQTYICNVNHKPSNTKVDKKVEPKSCDK

SEQ ID NO: 27734 - protein, 131 aa, Artificial Sequence
  source: /note="Description of Artificial Sequence: Synthetic polypeptide"
QVQLVQSGAAVRKPGASVTVSCKFAEDDDFSPHWVNPAPEHYIHFLRQAPGQQLEWLAWMKPTNGAVNYAWQLQGRVTVTRDRSQTTAFLEVKNLRSDDTAVYYCARAQKRGRSEWAYAHWGQGTPVVISA

SEQ ID NO: 27735 - protein, 131 aa, Artificial Sequence
  source: /note="Description of Artificial Sequence: Synthetic polypeptide"
QVQLVQSGAAVRKPGASISVSCKFADADDYSPHWMNPAPEHYIHFLRQAPGQQLEWLAWMNPTNGAVNYAWYLNGRVTATRDRSMTTAFLEVRSLRSDDTAVYYCARAQKRARSEWAYAHWGQGTPVVVSS

SEQ ID NO: 27736 - protein, 131 aa, Artificial Sequence
  source: /note="Description of Artificial Sequence: Synthetic polypeptide"
QVQLVQSGAAVRKPGASVTVSCKFAEDDDWSPHWVNPAPEHYIHFLRQAPGQQLEWLAWMNPTNGAVNYAWQLNGRLTATRDTSMTTAFLEVKSLRSDDTAVYYCARAQKRGRSEWAYAHWGQGTPVVVSS

SEQ ID NO: 27737 - protein, 125 aa, Artificial Sequence
  source: /note="Description of Artificial Sequence: Synthetic polypeptide"
QVRLSQSGGQMKKPGDSMRISCRASGYEFINCPINWIRLAPGKRPEWMGWMKPRHGAVSYARQLQGRVTMTRDMYSETAFLELRSLTSDDTAVYFCTRGKYCTARDYYNWDFEHWGQGTPVTVSS

SEQ ID NO: 27738 - protein, 125 aa, Artificial Sequence
  source: /note="Description of Artificial Sequence: Synthetic polypeptide"
QVQLVQSGSGVKKPGASVRVSCWTSEDIFERTELIHWVRQAPGQGLEWIGWVKTVTGAVNFGSPDFRQRVSLTRDRDLFTAHMDIRGLTQGDTATYFCARQKFYTGGQGWYFDLWGRGTLIVVSS

SEQ ID NO: 27739 - protein, 125 aa, Artificial Sequence
  source: /note="Description of Artificial Sequence: Synthetic polypeptide"
QVQLVQSGSGVKKPGASVRVSCWTSEDIFERTELIHWVRQAPGQGLEWIGWVKTVTGAVNFGSPNFRHRVSLTRDRDLFTAHMDIRGLTQGDTATYFCARQKFERGGQGWYFDLWGRGTLIVVSS

SEQ ID NO: 27740 - protein, 227 aa, Artificial Sequence
  source: /note="Description of Artificial Sequence: Synthetic polypeptide"
  MOD_RES (1)..(1): Any amino acid
XVHLMQSGTEMKKPGASVRVTCQTSGYTFSDYFIHWLRQVPGRGFEWMGWMNPQWGQVNYARTFQGRVTMTRDVYREVAYLDLRSLTFADTAVYFCARRMRSQDREWDFQHWGQGTRIIVSSASTKGPSVFPLAPSSKSTSGGTAALGCLVKDYFPEPVTVSWNSGALTSGVHTFPAVLQSSGLYSLSSVVTVPSSSLGTQTYICNVNHKPSNTKVDKKVEPKSCDK

SEQ ID NO: 27741 - protein, 261 aa, Artificial Sequence
  source: /note="Description of Artificial Sequence: Synthetic polypeptide"
MKYLLPTAAAGLLLLAAQPAMAEVQLLEQSGAEVKKPGSSVQVSCKASGGTFSMYGFNWVRQAPGHGLEWMGGIIPIFGTSNYAQKFRGRVTFTADQATSTAYMELTNLRSDDTAVYYCARDFGPDWEDGDSYDGSGRGFFDFWGQGTLVTVSSASTKGPSVFPLAPSSKSTSGGTAALGCLVKDYFPEPVTVSWNSGALTSGVHTFPAVLQSSGLYSLSSVVTVPSSSLGTQTYICNVNHKPSNTKVDKKVEPKSCDKTS

SEQ ID NO: 27742 - protein, 261 aa, Artificial Sequence; identical to SEQ ID NO: 27741
  source: /note="Description of Artificial Sequence: Synthetic polypeptide"

SEQ ID NO: 27743 - protein, 261 aa, Artificial Sequence
  source: /note="Description of Artificial Sequence: Synthetic polypeptide"
MKYLLPTAAAGLLLLAAQPAMAEVQLLEQSGAEVKKPGSSVQVSCKASGGTFSMYGFNWVRQAPGHGLEWMGGIIPIFGTSNYAQKFRGRVTFTADQATSTAYMELTNLRSDDTAVYYCARDFGPDWEDGDSYDGSGRGFFDFWGQGTLVTVSSPGTKGPSVFPLAPSSKSTSGGTAALGCLVKDYFPEPVTVSWNSGALTSGVHTFPAVLQSSGLYSLSSVVTVPSSSLGTQTYICNVNHKPSNTKVDKKVEPKSCDKTS

SEQ ID NO: 27744 - protein, 230 aa, Artificial Sequence
  source: /note="Description of Artificial Sequence: Synthetic polypeptide"
EVQLLESGPGLLKPSETLSLTCTVSGGSMINYYWSWIRQPPGERPQWLGHIIYGGTTKYNPSLESRITISRDISKNQFSLRLNSVTAADTAIYYCARVAIGVSGFLNYYYYMDVWGSGTAVTVSSASTKGPSVFPLAPSSKSTSGGTAALGCLVKDYFPEPVTVSWNSGALTSGVHTFPAVLQSSGLYSLSSVVTVPSSSLGTQTYICNVNHKPSNTKVDKKVEPKSCDK

SEQ ID NO: 27745 - protein, 227 aa, Artificial Sequence
  source: /note="Description of Artificial Sequence: Synthetic polypeptide"
SQRLVQSGPQVRKPGSSVRISCETSGYTFNAYILHWFRQAPGRSFEWMGWIKPKFGAVNYAHSFQGRITLTRDIYRETAFLDLTGLRFDDTAVYYCARDRLYDGSSWRLDPWGQGTRVVVSSASTKGPSVFPLAPSSKSTSGGTAALGCLVKDYFPEPVTVSWNSGALTSGVHTFPAVLQSSGLYSLSSVVTVPSSSLGTQTYICNVNHKPSNTKVDKKVEPKSCDK

SEQ ID NO: 27746 - protein, 230 aa, Artificial Sequence
  source: /note="Description of Artificial Sequence: Synthetic polypeptide"
QVQLVQSGAEVKKPGASVKVSCQASGYRFSNFVIHWVRQAPGQRFEWMGWINPYNGNKEFSAKFQDRVTFTADTSANTAYMELRSLRSADTAVYYCARVGPYSWDDSPQDNYYMDVWGKGTTVIVSSASTKGPSVFPLAPSSKSTSGGTAALGCLVKDYFPEPVTVSWNSGALTSGVHTFPAVLQSSGLYSLSSVVTVPSSSLGTQTYICNVNHKPSNTKVDKKVEPKSC

SEQ ID NO: 27747 - protein, 126 aa, Artificial Sequence
  source: /note="Description of Artificial Sequence: Synthetic polypeptide"
LLESGPGLVKPSETLSLTCTVSGGSLSSFDWNWIRQPAGKGLEWIGRIYPSGNTHYNPSLRSRVTMSRDTSKNQFSVKLTSVTAADTALYYCARENTGRTIEEIGNFFDIWGQGTLVTVSSASTKG

SEQ ID NO: 27748 - protein, 122 aa, Artificial Sequence
  source: /note="Description of Artificial Sequence: Synthetic polypeptide"
LLKSGGGLVKPGGSLRLSCVISAFSFSGYNINWVRQAPGKGLEWVSSISMSTGSLSYADSMKGRFTISRDNAKNSVYLEMSSLTAEDTAMYYCAARTPLVGRALDIWGQGTVVTVSSASTKG

SEQ ID NO: 27749 - protein, 128 aa, Artificial Sequence
  source: /note="Description of Artificial Sequence: Synthetic polypeptide"
LLESGGGLVKPGGSLRLSCSASGFTFSSYGMNWVRQAPGKGPEWVAYISSSRKYTEYADSVKGRFTISRENAKYSVFLQLDSLTAEDTAIYYCARGRDFYSGFGRRDDFHLHYMDVWGKGTTVTVSSA

SEQ ID NO: 27750 - protein, 126 aa, Artificial Sequence
  source: /note="Description of Artificial Sequence: Synthetic polypeptide"
LLEQSGGGLVQPGGSLRISCVASGDIFYSYAMSWVRQAPGKGLEWVASISGTGGSNYYADSVKGRFTISRDNSKSTLYLQMNSLRAEDTALYYCARDRGPRIGIRGWFDSWGQGTLVTVSSASTKG

SEQ ID NO: 27751 - protein, 124 aa, Artificial Sequence
  source: /note="Description of Artificial Sequence: Synthetic polypeptide"
LLESGGGLVQPGGSLRLSCAASGFLYSSFAMSWVRQAPGKGLAWVSTISASGGSTKYADSVKGRFIISRDNSKNTIYLQMDSLRAEDTAVYYCAKNFRAFARDPWGDWGQGTLVTVSSASASTK

SEQ ID NO: 27752 - protein, 124 aa, Artificial Sequence
  source: /note="Description of Artificial Sequence: Synthetic polypeptide"
LEQSGAEVKKPGASVKVSCQASGYRFSNFVIHWVRQAPGQRFEWMGWINPYNGNKEFSAKFQDRVTFTADTSANTAYMELRSLRSADTAVYYCARVGPYSWDDSPQDNYYMDVWGKGTTVIVSS

SEQ ID NO: 27753 - protein, 124 aa, Artificial Sequence
  source: /note="Description of Artificial Sequence: Synthetic polypeptide"
LEQSGAEVKKPGASVKVSCQASGYRFSNFVIHWVRQAPGQRFEWMGWINPYNGNKEFSAKFQDRVTFTADTDANTAYMELRSLRSADTAIYYCARVGPYTWDDSPQDNYYMDVWGKGTKVIVSS

SEQ ID NO: 27754 - protein, 124 aa, Artificial Sequence
  source: /note="Description of Artificial Sequence: Synthetic polypeptide"
LEQSGAEVKKPGASVKVSCQASGYRFSNFVIHWVRQAPGQRFEWMGWINPYNGNKEFSAKFQDRVTFTADTDANTAYMELRSLRSTDTAIYYCARVGPYTWDDSPQDNYYMDVWGKGTKVIVSS

SEQ ID NO: 27755 - protein, 112 aa, Artificial Sequence
  source: /note="Description of Artificial Sequence: Synthetic polypeptide"
LEESGGGLVKAGGSLRLSCVGSGFTFSSAWMAWVGQAPGRGLEWVGLIKSKADGETTDYATPVKGRFSISRNNLEDTVYLQMDSLRADDTAVYYCATQKPRYFDLLSGQYRR

SEQ ID NO: 27756 - protein, 125 aa, Artificial Sequence [sequence omitted]

SEQ ID NO: 27757 - protein, 125 aa, Artificial Sequence [sequence omitted]

SEQ ID NO: 27758 - protein, 125 aa, Artificial Sequence
  source: /note="Description of Artificial Sequence: Synthetic polypeptide"
LEQSGEAVVQPGRSLRLSCAASGFIFRNYAMHWVRQAPGKGLEWVALIKYDGRNKYYADSVKGRFTISRDNSKNTLYLQMNSLRAEDTAVYYCARDIGLKGEHYDILTAYGPDYWGQGTLVTVSS

SEQ ID NO: 27759 - protein, 125 aa, Artificial Sequence
  source: /note="Description of Artificial Sequence: Synthetic polypeptide"
LEESGEAVVQPGTSLRLSCAASGFTFRNYAMHWVRQAPGKGLEWVALIKYDGRNKYYADSVKGRFSISRDNSKNTLYLEMNSLRAEDTAVYYCARDIGLKGEHYDILTAYGPDYWGQGALVTVSS

SEQ ID NO: 27760 - protein, 128 aa, Artificial Sequence
  source: /note="Description of Artificial Sequence: Synthetic polypeptide"
LEQSGGGVVKPGGSLRLSCEGSGFTFPNAWMTWVRQSPGKGLEWVASIKSKFDGGSPHYAAPVEGRFTISRNDLEDKVFLQMNGLKAEDTGVYYCATRYPRYSEMMGGVRKHFYMDVWGKGTTVSVSS

SEQ ID NO: 27761 - protein, 108 aa, Artificial Sequence
  source: /note="Description of Artificial Sequence: Synthetic polypeptide"
SYVRPLSVALGETASISCGRQALGSRAVQWYQHRPGQAPILLIYNNQDRPSGIPERFSGTPDINFGTRATLTISGVEAGDEADYYCHMWDSRSGFSWSFGGATRLTVL

SEQ ID NO: 27762 - protein, 107 aa, Artificial Sequence
  source: /note="Description of Artificial Sequence: Synthetic polypeptide"
SSLPLSVAPGATAKIACGEKSFASRAVQWYQQKPGQAPVLIIYNNQDRPAGVSERFSGTPDVGFGSTATLTISRVEAGDEADYYCHKWDSRSPLSWVFGGGTQLTVL

SEQ ID NO: 27763 - protein, 108 aa, Artificial Sequence
  source: /note="Description of Artificial Sequence: Synthetic polypeptide"
SYVRPLSVALGETARISCGRQALGSRAVQWYQHRPGQAPILLIYNNQDRPSGIPERFSGTPDINFGTRATLTISGVEAGDEADYYCHMWDSRSGFSWSFGGATRLTVL

SEQ ID NO: 27764 - protein, 108 aa, Artificial Sequence; identical to SEQ ID NO: 27763
  source: /note="Description of Artificial Sequence: Synthetic polypeptide"

SEQ ID NO: 27765 - protein, 105 aa, Artificial Sequence
  source: /note="Description of Artificial Sequence: Synthetic polypeptide"
SFVSVAPGQTARITCGEESLGSRSVIWYQQRPGQAPSLIMYNNHDRPSGIPERFSGSPGSTFGTTATLTITSVEAGDEADYYCHIWDSRRPTNWVFGEGTTLTVL

SEQ ID NO: 27766 - protein, 105 aa, Artificial Sequence
  source: /note="Description of Artificial Sequence: Synthetic polypeptide"
SFVSVAPGQTARITCGEESLGSRSVIWYQQRPGQAPSLIIYNNNDRPSGIPERFSGSPGSTFGTTATLTITSVEAGDEADYYCHIWDSRRPTNWVFGEGTTLTVL

SEQ ID NO: 27767 - protein, 107 aa, Artificial Sequence
  source: /note="Description of Artificial Sequence: Synthetic polypeptide"
SSLPLSLAPGATAKIPCGEKSRGSRAVQWYQQKPGQAPTLIIYNNQDRPAGVSERYSGNPDVAIGVTATLTISRVEAGDEAEYYCHYWDSRSPISWVFGGWTQLTVL

SEQ ID NO: 27768 - protein, 108 aa, Artificial Sequence; identical to SEQ ID NO: 27763
  source: /note="Description of Artificial Sequence: Synthetic polypeptide"

SEQ ID NO: 27769 - protein, 105 aa, Artificial Sequence
  source: /note="Description of Artificial Sequence: Synthetic polypeptide"
SSMSVSPGETAKITCGEKSIGSRAVQWYQKKPGQPPSLIIYNNQDRPSGVPERFSASPDIEFGTTATLTITNVEAGDEADYYCHIYDARRPTNWVFDRGTTLTVL

SEQ ID NO: 27770 - protein, 105 aa, Artificial Sequence
  source: /note="Description of Artificial Sequence: Synthetic polypeptide"
SSMSVSPGETAKISCGKESIGSRAVQWYQQKSGQPPSLIIYNNQDRPSGVPERFSATPDFGAGTTATLTITNVEADDEADYYCHIYDARGGTNWVFDRGATLTVL

SEQ ID NO: 27771 - protein, 105 aa, Artificial Sequence
  source: /note="Description of Artificial Sequence: Synthetic polypeptide"
SDISVAPGETARISCGEKSLGSRAVQWYQHRAGQAPSLIIYNNQDRPSGIPERFSGSPDSPFGTTATLTITSVEAGDEADYYCHIWDSRVPTKWVFGGGTTLTVL

SEQ ID NO: 27772 - protein, 105 aa, Artificial Sequence; identical to SEQ ID NO: 27766
  source: /note="Description of Artificial Sequence: Synthetic polypeptide"

SEQ ID NO: 27773 - protein, 112 aa, Artificial Sequence
  source: /note="Description of Artificial Sequence: Synthetic polypeptide"
  MOD_RES (2)..(2): Any amino acid
  MOD_RES (21)..(21): Any amino acid
  MOD_RES (25)..(25): Any amino acid
  MOD_RES (67)..(68): Any amino acid
  MOD_RES (79)..(79): Any amino acid
  MOD_RES (97)..(97): Any amino acid
  MOD_RES (100)..(100): Any amino acid
SXVRPQPPSLSVAPGETARIXCGEXSLGSRAVQWYQQRPGQAPSLIIYNNQDRPSGIPERFSGSPDXXFGTTATLTITXVEAGDEADYYCHIWDSRXPTXWVFGGGTTLTVL

SEQ ID NO: 27774 - protein, 326 aa, Artificial Sequence
  source: /note="Description of Artificial Sequence: Synthetic polypeptide"
ASTKGPSVFPLAPCSRSTSESTAALGCLVKDYFPEPVTVSWNSGALTSGVHTFPAVLQSSGLYSLSSVVTVPSSSLGTKTYTCNVDHKPSNTKVDKRVESKYGPPCPPCPAPEFEGGPSVFLFPPKPKDTLMISRTPEVTCVVVDVSQEDPEVQFNWYVDGVEVHNAKTKPREEQFNSTYRVVSVLTVLHQDWLNGKEYKCKVSNKGLPSSIEKTISKAKGQPREPQVYTLPPSQEEMTKNQVSLTCLVKGFYPSDIAVEWESNGQPENNYKTTPPVLDSDGSFFLYSRLTVDKSRWQEGNVFSCSVMHEALHNHYTQKSLSLSLG

SEQ ID NO: 27775 - protein, 326 aa, Artificial Sequence; identical to SEQ ID NO: 4412
  source: /note="Description of Artificial Sequence: Synthetic polypeptide"

SEQ ID NO: 27776 - protein, 329 aa, Artificial Sequence
  source: /note="Description of Artificial Sequence: Synthetic polypeptide"
ASTKGPSVFPLAPSSKSTSGGTAALGCLVKDYFPEPVTVSWNSGALTSGVHTFPAVLQSSGLYSLSSVVTVPSSSLGTQTYICNVNHKPSNTKVDKKVEPKSCDKTHTCPPCPAPEFEGGPSVFLFPPKPKDTLMISRTPEVTCVVVDVSHEDPEVKFNWYVDGVEVHNAKTKPREEQYNSTYRVVSVLTVLHQDWLNGKEYKCKVSNKALPASIEKTISKAKGQPREPQVYTLPPSRDELTKNQVSLTCLVKGFYPSDIAVEWESNGQPENNYKTTPPVLDSDGSFFLYSKLTVDKSRWQQGNVFSCSVMHEALHNHYTQKSLSLSPG

SEQ ID NO: 27777 - protein, 326 aa, Artificial Sequence
  source: /note="Description of Artificial Sequence: Synthetic polypeptide"
ASTKGPSVFPLAPCSRSTSESTAALGCLVKDYFPEPVTVSWNSGALTSGVHTFPAVLQSSGLYSLSSVVTVPSSSLGTKTYTCNVDHKPSNTKVDKRVESKYGPPCPSCPAPEFLGGPSVFLFPPKPKDTLMISRTPEVTCVVVDVSQEDPEVQFNWYVDGVEVHNAKTKPREEQFNSTYRVVSVLTVLHQDWLNGKEYKCKVSNKGLPSSIEKTISKAKGQPREPQVYTLPPSQEEMTKNQVSLTCLVKGFYPSDIAVEWESNGQPENNYKTTPPVLDSDGSFFLYSRLTVDKSRWQEGNVFSCSVMHEALHNHYTQKSLSLSLG

SEQ ID NO: 27778 - protein, 238 aa, Artificial Sequence
  source: /note="Description of Artificial Sequence: Synthetic polypeptide"
EVQLVESGGGLIRPGGSLRLSCKGSGFIFENFGFGWVRQGPGKGLEWVSGTNWNGGDSRYGDSVKGRFTISRDNSNNFVYLQMNSLRPEDTAIYYCARGTDYTIDDQGIRYQGSGTFWYFDVWGRGTLVTVSSASTKGPSVFPLAPSSKSTSGGTAALGCLVKDYFPEPVTVSWNSGALTSGVHTFPAVLQSSGLYSLSSVVTVPSSSLGTQTYICNVNHKPSNTKVDKKVEPKSCDK

SEQ ID NO: 27779 - protein, 231 aa, Artificial Sequence
  source: /note="Description of Artificial Sequence: Synthetic polypeptide"
QVQVVQSGAEVRKPGASVKVSCKVSGFTLTGLSIHWVRQAPGKGLEWMGGFGPEENEIIYAQKFQGRVSMTEDTSTNTAYMELSSLRSEDTAVYYCATGGNYYNLWTGYYPLAYWGQGTLVTVSSASTKGPSVFPLAPSSKSTSGGTAALGCLVKDYFPEPVTVSWNSGALTSGVHTFPAVLQSSGLYSLSSVVTVPSSSLGTQTYICNVNHKPSNTKVDKKVEPKSCDKT

SEQ ID NO: 27780 - protein, 226 aa, Artificial Sequence
  source: /note="Description of Artificial Sequence: Synthetic polypeptide"
QVQLQQWGPGLLKPSETLSLTCAVYGGSFGRYYWSWIRQSSGEGLEWLGQIDHTGSTTYNPSLKGRVTISIDSSTNQFSLKVTSVIAADTAVYYCARAPSGYPGVSLYQYYGLDVWGQGTTVTVSSASTKGPSVFPLAPSSKSTSGGTAALGCLVKDYFPEPVTVSWNSGALTSGVHTFPAVLQSSGLYSLSSVVTVPSSSLGTQTYICNVNHKPSNTKVDKKVEP

SEQ ID NO: 27781 - protein, 193 aa, Artificial Sequence
  source: /note="Description of Artificial Sequence: Synthetic polypeptide"
SVGDRVTITCRASQSISNWLAWYQQKPGRAPKLLMYKASSLKSGVPSRFSGSGSGTEFTLTISSLQSDDFATYYCQQHDSSPYTFGQGTKLEIKRTVAAPSVFIFPPSDEQLKSGTASVVCLLNNFYPREAKVQWKVDNALQSGNSQESVTEQDSKDSTYSLSSTLTLSKADYEKHKVYACEVTHQGLSSPVT

SEQ ID NO: 27782 - protein, 119 aa, Artificial Sequence
  source: /note="Description of Artificial Sequence: Synthetic polypeptide"
EVQLVESGGGLIQPGGSLRLSCAASGFTVSSSSMSWVRQAPEKGLEWVSVVYSGGNTYNADSVKGRFSISRDNSKNTVYLQMNSLRADDTAVYYCARDLGGGDRSSDYWGQGTLVTVSS

SEQ ID NO: 27783 - protein, 129 aa, Artificial Sequence
  source: /note="Description of Artificial Sequence: Synthetic polypeptide"
EVQLVESAAEVKKPGASVKVSCKASGYTFTSYGISWVRQAPGQGLQWMGWISAYNGNTKFAQEFKGRVTMTTDTSATTAYMELRSLRSDDTAVYYCARRNYYDSGSYYIRDGDYSMDVWGQGTLVTVSS

SEQ ID NO: 27784 - protein, 130 aa, Artificial Sequence
  source: /note="Description of Artificial Sequence: Synthetic polypeptide"
QGQLVQSGGELKKPGASVKISCKTSGYRFSFYHIWIRQLVGRGPEWMGWISPYNGGTNLAPELRGRLVLTTEREVVDTMTLSTGTAHMELRNLRSDDTGIYFCAKGLLRDGSSTWLPHLWGQGTLLTVSS

SEQ ID NO: 27785 - protein, 131 aa, Artificial Sequence
  source: /note="Description of Artificial Sequence: Synthetic polypeptide"
QGQLVQSGGELKRPGASVKISCKTSGYRFSSYHINWIRQVIGRGPEWMGWISPYSGGTNLAPEFRGRLVLTTEREVVDTMTLSTGTAHMELRNLKSDDTGIYFCAKGLLRDGSSTWLPHLWGQGTLLTVSS

SEQ ID NO: 27786 - protein, 131 aa, Artificial Sequence
  source: /note="Description of Artificial Sequence: Synthetic polypeptide"
QGQLVQSGGELKKPGASVKISCKTSGYRFSFYHINWIRQVVGRGPEWMGWISPYNGGTNLAPEFRGRLVLTTEREVVDTMTMSTGTAHMELRNLKSDDTGLYFCAKGLLRDGPSTWLPHLWGQGTLLTVSS

SEQ ID NO: 27787 - protein, 131 aa, Artificial Sequence
  source: /note="Description of Artificial Sequence: Synthetic polypeptide"
QGQLVQSGAELKKPGASVKISCKTSGYKFSFFHINWIRQTAGRGPEWLGWISPYSGDKNYAPAFQDRVIMTTDKEVPVTSFTSTGTAYLEIRSLKPDDTGIYFCARGLLRDGSSTWLPYLWGQGTLLTVSS

SEQ ID NO: 27788 - protein, 130 aa, Artificial Sequence
  source: /note="Description of Artificial Sequence: Synthetic polypeptide"
QGQLVQSGAELKKPGASVKISCKTSGYRFNFYHIWIRQTAGRGPEWMGWISPYSGDKNLAPAFQDRVIMTTDTEVPVTSFTSTGAAYMEIRNLKFDDTGTYFCAKGLLRDGSSTWLPYLWGQGTLLTVSS

SEQ ID NO: 27789 - protein, 126 aa, Artificial Sequence
  source: /note="Description of Artificial Sequence: Synthetic polypeptide"
EVQLVESGGGVVRPGGSLRLSCAASGFAFGEYGMSWVRQAPGKGLEWVSGINWNGGSTGYADSVQGRFTTSRDNAKNSLYLQMNSLRAEDTALYYCARDENYDILTGNYYYGMDVWGQGTTVTVSS

SEQ ID NO: 27790 - protein, 481 aa, Artificial Sequence
  source: /note="Description of Artificial Sequence: Synthetic polypeptide"
MKHLWFFLLLVAAPRWVLSQVQLQESGPGLVRPSETLSVTCIVSGGSISNYYWTWIRQSPGKGLEWIGYISDRETTTYNPSLNSRAVISRDTSKNQLSLQLRSVTTADTAIYFCATARRGQRIYGVVSFGEFFYYYYMDVWGKGTAVTVSSASTKGPSVFPLAPSSKSTSGGTAALGCLVKDYFPEPVTVSWNSGALTSGVHTFPAVLQSSGLYSLSSVVTVPSSSLGTQTYICNVNHKPSNTKVDKRVEPKSCDKTHTCPPCPAPELLGGPSVFLFPPKPKDTLMISRTPEVTCVVVDVSHEDPEVKFNWYVDGVEVHNAKTKPREEQYNSTYRVVSVLTVLHQDWLNGKEYKCKVSNKALPAPIEKTISKAKGQPREPQVYTLPPSREEMTKNQVSLTCLVKGFYPSDIAVEWESNGQPENNYKTTPPVLDSDGSFFLYSKLTVDKSRWQQGNVFSCSVMHEALHNHYTQKSLSLSPGK

SEQ ID NO: 27791 - protein, 462 aa, Artificial Sequence
  source: /note="Description of Artificial Sequence: Synthetic polypeptide"
QMQLQESGPGLVKPSETLSLTCSVSGASISDSYWSWIRRSPGKGLEWIGYVHKSGDTNYSPSLKSRVNLSLDTSKNQVSLSLVAATAADSGKYYCARTLHGRRIYGIVAFNEWFTYFYMDVWGNGTQVTVSSASTKGPSVFPLAPSSKSTSGGTAALGCLVKDYFPEPVTVSWNSGALTSGVHTFPAVLQSSGLYSLSSVVTVPSSSLGTQTYICNVNHKPSNTKVDKRVEPKSCDKTHTCPPCPAPELLGGPSVFLFPPKPKDTLMISRTPEVTCVVVDVSHEDPEVKFNWYVDGVEVHNAKTKPREEQYNSTYRVVSVLTVLHQDWLNGKEYKCKVSNKALPAPIEKTISKAKGQPREPQVYTLPPSREEMTKNQVSLTCLVKGFYPSDIAVEWESNGQPENNYKTTPPVLDSDGSFFLYSKLTVDKSRWQQGNVFSCSVMHEALHNHYTQKSLSLSPGK

SEQ ID NO: 27792 - protein, 472 aa, Artificial Sequence
  source: /note="Description of Artificial Sequence: Synthetic polypeptide"
MKHLWIFLLLVATPRWVESQLHLQESGPGLVKPPETLSLTCSVSGASINDAYWSWIRQSPGKRPEWVGYVHHSGDTNYNPSLKRRVTFSLDTAKNEVSLKLVDLTAADSATYFCARALHGKRIYGIVALGELFTYFYMDVWGKGTAVTVSSASTKGPSVFPLAPSSKSTSGGTAALGCLVKDYFPEPVTVSWNSGALTSGVHTFPAVLQSSGLYSLSSVVTVPSSSLGTQTYICNVNHKPSNTKVDKRVEPKSCDKTHTCPPCPAPELLGGPSVFLFPPKPKDTLMISRTPEVTCVVVDVSHEDPEVKFNWYVDGVEVHNAKTKPREEQYNSTYRVVSVLTVLHQDWLNGKEYKCKVSNKALPAPIEKTISKAKGQPREPQVYTLPPSREEMTKNQVSLTCLVKGFYPSDIAVEWESNGQPENNYKTTPPVLDSDGSFFLYSKLTVDKSRWQQGNVFSCSVMHEALHNHYTQ

SEQ ID NO: 27793 - protein, 482 aa, Artificial Sequence
  source: /note="Description of Artificial Sequence: Synthetic polypeptide"
MKHLWFFLLLVAAPRWVVSQVHLQESGPGLVTPSETLSLTCTVSNGSVSGRFWSWIRQSPGRGLEWIGYFSDTDRSEYNPSLRSRLTLSVDRSKNQLSLRLKSVTAADSATYYCARAQQGKRIYGIVSFGEFFYYYYMDAWGKGTPVTVSSASTKGPSVFPLAPSSKSTSGGTAALGCLVICDYFPEPVTVSWNSGALTSGVHTFPAVLQSSGLYSLSSVVTVPSSSLGTQTYICNVNHKPSNTKVDKRVEPKSCDKTHTCPPCPAPELLGGPSVFLFPPKPKDTLMISRTPEVTCVVVDVSHEDPEVKFNWYVDGVEVHNAKTKPREEQYNSTYRVVSVLTVLHQDWLNGKEYKCKVSNKALPAPIEKTISKAKGQPREPQVYTLPPSREEMTKNQVSLTCLVKGFYPSDIAVEWESNGQPENNYKTTPPVLDSDGSFFLYSKLTVDKSRWQQGNVFSCSVMHEALHNHYTQKSLSLSPGK

SEQ ID NO: 27794 - protein, 481 aa, Artificial Sequence
  source: /note="Description of Artificial Sequence: Synthetic polypeptide"
MKHLWFFLLLVAAPRWVLSQMQLQESGPGLVKPSETLSLTCSVSGASISDSYWSWIRRSPGKGLEWIGYVHKSGDTNYIPSLKSRVNLSLDTSKNQVSLSLVAATAADSGKYYCARTLHGRRIYGIVAFNEWFTYFYMDVWGNGTQVTVSSASTKGPSVFPLAPSSKSTSGGTAALGCLVKDYFPEPVTVSWNSGALTSGVHTFPAVLQSSGLYSLSSVVTVPSSSLGTQTYICNVNHKPSNTKVDKRVEPKSCDKTHTCPPCPAPELLGGPSVFLFPPKPKDTLMISRTPEVTCVVVDVSHEDPEVKFNWYVDGVEVHNAKTKPREEQYNSTYRVVSVLTVLHQDWLNGKEYKCKVSNKALPAPIEKTISKAKGQPREPQVYTLPPSREEMTKNQVSLTCLVKGFYPSDIAVEWESNGQPENNYKTTPPVLDSDGSFFLYSKLTVDKSRWQQGNVFSCSVMHEALHNHYTQKSLSLSPGK

SEQ ID NO: 27795 - protein, 481 aa, Artificial Sequence
  source: /note="Description of Artificial Sequence: Synthetic polypeptide"
MKHLWFFLLLVAAPRWVVSQVHLQESGPGLVTPSETLSLTCTVSNGSVSGRFWSWIRQSPGRGLEWIGYFSDTDRSEYNPSLRSRLTLSVDRSKNQLSLKLKSVTAADSATYYCARAQQGKRIYGIVSFGELFYYYYMDAWGKGTPVTVSSASTKGPSVFPLAPSSKSTSGGTAALGCLVKDYFPEPVTVSWNSGALTSGVHTFPAVLQSSGLYSLSSVVTVPSSSLGTQTYICNVNHKPSNTKVDKRVEPKSCDKTHTCPPCPAPELLGGPSVFLFPPKPKDTLMISRTPEVTCVVVDVSHEDPEVKFNWYVDGVEVHNAKTKPREEQYNSTYRVVSVLTVLHQDWLNGKEYKCKVSNKALPAPIEKTISKAKGQPREPQVYTLPPSREEMTKNQVSLTCLVKGFYPSDIAVEWESNGQPENNYKTTPPVLDSDGSFFLYSKLTVDKSRWQQGNVFSCSVMHEALHNHYTQKSLSLSPGK

SEQ ID NO: 27796 - protein, 481 aa, Artificial Sequence
  source: /note="Description of Artificial Sequence: Synthetic polypeptide"
MKHLWFFLLLVAAPRWVLSQVHLQESGPGLVKPSETLSLTCNVSGTLVRDNYWSWIRQPLGKQPEWIGYVHDSGDTNYNPSLKSRVHLSLDKSKNLVSLRLTGVTAADSAIYYCATTKHGRRIYGVVAFKEWFTYFYMDVWGKGTSVTVSSASTKGPSVFPLAPSSKSTSGGTAALGCLVKDYFPEPVTVSWNSGALTSGVHTFPAVLQSSGLYSLSSVVTVPSSSLGTQTYICNVNHKPSNTKVDKRVEPKSCDKTHTCPPCPAPELLGGPSVFLFPPKPKDTLMISRTPEVTCVVVDVSHEDPEVKFNWYVDGVEVHNAKTKPREEQYNSTYRVVSVLTVLHQDWLNGKEYKCKVSNKALPAPIEKTISKAKGQPREPQVYTLPPSREEMTKNQVSLTCLVKGFYPSDIAVEWESNGQPENNYKTTPPVLDSDGSFFLYSKLTVDKSRWQQGNVFSCSVMHEALHNHYTQKSLSLSPGK

SEQ ID NO: 27797 - protein, 490 aa, Artificial Sequence
  source: /note="Description of Artificial Sequence: Synthetic polypeptide"
MDWIWRILFLVAAVASAHSQVQLVQSGPEVKKPGSSVKVSCKASGNTFSKYDVHWVRQATGQGLEWVGWMSHEGDKTESAQRFKGRVTFTRDTSASTAYMELRGLTSDDTAIYYCTRGSKHRLRDYVLYDDYGLINYQEWNDYLEFLDVWGHGTAVTVSSASTKGPSVFPLAPSSKSTSGGTAALGCLVKDYFPEPVTVSWNSGALTSGVHTFPAVLQSSGLYSLSSVVTVPSSSLGTQTYICNVNHKSPNTKVDKRVEPKSCDKTHTCPPCPAPELLGGPSVFLFPPKPKDTLMISRTPEVTCVVVDVSHEDPEVKFNWYVDGVEVHNAKTKPREEQYNSTYRVVSVLTVLHQDWLNGKEYKCKVSNKALPAPIEKTISKAKGQPREPQVYTLPPSREEMTKNQVSLTCLVKGFYPSDIAVEWESNGQPENNYKTTPPVLDSDGSFFLYSKLTVDKSRWQQGNVFSCSVMHEALHNHYTQKSLSLSPGK

SEQ ID NO: 27798 - protein, 491 aa, Artificial Sequence
  source: /note="Description of Artificial Sequence: Synthetic polypeptide"
  MOD_RES (32)..(32): Selenocysteine
MDWIWRILFLVAAVASAHSQVQLVQSGAEVIXCPGSSVKVSCKASGNTFRKYDVHWVRQATGQGLEWVGWMSHEGDKTESAQRFKGRVSFTRDNSASTAYIELRGLTSDDTAIYYCTGGSKHRLRDYVLYDDYGLINQQEWNDYLEFLDVWGHGTAVTVSSASTKGPSVFPLAPSSKSTSGGTAALGCLVKDYFPEPVTVSWNSGALTSGVHTFPAVLQSSGLYSLSSVVTVPSSSLGTQTYICNVNHKPSNTKVDKRVEPKSCDKTHTCPPCPAPELLGGPSVFLFPPKPKDTLMISRTPEVTCVVVDVSHEDPEVKFNWYVDGVEVHNAKTKPREEQYNSTYRVVSVLTVLHQDWLNGKEYKCKVSNKALPAPIEKTISKAKGQPREPQVYTLPPSREEMTKNQVSLTCLVKGFYPSDIAVEWESNGQPENNYKTTPPVLDSDGSFFLYSKLTVDKSRWQQGNVFSCSVMHEALHNHYTQKSLSLSPGK

SEQ ID NO: 27799 - protein, 490 aa, Artificial Sequence
  source: /note="Description of Artificial Sequence: Synthetic polypeptide"
MDWIWRILFLVAAVASAHAQVQLEQSGAEVKKPGSSVKVSCKASGNTFSKYDVHWVRQATGQGLEWVGWMSHEGDKTESAQRFKGRVTFTRDTSASTAYMELRGLTSDDTAIYYCTRGSKHRLRDYVLYDDYGLINYQEWNDYLEFLDVWGHGTAVTVSSASTKGPSVFPLAPSSKSTSGGTAALGCLVKDYFPEPVTVSWNSGALTSGVHTFPAVLQSSGLYSLSSVVTVPSSSLGTQTYICNVNHKPSNTKVDKRVEPKSCDKTHTCPPCPAPELLGGPSVFLFPPKPKDTLMISRTPEVTCVVVDVSHEDPEVKFNWYVDGVEVHNAKTKPREEQYNSTYRVVSVLTVLHQDWLNGKEYKCKVSNKALPAPIEKTISKAKGQPREPQVYTLPPSREEMTKNQVSLTCLVKGFYPSDIAVEWESNGQPENNYKTTPPVLDSDGSFFLYSKLTVDKSRWQQGNVFSCSVMHEALHNHYTQKSLSLSPGK

SEQ ID NO: 27800 - protein, 495 aa, Artificial Sequence
  source: /note="Description of Artificial Sequence: Synthetic polypeptide"
MDWIWRILFLVAAVASAHSQVQLVQSGPEVKKPGSSVKVSCKASGNTFSKYDVHWVRQATGQGLEWVGWISHERDKTESAQRFKGRVTFTRDTSATTAYMELRGLTSDDTAIYYCTRGSKHRLRDYVLYDDYGLINYQEWNDYLEFLDVWGHGTAVTVSSASTKGPSVFPLAPSSKSTSGGTAALGCLVICDYFPEPVTVSWNSGALTSGVHTFPAVLQSSGLYSLSSVVTVPSSSLGTQTYICNVNHKPSNTKVDICRVEPKSCDKTHTCPPCPAPELLGGPSVFLFPPKPKDTLMISRTPEVTCVVVDVSHEDPEVKFNWYVDGVEVHNAKTICPREEQYNSTYRVVSVLTVLHQDWLNGICEYKCKVSNICALPAPIEKTISKAKGQPREPQVYTLPPSREEMTKNQVSLTCLVKGFYPSDIAVEWESNGQPENNYKTTPPVLDSDGSFFLYSKLTVDKSRWQQGNVFSCSVMHEALHNHYTQKSLSLSPGK

SEQ ID NO: 27801 - protein, 489 aa, Artificial Sequence
  source: /note="Description of Artificial Sequence: Synthetic polypeptide"
MDWIWRILFLVAAATSAHSQVQLVQSGAEVKKPGSSVKVSCKASGNSFSNHDVHWVRQATGQGLEWMGWMSHEGDKTGLAQKFQGRVTITRDSGASTVYMELRGLTADDTAIYYCLTGSKHRLRDYFLYNEYGPNYEEWGDYLATLDVWGHGTAVTVSSASTKGPSVFPLAPSSKSTSGGTAALGCLVKDYFPEPVTVSWNSGALTSGVHTFPAVLQSSGLYSLSSVVTVPSSSLGTQTYICNVNHKPSNTKVDKRVEPKSCDKTHTCPPCPAPELLGGPSVFLFPPKPKDTLMISRTPEVTCVVVDVSHEDPEVKFNWYVDGVEVHNAKTKPREEQYNSTYRVVSVLTVLHQDWLNGKEYKCKVSNKALPAPIEKTISKAKGQPREPQVYTLPPSREEMTKNQVSLTCLVKGFYPSDIAVEWESNGQPENNYKTTPPVLDSDGSFFLYSKLTVDKSRWQQGNVFSCSVMHEALHNHYTQKSLSLSPGK

SEQ ID NO: 27802 - protein, 121 aa, Artificial Sequence
  source: /note="Description of Artificial Sequence: Synthetic polypeptide"
EVQLVQSGAEVKKPGASVKVSCKASGYTFTGYYMHWVRQAPGQGLEWMGWINPNSGGTNYAQKFQGRVTMTRDTSISTAYMELSRLRSDDTAVYYCARGPIAAATHAFDIWGQGTMVTVSS

SEQ ID NO: 27803 - protein, 131 aa, Artificial Sequence
  source: /note="Description of Artificial Sequence: Synthetic polypeptide"
QGQLVQSGAELKKPGGSVKISCKTSGYRFNFYHINWIRQTAGRGPEWMGWISPYSGDKNLAPAFQDRVIMTTDKEVPVTAFTSTGTAYMEIRNLKFDDTGIYFCAKGLLRDGSSTWLPYLWGQGTLLTVSS

SEQ ID NO: 27804 - protein, 484 aa, Artificial Sequence
  source: /note="Description of Artificial Sequence: Synthetic polypeptide"
MKHLWFFLLLVAAPRWVLSQPQLQESGPTLVEASETLSLTCAVSGDSTAACNSFWGWVRQPPGKGLEWVGSLSHCASYWNRGWTYHNPSLKSRLTLALDTPKNLVFLKLNSVTAADTATYYCARFGGEVLRYTDWPKPAWVDLWGRGTLVTVSSASTKGPSVFPLAPSSKSTSGGTAALGCLVKDYFPEPVTVSWNSGALTSGVHTFPAVLQSSGLYSLSSVVTVPSSSLGTQTYICNVNHKPSNTKVDKRVEPKSCDKTHTCPPCPAPELLGGPSVFLFPPKPKDTLMISRTPEVTCVVVDVSHEDPEVKFNWYVDGVEVHNAKTKPREEQYNSTYRVVSVLTVLHQDWLNGKEYKCKVSNKALPAPIEKTISKAKGQPREPQVYTLPPSREEMTKNQVSLTCLVKGFYPSDIAVEWESNGQPENNYKTTPPVLDSDGSFFLYSKLTVDKSRWQQGNVFSCSVMHEALHNHYTQKSLSLSPGK

SEQ ID NO: 27805 - protein, 486 aa, Artificial Sequence
  source: /note="Description of Artificial Sequence: Synthetic polypeptide"
MKHLWFFLLLVAAPRWVLSQPQLQESGPGLVEASETLSLTCTVSGDSTAGCDYFWGWVRQPPGKGLEWIGGLSHCAGYYNTGWTYHNPSLKSRLTISLDTPKNQVFLKLNSVTAADTAIYYCARFDGEVLVYNDWPKPAWVDLWGRGTLVTVSSASTKGPSVFPLAPSSKSTSGGTAALGCLVKDYFPEPVTVSWNSGALTSGVHTFPAVLQSSGLYSLSSVVTVPSSSLGTQTYICNVNHKPSNTKVDKRVEPKSCDKTHTCPPCPAPELLGGPSVFLFPPKPKDTLMISRTPEVTCVVVDVSHEDPEVICFNWYVDGVEVHNAKTKPREEQYNSTYRVVSVLTVLHQDWLNGKEYKCKVSNKALPAPIEKTISICAKGQPREPQVYTLPPSREEMTKNQVSLTCLVKGFYPSDIAVEWESNGQPENNYKTTPPVLDSDGSFFLYSKLTVDKSRWQQGNVFSCSVMHEALHNHYTQKSLSLSPGK

SEQ ID NO: 27806 - protein, 478 aa, Artificial Sequence
  source: /note="Description of Artificial Sequence: Synthetic polypeptide"
MKHLWFFLLLVAAPRWVLSQVQLQESGPGLVKPSETLSLTCTVSGDSINTGHHYWGWVRQVPGKGPEWIAHIHYNTAVLHNPALKSRVTISIFTLKNLITLRLSNMTAADTAVYFCVRSGGDILYYNEWQKPHWFYPWGPGILVTVSSASTKGPSVFPLAPSSKSTSGGTAALGCLVKDYFPEPVTVSWNSGVALTSGVHTFPALQSSGLYSLSSVVTVPSSSLGTQTYICNVNHKPSNTKVDKRVEPKSCDKTHTCPPCPAPELLGGPSVFLFPPKPKDTLMISRTPEVTCVVVDVSHEDPEVKFNWYVDGVEVHNAKTKPREEQYNSTYRVVSVLTVLHQDWLNGKEYKCKVSNKALPAPIEKTISKAKGQPREPQVYTLPPSREEMTKNQVSLTCLVKGFYPSDIAVEWESNGQPENNYKTTPPVLDSDGSFFLYSKLTVDKSRWQQGNVFSCSVMHEALHNHYTQKSLSLSPGK

SEQ ID NO: 27807 - protein, 478 aa, Artificial Sequence
  source: /note="Description of Artificial Sequence: Synthetic polypeptide"
MKHLWFFLLLVAAPRWVLSQVQLQESGPGLVKPSETLSLTCTVSGDSINTGHHYWGWVRQVPGKGPEWIAHIHYNTAVLHNPALKSRVTISIFTLKNLITLSLSNVTAADTAVYFCVRSGGDILYYIEWQKPHWFYPWGPGILVTVSSASTKGPSVFPLAPSSKSTSGGTAALGCLVKDYFPEPVTVSWNSGALTSGVHTFPAVLQSSGLYSLSSVVTVPSSSLGTQTYICNVNHKPSNTKVDKRVEPKSCDKTHTCPPCPAPELLGGPSVFLFPPKPKDTLMISRTPEVTCVVVDVSHEDPEVKFNWYVDGVEVHNAKTKPREEQYNSTYRVVSVLTVLHQDWLNGKEYKCKVSNKALPAPIEKTISKAKGQPREPQVYTLPPSREEMTKNQVSLTCLVKGFYPSDIAVEWESNGQPENNYKTTPPVLDSDGSFFLYSKLTVDKSRWQQGNVFSCSVMHEALHNHYTQKSLSLSPGK

SEQ ID NO: 27808 - protein, 484 aa, Artificial Sequence [sequence omitted]

SEQ ID NO: 27809 - protein, 484 aa, Artificial Sequence
  source: /note="Description of Artificial Sequence: Synthetic polypeptide"
MKHLWFFLLLVAAPRWVLSQPQLQESGPGLVEASETLSLTCTVSGDSTAACDYFWGWVRQPPGKGLEWIGGLSHCAGYYNTGWTYHNPSLKSRLTISLDTPKNQVFLKLNSVTAADTAIYYCARFDGEVLVYHDWPKPAWVDLWGRGTLVTVSSASTKGPSVFPLAPSSKSTSGGTAALGCLVKDYFPEPVTVSWNSGALTSGVHTFPAVLQSSGLYSLSSVVTVPSSSLGTQTYICNVNHKPSNTKVDKRVEPKSCDKTHTCPPCPAPELLGGPSVFLFPPKPKDTLMISRTPEVTCVVVDVSHEDPEVKFNWYVDGVEVHNAKTKPREEQYNSTYRVVSVLTVLHQDWLNGKEYKCKVSNKALPAPIEKTISKAKGQPREPQVYTLPPSREEMTKNQVSLTCLVKGFYPSDIAVEWESNGQPENNYKTTPPVLDSDGSFFLYSKLTVDKSRWQQGNVFSCSVMHEALHNHYTQKSLSLSPGK

SEQ ID NO: 27810 - protein, 485 aa, Artificial Sequence
  source: /note="Description of Artificial Sequence: Synthetic polypeptide"
MKHLWFFLLLVAAPRWVLSQPQLQESGPGLVEASETLSLTCTVSGDSTGRCNYFWGWVRQPPGKGLEWIGSLSHCRSYYNTDWTYHNPSLKSRLTISLDTPKNQVFLRLTSVTAADTATYYCARFGGEVLVYRDWPKPAWVDLWGRGTLVVTVSSASTKGPSVFPLAPSSKSTSGGTAALGCLVKDYFPEPVTVSWNSGALTSGVHTFPAVLQSSGLYSLSSVVTVPSSSLGTQTYICNVNHKPSNTKVDKRVEPKSCDKTHTCPPCPAPELLGGPSVFLFPPKPKDTLMISRTPEVTCVVVDVSHEDPEVKFNWYVDGVEVHNAKTKPREEQYNSTYRVVSVLTVLHQDWLNGKEYKCKVSNKALPAPIEKTISKAKGQPREPQVYTLPPSREEMTKNQVSLTCLVKGFYPSDIAVEWESNGQPENNYKTTPPVLDSDGSFFLYSKLTVDKSRWQQGNVFSCSVMHEALHNHYTQKSLSLSPGK

SEQ ID NO: 27811 - protein, 478 aa, Artificial Sequence
  source: /note="Description of Artificial Sequence: Synthetic polypeptide"
MKHLWFFLLLVAAPRWVLSQVQLQESGPGLVKPAETLSLTCSVSGESINTGHYYWGWVRQVPGKGLEWIGHIHYTTAVLHNPSLKSRLTIKIYTLRNQITLRLSNVTAADTAVYHCVRSGGDILYYYEWQKPHWFSPWGPGIHVTVSSASTKGPSVFPLAPSSKSTSGGTAALGCLVKDYFPEPVTVSWNSGALTSGVHTFPAVLQSSGLYSLSSVVTVPSSSLGTQTYICNVNHKPSNTKVDKRVEPKSCDKTHTCPPCPAPELLGGPSVFLFPPKPKDTLMISRTPEVTCVVVDVSHEDPEVKFNWYVDGVEVHNAKTKPREEQYNSTYRVVSVLTVLHQDWLNGKEYKCKVSNKALPAPIEKTISKAKGQPREPQVYTLPPSREEMTKNQVSLTCLVKGFYPSDIAVEWESNGQPENNYKTTPPVLDSDGSFFLYSKLTVDKSRWQQGNVFSCSVMHEALHNHYTQKSLSLSPGK

SEQ ID NO: 27812 - protein, 483 aa, Artificial Sequence
  source: /note="Description of Artificial Sequence: Synthetic polypeptide"
MKHLWFFLLLVAAPRWVLSQLQLQESGPGLVKPSETLSLTCTVSGGSMRGTDWGENDFHYGWIRQSSAKGLEWIGSIHWRGRTTHYKTSFRSRATLSIDTSNNRFSLTFSFVTAADTAVYYCARHKYHDIFRVVPVAGWFDPWGQGLLVTVSSASTKGPSVFPLAPSSKSTSGGTAALGCLVKDYFPEPVTVSWNSGALTSGVHTFPAVLQSSGLYSLSSVVTVPSSSLGTQTYICNVNHKPSNTKVDKRVEPKSCDKTHTCPPCPAPELLGGPSVFLFPPKPKDTLMISRTPEVTCVVVDVSHEDPEVKFNWYVDGVEVHNAKTKPREEQYNSTYRVVSVLTVLHQDWLNGKEYKCKVSNKALPAPIEKTISKAKGQPREPQVYTLPPSREEMTKNQVSLTCLVKGFYPSDIAVEWESNGQPENNYKTTPPVLDSDGSFFLYSKLTVDKSRWQQGNVFSCSVMHEALHNHYTQKSLSLSPGK

SEQ ID NO: 27813 - protein, 482 aa, Artificial Sequence
  source: /note="Description of Artificial Sequence: Synthetic polypeptide"
MKHLWFFLLLVAAPRWVLSQLQMQESGPGLVKPSETLSLSCTVSGDSIRGGEWGDKDYHWGWVRHSAGKGLEWIGSIHWRGTTHYKESLRRRVSMSIDTSRNWFSLRLASVTAADTAVYFCARHRHHDVFMLVPIAGWFDVWGPGVQVTVSSASTKGPSVFPLAPSSKSTSGGTAALGCLVKDYFPEPVTVSWNSGALTSGVHTFPAVLQSSGLYSLSSVVTVPSSSLGTQTYICNVNHKPSNTKVDKRVEPKSCDKTHTCPPCPAPELLGGPSVFLFPPKPKDTLMISRTPEVTCVVVDVSHEDPEVKFNWYVDGVEVHNAKTKPREEQYNSTYRVVSVLTVLHQDWLNGKEYKCKVSNKALPAPIEKTISKAKGQPREPQVYTLPPSREEMTKNQVSLTCLVKGFYPSDIAVEWESNGQPENNYKTTPPVLDSDGSFFLYSKLTVDKSRWQQGNVFSCSVMHEALHNHYTQKSLSLSPGK

SEQ ID NO: 27814 - protein, 482 aa, Artificial Sequence
  source: /note="Description of Artificial Sequence: Synthetic polypeptide"
MKHLWFFLLLVAAPRCVLSEVHLEESGPGLVRPSETLSLTCTASGGSIRGGEWGDSDYHWGWVRHSPEKGLEWIGSIHWRGTTHYNAPFRGRGRLSIDLSRNQFSLRLTSVTAEDTAVYYCVKHKYHDIVMVVPIAGWFDPWGQGLQVTVSSASTKGPSVFPLAPSSKSTSGGTAALGCLVKDYFPEPVTVSWNSGALTSGVHTFPAVLQSSGLYSLSSVVTVPSSSLGTQTYICNVNHKPSNTKVDKRVEPKSCDKTHTCPPCPAPELLGGPSVFLFPPKPKDTLMISRTPEVTCVVVDVSHEDPEVKFNWYVDGVEVHNAKTKPREEQYNSTYRVVSVLTVLHQDWLNGKEYKCKVSNKALPAPIEKTISKAKGQPREPQVYTLPPSREEMTKNQVSLTCLVKGFYPSDIAVEWESNGQPENNYKTTPPVLDSDGSFFLYSKLTVDKSRWQQGNVFSCSVMHEALHNHYTQKSLSLSPGK

SEQ ID NO: 27815 - protein, 123 aa, Artificial Sequence
  source: /note="Description of Artificial Sequence: Synthetic polypeptide"
EVQLVESGGGVVRPGNSLRLSCAASGIIFSTANLHWLRHVPGKGLEWVAIISYDGHRQYYADLVKGRFTISRDNSKNTLHLQMDGLTSDDTAVYYCAKDGADENNLGPAFDYWGRGTLVTVSS

SEQ ID NO: 27816 - protein, 485 aa, Artificial Sequence
  source: /note="Description of Artificial Sequence: Synthetic polypeptide"
MELGLSWVFLVVLLRGVHCQVHLVESGGGVVQPGKSLRLSCETSGFIFNQYPMYWVRQAPGKGPEWVAAISADAWHVDYPGSVRGRFTVSRDNSKSSLYLDMKSLKVEDTAIYFCAKDGEEHKVPQLHSWSGRNLYHYTGFDVWGPGTTVTVSSASTKGPSVFPLAPSSKSTSGGTAALGCLVKDYFPEPVTVSWNSGALTSGVHTFPAVLQSSGLYSLSSVVTVPSSSLGTQTYICNVNHKPSNTKVDKRVEPKSCDKTHTCPPCPAPELLGGPSVFLFPPKPKDTLMISRTPEVTCVVVDVSHEDPEVKFNWYVDGVEVHNAKTKPREEQYNSTYRVVSVLTVLHQDWLNGKEYKCKVSNKALPAPIEKTISICAKGQPREPQVYTLPPSREEMTKNQVSLTCLVKGFYPSDIAVEWESNGQPENNYKTTPPVLDSDGSFFLYSKLTVDKSRWQQGNVFSCSVMHEALHNHYTQKSLSLSPGK

SEQ ID NO: 27817 - protein, 484 aa, Artificial Sequence
  source: /note="Description of Artificial Sequence: Synthetic polypeptide"
MELGLSWVFLVGLLRGVQCRVQLVESGGGVVQPGKSVRLSCVVSDFPFSKYPMYWVRQAPGKGLEWVAAISGDAWHVVYSNSVQGRFLVSRDNVKNTLYLEMNSLKIEDTAVYRCARMFQESGPPRLDRWSGRNYYYYSGMDVWGQGTTVTVSSASTKGPSVFPLAPSSKSTSGGTAALGCLVKDYFPEPVTVSWNSGALTSGVHTFPAVLQSSGLYSLSSVVTVPSSSLGTQTYICNVNHKPSNTKVDKRVEPKSCDKTHTCPPCPAPELLGGPSVFLFPPKPKDTLMISRTPEVTCVVVDVSHEDPEVKFNWYVDGVEVHNAKTKPREEQYNSTYRVVSVLTVLHQDWLNGKEYKCKVSNKALPAPIEKTISKAKGQPREPQVYTLPPSREEMTKNQVSLTCLVKGFYPSDIAVEWESNGQPENNYKTTPPVLDSDGSFFLYSKLTVDKSRWQQGNVFSCSVMHEALHNHYTQKSLSLSPGK

SEQ ID NO: 27818 - protein, 484 aa, Artificial Sequence
  source: /note="Description of Artificial Sequence: Synthetic polypeptide"
MELGLSWVFLVALLRGVQCQVQLVESGGGVVQPGKSLRLSCVVSNFIFNKYPMYWVRQAPGKGLEWVAAISADAWHVDYAASVKDRFLISRDNSKNALYLEMNTLRVEDTGIYYCARNIEEFSVPQFDSWSGRSYYHYFGMDVWGQGTTVTVSSASTKGPSVFPLAPSSKSTSGGTAALGCLVKDYFPEPVTVSWNSGALTSGVHTFPAVLQSSGLYSLSSVVTVPSSSLGTQTYICNVNHKPSNTKVDKRVEPKSCDKTHTCPPCPAPELLGGPSVFLFPPKPKDTLMISRTPEVTCVVVDVSHEDPEVKFNWYVDGVEVHNAKTKPREEQYNSTYRVVSVLTVLHQDWLNGKEYKCKVSNKALPAPIEKTISKAKGQPREPQVYTLPPSREEMTKNQVSLTCLVKGFYPSDIAVEWESNGQPENNYKTTPPVLDSDGSFFLYSKLTVDKSRWQQGNVFSCSVMHEALHNHYTQKSLSLSPGK

SEQ ID NO: 27819 - protein, 484 aa, Artificial Sequence
  source: /note="Description of Artificial Sequence: Synthetic polypeptide"
MELGLSWVFLVALLRGVHCEVRLMESGGGVVQPGKSLRLSCVTSGFIFKKYPMYWIRQAPGKGLEWVAAISADAWHVDYPGSVRGRFTVSRDNSKNSLYLDMNSLTVEDTAIYFCAKDGEEHEVPQLHSWSGRNLYHYTGVDVWGPGTTVTVSSASTKGPSVFPLAPSSKSTSGGTAALGCLVKDYFPEPVTVSWNSGALTSGVHTFPAVLQSSGLYSLSSVVTVPSSSLGTQTYICNVNHKPSNTKVDKRVEPKSCDKTHTCPPCPAPELLGGPSVFLFPPKPKDTLMISRTPEVTCVVVDVSHEDPEVKFNWYVDGVEVHNAKTKPREEQYNSTYRVVSVLTVLHQDWLNGKEYKCKVSNKALPAPIEKTISKAKGQPREPQVYTLPPSREEMTKNQVSLTCLVKGFYPSDIAVEWESNGQPENNYKTTPPVLDSDGSFFLYSKLTVDKSRWQQGNVFSCSVMHEALHNHYTQKSLSLSPGK

SEQ ID NO: 27820 - protein, 486 aa, Artificial Sequence
  source: /note="Description of Artificial Sequence: Synthetic polypeptide"
MELGLSWVFLVGLLRGVHCRVQLVESGGGVVQPGKSVRLSCVVSDFPFSKYPMYWVRQAPGKGLEWVAAISADAWHVVYSGSVQGRFLVSRDNSKNILYLEMNTLKIEDTAVYRCARMFQESGPPRFDSWSGRNYYYYSGMDVWGQGTTVTVSSASTKGPSVFPLAPSSKSTSGGTAALGCLVKDYFPEPVTVSWNSGALTSGVHTFPAVLQSSGLYSLSSVVTVPSSSLGTQTYICNVNHKPSNTKVDICRVEPKSCDKTHTCPPCPAPELLGGPSVFLFPPKPKDTLMISRTPEVTCVVVDVSHEDPEVKFNWYVDGVEVHNAKTKPREEQYNSTYRVVSVLTVLHQDWLNGKEYKCKVSNKALPAPIEKTISKAKGQPREPQVYTLPPSREEMTICNQVSLTCLVKGFYPSDIAVEWESNGQPENNYKTTPPVLDSDGSFFLYSKLTVDKSRWQQGNVFSCSVMHEALHNHYTQKSLSLSPGK

SEQ ID NO: 27821 - protein, 484 aa, Artificial Sequence
  source: /note="Description of Artificial Sequence: Synthetic polypeptide"
MELGLSWVFLVALLRGVQCQVQLVESGGGVVQPGKSLRLSCVVSNFLFNKRHMHWVRQAPGKGLEWIAVISSDAIHVDYASSVRGRSLISRDNSKNSLYLDMNNLKIEDTATYYCARDRDGYGPPQIQTWSGRYLHLYSGIDAWGLGTTVTVSSASTKGPSVFPLAPSSKSTSGGTAALGCLVKDYFPEPVTVSWNSGALTSGVHTFPAVLQSSGLYSLSSVVTVPSSSLGTQTYICNVNHKPSNTKVDKRVEPKSCDKTHTCPPCPAPELLGGPSVFLFPPKPKDTLMISRTPEVTCVVVDVSHEDPEVKFNWYVDGVEVHNAKTKPREEQYNSTYRVVSVLTVLHQDWLNGKEYKCKVSNKALPAPIEKTISKAKGQPREPQVYTLPPSREEMTKNQVSLTCLVKGFYPSDIAVEWESNGQPENNYKTTPPVLDSDGSFFLYSKLTVDKSRWQQGNVFSCSVMHEALHNHYTQKSLSLSPGK

SEQ ID NO: 27822 - protein, 491 aa, Artificial Sequence
  source: /note="Description of Artificial Sequence: Synthetic polypeptide"
MELGLSWVFLVALLRGVHCEVHLVESGGGVVQPGKSLRLSCVTSGFIFKQYPMYWIRQAPGKGLEWVAAISADAWHVDYAGSVRGRFTVSRDNSICNSLYLDMNSLTVEDTAIYFCAKDGEEHEVPQLHSWSGRNLYHYTGVDIWGPGTTVTVSSASTKGPSVFPLAPSSKSTSGGTAALGCLVICDYFPEPVTVSWNSGALTSGVHTFPAVLQSSGLYSLSSVVTVPSSSLGTQTYICNVNHKPSNTKVDKRVEPKSCDKTHTCPPCPAPELLGGPSVFLFPPICPKDTLMISRTPEVTCVVVDVSHEDPEVICFNWYVDGVEVHNAKTICPREEQYNSTYRVVSVLTVLHQDWLNGICEYKCKVSNKALPAPIEKTISICAKGQPREPQVYTLPPSREEMTKNQVSLTCLVKGFYPSDIAVEWESNGQPENNYKTTPPVLDSDGSFFLYSKLTVDKSRWQQGNVFSCSVMHEALHNHYTQKSLSLSPGK

SEQ ID NO: 27823 - protein, 484 aa, Artificial Sequence
  source: /note="Description of Artificial Sequence: Synthetic polypeptide"
MELGLSWVFLVVLLRGVHCQVHLVESGGGVVQPGKSLRLSCETSGFIFNEYPMYWIRQAPGKGPEWVAAISADAWHVDYAGSVRGRFTVSRDNSKNSLYLDMKSLKVEDTAIYFCAKDGEEHKVPQLHSWSGRNLYHYTGFDVWGPGTTVTVSSASTKGPSVFPLAPSSKSTSGGTAALGCLVKDYFPEPVTVSWNSGALTSGVHTFPAVLQSSGLYSLSSVVTVPSSSLGTQTYICNVNHKPSNTKVDKRVEPKSCDKTHTCPPCPAPELLGGPSVFLFPPKPKDTLMISRTPEVTCVVVDVSHEDPEVKFNWYVDGVEVHNAKTKPREEQYNSTYRVVSVLTVLHQDWLNGKEYKCKVSNKALPAPIEKTISKAKGQPREPQVYTLPPSREEMTKNQVSLTCLVKGFYPSDIAVEWESNGQPENNYKTTPPVLDSDGSFFLYSKLTVDKSRWQQGNVFSCSVMHEALHNHYTQKSLSLSPGK

SEQ ID NO: 27824 - protein, 130 aa, Artificial Sequence
  source: /note="Description of Artificial Sequence: Synthetic polypeptide"
QGQLVQSGAELKKPGDSVKISCKTSGYRFNFYHIWIRQTAGRGPEWMGWISPYSGDKNLAPAFQDRVIMTTDNEVPVTAFTSTGTAYMEIRNLRFDDTGIYFCAKGLLRDGSSTWLPYLWGQGTLLTVSS

SEQ ID NO: 27825 - protein, 130 aa, Artificial Sequence
  source: /note="Description of Artificial Sequence: Synthetic polypeptide"
QGQLVQSGGELKKPGASVKISCKTSGYRFSFYHIWIRQVSGRGPEWMGWISPYSGDTNLAPDFRGRVVLTTDREVVDTMTMSTGTAHMELRNLKSDDTGLYFCAKGLLRDGSSTWLPHLWGQGTLLTVSS

SEQ ID NO: 27826 - protein, 118 aa, Artificial Sequence
  source: /note="Description of Artificial Sequence: Synthetic polypeptide"
QVQLQQSGPELVKPGASVRMSCKASGYTFTDYVIHWVKQRTGQGLEWIGEIYPGSGSAYSNAKFKDKATLTADKSSNTAYMQLSSLTSEDSAVYFCARRGNGTGFAYWGQGTLVTVSA

SEQ ID NO: 27827 - protein, 118 aa, Artificial Sequence
  source: /note="Description of Artificial Sequence: Synthetic polypeptide"
QVQLVQSGPELKKPGASVKVSCKASGYTFTDYVIHWVKQATGQGLEWIGEIYPGSGSAYSNAKFKDRVTMTADKSSNTAYMELSSLTSDDTAVYFCARRGNGTGFAYWGQGTLVTVSS

SEQ ID NO: 27828 - protein, 118 aa, Artificial Sequence
  source: /note="Description of Artificial Sequence: Synthetic polypeptide"
QVQLVQSGAEVKKPGASVKVSCKASGYTFTDYVIHWVRQATGQGLEWIGEIYPGSGSAYSNAKFKDRVTITADKSTNTAYMELRSLRSDDTAVYFCARRGNGTGFAYWGQGTLVTVSS

SEQ ID NO: 27829 - protein, 118 aa, Artificial Sequence
  source: /note="Description of Artificial Sequence: Synthetic polypeptide"
QVQLVQSGAEVKKPGASVKVSCKASGYTFTDYVIHWVKQATGQGLEWIGEIYPGSGSAYSNAKFKDRVTITADKSTNTAYMELRSLRSDDTAVYFCARRGNGTGFAYWGQGTLVTVSS

SEQ ID NO: 27830 - protein, 118 aa, Artificial Sequence
  source: /note="Description of Artificial Sequence: Synthetic polypeptide"
QVQLVQSGAEVKKPGASVKVSCKASGYTFTDYVIHWVRQATGQGLEWIGEIYPGSGSAYSNSKFKDRVTITADKSTNTAYMELRSLRSDDTAVYFCARRGNGTGFAYWGQGTLVTVSS

SEQ ID NO: 27831 - protein, 486 aa, Artificial Sequence
  source: /note="Description of Artificial Sequence: Synthetic polypeptide"
MEFGLSWVFLVAIIIGVQCQVQLVQSGAEVKKPGASVKVSCQASGYRFSNFVIHWVRQAPGQRFEWMGWINPYNGNKEFSAKFQDRVTFTADTSANTAYMELRSLRSADTAVYYCARVGPYSWDDSPQDNYYMDVWGQGTTVIVSSASLTSPKVFPLSLDSTPQDGNVVVACLVQGFFPQEPLSVTWSESGQNVTARNFPPSQDASGDLYTTSSQLTLPATQCPDGKSVTCHVKHYTNSSQDVTVPCRVPPPPPCCHPRLSLHRPALEDLLLGSEANLTCTLTGLRDASGATFTWTPSSGKSAVQGPPERDLCGCYSVSSVLPGCAQPWNHGETFTCTAAHPELKTPLTANITKSGNTFRPEVHLLPPPSEELALNELVTLTCLARGFSPKDVLVRWLQGSQELPREKYLTWASRQEPSQGTTTYAVTSILRVAAEDWKKGETFSCMVGHEALPLAFTQKTIDRLAGKPTHINVSVVMAEADGTCY

SEQ ID NO: 27832 - protein, 96 aa, Artificial Sequence
  source: /note="Description of Artificial Sequence: Synthetic polypeptide"
QVQLVQSGAEVKKPGASVKVSCKASGYTFTKYGMNWVRQAPGQGLKWMGWKNTNTGESTHVEEFKGRVTMSLDTSTNTAYMELSSLRSEDTAVYYC

SEQ ID NO: 27833 - protein, 118 aa, Artificial Sequence
  source: /note="Description of Artificial Sequence: Synthetic polypeptide"
QVQLVQSGAEVKKPGASVKVSCKASGYTFTEYTMHWVRQAPGQGLEWIGGINPNNGDTSYTQKFKGKATMTVDTSTNTAYMELSSLRSEDTAVYYCATPYYAYAIDSWGQGTLVTVSS

SEQ ID NO: 27834 - protein, 123 aa, Artificial Sequence
  source: /note="Description of Artificial Sequence: Synthetic polypeptide"
QEQLVESGGGVVQPGRSLRLSCEASGFIFSAFVLHWVRQAPGKGLEWVAVVWYDGNSKYYADSVKGRFTISRDTSQNTLHLQMDSLRPEDTAVYYCAREWVADDDTFDGFDVWGQGTMVTVSS

SEQ ID NO: 27835 - protein, 226 aa, Artificial Sequence
  source: /note="Description of Artificial Sequence: Synthetic polypeptide"
ESGGGVVQPGRSLRLSCAASGFSLSTYAIHWVRQAPGKGLEWVAVISHNGNIEYFGDSVRGRFSISRDNSKNTVYLHMNSLTTEDTAVYYCARDPRYYDAWSGPQLYYYYMDVWGKGTTVTVSSASPTSPKVFPLSLDSTQPDGNVVIACLVQGFFPQEPLSVTWSESGQGVTARDFPPSQDASGDLYTTSSQLTLPATQCLAGKSVTCHVKHYTNPSQDVTVPCP

SEQ ID NO: 27836 - protein, 119 aa, Artificial Sequence
  source: /note="Description of Artificial Sequence: Synthetic polypeptide"
EVQLVQSGAEVKKPGESLKISCYGSGYNFNDYWIGWVRQMPGKGLEWMGMIYPDDSDTKYSAAFEGQVTLSADKSISTAYLQWTSLRASDTATYYCARLDGDYADFDSWGQGTLVTVSS

SEQ ID NO: 27837 - protein, 127 aa, Artificial Sequence
  source: /note="Description of Artificial Sequence: Synthetic polypeptide"
QMKLMQSGGVMVRPGESATLSCVASGFDFSRNGFEWLRQGPGKGLQWLATVTFESKTHVTASARGRFTISRDNSRRTVYLQMTNLQPDDTAMYFCVKDQTIFHKNGAVDFFSYFDLWGRGAPVIVSA

SEQ ID NO: 27838 - protein, 122 aa, Artificial Sequence
  source: /note="Description of Artificial Sequence: Synthetic polypeptide"
QVQLVQSGAEVKKPGSSVKVSCKTSGGTFNRLAMSWVRQAPGQGLEWMGGIMPIFDITNYAQKFQGRVTIITDESTSTAYMELRSLTSEDSAVYYCARASYSSSSPYAFDIWGQGTMVTVSS

SEQ ID NO: 27839 - protein, 353 aa, Artificial Sequence
  source: /note="Description of Artificial Sequence: Synthetic polypeptide"
ASLTSPKVFPLSLCSTQPDGNVVIACLVQGFFPQEPLSVTWSESGQGVTARNFPPSQDASGDLYTTSSQLTLPATQCLAGKSVTCHVKHYTNPSQDVTVPCPVPSTPPTPSPSTPPTPSPSCCHPRLSLHRPALEDLLLGSEANLTCTLTGLRDASGVTFTWTPSSGKSAVQGPPDRDLCGCYSVSSVLSGCAEPWNHGKTFTCTAAYPESKTPLTATLSKSGNTFRPEVHLLPPPSEELALNELVTLTCLARGFSPKDVLVRWLQGSQELPREKYLTWASRQEPSQGTTTFAVTSILRVAAEDWKKGDTFSCMVGHEALPLAFTQKTIDRLAGKPTHVNVSVVMAEVDGTCY

SEQ ID NO: 27840 - protein, 125 aa, Artificial Sequence
  source: /note="Description of Artificial Sequence: Synthetic polypeptide"
EVQLVESGGGLVQAGDSLRLSCAASGRTFSFDAKGWFRQAPGKEREFVAAINWSGSDTHYADSVKGRFTISRDNAKNTAYLQMNSLKPEDTAVYYCAAAFDYSGSYDSVGLWDYWGQGTQVTVSS

SEQ ID NO: 27841 - protein, 125 aa, Artificial Sequence
  source: /note="Description of Artificial Sequence: Synthetic polypeptide"
EVQLVESGGGLVQAGDSLRLSCAASGRTFSFDARGWFRQAPGKEREFVAAINWSGSDTHYADSVKGRFTISRDNAKNTAYLQMNSLKPEDTAVYYCAAAFDYSGSYASVGLWDYWGQGTQVTVSS

SEQ ID NO: 27842 - protein, 125 aa, Artificial Sequence
  source: /note="Description of Artificial Sequence: Synthetic polypeptide"
EVQLVESGGGLVQAGDSLRLSCAASGRTFSFDARGWFRQAPGKEREFVAAINWSGSDTHYADSVKGRFTISRDNAKNTLYLQMNSLKPEDTAVYYCAAAFDYSGSYNSVGLWDYWGQGTQVTVSS

SEQ ID NO: 27843 - protein, 125 aa, Artificial Sequence
  source: /note="Description of Artificial Sequence: Synthetic polypeptide"
EVQLVESGGGLVQAGDSLRLSCAASGRTFSFDARGWFRQAPGKEREFVAAINWCGSDAHYADSVKGRFTISRDNAKNTAYLQMNSLKPEDTAVYFCAAAFDYSGSYNSVGLWDYWGQGTQVTVSS

SEQ ID NO: 27844 - protein, 125 aa, Artificial Sequence
  source: /note="Description of Artificial Sequence: Synthetic polypeptide"
EVQLVESGGGLVRHGDSLRLSCAASRRTTSVYATGWFRQAPGKEREFVAAISWSGGYTNYADSVKGRFTISRDNARNTVFLQMNSLKPEDTAVYYCAADRNPYRGSNNANAYDYWGQGTQVTVSS

SEQ ID NO: 27845 - protein, 125 aa, Artificial Sequence
  source: /note="Description of Artificial Sequence: Synthetic polypeptide"
EVQLVESGGGLVQAGDSLRLSCAASGRTFSFDARGWFRQAPGKEREFVAAINWSGSDTHYADSVKGRFTISRDNAKNTVYLQMNSLKPEDTAVYYCAAAFDYSGSYDSVGLWDYWGQGTQVTVSS

SEQ ID NO: 27846 - protein, 125 aa, Artificial Sequence
  source: /note="Description of Artificial Sequence: Synthetic polypeptide"
EVQLVESGGGLVRHGDSLRLSCLVSGRTTSVYATGWFRQAPGKEREFVAAISWSGGYTNYADSVKGRFTISRDNAKNTVFLQMNSLKPEDTAVYYCAADRNPYRGSNNANAYDYWGQGTQVTVSS

SEQ ID NO: 27847 - protein, 125 aa, Artificial Sequence
  source: /note="Description of Artificial Sequence: Synthetic polypeptide"
EVQLVESGGGWVQAGDSLRLSCAASGRTFSFDAKGWFRQAPGKEREFVAAINWSGSDTHYADSVKGRFTISRDNAKNTVYLQMNSLKPEDTAVYYCAAAFDYSGSYNSVGLWDYWGQGTQVTVSS

SEQ ID NO: 27848 - protein, 125 aa, Artificial Sequence
  source: /note="Description of Artificial Sequence: Synthetic polypeptide"
EVQLVESGGGWVQAGDSLRLSCAASGRTFSFDAKGWFRQAPGKEREFVAAINWSGSDTHYADSVKGRFTISRDNAKNTVYLQMNSLKPEDTAVYYCAAAFDYSGNYNSVGLWDYWGQGTQVTVSS

SEQ ID NO: 27849 - protein, 125 aa, Artificial Sequence
  source: /note="Description of Artificial Sequence: Synthetic polypeptide"
EVQLVESGGGLVQAGDSLRLSCAASGRTFSFDARGWFRQAPGKEREFVAAINWSGSDAHYADSVKGRFTISRDNAKNTAYLQMNSLKPEDTAVYFCAAAFDYSGSYNSVGLWDYWGQGTQVTVSS

SEQ ID NO: 27850 - protein, 125 aa, Artificial Sequence
  source: /note="Description of Artificial Sequence: Synthetic polypeptide"
EVQLVESGGGLVQAGDSLRLSCAASGRTFSFDARGWFRQAPGKEREFVAAINWSGSDAHYADSVKGRFTISRDNAKNTAYLQMNSLKPEDTAAYFCAAAFDYSGSYNSVGLWDYWGQGTQVTVSS

SEQ ID NO: 27851 - protein, 125 aa, Artificial Sequence
  source: /note="Description of Artificial Sequence: Synthetic polypeptide"
EVQLVESGGGLVQAGDSLRLSCAASGRSFSFDARGWFRQAPGKEREFVAAINWSGSDTHYADSVKGRFTISRDNAKNTAYLQMNSLKPEDTAVYYCAAAFDYSGSYNSVGLWDYWGQGTQVTVSS

SEQ ID NO: 27852 - protein, 125 aa, Artificial Sequence
  source: /note="Description of Artificial Sequence: Synthetic polypeptide"
EVQLVESGGGLVRHGDSLRLSCAASRRTTSVYATGWFRQAPGKEREFVAAISWSGGYTNYADSVKGRFTISRDNAKDTVFLQMNSLKPEDTAVYYCAADRNPYRGSNNANAYDYWGQGTQVTVSS

SEQ ID NO: 27853 - protein, 125 aa, Artificial Sequence
  source: /note="Description of Artificial Sequence: Synthetic polypeptide"
EVQLVESGGGLVRHGDSLRLSCLVSRRTTSVYATGWFRQAPGKEREFVAAISWSGGYTNYADSVKGRFTISRDNAKNTVFLQMNSLKPEDTAVYYCAADQNPYRGSNNANAYDYWGQGTQVTVSS

SEQ ID NO: 27854 - protein, 125 aa, Artificial Sequence
  source: /note="Description of Artificial Sequence: Synthetic polypeptide"
EVQLVESGGGLVRHGDSLRLSCAASRRTTSVYATGWFRQAPGKEREFVAAISWSGGYTNYADSVKGRFTISRDNAKNTVFLQMNSLKPEDTAVYYCAADRNPYRGSNNANAYDYWGQGTQVTVSS

SEQ ID NO: 27855 - protein, 125 aa, Artificial Sequence
  source: /note="Description of Artificial Sequence: Synthetic polypeptide"
EVQLVESGGGLVQAGDSLRLSCAASGRTFSFDAKGWFRQAPGKEREFVAAINWSGSDTHYADSVKGRFTISRDNAKNTVYLQMNSLKPEDTAVYYCAAAFDYSGSYDSVGLWDYWGQGTQVTVSS

SEQ ID NO: 27856 - protein, 125 aa, Artificial Sequence
  source: /note="Description of Artificial Sequence: Synthetic polypeptide"
EVQLVESGGGLVRHGDSLRLSCLVSRRTTSVYATGWFRQAPGKEREFVAAISWSGGYTNYADSVKGRFTISRDNARNTVFLQMNSLKPEDTAVYYCAADRNPYRGSNNANAYDYWGQGTQVTVSS

SEQ ID NO: 27857 - protein, 120 aa, Artificial Sequence
  source: /note="Description of Artificial Sequence: Synthetic polypeptide"
EVQLVESGGGLVQPGGSLRLSCAASGFTLDYYAIGWFRQAPGKEREGVSCVSSSDGSTYYADSVKGRFTISRDNAENTVYLQMNSLKPEDTAVYYCATEQSCTGSSWSGPGQGTRVTVSS

SEQ ID NO: 27858 - protein, 125 aa, Artificial Sequence
  source: /note="Description of Artificial Sequence: Synthetic polypeptide"
EVQLVESGGGLVQAGDSLRLSCAASGRTFSFDARGWFRQAPGKEREFVAAINWSGSDAHYADSVKGRFTISRDNAKNTAYLRMNSLKPEDTAVYFCAAAFDYSGSYNSVGLWDYWGQGTQVTVSS

SEQ ID NO: 27859 - protein, 123 aa, Artificial Sequence
  source: /note="Description of Artificial Sequence: Synthetic polypeptide"
EVQLVESGGGLVQAGGSLRLSCRASGNTGNVNAMGWYRQAPGKQRELVAAVSGGGKTNYADSVKGRFTISIDNAKIIVYLQMNNLKPEDTAVYYCNAGVMGTSGSYYLGEDNWGQGTQVTVSS

SEQ ID NO: 27860 - protein, 125 aa, Artificial Sequence
  source: /note="Description of Artificial Sequence: Synthetic polypeptide"
EVQLVESGGGLVQAGDSLRLSCAASKRTTSAYATGWFRQAPGKEREFVAAISYSGAYTNYADSVKGRFTISRDNAKNTVYLQMNSLKPEDTAVYYCAADRNPYRGSNNANAYDYWGQGTQVTVSS

SEQ ID NO: 27861 - protein, 125 aa, Artificial Sequence
  source: /note="Description of Artificial Sequence: Synthetic polypeptide"
EVQLVESGGGLVRHGDSLRLSCLVSRRTTSVYATGWFRQAPGKEREFVAAISWSGGYTNYADSVKGRFTISRDNAKNTVFLQMNSLKPEDTAVYYCAADRNPYRGSNNANAYDYWGQGTQVTVSS

SEQ ID NO: 27862 - protein, 119 aa, Artificial Sequence
  source: /note="Description of Artificial Sequence: Synthetic polypeptide"
EVQLVESGGGLVQPGGSLRLSCAASGSIFSFNAMAWYRQAPGKQRELVAAISSGGSTNYADSVKGRFTISRDNAKNTVYLQMNSLKPEDTADYYCNLWHTDFVSFYDYWGQGTQVTVSS

SEQ ID NO: 27863 - protein, 128 aa, Artificial Sequence
  source: /note="Description of Artificial Sequence: Synthetic polypeptide"
EVQLVESGEGLVQAGDSLRLSGAASGRTISSYAMGWFRQAPGKEREFVAAVSMSGGRTLYADSVKGRFTISKDNTENTVYLQMNSLKPEDTAVYYCAAKVVGYFDVALYAQERDYNYWGQGTQVTVSS

SEQ ID NO: 27864 - protein, 124 aa, Artificial Sequence
  source: /note="Description of Artificial Sequence: Synthetic polypeptide"
EVQLVESGGGLVQAGGSLRLSCAASGRTFSDDLISWFRQAPGKERDFVAAVTFYGEDTYYADSVKGRFTISRDNAKNTVYLQMDRLKSEDTAVYHCASSSRATVIQNPLGYDYWGQGTQVTVSS

SEQ ID NO: 27865 - protein, 123 aa, Artificial Sequence
  source: /note="Description of Artificial Sequence: Synthetic polypeptide"
EVLVESGGGLVQAGGSLRLSGAASGRTFSNDLISWFRQAPGKERDFVAGVAFYGDDTYYADSVKGRFTISRENAKNRVYLQMDNLKSEDTGVYYCASSSRASVIQNPLGYDYWGQGTKVTVSS

SEQ ID NO: 27866 - protein, 124 aa, Artificial Sequence
  source: /note="Description of Artificial Sequence: Synthetic polypeptide"
EVQLVESGGGLVQAGGSLRLSCAASGRTFSNDLISWFRQAPGEERDFVAAVAFYGDDTYYADSVKGRFTISRDNAKNTVYLQMDNLKSEDTAVYYCASSSRATVIQNPLGYDYWGQGTQVTVSS

SEQ ID NO: 27867 - protein, 127 aa, Artificial Sequence
  source: /note="Description of Artificial Sequence: Synthetic polypeptide"
EVQLVESGGGLVQAGDSLRLSCAASGRTISSYAMGWFRQAPGKEREFVAAVSMSGGRTLYADSVKGRFTISKDNTENTVYLQMNSLKPEDTAVYYCAAKWGYFDVALYAQERDYNYWGQGTQVTVSS

SEQ ID NO: 27868 - protein, 125 aa, Artificial Sequence
  source: /note="Description of Artificial Sequence: Synthetic polypeptide"
EVQLVESGGGLVQAGGSLRLACAASGRTFSDYAVGWFRQAPGKERQIVAAISWGGGDTYYTNSVKGRFTISRDNTRNTVYLQMSSLKPEDTAVYYCAANRNRRGVVSAPSSYDYWGQGTQVTVSS

SEQ ID NO: 27869 - protein, 126 aa, Artificial Sequence
  source: /note="Description of Artificial Sequence: Synthetic polypeptide"
EVQLVESGGGLVQAGGSLRLSCAASGFTSDDYAIGWFRQAPGKEREGVSYISHEDGSTYVADSVGGRFTISYDYAENTVYLQMNSLKPDDTAVYYCAAAILGNSVLWLWEYEYRYWGQGTQVTVSS

SEQ ID NO: 27870 - protein, 126 aa, Artificial Sequence
  source: /note="Description of Artificial Sequence: Synthetic polypeptide"
EVQLVESGGGLVQAGGSLRLSCAASGFTLDDYAIGWFRQAPGKEREKVSFMFTSDGSGWYADSVKGRFTISSNNAKNTVYLEMNRLKPEDTAVYYCAAAYAGELVLWLPDYDYNYWGQGTQVTVSS

SEQ ID NO: 27871 - protein, 126 aa, Artificial Sequence
  source: /note="Description of Artificial Sequence: Synthetic polypeptide"
EVQLVESGGGLVQAGGSLGLSCAASGFTSDDYAIGWFRQAPGKEREGVSYISHEDGSTYVADSVRGRFTISYDYAKNTVYLQMNSLKPEDTAVYYCAAAILGNSVLWLWEYEYRYWGQGTQVTVSS

SEQ ID NO: 27872 - protein, 126 aa, Artificial Sequence
  source: /note="Description of Artificial Sequence: Synthetic polypeptide"
EVQLVESGGGLVQAGGSLRLSCAASGFTSDDYAIGWFRRAPGKEREGVSYVSIEDGSTYTADSVKGRFTISSDNAENTVYLQMNSLKPEDTAVYYCAAAILGDYVRWLQEYDYDYWGQGTQVTVSS

SEQ ID NO: 27873 - protein, 126 aa, Artificial Sequence
  source: /note="Description of Artificial Sequence: Synthetic polypeptide"
EVQLVESGGGLVQAGGSLRLSCAASGFTSDDYAIGWFRQAPGKEREGVSYISHEDGSTYVADSVRGRFTISSDYAKNTVYLQMNSLKPEDTAVYYCAAAILGNSVLWLWEYEYRYWGQGTQVTVSS

SEQ ID NO: 27874 - protein, 126 aa, Artificial Sequence
  source: /note="Description of Artificial Sequence: Synthetic polypeptide"
EVQLVESGGGLVQAGGSLRLSCAASGFTSDDYAIGWFRRAPGKEREGVSYISIEDGSTYTADSVKGRFTISSDNAKNTVYLQMNSLKPEDTAVYYCAAAILGDYVRWLQEYDYDYWGQGTQVTVSS

SEQ ID NO: 27875 - protein, 126 aa, Artificial Sequence
  source: /note="Description of Artificial Sequence: Synthetic polypeptide"
EVQLVESGGGLVQPGGSLRLSCAASGFTSDDYAIGWFRQAPGKEREGVSYISHEDGSTYVADSVRGRFTISYDYAKNTVYLQMNSLKPEDTAVYYCAAAILGNSVLWLWEYEYRYWGQGTQVTVSS

SEQ ID NO: 27876 - protein, 125 aa, Artificial Sequence
  source: /note="Description of Artificial Sequence: Synthetic polypeptide"
EVQLVESGGGLVQAGGSLRLSCVLSGGTLSDAAMGWFRQPPGKEREFVAAISWSAGPTTHYADSVKGRFTISRDDAKNTVYLQMNSLKPEDTGVYYCAAQFRVGWVHLSNEYDYWGQGTQVTVSS

SEQ ID NO: 27877 - protein, 126 aa, Artificial Sequence
  source: /note="Description of Artificial Sequence: Synthetic polypeptide"
EVQLVESGGGLVQAGGSLRLSCAASGFTSDDYAIGWFRRAPGKEREGVSYISIEDGSMYYANSVKGRFTISSDNAKKTVYLQMNSLKVEDTAIYYCAAAIFGDSVRWLSEYEYNYWGQGTQVTVSS

SEQ ID NO: 27878 - protein, 126 aa, Artificial Sequence
  source: /note="Description of Artificial Sequence: Synthetic polypeptide"
EVQLVESGGGLVQAGGSLRLSCAASGFTSDDYAIGWFRQAPGKEREGVSYISHEDGSTYVADSVRGRFTISYDYAKNTVYLQMNSLKPEDTAVYYCAAAILGNSVLWLWEYEYRYWGQGTQVTVSS

SEQ ID NO: 27879 - protein, 126 aa, Artificial Sequence
  source: /note="Description of Artificial Sequence: Synthetic polypeptide"
EVQLVESGGGLVQAGGSLRLSCVCSGFSSDEYAIGWFRQAPGKEREGVSYISREDGSRHYADSVKGRFTISTDYARNTVYLQMDSLKPEDTGVYYCAAALLGDYVLWLPEYPYNYWGQGTQVTVSS

SEQ ID NO: 27880 - protein, 131 aa, Artificial Sequence
  source: /note="Description of Artificial Sequence: Synthetic polypeptide"
EVQLVESGGDSVQPGGSLRLSCAASGFAYGTLDDYTIGWFRQVPGKEREGVACIGHNDDTTYYADSVQGRFTISRDNAKNTVYLQMSSLKPEDTAVYLCASTSRARCARYSYNDRWFFDTWGQGTQVTVSS

SEQ ID NO: 27881 - protein, 122 aa, Artificial Sequence
  source: /note="Description of Artificial Sequence: Synthetic polypeptide"
EVQLVESGGGLVQAGDSLRLSCAASTRTFRNYNLGWFRQAPGKEREFVAAISWADYRTFYSDSAKGRFTISRDNTKNMLYLQMNSLKPEDTARYYCGAGYRDVRVDWQPAFWGQGTQVTVSS

SEQ ID NO: 27882 - protein, 118 aa, Artificial Sequence
  source: /note="Description of Artificial Sequence: Synthetic polypeptide"
EVQLVESGGGLVQAGDSLRLSCTASGSQFSHTDMAWARQPPGKEREFVAINWSAGNTYYRDSVKGRFTISRDNAQNTVYLQMNSLKPEDTATYYCAARIGYDVDWNYWGQGTQVTVSS

SEQ ID NO: 27883 - protein, 129 aa, Artificial Sequence
  source: /note="Description of Artificial Sequence: Synthetic polypeptide"
EVQLVESGGGLVQAGGSLRLSCTASGTTFFMYAMGWFRQAPGKEREFVAAISRFGDSLHSSDSVKGRFTISRDNTENTVYLQMNMVKPEDTAVYYCAAKVAYHRSGSRYYTNHTDYDAWGQGTQVTVSS

SEQ ID NO: 27884 - protein, 133 aa, Artificial Sequence
  source: /note="Description of Artificial Sequence: Synthetic polypeptide"
EVQLVESGGGLVQAGGSLRLSCTVSGQTSTTDAVGWFRQAPGKEREFVSAISWSDNKLYYEDSVKGRFAISRDNAKDTVYLQMDSLKPEDTAVYYCAARNRPPDFLTNYFRVLYYREGAYDYWGQGTQVTVSS

SEQ ID NO: 27885 - protein, 128 aa, Artificial Sequence
  source: /note="Description of Artificial Sequence: Synthetic polypeptide"
EVQLVESGGGLVQAGGSLRLSCAASGFSLDDYAIGWFRQAPGKEREGLSCRSGSDGSTYYADSVKGRFTFSSDNAKNTVYLQLNSLKPEDTAVYYCALITGSSYCLWRRILESEFDVWGQGTQVTVSS

SEQ ID NO: 27886 - protein, 127 aa, Artificial Sequence
  source: /note="Description of Artificial Sequence: Synthetic polypeptide"
EVQLVESGGGVVQAGGSLRLSCAASGRTFSLYTMGWFRQAPGKEREFIAHMRRGGYTTYVADSVKDRFTISGDNAEATVYLQMNSLKSEDTAVYYCAAKLGLLVIGTAPTANDYDYWGQGTQVTVSS

SEQ ID NO: 27887 - protein, 126 aa, Artificial Sequence
  source: /note="Description of Artificial Sequence: Synthetic polypeptide"
EVQLVESGGGLVQAGGSLRLSCAASGFTSDDYAIGWFRRAPGKEREGVSYISIEDGSTYSADSVKGRFTISSDYAKNTVYLQMNGLKPEDTAVYYCAAAILGDSVRWLQEYDYDYWGQGTQVTVSS

SEQ ID NO: 27888 - protein, 120 aa, Artificial Sequence
  source: /note="Description of Artificial Sequence: Synthetic polypeptide"
EVQLVESGGDLVQAGDSLRLSCVVSGSIRDNSVIGWFRQVPGKERKLFTYYYWSGTSTYFVEAVKGRFTISRDIKSKNTVYLQMNNLKEIEDTALYYCATTSEGIMIDISGQGTQVSFLS

SEQ ID NO: 27889 - protein, 121 aa, Artificial Sequence
  source: /note="Description of Artificial Sequence: Synthetic polypeptide"
EVQLVESGGGLVQAGGSLRLSCIVSESIFSRYAMGWFRQAPGKEREFVAGIGAVTHYGEFVKGRFTISRDSAKNTIYLQMSSLKPEDTAIYFCARSKNTYISYASNQYDVWGRGTQVTVSS

SEQ ID NO: 27890 - protein, 126 aa, Artificial Sequence
  source: /note="Description of Artificial Sequence: Synthetic polypeptide"
EVQLVESGGGLVQAGGSLRLSCAASGFTSDDYAIGWFRQAPGKEREGVSYISLEDGSTYVADSVRGRFTISYDYAKNTVYLQMNSLKPEDSAVYYCAAAILGNSVLWLWEYDYRYWGQGTQVTVSS

SEQ ID NO: 27891 - protein, 120 aa, Artificial Sequence
  source: /note="Description of Artificial Sequence: Synthetic polypeptide"
EVQLVESGGGLVQAGDSLRLSCAVSGSISGIKTIGWFRQFPGRERKLFGYYYWNGASTYLVDSVICGRFTISRDNAENTVYLQMNNLKPEDTAIYYCGAETEGHYDFEFWGQGTQVTVSS

SEQ ID NO: 27892 - protein, 126 aa, Artificial Sequence
  source: /note="Description of Artificial Sequence: Synthetic polypeptide"
EVQLVESGGGLVQAGGSLRLSCVLSGGTFSDAAMGWFRQPPGKEREFNTAAISWSAGPTTHYADSVKGRFTISRDDAKNTVYLQMNSLKPEDTGVYYCAAQFRVGWVHLSNEYDYWGQGTQVTVSS

SEQ ID NO: 27893 - protein, 126 aa, Artificial Sequence
  source: /note="Description of Artificial Sequence: Synthetic polypeptide"
EVQLVESGGGLVQAGGSLRLSCACSGFTSDDYAIGWFRQAPGKEREGVSYISREDGSRHYADSAKGRFTISSDYAKNTVYLQMNSLEPEDTAVYYCAAALLGDYVLWLPEYEYKYWGQGTQVTVSS

SEQ ID NO: 27894 - protein, 126 aa, Artificial Sequence
  source: /note="Description of Artificial Sequence: Synthetic polypeptide"
EVQLVESGGGLVQAGESLRLSCAASGFTSDDYAIGWFRQAPGKEREGVSYISHEDGSTYVADSVRGRFTISYDYAKNTVYLQMNSLKPEDTAVYYCAAAILGNSVLWLWEYEYRYWGQGTQVTVSS

SEQ ID NO: 27895 - protein, 126 aa, Artificial Sequence
  source: /note="Description of Artificial Sequence: Synthetic polypeptide"
EVQLVESGGGLVQAGGSLRLSCACSGFTSDDYAIGWFRQAPGKEREGVSYISREDGGRYYADSVKGRFTISSDNAKNTVYLQMNSLKPEDTAVYYCAAALLGDYVRWLPEYEYNYWGQGTQVTVSS

SEQ ID NO: 27896 - protein, 126 aa, Artificial Sequence
  source: /note="Description of Artificial Sequence: Synthetic polypeptide"
EVQLVESGGGLVQTGGSLRLSCAASGFTSDDHAIGWFRRAPGKEREGLSYISIEDGSTYTADSVKGRFTISSDNAKNTVYLQMNSLKPEDTAVYYCAAAILGDYVRWLQEYDYDYWGQGTQVTVSS

SEQ ID NO: 27897 - protein, 121 aa, Artificial Sequence
  source: /note="Description of Artificial Sequence: Synthetic polypeptide"
EVQLVESGGGLVQAGGSLRLSCVASGDIQFSWSSMAWFRQAPGKEREFVATISRSGSDVDYADSAKGRFTISRDNAKKMLYLQMNSLKPEDTATYYCAAARGLTAYEFQFWGQGTQVTVSS

SEQ ID NO: 27898 - protein, 126 aa, Artificial Sequence
  source: /note="Description of Artificial Sequence: Synthetic polypeptide"
EVQLVESGGGLVQAGGSLRLSCAASGFTSDDYAIGWFRQAPGKEREGVSYISNEDGSTYVADSVKGRFTISSDNAKNTVYLQMNSLKPEDTAAYYCAAAILGNSVRWLSEYDYDYWGQGTQVTVSS

SEQ ID NO: 27899 - protein, 118 aa, Artificial Sequence
  source: /note="Description of Artificial Sequence: Synthetic polypeptide"
EVQLVESGGGLVQAGDSLIMSCTASTPTFSTLAMAWFRQAPGKEREFVAGIVDGMDNYDYSVEGRFTISRDNRENTLYLQMDSLRPEDTAVYYCAARRRYYSSKYEYWGQGTQVTVSS

SEQ ID NO: 27900 - protein, 118 aa, Artificial Sequence
  source: /note="Description of Artificial Sequence: Synthetic polypeptide"
EVQLVESGGGLVQAGGSLRLSCAASFSSDNMGWFRQAPGKEREFIAAINWNGGTIVYADSVKGRFTISRDNAICNTVYLQMNSLKPEDTAVYYCAADSPGVVLSWDYWGQGTQVTVSS

SEQ ID NO: 27901 - protein, 126 aa, Artificial Sequence
  source: /note="Description of Artificial Sequence: Synthetic polypeptide"
EVQLVESGGGLVQAGGSLRLSCAASGFTSDDYAIGWFRQAPGKEREGVSYISAEDGSTYNADSVKGRFTISSDNAKNTVYLQMNSLKPEDTGVYYCAAALLGASVRWLSEYDYDYWGQGTQVTVSS

SEQ ID NO: 27902 - protein, 126 aa, Artificial Sequence
  source: /note="Description of Artificial Sequence: Synthetic polypeptide"
EVQLVESGGGLVQPGGSLRLSCAASGFTSDDYAIGWFRRAPGKEREGVSYISNEDGSTYHADPVKGRFTIYSDNAKRTVYLQMNSLKPEDTAVYYCAAATLGDYVRWLSEYDYNYWGQGTQVTVSS

SEQ ID NO: 27903 - protein, 126 aa, Artificial Sequence
  source: /note="Description of Artificial Sequence: Synthetic polypeptide"
EVQLVESGGGLVQAGGSLRLSCAASGFTSDDYAIGWFRQAPGKEREGVSYISAEDGSTYNADSVKGRFTISSDNAKNTVYLQMNSLKPEDTAVYYCAAALLGDSVRWLSEYDYDYWGQGTQVTVSS

SEQ ID NO: 27904 - protein, 123 aa, Artificial Sequence
  source: /note="Description of Artificial Sequence: Synthetic polypeptide"
EVQLVESGGGLVQSGDSLRLSCTISGIFFDLYSMAWFRQAPGKEREFVAAISSVGGMTDYADSVKGRFTISRDNARQTVYLQMNSLKPEDTAVYSCAARAHREIVRSYGYNYWGQGTQVTVSS

SEQ ID NO: 27905 - protein, 119 aa, Artificial Sequence
  source: /note="Description of Artificial Sequence: Synthetic polypeptide"
EVQLVESGGGSVQAGDSLKLSCTASTPTFSNLAMAWFRQAPGREREFVSGIVGDDITNYADFAEGRFTISRDNSKNTLYLQMDSLRPEDTAVYVCAARRRYYSSRYEYWGQGTQVTVSS

SEQ ID NO: 27906 - protein, 119 aa, Artificial Sequence
  source: /note="Description of Artificial Sequence: Synthetic polypeptide"
EVQLVESGGGLVQAGGSLRISCEYSGRTFSTHRMAWFRQAPGKDREFVASLKWSDGETTYADSVKGRFTISRENAENSLYLQMNNLEPGDTAVYFCAAGTWWPPSYDYWGQGTQVTVSS

SEQ ID NO: 27907 - protein, 126 aa, Artificial Sequence
  source: /note="Description of Artificial Sequence: Synthetic polypeptide"
EVQLVESGGGLVQAGGSLRLSCAASGFTSDDYAIGWFRQAPGKEREGVSYISHEDGSTYVADSVRGRFTISYDYAENTVYLQMNSLKPDDTAVYYCAAAILGNSVLWLWEYEYRYWGQGTQVTVSS

SEQ ID NO: 27908 - protein, 133 aa, Artificial Sequence
  source: /note="Description of Artificial Sequence: Synthetic polypeptide"
EVQLVESGGGLVQTGGSLRLSCTASGQTSIIDAVGWFRQAPGKEREFVSAISWSDNNIYYEDSVKGRFTISRDNAKDTVYLQMDSLKPEDTAVYYCAARNRPPDFLTNYFRVLYYREGAYDYWGQGTQVTVSS

SEQ ID NO: 27909 - protein, 130 aa, Artificial Sequence
  source: /note="Description of Artificial Sequence: Synthetic polypeptide"
EVQLVESGGGAVQPGDSLRLACTASGVTLDASRVTLDVYSIGWFRQAPGNEREAVSCISSSDGSTYYADSVKGRFTISRDDAKNTVYLQMNSLKPEDTAVYYCASDWSCEIVLYATADYWGQGTQVTVSS

SEQ ID NO: 27910 - protein, 121 aa, Artificial Sequence
  source: /note="Description of Artificial Sequence: Synthetic polypeptide"
EVQLVESGGGLVQAGGFLRLSCELRGSIFNQYAMAWFRQAPGKEREFVAGMGAVPHYGEFVKGRFTISRDNAKSTVYLQMNSLKPEDTAIYFCARSKSTYISYNSNGYDYWGRGTQVTVSS

SEQ ID NO: 27911 - protein, 121 aa, Artificial Sequence
  source: /note="Description of Artificial Sequence: Synthetic polypeptide"
EVQLVESGGGLVQAGDSLRLSCTLSGGTYGFTEYRIGWFRQAPGLEREFAASIAWHDDTYYADSVRGRFLISRDNAKNTVQLQMNSLKPEDTAVYYCAAGLPGSPRRYDYWGQGTQVTVSS

SEQ ID NO: 27912 - protein, 121 aa, Artificial Sequence
  source: /note="Description of Artificial Sequence: Synthetic polypeptide"
EVQLVESGGGLVQAGGSLRLSCAAAVSATRINAFGWYRQAPGKQRELVATILSDGNTNYADSVKGRFTISRDNTRNTVYLQMNGLKPEDTAVYVCNAELYYSDYLPTQTAWGQGTQVTVSS

SEQ ID NO: 27913 - protein, 128 aa, Artificial Sequence
  source: /note="Description of Artificial Sequence: Synthetic polypeptide"
EVQLVESGGGLVQAGGSWLSCAASGGTFRSYSMGWFRQAPGKEREFVGRITWTGSTSYADFVKGRFTISRDNAENMMYLQMNSLKPEDTAIYYCARDRTGLRYLTAQAMRDTNEYEYWGQGTQVTVSS

SEQ ID NO: 27914 - protein, 129 aa, Artificial Sequence
  source: /note="Description of Artificial Sequence: Synthetic polypeptide"
EVQLVESGGGLVQAGGSLRLSCAASGRSFRVYGMAWFRQAPGKEREFVGRITWTASTSYADSVKGRFTISRDSAMNVIYLQMNSLKPEDTAVYYCATDRVSARYLTAQAMRDTDEYDYWGQGTQVTVSS

SEQ ID NO: 27915 - protein, 129 aa, Artificial Sequence
  source: /note="Description of Artificial Sequence: Synthetic polypeptide"
EVQLVESGGGLVQAGGSLRLSCAASGRTINTYATGWFRQAPGKEREFVARISWGADSTNYADSVKGRFTISKDNAKNTVYLQMNSLKPEDTAVYYCAADKPYRALNLERMHDSSEYDVWGQGTQVTVSS

SEQ ID NO: 27916 - protein, 127 aa, Artificial Sequence
  source: /note="Description of Artificial Sequence: Synthetic polypeptide"
EVQLVESGGGLVQTGGSLTLSCATSEGTFSAYTMAWFRQAPGKEREFVGAIDWRFGNTYYADSVKGRFTISRDNARNTGYLQMNSLKPEDTAVYFCAADRYRSIPYPPRRDSVYEYWGQGTQVTVSS

SEQ ID NO: 27917 - protein, 120 aa, Artificial Sequence
  source: /note="Description of Artificial Sequence: Synthetic polypeptide"
EVQLVESGGGLVQPGGSLRLSCAASGSIFSMTGMGWYRQPPGKQRELVAAITTDGSTHYADSVKERFTISGDNAKKTLYLQMNSLKPEDTAVYYCYAPMIYDRGSYRDYWGQGTQVTVSS

SEQ ID NO: 27918 - protein, 126 aa, Artificial Sequence
  source: /note="Description of Artificial Sequence: Synthetic polypeptide"
EVQLVESGGGLVQPGGSLTLSCVASGFTLDGYAIGWFRQAPGKEVEPVSCITGRHGTIYYADSVMGRFTISRDNAKNTVYLQMNSLKPEDTAVYYCAADGFDTPCVAGTDWQYDYWGQGTQVTVSS

SEQ ID NO: 27919 - protein, 124 aa, Artificial Sequence
  source: /note="Description of Artificial Sequence: Synthetic polypeptide"
EVQLVESGGGLVQPGGSLRLSCAASGNIFGENTMNWYRQAPGKQRELVAGITNLQSAYYPDGVKYADSVKGRFTISRDNAKNAVYLQMNSLKPEDTAVYYCNIFEHRFPPATYWGQGTQVTVSS

SEQ ID NO: 27920 - protein, 125 aa, Artificial Sequence
  source: /note="Description of Artificial Sequence: Synthetic polypeptide"
EVQLVESGGGLVQPGGSLRLSCVASGFTLDGYAIGWFRQAPGKEREAISCITTAGTIYYADSVKGRVTISRDNAKNTVYLQMNSLKPEDTAVYLCAADGFDTPCVAGTDWGYDYEGQGTQVTVSS

SEQ ID NO: 27921 - protein, 116 aa, Artificial Sequence
  source: /note="Description of Artificial Sequence: Synthetic polypeptide"
EVQLVESGGGLVQPGGSLRLSCAASGPLFSISTMGWYRQAPGEQRELVASISSDGDTNYSDSVKDRFTISRDNAENTVYLQMNSLKPEDTAVYFCYARKWILDTYWGQGTQVTVSS

SEQ ID NO: 27922 - protein, 120 aa, Artificial Sequence
  source: /note="Description of Artificial Sequence: Synthetic polypeptide"
EVQLVESGGGLVQPGGSLRLSCTASGNIVSIDAAGWFRQAPGKQREPVATILTGGTTNYADSVKGRFTISRDTAKNIVYLQMNSLKPEDTAVYYCYAPMIYYGGSYSDYWGQGTQVTVSS

SEQ ID NO: 27923 - protein, 114 aa, Artificial Sequence
  source: /note="Description of Artificial Sequence: Synthetic polypeptide"
EVQLVESGGGLVQAGGSLRLSCTASGVTIDAVGWYRQAPGKQREPVATITSGGSTNYADSVKGRFTISRDDAKNTVYLQMNSLKPEDTAVYYCFRPGGPYSDSWGQGTQVTVSS

SEQ ID NO: 27924 - protein, 122 aa, Artificial Sequence
  source: /note="Description of Artificial Sequence: Synthetic polypeptide"
EVQLVESGGALVKAGGSLRLSCAVSGTSVSDNGMGWGRQAPGKQRELVAVLTSGGATNYAPSVKGRFTISRDNAKNAVYLQMNNLKPEDTAVYYCAADTAARSLYSDPFDVWGQGTQVTVSS

SEQ ID NO: 27925 - protein, 124 aa, Artificial Sequence
  source: /note="Description of Artificial Sequence: Synthetic polypeptide"
EVQLVESGGGLVQPGGSLRLSCAASGNILGENTMNWYRQAPGKERELVAGVTNLRSTYYPDGVKYADSVKGRFTVSRDNAKNAVYLQMNSLKPEDTAVYYCNLFEHRFPPATYWGQGTQVTVSS

SEQ ID NO: 27926 - protein, 120 aa, Artificial Sequence
  source: /note="Description of Artificial Sequence: Synthetic polypeptide"
EVQLVESGGALVQAGRSLRLSCAASGNAFTIDAAAWYRQAPGKQREPVATILSGGTTNYADSVKGRFTISRDNVKNTVYLQMNSLKPEDTAVYYCYVPMVYYSGRYNDVWGQGTQVTVSS

SEQ ID NO: 27927 - protein, 126 aa, Artificial Sequence
  source: /note="Description of Artificial Sequence: Synthetic polypeptide"
EVQLVESGGGLVQAGGSLRLSCAVSGGTFDDYAIGWFRQAPGKEREGVSYIGCNDGSTYYANSVKGRFTISCDYAKNTVYLQMNNLKPEDTAVYYCAAAAQWATIRWIQEYDYDYWGQGTQVTVSS

SEQ ID NO: 27928 - protein, 128 aa, Artificial Sequence
  source: /note="Description of Artificial Sequence: Synthetic polypeptide"
EVQLVESGGGLVQPGGSLRLSCAVSGFPLGYYAIGWFRQAPGKEREEVSCIVTSDGSTYYTDSVKGRFTISRDAAKNTVYLQMNNLNPEDTAVYYCAAGGTLVAVTDSCFIDYVMDYWGKGTLVTVSS

SEQ ID NO: 27929 - protein, 126 aa, Artificial Sequence
  source: /note="Description of Artificial Sequence: Synthetic polypeptide"
EVQLVESGGGLVQPGGSLRLSCAASGATFDDYAIGWFRQAPGKEREGVSYIGCNDGATYYAGSVKGRFTISCDYAKNTVYLQMNSLKPEDTAVYYCAAAAQWATIRWIHEYDYNIWGQGTQVTVSS

SEQ ID NO: 27930 - protein, 126 aa, Artificial Sequence
  source: /note="Description of Artificial Sequence: Synthetic polypeptide"
EVQLVESGGGLVQPGGSLKLSCAASGASFMDYAIGWFRQAPGKEREGVSYIGCEDGAQYYAGSVKGRFTISCDYAKNTVYLQMNSLKPEDTAVYYCAAAKQWETIRWVHEYDYHNWGQGTQVTVSS

SEQ ID NO: 27931 - protein, 126 aa, Artificial Sequence
  source: /note="Description of Artificial Sequence: Synthetic polypeptide"
EVQLVESGGGLVQPGGSLKLSCAASGAGFNDYAIGWFRQAPGKEREGVSYIGCLDGAQYYAGSVKGRFTISCDYAKNTVYLQMNSLKPEDTAVYYCAAAEQWNTIRWVHEYDYGDWGQGTQVTVSS

SEQ ID NO: 27932 - protein, 126 aa, Artificial Sequence
  source: /note="Description of Artificial Sequence: Synthetic polypeptide"
EVQLVESGGGLVQPGGSLKLSCAASGAAFDDYAIGWFRQAPGKEREGVSYIGCYDGAQYYAGSVKGRFTISCDYAKNTVYLQMNSLKPEDTAVYYCAAAYQWSTIRWVHEYDYNHLGQGTQVTVSS

SEQ ID NO: 27933 - protein, 126 aa, Artificial Sequence
  source: /note="Description of Artificial Sequence: Synthetic polypeptide"
EVQLVESGGGLVQPGGSLKLSCAASGASFHDYAIGWFRQAPGKEREGVSYIGCDDGAQYYAGSVKGRFTISCDYAKNTVYLQMNSLKPEDTAVYYCAAAYQWDTIRWVHEYDYSVWGQGTQVTVSS

SEQ ID NO: 27934 - protein, 126 aa, Artificial Sequence
  source: /note="Description of Artificial Sequence: Synthetic polypeptide"
EVQLVESGGGLVQPGGSLKLSCAASGAAFHDYAIGWFRQAPGKEREGVSYIGCTDGAQYYAGSVKGRFTISCDYAKNTVYLQMNSLKPEDTAVYYCAAADQWNTIRWVHEYDYVYWGQGTQVTVSS

SEQ ID NO: 27935 - protein, 126 aa, Artificial Sequence
  source: /note="Description of Artificial Sequence: Synthetic polypeptide"
EVQLVESGGGLVQPGGSLKLSCAASGAPFMDYAIGWFRQAPGKEREGVSYIGCADGAQYYAGSVKGRFTISCDYAKNTVYLQMNSLKPEDTAVYYCAAADQWTTIRWVHEYDYHVWGQGTQVTVSS

SEQ ID NO: 27936 - protein, 126 aa, Artificial Sequence
  source: /note="Description of Artificial Sequence: Synthetic polypeptide"
EVQLVESGGGLVQPGGSLKLSCAASGANFADYAIGWFRQAPGKEREGVSYIGCDDGAQYYAGSVKGRFTISCDYAKNTVYLQMNSLKPEDTAVYYCAAATQWNTIRWVHEYDYVFWGQGTQVTVSS

SEQ ID NO: 27937 - protein, 126 aa, Artificial Sequence
  source: /note="Description of Artificial Sequence: Synthetic polypeptide"
EVQLVESGGGLVQPGGSLRLSCAASGADFDDYAIGWFRQAPGKEREGVSYIGCDDGAQYYAGSVKGRFTISCDYAKNTVYLQMNSLKPEDTAVYYCAAANQWTTIRWVHEYDYDIWGQGTQVTVSS

SEQ ID NO: 27938 - protein, 125 aa, Artificial Sequence
  source: /note="Description of Artificial Sequence: Synthetic polypeptide"
EVQLVESGGGLVQPGGSLRLSCAASGFTLDGYAIGWFRQAPGKEREAISCITTAGTIYYADSVKGRVTISRDNAKNTVYLQMNSLKPEDTAVYLCAADGFDTPCVAGTDWGYDYEGQGTQVTVSS

SEQ ID NO: 27939 - protein, 126 aa, Artificial Sequence
  source: /note="Description of Artificial Sequence: Synthetic polypeptide"
EVQLVESGGGLVQAGGSLRLSCAASGGTLYDYAIGWFRQAPGKEREGVAYLGASDGATYYADSVKGRFTISSDNAKNTVYLQMNSLKPEDTAVYYCAAAAQWATIRWIQEYDYDTWGQGTQVTVSS

SEQ ID NO: 27940 - protein, 122 aa, Artificial Sequence
  source: /note="Description of Artificial Sequence: Synthetic polypeptide"
EVQLVESGGGLVQAGGSLRLSCTTSGSIFSLSGMGWFRQAPGKQREPVAVITSGGATNYAPYAKGRFTISRDNAKNTVYLQMNSLKPGDTAVYYCALDSPDRSLGAPPFDYWGQGTQVTVSS

SEQ ID NO: 27941 - protein, 126 aa, Artificial Sequence
  source: /note="Description of Artificial Sequence: Synthetic polypeptide"
EVQLVESGGGLVQPGGSLTLSCVASGFTLDGYAIGWFRQAPGKEVESVSCITGRHGTIYYADSVMGRFTISRDNAKSTVYLQMNSLKPEDTAVYYCAADGFDTPCVAGTDWQYDYWGQGTQVTVSS

SEQ ID NO: 27942 - protein, 125 aa, Artificial Sequence
  source: /note="Description of Artificial Sequence: Synthetic polypeptide"
EVQLVESGGGLVQPGGSLRLSCAASGFTLDGYAIGWFRQAPGKEREAISCITTAGTIYYADSVKGRVTISRDNTKNMVYLQMNSLKPEDTAVYLCAADGFDTPCVAGTDWGYDYEGQGTQVTVSS

SEQ ID NO: 27943 - protein, 121 aa, Artificial Sequence
  source: /note="Description of Artificial Sequence: Synthetic polypeptide"
EVQLVESGGGLVQPGGSLRLSCAASGSILDDANAMGWYRQTPGTERALVALITDSGATRYADSVKGRFTISRDNAKNTATLQMNSLKPEDTAVYYCNFREFGGWGTNIDHWGQGTQVTVSS

SEQ ID NO: 27944 - protein, 126 aa, Artificial Sequence
  source: /note="Description of Artificial Sequence: Synthetic polypeptide"
EVQLVESGGGLVQAGGSLRLSCAVSGATFDDYAIGWFRQAPGKEREGVSYIGCNDGSTYYAGSVKGRFTISCDYAKNTVYLQMNSLKPEDTAVYYCAAAAQWATIRWIHEYDYDTWGQGTQVITSS

SEQ ID NO: 27945 - protein, 123 aa, Artificial Sequence
  source: /note="Description of Artificial Sequence: Synthetic polypeptide"
EVQLVESGGGLVQAGGSLRLSCRASGNTGNVNAMGWYRQAPGKQRELVAAVSGGGKTNYADSVKGRFTISIDNAKIIAYLQMNSLKPEDTAVYYCNAGVMGTSGSYYPGDDNWGQGTQVTVSS

SEQ ID NO: 27946 - protein, 123 aa, Artificial Sequence
  source: /note="Description of Artificial Sequence: Synthetic polypeptide"
EVQLVESGGGLVQAGGSLRLSCRASGNTGNVNAMGWYRQAPGKQRELVAAVSGRGKTNYADSVKGRFTISIDNAKIIVYLQMNNLKPEDTAVYYCNAGVMGTSGSYYLGEDNWGQGTQVTVSS

SEQ ID NO: 27947 - protein, 123 aa, Artificial Sequence
  source: /note="Description of Artificial Sequence: Synthetic polypeptide"
EVQLVESGGGLVQAGGSLRLSCAASGNTGNVNAMGWYRQAPGKQRELVAGISSRGTTNYADSVKGRFTISLDSAKITAHLQMNRLKPEDTAVYYCNAGVMGSSGSYYPGEENWGQGTQVTVSS

SEQ ID NO: 27948 - protein, 119 aa, Artificial Sequence
  source: /note="Description of Artificial Sequence: Synthetic polypeptide"
EVQLVESGGGLVQPGGSLRLSCETSRHTLDHYAIAWFRQAPGKEGEGIACVSTSTYYADSVKGRFSISRGNAKNTVYLQMNDLKPEDTAVYHCATTGSGYCTLRAFASWGQGTQVIVSS

SEQ ID NO: 27949 - protein, 123 aa, Artificial Sequence; identical to SEQ ID NO: 27859
  source: /note="Description of Artificial Sequence: Synthetic polypeptide"

SEQ ID NO: 27950 - protein, 126 aa, Artificial Sequence
  source: /note="Description of Artificial Sequence: Synthetic polypeptide"
EVQLVESGGGLVQAGGSLRLSCAVSGGTFDDYAIGWFRQAPGKEREGVSYIGCNDGSTYNAGSVKGRFTISCDYAKNTVYLQMNNLKPEDTAVYYCAAAAQWATIRWIQEYDYDYWGQGTQVTVSS

SEQ ID NO: 27951 - protein, 128 aa, Artificial Sequence
  source: /note="Description of Artificial Sequence: Synthetic polypeptide"
EVQLVESGGGLVQPGGSLRLSCAVSGFPLGYYAIGWFRQAPGKEREEVSCIVTSDGSTYYTDSVKGRFTISRDNAKNTVYLQMNNLNPEDTAVYYCAAGGTIVAVTDSCFIDYVMDYWGKGTLVTVSS

SEQ ID NO: 27952 - protein, 125 aa, Artificial Sequence
  source: /note="Description of Artificial Sequence: Synthetic polypeptide"
EVQLVESGGGLVQPGGSLRLSCAASGFTLDGYAIGWFRQTPGKEREAISCITTAGTIYYADSVKGRVTISRDNAKNTVYLQMNSLKPEDTAVYLCAADGFDTPCVAGTDWGYDYEGQGTQVTVSS

SEQ ID NO: 27953 - protein, 126 aa, Artificial Sequence
  source: /note="Description of Artificial Sequence: Synthetic polypeptide"
EVQLVESGGGSVQAGASLRLSCAASGRTFSGIDMAWYRQAPGNGRELVAVITSGGSTKYVDSVKGRFTIFRDNAKNTVALQMNSLKPEDTAVYYCAAVEESPFYSGTYYPKPGDYWGQGTQVTVSS

SEQ ID NO: 27954 - protein, 125 aa, Artificial Sequence
  source: /note="Description of Artificial Sequence: Synthetic polypeptide"
EVQLVESGGGLVQPGGSLRLSCAASGFTLDGYAIGWFRQAPGKEREAISCITTAGTIYYADSVKGRVTISRDNAKNTVYLQMNSLKPEDTAVYLCAVDGFDTPCVAGTDWGYDYEGQGTQVTVSS

SEQ ID NO: 27955 - protein, 120 aa, Artificial Sequence
  source: /note="Description of Artificial Sequence: Synthetic polypeptide"
EVQLVESGGGLVQPGGSLRLSCAASGNIVSIDAAGWFRQAPGKQREPVATILTGGATNYADSVKGRFTISRDNAKNTVYLQMSSLKPEDTAVYYCYAPMIYYGGRYSDYWGQGTQVTVSS

SEQ ID NO: 27956 - protein, 120 aa, Artificial Sequence
  source: /note="Description of Artificial Sequence: Synthetic polypeptide"
EVQLVESGGGLVQPGGSLRLSCAASGNIASIDAAGWFRQAPGKQREPVATILTGGATNYADSVKGRFTISRDNAKNTVYLQMNSLKPEDTAVYYCYAPMIYYGGRYSDYWGQGTQVTVSS

SEQ ID NO: 27957 - protein, 120 aa, Artificial Sequence
  source: /note="Description of Artificial Sequence: Synthetic polypeptide"
EVQLVESGGGLVQPGGSLRLSCAASGNIVSIDAAGWFRQAPGKQREPVATILTGGATNYADSVKGRFTISRDNAKNTVYLQMNSLKPEDTAVYYCYAPMIAYGGRYSDYWGQGTQVTVSS

SEQ ID NO: 27958 - protein, 120 aa, Artificial Sequence
  source: /note="Description of Artificial Sequence: Synthetic polypeptide"
EVQLVESGGGLVQPGGSLRLSCAASGNIVSIDAAGWFRQAPGKQREPVATILTGGATNYADSVKGRFTISRDNAENTVYLQMNSLKPEDTAVYYCYAPMIYYGGAYSDYWGQGTQVTVSS

SEQ ID NO: 27959 - protein, 120 aa, Artificial Sequence
  source: /note="Description of Artificial Sequence: Synthetic polypeptide"
EVQLVESGGGLVQAGGSLRLSCAASGNAFSIDAAAWYRQAPGKQREPVATILTGGSTNYADSVKGRFTISRDNAKNTVYLQMNSLKPEDTAVYYCYVPMVYYSGRYSDYWGQGTQVTVSS

SEQ ID NO: 27960 - protein, 120 aa, Artificial Sequence
  source: /note="Description of Artificial Sequence: Synthetic polypeptide"
EVQLVESGGGLVQPGGSLRLSCAASGNIVSIDAAGWFRQAPGKQREPVATILTGGATNYADSVKGRFTISRDNAKNTVYLQMNSLKPEDTAVYYCYAPMIYYGGRASDYWGQGTQVTVSS

SEQ ID NO: 27961 - protein, 120 aa, Artificial Sequence
  source: /note="Description of Artificial Sequence: Synthetic polypeptide"
EVQLVESGGGLVQPGGSLRLSCAASGNIVSIDAAGWFRQAPGKQREPVATILTGGATNYADSVKGRFTISRDNAKNTVYLQMNSLKPEDTAVYYCYAPMIYYGGRYSDAWGQGTQVTVSS

SEQ ID NO: 27962 - protein, 119 aa, Artificial Sequence
  source: /note="Description of Artificial Sequence: Synthetic polypeptide"
EVQLVESGGGLVQAGGSLRLSCAASGNAFSIDAAAWYRAPGKQREPVATILTGGSTNYADSVKGRFTISRDNAKNTVYLQMNSLKPEDTAVYYCYVPMVYYSGRYSDYWGQGTQVTVSS

SEQ ID NO: 27963 - protein, 120 aa, Artificial Sequence
  source: /note="Description of Artificial Sequence: Synthetic polypeptide"
EVQLVESGGGLVQAGGSLRLSCAASGNAFSIDAAAWYRQAPGKQREPVATILTGGSTNYADSVKGRFTISRDNAKNLVYLQMNSLKPEDTAVYYCYVPMVYYSGRYSDYWGQGTQVTVSS

SEQ ID NO: 27964 - protein, 120 aa, Artificial Sequence
  source: /note="Description of Artificial Sequence: Synthetic polypeptide"
EVQLVESGGGSLQAGGSLRLSCAASGNIVSIDAAGWFRQAPGKQREPVATILTGGATNYADSVKGRFTISRDNAKNTVYLQMNSLKPEDTAVYYCYAPMIYYGGRYSDYWGQGTQVTVSS

SEQ ID NO: 27965 - protein, 120 aa, Artificial Sequence
  source: /note="Description of Artificial Sequence: Synthetic polypeptide"
EVQLVESGGGLVQPGGSLRLSCAASGNIVSIDAAGWFRQAPGKQREPVATILTGGATNYADSVKGRFTISRDNAENTVYLQMNSLKPEDTAVYYCYAPMIYYGGRYSDYWGQGTQVTVSS

SEQ ID NO: 27966 - protein, 120 aa, Artificial Sequence
  source: /note="Description of Artificial Sequence: Synthetic polypeptide"
EVQLVESGGGLVQPGGSLRLSCAASGNIVSIDAAGWFRQAPGKQREPVATILTGGAANYADSVKGRFTISRDNAKNTVYLQMNSLKPEDTAVYYCYAPMIYYGGRYSDYWGQGTQVTVSS

SEQ ID NO: 27967 - protein, 119 aa, Artificial Sequence
  source: /note="Description of Artificial Sequence: Synthetic polypeptide"
EVQLVESGGGLVQPGGSLRLSCAASGNIVSIDAAGWFRQAPGKQREPVATILTGGATNYADSVKGRFTISRDNAKNTVYLQMNSLKPEDTAVYYCYAPMIYYGGRYFDYWGQGTVTVSS

SEQ ID NO: 27968 - protein, 125 aa, Artificial Sequence
  source: /note="Description of Artificial Sequence: Synthetic polypeptide"
EVQLVESGGGLVQPGGSLRLSCAASGFTLDGYAIGWFRQAPGKEREAISCITTRGTIYYADSVKGRVTISRDNAKNTVYLQMTSLKPEDTAVYLCAADGFDTPCVAGTDWGYDYEGQGTQVTVSS

SEQ ID NO: 27969 - protein, 126 aa, Artificial Sequence
  source: /note="Description of Artificial Sequence: Synthetic polypeptide"
EVQLVESGGGLVQAGGSLRLSCAVSGGTFDDYAIGWFPQAPGKEREGVSYIGCNDGSTYYADSVKGRFTISCDYPKNTVYLQMNHLKPEDTAAYYCAAAAQWATIRWIQQYHYDYWGQGTQVTVSS

SEQ ID NO: 27970 - protein, 122 aa, Artificial Sequence
  source: /note="Description of Artificial Sequence: Synthetic polypeptide"
EVQLVESGGGLVQAGGSLRLSCETSGNTVDDYAMGWFRQAPGKEGEVVACISTSGYTDYADSGKGRFSISIDSNMTLHLHMKRLKHADADLCYSTASVMCSSGTYYPGEENWREGTPVTVSS

SEQ ID NO: 27971 - protein, 126 aa, Artificial Sequence
  source: /note="Description of Artificial Sequence: Synthetic polypeptide"
EVQLVESGGGLVQAGGSLRLSCAVSGGTFDDYAIGWFRQAPGKEREGVSYIGCNDGSTYHADSVKGRFTISCDYAKNTVYLQMNNLKPEDTAVYYCAAAAQWATIRWIQEYYYDYWGQGTQVTVSS

SEQ ID NO: 27972 - protein, 117 aa, Artificial Sequence
  source: /note="Description of Artificial Sequence: Synthetic polypeptide"
AISSGDGFGRTLGGSLRLSCETSRHTLDHYAIGWFRQAPGKDNEGVACITTSTYYADSVKGPFSISRDNAKNTVYLQMNSLKPEDTAVYYCATTGSGYCTLRAFASWGQGTQVIVSS

SEQ ID NO: 27973 - protein, 126 aa, Artificial Sequence
  source: /note="Description of Artificial Sequence: Synthetic polypeptide"
EVQLVESGGGLVQPGGSLTLSCVASGFTLDGYAIGWFRQAPGKEVESVSCITGRHGTIYYADSVMGRFTISRDNAKNTVYLQMNSLKPEDTAVYYCAADGFDTPCVAGTDWQYDYWGQGTQVTVSS

SEQ ID NO: 27974 - protein, 127 aa, Artificial Sequence
  source: /note="Description of Artificial Sequence: Synthetic polypeptide"
EVQLVESGGGLVQPGGSLRLSCAVSGFPLGYYAIGWFRQAPGKEREEVSCIVTSDGSTYYTDSVKGRFTISRDAAKNTVYLQMNNLNPEDTAVYYCAAGGTLVAVTDCFIDYVMDYWGKGTLVTVSS

SEQ ID NO: 27975 - protein, 119 aa, Artificial Sequence
  source: /note="Description of Artificial Sequence: Synthetic polypeptide"
RWQLVESGGGLVQPGGSLRLSCETSRHTLDHYAIGWFRQAPGKGGEGVACISTNTYYADSVKGRFSISRDNAKNTVYLQMNDLKPEDTAVYHCATTGSGYCTLRAFASWGQGTQVTVSS

SEQ ID NO: 27976 - protein, 125 aa, Artificial Sequence
  source: /note="Description of Artificial Sequence: Synthetic polypeptide"
EVQLVESGGGLVQPGGSLRLSCAASGFTLDGYAIGWFRQAPGKEREAISCITTAGTIYYADSVKGRVTISRDNAKNTVYLQMNSLKPEDTAVYLCAADGFDTPCVAGTDWGYDYGGQGTQVTVSS

SEQ ID NO: 27977 - protein, 126 aa, Artificial Sequence
  source: /note="Description of Artificial Sequence: Synthetic polypeptide"
EVQLVESGGGLVQPGGSLRLSCAASGFGLDYYAIGWFRQAPGKEREGVSCIDSSDGSTYYVDSAKGRFTISRDNAKNTVYLQMNNLKPEDTAVYYCAAHALICGSYWSNGVVFDTWGQGTQVTVSS

SEQ ID NO: 27978 - protein, 126 aa, Artificial Sequence
  source: /note="Description of Artificial Sequence: Synthetic polypeptide"
EVQLVESGGGLVQAGGSLRLSCAASGFTFDDYAIGWFRQAPGKEREGVSYIGCNDGSTYIADSVKGRFTISCDYAENTVYLQMDSLKSEDTAVYYCAAAAQWATIRWIQEYDYDYWGQGTQVTVSS

SEQ ID NO: 27979 - protein, 138 aa, Artificial Sequence
  source: /note="Description of Artificial Sequence: Synthetic polypeptide"
EVQLVESGGGLVQAGGSLRLSCATSGFRFDDYDIGWFRQAPGKEREGVSCISRGDGMTYYADFVKGRFTISSDSAKNTVYLQMNSLKPEDTAVYYCAADPGRSVGWVRAWSSTAQTMGVPSPADFASRGQGTQVTVSS

SEQ ID NO: 27980 - protein, 120 aa, Artificial Sequence
  source: /note="Description of Artificial Sequence: Synthetic polypeptide"
EVQLVESGGGLVQPGGSLRLSCAASQFTLESYAIGWFRQAPGKDSEGVACISSSTYYADSVKGRFTISRDNAKNTVYLQMESLKPEDTAVYHCATSGAGSYCTLRAFGSWGQGTQVTVSS

SEQ ID NO: 27981 - protein, 120 aa, Artificial Sequence
  source: /note="Description of Artificial Sequence: Synthetic polypeptide"
EVQLVESGGGLVQPGGSLRLSCAASGFTLDNYAIGWFRQVPGKEREGVSCISSSDGKTYYADSVKGRFTISRDNAKNTVYLQMNSLKPEDTAVYYCARETRCLGSRWMGGGQGTQVTVSS

SEQ ID NO: 27982 - protein, 125 aa, Artificial Sequence
  source: /note="Description of Artificial Sequence: Synthetic polypeptide"
EVQLVESGGSLVQPGGSLRLSCAASGFTLDGYAIGWFRQAPGKEREAISCITTRGTIYYADSVKGRVTISRDNAKNTVYLQMTSLKPEDTAVYLCAADGFDTPCVAGTDWGYDYEGQGTQVTVSS

SEQ ID NO: 27983 - protein, 128 aa, Artificial Sequence
  source: /note="Description of Artificial Sequence: Synthetic polypeptide"
EVQLVESGGGLVQPGGSLRLSCAVSGFPLGYYAIGWFRQAPGKEREEVSCIVTSDGSTYYTNSVKGRFTISRDNAKNTVYLQMNNLNPEDTAVYYCAAGGTIVAVTDSCFIDYVMDYWGKGTLVTVSS

SEQ ID NO: 27984 - protein, 125 aa, Artificial Sequence
  source: /note="Description of Artificial Sequence: Synthetic polypeptide"
EVQLVESGGSLVQPGGSLRLSCAASGFTLDGYAIGWERQAPGKEREAISCITTRGTIYYADSVKGRVTISRDNAKNTVYLQMTSLKPEDTAVYLCAADGFDTPCVAGTDWGYDYEGQGTQVTVSS

SEQ ID NO: 27985 - protein, 126 aa, Artificial Sequence
  source: /note="Description of Artificial Sequence: Synthetic polypeptide"
EVQLVESGGGLVQPGGSLRLSCAASGATFDDYAIGWFRQAPGKEREGVSYIGCNDGATYYSGSVKGRFTISCDYAKNTVYLQMNSLKPEDTAVYYCAAAAQWATIRWIHEYDYNIWGQGTQVTVSS

SEQ ID NO: 27986 - protein, 123 aa, Artificial Sequence
  source: /note="Description of Artificial Sequence: Synthetic polypeptide"
EVQLVESGGGLVQAGGSLRLSCRASGNTGNVNAMGWYRQAPGKQRELVAAVSGGGKTNYADFVKGRFTISIDNAKIIVYLQMNNLKPEDTAVYYCNAGVMGTSGSYYLGEDNWGQGTQVTVSS

SEQ ID NO: 27987 - protein, 124 aa, Artificial Sequence
  source: /note="Description of Artificial Sequence: Synthetic polypeptide"
EVQLVESGGGLVQAGGSLRLSCAASGFTFDDYGIAWFRQAPGKEREGLACITRSGYTTYYLDSVRGRFTISSDNAKNTVYLQMNSLNPEDTAVYYCAADEPLVVWNCNGDFGSWGQGTQVTVSS

SEQ ID NO: 27988 - protein, 126 aa, Artificial Sequence
  source: /note="Description of Artificial Sequence: Synthetic polypeptide"
EVQLVESGGGLVQAGGSLRLSCAVSGGTFDDYAIGWFRQAPGKEREGVSYIGCNDGSTYNAGSVKGRFTISCDYAKNTVYLQMNNLNSEDTAVYYCAAAAQWATIRWIQEYDYDYWGQGTQVTVSS

SEQ ID NO: 27989 - protein, 126 aa, Artificial Sequence
  source: /note="Description of Artificial Sequence: Synthetic polypeptide"
EVQLVESGGGLVQAGGSLRLSCAAFGFTFDDYAIGWFRQAPGKEREGVSYIGCNDYSTYYSDSVKGRFTISCDYAKNTVYLQMNNLKPEDTAVYYCAAAAQWATIRWIHEYDYNYWGQGTQVTVSS

SEQ ID NO: 27990 - protein, 124 aa, Artificial Sequence
  source: /note="Description of Artificial Sequence: Synthetic polypeptide"
EVQLVESGGGLVQAGGSLRLSCATSGFTFDDYGIAWFRQAPGKEREGLACITRSGYTTYYLDSVKGRFTISSDNAKNTVYLQMNSLNPEDTGVYYCAADEPLIVWNCNGDFGSWGQGTQVTVSS

SEQ ID NO: 27991 - protein, 126 aa, Artificial Sequence
  source: /note="Description of Artificial Sequence: Synthetic polypeptide"
EVQLVESGGGLVQAGGSLRLSCAVSGATFDDYAIGWFRQAPGKEREGVSYIGCNDGSTYYAGSVKGRFTISCDYAKNTVYLQMNSLKPEDTAVYYCAAAAQWATIRWIQEYDYDTWGQGTQVTVSS

SEQ ID NO: 27992 - protein, 119 aa, Artificial Sequence
  source: /note="Description of Artificial Sequence: Synthetic polypeptide"
EVQLVESGGGLVQPGGSLRLSCETSRHTLDHYAIGWFRQAPGKEGEGVACISTSTYYADSVKGRESISRDNAKNTVYLQMNSLKPEDTAVYYCATTGSGLCTLRAFASWGQGTQVITSS

SEQ ID NO: 27993 - protein, 120 aa, Artificial Sequence
  source: /note="Description of Artificial Sequence: Synthetic polypeptide"
EVQLVESGGGLVQPGGSLRLSCAASQSTLESYAIGWFRQAPGKDSEGVACISSSTYYADSVKGRFTISRDNAKNTVYLQMESLKPEDTAVYHCATSGAGSYCTLRAFGSWGQGTQVTVSS

SEQ ID NO: 27994 - protein, 126 aa, Artificial Sequence
  source: /note="Description of Artificial Sequence: Synthetic polypeptide"
EVQLVESGGGLVQAGGSLRLSCAVSGGTFDDYAIAWFRQAPGKEREGVSYIGCNDGSTYYAGSVKGRFTISCDNAKNTVYLQMNSLKPDDTAVYYCAAAAQWATIRWIQEYDYDYWGQGTQVTVSS

SEQ ID NO: 27995 - protein, 126 aa, Artificial Sequence
  source: /note="Description of Artificial Sequence: Synthetic polypeptide"
EVQLVESGGGLVQAGGSLRLSCAVSGATFDDYAIGWFRQAPGKEREGVSYIGCNDGSIYYAGSVKGRFTISCDYAKNTVYLQMNSLKPEDTAVYYCAAAAQWATIRWIQEYDYDTWGQGSQVTVSS

SEQ ID NO: 27996 - protein, 119 aa, Artificial Sequence
  source: /note="Description of Artificial Sequence: Synthetic polypeptide"
EVQLVESGGGLVQPGGSLRLSCETSRHTLDHYAIGWFRQAPGKENEGVACISTSTYYADSVKGRFSISRDNAKNTVYLQMNSLKPEDTAVYYCATTGSGYCTLRAFASWGQGTQVTVSS

SEQ ID NO: 27997 - protein, 125 aa, Artificial Sequence
  source: /note="Description of Artificial Sequence: Synthetic polypeptide"
EVQLVESGGGLVQPGGSLRLSCTASGFQLVYHDLGWFRQVPGKEREGISCISSTDGSTYYTDSVKGRFTISRDNAKNIVYLQMNSLKSEDTAVYYCAADWRNVCRLPLGTGFGSWGQGTQVTVSS

SEQ ID NO: 27998 - protein, 125 aa, Artificial Sequence
  source: /note="Description of Artificial Sequence: Synthetic polypeptide"
EVQLVESGGGLVQAGGSLTLSCEASGTIFSINGQGWFRQAPGKQREPVAFITSGGMTNYADHVKGRFPISRDNAKNTVYLQMNSLKPEDTAVYYCAAEDSPPNYRCSGEWCFDYWGQGTQVTVSS

SEQ ID NO: 27999 - protein, 125 aa, Artificial Sequence
  source: /note="Description of Artificial Sequence: Synthetic polypeptide"
EVQLVESGGGLVQAGGSLRLSCAASGFTLDGYAIGWFRQAPGKEREAISCITTAGTINYADSVKGRVTISRDNAKNTVYLQMNSLKPEDTAVYLCAADGFDTPCVAGTDWGYDYEGQGTQVTVSS

SEQ ID NO: 28000 - protein, 125 aa, Artificial Sequence
  source: /note="Description of Artificial Sequence: Synthetic polypeptide"
EVQLVESGGGLVQLGGSLRLSCAASGFTLDGYAIGWFRQAPGKEREAISCITTAGTIYYADSVKGRVTISRDNAKNTVYLQMNSLKPEDTAVYLCAADGFDTPCVAGTDWGYDYEGQGTQVTVSS

SEQ ID NO: 28001 - protein, 125 aa, Artificial Sequence
  source: /note="Description of Artificial Sequence: Synthetic polypeptide"
EVQLVESGGGLVQPGGSLRLSCAASGFTLDGYAIGWFRQAPGKEREAISCITTRGTIYYADSVKGRVTISRDNAKNTVYLQMNSLKPEDTAVYLCAADGFDTPCVAGTDWGYDYEGQGTQVTVSS

SEQ ID NO: 28002 - protein, 120 aa, Artificial Sequence
  source: /note="Description of Artificial Sequence: Synthetic polypeptide"
EVQLVESGGGLVQAGGSLRLSCTASINAVSIDAAGWFRQAPGMQREPVATILTSGSSTYADSVKGRFTISRDSAKNTVYLQMNSLKPEDTAVYTCYAPMVYYSGSYSDYWGQGTQVTVSS

SEQ ID NO: 28003 - protein, 124 aa, Artificial Sequence
  source: /note="Description of Artificial Sequence: Synthetic polypeptide"
EVQLVESGGGLVQAGGSLRLSCAASGIIFGSKGMGWYRQAPGKQRELVATVTSGGDIKYADSVKGRFSISRDNAKNTVYLQMNSLKPEDTAVYYCAALFPLYGTGELTPLDDYWGQGTQVTVSS

SEQ ID NO: 28004 - protein, 120 aa, Artificial Sequence
  source: /note="Description of Artificial Sequence: Synthetic polypeptide"
EVQLVESGGGLVQAGGSLRLSCVASGIIFSDSGMGWFRQAPGKQREPVAVITRGGSTNYADSVKGRFTISRDNAKNTVYLQMNNLKPEDTAVYAADTFDRHLQAPPFDYWGQGTQVTVSS

SEQ ID NO: 28005 - protein, 120 aa, Artificial Sequence
  source: /note="Description of Artificial Sequence: Synthetic polypeptide"
EVQLVESGGGLVQPGGSLRLSCAAPKIFSTAPMNWFRQAPGKQRELVAGISSGGSTMYADSVKGRFTISRDSAKNTLDLQMNSLKPEDTAVYYCNAEWAPLGPRSRVDYWGQGTQVTVSS

SEQ ID NO: 28006 - protein, 121 aa, Artificial Sequence
  source: /note="Description of Artificial Sequence: Synthetic polypeptide"
EVQLVESGGGWVQPGGSLGLSCTAGRSAFSINDMGWYRQPPGKQREVVAIITFDGSANYADSVKGRFTISRRNYNNTVYLQMNNLKPEDTAVYYCNADAAASPRGGYNEYWGQGTQVTVSS

SEQ ID NO: 28007 - protein, 116 aa, Artificial Sequence
  source: /note="Description of Artificial Sequence: Synthetic polypeptide"
EVQLVESGGGLVQAGGSLRLSCTASESSFSLTSMGWYRQAPGKQREAVASIDGDGTTSYADSVKGRFTISRDNAKNTVNLQMNSLKPEDTAVYFCFARKWILDIYWGQGTQVTVSS

SEQ ID NO: 28008 - protein, 125 aa, Artificial Sequence
  source: /note="Description of Artificial Sequence: Synthetic polypeptide"
EVQLVESGGGLVQPGGSLRLSCAASGFTLDTYAIGWFRQAPGKEREGVSCISKIDEQRYYLDSVKGRFTISRDNAKNTVYLQMNSLKPEDTAVYYCATPRSQYYCHNGAIGYDRWGQGTQVTVSS

SEQ ID NO: 28009 - protein, 129 aa, Artificial Sequence
  source: /note="Description of Artificial Sequence: Synthetic polypeptide"
EVQLVESGGGLVQSGGSLRLSCAASGFTLDYYTVGWFRQAPGKEREGVSCINSSDGRTLYADSVKGRFTISRDNAKNTVYLQMNSLKPEDTAVYYCAAEKPGLTSYYYPCPPPGEYDYSGQGTQVTVSS

SEQ ID NO: 28010 - protein, 125 aa, Artificial Sequence
  source: /note="Description of Artificial Sequence: Synthetic polypeptide"
EVQLVESGGGLVQTGGSLRLSCAASGGTLSSYAMGWFRQAPGKEREFVAAITWSGTRTLYADSVKGRFTISRDNANNTVYLQMNSLEPEDTAVYYCAAHRHPYALVVDHKAFDYWGQGTQVTVSS

SEQ ID NO: 28011 - protein, 126 aa, Artificial Sequence
  source: /note="Description of Artificial Sequence: Synthetic polypeptide"
EVQLVESGGGSVQAGGSLRLSCAASGSIFNINAMGWYRQARGKGRELVAVVTNGGTTTYTGSVKGRFTISRDNAKNTVYLQMNSLKLEDTAVYYCAGVEESPFHSGTYYPLPGDYWGQGTQVTVSS

SEQ ID NO: 28012 - protein, 127 aa, Artificial Sequence
  source: /note="Description of Artificial Sequence: Synthetic polypeptide"
EVQLVESGGGLVQAGGSLRLSCAASGRTFGTYAMAWFRQAAGKEREFVGAISSWGGGRTYYPPSVQGRFTISRENAKNTVYLQLSSLKPEDTAVYYCAAKRDNCSAFGCYAGPYDYWGQGTQVTVSS

SEQ ID NO: 28013 - protein, 130 aa, Artificial Sequence
  source: /note="Description of Artificial Sequence: Synthetic polypeptide"
EVQLVESGGGLVQAGGSLRLSCAASGFTFDDYAIGWFRQAPGKEREGVLCFTRSRGSTDGSTYYADSVKGRFTISSDNAKNTVYLQMNSLKPEDTAVYYCATDHYLRVGLKCRDYEYDYWGQGTQVTVSS

SEQ ID NO: 28014 - protein, 121 aa, Artificial Sequence
  source: /note="Description of Artificial Sequence: Synthetic polypeptide"
EVQLVESGGGLVQPGGSLRLSCIASGFTLDYYAMGWFRQAPGKEREGVACISSTDRSTYYPDSVKGRFTISRDNAENTVYLQMNSLKPEDTAVYSCAVGWNPDCENGMDYWGKGTLVTVSS

SEQ ID NO: 28015 - protein, 118 aa, Artificial Sequence
  source: /note="Description of Artificial Sequence: Synthetic polypeptide"
EVQLVESGGGLVQTGGSLRLSCVASGNIYSLTSTGWYRQAPGQQREWIATIRGDDSTEYANSVKGRFTISRENALKTVYLQMNSLKPEDTAIYYCAARTLPLGQPNYWGQGTQVTVSS

SEQ ID NO: 28016 - protein, 123 aa, Artificial Sequence
  source: /note="Description of Artificial Sequence: Synthetic polypeptide"
EVQLVESGGGLVQSGGSLRLSGAASGFTLDSYAIGWFRQAPGKEREGVSCISNSDGRTYYADSVKGRFTISRDSAENTVYLQMNSLKPEDTAVYLCATEGHCHGTNWTRPHSVSQGTQVTVSS

SEQ ID NO: 28017 - protein, 119 aa, Artificial Sequence
  source: /note="Description of Artificial Sequence: Synthetic polypeptide"
EVQLVESGGGLVQPGGSLRLSCETSRHTLDHYAIGWFRQAPGKENEGVACISTSTYYADSVKGRFSISRDNVKNTVYLQMNSLKPEDTAVYYCATTGSGYCTLRAFASWGQGTQVTVSS

SEQ ID NO: 28018 - protein, 129 aa, Artificial Sequence
  source: /note="Description of Artificial Sequence: Synthetic polypeptide"
EVQLVESGGGLVQPGGSLRLSCTASGRSISSSAMGWFRQAPGKEREFVASVHWTDVSTWYADSVKGRFTISRDNAKNTVYLQMNSVKPEDTAVYHCAASRAFSPDSWRRYSDSDSYESWGQGTQVTVSS

SEQ ID NO: 28019 - protein, 118 aa, Artificial Sequence
  source: /note="Description of Artificial Sequence: Synthetic polypeptide"
EVQLVESGGGLVQAGGSLRLSCAASGSISSLNTMAWYRQTPGQQREWVARITGAGSTTYADSVKGRFTISRDDALYITYLQMTSLKPEDTAVYYCAARTLPLGADNWWGQGTQVTVSS

SEQ ID NO: 28020 - protein, 127 aa, Artificial Sequence
  source: /note="Description of Artificial Sequence: Synthetic polypeptide"
EVQLVESGGGLVQPGGSLRLSCAASGFTLDDYTTGWFRQAPGKEREGVSCISSSDGGTWYADSVKGRFTISRDNAKNTVYLQMNSLKPEDAAVYYCAVDSTAGSSCPGPDFYAMDYWGKGTLVTVSS

SEQ ID NO: 28021 - protein, 120 aa, Artificial Sequence; identical to SEQ ID NO: 27980
  source: /note="Description of Artificial Sequence: Synthetic polypeptide"

SEQ ID NO: 28022 - protein, 121 aa, Artificial Sequence
  source: /note="Description of Artificial Sequence: Synthetic polypeptide"
EVQLVESGGGLVQAGESLRLSCVASERAFGMNYMGWFRQSAGKQREQVAAISQSGDTNYADSVKGRFTISRDNAKNTLYLEMNSLRPEDTAVYYCYAGPSIGLVISGLGYWGQGTQVTVSS

SEQ ID NO: 28023 - protein, 126 aa, Artificial Sequence
  source: /note="Description of Artificial Sequence: Synthetic polypeptide"
EVQLVESGGGLVQTGGSLRLSCVASGGTLDDYAIGWFRQAPGKEREGVSYIGSNDGSTYYAGAVKGRFTISSDHAKNTVYLQMNSLKPEDTAVYYCAAAAQWGTIRWIHEYDYEYWGQGTQVTVSS

SEQ ID NO: 28024 - protein, 126 aa, Artificial Sequence
  source: /note="Description of Artificial Sequence: Synthetic polypeptide"
EVQLVESGGGLVQPGGSLRLSCAASGFTLENYAIAWFRQAPGKEREGVSCISSKDSNTYYADSVKGRFTISRDNAKNTVYLQMNSLPEDTAVYYCAADRLFSCAIIGWDDPPFGSWGQGTQVTVSS

SEQ ID NO: 28025 - protein, 118 aa, Artificial Sequence
  source: /note="Description of Artificial Sequence: Synthetic polypeptide"
EVQLVESGGGLVQAGGSLRLSCAASGSIFSINAMAWYRQAPGKQREWVARITGDGTTNYADSVKGRFTISRDNAKSTMYLQMNSLKPEDTAVYYCAARALPLGTDNYWGQGTQVTVSS

SEQ ID NO: 28026 - protein, 123 aa, Artificial Sequence
  source: /note="Description of Artificial Sequence: Synthetic polypeptide"
EVQLVESGGGLVQAGGSLRLSCAASGRTFSRYAMGWFRRAPGKEREFVATISASGMSTYYKDSVKGRFTISRDNAQNTTWLQMNSLKPEDTAVYYCAAADDFLPRLPSSYTYWGQGTQVTVSS

SEQ ID NO: 28027 - protein, 122 aa, Artificial Sequence
  source: /note="Description of Artificial Sequence: Synthetic polypeptide"
EVQLVESGGGLVQAGGSLRLSCVASGSTSSINAMGWYRQTPGKQREFLAVIENIGNTRYADSVLGRFTISRDNAKNTVYLQMNSLKPEDTAVYYCNANARTTPTSISTAWFWGQGTQVTVSS

SEQ ID NO: 28028 - protein, 119 aa, Artificial Sequence
  source: /note="Description of Artificial Sequence: Synthetic polypeptide"
EVQLVESGGGLVQPGGSLRLSCETSRHTLDHYAIGWFRQAPGKEGEGVACISTNTYYADSVKGRFSISRDNAKNTVYLQMNDLKPEDTAVYHCATTGSGYCTLRAFASWGQGTQVTVSS

SEQ ID NO: 28029 - protein, 125 aa, Artificial Sequence
  source: /note="Description of Artificial Sequence: Synthetic polypeptide"
EVQLVESGGGLVQAGGSLRLSCAASGFTFDDYDIGWFRQAPGKEREAVSRISNRDGSTYYLDSVRGRFTASSDNAKNAVYLQMNNLKPEDTAVYYCAATTALVGMLLPAYEYDYWGQGTQVTVSS

SEQ ID NO: 28030 - protein, 128 aa, Artificial Sequence
  source: /note="Description of Artificial Sequence: Synthetic polypeptide"
EVQLVESGGGLVQPGGSMRPSCTGSGFTLDDYAIGWFRQAPGKEREGVSCISSTDSRTYYPDSVEGRFTISRDNAKNTVYLQMNSLKPEDTAVYYCATDVLECNYPGGTYYPLAFGSWGQGTQVTVSS

SEQ ID NO: 28031 - protein, 127 aa, Artificial Sequence
  source: /note="Description of Artificial Sequence: Synthetic polypeptide"
EVQLVESGGGLVQAGGSLRLSCAASGRTFSSCAMGWFRQAPGKEREIVAAISWRGGSTWYADSVKGRFTISRDNAKNTVYLQMSNLKPEDTAVYYCAADETSGSYYYTVDIDEYDYWGQGTQVTVSS

SEQ ID NO: 28032 - protein, 116 aa, Artificial Sequence
  source: /note="Description of Artificial Sequence: Synthetic polypeptide"
EVQLVESGGGLVQPGGSLRLSCAASGTAFSITSMGWYRQASGEQRELVARIDSDGSTNYADSVKGRFTISRDNAKNTVYLQMNSLKPEDTAVYYCNAKKWILETYWGQGTQVTVSS

SEQ ID NO: 28033 - protein, 124 aa, Artificial Sequence
  source: /note="Description of Artificial Sequence: Synthetic polypeptide"
LESGGGMVQPGRSLRLSCAVSGFTFDDYAMHWIRQVPGKGLEWVAGISWNSVKVDYADAVRGRFTISRDNAKNSLHLEMSNLRRDDTAFYFCAKDGGPGMTIGGYVVTGRFDPWGQGTLVHVSS

SEQ ID NO: 28034 - protein, 96 aa, Artificial Sequence
  source: /note="Description of Artificial Sequence: Synthetic polypeptide"
DIVLTQSPASLAVSLGQRATISCRASESVDSYGNSFMHWYQQKPGQSPKLLIYVASNLESGVPARFSGSGSRTDFTLTIDPVEADDAATYYCQQNN

SEQ ID NO: 28035 - protein, 120 aa, Artificial Sequence
  source: /note="Description of Artificial Sequence: Synthetic polypeptide"
QVQLQESGPGLVRPSQTLSLTCTVSGFSITSSSYCWHWVRQPPGRGLEWIGRICYEGSIDYSPSIKSRVTMLRDTSKNQFSLRLSSVTAADTAVYYCARENHGTTTSMDYWGQGSLVTVS

SEQ ID NO: 28036 - protein, 91 aa, Artificial Sequence
  source: /note="Description of Artificial Sequence: Synthetic polypeptide"
DIQMTQSPSSLSASVGDRVTITCRASESVDSYGNSFMHWYQQTPGKAPKLLIYVASNLESGVPSRFSGSGSGTDYTFTISSLQPEDIATYT

SEQ ID NO: 28037 - protein, 111 aa, Artificial Sequence
  source: /note="Description of Artificial Sequence: Synthetic polypeptide"
DIQMTQSPSSLSASVGDRVTITCRASESVDSYGNSFMHWYQQTPGKAPKLLIYVASNLESGVPSRFSGSGSGTDFTFTISSLQPEDIATYYCQQNNEDPLTFGQGTKLQIT

SEQ ID NO: 28038 - protein, 137 aa, Artificial Sequence
  source: /note="Description of Artificial Sequence: Synthetic polypeptide"
QSQLQESGPRLVEASETLSLTCNVSGESTGACTYFWGWVRQAPGKGLEWIGSLSHCQSFWGSGWTFHNPSLKSRLTISLDTPKNQVFLKLTSLTAADTATYYCARFDGEVLVYNHWPKPAWVDLWGRGIPVTVTVSS

SEQ ID NO: 28039 - protein, 137 aa, Artificial Sequence
  source: /note="Description of Artificial Sequence: Synthetic polypeptide"
QPQLQESGPGLVEASETLSLTCTVSGDSTAACDYFWGWVRQPPGKGLEWIGGLSHCAGYYNTGWTYHNPSLKSRLTISLDTPKNQVFLKLNSVTAADTAIYYCARFDGEVLVYHDWPKPAWVDLWGRGTLVTVTVSS

SEQ ID NO: 28040 - protein, 129 aa, Artificial Sequence
  source: /note="Description of Artificial Sequence: Synthetic polypeptide"
QVQLQESGPGLVKPSETLSLTCTVSGDSINTGHHYWGWVRQVPGKGPEWIAHIHYNTAVLHNPALKSRVTISIFTLKNLITLSLSNVTAADTAVYFCVRSGGDILYYIEWQKPHWFYPWGPGILVTVSS

SEQ ID NO: 28041 - protein, 134 aa, Artificial Sequence
  source: /note="Description of Artificial Sequence: Synthetic polypeptide"
QLQLQESGPGLVKPSETLSLTCTVSGGSMRGTDWGENDFHYGWIRQSSAKGLEWIGSIHWRGRTTHYKTSFRSRATLSIDTSNNRFSLTFSFVTAADTAVYYCARHKYHDIFRVVPVAGWFDPWGQGLLVTVSS

SEQ ID NO: 28042 - protein, 133 aa, Artificial Sequence
  source: /note="Description of Artificial Sequence: Synthetic polypeptide"
EVHLEESGPGLVRPSETLSLTCTASGGSIRGGEWGDSDYHWGWVRHSPEKGLEWIGSIHWRGTTHYNAPFRGRGRLSIDLSRNQFSLRLTSVTAEDTAVYYCVKHKYHDIVMVVPIAGWFDPWGQGLQVTVSS

SEQ ID NO: 28043 - protein, 141 aa, Artificial Sequence
  source: /note="Description of Artificial Sequence: Synthetic polypeptide"
QVQLVQSGPEVKKPGSSVKVSCKASGNTFSKYDVHWVRQATGQGLEWVGWMSHEGDKTESAQRFKGRVTFTRDTSASTAYMELRGLTSDDTAIYYCTRGSKHRLRDYVLYDDYGLINYQEWNDYLEFLDVWGHGTAVTVSS

SEQ ID NO: 28044 - protein, 141 aa, Artificial Sequence
  source: /note="Description of Artificial Sequence: Synthetic polypeptide"
QVQLVQSGPEVKKPGSSVKVSCKASGNTFSKYDVHWVRQATGQGLEWVGWISHERDKTESAQRFKGRVTFTRDTSATTAYMELRGLTSDDTAIYYCTRGSKHRLRDYVLYDDYGLINYQEWNDYLEFLDVWGHGTAVTVSS

SEQ ID NO: 28045 - protein, 140 aa, Artificial Sequence
  source: /note="Description of Artificial Sequence: Synthetic polypeptide"
QVQLEQSGAEVKKPGSSVKVSCKASGNTFSKYDVHWVRQATGQGLEWVGWMSHEGDKTESAQRFKGRVTFTRDTSASTAYMELRGLTSDDTAIYYCTRGSKHRLRDYVLYDDYGLINYQEWNDYLEFLDVWGHGTAVTVS

SEQ ID NO: 28046 - protein, 141 aa, Artificial Sequence
  source: /note="Description of Artificial Sequence: Synthetic polypeptide"
QVQLVQSGAEVKKPGSSVKVSCKASGNTFRKYDVHWVRQATGQGLEWVGWMSHEGDKTESAQRFKGRVSFTRDNSASTAYIELRGLTSDDTAIYYCTGGSKHRLRDYVLYDDYGLINQQEWNDYLEFLDVWGHGTAVTVSS

SEQ ID NO: 28047 - protein, 135 aa, Artificial Sequence
  source: /note="Description of Artificial Sequence: Synthetic polypeptide"
RVQLVESGGGVVQPGKSVRLSCVVSDFPFSKYPMYWVRQAPGKGLEWVAAISGDAWHVVYSNSVQGRFLVSRDNVKNTLYLEMNSLKIEDTAVYRCARMFQESGPPRLDRWSGRNYYYYSGMDVWGQGTTVTVSS

SEQ ID NO: 28048 - protein, 135 aa, Artificial Sequence
  source: /note="Description of Artificial Sequence: Synthetic polypeptide"
RVQLVESGGGVVQPGKSVRLSCVVSDFPFSKYPMYWVRQAPGKGLEWVAAISADAWHVVYSGSVQGRFLVSRDNSKNILYLEMNTLKIEDTAVYRCARMFQESGPPRFDSWSGRNYYYYSGMDVWGQGTTVTVSS

SEQ ID NO: 28049 - protein, 135 aa, Artificial Sequence
  source: /note="Description of Artificial Sequence: Synthetic polypeptide"
QVQLVESGGGVVQPGKSLRLSCVVSNFLFNKRHMHWVRQAPGKGLEWIAVISSDAIHVDYASSVRGRSLISRDNSKNSLYLDMNNLKIEDTATYYCARDRDGYGPPQIQTWSGRYLHLYSGIDAWGLGTTVTVSS

SEQ ID NO: 28050 - protein, 135 aa, Artificial Sequence
  source: /note="Description of Artificial Sequence: Synthetic polypeptide"
QVQLVESGGGVVQPGKSLRLSCVVSNFIFNKYPMYWVRQAPGKGLEWVAAISADAWHVDYAASVKDRFLISRDNSKNALYLEMNTLRVEDTGIYYCARNIEEFSVPQFDSWSGRSYYHYFGMDVWGQGTTVTVSS

SEQ ID NO: 28051 - protein, 135 aa, Artificial Sequence
  source: /note="Description of Artificial Sequence: Synthetic polypeptide"
QVHLVESGGGVVQPGKSLRLSCETSGFIFNEYPMYWIRQAPGKGPEWVAAISADAWHVDYAGSVRGRFTVSRDNSKNSLYLDMKSLKVEDTAIYFCAKDGEEHKVPQLHSWSGRNLYHYTGFDVWGPGTTVTVSS

SEQ ID NO: 28052 - protein, 135 aa, Artificial Sequence
  source: /note="Description of Artificial Sequence: Synthetic polypeptide"
QVHLVESGGGVVQPGKSLRLSCETSGFIFNQYPMYWVRQAPGKGPEWVAAISADAWHVDYPGSVRGRFTVSRDNSKSSLYLDMKSLKVEDTAIYFCAKDGEEHKVPQLHSWSGRNLYHYTGFDVWGPGTTVTVSS

SEQ ID NO: 28053 - protein, 135 aa, Artificial Sequence
  source: /note="Description of Artificial Sequence: Synthetic polypeptide"
EVHLVESGGGVVQPGKSLRLSCVTSGFIFKQYPMYWIRQAPGKGLEWVAAISADAWHVDYAGSVRGRFTVSRDNSKNSLYLDMNSLTVEDTAIYFCAKDGEEHEVPQLHSWSGRNLYHYTGVDIWGPGTTVTVSS

SEQ ID NO: 28054 - protein, 135 aa, Artificial Sequence
  source: /note="Description of Artificial Sequence: Synthetic polypeptide"
EVRLMESGGGVVQPGKSLRLSCVTSGFIFKKYPMYWIRQAPGKGLEWVAAISADAWHVDYPGSVRGRFTVSRDNSKNSLYLDMNSLTVEDTAIYFCAKDGEEHEVPQLHSWSGRNLYHYTGVDVWGPGTTVTVSS

SEQ ID NO: 28055 - protein, 142 aa, Artificial Sequence
  source: /note="Description of Artificial Sequence: Synthetic polypeptide"
MEHLWFFLLLVAAPRWVLSQVQLQESGPGLVKPSETLSLTCTVSGGSISSHYWSWIRQSPGKGLQWIGYIYYSGSTNYSPSLKSRVTISVETSKNQFSLKLTSMTAADTAVYYCARGPVPAVFYGDYRLDPWGQGTLVTVSS

SEQ ID NO: 28056 - protein, 133 aa, Artificial Sequence
  source: /note="Description of Artificial Sequence: Synthetic polypeptide"
MAVQLLEQSGAEVKKPGSSVQVSCKASGGTFSMYGFNWVRQAPGHGLEWMGGIIPIFGTSNYAQKFRGRVTFTADQATSTAYMELTNLRSDDTAVYYCARDFGPDWEDGDSYDGSGRGFFDFWGQGTLVTVSS

SEQ ID NO: 28057 - protein, 122 aa, Artificial Sequence
  source: /note="Description of Artificial Sequence: Synthetic polypeptide"
QVQLQQSGPEVVKPGASVKMSCKASGYTFTSYVIHWVRQKPGQGLDWIGYINPYNDGTDYDEKFKGKATLTSDTSTSTAYMELSSLRSEDTAVYYCAREKDNYATGAWFAYWGQGTLVTVSS

SEQ ID NO: 28058 - protein, 133 aa, Artificial Sequence
  source: /note="Description of Artificial Sequence: Synthetic polypeptide"
QVQLVQSGTALKSPGSSAKLSCTVLGDEFGTYFISWIRQAPGQGLEWVGGIVPHSQLQSSAQKFHGRIIISAGAGVTPPVVSLQLTNLTFEDTGTYFCARERGRHRDPKTGDALRGRYFDFWGRGTGLRVSTS

SEQ ID NO: 28059 - protein, 132 aa, Artificial Sequence
  source: /note="Description of Artificial Sequence: Synthetic polypeptide"
QVQLVQSGTALKSPGSSAKLSCTVLGDEFGTYFISWIRQAPGQGLEWVGGIVPHSQLQSSAQKFHGRITISAGAGVTPPVVSLQLTNLTFEDTGTYFCARERGRHRDPKTGDALRGRYFDFWGRGTGVRVST

SEQ ID NO: 28060 - protein, 132 aa, Artificial Sequence
  source: /note="Description of Artificial Sequence: Synthetic polypeptide"
QVQLVQSGTALKSPGSSAKLSCTVLGDEFGTYFISWIRQAPGQGLEWVGGIVPHSQLQSSAQKFHGRIIISAGAGVTPPVVSLQLTNLTFEDTGTYFCARERGRHRDPKTGKAPRGRYFDFWGRGTGVTVSA

SEQ ID NO: 28061 - protein, 129 aa, Artificial Sequence
  source: /note="Description of Artificial Sequence: Synthetic polypeptide"
EVQLSESGGGFVKPGGSLRLSCEASGFTFNNYAMGWVRQAPGKGLEWVSVTSAHGGSAYFGEFVKGRFTMSRDHFIDTVYLEMNRLTVEDTAVYYCVRVTFYHEGSGYYYRAGNYFDSWGQGTLVIVSA

SEQ ID NO: 28062 - protein, 129 aa, Artificial Sequence
  source: /note="Description of Artificial Sequence: Synthetic polypeptide"
EVQLSESGGGVVKPGGSLRLSCEASGFTFSNYAMSWVRQAPGKGLEWVSVTGGHGTYGYYGEFVKGRFTISRDHSMDTVYLQMNRLRVEDTAVYYCVRTPYYHESSGYYYRAGNYFDFWGKGTLVIVSA

SEQ ID NO: 28063 - protein, 129 aa, Artificial Sequence
  source: /note="Description of Artificial Sequence: Synthetic polypeptide"
EVQLSESGGGFVKPGGSLRLSCEASGFTFNNYAMSWVRQAPGKGLEWVSVTSAHGGSAYYGEFVKGRFTMSRDHFIDTVYLEMNRLTVEDTAVYYCVRVTFYHEGSGYYYRAGNYFDSWGKGTRVVVSA

SEQ ID NO: 28064 - protein, 129 aa, Artificial Sequence
  source: /note="Description of Artificial Sequence: Synthetic polypeptide"
EVQLSESGGGFVKPGGSLRLSCEASGFTFNNYAMSWVRQAPGKGLEWVSVTSAHGGSAYYGEFVKGRFTMSRDHFIDTVYLEMNGLTVEDTAVYYCVRVTFYHEGSGYYYRAGNYFDSWGKGTRVVVSA

SEQ ID NO: 28065 - protein, 122 aa, Artificial Sequence
  source: /note="Description of Artificial Sequence: Synthetic polypeptide"
EVQLVESGGGLVQAGGSLRLSCAASGFSFNDYAIGWFRQTPGKEREGVSCLSSSGMAHYADSVKGRFTIAYDNAKNTVYLQMNSLKPEDTAVYHCATHPFRCGNWRTVMGSWGQGTQVTVSS

SEQ ID NO: 28066 - protein, 122 aa, Artificial Sequence
  source: /note="Description of Artificial Sequence: Synthetic polypeptide"
EVQLVESGGGLVQAGGSLRLSCETSGFTFDDYGIGWFRQAPGKGREGISCISGSGIAHYGDSVKGRFTISSDNAKNTVYLQMNSLKPEDTGLYYCATTPFRCGNWRTTMGSWGQGTQVTVSS

SEQ ID NO: 28067 - protein, 119 aa, Artificial Sequence
  source: /note="Description of Artificial Sequence: Synthetic polypeptide"
EVQLVESGGGLVQAGGSLRLSCEASTSMFSIRAATWYRQAPGKQRELVANIDSEGTTGYSDSVKGRFTISRDNTKKTVYLQMNSLKPEDTAVYSCNAVVTYNMLVYDSWGQGTQVTVSS

SEQ ID NO: 28068 - protein, 135 aa, Artificial Sequence
  source: /note="Description of Artificial Sequence: Synthetic polypeptide"
QVQLVQPGTAMKSLGSSLTITCRVSGDDLGSFHFGTYFMIWVRQAPGQGLEYMGGILPSTKTPTYAHKFRGRVSISAPGVPPVLSLALTNLTYDDTATYFCARERGRHFEPKNRDNLEGKFFDLWGRGTFVRVSP

SEQ ID NO: 28069 - protein, 132 aa, Artificial Sequence
  source: /note="Description of Artificial Sequence: Synthetic polypeptide"
QVQLVQSGTALKSPGSSAKLSCTVLGDEFGTYFISWIRQAPGQGLEWVGGIVPHSQLQSSAQKFHGRIIISAGAGVTPPVVSLQLTNLTFEDTGTYFCARERGRHRDPKTGDALRGRYFDFWGRGTGVSVSA

SEQ ID NO: 28070 - protein, 135 aa, Artificial Sequence
  source: /note="Description of Artificial Sequence: Synthetic polypeptide"
QLQLDQPGAAMKSLGSSLTITCRVSGDDLGSFHFGTYFMIWVRQGPGQGLEYMGGILPSTKTPTYAHKFRGRVSISAPGVPPVLSLALTNLTYDDTATYFCARERGRHFEPKNRDHLEGKFLDLWGRGTFVRVSP

SEQ ID NO: 28071 - protein, 130 aa, Artificial Sequence
  source: /note="Description of Artificial Sequence: Synthetic polypeptide"
QVQLVQSGAVVKSPGSSAKLSCRLLGDEFGTYFISWIRQAPGRGLEWVGGIVPHSQLQSSAQKFHGRFFITGGVTPPIIFLQLTNVTFEDTGTYFCARERGRHRDPKTGKSLRGRYFDFWGRGTGVTVSP

SEQ ID NO: 28072 - protein, 134 aa, Artificial Sequence
  source: /note="Description of Artificial Sequence: Synthetic polypeptide"
QPYIVQSGPAVKGAGSSVTVTCKVDGDDDGIFSFGTYFMVWVRQAPGQGLQYMGGLVPSYAPTYAHKFEGRITISAAGTPPVVSLTLLNLTNDDAATYFCARERGRHYDSKTRENRRGRYFDMWGRGTRITVSP

SEQ ID NO: 28073 - protein, 134 aa, Artificial Sequence
  source: /note="Description of Artificial Sequence: Synthetic polypeptide"
QPYIVQSGPAVKGAGSSVTVTCRVDGDDDGIFNFGTYFMVWVRQAPGQGLQYMGGLVPSYAPTYAHKFEGRITISAAGTPPVVSLTLINLTNADAATYFCARERGRHYDSKTRENRRGRYFDMWGRGTRITVSP

SEQ ID NO: 28074 - protein, 130 aa, Artificial Sequence
  source: /note="Description of Artificial Sequence: Synthetic polypeptide"
QIELRQSGAAMKSPGSSVKLSCTVLGENFGTYFISWIRQAPGQGLEWVGGIVPHSQLQSSAQKFHGRIKISGGGTPPVVSLELTNVTFDDTGTYFCARERGRHVEPKTGDRLAGRYFDIWGRGTGLRVSP

SEQ ID NO: 28075 - protein, 132 aa, Artificial Sequence
  source: /note="Description of Artificial Sequence: Synthetic polypeptide"
QVQLVQSGAAVKSPGSSAKLSCTVLGDEFGTYFISWIRQAPGQGLEWVGGIVPHSQLQSSAQRFHGRITISAGAGVTPPVVSLQLTNLTFDDAGTYFCARERGRHRDPKTGDALRGRYFDFWGRGTGISVSP

SEQ ID NO: 28076 - protein, 135 aa, Artificial Sequence
  source: /note="Description of Artificial Sequence: Synthetic polypeptide"
QVQLVQPGTAMKTLGSSLTISCRVSGDDGNFHFGTYFMAWVRQVPGQGLEYMGGILPSTKSPTYAHKFRGRVSISTAGVPPVVSLALTNLTYDDTATYFCARERGRHYDSKKQENYRGKFFDLWGRGTWVRVSPT

SEQ ID NO: 28077 - protein, 130 aa, Artificial Sequence
  source: /note="Description of Artificial Sequence: Synthetic polypeptide"
RITLKESGPPLVKPTQTLTLTCSFSGFSLSDFGVGVGWIRQPPGKALEWLAIIYSDDDKRYSPSLNTRLTITKDTSKNQVVLVMTRVSPVDTATYFCAHRRGPTTLFGVPIARGPVNAMDVWGQGITVTI

SEQ ID NO: 28078 - protein, 136 aa, Artificial Sequence
  source: /note="Description of Artificial Sequence: Synthetic polypeptide"
LLEQSGAEVRKPGSSVKLSCKASEGSFNTYIIHWMRQAPGQGLEWVGRVIPALSMANYAQKFQGRISITADTSTDTAFLNLRSLTSDDTAVYYCATDGSRLSTSAFDFWSGNRPSSYIDVWGKGTAVTVSSASTKG

SEQ ID NO: 28079 - protein, 237 aa, Artificial Sequence
  source: /note="Description of Artificial Sequence: Synthetic polypeptide"
EVQLVESGGGLIRPGGSLRLSCKGSGFIFENFGFGWVRQGPGKGLEWVSGTNWNGGDSRYGDSVKGRFTISRDNSNNFVYLQMNSLRPEDTAIYYCARGTDYTIDDQGIRYQGSGTFWYFDVWGRGTLVTVSSASTKGPSVFPLAPSSKSTSGGTAALGCLVKDYFPEPVTVSWNSGALTSGVHTFPAVLQSSGLYSLSSVVTVPSSSLGTQTYICNVNHKPSNTKVDKKVEPKSCD

SEQ ID NO: 28080 - protein, 226 aa, Artificial Sequence
  source: /note="Description of Artificial Sequence: Synthetic polypeptide"
EVQLVESGGGLVQPGGSLRLSCAASGFTFSTYAMSWVRQAPGKGLEWVSSINNSGRNTFSADSVKGRFTISRDNSKNTLFLVMNSLRAEDTAVYYCAKDLRLGGGSDYWGQGTLVTVSSASTKGPSVFPLAPSSKSTSGGTAALGCLVKDYFPEPVTVSWNSGALTSGVHTFPAVLQSSGLYSLSSVVTVPSSSLGTQTYICNVNHKPSNTKVDKRVEPKSCDKTH

SEQ ID NO: 28081 - protein, 229 aa, Artificial Sequence
  source: /note="Description of Artificial Sequence: Synthetic polypeptide"
EVQLVESGPGLVKPSQTLSLTCTVSGASISSGGYFWSWIRQHPGKGLEWIGNIYYIGNTYYNPSLKSRLTISVDTTQNQFSLKLTSVTAADTAVYYCARVPRLRGGNYFDSWGQGTLVTVSSASTKGPSVFPLAPSSKSTSGGTAALGCLVKDYFPEPVTVSWNSGALTSGVHTFPAVLQSSGLYSLSSVVTVPSSSLGTQTYICNVNHKPSNTKVDKRVEPKSCDKTH

SEQ ID NO: 28082 - protein, 229 aa, Artificial Sequence
  source: /note="Description of Artificial Sequence: Synthetic polypeptide"
  MOD_RES (1)..(1): Any amino acid
XVRLSQSGGQMKKPGESMRLSCRASGYEFLNCPINWIRLAPGRRPEWMGWLKPRGGAVNYARKFQGRVTMTRDVYSDTAFLELRSLTSDDTAVYFCTRGKYCTARDYYNWDFEHWGRGAPVTVSSASTKGPSVFPLAPSSKSTSGGTAALGCLVKDYFPEPVTVSWNSGALTSGVHTFPAVLQSSGLYSLSSVVTVPSSSLGTQTYICNVNHKPSNTKVDKRVEPKSCD

SEQ ID NO: 28083 - protein, 239 aa, Artificial Sequence
  source: /note="Description of Artificial Sequence: Synthetic polypeptide"
  MOD_RES (1)..(1): Any amino acid
XPQLQESGPGLVEASETLSLTCTVSGDSTGRCNYFWGWVRQPPGKGLEWIGSLSHCRSYYNTDWTYHNPSLKSRLTISLDTPKNQVFLRLTSVTAADTATYYCARFGGEVLVYRDWPKPAWVDLWGRGTLVTVSSASTKGPSVFPLAPSSKSTSGGTAALGCLVKDYFPEPVTVSWNSGALTSGVHTFPAVLQSSGLYSLSSVVTVPSSSLGTQTYICNVNHKPSNTKVDKRVEPKSCD

SEQ ID NO: 28084 - protein, 239 aa, Artificial Sequence
  source: /note="Description of Artificial Sequence: Synthetic polypeptide"
  MOD_RES (1)..(1): Any amino acid
XPQLQESGPTLVEASETLSLTCAVSGDSTAACNSFWGWVRQPPGKGLEWVGSLSHCASYWNRGWTYHNPSLKSRLTLALDTPKNLVFLKLNSVTAADTATYYCARFGGEVLRYTDWPKPAWVDLWGRGTLVTVSSASTKGPSVFPLAPSSKSTSGGTAALGCLVKDYFPEPVTVSWNSGALTSGVHTFPAVLQSSGLYSLSSVVTVPSSSLGTQTYICNVNHKPSNTKVDKRVEPKSCD

SEQ ID NO: 28085 - protein, 448 aa, Artificial Sequence
  source: /note="Description of Artificial Sequence: Synthetic polypeptide"
QVQLVQSGAEVKKPGASVKVSCKASGYTFTNSWIGWFRQAPGQGLEWIGDIYPGGGYTNYNEIFKGKATMTADTSTNTAYMELSSLRSEDTAVYYCSRGIPGYAMDYWGQGTLVTVSSASTKGPSVFPLAPSSKSTSGGTAALGCLVKDYFPEPVTVSWNSGALTSGVHTFPAVLQSSGLYSLSSVVTVPSSSLGTQTYICNVNHKPSNTKVDKKVEPKSCDKTHTCPPCPAPELLGGPSVFLFPPKPKDTLMISRTPEVTCVVVDVSHEDPEVKFNWYVDGVEVHNAKTKPREEQYNSTYRVVSVLTVLHQDWLNGKEYKCKVSNKALPAPIEKTISKAKGQPREPQVYTLPPSRDELTKNQVSLTCLVKGFYPSDIAVEWESNGQPENNYKTTPPVLDSDGSFFLYSKLTVDKSRWQQGNVFSCSVMHEALHNHYTQKSLSLSPGK

SEQ ID NO: 28086 - protein, 128 aa, Artificial Sequence
  source: /note="Description of Artificial Sequence: Synthetic polypeptide"
LEVQLQESGGGLVKPGGSLRLSCAASGFTFSNAWMSWVRQAPGKGLEWVGRIKSKTDGGTTDYAAPVKGRFTISRDDSKNTLYLQMNSLKTEDTAVYYCTTDPYSSGWYTGYYGMDVWGQGTTVTVSS

SEQ ID NO: 28087 - protein, 123 aa, Artificial Sequence
  source: /note="Description of Artificial Sequence: Synthetic polypeptide"
LEVQLQESGPGLVKPSQTLSLTCTVSGGSISSGGYYWSWIRQHPGKGLEWIGYIYNSGSTYYNPSLKSRVTISIDTSKNKFSLKLSSVTAADTAVYYCARAAYCGGDCSFDYWGQGTLVTVSS

SEQ ID NO: 28088 - protein, 123 aa, Artificial Sequence; identical to SEQ ID NO: 28087
  source: /note="Description of Artificial Sequence: Synthetic polypeptide"

SEQ ID NO: 28089 - protein, 125 aa, Artificial Sequence
  source: /note="Description of Artificial Sequence: Synthetic polypeptide"
LEVQLQESGGGLVQPGGSLRLSCAASGFTFSTYSMNWVRQAPGKGLEWISYITSSSSAIYYADSVKGRFTISRDNAKNSLYLQMNSLRAEDTAVYYCARDLMGGIFGYSYGVDVWGQGTTVTVSS

SEQ ID NO: 28090 - protein, 123 aa, Artificial Sequence
  source: /note="Description of Artificial Sequence: Synthetic polypeptide"
LEVQLVESGGGLVQPGGSLRLSCAASGFTFSSYVMTWVRQDPGKGLEWVSTISGSGGSTYYADSVKGRFTMSRDNSKNMLYLQMNSLRAEDTAVYYCAKDHRRHLFGDYDDYWGQGTLVTVSS

SEQ ID NO: 28091 - protein, 123 aa, Artificial Sequence; identical to SEQ ID NO: 28090
  source: /note="Description of Artificial Sequence: Synthetic polypeptide"

SEQ ID NO: 28092 - protein, 124 aa, Artificial Sequence
  source: /note="Description of Artificial Sequence: Synthetic polypeptide"
LEVQLQESGPGLVKPSETLSLTCTVSGGSISSSSYYWGWIRQPPGKGLEWIGSIYYSGSTYYNPSLKSRVTISVDTSKNQFSLKLSSVTAAYTAVYYCARRCTSGVCYGAFDYWGQGTPVTVSS

SEQ ID NO: 28093 - protein, 120 aa, Artificial Sequence
  source: /note="Description of Artificial Sequence: Synthetic polypeptide"
LEVQLQESGAGLLKPSETLSLTCAVYGGSFSGYFWSWIRQPPGKGLEWIGEINPSGSTNYNPSLKSRVTISVDTSKNQFSLKLSSVTAADTAVYYCARARIFGFGPFDYWGQGTLVTVSS

SEQ ID NO: 28094 - protein, 114 aa, Artificial Sequence
  source: /note="Description of Artificial Sequence: Synthetic polypeptide"
LEVQLVESGGGLVQPGGSLRLYCAASGFTFSDYGMNWVRQAPGKGLEWVSSSGATTYYADSVKGRFTMSRDNSKNTLFLQMNSLRAEDTALYYCARGILHPASWGQGILVTVSS

SEQ ID NO: 28095 - protein, 115 aa, Artificial Sequence
  source: /note="Description of Artificial Sequence: Synthetic polypeptide"
LEVQLVESGGGLVQPGGSLRLSCAASGFTFSDYGMTWVRQAPGKGLEWVSSSGATTYYPDSVKGRFTMSRDNSKNTLFLQMNSLRPEDTALYYCPRGILHPRPLWGQGTLVTVSS

SEQ ID NO: 28096 - protein, 126 aa, Artificial Sequence
  source: /note="Description of Artificial Sequence: Synthetic polypeptide"
LEVQLQESGGGLVKPGGSLRLSCAASGFTFSNAWMSWVRQAPGKGLEWVGRIKSKTDGGTTDYAAPVKGRFTISRDDSKNTLYLQMNSLKTEDTAVYYCTGAVWLHYDYYYVMDVWGQGTTVTVSS

SEQ ID NO: 28097 - protein, 123 aa, Artificial Sequence
  source: /note="Description of Artificial Sequence: Synthetic polypeptide"
LEVQLQESGGGLVKPGGSLRLSCAASGFTFSNAWMSWVRQAPGKGLEWVGRIKSKTDGGTTDYAAPVKGRFTISRDDSKNTLYLQMNSLKTEDTAVYYCTTAPARPAEYFQHWGQGTLVTVSS

SEQ ID NO: 28098 - protein, 129 aa, Artificial Sequence
  source: /note="Description of Artificial Sequence: Synthetic polypeptide"
LEVQLQESGGGLVQPGGSLRLSCAASGFTFSNAWMNWVRQAPGKGLELVGRTKSKTDGGTTDYTAPVKGRFTISRDDSKNTLYLQMNSLKTEDTAVYYCTTARIRRSTMIVEEDAFDIWGQGTMVTVSS

SEQ ID NO: 28099 - protein, 122 aa, Artificial Sequence
  source: /note="Description of Artificial Sequence: Synthetic polypeptide"
LEVQLQESGPGLVKPSETLSLTCTVSGASISSDYWSWIRQPPGKGLEWIGYIYYSGGHVHNPSLTSRVTVSMDKSKNQFALNLTSVSAADTAVYYCARSDTIPVFRNGMDVWGQGTTVTVSS

SEQ ID NO: 28100 - protein, 122 aa, Artificial Sequence
  source: /note="Description of Artificial Sequence: Synthetic polypeptide"
LEVQLQESGPGLVKPSQTLSLTCTVSGGSISSGGYYWSWIRQHPGKGLEWIGYIYYSGSTYYNPSLKSRVTISVDTSKNQFSLKLSSVTAADTAVYYCARDMLRDSTGLCYWGRGTLVTVSS

SEQ ID NO: 28101 - protein, 119 aa, Artificial Sequence
  source: /note="Description of Artificial Sequence: Synthetic polypeptide"
EVQLVESGAEVKKPGESLRISCKGSGYSFTSYWISWVRQMPGKGLEWMGRIDPNDSYTNYIPSFQGHITISADKSINTAYLQWSSLKASDTAMYYCARLTLNQYGEGYWGQGTLVTVSS

SEQ ID NO: 28102 - protein, 120 aa, Artificial Sequence
  source: /note="Description of Artificial Sequence: Synthetic polypeptide"
LEVQLQESGPGLVKPSQTLSLTCTVSGGSISSGGYYWSWIRQHPGKGLEWIGYIYYSGSTYYNPSLKSRVTISVDTSKNQFSLKLSSVTAADTAVYYCARGVVVDWFDPWGQGTLVTVSS

SEQ ID NO: 28103 - protein, 125 aa, Artificial Sequence
  source: /note="Description of Artificial Sequence: Synthetic polypeptide"
LEVQLVESGGGLVQPGGSLRLSCAASGFTFSSYWMSWVRQAPGKGLEWVANIKQDGSEKYYVDSVKGRFTIFRNNAKNSLYLQMNSLRAEDTAVYYCASCYYGSGSYYFYPFAYWGQGTLVTVSS

SEQ ID NO: 28104 - protein, 123 aa, Artificial Sequence
  source: /note="Description of Artificial Sequence: Synthetic polypeptide"
LEVQLVESGGGLVKPAGSLTLSCAVSGFTFSSYWMSWVIQPPPKGLEWVIRIIHHRGNNYYVDSVKGRFTISIDNSKNSLYLQMNSLTAEDTAVYYCARLYQDLETSYVYGYWGQGTLITVSS

SEQ ID NO: 28105 - protein, 123 aa, Artificial Sequence
  source: /note="Description of Artificial Sequence: Synthetic polypeptide"
  MOD_RES (100)..(100): Any amino acid
LEVQLVESGGGLVQPAGSLRLSCAASGFTFSSYWMSWVRLAPRKGLEWVANIQDGSEKYYVDSVKGRFIIFTYNANSLYLQMNSLITEDTAVYYCASCYXGSGSYYFYPFAYWGHGNLVTVSS

SEQ ID NO: 28106 - protein, 108 aa, Artificial Sequence
  source: /note="Description of Artificial Sequence: Synthetic polypeptide"
DLVMTQSPATLSVSSGERTTLSCRASQNVSSNLAWYQQKPGQAPRLLIYDASNRATGIPDTFIGSGSGTDFTLTISRLEPEDLAVYYCQQYGSSPRTFGQGTKVEIKR

SEQ ID NO: 28107 - protein, 108 aa, Artificial Sequence
  source: /note="Description of Artificial Sequence: Synthetic polypeptide"
DLVMTQSPGTLSLSPGERATLSCRASQSVSSYLAWYQQKPGQAPRLLIYDASSRATGIPARFSGSGSGTDFTLTISSLEPEDFAVYYCQDCSNWQSTFGQGTRLDIRR

SEQ ID NO: 28108 - protein, 108 aa, Artificial Sequence
  source: /note="Description of Artificial Sequence: Synthetic polypeptide"
DLQMTQSPATLSVSPGERATLSCRASQSVSSNLAWYQQKPGQAPRLLIYGASTRATGIPARFSGSGSGTEFTLTISSLQSEDFATYYCQQTYSTPRPVGQGTKVEIKR

SEQ ID NO: 28109 - protein, 109 aa, Artificial Sequence
  source: /note="Description of Artificial Sequence: Synthetic polypeptide"
DLVLTQSPGTLSLSPGERATLSCRASQSVRSSYLAWYQLKTGQAPRLLIYDASRRATGIPDRFSGSGSGTDFTLTISRLEPEDYAVYSCQQYGSSPRTFGQGTKVEIKR

SEQ ID NO: 28110 - protein, 106 aa, Artificial Sequence
  source: /note="Description of Artificial Sequence: Synthetic polypeptide"
DLQMTQSPSSLSASVGDRVTFTCRASQSISSSLNWYQQKPGKAPKLLIYAASSLQSGVPSRFSGSGSGTDFTLTISSLQPEDFATYYCQQSYSRTFGQGTKVEIKR

SEQ ID NO: 28111 - protein, 108 aa, Artificial Sequence
  source: /note="Description of Artificial Sequence: Synthetic polypeptide"
DLCLTQSPATLSLSPGERATLSCRASQSVSSSQLAWYQQKPGQAPRLLIYGASSRATGIPDRFSGSGSGTDFTLTISRLEPEDFAVYYCQQYGSSPTFGQGTKLEIKR

SEQ ID NO: 28112 - protein, 109 aa, Artificial Sequence
  source: /note="Description of Artificial Sequence: Synthetic polypeptide"
DLVLTQSPATLSLSPGERATLSCRASQSVSSYLAWYQQKPGQAPRLLIYDASNRATGIPARFSGSGSGTDFTLTISSLEPEDFAVYYCHQYSNWPPWTFGQGTKVEIKR

SEQ ID NO: 28113 - protein, 108 aa, Artificial Sequence
  source: /note="Description of Artificial Sequence: Synthetic polypeptide"
DLVMTQSPSFLSASVGDRVTITCRASQGISSYLAWYQQKSGKAPKLLIYGTSILQSGVPSRFSGSGSGTESTLTISSLQPEDFATYYCQQLNSYPITFGQGTRLEIKR

SEQ ID NO: 28114 - protein, 109 aa, Artificial Sequence
  source: /note="Description of Artificial Sequence: Synthetic polypeptide"
DLVLTQSPATLSVSPGERATLSCRASQSVSSNLAWYQQKPGQAPRLLIYGASSRATGIPDRLSGSGSGTDFTLTISRLEPEDFAVYYCQQYGSSLSWTFGQGTKVEIKR

SEQ ID NO: 28115 - protein, 110 aa, Artificial Sequence
  source: /note="Description of Artificial Sequence: Synthetic polypeptide"
DLVLTQSPGTLCLCPGERATLSCRASESVSSSYLAWYQQKPGQAPRLLIYGASSRATGIPDRFSGSGSGTDFTLTISRLDPEDFAVYYCQQYGRSPMCSFGQGTKLEIKR

SEQ ID NO: 28116 - protein, 109 aa, Artificial Sequence
  source: /note="Description of Artificial Sequence: Synthetic polypeptide"
DLVMTQSPGTLSLSPGERATLSCRASQSVSSSYLAWYQQKPGQAPRLLIYGTSSRATGIPDRFSGSGSGTEFTLTISRLEPEDFAVYYCQQYATSPRTFGQGTKVEIKR

SEQ ID NO: 28117 - protein, 113 aa, Artificial Sequence
  source: /note="Description of Artificial Sequence: Synthetic polypeptide"
DLVMTQSPDSLAVSLGERATINCKSSQSVLYSSNNKNYLAWYQQKPGQPPKLLIYWASTRESGVPDRFSGSGSGTDFTLTISSLQAEDVAVYYCQQYFNTPTFGGGTKVEIKR

SEQ ID NO: 28118 - protein, 108 aa, Artificial Sequence
  source: /note="Description of Artificial Sequence: Synthetic polypeptide"
LVLTQSPGTLSLSPGERATLSCRASQSVSSIYLAWYQQKPGQAPRLLIYGASSRATGIPDRFSGSGSGTDFTLTISRLEPEDFAVYYCQQYGSSPWTFGQGTKVEIKR

SEQ ID NO: 28119 - protein, 107 aa, Artificial Sequence
  source: /note="Description of Artificial Sequence: Synthetic polypeptide"
DLVLTQSPATLSVSPGERATLSCRASQSVSSNLAWYQQKPGQAPRLLIYGASSRATGIPDRFSGSGSGTDFTLTISRLEPEDFAVYYCQQYGSSPYTFGQGTKLEIK

SEQ ID NO: 28120 - protein, 108 aa, Artificial Sequence
  source: /note="Description of Artificial Sequence: Synthetic polypeptide"
DLQMTQSPSSLSASVGDRVTITCRASQSISSYLNWYQQKPGKAPNLLIYAAFSLQSGVPARFSGSGSGTDFTLTISSLQPEDFATYYCQQSYSPPRTFGPGTKVDIKR

SEQ ID NO: 28121 - protein, 109 aa, Artificial Sequence
  source: /note="Description of Artificial Sequence: Synthetic polypeptide"
DLVLTQSPGTLSLSPGERATLSCRASQSVSSIYLAWYQQKPGQAPRLLIYGASSRATGIPDRFSGSGSGTDFTLTISRLEPEDFAVYYCQQSGSSPWTFGQGTKVEIKR

SEQ ID NO: 28122 - protein, 108 aa, Artificial Sequence; identical to SEQ ID NO: 28106
  source: /note="Description of Artificial Sequence: Synthetic polypeptide"

SEQ ID NO: 28123 - protein, 114 aa, Artificial Sequence
  source: /note="Description of Artificial Sequence: Synthetic polypeptide"
DLQMTQSPDFLAVSLGERATINCRSSQSVLYSSNNKNYLAWYQQKPGQPPKLLIYWASIRESGVPDRFSGSGSETDFTLTISSLQAEDVAVYYCQQYYNIPPTFGPGTKVHIKR

SEQ ID NO: 28124 - protein, 110 aa, Artificial Sequence
  source: /note="Description of Artificial Sequence: Synthetic polypeptide"
DLVLTQSPGTLSLSPGERTTLSCRASQSLSSNYLAWYQQKRGQAPRLLIYGASSRATGIPNRFSGSGSGTNFTLTISRLEPENFAVYYCQQYGSSPPYTFGQGTNLEIKR

SEQ ID NO: 28125 - protein, 110 aa, Artificial Sequence
  source: /note="Description of Artificial Sequence: Synthetic polypeptide"
DLVMTQSPSSLSASVGDRVTITCRASQGISSDLNWYHQKPGKAPKRLIYAASTLQSGVPSKFSGSGSGTYFSPTISSLQPEDYATYYCRQHYGYSPPTSFGQGTKLEIKR

SEQ ID NO: 28126 - protein, 110 aa, Artificial Sequence
  source: /note="Description of Artificial Sequence: Synthetic polypeptide"
DLVLTQSPDTLSLSPGERATLSCRASQSLSSNYLTWYQQKRGQAPRLLIYGASSRATGIPDRFSGNGSGTNFSLNISRLEPENFAVYYCQQYGSSPPYTFGQGTNLEIKR

SEQ ID NO: 28127 - protein, 214 aa, Artificial Sequence
  source: /note="Description of Artificial Sequence: Synthetic polypeptide"
DIQLTQSPSSLSASVGDRVTVTCRASQTIHTYLNWYQQIPGKAPKLLIYGASTLQSGVPSRFSGSGSGTDFTLTINSLQPEDFATYYCQQSYSTPRTFGQGTRLDIKRTVAAPSVFIFPPSDEQLKSGTASVVCLLNNFYPREAKVQWKVDNALQSGNSQESVTEQDSKDSTYSLSSTLTLSKADYEKHKVYACEVTHQGLSSPVTKSFNRGEC

SEQ ID NO: 28128 - protein, 107 aa, Artificial Sequence
  source: /note="Description of Artificial Sequence: Synthetic polypeptide"
DIQLTQSPSSLSASVGDRVSITCRASQTINNYLNWYQQTPGKAPKLLIYGASNLQNGVPSRFSGSGSGTDFTLTISSLQPEDFATYYCQQSFSTPRTFGQGTRLDIK

SEQ ID NO: 28129 - protein, 107 aa, Artificial Sequence
  source: /note="Description of Artificial Sequence: Synthetic polypeptide"
DIQLTQSPSSLSASVGDRVTVTCRASQTIHTYLNWYQQIPGKAPKLLIYGASTLQSGVPSRFSGSGSGTDFTLTINSLQPEDFATYYCQQSYSTPRTFGQGTRLDIK

SEQ ID NO: 28130 - protein, 214 aa, Artificial Sequence
  source: /note="Description of Artificial Sequence: Synthetic polypeptide"
DIQLTQSPSSLSASVGDRVSITCRASQTINNYLNWYQQTPGKAPKLLIYGASNLQNGVPSRFSGSGSGTDFTLTISSLQPEDFATYYCQQSFSTPRTFGQGTRLDIKRTVAAPSVFIFPPSDEQLKSGTASVVCLLNNFYPREAKVQWKVDNALQSGNSQESVTEQDSKDSTYSLSSTLTLSKADYEKHKVYACEVTHQGLSSPVTKSFNRGEC

SEQ ID NO: 28131 - protein, 216 aa, Artificial Sequence
  source: /note="Description of Artificial Sequence: Synthetic polypeptide"
QSALTQPASVSGSPGQTITISCNGTSRDVGGFDSVSWYQQSPGKAPKVMVFDVSHRPSGMSNRFSGSKSGNTASLTISGLHIEDEGDYFCSSLTDRSHRIFGGGTKLTVLGQPKAAPSVTLFPPSSEELQANKATLVCLISDFYPGAVTVAWKADSSPVKAGVETTTPSKQSNNKYAASSYLSLTPEQWKSHKSYSCQVTHEGSTVEKTVAPTECS

SEQ ID NO: 28132 - protein, 216 aa, Artificial Sequence
  source: /note="Description of Artificial Sequence: Synthetic polypeptide"
QSALTQPASVSGSPGQTITISCNGTRSDVGGFDSVSWYQQSPGRAPKVMVFDVSHRPSGISNRFSGSKSGNTASLTISGLHIEDEGDYFCSSLTDRSHRIFGGGTKLTVLGQPKAAPSVTLFPPSSEELQANKATLVCLISDFYPGAVTVAWKADSSPVKAGVETTTPSKQSNNKYAASSYLSLTPEQWKSHKSYSCQVTHEGSTVEKTVAPTECS

SEQ ID NO: 28133 - protein, 216 aa, Artificial Sequence
  source: /note="Description of Artificial Sequence: Synthetic polypeptide"
QSALTQPASVSGSPGQTITISCNGTSSDVGGFDSVSWYQQSPGKAPKVMVFDVSHRPSGISNRFSGSKSGNTASLTISGLHIEDEGDYFCSSLTDRSHRIFGGGTKVTVLGQPKAAPSVTLFPPSSEELQANKATLVCLISDFYPGAVTVAWKADSSPVKAGVETTTPSKQSNNKYAASSYLSLTPEQWKSHKSYSCQVTHEGSTVEKTVAPTECS

SEQ ID NO: 28134 - protein, 215 aa, Artificial Sequence
  source: /note="Description of Artificial Sequence: Synthetic polypeptide"
SYELTQPPSVSVSPGQTASITCSGSKLGDKYVSWYQLRPGQSPILVMYENDRRPSGIPERFSGSNSGDTATLTISGTQALDEADFYCQAWETTTTTFVFFGGGTQLTVLGQPKAAPSVTLFPPSSEELQANKATLVCLISDFYPGAVTVAWKADSSPVKAGVETTTPSKQSNNKYAASSYLSLTPEQWKSHKSYSCQVTHEGSTVEKTVAPTECS

SEQ ID NO: 28135 - protein, 110 aa, Artificial Sequence
  source: /note="Description of Artificial Sequence: Synthetic polypeptide"
QSALTQPASVSGSPGQTITISCNGTSSDVGGFDSVSWYQQSPGKAPKVMVFDVSHRPSGISNRFSGSKSGNTASLTISGLHIEDEGDYFCSSLTDRSHRIFGGGTKVTVL

SEQ ID NO: 28136 - protein, 109 aa, Artificial Sequence
  source: /note="Description of Artificial Sequence: Synthetic polypeptide"
SYELTQPPSVSVSPGQTASITCSGSKLGDKYVSWYQLRPGQSPILVMYENDRRPSGIPERFSGSNSGDTATLTISGTQALDEADFYCQAWETTTTTFVFFGGGTQLTVL

SEQ ID NO: 28137 - protein, 110 aa, Artificial Sequence
  source: /note="Description of Artificial Sequence: Synthetic polypeptide"
QSALTQPASVSGSPGQSITISCNGTSNDVGGYESVSWYQQHPGKAPKVVIYDVSKRPSGVSNRFSGSKSGNTASLTISGLQAEDEGDYYCKSLTSTRRRVFGTGTKLTVL

SEQ ID NO: 28138 - protein, 110 aa, Artificial Sequence
  source: /note="Description of Artificial Sequence: Synthetic polypeptide"
QSALTQPASVSGSPGQTITISCNGTSRDVGGFDSVSWYQQSPGKAPKVMVFDVSHRPSGMSNRFSGSKSGNTASLTISGLHIEDEGDYFCSSLTDRSHRIFGGGTKLTVL

SEQ ID NO: 28139 - protein, 216 aa, Artificial Sequence; identical to SEQ ID NO: 27037
  source: /note="Description of Artificial Sequence: Synthetic polypeptide"

SEQ ID NO: 28140 - protein, 216 aa, Artificial Sequence
  source: /note="Description of Artificial Sequence: Synthetic polypeptide"
QSALTQPASVSGSPGQSITISCNGTSNDVGGYESVSWYQQHPGKAPKVVIYDVSKRPSGVSNRFSGSKSGNTASLTISGLQAEDEGDYYCKSLTSTRRRVFGTGTKLTVLGQPKAAPSVTLFPPSSEELQANKATLVCLISDFYPGAVTVAWKADSSPVKAGVETTTPSKQSNNKYAASSYLSLTPEQWKSHKSYSCQVTHEGSTVEKTVAPTECS

SEQ ID NO: 28141 - protein, 215 aa, Artificial Sequence
  source: /note="Description of Artificial Sequence: Synthetic polypeptide"
DIVMNQSPPSLAVTPGEPASISCRASQSLLYSDGHNYLDWYLQKPGQAPQLLIYLGSTRASGVPDRFSGSGSGTDFTLKISRVEAEDVGVYYCMQPLQSYTFGQGTKLEIKRTVAAPSVFIFPPSDEQLKSGTASVVCLLNNFYPREAKVQWKVDNALQSGNSQESVTEQDSKDSTYSLSSTLTLSKADYEKHKVYACEVTHQGLSSPVTKSFNR

SEQ ID NO: 28142 - protein, 213 aa, Artificial Sequence
  source: /note="Description of Artificial Sequence: Synthetic polypeptide"
DIELTQPPSVSVVPGQTARISCSGDNIPYEYASWYQQKPGQAPVLVIYGDNNRPSGIPERFSGSNSGNTATLTISGTQAEDEADYYCASWDSMTVDGVFGGGTKLTVLGQPKAAPSVTLFPPSSEELQANKATLVCLISDFYPGAVTVAWKADSSPVKAGVETTTPSKQSNNKYAASSYLSLTPEQWKSHRSYSCQVTHEGSTVEKTVAPTEA

SEQ ID NO: 28143 - protein, 109 aa, Artificial Sequence
  source: /note="Description of Artificial Sequence: Synthetic polypeptide"
SYELTQETGVSVALGRTVTITCRGDSLRSHYASWYQKKPGQAPILLFYGKNNRPSGVPDRFSGSASGNRASLTISGAQAEDDAEYYCSSRDKSGSRLSVFGGGTKLTVL

SEQ ID NO: 28144 - protein, 215 aa, Artificial Sequence
  source: /note="Description of Artificial Sequence: Synthetic polypeptide"
SYELTQETGVSVALGRTVTITCRGDSLRSHYASWYQKKPGQAPILLFYGKNNRPSGVPDRFSGSASGNRASLTISGAQAEDDAEYYCSSRDKSGSRLSVFGGGTKLTVLSQPKAAPSVTLFPPSSEELQANKATLVCLISDFYPGAVTVAWKADSSPVKAGVETTTPSKQSNNKYAASSYLSLTPEQWKSHRSYSCQVTHEGSTVEKTVAPTECS

SEQ ID NO: 28145 - protein, 121 aa, Artificial Sequence
  source: /note="Description of Artificial Sequence: Synthetic polypeptide"
DIQMTQSPSSLSASVGDRVTITCQAGQGIGSSLQWYQQKPGKAPKLLVHGASNLHRGVPSRFSGSGFHTTFSLTISGLQRDDFATYFCAVVEFFGPGTKVDIKRTVAAPSVFIFPPSDEQL

SEQ ID NO: 28146 - protein, 122 aa, Artificial Sequence
  source: /note="Description of Artificial Sequence: Synthetic polypeptide"
DIQMTQSPSSLSASVGDRVTITCQASQGIGSSLQWYQQKPGRAPNLLVHGASKLHRGVPSRFSGSGFHTTFSLTISGLQRDDFATYFCAVLEFFGPGTKVEIKRTVAAPSVFIFPPSDEQLK

SEQ ID NO: 28147 - protein, 105 aa, Artificial Sequence
  source: /note="Description of Artificial Sequence: Synthetic polypeptide"
DIQMTQSPSSLSASVGDRVSINCQAGQGLGSSLNWYQQKPGRAPKLLVHGASNLQRGVPSRFSGSGFHTTFTLTISSLQPDDVATYFCAAFQWFGPGTKVEIKRT

SEQ ID NO: 28148 - protein, 102 aa, Artificial Sequence
  source: /note="Description of Artificial Sequence: Synthetic polypeptide"
DIQMTQSPSSLSASVGDRVSIHCQAGQGIGSSLNWYQQKPGRAPRLLVHGASNLQRGVPSRFSGSGFHTTFTLTISSLQPDDVATYWCAALEFFGPGTKVEI

SEQ ID NO: 28149 - protein, 122 aa, Artificial Sequence
  source: /note="Description of Artificial Sequence: Synthetic polypeptide"
DIQMTQSPSSLSASVGDRVTINCQAGQGIGSSLNWYQKKPGRAPKLLVHGASNLQRGVPSRFSGSGFHTTFTLTISSLQPDDVATYFCAVFQWFGPGTKVDIKRTVAAPSVFIFPPSDEQLK

SEQ ID NO: 28150 - protein, 210 aa, Artificial Sequence
  source: /note="Description of Artificial Sequence: Synthetic polypeptide"
DIQMTQSPSSLSASVGDRVTINCQAGQGIGSSLNWYQKKPGRAPKLLVHGASNLQRGVPSRFSGSGFHTTFTLTISSLQPDDVATYFCAVFQWFGPGTKVDIKRTVAAPSVFIFPPSDEQLKSGTASVVCLLNNFYPREAKVQWKVDNALQSGNSQESVTEQDSKDSTYSLSSTLTLSKADYEKHKVYACEVTHQGLRSPVTKSFNRGEC

SEQ ID NO: 28151 - protein, 120 aa, Artificial Sequence
  source: /note="Description of Artificial Sequence: Synthetic polypeptide"
DIQMTQSPSSLSASVGDRVTITCQAGQGIGSSLNWYQQKPGRAPKLLVYGASNLQRGVPSRFSGSGFHTTFTLTISSLQPEDFATYFCSVYEFLGPGTKVEIKRTVAAPSVFIFPPSDEQ

SEQ ID NO: 28152 - protein, 120 aa, Artificial Sequence
  source: /note="Description of Artificial Sequence: Synthetic polypeptide"
DIQMTQSPSSLSVSVGDRVSITCRATQGIGNSLNWYQQKPGKAPKVLIYGTTKLHGGVPSRFSGGGSGSTGTLTIDSLQPEDIATYFCQLFEFFGPGTKVEIKRTVAAPSVFIFPPSDEQ

SEQ ID NO: 28153 - protein, 120 aa, Artificial Sequence
  source: /note="Description of Artificial Sequence: Synthetic polypeptide"
DIQMTQSPSSLSASVGDRVTITCQASQGIGSSLQWYQQKPGRAPNLLVHGASNLHRGVPSRFSGSGFHTTFSLTISGLQRDDFATYFCAVLEFFGPGTKVDIKRTVAAPSVFIFPPSDEQ

SEQ ID NO: 28154 - protein, 120 aa, Artificial Sequence
  source: /note="Description of Artificial Sequence: Synthetic polypeptide"
DIQMTQSPSSLPASVGDTVTITCQAGQGIGSSLQWYQQRPGRAPNLLVYDASNLQRGVPSRFTGTGFHTTFTLTIRGLRPEDFGTYFCASLEFFGPGTKVDIKRTVAAPSVFIFPPSDEQ

SEQ ID NO: 28155 - protein, 120 aa, Artificial Sequence
  source: /note="Description of Artificial Sequence: Synthetic polypeptide"
YIQMTQSPSSLSASIGDRVTITCQAGQGIGSSLNWYQQKPGKAPKLLVHGASNLQRGVSSRFSGSGFHTTFTLTISSLRPEDVGTYFCEVYEFIGPGTKVDIKRTVAAPSVFIFPPSDEQ

SEQ ID NO: 28156 - protein, 120 aa, Artificial Sequence
  source: /note="Description of Artificial Sequence: Synthetic polypeptide"
DIQMTQSPSSLSASVGDRVSINCQAGQGIGSSLNWYQQKRGKAPKLLVHGASTLQRGVPSRFSGSGFHTTFTLTISSLQPDDVATYFCESFQWFGPGTKVEIKRTVAAPSVFIFPPSDEQ

SEQ ID NO: 28157 - protein, 120 aa, Artificial Sequence
  source: /note="Description of Artificial Sequence: Synthetic polypeptide"
DIQMTQSPSSLSASVGDRVTITCQASQGIGSSLQWYQQKPGRAPKLLVHGASNLHRGVPSRFSGSGFHTSFTLTISSLQPDDVATYFCAVLEFFGPGTKVEIKRTVAAPSVFIFPPSDEQ

SEQ ID NO: 28158 - protein, 120 aa, Artificial Sequence
  source: /note="Description of Artificial Sequence: Synthetic polypeptide"
DIQMTQSPSSLSASVGDRVSIHCQAGQGIGSSLKWYQQKSGRAPRLLVHGASNLQRGVPSRFSGSGFHTTFTLTISSLQPDDVATYWCAVLEFFGPGTKVEIKRTVAAPSVFIFPPSDEQ

SEQ ID NO: 28159 - protein, 129 aa, Artificial Sequence
  source: /note="Description of Artificial Sequence: Synthetic polypeptide"
QSVLTQPPSASGAPGQRVTISCSGGPSNVGGNYVYWYRQFPGTAPNLLILRDDQRPSGVPDRFSASKSGNSASLAISGLRPDDEAFYFCATYDSDGSVRLFGGGTTLTVLSQPKAAPSVTLFPPSNGGR

SEQ ID NO: 28160 - protein, 214 aa, Artificial Sequence
  source: /note="Description of Artificial Sequence: Synthetic polypeptide"
ELELTQSPATLSVSPGERATLSCRASESVSSDLAWYQQKPGQAPRLLIYGASTRATGVPARFSGSGSGAEFTLTISSLQSEDFAVYYCQQYNNWPPRYTFGQGTRLEIKRTVAAPSVFIFPPSDEQLKSGTASVVCLLNNFYPREAKVQWKVDNALQSGNSQESVTEQKSKDSTYSLSSTLTLSKADYEKHKVYACEVTHQGLSSPVTKSFNRG

SEQ ID NO: 28161 - protein, 215 aa, Artificial Sequence
  source: /note="Description of Artificial Sequence: Synthetic polypeptide"
QSALTQPPSASGAPGQRVTISCSGGPSNVGGNYVYWYRQFPGTAPTLLILRDDQRPSGVPDRFSASKSGNSASLAISGLRPDDEGFYFCATYDSDGSIRLFGGGTALTVLSQPKAAPSVTLFPPSSEELQANKATLVCLISDFYPGAVTVAWKADSSPVKAGVETTTPSKQSNNKYAASSYLSLTPEQWKSHKSYSCQVTHEGSTVEKTVAPTEC

SEQ ID NO: 28162 - protein, 110 aa, Artificial Sequence
  source: /note="Description of Artificial Sequence: Synthetic polypeptide"
EEDAATYYCQLCNEDPPTFGAGTKQQQKDIVLTNSPASLAVSLGQRATISCKASQSVDYDGDSYMWYQQKPGQPPKLLTIAASNLESGIPARFSGSGSGTDFTLNIHPVE

SEQ ID NO: 28163 - protein, 112 aa, Artificial Sequence
  source: /note="Description of Artificial Sequence: Synthetic polypeptide"
NFMLTQVLSVSGTPGQRVIISCSGTSSNVGGNLVSWYQHLPGAAPRLLIHRDDQRPSGVPDRFSGSKSGNSASLVISGLRSDDEADYFCAAYDSTFSLPVFGGGTRLTVLSQ

SEQ ID NO: 28164 - protein, 210 aa, Artificial Sequence
  source: /note="Description of Artificial Sequence: Synthetic polypeptide"
DIQMTQSPSFVSASVGDRVTITCRASQGISSYLAWYQQKPGKAPKLVIYAASTLQSGVPSRFSGSGSGTEFTLTISSLQPEDFATYYCQHLIGLRSFGQGTKLEIKRTVAAPSVFIFPPSDEQLKSGTASVVCLLNNFYPREAKVQWKVDNALQSGNSQESVTEQDSKDSTYSLSSTLTLSKADYEKHKVYACEVTHQGLSSPVTKSFNR

SEQ ID NO: 28165 - protein, 214 aa, Artificial Sequence
  source: /note="Description of Artificial Sequence: Synthetic polypeptide"
ALQLTQSPSSLSASVGDRITITCRASQGVTSALAWYRQKPGSPPQLLIYDASSLESGVPSRFSGSGSGTEFTLTISTLRPEDFATYYCQQLHFYPHTFGGGTRVDVRRTVAAPSVFIFPPSDEQLKSGTASVVCLLNNFYPREAKVQWKVDNALQSGNSQESVTEQDSKDSTYSLSSTLTLSKADYEKHKVYECEVTHQGLSSPVTKSFNRGEC

SEQ ID NO: 28166 - protein, 117 aa, Artificial Sequence
  source: /note="Description of Artificial Sequence: Synthetic polypeptide"
DIQMTQSPSTLSASIGDTVRISCRASQSITGNWVAWYQQRPGKAPRLLIYRGAALLGGVPSRFSGSAAGTDFTLTIGNLQAEDFGTFYCQQYDTYPGTFGQGTKVEVKRTVAAPSVF

SEQ ID NO: 28167 - protein, 117 aa, Artificial Sequence
  source: /note="Description of Artificial Sequence: Synthetic polypeptide"
DIQMTQSPSTLSASIGDTVRISCRASQSITGNWVAWYQQRPGKAPRLLIYRGAALLGGVPSRFSGSAAGTDFTLTIGNLQTEDFGTFYCQQYDTYPGTFGQGTKVEVKRTVAAPSVF

SEQ ID NO: 28168 - protein, 117 aa, Artificial Sequence
  source: /note="Description of Artificial Sequence: Synthetic polypeptide"
DIQMTQSPSTLSASVGDTVRISCRASQSITGGWLAWYHQRPGKAPRLLIYRGSRLLGGVPSRFSGSAAGTDFTLTIANLQAEDFGTFYCQQYDTYPGTFGQGTKVEVKRTVAAPSVF

SEQ ID NO: 28169 - protein, 117 aa, Artificial Sequence
  source: /note="Description of Artificial Sequence: Synthetic polypeptide"
DIQMTQSPSTLSASIGDTVRISCRASQSITGNWVAWYQQRPGKAPRLLIYRGAALLGGVPSRFRGSAAGTDFTLTIGNLQAEDFGTFYCQQYDTYPGTFGQGTKVEVKRTVAAPSVF

SEQ ID NO: 28170 - protein, 65 aa, Artificial Sequence
  source: /note="Description of Artificial Sequence: Synthetic polypeptide"
SRLLGGVPSRFSGSAAGTDFTLTIANLQAEDFGTFYCQQYDTYPGTFGQGTKVEVKRTVAAPSVF

SEQ ID NO: 28171 - protein, 123 aa, Artificial Sequence
  source: /note="Description of Artificial Sequence: Synthetic polypeptide"
  MOD_RES (18)..(18): Any amino acid
  MOD_RES (35)..(35): Any amino acid
EIVLTQSPGTLSLSPGEXATLSCRASQTISNNYLXWYQQKAGQAPRLLIYGASSGATGIPDRFSGSGSGTDFTLTISRLEPEDFAVYYCQQYGLSPWTFGRGTKVEIKRTVAAPSVFIFPPSD

SEQ ID NO: 28172 - protein, 129 aa, Artificial Sequence
  source: /note="Description of Artificial Sequence: Synthetic polypeptide"
QSALTQPRSVSGSPGQSVTISCTGTSSDVGAYNYVSWYRQHPGKAPKLMINDVSKRPSGVPDRFSGSKSGNTASLTISGLQAEDEADYYCCSYAGTYSYVFGTGTKVTVLGQPKANPTVTLFPPSSEEL

SEQ ID NO: 28173 - protein, 116 aa, Artificial Sequence
  source: /note="Description of Artificial Sequence: Synthetic polypeptide"
APVTLSASVGDTVTITCRASQPIATFLNWYQHKPGQAPKLLIYAASTFQRGAPSRYSGSGSGTDFTLTINSLQPEDLATYYCQQTFTDPVTFGQGTRLEIKRTVAAPSVFIFPPSD

SEQ ID NO: 28174 - protein, 122 aa, Artificial Sequence
  source: /note="Description of Artificial Sequence: Synthetic polypeptide"
DIQMTQSPASLSASVGDRVTITCRASQGISHYLAWYQQKPGKVPRLLIYAASRLQSGVTSRFSGSGSGTEFTLTISSLLPEDAAVYFCQKYDTDPMTFGQGTRLEIKRTVAAPSVFIFPPSD

SEQ ID NO: 28175 - protein, 123 aa, Artificial Sequence
  source: /note="Description of Artificial Sequence: Synthetic polypeptide"
DIQMTQSPSSLSASIGDRVTITCRANQHIRSFLNWYQQTPGKAPKLLIYAASTLQRGVPSRFSGSGSGTDFTLTITSLEREDLATYYCQQTYTSPITFGQGTRLEIKRTVAAPSVFIFPPSDE

SEQ ID NO: 28176 - protein, 124 aa, Artificial Sequence
  source: /note="Description of Artificial Sequence: Synthetic polypeptide"
EIVLTQSPGTLSLSPGERATLSCRASQSVSNNYLAWYQQKPGQAPRLLIYGASSRATGIPDRFSGSGSGTDFTLTISRLEPEDFAVYYCQQYATSSLYTFGQGTKLEIKRTVAAPSVFIFPPSD

SEQ ID NO: 28177 - protein, 118 aa, Artificial Sequence
  source: /note="Description of Artificial Sequence: Synthetic polypeptide"
LSVSLGERATINCKSSQSILYSSDKKNYLAWYQQKIGQPPKLLLYWASTRESGIPDRFSGSGSGSDFTLTISSLQPEDVAVYYCQQYYISPFTFGPGTKVDLKRTVAAPSVFIFPPSD

SEQ ID NO: 28178 - protein, 120 aa, Artificial Sequence
  source: /note="Description of Artificial Sequence: Synthetic polypeptide"
NFMLTQPASVSGSPGQSITLSCTGTTSDVRDSNFVSWYQQVPGKAPKLIIYDVSARPSGVSFRFSGSKSGNTASLTISGLQAEDEALYYCSSFTPTNTLVFGGGTKLTVLGQPKAAPSVT

SEQ ID NO: 28179 - protein, 114 aa, Artificial Sequence
  source: /note="Description of Artificial Sequence: Synthetic polypeptide"
SQSVVTQEPSLTVSPGGTVTLTCGPSTGAVTSGFYPHWFQQKPGQAPRALIYSTSNKYSWTPARFSGSLLGGKAVLTLSDVQPDDEAEYYCLLLLYYGGPWIFGGGTKLTVLVS

SEQ ID NO: 28180 - protein, 130 aa, Artificial Sequence
  source: /note="Description of Artificial Sequence: Synthetic polypeptide"
QAVVTQEPSLTVSPGGTVTLTCASSTGAVTSGFYPHWFQQKPGQAPRALIYSTSNRYSWTPARFSGSLLGGKAALTLSGVQPEDEAEYYCLLLPYYGGPWIFGGGTKLTVLGQPKAAPSVTLFPPSSEEL

SEQ ID NO: 28181 - protein, 122 aa, Artificial Sequence
  source: /note="Description of Artificial Sequence: Synthetic polypeptide"
EIVMTQSPATLSVSPGDRATLSCRASQSVSTNLAWYQQKPGQAPRLLIYGASTRATGIPATFSGSGFATEFTLTISSLQSEDFAVYYCQQYNNWPPAFGQGTKVEIKRTVAAPSVFIFPPSD

SEQ ID NO: 28182 - protein, 130 aa, Artificial Sequence
  source: /note="Description of Artificial Sequence: Synthetic polypeptide"
QSVLTQPPSASGSPGQSITISCTGTSSDVGGYNYVSWYQQPPGKAPKVIIYEVSKRPSGVPDRFSGSKSGNTASLTVSGLQAEDEADYYCSSYAGSNNFVFGTGTEVTVVGQPKANPTVTLFPPSSEELL

SEQ ID NO: 28183 - protein, 113 aa, Artificial Sequence
  source: /note="Description of Artificial Sequence: Synthetic polypeptide"
SLSASVGDRVTITCRASESISFYLNWYQQKPGKAPELLIFATSTLHSGVPSRFSGSGSGTDFTLTISSLQLEDFATYYCQQSSSTPFTFGGGTKVEIKRTVAAPSVFIFPPSD

SEQ ID NO: 28184 - protein, 121 aa, Artificial Sequence
  source: /note="Description of Artificial Sequence: Synthetic polypeptide"
DIQMTQSPSSLSAYVGDRVTITCRASQNINTYLNWYQQRPGKAPKLLIYAASTLQSGVPSRFSGSGSGTDFTLTISNLETEDFAVYYCQQTYRSVTFGQGTKLEIKRTVAAPSVFIFPPSD

SEQ ID NO: 28185 - protein, 111 aa, Artificial Sequence
  source: /note="Description of Artificial Sequence: Synthetic polypeptide"
LSAYVGDRVTITCRASQNINTYLNWYQQRPGKAPKLLIYAASTLQSGVPSRFSGSGSGTDFTLTISNLETEDFAVYYCQQTYSSVTFGQGTKLETRRTVAAPSVFIFPPSD

SEQ ID NO: 28186 - protein, 125 aa, Artificial Sequence
  source: /note="Description of Artificial Sequence: Synthetic polypeptide"
SEIVLTQSPGTLSLSPGERATLSCRASQSVSSSYLAWYQQKPVQAPRLLIYGASSRATGIPDRFSGSGSGTDFTLTISRLEPEDFAVYYCQQYGTLHPRTFGQGTKVEIKRTVAAPSVFIFPPSD

SEQ ID NO: 28187 - protein, 90 aa, Artificial Sequence
  source: /note="Description of Artificial Sequence: Synthetic polypeptide"
DVVMTQSPLSLPVTLGQPASISCRSSQSLVYSHGDTYLKCFQQRPGQSPRRPIYKVSNRDSGVPDRFSGSGSGTDFTLKISRVEAEDVGV

SEQ ID NO: 28188 - protein, 122 aa, Artificial Sequence
  source: /note="Description of Artificial Sequence: Synthetic polypeptide"
EIVLTQSPGTLSLSPGERATLSCRASQSISSNYLAWYQQKPGQAPRLLIYGASTRATGIPDRFSGSGSGTDFTLSISRLEPEDIAVYYCHQYGSSQRFGQGTKVEIKRTVAAPSVFIFPPSD

SEQ ID NO: 28189 - protein, 122 aa, Artificial Sequence
  source: /note="Description of Artificial Sequence: Synthetic polypeptide"
DIQMTQSPSSLSASVGDRVTITCRASQSISRYLNWYQQKPGKAPKLLIYAASSLQGGVPSRFSGSGSGTDFTLTISSLQPEDFATYYCQQSSSKPFTFGGGTKVEIKRTVAAPSVFIFPPSD

SEQ ID NO: 28190 - protein, 116 aa, Artificial Sequence
  source: /note="Description of Artificial Sequence: Synthetic polypeptide"
GPATLSVSPGERATLSCRASQSLRNNLAWYQQKTGQSPRLLIYAVSTRATGIPPRFSGGGSGTEFTLTIDSLQSEDFAVYFCQQYDSPQWTFGQGTKVEIKRTVAAPSVFIFPPSD

SEQ ID NO: 28191 - protein, 129 aa, Artificial Sequence
  source: /note="Description of Artificial Sequence: Synthetic polypeptide"
NFMLTQPASVSGSPGQSITISCSGTGSDIGVYNYVSWYQQHPGKAPRLMIYDVTNRPSGVSNRFSGSKSGFTASLTISGLQGDDEADYYCSSYSSTNTYVFGTGTHVTVLGQPKANPTVTLFPPSSEEL

SEQ ID NO: 28192 - protein, 127 aa, Artificial Sequence
  source: /note="Description of Artificial Sequence: Synthetic polypeptide"
QSALTQPPSASGTPGQRVTISCSGSYHNIGSNAVNWYQQLPGTAPKLLIYSNDQRPSGVPDRFSGSKSGTSASLAISGLQSEDEADYYCAAWDDSLHVFGTGTKVTVLGQPKANPTVTLFPPSSEEL

SEQ ID NO: 28193 - protein, 127 aa, Artificial Sequence; identical to SEQ ID NO: 28192
  source: /note="Description of Artificial Sequence: Synthetic polypeptide"

SEQ ID NO: 28194 - protein, 123 aa, Artificial Sequence
  source: /note="Description of Artificial Sequence: Synthetic polypeptide"
DIQMTQSPSSLSASVGDRVTITCRASQDITTYLAWLQQKPGKAPKSLIYSASTVQSGVPSRFSGSGSGTEFTLTISGLQPEDFATYYCQQYNYYPITFGLGTRLEIKRTVAAPSVFIFPPSDE

SEQ ID NO: 28195 - protein, 117 aa, Artificial Sequence
  source: /note="Description of Artificial Sequence: Synthetic polypeptide"
IILFLVATATGSWAQSALTQPRSVSGSLGQSVTISCTGSSSDVGRYNYVSWYQHHPGKAPKLMISDVNKRPSGVPDRFSGSKSGNTASLTISGLQAEDETDYYCCSYAGSYIWVFGG

SEQ ID NO: 28196 - protein, 125 aa, Artificial Sequence
  source: /note="Description of Artificial Sequence: Synthetic polypeptide"
EIVLTQSPATLSLSPGERATLSCRASQSVSSYLAWYQQKPGQAPRLLIYDASNRATGIPARFSGSGSDTDFTLTISSLEPEDFAVYYCQQRGIWPLQITFGQGTRLEIKRTVAAPSVFIFPPSDE

SEQ ID NO: 28197 - protein, 119 aa, Artificial Sequence
  source: /note="Description of Artificial Sequence: Synthetic polypeptide"
LSASVGDRVTITCRASQSIDRYLNWYQQKPGKAPKLLIYAASSLHTDVPSRFSGSGAGTYFTLTITSLQPEDFATYYCQQSHSPSFGQESYSITFGQGTRLEIKRTVAAPSVFIFPPSD

SEQ ID NO: 28198 - protein, 115 aa, Artificial Sequence
  source: /note="Description of Artificial Sequence: Synthetic polypeptide"
VTLSLSPGERATLSCRASQTISNNYLAWYQQKPGQAPRLLIYGASSGATGLPDRFSGSGSGTDFTLTISRLEPEDFAVYYCHQYALSPWTFGRGTKVEIKRTVAAPSVFIFPPSD

SEQ ID NO: 28199 - protein, 144 aa, Artificial Sequence
  source: /note="Description of Artificial Sequence: Synthetic polypeptide"
IILFLVATATGVHSDIQMTQSPSSLSASVGDRVTITCRASQSIDRYLNWYQHKPGKAPKLLIYAASNLHTDVPSRFSGSGAGTYFTLTITSLQPEDFATYYCQQSHSPSFGQESYSIAFGQGTRLEIKRTVAAPSVFIFPPSDE

SEQ ID NO: 28200 - protein, 113 aa, Artificial Sequence
  source: /note="Description of Artificial Sequence: Synthetic polypeptide"
QSVLTQPASVSGSPGQSITISCTGTNSDVGYSYVSWFQQHPGKVPKLLIYDVSRRSSGVSNRFSGSRSGNTASLTISGLRAEDEADYYCGSFTTSLTLVFGGGTKLAVLVSPS

SEQ ID NO: 28201 - protein, 124 aa, Artificial Sequence
  source: /note="Description of Artificial Sequence: Synthetic polypeptide"
EIVLTQSPGTLSLSPGERATLSCRASQSVSSRYLAWYQQKPGQAPRLIIYDASSRASGIPDRFSGSGSETDFTLTITRLEPEDFAVYYCQLYGTSPKFTFGQGTKLEIKRTVAAPSVFIFPPSD

SEQ ID NO: 28202 - protein, 114 aa, Artificial Sequence
  source: /note="Description of Artificial Sequence: Synthetic polypeptide"
DIQMTQSPSSLSASVGDTVTITCQANGYLNWYQQRRGKAPKLLIYDGSKLERGVPSRFSGRRWGQEYNLTINNLQPEDIATYFCQVYEFVVPGTRLDLKRTVAAPSVFIFPPSD

SEQ ID NO: 28203 - protein, 114 aa, Artificial Sequence; identical to SEQ ID NO: 28202
  source: /note="Description of Artificial Sequence: Synthetic polypeptide"

SEQ ID NO: 28204 - protein, 120 aa, Artificial Sequence
  source: /note="Description of Artificial Sequence: Synthetic polypeptide"
QSVLTQPASVSGSPGQSITISCTGTSNDVGGQNFVSWYQQHPGTAPQLLIYDVTNRPAGVSSRFSGSKSGNTASLTISGLRTEDEADYYCASFTILNGVDYVFGTGTKVTVLLSPSQPYL

SEQ ID NO: 28205 - protein, 114 aa, Artificial Sequence
  source: /note="Description of Artificial Sequence: Synthetic polypeptide"
DIQMTQSPSSLSARVGDTVTFTCQANGYLNWYQQRRGKAPKLLIYDGSKLERGVPSRFSGRGWGQEYNLTINNLQPEDIATYFCQVYEFAVPGTRLDLKRTVAAPSVFIFPPSD

SEQ ID NO: 28206 - protein, 124 aa, Artificial Sequence
  source: /note="Description of Artificial Sequence: Synthetic polypeptide"
EIVLTQSPATLSVSPGERATLSCRAGQSVSSDLAWYQHKPGQAPRLLIYDASKRATGIPARFSGSGSGTDFTLTISSLEPEDFAVYYCQHRTNWPPSITFGQGTRLEIKRTVAAPSVFIFPPSD

SEQ ID NO: 28207 - protein, 114 aa, Artificial Sequence
  source: /note="Description of Artificial Sequence: Synthetic polypeptide"
DIQMTQSPSSLSARVGDTVTITCQANGYLNWYQQRRGKAPKLLIYDGSKLETGVPSRFTGRRWGQEYNLTINNLQPEDIATYFCQVYEFIVPGTRLDLKRTVAAPSVFIFPPSD

SEQ ID NO: 28208 - protein, 114 aa, Artificial Sequence
  source: /note="Description of Artificial Sequence: Synthetic polypeptide"
DIQMTHSPSSLSASVGDTVTITCQANGYLNWYQQRRGKAPKLLIYDGSKLETGVPSRFTGRRWGQEYNLTINNLQPEDIATYFCQVYEFIVPGTRLDLKRTVAAPSVFIFPPSD

SEQ ID NO: 28209 - protein, 114 aa, Artificial Sequence; identical to SEQ ID NO: 28207
  source: /note="Description of Artificial Sequence: Synthetic polypeptide"

SEQ ID NO: 28210 - protein, 121 aa, Artificial Sequence
  source: /note="Description of Artificial Sequence: Synthetic polypeptide"
DIQMTQSPSSLSASVGDRVTITCQASQGISNSLNWYQQKPGKAPRLLIYGTSTLQRGVPSRFSGSGSGTRFTVTINSLQPEDIATYFCQHNEFFGRGTKVDIKRTVAAPSVFIFPPSDEQL

SEQ ID NO: 28211 - protein, 119 aa, Artificial Sequence
  source: /note="Description of Artificial Sequence: Synthetic polypeptide"
EIVLTQSPGTLSLSPGERATLSCRASQSVSSNYLAWYQQKPGQAPRLLIYGASSRATGIPDRFSGSGSGTDFTLSISRLEPEDFAVYYCQQYGTSSCTFGQGTKLEIKRTVAAPSVFIF

SEQ ID NO: 28212 - protein, 123 aa, Artificial Sequence
  source: /note="Description of Artificial Sequence: Synthetic polypeptide"
EIVLTQSPGTLSLSPGDRAALSCRASETLSGNSLAWYQQKRGQPPRLLIFAASSRATGIPERFSGGGSGTDFTLTITRLEPEDFAVYFCQQYVDAPITFGQGTRLEIKRTVAAPSVFIFPPSD

SEQ ID NO: 28213 - protein, 119 aa, Artificial Sequence
  source: /note="Description of Artificial Sequence: Synthetic polypeptide"
QSVLTQPRSVSGSPGQSVTISCTGTSSDVGGYNYVSWYQQHPGKAPKTMIFDVTKRPSGVPDRFSGSKSGNTASLTISGLQAEDEADYYCSSYAGRNTFYVFGTGTTVTVQVSPSQPPP

SEQ ID NO: 28214 - protein, 123 aa, Artificial Sequence
  source: /note="Description of Artificial Sequence: Synthetic polypeptide"
EIVLTQSPGTLSLSPGERATLSCRASQSVSSNLAWYAQKPGQAPRLIIYGASSRASAIPDRFRGSGSGTDFTLTISRLEPEDFAVYYCQQYDDAPITFGHGTRLEIKRTVAAPSVFIFPPSDE

SEQ ID NO: 28215 - protein, 121 aa, Artificial Sequence
  source: /note="Description of Artificial Sequence: Synthetic polypeptide"
EIVLTQSPGTLSLSPGERATLSCRASQSVSSNNLAWYQQKPGQAPRLLMSGASSRATGIPDRFSGSGSGTDFTLTISRLEPEDFAVYHCQQYGSSPPTFGQGTKVEIKRTVAAPSVFIFPP

SEQ ID NO: 28216 - protein, 105 aa, Artificial Sequence
  source: /note="Description of Artificial Sequence: Synthetic polypeptide"
DIQMTQSPSSLSASVGDKVTITCQTSAGYLNWYQQRRGRAPKLLMYDGSRLVTGVPSRFSGRRWGTQYNLTIGSLQPEDIATYYCQVYEFFGPGTRLDLKSTVAA

SEQ ID NO: 28217 - protein, 120 aa, Artificial Sequence
  source: /note="Description of Artificial Sequence: Synthetic polypeptide"
DIQMTQSPSSLSASIGDRVNITCQASRDTGSALNWYQQKVGRPPRLLISAVSNLGAGVPSRFSGRRSGTQSTLTINTLQPEDIATYFCQHYEFFGPGTKVDIKRTVAAPSVFIFPPSDEQ

SEQ ID NO: 28218 - protein, 114 aa, Artificial Sequence
  source: /note="Description of Artificial Sequence: Synthetic polypeptide"
DIQMTQSPSSLSASVGDTVTFTCQANGYLNWYQQRRGKAPKLLIYDGSRLERGVPSRFSGRRWGQEYNLTINNLQPEDIATYFCQVYEFAVPGTRLDLKRTVAAPSVFIFPPSD

SEQ ID NO: 28219 - protein, 115 aa, Artificial Sequence
  source: /note="Description of Artificial Sequence: Synthetic polypeptide"
DIQMTQSPSSLSASVGDTVTITCQTNKGYLNWYQQRRGRAPKLLMYDGSKLVTGVPSRFSGRRWGTQYNLTIGSLQPEDIATYYCQVYEFFGPGTRLDLKRTVAAPSVFIFPPSD

SEQ ID NO: 28220 - protein, 115 aa, Artificial Sequence
  source: /note="Description of Artificial Sequence: Synthetic polypeptide"
DIQMTQSPSSLSARVGDKVTITYQTSAGYLNWYQQRRGRAPKLLMYDGSRLVTGAPSRFSGRRWGTQYNLTIGSLQPEDIATYYCQVYEFFGPGTRLDLKRTVAAPSVFIFPPSD

SEQ ID NO: 28221 - protein, 114 aa, Artificial Sequence; identical to SEQ ID NO: 28202
  source: /note="Description of Artificial Sequence: Synthetic polypeptide"

SEQ ID NO: 28222 - protein, 206 aa, Artificial Sequence
  source: /note="Description of Artificial Sequence: Synthetic polypeptide"
DIQMTQSPSSLSASVGDTVTITCQANGYLNWYQQRRGKAPKLLIYDGSKLERGVPSRFSGRRWGQEYNLTINNLQPEDIATYFCQVYEFVVPGTRLDLKRTVAAPSVFIFPPSDEQLKSGTASVVCLLNNFYPREAKVQWKVDNALQSGNSQESVTEQDSKDSTYSLSSTLTLSKADYEKHKVYACEVTHQGLSSPVTKSFNRGEC

SEQ ID NO: 28223 - protein, 115 aa, Artificial Sequence
  source: /note="Description of Artificial Sequence: Synthetic polypeptide"
DIQMTQSPSSLSASVGDTVTINCQTNKGYLNWYQQRRGRAPKLLMYDGSKLVTGVPSRFSGRRWGTQYNLTIGSLQPEDIATYYCQVYEFFGPGTRLDLKRTVAAPSVFIFPPSD

SEQ ID NO: 28224 - protein, 115 aa, Artificial Sequence
  source: /note="Description of Artificial Sequence: Synthetic polypeptide"
DIQMTQSPSSLSASVGDTVTITCHTNKGYLNWYQQRRGRAPKLLMFDGSKLVTGVPSRFSGRRWGTQYNLTIGSLQPEDIATYYCQVYEVFGPGTRLDLKRTVAAPSVFIFPPSD

SEQ ID NO: 28225 - protein, 115 aa, Artificial Sequence; identical to SEQ ID NO: 28219
  source: /note="Description of Artificial Sequence: Synthetic polypeptide"

SEQ ID NO: 28226 - protein, 115 aa, Artificial Sequence
  source: /note="Description of Artificial Sequence: Synthetic polypeptide"
DIQMTQSPSSLSASVGDTVTITCQTNKGYLNWYQQRRGRAPKLLMYDGSKLVTGVPSRLSGRRWGTQYNLTIGSLQPEDIATYYCQVYEFFGPGTRLDLKRTVAAPSVFIFPPSD

SEQ ID NO: 28227 - protein, 115 aa, Artificial Sequence
  source: /note="Description of Artificial Sequence: Synthetic polypeptide"
DIQMTQSPSSLSASVGDTVTITCQTNKGYLNWYQQKRGRAPKLLMYDGSKLVTGVPSRLSGRRWGTQYNLTIGSLQPEDIATYYCQVYEFFGPGTRLDLKRTVAAPSVFIFPPSD

SEQ ID NO: 28228 - protein, 115 aa, Artificial Sequence; identical to SEQ ID NO: 28226
  source: /note="Description of Artificial Sequence: Synthetic polypeptide"

SEQ ID NO: 28229 - protein, 115 aa, Artificial Sequence; identical to SEQ ID NO: 28219
  source: /note="Description of Artificial Sequence: Synthetic polypeptide"

SEQ ID NO: 28230 - protein, 115 aa, Artificial Sequence; identical to SEQ ID NO: 28226
  source: /note="Description of Artificial Sequence: Synthetic polypeptide"

SEQ ID NO: 28231 - protein, 114 aa, Artificial Sequence
  source: /note="Description of Artificial Sequence: Synthetic polypeptide"
DIQMTQSPSSLSASVGDTVTITCQANGYLNWYQQRRGKAPKLLIYDGSKLERGVPSRFSGRRWGQEYNLTINNLQAEDIATYFCQVYEFAVPGTRLDLKRTVAAPSVFIFPPSD

SEQ ID NO: 28232 - protein, 115 aa, Artificial Sequence
  source: /note="Description of Artificial Sequence: Synthetic polypeptide"
DIQMTQSPSSLSARVGDKVTITCQTSAGYLNWYQQRRGRAPKLLMYDGSRLVTGVPSRFSGRRWGTQYNLTIGSLQPEDIATYYCQVYEFFGPGTRLDLKRTVAAPSVFIFPPSD

SEQ ID NO: 28233 - protein, 114 aa, Artificial Sequence
  source: /note="Description of Artificial Sequence: Synthetic polypeptide"
DIQMTQSPSSLSASVGDTVTITCQANGYLNWYQQRRGKAPKLLMYDGSTLERGVPARFSGRRWGQEYNLTINNLQPEDVATYFCQVYEFIVPGTRLDLKRTVAAPSVFIFPPSD

SEQ ID NO: 28234 - protein, 115 aa, Artificial Sequence
  source: /note="Description of Artificial Sequence: Synthetic polypeptide"
DIQMTQSPSSLSASVGDTVTITCQTNKGYLNWYQQRRGRAPKLLMCDGSKLVTGVPSRFSGRRWGTQYNLTIGSLQPEDIATYYCQVYEFFGPGTRLDLKRTVAAPSVFIFPPSD

SEQ ID NO: 28235 - protein, 115 aa, Artificial Sequence
  source: /note="Description of Artificial Sequence: Synthetic polypeptide"
DIQMTQSPSSLSASVGDTVTITCQTTKGYLNWYQQRRGRAPKLLMFDGSKLVTGVPSRFSGRRWGTQYNLTIGSLQPEDLATYYCQVYEFFGPGTRLDLKRTVAAPSVFIFPPSD

SEQ ID NO: 28236 - protein, 115 aa, Artificial Sequence; identical to SEQ ID NO: 28224
  source: /note="Description of Artificial Sequence: Synthetic polypeptide"

SEQ ID NO: 28237 - protein, 114 aa, Artificial Sequence; identical to SEQ ID NO: 28207
  source: /note="Description of Artificial Sequence: Synthetic polypeptide"

SEQ ID NO: 28238 - protein, 104 aa, Artificial Sequence
  source: /note="Description of Artificial Sequence: Synthetic polypeptide"
DIQMTQSPSSLSARVGDTVTITCQANGYLNWYQQRRGKAPKLLIYDGSKLERGVPARFSGRRWGQEYNLTINNLQPEDVATYFCQVYEFIVPGTRLDLKRTVAA

SEQ ID NO: 28239 - protein, 121 aa, Artificial Sequence
  source: /note="Description of Artificial Sequence: Synthetic polypeptide"
DIQMTQSPSSVSASVGDRVTITCQASRDTDNSLTWYQQKPGRPPKLLIYHVVNLGPGVPSRFSGSASSATQSTLIISDFQPDDVATYFCQNYEFFGPGTKVEIKRTVAAPSVFIFPPSDEQ

SEQ ID NO: 28240 - protein, 114 aa, Artificial Sequence
  source: /note="Description of Artificial Sequence: Synthetic polypeptide"
DIQMTQSPSSLSARVGDTVTFTCQANGYLNWYQQRRGKAPKLLIYDGSKLERGVPSRFSGRRWGQEYNLTINNLQPEDIATYFCQVYEFAVPGTRLDLKRTVAAPSVFIFPPSD

SEQ ID NO: 28241 - protein, 115 aa, Artificial Sequence; identical to SEQ ID NO: 28226
  source: /note="Description of Artificial Sequence: Synthetic polypeptide"

SEQ ID NO: 28242 - protein, 114 aa, Artificial Sequence
  source: /note="Description of Artificial Sequence: Synthetic polypeptide"
DIQMTQSPSSLSARVGDTVTITCQANGYLNWYQQRRGKAPKLLIYDGSKLERGVPSRFSGRRWGQEYNLTINNLQPEDIATYFCQVYEFVVPGTRLDLKRTVAAPSVFIFPPSD

SEQ ID NO: 28243 - protein, 113 aa, Artificial Sequence
  source: /note="Description of Artificial Sequence: Synthetic polypeptide"
DIQMTQSPSSLSARVGDTVTFTCQANGYLNWYQQRRGKAPKLLIYDGSKLERGVPSRFSGRRWGQEYNLTINNLQPEDIATYFCQVYEFAVPGTRLDLKRTVAAPSVFIFPSD

SEQ ID NO: 28244 - protein, 108 aa, Artificial Sequence
  source: /note="Description of Artificial Sequence: Synthetic polypeptide"
DIQMTQSPSSLSASVGDTVTINCQTNKGYLNWYQQRRGRAPKLLMYDGSKLVTGVPSRFSGRRWGTQYNLTIGSLQPEDIATYYCQVYEFFGPGTRLDLKRTVAAPSD

SEQ ID NO: 28245 - protein, 115 aa, Artificial Sequence; identical to SEQ ID NO: 28223
  source: /note="Description of Artificial Sequence: Synthetic polypeptide"

SEQ ID NO: 28246 - protein, 114 aa, Artificial Sequence; identical to SEQ ID NO: 28242
  source: /note="Description of Artificial Sequence: Synthetic polypeptide"

SEQ ID NO: 28247 - protein, 115 aa, Artificial Sequence
  source: /note="Description of Artificial Sequence: Synthetic polypeptide"
DIQMTQSPSSLSASVGDKVTITCQTSAGYLNWYQQRRGRAPKLLMYDGSRLVTGVPSRFSGRRWGTQYNLTIGSLQPEDVATYYCQVYEFFGPGTRLDLKRTVAAPSVFIFPPSD

SEQ ID NO: 28248 - protein, 114 aa, Artificial Sequence
  source: /note="Description of Artificial Sequence: Synthetic polypeptide"
DIQMTQSPSSLSARVGDTVTITCQANGYLNWYQQRRGKAPKLLIYDGSKLERGVPSRFSGRRWGQEYNLTINNLQPEDIATYFCQVYEFAVPGTRLDLKRTVAAPSVFIFPPSD

SEQ ID NO: 28249 - protein, 114 aa, Artificial Sequence
  source: /note="Description of Artificial Sequence: Synthetic polypeptide"
DIQMTQSPSSLSASVGDTVTITCQANGYLNWYQQRRGKAPKLLIYDGSKLERGVPSRFSGRRWGQEYNLTINNLQPEDIATYFCQVYEFIVPGTRLDLKRTVAAPSVFIFPPSD

SEQ ID NO: 28250 - protein, 114 aa, Artificial Sequence; identical to SEQ ID NO: 28249
  source: /note="Description of Artificial Sequence: Synthetic polypeptide"

SEQ ID NO: 28251 - protein, 214 aa, Artificial Sequence
  source: /note="Description of Artificial Sequence: Synthetic polypeptide"
DIQMTQSPSTLSASVGDRVTITCRASQSISNWLAWYQQKPGRAPKLLMYKASSLKSGVPSRFSGSGSGTEFTLTISSLQSDDFATYYCQQHDSSPYTFGQGTKLEIKRTVAAPSVFIFPPSDEQLKSGTASVVCLLNNFYPREAKVQWKVDNALQSGNSQESVTEQDSKDSTYSLSSTLTLSKADYEKHKLYACEVTHQGLSSPVTKSFNRGEC

SEQ ID NO: 28252 - protein, 206 aa, Artificial Sequence
  source: /note="Description of Artificial Sequence: Synthetic polypeptide"
QSALTQPASVSGSPGQSINISCAGRSDRVSWYQQRPNGVPKLLMFDVYRRPSGVSDRFSGSHSGDTAFLTISGLQTEDEADYYCTSHPYAFGAGTKVNVLRQPKANPTVTLFPPSSEELQANKATLVCLISDFYPGAVTVAWKADSSPVKAGVETTTPSKQSNNKYAASSYLSLTPEQWKSHKSYSCQVTHEGSTVEKTVAPTECS

SEQ ID NO: 28253 - protein, 210 aa, Artificial Sequence
  source: /note="Description of Artificial Sequence: Synthetic polypeptide"
EIVLTQSPATLSLSPGETAIISCRTSQYGSLAWYQQRPGQAPRLVIYSGSTRAAGIPDRFSGSRWGADYNLSISNLESGDFGVYYCQQYEFFGQGTKVQVDIKRTVAAPSVFIFPPSDEQLKSGTASVVCLLNNFYPREAKVQWKVDNALQSGNSQESVTEQDSKDSTYSLSSTLTLSKADYEKHKVYACEVTHQGLSSPVTKSFNRGEC

SEQ ID NO: 28254 - protein, 233 aa, Artificial Sequence
  source: /note="Description of Artificial Sequence: Synthetic polypeptide"
MAWIPLLLGLLSHCTGSVTSYVSPLSVALGETARISCGRQALGSRAVQWYQHKPGQAPILLIYNNQDRPSGIPERFSGTPDINFGTTATLTISGVEVGDEADYYCHMWDSRSGFSWSFGGATRLTVLGQPKAAPSVTLFPPSSEELQANKATLVCLISDFYPGAVTVAWKADSSPVKAGVETTTPSKQSNNKYAASSYLSLTPEQWKSHKSYSCQVTHEGSTVEKTVAPTECS

SEQ ID NO: 28255 - protein, 211 aa, Artificial Sequence
  source: /note="Description of Artificial Sequence: Synthetic polypeptide"
SDISVAPGETARISCGEKSLGSRAVQWYQHRAGQAPSLIIYNNQDRPSGIPERFSGSPDSPFGTTATLTITSVEAGDEADYYCHIWDSRVPTKWVFGGGTTLTVLGQPKAAPSVTLFPPSSEELQANKATLVCLISDFYPGAVTVAWKADSSPVKAGVETTTPSKQSNNKYAASSYLSLTPEQWKSHKSYSCQVTHEGSTVEKTVAPTECS

SEQ ID NO: 28256 - protein, 239 aa, Artificial Sequence
  source: /note="Description of Artificial Sequence: Synthetic polypeptide"
MAWTVLLLGLLSHCTGSLASSMSVSPGETAKISCGKESIGSRAVQWYQQKPGQPPSLIIYNNQDRPAGVPERFSASPDFRPGTTATLTITNVDAEDEADYYCHIYDARGGTNWVFDRGTTLTVLGQPKAAPSVTLFPPSSEELQANKATLVCLISDFYPGAVTVAWKADSSPVKAGVETTTPSKQSNNKYAASSYLSLTPEQWKSHKSYSCQVTHEGSTVEKTVAPTECSKSLSLSPGK

SEQ ID NO: 28257 - protein, 232 aa, Artificial Sequence
  source: /note="Description of Artificial Sequence: Synthetic polypeptide"
MAWIPLLLGLLSHCTGSDTSLNPLSLAPGATAKIPCGERSRGSRAVQWYQQKPGQAPTLIIYNNQDRPAGVSERFSGNPDVAIGVTATLTISRVEVGDEADYYCHYWDSRSPISWIFGGGTQLTVLGQPKAAPSVTLFPPSSEELQANKATLVCLISDFYPGAVTVAWKADSSPVKAGVETTTPSKQSNNKYAASSYLSLTPEQWKSHKSYSCQVTHEGSTVEKTVAPTECS

SEQ ID NO: 28258 - protein, 230 aa, Artificial Sequence
  source: /note="Description of Artificial Sequence: Synthetic polypeptide"
MAWTFLLLGLLSHCTASVTSDISVAPGETARISCGEKSLGSRAVQWYQHRAGQAPSLIIYNNQDRPSGIPERFSGSPDSPFGTTATLTITSVEAGDEADYYCHIWDSRVPTKWVFGGGTTLTVLGQPKAAPSVTLFPPSSEELQANKATLVCLISDFYPGAVTVAWKADSSPVKAGVETTTPSKQSNNKYAASSYLSLTPEQWKSHKSYSCQVTHEGSTVEKTVAPTECS

SEQ ID NO: 28259 - protein, 232 aa, Artificial Sequence
  source: /note="Description of Artificial Sequence: Synthetic polypeptide"
MAWIPLLLGLLSHCTGSDTSLNPLSLAPGATAKIPCGERSRGSRAVQWYQQKPGQAPTLIIYNNQDRPAGVSERFSGNPDVAIGVTATLTISRVEVGDEGDYYCHYWDSRSPISWIFAGGTQLTVLGQPKAAPSVTLFPPSSEELQANKATLVCLISDFYPGAVTVAWKADSSPVKAGVETTTPSKQSNNKYAASSYLSLTPEQWKSHKSYSCQVTHEGSTVEKTVAPTECS

SEQ ID NO: 28260 - protein, 230 aa, Artificial Sequence
  source: /note="Description of Artificial Sequence: Synthetic polypeptide"
MAWTVLLLGLLSHCTGAVSTFVSVAPGQTARITCGEESLGSRSVIWYQQRPGQAPSLIIYNNNDRPSGIPDRFSGSPGSTFGTTATLTITSVEAGDEADYYCHIWDSRRPTNWVFGEGTTLIVLGQPKAAPSVTLFPPSSEELQANKATLVCLISDFYPGAVTVAWKADSSPVKAGVETTTPSKQSNNKYAASSYLSLTPEQWKSHKSYSCQVTHEGSTVEKTVAPTECS

SEQ ID NO: 28261 - protein, 239 aa, Artificial Sequence
  source: /note="Description of Artificial Sequence: Synthetic polypeptide"
MRLPAQLLGLLMLWVSGSSADTVVTQSPLSLPVTPGEAASMSCSSTQSLRHSNGANYLAWYQHKPGQSPRLLIRLGSQRASGVPDRFSGSGSGTHFTLKISRVEAEDAAIYYCMQGLNRPWTFGKGTKLEIKRTVAAPSVFIFPPSDEQLKSGTASVVCLLNNFYPREAKVQWKVDNALQSGNSQESVTEQDSKDSTYSLSSTLTLSKADYEKHKVYACEVTHQGLSSPVTKSFNRGEC

SEQ ID NO: 28262 - protein, 239 aa, Artificial Sequence
  source: /note="Description of Artificial Sequence: Synthetic polypeptide"
MRLPAQLLGLLMLWVSGSSADTVVTQSPLSLSVTPGEAASMSCTSTQSLRHSNGANYLAWYQHKPGQSPRLLIRLGSQRASGVPDRFSGSGSGTHFTLKISRVEADDAAIYYCMQGLNRPWTFGKGTKLEIKRTVAAPSVFIFPPSDEQLKSGTASVVCLLNNFYPREAKVQWKVDNALQSGNSQESVTEQDSKDSTYSLSSTLTLSKADYEKHKVYACEVTHQGLSSPVTKSFNRGEC

SEQ ID NO: 28263 - protein, 239 aa, Artificial Sequence
  source: /note="Description of Artificial Sequence: Synthetic polypeptide"
MRLPAQLLGLLMLWVSGSSADTVVTQSPLSLPVTPGEAASMSCTSTQSLRHSNGANYLAWYQHKPGQSPRLLIRLGSQRASGVPDRFSGSGSGTHFTLKISRVEPEDAAIYYCMQGLNRPWTFGKGTKLEIKRTVAAPSVFIFPPSDEQLKSGTASVVCLLNNFYPREAKVQWKVDNALQSGNSQESVTEQDSKDSTYSLSSTLTLSKADYEKHKVYACEVTHQGLSSPVTKSFNRGEC

SEQ ID NO: 28264 - protein, 239 aa, Artificial Sequence; identical to SEQ ID NO: 27009
  source: /note="Description of Artificial Sequence: Synthetic polypeptide"

SEQ ID NO: 28265 - protein, 112 aa, Artificial Sequence
  source: /note="Description of Artificial Sequence: Synthetic polypeptide"
EIVLTQSPGTQSLSPGERATLSCRASQSVGNNKLAWYQQRPGQAPRLLIYGASSRPSGVADRFSGSGSGTDFTLTISRLEPEDFAVYYCQQYGQSLSTFGQGTKVEVKLVPR

SEQ ID NO: 28266 - protein, 230 aa, Artificial Sequence
  source: /note="Description of Artificial Sequence: Synthetic polypeptide"
MAWALLLLTLLTQGTGAWAQSALTQPPSASGSPGQSITISCTGTSNNFVSWYQQHAGKAPKLVIYDVNKRPSGVPDRFSGSKSGNTASLTVSGLQTDDEAVYYCGSLVGNWDVIFGGGTKLTVLGQPKAAPSVTLFPPSSEELQANKATLVCLISDFYPGAVTVAWKADSSPVKAGVETTTPSKQSNNKYAASSYLSLTPEQWKSHRSYSCQVTHEGSTVEKTVAPTECS

SEQ ID NO: 28267 - protein, 230 aa, Artificial Sequence
  source: /note="Description of Artificial Sequence: Synthetic polypeptide"
MAWALLLLTLLTQGTGAWAQSALTQPPSASGSPGQSITISCTGTSNNFVSWYQQHPAKAPKLVIYGVNKRPSGVPDRFSGSKSGNTASLTVSGLQTDDEAVYYCGSLVGNWDVIFGGGTKLTVLGQPMAAPSVTLFPPSSEELQANKATLVCLISDFYPGAVTVAWKADSSPVKAGVETTTPSKQSNNKYAASSYLSLTPEQWKSHKSYSCQVTHEGSTVEKTVAPTECS

SEQ ID NO: 28268 - protein, 235 aa, Artificial Sequence
  source: /note="Description of Artificial Sequence: Synthetic polypeptide"
MAWALLLLTLLTQGTGSWAQSALTQPPSASGSLGQSLTISCSGTASDIGSWNFVSWYQQFPGRAPNLIIFEVNRRRSGVPDRFSGSKSGNTASLTVSGLRSEDEAEYFCSSLSGRWDIVFGGGTKVTVLGQPKAAPSVTLFPPSSEELQANKATLVCLISDFYPGAVTVAWKADSSPVKAGVETTTPSKQSNNKYAASSYLSLTPEQWKSHKSYSCQVTHEGSTVEKTVAPTECS

SEQ ID NO: 28269 - protein, 235 aa, Artificial Sequence
  source: /note="Description of Artificial Sequence: Synthetic polypeptide"
MAWALLLLTLLTQGTGSWAQSALTQPPSASGSLGQSLTISCSGTGSDIGSWNFVSWYQQFPGRAPNLIIFEVNRRRSGVPDRFSGSKSGNTASLTVSGLRSEDEAEYFCSSLSGRWDIVFGGGTKVTVLGQPKAAPSVTLFPPSSEELQANKATLVCLISDFYPGAVTVAWKADSSPVKAGVETTTPSKQSNNKYAASSYLSLTPEQWKSHRSYSCQVTHEGSTVEKTVAPTECS

SEQ ID NO: 28270 - protein, 230 aa, Artificial Sequence
  source: /note="Description of Artificial Sequence: Synthetic polypeptide"
MAWALLLLTLLTQGTGAWAQSALTQPPSASGSPGQSITISCTGNINNFVSWYQQHPGKAPKLVIYGVNKRPSGVPDRFSGSKSGNAASLTVSGLQTDDEAVYYCGSLAGNWDVVFGGGTKLTVLGQPMAAPSVTLFPPSSEELQANKATLVCLISDFYPGAVTVAWKADSSPVKAGVETTTPSKQSNNKYAASSYLSLTPEQWKSHKSYSCQVTHEGSTVEKTVAPTECS

SEQ ID NO: 28271 - protein, 230 aa, Artificial Sequence
  source: /note="Description of Artificial Sequence: Synthetic polypeptide"
MAWALLLLTLLTQGTGAWAQSALTQPPSASGSPGQSISISCTGTSNRFVSWYQQHPGKAPKLVIYGVNKRPSGVPDRFSGSKSGNTASLTVSGLQTDDEAVYYCSSLVGNWDVIFGGGTKLTVLGQPKAAPSVTLFPPSSEELQANKATLVCLISDFYPGAVTVAWKADSSPVKAGVETTTPSKQSNNKYAASSYLSLTPEQWKSHKSYSCQVTHEGSTVEKTVAPTECS

SEQ ID NO: 28272 - protein, 230 aa, Artificial Sequence
  source: /note="Description of Artificial Sequence: Synthetic polypeptide"
MAWALLLLTLLTQGTGAWAQSALTQPPSASGSPGQSITISCTGTSNNFVSWYQQYPGKAPKLVIYEVNKRPSGVPDRFSGSKSGSTASLTVSGLQADDEGVYYCSSLVGNWDVIFGGGTKLTVLGQPKAAPSVTLFPPSSEELQANKATLVCLISDFYPGAVTVAWKADSSPVKAGVETTTPSKQSNNKYAASSYLSLTPEQWKSHRSYSCQVTHEGSTVEKTVAPTECS

SEQ ID NO: 28273 - protein, 235 aa, Artificial Sequence
  source: /note="Description of Artificial Sequence: Synthetic polypeptide"
MAWALLLLTLLTQGTGSWAQSALTQPPSASGSLGQSVTISCNGTSSDIGGWNFVSWYQQFPGRAPRLIIFEVNKRPSGVPGRFSGSKSGNSASLTVSGLQSDDEGQYFCSSLFGRWDVVFGGGTKLTVLGQPKAAPSVTLFPPSSEELQANKATLVCLISDFYPGAVTVAWKADSSPVKAGVETTTPSKQSNNKYAASSYLSLTPEQWKSHKSYSCQVTHEGSTVEKTVAPTECS

SEQ ID NO: 28274 - protein, 234 aa, Artificial Sequence
  source: /note="Description of Artificial Sequence: Synthetic polypeptide"
METPAQLLFLLLLWLPDSTGEIVMTQSPPTLSVSPGETATLSCRASQNVKNNLAWYQLKPGQAPRLLIFDASSRAGGIPDRFSGSGYGTDFTLTVNSVQSEDFGDYFCQQYEEWPRTFGQGTKVDIKRTVAAPSVFIFPPSDEQLKSGTASVVCLLNNFYPREAKVQWKVDNALQSGNSQESVTEQDSKDSTYSLSSTLTLSKADYEKHKVYACEVTHQGLSSPVTKSFNRGEC

SEQ ID NO: 28275 - protein, 234 aa, Artificial Sequence
  source: /note="Description of Artificial Sequence: Synthetic polypeptide"
METPAQLLFLLLLWLPDTTGEIVMTQSPDTLSVSPGETVTLSCRASQNINKNLAWYQYKPGQSPRLVIFETYSKIAAFPARFVASGSGTEFTLTINNMQSEDVAVYYCQQYEEWPRTFGQGTKVDIKRTVAAPSVFIFPPSDEQLKSGTASVVCLLNNFYPREAKVQWKVDNALQSGNSQESVTEQDSKDSTYSLSSTLTLSKADYEKHKVYACEVTHQGLSSPVTKSFNRGEC

SEQ ID NO: 28276 - protein, 234 aa, Artificial Sequence
  source: /note="Description of Artificial Sequence: Synthetic polypeptide"
METPAQLLFLLLLWLPDTTGEIMMTQSPAILSVSPGDRATLSCRASQSVKNNLAWYQKRPGQAPRLLIFDTSSRASGIPARFSGGGSGTEFTLTVNSMQSEDFATYYCQQYEEWPRTFGQGTKVEIKRTVAAPSVFIFPPSDEQLKSGTASVVCLLNNFYPREAKVQWKVDNALQSGNSQESVTEQDSKDSTYSLSSTLTLSKADYEKHKVYACEVTHQGLSSPVTKSFNRGEC

SEQ ID NO: 28277 - protein, 239 aa, Artificial Sequence
  source: /note="Description of Artificial Sequence: Synthetic polypeptide"
MRLPAQLLGLLMLWIPELAADIVMTQSPVSLSVTLGQPASMSCKSSQTVRQSDGKTFLYWYRQKAGQSPQLLIYEGSNRFSGVSDRISGSGSGTDFTLRISRVEAEDVGVYFCLQTKDFPLTFGGGTRVDIKRTVAAPSVFIFPPSDEQLKSGTASVVCLLNNFYPREAKVQWKVDNALQSGNSQESVTEQDSKDSTYSLSSTLTLSKADYEKHKVYACEVTHQGLSSPVTKSFNRGEC

SEQ ID NO: 28278 - protein, 239 aa, Artificial Sequence [sequence omitted]

SEQ ID NO: 28279 - protein, 239 aa, Artificial Sequence
  source: /note="Description of Artificial Sequence: Synthetic polypeptide"
MRLPAQLLGLLMLWIPEFAADIVMTQTPVSLSVSLGQAASISCSSSESLGRGDGRTYLHWYRQKPGQTPQLLMYEVSTRFSGVSDRFAGSGSRTQFTLKISRVEAEDVGVYYCMQSRDFPITFGGGTRVDLKRTVAAPSVFIFPPSDEQLKSGTASVVCLLNNFYPREAKVQWKVDNALQSGNSQESVTEQDSKDSTYSLSSTLTLSKADYEKHKVYACEVTHQGLSSPVTKSFNRGEC

SEQ ID NO: 28280 - protein, 241 aa, Artificial Sequence
  source: /note="Description of Artificial Sequence: Synthetic polypeptide"
MRLPAQLLGLLMLWIPEVTADIVMTQTPVSVSVTLGQPASMSCKSSQSVRQSDGKTFLYWYRQICAGQSPQLLIYEASICRFSGVSDRFSGSGSGTDFTLKISRVGAEDVGVYFCMQTKDFPLTFGGGTKVDLKRTVAAPSVFIFPPSDEQLKSGTASVVCLLNNFYPREAKVQWKVDNALQSGNSQESVTEQDSKDSTYSLSSTLTLSKADYEKHKVYACEVTHQGLSSPVTKSFNRGEC

SEQ ID NO: 28281 - protein, 239 aa, Artificial Sequence
  source: /note="Description of Artificial Sequence: Synthetic polypeptide"
MRLPAQLLGLLMLWIPEFIADIVMTQTPLSLSVDPGQPASISCKSSQSLRQSNGKTSLYWYQQKPGQSPQLLIFEVSNRFSGVSDRFVGSGSGTDFTLRISRVEAEDVGFYYCMQSKDFPLTFGGGTKVDLNRTVAAPSVFIFPPSDEQLKSGTASVVCLLNNFYPREAKVQWKVDNALQSGNSQESVTEQDSKDSTYSLSSTLTLSKADYEKHKVYACEVTHQGLSSPVTKSFNRGEC

SEQ ID NO: 28282 - protein, 239 aa, Artificial Sequence
  source: /note="Description of Artificial Sequence: Synthetic polypeptide"
MRLPAQLLGLLMLWIPEFTADIVLTQSPLFLSVSPGQPASISCKSSQSLRQSNGKTYLYWYVQKSGQSPQPLIQEVSIRFSGVPGRFAGSGSGTDFTLKISRVEAEDVGVYFCMQSKDFPLTFGGGTKVDLNRTVAAPSVFIFPPSDEQLKSGTASVVCLLNNFYPREAKVQWKVDNALQSGNSQESVTEQDSKDSTYSLSSTLTLSKADYEKHKVYACEVTHQGLSSPVTKSFNRGEC

SEQ ID NO: 28283 - protein, 239 aa, Artificial Sequence
  source: /note="Description of Artificial Sequence: Synthetic polypeptide"
MRLPAQLLGLLMLWIPELTADIVMTQTPVSLSVTLGQPASMSCKSSQSLRQSDGKTFLYWYRQKAGQSPQLLISEASNRFSGVSDRFSGSGSGTDFTLKISRVEAEDVGIYFCMQTKDFPLTFGGGTKVDLKRTVAAPSVFIFPPSDEQLKSGTASVVCLLNNFYPREAKVQWKVDNALQSGNSQESVTEQDSKDSTYSLSSTLTLSKADYEKHKVYACEVTHQGLSSPVTKSFNRGEC

SEQ ID NO: 28284 - protein, 239 aa, Artificial Sequence
  source: /note="Description of Artificial Sequence: Synthetic polypeptide"
MRLPAQLLGLLMLWIPELAADIVMTQSPVSLSVTLGQPASMSCKSSQSVRQSDGKTFLYWYRQKPGQSPQLLIYEGSSRFSGVSDRISGSGSGTDFTLRISRVEAEDAGVYFCLQTKDFPLTFGGGTRVDLKRTVAAPSVFIFPPSDEQLKSGTASVVCLLNNFYPREAKVQWKVDNALQSGNSQESVTEQDSKDSTYSLSSTLTLSKADYEKHKVYACEVTHQGLSSPVTKSFNRGEC

SEQ ID NO: 28285 - protein, 109 aa, Artificial Sequence
  source: /note="Description of Artificial Sequence: Synthetic polypeptide"
SYELTQETGVSVALGRTVTITCRGDSLRSHYASWYQKKPGQAPKLLFYGKNNRPSGIPDRFSGSASGNRASLTISGAQAEDDAEYYCSSRDKSGSRLSVFGGGTKLTVL

SEQ ID NO: 28286 - protein, 109 aa, Artificial Sequence
  source: /note="Description of Artificial Sequence: Synthetic polypeptide"
SYELTQETGVSVALGRTVTITCRGDSLRSHHASWYQKKPGQAPILLFYGKNNRPSGIPDRFSGSASGNRASLTISGAQAEDDAEYYCSSRDKSGSRLSVFGGGTKLIVL

SEQ ID NO: 28287 - protein, 213 aa, Artificial Sequence
  source: /note="Description of Artificial Sequence: Synthetic polypeptide"
EIVLTQSPATLSLSPGERATLSCRASQGLNFVVWYQQKRGQAPRLLIHAPSGRAPGVPDRFSARGSGTEFSLVISSVEPDDFAIYYCQEYSSTPYNFGPGTRVDRKRTVAAPSVFIFPPSDEQLKSGTASVVCLLNNFYPREAKVQWKVDNALQSGNSQESVTEQDSKDSTYSLSSTLTLSKADYEKHKVYACEVTHQGLRSPVTKSFNRGEC

SEQ ID NO: 28288 - protein, 123 aa, Artificial Sequence
  source: /note="Description of Artificial Sequence: Synthetic polypeptide"
EIVLTQSPATLSLSPGERATLSCRASQGLNFVVWYQQKGGQAPRLLIHGPTDRAPGVPDRFSARGSGTEFSLVISSVEPDDFALYYCQEYSSTPYNFGPGTRVDRKRTVAAPSVFIFPPSDEQ

SEQ ID NO: 28289 - protein, 213 aa, Artificial Sequence
  source: /note="Description of Artificial Sequence: Synthetic polypeptide"
EIVLTQSPATLSLSPGERATLSCRASQGLNFVVWYQQKGGQAPRLLIHGPTDRAPGVPDRFSARGSGTEFSLVISSVEPDDFALYYCQEYSSTPYNFGPGTRVERKRTVAAPSVFIFPPSDEQLKSGTASVVCLLNNFYPREAKVQWKVDNALQSGNSQESVTEQDSKDSTYSLSSTLTLSKADYEKHKVYACEVTHQGLRSPVTKSFNRGEC

SEQ ID NO: 28290 - protein, 123 aa, Artificial Sequence
  source: /note="Description of Artificial Sequence: Synthetic polypeptide"
EIVLTQSPATLSLSPGERATLSCRASQGLNFVVWYQQKRGQAPRLLIHGPSHRAPGVPDRFSARGSGTEFSLVISSVEPDDFAIYYCQEYSSTPYNFGPGTRVDRKRTVAAPSVFIFPPSDEQ

SEQ ID NO: 28291 - protein, 123 aa, Artificial Sequence
  source: /note="Description of Artificial Sequence: Synthetic polypeptide"
EIVLTQSPATLSLSPGERATLSCRASQGVNFVVWYQQKRGQAPRLLIYGPSNRAPGVPDRFSARGSGTEFSLVISSVEPDDFALYYCQEYSSTPYNFGPGTRVDRKRTVAAPSVFIFPPSDEQ

SEQ ID NO: 28292 - protein, 125 aa, Artificial Sequence
  source: /note="Description of Artificial Sequence: Synthetic polypeptide"
EIVMTQSPDTLSVSPGERATLSCRASQSVNSNLAWYQQKPGQAPRLLIYGASTRATAVPARFSGSGSGTEFTLTISSLQSEDSAVYYCQQYYQWLSYTFGQGTKLEIKRTVAAPSVFIFPPSDEQ

SEQ ID NO: 28293 - protein, 125 aa, Artificial Sequence
  source: /note="Description of Artificial Sequence: Synthetic polypeptide"
DIQMTQSPSTLAASIGGTVRVSCRASQSITGNWVAWYQQRPGKAPRLLIYRGAALLGGVPSRFSGSAAGTDFTLTIGNLQAEDFGTFYCQQYDTYPGTFGQGTKVEVKRTVAAPSVFIFPPSDEQ

SEQ ID NO: 28294 - protein, 111 aa, Artificial Sequence
  source: /note="Description of Artificial Sequence: Synthetic polypeptide"
EIVLTQSPATLSLSPGERATLSCRASQGVNFVVWYQQKRGQAPRLLIYGNSDRVPGVPDRFSARGSGTEFSLVISSVEPDDFALYYCQEYSSTPYNFGPGTRVDRKRTVAA

SEQ ID NO: 28295 - protein, 126 aa, Artificial Sequence
  source: /note="Description of Artificial Sequence: Synthetic polypeptide"
SEIVLTQSPATLSLSPGERATLSCRASQSINNYLAWYQQKPGQAPRLLIYDASNRATGIPARFSGGGSGTDFTLTISSLEPEDFAVYYCQQRANWRLLTFGGGTKVEIKRTVAAPSVFIFPPSDEQ

SEQ ID NO: 28296 - protein, 126 aa, Artificial Sequence
  source: /note="Description of Artificial Sequence: Synthetic polypeptide"
SEIVMTQSPATLSMSPGERATLSCRASLSVNTNLAWYQQKPGQAPRLLIYGASTRATGIPARFSGSGSGTEFTLTISSLQSEDFALYYCQQYNHWPQTFGQGTKVEIKRTVAAPSVFIFPPSDEQK

SEQ ID NO: 28297 - protein, 124 aa, Artificial Sequence
  source: /note="Description of Artificial Sequence: Synthetic polypeptide"
DIQMTQSPPSLSASVGDRVTITCQASQDINNFLNWYQQKPGKAPRLLIYDASNLESGVSSRFSGSRSGTDFTLTISSLLPEDIATYSCQQYSNLPYTFSQGTKLEIKRTVAAPSVFIFPPSDEQ

SEQ ID NO: 28298 - protein, 123 aa, Artificial Sequence
  source: /note="Description of Artificial Sequence: Synthetic polypeptide"
EIVLTQSPTTLSLSPGERATLSCRASQGVNLVVWYQQKRGQAPRLLIYGPSDRAPGVPDRFSARGSGTEFSLVISSVEPDDFALYYCQEYSSTPYNFGTGTRVDRKRTVAAPSVFIFPPSDEQ

SEQ ID NO: 28299 - protein, 123 aa, Artificial Sequence
  source: /note="Description of Artificial Sequence: Synthetic polypeptide"
EIVLTQSPATLSLSPGERATLSCRASQGLNFVVWYQQKRGQAPRLLIHAPSDRAPGVPDRFSARGSGTDFSLVISSVEPDDFAIYYCQEYSSTPYNFGPGTRVDRKRTVAAPSVFIFPPSDEQ

SEQ ID NO: 28300 - protein, 123 aa, Artificial Sequence
  source: /note="Description of Artificial Sequence: Synthetic polypeptide"
DIQMTQSPSSLSASVGDRVTITCQAGQGIGSSLQWYQQKPGKAPKLLVHGASNLHRGVPSRFSGSGFHTTFSLTISGLQRDDFATYFCAVLEFFGPGTKVEIKRTVAAPSVFIFPPSDEQLKS

SEQ ID NO: 28301 - protein, 112 aa, Artificial Sequence
  source: /note="Description of Artificial Sequence: Synthetic polypeptide"
EIVLTQSPATLSLSPGERATLSCRASQGVNFVVWYQQKRGQAPRLLIYGPSDRAPGVPDRFSARGSGTEFSLVISSVEPDDFALYYCQEYSSTPYNFGTGTRVDRKRTVAAP

SEQ ID NO: 28302 - protein, 220 aa, Artificial Sequence
  source: /note="Description of Artificial Sequence: Synthetic polypeptide"
DIVMSQSPSSLAVSVGEKVTMTCKSSQSLLYSSNQMNYLAWYQQKPGQSPKLLIYWASTRESGVPDRFTGSGSGTDFTLTISSVEAEDLAVYYCQQYHSYPFTFGSGTKLEIKRADAAPTVSIFPPSSEQLTSGGASVVCFLNNFYPKDINVKWKIDGSERQNGVLNSWTDQDSKDSTYSMSSTLTLTKDEYERHNSYTCEATHKTSTSPIVKSFNRNEC

SEQ ID NO: 28303 - protein, 215 aa, Artificial Sequence
  source: /note="Description of Artificial Sequence: Synthetic polypeptide"
EIVLTQSPGTLSLSPGERATFSCRSSHSIRSRRVAWYQHKPGQAPRLVIHGVSNRASGISDRFSGSGSGTDFTLTITRVEPEDFALYYCQVYGASSYTFGQGTKLERKRTVAAPSVFIFPPSDEQLKSGTASVVCLLNNFYPREAKVQWKVDNALQSGNSQESVTEQDSKDSTYSLSSTLTLSKADYEKHKVYACEVTHQGLRSPVTKSFNRGEC

SEQ ID NO: 28304 - protein, 214 aa, Artificial Sequence
  source: /note="Description of Artificial Sequence: Synthetic polypeptide"
DIQMTQSPSSLSASIGDRVTITCRASQDIANYLNWYQKKSGTPPKLLIFGATNLHHGVSPRFSGSGHGTHFSLTITNVQHEDFANYFCQQSFQTVGSFGQGTWVDIRRTVAAPSVFIFPPSDEQLKSGTASVVCLLNNFYPREAKVQWKVDNALQSGNSQESVTEQDSKDSTYSLSSTLTLSKADYEKHKVYACEVTHQGLSSPVTKSFNRGEC

SEQ ID NO: 28305 - protein, 211 aa, Artificial Sequence
  source: /note="Description of Artificial Sequence: Synthetic polypeptide"
EIVLTQSPGTLSLSPGETATLSCRTSQGILSNQLAWHQQRRGQPPRLLIYGGSNRAPGIPERFTGSGSGTDFVLTIKRLERDDFAVYYCQILEFFGRGTRVEMNRTVAAPSVFIFPPSDEQLKSGTASVVCLLNNFYPREAKVQWKVDNALQSGNSQESVTEQDSKDSTYSLSSTLTLSKADYEKHKVYACEVTHQGLSSPVTKSFNRGEC

SEQ ID NO: 28306 - protein, 217 aa, Artificial Sequence
  source: /note="Description of Artificial Sequence: Synthetic polypeptide"
QSVLTQPPSVSAAPGQKVTISCSGSSSTIGNNYVSWYRLLPGTAPKLLIYKNDNRPSGIPDRFSGSKSGTSATLGISGLQTGDEADYYCGTWDTSLSGGGVFGTGTKVTVLGQPKADPTVTLFPPSSEELQANKATLVCLISDFYPGAVTVAWKADSSPVKAGVETTTPSKQSNNKYAASSYLSLTPEQWKSHRSYSCQVTHEGSTVEKTVAPTECS

SEQ ID NO: 28307 - protein, 214 aa, Artificial Sequence
  source: /note="Description of Artificial Sequence: Synthetic polypeptide"
QSVLTQPPSVSAAPGQKVTISCSGSNSNIGNKDVSWYQQIPATAPKLLIYENNKRPSGISDRFSGSKSGTSATLAITGLQTGDEADYYCATWDGRVSVIGTGTNVIVLGQPKADPTVTLFPPSSEELQANKATLVCLISDFYPGAVTVAWKADSSPVKAGVETTTPSKQSNNKYAASSYLSLTPEQWKSHRSYSCQVTHEGSTVEKTVAPTECS

SEQ ID NO: 28308 - protein, 217 aa, Artificial Sequence
  source: /note="Description of Artificial Sequence: Synthetic polypeptide"
QSVLTQPPSVSAAPGQKVTISCSGSSSNIGNNFVSWYQQRPGTAPKILIYENNKRPSETPDRFSGSKSGTSATLAITGLQTADEAEYYCATWSASLSSARVFGTGTRITVLGQPKADPTVTLFPPSSEELQANKATLVCLISDFYPGAVTVAWKADSSPVKAGVETTTPSKQSNNKYAASSYLSLTPEQWKSHRSYSCQVTHEGSTVEKTVAPTECS

SEQ ID NO: 28309 - protein, 217 aa, Artificial Sequence
  source: /note="Description of Artificial Sequence: Synthetic polypeptide"
QPVLTQPPSVSAAPGQKVTISCSGSSSNIGNNFVSWYQQRPGTAPSLLIYETNKRPSGIPDRFSGSKSATSATLAITGLQTGDEADYYCATWAASLTSARVFGTGTKVIVSGQPKADPTVTLFPPSSEELQANKATLVCLISDFYPGAVTVAWKADSSPVKAGVETTTPSKQSNNKYAASSYLSLTPEQWKSHRSYSCQVTHEGSTVEKTVAPTECS

SEQ ID NO: 28310 - protein, 214 aa, Artificial Sequence
  source: /note="Description of Artificial Sequence: Synthetic polypeptide"
QSALTQPPSVSAAPGQKVTISCSGNIGNNYVSWYQQVPGTAPKLLIYENNKRPSGIPDRFSGSKSGTSATLVITGLQTGDEADFYCGTWGGSLRTGGVLGTGTRVTVLGQPKADPTVTLFPPSSEELQANKATLVCLISDFYPGAVTVAWKADSSPVKAGVETTTPSKQSNNKYAASSYLSLTPEQWKSHRSYSCQVTHEGSTVEKTVAPTECS

SEQ ID NO: 28311 - protein, 214 aa, Artificial Sequence
  source: /note="Description of Artificial Sequence: Synthetic polypeptide"
QSVLTQPPSVSAAPGQKVTISCSGSTSKIGQNSVSWYQQLPGTAPKLLIYENDRRPSGTPDRFSGSKSGTSATLAITGLQTGDEAEYYCETWDGSGGVFGTGTKVTVLGQPKADPTVTLFPPSSEELQANKATLVCLISDFYPGAVTVAWKADSSPVKAGVETTTPSKQSNNKYAASSYLSLTPEQWKSHRSYSCQVTHEGSTVEKTVAPTECS

SEQ ID NO: 28312 - protein, 217 aa, Artificial Sequence
  source: /note="Description of Artificial Sequence: Synthetic polypeptide"
QAVLTQPPSVSAAPGQNVTISCSGSGSNIGNNFVSWYQQRPGTAPKLLIYESNKRPSGIPDRFSGSKSGTSATLAITGLQTGDEAYYYCATWAARLNSARVFGTGTMVTVLGQPKADPTVTLFPPSSEELQANKATLVCLISDFYPGAVTVAWKADSSPVKAGVETTTPSKQSNNKYAASSYLSLTPEQWKSHRSYSCQVTHEGSTVEKTVAPTECS

SEQ ID NO: 28313 - protein, 217 aa, Artificial Sequence
  source: /note="Description of Artificial Sequence: Synthetic polypeptide"
QSALTQPPSVSAAPGQKVTISCSGNSSNIGNNFVSWYQQVPGTAPKLLLYETYRRPSGIPDRFSGSKSGTSATLAITGLQTGDEADYYCTVWGVRKGVGAVFGTGTKVTVLGQPKADPTVTLFPPSSEELQANKATLVCLISDFYPGAVTVAWKADSSPVKAGVETTTPSKQSNNKYAASSYLSLTPEQWKSHRSYSCQVTHEGSTVEKTVAPTECS

SEQ ID NO: 28314 - protein, 217 aa, Artificial Sequence
  source: /note="Description of Artificial Sequence: Synthetic polypeptide"
QSALTQPPSVSAAPGQKVTISCSGNSSNIGNNFVSWYQQLPGTAPKLLIYENNRRPSGIPDRFSGSKSGTSATLAISGLQTGDEADYWCAVWGVRRGAGAVFGAGTKVTVLGQPKADPTVTLFPPSSEELQANKATLVCLISDFYPGAVTVAWKADSSPVKAGVETTTPSKQSNNKYAASSYLSLTPEQWKSHRSYSCQVTHEGSTVEKTVAPTECS

SEQ ID NO: 28315 - protein, 217 aa, Artificial Sequence
  source: /note="Description of Artificial Sequence: Synthetic polypeptide"
QSVLTQPPSVSAAPGQKVTISCSGSSSNIGDNYVSWYQHLPGTAPKLLIYENTRRPSGIPDRFSGSKSGTSATLAITGLQTGDEADYYCGTWDVRPNRGAVFGTGTKVTVLGQPKADPTVTLFPPSSEELQANKATLVCLISDFYPGAVTVAWKADSSPVKAGVETTTPSKQSNNKYAASSYLSLTPEQWKSHRSYSCQVTHEGSTVEKTVAPTECS

SEQ ID NO: 28316 - protein, 213 aa, Artificial Sequence
  source: /note="Description of Artificial Sequence: Synthetic polypeptide"
QSVLTQPPSVSAAPGQNVTISCSGPPSHIEKNDVSWYQRLPGMAPKMVIYESKRRPLGIPVRFSASRSGSSATLVITGLQTADEADYYCGTWDGRMNFGTGTTVSVLGQPKADPTVTLFPPSSEELQANKATLVCLISDFYPGAVTVAWKADSSPVKAGVETTTPSKQSNNKYAASSYLSLTPEQWKSHRSYSCQVTHEGSTVEKTVAPTECS

SEQ ID NO: 28317 - protein, 213 aa, Artificial Sequence
  source: /note="Description of Artificial Sequence: Synthetic polypeptide"
QSVLTQPPSVSTAPGQTVTVSCSGGTSNTGNNFVSWYQHLPGTAPKLLIYENNKRPLGVPDRFSGAKSGTSATLAITGLQTGDEGDYYCATWSGSLNIGTGTKVSVLGQPKADPTVTLFPPSSEELQANKATLVCLISDFYPGAVTVAWKADSSPVKAGVETTTPSKQSNNKYAASSYLSLTPEQWKSHRSYSCQVTHEGSTVEKTVAPTECS

SEQ ID NO: 28318 - protein, 236 aa, Artificial Sequence
  source: /note="Description of Artificial Sequence: Synthetic polypeptide"
MGWSCIILFLVATATGSWAQSVLTQPPSVSAAPGQKVTISCSGNTSNIGNNFVSWYQQRPGRAPQLLIYETDKRPSGIPDRFSASKSGTSGTLAITGLQTGDEADYYCATWAASLSSARVFGTGTQVIVLGQPKVNPTVTLFPPSSEELQANKATLVCLISDFYPGAVTVAWKADSSPVKAGVETTTPSKQSNNKYAASSYLSLTPEQWKSHRSYSCQVTHEGSTVEKTVAPTECS

SEQ ID NO: 28319 - protein, 217 aa, Artificial Sequence
  source: /note="Description of Artificial Sequence: Synthetic polypeptide"
QSALTQPPSVSAAPGQKVSISCSGNNSNIGNNFISWFQQFPGTAPKPLIYETYKRHSGIPDRFSGSKSGTSATLAITGLQTGDEADYYCATWGVRQGVGALFGTGTKVTVLGQPKANPTVTLFPPSSEELQANKATLVCLISDFYPGAVTVAWKADSSPVKAGVETTTPSKQSNNKYAASSYLSLTPEQWKSHRSYSCQVTHEGSTVEKTVAPTECS

SEQ ID NO: 28320 - protein, 217 aa, Artificial Sequence
  source: /note="Description of Artificial Sequence: Synthetic polypeptide"
QSVLTQPPSVSAAPGQKVSISCSGNNSNIGNNFISWFQQFPGTAPKPLIYETYRRHSGIPDRFSGSKSGTSATLAITGLQTGDEADYYCATWGVRQGVGALFGTGTKVTVLGQPKANPTVTLFPPSSEELQANKATLVCLISDFYPGAVTVAWKADSSPVKAGVETTTPSKQSNNKYAASSYLSLTPEQWKSHRSYSCQVTHEGSTVEKTVAPTECS

SEQ ID NO: 28321 - protein, 217 aa, Artificial Sequence
  source: /note="Description of Artificial Sequence: Synthetic polypeptide"
QSVLTQPPSVSAAPGQKVTISCSGSSSNIGNNYVSWYQQLPGTAPKLLIYKNNERPSGIPDRFSGSKSGTSATLGITGLQTGDEADYYCGTWDTSLSAGGVFGTGTKVTVLGQPKANPTVTLFPPSSEELQANKATLVCLISDFYPGAVTVAWKADSSPVKAGVETTTPSKQSNNKYAASSYLSLTPEQWKSHRSYSCQVTHEGSTVEKTVAPTECS

SEQ ID NO: 28322 - protein, 217 aa, Artificial Sequence
  source: /note="Description of Artificial Sequence: Synthetic polypeptide"
QSVLTQPPSVSAAPGQKVTISCSGSSSTIGNNYVSWYQLLPGTAPKLLIYKNDKRPSGIPDRFSGSKSGTSATLGITGLQTGDEADYYCGTWDTSLSAGGVFGTGTKVTVLGQPKANPTVTLFPPSSEELQANKATLVCLISDFYPGAVTVAWKADSSPVKAGVETTTPSKQSNNKYAASSYLSLTPEQWKSHRSYSCQVTHEGSTVEKTVAPTECS

SEQ ID NO: 28323 - protein, 217 aa, Artificial Sequence
  source: /note="Description of Artificial Sequence: Synthetic polypeptide"
QSVLTQPPSVSAAPGQKVTISCSGSSSNIGNNYVSWYQQLPGTAPKLLIYENNKRPSGIPDRFSGSKSGTSATLGITGLQTGDEADYYCGTWDSSLSAGGVFGTGTKVTVLGQPKANPTVTLFPPSSEELQANKATLVCLISDFYPGAVTVAWKADSSPVKAGVETTTPSKQSNNKYAASSYLSLTPEQWKSHRSYSCQVTHEGSTVEKTVAPTECS

SEQ ID NO: 28324 - protein, 499 aa, Artificial Sequence
  source: /note="Description of Artificial Sequence: Synthetic polypeptide"
TSTLPFSPQVSTPRSKFKRISSEFAATMNRGVPFRHLLLVLQLALLPAATQGKKWLGKKGDTVELTCTASQKKSIQFHWKNSNQIKILGNQGSFLTKGPSKLNDRADSRRSLWDQGNFPLIIKNLKIEDSDTYICEVEDQKEEVQLLVFGLTANSDTHLLQGQSLTLTLESPPGSSPSVQCRSPRGKNIQGGKTLSVSQLELQDSGTWTCTVLQNQKKVEFKIDIWLAFQKASGGGGSGGGGSLEAEAAAKEAAAKEAAAKEAAAKALEGGGGSGGGGSDIVMTQSPDSLAVSPGERATIHCKSSQTLLYSSNNRHSIAWYQQRPGQPPKLLLYWASMRLSGVPDRFSGSGSGTDFTLTINNLQAEDVAIYYCHQYSSHPPTFGHGTRVELRRTVAAPSVFIFPPSDEQLKSGTASVVCLLNNFYPREAKVQWKVDNALQSGNSQESVTEQDSKDSTYSLSSTLTLSKADYEKHKVYACEVTHQGLSSPVTKSFNRGEC

SEQ ID NO: 28325 - protein, 479 aa, Artificial Sequence
  source: /note="Description of Artificial Sequence: Synthetic polypeptide"
TSTLPFSPQVSTPRSKFKRISSEFAATMNRGVPFRHLLLVLQLALLPAATQGKKWLGKKGDTVELTCTASQKKSIQFHWKNSNQIKILGNQGSFLTKGPSKLNDRADSRRSLWDQGNFPLIIKNLKIEDSDTYICEVEDQKEEVQLLVFGLTANSDTHLLQGQSLTLTLESPPGSSPSVQCRSPRGKNIQGGKTLSVSQLELQDSGTWTCTVLQNQKKVEFKIDIWLAFQKASLEAEAAAKEAAAKEAAAKEAAAKALEDIVMTQSPDSLAVSPGERATIHCKSSQTLLYSSNNRHSIAWYQQRPGQPPKLLLYWASMRLSGVPDRFSGSGSGTDFTLTINNLQAEDVAIYYCHQYSSHPPTFGHGTRVELRRTVAAPSVFIFPPSDEQLKSGTASVVCLLNNFYPREAKVQWKVDNALQSGNSQESVTEQDSKDSTYSLSSTLTLSKADYEKHKVYACEVTHQGLSSPVTKSFNRGEC

SEQ ID NO: 28326 - protein, 239 aa, Artificial Sequence
  source: /note="Description of Artificial Sequence: Synthetic polypeptide"
METPAQLLFLLLLWLPDTTGDIVMTQSPDSLAVSPGERATIHCKSSQTLLYSSNNRHSIAWYQQRPGQPPKLLLYWASMRLSGVPDRFSGSGSGTDFTLTINNLQAEDVAIYYCHQYSSHPPTFGHGTRVELRRTVAAPSVFIFPPSDEQLKSGTASWCLLNNFYPREAKVQWKVDNALQSGNSQESVTEQDSKDSTYSLSSTLTLSKADYEKHKVYACEVTHQGLSSPVTKSFNRGEC

SEQ ID NO: 28327 - protein, 215 aa, Artificial Sequence
  source: /note="Description of Artificial Sequence: Synthetic polypeptide"
QSVLTQPPSASGTPGQRISISCSGTSSNVENNYVYWYQHLPGTAPKLLIYRNDHRSSGIPDRFSASKSGTSASLAISGLRPEDEGDYYCAAWDDSRGGPDWVFGGGTKLTVLAQPKAAPSVTLFPPSSEELQANKATLVCLISDFYPGAVTVAWKADSSPVKAGVETTTPSKQSNNKYAASSYLSLTPEQWKSHKSYSCQVTHEGSTVEKTVAPT

SEQ ID NO: 28328 - protein, 212 aa, Artificial Sequence
  source: /note="Description of Artificial Sequence: Synthetic polypeptide"
VVMTQSPSTLSASVGDTITITCRASQSIETWLAWYQQKPGKAPKLLIYKASTLKTGVPSRFSGSGSGTEFTLTISGLQFDDFATYHCQHYAGYSATFGQGTRVEIKRTVAAPSVFIFPPSDEQLKSGTASVVCLLNNFYPREAKVQWKVDNALQSGNSQESVTEQDSKDSTYSLSSTLTLSKADYEKHKVYACEVTHQGLSSPVTKSFNRGE

SEQ ID NO: 28329 - protein, 213 aa, Artificial Sequence
  source: /note="Description of Artificial Sequence: Synthetic polypeptide"
AVVMTQSPSTLSASVGDTITITCRASQSIETWLAWYQQKPGKAPKLLIYKASTLKTGVPSRFSGSGSGTEFTLTISGLQFDDFATYHCQHYAGYSATFGQGTRVEIKRTVAAPSVFIFPPSDEQLKSGTASVVCLLNNFYPREAKVQWKVDNALQSGNSQESVTEQDSKDSTYSLSSTLTLSKADYEKHKVYACEVTHQGLSSPVTKSFNRGE

SEQ ID NO: 28330 - protein, 215 aa, Artificial Sequence
  source: /note="Description of Artificial Sequence: Synthetic polypeptide"
NSVLTQSPSSLSASVGDRVTITCQASQDISNYLNWYQHKPGKAPKLLIYTASNLETGVPSRFSGGGSGTHFSFTITSLQPEDAATYFCQQYDNLGDLSFGGGTKVEIKRTVAAPSVFIFPPSDEQLKSGTASVVCLLNNFYPREAKVQWKVDNALQSGNSQESVTEQDSKDSTYSLSSTLTLSKADYEKHKVYACEVTHQGLSSPVTKSFNRGEC

SEQ ID NO: 28331 - protein, 219 aa, Artificial Sequence
  source: /note="Description of Artificial Sequence: Synthetic polypeptide"
DIVMTQSPDSLAVSLGERVTMNCKSSQSLLYSTNQKNYLAWYQQKPGQSPKLLIYWASTRESGVPDRFSGSGSGTDFTLTISSVQAEDVAVYYCQQYYSYRTFGGGTKLEIKRTVAAPSVFIFPPSDEQLKSGTASVVCLLNNFYPREAKVQWKVDNALQSGNSQESVTEQDSKDSTYSLSSTLTLSKADYEKHKVYACEVTHQGLSSPVTKSFNRGEC

SEQ ID NO: 28332 - protein, 219 aa, Artificial Sequence; identical to SEQ ID NO: 28331
  source: /note="Description of Artificial Sequence: Synthetic polypeptide"

SEQ ID NO: 28333 - protein, 102 aa, Artificial Sequence
  source: /note="Description of Artificial Sequence: Synthetic polypeptide"
EIVLTQSPGTLSLSPGETASLSCTAASYGHMTWYQKKPGQPPKLLIFATSKRASGIPDRFSGSQFGKQYTLTITRMEPEDFARYYCQQLEFFGQGTRLEIRR

SEQ ID NO: 28334 - protein, 213 aa, Artificial Sequence
  source: /note="Description of Artificial Sequence: Synthetic polypeptide"
SYELTQPPSVSVSPGQTATITCSGDKVASKNVCWYQVKPGQSPEVVMYENYKRPSGIPDRFSGSKSGSTATLTIRGTQATDEADYYCQVWDSFSTFVFGSGTQVTVLGQPKAAPSVTLFPPSSEELQANKATLVCLISDFYPGAVTVAWKADSSPVKAGVETTTPSKQSNNKYAASSYLSLTPEQWKSHRSYSCQVTHEGSTVEKTVAPTECS

SEQ ID NO: 28335 - protein, 96 aa, Artificial Sequence
  source: /note="Description of Artificial Sequence: Synthetic polypeptide"
SSELTQDPAVSVALGQTVRITCQGDSLRSYYASWYQQKPGQAPVLVIYGKNNRPSGIPDRFSGSSSGNTASLTISGAQAEDEADYYCNSRDSSGNH

SEQ ID NO: 28336 - protein, 117 aa, Artificial Sequence
  source: /note="Description of Artificial Sequence: Synthetic polypeptide"
DIQMTQSPSTLSASIGDTVRISCRASQSITGNWLAWYHQRPGKAPRLLIYRGSRLLGGVPSRFSGSAAGTDFTLTIANLQAEDFGTFYCQQYDTYPGTFGQGTKVEVKRTVAAPSVF

SEQ ID NO: 28337 - protein, 117 aa, Artificial Sequence
  source: /note="Description of Artificial Sequence: Synthetic polypeptide"
DIQMTQSPSTLSASTGDTVRISCRASQSITGNWVAWYQQRPGKAPRLLIYRGAALLGGVPSRFRGSAAGTDFTLTIGNLQAEDFGTFYCQQYDTYPGTFGQGTKVEVKRTVAAPSVF

SEQ ID NO: 28338 - protein, 117 aa, Artificial Sequence
  source: /note="Description of Artificial Sequence: Synthetic polypeptide"
DIQMTQSPSTLSASIGDTVMISCRASQSITGGWLAWYHQRPGKAPRLLIYRGSKLLGGVPSRFSGSAAGTGFTLTIGNLQAEDFGTFYCQQYDTYPGTFGQGTKVEVKRTVAAPSVF

SEQ ID NO: 28339 - protein, 117 aa, Artificial Sequence
  source: /note="Description of Artificial Sequence: Synthetic polypeptide"
DIQMTQSPSTLSASIGDTVRISCRASQSITGGWLAWYHQRPGKAPRLLIYRGSRLLGGVPSKFSGSAAGTDFTLTIANLQAEDFGTFYCQQYDTYPGTFGQGTKVEVKRTVAAPSVF

SEQ ID NO: 28340 - protein, 117 aa, Artificial Sequence
  source: /note="Description of Artificial Sequence: Synthetic polypeptide"
DIQMTQSPSTLSASIGDTVRISCRASQSITGNWVAWYHQRPGKAPRLLIYRGAALLGGVPSRFSGSAAGTDFTLTIGNLQAEDFGTFYCQQYDTYPGTFGQGTKVEVKRTVAAPSVF

SEQ ID NO: 28341 - protein, 117 aa, Artificial Sequence
  source: /note="Description of Artificial Sequence: Synthetic polypeptide"
DIQMTQSPSTLSASIGDTVRISCRASQSITGGWLAWYHQRPGKAPRLLIYRGSRLVGGVPSRFSGSAAGTDFTLTIGNLQAEDFGTFYCQQYDTYPGTFGQGTKVEVKRTVAAPSVF

SEQ ID NO: 28342 - protein, 117 aa, Artificial Sequence
  source: /note="Description of Artificial Sequence: Synthetic polypeptide"
DIQMTQSPSTLSASIGDTVRISCRASQSITGGWVAWYHQRPGKAPRLLIYRGSRLLGGVPSRFSGSAAGTDFTLTIGNLQAEDFGTFYCQQYDTYPGTFGQGTKVEVKRTVAAPSVF

SEQ ID NO: 28343 - protein, 117 aa, Artificial Sequence
  source: /note="Description of Artificial Sequence: Synthetic polypeptide"
DIQMTQSPSTLSASVGGTVRISCRASQSITGGWLAWYHQRPGKAPRLLIYRGSRLLGGVPSRFSGSAAGTDFTLTIANLQAEDFGTFYCQQYDTYPGTFGQGTKVEVKRTVAAPSVF

SEQ ID NO: 28344 - protein, 117 aa, Artificial Sequence
  source: /note="Description of Artificial Sequence: Synthetic polypeptide"
DIQMTQSPSTLSASVGDTVRISCRASQSITGGWLAWYHQRPGKAPRLLIYRGSRLLGGVPSRFSGSAAGADFTLTIANLQAEDFGTFYCQQYDTYPGTFGQGTKVEVKRTVAAPSVF

SEQ ID NO: 28345 - protein, 117 aa, Artificial Sequence
  source: /note="Description of Artificial Sequence: Synthetic polypeptide"
DIQMTQSPSTLSASVGDTVRISCRASQSITGGWLAWYHQRPGKAPRLLIYRGSRLLGGVPSRFSGSAAGTGFTLTIANLQAEDFGTFYCQQYDTYPGTFGQGTKVEVKRTVAAPSVF

SEQ ID NO: 28346 - protein, 124 aa, Artificial Sequence
  source: /note="Description of Artificial Sequence: Synthetic polypeptide"
PATLAVSPGERATISCKSSQNLLYSANNQHSLAWYQQRPGQPPKLLLYWASTRLSGVPDRFSGSGSGTDFTLTISNLQAEDVAVYYCQQYYSPPPTFGQGTKVEIRRTVAAPSVFIFPPSDEQL

SEQ ID NO: 28347 - protein, 115 aa, Artificial Sequence
  source: /note="Description of Artificial Sequence: Synthetic polypeptide"
TLSASVGDRVTITCRASQSINNYLNWYQQKPGKAPKLLIYAASSLQSGVPSRFSGSGSGTDFTLTISSLQPEDFVTYYCQQTYSNPRMFGQGTKVEIKRTVAAPSVFIFPPSDEQ

SEQ ID NO: 28348 - protein, 118 aa, Artificial Sequence; identical to SEQ ID NO: 27615
  source: /note="Description of Artificial Sequence: Synthetic polypeptide"

SEQ ID NO: 28349 - protein, 126 aa, Artificial Sequence
  source: /note="Description of Artificial Sequence: Synthetic polypeptide"
RGPVTLAVSLGERATITCKSSQSVLVHSNNKNYLSWYQQKPGQPPKLLIYWASTRESGVPERFSGSGSGTDFTLSISSLQAEDVAVYYCHQYFSTPRTFGQGTKVEIKGTVAAPSVFIFPPSDEQL

SEQ ID NO: 28350 - protein, 129 aa, Artificial Sequence
  source: /note="Description of Artificial Sequence: Synthetic polypeptide"
QSALTQTPSVSGAPGQRVTISCSGGPSNVGGNYVYWYQQFPGAAPKLLIRRDDQRPSGVPDRFSGSKSGNSASLAISGLRLDDEAYYFCATYDSGWSIRLFGGGTRLTVLSQPKAAPSVTLFPPSSEEL

SEQ ID NO: 28351 - protein, 125 aa, Artificial Sequence
  source: /note="Description of Artificial Sequence: Synthetic polypeptide"
SQAVVTQPPSVSGAPGQRVTISCSGGPSNVGGNLVYWYKQFPGTAPKLLIRRDDQRPSGVPDRFSGSKSGNSASLAISGLRPDDEAFYFCATYDSHGSIRLFGGGTLLTVLSQPKAAPSVTLFPP

SEQ ID NO: 28352 - protein, 129 aa, Artificial Sequence
  source: /note="Description of Artificial Sequence: Synthetic polypeptide"
QTVVTQPPSASGTPGQRVTISCSGGGSNIGGNLVSWYQHFPGAAPKLLIYRNDQRPSGVPDRFSGSKSGTSASLTISGLRSDDEATYFCAAYDCTLSLRLFGGGTTLNVLSQPKAAPSVTLFPPSSEEL

SEQ ID NO: 28353 - protein, 129 aa, Artificial Sequence
  source: /note="Description of Artificial Sequence: Synthetic polypeptide"
QSALTQPPSVSGTPGQNVTISCSGGGSNVGGNLVSWYQHFPGAAPKLLIHRDNQRPSGVPDRFSVLKSGNSASLAISGPRSDDEAFYFCAVYDSSLSLGLFGGGTKLTVLSQPKAAPSVTLFPPSSEEL

SEQ ID NO: 28354 - protein, 130 aa, Artificial Sequence
  source: /note="Description of Artificial Sequence: Synthetic polypeptide"
QSALTQPPSASGAPGQRVTISCSGGPSNVGGNYVYWYRQFPGTAPTLLILRDDQRPSGVPDRFSASKSGNSASLAISGLRPDDEGFYFCATYDSDGSIRLFGGGTALTVLSQPKAAPSVTLFPPSSEELK

SEQ ID NO: 28355 - protein, 119 aa, Artificial Sequence
  source: /note="Description of Artificial Sequence: Synthetic polypeptide"
NFMLTQAPSASGAPGQRVTISCSGGPSNVGGNYVYWYRQYPGTAPKLLILRDDQRPSGVPDRFSASKSGNSASLAISELRPDDEAFYFCATYDSDGSIRLFGGGTALTVLSQPKAAPSV

SEQ ID NO: 28356 - protein, 124 aa, Artificial Sequence
  source: /note="Description of Artificial Sequence: Synthetic polypeptide"
NFMLTQPPSASGAPGQRVTISCSGGPSNVGGNYVYWYRQFPGTAPNLLILRDDQRPSGVPDRFSASKSGNSASLAISGLRPDDEAFYFCATYDSDGSIRLFGGGTTLTVLSQPKAAPSVTLFPP

SEQ ID NO: 28357 - protein, 118 aa, Artificial Sequence
  source: /note="Description of Artificial Sequence: Synthetic polypeptide"
QSVLTQPPSASGAPGQRVTISCSGGPSNVGGNYVYWYRQFPGTAPKLLILRDDQRPSGVPDRFSASKSGNSASLAISGLRPDDEAFYFCATYDSDGSIRLFGGGTALTVLSQPKAAPS

SEQ ID NO: 28358 - protein, 120 aa, Artificial Sequence
  source: /note="Description of Artificial Sequence: Synthetic polypeptide"
QLVLTQPPSVSGTPGQNVTISCSGGGSHVGGNLVSWYQHFPGAAPKLLIHRDNQRPSGVPDRFSALKSGNSASLAISGLRSDDEAFYFCAVYDSSLSLGLFGGGTKLTVLSQPKAAPSVT

SEQ ID NO: 28359 - protein, 131 aa, Artificial Sequence
  source: /note="Description of Artificial Sequence: Synthetic polypeptide"
RTVVTQPPSVSGAPGQRVTISCTGSSSNIGAGYDVHWYQQLPGTAPKLLIYGNSNRPSGVPDRFSGSKSGTSASLAITGLQAEDEADYYCQSYDSSLSGSGVFGTGTKVTVLGQPKANPTVTLFPPSSEEL

SEQ ID NO: 28360 - protein, 128 aa, Artificial Sequence
  source: /note="Description of Artificial Sequence: Synthetic polypeptide"
QSALTQPPSASGAPGQRVTISCSGGPSNVGGNYVYWYRQFPGTAPKLLILRDDQRPSGVPDRFSASKSGNSASLAISGLRPDDEALYFCATYDSDGSIRLFGGGTALTVLSQPKAAPSVTLFPPGWEE

SEQ ID NO: 28361 - protein, 124 aa, Artificial Sequence
  source: /note="Description of Artificial Sequence: Synthetic polypeptide"
QPVLTQPPSASGAPGQRVTISCSGGPSNVGGNYVYWYRQFPGTAPNLLILRDDQRPSGVPDRFSASKSGNSASLAITGLRPDDEAFYFCATYDSDGSIRLFGGGTALTVLSQPKAAPSVTLFPP

SEQ ID NO: 28362 - protein, 122 aa, Artificial Sequence
  source: /note="Description of Artificial Sequence: Synthetic polypeptide"
QSALTQPPSASGAPGQRVTISCSGGPSNVGGNYVYWYRQFPGTAPNLLILRDDQRPSGVPDRFSASKSGNSASLAISGLRPDDEAFYFCATYDSDGSIRLFGGGTTLTVLSQPKAAPSVTLF

SEQ ID NO: 28363 - protein, 129 aa, Artificial Sequence; identical to SEQ ID NO: 28350
  source: /note="Description of Artificial Sequence: Synthetic polypeptide"

SEQ ID NO: 28364 - protein, 123 aa, Artificial Sequence
  source: /note="Description of Artificial Sequence: Synthetic polypeptide"
SEIVLTQSPATLSLSPGESATLSCRASQSLSSSLAWYQQKPGQAPRLLIYDTSDRATGIPARFSGRGSGTDFTLTISSLEPEDFAVYYCQQRSNWAITFGQGTRLEIKRTVAAPSVFIFPPSD

SEQ ID NO: 28365 - protein, 129 aa, Artificial Sequence
  source: /note="Description of Artificial Sequence: Synthetic polypeptide"
QLVLTQPPSVSATPGQTVTISCSGSGSNVGGNHVYWYRQLPGAAPTLVISKTDHRPSRVPDRFSGSKSGNSASLAISGLRPDDEAAYFCATYDTGLSLRLFGGGTRLAVLSQPKAAPSVTLFPPSSEEL

SEQ ID NO: 28366 - protein, 129 aa, Artificial Sequence
  source: /note="Description of Artificial Sequence: Synthetic polypeptide"
QSALTQPPATSGTPGQRVTISCSGGGSNVGGNLVSWYQQFPGAAPKLILHRDGQRPSGVPDRFSASKSGTSASLTISGLRSDDEATYFCAAFDSALSLPLFGGGTKLTVLSQPKAAPSVTLFPPSSEEL

SEQ ID NO: 28367 - protein, 129 aa, Artificial Sequence
  source: /note="Description of Artificial Sequence: Synthetic polypeptide"
QSVLTQVLSVSGTPGQRVIISCSGTSSNVGGNLVSWYQHLPGAAPRLLIHRDDQRPSGVPDRFSGSKSGNSASLVISGLRSDDEADYFCGAYDSTFSLPVFGGGTRLTVLSQPKAAPSVTLFPPSSEEL

SEQ ID NO: 28368 - protein, 128 aa, Artificial Sequence
  source: /note="Description of Artificial Sequence: Synthetic polypeptide"
NFMLTQPPSVSATPGQTVTISCSGSGSNVGGNHVYWYRQLPGAAPTLVISKTDHRPSRVPDRFSGSKSGNSASLAISGLRPDDEAVYFCATYDTGLSLRLFGGGTRLTVLSQPKAAPSVTQFPPSSEE

SEQ ID NO: 28369 - protein, 129 aa, Artificial Sequence
  source: /note="Description of Artificial Sequence: Synthetic polypeptide"
QSALTQPPSVSATPGQTVTISCSGSGSNVGGNHVYWYRQLPGAAPTLLISKTNHRPSQVPDRFSASKSGNSASLAISGLRPDDEADYFCGTYDTSLSLRLFGGGTRLTVLSQPKAAPSVTLFPPSSEEL

SEQ ID NO: 28370 - protein, 129 aa, Artificial Sequence
  source: /note="Description of Artificial Sequence: Synthetic polypeptide"
QSALTQPPSASGTPGQRVTISCSGGGSNIGGNLVSWYQHFPGTAPKLLIYRNDQRPSGVPDRFSGSKSGTSASLTISGLRSDDEATYFCAAYDSSLSLRLFGGGTTLNVLSQPKAAPSVTLFPPSSEEL

SEQ ID NO: 28371 - protein, 129 aa, Artificial Sequence
  source: /note="Description of Artificial Sequence: Synthetic polypeptide"
QSALTQPPSVSGTPGQNVTISCSGGGSDVGGNLVSWYQHFPGAAPKLLIHRDNQRPSGVPDRFSALKSGNSASLAISGLRSDDEAFYFCAVYDSSLSLGLFGGGTKLTVLSQPKAAPSVTLFPPSSEEL

SEQ ID NO: 28372 - protein, 129 aa, Artificial Sequence
  source: /note="Description of Artificial Sequence: Synthetic polypeptide"
QAVVTQPPSVSATPGQTVTISCSGSGSNVGGNHVYWYRQLPGAAPTLLISKTNRRPSQVPDRFSGSKSGNSASLAISGLRPDDEADYFCATYDTDLSLRLFGGGTRLTVLSQPKAAPSVTLFPPSSEEL

SEQ ID NO: 28373 - protein, 120 aa, Artificial Sequence
  source: /note="Description of Artificial Sequence: Synthetic polypeptide"
QSALTQPPAASGAPGQRVTISCSGGGSNVGGNLVSWYQQFPGAAPKLILHRDGQRPSGVPDRFSASKSGTSASLTISGLRSDDEATYFCAAYDSAVSLPVFGGGTKLTVLSQPKAAPLVT

SEQ ID NO: 28374 - protein, 128 aa, Artificial Sequence
  source: /note="Description of Artificial Sequence: Synthetic polypeptide"
NFMLTQPPSASGTPGQRVTISCSGGGSNIGGNLVSWYQHFPGAAPKLLIYRNDQRPSGVPDRFSGSKSGTSASLAISGLRSDDKATYFCAAYDSTLSLRLFGGGTTLTVLSQPKAAPSVTLFPPSSEE

SEQ ID NO: 28375 - protein, 127 aa, Artificial Sequence
  source: /note="Description of Artificial Sequence: Synthetic polypeptide"
QSVLTQVLSVSGTPGQRVIISCSGTSSNVGGNLVSWYQHLPGAAPRLLIHRDDQRPSGVPDRFSGSKSGNSASLVISGLRSDDEADYFCAAYDSTFSLPVFGGGTRLTVLSQPKAAPSVTLFPPSSE

SEQ ID NO: 28376 - protein, 129 aa, Artificial Sequence
  source: /note="Description of Artificial Sequence: Synthetic polypeptide"
QSALTQPPSVSATPGQTVTISCSGSGSNVGGNHVYWYRQLPGAAPTLLISKTDHRPSRVPDRFSASKSGNSASLAISGLRPDDEAIYFCATYDTGLSLRLFGGGTRLTVLSQPKAAPSVTLFPPSSEEL

SEQ ID NO: 28377 - protein, 129 aa, Artificial Sequence
  source: /note="Description of Artificial Sequence: Synthetic polypeptide"
QSALTRTPSVSGAPGQRVTISCSGGPSNVGGNYVYWYQQFPGAAPKLLIRRDDQRPSGVPDRFSGSKSGNSASLAISGLRLDDEAYYFCATYDSGWSIRLFGGGTRLTVLSQPKAAPSVTLFPPSSEEL

SEQ ID NO: 28378 - protein, 115 aa, Artificial Sequence
  source: /note="Description of Artificial Sequence: Synthetic polypeptide"
QSALTQAPSASGTPGQRVTISCSGGGSNIGGNLVSWYQHFPGAAPKLLIYRNDQRPSGVPDRFSASKSGTSASLAISGLRSDDEATYFCAAYDSTLSLRLFGGGTTLAVLSQPKA

SEQ ID NO: 28379 - protein, 129 aa, Artificial Sequence
  source: /note="Description of Artificial Sequence: Synthetic polypeptide"
NFMLTQPPSVSGAPGQRVTISCSGGPSNVGGNLVYWYKQFPGTAPKLLIRRDDQRPSGVPDRFSGSKSGNSASLAISGLRPDDEAFYFCATYDSHGSIRLFGGGTLLTVLSQPKAAPSVTLFPPSSEEL

SEQ ID NO: 28380 - protein, 129 aa, Artificial Sequence
  source: /note="Description of Artificial Sequence: Synthetic polypeptide"
QLVLTQPPSVSGAPGQRVTISCSGGPSNVGGNLVYWYKQFPGTAPKLLIRRDDQRPSGVPDRFSGSKSGNSASLTISGLRPDDEAFYFCATYDSQGSTRLFGGGTVLTVLSQPKAAPSVTLFPPSSEEL

SEQ ID NO: 28381 - protein, 128 aa, Artificial Sequence
  source: /note="Description of Artificial Sequence: Synthetic polypeptide"
QSALTQPPSVSGAPGQRVTISCSGGPSNVGGNYVYWYRQFPGTAPKLLILRDDQRPSGVPDRFSASKSGNSASLAISGLRPDDEAFYFCATYDSQGSFRVFGGGTALTVLSQPKAAPSVTLYPPSSEE

SEQ ID NO: 28382 - protein, 129 aa, Artificial Sequence
  source: /note="Description of Artificial Sequence: Synthetic polypeptide"
NFMLTQPPSASGAPGQRVTISCSGGPSNVGGNYVYWYRQFPGTAPNLLILRDDQRPSGVPDRFSASKSGNSASLAISGLRPDDEAFYFCATYDSDGSIRLFGGGTTLTVLSQPKAAPSVTLFPPSSEEL

SEQ ID NO: 28383 - protein, 123 aa, Artificial Sequence
  source: /note="Description of Artificial Sequence: Synthetic polypeptide"
QVLSVSGTPGQRVIISCSGTSSNVGGNLVSWYQHLPGAAPRLLIHRDDQRPSGVPDRFSGSKSGNSASLVISGLRSDDEADYFCAAYDSTFSLPVFGGGTRLTVLSQPKAAPSVTLYAPSSEE

SEQ ID NO: 28384 - protein, 117 aa, Artificial Sequence
  source: /note="Description of Artificial Sequence: Synthetic polypeptide"
PVTLSASVGDRVTITCRASEDISKYLNWYQHKPGKAPKLLIYTASSLETGVPSRFSGSGSGTDFSLTISSLQPDDFATYYCQQSYTSSVTFGQGTRVEVKRTVAAPSVFIFPPSDEQ

SEQ ID NO: 28385 - protein, 212 aa, Artificial Sequence
  source: /note="Description of Artificial Sequence: Synthetic polypeptide"
QMTQSPSSVSASVGDRVTITCRASQGISSWLAWYQQKPGKAPKLLINAASSLQSGVPSRFSGSGSGTDFTLTISSLQPEDFATYYCQQANSFPLTFGGGTKVEIKRTVAAPSVFIFPPSDEQLKSGTASVVCLLNNFYPREAKVQWKVDNALQSGNSQESVTEQDSKDSTYSLSSTLTLSKADYEKHKVYACEVTHQLLSSPVTKSFNRGEC

SEQ ID NO: 28386 - protein, 214 aa, Artificial Sequence
  source: /note="Description of Artificial Sequence: Synthetic polypeptide"
TLTQSPTTLSASPGERVILSCRASQSVSSSHLAWYQQRPGQTPRLLIYSSSSRAAGIPDRFSGSGSGTDFTLTISRLEPEDFAVYYCQNQGFSPRFFFGPGTTVDMKRTVAAPSVFIFPPSDEQLKSGTASVVCLLNNFYPREAKVQWKVDNALQSGNSQESVTEQDSKDSTYSLSSTLTLSKADYEKHKVYACEVTHQLLSSPVTKSFNRGEC

SEQ ID NO: 28387 - protein, 212 aa, Artificial Sequence
  source: /note="Description of Artificial Sequence: Synthetic polypeptide"
QMTQSPSFLSASVGDRVSITCRASQDIQKFLAWYQLTPGDAPKLLMYSASTLQSGVPSRFSGSGSGTEFTLTISGLQPEDFATYYCQHLKRYPYTFGQGTKLEISRTVAAPSVFIFPPSDEQLKSGTASVVCLLNNFYPREAKVQWKVDNALQSGNSQESVTEQDNKDSTYSLSSTLTLSKADYEKHKVYACEVTHQLLSSPVTKSFNRGEC

SEQ ID NO: 28388 - protein, 210 aa, Artificial Sequence
  source: /note="Description of Artificial Sequence: Synthetic polypeptide"
TQSPGTLSLSPGERATLSCRASHSVSRAYLAWYQQKPGQAPRLLIYGTSSRATGIPDRFSGSGSGTDFTLTISRLEPEDFAVYYCQQYGGSPWFGQGTKVELKRTVAAPSVFIFPPSDEQLKSGTASVVCLLNNFYPREAKVQWKVDNALQSGNSQESVTEQDSKDSTYSLSSTLTLSKADYEKHKVYACEVTHQLLSSPVTKSFNRGEC

SEQ ID NO: 28389 - protein, 235 aa, Artificial Sequence
  source: /note="Description of Artificial Sequence: Synthetic polypeptide"
QVQLVQSGAEVKKPGESLKISCKVSGYNFASEWIGWVRQMPGKGLEWMGIIYPGDSDTKYSPSFQGQVIISADKSINTAYLQWSSLKASDTAIYYCARQNHYGSGSYFYRTAYYYAMDVWGQGTTVTVSSASTKGPSVFPLAPSSKSTSGGTAALGCLVKDYFPEPVTVSWNSGALTSGVHTFPAVLQSSGLYSLSSVVTVPSSSLGTQTYICNVNHKPSNTKVDKKVEPKSCDK

SEQ ID NO: 28390 - protein, 213 aa, Artificial Sequence
  source: /note="Description of Artificial Sequence: Synthetic polypeptide"
DIQLTQSPSSLSASLGDKVTITCRASQHIKKYLNWYQQKPGKAPKLLIYGALNLQSGVPSRFSGRGSGTDFTLTISSLQPEDFATYYCQQSYSTPFTFGPGTKVDIKRTVAAPSVFIFPPSDEQLKSGTASVVCLLNNFYPREAKVQWKVDNALQSGNSQESVTEQDSKDSTYSLSSTLTLSKADYEKHKVYACEVTHQGLSSPVTKSFNRGE

SEQ ID NO: 28391 - protein, 214 aa, Artificial Sequence
  source: /note="Description of Artificial Sequence: Synthetic polypeptide"
DIQMTQSPSTLSASVGDRVTITCRASQTISSWLAWYQQKSGTAPKLLIYKASSIVSGVPSRFSGSGSGTEFTLTITSLQPDDFATYYCQQYNSSPETFGQGTKVEIKRTVAAPSVFIFPPSDEQLKSGTASVVCLLNNFYPREAKVQWKVDNALQSGNSQESVTEQDSKDSTYSLSSTLTLSKADYEKHKLYACEVTHQGLSSPVTKSFNRGEC

SEQ ID NO: 28392 - protein, 219 aa, Artificial Sequence; identical to SEQ ID NO: 28331
  source: /note="Description of Artificial Sequence: Synthetic polypeptide"

SEQ ID NO: 28393 - protein, 216 aa, Artificial Sequence
  source: /note="Description of Artificial Sequence: Synthetic polypeptide"
QSALTQPASVSGSPGQTITISCQGTSSDVGGFDSVSWYQQSPGKAPKVMVFDVSHRPSGISNRFSGSKSGNTASLTISGLHIEDEGDYFCSSLTDRSHRIFGGGTKVTVLGQPKAAPSVTLFPPSSEELQANKATLVCLISDFYPGAVTVAWKADSSPVKAGVETTTPSKQSNNKYAASSYLSLTPEQWKSHKSYSCQVTHEGSTVEKTVAPTECS

SEQ ID NO: 28394 - protein, 216 aa, Artificial Sequence; identical to SEQ ID NO: 28140
  source: /note="Description of Artificial Sequence: Synthetic polypeptide"

SEQ ID NO: 28395 - protein, 215 aa, Artificial Sequence
  source: /note="Description of Artificial Sequence: Synthetic polypeptide"
SYVLTQPPSVSVAPGQTARITCGGNNIGSKSVHWYQQKPGQAPVLVVYDDSDRPSGIPERFSGSNSGNTATLTISRVEAGDEADYYCQVWDSSSDHPWVFGGGTKLTVLGQPKAAPSVTLFPPSSEELQANKATLVCLISDFYPGAVTVAWKADSSPVKAGVETTTPSKQSNNKYAASSYLSLTPEQWKSHRSYSCQVTHEGSTVEKTVAPTECS

SEQ ID NO: 28396 - protein, 211 aa, Artificial Sequence
  source: /note="Description of Artificial Sequence: Synthetic polypeptide"
TFVSVAPGQTARITCGEESLGSRSVIWYQQRPGQAPSLIIYNNNDRPSGIPDRFSGSPGSTFGTTATLTITSVEAGDEADYYCHIWDSRRPTNWVFGEGTTLIVLSQPKAAPSVTLFPPSSEELQANKATLVCLISDFYPGAVTVAWKADSSPVKAGVETTTPSKQSNNKYAASSYLSLTPEQWKSHKSYSCQVTHEGSTVEKTVAPTECS

SEQ ID NO: 28397 - protein, 211 aa, Artificial Sequence
  source: /note="Description of Artificial Sequence: Synthetic polypeptide"
SSMSVSPGETAKISCGKESIGSRAVQWYQQKPGQPPSLIIYNNQDRPAGVPERFSASPDFRPGTTATLTITNVDAEDEADYYCHIYDARGGTNWVFDRGTTLTVLGQPKAAPSVTLFPPSSEELQANKATLVCLISDFYPGAVTVAWKADSSPVKAGVETTTPSKQSNNKYAASSYLSLTPEQWKSHKSYSCQVTHEGSTVEKTVAPTECS

SEQ ID NO: 28398 - protein, 214 aa, Artificial Sequence
  source: /note="Description of Artificial Sequence: Synthetic polypeptide"
SYVSPLSVALGETARISCGRQALGSRAVQWYQHKPGQAPILLIYNNQDRPSGIPERFSGTPDINFGTTATLTISGVEVGDEADYYCHMWDSRSGFSWSFGGATRLTVLSQPKAAPSVTLFPPSSEELQANKATLVCLISDFYPGAVTVAWKADSSPVKAGVETTTPSKQSNNKYAASSYLSLTPEQWKSHKSYSCQVTHEGSTVEKTVAPTECS

SEQ ID NO: 28399 - protein, 216 aa, Artificial Sequence
  source: /note="Description of Artificial Sequence: Synthetic polypeptide"
QSALTQPPSASGSLGQSVTISCNGTSSDIGGWNFVSWYQQFPGRAPRLIIFEVNKRPSGVPGRFSGSKSGNSASLTVSGLQSDDEGQYFCSSLFGRWDVVFGGGTKLTVLGQPKAAPSVTLFPPSSEELQANKATLVCLISDFYPGAVTVAWKADSSPVKAGVETTTPSKQSNNKYAASSYLSLTPEQWKSHRSYSCQVTHEGSTVEKTVAPTECS

SEQ ID NO: 28400 - protein, 214 aa, Artificial Sequence
  source: /note="Description of Artificial Sequence: Synthetic polypeptide"
EIVMTQSPDTLSVSPGETVTLSCRASQNINKNLAWYQYKPGQSPRLVIFETYSKIAAFPARFVASGSGTEFTLTINNMQSEDVAVYYCQQYEEWPRTFGQGTKVDIKRTVAAPSVFIFPPSDEQLKSGTASVVCLLNNFYPREAKVQWKVDNALQSGNSQESVTEQDSKDSTYSLSSTLTLSKADYEKHKVYACEVTHQGLSSPVTKSFNRGEC

SEQ ID NO: 28401 - protein, 215 aa, Artificial Sequence
  source: /note="Description of Artificial Sequence: Synthetic polypeptide"
ELTQSPSSLSASVGDRVTITCRASQGIRDDLGWYQQKPGKAPKRLIYAASNLQSGVPSRFSGGGSGTEFTLTISSLQPEDFATYYCLQHNSYPLTFGGGTKVEIKRTVAAPSVFIFPPSDEQLKSGTASVVCLLNNFYPREAKVQWKVDNALQSGNSQESVTEQDSKDSTYSLSSTLTLSKADYEKHKVYACEVTHQGLSSPVTKSFNKGKVLIL

SEQ ID NO: 28402 - protein, 220 aa, Artificial Sequence
  source: /note="Description of Artificial Sequence: Synthetic polypeptide"
DIQMTQRPDSLSASVGDRVTMSCKSSQSLLNSGDQKNYLTWYQQKPGQPPKLLIYWASTGESGVPDRFSGSGSGTDFTFTISSLQPEDIATYYCQNDYSYPWTFGQGTKVEIKRTVAAPSVFIFPPSDEQLKSGTASVVCLLNNFYPREAKVQWKVDNALQSGNSQESVTEQDSKDSTYSLSSTLTLSKADYEKHKVYACEVTHQGLSSPVTKSFNRGEC

SEQ ID NO: 28403 - protein, 208 aa, Artificial Sequence [sequence omitted]

SEQ ID NO: 28404 - protein, 104 aa, Artificial Sequence
  source: /note="Description of Artificial Sequence: Synthetic polypeptide"
EIVLTQSPGTLSLSPGETAIISCRTSQYGSLAWYQQRPGQAPRLVIYSGSTRAAGIPDRFSGSRWGPDYNLTISNLESGDFGVYYCQQYEFFGQGTKVQVDIKR

SEQ ID NO: 28405 - protein, 101 aa, Artificial Sequence
  source: /note="Description of Artificial Sequence: Synthetic polypeptide"
VLTQSPGTLSLSPGETAIISCRTSQYGSLAWYQQRPGQAPRLVIYSGSTRAAGIPDRFSGSRWGPDYNLTISNLESGDFGVYYCQQYEFFGQGTKVQVDIK

SEQ ID NO: 28406 - protein, 100 aa, Artificial Sequence
  source: /note="Description of Artificial Sequence: Synthetic polypeptide"
VLTQSPGTLSLSPGETAIISCRTSQYGSLAWYQQRPGQAPRLVIYSGSTRAAGIPDRFSGSRWGPDYNLTISNLESGDFGVYYCQQYEDFGQGTKVQVDI

SEQ ID NO: 28407 - protein, 101 aa, Artificial Sequence
  source: /note="Description of Artificial Sequence: Synthetic polypeptide"
VLTQSPGTLSLSPGETAIISCRTSQYGSLAWYQQRPGQAPRLVIYSGSTRAAGIPDRFSGSRWGPDYNLTISNLESGDFGVYYCQQYEHFGQGTKVQVDIK

SEQ ID NO: 28408 - protein, 101 aa, Artificial Sequence
  source: /note="Description of Artificial Sequence: Synthetic polypeptide"
VLTQSPGTLSLSPGETAIISCRTSQYGSLAWYQQRPGQAPRLVIYSGSTRAAGIPDRFSGSRWGPDYNLTISNLESGDFGVYYCQQYEKFGQGTKVQVDIK

SEQ ID NO: 28409 - protein, 101 aa, Artificial Sequence
  source: /note="Description of Artificial Sequence: Synthetic polypeptide"
VLTQSPGTLSLSPGETAIISCRTSQYGSLAWYQQRPGQAPRLVIYSGSTRAAGIPDRFSGSRWGPDYNLTISNLESGDFGVYYCQQYESFGQGTKVQVDIK

SEQ ID NO: 28410 - protein, 101 aa, Artificial Sequence
  source: /note="Description of Artificial Sequence: Synthetic polypeptide"
ELTQSPGTLSLSPGETAIISCRTSQYGSLAWYQQRPGQAPRLVIYSGSTRAAGIPDRFSGSRWGPDYNLTISNLESGDFGVYYCQQYEFFGQGTKVQVDIK

SEQ ID NO: 28411 - protein, 101 aa, Artificial Sequence
  source: /note="Description of Artificial Sequence: Synthetic polypeptide"
ELTQSPGTLSLSPGETAIISCRTSQYGSLAWYQQRPGQAPRLVIYSGSTRAAGIPDRFSGSRWGPDYNLTISNLESGDFGVYYCQQYEHFGQGTKVQVDIK

SEQ ID NO: 28412 - protein, 101 aa, Artificial Sequence
  source: /note="Description of Artificial Sequence: Synthetic polypeptide"
ELTQSPGTLSLSPGETAIISCRTSQYGSLAWYQQRPGQAPRLVIYSGSTRAAGIPDRFSGSRWGPDYNLTISNLESGDFGVYYCQQYESFGQGTKVQVDIK

SEQ ID NO: 28413 - protein, 101 aa, Artificial Sequence
  source: /note="Description of Artificial Sequence: Synthetic polypeptide"
KLTQSPGTLSLSPGETAIISCRTSQYGSLAWYQQRPGQAPRLVIYSGSTRAAGIPDRFSGSRWGPDYNLTISNLESGDFGVYYCQQYEFFGQGTKVQVDIK

SEQ ID NO: 28414 - protein, 100 aa, Artificial Sequence
  source: /note="Description of Artificial Sequence: Synthetic polypeptide"
SLTQSPGTLSLSPGETAIISCRTSQYGSLAWYQQRPGQAPRLVIYSGSTRAAGIPDRFSGSRWGPDYNLTISNLESGDFGVYYCQQYEFFGQGTKVQVDI

SEQ ID NO: 28415 - protein, 103 aa, Artificial Sequence
  source: /note="Description of Artificial Sequence: Synthetic polypeptide"
EIVLTQSPGILSLSPGETATLFCKASQGGNAMTWYQKRRGQVPRLLIYDTSRRASGVPDRFVGSGSGTDFFLTINKLDREDFAVYYCQQFEFFGLGSELEVHR

SEQ ID NO: 28416 - protein, 103 aa, Artificial Sequence
  source: /note="Description of Artificial Sequence: Synthetic polypeptide"
EIVLTQSPGTLSLSPGETATISCRTSQYGSLAWYQQRPGQAPRLVIYSGSTRAAGIPDRFSGSRSGPDYTLTISNLESGDFGVYYCQQYEFFGQGTKVQQDNK

SEQ ID NO: 28417 - protein, 101 aa, Artificial Sequence
  source: /note="Description of Artificial Sequence: Synthetic polypeptide"
SLTQSPGTLSLSPGETATISCRTSQYGSLAWYQQRPGQAPRLVIYSGSTRAAGIPDRFSGSRSGPDYTLTISNLESGDFGVYYCQQYEFFGQGTKVQQDNK

SEQ ID NO: 28418 - protein, 103 aa, Artificial Sequence
  source: /note="Description of Artificial Sequence: Synthetic polypeptide"
EIVLTQSPGTLSLSPGETAIISCRTSQYGSLAWYQQRPGQAPRLVIYSGSTRAAGIPDRFSGSRSGPDYTLTISNLESGDFGVYYCQQYEFFGQGTKVQVDIK

SEQ ID NO: 28419 - protein, 103 aa, Artificial Sequence
  source: /note="Description of Artificial Sequence: Synthetic polypeptide"
EIVLTQSPGTLSLSPGETAQISCRTSQYGSLAWYQQRPGQAPRLVIYSGSTRAAGIPDRFSGSRNGPDYTLTISNLESGDFGVYYCQQYEFFGQGTKVQVDIK

SEQ ID NO: 28420 - protein, 103 aa, Artificial Sequence
  source: /note="Description of Artificial Sequence: Synthetic polypeptide"
EIVLTQSPGTLSLSPGETAQISCRTSQYGSLAWYQQRPGQAPRLVIYSGSTRAAGIPDRFSGSRNGPDYTLTISNLESGDFGVYYCQQYEFFGQGTKVQQDNK

SEQ ID NO: 28421 - protein, 103 aa, Artificial Sequence
  source: /note="Description of Artificial Sequence: Synthetic polypeptide"
EIVLTQSPGTLSLSPGETAEISCRTSQYGSLAWYQQRPGQAPRLVIYSGSTRAAGIPDRFKGEREGPEYRLRISNLESGDFGVYYCQQYEFFGQGTKVQQDNK

SEQ ID NO: 28422 - protein, 101 aa, Artificial Sequence
  source: /note="Description of Artificial Sequence: Synthetic polypeptide"
SLTQSPGTLSLSPGETAIISCRTSQYGSLAWYQQRPGQAPRLVIYSGSTRAAGIPDRFSGSRSGPDYTLTISNLESGDFGVYYCQQYEFFGQGTKVQVDIK

SEQ ID NO: 28423 - protein, 101 aa, Artificial Sequence
  source: /note="Description of Artificial Sequence: Synthetic polypeptide"
ELTQSPGTLSLSPGETAQISCRTSQYGSLAWYQQRPGQAPRLVIYSGSTRAAGIPDRFSGSRNGPDYTLTISNLESGDFGVYYCQQYEFFGQGTKVQVDIK

SEQ ID NO: 28424 - protein, 101 aa, Artificial Sequence
  source: /note="Description of Artificial Sequence: Synthetic polypeptide"
SLTQSPGTLSLSPGETAQISCRTSQYGSLAWYQQRPGQAPRLVIYSGSTRAAGIPDRFSGSRNGPDYTLTISNLESGDFGVYYCQQYEFFGQGTKVQVDIK

SEQ ID NO: 28425 - protein, 101 aa, Artificial Sequence
  source: /note="Description of Artificial Sequence: Synthetic polypeptide"
SLTQSPGTLSLSPGETAQISCRTSQYGSLAWYQQRPGQAPRLVIYSGSTRAAGIPDRFSGSRNGPDYTLTISNLESGDFGVYYCQQYEFFGQGTKVQQDNK

SEQ ID NO: 28426 - protein, 101 aa, Artificial Sequence
  source: /note="Description of Artificial Sequence: Synthetic polypeptide"
SLTQSPGTLSLSPGETAEISCRTSQYGSLAWYQQRPGQAPRLVIYSGSTRAAGIPDRFKGEREGPEYRLRISNLESGDFGVYYCQQYEFFGQGTKVQQDNK

SEQ ID NO: 28427 - protein, 104 aa, Artificial Sequence
  source: /note="Description of Artificial Sequence: Synthetic polypeptide"
EIVLTQSPGTLSLSPGETAIISCRTSQYGSLAWYQQRPGQAPRLVIYSGSTRAAGIPDRFSGSRWGPDYNLTIRNLESGDFGLYYCQQYEFFGQGTKVQVDIKR

SEQ ID NO: 28428 - protein, 102 aa, Artificial Sequence
  source: /note="Description of Artificial Sequence: Synthetic polypeptide"
EIVLTQSPGILSLSPGETATLFCKASQGGNAMTWYQKRRGQVPRLLIYDTSRRASGVPDRFVGSGSGTDFFLTINKLDREDFAVYYCQQFEFFGLGSELEVH

SEQ ID NO: 28429 - protein, 104 aa, Artificial Sequence; identical to SEQ ID NO: 28404
  source: /note="Description of Artificial Sequence: Synthetic polypeptide"

SEQ ID NO: 28430 - protein, 209 aa, Artificial Sequence
  source: /note="Description of Artificial Sequence: Synthetic polypeptide"
EIVLTQSPGTLSVSPGERATLFCKASQGGNSLSWYQKRRGQPPRLLIYDTSRRASGIPDRFVGSGSGTDFSLTITKVDRDDFALYFCQQFEFFGLGTALEINRTVAAPSVFIFPPSDEQLKSGTASVVCLLNNFYPREAKVQWKVDNALQSGNSQESVTEQDSKDSTYSLSSTLTLSKADYEKHKVYACEVTHQGLSSPVTKSFNRGEC

SEQ ID NO: 28431 - protein, 211 aa, Artificial Sequence
  source: /note="Description of Artificial Sequence: Synthetic polypeptide"
YIGLTQSPGTLSVSPGERATLSCRPSQAISKSHLAWYSQKSGQPPRLLLTGTYERASGVPDRFVGSGSGTNYTLTIASVEAEDFAVYFCQCFEGFGQGTKLEIKRTVAAPSVFIFPPSDEQLKSGTASVVCLLNNFYPREAKVQWKVDNALQSGNSQESVTEQDSKDSTYSLSSTLTLSKADYEKHKVYACEVTHQGLSSPVTKSFNRGEC

SEQ ID NO: 28432 - protein, 210 aa, Artificial Sequence
  source: /note="Description of Artificial Sequence: Synthetic polypeptide"
EIVMTQSPVTVSVSRGGTATLSCRASQGVGSDVAWYQHKPGQTPRLLIYGASTRASGVPERFSGSGFHVDFTLSISGLQPEDVAIYYCQQYETFGQGTKVEIKRTVAAPSVFIFPPSDEQLKSGTASVVCLLNNFYPREAKVQWKVDNALQSGNSQESVTEQDSKDSTYSLSSTLTLSKADYEKHKVYACEVTHQGLSSPVTKSFNRGEC

SEQ ID NO: 28433 - protein, 103 aa, Artificial Sequence
  source: /note="Description of Artificial Sequence: Synthetic polypeptide"
DIQMTQSPSSLSASLGDRVTITCQASRGIGKDLNWYQQKPGKAPKLLVSDASILEGGVPSRFSGSGFHQNFSLTISSLQPEDVATYFCQQYETFGQGTKVDIK

SEQ ID NO: 28434 - protein, 210 aa, Artificial Sequence
  source: /note="Description of Artificial Sequence: Synthetic polypeptide"
DIQMTQSPSSLSASLGDRVTITCQASRGIGKDLNWYQQKAGKAPKLLVSDASTLEGGVPSRFSGSGFHQNFSLTISSLQAEDVATYFCQQYETFGQGTKVDIKRTVAAPSVFIFPPSDEQLKSGTASVVCLLNNFYPREAKVQWKVDNALQSGNSQESVTEQDSKDSTYSLSSTLTLSKADYEKHKVYACEVTHQGLSSPVTKSFNRGEC

SEQ ID NO: 28435 - protein, 103 aa, Artificial Sequence
  source: /note="Description of Artificial Sequence: Synthetic polypeptide"
DIQMTQSPSSLSASLGDRVTITCQASRGIGKDLNWYQQKPGRAPKLLVSDASILEGGVPTRFSGSGFHQNFSLTISSLQAEDVATYFCQQYETFGQGTKVDIK

SEQ ID NO: 28436 - protein, 103 aa, Artificial Sequence
  source: /note="Description of Artificial Sequence: Synthetic polypeptide"
DIQMTQSPSSLSASLGDRVTITCQASRGIGKDLNWYQQKRGRAPRLLVSDASVLEGGVPSRFSGSGFHQNFSLTISTLQPEDVATYFCQQYETFGQGTKVDIK

SEQ ID NO: 28437 - protein, 103 aa, Artificial Sequence
  source: /note="Description of Artificial Sequence: Synthetic polypeptide"
DIQMTQSPSSLSASLGDRVTITCQASRGIGKDLNWYQQKAGKAPKLLVSDASILEGGVPSRFSGSGFHQNFSLTISSLQPEDVATYFCQQYETFGQGTKVDIK

SEQ ID NO: 28438 - protein, 100 aa, Artificial Sequence
  source: /note="Description of Artificial Sequence: Synthetic polypeptide"
EIVLTQSPGTLSLSPGETASLSCTAASYGHMTWYQKKPGQPPKLLIFATSKRASGIPDRFSGSQFGKQYTLTITRMEPEDFARYYCQQLEFFGQGTRLEI

SEQ ID NO: 28439 - protein, 101 aa, Artificial Sequence
  source: /note="Description of Artificial Sequence: Synthetic polypeptide"
EIVLTQSPGTLSLSPGETASLSCTAASYGHMTWYQKKPGQPPKLLIFATSKRASGIPDRFSGSQFGKQYTLTITRMEPEDFAGYYCQQVEFFGQGTRLEIR

SEQ ID NO: 28440 - protein, 204 aa, Artificial Sequence
  source: /note="Description of Artificial Sequence: Synthetic polypeptide"
QSALTQPPSVSGSPGQSITLSCTGASTSVAWYQQYADKAPRLIVFDGNKRPSDISSRFSGSQSGGTASLTISGLQSEDEAYYHCNAFEFFGGGTKLTVLSQPKAAPSVTLFPPSSEELQANKATLVCLISDFYPGAVTVAWKADSSPVKAGVETTTPSKQSNNKYAASSYLSLTPEQWKSHKSYSCQVTHEGSTVEKTVAPTEC

SEQ ID NO: 28441 - protein, 237 aa, Artificial Sequence
  source: /note="Description of Artificial Sequence: Synthetic polypeptide"
MKKTAIAIAVALAGFATVAQAAELVLTQSPGTLSLSAGERATLSCRASQSVSSGSLAWYQQKPGQAPRLLIYGASTRATGIPDRFSGSGSGTDFTLTIGRLEPEDLAVYYCQQYGTSPYTFGQGTKLEIKRTVAAPSVFIFPPSDEQLKSGTASVVCLLNNFYPREAKVQWKVDNALQSGNSQESVTEHDSRDSTYSLGSTLTLSKADYEKHKVYACEVTHQGLSSPVTKSFNRGEC

SEQ ID NO: 28442 - protein, 237 aa, Artificial Sequence; identical to SEQ ID NO: 28441
  source: /note="Description of Artificial Sequence: Synthetic polypeptide"

SEQ ID NO: 28443 - protein, 212 aa, Artificial Sequence
  source: /note="Description of Artificial Sequence: Synthetic polypeptide"
ELTQSPATLSLSPGERATLSCRASQSVGRNLGWYQQKPGQAPRLLIYDASNRATGIPARFSGSGSGTDFTLTISSLEPEDFAVYYCQARLLLPQTFGQGTKVEIKRTVAAPSVFIFPPSDEQLKSGTASVVCLLNNFYPREAKVQWKVDNALQSGNSQESVTEQDSKDSTYSLSSTLTLSKADYEKHKVYACEVTHQGLSSPVTKSFNRGEC

SEQ ID NO: 28444 - protein, 210 aa, Artificial Sequence
  source: /note="Description of Artificial Sequence: Synthetic polypeptide"
DIQMTQSPSSLAVSVGGRVTITCRASQGIGSDLHWYQQKRGRPPKILIHHASAREEGVPSRFGGSGSHTPFIFTINDLQLDDVATYYCQVIESFGQGTRLDINRTVAAPSVFIFPPSDEQLKSGTASVVCLLNNFYPREAKVQWKVDNALQSGNSQESVTEQDSKDSTYSLSSTLTLSKADYEKHKVYACEVTHQGLSSPVTKSFNRGEC

SEQ ID NO: 28445 - protein, 215 aa, Artificial Sequence; identical to SEQ ID NO: 28303
  source: /note="Description of Artificial Sequence: Synthetic polypeptide"

SEQ ID NO: 28446 - protein, 236 aa, Artificial Sequence [sequence omitted]

SEQ ID NO: 28447 - protein, 106 aa, Artificial Sequence
  source: /note="Description of Artificial Sequence: Synthetic polypeptide"
ELTQSPSSLSASVGDRVTITCRTSQGISNYLAWYQQKPGKVPKLLIYGASTLQSGGPSRFSGSGSGTDFTLTINSLQPEDVATYSCQNYDSAPWTFGQGTKVDIKR

SEQ ID NO: 28448 - protein, 108 aa, Artificial Sequence [sequence omitted]

SEQ ID NO: 28449 - protein, 107 aa, Artificial Sequence
  source: /note="Description of Artificial Sequence: Synthetic polypeptide"
ELTQSPSSLSASVGDRVTITCRASQNINNYLNWYQQKPGEAPKLLIHTAFNLQSGVPSRFSGTASGTEFTLTIRSLQPEDFATYYCQQSYSTPYTFGQGTKVEIKRT

SEQ ID NO: 28450 - protein, 107 aa, Artificial Sequence
  source: /note="Description of Artificial Sequence: Synthetic polypeptide"
ELTQSPSSLSASVGDRVTITCRASQSISSYLNWYQQKPGKAPKLLIYAASSLQSGVPSRFSGSGSGTDFTLTISSLQPEDFATYYCQQSYSTPYTFGQGTKLEIKRT

SEQ ID NO: 28451 - protein, 107 aa, Artificial Sequence
  source: /note="Description of Artificial Sequence: Synthetic polypeptide"
ELTQSPSSLSASVGDRVTITCRASQSISSYLNWYQQKPGKAPKLLIYAASSLQSGVPSRFSGSGSGTDFTLTISSLQPEDFATYYCQQSYSTPQTFGQGTKLEIKRT

SEQ ID NO: 28452 - protein, 107 aa, Artificial Sequence
  source: /note="Description of Artificial Sequence: Synthetic polypeptide"
ELTQSPSSLSASVGDRVTITCQASQDIRNYLNWYQQKPGKAPKLLIYDASNSETGVPSRFSGSGSGRDFTFTISSLQPEDVATYYCQQHQNVPLTFGGGTKVEIKRT

SEQ ID NO: 28453 - protein, 108 aa, Artificial Sequence [sequence omitted]

SEQ ID NO: 28454 - protein, 107 aa, Artificial Sequence
  source: /note="Description of Artificial Sequence: Synthetic polypeptide"
ELTQSPGTLSLSPGERATFSCRSSHNIRSRRVAWYQHKPGQAPRLVIHGVSNRATGISDRFSGSGSGTDFTLTITRLEPEDFALYYCQVYGASSYTFGQGTKLDFKR

SEQ ID NO: 28455 - protein, 107 aa, Artificial Sequence
  source: /note="Description of Artificial Sequence: Synthetic polypeptide"
ELTQSPDTLSLNTGERATLSCRASHRIGSRRLAWYQHRRGQAPRLLIYGVSNRAGGVPDRFSGSGSGTDFTLTISRLEPEDFAIYYCQTYGGSSYTFGQGTKVDIKR

SEQ ID NO: 28456 - protein, 107 aa, Artificial Sequence
  source: /note="Description of Artificial Sequence: Synthetic polypeptide"
ELTQSPGTLSSTPGERAILSCKTSHNIWSRRLAWYQVKSGLPPRLLIHGVSRRAGGIPDRFSGSGSARDFTLTISRLEPADFAVYYCQTYGGSSYSFGQGTKLDFNR

SEQ ID NO: 28457 - protein, 107 aa, Artificial Sequence
  source: /note="Description of Artificial Sequence: Synthetic polypeptide"
ELTQSPGTLSLNPGERAVLSCRTSRNIWSRRLAWYQVRRGQAPRLLIHGVSKRAGGVPDRFSGSGSARDFTLTISRLEPEDFAVYFCQTYGGSSYTFGQGNKLDIRR

SEQ ID NO: 28458 - protein, 125 aa, Artificial Sequence
  source: /note="Description of Artificial Sequence: Synthetic polypeptide"
QVKLLEQSGAEVKKPGASVKVSCQASGYRFSNFVLHWARQAPGHRPEWMGWINPANGVTEISPKFQDRVSLTGDTSASTVYLELRNLRFADTAVYYCARVGEWTWDDSPQDNYYMDVWGRGTTVT

SEQ ID NO: 28459 - protein, 124 aa, Artificial Sequence
  source: /note="Description of Artificial Sequence: Synthetic polypeptide"
QVKLLEQSGAEVKKPGASVKVSCQASGYRFSNFVLHWARQAPGHRPEWMGWINPANGVTEIPPKFQDRVSLTRDTSAGTVYLELTNLRFADTAVYYCARVGEWTWDDSPQDNYYMDVWGKGTTV

SEQ ID NO: 28460 - protein, 109 aa, Artificial Sequence
  source: /note="Description of Artificial Sequence: Synthetic polypeptide"
MAELTQSPGTLSLSPGERVIVSCRASQSVSSNYLAWYQQKPGQAPRLLIYGASNRATGIPDRFSGSGSGTDFTLTISRLEPEDFAVYYCQQYGSSGTFGQGTKVEIKRT

SEQ ID NO: 28461 - protein, 112 aa, Artificial Sequence
  source: /note="Description of Artificial Sequence: Synthetic polypeptide"
MAELTQSPGTLSLSPGERATFSCRSSHSIHTRRVAWYQHKPGQAPRLVIHGVSNRASGISDRFSGSGSGTDFTLTITRVEPEDFALYYCQVYGASSYTFGQGTKLERKRTVV

SEQ ID NO: 28462 - protein, 111 aa, Artificial Sequence
  source: /note="Description of Artificial Sequence: Synthetic polypeptide"
MAELTQSPGTLSLSPGERATLSCRASQSVSNGYLAWYQQKPGQAPRLLIYGASTRATDIPDRFSGSGSGADFTLAISRLEPEDFAVYYCQQYAGSHTFGQGTKLEIKRTVA

SEQ ID NO: 28463 - protein, 111 aa, Artificial Sequence
  source: /note="Description of Artificial Sequence: Synthetic polypeptide"
MAELTQSPSSLSASVGDRVTITCRPSQGIGRFFNWYQQKPGKAPNLLIYAADILQSGVPSRFSGSGSGTDFTLTISSLQPEDFATYYCQQSYSTPYTFGQGTRLDIKRTVA

SEQ ID NO: 28464 - protein, 112 aa, Artificial Sequence
  source: /note="Description of Artificial Sequence: Synthetic polypeptide"
MAELTQSPSSLSASVGDRVTITCRASQGVSSSYLAWYQQKPGQAPRLVIFGAYSRATGIPDRFSGSGSGTDFTLTISRLEPEDFAVYYCQQYGSSPITFGPGTKVDIKRTVA

SEQ ID NO: 28465 - protein, 108 aa, Artificial Sequence [sequence omitted]

SEQ ID NO: 28466 - protein, 108 aa, Artificial Sequence
  source: /note="Description of Artificial Sequence: Synthetic polypeptide"
ELTQSPGTLSLTPGERATLSCRTSHSIRSRRLAWYQVKGGQAPRLLIYGVSNRAGGIPDRFSGSGSGTDFTLTISRLEPEDFAVYYCQQYGSSRYTFGQGTKLEIKRT

SEQ ID NO: 28467 - protein, 107 aa, Artificial Sequence
  source: /note="Description of Artificial Sequence: Synthetic polypeptide"
ELTQAPGTLSLSPGERATFSCRSSHSIRSRRVRWYQHKPGQAPRLVIHGVSNRASGISDRFSGSGSGTDFTLTITRVEPEDFALYYCQVYGASSYTFGQGTKLERKR

SEQ ID NO: 28468 - protein, 108 aa, Artificial Sequence
  source: /note="Description of Artificial Sequence: Synthetic polypeptide"
ELTQAPGTLSLSPGDRATFSCRSSHNIRSRRVAWYQHKPGQAPRLVIHGVSNRASGISDRFSGSGSGTDFTLTITRLEPEDFALYYCQVYGASSYTFGQGTKLDFKRT

SEQ ID NO: 28469 - protein, 132 aa, Artificial Sequence
  source: /note="Description of Artificial Sequence: Synthetic polypeptide"
QVQLQESGPGLVKPSETLSLTCSVSNGSVSGRFWSWIRQSPGRGLEWIGYFSDTEKSNYNPSLRSRLTLSVDASKNQLSLKLNSVTAADSATYYCARTQQGKRIYGVVSFGEFFHYYYMDAWGKGTAVTVSS

SEQ ID NO: 28470 - protein, 132 aa, Artificial Sequence
  source: /note="Description of Artificial Sequence: Synthetic polypeptide"
QVQLQESGPGLVKPSETLSVTCSVSGDSMNNSYWTWIRQSPGKGLEWIGYISKSESANYNPSLNSRVVISRDTSKNQLSLKLNSVTPADTAVYYCATARHGQRIYGVVSFGEFFTYYSMDVWGKGTTVTVSS

SEQ ID NO: 28471 - protein, 132 aa, Artificial Sequence
  source: /note="Description of Artificial Sequence: Synthetic polypeptide"
QVQLQESGPGLVKPSETLSVTCSVSGDSMNNYYWTWIRQSPGKGLEWIGYISDRESATYNPSLNSRVVISRDTSKNQLSLKLNSVTPADTAVYYCATARRGQRIYGVVSFGEFFYYYSMDVWGKGTTVTVSS

SEQ ID NO: 28472 - protein, 132 aa, Artificial Sequence
  source: /note="Description of Artificial Sequence: Synthetic polypeptide"
QVQLQESGPGLVKPPETLSLTCSVSGASINDAYWSWIRQSPGKRPEWVGYVHHSGDTNYNPSLKRRVSFSLDTAKNEVSLKLVDLTAADSAIYFCARALHGKRIYGIVALGELFTYFYMDVWGKGTTVTVSS

SEQ ID NO: 28473 - protein, 132 aa, Artificial Sequence
  source: /note="Description of Artificial Sequence: Synthetic polypeptide"
QVQLQESGPGLVKPPETLSLTCSVSGASINDAYWSWIRQSPGKRPEWVGYVHHSGDTNYNPSLKRRVTFSLDTAKNEVSLKLVDLTAADSAVYFCARALHGKRIYGIVALGELFTYFYMDVWGKGTTVTVSS

SEQ ID NO: 28474 - protein, 132 aa, Artificial Sequence
  source: /note="Description of Artificial Sequence: Synthetic polypeptide"
QVQLVESGPGLVTPSETLSLTCTVSNGSVSGRFWSWIRQSPGRGLEWIGYFSDTDRSEYSPSLRSRLTLSLDASRNQLSLKLKSVTAADSATYYCARAQQGKRIYGIVSFGEFFYYYYMDAWGKGTAVTVSS

SEQ ID NO: 28475 - protein, 132 aa, Artificial Sequence
  source: /note="Description of Artificial Sequence: Synthetic polypeptide"
QVQLQESGPGLVKPSETLSVTCSVSGDSMNNYYWTWIRQSPGKGLEWIGYISDRESATYNPSLNSRVVISRDTSTNQLSLKLNSVTPADTAVYYCATARRGQRIYGVVSFGEFFYYYSMDVWGRGTTVTVSS

SEQ ID NO: 28476 - protein, 132 aa, Artificial Sequence
  source: /note="Description of Artificial Sequence: Synthetic polypeptide"
QVQLQESGPGLVKPLETLSLTCNVSGAFIADHYWSWIRLPLGKGPEWIGYVHDSGDINYNPSLKNRVHLSLDKSTNQVSLKLMAVTAGDSALYYCATTKHGRRIYGVVAFGEWFTYFYMDVWGRGTTVTVSS

SEQ ID NO: 28477 - protein, 132 aa, Artificial Sequence
  source: /note="Description of Artificial Sequence: Synthetic polypeptide"
QVHLQESGPGLVKPSETLSLTCNVSGTLVRDNYWSWMRQPLGKQPEWIGYVHDSGDTNYNPSLKSRVHLSLDKSNNLVSLRLTAVTAADSATYYCATTKHGRRIYGIVAFNEWFTYFYMDVWGKGTTVTVSS

SEQ ID NO: 28478 - protein, 132 aa, Artificial Sequence
  source: /note="Description of Artificial Sequence: Synthetic polypeptide"
QVQLQESGPGLVKPSETLSLTCSVSGASISDSYWSWIRRSPGKGLEWIGYVHKSGDTNYSPSLKSRVNLSLDTSKNQVSLSLVAATAADSGKYYCARTLHGRRIYGIVAFNEWFTYFYMDVWGNGTQVTVSS

SEQ ID NO: 28479 - protein, 132 aa, Artificial Sequence
  source: /note="Description of Artificial Sequence: Synthetic polypeptide"
QVQLQESGPGLVKPPETLSLTCSVSGASVNDAYWSWIRQSPGKRPEWVGYVHHSGDTNYNPSLKRRVTFSLDTAKNEVSLKLVALTAADSAVYFCARALHGKRIYGIVALGELFTYFYMDVWGKGTTVTVSS

SEQ ID NO: 28480 - protein, 132 aa, Artificial Sequence
  source: /note="Description of Artificial Sequence: Synthetic polypeptide"
QVQLQESGPGLVKPSETLSVTCSVSGDSMNNYYWTWIRQSPGKGLEWIGYISDRASATYNPSLNSRVVISRDTSKNQLSLKLNSVTPADTAVYYCATARRGQRIYGVVSFGEFFYYYSMDVWGKGTTVTVSS

SEQ ID NO: 28481 - protein, 132 aa, Artificial Sequence
  source: /note="Description of Artificial Sequence: Synthetic polypeptide"
  MOD_RES (27)..(27): Any amino acid
  MOD_RES (29)..(30): Any amino acid
  MOD_RES (32)..(32): Any amino acid
  MOD_RES (68)..(69): Any amino acid
  MOD_RES (83)..(84): Any amino acid
  MOD_RES (92)..(92): Any amino acid
  MOD_RES (99)..(99): Any amino acid
  MOD_RES (102)..(102): Any amino acid
  MOD_RES (113)..(113): Any amino acid
QVQLQESGPGLVKPSETLSLTCSVSGXSXXDXYWSWIRQSPGKGLEWIGYVHDSGDTNYNPSLKSRVXXSLDTSKNQVSLKLXXVTAADSAXYYCARAXHGXRIYGIVAFGEXFTYFYMDVWGKGTTVTVSS

SEQ ID NO: 28482 - protein, 107 aa, Artificial Sequence [sequence omitted]

SEQ ID NO: 28483 - protein, 215 aa, Artificial Sequence
  source: /note="Description of Artificial Sequence: Synthetic polypeptide"
EIVLTQSPATLSVSPGERATLSCRASQNVHPRYFAWYQQKRGQSPRLLIHSGSTRAAGIADRFSGGGSGMHFTLTITRVEPEDFAVYFCQQYGGSPYTFGQGTRVELRRTVAAPSVFIFPPSDEQLKSGTASVVCLLNNFYPREAKVQWKVDNALQSGNSQESVTEQDSKDSTYSLSSTLTLSKADYEKHKVYACEVTHQGLSSPVTKSFNRGEC

SEQ ID NO: 28484 - protein, 217 aa, Artificial Sequence
  source: /note="Description of Artificial Sequence: Synthetic polypeptide"
QSVLTQPPSVSAAPGQKVTISCSGSSSNIGKNYVSWYQQLPGAAPKLLIFDDTQRPSGIPDRFSGSKSGTSATLAITGLQTGDEADYYCGTWDSSLSTGQLFGGGTKLTVLGQPKAAPSVTLFPPSSEELQANKATLVCLISDFYPGAVTVAWKADSSPVKAGVETTTPSKQSNNKYAASSYLSLTPEQWKSHRSYSCQVTHEGSTVEKTMAHAECS

SEQ ID NO: 28485 - protein, 216 aa, Artificial Sequence
  source: /note="Description of Artificial Sequence: Synthetic polypeptide"
DTVMTQSPATLSVSPGERVTLSCRASQIINTNLAWYQKRPGQAPRLLIYAASARATGIPARFSGSGSGTEFTLTISGLQSEDSAVYYCQQYKHWPPYTFGRGTKLEIRRTVAAPSVFIFPPSDEQLKSGTASVVCLLNNFYPREAKVQWKVDNALQSGNSQESVTEQDSKDSTYSLSSTLTLSKADYEKHKVYACEVTHQGLSSPVTKSFNRGECS

SEQ ID NO: 28486 - protein, 209 aa, Artificial Sequence
  source: /note="Description of Artificial Sequence: Synthetic polypeptide"
SYELTQPPSVSVSPGQTASITCSGDILGDKYVSWYQQKSGQSPLLVIYEDTKRPSGIPDRFSGSKSGNTATLTISGTQAMDEADYYCQAWDSTLGVVFGGGTKVTVLGQPKAAPSVTLFPPSSEELQANKATLVCLISDFYPGAVTVAWKADSSPVKAGVETTTPSKQSNNKYAASSYLSLTPEQWKSHKSYSCQVTHEGSTVEKTVAP

SEQ ID NO: 28487 - protein, 213 aa, Artificial Sequence
  source: /note="Description of Artificial Sequence: Synthetic polypeptide"
SYELTQPPSVSVSPGQTARITCSGDALPEKYAYWYQQKSGQAPVLIIYEDSKRPSGIPERFSGSRSGTMATLTISGAQVDDEADYYCYSTNSGGTFFVFGTGTKVTVLGQPKANPTVTLFPPSSEELQANKATLVCLISDFYPGAVTVAWKADSSPVKAGVETTTPSKQSNNKYAASSYLSLTPEQWKSHRSYSCQVTHEGSTVEKTVAPTEC

SEQ ID NO: 28488 - protein, 215 aa, Artificial Sequence
  source: /note="Description of Artificial Sequence: Synthetic polypeptide"
AEVKKPGSSVKVSCKASGGTFSNYAINWVRQAPGQGLEWMGGIIPIFNIAHYAQRFQGRVSITADESTSTAYMELSSLRSEDTAVFYCASPYPNDYNDYAPEEGMSWYFDLWGRGTLVTVSPASTKGPSVFPLAPSSKSTSGGTAALGCLVKDYFPEPVTVSWNSGALTSGVHTFPAVLQSSGLYSLSSVVTVPSSSLGTQTYICNVNHKPSNTK

SEQ ID NO: 28489 - protein, 109 aa, Artificial Sequence
  source: /note="Description of Artificial Sequence: Synthetic polypeptide"
SYELTQPPSVSVSPGQTARITCSGDALPNQYVYWYQQRPGQAPVVVLYKDTERPSGIPERFSGSSSGTTVTLTISGVQAEDEADYYCQSADNSGAYPLFFGGGTKLTVL

SEQ ID NO: 28490 - protein, 109 aa, Artificial Sequence
  source: /note="Description of Artificial Sequence: Synthetic polypeptide"
DIQLTQSPSSLSASVGDRVTITCRASESINTYLNWYQQRPGKAPKLLIYAASTLQTGVPSRFSGSGSGTLFTLTISSLQPEDLATYYCQQSFSTLPYTLGRGTKVEIKG

SEQ ID NO: 28491 - protein, 111 aa, Artificial Sequence
  source: /note="Description of Artificial Sequence: Synthetic polypeptide"
QSVLTQPPSASGTPGQRVTISCSGSGSNIGSNTVNWYQQFPGTAPKLLIYNNNQRPSGVPDRFSGSKSGTSASLAISGLQSADEADYYCATWDDSLDGWVFGGGTKLTVLG

SEQ ID NO: 28492 - protein, 110 aa, Artificial Sequence
  source: /note="Description of Artificial Sequence: Synthetic polypeptide"
QSALTQPASVSGSLGQSVTISCTGPSSVCCSHKSISWYQWPPGRAPTLLIFEDSERSWGISDRFSGYKSYWSASLTISNLRPEDETTYYCCSYTHNSGCVFGTGTNVSVL

SEQ ID NO: 28493 - protein, 110 aa, Artificial Sequence
  source: /note="Description of Artificial Sequence: Synthetic polypeptide"
QSALTQPASVSGSLGQSVTISCTGPSSVCCSHKSISWYQWPPGRAPTLLIFEDSERSWGISDRFSGYKSYWSASLTISNLRPEDETTYFCCSYTHNSGCVFGTGTKVSVL

SEQ ID NO: 28494 - protein, 110 aa, Artificial Sequence
  source: /note="Description of Artificial Sequence: Synthetic polypeptide"
QSALTQPASVSGSLGQSVTISCTGPSSVCCSHKSISWYQWPPGRAPTLLIFEDSERSWGISDRFSGYKSYWSASLTISNLRPEDETTYYCCSYTHNSGCVFGTGTKVSVL

SEQ ID NO: 28495 - protein, 110 aa, Artificial Sequence
  source: /note="Description of Artificial Sequence: Synthetic polypeptide"
QPVLTQPASVSGSLGQSVTISCTGPSSVCCSHKSISWYRWPPGRAPTLIIYEDNKRFSEISPRFSGYKSYWSAYLTISDLRPEDETTYYCCSYTHNSGCVFATGTKVSVL

SEQ ID NO: 28496 - protein, 110 aa, Artificial Sequence
  source: /note="Description of Artificial Sequence: Synthetic polypeptide"
QSVLTQSASVSGSLGQSVTISCTGPNSVCCSHKSISWYQWPPGRAPTLIIYEDNERAPGISPRFSGYKSYWSAYLTISDLRPEDETTYYCCSYTHNSGCVFGTGTKVSVL

SEQ ID NO: 28497 - protein, 108 aa, Artificial Sequence
  source: /note="Description of Artificial Sequence: Synthetic polypeptide"
DIQLTQSPSSLSASVGDRVTITCRASQSISNYLNWYQQKPGKAPKLLIYAASSLQSGVPSRFSGSGSGTDFTLTISSLQPEDFATFYCQQSHSIPYTFGQGTKLEIKR

SEQ ID NO: 28498 - protein, 111 aa, Artificial Sequence; identical to SEQ ID NO: 28491
  source: /note="Description of Artificial Sequence: Synthetic polypeptide"

SEQ ID NO: 28499 - protein, 110 aa, Artificial Sequence
  source: /note="Description of Artificial Sequence: Synthetic polypeptide"
QSALTQPASVSGSLGQSVTISCTGPNSVCCSHKSISWYQWPPGRAPTLIIYEDNEKAPGISHRFSGYKSYWSAYLTISDLRPEDETTYYCCSYTHNSGCVFGTGTKVSVL

SEQ ID NO: 28500 - protein, 108 aa, Artificial Sequence
  source: /note="Description of Artificial Sequence: Synthetic polypeptide"
EIVLTQSPATLSVSPGEGATLSCRASQSISSNLAWYQQKPGQAPRLLIYGASTGATGIPARFSGSGSGTDFTLTISRLEPEDFAIYYCQQYGSLPITFGQGTRLEIKR

SEQ ID NO: 28501 - protein, 110 aa, Artificial Sequence
  source: /note="Description of Artificial Sequence: Synthetic polypeptide"
QSALTQPASVSGSLGQSVTISCTGPNSACCSHKSISWHQWPPGRAPTLIIYEDNEKAPGISHRFSGYKSYWSAYLTISDLRPEDETTYYCCSYTHNSGCVFGTGTKVSVL

SEQ ID NO: 28502 - protein, 110 aa, Artificial Sequence
  source: /note="Description of Artificial Sequence: Synthetic polypeptide"
QSALTQPASVSGSLGQSVTISCTGPNSVCCSHKSISWYQWPPGRAPTLLIFEDSERSWGISDRFSGYKSYWSASLTISNLRPEDETTYYCCSYTHNSGCVFGTGTKVSVL

SEQ ID NO: 28503 - protein, 111 aa, Artificial Sequence
  source: /note="Description of Artificial Sequence: Synthetic polypeptide"
DIVLTQSPASLAVSLGQRATISCKAGQSVDYDGDSYMNWYQQKPGQPPKLLIYVASNLESGIPARFSGSGSGTDFTLNIHPVEEEDAATYYCQQSYKDPLTFGAGTKLELK

SEQ ID NO: 28504 - protein, 111 aa, Artificial Sequence
  source: /note="Description of Artificial Sequence: Synthetic polypeptide"
DIVLTQSPASLAVSLGQRATITCKAGQSVDYDGDSYMNWYQQKPGQPPKLLIYVASNLESGIPARFSGSGSGTDFTLNIHPVEENDAATYYCQQSYKDPLTFGQGTKLEIK

SEQ ID NO: 28505 - protein, 111 aa, Artificial Sequence
  source: /note="Description of Artificial Sequence: Synthetic polypeptide"
DIVLTQSPASLAVSPGQRATITCKAGQSVDYDGDSYMNWYQQKPGQPPKLLIYVASNLESGIPSRFSGSGSGTDFTLTINPVEENDTATYYCQQSYKDPLTFGQGTKVEIK

SEQ ID NO: 28506 - protein, 111 aa, Artificial Sequence
  source: /note="Description of Artificial Sequence: Synthetic polypeptide"
DIVLTQSPASLAVSPGQRATITCKAGQSVDYDGDSYMNWYQQKPGQPPKLLIYVASNLESGIPSRFSGSGSGTDFTLTINPVEENDTATYYCQQSYKDPLAFGPGTKVEIK

SEQ ID NO: 28507 - protein, 236 aa, Artificial Sequence
  source: /note="Description of Artificial Sequence: Synthetic polypeptide"
MEFGLSWVFLVAIIIGVQCQVEIVLTQAPGTLSLSPGERATFSCRSSHSIRSRRVAWYQHKPGQAPRLVIHGVSNRASGISDRFSGSGSGTDFTLTITRVEPEDFALYYCQVYGASSYTFGQGTKLERKRTAAAPSVFIFPPSDEQLKSGTASVVCLLNNFYPREAKVQWKVDNALQSGNSQESVTEQDSKDSTYSLSSTLTLSKADYEKHKVYACEVTHQGLSSPVTKSFNRGEC

SEQ ID NO: 28508 - protein, 107 aa, Artificial Sequence
  source: /note="Description of Artificial Sequence: Synthetic polypeptide"
DIQMTQSPSSLSASVGDRVTITCKASQDVGADVAWYQQKPGKAPKLLISWASTRHTGVPSRFSGSGSGTDFTFTISSLQPEDIATYYCQQYSSFPLTFGQGTKVEIK

SEQ ID NO: 28509 - protein, 111 aa, Artificial Sequence
  source: /note="Description of Artificial Sequence: Synthetic polypeptide"
DIQMTQSPSSLSASVGDRVTITCKASQSVDYDGDSYMNWYQQKPGKAPKLLIYAASNLESGVPSRFSGSGSGTDFTFTISSLQPEDIATYYCQQSNEDPWTFGQGTKVEIK

SEQ ID NO: 28510 - protein, 110 aa, Artificial Sequence
  source: /note="Description of Artificial Sequence: Synthetic polypeptide"
EIVLSQSPATLSLSPGERATLSCRASQSVTNSLAWYQQKPGQAPRLLIYDASNRATGIPARFSGSGSGTDFTLTISSLEPEDFAVYYCQQRSNWPPEVTFGPGTKVDIKR

SEQ ID NO: 28511 - protein, 206 aa, Artificial Sequence
  source: /note="Description of Artificial Sequence: Synthetic polypeptide"
QSVLTQPPSASGTPGQRDTISCSGSSPNIGSNSAHWHQRVPGTAPKLLIYMNIERPSGVPDRISGSKSDSSASLAISGLRSGDEVDYFCELWGGPKLTVPGQPKAAPSVTLFPPSSEELQANKATLVCLISDFYPGAVTVAWKADSSPVKAGVETTTPSKQSNNKYAASSYLSLTPEQWKSHRSYSCQVTHEGSTVEKTVAPTECS

SEQ ID NO: 28512 - protein, 109 aa, Artificial Sequence
  source: /note="Description of Artificial Sequence: Synthetic polypeptide"
QSVLTQPPSVSAAPGQKVTISCSGTNSNLGDKFVSWYQQLPGTAPRLLIYDNDKRPSGIPDRFSGSKSGASATLAITGLQTGDEADYYCGTWDNSLSALFGGGTKLTVL

SEQ ID NO: 28513 - protein, 114 aa, Artificial Sequence
  source: /note="Description of Artificial Sequence: Synthetic polypeptide"
DVVMTQSPEFLAVSLGERATLECKSSHSLLYAPYDKDALVWYQQKPGQPPKLLLDWASSRRSGVSDRFSATSASGRYFTLTISNFRADDVATYYCQQTRWTPPTFGGGTKVDLN

SEQ ID NO: 28514 - protein, 108 aa, Artificial Sequence
  source: /note="Description of Artificial Sequence: Synthetic polypeptide"
DIQMTQSPSSLSPSVGDRVTITCQASQDIRNHLNWYQQKPGKAPKLLIYDASNLATGVPSRFSGSGSGTDFTFTISSLQPEDLATYYCQHYDDLPRITFGQGTRLEIK

SEQ ID NO: 28515 - protein, 106 aa, Artificial Sequence
  source: /note="Description of Artificial Sequence: Synthetic polypeptide"
TAAAPSVFIFPPSDEQLKSGTASVVCLLNNFYPREAKVQWKVDNALQSGNSQESVTEQDSKDSTYSLSSTLTLSKADYEKHKVYACEVTHQGLSSPVTKSFNRGEC

SEQ ID NO: 28516 - protein, 114 aa, Artificial Sequence
  source: /note="Description of Artificial Sequence: Synthetic polypeptide"
ELTQPSSLSASPGASASLTCTLRSGINVGTYRIYWYQQKPGSPPQFLLRYKSDSDKEQGSGVPRRFSGSKDASANAGILLISGLQSEDEADYYCMIWHSGAWVFGGGTKLTVLS

SEQ ID NO: 28517 - protein, 96 aa, Artificial Sequence; identical to SEQ ID NO: 28034
  source: /note="Description of Artificial Sequence: Synthetic polypeptide"

SEQ ID NO: 28518 - protein, 120 aa, Artificial Sequence; identical to SEQ ID NO: 28035
  source: /note="Description of Artificial Sequence: Synthetic polypeptide"

SEQ ID NO: 28519 - protein, 111 aa, Artificial Sequence
  source: /note="Description of Artificial Sequence: Synthetic polypeptide"
DIQMTQSPSSLSASVGDRVTITCRASESVDSYGNSFMHWYQQTPGKAPKLLIYVASNLESGVPSRFSGSGSGTDYTFTISSLQPEDIATYYCQQNNEDPLTFGQGTKLQIT

SEQ ID NO: 28520 - protein, 111 aa, Artificial Sequence; identical to SEQ ID NO: 28037
  source: /note="Description of Artificial Sequence: Synthetic polypeptide"

SEQ ID NO: 28521 - protein, 105 aa, Artificial Sequence
  source: /note="Description of Artificial Sequence: Synthetic polypeptide"
QSALTQPPSASGSPGQSITISCNGTATNFVSWYQQFPDKAPKLIIFGVDKRPPGVPDRFSGSRSGTTASLTVSRLQTDDEAVYYCGSLVGNWDVIFGGGTTLTVL

SEQ ID NO: 28522 - protein, 105 aa, Artificial Sequence
  source: /note="Description of Artificial Sequence: Synthetic polypeptide"
QSALTQPPSASGSPGQSISISCTGTSNRFVSWYQQHPGKAPKLVIYGVNKRPSGVPDRFSGSKSGNTASLTVSGLQTDDEAVYYCSSLVGNWDVIFGGGTKLTVL

SEQ ID NO: 28523 - protein, 110 aa, Artificial Sequence
  source: /note="Description of Artificial Sequence: Synthetic polypeptide"
QSALTQPPSASGSLGQSLTISCSGTGSDIGSWNFVSWYQQFPGRAPNLIIFEVNRRRSGVPDRFSGSKSGNTASLTVSGLRSEDEAEYFCSSLSGRWDIVFGGGTKVTVL

SEQ ID NO: 28524 - protein, 107 aa, Artificial Sequence
  source: /note="Description of Artificial Sequence: Synthetic polypeptide"
EIVMTQSPPTLSVSPGETATLSCRASQNVKNNLAWYQLKPGQAPRLLIFDASSRAGGIPDRFSGSGYGTDFTLTVNSVQSEDFGDYFCQQYEEWPRTFGQGTKVDIK

SEQ ID NO: 28525 - protein, 107 aa, Artificial Sequence
  source: /note="Description of Artificial Sequence: Synthetic polypeptide"
EIMMTQSPAILSVSPGDRATLSCRASQSVKNNLAWYQKRPGQAPRLLIFDTSSRASGIPARFSGGGSGTEFTLTVNSMQSEDFATYYCQQYEEWPRTFGQGTKVEIK

SEQ ID NO: 28526 - protein, 112 aa, Artificial Sequence
  source: /note="Description of Artificial Sequence: Synthetic polypeptide"
DTVVTQSPLSLPVTPGEAASMSCSSTQSLRHSNGANYLAWYQHKPGQSPRLLIRLGSQRASGVPDRFSGSGSGTHFTLKISRVEAEDAAIYYCMQGLNRPWTFGKGTKLEIK

SEQ ID NO: 28527 - protein, 112 aa, Artificial Sequence; identical to SEQ ID NO: 28526
  source: /note="Description of Artificial Sequence: Synthetic polypeptide"

SEQ ID NO: 28528 - protein, 112 aa, Artificial Sequence
  source: /note="Description of Artificial Sequence: Synthetic polypeptide"
DTVVTQSPLSLPVTPGEAASMSCTSTQSLRHSNGANYLAWYQHKPGQSPRLLIRLGSQRASGVPDRFSGSGSGTHFTLKISRVEPEDAAIYYCMQGLNRPWTFGKGTKLEIK

SEQ ID NO: 28529 - protein, 112 aa, Artificial Sequence
  source: /note="Description of Artificial Sequence: Synthetic polypeptide"
DTVVTQSPLSLSVTPGEAASMSCTSTQSLRHSNGANYLAWYQHKPGQSPRLLIRLGSQRASGVPDRFSGSGSGTHFTLKISRVEADDAAIYYCMQGLNRPWTFGKGTKLEIK

SEQ ID NO: 28530 - protein, 112 aa, Artificial Sequence
  source: /note="Description of Artificial Sequence: Synthetic polypeptide"
DIVMTQTPLSLSVTPGQPASISCKSSESLRQSNGKTSLYWYRQKPGQSPQLLVFEVSNRFSGVSDRFVGSGSGTDFTLRISRVEAEDVGFYYCMQSKDFPLTFGGGTKVDLK

SEQ ID NO: 28531 - protein, 112 aa, Artificial Sequence
  source: /note="Description of Artificial Sequence: Synthetic polypeptide"
DIVMTQTPLSLSVDPGQPASISCKSSQSLRQSNGKTSLYWYQQKPGQSPQLLIFEVSNRFSGVSDRFVGSGSGTDFTLRISRVEAEDVGFYYCMQSKDFPLTFGGGTKVDLN

SEQ ID NO: 28532 - protein, 112 aa, Artificial Sequence
  source: /note="Description of Artificial Sequence: Synthetic polypeptide"
DIVLTQSPLFLSVSPGQPASISCKSSQSLRQSNGKTYLYWYVQKSGQSPQPLIQEVSIRFSGVPGRFAGSGSGTDFTLKISRVEAEDVGVYFCMQSKDFPLTFGGGTKVDLN

SEQ ID NO: 28533 - protein, 112 aa, Artificial Sequence
  source: /note="Description of Artificial Sequence: Synthetic polypeptide"
DIVMTQTPVSLSVSLGQAASISCSSSESLGRGDGRTYLHWYRQKPGQTPQLLMYEVSTRFSGVSDRFAGSGSRTQFTLKISRVEAEDVGVYYCMQSRDFPITFGGGTRVDLK

SEQ ID NO: 28534 - protein, 112 aa, Artificial Sequence
  source: /note="Description of Artificial Sequence: Synthetic polypeptide"
DIVMTQSPVSLSVTLGQPASMSCKSSQSVRQSDGKTFLYWYRQKPGQSPQLLIYEGSSRFSGVSDRISGSGSGTDFTLRISRVEAEDAGVYFCLQTKDFPLTFGGGTRVDLK

SEQ ID NO: 28535 - protein, 112 aa, Artificial Sequence
  source: /note="Description of Artificial Sequence: Synthetic polypeptide"
DIVMTQSPVSLSVTLGQPASMSCKSSQTVRQSDGKTFLYWYRQKAGQSPQLLIYEGSNRFSGVSDRISGSGSGTDFTLRISRVEAEDVGVYFCLQTKDFPLTFGGGTRVDIK

SEQ ID NO: 28536 - protein, 112 aa, Artificial Sequence
  source: /note="Description of Artificial Sequence: Synthetic polypeptide"
DIVMTQTPVSLSVTLGQPASMSCKSSQSLRQSDGKTFLYWYRQKAGQSPQLLISEASNRFSGVSDRFSGSGSGTDFTLKISRVEAEDVGIYFCMQTKDFPLTFGGGTKVDLK

SEQ ID NO: 28537 - protein, 112 aa, Artificial Sequence
  source: /note="Description of Artificial Sequence: Synthetic polypeptide"
DIVMTQTPVSVSVTLGQPASMSCKSSQSVRQSDGKTFLYWYRQKAGQSPQLLIYEASKRFSGVSDRFSGSGSGTDFTLKISRVGAEDVGVYFCMQTKDFPLTFGGGTKVDLK

SEQ ID NO: 28538 - protein, 128 aa, Artificial Sequence
  source: /note="Description of Artificial Sequence: Synthetic polypeptide"
METPAQLLFLLLLWLPDTTGEIVLTQSPGTLSLSAGERATLSCRASQSVSSRYLAWYQQKPGQAPRLLIYGASSRATGIPDRFSGSGSGTDFTLTISRVEPEDFAVYYCQQYDNSVCTFGQGTKLEIK

SEQ ID NO: 28539 - protein, 110 aa, Artificial Sequence
  source: /note="Description of Artificial Sequence: Synthetic polypeptide"
DIVLTQSPGTLSLSAGERATLSCRASQSVSSGSLAWYQQKPGQAPRLLIYGASTRATGIPDRFSGSGSGTDFTLTIGRLEPEDLAVYYCQQYGTSPYTFGQGTKLEIKRT

SEQ ID NO: 28540 - protein, 112 aa, Artificial Sequence
  source: /note="Description of Artificial Sequence: Synthetic polypeptide"
DIVMTQSPDSLAVSLGERVTMNCKSSQSLLYSTNQKNYLAWYQQKPGQSPKLLIYWASTRESGVPDRFSGSGSGTDFTLTISSVQAEDVAVYYCQQYYSYRTFGGGTKLEIK

SEQ ID NO: 28541 - protein, 102 aa, Artificial Sequence
  source: /note="Description of Artificial Sequence: Synthetic polypeptide"
QSALTQPAFVSGSPGQSITLSCSLGTADVSWYQQRPNSAPRLIIFDVKKRPSDVSDRFSGHNSDTAAFVTISELRPEDEAEYFCTSWPYRFGPGTKVDVARQ

SEQ ID NO: 28542 - protein, 100 aa, Artificial Sequence
  source: /note="Description of Artificial Sequence: Synthetic polypeptide"
QSALTQPAFVSGSPGQSITLSCTLGTEDVSWYQQRPNSAPRLIIFDVKKRPSDVSDRFSGHNSDTAAFLTISELRPEDEAEYFCTSWPYRFGRGTKVDVA

SEQ ID NO: 28543 - protein, 100 aa, Artificial Sequence
  source: /note="Description of Artificial Sequence: Synthetic polypeptide"
QSALTQPAFVSGSPGQSITLSCTLGTEDVSWYQQRPNSAPRLIIFDVKKRPSDVSDRFSGHNSDTAAFLTISELRPEDEADYFCTSWPYRFDRGTKVDVA

SEQ ID NO: 28544 - protein, 107 aa, Artificial Sequence
  source: /note="Description of Artificial Sequence: Synthetic polypeptide"
DIQMTQSPSSLSASIGDRVTITCRASQDIANYLNWYQKKSGTPPKLLIFGATNLHHGVSPRFSGSGHGTHFSLTITNVQHEDFANYFCQQSFQTVGSFGQGTWVDIR

SEQ ID NO: 28545 - protein, 107 aa, Artificial Sequence
  source: /note="Description of Artificial Sequence: Synthetic polypeptide"
DIQMTQSPSSLSASVGDRVTITCRASQDIANYLNWYQKKSGTPPKLLIFAATNLHRGVSPRFSGSGSGTHFSLTITNVQYEDFANYFCQHSFGTIGTFGQGTWVDIR

SEQ ID NO: 28546 - protein, 107 aa, Artificial Sequence
  source: /note="Description of Artificial Sequence: Synthetic polypeptide"
DIQMTQSPSSLSASIGDRVTITCRASQDIANYLNWYQKKSGTPPKLLIFAATNLHRGVSPRFTGSGHGTHFSLTITNVQHEDFGHYFCQQSFATVGSFGQGTWVDIR

SEQ ID NO: 28547 - protein, 107 aa, Artificial Sequence
  source: /note="Description of Artificial Sequence: Synthetic polypeptide"
DIQMTQSPSSLSASIGDRVTITCRASQDIANYLNWYQKKSGTPPKLLIFAATNLHRGVSPRFTGSGHGTHFSLTITNVQHEDFGNYFCQQSFATVGSFGQGTWVDIR

SEQ ID NO: 28548 - protein, 102 aa, Artificial Sequence
  source: /note="Description of Artificial Sequence: Synthetic polypeptide"
QSALTQPASVSGSPGQSINISCAGRSDRVSWYQQRPNGVPKLLMFDVYRRPSGVSDRFSGSHSGDTAFLTISGLQTEDEADYYCTSHPYAFGAGTKVNVLRQ

SEQ ID NO: 28549 - protein, 100 aa, Artificial Sequence
  source: /note="Description of Artificial Sequence: Synthetic polypeptide"
QSVLTQPAFVSGSPGQSITLSCTLGTEDVSWYQQRPNSAPRLIIFDVKKRPSDVSDRFSGHNSDTAAFLTISELRPEDEAEYFCTSWPYRFGRGTKVDVA

SEQ ID NO: 28550 - protein, 100 aa, Artificial Sequence
  source: /note="Description of Artificial Sequence: Synthetic polypeptide"
QSVLTQPASVSGSPGQSINISCAGRSDRVSWYQQRPNGVPKLLLFDVYRRPSGVSDRFSGSHSDDTAFLTISGLQTDDEADYYCTSHPYAFGPGTKVNVL

SEQ ID NO: 28551 - protein, 100 aa, Artificial Sequence
  source: /note="Description of Artificial Sequence: Synthetic polypeptide"
QSVLTQPAFVSASPGQSITLSCNLGTDYVSWYQQRPSSAPRLIIFDVKNRPSGVSDRFSGYNSDTAAFLTISGLQPEDEAEYYCTSWPYNFGPGTKVDVT

SEQ ID NO: 28552 - protein, 102 aa, Artificial Sequence
  source: /note="Description of Artificial Sequence: Synthetic polypeptide"
QSVLTQPASVSGSPGQTISISCSGTFGSDSVSWYQQYPNSAPTLIIFDVHRRPSGISTRFSGSTSGDTASLTISTLHREDEAYYYCTSHPYDFGGGTYVIVL

SEQ ID NO: 28553 - protein, 102 aa, Artificial Sequence
  source: /note="Description of Artificial Sequence: Synthetic polypeptide"
QSVLTQPASVSGSPGQTISISCSGTFGSDSVSWYQQFPNSAPTLIIFDVHRRPSGISTRFSGSTSGDTASLTISTLHREDEAFYYCTSHPYDFGGGTYVIVL

SEQ ID NO: 28554 - protein, 100 aa, Artificial Sequence
  source: /note="Description of Artificial Sequence: Synthetic polypeptide"
QSVLTQPAFVSGSPGQSITISCTVGTTDVSWYQQRPNSAPRLIIFDVKKRPSGVSDRFSGSSSDNAAFLTIAGLRPEDEAEYYCTSWPYRFGRGTKVDVG

SEQ ID NO: 28555 - protein, 100 aa, Artificial Sequence
  source: /note="Description of Artificial Sequence: Synthetic polypeptide"
QSALTHPAFVSGSPGQSITLSCTLGTEDVSWYQQRPNSAPRLIIFDVRKRPSEVSDRFSGHKSDTAAFLTISDLRPEDEAEYFCTSWPYRFDRGTRLDVA

SEQ ID NO: 28556 - protein, 102 aa, Artificial Sequence
  source: /note="Description of Artificial Sequence: Synthetic polypeptide"
QSALTQPASVSGSPGQSITISCTADSDYVSWYQQRPNSAPKLILFDVNSRPSGVSDRYSGSRSGNTASLTISGLQREDEADYFCTPWPYDFRPGTRVFVLGQ

SEQ ID NO: 28557 - protein, 107 aa, Artificial Sequence
  source: /note="Description of Artificial Sequence: Synthetic polypeptide"
ALQLTQSPSSLSASVGDRITITCRASQGVTSALAWYRQKPGSPPQLLIYDASSLESGVPSRFSGSGSGTEFTLTISTLRPEDFATYYCQQLHFYPHTFGGGTRVDVR

SEQ ID NO: 28558 - protein, 215 aa, Artificial Sequence
  source: /note="Description of Artificial Sequence: Synthetic polypeptide"
EIVLTQSPDTLSLSPGERATLSCRASQSVHSRYFAWYQHKPGQPPRLLIYGGSTRATGIPNRFSAGGSGTQFTLTVNRLEAEDFAVYYCQQYGRSPYTFGQGTKVEIRRTVAAPSVFIFPPSDEQLKSGTASVVCLLNNFYPREAKVQWKVDNALQSGNSQESVTEQDSKDSTYSLSSTLTLSKADYEKHKVYACEVTHQGLSSPVTKSFNRGEC

SEQ ID NO: 28559 - protein, 217 aa, Artificial Sequence
  source: /note="Description of Artificial Sequence: Synthetic polypeptide"
QSALTQPASVSGSPGQSITISCTGTSSDVGSYNFVSWYQQHPGKAPKLMIYEVSERPSGISNRFSGSKSGNTASLTISGLQAEDEADYYCSSYAGSTTFRVFGGGTKLTVRGQPKAAPSVTLFPPSSEELQANKATLVCLISDFYPGAVTVAWKADSSPVKAGVETTTPSKQSNNKYAASSYLSLTPEQWKSHRSYSCQVTHEGSTVEKTVAPTECS

SEQ ID NO: 28560 - protein, 210 aa, Artificial Sequence
  source: /note="Description of Artificial Sequence: Synthetic polypeptide"
EIVLTQSPATLSLSPGETAIISCRTSQSGSLAWYQQRPGQAPRLVIYSGSTRAAGIPDRFSGSRWGADYNLSISNLESGDFGVYYCQQYEFFGQGTKVQVDIKRTVAAPSVFIFPPSDEQLKSGTASVVCLLNNFYPREAKVQWKVDNALQSGNSQESVTEQDSKDSTYSLSSTLTLSKADYEKHKVYACEVTHQGLSSPVTKSFNRGEC

SEQ ID NO: 28561 - protein, 211 aa, Artificial Sequence
  source: /note="Description of Artificial Sequence: Synthetic polypeptide"
  MOD_RES (1)..(1): Any amino acid
XSALTQPPSASGSPGQSITISCTGTSNNFVSWYQQYPGKAPKLVIYEVNKRPSGVPDRFSGSKSGSTASLTVSGLQADDEGVYYCSSLVGNWDVIFGGGTKLTVLGQPKAAPSVTLFPPSSEELQANKATLVCLISDFYPGAVTVAWKADSSPVKAGVETTTPSKQSNNKYAASSYLSLTPEQWKSHRSYSCQVTHEGSTVEKTVAPTECS

SEQ ID NO: 28562 - protein, 265 aa, Artificial Sequence
  source: /note="Description of Artificial Sequence: Synthetic polypeptide"
METDTLLLWVLLLWVPGSTGDDIQMTQSPASLAVPLLLWISGAYGDIVLAQSPDSLAVSPGERATIHCKSSQTLLYSSNNRHSIAWYQQRPGQPPKLLLYWASMRLSGVPDRFSGSGSGTDFTLTINNLQAEDVAIYYCHQYSSHPPTFGHGTRVELRRTVAAPSVFIFPPSDEQLKSGTASVVCLLNNFYPREAKVQWKVDNALQSGNSQESVTEQDSKDSTYSLSSTLTLSKADYEKHKVYACEVTHQGLSSPVTKSFNRGEC

SEQ ID NO: 28563 - protein, 221 aa, Artificial Sequence
  source: /note="Description of Artificial Sequence: Synthetic polypeptide"
TGVLSQSVLTQPASVSGSPGQSITISCTGTSSDVGGYKYVSWYQQHPDKAPKLMIYEVSNRPSGVSNRFSGSKSGNTASLTISGLQAEDEADYYCSSYTSSSTWVFGGGTKLTVLGQPKAAPSVTLFPPSSEELQANKATLVCLISDFYPGAVTVAWKADSSPVKAGVETTTPSKQSNNKYAASSYLSLTPEQWKSHRSYSCQVTHEGSTVEKTVAPTECS

SEQ ID NO: 28564 - protein, 211 aa, Artificial Sequence
  source: /note="Description of Artificial Sequence: Synthetic polypeptide"
QSALTQPPSASGSPGQSITISCTGTSNNFVSWYQQHAGKAPKLVIYDVNKRPSGVPDRFSGSKSGNTASLTVSGLQTDDEAVYYCGSLVGNWDVIFGGGTKLTVLGQPKAAPSVTLFPPSSEELQANKATLVCLISDFYPGAVTVAWKADSSPVKAGVETTTPSKQSNNKYAASSYLSLTPEQWKSHRSYSCQVTHEGSTVEKTVAPTECS

SEQ ID NO: 28565 - protein, 241 aa, Artificial Sequence
  source: /note="Description of Artificial Sequence: Synthetic polypeptide"
QVQLVQSGAEVKKPGSSVKVSCKASGGTFSSYAISWVRQAPGQGLEWMGGIIPLFDTSNYAQNFQGRITITADKSTSTAYMELSSLRFEDTAIYYCARDNPLLLAMDVWGKGTTVTVSSGGGGSGGGGSGGGGSDIQMTQSPSTLSASIGDRVTITCRASEGIYHWLAWYQQKPGKAPKLLIYKASSLASGAPSRFSGSGSGTDFTLTISSLQPDDFATYYCQQYSNYPLTFGGGTKLEIK

SEQ ID NO: 28566 - protein, 254 aa, Artificial Sequence
  source: /note="Description of Artificial Sequence: Synthetic polypeptide"
VLTQSPGTLSLSAGERATLSCRASQSVSSGSLAWYQQKPGQAPRLLIYGASTRATGIPDRFSGSGSGTDFTLTIGRLEPEDLAVYYCQQYGTSPYTFGQGTKLEIKRTGGGGSGGGGSGGGGSVQLLEQSGAEVKKPGSSVQVSCKASGGTFSMYGFNWVRQAPGHGLEWMGGIIPIFGTTNYAQKFRGRVTFTADQATSTAYMELTNLRSDDTAVYYCARDFGPDWEGGDSYDGSGRGFFDFWGQGTLVNVSS

SEQ ID NO: 28567 - protein, 254 aa, Artificial Sequence
  source: /note="Description of Artificial Sequence: Synthetic polypeptide"
VLTQSPGTLSLSAGERATLSCRASQSVSSGSLAWYQQKPGQAPRLLIYGASTRATGIPDRFSGSGSGTDFTLTIGRLEPEDLAVYYCQQYGTSPYTFGQGTKLEIKRTGGGGSSGGASGGGGSVRLLEQSGAEVKKPGSSVQVSCKASGGTFSMYGVNWVRQAPGHGLEWMGGIIPIFGTSNYAQKFRGRVTFTADQATSTAYMELTNLRSDDTAVYYCARDFGPDWEDGDSYDGSGRGFFDFWGQGTLVTVSS

SEQ ID NO: 28568 - protein, 254 aa, Artificial Sequence
  source: /note="Description of Artificial Sequence: Synthetic polypeptide"
VLTQSPGTLSLSAGERATLSCRASQSVSSGSLAWYQQKPGQAPRLLIYGASTRATGIPDRFSGSGSGTDFTLTIGRLEPEDLAVYYCQQYGTSPYTFGQGTKLEIKRTGGGGSGGGGSGGGGSVQLLEQSGAEVKKPGSSVQVSCKASGGTFSMYGFNWVRQAPGHGLEWMGGIIPIFGTSNYAQKFRGRVTFTADQATSTAYMELTNLRSDDTAVYYCARDFGPDWEDGDSYDGSGRGFFDFWGQGTLVTVSS

SEQ ID NO: 28569 - protein, 256 aa, Artificial Sequence
  source: /note="Description of Artificial Sequence: Synthetic polypeptide"
HHHHHHQVQLVQSGAEVKKPGASVKVSCQASGYRFSHFTVHWVRQAPGQRFEWMGWINPYNGNKEFSAKFQDRVTFTADTSANTAYMELRSLRSADTAVYYCARVGEWGWDDSPYDNYYMDVWGKGTTVIVSSGGGGSGGGGSGGGGSEIVLTQAPGTLSLSPGERATFSCRSSHSIRSRRVAWYQHKPGQAPRLVIHGVSNRASGISDRFSGSGSGTDFTLTITRVEPEDFALYYCQVYGASSYTFGQGTKLERK

SEQ ID NO: 28570 - protein, 240 aa, Artificial Sequence
  source: /note="Description of Artificial Sequence: Synthetic polypeptide"
QVQLVQSGAEVRKPGASVKVSCKASGDTFSSYAISWVRQAPGQGLEWMGGIIPIFGTANYAQKFQGRVTITADESTSTAYMELSSLRSEDTAIYYCARDNPTLLGSDYWGKGTLVTVSSGGGGSGGGGSGGGGSDIQMTQSPSTLSASIGDRVTITCRASEGIYHWLAWYQQKPGKAPKLLIYKASSLASGAPSRFSGSGSGTDFTLTISSLQPDDFATYYCQQYSNYPLTFGGGTKLEI

SEQ ID NO: 28571 - protein, 487 aa, Artificial Sequence
  source: /note="Description of Artificial Sequence: Synthetic polypeptide"
VLTQSPGTLSLSAGERATLSCRASQSVSSGSLAWYQQKPGQAPRLLIYGASTRATGIPDRFSGSGSGTDFTLTIGRLEPEDLAVYYCQQYGTSPYTFGQGTKLEIKRTGGGGSSGGASGGGGSVRLLEQSGAEVKKPGSSVQVSCKASGGTFSMYGVNWVRQAPGHGLEWMGGIIPIFGTSNYAQKFRGRVTFTADQATSTAYMELTNLRSDDTAVYYCARDFGPDWEDGDSYDGSGRGFFDFWGQGTLVTVSSGGGGSGGGGSGGGGSGGGGSGGGGSGGGGSMNRGVPFRHLLLVLQLALLPAATQGKKVVLGKKGDTVELTCTASQKKSIQFHWKNSNQIKILGNQGSFLTKGPSKLNDRADSRRSLWDQGNFPLIIKNLKIEDSDTYICEVEDQKEEVQLLVFGLTANSDTHLLQGQSLTLTLESPPGSSPSVQCRSPRGKNIQGGKTLSVSQLELQDSGTWTCTVLQNQKKVEFKIDIVVLA

SEQ ID NO: 28572 - protein, 231 aa, Artificial Sequence
  source: /note="Description of Artificial Sequence: Synthetic polypeptide"
EVQLVESGGGLVKPGGSLRLTCVASGFTFSDVWLNWVRQAPGKGLEWVGRIKSRTDGGTTDYAASVKGRFTISRDDSKNTLYLQMNSLKTEDTAVYSCTTDGFIMIRGVSEDYYYYYMDVWGKGTTVTVSSASTKGPSVFPLAPCSRSTSGGTAALGCLVKDYFPEPVTVSWNSGALTSGVHTFPAVLQSSGLYSLSSVVTVPSSSLGTQTYTCNVNHKPSNTKVDKRVEL

SEQ ID NO: 28573 - protein, 216 aa, Artificial Sequence
  source: /note="Description of Artificial Sequence: Synthetic polypeptide"
QSVLTQPPSVSAAPGQKVTISCSGSSSNIGNNYVLWYQQFPGTAPKLLIYGNNKRPSGIPDRFSGSKSGTSATLGITGLQTGDEADYFCATWDSGLSADWVFGGGTKLTVLSQPKAAPSVTLFPPSSEELQANKATLVCLISDFYPGAVTVAWKADSSPVKAGVETTTPSKQSNNKYAASSYLSLTPEQWKSHRSYSCQVTHEGSTVEKTVAPTEC

SEQ ID NO: 28574 - protein, 224 aa, Artificial Sequence
  source: /note="Description of Artificial Sequence: Synthetic polypeptide"
QVQLQESGPGLVKPSETLSLTCTVSGGSISSHYWSWIRQSPGKGLQWIGYIYYSGSTNYSPSLKSRVTISVETAKNQFSLKLTSMTAADTAVYYCARGPVPAVFYGDYRLDPWGQGTLVTVSSASTKGPSVFPLAPSSKSTSGGTAALGCLVKDYFPEPVTVSWNSGALTSGVHTFPAVLQSSGLYSLSSVVTVPSSSLGTQTYICNVNHKPSNTKVDKKVEPK

SEQ ID NO: 28575 - protein, 215 aa, Artificial Sequence
  source: /note="Description of Artificial Sequence: Synthetic polypeptide"
EIVLTQSPGTLSLSAGERATLSCRASQSVSSRYLAWYQQKPGQAPRLLIYGASSRATGIPDRFSGSGSGTDFTLTISRVEPEDFAVYYCQQYDNSVCTFGQGTKLEIKRTVAAPSVFIFPPSDEQLKSGTASVVCLLNNFYPREAKVQWKVDNALQSGNSQESVTEQDSKDSTYSLSSTLTLSKADYEKHKVYACEVTHQGLSSPVTKSFNRGEC

SEQ ID NO: 28576 - protein, 245 aa, Artificial Sequence; identical to SEQ ID NO: 27104
  source: /note="Description of Artificial Sequence: Synthetic polypeptide"

SEQ ID NO: 28577 - protein, 213 aa, Artificial Sequence; identical to SEQ ID NO: 28142
  source: /note="Description of Artificial Sequence: Synthetic polypeptide"

SEQ ID NO: 28578 - protein, 245 aa, Artificial Sequence
  source: /note="Description of Artificial Sequence: Synthetic polypeptide"
QVQLVQSGAEVKKPGSSVKVSCKASGGTFNSYAFSWVRQAPGQGLEWMGSIIPIFGTTNYAQKFQGRVTITADESTSTAYMELSSLRSEDTAVYYCARYFDTYNNYGFANWGQGTLVTVSSASTKGPSVFPLAPSSKSTSGGTAALGCLVKDYFPEPVTVSWNSGALTSGVHTFPAVLQSSGLYSLSSVVTVPSSSLGTQTYICNVNHKPSNTKVDKKVEPKSEFEQKLISEEDLNGAPHHHHHH

SEQ ID NO: 28579 - protein, 213 aa, Artificial Sequence; identical to SEQ ID NO: 28142
  source: /note="Description of Artificial Sequence: Synthetic polypeptide"

SEQ ID NO: 28580 - protein, 200 aa, Artificial Sequence
  source: /note="Description of Artificial Sequence: Synthetic polypeptide"
ALQLTQSPSSLSASVGDRITITCRASQGVTSALAWYRQKPGSPPQLLIYDASSLESGVPSRFSGSGSGTEFTLTISTLRPEDFATYYCQQLHFYPHTFGGGTRVDVRRTVAAPSVFIFPPSDEQLKSGTASVVCLLNNFYPREAKVQWKVDNALQSGNSQESVTEQDSKDSTYSLSSTLTLSKADYEKHKVYACEVTHQG

SEQ ID NO: 28581 - protein, 462 aa, Artificial Sequence
  source: /note="Description of Artificial Sequence: Synthetic polypeptide"
RITLKESGPPLVKPTQTLTLTCSFSGFSLSDFGVGVGWIRQPPGKALEWLAIIYSDDDKRYSPSLNTRLTITKDTSKNQVVLVMTRVSPVDTATYFCAHRRGPTTLFGVPIARGPVNAMDVWGQGITVTISSASTKGPSVFPLAPSSKSTSGGTAALGCLVKDYFPEPVTVSWNSGALTSGVHTFPAVLQSSGLYSLSSVVTVPSSSLGTQTYICNVNHKPSNTKVDKKVEPKSCDKTHTCPPCPAPELLGGPSVFLFPPKPKDTLMISRTPEVTCVVVDVSHEDPEVKFNWYVDGVEVHNAKTKPREEQYNSTYRVVSVLTVLHQDWLNGKEYKCKVSNKAFPAPIEKTISKAKGQPREPQVYTLPPSRDELTKNQVSLTCLVKGFYPSDIAVEWESNGQPENNYKTTPPVLDSDGSFFLYSKLTVDKSRWQQGNVFSCSVMHEALHNHYTQKSLSLSPGK

SEQ ID NO: 28582 - protein, 228 aa, Artificial Sequence
  source: /note="Description of Artificial Sequence: Synthetic polypeptide"
VQLLESGPGVVKPSETLSLTCTVSGASVNNYYWTWVRQPPGKGLEWIGNVYDSGDTNYNPSLSSRLSLSMDTSKNQFSLRLSSVTAADTATYYCARYHRHFIRGPLSFDYWGRGTLVTVSSASTKGPSVFPLAPSSKSTSGGTSALGCLVKDYFPEPVTVSWNSGALTSGVHTFPAVLQSSGLYSLSSVVTVPSSSLGTQTYICNVNHKPSNTKVDKKVEPKSCDKTS

SEQ ID NO: 28583 - protein, 213 aa, Artificial Sequence
  source: /note="Description of Artificial Sequence: Synthetic polypeptide"
LQMTQSPSFLSASVGDRVSITCRASQDIQKFLAWYQLTPGDAPKLLMYSASTLQSGVPSRFSGSGSGTEFTLTISGLQPEDFATYYCQHLKRYPYTFGQGTKLEISRTVAAPSVFIFPPSDEQLKSGTASVVCLLNNFYPREAKVQWKVDNALQSGNSQESVTEQDNKDSTYSLSSTLTLSKADYEKHKVYACEVTHQGLSSPVTKSFNRGEC

SEQ ID NO: 28584 - protein, 238 aa, Artificial Sequence
  source: /note="Description of Artificial Sequence: Synthetic polypeptide"
QEQLVESGGGVVQPGGSLRLSCLASGFTFHKYGMHWVRQAPGKGLEWVALISDDGMRKYHSDSMWGRVTISRDNSKNTLYLQFSSLKVEDTAMFFCAREAGGPIWHDDVKYYDFNDGYYNYHYMDVWGKGTTVTVSSASTKGPSVFPLAPSSKSTSGGTAALGCLVKDYFPEPVTVSWNSGALTSGVHTFPAVLQSSGLYSLSSVVTVPSSSLGTQTYICNVNHKPSNTKVDKRVEPK

SEQ ID NO: 28585 - protein, 216 aa, Artificial Sequence; identical to SEQ ID NO: 28133
  source: /note="Description of Artificial Sequence: Synthetic polypeptide"

SEQ ID NO: 28586 - RNA, 19 nt, Homo sapiens
ccgguuccagucccuggag

SEQ ID NO: 28587 - RNA, 22 nt, Homo sapiens
ugcucagguugcacagcuggga

SEQ ID NO: 28588 - RNA, 22 nt, Homo sapiens
ucagguguggaaacugaggcag

SEQ ID NO: 28589 - RNA, 22 nt, Homo sapiens
caaaaccgcgauuacucuugca

SEQ ID NO: 28590 - RNA, 21 nt, Homo sapiens
aaaaguaauugugguuuuugc

SEQ ID NO: 28591 - RNA, 21 nt, Homo sapiens
aaaaacugcaaucacuuuugc

SEQ ID NO: 28592 - RNA, 22 nt, Homo sapiens
caaaagugauugugguuuuugc

SEQ ID NO: 28593 - RNA, 22 nt, Homo sapiens
agcaguguuuguuuugcccaca

SEQ ID NO: 28594 - RNA, 22 nt, Homo sapiens
ucgggcgcaagagcacugcagu

SEQ ID NO: 28595 - RNA, 21 nt, Homo sapiens
acacuuguugggaugaccugc

SEQ ID NO: 28596 - RNA, 24 nt, Homo sapiens
aggagcuauccacuccaggugucc

SEQ ID NO: 28597 - RNA, 23 nt, Homo sapiens
ccagagcagccugcgguaacagu

SEQ ID NO: 28598 - RNA, 22 nt, Homo sapiens
aguugccagggcugccuuuggu

SEQ ID NO: 28599 - RNA, 21 nt, Homo sapiens
uagaccaucuuucuagaguau

SEQ ID NO: 28600 - RNA, 22 nt, Homo sapiens
agcucuagaaagauuguugacc

SEQ ID NO: 28601 - RNA, 21 nt, Homo sapiens
gggacuaggaugcagaccucc

SEQ ID NO: 28602 - RNA, 23 nt, Homo sapiens
aggucugcauucaaauccccaga

SEQ ID NO: 28603 - RNA, 20 nt, Homo sapiens
cauuacagcacagccauucu

SEQ ID NO: 28604 - RNA, 21 nt, Homo sapiens
ucuggcugugcuguaaugcag

SEQ ID NO: 28605 - RNA, 21 nt, Homo sapiens
ugacuucuaccucuuccaaag

SEQ ID NO: 28606 - RNA, 22 nt, Homo sapiens
uuggaauaggggauaucucagc

SEQ ID NO: 28607 - RNA, 22 nt, Homo sapiens
ucguaucagagauuccagacac

SEQ ID NO: 28608 - RNA, 23 nt, Homo sapiens
acugggaugucacugaauauggu

SEQ ID NO: 28609 - RNA, 22 nt, Homo sapiens
caaaguccuuccuauuuuuccc

SEQ ID NO: 28610 - RNA, 21 nt, Homo sapiens
gaagaauaggagggacuuugu

SEQ ID NO: 28611 - RNA, 22 nt, Homo sapiens
ugggccaugcauuucuagaacu

SEQ ID NO: 28612 - RNA, 21 nt, Homo sapiens
ucuagaaaugcaugacccacc

SEQ ID NO: 28613 - RNA, 22 nt, Homo sapiens
uuccacugccacuaccuaauuu

SEQ ID NO: 28614 - RNA, 21 nt, Homo sapiens
auuagguaguggcaguggaac

SEQ ID NO: 28615 - RNA, 21 nt, Homo sapiens
caccgacucugucuccugcag

SEQ ID NO: 28616 - RNA, 22 nt, Homo sapiens
cagcaggggagagagaggaguc

SEQ ID NO: 28617 - RNA, 22 nt, Homo sapiens
uuccagcccuucuaaugguagg

SEQ ID NO: 28618 - RNA, 22 nt, Homo sapiens
uaccauuagaagagcuggaaga

SEQ ID NO: 28619 - RNA, 21 nt, Homo sapiens
ucaagugucaucugucccuag

SEQ ID NO: 28620 - RNA, 23 nt, Homo sapiens
uuugggauugacgccacaugucu

SEQ ID NO: 28621 - RNA, 21 nt, Homo sapiens
cugccuguucuuccacuccag

SEQ ID NO: 28622 - RNA, 23 nt, Homo sapiens
uauggaguggacuuucagcuggc

SEQ ID NO: 28623 - RNA, 22 nt, Homo sapiens
ccucaccaucccuucugccugc

SEQ ID NO: 28624 - RNA, 23 nt, Homo sapiens
caggcagaaguggggcugacagg

SEQ ID NO: 28625 - RNA, 20 nt, Homo sapiens
ucucuucaucuaccccccag

SEQ ID NO: 28626 - RNA, 21 nt, Homo sapiens
uuggaggguguggaagacauc

SEQ ID NO: 28627 - RNA, 22 nt, Homo sapiens
cugccagccccguuccagggca

SEQ ID NO: 28628 - RNA, 23 nt, Homo sapiens
acaaaguacagcauuagccuuag

SEQ ID NO: 28629 - RNA, 23 nt, Homo sapiens
aaaggucauuguaagguuaaugc

SEQ ID NO: 28630 - RNA, 22 nt, Homo sapiens
ugaggcuaaugcacuacuucac

SEQ ID NO: 28631 - RNA, 24 nt, Homo sapiens
uauagagagcaggaagauuaaugu

SEQ ID NO: 28632 - RNA, 23 nt, Homo sapiens
gugcuucaucguaauuaaccuua

SEQ ID NO: 28633 - RNA, 24 nt, Homo sapiens
guggaaagcaugcauccagggugu

SEQ ID NO: 28634 - RNA, 22 nt, Homo sapiens
agacacauuuggagagggaacc

SEQ ID NO: 28635 - RNA, 22 nt, Homo sapiens
uucccuuugucauccuaugccu

SEQ ID NO: 28636 - RNA, 21 nt, Homo sapiens
gcugggaaggcaaagggacgu

SEQ ID NO: 28637 - RNA, 21 nt, Homo sapiens
uaccacaggguagaaccacgg

SEQ ID NO: 28638 - RNA, 22 nt, Homo sapiens
ggcuggagcgagugcaguggug

SEQ ID NO: 28639 - RNA, 18 nt, Homo sapiens
ccaggcucugcaguggga

SEQ ID NO: 28640 - RNA, 22 nt, Homo sapiens
cugggaggugugauauuguggu

SEQ ID NO: 28641 - RNA, 22 nt, Homo sapiens
gggaggugugaucucacacucg

SEQ ID NO: 28642 - RNA, 22 nt, Homo sapiens
ugugauaucaugguuccuggga

SEQ ID NO: 28643 - RNA, 22 nt, Homo sapiens
ugugauaucgugcuuccuggga

SEQ ID NO: 28644 - RNA, 18 nt, Homo sapiens
ggugggcuucccggaggg

SEQ ID NO: 28645 - RNA, 18 nt, Homo sapiens
cacugcaggacucagcag

SEQ ID NO: 28646 - RNA, 17 nt, Homo sapiens
ugagggaggagacugca

SEQ ID NO: 28647 - RNA, 18 nt, Homo sapiens
gaggcugaaggaagaugg

SEQ ID NO: 28648 - RNA, 22 nt, Homo sapiens
gucacugaugucuguagcugag

SEQ ID NO: 28649 - RNA, 22 nt, Homo sapiens
accugucuguggaaaggagcua

SEQ ID NO: 28650 - RNA, 22 nt, Homo sapiens
agaguuaacucaaaauggacua

SEQ ID NO: 28651 - RNA, 22 nt, Homo sapiens
uguugggauucagcaggaccau

SEQ ID NO: 28652 - RNA, 17 nt, Homo sapiens
gaagauggacguacuuu

SEQ ID NO: 28653 - RNA, 21 nt, Homo sapiens
ucugaauagagucugaagagu

SEQ ID NO: 28654 - RNA, 22 nt, Homo sapiens
caaggagacgggaacauggagc

SEQ ID NO: 28655 - RNA, 20 nt, Homo sapiens
aaaagcugggcugagaggcg

SEQ ID NO: 28656 - RNA, 18 nt, Homo sapiens
aggcuggagugagcggag

SEQ ID NO: 28657 - RNA, 22 nt, Homo sapiens
gcgacucugaaaacuagaaggu

SEQ ID NO: 28658 - RNA, 20 nt, Homo sapiens
aaagacucugcaagaugccu

SEQ ID NO: 28659 - RNA, 21 nt, Homo sapiens
acaggagugggggugggacau

SEQ ID NO: 28660 - RNA, 21 nt, Homo sapiens
cgucccaccccccacuccugu

SEQ ID NO: 28661 - RNA, 18 nt, Homo sapiens
aggagaaguaaaguagaa

SEQ ID NO: 28662 - RNA, 22 nt, Homo sapiens
auggccagagcucacacagagg

SEQ ID NO: 28663 - RNA, 21 nt, Homo sapiens
ugggcucaggguacaaagguu

SEQ ID NO: 28664 - RNA, 21 nt, Homo sapiens
cacaggcuuagaaaagacagu

SEQ ID NO: 28665 - RNA, 22 nt, Homo sapiens
gugacugauaccuuggaggcau

SEQ ID NO: 28666 - RNA, 22 nt, Homo sapiens
ugucguggggcuugcuggcuug

SEQ ID NO: 28667 - RNA, 17 nt, Homo sapiens
acagggaggagauugua

SEQ ID NO: 28668 - RNA, 17 nt, Homo sapiens
gccggacaagagggagg

SEQ ID NO: 28669 - RNA, 17 nt, Homo sapiens
uuggaggcguggguuuu

SEQ ID NO: 28670 - RNA, 18 nt, Homo sapiens
cucgaguuggaagaggcg

SEQ ID NO: 28671 - RNA, 21 nt, Homo sapiens
cacggcaaaagaaacaaucca

SEQ ID NO: 28672 - RNA, 22 nt, Homo sapiens
agauuguuucuuuugccgugca

SEQ ID NO: 28673 - RNA, 17 nt, Homo sapiens
ggugggggcuguuguuu

SEQ ID NO: 28674 - RNA, 20 nt, Homo sapiens
ggcuccuuggucuaggggua

SEQ ID NO: 28675 - RNA, 22 nt, Homo sapiens
cgucccggggcugcgcgaggca

SEQ ID NO: 28676 - RNA, 22 nt, Homo sapiens
uggggauuuggagaagugguga

SEQ ID NO: 28677 - RNA, 17 nt, Homo sapiens
ugguagagcugaggaca

SEQ ID NO: 28678 - RNA, 23 nt, Homo sapiens
uugaauucuuggccuuaagugau

SEQ ID NO: 28679 - RNA, 20 nt, Homo sapiens
gagcuuggucuguagcgguu

SEQ ID NO: 28680 - RNA, 20 nt, Homo sapiens
ggauccgagucacggcacca

SEQ ID NO: 28681 - RNA, 17 nt, Homo sapiens
aggguguguguguuuuu

SEQ ID NO: 28682 - RNA, 17 nt, Homo sapiens
ccugguggcuuccuuuu

SEQ ID NO: 28683 - RNA, 22 nt, Homo sapiens
ucacaagguauugacuggcgua

SEQ ID NO: 28684 - RNA, 19 nt, Homo sapiens
agagguagguguggaagaa

SEQ ID NO: 28685 - RNA, 22 nt, Homo sapiens
ccaggaggcggaggagguggag

SEQ ID NO: 28686 - RNA, 22 nt, Homo sapiens
auagugguugugaauuuaccuu

SEQ ID NO: 28687 - RNA, 23 nt, Homo sapiens
gauugagacuaguagggcuaggc

SEQ ID NO: 28688 - RNA, 23 nt, Homo sapiens
ugacacggaggguggcuugggaa

SEQ ID NO: 28689 - RNA, 17 nt, Homo sapiens
gagacugggguggggcc

SEQ ID NO: 28690 - RNA, 21 nt, Homo sapiens
aagguuuggauagaugcaaua

SEQ ID NO: 28691 - RNA, 22 nt, Homo sapiens
cucaaguagucugaccagggga

SEQ ID NO: 28692 - RNA, 18 nt, Homo sapiens
gggugcgggccggcgggg

SEQ ID NO: 28693 - RNA, 18 nt, Homo sapiens
agagcagaaggaugagau

SEQ ID NO: 28694 - RNA, 21 nt, Homo sapiens
uggcaaacguggaagccgaga

SEQ ID NO: 28695 - RNA, 18 nt, Homo sapiens
ggugggggguguuguuuu

SEQ ID NO: 28696 - RNA, 22 nt, Homo sapiens
cuagugcucuccguuacaagua

SEQ ID NO: 28697 - RNA, 22 nt, Homo sapiens
caagggaccaagcauucauuau

SEQ ID NO: 28698 - RNA, 22 nt, Homo sapiens
caggaaggauuuagggacaggc

SEQ ID NO: 28699 - RNA, 22 nt, Homo sapiens
cuauuaaggacauuugugauuc

SEQ ID NO: 28700 - RNA, 22 nt, Homo sapiens
auuaaggacauuugugauugau

SEQ ID NO: 28701 - RNA, 17 nt, Homo sapiens
gaggcugagcugaggag

SEQ ID NO: 28702 - RNA, 22 nt, Homo sapiens
cgcgcggccgugcucggagcag

SEQ ID NO: 28703 - RNA, 21 nt, Homo sapiens
agccaaguggaaguuacuuua

SEQ ID NO: 28704 - RNA, 17 nt, Homo sapiens
ggagugggcuggugguu

SEQ ID NO: 28705 - RNA, 22 nt, Homo sapiens
uuucuauuucucaguggggcuc

SEQ ID NO: 28706 - RNA, 22 nt, Homo sapiens
aacccagugggcuauggaaaug

SEQ ID NO: 28707 - RNA, 17 nt, Homo sapiens
gggguggucuguuguug

SEQ ID NO: 28708 - RNA, 20 nt, Homo sapiens
aaaaggcgggagaagcccca

SEQ ID NO: 28709 - RNA, 20 nt, Homo sapiens
uaacggccgcgguacccuaa

SEQ ID NO: 28710 - RNA, 17 nt, Homo sapiens
gcugggcgaggcuggca

SEQ ID NO: 28711 - RNA, 19 nt, Homo sapiens
agagcuggcugaagggcag

SEQ ID NO: 28712 - RNA, 18 nt, Homo sapiens
agggggcgggcuccggcg

SEQ ID NO: 28713 - RNA, 22 nt, Homo sapiens
ucugguaagagauuugggcaua

SEQ ID NO: 28714 - RNA, 22 nt, Homo sapiens
aauguggacuggugugaccaaa

SEQ ID NO: 28715 - RNA, 17 nt, Homo sapiens
ggggcugggcgcgcgcc

SEQ ID NO: 28716 - RNA, 21 nt, Homo sapiens
agaaggccuuuccaucucugu

SEQ ID NO: 28717 - RNA, 22 nt, Homo sapiens
ccagacuguggcugaccagagg

SEQ ID NO: 28718 - RNA, 21 nt, Homo sapiens
aauguaaacaggcuuuuugcu

SEQ ID NO: 28719 - RNA, 22 nt, Homo sapiens
gaggaaacugaagcugagaggg

SEQ ID NO: 28720 - RNA, 17 nt, Homo sapiens
cuccgggacggcugggc

SEQ ID NO: 28721 - RNA, 22 nt, Homo sapiens
ugggcuggcagggcaagugcug

SEQ ID NO: 28722 - RNA, 17 nt, Homo sapiens
aagacugagaggaggga

SEQ ID NO: 28723 - RNA, 17 nt, Homo sapiens
ugagguaguaguuucuu

SEQ ID NO: 28724 - RNA, 21 nt, Homo sapiens
uaugugaccucggaugaauca

SEQ ID NO: 28725 - RNA, 22 nt, Homo sapiens
gcugaugaugauggugcugaag

SEQ ID NO: 28726 - RNA, 22 nt, Homo sapiens
uuuaagcaggaaauagaauuua

SEQ ID NO: 28727 - RNA, 22 nt, Homo sapiens
ugugacaauagagaugaacaug

SEQ ID NO: 28728 - RNA, 18 nt, Homo sapiens
aggcugggcugggacgga

SEQ ID NO: 28729 - RNA, 20 nt, Homo sapiens
aaauggguggucugaggcaa

SEQ ID NO: 28730 - RNA, 20 nt, Homo sapiens
cuggguugggcugggcuggg

SEQ ID NO: 28731 - RNA, 17 nt, Homo sapiens
gcggggcugggcgcgcg

SEQ ID NO: 28732 - RNA, 22 nt, Homo sapiens
acuaaaggauauagaagguuuu

SEQ ID NO: 28733 - RNA, 22 nt, Homo sapiens
ugagggaguaggauguaugguu

SEQ ID NO: 28734 - RNA, 22 nt, Homo sapiens
gaagaacuguugcauuugcccu

SEQ ID NO: 28735 - RNA, 22 nt, Homo sapiens
cagggccucacuguaucgccca

SEQ ID NO: 28736 - RNA, 22 nt, Homo sapiens
agacugacggcuggaggcccau

SEQ ID NO: 28737 - RNA, 18 nt, Homo sapiens
acaggcaggauuggggaa

SEQ ID NO: 28738 - RNA, 22 nt, Homo sapiens
aggacuggacucccggcagccc

SEQ ID NO: 28739 - RNA, 17 nt, Homo sapiens
gggagaagggucggggc

SEQ ID NO: 28740 - RNA, 25 nt, Homo sapiens
aaauaugaugaaacucacagcugag

SEQ ID NO: 28741 - RNA, 26 nt, Homo sapiens
gcucagggaugauaacugugcugaga

SEQ ID NO: 28742 - RNA, 18 nt, Homo sapiens
cagcagugcgcagggcug

SEQ ID NO: 28743 - RNA, 22 nt, Homo sapiens
gcuaaggaaguccugugcucag

SEQ ID NO: 28744 - RNA, 21 nt, Homo sapiens
ugacucugccuguaggccggu

SEQ ID NO: 28745 - RNA, 21 nt, Homo sapiens
gaccgagagggccucggcugu

SEQ ID NO: 28746 - RNA, 21 nt, Homo sapiens
ggggggaugugcaugcugguu

SEQ ID NO: 28747 - RNA, 22 nt, Homo sapiens
uggucugcaaagagaugacugu

SEQ ID NO: 28748 - RNA, 22 nt, Homo sapiens
ucauuauauguaugaucuggac

SEQ ID NO: 28749 - RNA, 18 nt, Homo sapiens
cccagcaggacgggagcg

SEQ ID NO: 28750 - RNA, 17 nt, Homo sapiens
auggagaaggcuucuga

SEQ ID NO: 28751 - RNA, 17 nt, Homo sapiens
ccccggggagcccggcg

SEQ ID NO: 28752 - RNA, 22 nt, Homo sapiens
uggaaggagguugccggacgcu

SEQ ID NO: 28753 - RNA, 17 nt, Homo sapiens
ggauggaggaggggucu

SEQ ID NO: 28754 - RNA, 17 nt, Homo sapiens
guggaccuggcugggac

SEQ ID NO: 28755 - RNA, 21 nt, Homo sapiens
ucgugcauauaucuaccacau

SEQ ID NO: 28756 - RNA, 21 nt, Homo sapiens
ugugguagauauaugcacgau

SEQ ID NO: 28757 - RNA, 22 nt, Homo sapiens
ugagccgagcugagcuuagcug

SEQ ID NO: 28758 - RNA, 22 nt, Homo sapiens
gagcuuggaugagcugggcuga

SEQ ID NO: 28759 - RNA, 22 nt, Homo sapiens
gcugaacugggcugagcugggc

SEQ ID NO: 28760 - RNA, 21 nt, Homo sapiens
uuaguccugccuguagguuua

SEQ ID NO: 28761 - RNA, 20 nt, Homo sapiens
uugggcugggcuggguuggg

SEQ ID NO: 28762 - RNA, 20 nt, Homo sapiens
uaggaugggggugagaggug

SEQ ID NO: 28763 - RNA, 22 nt, Homo sapiens
aaaaguaauuguggauuuugcu

SEQ ID NO: 28764 - RNA, 22 nt, Homo sapiens
caaaaaccggcaauuacuuuug

SEQ ID NO: 28765 - RNA, 22 nt, Homo sapiens
gaaaacgacaaugacuuuugca

SEQ ID NO: 28766 - RNA, 21 nt, Homo sapiens
caaaaacugcaauuacuuuca

SEQ ID NO: 28767 - RNA, 21 nt, Homo sapiens
aaagguaauugugguuucugc

SEQ ID NO: 28768 - RNA, 22 nt, Homo sapiens
caaaaacugcaguuacuuuugc

SEQ ID NO: 28769 - RNA, 20 nt, Homo sapiens
aaaagugauugcaguguuug

SEQ ID NO: 28770 - RNA, 22 nt, Homo sapiens
aaagguaauugcaguuuuuccc

SEQ ID NO: 28771 - RNA, 21 nt, Homo sapiens
uaaaaacugcaauuacuuuua

SEQ ID NO: 28772 - RNA, 23 nt, Homo sapiens
ugcaaaaguaauugcaguuuuug

SEQ ID NO: 28773 - RNA, 21 nt, Homo sapiens
aaaaguaacugcgguuuuuga

SEQ ID NO: 28774 - RNA, 22 nt, Homo sapiens
aacggcaaugacuuuuguacca

SEQ ID NO: 28775 - RNA, 22 nt, Homo sapiens
caaaaacugcaguuacuuuugu

SEQ ID NO: 28776 - RNA, 22 nt, Homo sapiens
aaaaguaauugcgguuuuugcc

SEQ ID NO: 28777 - RNA, 20 nt, Homo sapiens
aaaaggcauugugguuuuug

SEQ ID NO: 28778 - RNA, 23 nt, Homo sapiens
cggcccgggcugcugcuguuccu

SEQ ID NO: 28779 - RNA, 20 nt, Homo sapiens
agagguauagggcaugggaa

SEQ ID NO: 28780 - RNA, 22 nt, Homo sapiens
uuccuaugcauauacuucuuug

SEQ ID NO: 28781 - RNA, 22 nt, Homo sapiens
aucauagaggaaaauccauguu

SEQ ID NO: 28782 - RNA, 22 nt, Homo sapiens
cguggauauuccuucuauguuu

SEQ ID NO: 28783 - RNA, 22 nt, Homo sapiens
ugaguauuacauggccaaucuc

SEQ ID NO: 28784 - RNA, 21 nt, Homo sapiens
cuuccgccccgccgggcgucg

SEQ ID NO: 28785 - RNA, 22 nt, Homo sapiens
uagcuuaucagacugauguuga

SEQ ID NO: 28786 - RNA, 22 nt, Homo sapiens
cacuagauugugagcuccugga

SEQ ID NO: 28787 - RNA, 22 nt, Homo sapiens
aaggagcucacagucuauugag

SEQ ID NO: 28788 - RNA, 22 nt, Homo sapiens
uacgucaucguugucaucguca

SEQ ID NO: 28789 - RNA, 22 nt, Homo sapiens
cacgcucaugcacacacccaca

SEQ ID NO: 28790 - RNA, 21 nt, Homo sapiens
caacaccagucgaugggcugu

SEQ ID NO: 28791 - RNA, 22 nt, Homo sapiens
uucaccaccuucuccacccagc

SEQ ID NO: 28792 - RNA, 23 nt, Homo sapiens
cggguagagagggcagugggagg

SEQ ID NO: 28793 - RNA, 18 nt, Homo sapiens
aauccuugcuaccugggu

SEQ ID NO: 28794 - RNA, 22 nt, Homo sapiens
caauuuagugugugugauauuu

SEQ ID NO: 28795 - RNA, 22 nt, Homo sapiens
uauugcacauuacuaaguugca

SEQ ID NO: 28796 - RNA, 22 nt, Homo sapiens
ccuauucuugauuacuuguuuc

SEQ ID NO: 28797 - RNA, 22 nt, Homo sapiens
uucaaguaauccaggauaggcu

SEQ ID NO: 28798 - RNA, 23 nt, Homo sapiens
ccaguuaccgcuuccgcuaccgc

SEQ ID NO: 28799 - RNA, 21 nt, Homo sapiens
gauuucaguggagugaaguuc

SEQ ID NO: 28800 - RNA, 22 nt, Homo sapiens
uccuucauuccaccggagucug

SEQ ID NO: 28801 - RNA, 23 nt, Homo sapiens
aaaauggugcccuagugacuaca

SEQ ID NO: 28802 - RNA, 21 nt, Homo sapiens
caagucacuagugguuccguu

SEQ ID NO: 28803 - RNA, 22 nt, Homo sapiens
ccaguauuaacugugcugcuga

SEQ ID NO: 28804 - RNA, 23 nt, Homo sapiens
ucccccaggugugauucugauuu

SEQ ID NO: 28805 - RNA, 22 nt, Homo sapiens
aaaagcuggguugagagggcga

SEQ ID NO: 28806 - RNA, 22 nt, Homo sapiens
uggacggagaacugauaagggu

SEQ ID NO: 28807 - RNA, 22 nt, Homo sapiens
uggugggccgcagaacaugugc

SEQ ID NO: 28808 - RNA, 22 nt, Homo sapiens
agugccugcuaugugccaggca

SEQ ID NO: 28809 - RNA, 22 nt, Homo sapiens
cuuggcaccuagcaagcacuca

SEQ ID NO: 28810 - RNA, 23 nt, Homo sapiens
uuauugcuuaagaauacgcguag

SEQ ID NO: 28811 - RNA, 22 nt, Homo sapiens
uugcauagucacaaaagugauc

SEQ ID NO: 28812 - RNA, 22 nt, Homo sapiens
gugaauuaccgaagggccauaa

SEQ ID NO: 28813 - RNA, 22 nt, Homo sapiens
uauggcacugguagaauucacu

SEQ ID NO: 28814 - RNA, 22 nt, Homo sapiens
ugauauguuugauauauuaggu

SEQ ID NO: 28815 - RNA, 21 nt, Homo sapiens
ugauauguuugauauuggguu

SEQ ID NO: 28816 - RNA, 18 nt, Homo sapiens
agcaggugcggggcggcg

SEQ ID NO: 28817 - RNA, 21 nt, Homo sapiens
cagugcaaguguagaugccga

SEQ ID NO: 28818 - RNA, 22 nt, Homo sapiens
uauguaauaugguccacaucuu

SEQ ID NO: 28819 - RNA, 21 nt, Homo sapiens
aauauaacacagauggccugu

SEQ ID NO: 28820 - RNA, 22 nt, Homo sapiens
aucgggaaugucguguccgccc

SEQ ID NO: 28821 - RNA, 23 nt, Homo sapiens
aaugacacgaucacucccguuga

SEQ ID NO: 28822 - RNA, 22 nt, Homo sapiens
uacucaggagaguggcaaucac

SEQ ID NO: 28823 - RNA, 23 nt, Homo sapiens
uggaagacuagugauuuuguugu

SEQ ID NO: 28824 - RNA, 22 nt, Homo sapiens
auaaagcuagauaaccgaaagu

SEQ ID NO: 28825 - RNA, 23 nt, Homo sapiens
ucuuugguuaucuagcuguauga

SEQ ID NO: 28826 - RNA, 22 nt, Homo sapiens
acaggugagguucuugggagcc

SEQ ID NO: 28827 - RNA, 24 nt, Homo sapiens
ucccugagacccuuuaaccuguga

SEQ ID NO: 28828 - RNA, 22 nt, Homo sapiens
caacaaaucccagucuaccuaa

SEQ ID NO: 28829 - RNA, 22 nt, Homo sapiens
cguguucacagcggaccuugau

SEQ ID NO: 28830 - RNA, 20 nt, Homo sapiens
uaaggcacgcggugaaugcc

SEQ ID NO: 28831 - RNA, 22 nt, Homo sapiens
aacacaccugguuaaccucuuu

SEQ ID NO: 28832 - RNA, 22 nt, Homo sapiens
uaacagucuacagccauggucg

SEQ ID NO: 28833 - RNA, 22 nt, Homo sapiens
accguggcuuucgauuguuacu

SEQ ID NO: 28834 - RNA, 21 nt, Homo sapiens
uaacagucuccagucacggcc

SEQ ID NO: 28835 - RNA, 23 nt, Homo sapiens
accuuggcucuagacugcuuacu

SEQ ID NO: 28836 - RNA, 23 nt, Homo sapiens
ucucacacagaaaucgcacccgu

SEQ ID NO: 28837 - RNA, 22 nt, Homo sapiens
ugguugaccauagaacaugcgc

SEQ ID NO: 28838 - RNA, 23 nt, Homo sapiens
caguaacaaagauucauccuugu

SEQ ID NO: 28839 - RNA, 22 nt, Homo sapiens
agaguugagucuggacgucccg

SEQ ID NO: 28840 - RNA, 22 nt, Homo sapiens
agaauuguggcuggacaucugu

SEQ ID NO: 28841 - RNA, 21 nt, Homo sapiens
ugauuguccaaacgcaauucu

SEQ ID NO: 28842 - RNA, 22 nt, Homo sapiens
uauagggauuggagccguggcg

SEQ ID NO: 28843 - RNA, 23 nt, Homo sapiens
uauggcuuuuuauuccuauguga

SEQ ID NO: 28844 - RNA, 22 nt, Homo sapiens
auguagggcuaaaagccauggg

SEQ ID NO: 28845 - RNA, 23 nt, Homo sapiens
uauggcuuuucauuccuauguga

SEQ ID NO: 28846 - RNA, 22 nt, Homo sapiens
aaccaucgaccguugaguggac

SEQ ID NO: 28847 - RNA, 22 nt, Homo sapiens
aacauucaaccugucggugagu

SEQ ID NO: 28848 - RNA, 25 nt, Homo sapiens
cuuccagacgcuccgccccacgucg

SEQ ID NO: 28849 - RNA, 24 nt, Homo sapiens
aacaacaaaaucacuagucuucca

SEQ ID NO: 28850 - RNA, 22 nt, Homo sapiens
agguagacugggauuuguuguu

SEQ ID NO: 28851 - RNA, 22 nt, Homo sapiens
aaacaccauugucacacuccac

SEQ ID NO: 28852 - RNA, 23 nt, Homo sapiens
uuuagugugauaauggcguuuga

SEQ ID NO: 28853 - RNA, 22 nt, Homo sapiens
uauggaaagacuuugccacucu

SEQ ID NO: 28854 - RNA, 21 nt, Homo sapiens
aguggcaaagucuuuccauau

SEQ ID NO: 28855 - RNA, 22 nt, Homo sapiens
cagcccggaucccagcccacuu

SEQ ID NO: 28856 - RNA, 20 nt, Homo sapiens
guggguuggggcgggcucug

SEQ ID NO: 28857 - RNA, 23 nt, Homo sapiens
uucgggcuggccugcugcuccgg

SEQ ID NO: 28858 - RNA, 21 nt, Homo sapiens
ugugcagcaggccaaccgaga

SEQ ID NO: 28859 - RNA, 22 nt, Homo sapiens
cagggcaggaagaaguggacaa

SEQ ID NO: 28860 - RNA, 22 nt, Homo sapiens
guccacuucugccugcccugcc

SEQ ID NO: 28861 - RNA, 22 nt, Homo sapiens
uuuggacagaaaacacgcaggu

SEQ ID NO: 28862 - RNA, 20 nt, Homo sapiens
ccugcguguuuucuguccaa

SEQ ID NO: 28863 - RNA, 22 nt, Homo sapiens
ugccgcccucucgcugcucuag

SEQ ID NO: 28864 - RNA, 23 nt, Homo sapiens
gagggcagcguggguguggcgga

SEQ ID NO: 28865 - RNA, 22 nt, Homo sapiens
aggagcuagccaggcauaugca

SEQ ID NO: 28866 - RNA, 20 nt, Homo sapiens
auaugccuggcuagcuccuc

SEQ ID NO: 28867 - RNA, 19 nt, Homo sapiens
cggcgcgaccggcccgggg

SEQ ID NO: 28868 - RNA, 21 nt, Homo sapiens
ucuugaagucagaacccgcaa

SEQ ID NO: 28869 - RNA, 22 nt, Homo sapiens
aacucguguucaaagccuuuag

SEQ ID NO: 28870 - RNA, 23 nt, Homo sapiens
ccuggacaccgcucagccggccg

SEQ ID NO: 28871 - RNA, 21 nt, Homo sapiens
acucggcugcgguggacaagu

SEQ ID NO: 28872 - RNA, 20 nt, Homo sapiens
ucacucucaccuugcuuugc

SEQ ID NO: 28873 - RNA, 22 nt, Homo sapiens
uugcuaaguaggcugagauuga

SEQ ID NO: 28874 - RNA, 22 nt, Homo sapiens
cacccccuguuuccuggcccac

SEQ ID NO: 28875 - RNA, 23 nt, Homo sapiens
ugggccagggagcagcugguggg

SEQ ID NO: 28876 - RNA, 24 nt, Homo sapiens
ugcccaugccauacuuuugccuca

SEQ ID NO: 28877 - RNA, 22 nt, Homo sapiens
auggcaucguccccugguggcu

SEQ ID NO: 28878 - RNA, 22 nt, Homo sapiens
gacacaugaccauaaaugcuaa

SEQ ID NO: 28879 - RNA, 23 nt, Homo sapiens
uggagagagaaaagagacagaag

SEQ ID NO: 28880 - RNA, 22 nt, Homo sapiens
agacaguaguucuugccugguu

SEQ ID NO: 28881 - RNA, 19 nt, Homo sapiens
accaggcaagaaauauugu

SEQ ID NO: 28882 - RNA, 21 nt, Homo sapiens
auugucccucucccuucccag

SEQ ID NO: 28883 - RNA, 22 nt, Homo sapiens
acugggaagaggagcugaggga

SEQ ID NO: 28884 - RNA, 23 nt, Homo sapiens
gaagauggugcugugcugaggaa

SEQ ID NO: 28885 - RNA, 20 nt, Homo sapiens
ugugggacugcaaaugggag

SEQ ID NO: 28886 - RNA, 21 nt, Homo sapiens
ucugaggccugccucucccca

SEQ ID NO: 28887 - RNA, 24 nt, Homo sapiens
ugggcgaggggugggcucucagag

SEQ ID NO: 28888 - RNA, 21 nt, Homo sapiens
agguagaaugaggccugacau

SEQ ID NO: 28889 - RNA, 19 nt, Homo sapiens
ucaggccucuuucuaccuu

SEQ ID NO: 28890 - RNA, 20 nt, Homo sapiens
cggggugggugaggucgggc

SEQ ID NO: 28891 - RNA, 22 nt, Homo sapiens
guucuguuaacccauccccuca

SEQ ID NO: 28892 - RNA, 22 nt, Homo sapiens
aggggacugguuaauagaacua

SEQ ID NO: 28893 - RNA, 23 nt, Homo sapiens
uggaguuaaggguugcuuggaga

SEQ ID NO: 28894 - RNA, 22 nt, Homo sapiens
ucucugagcaaggcuuaacacc

SEQ ID NO: 28895 - RNA, 22 nt, Homo sapiens
ugugggaucuggaggcaucugg

SEQ ID NO: 28896 - RNA, 21 nt, Homo sapiens
acccucgucagguccccgggg

SEQ ID NO: 28897 - RNA, 22 nt, Homo sapiens
caccggggauggcagagggucg

SEQ ID NO: 28898 - RNA, 23 nt, Homo sapiens
ugggcugagggcaggaggccugu

SEQ ID NO: 28899 - RNA, 23 nt, Homo sapiens
aauguggaaguggucugaggcau

SEQ ID NO: 28900 - RNA, 23 nt, Homo sapiens
gugaguguggauccuggaggaau

SEQ ID NO: 28901 - RNA, 22 nt, Homo sapiens
uuucuucuuagacauggcaacg

SEQ ID NO: 28902 - RNA, 22 nt, Homo sapiens
cugccaugucuaagaagaaaac

SEQ ID NO: 28903 - RNA, 22 nt, Homo sapiens
uuucuucuuagacauggcagcu

SEQ ID NO: 28904 - RNA, 19 nt, Homo sapiens
uugccaugucuaagaagaa

SEQ ID NO: 28905 - RNA, 23 nt, Homo sapiens
ugcagcucugguggaaaauggag

SEQ ID NO: 28906 - RNA, 22 nt, Homo sapiens
caggauccacagagcuagucca

SEQ ID NO: 28907 - RNA, 22 nt, Homo sapiens
aacuagcucuguggauccugac

SEQ ID NO: 28908 - RNA, 22 nt, Homo sapiens
aaagauggacaauuggcuaaau

SEQ ID NO: 28909 - RNA, 24 nt, Homo sapiens
agcugagcuccauggacgugcagu

SEQ ID NO: 28910 - RNA, 22 nt, Homo sapiens
cuuccggucugugagccccguc

SEQ ID NO: 28911 - RNA, 22 nt, Homo sapiens
uggggugcccacuccgcaaguu

SEQ ID NO: 28912 - RNA, 26 nt, Homo sapiens
cucggccgcggcgcguagcccccgcc

SEQ ID NO: 28913 - RNA, 23 nt, Homo sapiens
cugggggacgcgugagcgcgagc

SEQ ID NO: 28914 - RNA, 21 nt, Homo sapiens
cauacaaucugacauguauuu

SEQ ID NO: 28915 - RNA, 21 nt, Homo sapiens
auacaugucagauuguaugcc

SEQ ID NO: 28916 - RNA, 21 nt, Homo sapiens
ucccuccuucuguccccacag

SEQ ID NO: 28917 - RNA, 22 nt, Homo sapiens
acuggggagcagaaggagaacc

SEQ ID NO: 28918 - RNA, 23 nt, Homo sapiens
gaaaauccuuuuuguuuuuccag

SEQ ID NO: 28919 - RNA, 23 nt, Homo sapiens
agggaaaaaaaaaaggauuuguc

SEQ ID NO: 28920 - RNA, 22 nt, Homo sapiens
uguguccgggaaguggaggagg

SEQ ID NO: 28921 - RNA, 22 nt, Homo sapiens
ugaaguuacaucauggucgcuu

SEQ ID NO: 28922 - RNA, 22 nt, Homo sapiens
aagcgaccaugauguaacuuca

SEQ ID NO: 28923 - RNA, 21 nt, Homo sapiens
uuagugcauagucuuuggucu

SEQ ID NO: 28924 - RNA, 22 nt, Homo sapiens
accgaagacugugcgcuaaucu

SEQ ID NO: 28925 - RNA, 21 nt, Homo sapiens
uuacacagcuggacagaggca

SEQ ID NO: 28926 - RNA, 22 nt, Homo sapiens
uccaggcaggagccggacugga

SEQ ID NO: 28927 - RNA, 21 nt, Homo sapiens
cugggcucgggacgcgcggcu

SEQ ID NO: 28928 - RNA, 22 nt, Homo sapiens
ggggcugugauugaccagcagg

SEQ ID NO: 28929 - RNA, 22 nt, Homo sapiens
cacuguuucaccacuggcucuu

SEQ ID NO: 28930 - RNA, 21 nt, Homo sapiens
gagccaguggugagacaguga

SEQ ID NO: 28931 - RNA, 22 nt, Homo sapiens
aagguauuguucagacuuauga

SEQ ID NO: 28932 - RNA, 22 nt, Homo sapiens
ucugugauagagauucuuugcu

SEQ ID NO: 28933 - RNA, 21 nt, Homo sapiens
ucugaauuguaagaguuguua

SEQ ID NO: 28934 - RNA, 23 nt, Homo sapiens
agaacucuugcagucuuagaugu

SEQ ID NO: 28935 - RNA, 22 nt, Homo sapiens
aacgggaaugcaggcuguaucu

SEQ ID NO: 28936 - RNA, 23 nt, Homo sapiens
ucugaguuccuggagccuggucu

SEQ ID NO: 28937 - RNA, 23 nt, Homo sapiens
uggagauccagugcucgcccgau

SEQ ID NO: 28938 - RNA, 22 nt, Homo sapiens
uguugcaagucgguggagacgu

SEQ ID NO: 28939 - RNA, 22 nt, Homo sapiens
cucucuacugacuugcaacaua

SEQ ID NO: 28940 - RNA, 22 nt, Homo sapiens
ucucccuuccugcccuggcuag

SEQ ID NO: 28941 - RNA, 26 nt, Homo sapiens
cccagggcuuggaguggggcaagguu

SEQ ID NO: 28942 - RNA, 23 nt, Homo sapiens
uaucugcugggcuuucugguguu

SEQ ID NO: 28943 - RNA, 21 nt, Homo sapiens
uggcuguuggagggggcaggc

SEQ ID NO: 28944 - RNA, 22 nt, Homo sapiens
cagcccuccucccgcacccaaa

SEQ ID NO: 28945 - RNA, 22 nt, Homo sapiens
uaggggcagcagaggaccuggg

SEQ ID NO: 28946 - RNA, 22 nt, Homo sapiens
uugaggagacauggugggggcc

SEQ ID NO: 28947 - RNA, 21 nt, Homo sapiens
gcagcccagcugaggccucug

SEQ ID NO: 28948 - RNA, 22 nt, Homo sapiens
gagcaggcgaggcugggcugaa

SEQ ID NO: 28949 - RNA, 23 nt, Homo sapiens
ccagccacggacugagagugcau

SEQ ID NO: 28950 - RNA, 23 nt, Homo sapiens
guccuccaggccaugagcugcgg

SEQ ID NO: 28951 - RNA, 22 nt, Homo sapiens
ucaggcaguguggguaucagau

SEQ ID NO: 28952 - RNA, 23 nt, Homo sapiens
ugagaguggaauucacaguauuu

SEQ ID NO: 28953 - RNA, 23 nt, Homo sapiens
auacugugaauuucacugucaca

SEQ ID NO: 28954 - RNA, 21 nt, Homo sapiens
caaauggacaggauaacaccu

SEQ ID NO: 28955 - RNA, 22 nt, Homo sapiens
agguguuauccuauccauuugc

SEQ ID NO: 28956 - RNA, 22 nt, Homo sapiens
ugaucucaccgcugccuccuuc

SEQ ID NO: 28957 - RNA, 22 nt, Homo sapiens
caggaggcagugggcgagcagg

SEQ ID NO: 28958 - RNA, 22 nt, Homo sapiens
ugcaagacggauacugucaucu

SEQ ID NO: 28959 - RNA, 24 nt, Homo sapiens
ugucagugacuccugccccuuggu

SEQ ID NO: 28960 - RNA, 22 nt, Homo sapiens
agggggcgcagucacugacgug

SEQ ID NO: 28961 - RNA, 23 nt, Homo sapiens
ucaaaauguagaggaagacccca

SEQ ID NO: 28962 - RNA, 22 nt, Homo sapiens
aauuuacucugcaaucuucucc

SEQ ID NO: 28963 - RNA, 22 nt, Homo sapiens
agaagauugcagaguaaguucc

SEQ ID NO: 28964 - RNA, 26 nt, Homo sapiens
cacaggacugacuccucaccccagug

SEQ ID NO: 28965 - RNA, 22 nt, Homo sapiens
ucuggggaugaggacagugugu

SEQ ID NO: 28966 - RNA, 20 nt, Homo sapiens
augggugauggguguggugu

SEQ ID NO: 28967 - RNA, 22 nt, Homo sapiens
uuggccaccacaccuaccccuu

SEQ ID NO: 28968 - RNA, 22 nt, Homo sapiens
uguaguuguauuguauugccac

SEQ ID NO: 28969 - RNA, 23 nt, Homo sapiens
uagcaauacaguacaaauauagu

SEQ ID NO: 28970 - RNA, 22 nt, Homo sapiens
ucagucacauaucuagugucua

SEQ ID NO: 28971 - RNA, 22 nt, Homo sapiens
gacacuaggcaugugagugauu

SEQ ID NO: 28972 - RNA, 22 nt, Homo sapiens
ucaaucacuugguaauugcugu

SEQ ID NO: 28973 - RNA, 25 nt, Homo sapiens
agcggggaggaagugggcgcugcuu

SEQ ID NO: 28974 - RNA, 22 nt, Homo sapiens
agcccgccccagccgagguucu

SEQ ID NO: 28975 - RNA, 23 nt, Homo sapiens
gccccggcgcgggcggguucugg

SEQ ID NO: 28976 - RNA, 22 nt, Homo sapiens
agcaaggcggcaucucucugau

SEQ ID NO: 28977 - RNA, 21 nt, Homo sapiens
agagaugccgccuugcuccuu

SEQ ID NO: 28978 - RNA, 23 nt, Homo sapiens
uugaagaggaggugcucuguagc

SEQ ID NO: 28979 - RNA, 22 nt, Homo sapiens
acaacagugacuugcucuccaa

SEQ ID NO: 28980 - RNA, 18 nt, Homo sapiens
gggugagggcaggugguu

SEQ ID NO: 28981 - RNA, 18 nt, Homo sapiens
cgugucuucuggcuugau

SEQ ID NO: 28982 - RNA, 23 nt, Homo sapiens
ugcaucaggccagaagacaugag

SEQ ID NO: 28983 - RNA, 21 nt, Homo sapiens
aaugagagaccuguacuguau

SEQ ID NO: 28984 - RNA, 22 nt, Homo sapiens
uccaguacaggucucucauuuc

SEQ ID NO: 28985 - RNA, 22 nt, Homo sapiens
ugggauccagacagugggagaa

SEQ ID NO: 28986 - RNA, 22 nt, Homo sapiens
uucucccacuaccaggcuccca

SEQ ID NO: 28987 - RNA, 22 nt, Homo sapiens
ccaaccuagguggucagaguug

SEQ ID NO: 28988 - RNA, 22 nt, Homo sapiens
aacucugaccccuuagguugau

SEQ ID NO: 28989 - RNA, 23 nt, Homo sapiens
gugccaccuuaacugcagccaau

SEQ ID NO: 28990 - RNA, 22 nt, Homo sapiens
aaguuggcugcaguuaaggugg

SEQ ID NO: 28991 - RNA, 22 nt, Homo sapiens
aagggggaaggaaacauggaga

SEQ ID NO: 28992 - RNA, 22 nt, Homo sapiens
uccauguuuccuucccccuucu

SEQ ID NO: 28993 - RNA, 21 nt, Homo sapiens
acacauggguggcuguggccu

SEQ ID NO: 28994 - RNA, 22 nt, Homo sapiens
uaggccacagccacccaugugu

SEQ ID NO: 28995 - RNA, 21 nt, Homo sapiens
agcuguaccugaaaccaagca

SEQ ID NO: 28996 - RNA, 22 nt, Homo sapiens
ucacaaaucuauaauaugcagg

SEQ ID NO: 28997 - RNA, 21 nt, Homo sapiens
ugcuuaaguuguaccaaguau

SEQ ID NO: 28998 - RNA, 22 nt, Homo sapiens
ccuggcauauuugguauaacuu

SEQ ID NO: 28999 - RNA, 22 nt, Homo sapiens
ugagggcuccaggugacggugg

SEQ ID NO: 29000 - RNA, 22 nt, Homo sapiens
accugccagcaccucccugcag

SEQ ID NO: 29001 - RNA, 23 nt, Homo sapiens
ggcaggagggcugugccagguug

SEQ ID NO: 29002 - RNA, 22 nt, Homo sapiens
cccucucuggcuccuccccaaa

SEQ ID NO: 29003 - RNA, 24 nt, Homo sapiens
ugggggagccaugagauaagagca

SEQ ID NO: 29004 - RNA, 21 nt, Homo sapiens
guaccuucugguucagcuagu

SEQ ID NO: 29005 - RNA, 23 nt, Homo sapiens
aacugaaccaggagugagcuucg

SEQ ID NO: 29006 - RNA, 22 nt, Homo sapiens
uggggaaggcgucagugucggg

SEQ ID NO: 29007 - RNA, 21 nt, Homo sapiens
agacccugcagccuucccacc

SEQ ID NO: 29008 - RNA, 22 nt, Homo sapiens
acccagguucccucuggccgca

SEQ ID NO: 29009 - RNA, 23 nt, Homo sapiens
agggccagaggagccuggagugg

SEQ ID NO: 29010 - RNA, 22 nt, Homo sapiens
auagugggaagcuggcagauuc

SEQ ID NO: 29011 - RNA, 21 nt, Homo sapiens
aucugccagcuuccacagugg

SEQ ID NO: 29012 - RNA, 25 nt, Homo sapiens
caugcugaccucccuccugccccag

SEQ ID NO: 29013 - RNA, 23 nt, Homo sapiens
ugggaggggagaggcagcaagca

SEQ ID NO: 29014 - RNA, 22 nt, Homo sapiens
ucauuuaucuguugggaagcua

SEQ ID NO: 29015 - RNA, 23 nt, Homo sapiens
cuggcggagcccauuccaugcca

SEQ ID NO: 29016 - RNA, 22 nt, Homo sapiens
cacacaaguggcccccaacacu

SEQ ID NO: 29017 - RNA, 22 nt, Homo sapiens
ugcugggggccacaugagugug

SEQ ID NO: 29018 - RNA, 21 nt, Homo sapiens
gcccugaccuguccuguucug

SEQ ID NO: 29019 - RNA, 23 nt, Homo sapiens
uguagagcagggagcaggaagcu

SEQ ID NO: 29020 - RNA, 22 nt, Homo sapiens
ccaccaggucuagcauugggau

SEQ ID NO: 29021 - RNA, 22 nt, Homo sapiens
aaucccaaugcuagacccggug

SEQ ID NO: 29022 - RNA, 22 nt, Homo sapiens
gcugcgggcugcggucagggcg

SEQ ID NO: 29023 - RNA, 21 nt, Homo sapiens
aaaggugcucaaauuagacau

SEQ ID NO: 29024 - RNA, 22 nt, Homo sapiens
ccuaauuugaacaccuucggua

SEQ ID NO: 29025 - RNA, 19 nt, Homo sapiens
aggcagguuaucugggcug

SEQ ID NO: 29026 - RNA, 20 nt, Homo sapiens
augcgaggaugcugacagug

SEQ ID NO: 29027 - RNA, 22 nt, Homo sapiens
ugaaacuggagcgccuggagga

SEQ ID NO: 29028 - RNA, 22 nt, Homo sapiens
accagcgcguuuucaguuucau

SEQ ID NO: 29029 - RNA, 25 nt, Homo sapiens
aagggaggaggagcggaggggcccu

SEQ ID NO: 29030 - RNA, 22 nt, Homo sapiens
gcccgagaggauccgucccugc

SEQ ID NO: 29031 - RNA, 22 nt, Homo sapiens
aggacugauccucucgggcagg

SEQ ID NO: 29032 - RNA, 23 nt, Homo sapiens
ucaggcaaagggauauuuacaga

SEQ ID NO: 29033 - RNA, 21 nt, Homo sapiens
uuucugucuuuucugguccag

SEQ ID NO: 29034 - RNA, 23 nt, Homo sapiens
uggccggaugggacaggaggcau

SEQ ID NO: 29035 - RNA, 23 nt, Homo sapiens
ucuaaagacuagacuucgcuaug

SEQ ID NO: 29036 - RNA, 23 nt, Homo sapiens
uggcccggcgacgucucacgguc

SEQ ID NO: 29037 - RNA, 23 nt, Homo sapiens
ugaguggggcucccgggacggcg

SEQ ID NO: 29038 - RNA, 21 nt, Homo sapiens
agcggugcuccugcgggccga

SEQ ID NO: 29039 - RNA, 23 nt, Homo sapiens
ccggucccaggagaaccugcaga

SEQ ID NO: 29040 - RNA, 22 nt, Homo sapiens
aaggcccgggcuuuccucccag

SEQ ID NO: 29041 - RNA, 22 nt, Homo sapiens
agggaaggaggcuuggucuuag

SEQ ID NO: 29042 - RNA, 21 nt, Homo sapiens
gagguuuggggaggauuugcu

SEQ ID NO: 29043 - RNA, 20 nt, Homo sapiens
cgccccuccugcccccacag

SEQ ID NO: 29044 - RNA, 22 nt, Homo sapiens
ugcggggacaggccagggcauc

SEQ ID NO: 29045 - RNA, 22 nt, Homo sapiens
ccugacccacccccucccgcag

SEQ ID NO: 29046 - RNA, 22 nt, Homo sapiens
cucgggcggaggugguugagug

SEQ ID NO: 29047 - RNA, 24 nt, Homo sapiens
agaggacccguagcugcuagaagg

SEQ ID NO: 29048 - RNA, 22 nt, Homo sapiens
uuguggaucucaaggaugugcu

SEQ ID NO: 29049 - RNA, 22 nt, Homo sapiens
uucucuuucuuuagccuugugu

SEQ ID NO: 29050 - RNA, 22 nt, Homo sapiens
caaggccaaaggaagagaacag

SEQ ID NO: 29051 - RNA, 23 nt, Homo sapiens
augcggaccuggguuagcggagu

SEQ ID NO: 29052 - RNA, 22 nt, Homo sapiens
agccaggcucugaagggaaagu

SEQ ID NO: 29053 - RNA, 22 nt, Homo sapiens
uuucccuucagagccuggcuuu

SEQ ID NO: 29054 - RNA, 22 nt, Homo sapiens
ccagagaugguugccuuccuau

SEQ ID NO: 29055 - RNA, 23 nt, Homo sapiens
cagggaggcgcucacucucugcu

SEQ ID NO: 29056 - RNA, 22 nt, Homo sapiens
caugacgucacagaggcuucgc

SEQ ID NO: 29057 - RNA, 23 nt, Homo sapiens
aggccucugugacgucacggugu

SEQ ID NO: 29058 - RNA, 23 nt, Homo sapiens
ugccccaccugcugaccacccuc

SEQ ID NO: 29059 - RNA, 23 nt, Homo sapiens
gugagugggagccgguggggcug

SEQ ID NO: 29060 - RNA, 21 nt, Homo sapiens
uaggacuagauguuggaauua

SEQ ID NO: 29061 - RNA, 22 nt, Homo sapiens
aaauucauguucaaucuaaacc

SEQ ID NO: 29062 - RNA, 22 nt, Homo sapiens
uuuagauugaacaugaaguuag

SEQ ID NO: 29063 - RNA, 21 nt, Homo sapiens
gagggcaugcgcacuuugucc

SEQ ID NO: 29064 - RNA, 21 nt, Homo sapiens
acaaggugugcaugccugacc

SEQ ID NO: 29065 - RNA, 22 nt, Homo sapiens
cuucugaucaagauuuguggug

SEQ ID NO: 29066 - RNA, 21 nt, Homo sapiens
ccaaaucuugaucagaagccu

SEQ ID NO: 29067 - RNA, 24 nt, Homo sapiens
aggcaggggcuggugcugggcggg

SEQ ID NO: 29068 - RNA, 21 nt, Homo sapiens
cgccugcccagcccuccugcu

SEQ ID NO: 29069 - RNA, 22 nt, Homo sapiens
uuaacuccuuucacacccaugg

SEQ ID NO: 29070 - RNA, 21 nt, Homo sapiens
uggauguggaaggaguuaucu

SEQ ID NO: 29071 - RNA, 22 nt, Homo sapiens
ugagugauugauagcuauguuc

SEQ ID NO: 29072 - RNA, 21 nt, Homo sapiens
auagcaauugcucuuuuggaa

SEQ ID NO: 29073 - RNA, 21 nt, Homo sapiens
ucugaaagagcaguugguguu

SEQ ID NO: 29074 - RNA, 23 nt, Homo sapiens
cgcgggcgcuccuggccgccgcc

SEQ ID NO: 29075 - RNA, 20 nt, Homo sapiens
ccaggagauccagagagaau

SEQ ID NO: 29076 - RNA, 22 nt, Homo sapiens
auucucucuggaucccauggau

SEQ ID NO: 29077 - RNA, 22 nt, Homo sapiens
ucugccauccucccuccccuac

SEQ ID NO: 29078 - RNA, 24 nt, Homo sapiens
ggugggauggagagaagguaugag

SEQ ID NO: 29079 - RNA, 18 nt, Homo sapiens
ugagaugacacuguagcu

SEQ ID NO: 29080 - RNA, 21 nt, Homo sapiens
agcagacuugaccuacaauua

SEQ ID NO: 29081 - RNA, 22 nt, Homo sapiens
cagaacaggagcauagaaaggc

SEQ ID NO: 29082 - RNA, 22 nt, Homo sapiens
uuaauuuuuuguuucggucacu

SEQ ID NO: 29083 - RNA, 23 nt, Homo sapiens
cuugccauccugguccacugcau

SEQ ID NO: 29084 - RNA, 22 nt, Homo sapiens
guggaccaggauggcaagggcu

SEQ ID NO: 29085 - RNA, 22 nt, Homo sapiens
auaccucaucuagaaugcugua

SEQ ID NO: 29086 - RNA, 22 nt, Homo sapiens
uucuagaugagagauauauaua

SEQ ID NO: 29087 - RNA, 22 nt, Homo sapiens
ucuucuuccuuugcagaguuga

SEQ ID NO: 29088 - RNA, 22 nt, Homo sapiens
aauucuguaaaggaagaagagg

SEQ ID NO: 29089 - RNA, 22 nt, Homo sapiens
uaggagggaauaguaaaagcag

SEQ ID NO: 29090 - RNA, 22 nt, Homo sapiens
acccuugagccugaucccuagc

SEQ ID NO: 29091 - RNA, 22 nt, Homo sapiens
aauguuggaauccucgcuagag

SEQ ID NO: 29092 - RNA, 21 nt, Homo sapiens
uagcggggauuccaauauugg

SEQ ID NO: 29093 - RNA, 22 nt, Homo sapiens
ugauugucuucauaucuagaac

SEQ ID NO: 29094 - RNA, 22 nt, Homo sapiens
uucuggauaugaagacaaucaa

SEQ ID NO: 29095 - RNA, 23 nt, Homo sapiens
ccccgguguuggggcgcgucugc

SEQ ID NO: 29096 - RNA, 21 nt, Homo sapiens
ggcgcgcccagcucccgggcu

SEQ ID NO: 29097 - RNA, 20 nt, Homo sapiens
ugaggagaugcugggacuga

SEQ ID NO: 29098 - RNA, 21 nt, Homo sapiens
agagucggcgacgccgccagc

SEQ ID NO: 29099 - RNA, 22 nt, Homo sapiens
ugaagccagcucuggucugggc

SEQ ID NO: 29100 - RNA, 22 nt, Homo sapiens
ugagaccaggacuggaugcacc

SEQ ID NO: 29101 - RNA, 24 nt, Homo sapiens
gaugcgccgcccacugccccgcgc

SEQ ID NO: 29102 - RNA, 22 nt, Homo sapiens
gcggggguggcggcggcauccc

SEQ ID NO: 29103 - RNA, 22 nt, Homo sapiens
uuacggaccagcuaagggaggc

SEQ ID NO: 29104 - RNA, 21 nt, Homo sapiens
cacacauagcagguguauaua

SEQ ID NO: 29105 - RNA, 22 nt, Homo sapiens
guauacaccugauauguguaug

SEQ ID NO: 29106 - RNA, 22 nt, Homo sapiens
ugaaugguaaagcgaugucaca

SEQ ID NO: 29107 - RNA, 20 nt, Homo sapiens
aucgcuuuaccauucauguu

SEQ ID NO: 29108 - RNA, 18 nt, Homo sapiens
uggauaugaugacugaaa

SEQ ID NO: 29109 - RNA, 18 nt, Homo sapiens
cggugagcgcucgcuggc

SEQ ID NO: 29110 - RNA, 23 nt, Homo sapiens
ucugcacugugaguuggcuggcu

SEQ ID NO: 29111 - RNA, 24 nt, Homo sapiens
acauccugcuccacagggcagagg

SEQ ID NO: 29112 - RNA, 22 nt, Homo sapiens
ucuggcuaucucacgagacugu

SEQ ID NO: 29113 - RNA, 22 nt, Homo sapiens
auauuauuagccacuucuggau

SEQ ID NO: 29114 - RNA, 21 nt, Homo sapiens
agaaguggcuaauaauauuga

SEQ ID NO: 29115 - RNA, 22 nt, Homo sapiens
uaaaguggcagaguauagacac

SEQ ID NO: 29116 - RNA, 22 nt, Homo sapiens
ugucuauacucugucacuuuac

SEQ ID NO: 29117 - RNA, 21 nt, Homo sapiens
ucucaguaaguggcacucugu

SEQ ID NO: 29118 - RNA, 21 nt, Homo sapiens
gacagagugccacuuacugaa

SEQ ID NO: 29119 - RNA, 22 nt, Homo sapiens
aacucacgaaguauaccgaagu

SEQ ID NO: 29120 - RNA, 22 nt, Homo sapiens
uucgguauacuuugugaauugg

SEQ ID NO: 29121 - RNA, 22 nt, Homo sapiens
acuggcaugcugcauuuauaua

SEQ ID NO: 29122 - RNA, 22 nt, Homo sapiens
aucuaaaugcagcaugccaguc

SEQ ID NO: 29123 - RNA, 19 nt, Homo sapiens
cauccguccgucuguccac

SEQ ID NO: 29124 - RNA, 21 nt, Homo sapiens
aguggaccgaggaaggaagga

SEQ ID NO: 29125 - RNA, 22 nt, Homo sapiens
uacacaagaaaaccaaggcuca

SEQ ID NO: 29126 - RNA, 21 nt, Homo sapiens
uaacauaauaguguggauuga

SEQ ID NO: 29127 - RNA, 21 nt, Homo sapiens
ugcuuaaccuugcccucgaaa

SEQ ID NO: 29128 - RNA, 21 nt, Homo sapiens
uuggacgguaagguuaagcaa

SEQ ID NO: 29129 - RNA, 21 nt, Homo sapiens
aaaagcaucaggaaguaccca

SEQ ID NO: 29130 - RNA, 21 nt, Homo sapiens
gcaggacaggcagaaguggau

SEQ ID NO: 29131 - RNA, 22 nt, Homo sapiens
cagggcuggcagugacaugggu

SEQ ID NO: 29132 - RNA, 22 nt, Homo sapiens
auuucccugccauucccuuggc

SEQ ID NO: 29133 - RNA, 22 nt, Homo sapiens
uggcggcgguaguuaugggcuu

SEQ ID NO: 29134 - RNA, 22 nt, Homo sapiens
gcucccucuagggucgcucgga

SEQ ID NO: 29135 - RNA, 22 nt, Homo sapiens
ugggaacuuaguagagguuuaa

SEQ ID NO: 29136 - RNA, 21 nt, Homo sapiens
uggggcuagugaugcaggacg

SEQ ID NO: 29137 - RNA, 22 nt, Homo sapiens
gcugacagcagggcuggccgcu

SEQ ID NO: 29138 - RNA, 21 nt, Homo sapiens
auuggacugcugauggcccgu

SEQ ID NO: 29139 - RNA, 22 nt, Homo sapiens
aggccaucagcaguccaaugaa

SEQ ID NO: 29140 - RNA, 22 nt, Homo sapiens
uuggacagaaaacacgcaggaa

SEQ ID NO: 29141 - RNA, 20 nt, Homo sapiens
ccugcguguuuucuguccaa

SEQ ID NO: 29142 - RNA, 22 nt, Homo sapiens
ugagacaggcuuaugcugcuau

SEQ ID NO: 29143 - RNA, 22 nt, Homo sapiens
auagcagcaugaaccugucuca

SEQ ID NO: 29144 - RNA, 20 nt, Homo sapiens
gagacagguucaugcugcua

SEQ ID NO: 29145 - RNA, 21 nt, Homo sapiens
auagcagcauaagccugucuc

SEQ ID NO: 29146 - RNA, 22 nt, Homo sapiens
uguguggauccuggaggaggca

SEQ ID NO: 29147 - RNA, 22 nt, Homo sapiens
agacaucaagaucagucccaaa

SEQ ID NO: 29148 - RNA, 22 nt, Homo sapiens
uuugggacugaucuugaugucu

SEQ ID NO: 29149 - RNA, 22 nt, Homo sapiens
aaggaaccagaaaaugagaagu

SEQ ID NO: 29150 - RNA, 22 nt, Homo sapiens
ucuggccuugacuugacucuuu

SEQ ID NO: 29151 - RNA, 23 nt, Homo sapiens
ucaaggccagaggucccacagca

SEQ ID NO: 29152 - RNA, 21 nt, Homo sapiens
acuccaguuuuaguucucuug

SEQ ID NO: 29153 - RNA, 22 nt, Homo sapiens
aagagaacugaaaguggagccu

SEQ ID NO: 29154 - RNA, 22 nt, Homo sapiens
uaagggguguauggcagaugca

SEQ ID NO: 29155 - RNA, 21 nt, Homo sapiens
uuucagauaacaguauuacau

SEQ ID NO: 29156 - RNA, 22 nt, Homo sapiens
aagcaauacuguuaccugaaau

SEQ ID NO: 29157 - RNA, 22 nt, Homo sapiens
uacuaacugcagauucaaguga

SEQ ID NO: 29158 - RNA, 21 nt, Homo sapiens
auugccuaacaugugccagaa

SEQ ID NO: 29159 - RNA, 22 nt, Homo sapiens
ucugguauguaguagguaauaa

SEQ ID NO: 29160 - RNA, 22 nt, Homo sapiens
aguugccuuuuuguucccaugc

SEQ ID NO: 29161 - RNA, 21 nt, Homo sapiens
auaggcaccaaaaagcaacaa

SEQ ID NO: 29162 - RNA, 22 nt, Homo sapiens
ccugcaacuuugccugaucaga

SEQ ID NO: 29163 - RNA, 22 nt, Homo sapiens
ugaucaggcaaaauugcagacu

SEQ ID NO: 29164 - RNA, 22 nt, Homo sapiens
uuguggcuggucaugaggcuaa

SEQ ID NO: 29165 - RNA, 21 nt, Homo sapiens
uuagucucaugaucagacaca

SEQ ID NO: 29166 - RNA, 22 nt, Homo sapiens
aaagauagacaauuggcuaaau

SEQ ID NO: 29167 - RNA, 22 nt, Homo sapiens
uuagccaauuguccaucuuuag

SEQ ID NO: 29168 - RNA, 22 nt, Homo sapiens
ucugugagaccaaagaacuacu

SEQ ID NO: 29169 - RNA, 22 nt, Homo sapiens
uuguucuuuggucuuucagcca

SEQ ID NO: 29170 - RNA, 23 nt, Homo sapiens
cgggcuguccggaggggucggcu

SEQ ID NO: 29171 - RNA, 23 nt, Homo sapiens
ucuguauucuccuuugccugcag

SEQ ID NO: 29172 - RNA, 23 nt, Homo sapiens
uacauggauggaaaccuucaagc

SEQ ID NO: 29173 - RNA, 22 nt, Homo sapiens
uauggagguucuagaccauguu

SEQ ID NO: 29174 - RNA, 22 nt, Homo sapiens
gggaccauccugccugcugugg

SEQ ID NO: 29175 - RNA, 22 nt, Homo sapiens
ucagcaggcaggcuggugcagc

SEQ ID NO: 29176 - RNA, 22 nt, Homo sapiens
ucaccugaccucccaugccugu

SEQ ID NO: 29177 - RNA, 22 nt, Homo sapiens
caggcacgggagcucaggugag

SEQ ID NO: 29178 - RNA, 21 nt, Homo sapiens
ugaguguugucuacgagggca

SEQ ID NO: 29179 - RNA, 21 nt, Homo sapiens
acugacaggagagcauuuuga

SEQ ID NO: 29180 - RNA, 22 nt, Homo sapiens
ugaccugggacucggacagcug

SEQ ID NO: 29181 - RNA, 22 nt, Homo sapiens
ucucaggaguaaagacagaguu

SEQ ID NO: 29182 - RNA, 22 nt, Homo sapiens
aacucugucuucacucaugagu

SEQ ID NO: 29183 - RNA, 22 nt, Homo sapiens
uggggcggagcuuccggaggcc

SEQ ID NO: 29184 - RNA, 22 nt, Homo sapiens
caaucagcaaguauacugcccu

SEQ ID NO: 29185 - RNA, 22 nt, Homo sapiens
uggcagugucuuagcugguugu

SEQ ID NO: 29186 - RNA, 22 nt, Homo sapiens
ccaauauuggcugugcugcucc

SEQ ID NO: 29187 - RNA, 21 nt, Homo sapiens
uagcagcacagaaauauuggc

SEQ ID NO: 29188 - RNA, 21 nt, Homo sapiens
uaauuuuauguauaagcuagu

SEQ ID NO: 29189 - RNA, 22 nt, Homo sapiens
gagcuuauucauaaaagugcag

SEQ ID NO: 29190 - RNA, 22 nt, Homo sapiens
aagacgggaggaaagaagggag

SEQ ID NO: 29191 - RNA, 22 nt, Homo sapiens
cagugguuuuacccuaugguag

SEQ ID NO: 29192 - RNA, 22 nt, Homo sapiens
auucuaauuucuccacgucuuu

SEQ ID NO: 29193 - RNA, 22 nt, Homo sapiens
aaccagcaccccaacuuuggac

SEQ ID NO: 29194 - RNA, 24 nt, Homo sapiens
aaagacauaggauagagucaccuc

SEQ ID NO: 29195 - RNA, 22 nt, Homo sapiens
uaacugguugaacaacugaacc

SEQ ID NO: 29196 - RNA, 20 nt, Homo sapiens
cgugccacccuuuuccccag

SEQ ID NO: 29197 - RNA, 17 nt, Homo sapiens
guggggccaggcggugg

SEQ ID NO: 29198 - RNA, 22 nt, Homo sapiens
aaaagcuggguugagagggcaa

SEQ ID NO: 29199 - RNA, 22 nt, Homo sapiens
gguccagaggggagauagguuc

SEQ ID NO: 29200 - RNA, 23 nt, Homo sapiens
uagccuucagaucuugguguuuu

SEQ ID NO: 29201 - RNA, 23 nt, Homo sapiens
ccacuuggaucugaaggcugccc

SEQ ID NO: 29202 - RNA, 22 nt, Homo sapiens
ugugcgcagggagaccucuccc

SEQ ID NO: 29203 - RNA, 22 nt, Homo sapiens
ugucuacuacuggagacacugg

SEQ ID NO: 29204 - RNA, 21 nt, Homo sapiens
aaggcagggcccccgcucccc

SEQ ID NO: 29205 - RNA, 21 nt, Homo sapiens
cugacuguugccguccuccag

SEQ ID NO: 29206 - RNA, 25 nt, Homo sapiens
aaaaaccacaauuacuuuugcacca

SEQ ID NO: 29207 - RNA, 23 nt, Homo sapiens
caaaaaccgcaauuacuuuugca

SEQ ID NO: 29208 - RNA, 22 nt, Homo sapiens
augugccugagggaguaagaca

SEQ ID NO: 29209 - RNA, 20 nt, Homo sapiens
ucuuacucccucaggcacug

SEQ ID NO: 29210 - RNA, 22 nt, Homo sapiens
agacacauuuggagagggaccc

SEQ ID NO: 29211 - RNA, 22 nt, Homo sapiens
gguucccucuccaaaugugucu

SEQ ID NO: 29212 - RNA, 21 nt, Homo sapiens
aaaauuucuuucacuacuuag

SEQ ID NO: 29213 - RNA, 21 nt, Homo sapiens
uuagugaaggcuauuuuaauu

SEQ ID NO: 29214 - RNA, 20 nt, Homo sapiens
acuguaaacgcuuucugaug

SEQ ID NO: 29215 - RNA, 22 nt, Homo sapiens
gcaugugaugaagcaaaucagu

SEQ ID NO: 29216 - RNA, 24 nt, Homo sapiens
caaagugaugaguaauacuggcug

SEQ ID NO: 29217 - RNA, 20 nt, Homo sapiens
gaaucggaaaggaggcgccg

SEQ ID NO: 29218 - RNA, 21 nt, Homo sapiens
uugugaagaaagaaauucuua

SEQ ID NO: 29219 - RNA, 22 nt, Homo sapiens
aggaggcaucuugagaaaugga

SEQ ID NO: 29220 - RNA, 24 nt, Homo sapiens
acaaaaaaaaaagcccaacccuuc

SEQ ID NO: 29221 - RNA, 22 nt, Homo sapiens
uguuguacuuuuuuuuuuguuc

SEQ ID NO: 29222 - RNA, 21 nt, Homo sapiens
ucucucggcuccucgcggcuc

SEQ ID NO: 29223 - RNA, 23 nt, Homo sapiens
cgagggcauuucaugaugcaggc

SEQ ID NO: 29224 - RNA, 22 nt, Homo sapiens
augaagugcacucaugauaugu

SEQ ID NO: 29225 - RNA, 22 nt, Homo sapiens
ugucuacauuaaugaaaagagc

SEQ ID NO: 29226 - RNA, 22 nt, Homo sapiens
ucacccugcaucccgcacccag

SEQ ID NO: 29227 - RNA, 22 nt, Homo sapiens
gugggcugggcugggcugggcc

SEQ ID NO: 29228 - RNA, 20 nt, Homo sapiens
cgcgggucggggucugcagg

SEQ ID NO: 29229 - RNA, 21 nt, Homo sapiens
ucaccugagcucccgugccug

SEQ ID NO: 29230 - RNA, 20 nt, Homo sapiens
aggcaugggaggucagguga

SEQ ID NO: 29231 - RNA, 23 nt, Homo sapiens
caucagcacccuauguccuuucu

SEQ ID NO: 29232 - RNA, 22 nt, Homo sapiens
aaagacauaguugcaagauggg

SEQ ID NO: 29233 - RNA, 22 nt, Homo sapiens
uuugugaccugguccacuaacc

SEQ ID NO: 29234 - RNA, 22 nt, Homo sapiens
gaugguugaccagagagcacac

SEQ ID NO: 29235 - RNA, 20 nt, Homo sapiens
aaaagcuggguugagagggu

SEQ ID NO: 29236 - RNA, 21 nt, Homo sapiens
cacaagguauugguauuaccu

SEQ ID NO: 29237 - RNA, 22 nt, Homo sapiens
uaguaccaguaccuuguguuca

SEQ ID NO: 29238 - RNA, 22 nt, Homo sapiens
aguauucuguaccagggaaggu

SEQ ID NO: 29239 - RNA, 22 nt, Homo sapiens
uggcaguguauuguuagcuggu

SEQ ID NO: 29240 - RNA, 22 nt, Homo sapiens
uauacaagggcaagcucucugu

SEQ ID NO: 29241 - RNA, 22 nt, Homo sapiens
agcgagguugcccuuuguauau

SEQ ID NO: 29242 - RNA, 22 nt, Homo sapiens
caaucacuaacuccacugccau

SEQ ID NO: 29243 - RNA, 23 nt, Homo sapiens
uaggcagugucauuagcugauug

SEQ ID NO: 29244 - RNA, 22 nt, Homo sapiens
cagccacaacuacccugccacu

SEQ ID NO: 29245 - RNA, 22 nt, Homo sapiens
aggcaguguauuguuagcuggc

SEQ ID NO: 29246 - RNA, 22 nt, Homo sapiens
aaucacuaaccacacggccagg

SEQ ID NO: 29247 - RNA, 23 nt, Homo sapiens
aggcaguguaguuagcugauugc

SEQ ID NO: 29248 - RNA, 20 nt, Homo sapiens
guccgcucggcgguggccca

SEQ ID NO: 29249 - RNA, 23 nt, Homo sapiens
gaacgccuguucuugccaggugg

SEQ ID NO: 29250 - RNA, 19 nt, Homo sapiens
aagugugcagggcacuggu

SEQ ID NO: 29251 - RNA, 21 nt, Homo sapiens
aggggugcuaucugugauuga

SEQ ID NO: 29252 - RNA, 22 nt, Homo sapiens
cuuucagucagauguuugcugc

SEQ ID NO: 29253 - RNA, 22 nt, Homo sapiens
uguaaacauccccgacuggaag

SEQ ID NO: 29254 - RNA, 22 nt, Homo sapiens
uguaaacauccucgacuggaag

SEQ ID NO: 29255 - RNA, 22 nt, Homo sapiens
agaaguaauugcgguuuugcca

SEQ ID NO: 29256 - RNA, 22 nt, Homo sapiens
caaaacuggcaauuacuuuugc

SEQ ID NO: 29257 - RNA, 22 nt, Homo sapiens
aaaaguaauugcgaguuuuacc

SEQ ID NO: 29258 - RNA, 22 nt, Homo sapiens
caagaaccucaguugcuuuugu

SEQ ID NO: 29259 - RNA, 22 nt, Homo sapiens
caaaaaucucaauuacuuuugc

SEQ ID NO: 29260 - RNA, 22 nt, Homo sapiens
caaaaaccacaguuucuuuugc

SEQ ID NO: 29261 - RNA, 22 nt, Homo sapiens
aaaaguaauugugguuuuugcc

SEQ ID NO: 29262 - RNA, 21 nt, Homo sapiens
ugacaacuauggaugagcucu

SEQ ID NO: 29263 - RNA, 21 nt, Homo sapiens
aacaggugacugguuagacaa

SEQ ID NO: 29264 - RNA, 21 nt, Homo sapiens
aaaacggugagauuuuguuuu

SEQ ID NO: 29265 - RNA, 21 nt, Homo sapiens
gcuaguccugacucagccagu

SEQ ID NO: 29266 - RNA, 21 nt, Homo sapiens
aggguaagcugaaccucugau

SEQ ID NO: 29267 - RNA, 22 nt, Homo sapiens
auauuaccauuagcucaucuuu

SEQ ID NO: 29268 - RNA, 22 nt, Homo sapiens
gaugagcucauuguaauaugag

SEQ ID NO: 29269 - RNA, 19 nt, Homo sapiens
agguugacauacguuuccc

SEQ ID NO: 29270 - RNA, 20 nt, Homo sapiens
auguauaaauguauacacac

SEQ ID NO: 29271 - RNA, 24 nt, Homo sapiens
cugaagugauguguaacugaucag

SEQ ID NO: 29272 - RNA, 22 nt, Homo sapiens
aagauguggaaaaauuggaauc

SEQ ID NO: 29273 - RNA, 21 nt, Homo sapiens
uagauaaaauauugguaccug

SEQ ID NO: 29274 - RNA, 21 nt, Homo sapiens
cuucuugugcucuaggauugu

SEQ ID NO: 29275 - RNA, 22 nt, Homo sapiens
uaugcauuguauuuuuaggucc

SEQ ID NO: 29276 - RNA, 21 nt, Homo sapiens
uuuccauaggugaugagucac

SEQ ID NO: 29277 - RNA, 21 nt, Homo sapiens
uuggccacaauggguuagaac

SEQ ID NO: 29278 - RNA, 22 nt, Homo sapiens
ugugucacucgaugaccacugu

SEQ ID NO: 29279 - RNA, 23 nt, Homo sapiens
acuuacagacaagagccuugcuc

SEQ ID NO: 29280 - RNA, 19 nt, Homo sapiens
aggcugcggaauucaggac

SEQ ID NO: 29281 - RNA, 23 nt, Homo sapiens
uaaaucccauggugccuucuccu

SEQ ID NO: 29282 - RNA, 21 nt, Homo sapiens
aaacuacugaaaaucaaagau

SEQ ID NO: 29283 - RNA, 21 nt, Homo sapiens
guucaaauccagaucuauaac

SEQ ID NO: 29284 - RNA, 20 nt, Homo sapiens
aggguguuucucucaucucu

SEQ ID NO: 29285 - RNA, 24 nt, Homo sapiens
gaccuggacauguuugugcccagu

SEQ ID NO: 29286 - RNA, 20 nt, Homo sapiens
auggagauagauauagaaau

SEQ ID NO: 29287 - RNA, 19 nt, Homo sapiens
agcugucugaaaaugucuu

SEQ ID NO: 29288 - RNA, 21 nt, Homo sapiens
agaccuggcccagaccucagc

SEQ ID NO: 29289 - RNA, 23 nt, Homo sapiens
acuugggcacugaaacaaugucc

SEQ ID NO: 29290 - RNA, 24 nt, Homo sapiens
acugggggcuuucgggcucugcgu

SEQ ID NO: 29291 - RNA, 23 nt, Homo sapiens
aucgcugcgguugcgagcgcugu

SEQ ID NO: 29292 - RNA, 22 nt, Homo sapiens
gucccucuccaaaugugucuug

SEQ ID NO: 29293 - RNA, 22 nt, Homo sapiens
acuuguaugcuagcucagguag

SEQ ID NO: 29294 - RNA, 22 nt, Homo sapiens
uuuaggauaagcuugacuuuug

SEQ ID NO: 29295 - RNA, 21 nt, Homo sapiens
guguugaaacaaucucuacug

SEQ ID NO: 29296 - RNA, 22 nt, Homo sapiens
uaugucugcugaccaucaccuu

SEQ ID NO: 29297 - RNA, 22 nt, Homo sapiens
ggggcuggggccggggccgagc

SEQ ID NO: 29298 - RNA, 22 nt, Homo sapiens
ugagguaguagguuguaugguu

SEQ ID NO: 29299 - RNA, 21 nt, Homo sapiens
gugucuuuugcucugcaguca

SEQ ID NO: 29300 - RNA, 24 nt, Homo sapiens
ccccgggaacgucgagacuggagc

SEQ ID NO: 29301 - RNA, 22 nt, Homo sapiens
acccgucccguucguccccgga

SEQ ID NO: 29302 - RNA, 22 nt, Homo sapiens
augggugaauuuguagaaggau

SEQ ID NO: 29303 - RNA, 22 nt, Homo sapiens
cuggacugagccgugcuacugg

SEQ ID NO: 29304 - RNA, 22 nt, Homo sapiens
cuggacugagccaugcuacugg

SEQ ID NO: 29305 - RNA, 22 nt, Homo sapiens
uacguagauauauauguauuuu

SEQ ID NO: 29306 - RNA, 24 nt, Homo sapiens
aaauauauauauauauguacguau

SEQ ID NO: 29307 - RNA, 22 nt, Homo sapiens
ugcuggaucagugguucgaguc

SEQ ID NO: 29308 - RNA, 19 nt, Homo sapiens
uggauuuuuggaucaggga

SEQ ID NO: 29309 - RNA, 22 nt, Homo sapiens
uuauaaagcaaugagacugauu

SEQ ID NO: 29310 - RNA, 23 nt, Homo sapiens
uagugcaauauugcuuauagggu

SEQ ID NO: 29311 - RNA, 22 nt, Homo sapiens
acccuaucaauauugucucugc

SEQ ID NO: 29312 - RNA, 17 nt, Homo sapiens
uaagugcuuccaugcuu

SEQ ID NO: 29313 - RNA, 22 nt, Homo sapiens
ucggccugaccacccaccccac

SEQ ID NO: 29314 - RNA, 21 nt, Homo sapiens
ggggggggggggggggggccg

SEQ ID NO: 29315 - RNA, 22 nt, Homo sapiens
cuauacgaccugcugccuuucu

SEQ ID NO: 29316 - RNA, 22 nt, Homo sapiens
agagguaguagguugcauaguu

SEQ ID NO: 29317 - RNA, 22 nt, Homo sapiens
ccgcacuguggguacuugcugc

SEQ ID NO: 29318 - RNA, 21 nt, Homo sapiens
uaaagugcugacagugcagau

SEQ ID NO: 29319 - RNA, 22 nt, Homo sapiens
aacuggaucaauuauaggagug

SEQ ID NO: 29320 - RNA, 26 nt, Homo sapiens
aaguaguugguuuguaugagaugguu

SEQ ID NO: 29321 - RNA, 21 nt, Homo sapiens
aagugaucuaaaggccuacau

SEQ ID NO: 29322 - RNA, 22 nt, Homo sapiens
ucagaugaucuaaaggccuaua

SEQ ID NO: 29323 - RNA, 21 nt, Homo sapiens
uaggccuuuagaucacuuaaa

SEQ ID NO: 29324 - RNA, 21 nt, Homo sapiens
acucuagcugccaaaggcgcu

SEQ ID NO: 29325 - RNA, 22 nt, Homo sapiens
agaaggaaauugaauucauuua

SEQ ID NO: 29326 - RNA, 21 nt, Homo sapiens
agagaagaagaucagccugca

SEQ ID NO: 29327 - RNA, 24 nt, Homo sapiens
agccuggaagcuggagccugcagu

SEQ ID NO: 29328 - RNA, 23 nt, Homo sapiens
aggaugagcaaagaaaguagauu

SEQ ID NO: 29329 - RNA, 22 nt, Homo sapiens
aaccacuuucuuugcucaucca

SEQ ID NO: 29330 - RNA, 22 nt, Homo sapiens
cggaugagcaaagaaagugguu

SEQ ID NO: 29331 - RNA, 22 nt, Homo sapiens
aggcauugacuucucacuagcu

SEQ ID NO: 29332 - RNA, 21 nt, Homo sapiens
agugaaugauggguucugacc

SEQ ID NO: 29333 - RNA, 21 nt, Homo sapiens
aguuaggauuaggucguggaa

SEQ ID NO: 29334 - RNA, 19 nt, Homo sapiens
auggauaaggcuuuggcuu

SEQ ID NO: 29335 - RNA, 22 nt, Homo sapiens
augguacccuggcauacugagu

SEQ ID NO: 29336 - RNA, 23 nt, Homo sapiens
caagucuuauuugagcaccuguu

SEQ ID NO: 29337 - RNA, 22 nt, Homo sapiens
caggauguggucaaguguuguu

SEQ ID NO: 29338 - RNA, 23 nt, Homo sapiens
ccucagggcuguagaacagggcu

SEQ ID NO: 29339 - RNA, 21 nt, Homo sapiens
ccuguugaaguguaaucccca

SEQ ID NO: 29340 - RNA, 18 nt, Homo sapiens
cgggcguggugguggggg

SEQ ID NO: 29341 - RNA, 20 nt, Homo sapiens
cgggcgugguggugggggug

SEQ ID NO: 29342 - RNA, 23 nt, Homo sapiens
cuggagauauggaagagcugugu

SEQ ID NO: 29343 - RNA, 26 nt, Homo sapiens
gaugaugauggcagcaaauucugaaa

SEQ ID NO: 29344 - RNA, 25 nt, Homo sapiens
gggcgacaaagcaagacucuuucuu

SEQ ID NO: 29345 - RNA, 25 nt, Homo sapiens
gaacccaugagguugaggcugcagu

SEQ ID NO: 29346 - RNA, 17 nt, Homo sapiens
gugggggagaggcuguc

SEQ ID NO: 29347 - RNA, 20 nt, Homo sapiens
uaaagagcccuguggagaca

SEQ ID NO: 29348 - RNA, 22 nt, Homo sapiens
uaguacugugcauaucaucuau

SEQ ID NO: 29349 - RNA, 20 nt, Homo sapiens
ucguuugccuuuuucugcuu

SEQ ID NO: 29350 - RNA, 21 nt, Homo sapiens
uggacugcccugaucuggaga

SEQ ID NO: 29351 - RNA, 22 nt, Homo sapiens
uggguggucuggagauuugugc

SEQ ID NO: 29352 - RNA, 22 nt, Homo sapiens
ugugagguuggcauuguugucu

SEQ ID NO: 29353 - RNA, 17 nt, Homo sapiens
uucaaguaauucaggug

SEQ ID NO: 29354 - RNA, 22 nt, Homo sapiens
uucuggaauucugugugaggga

SEQ ID NO: 29355 - RNA, 22 nt, Homo sapiens
uuuucaacucuaaugggagaga

SEQ ID NO: 29356 - RNA, 18 nt, Homo sapiens
acguuggcucugguggug

SEQ ID NO: 29357 - RNA, 22 nt, Homo sapiens
ccaccuccccugcaaacgucca

SEQ ID NO: 29358 - RNA, 22 nt, Homo sapiens
acucggcguggcgucggucgug

SEQ ID NO: 29359 - RNA, 21 nt, Homo sapiens
ucgaccggaccucgaccggcu

SEQ ID NO: 29360 - RNA, 22 nt, Homo sapiens
ugagaacugaauuccauaggcu

SEQ ID NO: 29361 - RNA, 22 nt, Homo sapiens
aaucauacacgguugaccuauu

SEQ ID NO: 29362 - RNA, 22 nt, Homo sapiens
uagguuauccguguugccuucg

SEQ ID NO: 29363 - RNA, 21 nt, Homo sapiens
ccaguccugugccugccgccu

SEQ ID NO: 29364 - RNA, 22 nt, Homo sapiens
ucugcccccuccgcugcugcca

SEQ ID NO: 29365 - RNA, 22 nt, Homo sapiens
ggaggggucccgcacugggagg

SEQ ID NO: 29366 - RNA, 22 nt, Homo sapiens
cccugugcccggcccacuucug

SEQ ID NO: 29367 - RNA, 20 nt, Homo sapiens
ccccagggcgacgcggcggg

SEQ ID NO: 29368 - RNA, 22 nt, Homo sapiens
accuugccuugcugcccgggcc

SEQ ID NO: 29369 - RNA, 21 nt, Homo sapiens
auuugugcuuggcucugucac

SEQ ID NO: 29370 - RNA, 22 nt, Homo sapiens
auuguccuugcuguuuggagau

SEQ ID NO: 29371 - RNA, 21 nt, Homo sapiens
auccccagauacaauggacaa

SEQ ID NO: 29372 - RNA, 23 nt, Homo sapiens
cagugcaauaguauugucaaagc

SEQ ID NO: 29373 - RNA, 22 nt, Homo sapiens
gcucugacuuuauugcacuacu

SEQ ID NO: 29374 - RNA, 23 nt, Homo sapiens
uaagugcuuccauguuuuaguag

SEQ ID NO: 29375 - RNA, 22 nt, Homo sapiens
acuuuaacauggaagugcuuuc

SEQ ID NO: 29376 - RNA, 23 nt, Homo sapiens
uaagugcuuccauguuucagugg

SEQ ID NO: 29377 - RNA, 22 nt, Homo sapiens
uuuaacauggggguaccugcug

SEQ ID NO: 29378 - RNA, 23 nt, Homo sapiens
uaagugcuuccauguuugagugu

SEQ ID NO: 29379 - RNA, 22 nt, Homo sapiens
acuuuaacauggaggcacuugc

SEQ ID NO: 29380 - RNA, 22 nt, Homo sapiens
aauugcacuuuagcaaugguga

SEQ ID NO: 29381 - RNA, 22 nt, Homo sapiens
acuguugcuaauaugcaacucu

SEQ ID NO: 29382 - RNA, 23 nt, Homo sapiens
agcucggucugaggccccucagu

SEQ ID NO: 29383 - RNA, 22 nt, Homo sapiens
aaaaacugagacuacuuuugca

SEQ ID NO: 29384 - RNA, 19 nt, Homo sapiens
aaaaacuguaauuacuuuu

SEQ ID NO: 29385 - RNA, 22 nt, Homo sapiens
aaaacuguaauuacuuuuguac

SEQ ID NO: 29386 - RNA, 23 nt, Homo sapiens
ugcaaaaguaauugcaguuuuug

SEQ ID NO: 29387 - RNA, 23 nt, Homo sapiens
caaaaaccgcaauuacuuuugca

SEQ ID NO: 29388 - RNA, 22 nt, Homo sapiens
aaaaguaaucgcgguuuuuguc

SEQ ID NO: 29389 - RNA, 22 nt, Homo sapiens
aaaaguacuugcggauuuugcu

SEQ ID NO: 29390 - RNA, 22 nt, Homo sapiens
aaaaguauuugcggguuuuguc

SEQ ID NO: 29391 - RNA, 21 nt, Homo sapiens
caaagguauuugugguuuuug

SEQ ID NO: 29392 - RNA, 22 nt, Homo sapiens
ccaaaacugcaguuacuuuugc

SEQ ID NO: 29393 - RNA, 22 nt, Homo sapiens
aaaaguaauugcgguuuuugcc

SEQ ID NO: 29394 - RNA, 22 nt, Homo sapiens
uagcaaaaacugcaguuacuuu

SEQ ID NO: 29395 - RNA, 20 nt, Homo sapiens
ggagguugggaagggcagag

SEQ ID NO: 29396 - RNA, 18 nt, Homo sapiens
ugaggcgggggggcgagc

SEQ ID NO: 29397 - RNA, 20 nt, Homo sapiens
agagaugaagcgggggggcg

SEQ ID NO: 29398 - RNA, 24 nt, Homo sapiens
ggaggccgggguggggcggggcgg

SEQ ID NO: 29399 - RNA, 19 nt, Homo sapiens
ggggagcgaggggcggggc

SEQ ID NO: 29400 - RNA, 23 nt, Homo sapiens
uauucauuuauccccagccuaca

SEQ ID NO: 29401 - RNA, 24 nt, Homo sapiens
acuggcuagggaaaaugauuggau

SEQ ID NO: 29402 - RNA, 22 nt, Homo sapiens
uucauuugccucccagccuaca

SEQ ID NO: 29403 - RNA, 24 nt, Homo sapiens
ugggcuaagggagaugauugggua

SEQ ID NO: 29404 - RNA, 22 nt, Homo sapiens
acuccagccccacagccucagc

SEQ ID NO: 29405 - RNA, 22 nt, Homo sapiens
aggaggaauuggugcuggucuu

SEQ ID NO: 29406 - RNA, 22 nt, Homo sapiens
aggcagcgggguguaguggaua

SEQ ID NO: 29407 - RNA, 22 nt, Homo sapiens
uccauuacacuacccugccucu

SEQ ID NO: 29408 - RNA, 22 nt, Homo sapiens
acugcugagcuagcacuucccg

SEQ ID NO: 29409 - RNA, 23 nt, Homo sapiens
caaagugcuguucgugcagguag

SEQ ID NO: 29410 - RNA, 23 nt, Homo sapiens
cacccggcugugugcacaugugc

SEQ ID NO: 29411 - RNA, 23 nt, Homo sapiens
agcuucuuuacagugcugccuug

SEQ ID NO: 29412 - RNA, 23 nt, Homo sapiens
agcagcauuguacagggcuauga

SEQ ID NO: 29413 - RNA, 17 nt, Homo sapiens
ccugagaaaagggccaa

SEQ ID NO: 29414 - RNA, 19 nt, Homo sapiens
ggccacugagucagcacca

SEQ ID NO: 29415 - RNA, 18 nt, Homo sapiens
agggcauguccagggggu

SEQ ID NO: 29416 - RNA, 23 nt, Homo sapiens
gccuggagcuacuccaccaucuc

SEQ ID NO: 29417 - RNA, 17 nt, Homo sapiens
caguguucagagaugga

SEQ ID NO: 29418 - RNA, 18 nt, Homo sapiens
aucugaccugaugaaggu

SEQ ID NO: 29419 - RNA, 18 nt, Homo sapiens
ccagagguggggacugag

SEQ ID NO: 29420 - RNA, 17 nt, Homo sapiens
ccccgccaccgccuugg

SEQ ID NO: 29421 - RNA, 22 nt, Homo sapiens
caguugggucuaggggucagga

SEQ ID NO: 29422 - RNA, 19 nt, Homo sapiens
cuuggggcauggaguccca

SEQ ID NO: 29423 - RNA, 16 nt, Homo sapiens
aggaaacagggaccca

SEQ ID NO: 29424 - RNA, 17 nt, Homo sapiens
gacauucagacuaccug

SEQ ID NO: 29425 - RNA, 18 nt, Homo sapiens
auucuaagugccuuggcc

SEQ ID NO: 29426 - RNA, 17 nt, Homo sapiens
acucagucauggucauu

SEQ ID NO: 29427 - RNA, 19 nt, Homo sapiens
cugugggcucagcucuggg

SEQ ID NO: 29428 - RNA, 16 nt, Homo sapiens
cuaggaggccuuggcc

SEQ ID NO: 29429 - RNA, 16 nt, Homo sapiens
uccagcucgguggcac

SEQ ID NO: 29430 - RNA, 21 nt, Homo sapiens
ggcuccuccucucaggaugug

SEQ ID NO: 29431 - RNA, 21 nt, Homo sapiens
gcaggcacagacagcccuggc

SEQ ID NO: 29432 - RNA, 20 nt, Homo sapiens
ucagggagucaggggagggc

SEQ ID NO: 29433 - RNA, 19 nt, Homo sapiens
gggggaagaaaaggugggg

SEQ ID NO: 29434 - RNA, 18 nt, Homo sapiens
cauucaacuagugauugu

SEQ ID NO: 29435 - RNA, 18 nt, Homo sapiens
cagcagucccucccccug

SEQ ID NO: 29436 - RNA, 17 nt, Homo sapiens
ccaauuaccacuucuuu

SEQ ID NO: 29437 - RNA, 17 nt, Homo sapiens
cucagugacucaugugc

SEQ ID NO: 29438 - RNA, 21 nt, Homo sapiens
gcaguucugagcacaguacac

SEQ ID NO: 29439 - RNA, 18 nt, Homo sapiens
cuaggggguuugcccuug

SEQ ID NO: 29440 - RNA, 16 nt, Homo sapiens
cucuccucccggcuuc

SEQ ID NO: 29441 - RNA, 21 nt, Homo sapiens
gaguguaguucugagcagagc

SEQ ID NO: 29442 - RNA, 18 nt, Homo sapiens
gggucccggggagggggg

SEQ ID NO: 29443 - RNA, 18 nt, Homo sapiens
uaaaauuugcauccagga

SEQ ID NO: 29444 - RNA, 17 nt, Homo sapiens
uggggcucagcgaguuu

SEQ ID NO: 29445 - RNA, 18 nt, Homo sapiens
gggcucacaucaccccau

SEQ ID NO: 29446 - RNA, 18 nt, Homo sapiens
gcggcgaguccgacucau

SEQ ID NO: 29447 - RNA, 17 nt, Homo sapiens
accccacuccugguacc

SEQ ID NO: 29448 - RNA, 19 nt, Homo sapiens
ucucccuugagggcacuuu

SEQ ID NO: 29449 - RNA, 17 nt, Homo sapiens
uugucugcugaguuucc

SEQ ID NO: 29450 - RNA, 19 nt, Homo sapiens
gcauugugcagggcuauca

SEQ ID NO: 29451 - RNA, 19 nt, Homo sapiens
ugcccuccuuucuucccuc

SEQ ID NO: 29452 - RNA, 16 nt, Homo sapiens
uucagcaggaacagcu

SEQ ID NO: 29453 - RNA, 18 nt, Homo sapiens
ccccugggccggccuugg

SEQ ID NO: 29454 - RNA, 17 nt, Homo sapiens
cagccugacaggaacag

SEQ ID NO: 29455 - RNA, 17 nt, Homo sapiens
gggagucuacagcaggg

SEQ ID NO: 29456 - RNA, 18 nt, Homo sapiens
cagugcaauguuuuccuu

SEQ ID NO: 29457 - RNA, 17 nt, Homo sapiens
augugggcucaggcuca

SEQ ID NO: 29458 - RNA, 16 nt, Homo sapiens
ugccuuccugucugug

SEQ ID NO: 29459 - RNA, 22 nt, Homo sapiens
cugggacaggaggaggaggcag

SEQ ID NO: 29460 - RNA, 18 nt, Homo sapiens
gcuggugacaugagaggc

SEQ ID NO: 29461 - RNA, 18 nt, Homo sapiens
ugggagcuggacuacuuc

SEQ ID NO: 29462 - RNA, 20 nt, Homo sapiens
ucccacuacuucacuuguga

SEQ ID NO: 29463 - RNA, 18 nt, Homo sapiens
ccaguguggcucagcgag

SEQ ID NO: 29464 - RNA, 17 nt, Homo sapiens
uucugagcugaggacag

SEQ ID NO: 29465 - RNA, 17 nt, Homo sapiens
ccggcauguccagggca

SEQ ID NO: 29466 - RNA, 18 nt, Homo sapiens
ccuagacaccuccaguuc

SEQ ID NO: 29467 - RNA, 17 nt, Homo sapiens
uggagagaaaggcagua

SEQ ID NO: 29468 - RNA, 19 nt, Homo sapiens
aauguuuuuuccuguuucc

SEQ ID NO: 29469 - RNA, 18 nt, Homo sapiens
ucccuggaguuucuucuu

SEQ ID NO: 29470 - RNA, 18 nt, Homo sapiens
cuggagucuaggauucca

SEQ ID NO: 29471 - RNA, 16 nt, Homo sapiens
gcagcauucauguccc

SEQ ID NO: 29472 - RNA, 18 nt, Homo sapiens
gaaagagagcugagugug

SEQ ID NO: 29473 - RNA, 19 nt, Homo sapiens
ggccuuguuccugucccca

SEQ ID NO: 29474 - RNA, 20 nt, Homo sapiens
agcccccuggccccaaaccc

SEQ ID NO: 29475 - RNA, 18 nt, Homo sapiens
cucugggaaaugggacag

SEQ ID NO: 29476 - RNA, 18 nt, Homo sapiens
ccgcuuucugagcuggac

SEQ ID NO: 29477 - RNA, 17 nt, Homo sapiens
ggugaggcuagcuggug

SEQ ID NO: 29478 - RNA, 17 nt, Homo sapiens
acauugccagggaguuu

SEQ ID NO: 29479 - RNA, 17 nt, Homo sapiens
cacuguggguacaugcu

SEQ ID NO: 29480 - RNA, 17 nt, Homo sapiens
ucccugagcaaagccac

SEQ ID NO: 29481 - RNA, 18 nt, Homo sapiens
gggauucuguagcuuccu

SEQ ID NO: 29482 - RNA, 21 nt, Homo sapiens
uuagcgguggaccgcccugcg

SEQ ID NO: 29483 - RNA, 21 nt, Homo sapiens
cugugggcucagcgcgugggg

SEQ ID NO: 29484 - RNA, 18 nt, Homo sapiens
cagccccacagccucaga

SEQ ID NO: 29485 - RNA, 20 nt, Homo sapiens
cccugagacccuaaccuuaa

SEQ ID NO: 29486 - RNA, 18 nt, Homo sapiens
uugcacuugucucaguga

SEQ ID NO: 29487 - RNA, 20 nt, Homo sapiens
uguuccucugucucccagac

SEQ ID NO: 29488 - RNA, 19 nt, Homo sapiens
ggcuugcaugggggacugg

SEQ ID NO: 29489 - RNA, 17 nt, Homo sapiens
ccaguuuucccaggauu

SEQ ID NO: 29490 - RNA, 19 nt, Homo sapiens
ccugagacccuaguuccac

SEQ ID NO: 29491 - RNA, 19 nt, Homo sapiens
ccucagaucagagccuugc

SEQ ID NO: 29492 - RNA, 22 nt, Homo sapiens
cauugcacuugucucggucuga

SEQ ID NO: 29493 - RNA, 21 nt, Homo sapiens
aggcggagacuugggcaauug

SEQ ID NO: 29494 - RNA, 22 nt, Homo sapiens
ccuauucuugguuacuugcacg

SEQ ID NO: 29495 - RNA, 19 nt, Homo sapiens
aauggauuuuuggagcagg

SEQ ID NO: 29496 - RNA, 22 nt, Homo sapiens
ugcggggcuagggcuaacagca

SEQ ID NO: 29497 - RNA, 22 nt, Homo sapiens
aaaaguaauugcggauuuugcc

SEQ ID NO: 29498 - RNA, 22 nt, Homo sapiens
caaaaguaauuguggauuuugu

SEQ ID NO: 29499 - RNA, 23 nt, Homo sapiens
uaagugcuuccauguuuugguga

SEQ ID NO: 29500 - RNA, 23 nt, Homo sapiens
acuuaaacguggauguacuugcu

SEQ ID NO: 29501 - RNA, 21 nt, Homo sapiens
cuauacaaucuacugucuuuc

SEQ ID NO: 29502 - RNA, 22 nt, Homo sapiens
ugagguaguagguuguauaguu

SEQ ID NO: 29503 - RNA, 22 nt, Homo sapiens
cuguacagccuccuagcuuucc

SEQ ID NO: 29504 - RNA, 20 nt, Homo sapiens
caccaggcauuguggucucc

SEQ ID NO: 29505 - RNA, 23 nt, Homo sapiens
ugaguaccgccaugucuguuggg

SEQ ID NO: 29506 - RNA, 22 nt, Homo sapiens
uacccagagcaugcagugugaa

SEQ ID NO: 29507 - RNA, 22 nt, Homo sapiens
aagugcugucauagcugagguc

SEQ ID NO: 29508 - RNA, 23 nt, Homo sapiens
cacucagccuugagggcacuuuc

SEQ ID NO: 29509 - RNA, 22 nt, Homo sapiens
ucgacagcacgacacugccuuc

SEQ ID NO: 29510 - RNA, 22 nt, Homo sapiens
uagguaguuuccuguuguuggg

SEQ ID NO: 29511 - RNA, 21 nt, Homo sapiens
uacaguacugugauaacugaa

SEQ ID NO: 29512 - RNA, 22 nt, Homo sapiens
caguuaucacagugcugaugcu

SEQ ID NO: 29513 - RNA, 23 nt, Homo sapiens
ugugcaaaucuaugcaaaacuga

SEQ ID NO: 29514 - RNA, 22 nt, Homo sapiens
aguuuugcauaguugcacuaca

SEQ ID NO: 29515 - RNA, 23 nt, Homo sapiens
aguuuugcagguuugcauccagc

SEQ ID NO: 29516 - RNA, 22 nt, Homo sapiens
aguuuugcagguuugcauuuca

SEQ ID NO: 29517 - RNA, 23 nt, Homo sapiens
ugugcaaauccaugcaaaacuga

SEQ ID NO: 29518 - RNA, 23 nt, Homo sapiens
uacugcaucaggaacugauugga

SEQ ID NO: 29519 - RNA, 22 nt, Homo sapiens
augguuccgucaagcaccaugg

SEQ ID NO: 29520 - RNA, 21 nt, Homo sapiens
agcuacaucuggcuacugggu

SEQ ID NO: 29521 - RNA, 22 nt, Homo sapiens
cucaguagccaguguagauccu

SEQ ID NO: 29522 - RNA, 22 nt, Homo sapiens
uuaucagaaucuccagggguac

SEQ ID NO: 29523 - RNA, 23 nt, Homo sapiens
aucaacagacauuaauugggcgc

SEQ ID NO: 29524 - RNA, 21 nt, Homo sapiens
caaaacgugaggcgcugcuau

SEQ ID NO: 29525 - RNA, 22 nt, Homo sapiens
cagcagcaauucauguuuugaa

SEQ ID NO: 29526 - RNA, 18 nt, Homo sapiens
uucacagggaggugucau

SEQ ID NO: 29527 - RNA, 20 nt, Homo sapiens
gcggagagagaauggggagc

SEQ ID NO: 29528 - RNA, 21 nt, Homo sapiens
ccugcgagucuccggcggugg

SEQ ID NO: 29529 - RNA, 21 nt, Homo sapiens
gggcuagggccugcugccccc

SEQ ID NO: 29530 - RNA, 19 nt, Homo sapiens
uucugcugccggccaaggc

SEQ ID NO: 29531 - RNA, 22 nt, Homo sapiens
uccucaucacacugcaccuuag

SEQ ID NO: 29532 - RNA, 20 nt, Homo sapiens
gguagugaguuaucagcuac

SEQ ID NO: 29533 - RNA, 20 nt, Homo sapiens
gauauucagaggcuaggugg

SEQ ID NO: 29534 - RNA, 21 nt, Homo sapiens
acggcccaggcggcauuggug

SEQ ID NO: 29535 - RNA, 21 nt, Homo sapiens
agcaugacagaggagaggugg

SEQ ID NO: 29536 - RNA, 21 nt, Homo sapiens
gggaagagcuguacggccuuc

SEQ ID NO: 29537 - RNA, 19 nt, Homo sapiens
ccgccugagcuagcugugg

SEQ ID NO: 29538 - RNA, 24 nt, Homo sapiens
uuggaagcuuggaccaacuagcug

SEQ ID NO: 29539 - RNA, 19 nt, Homo sapiens
ucuagugcgggcguucccg

SEQ ID NO: 29540 - RNA, 24 nt, Homo sapiens
aggagcagugccggccaaggcgcc

SEQ ID NO: 29541 - RNA, 19 nt, Homo sapiens
gaauacgucugguugaucc

SEQ ID NO: 29542 - RNA, 20 nt, Homo sapiens
cuuauaucagaggcuguggg

SEQ ID NO: 29543 - RNA, 20 nt, Homo sapiens
uuccgccagucgguggccgg

SEQ ID NO: 29544 - RNA, 19 nt, Homo sapiens
aaggggcugggggagcaca

SEQ ID NO: 29545 - RNA, 23 nt, Homo sapiens
agguugggaucgguugcaaugcu

SEQ ID NO: 29546 - RNA, 22 nt, Homo sapiens
ggguggggauuuguugcauuac

SEQ ID NO: 29547 - RNA, 22 nt, Homo sapiens
uauugcacuugucccggccugu

SEQ ID NO: 29548 - RNA, 22 nt, Homo sapiens
uauugcacucgucccggccucc

SEQ ID NO: 29549 - RNA, 22 nt, Homo sapiens
agggacgggacgcggugcagug

SEQ ID NO: 29550 - RNA, 21 nt, Homo sapiens
aucacauugccagggauuucc

SEQ ID NO: 29551 - RNA, 22 nt, Homo sapiens
gggguuccuggggaugggauuu

SEQ ID NO: 29552 - RNA, 22 nt, Homo sapiens
acugcagugaaggcacuuguag

SEQ ID NO: 29553 - RNA, 23 nt, Homo sapiens
agcuacauugucugcuggguuuc

SEQ ID NO: 29554 - RNA, 22 nt, Homo sapiens
accuggcauacaauguagauuu

SEQ ID NO: 29555 - RNA, 22 nt, Homo sapiens
ucguaccgugaguaauaaugcg

SEQ ID NO: 29556 - RNA, 21 nt, Homo sapiens
cauuauuacuuuugguacgcg

SEQ ID NO: 29557 - RNA, 23 nt, Homo sapiens
uacuccagagggcgucacucaug

SEQ ID NO: 29558 - RNA, 21 nt, Homo sapiens
ucccacguuguggcccagcag

SEQ ID NO: 29559 - RNA, 23 nt, Homo sapiens
ccucaccaccccuucugccugca

SEQ ID NO: 29560 - RNA, 24 nt, Homo sapiens
cugcaggcagaaguggggcugaca

SEQ ID NO: 29561 - RNA, 21 nt, Homo sapiens
ccaaaccagucgugccugugg

SEQ ID NO: 29562 - RNA, 22 nt, Homo sapiens
cucaaaccggcugugccugugg

SEQ ID NO: 29563 - RNA, 21 nt, Homo sapiens
acaggcacgacugguuuggca

SEQ ID NO: 29564 - RNA, 22 nt, Homo sapiens
uccgaacucuccauuccucugc

SEQ ID NO: 29565 - RNA, 20 nt, Homo sapiens
ugggaauggggguaagggcc

SEQ ID NO: 29566 - RNA, 22 nt, Homo sapiens
aggcgauguggggauguagaga

SEQ ID NO: 29567 - RNA, 21 nt, Homo sapiens
uaguggucagagggcuuauga

SEQ ID NO: 29568 - RNA, 22 nt, Homo sapiens
ucugacaucagugauucuccug

SEQ ID NO: 29569 - RNA, 22 nt, Homo sapiens
cgcgccugcaggaacugguaga

SEQ ID NO: 29570 - RNA, 23 nt, Homo sapiens
ugggcaggggcuuauuguaggag

SEQ ID NO: 29571 - RNA, 22 nt, Homo sapiens
ugcaggggucgggugggccagg

SEQ ID NO: 29572 - RNA, 20 nt, Homo sapiens
aggcgcacccgaccacaugc

SEQ ID NO: 29573 - RNA, 22 nt, Homo sapiens
auaguccgaguaacgucggggc

SEQ ID NO: 29574 - RNA, 23 nt, Homo sapiens
cugggcccgcggcgggcgugggg

SEQ ID NO: 29575 - RNA, 21 nt, Homo sapiens
uacuuggaaaggcaucaguug

SEQ ID NO: 29576 - RNA, 22 nt, Homo sapiens
ugcaacgaaccugagccacuga

SEQ ID NO: 29577 - RNA, 22 nt, Homo sapiens
ugcaacuuaccugagucauuga

SEQ ID NO: 29578 - RNA, 21 nt, Homo sapiens
cacuguguccuuucugcguag

SEQ ID NO: 29579 - RNA, 22 nt, Homo sapiens
cacuggcuccuuucuggguaga

SEQ ID NO: 29580 - RNA, 22 nt, Homo sapiens
cacuguuuccuuucugagugga

SEQ ID NO: 29581 - RNA, 21 nt, Homo sapiens
uauucagaaaggugccaguca

SEQ ID NO: 29582 - RNA, 20 nt, Homo sapiens
auuccuagaaauuguucaua

SEQ ID NO: 29583 - RNA, 22 nt, Homo sapiens
uaauacugucugguaaaaccgu

SEQ ID NO: 29584 - RNA, 22 nt, Homo sapiens
ugaaacauacacgggaaaccuc

SEQ ID NO: 29585 - RNA, 22 nt, Homo sapiens
cuauacaaccuacugccuuccc

SEQ ID NO: 29586 - RNA, 22 nt, Homo sapiens
ugagguaguagguugugugguu

SEQ ID NO: 29587 - RNA, 22 nt, Homo sapiens
uaacacugucugguaacgaugu

SEQ ID NO: 29588 - RNA, 22 nt, Homo sapiens
caucuuaccggacagugcugga

SEQ ID NO: 29589 - RNA, 22 nt, Homo sapiens
uaauacugccugguaaugauga

SEQ ID NO: 29590 - RNA, 22 nt, Homo sapiens
caucuuacugggcagcauugga

SEQ ID NO: 29591 - RNA, 23 nt, Homo sapiens
uaauacugccggguaaugaugga

SEQ ID NO: 29592 - RNA, 22 nt, Homo sapiens
cgucuuacccagcaguguuugg

SEQ ID NO: 29593 - RNA, 22 nt, Homo sapiens
uccagcaucagugauuuuguug

SEQ ID NO: 29594 - RNA, 20 nt, Homo sapiens
uacaguauagaugauguacu

SEQ ID NO: 29595 - RNA, 22 nt, Homo sapiens
ggauaucaucauauacuguaag

SEQ ID NO: 29596 - RNA, 21 nt, Homo sapiens
cggggcagcucaguacaggau

SEQ ID NO: 29597 - RNA, 21 nt, Homo sapiens
uccuucugcuccgucccccag

SEQ ID NO: 29598 - RNA, 21 nt, Homo sapiens
cgggggcggggccgaagcgcg

SEQ ID NO: 29599 - RNA, 21 nt, Homo sapiens
uccugcgcgucccagaugccc

SEQ ID NO: 29600 - RNA, 22 nt, Homo sapiens
caucagaauucauggaggcuag

SEQ ID NO: 29601 - RNA, 22 nt, Homo sapiens
agcuuccaugacuccugaugga

SEQ ID NO: 29602 - RNA, 21 nt, Homo sapiens
ugacagcgcccugccuggcuc

SEQ ID NO: 29603 - RNA, 24 nt, Homo sapiens
agcgcgggcugagcgcugccaguc

SEQ ID NO: 29604 - RNA, 22 nt, Homo sapiens
cugggaggugugauaucguggu

SEQ ID NO: 29605 - RNA, 22 nt, Homo sapiens
ugugauaucaugguuccuggga

SEQ ID NO: 29606 - RNA, 22 nt, Homo sapiens
aggugcuccaggcuggcucaca

SEQ ID NO: 29607 - RNA, 22 nt, Homo sapiens
gagcaauguagguagacuguuu

SEQ ID NO: 29608 - RNA, 22 nt, Homo sapiens
uguccucuagggccugcagucu

SEQ ID NO: 29609 - RNA, 20 nt, Homo sapiens
aaaggcauaaaaccaagaca

SEQ ID NO: 29610 - RNA, 21 nt, Homo sapiens
uaacgcauaauauggacaugu

SEQ ID NO: 29611 - RNA, 22 nt, Homo sapiens
uugaggaaaagauggucuuauu

SEQ ID NO: 29612 - RNA, 26 nt, Homo sapiens
aagaggaagaaauggcugguucucag

SEQ ID NO: 29613 - RNA, 20 nt, Homo sapiens
gcucggacugagcagguggg

SEQ ID NO: 29614 - RNA, 21 nt, Homo sapiens
acagggccgcagauggagacu

SEQ ID NO: 29615 - RNA, 21 nt, Homo sapiens
gcagagaacaaaggacucagu

SEQ ID NO: 29616 - RNA, 22 nt, Homo sapiens
acugauuaucuuaacucucuga

SEQ ID NO: 29617 - RNA, 23 nt, Homo sapiens
ucucugaguaccauaugccuugu

SEQ ID NO: 29618 - RNA, 22 nt, Homo sapiens
aacuaguaauguuggauuaggg

SEQ ID NO: 29619 - RNA, 22 nt, Homo sapiens
auauguauaugugacugcuacu

SEQ ID NO: 29620 - RNA, 21 nt, Homo sapiens
uggccaaaaagcaggcagaga

SEQ ID NO: 29621 - RNA, 22 nt, Homo sapiens
ggaggaaccuuggagcuucggc

SEQ ID NO: 29622 - RNA, 23 nt, Homo sapiens
gaggcugaugugaguagaccacu

SEQ ID NO: 29623 - RNA, 21 nt, Homo sapiens
cuguccuaagguuguugaguu

SEQ ID NO: 29624 - RNA, 21 nt, Homo sapiens
ucuucaaccucaggacuugca

SEQ ID NO: 29625 - RNA, 22 nt, Homo sapiens
ugugauaucaugguuccuggga

SEQ ID NO: 29626 - RNA, 22 nt, Homo sapiens
cugggaggugugauauuguggu

SEQ ID NO: 29627 - RNA, 22 nt, Homo sapiens
cagguagauauuugauaggcau

SEQ ID NO: 29628 - RNA, 21 nt, Homo sapiens
gccuaucacauaucugccugu

SEQ ID NO: 29629 - RNA, 20 nt, Homo sapiens
gggcuggggcgcggggaggu

SEQ ID NO: 29630 - RNA, 18 nt, Homo sapiens
ugcuuccuuucagagggu

SEQ ID NO: 29631 - RNA, 21 nt, Homo sapiens
ugaguuggccaucugagugag

SEQ ID NO: 29632 - RNA, 23 nt, Homo sapiens
aacauucauuguugucggugggu

SEQ ID NO: 29633 - RNA, 21 nt, Homo sapiens
ucacagugaaccggucucuuu

SEQ ID NO: 29634 - RNA, 22 nt, Homo sapiens
caacaaaucacagucugccaua

SEQ ID NO: 29635 - RNA, 21 nt, Homo sapiens
cucacugaacaaugaaugcaa

SEQ ID NO: 29636 - RNA, 23 nt, Homo sapiens
aacauucauugcugucggugggu

SEQ ID NO: 29637 - RNA, 22 nt, Homo sapiens
accaucgaccguugauuguacc

SEQ ID NO: 29638 - RNA, 23 nt, Homo sapiens
aacauucaacgcugucggugagu

SEQ ID NO: 29639 - RNA, 22 nt, Homo sapiens
accacugaccguugacuguacc

SEQ ID NO: 29640 - RNA, 22 nt, Homo sapiens
cuguugccacuaaccucaaccu

SEQ ID NO: 29641 - RNA, 22 nt, Homo sapiens
auaagacgagcaaaaagcuugu

SEQ ID NO: 29642 - RNA, 22 nt, Homo sapiens
auaagacgaacaaaagguuugu

SEQ ID NO: 29643 - RNA, 21 nt, Homo sapiens
agggagggacgggggcugugc

SEQ ID NO: 29644 - RNA, 23 nt, Homo sapiens
ucuggcuccgugucuucacuccc

SEQ ID NO: 29645 - RNA, 22 nt, Homo sapiens
uggaauguaaagaaguauguau

SEQ ID NO: 29646 - RNA, 22 nt, Homo sapiens
aacaucacagcaagucugugcu

SEQ ID NO: 29647 - RNA, 21 nt, Homo sapiens
uuaagacuugcagugauguuu

SEQ ID NO: 29648 - RNA, 22 nt, Homo sapiens
aacaucacugcaagucuuaaca

SEQ ID NO: 29649 - RNA, 21 nt, Homo sapiens
acagacuugcugugauguuca

SEQ ID NO: 29650 - RNA, 22 nt, Homo sapiens
aaaccguuaccauuacugaguu

SEQ ID NO: 29651 - RNA, 22 nt, Homo sapiens
uagcaagagaaccauuaccauu

SEQ ID NO: 29652 - RNA, 23 nt, Homo sapiens
ugaggggcagagagcgagacuuu

SEQ ID NO: 29653 - RNA, 22 nt, Homo sapiens
caagcucgcuucuaugggucug

SEQ ID NO: 29654 - RNA, 22 nt, Homo sapiens
aacccguagauccgaucuugug

SEQ ID NO: 29655 - RNA, 22 nt, Homo sapiens
caagcucgugucuguggguccg

SEQ ID NO: 29656 - RNA, 22 nt, Homo sapiens
cacccguagaaccgaccuugcg

SEQ ID NO: 29657 - RNA, 23 nt, Homo sapiens
uggagacgcggcccuguuggagu

SEQ ID NO: 29658 - RNA, 23 nt, Homo sapiens
ucuacagugcacgugucuccagu

SEQ ID NO: 29659 - RNA, 22 nt, Homo sapiens
caaauucguaucuaggggaaua

SEQ ID NO: 29660 - RNA, 23 nt, Homo sapiens
uacccuguagauccgaauuugug

SEQ ID NO: 29661 - RNA, 23 nt, Homo sapiens
ccugcagcgacuugauggcuucc

SEQ ID NO: 29662 - RNA, 22 nt, Homo sapiens
ucagugcacuacagaacuuugu

SEQ ID NO: 29663 - RNA, 22 nt, Homo sapiens
aaaguucugagacacuccgacu

SEQ ID NO: 29664 - RNA, 22 nt, Homo sapiens
ccuguucuccauuacuuggcuc

SEQ ID NO: 29665 - RNA, 21 nt, Homo sapiens
uucaaguaauucaggauaggu

SEQ ID NO: 29666 - RNA, 22 nt, Homo sapiens
gcccugaacgaggggucuggag

SEQ ID NO: 29667 - RNA, 22 nt, Homo sapiens
gcugacuccuaguccagggcuc

SEQ ID NO: 29668 - RNA, 22 nt, Homo sapiens
aucacacaaaggcaacuuuugu

SEQ ID NO: 29669 - RNA, 22 nt, Homo sapiens
agagguugcccuuggugaauuc

SEQ ID NO: 29670 - RNA, 21 nt, Homo sapiens
gguagauuuuccuucuauggu

SEQ ID NO: 29671 - RNA, 21 nt, Homo sapiens
aucauagaggaaaauccacgu

SEQ ID NO: 29672 - RNA, 22 nt, Homo sapiens
guagauucuccuucuaugagua

SEQ ID NO: 29673 - RNA, 22 nt, Homo sapiens
cugguacaggccugggggacag

SEQ ID NO: 29674 - RNA, 22 nt, Homo sapiens
ucucccaacccuuguaccagug

SEQ ID NO: 29675 - RNA, 22 nt, Homo sapiens
acggguuaggcucuugggagcu

SEQ ID NO: 29676 - RNA, 22 nt, Homo sapiens
ucacaagucaggcucuugggac

SEQ ID NO: 29677 - RNA, 22 nt, Homo sapiens
aacccguagauccgaacuugug

SEQ ID NO: 29678 - RNA, 21 nt, Homo sapiens
cuguacaggccacugccuugc

SEQ ID NO: 29679 - RNA, 22 nt, Homo sapiens
ugagguaguaguuuguacaguu

SEQ ID NO: 29680 - RNA, 22 nt, Homo sapiens
ucccugagacccuaacuuguga

SEQ ID NO: 29681 - RNA, 22 nt, Homo sapiens
caagcuuguaucuauagguaug

SEQ ID NO: 29682 - RNA, 23 nt, Homo sapiens
aaagugcugcgacauuugagcgu

SEQ ID NO: 29683 - RNA, 22 nt, Homo sapiens
uuuagagacggggucuugcucu

SEQ ID NO: 29684 - RNA, 24 nt, Homo sapiens
uggcccugacugaagaccagcagu

SEQ ID NO: 29685 - RNA, 21 nt, Homo sapiens
gcgacccauacuugguuucag

SEQ ID NO: 29686 - RNA, 22 nt, Homo sapiens
gaaaucaagcgugggugagacc

SEQ ID NO: 29687 - RNA, 21 nt, Homo sapiens
cccugggccucugcuccccag

SEQ ID NO: 29688 - RNA, 24 nt, Homo sapiens
uggggagcugaggcucugggggug

SEQ ID NO: 29689 - RNA, 20 nt, Homo sapiens
ggggagcuguggaagcagua

SEQ ID NO: 29690 - RNA, 25 nt, Homo sapiens
cuagugagggacagaaccaggauuc

SEQ ID NO: 29691 - RNA, 20 nt, Homo sapiens
agagucuugugaugucuugc

SEQ ID NO: 29692 - RNA, 23 nt, Homo sapiens
gcagcagagaauaggacuacguc

SEQ ID NO: 29693 - RNA, 23 nt, Homo sapiens
ugagcgccucgacgacagagccg

SEQ ID NO: 29694 - RNA, 23 nt, Homo sapiens
ucccuguccuccaggagcucacg

SEQ ID NO: 29695 - RNA, 22 nt, Homo sapiens
cuauacggccuccuagcuuucc

SEQ ID NO: 29696 - RNA, 22 nt, Homo sapiens
ugagguaggagguuguauaguu

SEQ ID NO: 29697 - RNA, 22 nt, Homo sapiens
cugcgcaagcuacugccuugcu

SEQ ID NO: 29698 - RNA, 22 nt, Homo sapiens
ugagguaguaguuugugcuguu

SEQ ID NO: 29699 - RNA, 22 nt, Homo sapiens
ugcccuguggacucaguucugg

SEQ ID NO: 29700 - RNA, 21 nt, Homo sapiens
ugguucuagacuugccaacua

SEQ ID NO: 29701 - RNA, 23 nt, Homo sapiens
ugucugcccgcaugccugccucu

SEQ ID NO: 29702 - RNA, 22 nt, Homo sapiens
aaaaguaauugcggucuuuggu

SEQ ID NO: 29703 - RNA, 18 nt, Homo sapiens
ucgaggagcucacagucu

SEQ ID NO: 29704 - RNA, 22 nt, Homo sapiens
cuauacaaucuauugccuuccc

SEQ ID NO: 29705 - RNA, 22 nt, Homo sapiens
cuauacagucuacugucuuucc

SEQ ID NO: 29706 - RNA, 22 nt, Homo sapiens
ugagguaguagauuguauaguu

SEQ ID NO: 29707 - RNA, 22 nt, Homo sapiens
aaaaguaauugugguuuuggcc

SEQ ID NO: 29708 - RNA, 22 nt, Homo sapiens
aaaaguaauugcgguuuuugcc

SEQ ID NO: 29709 - RNA, 22 nt, Homo sapiens
ccucugaaauucaguucuucag

SEQ ID NO: 29710 - RNA, 22 nt, Homo sapiens
ugagaacugaauuccauggguu

SEQ ID NO: 29711 - RNA, 22 nt, Homo sapiens
acagcaggcacagacaggcagu

SEQ ID NO: 29712 - RNA, 22 nt, Homo sapiens
ugccugucuacacuugcugugc

SEQ ID NO: 29713 - RNA, 22 nt, Homo sapiens
uagcaccaucugaaaucgguua

SEQ ID NO: 29714 - RNA, 22 nt, Homo sapiens
acugauuucuuuugguguucag

SEQ ID NO: 29715 - RNA, 24 nt, Homo sapiens
gcugguuucauauggugguuuaga

SEQ ID NO: 29716 - RNA, 22 nt, Homo sapiens
cugguuucacaugguggcuuag

SEQ ID NO: 29717 - RNA, 23 nt, Homo sapiens
uagcaccauuugaaaucaguguu

SEQ ID NO: 29718 - RNA, 22 nt, Homo sapiens
uagcaccauuugaaaucgguua

SEQ ID NO: 29719 - RNA, 22 nt, Homo sapiens
ugaccgauuucuccugguguuc

SEQ ID NO: 29720 - RNA, 23 nt, Homo sapiens
ugucacucggcucggcccacuac

SEQ ID NO: 29721 - RNA, 22 nt, Homo sapiens
cugccaauuccauaggucacag

SEQ ID NO: 29722 - RNA, 21 nt, Homo sapiens
cugaccuaugaauugacagcc

SEQ ID NO: 29723 - RNA, 20 nt, Homo sapiens
acugccccaggugcugcugg

SEQ ID NO: 29724 - RNA, 22 nt, Homo sapiens
aacgccauuaucacacuaaaua

SEQ ID NO: 29725 - RNA, 22 nt, Homo sapiens
cuuucagucggauguuugcagc

SEQ ID NO: 29726 - RNA, 22 nt, Homo sapiens
aauugcacgguauccaucugua

SEQ ID NO: 29727 - RNA, 22 nt, Homo sapiens
cggguggaucacgaugcaauuu

SEQ ID NO: 29728 - RNA, 22 nt, Homo sapiens
cugggagguggauguuuacuuc

SEQ ID NO: 29729 - RNA, 22 nt, Homo sapiens
uguaaacauccuacacucagcu

SEQ ID NO: 29730 - RNA, 22 nt, Homo sapiens
cugggagaggguuguuuacucc

SEQ ID NO: 29731 - RNA, 22 nt, Homo sapiens
cugggagaaggcuguuuacucu

SEQ ID NO: 29732 - RNA, 23 nt, Homo sapiens
uguaaacauccuacacucucagc

SEQ ID NO: 29733 - RNA, 22 nt, Homo sapiens
uuuuucauuauugcuccugacc

SEQ ID NO: 29734 - RNA, 23 nt, Homo sapiens
ucaagagcaauaacgaaaaaugu

SEQ ID NO: 29735 - RNA, 23 nt, Homo sapiens
caaagugcuuacagugcagguag

SEQ ID NO: 29736 - RNA, 22 nt, Homo sapiens
ggauuccuggaaauacuguucu

SEQ ID NO: 29737 - RNA, 23 nt, Homo sapiens
guccaguuuucccaggaaucccu

SEQ ID NO: 29738 - RNA, 22 nt, Homo sapiens
acugcauuaugagcacuuaaag

SEQ ID NO: 29739 - RNA, 23 nt, Homo sapiens
uaaagugcuuauagugcagguag

SEQ ID NO: 29740 - RNA, 22 nt, Homo sapiens
gaggguuggguggaggcucucc

SEQ ID NO: 29741 - RNA, 22 nt, Homo sapiens
cugugcgugugacagcggcuga

SEQ ID NO: 29742 - RNA, 22 nt, Homo sapiens
ccaguggggcugcuguuaucug

SEQ ID NO: 29743 - RNA, 22 nt, Homo sapiens
uguaacagcaacuccaugugga

SEQ ID NO: 29744 - RNA, 22 nt, Homo sapiens
ucacaguggucucugggauuau

SEQ ID NO: 29745 - RNA, 22 nt, Homo sapiens
uaaucucagcuggcaacuguga

SEQ ID NO: 29746 - RNA, 22 nt, Homo sapiens
cagugccucggcagugcagccc

SEQ ID NO: 29747 - RNA, 20 nt, Homo sapiens
gugcauugcuguugcauugc

SEQ ID NO: 29748 - RNA, 19 nt, Homo sapiens
acuggacuuggaggcagaa

SEQ ID NO: 29749 - RNA, 25 nt, Homo sapiens
acuggacuuggagucagaagagugg

SEQ ID NO: 29750 - RNA, 20 nt, Homo sapiens
acuggacuuggagucagaaa

SEQ ID NO: 29751 - RNA, 19 nt, Homo sapiens
acuggacuuggagucagga

SEQ ID NO: 29752 - RNA, 20 nt, Homo sapiens
acuggacuuggagccagaag

SEQ ID NO: 29753 - RNA, 20 nt, Homo sapiens
acugggcuuggagucagaag

SEQ ID NO: 29754 - RNA, 21 nt, Homo sapiens
acuggacuuggugucagaugg

SEQ ID NO: 29755 - RNA, 21 nt, Homo sapiens
acuggacuaggagucagaagg

SEQ ID NO: 29756 - RNA, 19 nt, Homo sapiens
acuggauuuggagccagaa

SEQ ID NO: 29757 - RNA, 20 nt, Homo sapiens
aggaauguuccuucuuugcc

SEQ ID NO: 29758 - RNA, 21 nt, Homo sapiens
ucagugcaugacagaacuugg

SEQ ID NO: 29759 - RNA, 20 nt, Homo sapiens
ucacaccugccucgcccccc

SEQ ID NO: 29760 - RNA, 21 nt, Homo sapiens
gugggcgggggcaggugugug

SEQ ID NO: 29761 - RNA, 22 nt, Homo sapiens
acgcccuucccccccuucuuca

SEQ ID NO: 29762 - RNA, 22 nt, Homo sapiens
uugcauauguaggaugucccau

SEQ ID NO: 29763 - RNA, 23 nt, Homo sapiens
guuugcacgggugggccuugucu

SEQ ID NO: 29764 - RNA, 22 nt, Homo sapiens
gacuauagaacuuucccccuca

SEQ ID NO: 29765 - RNA, 21 nt, Homo sapiens
agggggaaaguucuauagucc

SEQ ID NO: 29766 - RNA, 21 nt, Homo sapiens
cuuuuugcggucugggcuugc

SEQ ID NO: 29767 - RNA, 21 nt, Homo sapiens
ucuuguguucucuagaucagu

SEQ ID NO: 29768 - RNA, 23 nt, Homo sapiens
cccaguguucagacuaccuguuc

SEQ ID NO: 29769 - RNA, 22 nt, Homo sapiens
acaguagucugcacauugguua

SEQ ID NO: 29770 - RNA, 22 nt, Homo sapiens
acaguagucugcacauugguua

SEQ ID NO: 29771 - RNA, 23 nt, Homo sapiens
cccaguguuuagacuaucuguuc

SEQ ID NO: 29772 - RNA, 22 nt, Homo sapiens
uggagugugacaaugguguuug

SEQ ID NO: 29773 - RNA, 22 nt, Homo sapiens
ugcccuaaaugccccuucuggc

SEQ ID NO: 29774 - RNA, 23 nt, Homo sapiens
uaaggugcaucuagugcaguuag

SEQ ID NO: 29775 - RNA, 22 nt, Homo sapiens
cuccuauaugaugccuuucuuc

SEQ ID NO: 29776 - RNA, 21 nt, Homo sapiens
gaacggcuucauacaggaguu

SEQ ID NO: 29777 - RNA, 22 nt, Homo sapiens
ugugacugguugaccagagggg

SEQ ID NO: 29778 - RNA, 23 nt, Homo sapiens
acugcccuaagugcuccuucugg

SEQ ID NO: 29779 - RNA, 23 nt, Homo sapiens
uaaggugcaucuagugcagauag

SEQ ID NO: 29780 - RNA, 22 nt, Homo sapiens
cagugcaaugaugaaagggcau

SEQ ID NO: 29781 - RNA, 21 nt, Homo sapiens
acucuuucccuguugcacuac

SEQ ID NO: 29782 - RNA, 24 nt, Homo sapiens
uuuggcaaugguagaacucacacu

SEQ ID NO: 29783 - RNA, 21 nt, Homo sapiens
agggcccccccucaauccugu

SEQ ID NO: 29784 - RNA, 22 nt, Homo sapiens
cagugcaauguuaaaagggcau

SEQ ID NO: 29785 - RNA, 22 nt, Homo sapiens
uucacauugugcuacugucugc

SEQ ID NO: 29786 - RNA, 22 nt, Homo sapiens
ucggauccgucugagcuuggcu

SEQ ID NO: 29787 - RNA, 22 nt, Homo sapiens
cugaagcucagagggcucugau

SEQ ID NO: 29788 - RNA, 22 nt, Homo sapiens
ccucuuccccuugucucuccag

SEQ ID NO: 29789 - RNA, 22 nt, Homo sapiens
ugagugacaggggaaaugggga

SEQ ID NO: 29790 - RNA, 22 nt, Homo sapiens
ucaggacacuucugaacuugga

SEQ ID NO: 29791 - RNA, 22 nt, Homo sapiens
caguucagaaguguuccugagu

SEQ ID NO: 29792 - RNA, 21 nt, Homo sapiens
uuucccuuuccauccuggcag

SEQ ID NO: 29793 - RNA, 21 nt, Homo sapiens
uugccagggcaggagguggaa

SEQ ID NO: 29794 - RNA, 21 nt, Homo sapiens
agagauugguagaaaucaggu

SEQ ID NO: 29795 - RNA, 23 nt, Homo sapiens
aaucggacccauuuaaaccggag

SEQ ID NO: 29796 - RNA, 24 nt, Homo sapiens
ucugggcacaggcggauggacagg

SEQ ID NO: 29797 - RNA, 21 nt, Homo sapiens
ccagugacugagcuggagcca

SEQ ID NO: 29798 - RNA, 22 nt, Homo sapiens
aggauaggaagaaugaagugcu

SEQ ID NO: 29799 - RNA, 22 nt, Homo sapiens
aggagaguggauuccagguggu

SEQ ID NO: 29800 - RNA, 22 nt, Homo sapiens
uccuccucuaccucaucccagu

SEQ ID NO: 29801 - RNA, 22 nt, Homo sapiens
ugagggguuuggaaugggaugg

SEQ ID NO: 29802 - RNA, 21 nt, Homo sapiens
auccaguucucugagggggcu

SEQ ID NO: 29803 - RNA, 22 nt, Homo sapiens
aaccccuaaggcaacuggaugg

SEQ ID NO: 29804 - RNA, 21 nt, Homo sapiens
ucauccucgucucccucccag

SEQ ID NO: 29805 - RNA, 22 nt, Homo sapiens
agggaaggggacgaggguuggg

SEQ ID NO: 29806 - RNA, 23 nt, Homo sapiens
aagaagagacugagucaucgaau

SEQ ID NO: 29807 - RNA, 23 nt, Homo sapiens
caauggcacaaacucauucuuga

SEQ ID NO: 29808 - RNA, 21 nt, Homo sapiens
acugaauccucuuuuccucag

SEQ ID NO: 29809 - RNA, 22 nt, Homo sapiens
ugggaugagggauugaagugga

SEQ ID NO: 29810 - RNA, 22 nt, Homo sapiens
caggccauauugugcugccuca

SEQ ID NO: 29811 - RNA, 22 nt, Homo sapiens
uagcagcacauaaugguuugug

SEQ ID NO: 29812 - RNA, 22 nt, Homo sapiens
cgaaucauuauuugcugcucua

SEQ ID NO: 29813 - RNA, 22 nt, Homo sapiens
uagcagcacaucaugguuuaca

SEQ ID NO: 29814 - RNA, 22 nt, Homo sapiens
ccaauauuacugugcugcuuua

SEQ ID NO: 29815 - RNA, 22 nt, Homo sapiens
cuagguauggucccagggaucc

SEQ ID NO: 29816 - RNA, 20 nt, Homo sapiens
guguguggaaaugcuucugc

SEQ ID NO: 29817 - RNA, 22 nt, Homo sapiens
gugugcggaaaugcuucugcua

SEQ ID NO: 29818 - RNA, 23 nt, Homo sapiens
agcagcauuguacagggcuauca

SEQ ID NO: 29819 - RNA, 22 nt, Homo sapiens
aacuggcccucaaagucccgcu

SEQ ID NO: 29820 - RNA, 22 nt, Homo sapiens
cgggguuuugagggcgagauga

SEQ ID NO: 29821 - RNA, 21 nt, Homo sapiens
gcagggacagcaaaggggugc

SEQ ID NO: 29822 - RNA, 22 nt, Homo sapiens
uucccuuugucauccuucgccu

SEQ ID NO: 29823 - RNA, 23 nt, Homo sapiens
auggccaaaacugcaguuauuuu

SEQ ID NO: 29824 - RNA, 25 nt, Homo sapiens
aaaaaccacaauuacuuuugcacca

SEQ ID NO: 29825 - RNA, 21 nt, Homo sapiens
caaaagugaucgugguuuuug

SEQ ID NO: 29826 - RNA, 23 nt, Homo sapiens
caaagacugcaauuacuuuugcg

SEQ ID NO: 29827 - RNA, 23 nt, Homo sapiens
aaaaguaacugcgguuuuugccu

SEQ ID NO: 29828 - RNA, 22 nt, Homo sapiens
ugccuggaacauaguagggacu

SEQ ID NO: 29829 - RNA, 21 nt, Homo sapiens
auaggacucauauagugccag

SEQ ID NO: 29830 - RNA, 20 nt, Homo sapiens
agacacuauacgagucauau

SEQ ID NO: 29831 - RNA, 23 nt, Homo sapiens
ugugacugcauuaugaaaauucu

SEQ ID NO: 29832 - RNA, 20 nt, Homo sapiens
uggcuuuuaacuuugauggc

SEQ ID NO: 29833 - RNA, 21 nt, Homo sapiens
cacagcaaguguagacaggca

SEQ ID NO: 29834 - RNA, 21 nt, Homo sapiens
ccugucugugccugcuguaca

SEQ ID NO: 29835 - RNA, 22 nt, Homo sapiens
uaaauagaguaggcaaaggaca

SEQ ID NO: 29836 - RNA, 22 nt, Homo sapiens
uccuuugccuauucuauuuaag

SEQ ID NO: 29837 - RNA, 22 nt, Homo sapiens
guugggacaagaggacggucuu

SEQ ID NO: 29838 - RNA, 17 nt, Homo sapiens
cagagaauuguuuaauc

SEQ ID NO: 29839 - RNA, 20 nt, Homo sapiens
uagaggaagcuguggagaga

SEQ ID NO: 29840 - RNA, 22 nt, Homo sapiens
uccccuucugcaggccugcugg

SEQ ID NO: 29841 - RNA, 23 nt, Homo sapiens
aucagggcuuguggaaugggaag

SEQ ID NO: 29842 - RNA, 23 nt, Homo sapiens
ucuggcaaguaaaaaacucucau

SEQ ID NO: 29843 - RNA, 23 nt, Homo sapiens
ucgaggacugguggaagggccuu

SEQ ID NO: 29844 - RNA, 24 nt, Homo sapiens
uggguagagaaggagcucagagga

SEQ ID NO: 29845 - RNA, 22 nt, Homo sapiens
uaaagaacucuuaaaacccaau

SEQ ID NO: 29846 - RNA, 23 nt, Homo sapiens
ugauggauaaaagacuacauauu

SEQ ID NO: 29847 - RNA, 22 nt, Homo sapiens
ugccuaggcugagacugcagug

SEQ ID NO: 29848 - RNA, 22 nt, Homo sapiens
uggcccaaccuauucaguuagu

SEQ ID NO: 29849 - RNA, 23 nt, Homo sapiens
cugacugaauagguagggucauu

SEQ ID NO: 29850 - RNA, 24 nt, Homo sapiens
ucuguagccugggagcaauggggu

SEQ ID NO: 29851 - RNA, 23 nt, Homo sapiens
uaggagcucaacagaugccuguu

SEQ ID NO: 29852 - RNA, 19 nt, Homo sapiens
gagggcggguggaggagga

SEQ ID NO: 29853 - RNA, 25 nt, Homo sapiens
auaacauuguaaagcgcuucuuucg

SEQ ID NO: 29854 - RNA, 24 nt, Homo sapiens
agauauuuugaguguuuggaauug

SEQ ID NO: 29855 - RNA, 22 nt, Homo sapiens
aacuccaaacacucaaaacuca

SEQ ID NO: 29856 - RNA, 22 nt, Homo sapiens
caugcuaggauagaaagaaugg

SEQ ID NO: 29857 - RNA, 24 nt, Homo sapiens
gguugggcagugaggaggguguga

SEQ ID NO: 29858 - RNA, 22 nt, Homo sapiens
uggaaaaaacuggugugugcuu

SEQ ID NO: 29859 - RNA, 22 nt, Homo sapiens
cuggggagauccucgagguugg

SEQ ID NO: 29860 - RNA, 22 nt, Homo sapiens
caaccucgacgaucuccucagc

SEQ ID NO: 29861 - RNA, 21 nt, Homo sapiens
ugaggagaucgucgagguugg

SEQ ID NO: 29862 - RNA, 22 nt, Homo sapiens
caaccucgaggaucuccccagc

SEQ ID NO: 29863 - RNA, 21 nt, Homo sapiens
gguggggcaaugggaucaggu

SEQ ID NO: 29864 - RNA, 23 nt, Homo sapiens
ggggaaagcgaguagggacauuu

SEQ ID NO: 29865 - RNA, 22 nt, Homo sapiens
cagaaggggaguugggagcaga

SEQ ID NO: 29866 - RNA, 21 nt, Homo sapiens
ccaggcucugcagugggaacu

SEQ ID NO: 29867 - RNA, 21 nt, Homo sapiens
cucccacuuccagaucuuucu

SEQ ID NO: 29868 - RNA, 22 nt, Homo sapiens
aaagaucuggaagugggagaca

SEQ ID NO: 29869 - RNA, 22 nt, Homo sapiens
cugcccuagucuagcugaagcu

SEQ ID NO: 29870 - RNA, 22 nt, Homo sapiens
uucagccaggcuagugcagucu

SEQ ID NO: 29871 - RNA, 22 nt, Homo sapiens
uaggauuacaagugucggccac

SEQ ID NO: 29872 - RNA, 22 nt, Homo sapiens
agagcugagacuagaaagccca

SEQ ID NO: 29873 - RNA, 22 nt, Homo sapiens
ggcuuucuagucucagcucucc

SEQ ID NO: 29874 - RNA, 23 nt, Homo sapiens
cugauaagaacagaggcccagau

SEQ ID NO: 29875 - RNA, 21 nt, Homo sapiens
ucccuaccccuccacucccca

SEQ ID NO: 29876 - RNA, 23 nt, Homo sapiens
uuagggaguagaaggguggggag

SEQ ID NO: 29877 - RNA, 22 nt, Homo sapiens
uauaaaaugagggcaguaagac

SEQ ID NO: 29878 - RNA, 22 nt, Homo sapiens
ugugacuuuaagggaaauggcg

SEQ ID NO: 29879 - RNA, 22 nt, Homo sapiens
agguggaugcaaugugaccuca

SEQ ID NO: 29880 - RNA, 23 nt, Homo sapiens
cgcagacaaugccuacuggccua

SEQ ID NO: 29881 - RNA, 17 nt, Homo sapiens
gaguucuacagucagac

SEQ ID NO: 29882 - RNA, 22 nt, Homo sapiens
uaggacugugcuuggcacauag

SEQ ID NO: 29883 - RNA, 22 nt, Homo sapiens
cugggguucugagacagacagu

SEQ ID NO: 29884 - RNA, 22 nt, Homo sapiens
aaaggaggaaauaggcaggcca

SEQ ID NO: 29885 - RNA, 22 nt, Homo sapiens
ugcccugccuguuuucuccuuu

SEQ ID NO: 29886 - RNA, 23 nt, Homo sapiens
uagugaguuagagaugcagagcc

SEQ ID NO: 29887 - RNA, 19 nt, Homo sapiens
acuggccugggacuaccgg

SEQ ID NO: 29888 - RNA, 21 nt, Homo sapiens
ugcacggcacuggggacacgu

SEQ ID NO: 29889 - RNA, 23 nt, Homo sapiens
uguguacacacgugccaggcgcu

SEQ ID NO: 29890 - RNA, 17 nt, Homo sapiens
ggggcgcggccggaucg

SEQ ID NO: 29891 - RNA, 22 nt, Homo sapiens
agaaggggugaaauuuaaacgu

SEQ ID NO: 29892 - RNA, 19 nt, Homo sapiens
aucgggcccucggcgccgg

SEQ ID NO: 29893 - RNA, 17 nt, Homo sapiens
gcuucuguaguguaguc

SEQ ID NO: 29894 - RNA, 22 nt, Homo sapiens
gccucucucggagucgcucgga

SEQ ID NO: 29895 - RNA, 23 nt, Homo sapiens
aaagucucgcucucugccccuca

SEQ ID NO: 29896 - RNA, 24 nt, Homo sapiens
ugaggggccucagaccgagcuuuu

SEQ ID NO: 29897 - RNA, 23 nt, Homo sapiens
agaagaaggcggucggucugcgg

SEQ ID NO: 29898 - RNA, 20 nt, Homo sapiens
uuggccauggggcugcgcgg

SEQ ID NO: 29899 - RNA, 23 nt, Homo sapiens
ccugggcagcguguggcugaagg

SEQ ID NO: 29900 - RNA, 23 nt, Homo sapiens
agaggcuuugugcggauacgggg

SEQ ID NO: 29901 - RNA, 21 nt, Homo sapiens
cccuugggucugaugggguag

SEQ ID NO: 29902 - RNA, 25 nt, Homo sapiens
ugccccaucugugcccuggguagga

SEQ ID NO: 29903 - RNA, 23 nt, Homo sapiens
uguggaagguagacggccagaga

SEQ ID NO: 29904 - RNA, 20 nt, Homo sapiens
ucuggccagcuacgucccca

SEQ ID NO: 29905 - RNA, 23 nt, Homo sapiens
uggggacguagcuggccagacag

SEQ ID NO: 29906 - RNA, 22 nt, Homo sapiens
cucucuggccgucuaccuucca

SEQ ID NO: 29907 - RNA, 23 nt, Homo sapiens
ucugggagguuguagcaguggaa

SEQ ID NO: 29908 - RNA, 22 nt, Homo sapiens
uccugcguaggaucugaggagu

SEQ ID NO: 29909 - RNA, 22 nt, Homo sapiens
agcucugcugcucacuggcagu

SEQ ID NO: 29910 - RNA, 21 nt, Homo sapiens
ggccagccaccaggagggcug

SEQ ID NO: 29911 - RNA, 17 nt, Homo sapiens
cgcgccgggcccggguu

SEQ ID NO: 29912 - RNA, 23 nt, Homo sapiens
ggaggcgcaggcucggaaaggcg

SEQ ID NO: 29913 - RNA, 22 nt, Homo sapiens
guggaguccuggggaauggaga

SEQ ID NO: 29914 - RNA, 23 nt, Homo sapiens
agggacugccuuaggagaaaguu

SEQ ID NO: 29915 - RNA, 17 nt, Homo sapiens
gggauaugaagaaaaau

SEQ ID NO: 29916 - RNA, 22 nt, Homo sapiens
uggaagggagaagagcuuuaau

SEQ ID NO: 29917 - RNA, 22 nt, Homo sapiens
acuuuccucacucccgugaagu

SEQ ID NO: 29918 - RNA, 21 nt, Homo sapiens
uucgcgggcgaaggcaaaguc

SEQ ID NO: 29919 - RNA, 22 nt, Homo sapiens
caucuggcauccgucacacaga

SEQ ID NO: 29920 - RNA, 22 nt, Homo sapiens
ugagggacagaugccagaagca

SEQ ID NO: 29921 - RNA, 22 nt, Homo sapiens
aaacuaaucucuacacugcugc

SEQ ID NO: 29922 - RNA, 22 nt, Homo sapiens
gcaguaguguagagauugguuu

SEQ ID NO: 29923 - RNA, 21 nt, Homo sapiens
gcugcaccggagacuggguaa

SEQ ID NO: 29924 - RNA, 21 nt, Homo sapiens
uacccagucuccggugcagcc

SEQ ID NO: 29925 - RNA, 24 nt, Homo sapiens
uguggacagugagguagagggagu

SEQ ID NO: 29926 - RNA, 22 nt, Homo sapiens
agcuuuugggaauucagguagu

SEQ ID NO: 29927 - RNA, 21 nt, Homo sapiens
accugaauuaccaaaagcuuu

SEQ ID NO: 29928 - RNA, 22 nt, Homo sapiens
auauaccuguucggucucuuua

SEQ ID NO: 29929 - RNA, 22 nt, Homo sapiens
aggggaccaaagagauauauag

SEQ ID NO: 29930 - RNA, 23 nt, Homo sapiens
uuuguauggauauguguguguau

SEQ ID NO: 29931 - RNA, 22 nt, Homo sapiens
uguguuagaauaggggcaauaa

SEQ ID NO: 29932 - RNA, 22 nt, Homo sapiens
auugccucuguucuaacacaag

SEQ ID NO: 29933 - RNA, 22 nt, Homo sapiens
aagggcuuccucucugcaggac

SEQ ID NO: 29934 - RNA, 21 nt, Homo sapiens
ccugcagagaggaagcccuuc

SEQ ID NO: 29935 - RNA, 22 nt, Homo sapiens
aggauuucagaaauacuggugu

SEQ ID NO: 29936 - RNA, 24 nt, Homo sapiens
agauguauggaaucuguauauauc

SEQ ID NO: 29937 - RNA, 22 nt, Homo sapiens
cggggagagaacgcagugacgu

SEQ ID NO: 29938 - RNA, 19 nt, Homo sapiens
uggggcggagcuuccggag

SEQ ID NO: 29939 - RNA, 21 nt, Homo sapiens
ucacgcggagagauggcuuug

SEQ ID NO: 29940 - RNA, 22 nt, Homo sapiens
caggcgucugucuacguggcuu

SEQ ID NO: 29941 - RNA, 22 nt, Homo sapiens
caccuugcgcuacucaggucug

SEQ ID NO: 29942 - RNA, 22 nt, Homo sapiens
aaucugagaaggcgcacaaggu

SEQ ID NO: 29943 - RNA, 22 nt, Homo sapiens
aaggccuuucugaaccuucaga

SEQ ID NO: 29944 - RNA, 22 nt, Homo sapiens
gugacaucacauauacggcagc

SEQ ID NO: 29945 - RNA, 24 nt, Homo sapiens
ucagaacaaaugccgguucccaga

SEQ ID NO: 29946 - RNA, 22 nt, Homo sapiens
ugagaaccacgucugcucugag

SEQ ID NO: 29947 - RNA, 17 nt, Homo sapiens
ucauauugcuucuuucu

SEQ ID NO: 29948 - RNA, 22 nt, Homo sapiens
ugugacagauugauaacugaaa

SEQ ID NO: 29949 - RNA, 23 nt, Homo sapiens
uggaguccaggaaucugcauuuu

SEQ ID NO: 29950 - RNA, 22 nt, Homo sapiens
aagcccuuaccccaaaaaguau

SEQ ID NO: 29951 - RNA, 22 nt, Homo sapiens
aagcccuuaccccaaaaagcau

SEQ ID NO: 29952 - RNA, 22 nt, Homo sapiens
uggaauguaaggaagugugugg

SEQ ID NO: 29953 - RNA, 22 nt, Homo sapiens
cuuaucagauuguauuguaauu

SEQ ID NO: 29954 - RNA, 22 nt, Homo sapiens
uuauaauacaaccugauaagug

SEQ ID NO: 29955 - RNA, 22 nt, Homo sapiens
cuuagcagguuguauuaucauu

SEQ ID NO: 29956 - RNA, 22 nt, Homo sapiens
auauaauacaaccugcuaagug

SEQ ID NO: 29957 - RNA, 22 nt, Homo sapiens
cacuuagcagguuguauuauau

SEQ ID NO: 29958 - RNA, 22 nt, Homo sapiens
auaauacaaccugcuaagugcu

SEQ ID NO: 29959 - RNA, 22 nt, Homo sapiens
uuugguccccuucaaccagcug

SEQ ID NO: 29960 - RNA, 22 nt, Homo sapiens
uuugguccccuucaaccagcua

SEQ ID NO: 29961 - RNA, 22 nt, Homo sapiens
uguaaacauccuugacuggaag

SEQ ID NO: 29962 - RNA, 22 nt, Homo sapiens
ugucaguuugucaaauacccca

SEQ ID NO: 29963 - RNA, 22 nt, Homo sapiens
cguguauuugacaagcugaguu

SEQ ID NO: 29964 - RNA, 21 nt, Homo sapiens
uucacaguggcuaaguuccgc

SEQ ID NO: 29965 - RNA, 22 nt, Homo sapiens
agggcuuagcugcuugugagca

SEQ ID NO: 29966 - RNA, 21 nt, Homo sapiens
aucacauugccagggauuacc

SEQ ID NO: 29967 - RNA, 22 nt, Homo sapiens
uggguuccuggcaugcugauuu

SEQ ID NO: 29968 - RNA, 22 nt, Homo sapiens
cuuucagucggauguuuacagc

SEQ ID NO: 29969 - RNA, 22 nt, Homo sapiens
ugccuacugagcugauaucagu

SEQ ID NO: 29970 - RNA, 22 nt, Homo sapiens
ugccuacugagcugaaacacag

SEQ ID NO: 29971 - RNA, 22 nt, Homo sapiens
uggcucaguucagcaggaacag

SEQ ID NO: 29972 - RNA, 21 nt, Homo sapiens
uucacaguggcuaaguucugc

SEQ ID NO: 29973 - RNA, 22 nt, Homo sapiens
agagcuuagcugauuggugaac

SEQ ID NO: 29974 - RNA, 23 nt, Homo sapiens
uguaguguuuccuacuuuaugga

SEQ ID NO: 29975 - RNA, 21 nt, Homo sapiens
cauaaaguagaaagcacuacu

SEQ ID NO: 29976 - RNA, 22 nt, Homo sapiens
ugaaggucuacugugugccagg

SEQ ID NO: 29977 - RNA, 22 nt, Homo sapiens
uuguacaugguaggcuuucauu

SEQ ID NO: 29978 - RNA, 21 nt, Homo sapiens
cuggauggcuccuccaugucu

SEQ ID NO: 29979 - RNA, 23 nt, Homo sapiens
ucuuggaguaggucauugggugg

SEQ ID NO: 29980 - RNA, 22 nt, Homo sapiens
cucaucugcaaagaaguaagug

SEQ ID NO: 29981 - RNA, 22 nt, Homo sapiens
aacuguuugcagaggaaacuga

SEQ ID NO: 29982 - RNA, 22 nt, Homo sapiens
cuugguucagggagggucccca

SEQ ID NO: 29983 - RNA, 22 nt, Homo sapiens
aggaccuucccugaaccaagga

SEQ ID NO: 29984 - RNA, 21 nt, Homo sapiens
accuccugugugcauggauua

SEQ ID NO: 29985 - RNA, 22 nt, Homo sapiens
uacccauugcauaucggaguug

SEQ ID NO: 29986 - RNA, 18 nt, Homo sapiens
aaagcuggguugagaagg

SEQ ID NO: 29987 - RNA, 20 nt, Homo sapiens
gguauccguuuggggauggu

SEQ ID NO: 29988 - RNA, 22 nt, Homo sapiens
gaaggcagcagugcuccccugu

SEQ ID NO: 29989 - RNA, 22 nt, Homo sapiens
ucagugcaucacagaacuuugu

SEQ ID NO: 29990 - RNA, 22 nt, Homo sapiens
aaguucuguuauacacucaggc

SEQ ID NO: 29991 - RNA, 22 nt, Homo sapiens
cuggcccucucugcccuuccgu

SEQ ID NO: 29992 - RNA, 21 nt, Homo sapiens
cuagacugaagcuccuugagg

SEQ ID NO: 29993 - RNA, 21 nt, Homo sapiens
ucgaggagcucacagucuagu

SEQ ID NO: 29994 - RNA, 21 nt, Homo sapiens
cacauuacacggucgaccucu

SEQ ID NO: 29995 - RNA, 22 nt, Homo sapiens
aggugguccguggcgcguucgc

SEQ ID NO: 29996 - RNA, 23 nt, Homo sapiens
cgcauccccuagggcauuggugu

SEQ ID NO: 29997 - RNA, 20 nt, Homo sapiens
ccucugggcccuuccuccag

SEQ ID NO: 29998 - RNA, 23 nt, Homo sapiens
ccuaguagguguccaguaagugu

SEQ ID NO: 29999 - RNA, 21 nt, Homo sapiens
acggugcuggauguggccuuu

SEQ ID NO: 30000 - RNA, 23 nt, Homo sapiens
ucagcaccaggauauuguuggag

SEQ ID NO: 30001 - RNA, 23 nt, Homo sapiens
ucaacaaaaucacugaugcugga

SEQ ID NO: 30002 - RNA, 22 nt, Homo sapiens
aacaauauccuggugcugagug

SEQ ID NO: 30003 - RNA, 23 nt, Homo sapiens
ggcagguucucacccucucuagg

SEQ ID NO: 30004 - RNA, 23 nt, Homo sapiens
gacacgggcgacagcugcggccc

SEQ ID NO: 30005 - RNA, 21 nt, Homo sapiens
auguaugugugcaugugcaug

SEQ ID NO: 30006 - RNA, 22 nt, Homo sapiens
uauacaagggcagacucucucu

SEQ ID NO: 30007 - RNA, 20 nt, Homo sapiens
ggcggcggcggaggcggggg

SEQ ID NO: 30008 - RNA, 22 nt, Homo sapiens
gcaggugcucacuuguccuccu

SEQ ID NO: 30009 - RNA, 19 nt, Homo sapiens
ggggccuggcggugggcgg

SEQ ID NO: 30010 - RNA, 22 nt, Homo sapiens
gcccaaaggugaauuuuuuggg

SEQ ID NO: 30011 - RNA, 22 nt, Homo sapiens
caaagaauucuccuuuugggcu

SEQ ID NO: 30012 - RNA, 22 nt, Homo sapiens
cugcaauguaagcacuucuuac

SEQ ID NO: 30013 - RNA, 23 nt, Homo sapiens
aaaagugcuuacagugcagguag

SEQ ID NO: 30014 - RNA, 22 nt, Homo sapiens
acuguaguaugggcacuuccag

SEQ ID NO: 30015 - RNA, 23 nt, Homo sapiens
caaagugcucauagugcagguag

SEQ ID NO: 30016 - RNA, 23 nt, Homo sapiens
gggguauuguuuccgcugccagg

SEQ ID NO: 30017 - RNA, 23 nt, Homo sapiens
uagcagcgggaacaguucugcag

SEQ ID NO: 30018 - RNA, 21 nt, Homo sapiens
cgagccucaagcaagggacuu

SEQ ID NO: 30019 - RNA, 22 nt, Homo sapiens
uagucccuuccuugaagcgguc

SEQ ID NO: 30020 - RNA, 21 nt, Homo sapiens
acuggacuuggagucagaagg

SEQ ID NO: 30021 - RNA, 22 nt, Homo sapiens
cuccugacuccagguccugugu

SEQ ID NO: 30022 - RNA, 22 nt, Homo sapiens
uuuguucguucggcucgcguga

SEQ ID NO: 30023 - RNA, 22 nt, Homo sapiens
acggauguuugagcaugugcua

SEQ ID NO: 30024 - RNA, 23 nt, Homo sapiens
ucaaaugcucagacuccuguggu

SEQ ID NO: 30025 - RNA, 22 nt, Homo sapiens
cggcaacaagaaacugccugag

SEQ ID NO: 30026 - RNA, 22 nt, Homo sapiens
uagguaguuucauguuguuggg

SEQ ID NO: 30027 - RNA, 22 nt, Homo sapiens
caauguuuccacagugcaucac

SEQ ID NO: 30028 - RNA, 21 nt, Homo sapiens
gugcauuguaguugcauugca

SEQ ID NO: 30029 - RNA, 18 nt, Homo sapiens
aucccaccucugccacca

SEQ ID NO: 30030 - RNA, 19 nt, Homo sapiens
aucccaccacugccaccau

SEQ ID NO: 30031 - RNA, 22 nt, Homo sapiens
accuuccucuccaugggucuuu

SEQ ID NO: 30032 - RNA, 22 nt, Homo sapiens
aaagacccauugaggagaaggu

SEQ ID NO: 30033 - RNA, 21 nt, Homo sapiens
aauguagagauugaucaaaau

SEQ ID NO: 30034 - RNA, 23 nt, Homo sapiens
acggaauauguauacggaauaua

SEQ ID NO: 30035 - RNA, 24 nt, Homo sapiens
agagcucacagcuguccuucucua

SEQ ID NO: 30036 - RNA, 22 nt, Homo sapiens
aucaaauaaggacuagucugca

SEQ ID NO: 30037 - RNA, 23 nt, Homo sapiens
augagacucauguaaaacaucuu

SEQ ID NO: 30038 - RNA, 21 nt, Homo sapiens
auggaauguauauacggaaua

SEQ ID NO: 30039 - RNA, 22 nt, Homo sapiens
auuguagaaccuaagauuggcc

SEQ ID NO: 30040 - RNA, 22 nt, Homo sapiens
caucucuaaggaacucccccaa

SEQ ID NO: 30041 - RNA, 23 nt, Homo sapiens
uauggggcuucuguagagauuuc

SEQ ID NO: 30042 - RNA, 20 nt, Homo sapiens
ccguguuucccccacgcuuu

SEQ ID NO: 30043 - RNA, 15 nt, Homo sapiens
aggagauccuggguu

SEQ ID NO: 30044 - RNA, 22 nt, Homo sapiens
cucgugggcucuggccacggcc

SEQ ID NO: 30045 - RNA, 22 nt, Homo sapiens
caguggccagagcccugcagug

SEQ ID NO: 30046 - RNA, 22 nt, Homo sapiens
cugcagaguuuguacggaccgg

SEQ ID NO: 30047 - RNA, 20 nt, Homo sapiens
uccguacaaacucugcugug

SEQ ID NO: 30048 - RNA, 22 nt, Homo sapiens
cuuccccccaguaaucuucauc

SEQ ID NO: 30049 - RNA, 23 nt, Homo sapiens
ugaggauauggcagggaagggga

SEQ ID NO: 30050 - RNA, 23 nt, Homo sapiens
uuuugcaugacccugggaguagg

SEQ ID NO: 30051 - RNA, 22 nt, Homo sapiens
gacucacucacaggauugugca

SEQ ID NO: 30052 - RNA, 22 nt, Homo sapiens
acacagugcuucauccacuacu

SEQ ID NO: 30053 - RNA, 22 nt, Homo sapiens
uaguggaugaugcacucugugc

SEQ ID NO: 30054 - RNA, 21 nt, Homo sapiens
ugaugauacagguggagguag

SEQ ID NO: 30055 - RNA, 22 nt, Homo sapiens
cuacuucuaccuguguuaucau

SEQ ID NO: 30056 - RNA, 22 nt, Homo sapiens
ugcgacauuggaaguaguauca

SEQ ID NO: 30057 - RNA, 21 nt, Homo sapiens
uuagaccuaguacacguccuu

SEQ ID NO: 30058 - RNA, 22 nt, Homo sapiens
uuuccuacccuaccugaagacu

SEQ ID NO: 30059 - RNA, 22 nt, Homo sapiens
aucuguaagagaaaguaaauga

SEQ ID NO: 30060 - RNA, 24 nt, Homo sapiens
cccggacaggcguucgugcgacgu

SEQ ID NO: 30061 - RNA, 23 nt, Homo sapiens
accuggacccagcguagacaaag

SEQ ID NO: 30062 - RNA, 22 nt, Homo sapiens
accaagucugcgucauccucuc

SEQ ID NO: 30063 - RNA, 23 nt, Homo sapiens
aguggaugauggagacucgguac

SEQ ID NO: 30064 - RNA, 24 nt, Homo sapiens
guuccacacugacacugcagaagu

SEQ ID NO: 30065 - RNA, 24 nt, Homo sapiens
ccugcuggucaggaguggauacug

SEQ ID NO: 30066 - RNA, 23 nt, Homo sapiens
gagggucuugggagggaugugac

SEQ ID NO: 30067 - RNA, 22 nt, Homo sapiens
auauacagggggagacucuuau

SEQ ID NO: 30068 - RNA, 22 nt, Homo sapiens
auauacagggggagacucucau

SEQ ID NO: 30069 - RNA, 21 nt, Homo sapiens
agaggauacccuuuguauguu

SEQ ID NO: 30070 - RNA, 22 nt, Homo sapiens
ucuacaaaggaaagcgcuuucu

SEQ ID NO: 30071 - RNA, 22 nt, Homo sapiens
ucaaaacugaggggcauuuucu

SEQ ID NO: 30072 - RNA, 24 nt, Homo sapiens
uucuccaaaagaaagcacuuucug

SEQ ID NO: 30073 - RNA, 23 nt, Homo sapiens
uucucgaggaaagaagcacuuuc

SEQ ID NO: 30074 - RNA, 22 nt, Homo sapiens
ccucuagauggaagcacugucu

SEQ ID NO: 30075 - RNA, 22 nt, Homo sapiens
aucgugcaucccuuuagagugu

SEQ ID NO: 30076 - RNA, 22 nt, Homo sapiens
aucgugcaucccuuuagagugu

SEQ ID NO: 30077 - RNA, 22 nt, Homo sapiens
aucgugcauccuuuuagagugu

SEQ ID NO: 30078 - RNA, 22 nt, Homo sapiens
caaagcgcuccccuuuagaggu

SEQ ID NO: 30079 - RNA, 23 nt, Homo sapiens
caaagcgcuucucuuuagagugu

SEQ ID NO: 30080 - RNA, 23 nt, Homo sapiens
ucucuggagggaagcacuuucug

SEQ ID NO: 30081 - RNA, 21 nt, Homo sapiens
gaaagcgcuucucuuuagagg

SEQ ID NO: 30082 - RNA, 22 nt, Homo sapiens
cucuagagggaagcacuuucuc

SEQ ID NO: 30083 - RNA, 22 nt, Homo sapiens
aaagugcauccuuuuagagugu

SEQ ID NO: 30084 - RNA, 22 nt, Homo sapiens
cucuagagggaagcgcuuucug

SEQ ID NO: 30085 - RNA, 22 nt, Homo sapiens
caaagugccucccuuuagagug

SEQ ID NO: 30086 - RNA, 22 nt, Homo sapiens
aagugccuccuuuuagaguguu

SEQ ID NO: 30087 - RNA, 22 nt, Homo sapiens
uucuccaaaagggagcacuuuc

SEQ ID NO: 30088 - RNA, 22 nt, Homo sapiens
aaagugcuucccuuuggacugu

SEQ ID NO: 30089 - RNA, 21 nt, Homo sapiens
cuccagagggaaguacuuucu

SEQ ID NO: 30090 - RNA, 22 nt, Homo sapiens
acaaagugcuucccuuuagagu

SEQ ID NO: 30091 - RNA, 22 nt, Homo sapiens
cuacaaagggaagcacuuucuc

SEQ ID NO: 30092 - RNA, 22 nt, Homo sapiens
gaaggcgcuucccuuuagagcg

SEQ ID NO: 30093 - RNA, 21 nt, Homo sapiens
cuccagagggaugcacuuucu

SEQ ID NO: 30094 - RNA, 22 nt, Homo sapiens
cucuagagggaagcacuuucug

SEQ ID NO: 30095 - RNA, 22 nt, Homo sapiens
gaaagugcuuccuuuuagaggc

SEQ ID NO: 30096 - RNA, 23 nt, Homo sapiens
cucuugagggaagcacuuucugu

SEQ ID NO: 30097 - RNA, 22 nt, Homo sapiens
acuggacuuagggucagaaggc

SEQ ID NO: 30098 - RNA, 22 nt, Homo sapiens
aaacaaacauggugcacuucuu

SEQ ID NO: 30099 - RNA, 22 nt, Homo sapiens
gaaguugcccauguuauuuucg

SEQ ID NO: 30100 - RNA, 21 nt, Homo sapiens
aaucauucacggacaacacuu

SEQ ID NO: 30101 - RNA, 22 nt, Homo sapiens
gaaguuguucgugguggauucg

SEQ ID NO: 30102 - RNA, 23 nt, Homo sapiens
ccuccguguuaccuguccucuag

SEQ ID NO: 30103 - RNA, 23 nt, Homo sapiens
ugaggauggauagcaaggaagcc

SEQ ID NO: 30104 - RNA, 22 nt, Homo sapiens
uucagaucccagcggugccucu

SEQ ID NO: 30105 - RNA, 19 nt, Homo sapiens
guccuaggaggcuccucug

SEQ ID NO: 30106 - RNA, 21 nt, Homo sapiens
caauucucaaaggagccuccc

SEQ ID NO: 30107 - RNA, 21 nt, Homo sapiens
guuggggugcaggggucugcu

SEQ ID NO: 30108 - RNA, 22 nt, Homo sapiens
uuuccggcucgcgugggugugu

SEQ ID NO: 30109 - RNA, 23 nt, Homo sapiens
ugagugugugugugugagugugu

SEQ ID NO: 30110 - RNA, 22 nt, Homo sapiens
agugggaggccagggcacggca

SEQ ID NO: 30111 - RNA, 20 nt, Homo sapiens
ugagcccuguccucccgcag

SEQ ID NO: 30112 - RNA, 23 nt, Homo sapiens
aagugccgccaucuuuugagugu

SEQ ID NO: 30113 - RNA, 20 nt, Homo sapiens
acucaaacugugggggcacu

SEQ ID NO: 30114 - RNA, 23 nt, Homo sapiens
aagugcccccacaguuugagugc

SEQ ID NO: 30115 - RNA, 22 nt, Homo sapiens
acucaaaagauggcggcacuuu

SEQ ID NO: 30116 - RNA, 22 nt, Homo sapiens
aaaccuguguuguucaagaguc

SEQ ID NO: 30117 - RNA, 22 nt, Homo sapiens
acaguagagggaggaaucgcag

SEQ ID NO: 30118 - RNA, 22 nt, Homo sapiens
gugaaauguuuaggaccacuag

SEQ ID NO: 30119 - RNA, 23 nt, Homo sapiens
uugaacuguuaagaaccacugga

SEQ ID NO: 30120 - RNA, 22 nt, Homo sapiens
uagugguccuaaacauuucaca

SEQ ID NO: 30121 - RNA, 21 nt, Homo sapiens
ugcaggaccaagaugagcccu

SEQ ID NO: 30122 - RNA, 21 nt, Homo sapiens
cucccacaugcaggguuugca

SEQ ID NO: 30123 - RNA, 21 nt, Homo sapiens
caucccuugcaugguggaggg

SEQ ID NO: 30124 - RNA, 22 nt, Homo sapiens
aaaaugaaaugagcccagccca

SEQ ID NO: 30125 - RNA, 21 nt, Homo sapiens
agccgcggggaucgccgaggg

SEQ ID NO: 30126 - RNA, 19 nt, Homo sapiens
agggaccugagugucuaag

SEQ ID NO: 30127 - RNA, 19 nt, Homo sapiens
aggugugucuguagagucc

SEQ ID NO: 30128 - RNA, 24 nt, Homo sapiens
cauagcccggucgcugguacauga

SEQ ID NO: 30129 - RNA, 18 nt, Homo sapiens
cggcuggaggugugagga

SEQ ID NO: 30130 - RNA, 18 nt, Homo sapiens
cuaagaaguugacugaag

SEQ ID NO: 30131 - RNA, 19 nt, Homo sapiens
gacuggacaagcugaggaa

SEQ ID NO: 30132 - RNA, 21 nt, Homo sapiens
gcuugucgcugcgguguugcu

SEQ ID NO: 30133 - RNA, 17 nt, Homo sapiens
ggcgggugcgggggugg

SEQ ID NO: 30134 - RNA, 21 nt, Homo sapiens
ugugucccauuauuggugauu

SEQ ID NO: 30135 - RNA, 22 nt, Homo sapiens
uuuaagaaaacaccauggagau

SEQ ID NO: 30136 - RNA, 22 nt, Homo sapiens
gcuauuucacgacaccaggguu

SEQ ID NO: 30137 - RNA, 23 nt, Homo sapiens
agcugguguugugaaucaggccg

SEQ ID NO: 30138 - RNA, 21 nt, Homo sapiens
aauaauacaugguugaucuuu

SEQ ID NO: 30139 - RNA, 22 nt, Homo sapiens
agaucgaccguguuauauucgc

SEQ ID NO: 30140 - RNA, 22 nt, Homo sapiens
aaucaugugcagugccaauaug

SEQ ID NO: 30141 - RNA, 23 nt, Homo sapiens
uuuggcacuagcacauuuuugcu

SEQ ID NO: 30142 - RNA, 22 nt, Homo sapiens
uccuguacugagcugccccgag

SEQ ID NO: 30143 - RNA, 22 nt, Homo sapiens
gcuacuucacaacaccagggcc

SEQ ID NO: 30144 - RNA, 22 nt, Homo sapiens
caucaucgucucaaaugagucu

SEQ ID NO: 30145 - RNA, 23 nt, Homo sapiens
acuccauuuguuuugaugaugga

SEQ ID NO: 30146 - RNA, 22 nt, Homo sapiens
cuccuacauauuagcauuaaca

SEQ ID NO: 30147 - RNA, 23 nt, Homo sapiens
uuaaugcuaaucgugauaggggu

SEQ ID NO: 30148 - RNA, 22 nt, Homo sapiens
agaucagaaggugauuguggcu

SEQ ID NO: 30149 - RNA, 22 nt, Homo sapiens
uacugcagacguggcaaucaug

SEQ ID NO: 30150 - RNA, 21 nt, Homo sapiens
guuagggccaacaucucuugg

SEQ ID NO: 30151 - RNA, 21 nt, Homo sapiens
aacauagaggaaauuccacgu

SEQ ID NO: 30152 - RNA, 21 nt, Homo sapiens
gguggauauuccuucuauguu

SEQ ID NO: 30153 - RNA, 23 nt, Homo sapiens
ucauagcccuguacaaugcugcu

SEQ ID NO: 30154 - RNA, 22 nt, Homo sapiens
uaacacugucugguaaagaugg

SEQ ID NO: 30155 - RNA, 22 nt, Homo sapiens
caucuuccaguacaguguugga

SEQ ID NO: 30156 - RNA, 22 nt, Homo sapiens
aacuggccuacaaagucccagu

SEQ ID NO: 30157 - RNA, 22 nt, Homo sapiens
ugggucuuugcgggcgagauga

SEQ ID NO: 30158 - RNA, 21 nt, Homo sapiens
augaccuaugaauugacagac

SEQ ID NO: 30159 - RNA, 22 nt, Homo sapiens
aagcugccaguugaagaacugu

SEQ ID NO: 30160 - RNA, 22 nt, Homo sapiens
aguucuucaguggcaagcuuua

SEQ ID NO: 30161 - RNA, 22 nt, Homo sapiens
acagauucgauucuaggggaau

SEQ ID NO: 30162 - RNA, 23 nt, Homo sapiens
uacccuguagaaccgaauuugug

SEQ ID NO: 30163 - RNA, 22 nt, Homo sapiens
uagcagcacguaaauauuggcg

SEQ ID NO: 30164 - RNA, 21 nt, Homo sapiens
ugagaugaagcacuguagcuc

SEQ ID NO: 30165 - RNA, 22 nt, Homo sapiens
ggugcagugcugcaucucuggu

SEQ ID NO: 30166 - RNA, 21 nt, Homo sapiens
uugcucacuguucuucccuag

SEQ ID NO: 30167 - RNA, 18 nt, Homo sapiens
cagggucagcugagcaug

SEQ ID NO: 30168 - RNA, 21 nt, Homo sapiens
aagcauucuuucauugguugg

SEQ ID NO: 30169 - RNA, 21 nt, Homo sapiens
ccgucgccgccacccgagccg

SEQ ID NO: 30170 - RNA, 27 nt, Homo sapiens
cacuguaggugauggugagagugggca

SEQ ID NO: 30171 - RNA, 23 nt, Homo sapiens
gggaugguagaccggugacgugc

SEQ ID NO: 30172 - RNA, 21 nt, Homo sapiens
uaggacacauggucuacuucu

SEQ ID NO: 30173 - RNA, 22 nt, Homo sapiens
cuccugagccauucugagccuc

SEQ ID NO: 30174 - RNA, 21 nt, Homo sapiens
gugccagcugcagugggggag

SEQ ID NO: 30175 - RNA, 21 nt, Homo sapiens
cccggagccaggaugcagcuc

SEQ ID NO: 30176 - RNA, 21 nt, Homo sapiens
ucguggccuggucuccauuau

SEQ ID NO: 30177 - RNA, 20 nt, Homo sapiens
ucugcaggguuugcuuugag

SEQ ID NO: 30178 - RNA, 21 nt, Homo sapiens
uguucauguagauguuuaagc

SEQ ID NO: 30179 - RNA, 18 nt, Homo sapiens
ucagcuggcccucauuuc

SEQ ID NO: 30180 - RNA, 21 nt, Homo sapiens
uggcagggaggcugggagggg

SEQ ID NO: 30181 - RNA, 20 nt, Homo sapiens
ucacuguucagacaggcgga

SEQ ID NO: 30182 - RNA, 21 nt, Homo sapiens
ccccaccuccucucuccucag

SEQ ID NO: 30183 - RNA, 19 nt, Homo sapiens
gugaggacucgggaggugg

SEQ ID NO: 30184 - RNA, 22 nt, Homo sapiens
ugagccccugugccgcccccag

SEQ ID NO: 30185 - RNA, 22 nt, Homo sapiens
guggguacggcccagugggggg

SEQ ID NO: 30186 - RNA, 22 nt, Homo sapiens
ucaccagcccuguguucccuag

SEQ ID NO: 30187 - RNA, 26 nt, Homo sapiens
gugagggcaugcaggccuggaugggg

SEQ ID NO: 30188 - RNA, 23 nt, Homo sapiens
cucucaccacugcccucccacag

SEQ ID NO: 30189 - RNA, 24 nt, Homo sapiens
guggguaggguuugggggagagcg

SEQ ID NO: 30190 - RNA, 20 nt, Homo sapiens
gugucugggcggacagcugc

SEQ ID NO: 30191 - RNA, 20 nt, Homo sapiens
cuuccucgucugucugcccc

SEQ ID NO: 30192 - RNA, 23 nt, Homo sapiens
gugagugggagccccagugugug

SEQ ID NO: 30193 - RNA, 27 nt, Homo sapiens
accuucuuguauaagcacugugcuaaa

SEQ ID NO: 30194 - RNA, 22 nt, Homo sapiens
ggcgacaaaacgagacccuguc

SEQ ID NO: 30195 - RNA, 22 nt, Homo sapiens
uugcuugaacccaggaagugga

SEQ ID NO: 30196 - RNA, 19 nt, Homo sapiens
ggagauggagguugcagug

SEQ ID NO: 30197 - RNA, 21 nt, Homo sapiens
accacugcacuccagccugag

SEQ ID NO: 30198 - RNA, 22 nt, Homo sapiens
ggugguugaggcugcaguaagu

SEQ ID NO: 30199 - RNA, 17 nt, Homo sapiens
ucgccuccuccucuccc

SEQ ID NO: 30200 - RNA, 22 nt, Homo sapiens
ucuauacagacccuggcuuuuc

SEQ ID NO: 30201 - RNA, 22 nt, Homo sapiens
ucugggcaacaaagugagaccu

SEQ ID NO: 30202 - RNA, 21 nt, Homo sapiens
gaucucacuuuguugcccagg

SEQ ID NO: 30203 - RNA, 20 nt, Homo sapiens
ucgcgccccggcucccguuc

SEQ ID NO: 30204 - RNA, 25 nt, Homo sapiens
ugggaacggguuccggcagacgcug

SEQ ID NO: 30205 - RNA, 21 nt, Homo sapiens
uuaggccgcagaucuggguga

SEQ ID NO: 30206 - RNA, 22 nt, Homo sapiens
aauaggccacggaucugggcaa

SEQ ID NO: 30207 - RNA, 21 nt, Homo sapiens
cacccagaucugcggccuaau

SEQ ID NO: 30208 - RNA, 22 nt, Homo sapiens
uuagggcccuggcuccaucucc

SEQ ID NO: 30209 - RNA, 22 nt, Homo sapiens
uucauucggcuguccagaugua

SEQ ID NO: 30210 - RNA, 24 nt, Homo sapiens
uugcagcugccugggagugacuuc

SEQ ID NO: 30211 - RNA, 21 nt, Homo sapiens
uugggacauacuuaugcuaaa

SEQ ID NO: 30212 - RNA, 22 nt, Homo sapiens
ucucacuguagccucgaacccc

SEQ ID NO: 30213 - RNA, 22 nt, Homo sapiens
uuugaggcuacagugagaugug

SEQ ID NO: 30214 - RNA, 18 nt, Homo sapiens
cagggaggugaaugugau

SEQ ID NO: 30215 - RNA, 19 nt, Homo sapiens
gaugaugcugcugaugcug

SEQ ID NO: 30216 - RNA, 24 nt, Homo sapiens
ccagacagaauucuaugcacuuuc

SEQ ID NO: 30217 - RNA, 22 nt, Homo sapiens
cuccuggggcccgcacucucgc

SEQ ID NO: 30218 - RNA, 21 nt, Homo sapiens
cuccguuugccuguuucgcug

SEQ ID NO: 30219 - RNA, 22 nt, Homo sapiens
cucggcgcggggcgcgggcucc

SEQ ID NO: 30220 - RNA, 21 nt, Homo sapiens
gcccuccgcccgugcaccccg

SEQ ID NO: 30221 - RNA, 22 nt, Homo sapiens
gcccgcguguggagccaggugu

SEQ ID NO: 30222 - RNA, 22 nt, Homo sapiens
aaaaccgucuaguuacaguugu

SEQ ID NO: 30223 - RNA, 18 nt, Homo sapiens
uccagugcccuccucucc

SEQ ID NO: 30224 - RNA, 18 nt, Homo sapiens
ugaggcaguagauugaau

SEQ ID NO: 30225 - RNA, 22 nt, Homo sapiens
aggggcuggcuuuccucugguc

SEQ ID NO: 30226 - RNA, 22 nt, Homo sapiens
uggagagaaaggcaguuccuga

SEQ ID NO: 30227 - RNA, 22 nt, Homo sapiens
ucgugucuuguguugcagccgg

SEQ ID NO: 30228 - RNA, 22 nt, Homo sapiens
ggcuacaacacaggacccgggc

SEQ ID NO: 30229 - RNA, 21 nt, Homo sapiens
cggcggggacggcgauugguc

SEQ ID NO: 30230 - RNA, 22 nt, Homo sapiens
cgcaggggccgggugcucaccg

SEQ ID NO: 30231 - RNA, 21 nt, Homo sapiens
ugagugccggugccugcccug

SEQ ID NO: 30232 - RNA, 22 nt, Homo sapiens
gcugcgcuuggauuucgucccc

SEQ ID NO: 30233 - RNA, 23 nt, Homo sapiens
caacggaaucccaaaagcagcug

SEQ ID NO: 30234 - RNA, 22 nt, Homo sapiens
ucaggccaggcacaguggcuca

SEQ ID NO: 30235 - RNA, 19 nt, Homo sapiens
accgugcaaagguagcaua

SEQ ID NO: 30236 - RNA, 20 nt, Homo sapiens
ccuccugcccuccuugcugu

SEQ ID NO: 30237 - RNA, 20 nt, Homo sapiens
uguuuugauaacaguaaugu

SEQ ID NO: 30238 - RNA, 23 nt, Homo sapiens
guguuaauuaaaccucuauuuac

SEQ ID NO: 30239 - RNA, 23 nt, Homo sapiens
cuguaauauaaauuuaauuuauu

SEQ ID NO: 30240 - RNA, 22 nt, Homo sapiens
uuggggaaacggccgcugagug

SEQ ID NO: 30241 - RNA, 21 nt, Homo sapiens
ccucccaugccaagaacuccc

SEQ ID NO: 30242 - RNA, 21 nt, Homo sapiens
gguucuuagcauaggaggucu

SEQ ID NO: 30243 - RNA, 21 nt, Homo sapiens
uguucucuuugccaaggacag

SEQ ID NO: 30244 - RNA, 22 nt, Homo sapiens
aaaucucugcaggcaaauguga

SEQ ID NO: 30245 - RNA, 22 nt, Homo sapiens
caugguucugucaagcaccgcg

SEQ ID NO: 30246 - RNA, 21 nt, Homo sapiens
uugugcuugaucuaaccaugu

SEQ ID NO: 30247 - RNA, 22 nt, Homo sapiens
ucugcaagugucagaggcgagg

SEQ ID NO: 30248 - RNA, 22 nt, Homo sapiens
gagagcaguguguguugccugg

SEQ ID NO: 30249 - RNA, 22 nt, Homo sapiens
aucacauugccagugauuaccc

SEQ ID NO: 30250 - RNA, 22 nt, Homo sapiens
agcagaggcagagaggcucagg

SEQ ID NO: 30251 - RNA, 23 nt, Homo sapiens
ugaggcucuguuagccuuggcuc

SEQ ID NO: 30252 - RNA, 22 nt, Homo sapiens
uaucauggaguugguaaagcac

SEQ ID NO: 30253 - RNA, 22 nt, Homo sapiens
guuuuaccaccuccaggagacu

SEQ ID NO: 30254 - RNA, 22 nt, Homo sapiens
cgccucuucagcgcugucuucc

SEQ ID NO: 30255 - RNA, 23 nt, Homo sapiens
caggcagugacuguucagacguc

SEQ ID NO: 30256 - RNA, 23 nt, Homo sapiens
agaauugcguuuggacaaucagu

SEQ ID NO: 30257 - RNA, 22 nt, Homo sapiens
agauguccagccacaauucucg

SEQ ID NO: 30258 - RNA, 24 nt, Homo sapiens
agcagaagcagggagguucuccca

SEQ ID NO: 30259 - RNA, 22 nt, Homo sapiens
uaugugggaugguaaaccgcuu

SEQ ID NO: 30260 - RNA, 22 nt, Homo sapiens
ugguuuaccgucccacauacau

SEQ ID NO: 30261 - RNA, 23 nt, Homo sapiens
cagugcaaugauauugucaaagc

SEQ ID NO: 30262 - RNA, 17 nt, Homo sapiens
uaauugcuuccauguuu

SEQ ID NO: 30263 - RNA, 23 nt, Homo sapiens
uugccacacugcaacaccuuaca

SEQ ID NO: 30264 - RNA, 21 nt, Homo sapiens
ucuggcuguuguggugugcaa

SEQ ID NO: 30265 - RNA, 22 nt, Homo sapiens
gauaucagcucaguaggcaccg

SEQ ID NO: 30266 - RNA, 21 nt, Homo sapiens
guuccugcugaacugagccag

SEQ ID NO: 30267 - RNA, 20 nt, Homo sapiens
auauggguuuacuaguuggu

SEQ ID NO: 30268 - RNA, 22 nt, Homo sapiens
ugcuaugccaacauauugccau

SEQ ID NO: 30269 - RNA, 21 nt, Homo sapiens
aggcaagaugcuggcauagcu

SEQ ID NO: 30270 - RNA, 18 nt, Homo sapiens
cggggcggcaggggccuc

SEQ ID NO: 30271 - RNA, 19 nt, Homo sapiens
aaaagcuggguugagagga

SEQ ID NO: 30272 - RNA, 22 nt, Homo sapiens
cccaauacacggucgaccucuu

SEQ ID NO: 30273 - RNA, 23 nt, Homo sapiens
agguuguccguggugaguucgca

SEQ ID NO: 30274 - RNA, 23 nt, Homo sapiens
gcaaagcacacggccugcagaga

SEQ ID NO: 30275 - RNA, 22 nt, Homo sapiens
ucucugggccugugucuuaggc

SEQ ID NO: 30276 - RNA, 21 nt, Homo sapiens
gccccugggccuauccuagaa

SEQ ID NO: 30277 - RNA, 22 nt, Homo sapiens
uccgucucaguuacuuuauagc

SEQ ID NO: 30278 - RNA, 22 nt, Homo sapiens
aacacaccuauucaaggauuca

SEQ ID NO: 30279 - RNA, 24 nt, Homo sapiens
aauccuuggaaccuaggugugagu

SEQ ID NO: 30280 - RNA, 22 nt, Homo sapiens
uaaugccccuaaaaauccuuau

SEQ ID NO: 30281 - RNA, 23 nt, Homo sapiens
agggacuuuugggggcagaugug

SEQ ID NO: 30282 - RNA, 22 nt, Homo sapiens
uaaugccccuaaaaauccuuau

SEQ ID NO: 30283 - RNA, 22 nt, Homo sapiens
agggacuuucaggggcagcugu

SEQ ID NO: 30284 - RNA, 24 nt, Homo sapiens
gaaaaugaugaguagugacugaug

SEQ ID NO: 30285 - RNA, 23 nt, Homo sapiens
ugagcaccacacaggccgggcgc

SEQ ID NO: 30286 - RNA, 21 nt, Homo sapiens
gcuggucugcguggugcucgg

SEQ ID NO: 30287 - RNA, 22 nt, Homo sapiens
gccugcugggguggaaccuggu

SEQ ID NO: 30288 - RNA, 23 nt, Homo sapiens
gaagugcuucgauuuuggggugu

SEQ ID NO: 30289 - RNA, 22 nt, Homo sapiens
acucaaaaugggggcgcuuucc

SEQ ID NO: 30290 - RNA, 22 nt, Homo sapiens
uauguaacaugguccacuaacu

SEQ ID NO: 30291 - RNA, 21 nt, Homo sapiens
ugguagacuauggaacguagg

SEQ ID NO: 30292 - RNA, 22 nt, Homo sapiens
uguagauacgagcaccagccac

SEQ ID NO: 30293 - RNA, 23 nt, Homo sapiens
acaggcggcuguagcaauggggg

SEQ ID NO: 30294 - RNA, 22 nt, Homo sapiens
aauucccuuguagauaacccgg

SEQ ID NO: 30295 - RNA, 22 nt, Homo sapiens
uacgcgcagaccacaggauguc

SEQ ID NO: 30296 - RNA, 22 nt, Homo sapiens
uuacacacaacugaggaucaua

SEQ ID NO: 30297 - RNA, 23 nt, Homo sapiens
uagcccccaggcuucacuuggcg

SEQ ID NO: 30298 - RNA, 23 nt, Homo sapiens
agggcauaggagaggguugauau

SEQ ID NO: 30299 - RNA, 22 nt, Homo sapiens
gaauguugcucggugaaccccu

SEQ ID NO: 30300 - RNA, 23 nt, Homo sapiens
agguuacccgagcaacuuugcau

SEQ ID NO: 30301 - RNA, 22 nt, Homo sapiens
uauguaacacgguccacuaacc

SEQ ID NO: 30302 - RNA, 21 nt, Homo sapiens
uaguagaccguauagcguacg

SEQ ID NO: 30303 - RNA, 23 nt, Homo sapiens
acuucaccugguccacuagccgu

SEQ ID NO: 30304 - RNA, 18 nt, Homo sapiens
guguucucugauggacag

SEQ ID NO: 30305 - RNA, 22 nt, Homo sapiens
caggucgucuugcagggcuucu

SEQ ID NO: 30306 - RNA, 21 nt, Homo sapiens
ugucuugcaggccgucaugca

SEQ ID NO: 30307 - RNA, 22 nt, Homo sapiens
aucaugaugggcuccucggugu

SEQ ID NO: 30308 - RNA, 23 nt, Homo sapiens
uugcuaguugcacuccucucugu

SEQ ID NO: 30309 - RNA, 25 nt, Homo sapiens
uaggcaguguauugcuagcggcugu

SEQ ID NO: 30310 - RNA, 22 nt, Homo sapiens
auuggggacauuuugcauucau

SEQ ID NO: 30311 - RNA, 22 nt, Homo sapiens
uuuugcgauguguuccuaauau

SEQ ID NO: 30312 - RNA, 22 nt, Homo sapiens
uugggaucauuuugcauccaua

SEQ ID NO: 30313 - RNA, 22 nt, Homo sapiens
uuuugcaauauguuccugaaua

SEQ ID NO: 30314 - RNA, 21 nt, Homo sapiens
gcaguccaugggcauauacac

SEQ ID NO: 30315 - RNA, 22 nt, Homo sapiens
uaugugccuuuggacuacaucg

SEQ ID NO: 30316 - RNA, 23 nt, Homo sapiens
auacacauacacgcaacacacau

SEQ ID NO: 30317 - RNA, 23 nt, Homo sapiens
uugcaugucagauuguaauuccc

SEQ ID NO: 30318 - RNA, 21 nt, Homo sapiens
ucacuccucuccucccgucuu

SEQ ID NO: 30319 - RNA, 22 nt, Homo sapiens
ucaggcucaguccccucccgau

SEQ ID NO: 30320 - RNA, 22 nt, Homo sapiens
gucauacacggcucuccucucu

SEQ ID NO: 30321 - RNA, 22 nt, Homo sapiens
agaggcuggccgugaugaauuc

SEQ ID NO: 30322 - RNA, 22 nt, Homo sapiens
aaucauacagggacauccaguu

SEQ ID NO: 30323 - RNA, 22 nt, Homo sapiens
aaucguacagggucauccacuu

SEQ ID NO: 30324 - RNA, 21 nt, Homo sapiens
uugaaaggcuauuucuugguc

SEQ ID NO: 30325 - RNA, 21 nt, Homo sapiens
cccagauaauggcacucucaa

SEQ ID NO: 30326 - RNA, 22 nt, Homo sapiens
caaccuggaggacuccaugcug

SEQ ID NO: 30327 - RNA, 20 nt, Homo sapiens
ccauggaucuccaggugggu

SEQ ID NO: 30328 - RNA, 22 nt, Homo sapiens
cuuaugcaagauucccuucuac

SEQ ID NO: 30329 - RNA, 22 nt, Homo sapiens
aguggggaacccuuccaugagg

SEQ ID NO: 30330 - RNA, 23 nt, Homo sapiens
aggaccugcgggacaagauucuu

SEQ ID NO: 30331 - RNA, 22 nt, Homo sapiens
caaaccacacugugguguuaga

SEQ ID NO: 30332 - RNA, 21 nt, Homo sapiens
cagcagcacacugugguuugu

SEQ ID NO: 30333 - RNA, 23 nt, Homo sapiens
uuucaagccagggggcguuuuuc

SEQ ID NO: 30334 - RNA, 20 nt, Homo sapiens
ucacuaccugacaauacagu

SEQ ID NO: 30335 - RNA, 21 nt, Homo sapiens
ugcuguauugucagguaguga

SEQ ID NO: 30336 - RNA, 22 nt, Homo sapiens
uucugccucuguccagguccuu

SEQ ID NO: 30337 - RNA, 24 nt, Homo sapiens
agggcuggacucagcggcggagcu

SEQ ID NO: 30338 - RNA, 21 nt, Homo sapiens
ugacugccucacugaccacuu

SEQ ID NO: 30339 - RNA, 24 nt, Homo sapiens
aauuugguuucugaggcacuuagu

SEQ ID NO: 30340 - RNA, 21 nt, Homo sapiens
uacuuuucuagguuguugggg

SEQ ID NO: 30341 - RNA, 23 nt, Homo sapiens
ucacaacaaccuugcaggguaga

SEQ ID NO: 30342 - RNA, 22 nt, Homo sapiens
cuuggauuuuccugggccucag

SEQ ID NO: 30343 - RNA, 22 nt, Homo sapiens
ugaggacagggcaaauucacga

SEQ ID NO: 30344 - RNA, 22 nt, Homo sapiens
aucauaugaaccaaacucuaau

SEQ ID NO: 30345 - RNA, 22 nt, Homo sapiens
uagagucuggcugauaugguuu

SEQ ID NO: 30346 - RNA, 21 nt, Homo sapiens
ccugugcucccagggccucgc

SEQ ID NO: 30347 - RNA, 22 nt, Homo sapiens
ugaggcccuuggggcacagugg

SEQ ID NO: 30348 - RNA, 22 nt, Homo sapiens
uccuaaaucugaaaguccaaaa

SEQ ID NO: 30349 - RNA, 24 nt, Homo sapiens
uuggacuuuuucagauuuggggau

SEQ ID NO: 30350 - RNA, 22 nt, Homo sapiens
augcaccugggcaaggauucug

SEQ ID NO: 30351 - RNA, 23 nt, Homo sapiens
uaauccuugcuaccugggugaga

SEQ ID NO: 30352 - RNA, 22 nt, Homo sapiens
uuuugugucucccauuccccag

SEQ ID NO: 30353 - RNA, 22 nt, Homo sapiens
agggggauggcagagcaaaauu

SEQ ID NO: 30354 - RNA, 22 nt, Homo sapiens
gugcauggcuguauauauaaca

SEQ ID NO: 30355 - RNA, 21 nt, Homo sapiens
uauauauacagccaugcacuc

SEQ ID NO: 30356 - RNA, 22 nt, Homo sapiens
aaugcacccgggcaaggauucu

SEQ ID NO: 30357 - RNA, 22 nt, Homo sapiens
aauccuuugucccugggugaga

SEQ ID NO: 30358 - RNA, 22 nt, Homo sapiens
aaugcaccugggcaaggauuca

SEQ ID NO: 30359 - RNA, 21 nt, Homo sapiens
auccuugcuaucugggugcua

SEQ ID NO: 30360 - RNA, 22 nt, Homo sapiens
agacccuggucugcacucuauc

SEQ ID NO: 30361 - RNA, 21 nt, Homo sapiens
uugcagcugcgguuguaaggu

SEQ ID NO: 30362 - RNA, 22 nt, Homo sapiens
cgucaacacuugcugguuuccu

SEQ ID NO: 30363 - RNA, 22 nt, Homo sapiens
gggagccaggaaguauugaugu

SEQ ID NO: 30364 - RNA, 21 nt, Homo sapiens
uaaggcacccuucugaguaga

SEQ ID NO: 30365 - RNA, 22 nt, Homo sapiens
uauucaggaagguguuacuuaa

SEQ ID NO: 30366 - RNA, 21 nt, Homo sapiens
uuuugcaccuuuuggagugaa

SEQ ID NO: 30367 - RNA, 23 nt, Homo sapiens
ugauuguagccuuuuggaguaga

SEQ ID NO: 30368 - RNA, 23 nt, Homo sapiens
ggguuuguagcuuugcuggcaug

SEQ ID NO: 30369 - RNA, 23 nt, Homo sapiens
cagggcucagggauuggauggag

SEQ ID NO: 30370 - RNA, 23 nt, Homo sapiens
augcuacucggaaaucccacuga

SEQ ID NO: 30371 - RNA, 21 nt, Homo sapiens
gugggauuucugaguagcauc

SEQ ID NO: 30372 - RNA, 23 nt, Homo sapiens
ccggggcagauugguguagggug

SEQ ID NO: 30373 - RNA, 23 nt, Homo sapiens
acggagacgacaagacugugcug

SEQ ID NO: 30374 - RNA, 22 nt, Homo sapiens
aauccacgcugagcuuggcauc

SEQ ID NO: 30375 - RNA, 23 nt, Homo sapiens
aggaaaugaggcuggcuaggagc

SEQ ID NO: 30376 - RNA, 22 nt, Homo sapiens
ugauugguacgucuguggguag

SEQ ID NO: 30377 - RNA, 22 nt, Homo sapiens
aaucagugaaugccuugaaccu

SEQ ID NO: 30378 - RNA, 21 nt, Homo sapiens
uuacaggcgugaaccaccgcg

SEQ ID NO: 30379 - RNA, 21 nt, Homo sapiens
uacugcagacaguggcaauca

SEQ ID NO: 30380 - RNA, 21 nt, Homo sapiens
guuucaccauguuggucaggc

SEQ ID NO: 30381 - RNA, 23 nt, Homo sapiens
uaaauuucaccuuucugagaagg

SEQ ID NO: 30382 - RNA, 22 nt, Homo sapiens
uucacaaggaggugucauuuau

SEQ ID NO: 30383 - RNA, 23 nt, Homo sapiens
uaaauuucaccuuucugagaaga

SEQ ID NO: 30384 - RNA, 22 nt, Homo sapiens
uucucaaggaggugucguuuau

SEQ ID NO: 30385 - RNA, 21 nt, Homo sapiens
auugacacuucugugaguaga

SEQ ID NO: 30386 - RNA, 23 nt, Homo sapiens
uacucuggagagugacaaucaug

SEQ ID NO: 30387 - RNA, 21 nt, Homo sapiens
auugacaccucugugagugga

SEQ ID NO: 30388 - RNA, 22 nt, Homo sapiens
uucucaagagggaggcaaucau

SEQ ID NO: 30389 - RNA, 22 nt, Homo sapiens
gagugccuucuuuuggagcguu

SEQ ID NO: 30390 - RNA, 18 nt, Homo sapiens
ugcuuccuuucagagggu

SEQ ID NO: 30391 - RNA, 22 nt, Homo sapiens
aucuggagguaagaagcacuuu

SEQ ID NO: 30392 - RNA, 22 nt, Homo sapiens
gaaagcgcuucccuuugcugga

SEQ ID NO: 30393 - RNA, 20 nt, Homo sapiens
cugcaaagggaagcccuuuc

SEQ ID NO: 30394 - RNA, 21 nt, Homo sapiens
caaagcgcuucccuuuggagc

SEQ ID NO: 30395 - RNA, 22 nt, Homo sapiens
cucuagagggaagcacuuucug

SEQ ID NO: 30396 - RNA, 21 nt, Homo sapiens
aaagcgcuucccuucagagug

SEQ ID NO: 30397 - RNA, 22 nt, Homo sapiens
cucuagagggaagcgcuuucug

SEQ ID NO: 30398 - RNA, 22 nt, Homo sapiens
aaagugcauccuuuuagagguu

SEQ ID NO: 30399 - RNA, 22 nt, Homo sapiens
cucuagagggaagcgcuuucug

SEQ ID NO: 30400 - RNA, 22 nt, Homo sapiens
aaagugcaucuuuuuagaggau

SEQ ID NO: 30401 - RNA, 22 nt, Homo sapiens
cucuagagggaagcgcuuucug

SEQ ID NO: 30402 - RNA, 21 nt, Homo sapiens
aaagugcuuccuuuuagaggg

SEQ ID NO: 30403 - RNA, 22 nt, Homo sapiens
aaagugcuuccuuuuagagggu

SEQ ID NO: 30404 - RNA, 22 nt, Homo sapiens
cucuagagggaagcacuuucug

SEQ ID NO: 30405 - RNA, 22 nt, Homo sapiens
aaagugcuucucuuuggugggu

SEQ ID NO: 30406 - RNA, 20 nt, Homo sapiens
cuacaaagggaagcccuuuc

SEQ ID NO: 30407 - RNA, 21 nt, Homo sapiens
aaagugcuuccuuuuugaggg

SEQ ID NO: 30408 - RNA, 22 nt, Homo sapiens
aagugcuuccuuuuagaggguu

SEQ ID NO: 30409 - RNA, 24 nt, Homo sapiens
acaaagugcuucccuuuagagugu

SEQ ID NO: 30410 - RNA, 22 nt, Homo sapiens
aacgcacuucccuuuagagugu

SEQ ID NO: 30411 - RNA, 22 nt, Homo sapiens
aaaaugguucccuuuagagugu

SEQ ID NO: 30412 - RNA, 22 nt, Homo sapiens
cucuagagggaagcgcuuucug

SEQ ID NO: 30413 - RNA, 23 nt, Homo sapiens
gaacgcgcuucccuauagagggu

SEQ ID NO: 30414 - RNA, 22 nt, Homo sapiens
cucuagagggaagcgcuuucug

SEQ ID NO: 30415 - RNA, 21 nt, Homo sapiens
gaaggcgcuucccuuuggagu

SEQ ID NO: 30416 - RNA, 20 nt, Homo sapiens
cugcaaagggaagcccuuuc

SEQ ID NO: 30417 - RNA, 22 nt, Homo sapiens
ccucccacacccaaggcuugca

SEQ ID NO: 30418 - RNA, 22 nt, Homo sapiens
caugccuugaguguaggaccgu

SEQ ID NO: 30419 - RNA, 22 nt, Homo sapiens
aucauacaaggacaauuucuuu

SEQ ID NO: 30420 - RNA, 22 nt, Homo sapiens
ggagaaauuauccuuggugugu

SEQ ID NO: 30421 - RNA, 22 nt, Homo sapiens
uggugggcacagaaucuggacu

SEQ ID NO: 30422 - RNA, 25 nt, Homo sapiens
aaaggauucugcugucggucccacu

SEQ ID NO: 30423 - RNA, 23 nt, Homo sapiens
ucggggaucaucaugucacgaga

SEQ ID NO: 30424 - RNA, 22 nt, Homo sapiens
aaacauucgcggugcacuucuu

SEQ ID NO: 30425 - RNA, 22 nt, Homo sapiens
auucugcauuuuuagcaaguuc

SEQ ID NO: 30426 - RNA, 22 nt, Homo sapiens
accugagguugugcauuucuaa

SEQ ID NO: 30427 - RNA, 22 nt, Homo sapiens
ucagcaaacauuuauugugugc

SEQ ID NO: 30428 - RNA, 22 nt, Homo sapiens
ucaguaaauguuuauuagauga

SEQ ID NO: 30429 - RNA, 22 nt, Homo sapiens
agcuacaguuacuuuugcacca

SEQ ID NO: 30430 - RNA, 20 nt, Homo sapiens
uaaaaacugcaauuacuuuc

SEQ ID NO: 30431 - RNA, 23 nt, Homo sapiens
ugcaaaaguaauugcaguuuuug

SEQ ID NO: 30432 - RNA, 22 nt, Homo sapiens
aaagaccgugacuacuuuugca

SEQ ID NO: 30433 - RNA, 22 nt, Homo sapiens
agaaguaacuacgguuuuugca

SEQ ID NO: 30434 - RNA, 19 nt, Homo sapiens
aaaaaccacaauuacuuuu

SEQ ID NO: 30435 - RNA, 19 nt, Homo sapiens
aaaaguaauugcggucuuu

SEQ ID NO: 30436 - RNA, 22 nt, Homo sapiens
caaaaacugcaauuacuuuugc

SEQ ID NO: 30437 - RNA, 22 nt, Homo sapiens
gaaaguaauugcuguuuuugcc

SEQ ID NO: 30438 - RNA, 21 nt, Homo sapiens
uaaaacugcaguuauuuuugc

SEQ ID NO: 30439 - RNA, 21 nt, Homo sapiens
aaaaguaauugcaguuuuugc

SEQ ID NO: 30440 - RNA, 22 nt, Homo sapiens
uaaaacccacaauuauguuugu

SEQ ID NO: 30441 - RNA, 22 nt, Homo sapiens
aaaaguaauugcggguuuugcc

SEQ ID NO: 30442 - RNA, 21 nt, Homo sapiens
caaaaccgcaguaacuuuugu

SEQ ID NO: 30443 - RNA, 22 nt, Homo sapiens
aaaaguuauugcgguuuuggcu

SEQ ID NO: 30444 - RNA, 21 nt, Homo sapiens
uggcaguuacuuuugcaccag

SEQ ID NO: 30445 - RNA, 21 nt, Homo sapiens
aaaaguaauugcgguuuuugc

SEQ ID NO: 30446 - RNA, 20 nt, Homo sapiens
aaaacugcaguuacuuuugc

SEQ ID NO: 30447 - RNA, 18 nt, Homo sapiens
aaaaguacuugcggauuu

SEQ ID NO: 30448 - RNA, 20 nt, Homo sapiens
gugcaaaagucaucacgguu

SEQ ID NO: 30449 - RNA, 22 nt, Homo sapiens
gcuggugcaaaaguaauggcgg

SEQ ID NO: 30450 - RNA, 22 nt, Homo sapiens
aaaaguaaucacuguuuuugcc

SEQ ID NO: 30451 - RNA, 20 nt, Homo sapiens
agugccugagggaguaagag

SEQ ID NO: 30452 - RNA, 22 nt, Homo sapiens
ugucuuacucccucaggcacau

SEQ ID NO: 30453 - RNA, 23 nt, Homo sapiens
agugccugagggaguaagagccc

SEQ ID NO: 30454 - RNA, 21 nt, Homo sapiens
gcgacccacucuugguuucca

SEQ ID NO: 30455 - RNA, 22 nt, Homo sapiens
uuagcuuaaggaguaccagauc

SEQ ID NO: 30456 - RNA, 21 nt, Homo sapiens
uaugguacuccuuaagcuaac

SEQ ID NO: 30457 - RNA, 19 nt, Homo sapiens
ugagcugcuguaccaaaau

SEQ ID NO: 30458 - RNA, 22 nt, Homo sapiens
cacauaugaagugagccagcac

SEQ ID NO: 30459 - RNA, 22 nt, Homo sapiens
ugcuggcucauuucauaugugu

SEQ ID NO: 30460 - RNA, 22 nt, Homo sapiens
uuccaugccuccuagaaguucc

SEQ ID NO: 30461 - RNA, 22 nt, Homo sapiens
agccuuccaggagaaauggaga

SEQ ID NO: 30462 - RNA, 22 nt, Homo sapiens
uaaaacuuuaagugugccuagg

SEQ ID NO: 30463 - RNA, 22 nt, Homo sapiens
uaggcacacuuaaaguuauagc

SEQ ID NO: 30464 - RNA, 22 nt, Homo sapiens
gaauauggguauauuaguuugg

SEQ ID NO: 30465 - RNA, 22 nt, Homo sapiens
aaacuaauauacccauauucug

SEQ ID NO: 30466 - RNA, 22 nt, Homo sapiens
uaguucuucccuuugcccaauu

SEQ ID NO: 30467 - RNA, 22 nt, Homo sapiens
cagggaaaugggaagaacuaga

SEQ ID NO: 30468 - RNA, 22 nt, Homo sapiens
cugaauagcugggacuacaggu

SEQ ID NO: 30469 - RNA, 22 nt, Homo sapiens
ugaaguaccagcuacucgagag

SEQ ID NO: 30470 - RNA, 22 nt, Homo sapiens
cagagugacaagcugguuaaag

SEQ ID NO: 30471 - RNA, 22 nt, Homo sapiens
uauccagcuuguuacuauaugc

SEQ ID NO: 30472 - RNA, 21 nt, Homo sapiens
gccccgggcagugugaucauc

SEQ ID NO: 30473 - RNA, 18 nt, Homo sapiens
auggucaccuccgggacu

SEQ ID NO: 30474 - RNA, 19 nt, Homo sapiens
aagucccacuaaugccagc

SEQ ID NO: 30475 - RNA, 21 nt, Homo sapiens
acuggcauuagugggacuuuu

SEQ ID NO: 30476 - RNA, 23 nt, Homo sapiens
ugcacauggcaaccuagcuccca

SEQ ID NO: 30477 - RNA, 21 nt, Homo sapiens
ggcugggugcucuugugcagu

SEQ ID NO: 30478 - RNA, 21 nt, Homo sapiens
uaaaguaaauaugcaccaaaa

SEQ ID NO: 30479 - RNA, 21 nt, Homo sapiens
aauaaaguucauguauggcaa

SEQ ID NO: 30480 - RNA, 21 nt, Homo sapiens
uugccauacauagacuuuauu

SEQ ID NO: 30481 - RNA, 21 nt, Homo sapiens
auacccauagcuuagcuccca

SEQ ID NO: 30482 - RNA, 21 nt, Homo sapiens
ugggagcuaagcuauggguau

SEQ ID NO: 30483 - RNA, 22 nt, Homo sapiens
caaaguuuaagauccuugaagu

SEQ ID NO: 30484 - RNA, 22 nt, Homo sapiens
aucaaggaucuuaaacuuugcc

SEQ ID NO: 30485 - RNA, 20 nt, Homo sapiens
aaaguagcuguaccauuugc

SEQ ID NO: 30486 - RNA, 19 nt, Homo sapiens
aggcacggugucagcaggc

SEQ ID NO: 30487 - RNA, 19 nt, Homo sapiens
gggcgccugugaucccaac

SEQ ID NO: 30488 - RNA, 23 nt, Homo sapiens
aguauguucuuccaggacagaac

SEQ ID NO: 30489 - RNA, 22 nt, Homo sapiens
gagaaaugcuggacuaaucugc

SEQ ID NO: 30490 - RNA, 22 nt, Homo sapiens
agaaaggguggcaauaccucuu

SEQ ID NO: 30491 - RNA, 22 nt, Homo sapiens
agguauugccacccuuucuagu

SEQ ID NO: 30492 - RNA, 22 nt, Homo sapiens
guagcaccuugcaggauaaggu

SEQ ID NO: 30493 - RNA, 24 nt, Homo sapiens
uacagaugcagauucucugacuuc

SEQ ID NO: 30494 - RNA, 20 nt, Homo sapiens
aacucuagccugagcaacag

SEQ ID NO: 30495 - RNA, 22 nt, Homo sapiens
acagcccagcaguuaucacggg

SEQ ID NO: 30496 - RNA, 21 nt, Homo sapiens
uaucguaucguauuguauugu

SEQ ID NO: 30497 - RNA, 22 nt, Homo sapiens
uuagaacguuuuagggucaaau

SEQ ID NO: 30498 - RNA, 22 nt, Homo sapiens
uaacaaacaccuguaaaacagc

SEQ ID NO: 30499 - RNA, 22 nt, Homo sapiens
agcauacaccuguaguccuaga

SEQ ID NO: 30500 - RNA, 21 nt, Homo sapiens
aguuaaugaauccuggaaagu

SEQ ID NO: 30501 - RNA, 21 nt, Homo sapiens
ucagcuacuaccucuauuagg

SEQ ID NO: 30502 - RNA, 22 nt, Homo sapiens
uugcucugagcuccgagaaagc

SEQ ID NO: 30503 - RNA, 22 nt, Homo sapiens
caaauaauaccacagugggugu

SEQ ID NO: 30504 - RNA, 20 nt, Homo sapiens
aauaauaucacaguaggugu

SEQ ID NO: 30505 - RNA, 22 nt, Homo sapiens
aauaauaucacaguagguguac

SEQ ID NO: 30506 - RNA, 22 nt, Homo sapiens
gcaguggcucugaaaugaacuc

SEQ ID NO: 30507 - RNA, 21 nt, Homo sapiens
cagaucaugggacugucucag

SEQ ID NO: 30508 - RNA, 22 nt, Homo sapiens
acuccaagaagaaucuagacag

SEQ ID NO: 30509 - RNA, 22 nt, Homo sapiens
cucauuuaaguagucugaugcc

SEQ ID NO: 30510 - RNA, 22 nt, Homo sapiens
ucaaguaguuucaugauaaagg

SEQ ID NO: 30511 - RNA, 22 nt, Homo sapiens
ugggggagugcagugauugugg

SEQ ID NO: 30512 - RNA, 22 nt, Homo sapiens
uccugucuuuccuuguuggagc

SEQ ID NO: 30513 - RNA, 22 nt, Homo sapiens
uaaugcauuaaauuauugaagg

SEQ ID NO: 30514 - RNA, 19 nt, Homo sapiens
uuauugucacguucugauu

SEQ ID NO: 30515 - RNA, 22 nt, Homo sapiens
ugagucagcaacauaucccaug

SEQ ID NO: 30516 - RNA, 18 nt, Homo sapiens
aggagaagucgggaaggu

SEQ ID NO: 30517 - RNA, 22 nt, Homo sapiens
cgaaaacagcaauuaccuuugc

SEQ ID NO: 30518 - RNA, 22 nt, Homo sapiens
uuaggccaucaucccauuaugc

SEQ ID NO: 30519 - RNA, 23 nt, Homo sapiens
uguuucggggcucauggccugug

SEQ ID NO: 30520 - RNA, 22 nt, Homo sapiens
aaagguaauugcaguuuuuccc

SEQ ID NO: 30521 - RNA, 22 nt, Homo sapiens
uucuggauaacaugcugaagcu

SEQ ID NO: 30522 - RNA, 22 nt, Homo sapiens
acguuugaaugcuguacaaggc

SEQ ID NO: 30523 - RNA, 20 nt, Homo sapiens
augagcgacugugccugacc

SEQ ID NO: 30524 - RNA, 19 nt, Homo sapiens
gagccaguuggacaggagc

SEQ ID NO: 30525 - RNA, 23 nt, Homo sapiens
uucauuugguauaaaccgcgauu

SEQ ID NO: 30526 - RNA, 22 nt, Homo sapiens
uugagaaugaugaaucauuagg

SEQ ID NO: 30527 - RNA, 23 nt, Homo sapiens
uuacaguuguucaaccaguuacu

SEQ ID NO: 30528 - RNA, 21 nt, Homo sapiens
caaagaggaaggucccauuac

SEQ ID NO: 30529 - RNA, 22 nt, Homo sapiens
ucaguuccaggccaaccaggcu

SEQ ID NO: 30530 - RNA, 22 nt, Homo sapiens
uuaugguuugccugggacugag

SEQ ID NO: 30531 - RNA, 19 nt, Homo sapiens
ugggcguaucuguaugcua

SEQ ID NO: 30532 - RNA, 20 nt, Homo sapiens
agaccauggguucucauugu

SEQ ID NO: 30533 - RNA, 22 nt, Homo sapiens
uugugucaauaugcgaugaugu

SEQ ID NO: 30534 - RNA, 19 nt, Homo sapiens
ugucucugcugggguuucu

SEQ ID NO: 30535 - RNA, 25 nt, Homo sapiens
aggcaccagccaggcauugcucagc
